United States Patent Application Publication US 2011/0177960 A1 - sequence listing, part 13

SEQ ID NO: 207961 - DNA, 25 bp, Artificial
  probe
  misc_feature (1)..(25): SEQ ID NO: 7539; WAN024FIQ_at; Start 52; Stop 76
ttccttaaaatgcaagagcagggca

SEQ ID NO: 207962 - DNA, 25 bp, Artificial
  probe
  misc_feature (1)..(25): SEQ ID NO: 7539; WAN024FIQ_at; Start 48; Stop 72
agagttccttaaaatgcaagagcag

SEQ ID NO: 207963 - DNA, 25 bp, Artificial
  probe
  misc_feature (1)..(25): SEQ ID NO: 7539; WAN024FIQ_at; Start 17; Stop 41
tgccaaaccagaaaatcgtcgctag

SEQ ID NO: 207964 - DNA, 25 bp, Artificial
  probe
  misc_feature (1)..(25): SEQ ID NO: 7559; WAN024FIR_at; Start 107; Stop 131
gctacttactgattattttacaaag

SEQ ID NO: 207965 - DNA, 25 bp, Artificial
  probe
  misc_feature (1)..(25): SEQ ID NO: 7559; WAN024FIR_at; Start 127; Stop 151
caaagtcaagcaaagccaagaagct

SEQ ID NO: 207966 - DNA, 25 bp, Artificial
  probe
  misc_feature (1)..(25): SEQ ID NO: 7559; WAN024FIR_at; Start 94; Stop 118
ccacctagcttttgctacttactga

SEQ ID NO: 207967 - DNA, 25 bp, Artificial
  probe
  misc_feature (1)..(25): SEQ ID NO: 7559; WAN024FIR_at; Start 136; Stop 160
gcaaagccaagaagctttcagcttc

SEQ ID NO: 207968 - DNA, 25 bp, Artificial
  probe
  misc_feature (1)..(25): SEQ ID NO: 7559; WAN024FIR_at; Start 79; Stop 103
catctgaatgctgttccacctagct

SEQ ID NO: 207969 - DNA, 25 bp, Artificial
  probe
  misc_feature (1)..(25): SEQ ID NO: 7559; WAN024FIR_at; Start 77; Stop 101
gacatctgaatgctgttccacctag

SEQ ID NO: 207970 - DNA, 25 bp, Artificial
  probe
  misc_feature (1)..(25): SEQ ID NO: 7559; WAN024FIR_at; Start 161; Stop 185
aagtgacgcaccacctacaagggca

SEQ ID NO: 207971 - DNA, 25 bp, Artificial
  probe
  misc_feature (1)..(25): SEQ ID NO: 7559; WAN024FIR_at; Start 197; Stop 221
tgggcaagccatgtatgaagcaaca

SEQ ID NO: 207972 - DNA, 25 bp, Artificial
  probe
  misc_feature (1)..(25): SEQ ID NO: 7559; WAN024FIR_at; Start 190; Stop 214
caacgtctgggcaagccatgtatga

SEQ ID NO: 207973 - DNA, 25 bp, Artificial
  probe
  misc_feature (1)..(25): SEQ ID NO: 7559; WAN024FIR_at; Start 87; Stop 111
tgctgttccacctagcttttgctac

SEQ ID NO: 207974 - DNA, 25 bp, Artificial
  probe
  misc_feature (1)..(25): SEQ ID NO: 7559; WAN024FIR_at; Start 210; Stop 234
tatgaagcaacattttcaggtttaa

SEQ ID NO: 207975 - DNA, 25 bp, Artificial
  probe
  misc_feature (1)..(25): SEQ ID NO: 7559; WAN024FIR_at; Start 123; Stop 147
tttacaaagtcaagcaaagccaaga

SEQ ID NO: 207976 - DNA, 25 bp, Artificial
  probe
  misc_feature (1)..(25): SEQ ID NO: 7559; WAN024FIR_at; Start 149; Stop 173
gctttcagcttcaagtgacgcacca

SEQ ID NO: 207977 - DNA, 25 bp, Artificial
  probe
  misc_feature (1)..(25): SEQ ID NO: 7559; WAN024FIR_at; Start 195; Stop 219
tctgggcaagccatgtatgaagcaa

SEQ ID NO: 207978 - DNA, 25 bp, Artificial
  probe
  misc_feature (1)..(25): SEQ ID NO: 7559; WAN024FIR_at; Start 204; Stop 228
gccatgtatgaagcaacattttcag

SEQ ID NO: 207979 - DNA, 25 bp, Artificial
  probe
  misc_feature (1)..(25): SEQ ID NO: 7559; WAN024FIR_at; Start 67; Stop 91
aaatgtaacagacatctgaatgctg

SEQ ID NO: 207980 - DNA, 25 bp, Artificial
  probe
  misc_feature (1)..(25): SEQ ID NO: 7559; WAN024FIR_at; Start 158; Stop 182
ttcaagtgacgcaccacctacaagg

SEQ ID NO: 207981 - DNA, 25 bp, Artificial
  probe
  misc_feature (1)..(25): SEQ ID NO: 7559; WAN024FIR_at; Start 18; Stop 42
cagatacttgctaatccaatttttg

SEQ ID NO: 207982 - DNA, 25 bp, Artificial
  probe
  misc_feature (1)..(25): SEQ ID NO: 7559; WAN024FIR_at; Start 50; Stop 74
tctttctctcctataaaaaatgtaa

SEQ ID NO: 207983 - DNA, 25 bp, Artificial
  probe
  misc_feature (1)..(25): SEQ ID NO: 7559; WAN024FIR_at; Start 146; Stop 170
gaagctttcagcttcaagtgacgca

SEQ ID NO: 207984 - DNA, 25 bp, Artificial
  probe
  misc_feature (1)..(25): SEQ ID NO: 7559; WAN024FIR_at; Start 41; Stop 65
tgttttcaatctttctctcctataa

SEQ ID NO: 207985 - DNA, 25 bp, Artificial
  probe
  misc_feature (1)..(25): SEQ ID NO: 7559; WAN024FIR_at; Start 5; Stop 29
caagcctagtaaacagatacttgct

SEQ ID NO: 207986 - DNA, 25 bp, Artificial
  probe
  misc_feature (1)..(25): SEQ ID NO: 7559; WAN024FIR_at; Start 173; Stop 197
acctacaagggcaccgtcaacgtct

SEQ ID NO: 207987 - DNA, 25 bp, Artificial
  probe
  misc_feature (1)..(25): SEQ ID NO: 7559; WAN024FIR_at; Start 13; Stop 37
gtaaacagatacttgctaatccaat

SEQ ID NO: 207988 - DNA, 25 bp, Artificial
  probe
  misc_feature (1)..(25): SEQ ID NO: 7559; WAN024FIR_at; Start 1; Stop 25
ttgccaagcctagtaaacagatact

SEQ ID NO: 207989 - DNA, 25 bp, Artificial
  probe
  misc_feature (1)..(25): SEQ ID NO: 7559; WAN024FIR_at; Start 186; Stop 210
ccgtcaacgtctgggcaagccatgt

SEQ ID NO: 207990 - DNA, 25 bp, Artificial
  probe
  misc_feature (1)..(25): SEQ ID NO: 7559; WAN024FIR_at; Start 199; Stop 223
ggcaagccatgtatgaagcaacatt

SEQ ID NO: 207991 - DNA, 25 bp, Artificial
  probe
  misc_feature (1)..(25): SEQ ID NO: 7559; WAN024FIR_at; Start 176; Stop 200
tacaagggcaccgtcaacgtctggg

SEQ ID NO: 207992 - DNA, 25 bp, Artificial
  probe
  misc_feature (1)..(25): SEQ ID NO: 7559; WAN024FIR_at; Start 180; Stop 204
agggcaccgtcaacgtctgggcaag

SEQ ID NO: 207993 - DNA, 25 bp, Artificial
  probe
  misc_feature (1)..(25): SEQ ID NO: 7559; WAN024FIR_at; Start 132; Stop 156
tcaagcaaagccaagaagctttcag

SEQ ID NO: 207994 - DNA, 25 bp, Artificial
  probe
  misc_feature (1)..(25): SEQ ID NO: 7559; WAN024FIR_at; Start 27; Stop 51
gctaatccaatttttgttttcaatc

SEQ ID NO: 207995 - DNA, 25 bp, Artificial
  probe
  misc_feature (1)..(25): SEQ ID NO: 7559; WAN024FIR_at; Start 83; Stop 107
tgaatgctgttccacctagcttttg

SEQ ID NO: 207996 - DNA, 25 bp, Artificial
  probe
  misc_feature (1)..(25): SEQ ID NO: 7559; WAN024FIR_at; Start 120; Stop 144
tattttacaaagtcaagcaaagcca

SEQ ID NO: 207997 - DNA, 25 bp, Artificial
  probe
  misc_feature (1)..(25): SEQ ID NO: 7559; WAN024FIR_at; Start 152; Stop 176
ttcagcttcaagtgacgcaccacct

SEQ ID NO: 207998 - DNA, 25 bp, Artificial
  probe
  misc_feature (1)..(25): SEQ ID NO: 5810; WAN024FIS_at; Start 105; Stop 129
gcaaatcttactcggatttcaagcc

SEQ ID NO: 207999 - DNA, 25 bp, Artificial
  probe
  misc_feature (1)..(25): SEQ ID NO: 5810; WAN024FIS_at; Start 8; Stop 32
ttttccagttaccagcgataaatgg

SEQ ID NO: 208000 - DNA, 25 bp, Artificial
  probe
  misc_feature (1)..(25): SEQ ID NO: 5810; WAN024FIS_at; Start 342; Stop 366
taatcaagtcagcactggttccatc

SEQ ID NO: 208001 - DNA, 25 bp, Artificial
  probe
  misc_feature (1)..(25): SEQ ID NO: 5810; WAN024FIS_at; Start 172; Stop 196
gaaatctgcagatacctgtgtcaac

SEQ ID NO: 208002 - DNA, 25 bp, Artificial
  probe
  misc_feature (1)..(25): SEQ ID NO: 5810; WAN024FIS_at; Start 1; Stop 25
ttgttcattttccagttaccagcga

SEQ ID NO: 208003 - DNA, 25 bp, Artificial
  probe
  misc_feature (1)..(25): SEQ ID NO: 5810; WAN024FIS_at; Start 145; Stop 169
atccttccagagatccatggcattt

SEQ ID NO: 208004 - DNA, 25 bp, Artificial
  probe
  misc_feature (1)..(25): SEQ ID NO: 5810; WAN024FIS_at; Start 124; Stop 148
caagcctacttgcatggattaatcc

SEQ ID NO: 208005 - DNA, 25 bp, Artificial
  probe
  misc_feature (1)..(25): SEQ ID NO: 5810; WAN024FIS_at; Start 82; Stop 106
tctatcacaattatacacagcttgc

SEQ ID NO: 208006 - DNA, 25 bp, Artificial
  probe
  misc_feature (1)..(25): SEQ ID NO: 5810; WAN024FIS_at; Start 178; Stop 202
tgcagatacctgtgtcaactgagga

SEQ ID NO: 208007 - DNA, 25 bp, Artificial
  probe
  misc_feature (1)..(25): SEQ ID NO: 5810; WAN024FIS_at; Start 282; Stop 306
tcgcctgaatgtacttccagtttgg

SEQ ID NO: 208008 - DNA, 25 bp, Artificial
  probe
  misc_feature (1)..(25): SEQ ID NO: 5810; WAN024FIS_at; Start 40; Stop 64
gacatttcacatacctcttttttca

SEQ ID NO: 208009 - DNA, 25 bp, Artificial
  probe
  misc_feature (1)..(25): SEQ ID NO: 5810; WAN024FIS_at; Start 200; Stop 224
ggattgcttgcttctctttctgctc

SEQ ID NO: 208010 - DNA, 25 bp, Artificial
  probe
  misc_feature (1)..(25): SEQ ID NO: 5810; WAN024FIS_at; Start 330; Stop 354
gaagagcctccttaatcaagtcagc

SEQ ID NO: 208011 - DNA, 25 bp, Artificial
  probe
  misc_feature (1)..(25): SEQ ID NO: 5810; WAN024FIS_at; Start 30; Stop 54
tggtttacgtgacatttcacatacc

SEQ ID NO: 208012 - DNA, 25 bp, Artificial
  probe
  misc_feature (1)..(25): SEQ ID NO: 5810; WAN024FIS_at; Start 293; Stop 317
tacttccagtttggttttccattca

SEQ ID NO: 208013 - DNA, 25 bp, Artificial
  probe
  misc_feature (1)..(25): SEQ ID NO: 5810; WAN024FIS_at; Start 186; Stop 210
cctgtgtcaactgaggattgcttgc

SEQ ID NO: 208014 - DNA, 25 bp, Artificial
  probe
  misc_feature (1)..(25): SEQ ID NO: 5810; WAN024FIS_at; Start 95; Stop 119
tacacagcttgcaaatcttactcgg

SEQ ID NO: 208015 - DNA, 25 bp, Artificial
  probe
  misc_feature (1)..(25): SEQ ID NO: 5810; WAN024FIS_at; Start 249; Stop 273
tcttgattccttcatggcgccagtt

SEQ ID NO: 208016 - DNA, 25 bp, Artificial
  probe
  misc_feature (1)..(25): SEQ ID NO: 5810; WAN024FIS_at; Start 113; Stop 137
tactcggatttcaagcctacttgca

SEQ ID NO: 208017 - DNA, 25 bp, Artificial
  probe
  misc_feature (1)..(25): SEQ ID NO: 5810; WAN024FIS_at; Start 267; Stop 291
gccagtttctcaaaatcgcctgaat

SEQ ID NO: 208018 - DNA, 25 bp, Artificial
  probe
  misc_feature (1)..(25): SEQ ID NO: 5810; WAN024FIS_at; Start 221; Stop 245
gctctcttggcctcaatttgagcca

SEQ ID NO: 208019 - DNA, 25 bp, Artificial
  probe
  misc_feature (1)..(25): SEQ ID NO: 5810; WAN024FIS_at; Start 130; Stop 154
tacttgcatggattaatccttccag

SEQ ID NO: 208020 - DNA, 25 bp, Artificial
  probe
  misc_feature (1)..(25): SEQ ID NO: 5810; WAN024FIS_at; Start 192; Stop 216
tcaactgaggattgcttgcttctct

SEQ ID NO: 208021 - DNA, 25 bp, Artificial
  probe
  misc_feature (1)..(25): SEQ ID NO: 5810; WAN024FIS_at; Start 351; Stop 375
cagcactggttccatcttcctttag

SEQ ID NO: 208022 - DNA, 25 bp, Artificial
  probe
  misc_feature (1)..(25): SEQ ID NO: 5810; WAN024FIS_at; Start 260; Stop 284
tcatggcgccagtttctcaaaatcg

SEQ ID NO: 208023 - DNA, 25 bp, Artificial
  probe
  misc_feature (1)..(25): SEQ ID NO: 5810; WAN024FIS_at; Start 19; Stop 43
ccagcgataaatggtttacgtgaca

SEQ ID NO: 208024 - DNA, 25 bp, Artificial
  probe
  misc_feature (1)..(25): SEQ ID NO: 5810; WAN024FIS_at; Start 335; Stop 359
gcctccttaatcaagtcagcactgg

SEQ ID NO: 208025 - DNA, 25 bp, Artificial
  probe
  misc_feature (1)..(25): SEQ ID NO: 5810; WAN024FIS_at; Start 240; Stop 264
gagccacactcttgattccttcatg

SEQ ID NO: 208026 - DNA, 25 bp, Artificial
  probe
  misc_feature (1)..(25): SEQ ID NO: 5810; WAN024FIS_at; Start 307; Stop 331
ttttccattcaaaacagcttcacga

SEQ ID NO: 208027 - DNA, 25 bp, Artificial
  probe
  misc_feature (1)..(25): SEQ ID NO: 5810; WAN024FIS_at; Start 212; Stop 236
tctctttctgctctcttggcctcaa

SEQ ID NO: 208028 - DNA, 25 bp, Artificial
  probe
  misc_feature (1)..(25): SEQ ID NO: 5810; WAN024FIS_at; Start 315; Stop 339
tcaaaacagcttcacgaagagcctc

SEQ ID NO: 208029 - DNA, 25 bp, Artificial
  probe
  misc_feature (1)..(25): SEQ ID NO: 5810; WAN024FIS_at; Start 140; Stop 164
gattaatccttccagagatccatgg

SEQ ID NO: 208030 - DNA, 25 bp, Artificial
  probe
  misc_feature (1)..(25): SEQ ID NO: 5810; WAN024FIS_at; Start 229; Stop 253
ggcctcaatttgagccacactcttg

SEQ ID NO: 208031 - DNA, 25 bp, Artificial
  probe
  misc_feature (1)..(25): SEQ ID NO: 5810; WAN024FIS_at; Start 277; Stop 301
caaaatcgcctgaatgtacttccag

SEQ ID NO: 208032 - DNA, 25 bp, Artificial
  probe
  misc_feature (1)..(25): SEQ ID NO: 5176; WAN024FIT_at; Start 1; Stop 25
ttgataacccgcctgcttcatcgtg

SEQ ID NO: 208033 - DNA, 25 bp, Artificial
  probe
  misc_feature (1)..(25): SEQ ID NO: 5176; WAN024FIT_at; Start 225; Stop 249
caccataaggaattcccagacggtt

SEQ ID NO: 208034 - DNA, 25 bp, Artificial
  probe
  misc_feature (1)..(25): SEQ ID NO: 5176; WAN024FIT_at; Start 219; Stop 243
gatagacaccataaggaattcccag

SEQ ID NO: 208035 - DNA, 25 bp, Artificial
  probe
  misc_feature (1)..(25): SEQ ID NO: 5176; WAN024FIT_at; Start 9; Stop 33
ccgcctgcttcatcgtgtccatgta

SEQ ID NO: 208036 - DNA, 25 bp, Artificial
  probe
  misc_feature (1)..(25): SEQ ID NO: 5176; WAN024FIT_at; Start 22; Stop 46
cgtgtccatgtacttgttgatgatt

SEQ ID NO: 208037 - DNA, 25 bp, Artificial
  probe
  misc_feature (1)..(25): SEQ ID NO: 5176; WAN024FIT_at; Start 185; Stop 209
tcagcatcggtctcattttcagcat

SEQ ID NO: 208038 - DNA, 25 bp, Artificial
  probe
  misc_feature (1)..(25): SEQ ID NO: 5176; WAN024FIT_at; Start 211; Stop 235
ggtatagagatagacaccataagga

SEQ ID NO: 208039 - DNA, 25 bp, Artificial
  probe
  misc_feature (1)..(25): SEQ ID NO: 5176; WAN024FIT_at; Start 157; Stop 181
aagttcaatggtctgtttagcgtca

SEQ ID NO: 208040 - DNA, 25 bp, Artificial
  probe
  misc_feature (1)..(25): SEQ ID NO: 5176; WAN024FIT_at; Start 154; Stop 178
tataagttcaatggtctgtttagcg

SEQ ID NO: 208041 - DNA, 25 bp, Artificial
  probe
  misc_feature (1)..(25): SEQ ID NO: 5176; WAN024FIT_at; Start 123; Stop 147
tagggtaagacaggttcatattgta

SEQ ID NO: 208042 - DNA, 25 bp, Artificial
  probe
  misc_feature (1)..(25): SEQ ID NO: 5176; WAN024FIT_at; Start 18; Stop 42
tcatcgtgtccatgtacttgttgat

SEQ ID NO: 208043 - DNA, 25 bp, Artificial
  probe
  misc_feature (1)..(25): SEQ ID NO: 5176; WAN024FIT_at; Start 70; Stop 94
tggagctctcttgctcttatttaca

SEQ ID NO: 208044 - DNA, 25 bp, Artificial
  probe
  misc_feature (1)..(25): SEQ ID NO: 5176; WAN024FIT_at; Start 145; Stop 169
gtatttctttataagttcaatggtc

SEQ ID NO: 208045 - DNA, 25 bp, Artificial
  probe
  misc_feature (1)..(25): SEQ ID NO: 5176; WAN024FIT_at; Start 198; Stop 222
cattttcagcataggtatagagata

SEQ ID NO: 208046 - DNA, 25 bp, Artificial
  probe
  misc_feature (1)..(25): SEQ ID NO: 5176; WAN024FIT_at; Start 223; Stop 247
gacaccataaggaattcccagacgg

SEQ ID NO: 208047 - DNA, 25 bp, Artificial
  probe
  misc_feature (1)..(25): SEQ ID NO: 5176; WAN024FIT_at; Start 116; Stop 140
taatagatagggtaagacaggttca

SEQ ID NO: 208048 - DNA, 25 bp, Artificial
  probe
  misc_feature (1)..(25): SEQ ID NO: 5176; WAN024FIT_at; Start 183; Stop 207
tctcagcatcggtctcattttcagc

SEQ ID NO: 208049 - DNA, 25 bp, Artificial
  probe
  misc_feature (1)..(25): SEQ ID NO: 5176; WAN024FIT_at; Start 207; Stop 231
cataggtatagagatagacaccata

SEQ ID NO: 208050 - DNA, 25 bp, Artificial
  probe
  misc_feature (1)..(25): SEQ ID NO: 5176; WAN024FIT_at; Start 63; Stop 87
tatcacttggagctctcttgctctt

SEQ ID NO: 208051 - DNA, 25 bp, Artificial
  probe
  misc_feature (1)..(25): SEQ ID NO: 5176; WAN024FIT_at; Start 78; Stop 102
tcttgctcttatttacatattccca

SEQ ID NO: 208052 - DNA, 25 bp, Artificial
  probe
  misc_feature (1)..(25): SEQ ID NO: 5176; WAN024FIT_at; Start 131; Stop 155
gacaggttcatattgtatttcttta

SEQ ID NO: 208053 - DNA, 25 bp, Artificial
  probe
  misc_feature (1)..(25): SEQ ID NO: 5176; WAN024FIT_at; Start 34; Stop 58
cttgttgatgattttaacccaagtg

SEQ ID NO: 208054 - DNA, 25 bp, Artificial
  probe
  misc_feature (1)..(25): SEQ ID NO: 5176; WAN024FIT_at; Start 104; Stop 128
ttctcaacatcataatagatagggt

SEQ ID NO: 208055 - DNA, 25 bp, Artificial
  probe
  misc_feature (1)..(25): SEQ ID NO: 5176; WAN024FIT_at; Start 2; Stop 26
tgataacccgcctgcttcatcgtgt

SEQ ID NO: 208056 - DNA, 25 bp, Artificial
  probe
  misc_feature (1)..(25): SEQ ID NO: 5176; WAN024FIT_at; Start 119; Stop 143
tagatagggtaagacaggttcatat

SEQ ID NO: 208057 - DNA, 25 bp, Artificial
  probe
  misc_feature (1)..(25): SEQ ID NO: 5176; WAN024FIT_at; Start 30; Stop 54
tgtacttgttgatgattttaaccca

SEQ ID NO: 208058 - DNA, 25 bp, Artificial
  probe
  misc_feature (1)..(25): SEQ ID NO: 5176; WAN024FIT_at; Start 60; Stop 84
ctgtatcacttggagctctcttgct

SEQ ID NO: 208059 - DNA, 25 bp, Artificial
  probe
  misc_feature (1)..(25): SEQ ID NO: 5176; WAN024FIT_at; Start 188; Stop 212
gcatcggtctcattttcagcatagg

SEQ ID NO: 208060 - DNA, 25 bp, Artificial
  probe
  misc_feature (1)..(25): SEQ ID NO: 5176; WAN024FIT_at; Start 11; Stop 35
gcctgcttcatcgtgtccatgtact

SEQ ID NO: 208061 - DNA, 25 bp, Artificial
  probe
  misc_feature (1)..(25): SEQ ID NO: 5176; WAN024FIT_at; Start 215; Stop 239
tagagatagacaccataaggaattc

SEQ ID NO: 208062 - DNA, 25 bp, Artificial
  probe
  misc_feature (1)..(25): SEQ ID NO: 5176; WAN024FIT_at; Start 204; Stop 228
cagcataggtatagagatagacacc

SEQ ID NO: 208063 - DNA, 25 bp, Artificial
  probe
  misc_feature (1)..(25): SEQ ID NO: 5176; WAN024FIT_at; Start 192; Stop 216
cggtctcattttcagcataggtata

SEQ ID NO: 208064 - DNA, 25 bp, Artificial
  probe
  misc_feature (1)..(25): SEQ ID NO: 5176; WAN024FIT_at; Start 113; Stop 137
tcataatagatagggtaagacaggt

SEQ ID NO: 208065 - DNA, 25 bp, Artificial
  probe
  misc_feature (1)..(25): SEQ ID NO: 5176; WAN024FIT_at; Start 14; Stop 38
tgcttcatcgtgtccatgtacttgt

SEQ ID NO: 208066 - DNA, 25 bp, Artificial
  probe
  misc_feature (1)..(25): SEQ ID NO: 4091; WAN024FIU_at; Start 282; Stop 306
gccactcttggttagcataagttcc

SEQ ID NO: 208067 - DNA, 25 bp, Artificial
  probe
  misc_feature (1)..(25): SEQ ID NO: 4091; WAN024FIU_at; Start 192; Stop 216
cacttccagtcaaatagtagttgcc

SEQ ID NO: 208068 - DNA, 25 bp, Artificial
  probe
  misc_feature (1)..(25): SEQ ID NO: 4091; WAN024FIU_at; Start 187; Stop 211
ggcaccacttccagtcaaatagtag

SEQ ID NO: 208069 - DNA, 25 bp, Artificial
  probe
  misc_feature (1)..(25): SEQ ID NO: 4091; WAN024FIU_at; Start 129; Stop 153
caccagaggccgcaaagatatagcg

SEQ ID NO: 208070 - DNA, 25 bp, Artificial
  probe
  misc_feature (1)..(25): SEQ ID NO: 4091; WAN024FIU_at; Start 198; Stop 222
cagtcaaatagtagttgccttgcca

SEQ ID NO: 208071 - DNA, 25 bp, Artificial
  probe
  misc_feature (1)..(25): SEQ ID NO: 4091; WAN024FIU_at; Start 27; Stop 51
tagcatgttcggttcccacttgttc

SEQ ID NO: 208072 - DNA, 25 bp, Artificial
  probe
  misc_feature (1)..(25): SEQ ID NO: 4091; WAN024FIU_at; Start 233; Stop 257
gccatatagccccacttcttgaaat

SEQ ID NO: 208073 - DNA, 25 bp, Artificial
  probe
  misc_feature (1)..(25): SEQ ID NO: 4091; WAN024FIU_at; Start 51; Stop 75
cttctctattattaaagaaatagcg

SEQ ID NO: 208074 - DNA, 25 bp, Artificial
  probe
  misc_feature (1)..(25): SEQ ID NO: 4091; WAN024FIU_at; Start 116; Stop 140
ttttctttgagctcaccagaggccg

SEQ ID NO: 208075 - DNA, 25 bp, Artificial
  probe
  misc_feature (1)..(25): SEQ ID NO: 4091; WAN024FIU_at; Start 249; Stop 273
tcttgaaatagtaccatttgccgcc

SEQ ID NO: 208076 - DNA, 25 bp, Artificial
  probe
  misc_feature (1)..(25): SEQ ID NO: 4091; WAN024FIU_at; Start 21; Stop 45
ttttcttagcatgttcggttcccac

SEQ ID NO: 208077 - DNA, 25 bp, Artificial
  probe
  misc_feature (1)..(25): SEQ ID NO: 4091; WAN024FIU_at; Start 37; Stop 61
ggttcccacttgttcttctctatta

SEQ ID NO: 208078 - DNA, 25 bp, Artificial
  probe
  misc_feature (1)..(25): SEQ ID NO: 4091; WAN024FIU_at; Start 14; Stop 38
tcaatgattttcttagcatgttcgg

SEQ ID NO: 208079 - DNA, 25 bp, Artificial
  probe
  misc_feature (1)..(25): SEQ ID NO: 4091; WAN024FIU_at; Start 294; Stop 318
tagcataagttccatcggattttag

SEQ ID NO: 208080 - DNA, 25 bp, Artificial
  probe
  misc_feature (1)..(25): SEQ ID NO: 4091; WAN024FIU_at; Start 158; Stop 182
ccatccataatcacttcgtcagtcg

SEQ ID NO: 208081 - DNA, 25 bp, Artificial
  probe
  misc_feature (1)..(25): SEQ ID NO: 4091; WAN024FIU_at; Start 287; Stop 311
tcttggttagcataagttccatcgg

SEQ ID NO: 208082 - DNA, 25 bp, Artificial
  probe
  misc_feature (1)..(25): SEQ ID NO: 4091; WAN024FIU_at; Start 256; Stop 280
atagtaccatttgccgcccactttt

SEQ ID NO: 208083 - DNA, 25 bp, Artificial
  probe
  misc_feature (1)..(25): SEQ ID NO: 4091; WAN024FIU_at; Start 118; Stop 142
ttctttgagctcaccagaggccgca

SEQ ID NO: 208084 - DNA, 25 bp, Artificial
  probe
  misc_feature (1)..(25): SEQ ID NO: 4091; WAN024FIU_at; Start 172; Stop 196
ttcgtcagtcgccatggcaccactt

SEQ ID NO: 208085 - DNA, 25 bp, Artificial
  probe
  misc_feature (1)..(25): SEQ ID NO: 4091; WAN024FIU_at; Start 217; Stop 241
ttgccactcattccgagccatatag

SEQ ID NO: 208086 - DNA, 25 bp, Artificial
  probe
  misc_feature (1)..(25): SEQ ID NO: 4091; WAN024FIU_at; Start 253; Stop 277
gaaatagtaccatttgccgcccact

SEQ ID NO: 208087 - DNA, 25 bp, Artificial
  probe
  misc_feature (1)..(25): SEQ ID NO: 4091; WAN024FIU_at; Start 209; Stop 233
tagttgccttgccactcattccgag

SEQ ID NO: 208088 - DNA, 25 bp, Artificial
  probe
  misc_feature (1)..(25): SEQ ID NO: 4091; WAN024FIU_at; Start 83; Stop 107
tctctgtgaacccagccgacattca

SEQ ID NO: 208089 - DNA, 25 bp, Artificial
  probe
  misc_feature (1)..(25): SEQ ID NO: 4091; WAN024FIU_at; Start 131; Stop 155
ccagaggccgcaaagatatagcgag

SEQ ID NO: 208090 - DNA, 25 bp, Artificial
  probe
  misc_feature (1)..(25): SEQ ID NO: 4091; WAN024FIU_at; Start 274; Stop 298
cactttttgccactcttggttagca

SEQ ID NO: 208091 - DNA, 25 bp, Artificial
  probe
  misc_feature (1)..(25): SEQ ID NO: 4091; WAN024FIU_at; Start 1; Stop 25
gtgctcactaatatcaatgattttc

SEQ ID NO: 208092 - DNA, 25 bp, Artificial
  probe
  misc_feature (1)..(25): SEQ ID NO: 4091; WAN024FIU_at; Start 291; Stop 315
ggttagcataagttccatcggattt

SEQ ID NO: 208093 - DNA, 25 bp, Artificial
  probe
  misc_feature (1)..(25): SEQ ID NO: 4091; WAN024FIU_at; Start 90; Stop 114
gaacccagccgacattcaaatcttt

SEQ ID NO: 208094 - DNA, 25 bp, Artificial
  probe
  misc_feature (1)..(25): SEQ ID NO: 4091; WAN024FIU_at; Start 165; Stop 189
taatcacttcgtcagtcgccatggc

SEQ ID NO: 208095 - DNA, 25 bp, Artificial
  probe
  misc_feature (1)..(25): SEQ ID NO: 4091; WAN024FIU_at; Start 121; Stop 145
tttgagctcaccagaggccgcaaag

SEQ ID NO: 208096 - DNA, 25 bp, Artificial
  probe
  misc_feature (1)..(25): SEQ ID NO: 4091; WAN024FIU_at; Start 239; Stop 263
tagccccacttcttgaaatagtacc

SEQ ID NO: 208097 - DNA, 25 bp, Artificial
  probe
  misc_feature (1)..(25): SEQ ID NO: 4091; WAN024FIU_at; Start 202; Stop 226
caaatagtagttgccttgccactca

SEQ ID NO: 208098 - DNA, 25 bp, Artificial
  probe
  misc_feature (1)..(25): SEQ ID NO: 4091; WAN024FIU_at; Start 182; Stop 206
gccatggcaccacttccagtcaaat

SEQ ID NO: 208099 - DNA, 25 bp, Artificial
  probe
  misc_feature (1)..(25): SEQ ID NO: 4091; WAN024FIU_at; Start 77; Stop 101
ttaccatctctgtgaacccagccga

SEQ ID NO: 208100 - DNA, 25 bp, Artificial
  probe
  misc_feature (1)..(25): SEQ ID NO: 4861; WAN024FIV_at; Start 439; Stop 463
gctgctgaattcgtaggtgctcaag

SEQ ID NO: 208101 - DNA, 25 bp, Artificial
  probe
  misc_feature (1)..(25): SEQ ID NO: 4861; WAN024FIV_at; Start 661; Stop 685
tctgttaaacctgaaaatgttgctt

SEQ ID NO: 208102 - DNA, 25 bp, Artificial
  probe
  misc_feature (1)..(25): SEQ ID NO: 4861; WAN024FIV_at; Start 297; Stop 321
tgttatcggtcactcagaacgccgt

SEQ ID NO: 208103 - DNA, 25 bp, Artificial
  probe
  misc_feature (1)..(25): SEQ ID NO: 4861; WAN024FIV_at; Start 244; Stop 268
ttcactggtgaaactagcccacaag

SEQ ID NO: 208104 - DNA, 25 bp, Artificial
  probe
  misc_feature (1)..(25): SEQ ID NO: 4861; WAN024FIV_at; Start 591; Stop 615
tgttcgtgacgttgtagctgctgac

SEQ ID NO: 208105 - DNA, 25 bp, Artificial
  probe
  misc_feature (1)..(25): SEQ ID NO: 4861; WAN024FIV_at; Start 122; Stop 146
cagatcttgttgaagcaggtatcgc

SEQ ID NO: 208106 - DNA, 25 bp, Artificial
  probe
  misc_feature (1)..(25): SEQ ID NO: 4861; WAN024FIV_at; Start 701; Stop 725
cagacgttgacggtgcccttgtagg

SEQ ID NO: 208107 - DNA, 25 bp, Artificial
  probe
  misc_feature (1)..(25): SEQ ID NO: 4861; WAN024FIV_at; Start 229; Stop 253
gaaaatgcaggtgctttcactggtg

SEQ ID NO: 208108 - DNA, 25 bp, Artificial
  probe
  misc_feature (1)..(25): SEQ ID NO: 4861; WAN024FIV_at; Start 272; Stop 296
tgaaagaaatcggtactgactacgt

SEQ ID NO: 208109 - DNA, 25 bp, Artificial
  probe
  misc_feature (1)..(25): SEQ ID NO: 4861; WAN024FIV_at; Start 362; Stop 386
caaaagcaatctttgcgaacggtat

SEQ ID NO: 208110 - DNA, 25 bp, Artificial
  probe
  misc_feature (1)..(25): SEQ ID NO: 4861; WAN024FIV_at; Start 93; Stop 117
tgaagcagttgcatcaaaacttcct

SEQ ID NO: 208111 - DNA, 25 bp, Artificial
  probe
  misc_feature (1)..(25): SEQ ID NO: 4861; WAN024FIV_at; Start 175; Stop 199
cttgctgttgcaaaaggctcaaacc

SEQ ID NO: 208112 - DNA, 25 bp, Artificial
  probe
  misc_feature (1)..(25): SEQ ID NO: 4861; WAN024FIV_at; Start 76; Stop 100
gaagctaaagcattcgttgaagcag

SEQ ID NO: 208113 - DNA, 25 bp, Artificial
  probe
  misc_feature (1)..(25): SEQ ID NO: 4861; WAN024FIV_at; Start 201; Stop 225
taaagttgctgctcaaaactgctac

SEQ ID NO: 208114 - DNA, 25 bp, Artificial
  probe
  misc_feature (1)..(25): SEQ ID NO: 4861; WAN024FIV_at; Start 727; Stop 751
ggtgcgtcacttgaagctgaaagct

SEQ ID NO: 208115 - DNA, 25 bp, Artificial
  probe
  misc_feature (1)..(25): SEQ ID NO: 4861; WAN024FIV_at; Start 547; Stop 571
ggtaaatcagcttcacaagacgatg

SEQ ID NO: 208116 - DNA, 25 bp, Artificial
  probe
  misc_feature (1)..(25): SEQ ID NO: 4861; WAN024FIV_at; Start 406; Stop 430
ggtgaatcacttgaaacttacgaag

SEQ ID NO: 208117 - DNA, 25 bp, Artificial
  probe
  misc_feature (1)..(25): SEQ ID NO: 4861; WAN024FIV_at; Start 23; Stop 47
tgtcacgtaaaccatttatcgctgg

SEQ ID NO: 208118 - DNA, 25 bp, Artificial
  probe
  misc_feature (1)..(25): SEQ ID NO: 4861; WAN024FIV_at; Start 690; Stop 714
catggcttgcccagacgttgacggt

SEQ ID NO: 208119 - DNA, 25 bp, Artificial
  probe
  misc_feature (1)..(25): SEQ ID NO: 4861; WAN024FIV_at; Start 39; Stop 63
tatcgctggtaactggaaaatgaac

SEQ ID NO: 208120 - DNA, 25 bp, Artificial
  probe
  misc_feature (1)..(25): SEQ ID NO: 4861; WAN024FIV_at; Start 473; Stop 497
cattggctggattgactgctgaaca

SEQ ID NO: 208121 - DNA, 25 bp, Artificial
  probe
  misc_feature (1)..(25): SEQ ID NO: 4861; WAN024FIV_at; Start 621; Stop 645
tcaagaagtcgcagacaaagttcgt

SEQ ID NO: 208122 - DNA, 25 bp, Artificial
  probe
  misc_feature (1)..(25): SEQ ID NO: 4861; WAN024FIV_at; Start 679; Stop 703
gttgcttcatacatggcttgcccag

SEQ ID NO: 208123 - DNA, 25 bp, Artificial
  probe
  misc_feature (1)..(25): SEQ ID NO: 4861; WAN024FIV_at; Start 313; Stop 337
gaacgccgtgactacttccatgaaa

SEQ ID NO: 208124 - DNA, 25 bp, Artificial
  probe
  misc_feature (1)..(25): SEQ ID NO: 4861; WAN024FIV_at; Start 454; Stop 478
ggtgctcaagtatctgctgcattgg

SEQ ID NO: 208125 - DNA, 25 bp, Artificial
  probe
  misc_feature (1)..(25): SEQ ID NO: 4861; WAN024FIV_at; Start 486; Stop 510
gactgctgaacaagttgctgcctca

SEQ ID NO: 208126 - DNA, 25 bp, Artificial
  probe
  misc_feature (1)..(25): SEQ ID NO: 4861; WAN024FIV_at; Start 422; Stop 446
cttacgaagctggtaaagctgctga

SEQ ID NO: 208127 - DNA, 25 bp, Artificial
  probe
  misc_feature (1)..(25): SEQ ID NO: 4861; WAN024FIV_at; Start 512; Stop 536
ttatcgcttatgagccaatctgggc

SEQ ID NO: 208128 - DNA, 25 bp, Artificial
  probe
  misc_feature (1)..(25): SEQ ID NO: 4861; WAN024FIV_at; Start 145; Stop 169
gctgctccagctcttgatttgacaa

SEQ ID NO: 208129 - DNA, 25 bp, Artificial
  probe
  misc_feature (1)..(25): SEQ ID NO: 4861; WAN024FIV_at; Start 636; Stop 660
caaagttcgtgttcaatacggtggt

SEQ ID NO: 208130 - DNA, 25 bp, Artificial
  probe
  misc_feature (1)..(25): SEQ ID NO: 4861; WAN024FIV_at; Start 375; Stop 399
tgcgaacggtatgcttccaatcatc

SEQ ID NO: 208131 - DNA, 25 bp, Artificial
  probe
  misc_feature (1)..(25): SEQ ID NO: 4861; WAN024FIV_at; Start 391; Stop 415
ccaatcatctgttgtggtgaatcac

SEQ ID NO: 208132 - DNA, 25 bp, Artificial
  probe
  misc_feature (1)..(25): SEQ ID NO: 4861; WAN024FIV_at; Start 716; Stop 740
cccttgtaggtggtgcgtcacttga

SEQ ID NO: 208133 - DNA, 25 bp, Artificial
  probe
  misc_feature (1)..(25): SEQ ID NO: 4861; WAN024FIV_at; Start 527; Stop 551
caatctgggctatcggtactggtaa

SEQ ID NO: 208134 - DNA, 25 bp, Artificial
  probe
  misc_feature (1)..(25): SEQ ID NO: 1383; WAN024FIW_at; Start 466; Stop 490
gctgacttgattaaggaggctcttc

SEQ ID NO: 208135 - DNA, 25 bp, Artificial
  probe
  misc_feature (1)..(25): SEQ ID NO: 1383; WAN024FIW_at; Start 451; Stop 475
gaagatggaaccagtgctgacttga

SEQ ID NO: 208136 - DNA, 25 bp, Artificial
  probe
  misc_feature (1)..(25): SEQ ID NO: 1383; WAN024FIW_at; Start 421; Stop 445
gagattgaggatttgaccaagacac

SEQ ID NO: 208137 - DNA, 25 bp, Artificial
  probe
  misc_feature (1)..(25): SEQ ID NO: 1383; WAN024FIW_at; Start 656; Stop 680
ccatggatctctggaaggattaact

SEQ ID NO: 208138 - DNA, 25 bp, Artificial
  probe
  misc_feature (1)..(25): SEQ ID NO: 1383; WAN024FIW_at; Start 531; Stop 555
tcaggcgattttgagaaactggcgc

SEQ ID NO: 208139 - DNA, 25 bp, Artificial
  probe
  misc_feature (1)..(25): SEQ ID NO: 1383; WAN024FIW_at; Start 292; Stop 316
gccttggaacgtttggatgacctgt

SEQ ID NO: 208140 - DNA, 25 bp, Artificial
  probe
  misc_feature (1)..(25): SEQ ID NO: 1383; WAN024FIW_at; Start 115; Stop 139
tatttgcaaaatacgacaggcttag

SEQ ID NO: 208141 - DNA, 25 bp, Artificial
  probe
  misc_feature (1)..(25): SEQ ID NO: 1383; WAN024FIW_at; Start 380; Stop 404
aaaccttccagcaggagttgggacg

SEQ ID NO: 208142 - DNA, 25 bp, Artificial
  probe
  misc_feature (1)..(25): SEQ ID NO: 1383; WAN024FIW_at; Start 567; Stop 591
caagagtgtggctcaaattgaggcc

SEQ ID NO: 208143 - DNA, 25 bp, Artificial
  probe
  misc_feature (1)..(25): SEQ ID NO: 1383; WAN024FIW_at; Start 355; Stop 379
caaaaccagctcaaggatttggtgg

SEQ ID NO: 208144 - DNA, 25 bp, Artificial
  probe
  misc_feature (1)..(25): SEQ ID NO: 1383; WAN024FIW_at; Start 84; Stop 108
tagcgacgattttctggtttggcaa

SEQ ID NO: 208145 - DNA, 25 bp, Artificial
  probe
  misc_feature (1)..(25): SEQ ID NO: 1383; WAN024FIW_at; Start 238; Stop 262
tatcgtactatcgaattaaatggcg

SEQ ID NO: 208146 - DNA, 25 bp, Artificial
  probe
  misc_feature (1)..(25): SEQ ID NO: 1383; WAN024FIW_at; Start 556; Stop 580
catgaaggaatcaagagtgtggctc

SEQ ID NO: 208147 - DNA, 25 bp, Artificial
  probe
  misc_feature (1)..(25): SEQ ID NO: 1383; WAN024FIW_at; Start 148; Stop 172
tcgccaagccagattgctgaaagga

SEQ ID NO: 208148 - DNA, 25 bp, Artificial
  probe
  misc_feature (1)..(25): SEQ ID NO: 1383; WAN024FIW_at; Start 591; Stop 615
caagagagcagaaagagaagcaagc

SEQ ID NO: 208149 - DNA, 25 bp, Artificial
  probe
  misc_feature (1)..(25): SEQ ID NO: 1383; WAN024FIW_at; Start 579; Stop 603
tcaaattgaggccaagagagcagaa

SEQ ID NO: 208150 - DNA, 25 bp, Artificial
  probe
  misc_feature (1)..(25): SEQ ID NO: 1383; WAN024FIW_at; Start 260; Stop 284
gcgaaattgaattgctctttgatgc

SEQ ID NO: 208151 - DNA, 25 bp, Artificial
  probe
  misc_feature (1)..(25): SEQ ID NO: 1383; WAN024FIW_at; Start 545; Stop 569
gaaactggcgccatgaaggaatcaa

SEQ ID NO: 208152 - DNA, 25 bp, Artificial
  probe
  misc_feature (1)..(25): SEQ ID NO: 1383; WAN024FIW_at; Start 366; Stop 390
caaggatttggtggaaaccttccag

SEQ ID NO: 208153 - DNA, 25 bp, Artificial
  probe
  misc_feature (1)..(25): SEQ ID NO: 1383; WAN024FIW_at; Start 604; Stop 628
agagaagcaagcaatcctcagttga

SEQ ID NO: 208154 - DNA, 25 bp, Artificial
  probe
  misc_feature (1)..(25): SEQ ID NO: 1383; WAN024FIW_at; Start 310; Stop 334
gacctgtttggagcagttcattcaa

SEQ ID NO: 208155 - DNA, 25 bp, Artificial
  probe
  misc_feature (1)..(25): SEQ ID NO: 1383; WAN024FIW_at; Start 481; Stop 505
gaggctcttcgtgaagctgttttga

SEQ ID NO: 208156 - DNA, 25 bp, Artificial
  probe
  misc_feature (1)..(25): SEQ ID NO: 1383; WAN024FIW_at; Start 325; Stop 349
gttcattcaagttcagaccagctaa

SEQ ID NO: 208157 - DNA, 25 bp, Artificial
  probe
  misc_feature (1)..(25): SEQ ID NO: 1383; WAN024FIW_at; Start 163; Stop 187
gctgaaaggattggcaaggaaattt

SEQ ID NO: 208158 - DNA, 25 bp, Artificial
  probe
  misc_feature (1)..(25): SEQ ID NO: 1383; WAN024FIW_at; Start 407; Stop 431
tgttgacgccttttgagattgagga

SEQ ID NO: 208159 - DNA, 25 bp, Artificial
  probe
  misc_feature (1)..(25): SEQ ID NO: 1383; WAN024FIW_at; Start 36; Stop 60
ggttttaccgagtgccctgctcttg

SEQ ID NO: 208160 - DNA, 25 bp, Artificial
  probe
  misc_feature (1)..(25): SEQ ID NO: 1383; WAN024FIW_at; Start 202; Stop 226
tccatttctaatctgacggaaaggg

SEQ ID NO: 208161 - DNA, 25 bp, Artificial
  probe
  misc_feature (1)..(25): SEQ ID NO: 1383; WAN024FIW_at; Start 51; Stop 75
cctgctcttgcattttaaggaactc

SEQ ID NO: 208162 - DNA, 25 bp, Artificial
  probe
  misc_feature (1)..(25): SEQ ID NO: 1383; WAN024FIW_at; Start 438; Stop 462
caagacactaaaggaagatggaacc

SEQ ID NO: 208163 - DNA, 25 bp, Artificial
  probe
  misc_feature (1)..(25): SEQ ID NO: 1383; WAN024FIW_at; Start 394; Stop 418
gagttgggacgattgttgacgcctt

SEQ ID NO: 208164 - DNA, 25 bp, Artificial
  probe
  misc_feature (1)..(25): SEQ ID NO: 1383; WAN024FIW_at; Start 278; Stop 302
ttgatgctagtttggccttggaacg

SEQ ID NO: 208165 - DNA, 25 bp, Artificial
  probe
  misc_feature (1)..(25): SEQ ID NO: 1383; WAN024FIW_at; Start 226; Stop 250
ggactgctccagtatcgtactatcg

SEQ ID NO: 208166 - DNA, 25 bp, Artificial
  probe
  misc_feature (1)..(25): SEQ ID NO: 1383; WAN024FIW_at; Start 515; Stop 539
caaactggaagtacattcaggcgat

SEQ ID NO: 208167 - DNA, 25 bp, Artificial
  probe
  misc_feature (1)..(25): SEQ ID NO: 1383; WAN024FIW_at; Start 69; Stop 93
ggaactctttccttctagcgacgat

SEQ ID NO: 208168 - DNA, 25 bp, Artificial
  probe
  misc_feature (1)..(25): SEQ ID NO: 4114; WAN024FIX_at; Start 756; Stop 780
tgccatggcgactgacgaagtgatt

SEQ ID NO: 208169 - DNA, 25 bp, Artificial
  probe
  misc_feature (1)..(25): SEQ ID NO: 4114; WAN024FIX_at; Start 736; Stop 760
tactatttgactggaagtggtgcca

SEQ ID NO: 208170 - DNA, 25 bp, Artificial
  probe
  misc_feature (1)..(25): SEQ ID NO: 4114; WAN024FIX_at; Start 1487; Stop 1511
tccaagggcgcgtagatgtcagcgt

SEQ ID NO: 208171 - DNA, 25 bp, Artificial
  probe
  misc_feature (1)..(25): SEQ ID NO: 4114; WAN024FIX_at; Start 378; Stop 402
gaaatcaggtggatatatggcccaa

SEQ ID NO: 208172 - DNA, 25 bp, Artificial
  probe
  misc_feature (1)..(25): SEQ ID NO: 4114; WAN024FIX_at; Start 1099; Stop 1123
tatacctatgctgaaaatgagaccg

SEQ ID NO: 208173 - DNA, 25 bp, Artificial
  probe
  misc_feature (1)..(25): SEQ ID NO: 4114; WAN024FIX_at; Start 400; Stop 424
caaaacgagtggatctatgacagta

SEQ ID NO: 208174 - DNA, 25 bp, Artificial
  probe
  misc_feature (1)..(25): SEQ ID NO: 4114; WAN024FIX_at; Start 1066; Stop 1090
aaccgtctgggaattccttatggtg

SEQ ID NO: 208175 - DNA, 25 bp, Artificial
  probe
  misc_feature (1)..(25): SEQ ID NO: 4114; WAN024FIX_at; Start 631; Stop 655
aaatccgatggaacttatgctaacc

SEQ ID NO: 208176 - DNA, 25 bp, Artificial
  probe
  misc_feature (1)..(25): SEQ ID NO: 4114; WAN024FIX_at; Start 584; Stop 608
aaaatgaatggctctatgatccagc

SEQ ID NO: 208177 - DNA, 25 bp, Artificial
  probe
  misc_feature (1)..(25): SEQ ID NO: 4114; WAN024FIX_at; Start 939; Stop 963
tgagcacaatggtcgtatcaatgat

SEQ ID NO: 208178 - DNA, 25 bp, Artificial
  probe
  misc_feature (1)..(25): SEQ ID NO: 4114; WAN024FIX_at; Start 1474; Stop 1498
tacatgaaaggaatccaagggcgcg

SEQ ID NO: 208179 - DNA, 25 bp, Artificial
  probe
  misc_feature (1)..(25): SEQ ID NO: 4114; WAN024FIX_at; Start 86; Stop 110
taggcttggcaactagtcatgtcgc

SEQ ID NO: 208180 - DNA, 25 bp, Artificial
  probe
  misc_feature (1)..(25): SEQ ID NO: 4114; WAN024FIX_at; Start 900; Stop 924
agtgggaaccgaacatgctaagaaa

SEQ ID NO: 208181 - DNA, 25 bp, Artificial
  probe
  misc_feature (1)..(25): SEQ ID NO: 4114; WAN024FIX_at; Start 458; Stop 482
gggcttatgctcatcaagaatggca

SEQ ID NO: 208182 - DNA, 25 bp, Artificial
  probe
  misc_feature (1)..(25): SEQ ID NO: 4114; WAN024FIX_at; Start 1376; Stop 1400
taaaacatgtaaactgggtagcggc

SEQ ID NO: 208183 - DNA, 25 bp, Artificial
  probe
  misc_feature (1)..(25): SEQ ID NO: 4114; WAN024FIX_at; Start 712; Stop 736
gctcggaatgagtggcaaggcaact

SEQ ID NO: 208184 - DNA, 25 bp, Artificial
  probe
  misc_feature (1)..(25): SEQ ID NO: 4114; WAN024FIX_at; Start 1020; Stop 1044
tagcggtaaagaagacaaggaattg

SEQ ID NO: 208185 - DNA, 25 bp, Artificial
  probe
  misc_feature (1)..(25): SEQ ID NO: 4114; WAN024FIX_at; Start 1391; Stop 1415
gggtagcggcctatacgaatgcttt

SEQ ID NO: 208186 - DNA, 25 bp, Artificial
  probe
  misc_feature (1)..(25): SEQ ID NO: 4114; WAN024FIX_at; Start 495; Stop 519
taagtggtactacttcaagaagtgg

SEQ ID NO: 208187 - DNA, 25 bp, Artificial
  probe
  misc_feature (1)..(25): SEQ ID NO: 4114; WAN024FIX_at; Start 649; Stop 673
gctaaccaagagtggcaaaaagtgg

SEQ ID NO: 208188 - DNA, 25 bp, Artificial
  probe
  misc_feature (1)..(25): SEQ ID NO: 4114; WAN024FIX_at; Start 184; Stop 208
tcttctaataaaacgcaaacgagcg

SEQ ID NO: 208189 - DNA, 25 bp, Artificial
  probe
  misc_feature (1)..(25): SEQ ID NO: 4114; WAN024FIX_at; Start 805; Stop 829
gcggcctctggtgagctcaaagaaa

SEQ ID NO: 208190 - DNA, 25 bp, Artificial
  probe
  misc_feature (1)..(25): SEQ ID NO: 4114; WAN024FIX_at; Start 1038; Stop 1062
ggaattggcgcataacattaaggag

SEQ ID NO: 208191 - DNA, 25 bp, Artificial
  probe
  misc_feature (1)..(25): SEQ ID NO: 4114; WAN024FIX_at; Start 199; Stop 223
caaacgagcgcagaagtacagacta

SEQ ID NO: 208192 - DNA, 25 bp, Artificial
  probe
  misc_feature (1)..(25): SEQ ID NO: 4114; WAN024FIX_at; Start 355; Stop 379
gaatggcatggaaattactacctga

SEQ ID NO: 208193 - DNA, 25 bp, Artificial
  probe
  misc_feature (1)..(25): SEQ ID NO: 4114; WAN024FIX_at; Start 1002; Stop 1026
cattgttcgtctaggttatagcggt

SEQ ID NO: 208194 - DNA, 25 bp, Artificial
  probe
  misc_feature (1)..(25): SEQ ID NO: 4114; WAN024FIX_at; Start 1346; Stop 1370
tacagacgcgtttaaaacacccaga

SEQ ID NO: 208195 - DNA, 25 bp, Artificial
  probe
  misc_feature (1)..(25): SEQ ID NO: 4114; WAN024FIX_at; Start 161; Stop 185
caagtagttcagagcaaaatcagtc

SEQ ID NO: 208196 - DNA, 25 bp, Artificial
  probe
  misc_feature (1)..(25): SEQ ID NO: 4114; WAN024FIX_at; Start 1134; Stop 1158
tgacgctaaacagaccattgaactt

SEQ ID NO: 208197 - DNA, 25 bp, Artificial
  probe
  misc_feature (1)..(25): SEQ ID NO: 4114; WAN024FIX_at; Start 141; Stop 165
gcaggatacaacgacagcttcaagt

SEQ ID NO: 208198 - DNA, 25 bp, Artificial
  probe
  misc_feature (1)..(25): SEQ ID NO: 4114; WAN024FIX_at; Start 340; Stop 364
cgttactcgcagaatgaatggcatg

SEQ ID NO: 208199 - DNA, 25 bp, Artificial
  probe
  misc_feature (1)..(25): SEQ ID NO: 4114; WAN024FIX_at; Start 885; Stop 909
taatagagaagaacaagtgggaacc

SEQ ID NO: 208200 - DNA, 25 bp, Artificial
  probe
  misc_feature (1)..(25): SEQ ID NO: 4114; WAN024FIX_at; Start 1290; Stop 1314
cacgatgaagcaggcgggttatcaa

SEQ ID NO: 208201 - DNA, 25 bp, Artificial
  probe
  misc_feature (1)..(25): SEQ ID NO: 4114; WAN024FIX_at; Start 839; Stop 863
tgaatgtcggctgggttcacagaga

SEQ ID NO: 208202 - DNA, 25 bp, Artificial
  probe
  misc_feature (1)..(25): SEQ ID NO: 2637; WAN024FIY_at; Start 160; Stop 184
cgcggttttatggtatggcatccaa

SEQ ID NO: 208203 - DNA, 25 bp, Artificial
  probe
  misc_feature (1)..(25): SEQ ID NO: 2637; WAN024FIY_at; Start 354; Stop 378
tctagctatttatcgctacctcatc

SEQ ID NO: 208204 - DNA, 25 bp, Artificial
  probe
  misc_feature (1)..(25): SEQ ID NO: 2637; WAN024FIY_at; Start 384; Stop 408
tttccaaaaagcgttggatgtgact

SEQ ID NO: 208205 - DNA, 25 bp, Artificial
  probe
  misc_feature (1)..(25): SEQ ID NO: 2637; WAN024FIY_at; Start 386; Stop 410
tccaaaaagcgttggatgtgactga

SEQ ID NO: 208206 - DNA, 25 bp, Artificial
  probe
  misc_feature (1)..(25): SEQ ID NO: 2637; WAN024FIY_at; Start 31; Stop 55
gatgtcgcaacattaacaaaagcag

SEQ ID NO: 208207 - DNA, 25 bp, Artificial
  probe
  misc_feature (1)..(25): SEQ ID NO: 2637; WAN024FIY_at; Start 231; Stop 255
cagcgaacgattgattacacttgga

SEQ ID NO: 208208 - DNA, 25 bp, Artificial
  probe
  misc_feature (1)..(25): SEQ ID NO: 2637; WAN024FIY_at; Start 248; Stop 272
cacttggaggtagcccattctctac

SEQ ID NO: 208209 - DNA, 25 bp, Artificial
  probe
  misc_feature (1)..(25): SEQ ID NO: 2637; WAN024FIY_at; Start 14; Stop 38
aaaaagaagcagcaaaagatgtcgc

SEQ ID NO: 208210 - DNA, 25 bp, Artificial
  probe
  misc_feature (1)..(25): SEQ ID NO: 2637; WAN024FIY_at; Start 135; Stop 159
ccaagtacactggtatatgcgtgga

SEQ ID NO: 208211 - DNA, 25 bp, Artificial
  probe
  misc_feature (1)..(25): SEQ ID NO: 2637; WAN024FIY_at; Start 418; Stop 442
ggcgatgatgttacaaacgatattt

SEQ ID NO: 208212 - DNA, 25 bp, Artificial
  probe
  misc_feature (1)..(25): SEQ ID NO: 2637; WAN024FIY_at; Start 434; Stop 458
acgatatttttgttggtgctaaggc

SEQ ID NO: 208213 - DNA, 25 bp, Artificial
  probe
  misc_feature (1)..(25): SEQ ID NO: 2637; WAN024FIY_at; Start 242; Stop 266
tgattacacttggaggtagcccatt

SEQ ID NO: 208214 - DNA, 25 bp, Artificial
  probe
  misc_feature (1)..(25): SEQ ID NO: 2637; WAN024FIY_at; Start 337; Stop 361
gaaagtttggaacgtgttctagcta

SEQ ID NO: 208215 - DNA, 25 bp, Artificial
  probe
  misc_feature (1)..(25): SEQ ID NO: 2637; WAN024FIY_at; Start 464; Stop 488
ttgagaaaacagtttggatgcttgc

SEQ ID NO: 208216 - DNA, 25 bp, Artificial
  probe
  misc_feature (1)..(25): SEQ ID NO: 2637; WAN024FIY_at; Start 162; Stop 186
cggttttatggtatggcatccaaaa

SEQ ID NO: 208217 - DNA, 25 bp, Artificial
  probe
  misc_feature (1)..(25): SEQ ID NO: 2637; WAN024FIY_at; Start 444; Stop 468
tgttggtgctaaggctgaacttgag

SEQ ID NO: 208218 - DNA, 25 bp, Artificial
  probe
  misc_feature (1)..(25): SEQ ID NO: 2637; WAN024FIY_at; Start 158; Stop 182
gacgcggttttatggtatggcatcc

SEQ ID NO: 208219 - DNA, 25 bp, Artificial
  probe
  misc_feature (1)..(25): SEQ ID NO: 2637; WAN024FIY_at; Start 221; Stop 245
tagatgaaatcagcgaacgattgat

SEQ ID NO: 208220 - DNA, 25 bp, Artificial
  probe
  misc_feature (1)..(25): SEQ ID NO: 2637; WAN024FIY_at; Start 345; Stop 369
ggaacgtgttctagctatttatcgc

SEQ ID NO: 208221 - DNA, 25 bp, Artificial
  probe
  misc_feature (1)..(25): SEQ ID NO: 2637; WAN024FIY_at; Start 36; Stop 60
cgcaacattaacaaaagcagcgcca

SEQ ID NO: 208222 - DNA, 25 bp, Artificial
  probe
  misc_feature (1)..(25): SEQ ID NO: 2637; WAN024FIY_at; Start 19; Stop 43
gaagcagcaaaagatgtcgcaacat

SEQ ID NO: 208223 - DNA, 25 bp, Artificial
  probe
  misc_feature (1)..(25): SEQ ID NO: 2637; WAN024FIY_at; Start 140; Stop 164
tacactggtatatgcgtggacgcgg

SEQ ID NO: 208224 - DNA, 25 bp, Artificial
  probe
  misc_feature (1)..(25): SEQ ID NO: 2637; WAN024FIY_at; Start 216; Stop 240
tcatttagatgaaatcagcgaacga

SEQ ID NO: 208225 - DNA, 25 bp, Artificial
  probe
  misc_feature (1)..(25): SEQ ID NO: 2637; WAN024FIY_at; Start 195; Stop 219
gtacatggatgctcttgatggtcat

SEQ ID NO: 208226 - DNA, 25 bp, Artificial
  probe
  misc_feature (1)..(25): SEQ ID NO: 2637; WAN024FIY_at; Start 457; Stop 481
gctgaacttgagaaaacagtttgga

SEQ ID NO: 208227 - DNA, 25 bp, Artificial
  probe
  misc_feature (1)..(25): SEQ ID NO: 2637; WAN024FIY_at; Start 239; Stop 263
gattgattacacttggaggtagccc

SEQ ID NO: 208228 - DNA, 25 bp, Artificial
  probe
  misc_feature (1)..(25): SEQ ID NO: 2637; WAN024FIY_at; Start 451; Stop 475
gctaaggctgaacttgagaaaacag

SEQ ID NO: 208229 - DNA, 25 bp, Artificial
  probe
  misc_feature (1)..(25): SEQ ID NO: 2637; WAN024FIY_at; Start 202; Stop 226
gatgctcttgatggtcatttagatg

SEQ ID NO: 208230 - DNA, 25 bp, Artificial
  probe
  misc_feature (1)..(25): SEQ ID NO: 2637; WAN024FIY_at; Start 143; Stop 167
actggtatatgcgtggacgcggttt

SEQ ID NO: 208231 - DNA, 25 bp, Artificial
  probe
  misc_feature (1)..(25): SEQ ID NO: 2637; WAN024FIY_at; Start 211; Stop 235
gatggtcatttagatgaaatcagcg

SEQ ID NO: 208232 - DNA, 25 bp, Artificial
  probe
  misc_feature (1)..(25): SEQ ID NO: 2637; WAN024FIY_at; Start 234; Stop 258
cgaacgattgattacacttggaggt

SEQ ID NO: 208233 - DNA, 25 bp, Artificial
  probe
  misc_feature (1)..(25): SEQ ID NO: 2637; WAN024FIY_at; Start 412; Stop 436
gaagaaggcgatgatgttacaaacg

SEQ ID NO: 208234 - DNA, 25 bp, Artificial
  probe
  misc_feature (1)..(25): SEQ ID NO: 2637; WAN024FIY_at; Start 246; Stop 270
tacacttggaggtagcccattctct

SEQ ID NO: 208235 - DNA, 25 bp, Artificial
  probe
  misc_feature (1)..(25): SEQ ID NO: 2637; WAN024FIY_at; Start 22; Stop 46
gcagcaaaagatgtcgcaacattaa

SEQ ID NO: 208236 - DNA, 25 bp, Artificial
  probe
  misc_feature (1)..(25): SEQ ID NO: 4960; WAN024FIZ_at; Start 188; Stop 212
gcaacagcttggttcaagacttcct

SEQ ID NO: 208237 - DNA, 25 bp, Artificial
  probe
  misc_feature (1)..(25): SEQ ID NO: 4960; WAN024FIZ_at; Start 183; Stop 207
aatcagcaacagcttggttcaagac

SEQ ID NO: 208238 - DNA, 25 bp, Artificial
  probe
  misc_feature (1)..(25): SEQ ID NO: 4960; WAN024FIZ_at; Start 25; Stop 49
gaatgggcttccaccgagtgtaatc

SEQ ID NO: 208239 - DNA, 25 bp, Artificial
  probe
  misc_feature (1)..(25): SEQ ID NO: 4960; WAN024FIZ_at; Start 193; Stop 217
agcttggttcaagacttcctttgtt

SEQ ID NO: 208240 - DNA, 25 bp, Artificial
  probe
  misc_feature (1)..(25): SEQ ID NO: 4960; WAN024FIZ_at; Start 91; Stop 115
catgtactcatccatttttggatgc

SEQ ID NO: 208241 - DNA, 25 bp, Artificial
  probe
  misc_feature (1)..(25): SEQ ID NO: 4960; WAN024FIZ_at; Start 124; Stop 148
gaaaccacgaccatgcatataccag

SEQ ID NO: 208242 - DNA, 25 bp, Artificial
  probe
  misc_feature (1)..(25): SEQ ID NO: 4960; WAN024FIZ_at; Start 246; Stop 270
tcaatgatgttacgtcttttactgc

SEQ ID NO: 208243 - DNA, 25 bp, Artificial
  probe
  misc_feature (1)..(25): SEQ ID NO: 4960; WAN024FIZ_at; Start 143; Stop 167
taccagtgcacttggtgcaaagcaa

SEQ ID NO: 208244 - DNA, 25 bp, Artificial
  probe
  misc_feature (1)..(25): SEQ ID NO: 4960; WAN024FIZ_at; Start 234; Stop 258
gcgctgcttttgtcaatgatgttac

SEQ ID NO: 208245 - DNA, 25 bp, Artificial
  probe
  misc_feature (1)..(25): SEQ ID NO: 4960; WAN024FIZ_at; Start 111; Stop 135
gatgccatacaaggaaaccacgacc

SEQ ID NO: 208246 - DNA, 25 bp, Artificial
  probe
  misc_feature (1)..(25): SEQ ID NO: 4960; WAN024FIZ_at; Start 138; Stop 162
gcatataccagtgcacttggtgcaa

SEQ ID NO: 208247 - DNA, 25 bp, Artificial
  probe
  misc_feature (1)..(25): SEQ ID NO: 4960; WAN024FIZ_at; Start 102; Stop 126
ccatttttggatgccatacaaggaa

SEQ ID NO: 208248 - DNA, 25 bp, Artificial
  probe
  misc_feature (1)..(25): SEQ ID NO: 4960; WAN024FIZ_at; Start 230; Stop 254
actggcgctgcttttgtcaatgatg

SEQ ID NO: 208249 - DNA, 25 bp, Artificial
  probe
  misc_feature (1)..(25): SEQ ID NO: 4960; WAN024FIZ_at; Start 251; Stop 275
gatgttacgtcttttactgcttctt

SEQ ID NO: 208250 - DNA, 25 bp, Artificial
  probe
  misc_feature (1)..(25): SEQ ID NO: 4960; WAN024FIZ_at; Start 77; Stop 101
ccgtcaagagcttccatgtactcat

SEQ ID NO: 208251 - DNA, 25 bp, Artificial
  probe
  misc_feature (1)..(25): SEQ ID NO: 4960; WAN024FIZ_at; Start 2; Stop 26
tgaaggaactctgtcaatgtagaga

SEQ ID NO: 208252 - DNA, 25 bp, Artificial
  probe
  misc_feature (1)..(25): SEQ ID NO: 4960; WAN024FIZ_at; Start 116; Stop 140
catacaaggaaaccacgaccatgca

SEQ ID NO: 208253 - DNA, 25 bp, Artificial
  probe
  misc_feature (1)..(25): SEQ ID NO: 4960; WAN024FIZ_at; Start 300; Stop 324
cctcattcattattttttgtaacca

SEQ ID NO: 208254 - DNA, 25 bp, Artificial
  probe
  misc_feature (1)..(25): SEQ ID NO: 4960; WAN024FIZ_at; Start 209; Stop 233
tcctttgtttttgccaatgctactg

SEQ ID NO: 208255 - DNA, 25 bp, Artificial
  probe
  misc_feature (1)..(25): SEQ ID NO: 4960; WAN024FIZ_at; Start 60; Stop 84
tgatttcatccaattgaccgtcaag

SEQ ID NO: 208256 - DNA, 25 bp, Artificial
  probe
  misc_feature (1)..(25): SEQ ID NO: 4960; WAN024FIZ_at; Start 15; Stop 39
tcaatgtagagaatgggcttccacc

SEQ ID NO: 208257 - DNA, 25 bp, Artificial
  probe
  misc_feature (1)..(25): SEQ ID NO: 4960; WAN024FIZ_at; Start 70; Stop 94
caattgaccgtcaagagcttccatg

SEQ ID NO: 208258 - DNA, 25 bp, Artificial
  probe
  misc_feature (1)..(25): SEQ ID NO: 4960; WAN024FIZ_at; Start 265; Stop 289
tactgcttcttttttcaattctacc

SEQ ID NO: 208259 - DNA, 25 bp, Artificial
  probe
  misc_feature (1)..(25): SEQ ID NO: 4960; WAN024FIZ_at; Start 225; Stop 249
atgctactggcgctgcttttgtcaa

SEQ ID NO: 208260 - DNA, 25 bp, Artificial
  probe
  misc_feature (1)..(25): SEQ ID NO: 4960; WAN024FIZ_at; Start 132; Stop 156
gaccatgcatataccagtgcacttg

SEQ ID NO: 208261 - DNA, 25 bp, Artificial
  probe
  misc_feature (1)..(25): SEQ ID NO: 4960; WAN024FIZ_at; Start 216; Stop 240
tttttgccaatgctactggcgctgc

SEQ ID NO: 208262 - DNA, 25 bp, Artificial
  probe
  misc_feature (1)..(25): SEQ ID NO: 4960; WAN024FIZ_at; Start 33; Stop 57
ttccaccgagtgtaatcaagcgttc

SEQ ID NO: 208263 - DNA, 25 bp, Artificial
  probe
  misc_feature (1)..(25): SEQ ID NO: 4960; WAN024FIZ_at; Start 156; Stop 180
ggtgcaaagcaacgtgagctacata

SEQ ID NO: 208264 - DNA, 25 bp, Artificial
  probe
  misc_feature (1)..(25): SEQ ID NO: 4960; WAN024FIZ_at; Start 175; Stop 199
tacatacaaatcagcaacagcttgg

SEQ ID NO: 208265 - DNA, 25 bp, Artificial
  probe
  misc_feature (1)..(25): SEQ ID NO: 4960; WAN024FIZ_at; Start 11; Stop 35
tctgtcaatgtagagaatgggcttc

SEQ ID NO: 208266 - DNA, 25 bp, Artificial
  probe
  misc_feature (1)..(25): SEQ ID NO: 4960; WAN024FIZ_at; Start 151; Stop 175
cacttggtgcaaagcaacgtgagct

SEQ ID NO: 208267 - DNA, 25 bp, Artificial
  probe
  misc_feature (1)..(25): SEQ ID NO: 4960; WAN024FIZ_at; Start 164; Stop 188
gcaacgtgagctacatacaaatcag

SEQ ID NO: 208268 - DNA, 25 bp, Artificial
  probe
  misc_feature (1)..(25): SEQ ID NO: 4960; WAN024FIZ_at; Start 21; Stop 45
tagagaatgggcttccaccgagtgt

SEQ ID NO: 208269 - DNA, 25 bp, Artificial
  probe
  misc_feature (1)..(25): SEQ ID NO: 4960; WAN024FIZ_at; Start 280; Stop 304
caattctaccattttctttacctca

SEQ ID NO: 208270 - DNA, 25 bp, Artificial
  probe
  misc_feature (1)..(25): SEQ ID NO: 1248; WAN024FJ2_at; Start 216; Stop 240
catggaagctcttgacggtcaattg

SEQ ID NO: 208271 - DNA, 25 bp, Artificial
  probe
  misc_feature (1)..(25): SEQ ID NO: 1248; WAN024FJ2_at; Start 166; Stop 190
tatatgcatggtcgtggtttccttg

SEQ ID NO: 208272 - DNA, 25 bp, Artificial
  probe
  misc_feature (1)..(25): SEQ ID NO: 1248; WAN024FJ2_at; Start 466; Stop 490
ggcgctaaaactgaaacagataaaa

SEQ ID NO: 208273 - DNA, 25 bp, Artificial
  probe
  misc_feature (1)..(25): SEQ ID NO: 1248; WAN024FJ2_at; Start 414; Stop 438
tttggatgtcactgatgaagaaggt

SEQ ID NO: 208274 - DNA, 25 bp, Artificial
  probe
  misc_feature (1)..(25): SEQ ID NO: 1248; WAN024FJ2_at; Start 2; Stop 26
tgaatgaggtaaagaaaatggtaga

SEQ ID NO: 208275 - DNA, 25 bp, Artificial
  probe
  misc_feature (1)..(25): SEQ ID NO: 1248; WAN024FJ2_at; Start 261; Stop 285
gattacactcggtggaagcccattc

SEQ ID NO: 208276 - DNA, 25 bp, Artificial
  probe
  misc_feature (1)..(25): SEQ ID NO: 1248; WAN024FJ2_at; Start 253; Stop 277
gaacgcttgattacactcggtggaa

SEQ ID NO: 208277 - DNA, 25 bp, Artificial
  probe
  misc_feature (1)..(25): SEQ ID NO: 1248; WAN024FJ2_at; Start 490; Stop 514
acaatttggatgcttgcagccgaac

SEQ ID NO: 208278 - DNA, 25 bp, Artificial
  probe
  misc_feature (1)..(25): SEQ ID NO: 1248; WAN024FJ2_at; Start 154; Stop 178
caagtgcactggtatatgcatggtc

SEQ ID NO: 208279 - DNA, 25 bp, Artificial
  probe
  misc_feature (1)..(25): SEQ ID NO: 1248; WAN024FJ2_at; Start 265; Stop 289
acactcggtggaagcccattctcta

SEQ ID NO: 208280 - DNA, 25 bp, Artificial
  probe
  misc_feature (1)..(25): SEQ ID NO: 1248; WAN024FJ2_at; Start 35; Stop 59
aagaagcagtaaaagacgtaacatc

SEQ ID NO: 208281 - DNA, 25 bp, Artificial
  probe
  misc_feature (1)..(25): SEQ ID NO: 1248; WAN024FJ2_at; Start 375; Stop 399
tgttatctaccgttacttgtcagaa

SEQ ID NO: 208282 - DNA, 25 bp, Artificial
  probe
  misc_feature (1)..(25): SEQ ID NO: 1248; WAN024FJ2_at; Start 225; Stop 249
tcttgacggtcaattggatgaaatc

SEQ ID NO: 208283 - DNA, 25 bp, Artificial
  probe
  misc_feature (1)..(25): SEQ ID NO: 1248; WAN024FJ2_at; Start 159; Stop 183
gcactggtatatgcatggtcgtggt

SEQ ID NO: 208284 - DNA, 25 bp, Artificial
  probe
  misc_feature (1)..(25): SEQ ID NO: 1248; WAN024FJ2_at; Start 487; Stop 511
aaaacaatttggatgcttgcagccg

SEQ ID NO: 208285 - DNA, 25 bp, Artificial
  probe
  misc_feature (1)..(25): SEQ ID NO: 1248; WAN024FJ2_at; Start 409; Stop 433
aaaggtttggatgtcactgatgaag

SEQ ID NO: 208286 - DNA, 25 bp, Artificial
  probe
  misc_feature (1)..(25): SEQ ID NO: 1248; WAN024FJ2_at; Start 355; Stop 379
gaaagcttggaacgtgttcttgtta

SEQ ID NO: 208287 - DNA, 25 bp, Artificial
  probe
  misc_feature (1)..(25): SEQ ID NO: 1248; WAN024FJ2_at; Start 493; Stop 517
atttggatgcttgcagccgaacttg

SEQ ID NO: 208288 - DNA, 25 bp, Artificial
  probe
  misc_feature (1)..(25): SEQ ID NO: 1248; WAN024FJ2_at; Start 362; Stop 386
tggaacgtgttcttgttatctaccg

SEQ ID NO: 208289 - DNA, 25 bp, Artificial
  probe
  misc_feature (1)..(25): SEQ ID NO: 1248; WAN024FJ2_at; Start 40; Stop 64
gcagtaaaagacgtaacatcattga

SEQ ID NO: 208290 - DNA, 25 bp, Artificial
  probe
  misc_feature (1)..(25): SEQ ID NO: 1248; WAN024FJ2_at; Start 213; Stop 237
gtacatggaagctcttgacggtcaa

SEQ ID NO: 208291 - DNA, 25 bp, Artificial
  probe
  misc_feature (1)..(25): SEQ ID NO: 1248; WAN024FJ2_at; Start 172; Stop 196
catggtcgtggtttccttgtatggc

SEQ ID NO: 208292 - DNA, 25 bp, Artificial
  probe
  misc_feature (1)..(25): SEQ ID NO: 1248; WAN024FJ2_at; Start 478; Stop 502
gaaacagataaaacaatttggatgc

SEQ ID NO: 208293 - DNA, 25 bp, Artificial
  probe
  misc_feature (1)..(25): SEQ ID NO: 1248; WAN024FJ2_at; Start 367; Stop 391
cgtgttcttgttatctaccgttact

SEQ ID NO: 208294 - DNA, 25 bp, Artificial
  probe
  misc_feature (1)..(25): SEQ ID NO: 1248; WAN024FJ2_at; Start 53; Stop 77
taacatcattgacaaaagcagcgcc

SEQ ID NO: 208295 - DNA, 25 bp, Artificial
  probe
  misc_feature (1)..(25): SEQ ID NO: 1248; WAN024FJ2_at; Start 6; Stop 30
tgaggtaaagaaaatggtagaattg

SEQ ID NO: 208296 - DNA, 25 bp, Artificial
  probe
  misc_feature (1)..(25): SEQ ID NO: 1248; WAN024FJ2_at; Start 405; Stop 429
ccaaaaaggtttggatgtcactgat

SEQ ID NO: 208297 - DNA, 25 bp, Artificial
  probe
  misc_feature (1)..(25): SEQ ID NO: 1248; WAN024FJ2_at; Start 54; Stop 78
aacatcattgacaaaagcagcgcca

SEQ ID NO: 208298 - DNA, 25 bp, Artificial
  probe
  misc_feature (1)..(25): SEQ ID NO: 1248; WAN024FJ2_at; Start 227; Stop 251
ttgacggtcaattggatgaaatcag

SEQ ID NO: 208299 - DNA, 25 bp, Artificial
  probe
  misc_feature (1)..(25): SEQ ID NO: 1248; WAN024FJ2_at; Start 180; Stop 204
tggtttccttgtatggcatccaaaa

SEQ ID NO: 208300 - DNA, 25 bp, Artificial
  probe
  misc_feature (1)..(25): SEQ ID NO: 1248; WAN024FJ2_at; Start 422; Stop 446
tcactgatgaagaaggtgacgatgt

SEQ ID NO: 208301 - DNA, 25 bp, Artificial
  probe
  misc_feature (1)..(25): SEQ ID NO: 1248; WAN024FJ2_at; Start 378; Stop 402
tatctaccgttacttgtcagaactt

SEQ ID NO: 208302 - DNA, 25 bp, Artificial
  probe
  misc_feature (1)..(25): SEQ ID NO: 1248; WAN024FJ2_at; Start 258; Stop 282
cttgattacactcggtggaagccca

SEQ ID NO: 208303 - DNA, 25 bp, Artificial
  probe
  misc_feature (1)..(25): SEQ ID NO: 1248; WAN024FJ2_at; Start 178; Stop 202
cgtggtttccttgtatggcatccaa

SEQ ID NO: 208304 - DNA, 25 bp, Artificial
  probe
  misc_feature (1)..(25): SEQ ID NO: 1257; WAN024FJ3_at; Start 523; Stop 547
ggctgcaagcatccaaattgtttta

SEQ ID NO: 208305 - DNA, 25 bp, Artificial
  probe
  misc_feature (1)..(25): SEQ ID NO: 1257; WAN024FJ3_at; Start 459; Stop 483
gaaatttcctacagatttatctatg

SEQ ID NO: 208306 - DNA, 25 bp, Artificial
  probe
  misc_feature (1)..(25): SEQ ID NO: 1257; WAN024FJ3_at; Start 235; Stop 259
caagatagcatgattcagagttgtt

SEQ ID NO: 208307 - DNA, 25 bp, Artificial
  probe
  misc_feature (1)..(25): SEQ ID NO: 1257; WAN024FJ3_at; Start 352; Stop 376
gattttcttagtcatgcttccatcc

SEQ ID NO: 208308 - DNA, 25 bp, Artificial
  probe
  misc_feature (1)..(25): SEQ ID NO: 1257; WAN024FJ3_at; Start 486; Stop 510
tccttatttcttacaaaccaggtgc

SEQ ID NO: 208309 - DNA, 25 bp, Artificial
  probe
  misc_feature (1)..(25): SEQ ID NO: 1257; WAN024FJ3_at; Start 587; Stop 611
acatcgtcaccttcttcatcagtga

SEQ ID NO: 208310 - DNA, 25 bp, Artificial
  probe
  misc_feature (1)..(25): SEQ ID NO: 1257; WAN024FJ3_at; Start 250; Stop 274
cagagttgtttctttaaagtgctgc

SEQ ID NO: 208311 - DNA, 25 bp, Artificial
  probe
  misc_feature (1)..(25): SEQ ID NO: 1257; WAN024FJ3_at; Start 274; Stop 298
caattctgctggcaaatgccaaggc

SEQ ID NO: 208312 - DNA, 25 bp, Artificial
  probe
  misc_feature (1)..(25): SEQ ID NO: 1257; WAN024FJ3_at; Start 47; Stop 71
tgaaaaatttgcttcccaccgataa

SEQ ID NO: 208313 - DNA, 25 bp, Artificial
  probe
  misc_feature (1)..(25): SEQ ID NO: 1257; WAN024FJ3_at; Start 415; Stop 439
aaagactggtttggaatagcttaca

SEQ ID NO: 208314 - DNA, 25 bp, Artificial
  probe
  misc_feature (1)..(25): SEQ ID NO: 1257; WAN024FJ3_at; Start 296; Stop 320
ggcagacgattttccttaccaatca

SEQ ID NO: 208315 - DNA, 25 bp, Artificial
  probe
  misc_feature (1)..(25): SEQ ID NO: 1257; WAN024FJ3_at; Start 187; Stop 211
ttttggaagcaagcgacgccccatc

SEQ ID NO: 208316 - DNA, 25 bp, Artificial
  probe
  misc_feature (1)..(25): SEQ ID NO: 1257; WAN024FJ3_at; Start 287; Stop 311
aaatgccaaggcagacgattttcct

SEQ ID NO: 208317 - DNA, 25 bp, Artificial
  probe
  misc_feature (1)..(25): SEQ ID NO: 1257; WAN024FJ3_at; Start 603; Stop 627
catcagtgacatccaaacctttttg

SEQ ID NO: 208318 - DNA, 25 bp, Artificial
  probe
  misc_feature (1)..(25): SEQ ID NO: 1257; WAN024FJ3_at; Start 143; Stop 167
tctatcttttcttccggattacgcg

SEQ ID NO: 208319 - DNA, 25 bp, Artificial
  probe
  misc_feature (1)..(25): SEQ ID NO: 1257; WAN024FJ3_at; Start 543; Stop 567
ttttatctgtttcagttttagcgcc

SEQ ID NO: 208320 - DNA, 25 bp, Artificial
  probe
  misc_feature (1)..(25): SEQ ID NO: 1257; WAN024FJ3_at; Start 101; Stop 125
cagtcaagaacagactggacgtcct

SEQ ID NO: 208321 - DNA, 25 bp, Artificial
  probe
  misc_feature (1)..(25): SEQ ID NO: 1257; WAN024FJ3_at; Start 264; Stop 288
taaagtgctgcaattctgctggcaa

SEQ ID NO: 208322 - DNA, 25 bp, Artificial
  probe
  misc_feature (1)..(25): SEQ ID NO: 1257; WAN024FJ3_at; Start 228; Stop 252
gccccatcaagatagcatgattcag

SEQ ID NO: 208323 - DNA, 25 bp, Artificial
  probe
  misc_feature (1)..(25): SEQ ID NO: 1257; WAN024FJ3_at; Start 61; Stop 85
cccaccgataatgtagagattcttt

SEQ ID NO: 208324 - DNA, 25 bp, Artificial
  probe
  misc_feature (1)..(25): SEQ ID NO: 1257; WAN024FJ3_at; Start 125; Stop 149
tgaaaagtagcaaccccatctatct

SEQ ID NO: 208325 - DNA, 25 bp, Artificial
  probe
  misc_feature (1)..(25): SEQ ID NO: 1257; WAN024FJ3_at; Start 338; Stop 362
gcccaaatagctacgattttcttag

SEQ ID NO: 208326 - DNA, 25 bp, Artificial
  probe
  misc_feature (1)..(25): SEQ ID NO: 1257; WAN024FJ3_at; Start 214; Stop 238
atcaaaggtcacacgccccatcaag

SEQ ID NO: 208327 - DNA, 25 bp, Artificial
  probe
  misc_feature (1)..(25): SEQ ID NO: 1257; WAN024FJ3_at; Start 367; Stop 391
gcttccatccttttcactgatagta

SEQ ID NO: 208328 - DNA, 25 bp, Artificial
  probe
  misc_feature (1)..(25): SEQ ID NO: 1257; WAN024FJ3_at; Start 329; Stop 353
tcatcctgggcccaaatagctacga

SEQ ID NO: 208329 - DNA, 25 bp, Artificial
  probe
  misc_feature (1)..(25): SEQ ID NO: 1257; WAN024FJ3_at; Start 3; Stop 27
gaatgtgagtgacaatcacttcatc

SEQ ID NO: 208330 - DNA, 25 bp, Artificial
  probe
  misc_feature (1)..(25): SEQ ID NO: 1257; WAN024FJ3_at; Start 152; Stop 176
tcttccggattacgcgtcaaaatca

SEQ ID NO: 208331 - DNA, 25 bp, Artificial
  probe
  misc_feature (1)..(25): SEQ ID NO: 1257; WAN024FJ3_at; Start 422; Stop 446
ggtttggaatagcttacaaaataga

SEQ ID NO: 208332 - DNA, 25 bp, Artificial
  probe
  misc_feature (1)..(25): SEQ ID NO: 1257; WAN024FJ3_at; Start 182; Stop 206
tcccgttttggaagcaagcgacgcc

SEQ ID NO: 208333 - DNA, 25 bp, Artificial
  probe
  misc_feature (1)..(25): SEQ ID NO: 1257; WAN024FJ3_at; Start 116; Stop 140
tggacgtcctgaaaagtagcaaccc

SEQ ID NO: 208334 - DNA, 25 bp, Artificial
  probe
  misc_feature (1)..(25): SEQ ID NO: 1257; WAN024FJ3_at; Start 38; Stop 62
tcaaaagcctgaaaaatttgcttcc

SEQ ID NO: 208335 - DNA, 25 bp, Artificial
  probe
  misc_feature (1)..(25): SEQ ID NO: 1257; WAN024FJ3_at; Start 514; Stop 538
tccaagttcggctgcaagcatccaa

SEQ ID NO: 208336 - DNA, 25 bp, Artificial
  probe
  misc_feature (1)..(25): SEQ ID NO: 1257; WAN024FJ3_at; Start 11; Stop 35
gtgacaatcacttcatcaaggtaag

SEQ ID NO: 208337 - DNA, 25 bp, Artificial
  probe
  misc_feature (1)..(25): SEQ ID NO: 1257; WAN024FJ3_at; Start 499; Stop 523
caaaccaggtgcttgtccaagttcg

SEQ ID NO: 208338 - DNA, 25 bp, Artificial
  probe
  misc_feature (1)..(25): SEQ ID NO: 5029; WAN024FJ4_at; Start 354; Stop 378
cataaccagcctccgtcagagctgt

SEQ ID NO: 208339 - DNA, 25 bp, Artificial
  probe
  misc_feature (1)..(25): SEQ ID NO: 5029; WAN024FJ4_at; Start 196; Stop 220
cccttcaccagaaacatcacgtgtg

SEQ ID NO: 208340 - DNA, 25 bp, Artificial
  probe
  misc_feature (1)..(25): SEQ ID NO: 5029; WAN024FJ4_at; Start 244; Stop 268
ggcaatcttgtcaatttcatccaca

SEQ ID NO: 208341 - DNA, 25 bp, Artificial
  probe
  misc_feature (1)..(25): SEQ ID NO: 5029; WAN024FJ4_at; Start 287; Stop 311
gcacgttcgatgttaaagtcagcaa

SEQ ID NO: 208342 - DNA, 25 bp, Artificial
  probe
  misc_feature (1)..(25): SEQ ID NO: 5029; WAN024FJ4_at; Start 369; Stop 393
tcagagctgtcgcatccgcaatagc

SEQ ID NO: 208343 - DNA, 25 bp, Artificial
  probe
  misc_feature (1)..(25): SEQ ID NO: 5029; WAN024FJ4_at; Start 375; Stop 399
ctgtcgcatccgcaatagcaaaagg

SEQ ID NO: 208344 - DNA, 25 bp, Artificial
  probe
  misc_feature (1)..(25): SEQ ID NO: 5029; WAN024FJ4_at; Start 183; Stop 207
gggcttgttgcaccccttcaccaga

SEQ ID NO: 208345 - DNA, 25 bp, Artificial
  probe
  misc_feature (1)..(25): SEQ ID NO: 5029; WAN024FJ4_at; Start 85; Stop 109
gatattttttgtatccacttgaatc

SEQ ID NO: 208346 - DNA, 25 bp, Artificial
  probe
  misc_feature (1)..(25): SEQ ID NO: 5029; WAN024FJ4_at; Start 3; Stop 27
gaccaaatccgatgactttttcacc

SEQ ID NO: 208347 - DNA, 25 bp, Artificial
  probe
  misc_feature (1)..(25): SEQ ID NO: 5029; WAN024FJ4_at; Start 40; Stop 64
gacaatttcttcaataccatcaaaa

SEQ ID NO: 208348 - DNA, 25 bp, Artificial
  probe
  misc_feature (1)..(25): SEQ ID NO: 5029; WAN024FJ4_at; Start 423; Stop 447
tctgggcaaggaaagttttccctga

SEQ ID NO: 208349 - DNA, 25 bp, Artificial
  probe
  misc_feature (1)..(25): SEQ ID NO: 5029; WAN024FJ4_at; Start 259; Stop 283
ttcatccacatagataatgccacgc

SEQ ID NO: 208350 - DNA, 25 bp, Artificial
  probe
  misc_feature (1)..(25): SEQ ID NO: 5029; WAN024FJ4_at; Start 62; Stop 86
aaagcaccacccacgatgaagagga

SEQ ID NO: 208351 - DNA, 25 bp, Artificial
  probe
  misc_feature (1)..(25): SEQ ID NO: 5029; WAN024FJ4_at; Start 224; Stop 248
gacacattctcactcttcttggcaa

SEQ ID NO: 208352 - DNA, 25 bp, Artificial
  probe
  misc_feature (1)..(25): SEQ ID NO: 5029; WAN024FJ4_at; Start 171; Stop 195
taatcttgagaagggcttgttgcac

SEQ ID NO: 208353 - DNA, 25 bp, Artificial
  probe
  misc_feature (1)..(25): SEQ ID NO: 5029; WAN024FJ4_at; Start 318; Stop 342
agagtttgaggaggatattttccac

SEQ ID NO: 208354 - DNA, 25 bp, Artificial
  probe
  misc_feature (1)..(25): SEQ ID NO: 5029; WAN024FJ4_at; Start 24; Stop 48
cacccagacgttgtttgacaatttc

SEQ ID NO: 208355 - DNA, 25 bp, Artificial
  probe
  misc_feature (1)..(25): SEQ ID NO: 5029; WAN024FJ4_at; Start 230; Stop 254
ttctcactcttcttggcaatcttgt

SEQ ID NO: 208356 - DNA, 25 bp, Artificial
  probe
  misc_feature (1)..(25): SEQ ID NO: 5029; WAN024FJ4_at; Start 71; Stop 95
cccacgatgaagaggatattttttg

SEQ ID NO: 208357 - DNA, 25 bp, Artificial
  probe
  misc_feature (1)..(25): SEQ ID NO: 5029; WAN024FJ4_at; Start 125; Stop 149
tgtttgcgtccaccttgaggcggta

SEQ ID NO: 208358 - DNA, 25 bp, Artificial
  probe
  misc_feature (1)..(25): SEQ ID NO: 5029; WAN024FJ4_at; Start 406; Stop 430
caagctcttagccaaggtctgggca

SEQ ID NO: 208359 - DNA, 25 bp, Artificial
  probe
  misc_feature (1)..(25): SEQ ID NO: 5029; WAN024FJ4_at; Start 269; Stop 293
tagataatgccacgctctgcacgtt

SEQ ID NO: 208360 - DNA, 25 bp, Artificial
  probe
  misc_feature (1)..(25): SEQ ID NO: 5029; WAN024FJ4_at; Start 47; Stop 71
tcttcaataccatcaaaagcaccac

SEQ ID NO: 208361 - DNA, 25 bp, Artificial
  probe
  misc_feature (1)..(25): SEQ ID NO: 5029; WAN024FJ4_at; Start 305; Stop 329
tcagcaacctgcaagagtttgagga

SEQ ID NO: 208362 - DNA, 25 bp, Artificial
  probe
  misc_feature (1)..(25): SEQ ID NO: 5029; WAN024FJ4_at; Start 111; Stop 135
tctcttgttgtggatgtttgcgtcc

SEQ ID NO: 208363 - DNA, 25 bp, Artificial
  probe
  misc_feature (1)..(25): SEQ ID NO: 5029; WAN024FJ4_at; Start 414; Stop 438
tagccaaggtctgggcaaggaaagt

SEQ ID NO: 208364 - DNA, 25 bp, Artificial
  probe
  misc_feature (1)..(25): SEQ ID NO: 5029; WAN024FJ4_at; Start 100; Stop 124
cacttgaatcatctcttgttgtgga

SEQ ID NO: 208365 - DNA, 25 bp, Artificial
  probe
  misc_feature (1)..(25): SEQ ID NO: 5029; WAN024FJ4_at; Start 135; Stop 159
caccttgaggcggtacgctagcaac

SEQ ID NO: 208366 - DNA, 25 bp, Artificial
  probe
  misc_feature (1)..(25): SEQ ID NO: 5029; WAN024FJ4_at; Start 210; Stop 234
catcacgtgtgatagacacattctc

SEQ ID NO: 208367 - DNA, 25 bp, Artificial
  probe
  misc_feature (1)..(25): SEQ ID NO: 5029; WAN024FJ4_at; Start 297; Stop 321
tgttaaagtcagcaacctgcaagag

SEQ ID NO: 208368 - DNA, 25 bp, Artificial
  probe
  misc_feature (1)..(25): SEQ ID NO: 5029; WAN024FJ4_at; Start 279; Stop 303
cacgctctgcacgttcgatgttaaa

SEQ ID NO: 208369 - DNA, 25 bp, Artificial
  probe
  misc_feature (1)..(25): SEQ ID NO: 5029; WAN024FJ4_at; Start 143; Stop 167
ggcggtacgctagcaacagttccct

SEQ ID NO: 208370 - DNA, 25 bp, Artificial
  probe
  misc_feature (1)..(25): SEQ ID NO: 5029; WAN024FJ4_at; Start 13; Stop 37
gatgactttttcacccagacgttgt

SEQ ID NO: 208371 - DNA, 25 bp, Artificial
  probe
  misc_feature (1)..(25): SEQ ID NO: 5029; WAN024FJ4_at; Start 402; Stop 426
cattcaagctcttagccaaggtctg

SEQ ID NO: 208372 - DNA, 25 bp, Artificial
  probe
  misc_feature (1)..(25): SEQ ID NO: 2453; WAN024FJ5_at; Start 126; Stop 150
ccgcagactttttagaatgacggga

SEQ ID NO: 208373 - DNA, 25 bp, Artificial
  probe
  misc_feature (1)..(25): SEQ ID NO: 2453; WAN024FJ5_at; Start 13; Stop 37
acattacgaagatcacctggcggtg

SEQ ID NO: 208374 - DNA, 25 bp, Artificial
  probe
  misc_feature (1)..(25): SEQ ID NO: 2453; WAN024FJ5_at; Start 46; Stop 70
tgcatattttttcggagttcacctg

SEQ ID NO: 208375 - DNA, 25 bp, Artificial
  probe
  misc_feature (1)..(25): SEQ ID NO: 2453; WAN024FJ5_at; Start 64; Stop 88
tcacctgaagaaccaccatcatctg

SEQ ID NO: 208376 - DNA, 25 bp, Artificial
  probe
  misc_feature (1)..(25): SEQ ID NO: 2453; WAN024FJ5_at; Start 50; Stop 74
tattttttcggagttcacctgaaga

SEQ ID NO: 208377 - DNA, 25 bp, Artificial
  probe
  misc_feature (1)..(25): SEQ ID NO: 2453; WAN024FJ5_at; Start 8; Stop 32
caaggacattacgaagatcacctgg

SEQ ID NO: 208378 - DNA, 25 bp, Artificial
  probe
  misc_feature (1)..(25): SEQ ID NO: 2453; WAN024FJ5_at; Start 91; Stop 115
accgtcacgatagctgcgatttcca

SEQ ID NO: 208379 - DNA, 25 bp, Artificial
  probe
  misc_feature (1)..(25): SEQ ID NO: 2453; WAN024FJ5_at; Start 16; Stop 40
ttacgaagatcacctggcggtgtca

SEQ ID NO: 208380 - DNA, 25 bp, Artificial
  probe
  misc_feature (1)..(25): SEQ ID NO: 2453; WAN024FJ5_at; Start 215; Stop 239
tctgcggtctttgtcgcgatgccct

SEQ ID NO: 208381 - DNA, 25 bp, Artificial
  probe
  misc_feature (1)..(25): SEQ ID NO: 2453; WAN024FJ5_at; Start 11; Stop 35
ggacattacgaagatcacctggcgg

SEQ ID NO: 208382 - DNA, 25 bp, Artificial
  probe
  misc_feature (1)..(25): SEQ ID NO: 2453; WAN024FJ5_at; Start 23; Stop 47
gatcacctggcggtgtcaactgttg

SEQ ID NO: 208383 - DNA, 25 bp, Artificial
  probe
  misc_feature (1)..(25): SEQ ID NO: 2453; WAN024FJ5_at; Start 210; Stop 234
tcctttctgcggtctttgtcgcgat

SEQ ID NO: 208384 - DNA, 25 bp, Artificial
  probe
  misc_feature (1)..(25): SEQ ID NO: 2453; WAN024FJ5_at; Start 98; Stop 122
cgatagctgcgatttccacatcttt

SEQ ID NO: 208385 - DNA, 25 bp, Artificial
  probe
  misc_feature (1)..(25): SEQ ID NO: 2453; WAN024FJ5_at; Start 26; Stop 50
cacctggcggtgtcaactgttgcat

SEQ ID NO: 208386 - DNA, 25 bp, Artificial
  probe
  misc_feature (1)..(25): SEQ ID NO: 2453; WAN024FJ5_at; Start 28; Stop 52
cctggcggtgtcaactgttgcatat

SEQ ID NO: 208387 - DNA, 25 bp, Artificial
  probe
  misc_feature (1)..(25): SEQ ID NO: 2453; WAN024FJ5_at; Start 85; Stop 109
tctgccaccgtcacgatagctgcga

SEQ ID NO: 208388 - DNA, 25 bp, Artificial
  probe
  misc_feature (1)..(25): SEQ ID NO: 2453; WAN024FJ5_at; Start 59; Stop 83
ggagttcacctgaagaaccaccatc

SEQ ID NO: 208389 - DNA, 25 bp, Artificial
  probe
  misc_feature (1)..(25): SEQ ID NO: 2453; WAN024FJ5_at; Start 54; Stop 78
ttttcggagttcacctgaagaacca

SEQ ID NO: 208390 - DNA, 25 bp, Artificial
  probe
  misc_feature (1)..(25): SEQ ID NO: 2453; WAN024FJ5_at; Start 222; Stop 246
tctttgtcgcgatgcccttcattaa

SEQ ID NO: 208391 - DNA, 25 bp, Artificial
  probe
  misc_feature (1)..(25): SEQ ID NO: 2453; WAN024FJ5_at; Start 56; Stop 80
ttcggagttcacctgaagaaccacc

SEQ ID NO: 208392 - DNA, 25 bp, Artificial
  probe
  misc_feature (1)..(25): SEQ ID NO: 2453; WAN024FJ5_at; Start 4; Stop 28
gccacaaggacattacgaagatcac

SEQ ID NO: 208393 - DNA, 25 bp, Artificial
  probe
  misc_feature (1)..(25): SEQ ID NO: 2453; WAN024FJ5_at; Start 161; Stop 185
ctccaccaatcaccgttatctttgg

SEQ ID NO: 208394 - DNA, 25 bp, Artificial
  probe
  misc_feature (1)..(25): SEQ ID NO: 2453; WAN024FJ5_at; Start 220; Stop 244
ggtctttgtcgcgatgcccttcatt

SEQ ID NO: 208395 - DNA, 25 bp, Artificial
  probe
  misc_feature (1)..(25): SEQ ID NO: 2453; WAN024FJ5_at; Start 19; Stop 43
cgaagatcacctggcggtgtcaact

SEQ ID NO: 208396 - DNA, 25 bp, Artificial
  probe
  misc_feature (1)..(25): SEQ ID NO: 2453; WAN024FJ5_at; Start 71; Stop 95
aagaaccaccatcatctgccaccgt

SEQ ID NO: 208397 - DNA, 25 bp, Artificial
  probe
  misc_feature (1)..(25): SEQ ID NO: 2453; WAN024FJ5_at; Start 2; Stop 26
tggccacaaggacattacgaagatc

SEQ ID NO: 208398 - DNA, 25 bp, Artificial
  probe
  misc_feature (1)..(25): SEQ ID NO: 2453; WAN024FJ5_at; Start 38; Stop 62
tcaactgttgcatattttttcggag

SEQ ID NO: 208399 - DNA, 25 bp, Artificial
  probe
  misc_feature (1)..(25): SEQ ID NO: 2453; WAN024FJ5_at; Start 88; Stop 112
gccaccgtcacgatagctgcgattt

SEQ ID NO: 208400 - DNA, 25 bp, Artificial
  probe
  misc_feature (1)..(25): SEQ ID NO: 2453; WAN024FJ5_at; Start 123; Stop 147
ttcccgcagactttttagaatgacg

SEQ ID NO: 208401 - DNA, 25 bp, Artificial
  probe
  misc_feature (1)..(25): SEQ ID NO: 2453; WAN024FJ5_at; Start 177; Stop 201
tatctttggttttctcatgaacggt

SEQ ID NO: 208402 - DNA, 25 bp, Artificial
  probe
  misc_feature (1)..(25): SEQ ID NO: 2453; WAN024FJ5_at; Start 171; Stop 195
caccgttatctttggttttctcatg

SEQ ID NO: 208403 - DNA, 25 bp, Artificial
  probe
  misc_feature (1)..(25): SEQ ID NO: 2453; WAN024FJ5_at; Start 206; Stop 230
cgtttcctttctgcggtctttgtcg

SEQ ID NO: 208404 - DNA, 25 bp, Artificial
  probe
  misc_feature (1)..(25): SEQ ID NO: 2453; WAN024FJ5_at; Start 94; Stop 118
gtcacgatagctgcgatttccacat

SEQ ID NO: 208405 - DNA, 25 bp, Artificial
  probe
  misc_feature (1)..(25): SEQ ID NO: 2453; WAN024FJ5_at; Start 108; Stop 132
gatttccacatctttttcccgcaga

SEQ ID NO: 208406 - DNA, 25 bp, Artificial
  probe
  misc_feature (1)..(25): SEQ ID NO: 1987; WAN024FJ6_at; Start 146; Stop 170
tagatgaaatcacgcgcgaaacttg

SEQ ID NO: 208407 - DNA, 25 bp, Artificial
  probe
  misc_feature (1)..(25): SEQ ID NO: 1987; WAN024FJ6_at; Start 340; Stop 364
tccgtctccccacgttgggtcatga

SEQ ID NO: 208408 - DNA, 25 bp, Artificial
  probe
  misc_feature (1)..(25): SEQ ID NO: 1987; WAN024FJ6_at; Start 418; Stop 442
tccttaatcacgatattgggcaaaa

SEQ ID NO: 208409 - DNA, 25 bp, Artificial
  probe
  misc_feature (1)..(25): SEQ ID NO: 1987; WAN024FJ6_at; Start 245; Stop 269
gaggcactttttcaatattcaccaa

SEQ ID NO: 208410 - DNA, 25 bp, Artificial
  probe
  misc_feature (1)..(25): SEQ ID NO: 1987; WAN024FJ6_at; Start 85; Stop 109
aactcgtccacaatcaaatctccat

SEQ ID NO: 208411 - DNA, 25 bp, Artificial
  probe
  misc_feature (1)..(25): SEQ ID NO: 1987; WAN024FJ6_at; Start 326; Stop 350
tatctgtaaagtgttccgtctcccc

SEQ ID NO: 208412 - DNA, 25 bp, Artificial
  probe
  misc_feature (1)..(25): SEQ ID NO: 1987; WAN024FJ6_at; Start 123; Stop 147
gccattttccagacgaaggaagtta

SEQ ID NO: 208413 - DNA, 25 bp, Artificial
  probe
  misc_feature (1)..(25): SEQ ID NO: 1987; WAN024FJ6_at; Start 278; Stop 302
cgataaaagggcgaccaaggtgacg

SEQ ID NO: 208414 - DNA, 25 bp, Artificial
  probe
  misc_feature (1)..(25): SEQ ID NO: 1987; WAN024FJ6_at; Start 378; Stop 402
ggcaatttctgccttggtttccaaa

SEQ ID NO: 208415 - DNA, 25 bp, Artificial
  probe
  misc_feature (1)..(25): SEQ ID NO: 1987; WAN024FJ6_at; Start 432; Stop 456
attgggcaaaatagaggtaaagagg

SEQ ID NO: 208416 - DNA, 25 bp, Artificial
  probe
  misc_feature (1)..(25): SEQ ID NO: 1987; WAN024FJ6_at; Start 131; Stop 155
ccagacgaaggaagttagatgaaat

SEQ ID NO: 208417 - DNA, 25 bp, Artificial
  probe
  misc_feature (1)..(25): SEQ ID NO: 1987; WAN024FJ6_at; Start 365; Stop 389
tattgcagacataggcaatttctgc

SEQ ID NO: 208418 - DNA, 25 bp, Artificial
  probe
  misc_feature (1)..(25): SEQ ID NO: 1987; WAN024FJ6_at; Start 347; Stop 371
ccccacgttgggtcatgatattgca

SEQ ID NO: 208419 - DNA, 25 bp, Artificial
  probe
  misc_feature (1)..(25): SEQ ID NO: 1987; WAN024FJ6_at; Start 100; Stop 124
aaatctccatcgtggaaggcaccgc

SEQ ID NO: 208420 - DNA, 25 bp, Artificial
  probe
  misc_feature (1)..(25): SEQ ID NO: 1987; WAN024FJ6_at; Start 52; Stop 76
gaaactcattttttcacctgtataa

SEQ ID NO: 208421 - DNA, 25 bp, Artificial
  probe
  misc_feature (1)..(25): SEQ ID NO: 1987; WAN024FJ6_at; Start 5; Stop 29
cagctcagatggtgttggcccagga

SEQ ID NO: 208422 - DNA, 25 bp, Artificial
  probe
  misc_feature (1)..(25): SEQ ID NO: 1987; WAN024FJ6_at; Start 20; Stop 44
tggcccaggatttcttcttttactg

SEQ ID NO: 208423 - DNA, 25 bp, Artificial
  probe
  misc_feature (1)..(25): SEQ ID NO: 1987; WAN024FJ6_at; Start 403; Stop 427
agagcccgcccaatttccttaatca

SEQ ID NO: 208424 - DNA, 25 bp, Artificial
  probe
  misc_feature (1)..(25): SEQ ID NO: 1987; WAN024FJ6_at; Start 35; Stop 59
tcttttactgctactgtgaaactca

SEQ ID NO: 208425 - DNA, 25 bp, Artificial
  probe
  misc_feature (1)..(25): SEQ ID NO: 1987; WAN024FJ6_at; Start 266; Stop 290
ccaagacagtgtcgataaaagggcg

SEQ ID NO: 208426 - DNA, 25 bp, Artificial
  probe
  misc_feature (1)..(25): SEQ ID NO: 1987; WAN024FJ6_at; Start 292; Stop 316
ccaaggtgacgatgcaagacttcca

SEQ ID NO: 208427 - DNA, 25 bp, Artificial
  probe
  misc_feature (1)..(25): SEQ ID NO: 1987; WAN024FJ6_at; Start 255; Stop 279
ttcaatattcaccaagacagtgtcg

SEQ ID NO: 208428 - DNA, 25 bp, Artificial
  probe
  misc_feature (1)..(25): SEQ ID NO: 1987; WAN024FJ6_at; Start 313; Stop 337
tccacgtggttgctatctgtaaagt

SEQ ID NO: 208429 - DNA, 25 bp, Artificial
  probe
  misc_feature (1)..(25): SEQ ID NO: 1987; WAN024FJ6_at; Start 387; Stop 411
tgccttggtttccaaaagagcccgc

SEQ ID NO: 208430 - DNA, 25 bp, Artificial
  probe
  misc_feature (1)..(25): SEQ ID NO: 1987; WAN024FJ6_at; Start 229; Stop 253
gaattcatgtattcctgaggcactt

SEQ ID NO: 208431 - DNA, 25 bp, Artificial
  probe
  misc_feature (1)..(25): SEQ ID NO: 1987; WAN024FJ6_at; Start 214; Stop 238
tcatcaaaacggttggaattcatgt

SEQ ID NO: 208432 - DNA, 25 bp, Artificial
  probe
  misc_feature (1)..(25): SEQ ID NO: 1987; WAN024FJ6_at; Start 357; Stop 381
ggtcatgatattgcagacataggca

SEQ ID NO: 208433 - DNA, 25 bp, Artificial
  probe
  misc_feature (1)..(25): SEQ ID NO: 1987; WAN024FJ6_at; Start 179; Stop 203
gacctacaaaatcgtgttccacttg

SEQ ID NO: 208434 - DNA, 25 bp, Artificial
  probe
  misc_feature (1)..(25): SEQ ID NO: 1987; WAN024FJ6_at; Start 62; Stop 86
ttttcacctgtataatgcgcatcaa

SEQ ID NO: 208435 - DNA, 25 bp, Artificial
  probe
  misc_feature (1)..(25): SEQ ID NO: 1987; WAN024FJ6_at; Start 72; Stop 96
tataatgcgcatcaactcgtccaca

SEQ ID NO: 208436 - DNA, 25 bp, Artificial
  probe
  misc_feature (1)..(25): SEQ ID NO: 1987; WAN024FJ6_at; Start 301; Stop 325
cgatgcaagacttccacgtggttgc

SEQ ID NO: 208437 - DNA, 25 bp, Artificial
  probe
  misc_feature (1)..(25): SEQ ID NO: 1987; WAN024FJ6_at; Start 115; Stop 139
aaggcaccgccattttccagacgaa

SEQ ID NO: 208438 - DNA, 25 bp, Artificial
  probe
  misc_feature (1)..(25): SEQ ID NO: 1987; WAN024FJ6_at; Start 170; Stop 194
gcttacaaagacctacaaaatcgtg

SEQ ID NO: 208439 - DNA, 25 bp, Artificial
  probe
  misc_feature (1)..(25): SEQ ID NO: 1987; WAN024FJ6_at; Start 155; Stop 179
tcacgcgcgaaacttgcttacaaag

SEQ ID NO: 208440 - DNA, 25 bp, Artificial
  probe
  misc_feature (1)..(25): SEQ ID NO: 1316; WAN024FJ7_at; Start 310; Stop 334
tacaaggaaaccagacggagtcacc

SEQ ID NO: 208441 - DNA, 25 bp, Artificial
  probe
  misc_feature (1)..(25): SEQ ID NO: 1316; WAN024FJ7_at; Start 376; Stop 400
gaacgtgaactcttggcacctttga

SEQ ID NO: 208442 - DNA, 25 bp, Artificial
  probe
  misc_feature (1)..(25): SEQ ID NO: 1316; WAN024FJ7_at; Start 412; Stop 436
caaaatgtggtggatacgactgaac

SEQ ID NO: 208443 - DNA, 25 bp, Artificial
  probe
  misc_feature (1)..(25): SEQ ID NO: 1316; WAN024FJ7_at; Start 46; Stop 70
ggcgcagggaaaactgtagccattc

SEQ ID NO: 208444 - DNA, 25 bp, Artificial
  probe
  misc_feature (1)..(25): SEQ ID NO: 1316; WAN024FJ7_at; Start 535; Stop 559
tatggaatcccgattgatgcggact

SEQ ID NO: 208445 - DNA, 25 bp, Artificial
  probe
  misc_feature (1)..(25): SEQ ID NO: 1316; WAN024FJ7_at; Start 496; Stop 520
cagtctttccgtatcgaagtcatgt

SEQ ID NO: 208446 - DNA, 25 bp, Artificial
  probe
  misc_feature (1)..(25): SEQ ID NO: 1316; WAN024FJ7_at; Start 95; Stop 119
tcaccattgataatatgccgccagc

SEQ ID NO: 208447 - DNA, 25 bp, Artificial
  probe
  misc_feature (1)..(25): SEQ ID NO: 1316; WAN024FJ7_at; Start 75; Stop 99
cttcgaggatctaggttatttcacc

SEQ ID NO: 208448 - DNA, 25 bp, Artificial
  probe
  misc_feature (1)..(25): SEQ ID NO: 1316; WAN024FJ7_at; Start 172; Stop 196
ttggccttggtagtggatatgcgta

SEQ ID NO: 208449 - DNA, 25 bp, Artificial
  probe
  misc_feature (1)..(25): SEQ ID NO: 1316; WAN024FJ7_at; Start 568; Stop 592
gatgtccgtttcttgccaaatccct

SEQ ID NO: 208450 - DNA, 25 bp, Artificial
  probe
  misc_feature (1)..(25): SEQ ID NO: 1316; WAN024FJ7_at; Start 685; Stop 709
catttattggccttgattgagccga

SEQ ID NO: 208451 - DNA, 25 bp, Artificial
  probe
  misc_feature (1)..(25): SEQ ID NO: 1316; WAN024FJ7_at; Start 60; Stop 84
tgtagccattcagtccttcgaggat

SEQ ID NO: 208452 - DNA, 25 bp, Artificial
  probe
  misc_feature (1)..(25): SEQ ID NO: 1316; WAN024FJ7_at; Start 646; Stop 670
tatgtcatgaaccatcctgagtcag

SEQ ID NO: 208453 - DNA, 25 bp, Artificial
  probe
  misc_feature (1)..(25): SEQ ID NO: 1316; WAN024FJ7_at; Start 466; Stop 490
gcagagcagttttcagaccaagaac

SEQ ID NO: 208454 - DNA, 25 bp, Artificial
  probe
  misc_feature (1)..(25): SEQ ID NO: 1316; WAN024FJ7_at; Start 282; Stop 306
tgcggctgataaggaattggtcgct

SEQ ID NO: 208455 - DNA, 25 bp, Artificial
  probe
  misc_feature (1)..(25): SEQ ID NO: 1316; WAN024FJ7_at; Start 424; Stop 448
gatacgactgaactcactccacgtg

SEQ ID NO: 208456 - DNA, 25 bp, Artificial
  probe
  misc_feature (1)..(25): SEQ ID NO: 1316; WAN024FJ7_at; Start 761; Stop 785
gatgtacgggtggacaacaccgtag

SEQ ID NO: 208457 - DNA, 25 bp, Artificial
  probe
  misc_feature (1)..(25): SEQ ID NO: 1316; WAN024FJ7_at; Start 110; Stop 134
tgccgccagctctcttgcctaagtt

SEQ ID NO: 208458 - DNA, 25 bp, Artificial
  probe
  misc_feature (1)..(25): SEQ ID NO: 1316; WAN024FJ7_at; Start 550; Stop 574
gatgcggacttggtctttgatgtcc

SEQ ID NO: 208459 - DNA, 25 bp, Artificial
  probe
  misc_feature (1)..(25): SEQ ID NO: 1316; WAN024FJ7_at; Start 852; Stop 876
cgacaaagaccgcagaaaggaaacg

SEQ ID NO: 208460 - DNA, 25 bp, Artificial
  probe
  misc_feature (1)..(25): SEQ ID NO: 1316; WAN024FJ7_at; Start 157; Stop 181
gaagacaatcctaagttggccttgg

SEQ ID NO: 208461 - DNA, 25 bp, Artificial
  probe
  misc_feature (1)..(25): SEQ ID NO: 1316; WAN024FJ7_at; Start 702; Stop 726
tgagccgattctgccaagttaccaa

SEQ ID NO: 208462 - DNA, 25 bp, Artificial
  probe
  misc_feature (1)..(25): SEQ ID NO: 1316; WAN024FJ7_at; Start 837; Stop 861
taatgaagggcatcgcgacaaagac

SEQ ID NO: 208463 - DNA, 25 bp, Artificial
  probe
  misc_feature (1)..(25): SEQ ID NO: 1316; WAN024FJ7_at; Start 390; Stop 414
ggcacctttgaaaaatatgagccaa

SEQ ID NO: 208464 - DNA, 25 bp, Artificial
  probe
  misc_feature (1)..(25): SEQ ID NO: 1316; WAN024FJ7_at; Start 615; Stop 639
ccaaacgggtgtggatgaacctgtt

SEQ ID NO: 208465 - DNA, 25 bp, Artificial
  probe
  misc_feature (1)..(25): SEQ ID NO: 1316; WAN024FJ7_at; Start 810; Stop 834
gcaggacttatccaagaattggtct

SEQ ID NO: 208466 - DNA, 25 bp, Artificial
  probe
  misc_feature (1)..(25): SEQ ID NO: 1316; WAN024FJ7_at; Start 294; Stop 318
ggaattggtcgctcgttacaaggaa

SEQ ID NO: 208467 - DNA, 25 bp, Artificial
  probe
  misc_feature (1)..(25): SEQ ID NO: 1316; WAN024FJ7_at; Start 333; Stop 357
cccactagcagcagacggtcgtatt

SEQ ID NO: 208468 - DNA, 25 bp, Artificial
  probe
  misc_feature (1)..(25): SEQ ID NO: 1316; WAN024FJ7_at; Start 776; Stop 800
aacaccgtagtgtggcatttgctaa

SEQ ID NO: 208469 - DNA, 25 bp, Artificial
  probe
  misc_feature (1)..(25): SEQ ID NO: 1316; WAN024FJ7_at; Start 361; Stop 385
gatggaatcaagttggaacgtgaac

SEQ ID NO: 208470 - DNA, 25 bp, Artificial
  probe
  misc_feature (1)..(25): SEQ ID NO: 1316; WAN024FJ7_at; Start 601; Stop 625
ccagaactgagaaaccaaacgggtg

SEQ ID NO: 208471 - DNA, 25 bp, Artificial
  probe
  misc_feature (1)..(25): SEQ ID NO: 1316; WAN024FJ7_at; Start 126; Stop 150
gcctaagtttttgcagctggttgaa

SEQ ID NO: 208472 - DNA, 25 bp, Artificial
  probe
  misc_feature (1)..(25): SEQ ID NO: 1316; WAN024FJ7_at; Start 266; Stop 290
aaatcctctttttggatgcggctga

SEQ ID NO: 208473 - DNA, 25 bp, Artificial
  probe
  misc_feature (1)..(25): SEQ ID NO: 1316; WAN024FJ7_at; Start 3; Stop 27
gacaaagaaacaacttcacttggtg

SEQ ID NO: 208474 - DNA, 25 bp, Artificial
  probe
  misc_feature (1)..(25): SEQ ID NO: 3446; WAN024FJ8_at; Start 29; Stop 53
ctttgtcatctttttctccttatat

SEQ ID NO: 208475 - DNA, 25 bp, Artificial
  probe
  misc_feature (1)..(25): SEQ ID NO: 3446; WAN024FJ8_at; Start 36; Stop 60
atctttttctccttatatcaaaaga

SEQ ID NO: 208476 - DNA, 25 bp, Artificial
  probe
  misc_feature (1)..(25): SEQ ID NO: 3446; WAN024FJ8_at; Start 45; Stop 69
tccttatatcaaaagaagtttggca

SEQ ID NO: 208477 - DNA, 25 bp, Artificial
  probe
  misc_feature (1)..(25): SEQ ID NO: 3446; WAN024FJ8_at; Start 2; Stop 26
tgtcacaatcaccaagtgaagttgt

SEQ ID NO: 208478 - DNA, 25 bp, Artificial
  probe
  misc_feature (1)..(25): SEQ ID NO: 3446; WAN024FJ8_at; Start 46; Stop 70
ccttatatcaaaagaagtttggcaa

SEQ ID NO: 208479 - DNA, 25 bp, Artificial
  probe
  misc_feature (1)..(25): SEQ ID NO: 3446; WAN024FJ8_at; Start 23; Stop 47
ttgtttctttgtcatctttttctcc

SEQ ID NO: 208480 - DNA, 25 bp, Artificial
  probe
  misc_feature (1)..(25): SEQ ID NO: 3446; WAN024FJ8_at; Start 37; Stop 61
tctttttctccttatatcaaaagaa

SEQ ID NO: 208481 - DNA, 25 bp, Artificial
  probe
  misc_feature (1)..(25): SEQ ID NO: 3446; WAN024FJ8_at; Start 43; Stop 67
tctccttatatcaaaagaagtttgg

SEQ ID NO: 208482 - DNA, 25 bp, Artificial
  probe
  misc_feature (1)..(25): SEQ ID NO: 3446; WAN024FJ8_at; Start 6; Stop 30
acaatcaccaagtgaagttgtttct

SEQ ID NO: 208483 - DNA, 25 bp, Artificial
  probe
  misc_feature (1)..(25): SEQ ID NO: 3446; WAN024FJ8_at; Start 44; Stop 68
ctccttatatcaaaagaagtttggc

SEQ ID NO: 208484 - DNA, 25 bp, Artificial
  probe
  misc_feature (1)..(25): SEQ ID NO: 3446; WAN024FJ8_at; Start 11; Stop 35
caccaagtgaagttgtttctttgtc

SEQ ID NO: 208485 - DNA, 25 bp, Artificial
  probe
  misc_feature (1)..(25): SEQ ID NO: 3446; WAN024FJ8_at; Start 28; Stop 52
tctttgtcatctttttctccttata

SEQ ID NO: 208486 - DNA, 25 bp, Artificial
  probe
  misc_feature (1)..(25): SEQ ID NO: 3446; WAN024FJ8_at; Start 10; Stop 34
tcaccaagtgaagttgtttctttgt

SEQ ID NO: 208487 - DNA, 25 bp, Artificial
  probe
  misc_feature (1)..(25): SEQ ID NO: 3446; WAN024FJ8_at; Start 47; Stop 71
cttatatcaaaagaagtttggcaac

SEQ ID NO: 208488 - DNA, 25 bp, Artificial
  probe
  misc_feature (1)..(25): SEQ ID NO: 3446; WAN024FJ8_at; Start 42; Stop 66
ttctccttatatcaaaagaagtttg

SEQ ID NO: 208489 - DNA, 25 bp, Artificial
  probe
  misc_feature (1)..(25): SEQ ID NO: 3446; WAN024FJ8_at; Start 33; Stop 57
gtcatctttttctccttatatcaaa

SEQ ID NO: 208490 - DNA, 25 bp, Artificial
  probe
  misc_feature (1)..(25): SEQ ID NO: 3446; WAN024FJ8_at; Start 22; Stop 46
gttgtttctttgtcatctttttctc

SEQ ID NO: 208491 - DNA, 25 bp, Artificial
  probe
  misc_feature (1)..(25): SEQ ID NO: 3446; WAN024FJ8_at; Start 31; Stop 55
ttgtcatctttttctccttatatca

SEQ ID NO: 208492 - DNA, 25 bp, Artificial
  probe
  misc_feature (1)..(25): SEQ ID NO: 3446; WAN024FJ8_at; Start 34; Stop 58
tcatctttttctccttatatcaaaa

SEQ ID NO: 208493 - DNA, 25 bp, Artificial
  probe
  misc_feature (1)..(25): SEQ ID NO: 3446; WAN024FJ8_at; Start 5; Stop 29
cacaatcaccaagtgaagttgtttc

SEQ ID NO: 208494 - DNA, 25 bp, Artificial
  probe
  misc_feature (1)..(25): SEQ ID NO: 3446; WAN024FJ8_at; Start 32; Stop 56
tgtcatctttttctccttatatcaa

SEQ ID NO: 208495 - DNA, 25 bp, Artificial
  probe
  misc_feature (1)..(25): SEQ ID NO: 3446; WAN024FJ8_at; Start 8; Stop 32
aatcaccaagtgaagttgtttcttt

SEQ ID NO: 208496 - DNA, 25 bp, Artificial
  probe
  misc_feature (1)..(25): SEQ ID NO: 3446; WAN024FJ8_at; Start 3; Stop 27
gtcacaatcaccaagtgaagttgtt

SEQ ID NO: 208497 - DNA, 25 bp, Artificial
  probe
  misc_feature (1)..(25): SEQ ID NO: 3446; WAN024FJ8_at; Start 35; Stop 59
catctttttctccttatatcaaaag

SEQ ID NO: 208498 - DNA, 25 bp, Artificial
  probe
  misc_feature (1)..(25): SEQ ID NO: 3446; WAN024FJ8_at; Start 27; Stop 51
ttctttgtcatctttttctccttat

SEQ ID NO: 208499 - DNA, 25 bp, Artificial
  probe
  misc_feature (1)..(25): SEQ ID NO: 3446; WAN024FJ8_at; Start 9; Stop 33
atcaccaagtgaagttgtttctttg

SEQ ID NO: 208500 - DNA, 25 bp, Artificial
  probe
  misc_feature (1)..(25): SEQ ID NO: 3446; WAN024FJ8_at; Start 38; Stop 62
ctttttctccttatatcaaaagaag

SEQ ID NO: 208501 - DNA, 25 bp, Artificial
  probe
  misc_feature (1)..(25): SEQ ID NO: 3446; WAN024FJ8_at; Start 48; Stop 72
ttatatcaaaagaagtttggcaaca

SEQ ID NO: 208502 - DNA, 25 bp, Artificial
  probe
  misc_feature (1)..(25): SEQ ID NO: 3446; WAN024FJ8_at; Start 1; Stop 25
ctgtcacaatcaccaagtgaagttg

SEQ ID NO: 208503 - DNA, 25 bp, Artificial
  probe
  misc_feature (1)..(25): SEQ ID NO: 3446; WAN024FJ8_at; Start 26; Stop 50
tttctttgtcatctttttctcctta

SEQ ID NO: 208504 - DNA, 25 bp, Artificial
  probe
  misc_feature (1)..(25): SEQ ID NO: 3446; WAN024FJ8_at; Start 24; Stop 48
tgtttctttgtcatctttttctcct

SEQ ID NO: 208505 - DNA, 25 bp, Artificial
  probe
  misc_feature (1)..(25): SEQ ID NO: 3446; WAN024FJ8_at; Start 7; Stop 31
caatcaccaagtgaagttgtttctt

SEQ ID NO: 208506 - DNA, 25 bp, Artificial
  probe
  misc_feature (1)..(25): SEQ ID NO: 3446; WAN024FJ8_at; Start 30; Stop 54
tttgtcatctttttctccttatatc

SEQ ID NO: 208507 - DNA, 25 bp, Artificial
  probe
  misc_feature (1)..(25): SEQ ID NO: 3446; WAN024FJ8_at; Start 4; Stop 28
tcacaatcaccaagtgaagttgttt

SEQ ID NO: 208508 - DNA, 25 bp, Artificial
  probe
  misc_feature (1)..(25): SEQ ID NO: 1498; WAN024FJ9_at; Start 832; Stop 856
caagtggaacacgattttgtaggtc

SEQ ID NO: 208509 - DNA, 25 bp, Artificial
  probe
  misc_feature (1)..(25): SEQ ID NO: 1498; WAN024FJ9_at; Start 481; Stop 505
tatgtgaccaatgccctaaacgatg

SEQ ID NO: 208510 - DNA, 25 bp, Artificial
  probe
  misc_feature (1)..(25): SEQ ID NO: 1498; WAN024FJ9_at; Start 125; Stop 149
caggtgaactccgaaaaaatatgca

SEQ ID NO: 208511 - DNA, 25 bp, Artificial
  probe
  misc_feature (1)..(25): SEQ ID NO: 1498; WAN024FJ9_at; Start 297; Stop 321
cttgtcagaaatgcagggttcaacc

SEQ ID NO: 208512 - DNA, 25 bp, Artificial
  probe
  misc_feature (1)..(25): SEQ ID NO: 1498; WAN024FJ9_at; Start 608; Stop 632
tgattaaggaaattgggcgggctct

SEQ ID NO: 208513 - DNA, 25 bp, Artificial
  probe
  misc_feature (1)..(25): SEQ ID NO: 1498; WAN024FJ9_at; Start 512; Stop 536
ctctggccagccgtcgagtagtgca

SEQ ID NO: 208514 - DNA, 25 bp, Artificial
  probe
  misc_feature (1)..(25): SEQ ID NO: 1498; WAN024FJ9_at; Start 272; Stop 296
cattgggaaatctcatcattgctgg

SEQ ID NO: 208515 - DNA, 25 bp, Artificial
  probe
  misc_feature (1)..(25): SEQ ID NO: 1498; WAN024FJ9_at; Start 48; Stop 72
cgtcattctaaaaagtctgcgggaa

SEQ ID NO: 208516 - DNA, 25 bp, Artificial
  probe
  misc_feature (1)..(25): SEQ ID NO: 1498; WAN024FJ9_at; Start 342; Stop 366
gagcaaatttttccatacaacaggg

SEQ ID NO: 208517 - DNA, 25 bp, Artificial
  probe
  misc_feature (1)..(25): SEQ ID NO: 1498; WAN024FJ9_at; Start 778; Stop 802
gaaaaagtgcctcaggaatacatga

SEQ ID NO: 208518 - DNA, 25 bp, Artificial
  probe
  misc_feature (1)..(25): SEQ ID NO: 1498; WAN024FJ9_at; Start 144; Stop 168
tatgcaacagttgacaccgccaggt

SEQ ID NO: 208519 - DNA, 25 bp, Artificial
  probe
  misc_feature (1)..(25): SEQ ID NO: 1498; WAN024FJ9_at; Start 893; Stop 917
tccttcgtctggaaaatggcggtgc

SEQ ID NO: 208520 - DNA, 25 bp, Artificial
  probe
  misc_feature (1)..(25): SEQ ID NO: 1498; WAN024FJ9_at; Start 373; Stop 397
tatccttccagtgaccatcctttga

SEQ ID NO: 208521 - DNA, 25 bp, Artificial
  probe
  misc_feature (1)..(25): SEQ ID NO: 1498; WAN024FJ9_at; Start 855; Stop 879
tctttgtaagcaagtttcgcgcgtg

SEQ ID NO: 208522 - DNA, 25 bp, Artificial
  probe
  misc_feature (1)..(25): SEQ ID NO: 1498; WAN024FJ9_at; Start 907; Stop 931
aatggcggtgccttccacgatggag

SEQ ID NO: 208523 - DNA, 25 bp, Artificial
  probe
  misc_feature (1)..(25): SEQ ID NO: 1498; WAN024FJ9_at; Start 662; Stop 686
tctgcaatatcatgacccaacgtgg

SEQ ID NO: 208524 - DNA, 25 bp, Artificial
  probe
  misc_feature (1)..(25): SEQ ID NO: 1498; WAN024FJ9_at; Start 540; Stop 564
catccttgaaagtgacatgattgtc

SEQ ID NO: 208525 - DNA, 25 bp, Artificial
  probe
  misc_feature (1)..(25): SEQ ID NO: 1498; WAN024FJ9_at; Start 719; Stop 743
tggaagtcttgcatcgtcaccttgg

SEQ ID NO: 208526 - DNA, 25 bp, Artificial
  probe
  misc_feature (1)..(25): SEQ ID NO: 1498; WAN024FJ9_at; Start 941; Stop 965
tggacgagttgatgcgcattataca

SEQ ID NO: 208527 - DNA, 25 bp, Artificial
  probe
  misc_feature (1)..(25): SEQ ID NO: 1498; WAN024FJ9_at; Start 83; Stop 107
aaatcgcagctatcgtgacggtggc

SEQ ID NO: 208528 - DNA, 25 bp, Artificial
  probe
  misc_feature (1)..(25): SEQ ID NO: 1498; WAN024FJ9_at; Start 555; Stop 579
catgattgtcctagggccaggttcc

SEQ ID NO: 208529 - DNA, 25 bp, Artificial
  probe
  misc_feature (1)..(25): SEQ ID NO: 1498; WAN024FJ9_at; Start 256; Stop 280
gcctttgctggccatccattgggaa

SEQ ID NO: 208530 - DNA, 25 bp, Artificial
  probe
  misc_feature (1)..(25): SEQ ID NO: 1498; WAN024FJ9_at; Start 497; Stop 521
taaacgatgatacgcctctggccag

SEQ ID NO: 208531 - DNA, 25 bp, Artificial
  probe
  misc_feature (1)..(25): SEQ ID NO: 1498; WAN024FJ9_at; Start 63; Stop 87
tctgcgggaaaaagatgtggaaatc

SEQ ID NO: 208532 - DNA, 25 bp, Artificial
  probe
  misc_feature (1)..(25): SEQ ID NO: 1498; WAN024FJ9_at; Start 169; Stop 193
gatcttcgtaatgtccttgtggcca

SEQ ID NO: 208533 - DNA, 25 bp, Artificial
  probe
  misc_feature (1)..(25): SEQ ID NO: 1498; WAN024FJ9_at; Start 402; Stop 426
tcatgcagtctttcaggatgggaca

SEQ ID NO: 208534 - DNA, 25 bp, Artificial
  probe
  misc_feature (1)..(25): SEQ ID NO: 1498; WAN024FJ9_at; Start 456; Stop 480
ccatcgaggcataattgacaatgtc

SEQ ID NO: 208535 - DNA, 25 bp, Artificial
  probe
  misc_feature (1)..(25): SEQ ID NO: 1498; WAN024FJ9_at; Start 216; Stop 240
tgagaaggtctttcagtatcggttc

SEQ ID NO: 208536 - DNA, 25 bp, Artificial
  probe
  misc_feature (1)..(25): SEQ ID NO: 1498; WAN024FJ9_at; Start 182; Stop 206
tccttgtggccatgtcggatatgcc

SEQ ID NO: 208537 - DNA, 25 bp, Artificial
  probe
  misc_feature (1)..(25): SEQ ID NO: 1498; WAN024FJ9_at; Start 525; Stop 549
tcgagtagtgcagaccatccttgaa

SEQ ID NO: 208538 - DNA, 25 bp, Artificial
  probe
  misc_feature (1)..(25): SEQ ID NO: 1498; WAN024FJ9_at; Start 441; Stop 465
gagtcatattgtagaccatcgaggc

SEQ ID NO: 208539 - DNA, 25 bp, Artificial
  probe
  misc_feature (1)..(25): SEQ ID NO: 1498; WAN024FJ9_at; Start 687; Stop 711
ggagacggaacactttacagatagc

SEQ ID NO: 208540 - DNA, 25 bp, Artificial
  probe
  misc_feature (1)..(25): SEQ ID NO: 1498; WAN024FJ9_at; Start 107; Stop 131
cagatgatggtggttcttcaggtga

SEQ ID NO: 208541 - DNA, 25 bp, Artificial
  probe
  misc_feature (1)..(25): SEQ ID NO: 1498; WAN024FJ9_at; Start 238; Stop 262
ttctctgaggatgccggagcctttg

SEQ ID NO: 208542 - DNA, 25 bp, Artificial
  probe
  misc_feature (1)..(25): SEQ ID NO: 1652; WAN024FJA_at; Start 414; Stop 438
tgagtcaggcaagtaccagttggaa

SEQ ID NO: 208543 - DNA, 25 bp, Artificial
  probe
  misc_feature (1)..(25): SEQ ID NO: 1652; WAN024FJA_at; Start 75; Stop 99
tatcaaaatgtctggtagcatcggt

SEQ ID NO: 208544 - DNA, 25 bp, Artificial
  probe
  misc_feature (1)..(25): SEQ ID NO: 1652; WAN024FJA_at; Start 543; Stop 567
tctccagcgagcagaagacattatg

SEQ ID NO: 208545 - DNA, 25 bp, Artificial
  probe
  misc_feature (1)..(25): SEQ ID NO: 1652; WAN024FJA_at; Start 29; Stop 53
aaatcctgggccaacaccatctgag

SEQ ID NO: 208546 - DNA, 25 bp, Artificial
  probe
  misc_feature (1)..(25): SEQ ID NO: 1652; WAN024FJA_at; Start 298; Stop 322
gcagactctttctttggcctggaaa

SEQ ID NO: 208547 - DNA, 25 bp, Artificial
  probe
  misc_feature (1)..(25): SEQ ID NO: 1652; WAN024FJA_at; Start 755; Stop 779
aaaatttgccagtagatttgcagga

SEQ ID NO: 208548 - DNA, 25 bp, Artificial
  probe
  misc_feature (1)..(25): SEQ ID NO: 1652; WAN024FJA_at; Start 199; Stop 223
gaaattcgtcaccaccaacggagca

SEQ ID NO: 208549 - DNA, 25 bp, Artificial
  probe
  misc_feature (1)..(25): SEQ ID NO: 1652; WAN024FJA_at; Start 355; Stop 379
gaagcaggtcgtgcctatctctgtg

SEQ ID NO: 208550 - DNA, 25 bp, Artificial
  probe
  misc_feature (1)..(25): SEQ ID NO: 1652; WAN024FJA_at; Start 217; Stop 241
cggagcaatcttcgcaagaatcgcg

SEQ ID NO: 208551 - DNA, 25 bp, Artificial
  probe
  misc_feature (1)..(25): SEQ ID NO: 1652; WAN024FJA_at; Start 145; Stop 169
aaactggcccgtcacctctatgagt

SEQ ID NO: 208552 - DNA, 25 bp, Artificial
  probe
  misc_feature (1)..(25): SEQ ID NO: 1652; WAN024FJA_at; Start 442; Stop 466
agttctgtttatctggaccacgcgc

SEQ ID NO: 208553 - DNA, 25 bp, Artificial
  probe
  misc_feature (1)..(25): SEQ ID NO: 1652; WAN024FJA_at; Start 531; Stop 555
ggctgtgacctatctccagcgagca

SEQ ID NO: 208554 - DNA, 25 bp, Artificial
  probe
  misc_feature (1)..(25): SEQ ID NO: 1652; WAN024FJA_at; Start 281; Stop 305
taagtgatttgcacttggcagactc

SEQ ID NO: 208555 - DNA, 25 bp, Artificial
  probe
  misc_feature (1)..(25): SEQ ID NO: 1652; WAN024FJA_at; Start 374; Stop 398
tctgtggcgctttcttggcaaatgg

SEQ ID NO: 208556 - DNA, 25 bp, Artificial
  probe
  misc_feature (1)..(25): SEQ ID NO: 1652; WAN024FJA_at; Start 392; Stop 416
caaatgggagcattcgtgaccctga

SEQ ID NO: 208557 - DNA, 25 bp, Artificial
  probe
  misc_feature (1)..(25): SEQ ID NO: 1652; WAN024FJA_at; Start 455; Stop 479
tggaccacgcgcaaggaattgcctc

SEQ ID NO: 208558 - DNA, 25 bp, Artificial
  probe
  misc_feature (1)..(25): SEQ ID NO: 1652; WAN024FJA_at; Start 629; Stop 653
tgcgagaaacccgtaacgacctcaa

SEQ ID NO: 208559 - DNA, 25 bp, Artificial
  probe
  misc_feature (1)..(25): SEQ ID NO: 1652; WAN024FJA_at; Start 316; Stop 340
ctggaaacaggtattgatgaggcga

SEQ ID NO: 208560 - DNA, 25 bp, Artificial
  probe
  misc_feature (1)..(25): SEQ ID NO: 1652; WAN024FJA_at; Start 255; Stop 279
tacagatgaaaaggtgcaggatttg

SEQ ID NO: 208561 - DNA, 25 bp, Artificial
  probe
  misc_feature (1)..(25): SEQ ID NO: 1652; WAN024FJA_at; Start 663; Stop 687
taatgccgagacagctaatatcgct

SEQ ID NO: 208562 - DNA, 25 bp, Artificial
  probe
  misc_feature (1)..(25): SEQ ID NO: 1652; WAN024FJA_at; Start 2; Stop 26
tgagtttcacagtagcagtaaaaga

SEQ ID NO: 208563 - DNA, 25 bp, Artificial
  probe
  misc_feature (1)..(25): SEQ ID NO: 1652; WAN024FJA_at; Start 504; Stop 528
tgccaaggtgcttgagcgcaagaag

SEQ ID NO: 208564 - DNA, 25 bp, Artificial
  probe
  misc_feature (1)..(25): SEQ ID NO: 1652; WAN024FJA_at; Start 593; Stop 617
tgcaggcacgtgatgattttgagcg

SEQ ID NO: 208565 - DNA, 25 bp, Artificial
  probe
  misc_feature (1)..(25): SEQ ID NO: 1652; WAN024FJA_at; Start 678; Stop 702
taatatcgctcggacagtttctgcc

SEQ ID NO: 208566 - DNA, 25 bp, Artificial
  probe
  misc_feature (1)..(25): SEQ ID NO: 1652; WAN024FJA_at; Start 17; Stop 41
cagtaaaagaagaaatcctgggcca

SEQ ID NO: 208567 - DNA, 25 bp, Artificial
  probe
  misc_feature (1)..(25): SEQ ID NO: 1652; WAN024FJA_at; Start 129; Stop 153
tgtgacagaaaatgccaaactggcc

SEQ ID NO: 208568 - DNA, 25 bp, Artificial
  probe
  misc_feature (1)..(25): SEQ ID NO: 1652; WAN024FJA_at; Start 104; Stop 128
cgacttcgggcttgactttgtcagt

SEQ ID NO: 208569 - DNA, 25 bp, Artificial
  probe
  misc_feature (1)..(25): SEQ ID NO: 1652; WAN024FJA_at; Start 234; Stop 258
gaatcgcgtctataccgtttttaca

SEQ ID NO: 208570 - DNA, 25 bp, Artificial
  probe
  misc_feature (1)..(25): SEQ ID NO: 1652; WAN024FJA_at; Start 490; Stop 514
cagtttttactggatgccaaggtgc

SEQ ID NO: 208571 - DNA, 25 bp, Artificial
  probe
  misc_feature (1)..(25): SEQ ID NO: 1652; WAN024FJA_at; Start 613; Stop 637
gagcgggttaagattttgcgagaaa

SEQ ID NO: 208572 - DNA, 25 bp, Artificial
  probe
  misc_feature (1)..(25): SEQ ID NO: 1652; WAN024FJA_at; Start 741; Stop 765
tatcatgggcttagaaaatttgcca

SEQ ID NO: 208573 - DNA, 25 bp, Artificial
  probe
  misc_feature (1)..(25): SEQ ID NO: 1652; WAN024FJA_at; Start 839; Stop 863
tcagcacccctctgaccaaaagtgg

SEQ ID NO: 208574 - DNA, 25 bp, Artificial
  probe
  misc_feature (1)..(25): SEQ ID NO: 1652; WAN024FJA_at; Start 90; Stop 114
tagcatcggtctctcgacttcgggc

SEQ ID NO: 208575 - DNA, 25 bp, Artificial
  probe
  misc_feature (1)..(25): SEQ ID NO: 1652; WAN024FJA_at; Start 469; Stop 493
ggaattgcctcccttctccaacagt

SEQ ID NO: 208576 - DNA, 25 bp, Artificial
  probe
  misc_feature (1)..(25): SEQ ID NO: 7669; WAN024FJB_at; Start 14; Stop 38
tcagggtcaatgtagttgatagcgt

SEQ ID NO: 208577 - DNA, 25 bp, Artificial
  probe
  misc_feature (1)..(25): SEQ ID NO: 7669; WAN024FJB_at; Start 120; Stop 144
catagatacctgcttggctggattc

SEQ ID NO: 208578 - DNA, 25 bp, Artificial
  probe
  misc_feature (1)..(25): SEQ ID NO: 7669; WAN024FJB_at; Start 95; Stop 119
tcatagtagcagcagtcaccgatag

SEQ ID NO: 208579 - DNA, 25 bp, Artificial
  probe
  misc_feature (1)..(25): SEQ ID NO: 7669; WAN024FJB_at; Start 88; Stop 112
ttttccgtcatagtagcagcagtca

SEQ ID NO: 208580 - DNA, 25 bp, Artificial
  probe
  misc_feature (1)..(25): SEQ ID NO: 7669; WAN024FJB_at; Start 91; Stop 115
tccgtcatagtagcagcagtcaccg

SEQ ID NO: 208581 - DNA, 25 bp, Artificial
  probe
  misc_feature (1)..(25): SEQ ID NO: 7669; WAN024FJB_at; Start 98; Stop 122
tagtagcagcagtcaccgatagcat

SEQ ID NO: 208582 - DNA, 25 bp, Artificial
  probe
  misc_feature (1)..(25): SEQ ID NO: 7669; WAN024FJB_at; Start 26; Stop 50
tagttgatagcgttgttgacagcag

SEQ ID NO: 208583 - DNA, 25 bp, Artificial
  probe
  misc_feature (1)..(25): SEQ ID NO: 7669; WAN024FJB_at; Start 103; Stop 127
gcagcagtcaccgatagcatagata

SEQ ID NO: 208584 - DNA, 25 bp, Artificial
  probe
  misc_feature (1)..(25): SEQ ID NO: 7669; WAN024FJB_at; Start 4; Stop 28
tactttttgttcagggtcaatgtag

SEQ ID NO: 208585 - DNA, 25 bp, Artificial
  probe
  misc_feature (1)..(25): SEQ ID NO: 7669; WAN024FJB_at; Start 115; Stop 139
gatagcatagatacctgcttggctg

SEQ ID NO: 208586 - DNA, 25 bp, Artificial
  probe
  misc_feature (1)..(25): SEQ ID NO: 7669; WAN024FJB_at; Start 225; Stop 249
catagttgacaaagaggtggtctag

SEQ ID NO: 208587 - DNA, 25 bp, Artificial
  probe
  misc_feature (1)..(25): SEQ ID NO: 7669; WAN024FJB_at; Start 31; Stop 55
gatagcgttgttgacagcagttgga

SEQ ID NO: 208588 - DNA, 25 bp, Artificial
  probe
  misc_feature (1)..(25): SEQ ID NO: 7669; WAN024FJB_at; Start 203; Stop 227
ttaccgacagaagatttgaaaccat

SEQ ID NO: 208589 - DNA, 25 bp, Artificial
  probe
  misc_feature (1)..(25): SEQ ID NO: 7669; WAN024FJB_at; Start 61; Stop 85
tccgaggcctgtcgcaatcagatca

SEQ ID NO: 208590 - DNA, 25 bp, Artificial
  probe
  misc_feature (1)..(25): SEQ ID NO: 7669; WAN024FJB_at; Start 49; Stop 73
agttggagcttctccgaggcctgtc

SEQ ID NO: 208591 - DNA, 25 bp, Artificial
  probe
  misc_feature (1)..(25): SEQ ID NO: 7669; WAN024FJB_at; Start 197; Stop 221
ttaaggttaccgacagaagatttga

SEQ ID NO: 208592 - DNA, 25 bp, Artificial
  probe
  misc_feature (1)..(25): SEQ ID NO: 7669; WAN024FJB_at; Start 54; Stop 78
gagcttctccgaggcctgtcgcaat

SEQ ID NO: 208593 - DNA, 25 bp, Artificial
  probe
  misc_feature (1)..(25): SEQ ID NO: 7669; WAN024FJB_at; Start 220; Stop 244
gaaaccatagttgacaaagaggtgg

SEQ ID NO: 208594 - DNA, 25 bp, Artificial
  probe
  misc_feature (1)..(25): SEQ ID NO: 7669; WAN024FJB_at; Start 150; Stop 174
tgctgttgacgataatcttgtgacg

SEQ ID NO: 208595 - DNA, 25 bp, Artificial
  probe
  misc_feature (1)..(25): SEQ ID NO: 7669; WAN024FJB_at; Start 106; Stop 130
gcagtcaccgatagcatagatacct

SEQ ID NO: 208596 - DNA, 25 bp, Artificial
  probe
  misc_feature (1)..(25): SEQ ID NO: 7669; WAN024FJB_at; Start 126; Stop 150
tacctgcttggctggattcctgttt

SEQ ID NO: 208597 - DNA, 25 bp, Artificial
  probe
  misc_feature (1)..(25): SEQ ID NO: 7669; WAN024FJB_at; Start 140; Stop 164
gattcctgtttgctgttgacgataa

SEQ ID NO: 208598 - DNA, 25 bp, Artificial
  probe
  misc_feature (1)..(25): SEQ ID NO: 7669; WAN024FJB_at; Start 84; Stop 108
caatttttccgtcatagtagcagca

SEQ ID NO: 208599 - DNA, 25 bp, Artificial
  probe
  misc_feature (1)..(25): SEQ ID NO: 7669; WAN024FJB_at; Start 210; Stop 234
cagaagatttgaaaccatagttgac

SEQ ID NO: 208600 - DNA, 25 bp, Artificial
  probe
  misc_feature (1)..(25): SEQ ID NO: 7669; WAN024FJB_at; Start 157; Stop 181
gacgataatcttgtgacggttgagg

SEQ ID NO: 208601 - DNA, 25 bp, Artificial
  probe
  misc_feature (1)..(25): SEQ ID NO: 7669; WAN024FJB_at; Start 166; Stop 190
cttgtgacggttgaggtcgagcccc

SEQ ID NO: 208602 - DNA, 25 bp, Artificial
  probe
  misc_feature (1)..(25): SEQ ID NO: 7669; WAN024FJB_at; Start 163; Stop 187
aatcttgtgacggttgaggtcgagc

SEQ ID NO: 208603 - DNA, 25 bp, Artificial
  probe
  misc_feature (1)..(25): SEQ ID NO: 7669; WAN024FJB_at; Start 45; Stop 69
cagcagttggagcttctccgaggcc

SEQ ID NO: 208604 - DNA, 25 bp, Artificial
  probe
  misc_feature (1)..(25): SEQ ID NO: 7669; WAN024FJB_at; Start 41; Stop 65
ttgacagcagttggagcttctccga

SEQ ID NO: 208605 - DNA, 25 bp, Artificial
  probe
  misc_feature (1)..(25): SEQ ID NO: 7669; WAN024FJB_at; Start 135; Stop 159
ggctggattcctgtttgctgttgac

SEQ ID NO: 208606 - DNA, 25 bp, Artificial
  probe
  misc_feature (1)..(25): SEQ ID NO: 7669; WAN024FJB_at; Start 64; Stop 88
gaggcctgtcgcaatcagatcaatt

SEQ ID NO: 208607 - DNA, 25 bp, Artificial
  probe
  misc_feature (1)..(25): SEQ ID NO: 7669; WAN024FJB_at; Start 70; Stop 94
tgtcgcaatcagatcaatttttccg

SEQ ID NO: 208608 - DNA, 25 bp, Artificial
  probe
  misc_feature (1)..(25): SEQ ID NO: 7669; WAN024FJB_at; Start 111; Stop 135
caccgatagcatagatacctgcttg

SEQ ID NO: 208609 - DNA, 25 bp, Artificial
  probe
  misc_feature (1)..(25): SEQ ID NO: 7669; WAN024FJB_at; Start 36; Stop 60
cgttgttgacagcagttggagcttc

SEQ ID NO: 208610 - DNA, 25 bp, Artificial
  probe
  misc_feature (1)..(25): SEQ ID NO: 4301; WAN024FJC_at; Start 258; Stop 282
aagttgtgatggcaaattcttcttc

SEQ ID NO: 208611 - DNA, 25 bp, Artificial
  probe
  misc_feature (1)..(25): SEQ ID NO: 4301; WAN024FJC_at; Start 120; Stop 144
cagcgtattgctgaatgttagaaac

SEQ ID NO: 208612 - DNA, 25 bp, Artificial
  probe
  misc_feature (1)..(25): SEQ ID NO: 4301; WAN024FJC_at; Start 23; Stop 47
tctctgcggtgaacaagggtagttg

SEQ ID NO: 208613 - DNA, 25 bp, Artificial
  probe
  misc_feature (1)..(25): SEQ ID NO: 4301; WAN024FJC_at; Start 68; Stop 92
aaagcccaatccacagccgagtctc

SEQ ID NO: 208614 - DNA, 25 bp, Artificial
  probe
  misc_feature (1)..(25): SEQ ID NO: 4301; WAN024FJC_at; Start 301; Stop 325
aaccgtttcattgagatgaataggg

SEQ ID NO: 208615 - DNA, 25 bp, Artificial
  probe
  misc_feature (1)..(25): SEQ ID NO: 4301; WAN024FJC_at; Start 192; Stop 216
gacgtggtttgaaggcaccgccacc

SEQ ID NO: 208616 - DNA, 25 bp, Artificial
  probe
  misc_feature (1)..(25): SEQ ID NO: 4301; WAN024FJC_at; Start 228; Stop 252
taactgttttagtcaggtgacttcc

SEQ ID NO: 208617 - DNA, 25 bp, Artificial
  probe
  misc_feature (1)..(25): SEQ ID NO: 4301; WAN024FJC_at; Start 125; Stop 149
tattgctgaatgttagaaacgtggt

SEQ ID NO: 208618 - DNA, 25 bp, Artificial
  probe
  misc_feature (1)..(25): SEQ ID NO: 4301; WAN024FJC_at; Start 109; Stop 133
cactttcttaccagcgtattgctga

SEQ ID NO: 208619 - DNA, 25 bp, Artificial
  probe
  misc_feature (1)..(25): SEQ ID NO: 4301; WAN024FJC_at; Start 176; Stop 200
ccttcaagttccagcggacgtggtt

SEQ ID NO: 208620 - DNA, 25 bp, Artificial
  probe
  misc_feature (1)..(25): SEQ ID NO: 4301; WAN024FJC_at; Start 133; Stop 157
aatgttagaaacgtggtagtggata

SEQ ID NO: 208621 - DNA, 25 bp, Artificial
  probe
  misc_feature (1)..(25): SEQ ID NO: 4301; WAN024FJC_at; Start 56; Stop 80
ttttcaaaagccaaagcccaatcca

SEQ ID NO: 208622 - DNA, 25 bp, Artificial
  probe
  misc_feature (1)..(25): SEQ ID NO: 4301; WAN024FJC_at; Start 318; Stop 342
gaataggggtatcaaatccatttag

SEQ ID NO: 208623 - DNA, 25 bp, Artificial
  probe
  misc_feature (1)..(25): SEQ ID NO: 4301; WAN024FJC_at; Start 195; Stop 219
gtggtttgaaggcaccgccacccat

SEQ ID NO: 208624 - DNA, 25 bp, Artificial
  probe
  misc_feature (1)..(25): SEQ ID NO: 4301; WAN024FJC_at; Start 211; Stop 235
gccacccatagcgatgataactgtt

SEQ ID NO: 208625 - DNA, 25 bp, Artificial
  probe
  misc_feature (1)..(25): SEQ ID NO: 4301; WAN024FJC_at; Start 20; Stop 44
ttatctctgcggtgaacaagggtag

SEQ ID NO: 208626 - DNA, 25 bp, Artificial
  probe
  misc_feature (1)..(25): SEQ ID NO: 4301; WAN024FJC_at; Start 180; Stop 204
caagttccagcggacgtggtttgaa

SEQ ID NO: 208627 - DNA, 25 bp, Artificial
  probe
  misc_feature (1)..(25): SEQ ID NO: 4301; WAN024FJC_at; Start 174; Stop 198
ccccttcaagttccagcggacgtgg

SEQ ID NO: 208628 - DNA, 25 bp, Artificial
  probe
  misc_feature (1)..(25): SEQ ID NO: 4301; WAN024FJC_at; Start 268; Stop 292
ggcaaattcttcttcttgtttgtca

SEQ ID NO: 208629 - DNA, 25 bp, Artificial
  probe
  misc_feature (1)..(25): SEQ ID NO: 4301; WAN024FJC_at; Start 142; Stop 166
aacgtggtagtggatattttcatag

SEQ ID NO: 208630 - DNA, 25 bp, Artificial
  probe
  misc_feature (1)..(25): SEQ ID NO: 4301; WAN024FJC_at; Start 16; Stop 40
gaaattatctctgcggtgaacaagg

SEQ ID NO: 208631 - DNA, 25 bp, Artificial
  probe
  misc_feature (1)..(25): SEQ ID NO: 4301; WAN024FJC_at; Start 7; Stop 31
caaggcacggaaattatctctgcgg

SEQ ID NO: 208632 - DNA, 25 bp, Artificial
  probe
  misc_feature (1)..(25): SEQ ID NO: 4301; WAN024FJC_at; Start 58; Stop 82
ttcaaaagccaaagcccaatccaca

SEQ ID NO: 208633 - DNA, 25 bp, Artificial
  probe
  misc_feature (1)..(25): SEQ ID NO: 4301; WAN024FJC_at; Start 215; Stop 239
cccatagcgatgataactgttttag

SEQ ID NO: 208634 - DNA, 25 bp, Artificial
  probe
  misc_feature (1)..(25): SEQ ID NO: 4301; WAN024FJC_at; Start 2; Stop 26
tgttccaaggcacggaaattatctc

SEQ ID NO: 208635 - DNA, 25 bp, Artificial
  probe
  misc_feature (1)..(25): SEQ ID NO: 4301; WAN024FJC_at; Start 186; Stop 210
ccagcggacgtggtttgaaggcacc

SEQ ID NO: 208636 - DNA, 25 bp, Artificial
  probe
  misc_feature (1)..(25): SEQ ID NO: 4301; WAN024FJC_at; Start 94; Stop 118
cccaccaagaatcgtcactttctta

SEQ ID NO: 208637 - DNA, 25 bp, Artificial
  probe
  misc_feature (1)..(25): SEQ ID NO: 4301; WAN024FJC_at; Start 102; Stop 126
gaatcgtcactttcttaccagcgta

SEQ ID NO: 208638 - DNA, 25 bp, Artificial
  probe
  misc_feature (1)..(25): SEQ ID NO: 4301; WAN024FJC_at; Start 296; Stop 320
tcaagaaccgtttcattgagatgaa

SEQ ID NO: 208639 - DNA, 25 bp, Artificial
  probe
  misc_feature (1)..(25): SEQ ID NO: 4301; WAN024FJC_at; Start 288; Stop 312
tgtcaatctcaagaaccgtttcatt

SEQ ID NO: 208640 - DNA, 25 bp, Artificial
  probe
  misc_feature (1)..(25): SEQ ID NO: 4301; WAN024FJC_at; Start 13; Stop 37
acggaaattatctctgcggtgaaca

SEQ ID NO: 208641 - DNA, 25 bp, Artificial
  probe
  misc_feature (1)..(25): SEQ ID NO: 4301; WAN024FJC_at; Start 205; Stop 229
ggcaccgccacccatagcgatgata

SEQ ID NO: 208642 - DNA, 25 bp, Artificial
  probe
  misc_feature (1)..(25): SEQ ID NO: 4301; WAN024FJC_at; Start 283; Stop 307
ttgtttgtcaatctcaagaaccgtt

SEQ ID NO: 208643 - DNA, 25 bp, Artificial
  probe
  misc_feature (1)..(25): SEQ ID NO: 4301; WAN024FJC_at; Start 32; Stop 56
tgaacaagggtagttggtgcgattt

SEQ ID NO: 208644 - DNA, 25 bp, Artificial
  probe
  misc_feature (1)..(25): SEQ ID NO: 3342; WAN024FJD_at; Start 862; Stop 886
gactgctgctactatgacggaaaaa

SEQ ID NO: 208645 - DNA, 25 bp, Artificial
  probe
  misc_feature (1)..(25): SEQ ID NO: 3342; WAN024FJD_at; Start 19; Stop 43
ggagaaactatgtctcaactctatg

SEQ ID NO: 208646 - DNA, 25 bp, Artificial
  probe
  misc_feature (1)..(25): SEQ ID NO: 3342; WAN024FJD_at; Start 241; Stop 265
gaacagctaaatggatttgataccc

SEQ ID NO: 208647 - DNA, 25 bp, Artificial
  probe
  misc_feature (1)..(25): SEQ ID NO: 3342; WAN024FJD_at; Start 542; Stop 566
caactacccttgttcaccgcagaga

SEQ ID NO: 208648 - DNA, 25 bp, Artificial
  probe
  misc_feature (1)..(25): SEQ ID NO: 3342; WAN024FJD_at; Start 613; Stop 637
tctgtaaccatcaagacaccattcg

SEQ ID NO: 208649 - DNA, 25 bp, Artificial
  probe
  misc_feature (1)..(25): SEQ ID NO: 3342; WAN024FJD_at; Start 210; Stop 234
gactggagaagagttgactaaccgc

SEQ ID NO: 208650 - DNA, 25 bp, Artificial
  probe
  misc_feature (1)..(25): SEQ ID NO: 3342; WAN024FJD_at; Start 700; Stop 724
tctgatgaaactgaaaccattgacc

SEQ ID NO: 208651 - DNA, 25 bp, Artificial
  probe
  misc_feature (1)..(25): SEQ ID NO: 3342; WAN024FJD_at; Start 552; Stop 576
tgttcaccgcagagataatttccgt

SEQ ID NO: 208652 - DNA, 25 bp, Artificial
  probe
  misc_feature (1)..(25): SEQ ID NO: 3342; WAN024FJD_at; Start 369; Stop 393
tatgggtggcggtgccttcaaacca

SEQ ID NO: 208653 - DNA, 25 bp, Artificial
  probe
  misc_feature (1)..(25): SEQ ID NO: 3342; WAN024FJD_at; Start 712; Stop 736
gaaaccattgacctagaccacctct

SEQ ID NO: 208654 - DNA, 25 bp, Artificial
  probe
  misc_feature (1)..(25): SEQ ID NO: 3342; WAN024FJD_at; Start 424; Stop 448
tatgaaaatatccactaccacgttt

SEQ ID NO: 208655 - DNA, 25 bp, Artificial
  probe
  misc_feature (1)..(25): SEQ ID NO: 3342; WAN024FJD_at; Start 800; Stop 824
gtcacaagattatcgtcaacagcaa

SEQ ID NO: 208656 - DNA, 25 bp, Artificial
  probe
  misc_feature (1)..(25): SEQ ID NO: 3342; WAN024FJD_at; Start 385; Stop 409
ttcaaaccacgtccgctggaacttg

SEQ ID NO: 208657 - DNA, 25 bp, Artificial
  probe
  misc_feature (1)..(25): SEQ ID NO: 3342; WAN024FJD_at; Start 148; Stop 172
ggacaacctgctattctctaccctg

SEQ ID NO: 208658 - DNA, 25 bp, Artificial
  probe
  misc_feature (1)..(25): SEQ ID NO: 3342; WAN024FJD_at; Start 104; Stop 128
gccaagccaaggttcaaatcatcga

SEQ ID NO: 208659 - DNA, 25 bp, Artificial
  probe
  misc_feature (1)..(25): SEQ ID NO: 3342; WAN024FJD_at; Start 913; Stop 937
gaagctccaactgctgtcaacaacg

SEQ ID NO: 208660 - DNA, 25 bp, Artificial
  probe
  misc_feature (1)..(25): SEQ ID NO: 3342; WAN024FJD_at; Start 725; Stop 749
tagaccacctctttgtcaactatgg

SEQ ID NO: 208661 - DNA, 25 bp, Artificial
  probe
  misc_feature (1)..(25): SEQ ID NO: 3342; WAN024FJD_at; Start 450; Stop 474
taacattcagcaatacgctggtaag

SEQ ID NO: 208662 - DNA, 25 bp, Artificial
  probe
  misc_feature (1)..(25): SEQ ID NO: 3342; WAN024FJD_at; Start 350; Stop 374
ctaaaacagttatcatcgctatggg

SEQ ID NO: 208663 - DNA, 25 bp, Artificial
  probe
  misc_feature (1)..(25): SEQ ID NO: 3342; WAN024FJD_at; Start 829; Stop 853
gaatccagccaagcaggtatctatg

SEQ ID NO: 208664 - DNA, 25 bp, Artificial
  probe
  misc_feature (1)..(25): SEQ ID NO: 3342; WAN024FJD_at; Start 127; Stop 151
gactctcttccccagctaggtggac

SEQ ID NO: 208665 - DNA, 25 bp, Artificial
  probe
  misc_feature (1)..(25): SEQ ID NO: 3342; WAN024FJD_at; Start 785; Stop 809
ggctcgacctcaaccgtcacaagat

SEQ ID NO: 208666 - DNA, 25 bp, Artificial
  probe
  misc_feature (1)..(25): SEQ ID NO: 3342; WAN024FJD_at; Start 881; Stop 905
gaaaaattgatctgattgcgacagg

SEQ ID NO: 208667 - DNA, 25 bp, Artificial
  probe
  misc_feature (1)..(25): SEQ ID NO: 3342; WAN024FJD_at; Start 752; Stop 776
tcaaatcttctgtcggtaaccttaa

SEQ ID NO: 208668 - DNA, 25 bp, Artificial
  probe
  misc_feature (1)..(25): SEQ ID NO: 3342; WAN024FJD_at; Start 307; Stop 331
gaagaagaatttgccatcacaactt

SEQ ID NO: 208669 - DNA, 25 bp, Artificial
  probe
  misc_feature (1)..(25): SEQ ID NO: 3342; WAN024FJD_at; Start 48; Stop 72
taccattgtgggtggtggtcctgtc

SEQ ID NO: 208670 - DNA, 25 bp, Artificial
  probe
  misc_feature (1)..(25): SEQ ID NO: 3342; WAN024FJD_at; Start 163; Stop 187
ctctaccctgaaaaggaaatcctag

SEQ ID NO: 208671 - DNA, 25 bp, Artificial
  probe
  misc_feature (1)..(25): SEQ ID NO: 3342; WAN024FJD_at; Start 75; Stop 99
gctttttgcagccttttatgcccac

SEQ ID NO: 208672 - DNA, 25 bp, Artificial
  probe
  misc_feature (1)..(25): SEQ ID NO: 3342; WAN024FJD_at; Start 846; Stop 870
tatctatgctatcggtgactgctgc

SEQ ID NO: 208673 - DNA, 25 bp, Artificial
  probe
  misc_feature (1)..(25): SEQ ID NO: 3342; WAN024FJD_at; Start 951; Stop 975
tgaccctgaacaaaaagtacaacca

SEQ ID NO: 208674 - DNA, 25 bp, Artificial
  probe
  misc_feature (1)..(25): SEQ ID NO: 3342; WAN024FJD_at; Start 225; Stop 249
gactaaccgcttgattgaacagcta

SEQ ID NO: 208675 - DNA, 25 bp, Artificial
  probe
  misc_feature (1)..(25): SEQ ID NO: 3342; WAN024FJD_at; Start 194; Stop 218
caggcttcccaaacctgactggaga

SEQ ID NO: 208676 - DNA, 25 bp, Artificial
  probe
  misc_feature (1)..(25): SEQ ID NO: 3342; WAN024FJD_at; Start 178; Stop 202
gaaatcctagacgtaccaggcttcc

SEQ ID NO: 208677 - DNA, 25 bp, Artificial
  probe
  misc_feature (1)..(25): SEQ ID NO: 3342; WAN024FJD_at; Start 567; Stop 591
taatttccgtgccttggaacacagt

SEQ ID NO: 208678 - DNA, 25 bp, Artificial
  probe
  misc_feature (1)..(25): SEQ ID NO: 5076; WAN024FJE_at; Start 55; Stop 79
tcaatgctcaaaggaacttcaatcg

SEQ ID NO: 208679 - DNA, 25 bp, Artificial
  probe
  misc_feature (1)..(25): SEQ ID NO: 5076; WAN024FJE_at; Start 88; Stop 112
ccggcatctgttaggtcagcagtaa

SEQ ID NO: 208680 - DNA, 25 bp, Artificial
  probe
  misc_feature (1)..(25): SEQ ID NO: 5076; WAN024FJE_at; Start 156; Stop 180
taggcgatttgcaccagtcaagacc

SEQ ID NO: 208681 - DNA, 25 bp, Artificial
  probe
  misc_feature (1)..(25): SEQ ID NO: 5076; WAN024FJE_at; Start 131; Stop 155
tttcttgcatttcactagctagcga

SEQ ID NO: 208682 - DNA, 25 bp, Artificial
  probe
  misc_feature (1)..(25): SEQ ID NO: 5076; WAN024FJE_at; Start 101; Stop 125
ggtcagcagtaaccttgaatttacg

SEQ ID NO: 208683 - DNA, 25 bp, Artificial
  probe
  misc_feature (1)..(25): SEQ ID NO: 5076; WAN024FJE_at; Start 85; Stop 109
acaccggcatctgttaggtcagcag

SEQ ID NO: 208684 - DNA, 25 bp, Artificial
  probe
  misc_feature (1)..(25): SEQ ID NO: 5076; WAN024FJE_at; Start 184; Stop 208
gatacttctgaagcaaaaccgctaa

SEQ ID NO: 208685 - DNA, 25 bp, Artificial
  probe
  misc_feature (1)..(25): SEQ ID NO: 5076; WAN024FJE_at; Start 52; Stop 76
tcttcaatgctcaaaggaacttcaa

SEQ ID NO: 208686 - DNA, 25 bp, Artificial
  probe
  misc_feature (1)..(25): SEQ ID NO: 5076; WAN024FJE_at; Start 180; Stop 204
cactgatacttctgaagcaaaaccg

SEQ ID NO: 208687 - DNA, 25 bp, Artificial
  probe
  misc_feature (1)..(25): SEQ ID NO: 5076; WAN024FJE_at; Start 117; Stop 141
gaatttacgtgtactttcttgcatt

SEQ ID NO: 208688 - DNA, 25 bp, Artificial
  probe
  misc_feature (1)..(25): SEQ ID NO: 5076; WAN024FJE_at; Start 74; Stop 98
caatcgttccaacaccggcatctgt

SEQ ID NO: 208689 - DNA, 25 bp, Artificial
  probe
  misc_feature (1)..(25): SEQ ID NO: 5076; WAN024FJE_at; Start 69; Stop 93
aacttcaatcgttccaacaccggca

SEQ ID NO: 208690 - DNA, 25 bp, Artificial
  probe
  misc_feature (1)..(25): SEQ ID NO: 5076; WAN024FJE_at; Start 8; Stop 32
taattttttgcggagtcgccacagc

SEQ ID NO: 208691 - DNA, 25 bp, Artificial
  probe
  misc_feature (1)..(25): SEQ ID NO: 5076; WAN024FJE_at; Start 35; Stop 59
tcagcccattgggtaaatcttcaat

SEQ ID NO: 208692 - DNA, 25 bp, Artificial
  probe
  misc_feature (1)..(25): SEQ ID NO: 5076; WAN024FJE_at; Start 154; Stop 178
gataggcgatttgcaccagtcaaga

SEQ ID NO: 208693 - DNA, 25 bp, Artificial
  probe
  misc_feature (1)..(25): SEQ ID NO: 5076; WAN024FJE_at; Start 26; Stop 50
ccacagcggtcagcccattgggtaa

SEQ ID NO: 208694 - DNA, 25 bp, Artificial
  probe
  misc_feature (1)..(25): SEQ ID NO: 5076; WAN024FJE_at; Start 4; Stop 28
actgtaattttttgcggagtcgcca

SEQ ID NO: 208695 - DNA, 25 bp, Artificial
  probe
  misc_feature (1)..(25): SEQ ID NO: 5076; WAN024FJE_at; Start 138; Stop 162
catttcactagctagcgataggcga

SEQ ID NO: 208696 - DNA, 25 bp, Artificial
  probe
  misc_feature (1)..(25): SEQ ID NO: 5076; WAN024FJE_at; Start 202; Stop 226
ccgctaataaaatacttatcactat

SEQ ID NO: 208697 - DNA, 25 bp, Artificial
  probe
  misc_feature (1)..(25): SEQ ID NO: 5076; WAN024FJE_at; Start 94; Stop 118
tctgttaggtcagcagtaaccttga

SEQ ID NO: 208698 - DNA, 25 bp, Artificial
  probe
  misc_feature (1)..(25): SEQ ID NO: 5076; WAN024FJE_at; Start 165; Stop 189
tgcaccagtcaagaccactgatact

SEQ ID NO: 208699 - DNA, 25 bp, Artificial
  probe
  misc_feature (1)..(25): SEQ ID NO: 5076; WAN024FJE_at; Start 143; Stop 167
cactagctagcgataggcgatttgc

SEQ ID NO: 208700 - DNA, 25 bp, Artificial
  probe
  misc_feature (1)..(25): SEQ ID NO: 5076; WAN024FJE_at; Start 174; Stop 198
caagaccactgatacttctgaagca

SEQ ID NO: 208701 - DNA, 25 bp, Artificial
  probe
  misc_feature (1)..(25): SEQ ID NO: 5076; WAN024FJE_at; Start 91; Stop 115
gcatctgttaggtcagcagtaacct

SEQ ID NO: 208702 - DNA, 25 bp, Artificial
  probe
  misc_feature (1)..(25): SEQ ID NO: 5076; WAN024FJE_at; Start 59; Stop 83
tgctcaaaggaacttcaatcgttcc

SEQ ID NO: 208703 - DNA, 25 bp, Artificial
  probe
  misc_feature (1)..(25): SEQ ID NO: 5076; WAN024FJE_at; Start 146; Stop 170
tagctagcgataggcgatttgcacc

SEQ ID NO: 208704 - DNA, 25 bp, Artificial
  probe
  misc_feature (1)..(25): SEQ ID NO: 5076; WAN024FJE_at; Start 150; Stop 174
tagcgataggcgatttgcaccagtc

SEQ ID NO: 208705 - DNA, 25 bp, Artificial
  probe
  misc_feature (1)..(25): SEQ ID NO: 5076; WAN024FJE_at; Start 83; Stop 107
caacaccggcatctgttaggtcagc

SEQ ID NO: 208706 - DNA, 25 bp, Artificial
  probe
  misc_feature (1)..(25): SEQ ID NO: 5076; WAN024FJE_at; Start 161; Stop 185
gatttgcaccagtcaagaccactga

SEQ ID NO: 208707 - DNA, 25 bp, Artificial
  probe
  misc_feature (1)..(25): SEQ ID NO: 5076; WAN024FJE_at; Start 29; Stop 53
cagcggtcagcccattgggtaaatc

SEQ ID NO: 208708 - DNA, 25 bp, Artificial
  probe
  misc_feature (1)..(25): SEQ ID NO: 5076; WAN024FJE_at; Start 190; Stop 214
tctgaagcaaaaccgctaataaaat

SEQ ID NO: 208709 - DNA, 25 bp, Artificial
  probe
  misc_feature (1)..(25): SEQ ID NO: 5076; WAN024FJE_at; Start 106; Stop 130
gcagtaaccttgaatttacgtgtac

SEQ ID NO: 208710 - DNA, 25 bp, Artificial
  probe
  misc_feature (1)..(25): SEQ ID NO: 5076; WAN024FJE_at; Start 12; Stop 36
tttttgcggagtcgccacagcggtc

SEQ ID NO: 208711 - DNA, 25 bp, Artificial
  probe
  misc_feature (1)..(25): SEQ ID NO: 5076; WAN024FJE_at; Start 39; Stop 63
cccattgggtaaatcttcaatgctc

SEQ ID NO: 208712 - DNA, 25 bp, Artificial
  probe
  misc_feature (1)..(25): SEQ ID NO: 602; WAN024FJF_at; Start 308; Stop 332
gaacgattgaagttcctttgagcat

SEQ ID NO: 208713 - DNA, 25 bp, Artificial
  probe
  misc_feature (1)..(25): SEQ ID NO: 602; WAN024FJF_at; Start 439; Stop 463
gaccctagtcaaattgatagtcggg

SEQ ID NO: 208714 - DNA, 25 bp, Artificial
  probe
  misc_feature (1)..(25): SEQ ID NO: 602; WAN024FJF_at; Start 466; Stop 490
caaattgaaaatgtcatggtgtcag

SEQ ID NO: 208715 - DNA, 25 bp, Artificial
  probe
  misc_feature (1)..(25): SEQ ID NO: 602; WAN024FJF_at; Start 745; Stop 769
tcgtcaacgaaagcaactagttcaa

SEQ ID NO: 208716 - DNA, 25 bp, Artificial
  probe
  misc_feature (1)..(25): SEQ ID NO: 602; WAN024FJF_at; Start 362; Stop 386
tggcgactccgcaaaaaattacagt

SEQ ID NO: 208717 - DNA, 25 bp, Artificial
  probe
  misc_feature (1)..(25): SEQ ID NO: 602; WAN024FJF_at; Start 383; Stop 407
cagtcaagattggtaagaaggctca

SEQ ID NO: 208718 - DNA, 25 bp, Artificial
  probe
  misc_feature (1)..(25): SEQ ID NO: 602; WAN024FJF_at; Start 701; Stop 725
caagcacatcaaattcaagtacaag

SEQ ID NO: 208719 - DNA, 25 bp, Artificial
  probe
  misc_feature (1)..(25): SEQ ID NO: 602; WAN024FJF_at; Start 507; Stop 531
tacgagtgaccaagagacattggat

SEQ ID NO: 208720 - DNA, 25 bp, Artificial
  probe
  misc_feature (1)..(25): SEQ ID NO: 602; WAN024FJF_at; Start 479; Stop 503
tcatggtgtcagataaagaagtgtc

SEQ ID NO: 208721 - DNA, 25 bp, Artificial
  probe
  misc_feature (1)..(25): SEQ ID NO: 602; WAN024FJF_at; Start 183; Stop 207
tagcggttttgcttcagaagtatca

SEQ ID NO: 208722 - DNA, 25 bp, Artificial
  probe
  misc_feature (1)..(25): SEQ ID NO: 602; WAN024FJF_at; Start 293; Stop 317
cagatgccggtgttggaacgattga

SEQ ID NO: 208723 - DNA, 25 bp, Artificial
  probe
  misc_feature (1)..(25): SEQ ID NO: 602; WAN024FJF_at; Start 686; Stop 710
cagtagcaccaagttcaagcacatc

SEQ ID NO: 208724 - DNA, 25 bp, Artificial
  probe
  misc_feature (1)..(25): SEQ ID NO: 602; WAN024FJF_at; Start 78; Stop 102
ttttcaaaacagtaccagtgctagg

SEQ ID NO: 208725 - DNA, 25 bp, Artificial
  probe
  misc_feature (1)..(25): SEQ ID NO: 602; WAN024FJF_at; Start 278; Stop 302
ttactgctgacctaacagatgccgg

SEQ ID NO: 208726 - DNA, 25 bp, Artificial
  probe
  misc_feature (1)..(25): SEQ ID NO: 602; WAN024FJF_at; Start 63; Stop 87
tgctacggcgacgaattttcaaaac

SEQ ID NO: 208727 - DNA, 25 bp, Artificial
  probe
  misc_feature (1)..(25): SEQ ID NO: 602; WAN024FJF_at; Start 669; Stop 693
gaaggtgactacaaaaccagtagca

SEQ ID NO: 208728 - DNA, 25 bp, Artificial
  probe
  misc_feature (1)..(25): SEQ ID NO: 602; WAN024FJF_at; Start 653; Stop 677
cgtttgatacaataatgaaggtgac

SEQ ID NO: 208729 - DNA, 25 bp, Artificial
  probe
  misc_feature (1)..(25): SEQ ID NO: 602; WAN024FJF_at; Start 337; Stop 361
gatttacccaatgggctgaccgctg

SEQ ID NO: 208730 - DNA, 25 bp, Artificial
  probe
  misc_feature (1)..(25): SEQ ID NO: 602; WAN024FJF_at; Start 716; Stop 740
caagtacaagcagttcatcggagac

SEQ ID NO: 208731 - DNA, 25 bp, Artificial
  probe
  misc_feature (1)..(25): SEQ ID NO: 602; WAN024FJF_at; Start 635; Stop 659
taccggcagttatcactccgtttga

SEQ ID NO: 208732 - DNA, 25 bp, Artificial
  probe
  misc_feature (1)..(25): SEQ ID NO: 602; WAN024FJF_at; Start 246; Stop 270
tgaaatgcaagaaagtacacgtaaa

SEQ ID NO: 208733 - DNA, 25 bp, Artificial
  probe
  misc_feature (1)..(25): SEQ ID NO: 602; WAN024FJF_at; Start 216; Stop 240
gactggtgcaaatcgcctatcgcta

SEQ ID NO: 208734 - DNA, 25 bp, Artificial
  probe
  misc_feature (1)..(25): SEQ ID NO: 602; WAN024FJF_at; Start 231; Stop 255
cctatcgctagctagtgaaatgcaa

SEQ ID NO: 208735 - DNA, 25 bp, Artificial
  probe
  misc_feature (1)..(25): SEQ ID NO: 602; WAN024FJF_at; Start 48; Stop 72
tgtcttatttgtctatgctacggcg

SEQ ID NO: 208736 - DNA, 25 bp, Artificial
  probe
  misc_feature (1)..(25): SEQ ID NO: 602; WAN024FJF_at; Start 322; Stop 346
cctttgagcattgaagatttaccca

SEQ ID NO: 208737 - DNA, 25 bp, Artificial
  probe
  misc_feature (1)..(25): SEQ ID NO: 602; WAN024FJF_at; Start 730; Stop 754
tcatcggagacatcttcgtcaacga

SEQ ID NO: 208738 - DNA, 25 bp, Artificial
  probe
  misc_feature (1)..(25): SEQ ID NO: 602; WAN024FJF_at; Start 203; Stop 227
tatcagtggtcttgactggtgcaaa

SEQ ID NO: 208739 - DNA, 25 bp, Artificial
  probe
  misc_feature (1)..(25): SEQ ID NO: 602; WAN024FJF_at; Start 93; Stop 117
cagtgctaggcaggtaaaaacggaa

SEQ ID NO: 208740 - DNA, 25 bp, Artificial
  probe
  misc_feature (1)..(25): SEQ ID NO: 602; WAN024FJF_at; Start 419; Stop 443
taaagattgtaccagagattgaccc

SEQ ID NO: 208741 - DNA, 25 bp, Artificial
  probe
  misc_feature (1)..(25): SEQ ID NO: 602; WAN024FJF_at; Start 592; Stop 616
ggttcagtacctttgcaggcaatcg

SEQ ID NO: 208742 - DNA, 25 bp, Artificial
  probe
  misc_feature (1)..(25): SEQ ID NO: 602; WAN024FJF_at; Start 577; Stop 601
acaggtaattacagtggttcagtac

SEQ ID NO: 208743 - DNA, 25 bp, Artificial
  probe
  misc_feature (1)..(25): SEQ ID NO: 602; WAN024FJF_at; Start 399; Stop 423
gaaggctcagaaggataaggtaaag

SEQ ID NO: 208744 - DNA, 25 bp, Artificial
  probe
  misc_feature (1)..(25): SEQ ID NO: 602; WAN024FJF_at; Start 265; Stop 289
cgtaaattcaaggttactgctgacc

SEQ ID NO: 208745 - DNA, 25 bp, Artificial
  probe
  misc_feature (1)..(25): SEQ ID NO: 602; WAN024FJF_at; Start 619; Stop 643
cgcaatggtgttgtcttaccggcag

SEQ ID NO: 208746 - DNA, 25 bp, Artificial
  probe
  misc_feature (1)..(25): SEQ ID NO: 5271; WAN024FJG_at; Start 54; Stop 78
caggagctccattttcattttccca

SEQ ID NO: 208747 - DNA, 25 bp, Artificial
  probe
  misc_feature (1)..(25): SEQ ID NO: 5271; WAN024FJG_at; Start 132; Stop 156
taagattcatgtctttctccatcgg

SEQ ID NO: 208748 - DNA, 25 bp, Artificial
  probe
  misc_feature (1)..(25): SEQ ID NO: 5271; WAN024FJG_at; Start 147; Stop 171
tctccatcggctacaatattataag

SEQ ID NO: 208749 - DNA, 25 bp, Artificial
  probe
  misc_feature (1)..(25): SEQ ID NO: 5271; WAN024FJG_at; Start 99; Stop 123
aatgatactgactaacaaattcttg

SEQ ID NO: 208750 - DNA, 25 bp, Artificial
  probe
  misc_feature (1)..(25): SEQ ID NO: 5271; WAN024FJG_at; Start 135; Stop 159
gattcatgtctttctccatcggcta

SEQ ID NO: 208751 - DNA, 25 bp, Artificial
  probe
  misc_feature (1)..(25): SEQ ID NO: 5271; WAN024FJG_at; Start 153; Stop 177
tcggctacaatattataagctattg

SEQ ID NO: 208752 - DNA, 25 bp, Artificial
  probe
  misc_feature (1)..(25): SEQ ID NO: 5271; WAN024FJG_at; Start 75; Stop 99
cccattcaaaattacgcgcatcaaa

SEQ ID NO: 208753 - DNA, 25 bp, Artificial
  probe
  misc_feature (1)..(25): SEQ ID NO: 5271; WAN024FJG_at; Start 19; Stop 43
ttggagcaattggaaattcacatcc

SEQ ID NO: 208754 - DNA, 25 bp, Artificial
  probe
  misc_feature (1)..(25): SEQ ID NO: 5271; WAN024FJG_at; Start 90; Stop 114
gcgcatcaaaatgatactgactaac

SEQ ID NO: 208755 - DNA, 25 bp, Artificial
  probe
  misc_feature (1)..(25): SEQ ID NO: 5271; WAN024FJG_at; Start 168; Stop 192
taagctattgtaccataatttttta

SEQ ID NO: 208756 - DNA, 25 bp, Artificial
  probe
  misc_feature (1)..(25): SEQ ID NO: 5271; WAN024FJG_at; Start 36; Stop 60
tcacatccaccttggtttcaggagc

SEQ ID NO: 208757 - DNA, 25 bp, Artificial
  probe
  misc_feature (1)..(25): SEQ ID NO: 5271; WAN024FJG_at; Start 227; Stop 251
aatttcagcacgaactacatctgtg

SEQ ID NO: 208758 - DNA, 25 bp, Artificial
  probe
  misc_feature (1)..(25): SEQ ID NO: 5271; WAN024FJG_at; Start 49; Stop 73
ggtttcaggagctccattttcattt

SEQ ID NO: 208759 - DNA, 25 bp, Artificial
  probe
  misc_feature (1)..(25): SEQ ID NO: 5271; WAN024FJG_at; Start 15; Stop 39
catgttggagcaattggaaattcac

SEQ ID NO: 208760 - DNA, 25 bp, Artificial
  probe
  misc_feature (1)..(25): SEQ ID NO: 5271; WAN024FJG_at; Start 138; Stop 162
tcatgtctttctccatcggctacaa

SEQ ID NO: 208761 - DNA, 25 bp, Artificial
  probe
  misc_feature (1)..(25): SEQ ID NO: 5271; WAN024FJG_at; Start 9; Stop 33
cttggtcatgttggagcaattggaa

SEQ ID NO: 208762 - DNA, 25 bp, Artificial
  probe
  misc_feature (1)..(25): SEQ ID NO: 5271; WAN024FJG_at; Start 212; Stop 236
gatttagtcaatcccaatttcagca

SEQ ID NO: 208763 - DNA, 25 bp, Artificial
  probe
  misc_feature (1)..(25): SEQ ID NO: 5271; WAN024FJG_at; Start 41; Stop 65
tccaccttggtttcaggagctccat

SEQ ID NO: 208764 - DNA, 25 bp, Artificial
  probe
  misc_feature (1)..(25): SEQ ID NO: 5271; WAN024FJG_at; Start 3; Stop 27
gattttcttggtcatgttggagcaa

SEQ ID NO: 208765 - DNA, 25 bp, Artificial
  probe
  misc_feature (1)..(25): SEQ ID NO: 5271; WAN024FJG_at; Start 141; Stop 165
tgtctttctccatcggctacaatat

SEQ ID NO: 208766 - DNA, 25 bp, Artificial
  probe
  misc_feature (1)..(25): SEQ ID NO: 5271; WAN024FJG_at; Start 216; Stop 240
tagtcaatcccaatttcagcacgaa

SEQ ID NO: 208767 - DNA, 25 bp, Artificial
  probe
  misc_feature (1)..(25): SEQ ID NO: 5271; WAN024FJG_at; Start 84; Stop 108
aattacgcgcatcaaaatgatactg

SEQ ID NO: 208768 - DNA, 25 bp, Artificial
  probe
  misc_feature (1)..(25): SEQ ID NO: 5271; WAN024FJG_at; Start 87; Stop 111
tacgcgcatcaaaatgatactgact

SEQ ID NO: 208769 - DNA, 25 bp, Artificial
  probe
  misc_feature (1)..(25): SEQ ID NO: 5271; WAN024FJG_at; Start 220; Stop 244
caatcccaatttcagcacgaactac

SEQ ID NO: 208770 - DNA, 25 bp, Artificial
  probe
  misc_feature (1)..(25): SEQ ID NO: 5271; WAN024FJG_at; Start 33; Stop 57
aattcacatccaccttggtttcagg

SEQ ID NO: 208771 - DNA, 25 bp, Artificial
  probe
  misc_feature (1)..(25): SEQ ID NO: 5271; WAN024FJG_at; Start 72; Stop 96
tttcccattcaaaattacgcgcatc

SEQ ID NO: 208772 - DNA, 25 bp, Artificial
  probe
  misc_feature (1)..(25): SEQ ID NO: 5271; WAN024FJG_at; Start 22; Stop 46
gagcaattggaaattcacatccacc

SEQ ID NO: 208773 - DNA, 25 bp, Artificial
  probe
  misc_feature (1)..(25): SEQ ID NO: 5271; WAN024FJG_at; Start 120; Stop 144
cttgttcacgtttaagattcatgtc

SEQ ID NO: 208774 - DNA, 25 bp, Artificial
  probe
  misc_feature (1)..(25): SEQ ID NO: 5271; WAN024FJG_at; Start 197; Stop 221
catctagttttctaggatttagtca

SEQ ID NO: 208775 - DNA, 25 bp, Artificial
  probe
  misc_feature (1)..(25): SEQ ID NO: 5271; WAN024FJG_at; Start 26; Stop 50
aattggaaattcacatccaccttgg

SEQ ID NO: 208776 - DNA, 25 bp, Artificial
  probe
  misc_feature (1)..(25): SEQ ID NO: 5271; WAN024FJG_at; Start 81; Stop 105
caaaattacgcgcatcaaaatgata

SEQ ID NO: 208777 - DNA, 25 bp, Artificial
  probe
  misc_feature (1)..(25): SEQ ID NO: 5271; WAN024FJG_at; Start 105; Stop 129
actgactaacaaattcttgttcacg

SEQ ID NO: 208778 - DNA, 25 bp, Artificial
  probe
  misc_feature (1)..(25): SEQ ID NO: 5271; WAN024FJG_at; Start 59; Stop 83
gctccattttcattttcccattcaa

SEQ ID NO: 208779 - DNA, 25 bp, Artificial
  probe
  misc_feature (1)..(25): SEQ ID NO: 5271; WAN024FJG_at; Start 45; Stop 69
ccttggtttcaggagctccattttc

SEQ ID NO: 208780 - DNA, 25 bp, Artificial
  probe
  misc_feature (1)..(25): SEQ ID NO: 2271; WAN024FJH_at; Start 139; Stop 163
gaccaagaaaatcaagtgacttcct

SEQ ID NO: 208781 - DNA, 25 bp, Artificial
  probe
  misc_feature (1)..(25): SEQ ID NO: 2271; WAN024FJH_at; Start 85; Stop 109
gaaaatggagctcctgaaaccaagg

SEQ ID NO: 208782 - DNA, 25 bp, Artificial
  probe
  misc_feature (1)..(25): SEQ ID NO: 2271; WAN024FJH_at; Start 205; Stop 229
gtcattagtggaacaatctcacaag

SEQ ID NO: 208783 - DNA, 25 bp, Artificial
  probe
  misc_feature (1)..(25): SEQ ID NO: 2271; WAN024FJH_at; Start 58; Stop 82
gatgcgcgtaattttgaatgggaaa

SEQ ID NO: 208784 - DNA, 25 bp, Artificial
  probe
  misc_feature (1)..(25): SEQ ID NO: 2271; WAN024FJH_at; Start 156; Stop 180
gacttccttgattgtcatcttgagc

SEQ ID NO: 208785 - DNA, 25 bp, Artificial
  probe
  misc_feature (1)..(25): SEQ ID NO: 2271; WAN024FJH_at; Start 241; Stop 265
gatggccgtattgtcaatgaaccaa

SEQ ID NO: 208786 - DNA, 25 bp, Artificial
  probe
  misc_feature (1)..(25): SEQ ID NO: 2271; WAN024FJH_at; Start 102; Stop 126
aaccaaggtggatgtgaatttccaa

SEQ ID NO: 208787 - DNA, 25 bp, Artificial
  probe
  misc_feature (1)..(25): SEQ ID NO: 2271; WAN024FJH_at; Start 111; Stop 135
ggatgtgaatttccaattgctccaa

SEQ ID NO: 208788 - DNA, 25 bp, Artificial
  probe
  misc_feature (1)..(25): SEQ ID NO: 2271; WAN024FJH_at; Start 214; Stop 238
ggaacaatctcacaagtaaaccata

SEQ ID NO: 208789 - DNA, 25 bp, Artificial
  probe
  misc_feature (1)..(25): SEQ ID NO: 2271; WAN024FJH_at; Start 128; Stop 152
tgctccaacatgaccaagaaaatca

SEQ ID NO: 208790 - DNA, 25 bp, Artificial
  probe
  misc_feature (1)..(25): SEQ ID NO: 2271; WAN024FJH_at; Start 10; Stop 34
gacatgaatcttaaacgtgaacaag

SEQ ID NO: 208791 - DNA, 25 bp, Artificial
  probe
  misc_feature (1)..(25): SEQ ID NO: 2271; WAN024FJH_at; Start 226; Stop 250
caagtaaaccatatcgatggccgta

SEQ ID NO: 208792 - DNA, 25 bp, Artificial
  probe
  misc_feature (1)..(25): SEQ ID NO: 2271; WAN024FJH_at; Start 282; Stop 306
agaggtggaaaccttggctcgtcca

SEQ ID NO: 208793 - DNA, 25 bp, Artificial
  probe
  misc_feature (1)..(25): SEQ ID NO: 2271; WAN024FJH_at; Start 289; Stop 313
gaaaccttggctcgtccatgtttga

SEQ ID NO: 208794 - DNA, 25 bp, Artificial
  probe
  misc_feature (1)..(25): SEQ ID NO: 2271; WAN024FJH_at; Start 277; Stop 301
caagaagaggtggaaaccttggctc

SEQ ID NO: 208795 - DNA, 25 bp, Artificial
  probe
  misc_feature (1)..(25): SEQ ID NO: 2271; WAN024FJH_at; Start 90; Stop 114
tggagctcctgaaaccaaggtggat

SEQ ID NO: 208796 - DNA, 25 bp, Artificial
  probe
  misc_feature (1)..(25): SEQ ID NO: 2271; WAN024FJH_at; Start 293; Stop 317
ccttggctcgtccatgtttgaacat

SEQ ID NO: 208797 - DNA, 25 bp, Artificial
  probe
  misc_feature (1)..(25): SEQ ID NO: 2271; WAN024FJH_at; Start 267; Stop 291
tgaattgaaccaagaagaggtggaa

SEQ ID NO: 208798 - DNA, 25 bp, Artificial
  probe
  misc_feature (1)..(25): SEQ ID NO: 2271; WAN024FJH_at; Start 307; Stop 331
tgtttgaacatgctcaatcgtttga

SEQ ID NO: 208799 - DNA, 25 bp, Artificial
  probe
  misc_feature (1)..(25): SEQ ID NO: 2271; WAN024FJH_at; Start 183; Stop 207
tatgattgtatttgataagtttgtc

SEQ ID NO: 208800 - DNA, 25 bp, Artificial
  probe
  misc_feature (1)..(25): SEQ ID NO: 2271; WAN024FJH_at; Start 94; Stop 118
gctcctgaaaccaaggtggatgtga

SEQ ID NO: 208801 - DNA, 25 bp, Artificial
  probe
  misc_feature (1)..(25): SEQ ID NO: 2271; WAN024FJH_at; Start 30; Stop 54
acaagaatttgttagtcagtatcat

SEQ ID NO: 208802 - DNA, 25 bp, Artificial
  probe
  misc_feature (1)..(25): SEQ ID NO: 2271; WAN024FJH_at; Start 168; Stop 192
tgtcatcttgagctttatgattgta

SEQ ID NO: 208803 - DNA, 25 bp, Artificial
  probe
  misc_feature (1)..(25): SEQ ID NO: 2271; WAN024FJH_at; Start 345; Stop 369
tgaaattgcattagacttaccagga

SEQ ID NO: 208804 - DNA, 25 bp, Artificial
  probe
  misc_feature (1)..(25): SEQ ID NO: 2271; WAN024FJH_at; Start 237; Stop 261
tatcgatggccgtattgtcaatgaa

SEQ ID NO: 208805 - DNA, 25 bp, Artificial
  probe
  misc_feature (1)..(25): SEQ ID NO: 2271; WAN024FJH_at; Start 121; Stop 145
ttccaattgctccaacatgaccaag

SEQ ID NO: 208806 - DNA, 25 bp, Artificial
  probe
  misc_feature (1)..(25): SEQ ID NO: 2271; WAN024FJH_at; Start 365; Stop 389
caggaattaatttggagttctaact

SEQ ID NO: 208807 - DNA, 25 bp, Artificial
  probe
  misc_feature (1)..(25): SEQ ID NO: 2271; WAN024FJH_at; Start 321; Stop 345
caatcgtttgacttacgaagtgact

SEQ ID NO: 208808 - DNA, 25 bp, Artificial
  probe
  misc_feature (1)..(25): SEQ ID NO: 2271; WAN024FJH_at; Start 73; Stop 97
gaatgggaaaatgaaaatggagctc

SEQ ID NO: 208809 - DNA, 25 bp, Artificial
  probe
  misc_feature (1)..(25): SEQ ID NO: 2271; WAN024FJH_at; Start 196; Stop 220
gataagtttgtcattagtggaacaa

SEQ ID NO: 208810 - DNA, 25 bp, Artificial
  probe
  misc_feature (1)..(25): SEQ ID NO: 2271; WAN024FJH_at; Start 330; Stop 354
gacttacgaagtgactgaaattgca

SEQ ID NO: 208811 - DNA, 25 bp, Artificial
  probe
  misc_feature (1)..(25): SEQ ID NO: 2271; WAN024FJH_at; Start 356; Stop 380
tagacttaccaggaattaatttgga

SEQ ID NO: 208812 - DNA, 25 bp, Artificial
  probe
  misc_feature (1)..(25): SEQ ID NO: 2271; WAN024FJH_at; Start 2; Stop 26
tggagaaagacatgaatcttaaacg

SEQ ID NO: 208813 - DNA, 25 bp, Artificial
  probe
  misc_feature (1)..(25): SEQ ID NO: 2271; WAN024FJH_at; Start 44; Stop 68
gtcagtatcattttgatgcgcgtaa

SEQ ID NO: 208814 - DNA, 25 bp, Artificial
  probe
  misc_feature (1)..(25): SEQ ID NO: 2600; WAN024FJI_at; Start 680; Stop 704
tggtcaaagaaagtgggtcagctat

SEQ ID NO: 208815 - DNA, 25 bp, Artificial
  probe
  misc_feature (1)..(25): SEQ ID NO: 2600; WAN024FJI_at; Start 203; Stop 227
tagggattcacgtatacaaacttgg

SEQ ID NO: 208816 - DNA, 25 bp, Artificial
  probe
  misc_feature (1)..(25): SEQ ID NO: 2600; WAN024FJI_at; Start 260; Stop 284
ttgaaactgaaggagcaagtgccgg

SEQ ID NO: 208817 - DNA, 25 bp, Artificial
  probe
  misc_feature (1)..(25): SEQ ID NO: 2600; WAN024FJI_at; Start 126; Stop 150
gaaagtctttgtaggacgtgacaca

SEQ ID NO: 208818 - DNA, 25 bp, Artificial
  probe
  misc_feature (1)..(25): SEQ ID NO: 2600; WAN024FJI_at; Start 1085; Stop 1109
tggcggcagaagtaacgatttatcc

SEQ ID NO: 208819 - DNA, 25 bp, Artificial
  probe
  misc_feature (1)..(25): SEQ ID NO: 2600; WAN024FJI_at; Start 389; Stop 413
ccttgctagatgctgaggaagacac

SEQ ID NO: 208820 - DNA, 25 bp, Artificial
  probe
  misc_feature (1)..(25): SEQ ID NO: 2600; WAN024FJI_at; Start 869; Stop 893
tccacaaggccttgaatcgcgaagg

SEQ ID NO: 208821 - DNA, 25 bp, Artificial
  probe
  misc_feature (1)..(25): SEQ ID NO: 2600; WAN024FJI_at; Start 996; Stop 1020
gatggattacaataccacaggtgat

SEQ ID NO: 208822 - DNA, 25 bp, Artificial
  probe
  misc_feature (1)..(25): SEQ ID NO: 2600; WAN024FJI_at; Start 921; Stop 945
tgaccgctacgttgttgaagaaatg

SEQ ID NO: 208823 - DNA, 25 bp, Artificial
  probe
  misc_feature (1)..(25): SEQ ID NO: 2600; WAN024FJI_at; Start 1215; Stop 1239
gaacggccgtatccttgttcgtcca

SEQ ID NO: 208824 - DNA, 25 bp, Artificial
  probe
  misc_feature (1)..(25): SEQ ID NO: 2600; WAN024FJI_at; Start 958; Stop 982
tacaaccttggtggtgaacagtctg

SEQ ID NO: 208825 - DNA, 25 bp, Artificial
  probe
  misc_feature (1)..(25): SEQ ID NO: 2600; WAN024FJI_at; Start 1068; Stop 1092
taagagcttatcagagttggcggca

SEQ ID NO: 208826 - DNA, 25 bp, Artificial
  probe
  misc_feature (1)..(25): SEQ ID NO: 2600; WAN024FJI_at; Start 558; Stop 582
taccagtgcccgtcaaatctttgca

SEQ ID NO: 208827 - DNA, 25 bp, Artificial
  probe
  misc_feature (1)..(25): SEQ ID NO: 2600; WAN024FJI_at; Start 1158; Stop 1182
catggaagtgccagctatcaaggcc

SEQ ID NO: 208828 - DNA, 25 bp, Artificial
  probe
  misc_feature (1)..(25): SEQ ID NO: 2600; WAN024FJI_at; Start 507; Stop 531
tcctcttgatggaatgaaggttgcc

SEQ ID NO: 208829 - DNA, 25 bp, Artificial
  probe
  misc_feature (1)..(25): SEQ ID NO: 2600; WAN024FJI_at; Start 1256; Stop 1280
tcttgcgtgttatggcagaagcgcc

SEQ ID NO: 208830 - DNA, 25 bp, Artificial
  probe
  misc_feature (1)..(25): SEQ ID NO: 2600; WAN024FJI_at; Start 341; Stop 365
gcggtgatggcttcaaactagatga

SEQ ID NO: 208831 - DNA, 25 bp, Artificial
  probe
  misc_feature (1)..(25): SEQ ID NO: 2600; WAN024FJI_at; Start 322; Stop 346
aacggaatcaagttctttggcggtg

SEQ ID NO: 208832 - DNA, 25 bp, Artificial
  probe
  misc_feature (1)..(25): SEQ ID NO: 2600; WAN024FJI_at; Start 26; Stop 50
gagtccgtggagaagctaacctaga

SEQ ID NO: 208833 - DNA, 25 bp, Artificial
  probe
  misc_feature (1)..(25): SEQ ID NO: 2600; WAN024FJI_at; Start 543; Stop 567
taatggagcagcttctaccagtgcc

SEQ ID NO: 208834 - DNA, 25 bp, Artificial
  probe
  misc_feature (1)..(25): SEQ ID NO: 2600; WAN024FJI_at; Start 973; Stop 997
gaacagtctggtcacgttatcttga

SEQ ID NO: 208835 - DNA, 25 bp, Artificial
  probe
  misc_feature (1)..(25): SEQ ID NO: 2600; WAN024FJI_at; Start 188; Stop 212
caggtctcctttcagtagggattca

SEQ ID NO: 208836 - DNA, 25 bp, Artificial
  probe
  misc_feature (1)..(25): SEQ ID NO: 2600; WAN024FJI_at; Start 645; Stop 669
tgttggttcaacacatccagaagcc

SEQ ID NO: 208837 - DNA, 25 bp, Artificial
  probe
  misc_feature (1)..(25): SEQ ID NO: 2600; WAN024FJI_at; Start 905; Stop 929
cagttactgcagttggtgaccgcta

SEQ ID NO: 208838 - DNA, 25 bp, Artificial
  probe
  misc_feature (1)..(25): SEQ ID NO: 2600; WAN024FJI_at; Start 885; Stop 909
tcgcgaaggtattaacaaggcagtt

SEQ ID NO: 208839 - DNA, 25 bp, Artificial
  probe
  misc_feature (1)..(25): SEQ ID NO: 2600; WAN024FJI_at; Start 1011; Stop 1035
cacaggtgatggtcaattatcagca

SEQ ID NO: 208840 - DNA, 25 bp, Artificial
  probe
  misc_feature (1)..(25): SEQ ID NO: 2600; WAN024FJI_at; Start 730; Stop 754
gaccgcttgattgctgttgatgaga

SEQ ID NO: 208841 - DNA, 25 bp, Artificial
  probe
  misc_feature (1)..(25): SEQ ID NO: 2600; WAN024FJI_at; Start 527; Stop 551
ttgccttggatacagctaatggagc

SEQ ID NO: 208842 - DNA, 25 bp, Artificial
  probe
  misc_feature (1)..(25): SEQ ID NO: 2600; WAN024FJI_at; Start 306; Stop 330
caacccagcccttgataacggaatc

SEQ ID NO: 208843 - DNA, 25 bp, Artificial
  probe
  misc_feature (1)..(25): SEQ ID NO: 2600; WAN024FJI_at; Start 1270; Stop 1294
gcagaagcgcctacaacagaagaag

SEQ ID NO: 208844 - DNA, 25 bp, Artificial
  probe
  misc_feature (1)..(25): SEQ ID NO: 2600; WAN024FJI_at; Start 1173; Stop 1197
tatcaaggccatcatcgagaagatg

SEQ ID NO: 208845 - DNA, 25 bp, Artificial
  probe
  misc_feature (1)..(25): SEQ ID NO: 2600; WAN024FJI_at; Start 102; Stop 126
tagtcaacatgaaacggaagcgccg

SEQ ID NO: 208846 - DNA, 25 bp, Artificial
  probe
  misc_feature (1)..(25): SEQ ID NO: 2600; WAN024FJI_at; Start 172; Stop 196
gaatcggccttggtggcaggtctcc

SEQ ID NO: 208847 - DNA, 25 bp, Artificial
  probe
  misc_feature (1)..(25): SEQ ID NO: 2600; WAN024FJI_at; Start 572; Stop 596
aaatctttgcagaccttggtgccca

SEQ ID NO: 208848 - DNA, 25 bp, Artificial
  probe
  misc_feature (1)..(25): SEQ ID NO: 2294; WAN024FJJ_at; Start 30; Stop 54
tagtaaaatcatggaaacagtaaac

SEQ ID NO: 208849 - DNA, 25 bp, Artificial
  probe
  misc_feature (1)..(25): SEQ ID NO: 2294; WAN024FJJ_at; Start 92; Stop 116
catcgagaaatattattagacaagc

SEQ ID NO: 208850 - DNA, 25 bp, Artificial
  probe
  misc_feature (1)..(25): SEQ ID NO: 2294; WAN024FJJ_at; Start 81; Stop 105
tccagagcacacatcgagaaatatt

SEQ ID NO: 208851 - DNA, 25 bp, Artificial
  probe
  misc_feature (1)..(25): SEQ ID NO: 2294; WAN024FJJ_at; Start 169; Stop 193
gcggtacaattaggatgttcacctt

SEQ ID NO: 208852 - DNA, 25 bp, Artificial
  probe
  misc_feature (1)..(25): SEQ ID NO: 2294; WAN024FJJ_at; Start 72; Stop 96
gattggttttccagagcacacatcg

SEQ ID NO: 208853 - DNA, 25 bp, Artificial
  probe
  misc_feature (1)..(25): SEQ ID NO: 2294; WAN024FJJ_at; Start 69; Stop 93
tgcgattggttttccagagcacaca

SEQ ID NO: 208854 - DNA, 25 bp, Artificial
  probe
  misc_feature (1)..(25): SEQ ID NO: 2294; WAN024FJJ_at; Start 39; Stop 63
catggaaacagtaaactataaagat

SEQ ID NO: 208855 - DNA, 25 bp, Artificial
  probe
  misc_feature (1)..(25): SEQ ID NO: 2294; WAN024FJJ_at; Start 121; Stop 145
aagattgctgtaaaaaagtttgaag

SEQ ID NO: 208856 - DNA, 25 bp, Artificial
  probe
  misc_feature (1)..(25): SEQ ID NO: 2294; WAN024FJJ_at; Start 194; Stop 218
tcgataataaaaggttaggcattgc

SEQ ID NO: 208857 - DNA, 25 bp, Artificial
  probe
  misc_feature (1)..(25): SEQ ID NO: 2294; WAN024FJJ_at; Start 213; Stop 237
cattgctcctaaaaatattgtagaa

SEQ ID NO: 208858 - DNA, 25 bp, Artificial
  probe
  misc_feature (1)..(25): SEQ ID NO: 2294; WAN024FJJ_at; Start 160; Stop 184
gataagaatgcggtacaattaggat

SEQ ID NO: 208859 - DNA, 25 bp, Artificial
  probe
  misc_feature (1)..(25): SEQ ID NO: 2294; WAN024FJJ_at; Start 61; Stop 85
gatttagttgcgattggttttccag

SEQ ID NO: 208860 - DNA, 25 bp, Artificial
  probe
  misc_feature (1)..(25): SEQ ID NO: 2294; WAN024FJJ_at; Start 16; Stop 40
tctaagaaaggaagtagtaaaatca

SEQ ID NO: 208861 - DNA, 25 bp, Artificial
  probe
  misc_feature (1)..(25): SEQ ID NO: 2294; WAN024FJJ_at; Start 166; Stop 190
aatgcggtacaattaggatgttcac

SEQ ID NO: 208862 - DNA, 25 bp, Artificial
  probe
  misc_feature (1)..(25): SEQ ID NO: 2294; WAN024FJJ_at; Start 83; Stop 107
cagagcacacatcgagaaatattat

SEQ ID NO: 208863 - DNA, 25 bp, Artificial
  probe
  misc_feature (1)..(25): SEQ ID NO: 2294; WAN024FJJ_at; Start 253; Stop 277
tctttttcagatatagaaggtgaga

SEQ ID NO: 208864 - DNA, 25 bp, Artificial
  probe
  misc_feature (1)..(25): SEQ ID NO: 2294; WAN024FJJ_at; Start 271; Stop 295
ggtgagaaaaatggttatatcaaag

SEQ ID NO: 208865 - DNA, 25 bp, Artificial
  probe
  misc_feature (1)..(25): SEQ ID NO: 2294; WAN024FJJ_at; Start 25; Stop 49
ggaagtagtaaaatcatggaaacag

SEQ ID NO: 208866 - DNA, 25 bp, Artificial
  probe
  misc_feature (1)..(25): SEQ ID NO: 2294; WAN024FJJ_at; Start 198; Stop 222
taataaaaggttaggcattgctcct

SEQ ID NO: 208867 - DNA, 25 bp, Artificial
  probe
  misc_feature (1)..(25): SEQ ID NO: 2294; WAN024FJJ_at; Start 1; Stop 25
atggaggtgaaaaaatctaagaaag

SEQ ID NO: 208868 - DNA, 25 bp, Artificial
  probe
  misc_feature (1)..(25): SEQ ID NO: 2294; WAN024FJJ_at; Start 54; Stop 78
ctataaagatttagttgcgattggt

SEQ ID NO: 208869 - DNA, 25 bp, Artificial
  probe
  misc_feature (1)..(25): SEQ ID NO: 2294; WAN024FJJ_at; Start 76; Stop 100
ggttttccagagcacacatcgagaa

SEQ ID NO: 208870 - DNA, 25 bp, Artificial
  probe
  misc_feature (1)..(25): SEQ ID NO: 2294; WAN024FJJ_at; Start 211; Stop 235
ggcattgctcctaaaaatattgtag

SEQ ID NO: 208871 - DNA, 25 bp, Artificial
  probe
  misc_feature (1)..(25): SEQ ID NO: 2294; WAN024FJJ_at; Start 128; Stop 152
ctgtaaaaaagtttgaagaagctag

SEQ ID NO: 208872 - DNA, 25 bp, Artificial
  probe
  misc_feature (1)..(25): SEQ ID NO: 2294; WAN024FJJ_at; Start 175; Stop 199
caattaggatgttcacctttcgata

SEQ ID NO: 208873 - DNA, 25 bp, Artificial
  probe
  misc_feature (1)..(25): SEQ ID NO: 2294; WAN024FJJ_at; Start 110; Stop 134
gacaagcaaaaaagattgctgtaaa

SEQ ID NO: 208874 - DNA, 25 bp, Artificial
  probe
  misc_feature (1)..(25): SEQ ID NO: 2294; WAN024FJJ_at; Start 201; Stop 225
taaaaggttaggcattgctcctaaa

SEQ ID NO: 208875 - DNA, 25 bp, Artificial
  probe
  misc_feature (1)..(25): SEQ ID NO: 2294; WAN024FJJ_at; Start 65; Stop 89
tagttgcgattggttttccagagca

SEQ ID NO: 208876 - DNA, 25 bp, Artificial
  probe
  misc_feature (1)..(25): SEQ ID NO: 2294; WAN024FJJ_at; Start 181; Stop 205
ggatgttcacctttcgataataaaa

SEQ ID NO: 208877 - DNA, 25 bp, Artificial
  probe
  misc_feature (1)..(25): SEQ ID NO: 2294; WAN024FJJ_at; Start 105; Stop 129
tattagacaagcaaaaaagattgct

SEQ ID NO: 208878 - DNA, 25 bp, Artificial
  probe
  misc_feature (1)..(25): SEQ ID NO: 2294; WAN024FJJ_at; Start 87; Stop 111
gcacacatcgagaaatattattaga

SEQ ID NO: 208879 - DNA, 25 bp, Artificial
  probe
  misc_feature (1)..(25): SEQ ID NO: 2294; WAN024FJJ_at; Start 74; Stop 98
ttggttttccagagcacacatcgag

SEQ ID NO: 208880 - DNA, 25 bp, Artificial
  probe
  misc_feature (1)..(25): SEQ ID NO: 2294; WAN024FJJ_at; Start 154; Stop 178
aaaaatgataagaatgcggtacaat

SEQ ID NO: 208881 - DNA, 25 bp, Artificial
  probe
  misc_feature (1)..(25): SEQ ID NO: 2294; WAN024FJJ_at; Start 260; Stop 284
cagatatagaaggtgagaaaaatgg

SEQ ID NO: 208882 - DNA, 25 bp, Artificial
  probe
  misc_feature (1)..(25): SEQ ID NO: 3519; WAN024FJK_at; Start 107; Stop 131
tttgcaaaaagattggatactctgg

SEQ ID NO: 208883 - DNA, 25 bp, Artificial
  probe
  misc_feature (1)..(25): SEQ ID NO: 3519; WAN024FJK_at; Start 251; Stop 275
caagaaaattaattgatggtagaca

SEQ ID NO: 208884 - DNA, 25 bp, Artificial
  probe
  misc_feature (1)..(25): SEQ ID NO: 3519; WAN024FJK_at; Start 392; Stop 416
taagtaagacggtaattgataccca

SEQ ID NO: 208885 - DNA, 25 bp, Artificial
  probe
  misc_feature (1)..(25): SEQ ID NO: 3519; WAN024FJK_at; Start 426; Stop 450
catgcatactgcgttattgaaagat

SEQ ID NO: 208886 - DNA, 25 bp, Artificial
  probe
  misc_feature (1)..(25): SEQ ID NO: 3519; WAN024FJK_at; Start 291; Stop 315
aaaattaataagagaagcaaaccag

SEQ ID NO: 208887 - DNA, 25 bp, Artificial
  probe
  misc_feature (1)..(25): SEQ ID NO: 3519; WAN024FJK_at; Start 629; Stop 653
gtggtagtttaatggctaaggcttc

SEQ ID NO: 208888 - DNA, 25 bp, Artificial
  probe
  misc_feature (1)..(25): SEQ ID NO: 3519; WAN024FJK_at; Start 585; Stop 609
tgactgcgttcttttgacatcaaaa

SEQ ID NO: 208889 - DNA, 25 bp, Artificial
  probe
  misc_feature (1)..(25): SEQ ID NO: 3519; WAN024FJK_at; Start 23; Stop 47
tagttagagatagtgaaatagttca

SEQ ID NO: 208890 - DNA, 25 bp, Artificial
  probe
  misc_feature (1)..(25): SEQ ID NO: 3519; WAN024FJK_at; Start 478; Stop 502
tctggttccacaaaagaagttgagg

SEQ ID NO: 208891 - DNA, 25 bp, Artificial
  probe
  misc_feature (1)..(25): SEQ ID NO: 3519; WAN024FJK_at; Start 642; Stop 666
ggctaaggcttctcaactattcata

SEQ ID NO: 208892 - DNA, 25 bp, Artificial
  probe
  misc_feature (1)..(25): SEQ ID NO: 3519; WAN024FJK_at; Start 727; Stop 751
gaagagattgcttctttgctgtcaa

SEQ ID NO: 208893 - DNA, 25 bp, Artificial
  probe
  misc_feature (1)..(25): SEQ ID NO: 3519; WAN024FJK_at; Start 444; Stop 468
gaaagataatgatttgataatagcg

SEQ ID NO: 208894 - DNA, 25 bp, Artificial
  probe
  misc_feature (1)..(25): SEQ ID NO: 3519; WAN024FJK_at; Start 464; Stop 488
tagcgtttagtttatctggttccac

SEQ ID NO: 208895 - DNA, 25 bp, Artificial
  probe
  misc_feature (1)..(25): SEQ ID NO: 3519; WAN024FJK_at; Start 409; Stop 433
gatacccattttcaactcatgcata

SEQ ID NO: 208896 - DNA, 25 bp, Artificial
  probe
  misc_feature (1)..(25): SEQ ID NO: 3519; WAN024FJK_at; Start 611; Stop 635
aagaatcttatttagagggtggtag

SEQ ID NO: 208897 - DNA, 25 bp, Artificial
  probe
  misc_feature (1)..(25): SEQ ID NO: 3519; WAN024FJK_at; Start 80; Stop 104
aagttggagagggaactcttaatcg

SEQ ID NO: 208898 - DNA, 25 bp, Artificial
  probe
  misc_feature (1)..(25): SEQ ID NO: 3519; WAN024FJK_at; Start 670; Stop 694
gatgtaatatgcactagactctctt

SEQ ID NO: 208899 - DNA, 25 bp, Artificial
  probe
  misc_feature (1)..(25): SEQ ID NO: 3519; WAN024FJK_at; Start 181; Stop 205
tctcaaaaaatgagtagtgacacat

SEQ ID NO: 208900 - DNA, 25 bp, Artificial
  probe
  misc_feature (1)..(25): SEQ ID NO: 3519; WAN024FJK_at; Start 49; Stop 73
gaaacgtcttcagaaattgttagta

SEQ ID NO: 208901 - DNA, 25 bp, Artificial
  probe
  misc_feature (1)..(25): SEQ ID NO: 3519; WAN024FJK_at; Start 264; Stop 288
tgatggtagacaaatagaattagct

SEQ ID NO: 208902 - DNA, 25 bp, Artificial
  probe
  misc_feature (1)..(25): SEQ ID NO: 3519; WAN024FJK_at; Start 37; Stop 61
gaaatagttcatgaaacgtcttcag

SEQ ID NO: 208903 - DNA, 25 bp, Artificial
  probe
  misc_feature (1)..(25): SEQ ID NO: 3519; WAN024FJK_at; Start 736; Stop 760
gcttctttgctgtcaaataaagtgg

SEQ ID NO: 208904 - DNA, 25 bp, Artificial
  probe
  misc_feature (1)..(25): SEQ ID NO: 3519; WAN024FJK_at; Start 337; Stop 361
tctagtggaaatgcggctagagaat

SEQ ID NO: 208905 - DNA, 25 bp, Artificial
  probe
  misc_feature (1)..(25): SEQ ID NO: 3519; WAN024FJK_at; Start 233; Stop 257
tatctattgtggaaagtacaagaaa

SEQ ID NO: 208906 - DNA, 25 bp, Artificial
  probe
  misc_feature (1)..(25): SEQ ID NO: 3519; WAN024FJK_at; Start 319; Stop 343
ttaatgattggtgtgggttctagtg

SEQ ID NO: 208907 - DNA, 25 bp, Artificial
  probe
  misc_feature (1)..(25): SEQ ID NO: 3519; WAN024FJK_at; Start 304; Stop 328
gaagcaaaccagattttaatgattg

SEQ ID NO: 208908 - DNA, 25 bp, Artificial
  probe
  misc_feature (1)..(25): SEQ ID NO: 3519; WAN024FJK_at; Start 572; Stop 596
tagcaaaattatctgactgcgttct

SEQ ID NO: 208909 - DNA, 25 bp, Artificial
  probe
  misc_feature (1)..(25): SEQ ID NO: 3519; WAN024FJK_at; Start 90; Stop 114
gggaactcttaatcgattttgcaaa

SEQ ID NO: 208910 - DNA, 25 bp, Artificial
  probe
  misc_feature (1)..(25): SEQ ID NO: 3519; WAN024FJK_at; Start 121; Stop 145
ggatactctggttttcaggaactaa

SEQ ID NO: 208911 - DNA, 25 bp, Artificial
  probe
  misc_feature (1)..(25): SEQ ID NO: 3519; WAN024FJK_at; Start 364; Stop 388
gagagtagtttgttaagaattggaa

SEQ ID NO: 208912 - DNA, 25 bp, Artificial
  probe
  misc_feature (1)..(25): SEQ ID NO: 3519; WAN024FJK_at; Start 156; Stop 180
gacgaaagatatattagagttagaa

SEQ ID NO: 208913 - DNA, 25 bp, Artificial
  probe
  misc_feature (1)..(25): SEQ ID NO: 3519; WAN024FJK_at; Start 192; Stop 216
gagtagtgacacatttattgatgaa

SEQ ID NO: 208914 - DNA, 25 bp, Artificial
  probe
  misc_feature (1)..(25): SEQ ID NO: 3519; WAN024FJK_at; Start 349; Stop 373
gcggctagagaatttgagagtagtt

SEQ ID NO: 208915 - DNA, 25 bp, Artificial
  probe
  misc_feature (1)..(25): SEQ ID NO: 3519; WAN024FJK_at; Start 551; Stop 575
caaattattcgtccagaaatatagc

SEQ ID NO: 208916 - DNA, 25 bp, Artificial
  probe
  misc_feature (1)..(25): SEQ ID NO: 4105; WAN024FJL_at; Start 280; Stop 304
actaagcgttatgaaaccataaggc

SEQ ID NO: 208917 - DNA, 25 bp, Artificial
  probe
  misc_feature (1)..(25): SEQ ID NO: 4105; WAN024FJL_at; Start 154; Stop 178
cagaagcgcgtgattatctttaatc

SEQ ID NO: 208918 - DNA, 25 bp, Artificial
  probe
  misc_feature (1)..(25): SEQ ID NO: 4105; WAN024FJL_at; Start 308; Stop 332
cctatcgtgacagcaagtggcagga

SEQ ID NO: 208919 - DNA, 25 bp, Artificial
  probe
  misc_feature (1)..(25): SEQ ID NO: 4105; WAN024FJL_at; Start 26; Stop 50
tcttatttttatctcaagtgtctca

SEQ ID NO: 208920 - DNA, 25 bp, Artificial
  probe
  misc_feature (1)..(25): SEQ ID NO: 4105; WAN024FJL_at; Start 312; Stop 336
tcgtgacagcaagtggcaggaacag

SEQ ID NO: 208921 - DNA, 25 bp, Artificial
  probe
  misc_feature (1)..(25): SEQ ID NO: 4105; WAN024FJL_at; Start 209; Stop 233
cagtgcttctgtcctttgaaggatc

SEQ ID NO: 208922 - DNA, 25 bp, Artificial
  probe
  misc_feature (1)..(25): SEQ ID NO: 4105; WAN024FJL_at; Start 257; Stop 281
tgtccttggtaggtgtgagatcaac

SEQ ID NO: 208923 - DNA, 25 bp, Artificial
  probe
  misc_feature (1)..(25): SEQ ID NO: 4105; WAN024FJL_at; Start 75; Stop 99
tcttgccagagatttgcaggataca

SEQ ID NO: 208924 - DNA, 25 bp, Artificial
  probe
  misc_feature (1)..(25): SEQ ID NO: 4105; WAN024FJL_at; Start 286; Stop 310
cgttatgaaaccataaggcttgcct

SEQ ID NO: 208925 - DNA, 25 bp, Artificial
  probe
  misc_feature (1)..(25): SEQ ID NO: 4105; WAN024FJL_at; Start 52; Stop 76
ccggcaagtcaggaggacctttatc

SEQ ID NO: 208926 - DNA, 25 bp, Artificial
  probe
  misc_feature (1)..(25): SEQ ID NO: 4105; WAN024FJL_at; Start 339; Stop 363
cattaccttgacaggcttcccagct

SEQ ID NO: 208927 - DNA, 25 bp, Artificial
  probe
  misc_feature (1)..(25): SEQ ID NO: 4105; WAN024FJL_at; Start 151; Stop 175
gtgcagaagcgcgtgattatcttta

SEQ ID NO: 208928 - DNA, 25 bp, Artificial
  probe
  misc_feature (1)..(25): SEQ ID NO: 4105; WAN024FJL_at; Start 299; Stop 323
taaggcttgcctatcgtgacagcaa

SEQ ID NO: 208929 - DNA, 25 bp, Artificial
  probe
  misc_feature (1)..(25): SEQ ID NO: 4105; WAN024FJL_at; Start 380; Stop 404
agctggatcacttggaaggacgaat

SEQ ID NO: 208930 - DNA, 25 bp, Artificial
  probe
  misc_feature (1)..(25): SEQ ID NO: 4105; WAN024FJL_at; Start 64; Stop 88
gaggacctttatcttgccagagatt

SEQ ID NO: 208931 - DNA, 25 bp, Artificial
  probe
  misc_feature (1)..(25): SEQ ID NO: 4105; WAN024FJL_at; Start 353; Stop 377
gcttcccagctcagatttgccagca

SEQ ID NO: 208932 - DNA, 25 bp, Artificial
  probe
  misc_feature (1)..(25): SEQ ID NO: 4105; WAN024FJL_at; Start 316; Stop 340
gacagcaagtggcaggaacagacca

SEQ ID NO: 208933 - DNA, 25 bp, Artificial
  probe
  misc_feature (1)..(25): SEQ ID NO: 4105; WAN024FJL_at; Start 167; Stop 191
ttatctttaatcttggcttggttcc

SEQ ID NO: 208934 - DNA, 25 bp, Artificial
  probe
  misc_feature (1)..(25): SEQ ID NO: 4105; WAN024FJL_at; Start 376; Stop 400
catgagctggatcacttggaaggac

SEQ ID NO: 208935 - DNA, 25 bp, Artificial
  probe
  misc_feature (1)..(25): SEQ ID NO: 4105; WAN024FJL_at; Start 198; Stop 222
catgtttaacccagtgcttctgtcc

SEQ ID NO: 208936 - DNA, 25 bp, Artificial
  probe
  misc_feature (1)..(25): SEQ ID NO: 4105; WAN024FJL_at; Start 235; Stop 259
tatgaggcagaagaaggctgtttgt

SEQ ID NO: 208937 - DNA, 25 bp, Artificial
  probe
  misc_feature (1)..(25): SEQ ID NO: 4105; WAN024FJL_at; Start 292; Stop 316
gaaaccataaggcttgcctatcgtg

SEQ ID NO: 208938 - DNA, 25 bp, Artificial
  probe
  misc_feature (1)..(25): SEQ ID NO: 4105; WAN024FJL_at; Start 78; Stop 102
tgccagagatttgcaggatacactc

SEQ ID NO: 208939 - DNA, 25 bp, Artificial
  probe
  misc_feature (1)..(25): SEQ ID NO: 4105; WAN024FJL_at; Start 61; Stop 85
caggaggacctttatcttgccagag

SEQ ID NO: 208940 - DNA, 25 bp, Artificial
  probe
  misc_feature (1)..(25): SEQ ID NO: 4105; WAN024FJL_at; Start 204; Stop 228
taacccagtgcttctgtcctttgaa

SEQ ID NO: 208941 - DNA, 25 bp, Artificial
  probe
  misc_feature (1)..(25): SEQ ID NO: 4105; WAN024FJL_at; Start 330; Stop 354
ggaacagaccattaccttgacaggc

SEQ ID NO: 208942 - DNA, 25 bp, Artificial
  probe
  misc_feature (1)..(25): SEQ ID NO: 4105; WAN024FJL_at; Start 83; Stop 107
gagatttgcaggatacactcttagc

SEQ ID NO: 208943 - DNA, 25 bp, Artificial
  probe
  misc_feature (1)..(25): SEQ ID NO: 4105; WAN024FJL_at; Start 266; Stop 290
taggtgtgagatcaactaagcgtta

SEQ ID NO: 208944 - DNA, 25 bp, Artificial
  probe
  misc_feature (1)..(25): SEQ ID NO: 4105; WAN024FJL_at; Start 347; Stop 371
tgacaggcttcccagctcagatttg

SEQ ID NO: 208945 - DNA, 25 bp, Artificial
  probe
  misc_feature (1)..(25): SEQ ID NO: 4105; WAN024FJL_at; Start 3; Stop 27
ggaaaagaaaattgtgaaggatatc

SEQ ID NO: 208946 - DNA, 25 bp, Artificial
  probe
  misc_feature (1)..(25): SEQ ID NO: 4105; WAN024FJL_at; Start 361; Stop 385
gctcagatttgccagcatgagctgg

SEQ ID NO: 208947 - DNA, 25 bp, Artificial
  probe
  misc_feature (1)..(25): SEQ ID NO: 4105; WAN024FJL_at; Start 244; Stop 268
gaagaaggctgtttgtccttggtag

SEQ ID NO: 208948 - DNA, 25 bp, Artificial
  probe
  misc_feature (1)..(25): SEQ ID NO: 4105; WAN024FJL_at; Start 373; Stop 397
cagcatgagctggatcacttggaag

SEQ ID NO: 208949 - DNA, 25 bp, Artificial
  probe
  misc_feature (1)..(25): SEQ ID NO: 4105; WAN024FJL_at; Start 321; Stop 345
caagtggcaggaacagaccattacc

SEQ ID NO: 208950 - DNA, 25 bp, Artificial
  probe
  misc_feature (1)..(25): SEQ ID NO: 2956; WAN024FJM_at; Start 404; Stop 428
ggctcagaggtatctttaattacgc

SEQ ID NO: 208951 - DNA, 25 bp, Artificial
  probe
  misc_feature (1)..(25): SEQ ID NO: 2956; WAN024FJM_at; Start 285; Stop 309
gaaggaagtcataccatccgatacc

SEQ ID NO: 208952 - DNA, 25 bp, Artificial
  probe
  misc_feature (1)..(25): SEQ ID NO: 2956; WAN024FJM_at; Start 737; Stop 761
caaagactacaaattcaatacggac

SEQ ID NO: 208953 - DNA, 25 bp, Artificial
  probe
  misc_feature (1)..(25): SEQ ID NO: 2956; WAN024FJM_at; Start 456; Stop 480
cgaggtcgattatactacgattcct

SEQ ID NO: 208954 - DNA, 25 bp, Artificial
  probe
  misc_feature (1)..(25): SEQ ID NO: 2956; WAN024FJM_at; Start 872; Stop 896
ggaatcaacctacaacaatagcttg

SEQ ID NO: 208955 - DNA, 25 bp, Artificial
  probe
  misc_feature (1)..(25): SEQ ID NO: 2956; WAN024FJM_at; Start 594; Stop 618
cgctgatatggttcttgtgctgaca

SEQ ID NO: 208956 - DNA, 25 bp, Artificial
  probe
  misc_feature (1)..(25): SEQ ID NO: 2956; WAN024FJM_at; Start 78; Stop 102
aaaagtttcagtaaccatggagaag

SEQ ID NO: 208957 - DNA, 25 bp, Artificial
  probe
  misc_feature (1)..(25): SEQ ID NO: 2956; WAN024FJM_at; Start 324; Stop 348
tgacaggcgttttcttcaagaggct

SEQ ID NO: 208958 - DNA, 25 bp, Artificial
  probe
  misc_feature (1)..(25): SEQ ID NO: 2956; WAN024FJM_at; Start 439; Stop 463
tcttacattgaaaacaacgaggtcg

SEQ ID NO: 208959 - DNA, 25 bp, Artificial
  probe
  misc_feature (1)..(25): SEQ ID NO: 2956; WAN024FJM_at; Start 573; Stop 597
tcgagaatatcaccaaaagtacgct

SEQ ID NO: 208960 - DNA, 25 bp, Artificial
  probe
  misc_feature (1)..(25): SEQ ID NO: 2956; WAN024FJM_at; Start 389; Stop 413
aaaaagtacggcataggctcagagg

SEQ ID NO: 208961 - DNA, 25 bp, Artificial
  probe
  misc_feature (1)..(25): SEQ ID NO: 2956; WAN024FJM_at; Start 207; Stop 231
taaccttttctataaatcatgggcg

SEQ ID NO: 208962 - DNA, 25 bp, Artificial
  probe
  misc_feature (1)..(25): SEQ ID NO: 2956; WAN024FJM_at; Start 800; Stop 824
gacaaatagtacgacttagcgaacg

SEQ ID NO: 208963 - DNA, 25 bp, Artificial
  probe
  misc_feature (1)..(25): SEQ ID NO: 2956; WAN024FJM_at; Start 755; Stop 779
tacggacaatcaaagtatcagagag

SEQ ID NO: 208964 - DNA, 25 bp, Artificial
  probe
  misc_feature (1)..(25): SEQ ID NO: 2956; WAN024FJM_at; Start 818; Stop 842
gcgaacgtttccagccattgtcaag

SEQ ID NO: 208965 - DNA, 25 bp, Artificial
  probe
  misc_feature (1)..(25): SEQ ID NO: 2956; WAN024FJM_at; Start 364; Stop 388
gaaagcaacggatatattacagcta

SEQ ID NO: 208966 - DNA, 25 bp, Artificial
  probe
  misc_feature (1)..(25): SEQ ID NO: 2956; WAN024FJM_at; Start 224; Stop 248
catgggcgcaaacagtaaaggaatc

SEQ ID NO: 208967 - DNA, 25 bp, Artificial
  probe
  misc_feature (1)..(25): SEQ ID NO: 2956; WAN024FJM_at; Start 627; Stop 651
tatgagatatggtgagttaactgcc

SEQ ID NO: 208968 - DNA, 25 bp, Artificial
  probe
  misc_feature (1)..(25): SEQ ID NO: 2956; WAN024FJM_at; Start 1081; Stop 1105
gaagatatggaggataaactggtca

SEQ ID NO: 208969 - DNA, 25 bp, Artificial
  probe
  misc_feature (1)..(25): SEQ ID NO: 2956; WAN024FJM_at; Start 2; Stop 26
tgtggatggaagaactttccaacgg

SEQ ID NO: 208970 - DNA, 25 bp, Artificial
  probe
  misc_feature (1)..(25): SEQ ID NO: 2956; WAN024FJM_at; Start 541; Stop 565
gaaataaaagcacttgtcgatgtcc

SEQ ID NO: 208971 - DNA, 25 bp, Artificial
  probe
  misc_feature (1)..(25): SEQ ID NO: 2956; WAN024FJM_at; Start 1060; Stop 1084
gaaatctattctcatactactgaag

SEQ ID NO: 208972 - DNA, 25 bp, Artificial
  probe
  misc_feature (1)..(25): SEQ ID NO: 2956; WAN024FJM_at; Start 640; Stop 664
gagttaactgccttacaactgaaga

SEQ ID NO: 208973 - DNA, 25 bp, Artificial
  probe
  misc_feature (1)..(25): SEQ ID NO: 2956; WAN024FJM_at; Start 991; Stop 1015
gcagagtctggcctcccaataaaat

SEQ ID NO: 208974 - DNA, 25 bp, Artificial
  probe
  misc_feature (1)..(25): SEQ ID NO: 2956; WAN024FJM_at; Start 1032; Stop 1056
tgggcactcaaatgcaaaaatgact

SEQ ID NO: 208975 - DNA, 25 bp, Artificial
  probe
  misc_feature (1)..(25): SEQ ID NO: 2956; WAN024FJM_at; Start 722; Stop 746
aaatcaagacgctaccaaagactac

SEQ ID NO: 208976 - DNA, 25 bp, Artificial
  probe
  misc_feature (1)..(25): SEQ ID NO: 2956; WAN024FJM_at; Start 772; Stop 796
tcagagagtgtcatagaagctattc

SEQ ID NO: 208977 - DNA, 25 bp, Artificial
  probe
  misc_feature (1)..(25): SEQ ID NO: 2956; WAN024FJM_at; Start 555; Stop 579
tgtcgatgtccttaatcgtcgagaa

SEQ ID NO: 208978 - DNA, 25 bp, Artificial
  probe
  misc_feature (1)..(25): SEQ ID NO: 2956; WAN024FJM_at; Start 1016; Stop 1040
caataatggatcgagttgggcactc

SEQ ID NO: 208979 - DNA, 25 bp, Artificial
  probe
  misc_feature (1)..(25): SEQ ID NO: 2956; WAN024FJM_at; Start 93; Stop 117
catggagaagaaaactccccaggca

SEQ ID NO: 208980 - DNA, 25 bp, Artificial
  probe
  misc_feature (1)..(25): SEQ ID NO: 2956; WAN024FJM_at; Start 518; Stop 542
gtaacaactttctcaccatgcaaga

SEQ ID NO: 208981 - DNA, 25 bp, Artificial
  probe
  misc_feature (1)..(25): SEQ ID NO: 2956; WAN024FJM_at; Start 43; Stop 67
gagcgatacaaagacccttatactg

SEQ ID NO: 208982 - DNA, 25 bp, Artificial
  probe
  misc_feature (1)..(25): SEQ ID NO: 2956; WAN024FJM_at; Start 123; Stop 147
tcaagctgctatcttgttacaagag

SEQ ID NO: 208983 - DNA, 25 bp, Artificial
  probe
  misc_feature (1)..(25): SEQ ID NO: 2956; WAN024FJM_at; Start 309; Stop 333
catacttgctaatcttgacaggcgt

SEQ ID NO: 208984 - DNA, 25 bp, Artificial
  probe
  misc_feature (1)..(25): SEQ ID NO: 6977; WAN024FJN_at; Start 165; Stop 189
cattaaaaaagcaactctagcggtt

SEQ ID NO: 208985 - DNA, 25 bp, Artificial
  probe
  misc_feature (1)..(25): SEQ ID NO: 6977; WAN024FJN_at; Start 175; Stop 199
gcaactctagcggttgcttacggct

SEQ ID NO: 208986 - DNA, 25 bp, Artificial
  probe
  misc_feature (1)..(25): SEQ ID NO: 6977; WAN024FJN_at; Start 135; Stop 159
aagagttattgctttcttgaaagag

SEQ ID NO: 208987 - DNA, 25 bp, Artificial
  probe
  misc_feature (1)..(25): SEQ ID NO: 6977; WAN024FJN_at; Start 113; Stop 137
cagatatcgcaaacggtcgcgaaag

SEQ ID NO: 208988 - DNA, 25 bp, Artificial
  probe
  misc_feature (1)..(25): SEQ ID NO: 6977; WAN024FJN_at; Start 117; Stop 141
tatcgcaaacggtcgcgaaagagtt

SEQ ID NO: 208989 - DNA, 25 bp, Artificial
  probe
  misc_feature (1)..(25): SEQ ID NO: 6977; WAN024FJN_at; Start 179; Stop 203
ctctagcggttgcttacggctttaa

SEQ ID NO: 208990 - DNA, 25 bp, Artificial
  probe
  misc_feature (1)..(25): SEQ ID NO: 6977; WAN024FJN_at; Start 216; Stop 240
gacaaacattctaagtggaacgact

SEQ ID NO: 208991 - DNA, 25 bp, Artificial
  probe
  misc_feature (1)..(25): SEQ ID NO: 6977; WAN024FJN_at; Start 122; Stop 146
caaacggtcgcgaaagagttattgc

SEQ ID NO: 208992 - DNA, 25 bp, Artificial
  probe
  misc_feature (1)..(25): SEQ ID NO: 6977; WAN024FJN_at; Start 21; Stop 45
gagtaaatattctttaaaagtcata

SEQ ID NO: 208993 - DNA, 25 bp, Artificial
  probe
  misc_feature (1)..(25): SEQ ID NO: 6977; WAN024FJN_at; Start 2; Stop 26
tgtcgcgtttgcttgctttgagtaa

SEQ ID NO: 208994 - DNA, 25 bp, Artificial
  probe
  misc_feature (1)..(25): SEQ ID NO: 6977; WAN024FJN_at; Start 38; Stop 62
aagtcataaggttaactcctttctg

SEQ ID NO: 208995 - DNA, 25 bp, Artificial
  probe
  misc_feature (1)..(25): SEQ ID NO: 6977; WAN024FJN_at; Start 225; Stop 249
tctaagtggaacgactaaaggtcca

SEQ ID NO: 208996 - DNA, 25 bp, Artificial
  probe
  misc_feature (1)..(25): SEQ ID NO: 6977; WAN024FJN_at; Start 108; Stop 132
tatgccagatatcgcaaacggtcgc

SEQ ID NO: 208997 - DNA, 25 bp, Artificial
  probe
  misc_feature (1)..(25): SEQ ID NO: 6977; WAN024FJN_at; Start 67; Stop 91
tattatagcagaaaaagaagaaaga

SEQ ID NO: 208998 - DNA, 25 bp, Artificial
  probe
  misc_feature (1)..(25): SEQ ID NO: 6977; WAN024FJN_at; Start 141; Stop 165
tattgctttcttgaaagagaaaggc

SEQ ID NO: 208999 - DNA, 25 bp, Artificial
  probe
  misc_feature (1)..(25): SEQ ID NO: 6977; WAN024FJN_at; Start 218; Stop 242
caaacattctaagtggaacgactaa

SEQ ID NO: 209000 - DNA, 25 bp, Artificial
  probe
  misc_feature (1)..(25): SEQ ID NO: 6977; WAN024FJN_at; Start 222; Stop 246
cattctaagtggaacgactaaaggt

SEQ ID NO: 209001 - DNA, 25 bp, Artificial
  probe
  misc_feature (1)..(25): SEQ ID NO: 6977; WAN024FJN_at; Start 111; Stop 135
gccagatatcgcaaacggtcgcgaa

SEQ ID NO: 209002 - DNA, 25 bp, Artificial
  probe
  misc_feature (1)..(25): SEQ ID NO: 6977; WAN024FJN_at; Start 231; Stop 255
tggaacgactaaaggtccacgagcg

SEQ ID NO: 209003 - DNA, 25 bp, Artificial
  probe
  misc_feature (1)..(25): SEQ ID NO: 6977; WAN024FJN_at; Start 12; Stop 36
gcttgctttgagtaaatattcttta

SEQ ID NO: 209004 - DNA, 25 bp, Artificial
  probe
  misc_feature (1)..(25): SEQ ID NO: 6977; WAN024FJN_at; Start 168; Stop 192
taaaaaagcaactctagcggttgct

SEQ ID NO: 209005 - DNA, 25 bp, Artificial
  probe
  misc_feature (1)..(25): SEQ ID NO: 6977; WAN024FJN_at; Start 98; Stop 122
aaggagaaaatatgccagatatcgc

SEQ ID NO: 209006 - DNA, 25 bp, Artificial
  probe
  misc_feature (1)..(25): SEQ ID NO: 6977; WAN024FJN_at; Start 233; Stop 257
gaacgactaaaggtccacgagcgaa

SEQ ID NO: 209007 - DNA, 25 bp, Artificial
  probe
  misc_feature (1)..(25): SEQ ID NO: 6977; WAN024FJN_at; Start 93; Stop 117
aaagaaaggagaaaatatgccagat

SEQ ID NO: 209008 - DNA, 25 bp, Artificial
  probe
  misc_feature (1)..(25): SEQ ID NO: 6977; WAN024FJN_at; Start 153; Stop 177
gaaagagaaaggcattaaaaaagca

SEQ ID NO: 209009 - DNA, 25 bp, Artificial
  probe
  misc_feature (1)..(25): SEQ ID NO: 6977; WAN024FJN_at; Start 42; Stop 66
cataaggttaactcctttctgctta

SEQ ID NO: 209010 - DNA, 25 bp, Artificial
  probe
  misc_feature (1)..(25): SEQ ID NO: 6977; WAN024FJN_at; Start 5; Stop 29
cgcgtttgcttgctttgagtaaata

SEQ ID NO: 209011 - DNA, 25 bp, Artificial
  probe
  misc_feature (1)..(25): SEQ ID NO: 6977; WAN024FJN_at; Start 210; Stop 234
ggaagtgacaaacattctaagtgga

SEQ ID NO: 209012 - DNA, 25 bp, Artificial
  probe
  misc_feature (1)..(25): SEQ ID NO: 6977; WAN024FJN_at; Start 163; Stop 187
ggcattaaaaaagcaactctagcgg

SEQ ID NO: 209013 - DNA, 25 bp, Artificial
  probe
  misc_feature (1)..(25): SEQ ID NO: 6977; WAN024FJN_at; Start 126; Stop 150
cggtcgcgaaagagttattgctttc

SEQ ID NO: 209014 - DNA, 25 bp, Artificial
  probe
  misc_feature (1)..(25): SEQ ID NO: 6977; WAN024FJN_at; Start 103; Stop 127
gaaaatatgccagatatcgcaaacg

SEQ ID NO: 209015 - DNA, 25 bp, Artificial
  probe
  misc_feature (1)..(25): SEQ ID NO: 6977; WAN024FJN_at; Start 62; Stop 86
gcttatattatagcagaaaaagaag

SEQ ID NO: 209016 - DNA, 25 bp, Artificial
  probe
  misc_feature (1)..(25): SEQ ID NO: 6977; WAN024FJN_at; Start 50; Stop 74
taactcctttctgcttatattatag

SEQ ID NO: 209017 - DNA, 25 bp, Artificial
  probe
  misc_feature (1)..(25): SEQ ID NO: 6977; WAN024FJN_at; Start 237; Stop 261
gactaaaggtccacgagcgaacagt

SEQ ID NO: 209018 - DNA, 25 bp, Artificial
  probe
  misc_feature (1)..(25): SEQ ID NO: 6723; WAN024FJO_at; Start 112; Stop 136
aacattctgagtgggacgacgaagg

SEQ ID NO: 209019 - DNA, 25 bp, Artificial
  probe
  misc_feature (1)..(25): SEQ ID NO: 6723; WAN024FJO_at; Start 14; Stop 38
caaatggtcgtgagaaagtcaatga

SEQ ID NO: 209020 - DNA, 25 bp, Artificial
  probe
  misc_feature (1)..(25): SEQ ID NO: 6723; WAN024FJO_at; Start 7; Stop 31
gatatcacaaatggtcgtgagaaag

SEQ ID NO: 209021 - DNA, 25 bp, Artificial
  probe
  misc_feature (1)..(25): SEQ ID NO: 6723; WAN024FJO_at; Start 2; Stop 26
tgccagatatcacaaatggtcgtga

SEQ ID NO: 209022 - DNA, 25 bp, Artificial
  probe
  misc_feature (1)..(25): SEQ ID NO: 6723; WAN024FJO_at; Start 108; Stop 132
aacaaacattctgagtgggacgacg

SEQ ID NO: 209023 - DNA, 25 bp, Artificial
  probe
  misc_feature (1)..(25): SEQ ID NO: 6723; WAN024FJO_at; Start 64; Stop 88
aaaacaagtctagcgattgcttatg

SEQ ID NO: 209024 - DNA, 25 bp, Artificial
  probe
  misc_feature (1)..(25): SEQ ID NO: 6723; WAN024FJO_at; Start 104; Stop 128
aagtaacaaacattctgagtgggac

SEQ ID NO: 209025 - DNA, 25 bp, Artificial
  probe
  misc_feature (1)..(25): SEQ ID NO: 6723; WAN024FJO_at; Start 22; Stop 46
cgtgagaaagtcaatgattttctga

SEQ ID NO: 209026 - DNA, 25 bp, Artificial
  probe
  misc_feature (1)..(25): SEQ ID NO: 6723; WAN024FJO_at; Start 107; Stop 131
taacaaacattctgagtgggacgac

SEQ ID NO: 209027 - DNA, 25 bp, Artificial
  probe
  misc_feature (1)..(25): SEQ ID NO: 6723; WAN024FJO_at; Start 105; Stop 129
agtaacaaacattctgagtgggacg

SEQ ID NO: 209028 - DNA, 25 bp, Artificial
  probe
  misc_feature (1)..(25): SEQ ID NO: 6723; WAN024FJO_at; Start 11; Stop 35
tcacaaatggtcgtgagaaagtcaa

SEQ ID NO: 209029 - DNA, 25 bp, Artificial
  probe
  misc_feature (1)..(25): SEQ ID NO: 6723; WAN024FJO_at; Start 103; Stop 127
gaagtaacaaacattctgagtggga

SEQ ID NO: 209030 - DNA, 25 bp, Artificial
  probe
  misc_feature (1)..(25): SEQ ID NO: 6723; WAN024FJO_at; Start 3; Stop 27
gccagatatcacaaatggtcgtgag

SEQ ID NO: 209031 - DNA, 25 bp, Artificial
  probe
  misc_feature (1)..(25): SEQ ID NO: 6723; WAN024FJO_at; Start 110; Stop 134
caaacattctgagtgggacgacgaa

SEQ ID NO: 209032 - DNA, 25 bp, Artificial
  probe
  misc_feature (1)..(25): SEQ ID NO: 6723; WAN024FJO_at; Start 32; Stop 56
tcaatgattttctgaaagacaaagg

SEQ ID NO: 209033 - DNA, 25 bp, Artificial
  probe
  misc_feature (1)..(25): SEQ ID NO: 6723; WAN024FJO_at; Start 33; Stop 57
caatgattttctgaaagacaaaggt

SEQ ID NO: 209034 - DNA, 25 bp, Artificial
  probe
  misc_feature (1)..(25): SEQ ID NO: 6723; WAN024FJO_at; Start 1; Stop 25
atgccagatatcacaaatggtcgtg

SEQ ID NO: 209035 - DNA, 25 bp, Artificial
  probe
  misc_feature (1)..(25): SEQ ID NO: 6723; WAN024FJO_at; Start 27; Stop 51
gaaagtcaatgattttctgaaagac

SEQ ID NO: 209036 - DNA, 25 bp, Artificial
  probe
  misc_feature (1)..(25): SEQ ID NO: 6723; WAN024FJO_at; Start 16; Stop 40
aatggtcgtgagaaagtcaatgatt

SEQ ID NO: 209037 - DNA, 25 bp, Artificial
  probe
  misc_feature (1)..(25): SEQ ID NO: 6723; WAN024FJO_at; Start 5; Stop 29
cagatatcacaaatggtcgtgagaa

SEQ ID NO: 209038 - DNA, 25 bp, Artificial
  probe
  misc_feature (1)..(25): SEQ ID NO: 6723; WAN024FJO_at; Start 116; Stop 140
ttctgagtgggacgacgaagggacc

SEQ ID NO: 209039 - DNA, 25 bp, Artificial
  probe
  misc_feature (1)..(25): SEQ ID NO: 6723; WAN024FJO_at; Start 62; Stop 86
aaaaaacaagtctagcgattgctta

SEQ ID NO: 209040 - DNA, 25 bp, Artificial
  probe
  misc_feature (1)..(25): SEQ ID NO: 6723; WAN024FJO_at; Start 111; Stop 135
aaacattctgagtgggacgacgaag

SEQ ID NO: 209041 - DNA, 25 bp, Artificial
  probe
  misc_feature (1)..(25): SEQ ID NO: 6723; WAN024FJO_at; Start 126; Stop 150
gacgacgaagggaccacgagcgaac

SEQ ID NO: 209042 - DNA, 25 bp, Artificial
  probe
  misc_feature (1)..(25): SEQ ID NO: 6723; WAN024FJO_at; Start 109; Stop 133
acaaacattctgagtgggacgacga

SEQ ID NO: 209043 - DNA, 25 bp, Artificial
  probe
  misc_feature (1)..(25): SEQ ID NO: 6723; WAN024FJO_at; Start 102; Stop 126
ggaagtaacaaacattctgagtggg

SEQ ID NO: 209044 - DNA, 25 bp, Artificial
  probe
  misc_feature (1)..(25): SEQ ID NO: 6723; WAN024FJO_at; Start 71; Stop 95
gtctagcgattgcttatggctttaa

SEQ ID NO: 209045 - DNA, 25 bp, Artificial
  probe
  misc_feature (1)..(25): SEQ ID NO: 6723; WAN024FJO_at; Start 66; Stop 90
aacaagtctagcgattgcttatggc

SEQ ID NO: 209046 - DNA, 25 bp, Artificial
  probe
  misc_feature (1)..(25): SEQ ID NO: 6723; WAN024FJO_at; Start 68; Stop 92
caagtctagcgattgcttatggctt

SEQ ID NO: 209047 - DNA, 25 bp, Artificial
  probe
  misc_feature (1)..(25): SEQ ID NO: 6723; WAN024FJO_at; Start 9; Stop 33
tatcacaaatggtcgtgagaaagtc

SEQ ID NO: 209048 - DNA, 25 bp, Artificial
  probe
  misc_feature (1)..(25): SEQ ID NO: 6723; WAN024FJO_at; Start 129; Stop 153
gacgaagggaccacgagcgaacagt

SEQ ID NO: 209049 - DNA, 25 bp, Artificial
  probe
  misc_feature (1)..(25): SEQ ID NO: 6723; WAN024FJO_at; Start 12; Stop 36
cacaaatggtcgtgagaaagtcaat

SEQ ID NO: 209050 - DNA, 25 bp, Artificial
  probe
  misc_feature (1)..(25): SEQ ID NO: 6723; WAN024FJO_at; Start 37; Stop 61
gattttctgaaagacaaaggtatta

SEQ ID NO: 209051 - DNA, 25 bp, Artificial
  probe
  misc_feature (1)..(25): SEQ ID NO: 6723; WAN024FJO_at; Start 19; Stop 43
ggtcgtgagaaagtcaatgattttc

SEQ ID NO: 209052 - DNA, 25 bp, Artificial
  probe
  misc_feature (1)..(25): SEQ ID NO: 7440; WAN024FJP_at; Start 170; Stop 194
catctttaccttctgttgttgggtc

SEQ ID NO: 209053 - DNA, 25 bp, Artificial
  probe
  misc_feature (1)..(25): SEQ ID NO: 7440; WAN024FJP_at; Start 98; Stop 122
ttcctgctggttcccaagtgttacc

SEQ ID NO: 209054 - DNA, 25 bp, Artificial
  probe
  misc_feature (1)..(25): SEQ ID NO: 7440; WAN024FJP_at; Start 150; Stop 174
tgtatttacgaatgtgtctccatct

SEQ ID NO: 209055 - DNA, 25 bp, Artificial
  probe
  misc_feature (1)..(25): SEQ ID NO: 7440; WAN024FJP_at; Start 214; Stop 238
tcttttccatcacgtccagatgctc

SEQ ID NO: 209056 - DNA, 25 bp, Artificial
  probe
  misc_feature (1)..(25): SEQ ID NO: 7440; WAN024FJP_at; Start 250; Stop 274
tcttgtccgtctttaactactgttg

SEQ ID NO: 209057 - DNA, 25 bp, Artificial
  probe
  misc_feature (1)..(25): SEQ ID NO: 7440; WAN024FJP_at; Start 76; Stop 100
tcacctttcggtcctttgatgtttc

SEQ ID NO: 209058 - DNA, 25 bp, Artificial
  probe
  misc_feature (1)..(25): SEQ ID NO: 7440; WAN024FJP_at; Start 83; Stop 107
tcggtcctttgatgtttcctgctgg

SEQ ID NO: 209059 - DNA, 25 bp, Artificial
  probe
  misc_feature (1)..(25): SEQ ID NO: 7440; WAN024FJP_at; Start 48; Stop 72
ttcacccttggcaccatctgcacct

SEQ ID NO: 209060 - DNA, 25 bp, Artificial
  probe
  misc_feature (1)..(25): SEQ ID NO: 7440; WAN024FJP_at; Start 137; Stop 161
catctcctgtttgtgtatttacgaa

SEQ ID NO: 209061 - DNA, 25 bp, Artificial
  probe
  misc_feature (1)..(25): SEQ ID NO: 7440; WAN024FJP_at; Start 230; Stop 254
cagatgctcctgcagctccgtcttg

SEQ ID NO: 209062 - DNA, 25 bp, Artificial
  probe
  misc_feature (1)..(25): SEQ ID NO: 7440; WAN024FJP_at; Start 244; Stop 268
gctccgtcttgtccgtctttaacta

SEQ ID NO: 209063 - DNA, 25 bp, Artificial
  probe
  misc_feature (1)..(25): SEQ ID NO: 7440; WAN024FJP_at; Start 208; Stop 232
aatacttcttttccatcacgtccag

SEQ ID NO: 209064 - DNA, 25 bp, Artificial
  probe
  misc_feature (1)..(25): SEQ ID NO: 7440; WAN024FJP_at; Start 217; Stop 241
tttccatcacgtccagatgctcctg

SEQ ID NO: 209065 - DNA, 25 bp, Artificial
  probe
  misc_feature (1)..(25): SEQ ID NO: 7440; WAN024FJP_at; Start 102; Stop 126
tgctggttcccaagtgttacctttc

SEQ ID NO: 209066 - DNA, 25 bp, Artificial
  probe
  misc_feature (1)..(25): SEQ ID NO: 7440; WAN024FJP_at; Start 127; Stop 151
ttaacgaatacatctcctgtttgtg

SEQ ID NO: 209067 - DNA, 25 bp, Artificial
  probe
  misc_feature (1)..(25): SEQ ID NO: 7440; WAN024FJP_at; Start 92; Stop 116
tgatgtttcctgctggttcccaagt

SEQ ID NO: 209068 - DNA, 25 bp, Artificial
  probe
  misc_feature (1)..(25): SEQ ID NO: 7440; WAN024FJP_at; Start 89; Stop 113
ctttgatgtttcctgctggttccca

SEQ ID NO: 209069 - DNA, 25 bp, Artificial
  probe
  misc_feature (1)..(25): SEQ ID NO: 7440; WAN024FJP_at; Start 156; Stop 180
tacgaatgtgtctccatctttacct

SEQ ID NO: 209070 - DNA, 25 bp, Artificial
  probe
  misc_feature (1)..(25): SEQ ID NO: 7440; WAN024FJP_at; Start 18; Stop 42
agtcaggccgcgttctccttgggct

SEQ ID NO: 209071 - DNA, 25 bp, Artificial
  probe
  misc_feature (1)..(25): SEQ ID NO: 7440; WAN024FJP_at; Start 222; Stop 246
atcacgtccagatgctcctgcagct

SEQ ID NO: 209072 - DNA, 25 bp, Artificial
  probe
  misc_feature (1)..(25): SEQ ID NO: 7440; WAN024FJP_at; Start 172; Stop 196
tctttaccttctgttgttgggtcta

SEQ ID NO: 209073 - DNA, 25 bp, Artificial
  probe
  misc_feature (1)..(25): SEQ ID NO: 7440; WAN024FJP_at; Start 231; Stop 255
agatgctcctgcagctccgtcttgt

SEQ ID NO: 209074 - DNA, 25 bp, Artificial
  probe
  misc_feature (1)..(25): SEQ ID NO: 7440; WAN024FJP_at; Start 116; Stop 140
tgttacctttcttaacgaatacatc

SEQ ID NO: 209075 - DNA, 25 bp, Artificial
  probe
  misc_feature (1)..(25): SEQ ID NO: 7440; WAN024FJP_at; Start 95; Stop 119
tgtttcctgctggttcccaagtgtt

SEQ ID NO: 209076 - DNA, 25 bp, Artificial
  probe
  misc_feature (1)..(25): SEQ ID NO: 7440; WAN024FJP_at; Start 147; Stop 171
ttgtgtatttacgaatgtgtctcca

SEQ ID NO: 209077 - DNA, 25 bp, Artificial
  probe
  misc_feature (1)..(25): SEQ ID NO: 7440; WAN024FJP_at; Start 255; Stop 279
tccgtctttaactactgttgtttga

SEQ ID NO: 209078 - DNA, 25 bp, Artificial
  probe
  misc_feature (1)..(25): SEQ ID NO: 7440; WAN024FJP_at; Start 201; Stop 225
tccgtttaatacttcttttccatca

SEQ ID NO: 209079 - DNA, 25 bp, Artificial
  probe
  misc_feature (1)..(25): SEQ ID NO: 7440; WAN024FJP_at; Start 247; Stop 271
ccgtcttgtccgtctttaactactg

SEQ ID NO: 209080 - DNA, 25 bp, Artificial
  probe
  misc_feature (1)..(25): SEQ ID NO: 7440; WAN024FJP_at; Start 22; Stop 46
aggccgcgttctccttgggctcctt

SEQ ID NO: 209081 - DNA, 25 bp, Artificial
  probe
  misc_feature (1)..(25): SEQ ID NO: 7440; WAN024FJP_at; Start 93; Stop 117
gatgtttcctgctggttcccaagtg

SEQ ID NO: 209082 - DNA, 25 bp, Artificial
  probe
  misc_feature (1)..(25): SEQ ID NO: 7440; WAN024FJP_at; Start 163; Stop 187
gtgtctccatctttaccttctgttg

SEQ ID NO: 209083 - DNA, 25 bp, Artificial
  probe
  misc_feature (1)..(25): SEQ ID NO: 7440; WAN024FJP_at; Start 37; Stop 61
tgggctcctttttcacccttggcac

SEQ ID NO: 209084 - DNA, 25 bp, Artificial
  probe
  misc_feature (1)..(25): SEQ ID NO: 7440; WAN024FJP_at; Start 241; Stop 265
gcagctccgtcttgtccgtctttaa

SEQ ID NO: 209085 - DNA, 25 bp, Artificial
  probe
  misc_feature (1)..(25): SEQ ID NO: 7440; WAN024FJP_at; Start 121; Stop 145
cctttcttaacgaatacatctcctg

SEQ ID NO: 209086 - DNA, 25 bp, Artificial
  probe
  misc_feature (1)..(25): SEQ ID NO: 5351; WAN024FJQ_at; Start 194; Stop 218
tcttaacgaagacgtcgcctgtttc

SEQ ID NO: 209087 - DNA, 25 bp, Artificial
  probe
  misc_feature (1)..(25): SEQ ID NO: 5351; WAN024FJQ_at; Start 201; Stop 225
gaagacgtcgcctgtttctgtatta

SEQ ID NO: 209088 - DNA, 25 bp, Artificial
  probe
  misc_feature (1)..(25): SEQ ID NO: 5351; WAN024FJQ_at; Start 42; Stop 66
gtcacgacctgctgctccatccgca

SEQ ID NO: 209089 - DNA, 25 bp, Artificial
  probe
  misc_feature (1)..(25): SEQ ID NO: 5351; WAN024FJQ_at; Start 146; Stop 170
cacctttagggcctttgatgttgcc

SEQ ID NO: 209090 - DNA, 25 bp, Artificial
  probe
  misc_feature (1)..(25): SEQ ID NO: 5351; WAN024FJQ_at; Start 317; Stop 341
cgccatccgcacctttagctccttg

SEQ ID NO: 209091 - DNA, 25 bp, Artificial
  probe
  misc_feature (1)..(25): SEQ ID NO: 5351; WAN024FJQ_at; Start 57; Stop 81
tccatccgcacctttagctccttgc

SEQ ID NO: 209092 - DNA, 25 bp, Artificial
  probe
  misc_feature (1)..(25): SEQ ID NO: 5351; WAN024FJQ_at; Start 228; Stop 252
gtatttatcgccgtctttaccttga

SEQ ID NO: 209093 - DNA, 25 bp, Artificial
  probe
  misc_feature (1)..(25): SEQ ID NO: 5351; WAN024FJQ_at; Start 240; Stop 264
gtctttaccttgatgtgcttctggg

SEQ ID NO: 209094 - DNA, 25 bp, Artificial
  probe
  misc_feature (1)..(25): SEQ ID NO: 5351; WAN024FJQ_at; Start 219; Stop 243
tgtattaacgtatttatcgccgtct

SEQ ID NO: 209095 - DNA, 25 bp, Artificial
  probe
  misc_feature (1)..(25): SEQ ID NO: 5351; WAN024FJQ_at; Start 24; Stop 48
gtcacgtccatcacgtccgtcacga

SEQ ID NO: 209096 - DNA, 25 bp, Artificial
  probe
  misc_feature (1)..(25): SEQ ID NO: 5351; WAN024FJQ_at; Start 294; Stop 318
gtcacgtccatcacgacctactgcg

SEQ ID NO: 209097 - DNA, 25 bp, Artificial
  probe
  misc_feature (1)..(25): SEQ ID NO: 5351; WAN024FJQ_at; Start 268; Stop 292
gctttgccgttcaacacgtctttac

SEQ ID NO: 209098 - DNA, 25 bp, Artificial
  probe
  misc_feature (1)..(25): SEQ ID NO: 5351; WAN024FJQ_at; Start 105; Stop 129
tcggtctcctttttcgcctttagca

SEQ ID NO: 209099 - DNA, 25 bp, Artificial
  probe
  misc_feature (1)..(25): SEQ ID NO: 5351; WAN024FJQ_at; Start 204; Stop 228
gacgtcgcctgtttctgtattaacg

SEQ ID NO: 209100 - DNA, 25 bp, Artificial
  probe
  misc_feature (1)..(25): SEQ ID NO: 5351; WAN024FJQ_at; Start 87; Stop 111
agtcaggccgcgttcgcctcggtct

SEQ ID NO: 209101 - DNA, 25 bp, Artificial
  probe
  misc_feature (1)..(25): SEQ ID NO: 5351; WAN024FJQ_at; Start 162; Stop 186
gatgttgccctctttatcccagttg

SEQ ID NO: 209102 - DNA, 25 bp, Artificial
  probe
  misc_feature (1)..(25): SEQ ID NO: 5351; WAN024FJQ_at; Start 252; Stop 276
atgtgcttctgggttagctttgccg

SEQ ID NO: 209103 - DNA, 25 bp, Artificial
  probe
  misc_feature (1)..(25): SEQ ID NO: 5351; WAN024FJQ_at; Start 165; Stop 189
gttgccctctttatcccagttgccg

SEQ ID NO: 209104 - DNA, 25 bp, Artificial
  probe
  misc_feature (1)..(25): SEQ ID NO: 5351; WAN024FJQ_at; Start 256; Stop 280
gcttctgggttagctttgccgttca

SEQ ID NO: 209105 - DNA, 25 bp, Artificial
  probe
  misc_feature (1)..(25): SEQ ID NO: 5351; WAN024FJQ_at; Start 303; Stop 327
atcacgacctactgcgccatccgca

SEQ ID NO: 209106 - DNA, 25 bp, Artificial
  probe
  misc_feature (1)..(25): SEQ ID NO: 5351; WAN024FJQ_at; Start 197; Stop 221
taacgaagacgtcgcctgtttctgt

SEQ ID NO: 209107 - DNA, 25 bp, Artificial
  probe
  misc_feature (1)..(25): SEQ ID NO: 5351; WAN024FJQ_at; Start 216; Stop 240
ttctgtattaacgtatttatcgccg

SEQ ID NO: 209108 - DNA, 25 bp, Artificial
  probe
  misc_feature (1)..(25): SEQ ID NO: 5351; WAN024FJQ_at; Start 180; Stop 204
ccagttgccgttattcttaacgaag

SEQ ID NO: 209109 - DNA, 25 bp, Artificial
  probe
  misc_feature (1)..(25): SEQ ID NO: 5351; WAN024FJQ_at; Start 190; Stop 214
ttattcttaacgaagacgtcgcctg

SEQ ID NO: 209110 - DNA, 25 bp, Artificial
  probe
  misc_feature (1)..(25): SEQ ID NO: 5351; WAN024FJQ_at; Start 264; Stop 288
gttagctttgccgttcaacacgtct

SEQ ID NO: 209111 - DNA, 25 bp, Artificial
  probe
  misc_feature (1)..(25): SEQ ID NO: 5351; WAN024FJQ_at; Start 233; Stop 257
tatcgccgtctttaccttgatgtgc

SEQ ID NO: 209112 - DNA, 25 bp, Artificial
  probe
  misc_feature (1)..(25): SEQ ID NO: 5351; WAN024FJQ_at; Start 245; Stop 269
taccttgatgtgcttctgggttagc

SEQ ID NO: 209113 - DNA, 25 bp, Artificial
  probe
  misc_feature (1)..(25): SEQ ID NO: 5351; WAN024FJQ_at; Start 259; Stop 283
tctgggttagctttgccgttcaaca

SEQ ID NO: 209114 - DNA, 25 bp, Artificial
  probe
  misc_feature (1)..(25): SEQ ID NO: 5351; WAN024FJQ_at; Start 167; Stop 191
tgccctctttatcccagttgccgtt

SEQ ID NO: 209115 - DNA, 25 bp, Artificial
  probe
  misc_feature (1)..(25): SEQ ID NO: 5351; WAN024FJQ_at; Start 33; Stop 57
atcacgtccgtcacgacctgctgct

SEQ ID NO: 209116 - DNA, 25 bp, Artificial
  probe
  misc_feature (1)..(25): SEQ ID NO: 5351; WAN024FJQ_at; Start 150; Stop 174
tttagggcctttgatgttgccctct

SEQ ID NO: 209117 - DNA, 25 bp, Artificial
  probe
  misc_feature (1)..(25): SEQ ID NO: 5351; WAN024FJQ_at; Start 236; Stop 260
cgccgtctttaccttgatgtgcttc

SEQ ID NO: 209118 - DNA, 25 bp, Artificial
  probe
  misc_feature (1)..(25): SEQ ID NO: 5351; WAN024FJQ_at; Start 261; Stop 285
tgggttagctttgccgttcaacacg

SEQ ID NO: 209119 - DNA, 25 bp, Artificial
  probe
  misc_feature (1)..(25): SEQ ID NO: 5351; WAN024FJQ_at; Start 172; Stop 196
tctttatcccagttgccgttattct

SEQ ID NO: 209120 - DNA, 25 bp, Artificial
  probe
  misc_feature (1)..(25): SEQ ID NO: 1327; WAN024FJR_at; Start 286; Stop 310
cgtaagctatggcacaaggttgttt

SEQ ID NO: 209121 - DNA, 25 bp, Artificial
  probe
  misc_feature (1)..(25): SEQ ID NO: 1327; WAN024FJR_at; Start 25; Stop 49
cgtggccattttgtagctccataca

SEQ ID NO: 209122 - DNA, 25 bp, Artificial
  probe
  misc_feature (1)..(25): SEQ ID NO: 1327; WAN024FJR_at; Start 71; Stop 95
cagaagatacatggttggaacttgc

SEQ ID NO: 209123 - DNA, 25 bp, Artificial
  probe
  misc_feature (1)..(25): SEQ ID NO: 1327; WAN024FJR_at; Start 60; Stop 84
tgaaccatcaacagaagatacatgg

SEQ ID NO: 209124 - DNA, 25 bp, Artificial
  probe
  misc_feature (1)..(25): SEQ ID NO: 1327; WAN024FJR_at; Start 405; Stop 429
taagctttcttacaactcaacgcca

SEQ ID NO: 209125 - DNA, 25 bp, Artificial
  probe
  misc_feature (1)..(25): SEQ ID NO: 1327; WAN024FJR_at; Start 237; Stop 261
taaagcacaggctcttattgctggg

SEQ ID NO: 209126 - DNA, 25 bp, Artificial
  probe
  misc_feature (1)..(25): SEQ ID NO: 1327; WAN024FJR_at; Start 313; Stop 337
tctgacaggaagaaacaatgggtgg

SEQ ID NO: 209127 - DNA, 25 bp, Artificial
  probe
  misc_feature (1)..(25): SEQ ID NO: 1327; WAN024FJR_at; Start 179; Stop 203
caaccgtggtcagcgtaaaaggtgc

SEQ ID NO: 209128 - DNA, 25 bp, Artificial
  probe
  misc_feature (1)..(25): SEQ ID NO: 1327; WAN024FJR_at; Start 278; Stop 302
gggatgaccgtaagctatggcacaa

SEQ ID NO: 209129 - DNA, 25 bp, Artificial
  probe
  misc_feature (1)..(25): SEQ ID NO: 1327; WAN024FJR_at; Start 83; Stop 107
ggttggaacttgctaaatggatctc

SEQ ID NO: 209130 - DNA, 25 bp, Artificial
  probe
  misc_feature (1)..(25): SEQ ID NO: 1327; WAN024FJR_at; Start 390; Stop 414
tgaggcgtttggatgtaagctttct

SEQ ID NO: 209131 - DNA, 25 bp, Artificial
  probe
  misc_feature (1)..(25): SEQ ID NO: 1327; WAN024FJR_at; Start 422; Stop 446
caacgccaaaagagactggtattgg

SEQ ID NO: 209132 - DNA, 25 bp, Artificial
  probe
  misc_feature (1)..(25): SEQ ID NO: 1327; WAN024FJR_at; Start 417; Stop 441
caactcaacgccaaaagagactggt

SEQ ID NO: 209133 - DNA, 25 bp, Artificial
  probe
  misc_feature (1)..(25): SEQ ID NO: 1327; WAN024FJR_at; Start 226; Stop 250
gatccagacgataaagcacaggctc

SEQ ID NO: 209134 - DNA, 25 bp, Artificial
  probe
  misc_feature (1)..(25): SEQ ID NO: 1327; WAN024FJR_at; Start 355; Stop 379
gaaatcaaagcaggttctggcgctg

SEQ ID NO: 209135 - DNA, 25 bp, Artificial
  probe
  misc_feature (1)..(25): SEQ ID NO: 1327; WAN024FJR_at; Start 125; Stop 149
cagacgagaaaacagatgatcaagc

SEQ ID NO: 209136 - DNA, 25 bp, Artificial
  probe
  misc_feature (1)..(25): SEQ ID NO: 1327; WAN024FJR_at; Start 324; Stop 348
gaaacaatgggtgggagctgcaact

SEQ ID NO: 209137 - DNA, 25 bp, Artificial
  probe
  misc_feature (1)..(25): SEQ ID NO: 1327; WAN024FJR_at; Start 53; Stop 77
gaggaactgaaccatcaacagaaga

SEQ ID NO: 209138 - DNA, 25 bp, Artificial
  probe
  misc_feature (1)..(25): SEQ ID NO: 1327; WAN024FJR_at; Start 242; Stop 266
cacaggctcttattgctgggatgaa

SEQ ID NO: 209139 - DNA, 25 bp, Artificial
  probe
  misc_feature (1)..(25): SEQ ID NO: 1327; WAN024FJR_at; Start 252; Stop 276
tattgctgggatgaagtacaagaca

SEQ ID NO: 209140 - DNA, 25 bp, Artificial
  probe
  misc_feature (1)..(25): SEQ ID NO: 1327; WAN024FJR_at; Start 198; Stop 222
aggtgcttatacctttgagggtact

SEQ ID NO: 209141 - DNA, 25 bp, Artificial
  probe
  misc_feature (1)..(25): SEQ ID NO: 1327; WAN024FJR_at; Start 118; Stop 142
gatgatacagacgagaaaacagatg

SEQ ID NO: 209142 - DNA, 25 bp, Artificial
  probe
  misc_feature (1)..(25): SEQ ID NO: 1327; WAN024FJR_at; Start 16; Stop 40
aacgccctacgtggccattttgtag

SEQ ID NO: 209143 - DNA, 25 bp, Artificial
  probe
  misc_feature (1)..(25): SEQ ID NO: 1327; WAN024FJR_at; Start 92; Stop 116
ttgctaaatggatctcagacgtatc

SEQ ID NO: 209144 - DNA, 25 bp, Artificial
  probe
  misc_feature (1)..(25): SEQ ID NO: 1327; WAN024FJR_at; Start 42; Stop 66
tccatacaatggaggaactgaacca

SEQ ID NO: 209145 - DNA, 25 bp, Artificial
  probe
  misc_feature (1)..(25): SEQ ID NO: 1327; WAN024FJR_at; Start 213; Stop 237
tgagggtacttacgatccagacgat

SEQ ID NO: 209146 - DNA, 25 bp, Artificial
  probe
  misc_feature (1)..(25): SEQ ID NO: 1327; WAN024FJR_at; Start 165; Stop 189
tggagttgaagaaacaaccgtggtc

SEQ ID NO: 209147 - DNA, 25 bp, Artificial
  probe
  misc_feature (1)..(25): SEQ ID NO: 1327; WAN024FJR_at; Start 172; Stop 196
gaagaaacaaccgtggtcagcgtaa

SEQ ID NO: 209148 - DNA, 25 bp, Artificial
  probe
  misc_feature (1)..(25): SEQ ID NO: 1327; WAN024FJR_at; Start 151; Stop 175
tactatgacggtgatggagttgaag

SEQ ID NO: 209149 - DNA, 25 bp, Artificial
  probe
  misc_feature (1)..(25): SEQ ID NO: 1327; WAN024FJR_at; Start 370; Stop 394
tctggcgctgcctctgactatgagg

SEQ ID NO: 209150 - DNA, 25 bp, Artificial
  probe
  misc_feature (1)..(25): SEQ ID NO: 1327; WAN024FJR_at; Start 385; Stop 409
gactatgaggcgtttggatgtaagc

SEQ ID NO: 209151 - DNA, 25 bp, Artificial
  probe
  misc_feature (1)..(25): SEQ ID NO: 1327; WAN024FJR_at; Start 333; Stop 357
ggtgggagctgcaactgcaacagaa

SEQ ID NO: 209152 - DNA, 25 bp, Artificial
  probe
  misc_feature (1)..(25): SEQ ID NO: 1327; WAN024FJR_at; Start 340; Stop 364
gctgcaactgcaacagaaatcaaag

SEQ ID NO: 209153 - DNA, 25 bp, Artificial
  probe
  misc_feature (1)..(25): SEQ ID NO: 1327; WAN024FJR_at; Start 186; Stop 210
ggtcagcgtaaaaggtgcttatacc

SEQ ID NO: 209154 - DNA, 25 bp, Artificial
  probe
  misc_feature (1)..(25): SEQ ID NO: 5111; WAN024FJS_at; Start 60; Stop 84
tgaactaaaacgtacaggatttcca

SEQ ID NO: 209155 - DNA, 25 bp, Artificial
  probe
  misc_feature (1)..(25): SEQ ID NO: 5111; WAN024FJS_at; Start 373; Stop 397
gctctagaacagaccgcaatcatgt

SEQ ID NO: 209156 - DNA, 25 bp, Artificial
  probe
  misc_feature (1)..(25): SEQ ID NO: 5111; WAN024FJS_at; Start 342; Stop 366
tatatatccagattataacgcccta

SEQ ID NO: 209157 - DNA, 25 bp, Artificial
  probe
  misc_feature (1)..(25): SEQ ID NO: 5111; WAN024FJS_at; Start 300; Stop 324
tgatcttatttttggcgacggtaca

SEQ ID NO: 209158 - DNA, 25 bp, Artificial
  probe
  misc_feature (1)..(25): SEQ ID NO: 5111; WAN024FJS_at; Start 452; Stop 476
gtgctagtcactatttaaacaaggg

SEQ ID NO: 209159 - DNA, 25 bp, Artificial
  probe
  misc_feature (1)..(25): SEQ ID NO: 5111; WAN024FJS_at; Start 219; Stop 243
caaaattgagcgtgatggagtaact

SEQ ID NO: 209160 - DNA, 25 bp, Artificial
  probe
  misc_feature (1)..(25): SEQ ID NO: 5111; WAN024FJS_at; Start 273; Stop 297
ggagaagaaacagcttgagattcaa

SEQ ID NO: 209161 - DNA, 25 bp, Artificial
  probe
  misc_feature (1)..(25): SEQ ID NO: 5111; WAN024FJS_at; Start 74; Stop 98
caggatttccagtaaaaatcggaga

SEQ ID NO: 209162 - DNA, 25 bp, Artificial
  probe
  misc_feature (1)..(25): SEQ ID NO: 5111; WAN024FJS_at; Start 101; Stop 125
tagagctatggtttgatacaagtca

SEQ ID NO: 209163 - DNA, 25 bp, Artificial
  probe
  misc_feature (1)..(25): SEQ ID NO: 5111; WAN024FJS_at; Start 27; Stop 51
gaaaaggagtaaagacatgacagat

SEQ ID NO: 209164 - DNA, 25 bp, Artificial
  probe
  misc_feature (1)..(25): SEQ ID NO: 5111; WAN024FJS_at; Start 419; Stop 443
ttgctgagcaacacaaaacggtggt

SEQ ID NO: 209165 - DNA, 25 bp, Artificial
  probe
  misc_feature (1)..(25): SEQ ID NO: 5111; WAN024FJS_at; Start 139; Stop 163
tgcttttatgacatggaagaagaac

SEQ ID NO: 209166 - DNA, 25 bp, Artificial
  probe
  misc_feature (1)..(25): SEQ ID NO: 5111; WAN024FJS_at; Start 2; Stop 26
tgagccttgccctttttaacaacag

SEQ ID NO: 209167 - DNA, 25 bp, Artificial
  probe
  misc_feature (1)..(25): SEQ ID NO: 5111; WAN024FJS_at; Start 206; Stop 230
caaatatcaataacaaaattgagcg

SEQ ID NO: 209168 - DNA, 25 bp, Artificial
  probe
  misc_feature (1)..(25): SEQ ID NO: 5111; WAN024FJS_at; Start 150; Stop 174
catggaagaagaactaaaacgtcgc

SEQ ID NO: 209169 - DNA, 25 bp, Artificial
  probe
  misc_feature (1)..(25): SEQ ID NO: 5111; WAN024FJS_at; Start 117; Stop 141
tacaagtcaagagagcttaatgtgc

SEQ ID NO: 209170 - DNA, 25 bp, Artificial
  probe
  misc_feature (1)..(25): SEQ ID NO: 5111; WAN024FJS_at; Start 355; Stop 379
tataacgccctaaataacgctctag

SEQ ID NO: 209171 - DNA, 25 bp, Artificial
  probe
  misc_feature (1)..(25): SEQ ID NO: 5111; WAN024FJS_at; Start 236; Stop 260
gagtaactaaagaagtagttgctgg

SEQ ID NO: 209172 - DNA, 25 bp, Artificial
  probe
  misc_feature (1)..(25): SEQ ID NO: 5111; WAN024FJS_at; Start 53; Stop 77
ttcagattgaactaaaacgtacagg

SEQ ID NO: 209173 - DNA, 25 bp, Artificial
  probe
  misc_feature (1)..(25): SEQ ID NO: 5111; WAN024FJS_at; Start 32; Stop 56
ggagtaaagacatgacagatattca

SEQ ID NO: 209174 - DNA, 25 bp, Artificial
  probe
  misc_feature (1)..(25): SEQ ID NO: 5111; WAN024FJS_at; Start 441; Stop 465
ggtgaaagagcgtgctagtcactat

SEQ ID NO: 209175 - DNA, 25 bp, Artificial
  probe
  misc_feature (1)..(25): SEQ ID NO: 5111; WAN024FJS_at; Start 392; Stop 416
tcatgttgcatgacaagttggaaga

SEQ ID NO: 209176 - DNA, 25 bp, Artificial
  probe
  misc_feature (1)..(25): SEQ ID NO: 5111; WAN024FJS_at; Start 432; Stop 456
caaaacggtggtgaaagagcgtgct

SEQ ID NO: 209177 - DNA, 25 bp, Artificial
  probe
  misc_feature (1)..(25): SEQ ID NO: 5111; WAN024FJS_at; Start 481; Stop 505
gtcactccaattcaagaacaacaag

SEQ ID NO: 209178 - DNA, 25 bp, Artificial
  probe
  misc_feature (1)..(25): SEQ ID NO: 5111; WAN024FJS_at; Start 86; Stop 110
taaaaatcggagaagtagagctatg

SEQ ID NO: 209179 - DNA, 25 bp, Artificial
  probe
  misc_feature (1)..(25): SEQ ID NO: 5111; WAN024FJS_at; Start 165; Stop 189
aaaacgtcgccttgtccaatatgaa

SEQ ID NO: 209180 - DNA, 25 bp, Artificial
  probe
  misc_feature (1)..(25): SEQ ID NO: 5111; WAN024FJS_at; Start 328; Stop 352
gacaagttatattctatatatccag

SEQ ID NO: 209181 - DNA, 25 bp, Artificial
  probe
  misc_feature (1)..(25): SEQ ID NO: 5111; WAN024FJS_at; Start 127; Stop 151
gagagcttaatgtgcttttatgaca

SEQ ID NO: 209182 - DNA, 25 bp, Artificial
  probe
  misc_feature (1)..(25): SEQ ID NO: 5111; WAN024FJS_at; Start 312; Stop 336
tggcgacggtacatttgacaagtta

SEQ ID NO: 209183 - DNA, 25 bp, Artificial
  probe
  misc_feature (1)..(25): SEQ ID NO: 5111; WAN024FJS_at; Start 379; Stop 403
gaacagaccgcaatcatgttgcatg

SEQ ID NO: 209184 - DNA, 25 bp, Artificial
  probe
  misc_feature (1)..(25): SEQ ID NO: 5111; WAN024FJS_at; Start 180; Stop 204
ccaatatgaattagatgtggtatct

SEQ ID NO: 209185 - DNA, 25 bp, Artificial
  probe
  misc_feature (1)..(25): SEQ ID NO: 5111; WAN024FJS_at; Start 193; Stop 217
gatgtggtatctgcaaatatcaata

SEQ ID NO: 209186 - DNA, 25 bp, Artificial
  probe
  misc_feature (1)..(25): SEQ ID NO: 5111; WAN024FJS_at; Start 263; Stop 287
ctattgaattggagaagaaacagct

SEQ ID NO: 209187 - DNA, 25 bp, Artificial
  probe
  misc_feature (1)..(25): SEQ ID NO: 5111; WAN024FJS_at; Start 365; Stop 389
taaataacgctctagaacagaccgc

SEQ ID NO: 209188 - DNA, 25 bp, Artificial
  probe
  misc_feature (1)..(25): SEQ ID NO: 3247; WAN024FJT_at; Start 47; Stop 71
tgacaatgacagataacggacagcg

SEQ ID NO: 209189 - DNA, 25 bp, Artificial
  probe
  misc_feature (1)..(25): SEQ ID NO: 3247; WAN024FJT_at; Start 1071; Stop 1095
aattggacgttttagaacagaacag

SEQ ID NO: 209190 - DNA, 25 bp, Artificial
  probe
  misc_feature (1)..(25): SEQ ID NO: 3247; WAN024FJT_at; Start 575; Stop 599
taaaggtagaatatggaaccgtgca

SEQ ID NO: 209191 - DNA, 25 bp, Artificial
  probe
  misc_feature (1)..(25): SEQ ID NO: 3247; WAN024FJT_at; Start 32; Stop 56
cagatggatcaggtttgacaatgac

SEQ ID NO: 209192 - DNA, 25 bp, Artificial
  probe
  misc_feature (1)..(25): SEQ ID NO: 3247; WAN024FJT_at; Start 724; Stop 748
aaagcgaaagcatcgatggaggcct

SEQ ID NO: 209193 - DNA, 25 bp, Artificial
  probe
  misc_feature (1)..(25): SEQ ID NO: 3247; WAN024FJT_at; Start 323; Stop 347
taaagcaacagggaatgaaaatccc

SEQ ID NO: 209194 - DNA, 25 bp, Artificial
  probe
  misc_feature (1)..(25): SEQ ID NO: 3247; WAN024FJT_at; Start 985; Stop 1009
tccatgttttctgcaggtaaggaag

SEQ ID NO: 209195 - DNA, 25 bp, Artificial
  probe
  misc_feature (1)..(25): SEQ ID NO: 3247; WAN024FJT_at; Start 292; Stop 316
ggcgccgtttcttctcatccaggta

SEQ ID NO: 209196 - DNA, 25 bp, Artificial
  probe
  misc_feature (1)..(25): SEQ ID NO: 3247; WAN024FJT_at; Start 673; Stop 697
gagcagttaaatgccctcaatgaga

SEQ ID NO: 209197 - DNA, 25 bp, Artificial
  probe
  misc_feature (1)..(25): SEQ ID NO: 3247; WAN024FJT_at; Start 277; Stop 301
tcagatccatacattggcgccgttt

SEQ ID NO: 209198 - DNA, 25 bp, Artificial
  probe
  misc_feature (1)..(25): SEQ ID NO: 3247; WAN024FJT_at; Start 694; Stop 718
gagaagtcacaaattttagaggctg

SEQ ID NO: 209199 - DNA, 25 bp, Artificial
  probe
  misc_feature (1)..(25): SEQ ID NO: 3247; WAN024FJT_at; Start 91; Stop 115
gattatgagaaacctgatagttcgg

SEQ ID NO: 209200 - DNA, 25 bp, Artificial
  probe
  misc_feature (1)..(25): SEQ ID NO: 3247; WAN024FJT_at; Start 642; Stop 666
taactctaaagctgatcagggtctg

SEQ ID NO: 209201 - DNA, 25 bp, Artificial
  probe
  misc_feature (1)..(25): SEQ ID NO: 3247; WAN024FJT_at; Start 904; Stop 928
tacatgaaaagcacaaatgagggct

SEQ ID NO: 209202 - DNA, 25 bp, Artificial
  probe
  misc_feature (1)..(25): SEQ ID NO: 3247; WAN024FJT_at; Start 1006; Stop 1030
gaagttatgtacatttcgcaaggtg

SEQ ID NO: 209203 - DNA, 25 bp, Artificial
  probe
  misc_feature (1)..(25): SEQ ID NO: 3247; WAN024FJT_at; Start 935; Stop 959
taggtaagaatgatgcaagctctac

SEQ ID NO: 209204 - DNA, 25 bp, Artificial
  probe
  misc_feature (1)..(25): SEQ ID NO: 3247; WAN024FJT_at; Start 1116; Stop 1140
gaatgtcatacgatatataggaggt

SEQ ID NO: 209205 - DNA, 25 bp, Artificial
  probe
  misc_feature (1)..(25): SEQ ID NO: 3247; WAN024FJT_at; Start 779; Stop 803
ttgtgaaatcaaatgcagatagtcg

SEQ ID NO: 209206 - DNA, 25 bp, Artificial
  probe
  misc_feature (1)..(25): SEQ ID NO: 3247; WAN024FJT_at; Start 950; Stop 974
caagctctactattaaggtatcaag

SEQ ID NO: 209207 - DNA, 25 bp, Artificial
  probe
  misc_feature (1)..(25): SEQ ID NO: 3247; WAN024FJT_at; Start 710; Stop 734
tagaggctgaaatgaaagcgaaagc

SEQ ID NO: 209208 - DNA, 25 bp, Artificial
  probe
  misc_feature (1)..(25): SEQ ID NO: 3247; WAN024FJT_at; Start 119; Stop 143
aaactaagtacaaatgggctgatcg

SEQ ID NO: 209209 - DNA, 25 bp, Artificial
  probe
  misc_feature (1)..(25): SEQ ID NO: 3247; WAN024FJT_at; Start 860; Stop 884
cacaatttggaggattagcagagct

SEQ ID NO: 209210 - DNA, 25 bp, Artificial
  probe
  misc_feature (1)..(25): SEQ ID NO: 3247; WAN024FJT_at; Start 338; Stop 362
tgaaaatcccagttatacaagggag

SEQ ID NO: 209211 - DNA, 25 bp, Artificial
  probe
  misc_feature (1)..(25): SEQ ID NO: 3247; WAN024FJT_at; Start 658; Stop 682
cagggtctgactcaagagcagttaa

SEQ ID NO: 209212 - DNA, 25 bp, Artificial
  probe
  misc_feature (1)..(25): SEQ ID NO: 3247; WAN024FJT_at; Start 476; Stop 500
taatatcttcagctgatttggtagg

SEQ ID NO: 209213 - DNA, 25 bp, Artificial
  probe
  misc_feature (1)..(25): SEQ ID NO: 3247; WAN024FJT_at; Start 10; Stop 34
cactttgcgtattctgaaaatgcag

SEQ ID NO: 209214 - DNA, 25 bp, Artificial
  probe
  misc_feature (1)..(25): SEQ ID NO: 3247; WAN024FJT_at; Start 590; Stop 614
gaaccgtgcatagcgactggtcgcc

SEQ ID NO: 209215 - DNA, 25 bp, Artificial
  probe
  misc_feature (1)..(25): SEQ ID NO: 3247; WAN024FJT_at; Start 737; Stop 761
cgatggaggcctttagtgaattaga

SEQ ID NO: 209216 - DNA, 25 bp, Artificial
  probe
  misc_feature (1)..(25): SEQ ID NO: 3247; WAN024FJT_at; Start 512; Stop 536
tcgctttacgatatggtgcaggaag

SEQ ID NO: 209217 - DNA, 25 bp, Artificial
  probe
  misc_feature (1)..(25): SEQ ID NO: 3247; WAN024FJT_at; Start 545; Stop 569
tacaaattggaaccgtactagagac

SEQ ID NO: 209218 - DNA, 25 bp, Artificial
  probe
  misc_feature (1)..(25): SEQ ID NO: 3247; WAN024FJT_at; Start 839; Stop 863
gaagaattgatttgctgacgacaca

SEQ ID NO: 209219 - DNA, 25 bp, Artificial
  probe
  misc_feature (1)..(25): SEQ ID NO: 3247; WAN024FJT_at; Start 608; Stop 632
ggtcgcccgctccagaagatattga

SEQ ID NO: 209220 - DNA, 25 bp, Artificial
  probe
  misc_feature (1)..(25): SEQ ID NO: 3247; WAN024FJT_at; Start 526; Stop 550
ggtgcaggaagctcgaatatacaaa

SEQ ID NO: 209221 - DNA, 25 bp, Artificial
  probe
  misc_feature (1)..(25): SEQ ID NO: 3247; WAN024FJT_at; Start 261; Stop 285
tctaaaagcaattgggtcagatcca

SEQ ID NO: 209222 - DNA, 25 bp, Artificial
  probe
  misc_feature (1)..(25): SEQ ID NO: 7505; WAN024FJU_at; Start 48; Stop 72
ctgctggtttagtaacttcttcagt

SEQ ID NO: 209223 - DNA, 25 bp, Artificial
  probe
  misc_feature (1)..(25): SEQ ID NO: 7505; WAN024FJU_at; Start 105; Stop 129
cagttggagctgcataggttttctc

SEQ ID NO: 209224 - DNA, 25 bp, Artificial
  probe
  misc_feature (1)..(25): SEQ ID NO: 7505; WAN024FJU_at; Start 126; Stop 150
tctctttattagacgcagaaacctc

SEQ ID NO: 209225 - DNA, 25 bp, Artificial
  probe
  misc_feature (1)..(25): SEQ ID NO: 7505; WAN024FJU_at; Start 152; Stop 176
gctggtttagtagctgcttctcccc

SEQ ID NO: 209226 - DNA, 25 bp, Artificial
  probe
  misc_feature (1)..(25): SEQ ID NO: 7505; WAN024FJU_at; Start 203; Stop 227
tcttgtttgttttcttccgcttgta

SEQ ID NO: 209227 - DNA, 25 bp, Artificial
  probe
  misc_feature (1)..(25): SEQ ID NO: 7505; WAN024FJU_at; Start 180; Stop 204
caacagaaatactattggtagtttc

SEQ ID NO: 209228 - DNA, 25 bp, Artificial
  probe
  misc_feature (1)..(25): SEQ ID NO: 7505; WAN024FJU_at; Start 137; Stop 161
gacgcagaaacctctgctggtttag

SEQ ID NO: 209229 - DNA, 25 bp, Artificial
  probe
  misc_feature (1)..(25): SEQ ID NO: 7505; WAN024FJU_at; Start 215; Stop 239
tcttccgcttgtactgtttggacac

SEQ ID NO: 209230 - DNA, 25 bp, Artificial
  probe
  misc_feature (1)..(25): SEQ ID NO: 7505; WAN024FJU_at; Start 103; Stop 127
tacagttggagctgcataggttttc

SEQ ID NO: 209231 - DNA, 25 bp, Artificial
  probe
  misc_feature (1)..(25): SEQ ID NO: 7505; WAN024FJU_at; Start 91; Stop 115
tactggattagctacagttggagct

SEQ ID NO: 209232 - DNA, 25 bp, Artificial
  probe
  misc_feature (1)..(25): SEQ ID NO: 7505; WAN024FJU_at; Start 78; Stop 102
ctggagtcgtttctactggattagc

SEQ ID NO: 209233 - DNA, 25 bp, Artificial
  probe
  misc_feature (1)..(25): SEQ ID NO: 7505; WAN024FJU_at; Start 155; Stop 179
ggtttagtagctgcttctcccctac

SEQ ID NO: 209234 - DNA, 25 bp, Artificial
  probe
  misc_feature (1)..(25): SEQ ID NO: 7505; WAN024FJU_at; Start 31; Stop 55
tgcttcttcaactttttctgctggt

SEQ ID NO: 209235 - DNA, 25 bp, Artificial
  probe
  misc_feature (1)..(25): SEQ ID NO: 7505; WAN024FJU_at; Start 117; Stop 141
cataggttttctctttattagacgc

SEQ ID NO: 209236 - DNA, 25 bp, Artificial
  probe
  misc_feature (1)..(25): SEQ ID NO: 7505; WAN024FJU_at; Start 166; Stop 190
tgcttctcccctaccaacagaaata

SEQ ID NO: 209237 - DNA, 25 bp, Artificial
  probe
  misc_feature (1)..(25): SEQ ID NO: 7505; WAN024FJU_at; Start 143; Stop 167
gaaacctctgctggtttagtagctg

SEQ ID NO: 209238 - DNA, 25 bp, Artificial
  probe
  misc_feature (1)..(25): SEQ ID NO: 7505; WAN024FJU_at; Start 73; Stop 97
tttaactggagtcgtttctactgga

SEQ ID NO: 209239 - DNA, 25 bp, Artificial
  probe
  misc_feature (1)..(25): SEQ ID NO: 7505; WAN024FJU_at; Start 83; Stop 107
gtcgtttctactggattagctacag

SEQ ID NO: 209240 - DNA, 25 bp, Artificial
  probe
  misc_feature (1)..(25): SEQ ID NO: 7505; WAN024FJU_at; Start 231; Stop 255
tttggacactagctgctgcacctaa

SEQ ID NO: 209241 - DNA, 25 bp, Artificial
  probe
  misc_feature (1)..(25): SEQ ID NO: 7505; WAN024FJU_at; Start 16; Stop 40
ctcttttttgtcttttgcttcttca

SEQ ID NO: 209242 - DNA, 25 bp, Artificial
  probe
  misc_feature (1)..(25): SEQ ID NO: 7505; WAN024FJU_at; Start 3; Stop 27
gatgcgttacttcctcttttttgtc

SEQ ID NO: 209243 - DNA, 25 bp, Artificial
  probe
  misc_feature (1)..(25): SEQ ID NO: 7505; WAN024FJU_at; Start 132; Stop 156
tattagacgcagaaacctctgctgg

SEQ ID NO: 209244 - DNA, 25 bp, Artificial
  probe
  misc_feature (1)..(25): SEQ ID NO: 7505; WAN024FJU_at; Start 99; Stop 123
tagctacagttggagctgcataggt

SEQ ID NO: 209245 - DNA, 25 bp, Artificial
  probe
  misc_feature (1)..(25): SEQ ID NO: 7505; WAN024FJU_at; Start 109; Stop 133
tggagctgcataggttttctcttta

SEQ ID NO: 209246 - DNA, 25 bp, Artificial
  probe
  misc_feature (1)..(25): SEQ ID NO: 7505; WAN024FJU_at; Start 94; Stop 118
tggattagctacagttggagctgca

SEQ ID NO: 209247 - DNA, 25 bp, Artificial
  probe
  misc_feature (1)..(25): SEQ ID NO: 7505; WAN024FJU_at; Start 229; Stop 253
tgtttggacactagctgctgcacct

SEQ ID NO: 209248 - DNA, 25 bp, Artificial
  probe
  misc_feature (1)..(25): SEQ ID NO: 7505; WAN024FJU_at; Start 38; Stop 62
tcaactttttctgctggtttagtaa

SEQ ID NO: 209249 - DNA, 25 bp, Artificial
  probe
  misc_feature (1)..(25): SEQ ID NO: 7505; WAN024FJU_at; Start 62; Stop 86
acttcttcagttttaactggagtcg

SEQ ID NO: 209250 - DNA, 25 bp, Artificial
  probe
  misc_feature (1)..(25): SEQ ID NO: 7505; WAN024FJU_at; Start 222; Stop 246
cttgtactgtttggacactagctgc

SEQ ID NO: 209251 - DNA, 25 bp, Artificial
  probe
  misc_feature (1)..(25): SEQ ID NO: 7505; WAN024FJU_at; Start 218; Stop 242
tccgcttgtactgtttggacactag

SEQ ID NO: 209252 - DNA, 25 bp, Artificial
  probe
  misc_feature (1)..(25): SEQ ID NO: 7505; WAN024FJU_at; Start 147; Stop 171
cctctgctggtttagtagctgcttc

SEQ ID NO: 209253 - DNA, 25 bp, Artificial
  probe
  misc_feature (1)..(25): SEQ ID NO: 7505; WAN024FJU_at; Start 226; Stop 250
tactgtttggacactagctgctgca

SEQ ID NO: 209254 - DNA, 25 bp, Artificial
  probe
  misc_feature (1)..(25): SEQ ID NO: 7505; WAN024FJU_at; Start 172; Stop 196
tcccctaccaacagaaatactattg

SEQ ID NO: 209255 - DNA, 25 bp, Artificial
  probe
  misc_feature (1)..(25): SEQ ID NO: 7505; WAN024FJU_at; Start 158; Stop 182
ttagtagctgcttctcccctaccaa

SEQ ID NO: 209256 - DNA, 25 bp, Artificial
  probe
  misc_feature (1)..(25): SEQ ID NO: 6375; WAN024FJV_at; Start 970; Stop 994
tcatttcgtggtataggacattcac

SEQ ID NO: 209257 - DNA, 25 bp, Artificial
  probe
  misc_feature (1)..(25): SEQ ID NO: 6375; WAN024FJV_at; Start 895; Stop 919
gctggaccagaaaataaaccaatct

SEQ ID NO: 209258 - DNA, 25 bp, Artificial
  probe
  misc_feature (1)..(25): SEQ ID NO: 6375; WAN024FJV_at; Start 864; Stop 888
ctttagagcggctggaagtggtttt

SEQ ID NO: 209259 - DNA, 25 bp, Artificial
  probe
  misc_feature (1)..(25): SEQ ID NO: 6375; WAN024FJV_at; Start 939; Stop 963
tgcattttctgacatcagtcagggc

SEQ ID NO: 209260 - DNA, 25 bp, Artificial
  probe
  misc_feature (1)..(25): SEQ ID NO: 6375; WAN024FJV_at; Start 627; Stop 651
tatagttgaagcgaaggaagagact

SEQ ID NO: 209261 - DNA, 25 bp, Artificial
  probe
  misc_feature (1)..(25): SEQ ID NO: 6375; WAN024FJV_at; Start 1411; Stop 1435
aatccactcctcttggatgcaaacc

SEQ ID NO: 209262 - DNA, 25 bp, Artificial
  probe
  misc_feature (1)..(25): SEQ ID NO: 6375; WAN024FJV_at; Start 1058; Stop 1082
caattaaatactctggtccaggtga

SEQ ID NO: 209263 - DNA, 25 bp, Artificial
  probe
  misc_feature (1)..(25): SEQ ID NO: 6375; WAN024FJV_at; Start 917; Stop 941
tcttaaatccaaataatactattgc

SEQ ID NO: 209264 - DNA, 25 bp, Artificial
  probe
  misc_feature (1)..(25): SEQ ID NO: 6375; WAN024FJV_at; Start 1391; Stop 1415
ccaactattatcatagagcaaatcc

SEQ ID NO: 209265 - DNA, 25 bp, Artificial
  probe
  misc_feature (1)..(25): SEQ ID NO: 6375; WAN024FJV_at; Start 1405; Stop 1429
agagcaaatccactcctcttggatg

SEQ ID NO: 209266 - DNA, 25 bp, Artificial
  probe
  misc_feature (1)..(25): SEQ ID NO: 6375; WAN024FJV_at; Start 1069; Stop 1093
tctggtccaggtgaatttgttaata

SEQ ID NO: 209267 - DNA, 25 bp, Artificial
  probe
  misc_feature (1)..(25): SEQ ID NO: 6375; WAN024FJV_at; Start 965; Stop 989
tacattcatttcgtggtataggaca

SEQ ID NO: 209268 - DNA, 25 bp, Artificial
  probe
  misc_feature (1)..(25): SEQ ID NO: 6375; WAN024FJV_at; Start 696; Stop 720
tattttgccaattagcacagctgct

SEQ ID NO: 209269 - DNA, 25 bp, Artificial
  probe
  misc_feature (1)..(25): SEQ ID NO: 6375; WAN024FJV_at; Start 878; Stop 902
gaagtggttttagagcagctggacc

SEQ ID NO: 209270 - DNA, 25 bp, Artificial
  probe
  misc_feature (1)..(25): SEQ ID NO: 6375; WAN024FJV_at; Start 646; Stop 670
gagactaaaccagctgtaacaacga

SEQ ID NO: 209271 - DNA, 25 bp, Artificial
  probe
  misc_feature (1)..(25): SEQ ID NO: 6375; WAN024FJV_at; Start 953; Stop 977
tcagtcagggcttacattcatttcg

SEQ ID NO: 209272 - DNA, 25 bp, Artificial
  probe
  misc_feature (1)..(25): SEQ ID NO: 6375; WAN024FJV_at; Start 638; Stop 662
cgaaggaagagactaaaccagctgt

SEQ ID NO: 209273 - DNA, 25 bp, Artificial
  probe
  misc_feature (1)..(25): SEQ ID NO: 6375; WAN024FJV_at; Start 1006; Stop 1030
gaaatccattatgatgtaacgacag

SEQ ID NO: 209274 - DNA, 25 bp, Artificial
  probe
  misc_feature (1)..(25): SEQ ID NO: 6375; WAN024FJV_at; Start 930; Stop 954
taatactattgcattttctgacatc

SEQ ID NO: 209275 - DNA, 25 bp, Artificial
  probe
  misc_feature (1)..(25): SEQ ID NO: 6375; WAN024FJV_at; Start 1035; Stop 1059
tagaggtaatagattgaatttcaca

SEQ ID NO: 209276 - DNA, 25 bp, Artificial
  probe
  misc_feature (1)..(25): SEQ ID NO: 6375; WAN024FJV_at; Start 958; Stop 982
cagggcttacattcatttcgtggta

SEQ ID NO: 209277 - DNA, 25 bp, Artificial
  probe
  misc_feature (1)..(25): SEQ ID NO: 6375; WAN024FJV_at; Start 835; Stop 859
tatagtggttttagaacagcaggaa

SEQ ID NO: 209278 - DNA, 25 bp, Artificial
  probe
  misc_feature (1)..(25): SEQ ID NO: 6375; WAN024FJV_at; Start 707; Stop 731
ttagcacagctgctaaagtagaaac

SEQ ID NO: 209279 - DNA, 25 bp, Artificial
  probe
  misc_feature (1)..(25): SEQ ID NO: 6375; WAN024FJV_at; Start 605; Stop 629
cgcctgtagcaaagaaagctaatat

SEQ ID NO: 209280 - DNA, 25 bp, Artificial
  probe
  misc_feature (1)..(25): SEQ ID NO: 6375; WAN024FJV_at; Start 1055; Stop 1079
tcacaattaaatactctggtccagg

SEQ ID NO: 209281 - DNA, 25 bp, Artificial
  probe
  misc_feature (1)..(25): SEQ ID NO: 6375; WAN024FJV_at; Start 660; Stop 684
tgtaacaacgactgaacgttcagct

SEQ ID NO: 209282 - DNA, 25 bp, Artificial
  probe
  misc_feature (1)..(25): SEQ ID NO: 6375; WAN024FJV_at; Start 1025; Stop 1049
cgacagtacgtagaggtaatagatt

SEQ ID NO: 209283 - DNA, 25 bp, Artificial
  probe
  misc_feature (1)..(25): SEQ ID NO: 6375; WAN024FJV_at; Start 981; Stop 1005
tataggacattcacgtggtggtcgt

SEQ ID NO: 209284 - DNA, 25 bp, Artificial
  probe
  misc_feature (1)..(25): SEQ ID NO: 6375; WAN024FJV_at; Start 840; Stop 864
tggttttagaacagcaggaagtggc

SEQ ID NO: 209285 - DNA, 25 bp, Artificial
  probe
  misc_feature (1)..(25): SEQ ID NO: 6375; WAN024FJV_at; Start 614; Stop 638
caaagaaagctaatatagttgaagc

SEQ ID NO: 209286 - DNA, 25 bp, Artificial
  probe
  misc_feature (1)..(25): SEQ ID NO: 6375; WAN024FJV_at; Start 992; Stop 1016
cacgtggtggtcgtgaaatccatta

SEQ ID NO: 209287 - DNA, 25 bp, Artificial
  probe
  misc_feature (1)..(25): SEQ ID NO: 6375; WAN024FJV_at; Start 1015; Stop 1039
tatgatgtaacgacagtacgtagag

SEQ ID NO: 209288 - DNA, 25 bp, Artificial
  probe
  misc_feature (1)..(25): SEQ ID NO: 6375; WAN024FJV_at; Start 883; Stop 907
ggttttagagcagctggaccagaaa

SEQ ID NO: 209289 - DNA, 25 bp, Artificial
  probe
  misc_feature (1)..(25): SEQ ID NO: 6375; WAN024FJV_at; Start 849; Stop 873
aacagcaggaagtggctttagagcg

SEQ ID NO: 209290 - DNA, 25 bp, Artificial
  probe
  misc_feature (1)..(25): SEQ ID NO: 7632; WAN024FJW_at; Start 201; Stop 225
tgttgcagctggtttagccccttct

SEQ ID NO: 209291 - DNA, 25 bp, Artificial
  probe
  misc_feature (1)..(25): SEQ ID NO: 7632; WAN024FJW_at; Start 70; Stop 94
ttttggcgagcatcagaaaggctca

SEQ ID NO: 209292 - DNA, 25 bp, Artificial
  probe
  misc_feature (1)..(25): SEQ ID NO: 7632; WAN024FJW_at; Start 136; Stop 160
gttgtttctactttgtcagctgtgc

SEQ ID NO: 209293 - DNA, 25 bp, Artificial
  probe
  misc_feature (1)..(25): SEQ ID NO: 7632; WAN024FJW_at; Start 32; Stop 56
tataccctctattaacatcttcctt

SEQ ID NO: 209294 - DNA, 25 bp, Artificial
  probe
  misc_feature (1)..(25): SEQ ID NO: 7632; WAN024FJW_at; Start 112; Stop 136
tcattaatagatgctggagctgaag

SEQ ID NO: 209295 - DNA, 25 bp, Artificial
  probe
  misc_feature (1)..(25): SEQ ID NO: 7632; WAN024FJW_at; Start 215; Stop 239
tagccccttcttttgattcaactgc

SEQ ID NO: 209296 - DNA, 25 bp, Artificial
  probe
  misc_feature (1)..(25): SEQ ID NO: 7632; WAN024FJW_at; Start 197; Stop 221
cagttgttgcagctggtttagcccc

SEQ ID NO: 209297 - DNA, 25 bp, Artificial
  probe
  misc_feature (1)..(25): SEQ ID NO: 7632; WAN024FJW_at; Start 56; Stop 80
tacggatagctggattttggcgagc

SEQ ID NO: 209298 - DNA, 25 bp, Artificial
  probe
  misc_feature (1)..(25): SEQ ID NO: 7632; WAN024FJW_at; Start 8; Stop 32
gattgctagccgctctaaaaccact

SEQ ID NO: 209299 - DNA, 25 bp, Artificial
  probe
  misc_feature (1)..(25): SEQ ID NO: 7632; WAN024FJW_at; Start 296; Stop 320
gaagttctagaccaataataaatga

SEQ ID NO: 209300 - DNA, 25 bp, Artificial
  probe
  misc_feature (1)..(25): SEQ ID NO: 7632; WAN024FJW_at; Start 244; Stop 268
gctttcttcgctacaggcgtttctg

SEQ ID NO: 209301 - DNA, 25 bp, Artificial
  probe
  misc_feature (1)..(25): SEQ ID NO: 7632; WAN024FJW_at; Start 188; Stop 212
ctgaacgttcagttgttgcagctgg

SEQ ID NO: 209302 - DNA, 25 bp, Artificial
  probe
  misc_feature (1)..(25): SEQ ID NO: 7632; WAN024FJW_at; Start 229; Stop 253
gattcaactgcatcagctttcttcg

SEQ ID NO: 209303 - DNA, 25 bp, Artificial
  probe
  misc_feature (1)..(25): SEQ ID NO: 7632; WAN024FJW_at; Start 79; Stop 103
gcatcagaaaggctcaaacctagtt

SEQ ID NO: 209304 - DNA, 25 bp, Artificial
  probe
  misc_feature (1)..(25): SEQ ID NO: 7632; WAN024FJW_at; Start 255; Stop 279
tacaggcgtttctgatacagtttct

SEQ ID NO: 209305 - DNA, 25 bp, Artificial
  probe
  misc_feature (1)..(25): SEQ ID NO: 7632; WAN024FJW_at; Start 53; Stop 77
ccttacggatagctggattttggcg

SEQ ID NO: 209306 - DNA, 25 bp, Artificial
  probe
  misc_feature (1)..(25): SEQ ID NO: 7632; WAN024FJW_at; Start 85; Stop 109
gaaaggctcaaacctagtttcaaga

SEQ ID NO: 209307 - DNA, 25 bp, Artificial
  probe
  misc_feature (1)..(25): SEQ ID NO: 7632; WAN024FJW_at; Start 44; Stop 68
taacatcttccttacggatagctgg

SEQ ID NO: 209308 - DNA, 25 bp, Artificial
  probe
  misc_feature (1)..(25): SEQ ID NO: 7632; WAN024FJW_at; Start 268; Stop 292
gatacagtttctttattagagttag

SEQ ID NO: 209309 - DNA, 25 bp, Artificial
  probe
  misc_feature (1)..(25): SEQ ID NO: 7632; WAN024FJW_at; Start 284; Stop 308
tagagttagaacgaagttctagacc

SEQ ID NO: 209310 - DNA, 25 bp, Artificial
  probe
  misc_feature (1)..(25): SEQ ID NO: 7632; WAN024FJW_at; Start 19; Stop 43
gctctaaaaccactataccctctat

SEQ ID NO: 209311 - DNA, 25 bp, Artificial
  probe
  misc_feature (1)..(25): SEQ ID NO: 7632; WAN024FJW_at; Start 238; Stop 262
gcatcagctttcttcgctacaggcg

SEQ ID NO: 209312 - DNA, 25 bp, Artificial
  probe
  misc_feature (1)..(25): SEQ ID NO: 7632; WAN024FJW_at; Start 121; Stop 145
gatgctggagctgaagttgtttcta

SEQ ID NO: 209313 - DNA, 25 bp, Artificial
  probe
  misc_feature (1)..(25): SEQ ID NO: 7632; WAN024FJW_at; Start 62; Stop 86
tagctggattttggcgagcatcaga

SEQ ID NO: 209314 - DNA, 25 bp, Artificial
  probe
  misc_feature (1)..(25): SEQ ID NO: 7632; WAN024FJW_at; Start 292; Stop 316
gaacgaagttctagaccaataataa

SEQ ID NO: 209315 - DNA, 25 bp, Artificial
  probe
  misc_feature (1)..(25): SEQ ID NO: 7632; WAN024FJW_at; Start 159; Stop 183
gctagttggcaaaatagcgctatca

SEQ ID NO: 209316 - DNA, 25 bp, Artificial
  probe
  misc_feature (1)..(25): SEQ ID NO: 7632; WAN024FJW_at; Start 251; Stop 275
tcgctacaggcgtttctgatacagt

SEQ ID NO: 209317 - DNA, 25 bp, Artificial
  probe
  misc_feature (1)..(25): SEQ ID NO: 7632; WAN024FJW_at; Start 90; Stop 114
gctcaaacctagtttcaagatttca

SEQ ID NO: 209318 - DNA, 25 bp, Artificial
  probe
  misc_feature (1)..(25): SEQ ID NO: 7632; WAN024FJW_at; Start 2; Stop 26
tggctggattgctagccgctctaaa

SEQ ID NO: 209319 - DNA, 25 bp, Artificial
  probe
  misc_feature (1)..(25): SEQ ID NO: 7632; WAN024FJW_at; Start 151; Stop 175
tcagctgtgctagttggcaaaatag

SEQ ID NO: 209320 - DNA, 25 bp, Artificial
  probe
  misc_feature (1)..(25): SEQ ID NO: 7632; WAN024FJW_at; Start 105; Stop 129
caagatttcattaatagatgctgga

SEQ ID NO: 209321 - DNA, 25 bp, Artificial
  probe
  misc_feature (1)..(25): SEQ ID NO: 7632; WAN024FJW_at; Start 175; Stop 199
gcgctatcaacagctgaacgttcag

SEQ ID NO: 209322 - DNA, 25 bp, Artificial
  probe
  misc_feature (1)..(25): SEQ ID NO: 7632; WAN024FJW_at; Start 166; Stop 190
ggcaaaatagcgctatcaacagctg

SEQ ID NO: 209323 - DNA, 25 bp, Artificial
  probe
  misc_feature (1)..(25): SEQ ID NO: 7632; WAN024FJW_at; Start 144; Stop 168
tactttgtcagctgtgctagttggc

SEQ ID NO: 209324 - DNA, 25 bp, Artificial
  probe
  misc_feature (1)..(25): SEQ ID NO: 824; WAN024FJX_at; Start 852; Stop 876
tagcaatccagccaacccaattgtc

SEQ ID NO: 209325 - DNA, 25 bp, Artificial
  probe
  misc_feature (1)..(25): SEQ ID NO: 824; WAN024FJX_at; Start 933; Stop 957
tagtttccgtggctacgggaactca

SEQ ID NO: 209326 - DNA, 25 bp, Artificial
  probe
  misc_feature (1)..(25): SEQ ID NO: 824; WAN024FJX_at; Start 1377; Stop 1401
tagagcaaacccactatacttggat

SEQ ID NO: 209327 - DNA, 25 bp, Artificial
  probe
  misc_feature (1)..(25): SEQ ID NO: 824; WAN024FJX_at; Start 875; Stop 899
tctcaggttctggaaatacagttgc

SEQ ID NO: 209328 - DNA, 25 bp, Artificial
  probe
  misc_feature (1)..(25): SEQ ID NO: 824; WAN024FJX_at; Start 1803; Stop 1827
tgaaaaaggagaccaaggtgaacgc

SEQ ID NO: 209329 - DNA, 25 bp, Artificial
  probe
  misc_feature (1)..(25): SEQ ID NO: 824; WAN024FJX_at; Start 704; Stop 728
ctagcacagctgacaaagtagaaac

SEQ ID NO: 209330 - DNA, 25 bp, Artificial
  probe
  misc_feature (1)..(25): SEQ ID NO: 824; WAN024FJX_at; Start 1365; Stop 1389
taactattattatagagcaaaccca

SEQ ID NO: 209331 - DNA, 25 bp, Artificial
  probe
  misc_feature (1)..(25): SEQ ID NO: 824; WAN024FJX_at; Start 1030; Stop 1054
tattctgcgccaggagattctagag

SEQ ID NO: 209332 - DNA, 25 bp, Artificial
  probe
  misc_feature (1)..(25): SEQ ID NO: 824; WAN024FJX_at; Start 975; Stop 999
tcattacgatgtaacaacagtacgt

SEQ ID NO: 209333 - DNA, 25 bp, Artificial
  probe
  misc_feature (1)..(25): SEQ ID NO: 824; WAN024FJX_at; Start 865; Stop 889
aacccaattgtctcaggttctggaa

SEQ ID NO: 209334 - DNA, 25 bp, Artificial
  probe
  misc_feature (1)..(25): SEQ ID NO: 824; WAN024FJX_at; Start 693; Stop 717
tattttgccaactagcacagctgac

SEQ ID NO: 209335 - DNA, 25 bp, Artificial
  probe
  misc_feature (1)..(25): SEQ ID NO: 824; WAN024FJX_at; Start 992; Stop 1016
cagtacgtagtggtaatagtgttaa

SEQ ID NO: 209336 - DNA, 25 bp, Artificial
  probe
  misc_feature (1)..(25): SEQ ID NO: 824; WAN024FJX_at; Start 886; Stop 910
ggaaatacagttgcatttgcagata

SEQ ID NO: 209337 - DNA, 25 bp, Artificial
  probe
  misc_feature (1)..(25): SEQ ID NO: 824; WAN024FJX_at; Start 1813; Stop 1837
gaccaaggtgaacgcggtctaactg

SEQ ID NO: 209338 - DNA, 25 bp, Artificial
  probe
  misc_feature (1)..(25): SEQ ID NO: 824; WAN024FJX_at; Start 927; Stop 951
tagctatagtttccgtggctacggg

SEQ ID NO: 209339 - DNA, 25 bp, Artificial
  probe
  misc_feature (1)..(25): SEQ ID NO: 824; WAN024FJX_at; Start 1779; Stop 1803
tgctattaaagatggagctaaaggt

SEQ ID NO: 209340 - DNA, 25 bp, Artificial
  probe
  misc_feature (1)..(25): SEQ ID NO: 824; WAN024FJX_at; Start 961; Stop 985
ggtggaaattctattcattacgatg

SEQ ID NO: 209341 - DNA, 25 bp, Artificial
  probe
  misc_feature (1)..(25): SEQ ID NO: 824; WAN024FJX_at; Start 832; Stop 856
tatagtggttttagagcggctagca

SEQ ID NO: 209342 - DNA, 25 bp, Artificial
  probe
  misc_feature (1)..(25): SEQ ID NO: 824; WAN024FJX_at; Start 916; Stop 940
caaggtggtcgtagctatagtttcc

SEQ ID NO: 209343 - DNA, 25 bp, Artificial
  probe
  misc_feature (1)..(25): SEQ ID NO: 824; WAN024FJX_at; Start 953; Stop 977
actcacgtggtggaaattctattca

SEQ ID NO: 209344 - DNA, 25 bp, Artificial
  probe
  misc_feature (1)..(25): SEQ ID NO: 824; WAN024FJX_at; Start 647; Stop 671
gggctaaaccagctgcaacaactga

SEQ ID NO: 209345 - DNA, 25 bp, Artificial
  probe
  misc_feature (1)..(25): SEQ ID NO: 824; WAN024FJX_at; Start 605; Stop 629
cgcctgtagcgaagaaagctgatgc

SEQ ID NO: 209346 - DNA, 25 bp, Artificial
  probe
  misc_feature (1)..(25): SEQ ID NO: 824; WAN024FJX_at; Start 624; Stop 648
tgatgcagttgaatcaaaagaaggg

SEQ ID NO: 209347 - DNA, 25 bp, Artificial
  probe
  misc_feature (1)..(25): SEQ ID NO: 824; WAN024FJX_at; Start 981; Stop 1005
cgatgtaacaacagtacgtagtggt

SEQ ID NO: 209348 - DNA, 25 bp, Artificial
  probe
  misc_feature (1)..(25): SEQ ID NO: 824; WAN024FJX_at; Start 655; Stop 679
ccagctgcaacaactgaacgttcag

SEQ ID NO: 209349 - DNA, 25 bp, Artificial
  probe
  misc_feature (1)..(25): SEQ ID NO: 824; WAN024FJX_at; Start 614; Stop 638
cgaagaaagctgatgcagttgaatc

SEQ ID NO: 209350 - DNA, 25 bp, Artificial
  probe
  misc_feature (1)..(25): SEQ ID NO: 824; WAN024FJX_at; Start 1039; Stop 1063
ccaggagattctagagagtttgtta

SEQ ID NO: 209351 - DNA, 25 bp, Artificial
  probe
  misc_feature (1)..(25): SEQ ID NO: 824; WAN024FJX_at; Start 1020; Stop 1044
tacaattagttattctgcgccagga

SEQ ID NO: 209352 - DNA, 25 bp, Artificial
  probe
  misc_feature (1)..(25): SEQ ID NO: 824; WAN024FJX_at; Start 1759; Stop 1783
gacgaacttgttcaaaaaattgcta

SEQ ID NO: 209353 - DNA, 25 bp, Artificial
  probe
  misc_feature (1)..(25): SEQ ID NO: 824; WAN024FJX_at; Start 841; Stop 865
tttagagcggctagcaatccagcca

SEQ ID NO: 209354 - DNA, 25 bp, Artificial
  probe
  misc_feature (1)..(25): SEQ ID NO: 824; WAN024FJX_at; Start 1384; Stop 1408
aacccactatacttggatgcaaacc

SEQ ID NO: 209355 - DNA, 25 bp, Artificial
  probe
  misc_feature (1)..(25): SEQ ID NO: 824; WAN024FJX_at; Start 901; Stop 925
tttgcagatattagccaaggtggtc

SEQ ID NO: 209356 - DNA, 25 bp, Artificial
  probe
  misc_feature (1)..(25): SEQ ID NO: 824; WAN024FJX_at; Start 1791; Stop 1815
tggagctaaaggtgaaaaaggagac

SEQ ID NO: 209357 - DNA, 25 bp, Artificial
  probe
  misc_feature (1)..(25): SEQ ID NO: 824; WAN024FJX_at; Start 945; Stop 969
ctacgggaactcacgtggtggaaat

SEQ ID NO: 209358 - DNA, 25 bp, Artificial
  probe
  misc_feature (1)..(25): SEQ ID NO: 3955; WAN024FJY_at; Start 145; Stop 169
catcctggtggtgatttttggctga

SEQ ID NO: 209359 - DNA, 25 bp, Artificial
  probe
  misc_feature (1)..(25): SEQ ID NO: 3955; WAN024FJY_at; Start 353; Stop 377
tggtttgccataaagaataactaat

SEQ ID NO: 209360 - DNA, 25 bp, Artificial
  probe
  misc_feature (1)..(25): SEQ ID NO: 3955; WAN024FJY_at; Start 310; Stop 334
tatgctgcttttatgattgacctgg

SEQ ID NO: 209361 - DNA, 25 bp, Artificial
  probe
  misc_feature (1)..(25): SEQ ID NO: 3955; WAN024FJY_at; Start 56; Stop 80
gattttataggagttttctcgctcc

SEQ ID NO: 209362 - DNA, 25 bp, Artificial
  probe
  misc_feature (1)..(25): SEQ ID NO: 3955; WAN024FJY_at; Start 209; Stop 233
cagaaaataaggaagaagttcaggc

SEQ ID NO: 209363 - DNA, 25 bp, Artificial
  probe
  misc_feature (1)..(25): SEQ ID NO: 3955; WAN024FJY_at; Start 327; Stop 351
tgacctggatgggaacaatatagag

SEQ ID NO: 209364 - DNA, 25 bp, Artificial
  probe
  misc_feature (1)..(25): SEQ ID NO: 3955; WAN024FJY_at; Start 339; Stop 363
gaacaatatagaggtggtttgccat

SEQ ID NO: 209365 - DNA, 25 bp, Artificial
  probe
  misc_feature (1)..(25): SEQ ID NO: 3955; WAN024FJY_at; Start 342; Stop 366
caatatagaggtggtttgccataaa

SEQ ID NO: 209366 - DNA, 25 bp, Artificial
  probe
  misc_feature (1)..(25): SEQ ID NO: 3955; WAN024FJY_at; Start 281; Stop 305
ctggttatcgaagtgagcatccgat

SEQ ID NO: 209367 - DNA, 25 bp, Artificial
  probe
  misc_feature (1)..(25): SEQ ID NO: 3955; WAN024FJY_at; Start 168; Stop 192
gactcagggaacacaagatcctgtt

SEQ ID NO: 209368 - DNA, 25 bp, Artificial
  probe
  misc_feature (1)..(25): SEQ ID NO: 3955; WAN024FJY_at; Start 176; Stop 200
gaacacaagatcctgttcattttgc

SEQ ID NO: 209369 - DNA, 25 bp, Artificial
  probe
  misc_feature (1)..(25): SEQ ID NO: 3955; WAN024FJY_at; Start 162; Stop 186
ttggctgactcagggaacacaagat

SEQ ID NO: 209370 - DNA, 25 bp, Artificial
  probe
  misc_feature (1)..(25): SEQ ID NO: 3955; WAN024FJY_at; Start 34; Stop 58
aaggatttacaaatttcagaaggat

SEQ ID NO: 209371 - DNA, 25 bp, Artificial
  probe
  misc_feature (1)..(25): SEQ ID NO: 3955; WAN024FJY_at; Start 20; Stop 44
ttgagattaaggtaaaggatttaca

SEQ ID NO: 209372 - DNA, 25 bp, Artificial
  probe
  misc_feature (1)..(25): SEQ ID NO: 3955; WAN024FJY_at; Start 316; Stop 340
gcttttatgattgacctggatggga

SEQ ID NO: 209373 - DNA, 25 bp, Artificial
  probe
  misc_feature (1)..(25): SEQ ID NO: 3955; WAN024FJY_at; Start 221; Stop 245
aagaagttcaggcttgttatgaggc

SEQ ID NO: 209374 - DNA, 25 bp, Artificial
  probe
  misc_feature (1)..(25): SEQ ID NO: 3955; WAN024FJY_at; Start 138; Stop 162
cagccctcatcctggtggtgatttt

SEQ ID NO: 209375 - DNA, 25 bp, Artificial
  probe
  misc_feature (1)..(25): SEQ ID NO: 3955; WAN024FJY_at; Start 112; Stop 136
tctctaattagttttctatccccga

SEQ ID NO: 209376 - DNA, 25 bp, Artificial
  probe
  misc_feature (1)..(25): SEQ ID NO: 3955; WAN024FJY_at; Start 198; Stop 222
tgcttttttagcagaaaataaggaa

SEQ ID NO: 209377 - DNA, 25 bp, Artificial
  probe
  misc_feature (1)..(25): SEQ ID NO: 3955; WAN024FJY_at; Start 165; Stop 189
gctgactcagggaacacaagatcct

SEQ ID NO: 209378 - DNA, 25 bp, Artificial
  probe
  misc_feature (1)..(25): SEQ ID NO: 3955; WAN024FJY_at; Start 148; Stop 172
cctggtggtgatttttggctgactc

SEQ ID NO: 209379 - DNA, 25 bp, Artificial
  probe
  misc_feature (1)..(25): SEQ ID NO: 3955; WAN024FJY_at; Start 349; Stop 373
gaggtggtttgccataaagaataac

SEQ ID NO: 209380 - DNA, 25 bp, Artificial
  probe
  misc_feature (1)..(25): SEQ ID NO: 3955; WAN024FJY_at; Start 279; Stop 303
tcctggttatcgaagtgagcatccg

SEQ ID NO: 209381 - DNA, 25 bp, Artificial
  probe
  misc_feature (1)..(25): SEQ ID NO: 3955; WAN024FJY_at; Start 157; Stop 181
gatttttggctgactcagggaacac

SEQ ID NO: 209382 - DNA, 25 bp, Artificial
  probe
  misc_feature (1)..(25): SEQ ID NO: 3955; WAN024FJY_at; Start 13; Stop 37
gatcattttgagattaaggtaaagg

SEQ ID NO: 209383 - DNA, 25 bp, Artificial
  probe
  misc_feature (1)..(25): SEQ ID NO: 3955; WAN024FJY_at; Start 184; Stop 208
gatcctgttcattttgcttttttag

SEQ ID NO: 209384 - DNA, 25 bp, Artificial
  probe
  misc_feature (1)..(25): SEQ ID NO: 3955; WAN024FJY_at; Start 319; Stop 343
tttatgattgacctggatgggaaca

SEQ ID NO: 209385 - DNA, 25 bp, Artificial
  probe
  misc_feature (1)..(25): SEQ ID NO: 3955; WAN024FJY_at; Start 284; Stop 308
gttatcgaagtgagcatccgattta

SEQ ID NO: 209386 - DNA, 25 bp, Artificial
  probe
  misc_feature (1)..(25): SEQ ID NO: 3955; WAN024FJY_at; Start 225; Stop 249
agttcaggcttgttatgaggctggc

SEQ ID NO: 209387 - DNA, 25 bp, Artificial
  probe
  misc_feature (1)..(25): SEQ ID NO: 3955; WAN024FJY_at; Start 43; Stop 67
caaatttcagaaggattttatagga

SEQ ID NO: 209388 - DNA, 25 bp, Artificial
  probe
  misc_feature (1)..(25): SEQ ID NO: 3955; WAN024FJY_at; Start 69; Stop 93
ttttctcgctcctttggactataaa

SEQ ID NO: 209389 - DNA, 25 bp, Artificial
  probe
  misc_feature (1)..(25): SEQ ID NO: 3955; WAN024FJY_at; Start 171; Stop 195
tcagggaacacaagatcctgttcat

SEQ ID NO: 209390 - DNA, 25 bp, Artificial
  probe
  misc_feature (1)..(25): SEQ ID NO: 3955; WAN024FJY_at; Start 134; Stop 158
cgaacagccctcatcctggtggtga

SEQ ID NO: 209391 - DNA, 25 bp, Artificial
  probe
  misc_feature (1)..(25): SEQ ID NO: 3955; WAN024FJY_at; Start 65; Stop 89
ggagttttctcgctcctttggacta

SEQ ID NO: 209392 - DNA, 25 bp, Artificial
  probe
  misc_feature (1)..(25): SEQ ID NO: 5497; WAN024FJZ_at; Start 203; Stop 227
taatcttcgtttacgaaaggcatca

SEQ ID NO: 209393 - DNA, 25 bp, Artificial
  probe
  misc_feature (1)..(25): SEQ ID NO: 5497; WAN024FJZ_at; Start 142; Stop 166
gtcttaattcgctttcttgttttca

SEQ ID NO: 209394 - DNA, 25 bp, Artificial
  probe
  misc_feature (1)..(25): SEQ ID NO: 5497; WAN024FJZ_at; Start 250; Stop 274
gatagctgttgttactttacgttgg

SEQ ID NO: 209395 - DNA, 25 bp, Artificial
  probe
  misc_feature (1)..(25): SEQ ID NO: 5497; WAN024FJZ_at; Start 237; Stop 261
cgcgagcgcgtttgatagctgttgt

SEQ ID NO: 209396 - DNA, 25 bp, Artificial
  probe
  misc_feature (1)..(25): SEQ ID NO: 5497; WAN024FJZ_at; Start 217; Stop 241
gaaaggcatcaaagccattacgcga

SEQ ID NO: 209397 - DNA, 25 bp, Artificial
  probe
  misc_feature (1)..(25): SEQ ID NO: 5497; WAN024FJZ_at; Start 151; Stop 175
cgctttcttgttttcaagctcatga

SEQ ID NO: 209398 - DNA, 25 bp, Artificial
  probe
  misc_feature (1)..(25): SEQ ID NO: 5497; WAN024FJZ_at; Start 30; Stop 54
aaagctccatcgtgcttttaatgtg

SEQ ID NO: 209399 - DNA, 25 bp, Artificial
  probe
  misc_feature (1)..(25): SEQ ID NO: 5497; WAN024FJZ_at; Start 221; Stop 245
ggcatcaaagccattacgcgagcgc

SEQ ID NO: 209400 - DNA, 25 bp, Artificial
  probe
  misc_feature (1)..(25): SEQ ID NO: 5497; WAN024FJZ_at; Start 230; Stop 254
gccattacgcgagcgcgtttgatag

SEQ ID NO: 209401 - DNA, 25 bp, Artificial
  probe
  misc_feature (1)..(25): SEQ ID NO: 5497; WAN024FJZ_at; Start 52; Stop 76
gtgttctcttgttttcaaactcgta

SEQ ID NO: 209402 - DNA, 25 bp, Artificial
  probe
  misc_feature (1)..(25): SEQ ID NO: 5497; WAN024FJZ_at; Start 16; Stop 40
gacatatttatgaaaaagctccatc

SEQ ID NO: 209403 - DNA, 25 bp, Artificial
  probe
  misc_feature (1)..(25): SEQ ID NO: 5497; WAN024FJZ_at; Start 214; Stop 238
tacgaaaggcatcaaagccattacg

SEQ ID NO: 209404 - DNA, 25 bp, Artificial
  probe
  misc_feature (1)..(25): SEQ ID NO: 5497; WAN024FJZ_at; Start 40; Stop 64
cgtgcttttaatgtgttctcttgtt

SEQ ID NO: 209405 - DNA, 25 bp, Artificial
  probe
  misc_feature (1)..(25): SEQ ID NO: 5497; WAN024FJZ_at; Start 36; Stop 60
ccatcgtgcttttaatgtgttctct

SEQ ID NO: 209406 - DNA, 25 bp, Artificial
  probe
  misc_feature (1)..(25): SEQ ID NO: 5497; WAN024FJZ_at; Start 22; Stop 46
tttatgaaaaagctccatcgtgctt

SEQ ID NO: 209407 - DNA, 25 bp, Artificial
  probe
  misc_feature (1)..(25): SEQ ID NO: 5497; WAN024FJZ_at; Start 20; Stop 44
tatttatgaaaaagctccatcgtgc

SEQ ID NO: 209408 - DNA, 25 bp, Artificial
  probe
  misc_feature (1)..(25): SEQ ID NO: 5497; WAN024FJZ_at; Start 208; Stop 232
ttcgtttacgaaaggcatcaaagcc

SEQ ID NO: 209409 - DNA, 25 bp, Artificial
  probe
  misc_feature (1)..(25): SEQ ID NO: 5497; WAN024FJZ_at; Start 239; Stop 263
cgagcgcgtttgatagctgttgtta

SEQ ID NO: 209410 - DNA, 25 bp, Artificial
  probe
  misc_feature (1)..(25): SEQ ID NO: 5497; WAN024FJZ_at; Start 94; Stop 118
cctaactcgctctctcatttcaaag

SEQ ID NO: 209411 - DNA, 25 bp, Artificial
  probe
  misc_feature (1)..(25): SEQ ID NO: 5497; WAN024FJZ_at; Start 101; Stop 125
cgctctctcatttcaaagcttgtga

SEQ ID NO: 209412 - DNA, 25 bp, Artificial
  probe
  misc_feature (1)..(25): SEQ ID NO: 5497; WAN024FJZ_at; Start 225; Stop 249
tcaaagccattacgcgagcgcgttt

SEQ ID NO: 209413 - DNA, 25 bp, Artificial
  probe
  misc_feature (1)..(25): SEQ ID NO: 5497; WAN024FJZ_at; Start 242; Stop 266
gcgcgtttgatagctgttgttactt

SEQ ID NO: 209414 - DNA, 25 bp, Artificial
  probe
  misc_feature (1)..(25): SEQ ID NO: 5497; WAN024FJZ_at; Start 109; Stop 133
catttcaaagcttgtgaaaaaagac

SEQ ID NO: 209415 - DNA, 25 bp, Artificial
  probe
  misc_feature (1)..(25): SEQ ID NO: 5497; WAN024FJZ_at; Start 33; Stop 57
gctccatcgtgcttttaatgtgttc

SEQ ID NO: 209416 - DNA, 25 bp, Artificial
  probe
  misc_feature (1)..(25): SEQ ID NO: 5497; WAN024FJZ_at; Start 155; Stop 179
ttcttgttttcaagctcatgaaaaa

SEQ ID NO: 209417 - DNA, 25 bp, Artificial
  probe
  misc_feature (1)..(25): SEQ ID NO: 5497; WAN024FJZ_at; Start 67; Stop 91
caaactcgtaaaaagggagccactg

SEQ ID NO: 209418 - DNA, 25 bp, Artificial
  probe
  misc_feature (1)..(25): SEQ ID NO: 5497; WAN024FJZ_at; Start 211; Stop 235
gtttacgaaaggcatcaaagccatt

SEQ ID NO: 209419 - DNA, 25 bp, Artificial
  probe
  misc_feature (1)..(25): SEQ ID NO: 5497; WAN024FJZ_at; Start 1; Stop 25
ttggatgagaaaaaagacatattta

SEQ ID NO: 209420 - DNA, 25 bp, Artificial
  probe
  misc_feature (1)..(25): SEQ ID NO: 5497; WAN024FJZ_at; Start 228; Stop 252
aagccattacgcgagcgcgtttgat

SEQ ID NO: 209421 - DNA, 25 bp, Artificial
  probe
  misc_feature (1)..(25): SEQ ID NO: 5497; WAN024FJZ_at; Start 223; Stop 247
catcaaagccattacgcgagcgcgt

SEQ ID NO: 209422 - DNA, 25 bp, Artificial
  probe
  misc_feature (1)..(25): SEQ ID NO: 5497; WAN024FJZ_at; Start 218; Stop 242
aaaggcatcaaagccattacgcgag

SEQ ID NO: 209423 - DNA, 25 bp, Artificial
  probe
  misc_feature (1)..(25): SEQ ID NO: 5497; WAN024FJZ_at; Start 206; Stop 230
tcttcgtttacgaaaggcatcaaag

SEQ ID NO: 209424 - DNA, 25 bp, Artificial
  probe
  misc_feature (1)..(25): SEQ ID NO: 5497; WAN024FJZ_at; Start 235; Stop 259
tacgcgagcgcgtttgatagctgtt

SEQ ID NO: 209425 - DNA, 25 bp, Artificial
  probe
  misc_feature (1)..(25): SEQ ID NO: 5497; WAN024FJZ_at; Start 245; Stop 269
cgtttgatagctgttgttactttac

SEQ ID NO: 209426 - DNA, 25 bp, Artificial
  probe
  misc_feature (1)..(25): SEQ ID NO: 5584; WAN024FK2_at; Start 4; Stop 28
ggtctctttttcatgagcttgaaaa

SEQ ID NO: 209427 - DNA, 25 bp, Artificial
  probe
  misc_feature (1)..(25): SEQ ID NO: 5584; WAN024FK2_at; Start 3; Stop 27
gggtctctttttcatgagcttgaaa

SEQ ID NO: 209428 - DNA, 25 bp, Artificial
  probe
  misc_feature (1)..(25): SEQ ID NO: 5584; WAN024FK2_at; Start 2; Stop 26
tgggtctctttttcatgagcttgaa

SEQ ID NO: 209429 - DNA, 25 bp, Artificial
  probe
  misc_feature (1)..(25): SEQ ID NO: 5584; WAN024FK2_at; Start 5; Stop 29
gtctctttttcatgagcttgaaaac

SEQ ID NO: 209430 - DNA, 25 bp, Artificial
  probe
  misc_feature (1)..(25): SEQ ID NO: 5584; WAN024FK2_at; Start 1; Stop 25
ttgggtctctttttcatgagcttga

SEQ ID NO: 209431 - DNA, 25 bp, Artificial
  probe
  misc_feature (1)..(25): SEQ ID NO: 2498; WAN024FK3_at; Start 189; Stop 213
tatcaaacgcgctcgcgtaatggct

SEQ ID NO: 209432 - DNA, 25 bp, Artificial
  probe
  misc_feature (1)..(25): SEQ ID NO: 2498; WAN024FK3_at; Start 4; Stop 28
gctcaacaacgtcgtggcggattca

SEQ ID NO: 209433 - DNA, 25 bp, Artificial
  probe
  misc_feature (1)..(25): SEQ ID NO: 2498; WAN024FK3_at; Start 207; Stop 231
aatggctttgatgcctttcgtaaac

SEQ ID NO: 209434 - DNA, 25 bp, Artificial
  probe
  misc_feature (1)..(25): SEQ ID NO: 2498; WAN024FK3_at; Start 88; Stop 112
gatactgagcttcttagccgtttcg

SEQ ID NO: 209435 - DNA, 25 bp, Artificial
  probe
  misc_feature (1)..(25): SEQ ID NO: 2498; WAN024FK3_at; Start 15; Stop 39
tcgtggcggattcaaacgccgtaaa

SEQ ID NO: 209436 - DNA, 25 bp, Artificial
  probe
  misc_feature (1)..(25): SEQ ID NO: 2498; WAN024FK3_at; Start 36; Stop 60
taaaaaagttgattacatcgcagca

SEQ ID NO: 209437 - DNA, 25 bp, Artificial
  probe
  misc_feature (1)..(25): SEQ ID NO: 2498; WAN024FK3_at; Start 49; Stop 73
tacatcgcagcaaacaaaattgaat

SEQ ID NO: 209438 - DNA, 25 bp, Artificial
  probe
  misc_feature (1)..(25): SEQ ID NO: 2498; WAN024FK3_at; Start 128; Stop 152
aaatccttcctcgtcgtgtaacagg

SEQ ID NO: 209439 - DNA, 25 bp, Artificial
  probe
  misc_feature (1)..(25): SEQ ID NO: 2498; WAN024FK3_at; Start 46; Stop 70
gattacatcgcagcaaacaaaattg

SEQ ID NO: 209440 - DNA, 25 bp, Artificial
  probe
  misc_feature (1)..(25): SEQ ID NO: 2498; WAN024FK3_at; Start 149; Stop 173
caggaacttcagctaaaaaccaacg

SEQ ID NO: 209441 - DNA, 25 bp, Artificial
  probe
  misc_feature (1)..(25): SEQ ID NO: 2498; WAN024FK3_at; Start 53; Stop 77
tcgcagcaaacaaaattgaatatgt

SEQ ID NO: 209442 - DNA, 25 bp, Artificial
  probe
  misc_feature (1)..(25): SEQ ID NO: 2498; WAN024FK3_at; Start 202; Stop 226
cgcgtaatggctttgatgcctttcg

SEQ ID NO: 209443 - DNA, 25 bp, Artificial
  probe
  misc_feature (1)..(25): SEQ ID NO: 2498; WAN024FK3_at; Start 76; Stop 100
gttgattacaaagatactgagcttc

SEQ ID NO: 209444 - DNA, 25 bp, Artificial
  probe
  misc_feature (1)..(25): SEQ ID NO: 2498; WAN024FK3_at; Start 131; Stop 155
tccttcctcgtcgtgtaacaggaac

SEQ ID NO: 209445 - DNA, 25 bp, Artificial
  probe
  misc_feature (1)..(25): SEQ ID NO: 2498; WAN024FK3_at; Start 198; Stop 222
cgctcgcgtaatggctttgatgcct

SEQ ID NO: 209446 - DNA, 25 bp, Artificial
  probe
  misc_feature (1)..(25): SEQ ID NO: 2498; WAN024FK3_at; Start 11; Stop 35
aacgtcgtggcggattcaaacgccg

SEQ ID NO: 209447 - DNA, 25 bp, Artificial
  probe
  misc_feature (1)..(25): SEQ ID NO: 2498; WAN024FK3_at; Start 40; Stop 64
aaagttgattacatcgcagcaaaca

SEQ ID NO: 209448 - DNA, 25 bp, Artificial
  probe
  misc_feature (1)..(25): SEQ ID NO: 2498; WAN024FK3_at; Start 123; Stop 147
tgggaaaatccttcctcgtcgtgta

SEQ ID NO: 209449 - DNA, 25 bp, Artificial
  probe
  misc_feature (1)..(25): SEQ ID NO: 2498; WAN024FK3_at; Start 216; Stop 240
gatgcctttcgtaaacgaagattaa

SEQ ID NO: 209450 - DNA, 25 bp, Artificial
  probe
  misc_feature (1)..(25): SEQ ID NO: 2498; WAN024FK3_at; Start 100; Stop 124
cttagccgtttcgtttcagaacgtg

SEQ ID NO: 209451 - DNA, 25 bp, Artificial
  probe
  misc_feature (1)..(25): SEQ ID NO: 2498; WAN024FK3_at; Start 31; Stop 55
cgccgtaaaaaagttgattacatcg

SEQ ID NO: 209452 - DNA, 25 bp, Artificial
  probe
  misc_feature (1)..(25): SEQ ID NO: 2498; WAN024FK3_at; Start 194; Stop 218
aacgcgctcgcgtaatggctttgat

SEQ ID NO: 209453 - DNA, 25 bp, Artificial
  probe
  misc_feature (1)..(25): SEQ ID NO: 2498; WAN024FK3_at; Start 211; Stop 235
gctttgatgcctttcgtaaacgaag

SEQ ID NO: 209454 - DNA, 25 bp, Artificial
  probe
  misc_feature (1)..(25): SEQ ID NO: 2498; WAN024FK3_at; Start 196; Stop 220
cgcgctcgcgtaatggctttgatgc

SEQ ID NO: 209455 - DNA, 25 bp, Artificial
  probe
  misc_feature (1)..(25): SEQ ID NO: 2498; WAN024FK3_at; Start 126; Stop 150
gaaaatccttcctcgtcgtgtaaca

SEQ ID NO: 209456 - DNA, 25 bp, Artificial
  probe
  misc_feature (1)..(25): SEQ ID NO: 2498; WAN024FK3_at; Start 115; Stop 139
tcagaacgtgggaaaatccttcctc

SEQ ID NO: 209457 - DNA, 25 bp, Artificial
  probe
  misc_feature (1)..(25): SEQ ID NO: 2498; WAN024FK3_at; Start 135; Stop 159
tcctcgtcgtgtaacaggaacttca

SEQ ID NO: 209458 - DNA, 25 bp, Artificial
  probe
  misc_feature (1)..(25): SEQ ID NO: 2498; WAN024FK3_at; Start 73; Stop 97
tatgttgattacaaagatactgagc

SEQ ID NO: 209459 - DNA, 25 bp, Artificial
  probe
  misc_feature (1)..(25): SEQ ID NO: 2498; WAN024FK3_at; Start 1; Stop 25
atggctcaacaacgtcgtggcggat

SEQ ID NO: 209460 - DNA, 25 bp, Artificial
  probe
  misc_feature (1)..(25): SEQ ID NO: 2498; WAN024FK3_at; Start 142; Stop 166
cgtgtaacaggaacttcagctaaaa

SEQ ID NO: 209461 - DNA, 25 bp, Artificial
  probe
  misc_feature (1)..(25): SEQ ID NO: 2498; WAN024FK3_at; Start 95; Stop 119
agcttcttagccgtttcgtttcaga

SEQ ID NO: 209462 - DNA, 25 bp, Artificial
  probe
  misc_feature (1)..(25): SEQ ID NO: 2498; WAN024FK3_at; Start 7; Stop 31
caacaacgtcgtggcggattcaaac

SEQ ID NO: 209463 - DNA, 25 bp, Artificial
  probe
  misc_feature (1)..(25): SEQ ID NO: 2498; WAN024FK3_at; Start 84; Stop 108
caaagatactgagcttcttagccgt

SEQ ID NO: 209464 - DNA, 25 bp, Artificial
  probe
  misc_feature (1)..(25): SEQ ID NO: 2498; WAN024FK3_at; Start 139; Stop 163
cgtcgtgtaacaggaacttcagcta

SEQ ID NO: 209465 - DNA, 25 bp, Artificial
  probe
  misc_feature (1)..(25): SEQ ID NO: 5098; WAN024FK4_at; Start 45; Stop 69
agaggcgattcctgttaaaattcct

SEQ ID NO: 209466 - DNA, 25 bp, Artificial
  probe
  misc_feature (1)..(25): SEQ ID NO: 5098; WAN024FK4_at; Start 27; Stop 51
accaaaaatgccacgtccagaggcg

SEQ ID NO: 209467 - DNA, 25 bp, Artificial
  probe
  misc_feature (1)..(25): SEQ ID NO: 5098; WAN024FK4_at; Start 33; Stop 57
aatgccacgtccagaggcgattcct

SEQ ID NO: 209468 - DNA, 25 bp, Artificial
  probe
  misc_feature (1)..(25): SEQ ID NO: 5098; WAN024FK4_at; Start 40; Stop 64
cgtccagaggcgattcctgttaaaa

SEQ ID NO: 209469 - DNA, 25 bp, Artificial
  probe
  misc_feature (1)..(25): SEQ ID NO: 5098; WAN024FK4_at; Start 31; Stop 55
aaaatgccacgtccagaggcgattc

SEQ ID NO: 209470 - DNA, 25 bp, Artificial
  probe
  misc_feature (1)..(25): SEQ ID NO: 5098; WAN024FK4_at; Start 120; Stop 144
tgtctttgaattccgcaatgtatca

SEQ ID NO: 209471 - DNA, 25 bp, Artificial
  probe
  misc_feature (1)..(25): SEQ ID NO: 5098; WAN024FK4_at; Start 44; Stop 68
cagaggcgattcctgttaaaattcc

SEQ ID NO: 209472 - DNA, 25 bp, Artificial
  probe
  misc_feature (1)..(25): SEQ ID NO: 5098; WAN024FK4_at; Start 20; Stop 44
gaacaacaccaaaaatgccacgtcc

SEQ ID NO: 209473 - DNA, 25 bp, Artificial
  probe
  misc_feature (1)..(25): SEQ ID NO: 5098; WAN024FK4_at; Start 29; Stop 53
caaaaatgccacgtccagaggcgat

SEQ ID NO: 209474 - DNA, 25 bp, Artificial
  probe
  misc_feature (1)..(25): SEQ ID NO: 5098; WAN024FK4_at; Start 24; Stop 48
aacaccaaaaatgccacgtccagag

SEQ ID NO: 209475 - DNA, 25 bp, Artificial
  probe
  misc_feature (1)..(25): SEQ ID NO: 5098; WAN024FK4_at; Start 14; Stop 38
tctctggaacaacaccaaaaatgcc

SEQ ID NO: 209476 - DNA, 25 bp, Artificial
  probe
  misc_feature (1)..(25): SEQ ID NO: 5098; WAN024FK4_at; Start 36; Stop 60
gccacgtccagaggcgattcctgtt

SEQ ID NO: 209477 - DNA, 25 bp, Artificial
  probe
  misc_feature (1)..(25): SEQ ID NO: 5098; WAN024FK4_at; Start 183; Stop 207
gtatcttaatttcgcgtccatctca

SEQ ID NO: 209478 - DNA, 25 bp, Artificial
  probe
  misc_feature (1)..(25): SEQ ID NO: 5098; WAN024FK4_at; Start 8; Stop 32
cacgaatctctggaacaacaccaaa

SEQ ID NO: 209479 - DNA, 25 bp, Artificial
  probe
  misc_feature (1)..(25): SEQ ID NO: 5098; WAN024FK4_at; Start 5; Stop 29
gatcacgaatctctggaacaacacc

SEQ ID NO: 209480 - DNA, 25 bp, Artificial
  probe
  misc_feature (1)..(25): SEQ ID NO: 5098; WAN024FK4_at; Start 117; Stop 141
ccctgtctttgaattccgcaatgta

SEQ ID NO: 209481 - DNA, 25 bp, Artificial
  probe
  misc_feature (1)..(25): SEQ ID NO: 5098; WAN024FK4_at; Start 189; Stop 213
taatttcgcgtccatctcactacct

SEQ ID NO: 209482 - DNA, 25 bp, Artificial
  probe
  misc_feature (1)..(25): SEQ ID NO: 5098; WAN024FK4_at; Start 104; Stop 128
tagttggaataaaccctgtctttga

SEQ ID NO: 209483 - DNA, 25 bp, Artificial
  probe
  misc_feature (1)..(25): SEQ ID NO: 5098; WAN024FK4_at; Start 35; Stop 59
tgccacgtccagaggcgattcctgt

SEQ ID NO: 209484 - DNA, 25 bp, Artificial
  probe
  misc_feature (1)..(25): SEQ ID NO: 5098; WAN024FK4_at; Start 2; Stop 26
tgagatcacgaatctctggaacaac

SEQ ID NO: 209485 - DNA, 25 bp, Artificial
  probe
  misc_feature (1)..(25): SEQ ID NO: 5098; WAN024FK4_at; Start 126; Stop 150
tgaattccgcaatgtatcatcaata

SEQ ID NO: 209486 - DNA, 25 bp, Artificial
  probe
  misc_feature (1)..(25): SEQ ID NO: 5098; WAN024FK4_at; Start 159; Stop 183
gacaatcttgatcttctttgccttg

SEQ ID NO: 209487 - DNA, 25 bp, Artificial
  probe
  misc_feature (1)..(25): SEQ ID NO: 5098; WAN024FK4_at; Start 131; Stop 155
tccgcaatgtatcatcaatatcaaa

SEQ ID NO: 209488 - DNA, 25 bp, Artificial
  probe
  misc_feature (1)..(25): SEQ ID NO: 5098; WAN024FK4_at; Start 162; Stop 186
aatcttgatcttctttgccttgtat

SEQ ID NO: 209489 - DNA, 25 bp, Artificial
  probe
  misc_feature (1)..(25): SEQ ID NO: 5098; WAN024FK4_at; Start 113; Stop 137
taaaccctgtctttgaattccgcaa

SEQ ID NO: 209490 - DNA, 25 bp, Artificial
  probe
  misc_feature (1)..(25): SEQ ID NO: 5098; WAN024FK4_at; Start 115; Stop 139
aaccctgtctttgaattccgcaatg

SEQ ID NO: 209491 - DNA, 25 bp, Artificial
  probe
  misc_feature (1)..(25): SEQ ID NO: 5098; WAN024FK4_at; Start 178; Stop 202
gccttgtatcttaatttcgcgtcca

SEQ ID NO: 209492 - DNA, 25 bp, Artificial
  probe
  misc_feature (1)..(25): SEQ ID NO: 5098; WAN024FK4_at; Start 89; Stop 113
aaacagtgggaattgtagttggaat

SEQ ID NO: 209493 - DNA, 25 bp, Artificial
  probe
  misc_feature (1)..(25): SEQ ID NO: 5098; WAN024FK4_at; Start 100; Stop 124
attgtagttggaataaaccctgtct

SEQ ID NO: 209494 - DNA, 25 bp, Artificial
  probe
  misc_feature (1)..(25): SEQ ID NO: 5098; WAN024FK4_at; Start 142; Stop 166
tcatcaatatcaaaaaagacaatct

SEQ ID NO: 209495 - DNA, 25 bp, Artificial
  probe
  misc_feature (1)..(25): SEQ ID NO: 5098; WAN024FK4_at; Start 174; Stop 198
ctttgccttgtatcttaatttcgcg

SEQ ID NO: 209496 - DNA, 25 bp, Artificial
  probe
  misc_feature (1)..(25): SEQ ID NO: 5098; WAN024FK4_at; Start 74; Stop 98
cacgcaactgtttaaaaacagtggg

SEQ ID NO: 209497 - DNA, 25 bp, Artificial
  probe
  misc_feature (1)..(25): SEQ ID NO: 5098; WAN024FK4_at; Start 18; Stop 42
tggaacaacaccaaaaatgccacgt

SEQ ID NO: 209498 - DNA, 25 bp, Artificial
  probe
  misc_feature (1)..(25): SEQ ID NO: 5098; WAN024FK4_at; Start 10; Stop 34
cgaatctctggaacaacaccaaaaa

SEQ ID NO: 209499 - DNA, 25 bp, Artificial
  probe
  misc_feature (1)..(25): SEQ ID NO: 4892; WAN024FK5_at; Start 86; Stop 110
ttgttgagttagagacgggtgatac

SEQ ID NO: 209500 - DNA, 25 bp, Artificial
  probe
  misc_feature (1)..(25): SEQ ID NO: 4892; WAN024FK5_at; Start 163; Stop 187
gaaaccttgaaagtcgatgaagagg

SEQ ID NO: 209501 - DNA, 25 bp, Artificial
  probe
  misc_feature (1)..(25): SEQ ID NO: 4892; WAN024FK5_at; Start 316; Stop 340
tttgctccctttcgacgaatgctac

SEQ ID NO: 209502 - DNA, 25 bp, Artificial
  probe
  misc_feature (1)..(25): SEQ ID NO: 4892; WAN024FK5_at; Start 360; Stop 384
cctgcaccatttaaaaaagaagaag

SEQ ID NO: 209503 - DNA, 25 bp, Artificial
  probe
  misc_feature (1)..(25): SEQ ID NO: 4892; WAN024FK5_at; Start 246; Stop 270
cactttggaggaagaaaagtaccag

SEQ ID NO: 209504 - DNA, 25 bp, Artificial
  probe
  misc_feature (1)..(25): SEQ ID NO: 4892; WAN024FK5_at; Start 29; Stop 53
tgaaaatcggtgataagctaaaggg

SEQ ID NO: 209505 - DNA, 25 bp, Artificial
  probe
  misc_feature (1)..(25): SEQ ID NO: 4892; WAN024FK5_at; Start 282; Stop 306
gagacgcttttcaagcgaccgcttt

SEQ ID NO: 209506 - DNA, 25 bp, Artificial
  probe
  misc_feature (1)..(25): SEQ ID NO: 4892; WAN024FK5_at; Start 16; Stop 40
tcgaggactaagatgaaaatcggtg

SEQ ID NO: 209507 - DNA, 25 bp, Artificial
  probe
  misc_feature (1)..(25): SEQ ID NO: 4892; WAN024FK5_at; Start 196; Stop 220
caggtagtggatttagatgaattta

SEQ ID NO: 209508 - DNA, 25 bp, Artificial
  probe
  misc_feature (1)..(25): SEQ ID NO: 4892; WAN024FK5_at; Start 234; Stop 258
tctttctatccgcactttggaggaa

SEQ ID NO: 209509 - DNA, 25 bp, Artificial
  probe
  misc_feature (1)..(25): SEQ ID NO: 4892; WAN024FK5_at; Start 190; Stop 214
caagttcaggtagtggatttagatg

SEQ ID NO: 209510 - DNA, 25 bp, Artificial
  probe
  misc_feature (1)..(25): SEQ ID NO: 4892; WAN024FK5_at; Start 76; Stop 100
tacggtgcctttgttgagttagaga

SEQ ID NO: 209511 - DNA, 25 bp, Artificial
  probe
  misc_feature (1)..(25): SEQ ID NO: 4892; WAN024FK5_at; Start 267; Stop 291
ccagtttcctagacggagacgcttt

SEQ ID NO: 209512 - DNA, 25 bp, Artificial
  probe
  misc_feature (1)..(25): SEQ ID NO: 4892; WAN024FK5_at; Start 106; Stop 130
gatacggggctgattcacatttcag

SEQ ID NO: 209513 - DNA, 25 bp, Artificial
  probe
  misc_feature (1)..(25): SEQ ID NO: 4892; WAN024FK5_at; Start 346; Stop 370
tggactggagaagccctgcaccatt

SEQ ID NO: 209514 - DNA, 25 bp, Artificial
  probe
  misc_feature (1)..(25): SEQ ID NO: 4892; WAN024FK5_at; Start 52; Stop 76
gggcgtattacagggattcagccct

SEQ ID NO: 209515 - DNA, 25 bp, Artificial
  probe
  misc_feature (1)..(25): SEQ ID NO: 4892; WAN024FK5_at; Start 263; Stop 287
agtaccagtttcctagacggagacg

SEQ ID NO: 209516 - DNA, 25 bp, Artificial
  probe
  misc_feature (1)..(25): SEQ ID NO: 4892; WAN024FK5_at; Start 176; Stop 200
tcgatgaagaggttcaagttcaggt

SEQ ID NO: 209517 - DNA, 25 bp, Artificial
  probe
  misc_feature (1)..(25): SEQ ID NO: 4892; WAN024FK5_at; Start 167; Stop 191
ccttgaaagtcgatgaagaggttca

SEQ ID NO: 209518 - DNA, 25 bp, Artificial
  probe
  misc_feature (1)..(25): SEQ ID NO: 4892; WAN024FK5_at; Start 338; Stop 362
taccaatctggactggagaagccct

SEQ ID NO: 209519 - DNA, 25 bp, Artificial
  probe
  misc_feature (1)..(25): SEQ ID NO: 4892; WAN024FK5_at; Start 182; Stop 206
aagaggttcaagttcaggtagtgga

SEQ ID NO: 209520 - DNA, 25 bp, Artificial
  probe
  misc_feature (1)..(25): SEQ ID NO: 4892; WAN024FK5_at; Start 64; Stop 88
gggattcagccctacggtgcctttg

SEQ ID NO: 209521 - DNA, 25 bp, Artificial
  probe
  misc_feature (1)..(25): SEQ ID NO: 4892; WAN024FK5_at; Start 240; Stop 264
tatccgcactttggaggaagaaaag

SEQ ID NO: 209522 - DNA, 25 bp, Artificial
  probe
  misc_feature (1)..(25): SEQ ID NO: 4892; WAN024FK5_at; Start 273; Stop 297
tcctagacggagacgcttttcaagc

SEQ ID NO: 209523 - DNA, 25 bp, Artificial
  probe
  misc_feature (1)..(25): SEQ ID NO: 4892; WAN024FK5_at; Start 325; Stop 349
tttcgacgaatgctaccaatctgga

SEQ ID NO: 209524 - DNA, 25 bp, Artificial
  probe
  misc_feature (1)..(25): SEQ ID NO: 4892; WAN024FK5_at; Start 223; Stop 247
gggaaagccagtctttctatccgca

SEQ ID NO: 209525 - DNA, 25 bp, Artificial
  probe
  misc_feature (1)..(25): SEQ ID NO: 4892; WAN024FK5_at; Start 355; Stop 379
gaagccctgcaccatttaaaaaaga

SEQ ID NO: 209526 - DNA, 25 bp, Artificial
  probe
  misc_feature (1)..(25): SEQ ID NO: 4892; WAN024FK5_at; Start 276; Stop 300
tagacggagacgcttttcaagcgac

SEQ ID NO: 209527 - DNA, 25 bp, Artificial
  probe
  misc_feature (1)..(25): SEQ ID NO: 4892; WAN024FK5_at; Start 57; Stop 81
tattacagggattcagccctacggt

SEQ ID NO: 209528 - DNA, 25 bp, Artificial
  probe
  misc_feature (1)..(25): SEQ ID NO: 4892; WAN024FK5_at; Start 331; Stop 355
cgaatgctaccaatctggactggag

SEQ ID NO: 209529 - DNA, 25 bp, Artificial
  probe
  misc_feature (1)..(25): SEQ ID NO: 4892; WAN024FK5_at; Start 83; Stop 107
cctttgttgagttagagacgggtga

SEQ ID NO: 209530 - DNA, 25 bp, Artificial
  probe
  misc_feature (1)..(25): SEQ ID NO: 4892; WAN024FK5_at; Start 287; Stop 311
gcttttcaagcgaccgctttaacta

SEQ ID NO: 209531 - DNA, 25 bp, Artificial
  probe
  misc_feature (1)..(25): SEQ ID NO: 4892; WAN024FK5_at; Start 69; Stop 93
tcagccctacggtgcctttgttgag

SEQ ID NO: 209532 - DNA, 25 bp, Artificial
  probe
  misc_feature (1)..(25): SEQ ID NO: 4892; WAN024FK5_at; Start 136; Stop 160
cggacaggatttattgaaaatattc

SEQ ID NO: 209533 - DNA, 25 bp, Artificial
  probe
  misc_feature (1)..(25): SEQ ID NO: 2259; WAN024FK6_at; Start 566; Stop 590
cgatttcaggctccaaagcgacggg

SEQ ID NO: 209534 - DNA, 25 bp, Artificial
  probe
  misc_feature (1)..(25): SEQ ID NO: 2259; WAN024FK6_at; Start 903; Stop 927
tgaacatgctcctaaaacagtggct

SEQ ID NO: 209535 - DNA, 25 bp, Artificial
  probe
  misc_feature (1)..(25): SEQ ID NO: 2259; WAN024FK6_at; Start 1190; Stop 1214
aaattactcgtggtggttggccaga

SEQ ID NO: 209536 - DNA, 25 bp, Artificial
  probe
  misc_feature (1)..(25): SEQ ID NO: 2259; WAN024FK6_at; Start 524; Stop 548
ttcgcatggttcgttggcatcaaca

SEQ ID NO: 209537 - DNA, 25 bp, Artificial
  probe
  misc_feature (1)..(25): SEQ ID NO: 2259; WAN024FK6_at; Start 63; Stop 87
tacattgcggaattcaaagacaggg

SEQ ID NO: 209538 - DNA, 25 bp, Artificial
  probe
  misc_feature (1)..(25): SEQ ID NO: 2259; WAN024FK6_at; Start 1229; Stop 1253
tctatgccaatcaaggtgggacacc

SEQ ID NO: 209539 - DNA, 25 bp, Artificial
  probe
  misc_feature (1)..(25): SEQ ID NO: 2259; WAN024FK6_at; Start 1207; Stop 1231
tggccagaaccgattgcagaaatct

SEQ ID NO: 209540 - DNA, 25 bp, Artificial
  probe
  misc_feature (1)..(25): SEQ ID NO: 2259; WAN024FK6_at; Start 252; Stop 276
aggtcaggtcatttatcagcatcag

SEQ ID NO: 209541 - DNA, 25 bp, Artificial
  probe
  misc_feature (1)..(25): SEQ ID NO: 2259; WAN024FK6_at; Start 1270; Stop 1294
cacacggtttttggtcagttagctg

SEQ ID NO: 209542 - DNA, 25 bp, Artificial
  probe
  misc_feature (1)..(25): SEQ ID NO: 2259; WAN024FK6_at; Start 485; Stop 509
gagatgacttgcacttgcctgacag

SEQ ID NO: 209543 - DNA, 25 bp, Artificial
  probe
  misc_feature (1)..(25): SEQ ID NO: 2259; WAN024FK6_at; Start 1294; Stop 1318
gatgaagcatcttacgctgtcttgg

SEQ ID NO: 209544 - DNA, 25 bp, Artificial
  probe
  misc_feature (1)..(25): SEQ ID NO: 2259; WAN024FK6_at; Start 1029; Stop 1053
tatgggtggcgagtcaatctacggc

SEQ ID NO: 209545 - DNA, 25 bp, Artificial
  probe
  misc_feature (1)..(25): SEQ ID NO: 2259; WAN024FK6_at; Start 1008; Stop 1032
tggagacccaactggaactggtatg

SEQ ID NO: 209546 - DNA, 25 bp, Artificial
  probe
  misc_feature (1)..(25): SEQ ID NO: 2259; WAN024FK6_at; Start 1335; Stop 1359
tgagacaggagctatggacaagcca

SEQ ID NO: 209547 - DNA, 25 bp, Artificial
  probe
  misc_feature (1)..(25): SEQ ID NO: 2259; WAN024FK6_at; Start 689; Stop 713
tcagcgttgccatgggaatttctca

SEQ ID NO: 209548 - DNA, 25 bp, Artificial
  probe
  misc_feature (1)..(25): SEQ ID NO: 2259; WAN024FK6_at; Start 844; Stop 868
gaaggtcctcttgcgactattaaga

SEQ ID NO: 209549 - DNA, 25 bp, Artificial
  probe
  misc_feature (1)..(25): SEQ ID NO: 2259; WAN024FK6_at; Start 808; Stop 832
gaattgcattttccacaagtagaca

SEQ ID NO: 209550 - DNA, 25 bp, Artificial
  probe
  misc_feature (1)..(25): SEQ ID NO: 2259; WAN024FK6_at; Start 175; Stop 199
ggtgttgttccagagattcgtgatc

SEQ ID NO: 209551 - DNA, 25 bp, Artificial
  probe
  misc_feature (1)..(25): SEQ ID NO: 2259; WAN024FK6_at; Start 1104; Stop 1128
tctttccatggcaaatgctggtcca

SEQ ID NO: 209552 - DNA, 25 bp, Artificial
  probe
  misc_feature (1)..(25): SEQ ID NO: 2259; WAN024FK6_at; Start 873; Stop 897
tcacggagacttacgtatcaagctt

SEQ ID NO: 209553 - DNA, 25 bp, Artificial
  probe
  misc_feature (1)..(25): SEQ ID NO: 2259; WAN024FK6_at; Start 544; Stop 568
caacattcgtctgatattgtgccga

SEQ ID NO: 209554 - DNA, 25 bp, Artificial
  probe
  misc_feature (1)..(25): SEQ ID NO: 2259; WAN024FK6_at; Start 509; Stop 533
gtctctcagacaaacttcgcatggt

SEQ ID NO: 209555 - DNA, 25 bp, Artificial
  probe
  misc_feature (1)..(25): SEQ ID NO: 2259; WAN024FK6_at; Start 858; Stop 882
gactattaagaccaatcacggagac

SEQ ID NO: 209556 - DNA, 25 bp, Artificial
  probe
  misc_feature (1)..(25): SEQ ID NO: 2259; WAN024FK6_at; Start 409; Stop 433
tatcccgacttagatgtagatcccg

SEQ ID NO: 209557 - DNA, 25 bp, Artificial
  probe
  misc_feature (1)..(25): SEQ ID NO: 2259; WAN024FK6_at; Start 606; Stop 630
ggaacaccttggcttgaaaccagag

SEQ ID NO: 209558 - DNA, 25 bp, Artificial
  probe
  misc_feature (1)..(25): SEQ ID NO: 2259; WAN024FK6_at; Start 992; Stop 1016
actttatgatccaaggtggagaccc

SEQ ID NO: 209559 - DNA, 25 bp, Artificial
  probe
  misc_feature (1)..(25): SEQ ID NO: 2259; WAN024FK6_at; Start 1078; Stop 1102
gaagagctttacaatatccgtggtg

SEQ ID NO: 209560 - DNA, 25 bp, Artificial
  probe
  misc_feature (1)..(25): SEQ ID NO: 2259; WAN024FK6_at; Start 2; Stop 26
tggacgcgaaattaagatacaaggc

SEQ ID NO: 209561 - DNA, 25 bp, Artificial
  probe
  misc_feature (1)..(25): SEQ ID NO: 2259; WAN024FK6_at; Start 351; Stop 375
tcatgatgccaagttgtcgactcgc

SEQ ID NO: 209562 - DNA, 25 bp, Artificial
  probe
  misc_feature (1)..(25): SEQ ID NO: 2259; WAN024FK6_at; Start 365; Stop 389
tgtcgactcgcaccgatatgatgag

SEQ ID NO: 209563 - DNA, 25 bp, Artificial
  probe
  misc_feature (1)..(25): SEQ ID NO: 2259; WAN024FK6_at; Start 1043; Stop 1067
caatctacggcgaatcttttgagga

SEQ ID NO: 209564 - DNA, 25 bp, Artificial
  probe
  misc_feature (1)..(25): SEQ ID NO: 2259; WAN024FK6_at; Start 145; Stop 169
acaggaatcgcctctggacgtggca

SEQ ID NO: 209565 - DNA, 25 bp, Artificial
  probe
  misc_feature (1)..(25): SEQ ID NO: 2259; WAN024FK6_at; Start 297; Stop 321
ggagtatatctcttgggctaagcaa

SEQ ID NO: 209566 - DNA, 25 bp, Artificial
  probe
  misc_feature (1)..(25): SEQ ID NO: 2259; WAN024FK6_at; Start 829; Stop 853
gacattgaaacagtagaaggtcctc

SEQ ID NO: 209567 - DNA, 25 bp, Artificial
  probe
  misc_feature (1)..(25): SEQ ID NO: 1030; WAN024FK7_at; Start 150; Stop 174
gattacacaaaatcatatccacctt

SEQ ID NO: 209568 - DNA, 25 bp, Artificial
  probe
  misc_feature (1)..(25): SEQ ID NO: 1030; WAN024FK7_at; Start 133; Stop 157
caccttgaaatagggtggattacac

SEQ ID NO: 209569 - DNA, 25 bp, Artificial
  probe
  misc_feature (1)..(25): SEQ ID NO: 1030; WAN024FK7_at; Start 186; Stop 210
tgtgagcaggcatatttttcaaatc

SEQ ID NO: 209570 - DNA, 25 bp, Artificial
  probe
  misc_feature (1)..(25): SEQ ID NO: 1030; WAN024FK7_at; Start 105; Stop 129
cactctcgttcagattagaataagg

SEQ ID NO: 209571 - DNA, 25 bp, Artificial
  probe
  misc_feature (1)..(25): SEQ ID NO: 1030; WAN024FK7_at; Start 21; Stop 45
cattagacttgagaatactctgggc

SEQ ID NO: 209572 - DNA, 25 bp, Artificial
  probe
  misc_feature (1)..(25): SEQ ID NO: 1030; WAN024FK7_at; Start 69; Stop 93
tagtcgtgatttcgtgtcgagccaa

SEQ ID NO: 209573 - DNA, 25 bp, Artificial
  probe
  misc_feature (1)..(25): SEQ ID NO: 1030; WAN024FK7_at; Start 17; Stop 41
cgcccattagacttgagaatactct

SEQ ID NO: 209574 - DNA, 25 bp, Artificial
  probe
  misc_feature (1)..(25): SEQ ID NO: 1030; WAN024FK7_at; Start 76; Stop 100
gatttcgtgtcgagccaagagataa

SEQ ID NO: 209575 - DNA, 25 bp, Artificial
  probe
  misc_feature (1)..(25): SEQ ID NO: 1030; WAN024FK7_at; Start 84; Stop 108
gtcgagccaagagataatgttcact

SEQ ID NO: 209576 - DNA, 25 bp, Artificial
  probe
  misc_feature (1)..(25): SEQ ID NO: 1030; WAN024FK7_at; Start 181; Stop 205
ctgaatgtgagcaggcatatttttc

SEQ ID NO: 209577 - DNA, 25 bp, Artificial
  probe
  misc_feature (1)..(25): SEQ ID NO: 1030; WAN024FK7_at; Start 145; Stop 169
gggtggattacacaaaatcatatcc

SEQ ID NO: 209578 - DNA, 25 bp, Artificial
  probe
  misc_feature (1)..(25): SEQ ID NO: 1030; WAN024FK7_at; Start 13; Stop 37
caaacgcccattagacttgagaata

SEQ ID NO: 209579 - DNA, 25 bp, Artificial
  probe
  misc_feature (1)..(25): SEQ ID NO: 1030; WAN024FK7_at; Start 204; Stop 228
tcaaatcatcgcagatgacctgcat

SEQ ID NO: 209580 - DNA, 25 bp, Artificial
  probe
  misc_feature (1)..(25): SEQ ID NO: 1030; WAN024FK7_at; Start 2; Stop 26
tgaaccatggccaaacgcccattag

SEQ ID NO: 209581 - DNA, 25 bp, Artificial
  probe
  misc_feature (1)..(25): SEQ ID NO: 1030; WAN024FK7_at; Start 198; Stop 222
tatttttcaaatcatcgcagatgac

SEQ ID NO: 209582 - DNA, 25 bp, Artificial
  probe
  misc_feature (1)..(25): SEQ ID NO: 1030; WAN024FK7_at; Start 89; Stop 113
gccaagagataatgttcactctcgt

SEQ ID NO: 209583 - DNA, 25 bp, Artificial
  probe
  misc_feature (1)..(25): SEQ ID NO: 1030; WAN024FK7_at; Start 209; Stop 233
tcatcgcagatgacctgcatttgct

SEQ ID NO: 209584 - DNA, 25 bp, Artificial
  probe
  misc_feature (1)..(25): SEQ ID NO: 1030; WAN024FK7_at; Start 25; Stop 49
agacttgagaatactctgggcacta

SEQ ID NO: 209585 - DNA, 25 bp, Artificial
  probe
  misc_feature (1)..(25): SEQ ID NO: 1030; WAN024FK7_at; Start 165; Stop 189
tatccaccttactcccctgaatgtg

SEQ ID NO: 209586 - DNA, 25 bp, Artificial
  probe
  misc_feature (1)..(25): SEQ ID NO: 1030; WAN024FK7_at; Start 73; Stop 97
cgtgatttcgtgtcgagccaagaga

SEQ ID NO: 209587 - DNA, 25 bp, Artificial
  probe
  misc_feature (1)..(25): SEQ ID NO: 1030; WAN024FK7_at; Start 214; Stop 238
gcagatgacctgcatttgctcctct

SEQ ID NO: 209588 - DNA, 25 bp, Artificial
  probe
  misc_feature (1)..(25): SEQ ID NO: 1030; WAN024FK7_at; Start 177; Stop 201
tcccctgaatgtgagcaggcatatt

SEQ ID NO: 209589 - DNA, 25 bp, Artificial
  probe
  misc_feature (1)..(25): SEQ ID NO: 1030; WAN024FK7_at; Start 94; Stop 118
gagataatgttcactctcgttcaga

SEQ ID NO: 209590 - DNA, 25 bp, Artificial
  probe
  misc_feature (1)..(25): SEQ ID NO: 1030; WAN024FK7_at; Start 139; Stop 163
gaaatagggtggattacacaaaatc

SEQ ID NO: 209591 - DNA, 25 bp, Artificial
  probe
  misc_feature (1)..(25): SEQ ID NO: 1030; WAN024FK7_at; Start 174; Stop 198
tactcccctgaatgtgagcaggcat

SEQ ID NO: 209592 - DNA, 25 bp, Artificial
  probe
  misc_feature (1)..(25): SEQ ID NO: 1030; WAN024FK7_at; Start 9; Stop 33
tggccaaacgcccattagacttgag

SEQ ID NO: 209593 - DNA, 25 bp, Artificial
  probe
  misc_feature (1)..(25): SEQ ID NO: 1030; WAN024FK7_at; Start 169; Stop 193
caccttactcccctgaatgtgagca

SEQ ID NO: 209594 - DNA, 25 bp, Artificial
  probe
  misc_feature (1)..(25): SEQ ID NO: 1030; WAN024FK7_at; Start 194; Stop 218
ggcatatttttcaaatcatcgcaga

SEQ ID NO: 209595 - DNA, 25 bp, Artificial
  probe
  misc_feature (1)..(25): SEQ ID NO: 1030; WAN024FK7_at; Start 51; Stop 75
gacagatttcttccaaattagtcgt

SEQ ID NO: 209596 - DNA, 25 bp, Artificial
  probe
  misc_feature (1)..(25): SEQ ID NO: 1030; WAN024FK7_at; Start 81; Stop 105
cgtgtcgagccaagagataatgttc

SEQ ID NO: 209597 - DNA, 25 bp, Artificial
  probe
  misc_feature (1)..(25): SEQ ID NO: 1030; WAN024FK7_at; Start 107; Stop 131
ctctcgttcagattagaataaggat

SEQ ID NO: 209598 - DNA, 25 bp, Artificial
  probe
  misc_feature (1)..(25): SEQ ID NO: 1030; WAN024FK7_at; Start 216; Stop 240
agatgacctgcatttgctcctctaa

SEQ ID NO: 209599 - DNA, 25 bp, Artificial
  probe
  misc_feature (1)..(25): SEQ ID NO: 1030; WAN024FK7_at; Start 64; Stop 88
caaattagtcgtgatttcgtgtcga

SEQ ID NO: 209600 - DNA, 25 bp, Artificial
  probe
  misc_feature (1)..(25): SEQ ID NO: 1030; WAN024FK7_at; Start 99; Stop 123
aatgttcactctcgttcagattaga

SEQ ID NO: 209601 - DNA, 25 bp, Artificial
  probe
  misc_feature (1)..(25): SEQ ID NO: 5104; WAN024FK8_at; Start 43; Stop 67
tttggctcccttcccactattgtgg

SEQ ID NO: 209602 - DNA, 25 bp, Artificial
  probe
  misc_feature (1)..(25): SEQ ID NO: 5104; WAN024FK8_at; Start 32; Stop 56
gctcgtgtatatttggctcccttcc

SEQ ID NO: 209603 - DNA, 25 bp, Artificial
  probe
  misc_feature (1)..(25): SEQ ID NO: 5104; WAN024FK8_at; Start 189; Stop 213
gagccatcatcattgtggacaatca

SEQ ID NO: 209604 - DNA, 25 bp, Artificial
  probe
  misc_feature (1)..(25): SEQ ID NO: 5104; WAN024FK8_at; Start 10; Stop 34
gataagtttgactggcaagcgtgct

SEQ ID NO: 209605 - DNA, 25 bp, Artificial
  probe
  misc_feature (1)..(25): SEQ ID NO: 5104; WAN024FK8_at; Start 93; Stop 117
tcgtatagcctatatagtaggatcc

SEQ ID NO: 209606 - DNA, 25 bp, Artificial
  probe
  misc_feature (1)..(25): SEQ ID NO: 5104; WAN024FK8_at; Start 67; Stop 91
gatagcgaggcgtcttctcatatca

SEQ ID NO: 209607 - DNA, 25 bp, Artificial
  probe
  misc_feature (1)..(25): SEQ ID NO: 5104; WAN024FK8_at; Start 2; Stop 26
tgagcatagataagtttgactggca

SEQ ID NO: 209608 - DNA, 25 bp, Artificial
  probe
  misc_feature (1)..(25): SEQ ID NO: 5104; WAN024FK8_at; Start 159; Stop 183
taataaatctcttcgatttcgggcg

SEQ ID NO: 209609 - DNA, 25 bp, Artificial
  probe
  misc_feature (1)..(25): SEQ ID NO: 5104; WAN024FK8_at; Start 19; Stop 43
gactggcaagcgtgctcgtgtatat

SEQ ID NO: 209610 - DNA, 25 bp, Artificial
  probe
  misc_feature (1)..(25): SEQ ID NO: 5104; WAN024FK8_at; Start 164; Stop 188
aatctcttcgatttcgggcgtataa

SEQ ID NO: 209611 - DNA, 25 bp, Artificial
  probe
  misc_feature (1)..(25): SEQ ID NO: 5104; WAN024FK8_at; Start 76; Stop 100
gcgtcttctcatatcagtcgtatag

SEQ ID NO: 209612 - DNA, 25 bp, Artificial
  probe
  misc_feature (1)..(25): SEQ ID NO: 5104; WAN024FK8_at; Start 128; Stop 152
tccagaacgtacatataagccttat

SEQ ID NO: 209613 - DNA, 25 bp, Artificial
  probe
  misc_feature (1)..(25): SEQ ID NO: 5104; WAN024FK8_at; Start 57; Stop 81
cactattgtggatagcgaggcgtct

SEQ ID NO: 209614 - DNA, 25 bp, Artificial
  probe
  misc_feature (1)..(25): SEQ ID NO: 5104; WAN024FK8_at; Start 54; Stop 78
tcccactattgtggatagcgaggcg

SEQ ID NO: 209615 - DNA, 25 bp, Artificial
  probe
  misc_feature (1)..(25): SEQ ID NO: 5104; WAN024FK8_at; Start 25; Stop 49
caagcgtgctcgtgtatatttggct

SEQ ID NO: 209616 - DNA, 25 bp, Artificial
  probe
  misc_feature (1)..(25): SEQ ID NO: 5104; WAN024FK8_at; Start 181; Stop 205
gcgtataagagccatcatcattgtg

SEQ ID NO: 209617 - DNA, 25 bp, Artificial
  probe
  misc_feature (1)..(25): SEQ ID NO: 5104; WAN024FK8_at; Start 101; Stop 125
cctatatagtaggatccatcacgac

SEQ ID NO: 209618 - DNA, 25 bp, Artificial
  probe
  misc_feature (1)..(25): SEQ ID NO: 5104; WAN024FK8_at; Start 62; Stop 86
ttgtggatagcgaggcgtcttctca

SEQ ID NO: 209619 - DNA, 25 bp, Artificial
  probe
  misc_feature (1)..(25): SEQ ID NO: 5104; WAN024FK8_at; Start 184; Stop 208
tataagagccatcatcattgtggac

SEQ ID NO: 209620 - DNA, 25 bp, Artificial
  probe
  misc_feature (1)..(25): SEQ ID NO: 5104; WAN024FK8_at; Start 113; Stop 137
gatccatcacgacactccagaacgt

SEQ ID NO: 209621 - DNA, 25 bp, Artificial
  probe
  misc_feature (1)..(25): SEQ ID NO: 5104; WAN024FK8_at; Start 199; Stop 223
cattgtggacaatcaaaggaggtaa

SEQ ID NO: 209622 - DNA, 25 bp, Artificial
  probe
  misc_feature (1)..(25): SEQ ID NO: 5104; WAN024FK8_at; Start 171; Stop 195
tcgatttcgggcgtataagagccat

SEQ ID NO: 209623 - DNA, 25 bp, Artificial
  probe
  misc_feature (1)..(25): SEQ ID NO: 5104; WAN024FK8_at; Start 150; Stop 174
tatgatccataataaatctcttcga

SEQ ID NO: 209624 - DNA, 25 bp, Artificial
  probe
  misc_feature (1)..(25): SEQ ID NO: 5104; WAN024FK8_at; Start 105; Stop 129
tatagtaggatccatcacgacactc

SEQ ID NO: 209625 - DNA, 25 bp, Artificial
  probe
  misc_feature (1)..(25): SEQ ID NO: 5104; WAN024FK8_at; Start 82; Stop 106
tctcatatcagtcgtatagcctata

SEQ ID NO: 209626 - DNA, 25 bp, Artificial
  probe
  misc_feature (1)..(25): SEQ ID NO: 5104; WAN024FK8_at; Start 134; Stop 158
acgtacatataagccttatgatcca

SEQ ID NO: 209627 - DNA, 25 bp, Artificial
  probe
  misc_feature (1)..(25): SEQ ID NO: 5104; WAN024FK8_at; Start 175; Stop 199
tttcgggcgtataagagccatcatc

SEQ ID NO: 209628 - DNA, 25 bp, Artificial
  probe
  misc_feature (1)..(25): SEQ ID NO: 5104; WAN024FK8_at; Start 109; Stop 133
gtaggatccatcacgacactccaga

SEQ ID NO: 209629 - DNA, 25 bp, Artificial
  probe
  misc_feature (1)..(25): SEQ ID NO: 5104; WAN024FK8_at; Start 206; Stop 230
gacaatcaaaggaggtaagacctta

SEQ ID NO: 209630 - DNA, 25 bp, Artificial
  probe
  misc_feature (1)..(25): SEQ ID NO: 5104; WAN024FK8_at; Start 122; Stop 146
cgacactccagaacgtacatataag

SEQ ID NO: 209631 - DNA, 25 bp, Artificial
  probe
  misc_feature (1)..(25): SEQ ID NO: 5104; WAN024FK8_at; Start 71; Stop 95
gcgaggcgtcttctcatatcagtcg

SEQ ID NO: 209632 - DNA, 25 bp, Artificial
  probe
  misc_feature (1)..(25): SEQ ID NO: 5104; WAN024FK8_at; Start 15; Stop 39
gtttgactggcaagcgtgctcgtgt

SEQ ID NO: 209633 - DNA, 25 bp, Artificial
  probe
  misc_feature (1)..(25): SEQ ID NO: 5104; WAN024FK8_at; Start 202; Stop 226
tgtggacaatcaaaggaggtaagac

SEQ ID NO: 209634 - DNA, 25 bp, Artificial
  probe
  misc_feature (1)..(25): SEQ ID NO: 5104; WAN024FK8_at; Start 6; Stop 30
catagataagtttgactggcaagcg

SEQ ID NO: 209635 - DNA, 25 bp, Artificial
  probe
  misc_feature (1)..(25): SEQ ID NO: 2348; WAN024FK9_at; Start 280; Stop 304
gaatcgtggggagtccttctaacta

SEQ ID NO: 209636 - DNA, 25 bp, Artificial
  probe
  misc_feature (1)..(25): SEQ ID NO: 2348; WAN024FK9_at; Start 151; Stop 175
tatgctcaaggttttgccagtaagg

SEQ ID NO: 209637 - DNA, 25 bp, Artificial
  probe
  misc_feature (1)..(25): SEQ ID NO: 2348; WAN024FK9_at; Start 80; Stop 104
gacgcctcgctatccacaatagtgg

SEQ ID NO: 209638 - DNA, 25 bp, Artificial
  probe
  misc_feature (1)..(25): SEQ ID NO: 2348; WAN024FK9_at; Start 16; Stop 40
tatatgtacgttctggagtgtcgtg

SEQ ID NO: 209639 - DNA, 25 bp, Artificial
  probe
  misc_feature (1)..(25): SEQ ID NO: 2348; WAN024FK9_at; Start 43; Stop 67
ggatcctactatataggctatacga

SEQ ID NO: 209640 - DNA, 25 bp, Artificial
  probe
  misc_feature (1)..(25): SEQ ID NO: 2348; WAN024FK9_at; Start 94; Stop 118
cacaatagtgggaagggagccaaat

SEQ ID NO: 209641 - DNA, 25 bp, Artificial
  probe
  misc_feature (1)..(25): SEQ ID NO: 2348; WAN024FK9_at; Start 27; Stop 51
tctggagtgtcgtgatggatcctac

SEQ ID NO: 209642 - DNA, 25 bp, Artificial
  probe
  misc_feature (1)..(25): SEQ ID NO: 2348; WAN024FK9_at; Start 250; Stop 274
caagatagaaatttactcagttatt

SEQ ID NO: 209643 - DNA, 25 bp, Artificial
  probe
  misc_feature (1)..(25): SEQ ID NO: 2348; WAN024FK9_at; Start 168; Stop 192
cagtaaggaagaagccatgtcggct

SEQ ID NO: 209644 - DNA, 25 bp, Artificial
  probe
  misc_feature (1)..(25): SEQ ID NO: 2348; WAN024FK9_at; Start 156; Stop 180
tcaaggttttgccagtaaggaagaa

SEQ ID NO: 209645 - DNA, 25 bp, Artificial
  probe
  misc_feature (1)..(25): SEQ ID NO: 2348; WAN024FK9_at; Start 105; Stop 129
gaagggagccaaatatacacgagca

SEQ ID NO: 209646 - DNA, 25 bp, Artificial
  probe
  misc_feature (1)..(25): SEQ ID NO: 2348; WAN024FK9_at; Start 125; Stop 149
gagcacgcttgccagtcaaacttat

SEQ ID NO: 209647 - DNA, 25 bp, Artificial
  probe
  misc_feature (1)..(25): SEQ ID NO: 2348; WAN024FK9_at; Start 66; Stop 90
gactgatatgagaagacgcctcgct

SEQ ID NO: 209648 - DNA, 25 bp, Artificial
  probe
  misc_feature (1)..(25): SEQ ID NO: 2348; WAN024FK9_at; Start 131; Stop 155
gcttgccagtcaaacttatctatgc

SEQ ID NO: 209649 - DNA, 25 bp, Artificial
  probe
  misc_feature (1)..(25): SEQ ID NO: 2348; WAN024FK9_at; Start 115; Stop 139
aaatatacacgagcacgcttgccag

SEQ ID NO: 209650 - DNA, 25 bp, Artificial
  probe
  misc_feature (1)..(25): SEQ ID NO: 2348; WAN024FK9_at; Start 146; Stop 170
ttatctatgctcaaggttttgccag

SEQ ID NO: 209651 - DNA, 25 bp, Artificial
  probe
  misc_feature (1)..(25): SEQ ID NO: 2348; WAN024FK9_at; Start 77; Stop 101
gaagacgcctcgctatccacaatag

SEQ ID NO: 209652 - DNA, 25 bp, Artificial
  probe
  misc_feature (1)..(25): SEQ ID NO: 2348; WAN024FK9_at; Start 165; Stop 189
tgccagtaaggaagaagccatgtcg

SEQ ID NO: 209653 - DNA, 25 bp, Artificial
  probe
  misc_feature (1)..(25): SEQ ID NO: 2348; WAN024FK9_at; Start 265; Stop 289
ctcagttattttgaagaatcgtggg

SEQ ID NO: 209654 - DNA, 25 bp, Artificial
  probe
  misc_feature (1)..(25): SEQ ID NO: 2348; WAN024FK9_at; Start 109; Stop 133
ggagccaaatatacacgagcacgct

SEQ ID NO: 209655 - DNA, 25 bp, Artificial
  probe
  misc_feature (1)..(25): SEQ ID NO: 2348; WAN024FK9_at; Start 90; Stop 114
tatccacaatagtgggaagggagcc

SEQ ID NO: 209656 - DNA, 25 bp, Artificial
  probe
  misc_feature (1)..(25): SEQ ID NO: 2348; WAN024FK9_at; Start 9; Stop 33
taaggcttatatgtacgttctggag

SEQ ID NO: 209657 - DNA, 25 bp, Artificial
  probe
  misc_feature (1)..(25): SEQ ID NO: 2348; WAN024FK9_at; Start 54; Stop 78
tataggctatacgactgatatgaga

SEQ ID NO: 209658 - DNA, 25 bp, Artificial
  probe
  misc_feature (1)..(25): SEQ ID NO: 2348; WAN024FK9_at; Start 61; Stop 85
tatacgactgatatgagaagacgcc

SEQ ID NO: 209659 - DNA, 25 bp, Artificial
  probe
  misc_feature (1)..(25): SEQ ID NO: 2348; WAN024FK9_at; Start 70; Stop 94
gatatgagaagacgcctcgctatcc

SEQ ID NO: 209660 - DNA, 25 bp, Artificial
  probe
  misc_feature (1)..(25): SEQ ID NO: 2348; WAN024FK9_at; Start 120; Stop 144
tacacgagcacgcttgccagtcaaa

SEQ ID NO: 209661 - DNA, 25 bp, Artificial
  probe
  misc_feature (1)..(25): SEQ ID NO: 2348; WAN024FK9_at; Start 216; Stop 240
gaggccacagaaggaagaattttta

SEQ ID NO: 209662 - DNA, 25 bp, Artificial
  probe
  misc_feature (1)..(25): SEQ ID NO: 2348; WAN024FK9_at; Start 210; Stop 234
taagaagaggccacagaaggaagaa

SEQ ID NO: 209663 - DNA, 25 bp, Artificial
  probe
  misc_feature (1)..(25): SEQ ID NO: 2348; WAN024FK9_at; Start 175; Stop 199
gaagaagccatgtcggctgaagctc

SEQ ID NO: 209664 - DNA, 25 bp, Artificial
  probe
  misc_feature (1)..(25): SEQ ID NO: 2348; WAN024FK9_at; Start 36; Stop 60
tcgtgatggatcctactatataggc

SEQ ID NO: 209665 - DNA, 25 bp, Artificial
  probe
  misc_feature (1)..(25): SEQ ID NO: 2348; WAN024FK9_at; Start 203; Stop 227
tcaagcgtaagaagaggccacagaa

SEQ ID NO: 209666 - DNA, 25 bp, Artificial
  probe
  misc_feature (1)..(25): SEQ ID NO: 2348; WAN024FK9_at; Start 229; Stop 253
gaagaatttttatctgaaaatcaag

SEQ ID NO: 209667 - DNA, 25 bp, Artificial
  probe
  misc_feature (1)..(25): SEQ ID NO: 2348; WAN024FK9_at; Start 24; Stop 48
cgttctggagtgtcgtgatggatcc

SEQ ID NO: 209668 - DNA, 25 bp, Artificial
  probe
  misc_feature (1)..(25): SEQ ID NO: 2348; WAN024FK9_at; Start 241; Stop 265
tctgaaaatcaagatagaaatttac

SEQ ID NO: 209669 - DNA, 25 bp, Artificial
  probe
  misc_feature (1)..(25): SEQ ID NO: 2204; WAN024FKA_at; Start 218; Stop 242
tattgtctgttgagattcaggagcg

SEQ ID NO: 209670 - DNA, 25 bp, Artificial
  probe
  misc_feature (1)..(25): SEQ ID NO: 2204; WAN024FKA_at; Start 598; Stop 622
tatccaaaaagagaaaaggaagcca

SEQ ID NO: 209671 - DNA, 25 bp, Artificial
  probe
  misc_feature (1)..(25): SEQ ID NO: 2204; WAN024FKA_at; Start 474; Stop 498
tagtgcccagagtattctcaagtct

SEQ ID NO: 209672 - DNA, 25 bp, Artificial
  probe
  misc_feature (1)..(25): SEQ ID NO: 2204; WAN024FKA_at; Start 185; Stop 209
ggctttttgctagcactcgtactca

SEQ ID NO: 209673 - DNA, 25 bp, Artificial
  probe
  misc_feature (1)..(25): SEQ ID NO: 2204; WAN024FKA_at; Start 364; Stop 388
ttgtgtaatccaccctatttcaagg

SEQ ID NO: 209674 - DNA, 25 bp, Artificial
  probe
  misc_feature (1)..(25): SEQ ID NO: 2204; WAN024FKA_at; Start 520; Stop 544
catcgtcctgatcgacttctggata

SEQ ID NO: 209675 - DNA, 25 bp, Artificial
  probe
  misc_feature (1)..(25): SEQ ID NO: 2204; WAN024FKA_at; Start 489; Stop 513
tctcaagtctaatgggcgtttggcc

SEQ ID NO: 209676 - DNA, 25 bp, Artificial
  probe
  misc_feature (1)..(25): SEQ ID NO: 2204; WAN024FKA_at; Start 80; Stop 104
gagaggtttttagctattcggtgga

SEQ ID NO: 209677 - DNA, 25 bp, Artificial
  probe
  misc_feature (1)..(25): SEQ ID NO: 2204; WAN024FKA_at; Start 397; Stop 421
tattctaatctgaacgagagtgaac

SEQ ID NO: 209678 - DNA, 25 bp, Artificial
  probe
  misc_feature (1)..(25): SEQ ID NO: 2204; WAN024FKA_at; Start 149; Stop 173
tgattgtggatttctgtgctgggaa

SEQ ID NO: 209679 - DNA, 25 bp, Artificial
  probe
  misc_feature (1)..(25): SEQ ID NO: 2204; WAN024FKA_at; Start 99; Stop 123
ggtggatagtgttctcttatcacga

SEQ ID NO: 209680 - DNA, 25 bp, Artificial
  probe
  misc_feature (1)..(25): SEQ ID NO: 2204; WAN024FKA_at; Start 291; Stop 315
gcaaatgcaggtcatctgcgatgat

SEQ ID NO: 209681 - DNA, 25 bp, Artificial
  probe
  misc_feature (1)..(25): SEQ ID NO: 2204; WAN024FKA_at; Start 118; Stop 142
tcacgatttccacgttttcctaaga

SEQ ID NO: 209682 - DNA, 25 bp, Artificial
  probe
  misc_feature (1)..(25): SEQ ID NO: 2204; WAN024FKA_at; Start 276; Stop 300
gaatggattagaggagcaaatgcag

SEQ ID NO: 209683 - DNA, 25 bp, Artificial
  probe
  misc_feature (1)..(25): SEQ ID NO: 2204; WAN024FKA_at; Start 640; Stop 664
gcgatcaaggatggctcaacaagtg

SEQ ID NO: 209684 - DNA, 25 bp, Artificial
  probe
  misc_feature (1)..(25): SEQ ID NO: 2204; WAN024FKA_at; Start 621; Stop 645
caatatgcttttgattgaggcgatc

SEQ ID NO: 209685 - DNA, 25 bp, Artificial
  probe
  misc_feature (1)..(25): SEQ ID NO: 2204; WAN024FKA_at; Start 672; Stop 696
ggtcttacctcctttgattgtccac

SEQ ID NO: 209686 - DNA, 25 bp, Artificial
  probe
  misc_feature (1)..(25): SEQ ID NO: 2204; WAN024FKA_at; Start 418; Stop 442
gaacattatctcttggctcgacacg

SEQ ID NO: 209687 - DNA, 25 bp, Artificial
  probe
  misc_feature (1)..(25): SEQ ID NO: 2204; WAN024FKA_at; Start 712; Stop 736
tatacgcccgaaatcgaagagattt

SEQ ID NO: 209688 - DNA, 25 bp, Artificial
  probe
  misc_feature (1)..(25): SEQ ID NO: 2204; WAN024FKA_at; Start 320; Stop 344
aaaatatgcctgctcacattcaggg

SEQ ID NO: 209689 - DNA, 25 bp, Artificial
  probe
  misc_feature (1)..(25): SEQ ID NO: 2204; WAN024FKA_at; Start 20; Stop 44
taaaatcaggagagcgcattaacca

SEQ ID NO: 209690 - DNA, 25 bp, Artificial
  probe
  misc_feature (1)..(25): SEQ ID NO: 2204; WAN024FKA_at; Start 552; Stop 576
tacgttaaaacgacataatctagcc

SEQ ID NO: 209691 - DNA, 25 bp, Artificial
  probe
  misc_feature (1)..(25): SEQ ID NO: 2204; WAN024FKA_at; Start 305; Stop 329
tctgcgatgatttgaaaaatatgcc

SEQ ID NO: 209692 - DNA, 25 bp, Artificial
  probe
  misc_feature (1)..(25): SEQ ID NO: 2204; WAN024FKA_at; Start 566; Stop 590
ataatctagcccctaagcgcctgca

SEQ ID NO: 209693 - DNA, 25 bp, Artificial
  probe
  misc_feature (1)..(25): SEQ ID NO: 2204; WAN024FKA_at; Start 201; Stop 225
tcgtactcaagcacagatattgtct

SEQ ID NO: 209694 - DNA, 25 bp, Artificial
  probe
  misc_feature (1)..(25): SEQ ID NO: 2204; WAN024FKA_at; Start 432; Stop 456
ggctcgacacgaaatcacgactaat

SEQ ID NO: 209695 - DNA, 25 bp, Artificial
  probe
  misc_feature (1)..(25): SEQ ID NO: 2204; WAN024FKA_at; Start 505; Stop 529
cgtttggccatggttcatcgtcctg

SEQ ID NO: 209696 - DNA, 25 bp, Artificial
  probe
  misc_feature (1)..(25): SEQ ID NO: 2204; WAN024FKA_at; Start 655; Stop 679
tcaacaagtggctttaaggtcttac

SEQ ID NO: 209697 - DNA, 25 bp, Artificial
  probe
  misc_feature (1)..(25): SEQ ID NO: 2204; WAN024FKA_at; Start 258; Stop 282
tgaacgctctgtccgtttgaatgga

SEQ ID NO: 209698 - DNA, 25 bp, Artificial
  probe
  misc_feature (1)..(25): SEQ ID NO: 2204; WAN024FKA_at; Start 447; Stop 471
cacgactaatttggaagaaatctgt

SEQ ID NO: 209699 - DNA, 25 bp, Artificial
  probe
  misc_feature (1)..(25): SEQ ID NO: 2204; WAN024FKA_at; Start 580; Stop 604
aagcgcctgcagtttgtttatccaa

SEQ ID NO: 209700 - DNA, 25 bp, Artificial
  probe
  misc_feature (1)..(25): SEQ ID NO: 2204; WAN024FKA_at; Start 35; Stop 59
gcattaaccagctcttttcgacaga

SEQ ID NO: 209701 - DNA, 25 bp, Artificial
  probe
  misc_feature (1)..(25): SEQ ID NO: 2204; WAN024FKA_at; Start 697; Stop 721
aatgatgatggctcttatacgcccg

SEQ ID NO: 209702 - DNA, 25 bp, Artificial
  probe
  misc_feature (1)..(25): SEQ ID NO: 2204; WAN024FKA_at; Start 243; Stop 267
tttggcggatatggctgaacgctct

SEQ ID NO: 209703 - DNA, 25 bp, Artificial
  probe
  misc_feature (1)..(25): SEQ ID NO: 5198; WAN024FKB_at; Start 235; Stop 259
cagagttttgagacggaattgcgca

SEQ ID NO: 209704 - DNA, 25 bp, Artificial
  probe
  misc_feature (1)..(25): SEQ ID NO: 5198; WAN024FKB_at; Start 189; Stop 213
gatttttgtcagagaagctagtccg

SEQ ID NO: 209705 - DNA, 25 bp, Artificial
  probe
  misc_feature (1)..(25): SEQ ID NO: 5198; WAN024FKB_at; Start 392; Stop 416
taggagatgttaatcctgagtatgc

SEQ ID NO: 209706 - DNA, 25 bp, Artificial
  probe
  misc_feature (1)..(25): SEQ ID NO: 5198; WAN024FKB_at; Start 557; Stop 581
tcgattttgataaggagagattaac

SEQ ID NO: 209707 - DNA, 25 bp, Artificial
  probe
  misc_feature (1)..(25): SEQ ID NO: 5198; WAN024FKB_at; Start 283; Stop 307
gttgaaaagacggactttgcgcgca

SEQ ID NO: 209708 - DNA, 25 bp, Artificial
  probe
  misc_feature (1)..(25): SEQ ID NO: 5198; WAN024FKB_at; Start 448; Stop 472
tttctcaaaaaagaccagcttatgc

SEQ ID NO: 209709 - DNA, 25 bp, Artificial
  probe
  misc_feature (1)..(25): SEQ ID NO: 5198; WAN024FKB_at; Start 357; Stop 381
tttgacagaaaaacagcaggagctc

SEQ ID NO: 209710 - DNA, 25 bp, Artificial
  probe
  misc_feature (1)..(25): SEQ ID NO: 5198; WAN024FKB_at; Start 174; Stop 198
tgaactggatcaagagatttttgtc

SEQ ID NO: 209711 - DNA, 25 bp, Artificial
  probe
  misc_feature (1)..(25): SEQ ID NO: 5198; WAN024FKB_at; Start 81; Stop 105
actcatggaagagtatataaaggca

SEQ ID NO: 209712 - DNA, 25 bp, Artificial
  probe
  misc_feature (1)..(25): SEQ ID NO: 5198; WAN024FKB_at; Start 460; Stop 484
gaccagcttatgcagaaatgccgtg

SEQ ID NO: 209713 - DNA, 25 bp, Artificial
  probe
  misc_feature (1)..(25): SEQ ID NO: 5198; WAN024FKB_at; Start 19; Stop 43
cagtatgaggatgtgattctacggg

SEQ ID NO: 209714 - DNA, 25 bp, Artificial
  probe
  misc_feature (1)..(25): SEQ ID NO: 5198; WAN024FKB_at; Start 319; Stop 343
ctgtccaattatttttacaaggtca

SEQ ID NO: 209715 - DNA, 25 bp, Artificial
  probe
  misc_feature (1)..(25): SEQ ID NO: 5198; WAN024FKB_at; Start 126; Stop 150
taagcgctattacctcaattttcct

SEQ ID NO: 209716 - DNA, 25 bp, Artificial
  probe
  misc_feature (1)..(25): SEQ ID NO: 5198; WAN024FKB_at; Start 343; Stop 367
aaacagcagtatcctttgacagaaa

SEQ ID NO: 209717 - DNA, 25 bp, Artificial
  probe
  misc_feature (1)..(25): SEQ ID NO: 5198; WAN024FKB_at; Start 476; Stop 500
aatgccgtgatatctttgtggacag

SEQ ID NO: 209718 - DNA, 25 bp, Artificial
  probe
  misc_feature (1)..(25): SEQ ID NO: 5198; WAN024FKB_at; Start 157; Stop 181
gaatcacttgatagtcttgaactgg

SEQ ID NO: 209719 - DNA, 25 bp, Artificial
  probe
  misc_feature (1)..(25): SEQ ID NO: 5198; WAN024FKB_at; Start 110; Stop 134
tgattctacgtgaaaataagcgcta

SEQ ID NO: 209720 - DNA, 25 bp, Artificial
  probe
  misc_feature (1)..(25): SEQ ID NO: 5198; WAN024FKB_at; Start 142; Stop 166
aattttcctacgcttgaatcacttg

SEQ ID NO: 209721 - DNA, 25 bp, Artificial
  probe
  misc_feature (1)..(25): SEQ ID NO: 5198; WAN024FKB_at; Start 539; Stop 563
gaaagtatgagttggctatcgattt

SEQ ID NO: 209722 - DNA, 25 bp, Artificial
  probe
  misc_feature (1)..(25): SEQ ID NO: 5198; WAN024FKB_at; Start 255; Stop 279
gcgcaatcaaatcaatgcagctatt

SEQ ID NO: 209723 - DNA, 25 bp, Artificial
  probe
  misc_feature (1)..(25): SEQ ID NO: 5198; WAN024FKB_at; Start 271; Stop 295
gcagctattttagttgaaaagacgg

SEQ ID NO: 209724 - DNA, 25 bp, Artificial
  probe
  misc_feature (1)..(25): SEQ ID NO: 5198; WAN024FKB_at; Start 202; Stop 226
gaagctagtccggtctatcaagcct

SEQ ID NO: 209725 - DNA, 25 bp, Artificial
  probe
  misc_feature (1)..(25): SEQ ID NO: 5198; WAN024FKB_at; Start 573; Stop 597
gagattaactttctacttagcgtga

SEQ ID NO: 209726 - DNA, 25 bp, Artificial
  probe
  misc_feature (1)..(25): SEQ ID NO: 5198; WAN024FKB_at; Start 332; Stop 356
tttacaaggtcaaacagcagtatcc

SEQ ID NO: 209727 - DNA, 25 bp, Artificial
  probe
  misc_feature (1)..(25): SEQ ID NO: 5198; WAN024FKB_at; Start 48; Stop 72
taaggctcaatttccagatgttgca

SEQ ID NO: 209728 - DNA, 25 bp, Artificial
  probe
  misc_feature (1)..(25): SEQ ID NO: 5198; WAN024FKB_at; Start 422; Stop 446
agtatatgacggcttttttgttgaa

SEQ ID NO: 209729 - DNA, 25 bp, Artificial
  probe
  misc_feature (1)..(25): SEQ ID NO: 5198; WAN024FKB_at; Start 243; Stop 267
tgagacggaattgcgcaatcaaatc

SEQ ID NO: 209730 - DNA, 25 bp, Artificial
  probe
  misc_feature (1)..(25): SEQ ID NO: 5198; WAN024FKB_at; Start 372; Stop 396
gcaggagctctatgacattttagga

SEQ ID NO: 209731 - DNA, 25 bp, Artificial
  probe
  misc_feature (1)..(25): SEQ ID NO: 5198; WAN024FKB_at; Start 509; Stop 533
tcttaggctatattgtgcaaaatga

SEQ ID NO: 209732 - DNA, 25 bp, Artificial
  probe
  misc_feature (1)..(25): SEQ ID NO: 5198; WAN024FKB_at; Start 69; Stop 93
tgcagttgataaactcatggaagag

SEQ ID NO: 209733 - DNA, 25 bp, Artificial
  probe
  misc_feature (1)..(25): SEQ ID NO: 5198; WAN024FKB_at; Start 216; Stop 240
ctatcaagccttgttggagcagagt

SEQ ID NO: 209734 - DNA, 25 bp, Artificial
  probe
  misc_feature (1)..(25): SEQ ID NO: 5198; WAN024FKB_at; Start 289; Stop 313
aagacggactttgcgcgcattaaaa

SEQ ID NO: 209735 - DNA, 25 bp, Artificial
  probe
  misc_feature (1)..(25): SEQ ID NO: 5198; WAN024FKB_at; Start 60; Stop 84
tccagatgttgcagttgataaactc

SEQ ID NO: 209736 - DNA, 25 bp, Artificial
  probe
  misc_feature (1)..(25): SEQ ID NO: 5198; WAN024FKB_at; Start 224; Stop 248
ccttgttggagcagagttttgagac

SEQ ID NO: 209737 - DNA, 25 bp, Artificial
  probe
  misc_feature (1)..(25): SEQ ID NO: 625; WAN024FKC_at; Start 906; Stop 930
gatttctactagaactcaagggtca

SEQ ID NO: 209738 - DNA, 25 bp, Artificial
  probe
  misc_feature (1)..(25): SEQ ID NO: 625; WAN024FKC_at; Start 759; Stop 783
tctaggtgagcaaaattacattcaa

SEQ ID NO: 209739 - DNA, 25 bp, Artificial
  probe
  misc_feature (1)..(25): SEQ ID NO: 625; WAN024FKC_at; Start 321; Stop 345
gccaactaaaattatttcaggctca

SEQ ID NO: 209740 - DNA, 25 bp, Artificial
  probe
  misc_feature (1)..(25): SEQ ID NO: 625; WAN024FKC_at; Start 704; Stop 728
tattaattttgggtgaaggagagct

SEQ ID NO: 209741 - DNA, 25 bp, Artificial
  probe
  misc_feature (1)..(25): SEQ ID NO: 625; WAN024FKC_at; Start 626; Stop 650
gattggcagaagtgaaaaattattc

SEQ ID NO: 209742 - DNA, 25 bp, Artificial
  probe
  misc_feature (1)..(25): SEQ ID NO: 625; WAN024FKC_at; Start 181; Stop 205
gacacaccatatcttattgaaaaac

SEQ ID NO: 209743 - DNA, 25 bp, Artificial
  probe
  misc_feature (1)..(25): SEQ ID NO: 625; WAN024FKC_at; Start 470; Stop 494
tagctgtttctttaggtcagaaaga

SEQ ID NO: 209744 - DNA, 25 bp, Artificial
  probe
  misc_feature (1)..(25): SEQ ID NO: 625; WAN024FKC_at; Start 864; Stop 888
tagttatgttctagctgaagcgtca

SEQ ID NO: 209745 - DNA, 25 bp, Artificial
  probe
  misc_feature (1)..(25): SEQ ID NO: 625; WAN024FKC_at; Start 813; Stop 837
ctatataagacaaagcaaagggctg

SEQ ID NO: 209746 - DNA, 25 bp, Artificial
  probe
  misc_feature (1)..(25): SEQ ID NO: 625; WAN024FKC_at; Start 27; Stop 51
tagcttaacaggaggcggagctgaa

SEQ ID NO: 209747 - DNA, 25 bp, Artificial
  probe
  misc_feature (1)..(25): SEQ ID NO: 625; WAN024FKC_at; Start 283; Stop 307
gaaaaatacgacatagaatttgcgt

SEQ ID NO: 209748 - DNA, 25 bp, Artificial
  probe
  misc_feature (1)..(25): SEQ ID NO: 625; WAN024FKC_at; Start 576; Stop 600
caaagaatcaaatgtgcaaaagaca

SEQ ID NO: 209749 - DNA, 25 bp, Artificial
  probe
  misc_feature (1)..(25): SEQ ID NO: 625; WAN024FKC_at; Start 1031; Stop 1055
aaaatacggatttcaatgaggaagc

SEQ ID NO: 209750 - DNA, 25 bp, Artificial
  probe
  misc_feature (1)..(25): SEQ ID NO: 625; WAN024FKC_at; Start 337; Stop 361
tcaggctcatacaatgaagatagtc

SEQ ID NO: 209751 - DNA, 25 bp, Artificial
  probe
  misc_feature (1)..(25): SEQ ID NO: 625; WAN024FKC_at; Start 995; Stop 1019
gaatggaatttattctccagaagga

SEQ ID NO: 209752 - DNA, 25 bp, Artificial
  probe
  misc_feature (1)..(25): SEQ ID NO: 625; WAN024FKC_at; Start 611; Stop 635
tttgtgcagtaggaagattggcaga

SEQ ID NO: 209753 - DNA, 25 bp, Artificial
  probe
  misc_feature (1)..(25): SEQ ID NO: 625; WAN024FKC_at; Start 19; Stop 43
tgcataactagcttaacaggaggcg

SEQ ID NO: 209754 - DNA, 25 bp, Artificial
  probe
  misc_feature (1)..(25): SEQ ID NO: 625; WAN024FKC_at; Start 961; Stop 985
gaagttgatcatgatagtgcggcac

SEQ ID NO: 209755 - DNA, 25 bp, Artificial
  probe
  misc_feature (1)..(25): SEQ ID NO: 625; WAN024FKC_at; Start 303; Stop 327
tgcgtatatagaaggaaagccaact

SEQ ID NO: 209756 - DNA, 25 bp, Artificial
  probe
  misc_feature (1)..(25): SEQ ID NO: 625; WAN024FKC_at; Start 717; Stop 741
tgaaggagagctacggcaaacactg

SEQ ID NO: 209757 - DNA, 25 bp, Artificial
  probe
  misc_feature (1)..(25): SEQ ID NO: 625; WAN024FKC_at; Start 880; Stop 904
gaagcgtcaatattgggagttccca

SEQ ID NO: 209758 - DNA, 25 bp, Artificial
  probe
  misc_feature (1)..(25): SEQ ID NO: 625; WAN024FKC_at; Start 732; Stop 756
gcaaacactgcaaaatcagattgag

SEQ ID NO: 209759 - DNA, 25 bp, Artificial
  probe
  misc_feature (1)..(25): SEQ ID NO: 625; WAN024FKC_at; Start 747; Stop 771
tcagattgagattctaggtgagcaa

SEQ ID NO: 209760 - DNA, 25 bp, Artificial
  probe
  misc_feature (1)..(25): SEQ ID NO: 625; WAN024FKC_at; Start 393; Stop 417
taagaattggtactctcgtaaatcg

SEQ ID NO: 209761 - DNA, 25 bp, Artificial
  probe
  misc_feature (1)..(25): SEQ ID NO: 625; WAN024FKC_at; Start 894; Stop 918
gggagttcccacgatttctactaga

SEQ ID NO: 209762 - DNA, 25 bp, Artificial
  probe
  misc_feature (1)..(25): SEQ ID NO: 625; WAN024FKC_at; Start 1043; Stop 1067
tcaatgaggaagcaataaataagtt

SEQ ID NO: 209763 - DNA, 25 bp, Artificial
  probe
  misc_feature (1)..(25): SEQ ID NO: 625; WAN024FKC_at; Start 423; Stop 447
aagtattagagatgagagtgtgtgc

SEQ ID NO: 209764 - DNA, 25 bp, Artificial
  probe
  misc_feature (1)..(25): SEQ ID NO: 625; WAN024FKC_at; Start 438; Stop 462
gagtgtgtgctatcaaaaatttcat

SEQ ID NO: 209765 - DNA, 25 bp, Artificial
  probe
  misc_feature (1)..(25): SEQ ID NO: 625; WAN024FKC_at; Start 920; Stop 944
ctcaagggtcagaattaatgatgaa

SEQ ID NO: 209766 - DNA, 25 bp, Artificial
  probe
  misc_feature (1)..(25): SEQ ID NO: 625; WAN024FKC_at; Start 94; Stop 118
gatatctctttactcgtatatagcg

SEQ ID NO: 209767 - DNA, 25 bp, Artificial
  probe
  misc_feature (1)..(25): SEQ ID NO: 625; WAN024FKC_at; Start 515; Stop 539
catcatgtaaattggatatagttcc

SEQ ID NO: 209768 - DNA, 25 bp, Artificial
  probe
  misc_feature (1)..(25): SEQ ID NO: 625; WAN024FKC_at; Start 777; Stop 801
cattcaattagtcggttttcaaagt

SEQ ID NO: 209769 - DNA, 25 bp, Artificial
  probe
  misc_feature (1)..(25): SEQ ID NO: 625; WAN024FKC_at; Start 827; Stop 851
gcaaagggctgattcaaagctcaat

SEQ ID NO: 209770 - DNA, 25 bp, Artificial
  probe
  misc_feature (1)..(25): SEQ ID NO: 625; WAN024FKC_at; Start 980; Stop 1004
cggcactggctaagggaatggaatt

SEQ ID NO: 209771 - DNA, 25 bp, Artificial
  probe
  misc_feature (1)..(25): SEQ ID NO: 5138; WAN024FKD_at; Start 81; Stop 105
catgattgggatcaagtctttgccc

SEQ ID NO: 209772 - DNA, 25 bp, Artificial
  probe
  misc_feature (1)..(25): SEQ ID NO: 5138; WAN024FKD_at; Start 130; Stop 154
ggagcaaagacatacaagactaaag

SEQ ID NO: 209773 - DNA, 25 bp, Artificial
  probe
  misc_feature (1)..(25): SEQ ID NO: 5138; WAN024FKD_at; Start 142; Stop 166
tacaagactaaagcaaaaaccaggc

SEQ ID NO: 209774 - DNA, 25 bp, Artificial
  probe
  misc_feature (1)..(25): SEQ ID NO: 5138; WAN024FKD_at; Start 67; Stop 91
caagccaagctttgcatgattggga

SEQ ID NO: 209775 - DNA, 25 bp, Artificial
  probe
  misc_feature (1)..(25): SEQ ID NO: 5138; WAN024FKD_at; Start 261; Stop 285
cgcaactggaatccccgctgttgaa

SEQ ID NO: 209776 - DNA, 25 bp, Artificial
  probe
  misc_feature (1)..(25): SEQ ID NO: 5138; WAN024FKD_at; Start 110; Stop 134
cagacaagtctgctagccaaggagc

SEQ ID NO: 209777 - DNA, 25 bp, Artificial
  probe
  misc_feature (1)..(25): SEQ ID NO: 5138; WAN024FKD_at; Start 99; Stop 123
tttgcccacgccagacaagtctgct

SEQ ID NO: 209778 - DNA, 25 bp, Artificial
  probe
  misc_feature (1)..(25): SEQ ID NO: 5138; WAN024FKD_at; Start 18; Stop 42
ttggaaaaatcctcggataacactc

SEQ ID NO: 209779 - DNA, 25 bp, Artificial
  probe
  misc_feature (1)..(25): SEQ ID NO: 5138; WAN024FKD_at; Start 56; Stop 80
tcaagactccccaagccaagctttg

SEQ ID NO: 209780 - DNA, 25 bp, Artificial
  probe
  misc_feature (1)..(25): SEQ ID NO: 5138; WAN024FKD_at; Start 195; Stop 219
ccgaatcagggcaaagctatgctct

SEQ ID NO: 209781 - DNA, 25 bp, Artificial
  probe
  misc_feature (1)..(25): SEQ ID NO: 5138; WAN024FKD_at; Start 226; Stop 250
cgcatggtattatacttggcaactt

SEQ ID NO: 209782 - DNA, 25 bp, Artificial
  probe
  misc_feature (1)..(25): SEQ ID NO: 5138; WAN024FKD_at; Start 246; Stop 270
aacttgcttggccaccgcaactgga

SEQ ID NO: 209783 - DNA, 25 bp, Artificial
  probe
  misc_feature (1)..(25): SEQ ID NO: 5138; WAN024FKD_at; Start 94; Stop 118
aagtctttgcccacgccagacaagt

SEQ ID NO: 209784 - DNA, 25 bp, Artificial
  probe
  misc_feature (1)..(25): SEQ ID NO: 5138; WAN024FKD_at; Start 186; Stop 210
taagaagctccgaatcagggcaaag

SEQ ID NO: 209785 - DNA, 25 bp, Artificial
  probe
  misc_feature (1)..(25): SEQ ID NO: 5138; WAN024FKD_at; Start 88; Stop 112
gggatcaagtctttgcccacgccag

SEQ ID NO: 209786 - DNA, 25 bp, Artificial
  probe
  misc_feature (1)..(25): SEQ ID NO: 5138; WAN024FKD_at; Start 179; Stop 203
taaagcctaagaagctccgaatcag

SEQ ID NO: 209787 - DNA, 25 bp, Artificial
  probe
  misc_feature (1)..(25): SEQ ID NO: 5138; WAN024FKD_at; Start 72; Stop 96
caagctttgcatgattgggatcaag

SEQ ID NO: 209788 - DNA, 25 bp, Artificial
  probe
  misc_feature (1)..(25): SEQ ID NO: 5138; WAN024FKD_at; Start 174; Stop 198
tgtcataaagcctaagaagctccga

SEQ ID NO: 209789 - DNA, 25 bp, Artificial
  probe
  misc_feature (1)..(25): SEQ ID NO: 5138; WAN024FKD_at; Start 27; Stop 51
tcctcggataacactcatagacggg

SEQ ID NO: 209790 - DNA, 25 bp, Artificial
  probe
  misc_feature (1)..(25): SEQ ID NO: 5138; WAN024FKD_at; Start 268; Stop 292
ggaatccccgctgttgaaaccaaca

SEQ ID NO: 209791 - DNA, 25 bp, Artificial
  probe
  misc_feature (1)..(25): SEQ ID NO: 5138; WAN024FKD_at; Start 31; Stop 55
cggataacactcatagacgggaaaa

SEQ ID NO: 209792 - DNA, 25 bp, Artificial
  probe
  misc_feature (1)..(25): SEQ ID NO: 5138; WAN024FKD_at; Start 220; Stop 244
tcttctcgcatggtattatacttgg

SEQ ID NO: 209793 - DNA, 25 bp, Artificial
  probe
  misc_feature (1)..(25): SEQ ID NO: 5138; WAN024FKD_at; Start 10; Stop 34
ttcatcccttggaaaaatcctcgga

SEQ ID NO: 209794 - DNA, 25 bp, Artificial
  probe
  misc_feature (1)..(25): SEQ ID NO: 5138; WAN024FKD_at; Start 123; Stop 147
tagccaaggagcaaagacatacaag

SEQ ID NO: 209795 - DNA, 25 bp, Artificial
  probe
  misc_feature (1)..(25): SEQ ID NO: 5138; WAN024FKD_at; Start 151; Stop 175
aaagcaaaaaccaggcctagtcctg

SEQ ID NO: 209796 - DNA, 25 bp, Artificial
  probe
  misc_feature (1)..(25): SEQ ID NO: 5138; WAN024FKD_at; Start 208; Stop 232
aagctatgctcttcttctcgcatgg

SEQ ID NO: 209797 - DNA, 25 bp, Artificial
  probe
  misc_feature (1)..(25): SEQ ID NO: 5138; WAN024FKD_at; Start 41; Stop 65
tcatagacgggaaaatcaagactcc

SEQ ID NO: 209798 - DNA, 25 bp, Artificial
  probe
  misc_feature (1)..(25): SEQ ID NO: 5138; WAN024FKD_at; Start 164; Stop 188
ggcctagtcctgtcataaagcctaa

SEQ ID NO: 209799 - DNA, 25 bp, Artificial
  probe
  misc_feature (1)..(25): SEQ ID NO: 5138; WAN024FKD_at; Start 238; Stop 262
tacttggcaacttgcttggccaccg

SEQ ID NO: 209800 - DNA, 25 bp, Artificial
  probe
  misc_feature (1)..(25): SEQ ID NO: 5138; WAN024FKD_at; Start 2; Stop 26
tgaggttattcatcccttggaaaaa

SEQ ID NO: 209801 - DNA, 25 bp, Artificial
  probe
  misc_feature (1)..(25): SEQ ID NO: 5138; WAN024FKD_at; Start 50; Stop 74
ggaaaatcaagactccccaagccaa

SEQ ID NO: 209802 - DNA, 25 bp, Artificial
  probe
  misc_feature (1)..(25): SEQ ID NO: 5138; WAN024FKD_at; Start 282; Stop 306
tgaaaccaacaagaaccaagcatag

SEQ ID NO: 209803 - DNA, 25 bp, Artificial
  probe
  misc_feature (1)..(25): SEQ ID NO: 5138; WAN024FKD_at; Start 200; Stop 224
tcagggcaaagctatgctcttcttc

SEQ ID NO: 209804 - DNA, 25 bp, Artificial
  probe
  misc_feature (1)..(25): SEQ ID NO: 5138; WAN024FKD_at; Start 118; Stop 142
tctgctagccaaggagcaaagacat

SEQ ID NO: 209805 - DNA, 25 bp, Artificial
  probe
  misc_feature (1)..(25): SEQ ID NO: 5001; WAN024FKE_at; Start 1177; Stop 1201
gtcttgtctccaatgcttcaggcca

SEQ ID NO: 209806 - DNA, 25 bp, Artificial
  probe
  misc_feature (1)..(25): SEQ ID NO: 5001; WAN024FKE_at; Start 835; Stop 859
tggtttaccaactacagcaatgagg

SEQ ID NO: 209807 - DNA, 25 bp, Artificial
  probe
  misc_feature (1)..(25): SEQ ID NO: 5001; WAN024FKE_at; Start 581; Stop 605
caggagattatctagcagccgttac

SEQ ID NO: 209808 - DNA, 25 bp, Artificial
  probe
  misc_feature (1)..(25): SEQ ID NO: 5001; WAN024FKE_at; Start 34; Stop 58
caccagcaggcccagatgttacggg

SEQ ID NO: 209809 - DNA, 25 bp, Artificial
  probe
  misc_feature (1)..(25): SEQ ID NO: 5001; WAN024FKE_at; Start 19; Stop 43
tcgcacgaaaacaatcaccagcagg

SEQ ID NO: 209810 - DNA, 25 bp, Artificial
  probe
  misc_feature (1)..(25): SEQ ID NO: 5001; WAN024FKE_at; Start 1480; Stop 1504
caaccaagtggacgtttgtggagct

SEQ ID NO: 209811 - DNA, 25 bp, Artificial
  probe
  misc_feature (1)..(25): SEQ ID NO: 5001; WAN024FKE_at; Start 3; Stop 27
gaatgaggaatctatgtcgcacgaa

SEQ ID NO: 209812 - DNA, 25 bp, Artificial
  probe
  misc_feature (1)..(25): SEQ ID NO: 5001; WAN024FKE_at; Start 1606; Stop 1630
gatcgcctgcgagcaaaatttaagc

SEQ ID NO: 209813 - DNA, 25 bp, Artificial
  probe
  misc_feature (1)..(25): SEQ ID NO: 5001; WAN024FKE_at; Start 401; Stop 425
tgatcccaatcatgcaaagcttggc

SEQ ID NO: 209814 - DNA, 25 bp, Artificial
  probe
  misc_feature (1)..(25): SEQ ID NO: 5001; WAN024FKE_at; Start 1381; Stop 1405
cgcaaggtgattttgaagcgaacca

SEQ ID NO: 209815 - DNA, 25 bp, Artificial
  probe
  misc_feature (1)..(25): SEQ ID NO: 5001; WAN024FKE_at; Start 1439; Stop 1463
tgttaataggaaccatccagtggct

SEQ ID NO: 209816 - DNA, 25 bp, Artificial
  probe
  misc_feature (1)..(25): SEQ ID NO: 5001; WAN024FKE_at; Start 1362; Stop 1386
taaagtaactggtgtcaagcgcaag

SEQ ID NO: 209817 - DNA, 25 bp, Artificial
  probe
  misc_feature (1)..(25): SEQ ID NO: 5001; WAN024FKE_at; Start 621; Stop 645
tgcctttgtcggtatggtagccagt

SEQ ID NO: 209818 - DNA, 25 bp, Artificial
  probe
  misc_feature (1)..(25): SEQ ID NO: 5001; WAN024FKE_at; Start 720; Stop 744
cagtaagcgtctcttggttgatacc

SEQ ID NO: 209819 - DNA, 25 bp, Artificial
  probe
  misc_feature (1)..(25): SEQ ID NO: 5001; WAN024FKE_at; Start 765; Stop 789
tatcctgacagggtctgccatccag

SEQ ID NO: 209820 - DNA, 25 bp, Artificial
  probe
  misc_feature (1)..(25): SEQ ID NO: 5001; WAN024FKE_at; Start 1589; Stop 1613
taggaaaagcccaagcagatcgcct

SEQ ID NO: 209821 - DNA, 25 bp, Artificial
  probe
  misc_feature (1)..(25): SEQ ID NO: 5001; WAN024FKE_at; Start 444; Stop 468
cccgtctatgagtgttatccgagga

SEQ ID NO: 209822 - DNA, 25 bp, Artificial
  probe
  misc_feature (1)..(25): SEQ ID NO: 5001; WAN024FKE_at; Start 277; Stop 301
gagcatagctttgccctgattcgga

SEQ ID NO: 209823 - DNA, 25 bp, Artificial
  probe
  misc_feature (1)..(25): SEQ ID NO: 5001; WAN024FKE_at; Start 361; Stop 385
gctccttggctagcagacttgtctg

SEQ ID NO: 209824 - DNA, 25 bp, Artificial
  probe
  misc_feature (1)..(25): SEQ ID NO: 5001; WAN024FKE_at; Start 1333; Stop 1357
cctaacgtcttgatgtatcgggata

SEQ ID NO: 209825 - DNA, 25 bp, Artificial
  probe
  misc_feature (1)..(25): SEQ ID NO: 5001; WAN024FKE_at; Start 81; Stop 105
taactttatcagtcgcctactcggg

SEQ ID NO: 209826 - DNA, 25 bp, Artificial
  probe
  misc_feature (1)..(25): SEQ ID NO: 5001; WAN024FKE_at; Start 737; Stop 761
ttgataccattaaggaagccattcc

SEQ ID NO: 209827 - DNA, 25 bp, Artificial
  probe
  misc_feature (1)..(25): SEQ ID NO: 5001; WAN024FKE_at; Start 532; Stop 556
cgtgttatctggatgctcctagcaa

SEQ ID NO: 209828 - DNA, 25 bp, Artificial
  probe
  misc_feature (1)..(25): SEQ ID NO: 5001; WAN024FKE_at; Start 116; Stop 140
ttatcccttggtacatctggatggg

SEQ ID NO: 209829 - DNA, 25 bp, Artificial
  probe
  misc_feature (1)..(25): SEQ ID NO: 5001; WAN024FKE_at; Start 479; Stop 503
ggatgaataacctcaaaccctatgc

SEQ ID NO: 209830 - DNA, 25 bp, Artificial
  probe
  misc_feature (1)..(25): SEQ ID NO: 5001; WAN024FKE_at; Start 461; Stop 485
tccgaggatttttccaagggatgaa

SEQ ID NO: 209831 - DNA, 25 bp, Artificial
  probe
  misc_feature (1)..(25): SEQ ID NO: 5001; WAN024FKE_at; Start 144; Stop 168
ttatgcagctaaggcaaatggtctc

SEQ ID NO: 209832 - DNA, 25 bp, Artificial
  probe
  misc_feature (1)..(25): SEQ ID NO: 5001; WAN024FKE_at; Start 225; Stop 249
tccagttgcggtggccaagcaagtt

SEQ ID NO: 209833 - DNA, 25 bp, Artificial
  probe
  misc_feature (1)..(25): SEQ ID NO: 5001; WAN024FKE_at; Start 561; Stop 585
tatcattatgaagctcggttcagga

SEQ ID NO: 209834 - DNA, 25 bp, Artificial
  probe
  misc_feature (1)..(25): SEQ ID NO: 5001; WAN024FKE_at; Start 509; Stop 533
gccaaattgctgagcaggtcattcg

SEQ ID NO: 209835 - DNA, 25 bp, Artificial
  probe
  misc_feature (1)..(25): SEQ ID NO: 5001; WAN024FKE_at; Start 751; Stop 775
gaagccattccttttatcctgacag

SEQ ID NO: 209836 - DNA, 25 bp, Artificial
  probe
  misc_feature (1)..(25): SEQ ID NO: 5001; WAN024FKE_at; Start 1037; Stop 1061
tgttcttgctaccagcaacggttgg

SEQ ID NO: 209837 - DNA, 25 bp, Artificial
  probe
  misc_feature (1)..(25): SEQ ID NO: 5001; WAN024FKE_at; Start 261; Stop 285
taccatgcgagaagaagagcatagc

SEQ ID NO: 209838 - DNA, 25 bp, Artificial
  probe
  misc_feature (1)..(25): SEQ ID NO: 5001; WAN024FKE_at; Start 306; Stop 330
cttaggctttatgacaggactaggc

SEQ ID NO: 209839 - DNA, 25 bp, Artificial
  probe
  misc_feature (1)..(25): SEQ ID NO: 7603; WAN024FKF_at; Start 31; Stop 55
caaggaagagtgatgaataaaagta

SEQ ID NO: 209840 - DNA, 25 bp, Artificial
  probe
  misc_feature (1)..(25): SEQ ID NO: 7603; WAN024FKF_at; Start 147; Stop 171
aaactcacgaatgacactcgtgtca

SEQ ID NO: 209841 - DNA, 25 bp, Artificial
  probe
  misc_feature (1)..(25): SEQ ID NO: 7603; WAN024FKF_at; Start 17; Stop 41
taataaacatcatacaaggaagagt

SEQ ID NO: 209842 - DNA, 25 bp, Artificial
  probe
  misc_feature (1)..(25): SEQ ID NO: 7603; WAN024FKF_at; Start 138; Stop 162
cgtaattaaaaactcacgaatgaca

SEQ ID NO: 209843 - DNA, 25 bp, Artificial
  probe
  misc_feature (1)..(25): SEQ ID NO: 7603; WAN024FKF_at; Start 9; Stop 33
gggcaagataataaacatcatacaa

SEQ ID NO: 209844 - DNA, 25 bp, Artificial
  probe
  misc_feature (1)..(25): SEQ ID NO: 7603; WAN024FKF_at; Start 165; Stop 189
cgtgtcattgacaatggcagaagtc

SEQ ID NO: 209845 - DNA, 25 bp, Artificial
  probe
  misc_feature (1)..(25): SEQ ID NO: 7603; WAN024FKF_at; Start 94; Stop 118
gaaccaagtaccataactaaactca

SEQ ID NO: 209846 - DNA, 25 bp, Artificial
  probe
  misc_feature (1)..(25): SEQ ID NO: 7603; WAN024FKF_at; Start 87; Stop 111
tacaatggaaccaagtaccataact

SEQ ID NO: 209847 - DNA, 25 bp, Artificial
  probe
  misc_feature (1)..(25): SEQ ID NO: 7603; WAN024FKF_at; Start 70; Stop 94
tcaagactaaataagactacaatgg

SEQ ID NO: 209848 - DNA, 25 bp, Artificial
  probe
  misc_feature (1)..(25): SEQ ID NO: 7603; WAN024FKF_at; Start 74; Stop 98
gactaaataagactacaatggaacc

SEQ ID NO: 209849 - DNA, 25 bp, Artificial
  probe
  misc_feature (1)..(25): SEQ ID NO: 7603; WAN024FKF_at; Start 108; Stop 132
aactaaactcagaataatatttggg

SEQ ID NO: 209850 - DNA, 25 bp, Artificial
  probe
  misc_feature (1)..(25): SEQ ID NO: 7603; WAN024FKF_at; Start 161; Stop 185
cactcgtgtcattgacaatggcaga

SEQ ID NO: 209851 - DNA, 25 bp, Artificial
  probe
  misc_feature (1)..(25): SEQ ID NO: 7603; WAN024FKF_at; Start 144; Stop 168
taaaaactcacgaatgacactcgtg

SEQ ID NO: 209852 - DNA, 25 bp, Artificial
  probe
  misc_feature (1)..(25): SEQ ID NO: 7603; WAN024FKF_at; Start 186; Stop 210
agtcaactccccactttggctctta

SEQ ID NO: 209853 - DNA, 25 bp, Artificial
  probe
  misc_feature (1)..(25): SEQ ID NO: 7603; WAN024FKF_at; Start 180; Stop 204
ggcagaagtcaactccccactttgg

SEQ ID NO: 209854 - DNA, 25 bp, Artificial
  probe
  misc_feature (1)..(25): SEQ ID NO: 7603; WAN024FKF_at; Start 203; Stop 227
ggctcttatcaaagaaggatttctc

SEQ ID NO: 209855 - DNA, 25 bp, Artificial
  probe
  misc_feature (1)..(25): SEQ ID NO: 7603; WAN024FKF_at; Start 176; Stop 200
caatggcagaagtcaactccccact

SEQ ID NO: 209856 - DNA, 25 bp, Artificial
  probe
  misc_feature (1)..(25): SEQ ID NO: 7603; WAN024FKF_at; Start 77; Stop 101
taaataagactacaatggaaccaag

SEQ ID NO: 209857 - DNA, 25 bp, Artificial
  probe
  misc_feature (1)..(25): SEQ ID NO: 7603; WAN024FKF_at; Start 173; Stop 197
tgacaatggcagaagtcaactcccc

SEQ ID NO: 209858 - DNA, 25 bp, Artificial
  probe
  misc_feature (1)..(25): SEQ ID NO: 7603; WAN024FKF_at; Start 27; Stop 51
catacaaggaagagtgatgaataaa

SEQ ID NO: 209859 - DNA, 25 bp, Artificial
  probe
  misc_feature (1)..(25): SEQ ID NO: 7603; WAN024FKF_at; Start 182; Stop 206
cagaagtcaactccccactttggct

SEQ ID NO: 209860 - DNA, 25 bp, Artificial
  probe
  misc_feature (1)..(25): SEQ ID NO: 7603; WAN024FKF_at; Start 209; Stop 233
tatcaaagaaggatttctctacata

SEQ ID NO: 209861 - DNA, 25 bp, Artificial
  probe
  misc_feature (1)..(25): SEQ ID NO: 7603; WAN024FKF_at; Start 159; Stop 183
gacactcgtgtcattgacaatggca

SEQ ID NO: 209862 - DNA, 25 bp, Artificial
  probe
  misc_feature (1)..(25): SEQ ID NO: 7603; WAN024FKF_at; Start 206; Stop 230
tcttatcaaagaaggatttctctac

SEQ ID NO: 209863 - DNA, 25 bp, Artificial
  probe
  misc_feature (1)..(25): SEQ ID NO: 7603; WAN024FKF_at; Start 62; Stop 86
gattccaatcaagactaaataagac

SEQ ID NO: 209864 - DNA, 25 bp, Artificial
  probe
  misc_feature (1)..(25): SEQ ID NO: 7603; WAN024FKF_at; Start 81; Stop 105
taagactacaatggaaccaagtacc

SEQ ID NO: 209865 - DNA, 25 bp, Artificial
  probe
  misc_feature (1)..(25): SEQ ID NO: 7603; WAN024FKF_at; Start 190; Stop 214
aactccccactttggctcttatcaa

SEQ ID NO: 209866 - DNA, 25 bp, Artificial
  probe
  misc_feature (1)..(25): SEQ ID NO: 7603; WAN024FKF_at; Start 98; Stop 122
caagtaccataactaaactcagaat

SEQ ID NO: 209867 - DNA, 25 bp, Artificial
  probe
  misc_feature (1)..(25): SEQ ID NO: 7603; WAN024FKF_at; Start 117; Stop 141
cagaataatatttgggaaagtcgta

SEQ ID NO: 209868 - DNA, 25 bp, Artificial
  probe
  misc_feature (1)..(25): SEQ ID NO: 7603; WAN024FKF_at; Start 197; Stop 221
cactttggctcttatcaaagaagga

SEQ ID NO: 209869 - DNA, 25 bp, Artificial
  probe
  misc_feature (1)..(25): SEQ ID NO: 7603; WAN024FKF_at; Start 37; Stop 61
agagtgatgaataaaagtagagaaa

SEQ ID NO: 209870 - DNA, 25 bp, Artificial
  probe
  misc_feature (1)..(25): SEQ ID NO: 7603; WAN024FKF_at; Start 84; Stop 108
gactacaatggaaccaagtaccata

SEQ ID NO: 209871 - DNA, 25 bp, Artificial
  probe
  misc_feature (1)..(25): SEQ ID NO: 7603; WAN024FKF_at; Start 20; Stop 44
taaacatcatacaaggaagagtgat

SEQ ID NO: 209872 - DNA, 25 bp, Artificial
  probe
  misc_feature (1)..(25): SEQ ID NO: 7603; WAN024FKF_at; Start 53; Stop 77
gtagagaaagattccaatcaagact

SEQ ID NO: 209873 - DNA, 25 bp, Artificial
  probe
  misc_feature (1)..(25): SEQ ID NO: 4972; WAN024FKG_at; Start 247; Stop 271
catatatacttgattgctccattag

SEQ ID NO: 209874 - DNA, 25 bp, Artificial
  probe
  misc_feature (1)..(25): SEQ ID NO: 4972; WAN024FKG_at; Start 54; Stop 78
tcagtatctagtccctctttcatgg

SEQ ID NO: 209875 - DNA, 25 bp, Artificial
  probe
  misc_feature (1)..(25): SEQ ID NO: 4972; WAN024FKG_at; Start 133; Stop 157
cagttactaagcgattcaaaccgag

SEQ ID NO: 209876 - DNA, 25 bp, Artificial
  probe
  misc_feature (1)..(25): SEQ ID NO: 4972; WAN024FKG_at; Start 73; Stop 97
tcatggagcgaatctcatcacctag

SEQ ID NO: 209877 - DNA, 25 bp, Artificial
  probe
  misc_feature (1)..(25): SEQ ID NO: 4972; WAN024FKG_at; Start 91; Stop 115
cacctagtgatactaagtctagcac

SEQ ID NO: 209878 - DNA, 25 bp, Artificial
  probe
  misc_feature (1)..(25): SEQ ID NO: 4972; WAN024FKG_at; Start 121; Stop 145
tcaattcatcatcagttactaagcg

SEQ ID NO: 209879 - DNA, 25 bp, Artificial
  probe
  misc_feature (1)..(25): SEQ ID NO: 4972; WAN024FKG_at; Start 171; Stop 195
cgaatactgccagataagactgcat

SEQ ID NO: 209880 - DNA, 25 bp, Artificial
  probe
  misc_feature (1)..(25): SEQ ID NO: 4972; WAN024FKG_at; Start 166; Stop 190
tgtcacgaatactgccagataagac

SEQ ID NO: 209881 - DNA, 25 bp, Artificial
  probe
  misc_feature (1)..(25): SEQ ID NO: 4972; WAN024FKG_at; Start 206; Stop 230
aacccaagcgattttacttctccat

SEQ ID NO: 209882 - DNA, 25 bp, Artificial
  probe
  misc_feature (1)..(25): SEQ ID NO: 4972; WAN024FKG_at; Start 62; Stop 86
tagtccctctttcatggagcgaatc

SEQ ID NO: 209883 - DNA, 25 bp, Artificial
  probe
  misc_feature (1)..(25): SEQ ID NO: 4972; WAN024FKG_at; Start 36; Stop 60
cgtccgcgttcaccaacttcagtat

SEQ ID NO: 209884 - DNA, 25 bp, Artificial
  probe
  misc_feature (1)..(25): SEQ ID NO: 4972; WAN024FKG_at; Start 144; Stop 168
cgattcaaaccgagacaaagattgt

SEQ ID NO: 209885 - DNA, 25 bp, Artificial
  probe
  misc_feature (1)..(25): SEQ ID NO: 4972; WAN024FKG_at; Start 271; Stop 295
gaatatctcctgaaagcggtttata

SEQ ID NO: 209886 - DNA, 25 bp, Artificial
  probe
  misc_feature (1)..(25): SEQ ID NO: 4972; WAN024FKG_at; Start 201; Stop 225
tgtgaaacccaagcgattttacttc

SEQ ID NO: 209887 - DNA, 25 bp, Artificial
  probe
  misc_feature (1)..(25): SEQ ID NO: 4972; WAN024FKG_at; Start 137; Stop 161
tactaagcgattcaaaccgagacaa

SEQ ID NO: 209888 - DNA, 25 bp, Artificial
  probe
  misc_feature (1)..(25): SEQ ID NO: 4972; WAN024FKG_at; Start 41; Stop 65
gcgttcaccaacttcagtatctagt

SEQ ID NO: 209889 - DNA, 25 bp, Artificial
  probe
  misc_feature (1)..(25): SEQ ID NO: 4972; WAN024FKG_at; Start 159; Stop 183
caaagattgtcacgaatactgccag

SEQ ID NO: 209890 - DNA, 25 bp, Artificial
  probe
  misc_feature (1)..(25): SEQ ID NO: 4972; WAN024FKG_at; Start 175; Stop 199
tactgccagataagactgcattatt

SEQ ID NO: 209891 - DNA, 25 bp, Artificial
  probe
  misc_feature (1)..(25): SEQ ID NO: 4972; WAN024FKG_at; Start 186; Stop 210
aagactgcattattttgtgaaaccc

SEQ ID NO: 209892 - DNA, 25 bp, Artificial
  probe
  misc_feature (1)..(25): SEQ ID NO: 4972; WAN024FKG_at; Start 258; Stop 282
gattgctccattagaatatctcctg

SEQ ID NO: 209893 - DNA, 25 bp, Artificial
  probe
  misc_feature (1)..(25): SEQ ID NO: 4972; WAN024FKG_at; Start 23; Stop 47
ccctgacaagagtcgtccgcgttca

SEQ ID NO: 209894 - DNA, 25 bp, Artificial
  probe
  misc_feature (1)..(25): SEQ ID NO: 4972; WAN024FKG_at; Start 111; Stop 135
agcactttcatcaattcatcatcag

SEQ ID NO: 209895 - DNA, 25 bp, Artificial
  probe
  misc_feature (1)..(25): SEQ ID NO: 4972; WAN024FKG_at; Start 77; Stop 101
ggagcgaatctcatcacctagtgat

SEQ ID NO: 209896 - DNA, 25 bp, Artificial
  probe
  misc_feature (1)..(25): SEQ ID NO: 4972; WAN024FKG_at; Start 33; Stop 57
agtcgtccgcgttcaccaacttcag

SEQ ID NO: 209897 - DNA, 25 bp, Artificial
  probe
  misc_feature (1)..(25): SEQ ID NO: 4972; WAN024FKG_at; Start 163; Stop 187
gattgtcacgaatactgccagataa

SEQ ID NO: 209898 - DNA, 25 bp, Artificial
  probe
  misc_feature (1)..(25): SEQ ID NO: 4972; WAN024FKG_at; Start 67; Stop 91
cctctttcatggagcgaatctcatc

SEQ ID NO: 209899 - DNA, 25 bp, Artificial
  probe
  misc_feature (1)..(25): SEQ ID NO: 4972; WAN024FKG_at; Start 58; Stop 82
tatctagtccctctttcatggagcg

SEQ ID NO: 209900 - DNA, 25 bp, Artificial
  probe
  misc_feature (1)..(25): SEQ ID NO: 4972; WAN024FKG_at; Start 213; Stop 237
gcgattttacttctccattctttta

SEQ ID NO: 209901 - DNA, 25 bp, Artificial
  probe
  misc_feature (1)..(25): SEQ ID NO: 4972; WAN024FKG_at; Start 266; Stop 290
cattagaatatctcctgaaagcggt

SEQ ID NO: 209902 - DNA, 25 bp, Artificial
  probe
  misc_feature (1)..(25): SEQ ID NO: 4972; WAN024FKG_at; Start 27; Stop 51
gacaagagtcgtccgcgttcaccaa

SEQ ID NO: 209903 - DNA, 25 bp, Artificial
  probe
  misc_feature (1)..(25): SEQ ID NO: 4972; WAN024FKG_at; Start 148; Stop 172
tcaaaccgagacaaagattgtcacg

SEQ ID NO: 209904 - DNA, 25 bp, Artificial
  probe
  misc_feature (1)..(25): SEQ ID NO: 4972; WAN024FKG_at; Start 140; Stop 164
taagcgattcaaaccgagacaaaga

SEQ ID NO: 209905 - DNA, 25 bp, Artificial
  probe
  misc_feature (1)..(25): SEQ ID NO: 4972; WAN024FKG_at; Start 192; Stop 216
gcattattttgtgaaacccaagcga

SEQ ID NO: 209906 - DNA, 25 bp, Artificial
  probe
  misc_feature (1)..(25): SEQ ID NO: 4972; WAN024FKG_at; Start 99; Stop 123
gatactaagtctagcactttcatca

SEQ ID NO: 209907 - DNA, 25 bp, Artificial
  probe
  misc_feature (1)..(25): SEQ ID NO: 963; WAN024FKH_at; Start 1257; Stop 1281
gaatcgcttagtaactgatgatgaa

SEQ ID NO: 209908 - DNA, 25 bp, Artificial
  probe
  misc_feature (1)..(25): SEQ ID NO: 963; WAN024FKH_at; Start 1480; Stop 1504
gagtatgcgattatcagtagcctct

SEQ ID NO: 209909 - DNA, 25 bp, Artificial
  probe
  misc_feature (1)..(25): SEQ ID NO: 963; WAN024FKH_at; Start 646; Stop 670
gaaagggtacaaaacaattcactga

SEQ ID NO: 209910 - DNA, 25 bp, Artificial
  probe
  misc_feature (1)..(25): SEQ ID NO: 963; WAN024FKH_at; Start 875; Stop 899
gcaagggatcttcagttgcactgga

SEQ ID NO: 209911 - DNA, 25 bp, Artificial
  probe
  misc_feature (1)..(25): SEQ ID NO: 963; WAN024FKH_at; Start 1195; Stop 1219
tgggtttcacaaaataatgcagtct

SEQ ID NO: 209912 - DNA, 25 bp, Artificial
  probe
  misc_feature (1)..(25): SEQ ID NO: 963; WAN024FKH_at; Start 1464; Stop 1488
tcttgatgcggattctgagtatgcg

SEQ ID NO: 209913 - DNA, 25 bp, Artificial
  probe
  misc_feature (1)..(25): SEQ ID NO: 963; WAN024FKH_at; Start 984; Stop 1008
tggttatgatgaaaatcgacctgtc

SEQ ID NO: 209914 - DNA, 25 bp, Artificial
  probe
  misc_feature (1)..(25): SEQ ID NO: 963; WAN024FKH_at; Start 1291; Stop 1315
gtgctagacttagtatcactaggtg

SEQ ID NO: 209915 - DNA, 25 bp, Artificial
  probe
  misc_feature (1)..(25): SEQ ID NO: 963; WAN024FKH_at; Start 1347; Stop 1371
tactgaagttggtgaacgcggacga

SEQ ID NO: 209916 - DNA, 25 bp, Artificial
  probe
  misc_feature (1)..(25): SEQ ID NO: 963; WAN024FKH_at; Start 903; Stop 927
cttgcttgcagttcctaaagaaaaa

SEQ ID NO: 209917 - DNA, 25 bp, Artificial
  probe
  misc_feature (1)..(25): SEQ ID NO: 963; WAN024FKH_at; Start 1306; Stop 1330
tcactaggtgatgagattcgctcca

SEQ ID NO: 209918 - DNA, 25 bp, Artificial
  probe
  misc_feature (1)..(25): SEQ ID NO: 963; WAN024FKH_at; Start 665; Stop 689
cactgaaatcagatagggttacttc

SEQ ID NO: 209919 - DNA, 25 bp, Artificial
  probe
  misc_feature (1)..(25): SEQ ID NO: 963; WAN024FKH_at; Start 517; Stop 541
tatagtcgtcgtttacaggaggaaa

SEQ ID NO: 209920 - DNA, 25 bp, Artificial
  probe
  misc_feature (1)..(25): SEQ ID NO: 963; WAN024FKH_at; Start 1239; Stop 1263
caatctttgtctcggtttgaatcgc

SEQ ID NO: 209921 - DNA, 25 bp, Artificial
  probe
  misc_feature (1)..(25): SEQ ID NO: 963; WAN024FKH_at; Start 1643; Stop 1667
agcgttatgctcgttttgtgcagga

SEQ ID NO: 209922 - DNA, 25 bp, Artificial
  probe
  misc_feature (1)..(25): SEQ ID NO: 963; WAN024FKH_at; Start 554; Stop 578
cagggcaattgactgaaaagattca

SEQ ID NO: 209923 - DNA, 25 bp, Artificial
  probe
  misc_feature (1)..(25): SEQ ID NO: 963; WAN024FKH_at; Start 1127; Stop 1151
gagatattctaatggagcaatcaag

SEQ ID NO: 209924 - DNA, 25 bp, Artificial
  probe
  misc_feature (1)..(25): SEQ ID NO: 963; WAN024FKH_at; Start 1623; Stop 1647
ggaactactggaaaatcatgagcgt

SEQ ID NO: 209925 - DNA, 25 bp, Artificial
  probe
  misc_feature (1)..(25): SEQ ID NO: 963; WAN024FKH_at; Start 777; Stop 801
tatatctgtgggaaccttggtttcg

SEQ ID NO: 209926 - DNA, 25 bp, Artificial
  probe
  misc_feature (1)..(25): SEQ ID NO: 963; WAN024FKH_at; Start 759; Stop 783
tcgggtcagcgcaggatatatatct

SEQ ID NO: 209927 - DNA, 25 bp, Artificial
  probe
  misc_feature (1)..(25): SEQ ID NO: 963; WAN024FKH_at; Start 603; Stop 627
ccaagcagagaaaagtgtacaggat

SEQ ID NO: 209928 - DNA, 25 bp, Artificial
  probe
  misc_feature (1)..(25): SEQ ID NO: 963; WAN024FKH_at; Start 1111; Stop 1135
tataaaccgctttcaggagatattc

SEQ ID NO: 209929 - DNA, 25 bp, Artificial
  probe
  misc_feature (1)..(25): SEQ ID NO: 963; WAN024FKH_at; Start 1519; Stop 1543
gagaagacggttgtgattatagcgc

SEQ ID NO: 209930 - DNA, 25 bp, Artificial
  probe
  misc_feature (1)..(25): SEQ ID NO: 963; WAN024FKH_at; Start 504; Stop 528
tatcagtgaaaagtatagtcgtcgt

SEQ ID NO: 209931 - DNA, 25 bp, Artificial
  probe
  misc_feature (1)..(25): SEQ ID NO: 963; WAN024FKH_at; Start 589; Stop 613
ttaattaagactaaccaagcagaga

SEQ ID NO: 209932 - DNA, 25 bp, Artificial
  probe
  misc_feature (1)..(25): SEQ ID NO: 963; WAN024FKH_at; Start 1220; Stop 1244
tatctggcagtattcgtgacaatct

SEQ ID NO: 209933 - DNA, 25 bp, Artificial
  probe
  misc_feature (1)..(25): SEQ ID NO: 963; WAN024FKH_at; Start 1415; Stop 1439
cctacttaaaagatgctgaaattct

SEQ ID NO: 209934 - DNA, 25 bp, Artificial
  probe
  misc_feature (1)..(25): SEQ ID NO: 963; WAN024FKH_at; Start 1066; Stop 1090
tctggatcaggaaaatcaacgattg

SEQ ID NO: 209935 - DNA, 25 bp, Artificial
  probe
  misc_feature (1)..(25): SEQ ID NO: 963; WAN024FKH_at; Start 1604; Stop 1628
ctggctcaggaactcataaggaact

SEQ ID NO: 209936 - DNA, 25 bp, Artificial
  probe
  misc_feature (1)..(25): SEQ ID NO: 963; WAN024FKH_at; Start 66; Stop 90
tagtctacttgctttgttgcttccc

SEQ ID NO: 209937 - DNA, 25 bp, Artificial
  probe
  misc_feature (1)..(25): SEQ ID NO: 963; WAN024FKH_at; Start 1181; Stop 1205
gaagtaaaatcgcttgggtttcaca

SEQ ID NO: 209938 - DNA, 25 bp, Artificial
  probe
  misc_feature (1)..(25): SEQ ID NO: 963; WAN024FKH_at; Start 1275; Stop 1299
tgatgaattgatgaaagtgctagac

SEQ ID NO: 209939 - DNA, 25 bp, Artificial
  probe
  misc_feature (1)..(25): SEQ ID NO: 963; WAN024FKH_at; Start 488; Stop 512
tcttgcccctttccaatatcagtga

SEQ ID NO: 209940 - DNA, 25 bp, Artificial
  probe
  misc_feature (1)..(25): SEQ ID NO: 963; WAN024FKH_at; Start 1320; Stop 1344
gattcgctccatgaaagagggacta

SEQ ID NO: 209941 - DNA, 25 bp, Artificial
  probe
  misc_feature (1)..(25): SEQ ID NO: 5528; WAN024FKI_at; Start 225; Stop 249
taaaggaaatcatgcctccacgacc

SEQ ID NO: 209942 - DNA, 25 bp, Artificial
  probe
  misc_feature (1)..(25): SEQ ID NO: 5528; WAN024FKI_at; Start 198; Stop 222
gaggaatgcgtgtttcatcggctac

SEQ ID NO: 209943 - DNA, 25 bp, Artificial
  probe
  misc_feature (1)..(25): SEQ ID NO: 5528; WAN024FKI_at; Start 132; Stop 156
taataagactttccactccacccaa

SEQ ID NO: 209944 - DNA, 25 bp, Artificial
  probe
  misc_feature (1)..(25): SEQ ID NO: 5528; WAN024FKI_at; Start 53; Stop 77
cgcaagaggtcatctgtcaaaccat

SEQ ID NO: 209945 - DNA, 25 bp, Artificial
  probe
  misc_feature (1)..(25): SEQ ID NO: 5528; WAN024FKI_at; Start 177; Stop 201
ccttgagactgttcaaaatatgagg

SEQ ID NO: 209946 - DNA, 25 bp, Artificial
  probe
  misc_feature (1)..(25): SEQ ID NO: 5528; WAN024FKI_at; Start 120; Stop 144
tcgttggataagtaataagactttc

SEQ ID NO: 209947 - DNA, 25 bp, Artificial
  probe
  misc_feature (1)..(25): SEQ ID NO: 5528; WAN024FKI_at; Start 213; Stop 237
catcggctactttaaaggaaatcat

SEQ ID NO: 209948 - DNA, 25 bp, Artificial
  probe
  misc_feature (1)..(25): SEQ ID NO: 5528; WAN024FKI_at; Start 170; Stop 194
gagaagaccttgagactgttcaaaa

SEQ ID NO: 209949 - DNA, 25 bp, Artificial
  probe
  misc_feature (1)..(25): SEQ ID NO: 5528; WAN024FKI_at; Start 158; Stop 182
ctttccgcaaaagagaagaccttga

SEQ ID NO: 209950 - DNA, 25 bp, Artificial
  probe
  misc_feature (1)..(25): SEQ ID NO: 5528; WAN024FKI_at; Start 164; Stop 188
gcaaaagagaagaccttgagactgt

SEQ ID NO: 209951 - DNA, 25 bp, Artificial
  probe
  misc_feature (1)..(25): SEQ ID NO: 5528; WAN024FKI_at; Start 294; Stop 318
caaccacttcttgggcgttagctgt

SEQ ID NO: 209952 - DNA, 25 bp, Artificial
  probe
  misc_feature (1)..(25): SEQ ID NO: 5528; WAN024FKI_at; Start 204; Stop 228
tgcgtgtttcatcggctactttaaa

SEQ ID NO: 209953 - DNA, 25 bp, Artificial
  probe
  misc_feature (1)..(25): SEQ ID NO: 5528; WAN024FKI_at; Start 2; Stop 26
tggcgcaaatctgcaatcaaatctc

SEQ ID NO: 209954 - DNA, 25 bp, Artificial
  probe
  misc_feature (1)..(25): SEQ ID NO: 5528; WAN024FKI_at; Start 108; Stop 132
catgagtttgagtcgttggataagt

SEQ ID NO: 209955 - DNA, 25 bp, Artificial
  probe
  misc_feature (1)..(25): SEQ ID NO: 5528; WAN024FKI_at; Start 232; Stop 256
aatcatgcctccacgaccagtgtag

SEQ ID NO: 209956 - DNA, 25 bp, Artificial
  probe
  misc_feature (1)..(25): SEQ ID NO: 5528; WAN024FKI_at; Start 92; Stop 116
tctgctggaatatcagcatgagttt

SEQ ID NO: 209957 - DNA, 25 bp, Artificial
  probe
  misc_feature (1)..(25): SEQ ID NO: 5528; WAN024FKI_at; Start 14; Stop 38
gcaatcaaatctctagcatcctcaa

SEQ ID NO: 209958 - DNA, 25 bp, Artificial
  probe
  misc_feature (1)..(25): SEQ ID NO: 5528; WAN024FKI_at; Start 66; Stop 90
ctgtcaaaccataagaatggcgtac

SEQ ID NO: 209959 - DNA, 25 bp, Artificial
  probe
  misc_feature (1)..(25): SEQ ID NO: 5528; WAN024FKI_at; Start 190; Stop 214
caaaatatgaggaatgcgtgtttca

SEQ ID NO: 209960 - DNA, 25 bp, Artificial
  probe
  misc_feature (1)..(25): SEQ ID NO: 5528; WAN024FKI_at; Start 252; Stop 276
tgtagagaacttccttaactgctgg

SEQ ID NO: 209961 - DNA, 25 bp, Artificial
  probe
  misc_feature (1)..(25): SEQ ID NO: 5528; WAN024FKI_at; Start 102; Stop 126
tatcagcatgagtttgagtcgttgg

SEQ ID NO: 209962 - DNA, 25 bp, Artificial
  probe
  misc_feature (1)..(25): SEQ ID NO: 5528; WAN024FKI_at; Start 27; Stop 51
tagcatcctcaatcccaatagacaa

SEQ ID NO: 209963 - DNA, 25 bp, Artificial
  probe
  misc_feature (1)..(25): SEQ ID NO: 5528; WAN024FKI_at; Start 60; Stop 84
ggtcatctgtcaaaccataagaatg

SEQ ID NO: 209964 - DNA, 25 bp, Artificial
  probe
  misc_feature (1)..(25): SEQ ID NO: 5528; WAN024FKI_at; Start 290; Stop 314
aaggcaaccacttcttgggcgttag

SEQ ID NO: 209965 - DNA, 25 bp, Artificial
  probe
  misc_feature (1)..(25): SEQ ID NO: 5528; WAN024FKI_at; Start 274; Stop 298
tggagaatccttcaaaaaggcaacc

SEQ ID NO: 209966 - DNA, 25 bp, Artificial
  probe
  misc_feature (1)..(25): SEQ ID NO: 5528; WAN024FKI_at; Start 36; Stop 60
caatcccaatagacaaacgcaagag

SEQ ID NO: 209967 - DNA, 25 bp, Artificial
  probe
  misc_feature (1)..(25): SEQ ID NO: 5528; WAN024FKI_at; Start 45; Stop 69
tagacaaacgcaagaggtcatctgt

SEQ ID NO: 209968 - DNA, 25 bp, Artificial
  probe
  misc_feature (1)..(25): SEQ ID NO: 5528; WAN024FKI_at; Start 235; Stop 259
catgcctccacgaccagtgtagaga

SEQ ID NO: 209969 - DNA, 25 bp, Artificial
  probe
  misc_feature (1)..(25): SEQ ID NO: 5528; WAN024FKI_at; Start 270; Stop 294
ctgctggagaatccttcaaaaaggc

SEQ ID NO: 209970 - DNA, 25 bp, Artificial
  probe
  misc_feature (1)..(25): SEQ ID NO: 5528; WAN024FKI_at; Start 286; Stop 310
caaaaaggcaaccacttcttgggcg

SEQ ID NO: 209971 - DNA, 25 bp, Artificial
  probe
  misc_feature (1)..(25): SEQ ID NO: 5528; WAN024FKI_at; Start 243; Stop 267
cacgaccagtgtagagaacttcctt

SEQ ID NO: 209972 - DNA, 25 bp, Artificial
  probe
  misc_feature (1)..(25): SEQ ID NO: 5528; WAN024FKI_at; Start 49; Stop 73
caaacgcaagaggtcatctgtcaaa

SEQ ID NO: 209973 - DNA, 25 bp, Artificial
  probe
  misc_feature (1)..(25): SEQ ID NO: 5528; WAN024FKI_at; Start 263; Stop 287
tccttaactgctggagaatccttca

SEQ ID NO: 209974 - DNA, 25 bp, Artificial
  probe
  misc_feature (1)..(25): SEQ ID NO: 5528; WAN024FKI_at; Start 256; Stop 280
gagaacttccttaactgctggagaa

SEQ ID NO: 209975 - DNA, 25 bp, Artificial
  probe
  misc_feature (1)..(25): SEQ ID NO: 420; WAN024FKJ-3_at; Start 9; Stop 33
tctcttcgtatggagcgctcaacag

SEQ ID NO: 209976 - DNA, 25 bp, Artificial
  probe
  misc_feature (1)..(25): SEQ ID NO: 420; WAN024FKJ-3_at; Start 294; Stop 318
cgtttgtctattgggattgaggatg

SEQ ID NO: 209977 - DNA, 25 bp, Artificial
  probe
  misc_feature (1)..(25): SEQ ID NO: 420; WAN024FKJ-3_at; Start 264; Stop 288
cattcttatggtttgacagatgacc

SEQ ID NO: 209978 - DNA, 25 bp, Artificial
  probe
  misc_feature (1)..(25): SEQ ID NO: 420; WAN024FKJ-3_at; Start 91; Stop 115
tctacactggtcgtggaggcatgat

SEQ ID NO: 209979 - DNA, 25 bp, Artificial
  probe
  misc_feature (1)..(25): SEQ ID NO: 420; WAN024FKJ-3_at; Start 270; Stop 294
tatggtttgacagatgacctcttgc

SEQ ID NO: 209980 - DNA, 25 bp, Artificial
  probe
  misc_feature (1)..(25): SEQ ID NO: 420; WAN024FKJ-3_at; Start 33; Stop 57
gctaacgcccaagaagtggttgcct

SEQ ID NO: 209981 - DNA, 25 bp, Artificial
  probe
  misc_feature (1)..(25): SEQ ID NO: 420; WAN024FKJ-3_at; Start 17; Stop 41
tatggagcgctcaacagctaacgcc

SEQ ID NO: 209982 - DNA, 25 bp, Artificial
  probe
  misc_feature (1)..(25): SEQ ID NO: 420; WAN024FKJ-3_at; Start 310; Stop 334
ttgaggatgctagagatttgattgc

SEQ ID NO: 209983 - DNA, 25 bp, Artificial
  probe
  misc_feature (1)..(25): SEQ ID NO: 420; WAN024FKJ-3_at; Start 54; Stop 78
gcctttttgaaggattctccagcag

SEQ ID NO: 209984 - DNA, 25 bp, Artificial
  probe
  misc_feature (1)..(25): SEQ ID NO: 420; WAN024FKJ-3_at; Start 157; Stop 181
tgaacagtctcaaggtcttctcttt

SEQ ID NO: 209985 - DNA, 25 bp, Artificial
  probe
  misc_feature (1)..(25): SEQ ID NO: 420; WAN024FKJ-3_at; Start 99; Stop 123
ggtcgtggaggcatgatttccttta

SEQ ID NO: 209986 - DNA, 25 bp, Artificial
  probe
  misc_feature (1)..(25): SEQ ID NO: 420; WAN024FKJ-3_at; Start 110; Stop 134
catgatttcctttaaagtagccgat

SEQ ID NO: 209987 - DNA, 25 bp, Artificial
  probe
  misc_feature (1)..(25): SEQ ID NO: 420; WAN024FKJ-3_at; Start 149; Stop 173
tcatattttgaacagtctcaaggtc

SEQ ID NO: 209988 - DNA, 25 bp, Artificial
  probe
  misc_feature (1)..(25): SEQ ID NO: 420; WAN024FKJ-3_at; Start 275; Stop 299
tttgacagatgacctcttgcgtttg

SEQ ID NO: 209989 - DNA, 25 bp, Artificial
  probe
  misc_feature (1)..(25): SEQ ID NO: 420; WAN024FKJ-3_at; Start 322; Stop 346
gagatttgattgcagatttgcgcca

SEQ ID NO: 209990 - DNA, 25 bp, Artificial
  probe
  misc_feature (1)..(25): SEQ ID NO: 420; WAN024FKJ-3_at; Start 285; Stop 309
gacctcttgcgtttgtctattggga

SEQ ID NO: 209991 - DNA, 25 bp, Artificial
  probe
  misc_feature (1)..(25): SEQ ID NO: 420; WAN024FKJ-3_at; Start 227; Stop 251
gactcaaactcatgctgatattcca

SEQ ID NO: 209992 - DNA, 25 bp, Artificial
  probe
  misc_feature (1)..(25): SEQ ID NO: 420; WAN024FKJ-3_at; Start 259; Stop 283
tacgccattcttatggtttgacaga

SEQ ID NO: 209993 - DNA, 25 bp, Artificial
  probe
  misc_feature (1)..(25): SEQ ID NO: 420; WAN024FKJ-3_at; Start 127; Stop 151
tagccgatgaaacacgcattcctca

SEQ ID NO: 209994 - DNA, 25 bp, Artificial
  probe
  misc_feature (1)..(25): SEQ ID NO: 420; WAN024FKJ-3_at; Start 204; Stop 228
gaaagtcttattacttatccaacga

SEQ ID NO: 209995 - DNA, 25 bp, Artificial
  probe
  misc_feature (1)..(25): SEQ ID NO: 420; WAN024FKJ-3_at; Start 166; Stop 190
tcaaggtcttctcttttgcggaaag

SEQ ID NO: 209996 - DNA, 25 bp, Artificial
  probe
  misc_feature (1)..(25): SEQ ID NO: 420; WAN024FKJ-3_at; Start 219; Stop 243
tatccaacgactcaaactcatgctg

SEQ ID NO: 209997 - DNA, 25 bp, Artificial
  probe
  misc_feature (1)..(25): SEQ ID NO: 420; WAN024FKJ-3_at; Start 326; Stop 350
tttgattgcagatttgcgccaagcc

SEQ ID NO: 209998 - DNA, 25 bp, Artificial
  probe
  misc_feature (1)..(25): SEQ ID NO: 420; WAN024FKJ-3_at; Start 39; Stop 63
gcccaagaagtggttgcctttttga

SEQ ID NO: 209999 - DNA, 25 bp, Artificial
  probe
  misc_feature (1)..(25): SEQ ID NO: 420; WAN024FKJ-3_at; Start 84; Stop 108
gaagttctctacactggtcgtggag

SEQ ID NO: 210000 - DNA, 25 bp, Artificial
  probe
  misc_feature (1)..(25): SEQ ID NO: 420; WAN024FKJ-3_at; Start 120; Stop 144
tttaaagtagccgatgaaacacgca

SEQ ID NO: 210001 - DNA, 25 bp, Artificial
  probe
  misc_feature (1)..(25): SEQ ID NO: 420; WAN024FKJ-3_at; Start 69; Stop 93
tctccagcagttaaggaagttctct

SEQ ID NO: 210002 - DNA, 25 bp, Artificial
  probe
  misc_feature (1)..(25): SEQ ID NO: 420; WAN024FKJ-3_at; Start 25; Stop 49
gctcaacagctaacgcccaagaagt

SEQ ID NO: 210003 - DNA, 25 bp, Artificial
  probe
  misc_feature (1)..(25): SEQ ID NO: 420; WAN024FKJ-3_at; Start 135; Stop 159
gaaacacgcattcctcatattttga

SEQ ID NO: 210004 - DNA, 25 bp, Artificial
  probe
  misc_feature (1)..(25): SEQ ID NO: 420; WAN024FKJ-3_at; Start 61; Stop 85
tgaaggattctccagcagttaagga

SEQ ID NO: 210005 - DNA, 25 bp, Artificial
  probe
  misc_feature (1)..(25): SEQ ID NO: 420; WAN024FKJ-3_at; Start 80; Stop 104
taaggaagttctctacactggtcgt

SEQ ID NO: 210006 - DNA, 25 bp, Artificial
  probe
  misc_feature (1)..(25): SEQ ID NO: 420; WAN024FKJ-3_at; Start 199; Stop 223
gagtggaaagtcttattacttatcc

SEQ ID NO: 210007 - DNA, 25 bp, Artificial
  probe
  misc_feature (1)..(25): SEQ ID NO: 420; WAN024FKJ-3_at; Start 231; Stop 255
caaactcatgctgatattccagcag

SEQ ID NO: 210008 - DNA, 25 bp, Artificial
  probe
  misc_feature (1)..(25): SEQ ID NO: 420; WAN024FKJ-3_at; Start 95; Stop 119
cactggtcgtggaggcatgatttcc

SEQ ID NO: 210009 - DNA, 25 bp, Artificial
  probe
  misc_feature (1)..(25): SEQ ID NO: 1558; WAN024FKJ-5_at; Start 117; Stop 141
gtttggtcgatctactgggtttgac

SEQ ID NO: 210010 - DNA, 25 bp, Artificial
  probe
  misc_feature (1)..(25): SEQ ID NO: 1558; WAN024FKJ-5_at; Start 234; Stop 258
gatgtcagctattgtactggccttt

SEQ ID NO: 210011 - DNA, 25 bp, Artificial
  probe
  misc_feature (1)..(25): SEQ ID NO: 1558; WAN024FKJ-5_at; Start 123; Stop 147
tcgatctactgggtttgactatacg

SEQ ID NO: 210012 - DNA, 25 bp, Artificial
  probe
  misc_feature (1)..(25): SEQ ID NO: 1558; WAN024FKJ-5_at; Start 159; Stop 183
tccaactcgtagtaaggctgaggaa

SEQ ID NO: 210013 - DNA, 25 bp, Artificial
  probe
  misc_feature (1)..(25): SEQ ID NO: 1558; WAN024FKJ-5_at; Start 162; Stop 186
aactcgtagtaaggctgaggaagtc

SEQ ID NO: 210014 - DNA, 25 bp, Artificial
  probe
  misc_feature (1)..(25): SEQ ID NO: 1558; WAN024FKJ-5_at; Start 267; Stop 291
tccagtaggaagtaaggtcttggca

SEQ ID NO: 210015 - DNA, 25 bp, Artificial
  probe
  misc_feature (1)..(25): SEQ ID NO: 1558; WAN024FKJ-5_at; Start 269; Stop 293
cagtaggaagtaaggtcttggcagt

SEQ ID NO: 210016 - DNA, 25 bp, Artificial
  probe
  misc_feature (1)..(25): SEQ ID NO: 1558; WAN024FKJ-5_at; Start 230; Stop 254
cagggatgtcagctattgtactggc

SEQ ID NO: 210017 - DNA, 25 bp, Artificial
  probe
  misc_feature (1)..(25): SEQ ID NO: 1558; WAN024FKJ-5_at; Start 227; Stop 251
gctcagggatgtcagctattgtact

SEQ ID NO: 210018 - DNA, 25 bp, Artificial
  probe
  misc_feature (1)..(25): SEQ ID NO: 1558; WAN024FKJ-5_at; Start 316; Stop 340
tttcgctggtttaaccaagtggagc

SEQ ID NO: 210019 - DNA, 25 bp, Artificial
  probe
  misc_feature (1)..(25): SEQ ID NO: 1558; WAN024FKJ-5_at; Start 125; Stop 149
gatctactgggtttgactatacgcg

SEQ ID NO: 210020 - DNA, 25 bp, Artificial
  probe
  misc_feature (1)..(25): SEQ ID NO: 1558; WAN024FKJ-5_at; Start 168; Stop 192
tagtaaggctgaggaagtcttggcg

SEQ ID NO: 210021 - DNA, 25 bp, Artificial
  probe
  misc_feature (1)..(25): SEQ ID NO: 1558; WAN024FKJ-5_at; Start 222; Stop 246
gactagctcagggatgtcagctatt

SEQ ID NO: 210022 - DNA, 25 bp, Artificial
  probe
  misc_feature (1)..(25): SEQ ID NO: 1558; WAN024FKJ-5_at; Start 165; Stop 189
tcgtagtaaggctgaggaagtcttg

SEQ ID NO: 210023 - DNA, 25 bp, Artificial
  probe
  misc_feature (1)..(25): SEQ ID NO: 1558; WAN024FKJ-5_at; Start 284; Stop 308
tcttggcagtgcgtgatctttacgg

SEQ ID NO: 210024 - DNA, 25 bp, Artificial
  probe
  misc_feature (1)..(25): SEQ ID NO: 1558; WAN024FKJ-5_at; Start 5; Stop 29
gcaaggaattacacattaacacaat

SEQ ID NO: 210025 - DNA, 25 bp, Artificial
  probe
  misc_feature (1)..(25): SEQ ID NO: 1558; WAN024FKJ-5_at; Start 154; Stop 178
aaaaatccaactcgtagtaaggctg

SEQ ID NO: 210026 - DNA, 25 bp, Artificial
  probe
  misc_feature (1)..(25): SEQ ID NO: 1558; WAN024FKJ-5_at; Start 2; Stop 26
tgagcaaggaattacacattaacac

SEQ ID NO: 210027 - DNA, 25 bp, Artificial
  probe
  misc_feature (1)..(25): SEQ ID NO: 1558; WAN024FKJ-5_at; Start 101; Stop 125
cctatcagcatccagagtttggtcg

SEQ ID NO: 210028 - DNA, 25 bp, Artificial
  probe
  misc_feature (1)..(25): SEQ ID NO: 1558; WAN024FKJ-5_at; Start 109; Stop 133
catccagagtttggtcgatctactg

SEQ ID NO: 210029 - DNA, 25 bp, Artificial
  probe
  misc_feature (1)..(25): SEQ ID NO: 1558; WAN024FKJ-5_at; Start 157; Stop 181
aatccaactcgtagtaaggctgagg

SEQ ID NO: 210030 - DNA, 25 bp, Artificial
  probe
  misc_feature (1)..(25): SEQ ID NO: 1558; WAN024FKJ-5_at; Start 320; Stop 344
gctggtttaaccaagtggagcagga

SEQ ID NO: 210031 - DNA, 25 bp, Artificial
  probe
  misc_feature (1)..(25): SEQ ID NO: 1558; WAN024FKJ-5_at; Start 238; Stop 262
tcagctattgtactggcctttagcg

SEQ ID NO: 210032 - DNA, 25 bp, Artificial
  probe
  misc_feature (1)..(25): SEQ ID NO: 1558; WAN024FKJ-5_at; Start 264; Stop 288
ctttccagtaggaagtaaggtcttg

SEQ ID NO: 210033 - DNA, 25 bp, Artificial
  probe
  misc_feature (1)..(25): SEQ ID NO: 1558; WAN024FKJ-5_at; Start 105; Stop 129
tcagcatccagagtttggtcgatct

SEQ ID NO: 210034 - DNA, 25 bp, Artificial
  probe
  misc_feature (1)..(25): SEQ ID NO: 1558; WAN024FKJ-5_at; Start 94; Stop 118
tcaacgacctatcagcatccagagt

SEQ ID NO: 210035 - DNA, 25 bp, Artificial
  probe
  misc_feature (1)..(25): SEQ ID NO: 1558; WAN024FKJ-5_at; Start 98; Stop 122
cgacctatcagcatccagagtttgg

SEQ ID NO: 210036 - DNA, 25 bp, Artificial
  probe
  misc_feature (1)..(25): SEQ ID NO: 1558; WAN024FKJ-5_at; Start 86; Stop 110
ttcatttttcaacgacctatcagca

SEQ ID NO: 210037 - DNA, 25 bp, Artificial
  probe
  misc_feature (1)..(25): SEQ ID NO: 1558; WAN024FKJ-5_at; Start 279; Stop 303
taaggtcttggcagtgcgtgatctt

SEQ ID NO: 210038 - DNA, 25 bp, Artificial
  probe
  misc_feature (1)..(25): SEQ ID NO: 1558; WAN024FKJ-5_at; Start 91; Stop 115
ttttcaacgacctatcagcatccag

SEQ ID NO: 210039 - DNA, 25 bp, Artificial
  probe
  misc_feature (1)..(25): SEQ ID NO: 1558; WAN024FKJ-5_at; Start 218; Stop 242
tagcgactagctcagggatgtcagc

SEQ ID NO: 210040 - DNA, 25 bp, Artificial
  probe
  misc_feature (1)..(25): SEQ ID NO: 1558; WAN024FKJ-5_at; Start 113; Stop 137
cagagtttggtcgatctactgggtt

SEQ ID NO: 210041 - DNA, 25 bp, Artificial
  probe
  misc_feature (1)..(25): SEQ ID NO: 1558; WAN024FKJ-5_at; Start 325; Stop 349
tttaaccaagtggagcaggaaggtc

SEQ ID NO: 210042 - DNA, 25 bp, Artificial
  probe
  misc_feature (1)..(25): SEQ ID NO: 1558; WAN024FKJ-5_at; Start 276; Stop 300
aagtaaggtcttggcagtgcgtgat

SEQ ID NO: 210043 - DNA, 25 bp, Artificial
  probe
  misc_feature (1)..(25): SEQ ID NO: 3678; WAN024FKJ-M_at; Start 160; Stop 184
tatagccctatctaccaacgtccga

SEQ ID NO: 210044 - DNA, 25 bp, Artificial
  probe
  misc_feature (1)..(25): SEQ ID NO: 3678; WAN024FKJ-M_at; Start 145; Stop 169
gtggacaataccttctatagcccta

SEQ ID NO: 210045 - DNA, 25 bp, Artificial
  probe
  misc_feature (1)..(25): SEQ ID NO: 3678; WAN024FKJ-M_at; Start 343; Stop 367
agctaccagttgcttcgtggtctca

SEQ ID NO: 210046 - DNA, 25 bp, Artificial
  probe
  misc_feature (1)..(25): SEQ ID NO: 3678; WAN024FKJ-M_at; Start 230; Stop 254
tagcaggccacaatgatgtcttggc

SEQ ID NO: 210047 - DNA, 25 bp, Artificial
  probe
  misc_feature (1)..(25): SEQ ID NO: 3678; WAN024FKJ-M_at; Start 141; Stop 165
ggtggtggacaataccttctatagc

SEQ ID NO: 210048 - DNA, 25 bp, Artificial
  probe
  misc_feature (1)..(25): SEQ ID NO: 3678; WAN024FKJ-M_at; Start 331; Stop 355
tctccatttgacagctaccagttgc

SEQ ID NO: 210049 - DNA, 25 bp, Artificial
  probe
  misc_feature (1)..(25): SEQ ID NO: 3678; WAN024FKJ-M_at; Start 180; Stop 204
tccgattgaagatggagcagatatc

SEQ ID NO: 210050 - DNA, 25 bp, Artificial
  probe
  misc_feature (1)..(25): SEQ ID NO: 3678; WAN024FKJ-M_at; Start 120; Stop 144
tcatgctaagggtgccaaagtggtg

SEQ ID NO: 210051 - DNA, 25 bp, Artificial
  probe
  misc_feature (1)..(25): SEQ ID NO: 3678; WAN024FKJ-M_at; Start 201; Stop 225
tatcgttctccattcagcaaccaag

SEQ ID NO: 210052 - DNA, 25 bp, Artificial
  probe
  misc_feature (1)..(25): SEQ ID NO: 3678; WAN024FKJ-M_at; Start 338; Stop 362
ttgacagctaccagttgcttcgtgg

SEQ ID NO: 210053 - DNA, 25 bp, Artificial
  probe
  misc_feature (1)..(25): SEQ ID NO: 3678; WAN024FKJ-M_at; Start 284; Stop 308
tatacgagaagcttttttacaatct

SEQ ID NO: 210054 - DNA, 25 bp, Artificial
  probe
  misc_feature (1)..(25): SEQ ID NO: 3678; WAN024FKJ-M_at; Start 218; Stop 242
caaccaagtatctagcaggccacaa

SEQ ID NO: 210055 - DNA, 25 bp, Artificial
  probe
  misc_feature (1)..(25): SEQ ID NO: 3678; WAN024FKJ-M_at; Start 273; Stop 297
tagtttagaactatacgagaagctt

SEQ ID NO: 210056 - DNA, 25 bp, Artificial
  probe
  misc_feature (1)..(25): SEQ ID NO: 3678; WAN024FKJ-M_at; Start 132; Stop 156
tgccaaagtggtggtggacaatacc

SEQ ID NO: 210057 - DNA, 25 bp, Artificial
  probe
  misc_feature (1)..(25): SEQ ID NO: 3678; WAN024FKJ-M_at; Start 214; Stop 238
tcagcaaccaagtatctagcaggcc

SEQ ID NO: 210058 - DNA, 25 bp, Artificial
  probe
  misc_feature (1)..(25): SEQ ID NO: 3678; WAN024FKJ-M_at; Start 66; Stop 90
cccaaccaatcccttgatgttggaa

SEQ ID NO: 210059 - DNA, 25 bp, Artificial
  probe
  misc_feature (1)..(25): SEQ ID NO: 3678; WAN024FKJ-M_at; Start 21; Stop 45
gattgccgagttagaaaaggatgtg

SEQ ID NO: 210060 - DNA, 25 bp, Artificial
  probe
  misc_feature (1)..(25): SEQ ID NO: 3678; WAN024FKJ-M_at; Start 13; Stop 37
gaagagttgattgccgagttagaaa

SEQ ID NO: 210061 - DNA, 25 bp, Artificial
  probe
  misc_feature (1)..(25): SEQ ID NO: 3678; WAN024FKJ-M_at; Start 110; Stop 134
caaaattggctcatgctaagggtgc

SEQ ID NO: 210062 - DNA, 25 bp, Artificial
  probe
  misc_feature (1)..(25): SEQ ID NO: 3678; WAN024FKJ-M_at; Start 87; Stop 111
ggaatttgatatcgaaaaactagca

SEQ ID NO: 210063 - DNA, 25 bp, Artificial
  probe
  misc_feature (1)..(25): SEQ ID NO: 3678; WAN024FKJ-M_at; Start 320; Stop 344
gggcagtcttgtctccatttgacag

SEQ ID NO: 210064 - DNA, 25 bp, Artificial
  probe
  misc_feature (1)..(25): SEQ ID NO: 3678; WAN024FKJ-M_at; Start 261; Stop 285
ggttgtgaccaatagtttagaacta

SEQ ID NO: 210065 - DNA, 25 bp, Artificial
  probe
  misc_feature (1)..(25): SEQ ID NO: 3678; WAN024FKJ-M_at; Start 238; Stop 262
cacaatgatgtcttggctggagtgg

SEQ ID NO: 210066 - DNA, 25 bp, Artificial
  probe
  misc_feature (1)..(25): SEQ ID NO: 3678; WAN024FKJ-M_at; Start 51; Stop 75
tctctatatcgaaaccccaaccaat

SEQ ID NO: 210067 - DNA, 25 bp, Artificial
  probe
  misc_feature (1)..(25): SEQ ID NO: 3678; WAN024FKJ-M_at; Start 174; Stop 198
ccaacgtccgattgaagatggagca

SEQ ID NO: 210068 - DNA, 25 bp, Artificial
  probe
  misc_feature (1)..(25): SEQ ID NO: 3678; WAN024FKJ-M_at; Start 194; Stop 218
gagcagatatcgttctccattcagc

SEQ ID NO: 210069 - DNA, 25 bp, Artificial
  probe
  misc_feature (1)..(25): SEQ ID NO: 3678; WAN024FKJ-M_at; Start 248; Stop 272
tcttggctggagtggttgtgaccaa

SEQ ID NO: 210070 - DNA, 25 bp, Artificial
  probe
  misc_feature (1)..(25): SEQ ID NO: 3678; WAN024FKJ-M_at; Start 102; Stop 126
aaaactagcaaaattggctcatgct

SEQ ID NO: 210071 - DNA, 25 bp, Artificial
  probe
  misc_feature (1)..(25): SEQ ID NO: 3678; WAN024FKJ-M_at; Start 36; Stop 60
aaaggatgtggatgttctctatatc

SEQ ID NO: 210072 - DNA, 25 bp, Artificial
  probe
  misc_feature (1)..(25): SEQ ID NO: 3678; WAN024FKJ-M_at; Start 226; Stop 250
tatctagcaggccacaatgatgtct

SEQ ID NO: 210073 - DNA, 25 bp, Artificial
  probe
  misc_feature (1)..(25): SEQ ID NO: 3678; WAN024FKJ-M_at; Start 8; Stop 32
cagaagaagagttgattgccgagtt

SEQ ID NO: 210074 - DNA, 25 bp, Artificial
  probe
  misc_feature (1)..(25): SEQ ID NO: 3678; WAN024FKJ-M_at; Start 187; Stop 211
gaagatggagcagatatcgttctcc

SEQ ID NO: 210075 - DNA, 25 bp, Artificial
  probe
  misc_feature (1)..(25): SEQ ID NO: 3678; WAN024FKJ-M_at; Start 76; Stop 100
cccttgatgttggaatttgatatcg

SEQ ID NO: 210076 - DNA, 25 bp, Artificial
  probe
  misc_feature (1)..(25): SEQ ID NO: 3678; WAN024FKJ-M_at; Start 45; Stop 69
ggatgttctctatatcgaaacccca

SEQ ID NO: 210077 - DNA, 25 bp, Artificial
  probe
  misc_feature (1)..(25): SEQ ID NO: 1782; WAN024FKK_at; Start 479; Stop 503
tagagcatcctctaataacttcgat

SEQ ID NO: 210078 - DNA, 25 bp, Artificial
  probe
  misc_feature (1)..(25): SEQ ID NO: 1782; WAN024FKK_at; Start 853; Stop 877
actggattagatgtaattttcgatc

SEQ ID NO: 210079 - DNA, 25 bp, Artificial
  probe
  misc_feature (1)..(25): SEQ ID NO: 1782; WAN024FKK_at; Start 901; Stop 925
gggaatggatatgactttttaccta

SEQ ID NO: 210080 - DNA, 25 bp, Artificial
  probe
  misc_feature (1)..(25): SEQ ID NO: 1782; WAN024FKK_at; Start 430; Stop 454
gatatgagttttaaagtcggaacac

SEQ ID NO: 210081 - DNA, 25 bp, Artificial
  probe
  misc_feature (1)..(25): SEQ ID NO: 1782; WAN024FKK_at; Start 372; Stop 396
catttcattaggacaatttaatccg

SEQ ID NO: 210082 - DNA, 25 bp, Artificial
  probe
  misc_feature (1)..(25): SEQ ID NO: 1782; WAN024FKK_at; Start 752; Stop 776
gggtgcaaggtgattatgtattaaa

SEQ ID NO: 210083 - DNA, 25 bp, Artificial
  probe
  misc_feature (1)..(25): SEQ ID NO: 1782; WAN024FKK_at; Start 467; Stop 491
tgagatcaagtttagagcatcctct

SEQ ID NO: 210084 - DNA, 25 bp, Artificial
  probe
  misc_feature (1)..(25): SEQ ID NO: 1782; WAN024FKK_at; Start 789; Stop 813
taaattttctgctttacaagatgca

SEQ ID NO: 210085 - DNA, 25 bp, Artificial
  probe
  misc_feature (1)..(25): SEQ ID NO: 1782; WAN024FKK_at; Start 999; Stop 1023
tcttgccgactatggaatgattggt

SEQ ID NO: 210086 - DNA, 25 bp, Artificial
  probe
  misc_feature (1)..(25): SEQ ID NO: 1782; WAN024FKK_at; Start 398; Stop 422
ttaaaacattttatgcaccaagagt

SEQ ID NO: 210087 - DNA, 25 bp, Artificial
  probe
  misc_feature (1)..(25): SEQ ID NO: 1782; WAN024FKK_at; Start 452; Stop 476
cacctttatattttttgagatcaag

SEQ ID NO: 210088 - DNA, 25 bp, Artificial
  probe
  misc_feature (1)..(25): SEQ ID NO: 1782; WAN024FKK_at; Start 835; Stop 859
cgtgtaattaatgctaaaactggat

SEQ ID NO: 210089 - DNA, 25 bp, Artificial
  probe
  misc_feature (1)..(25): SEQ ID NO: 1782; WAN024FKK_at; Start 984; Stop 1008
tacatatatttcatttcttgccgac

SEQ ID NO: 210090 - DNA, 25 bp, Artificial
  probe
  misc_feature (1)..(25): SEQ ID NO: 1782; WAN024FKK_at; Start 1165; Stop 1189
tttgatatatatgcttggtacacgc

SEQ ID NO: 210091 - DNA, 25 bp, Artificial
  probe
  misc_feature (1)..(25): SEQ ID NO: 1782; WAN024FKK_at; Start 606; Stop 630
gagaactgcgtatatattggtatcg

SEQ ID NO: 210092 - DNA, 25 bp, Artificial
  probe
  misc_feature (1)..(25): SEQ ID NO: 1782; WAN024FKK_at; Start 1017; Stop 1041
gattggtctgttcttagtattgtta

SEQ ID NO: 210093 - DNA, 25 bp, Artificial
  probe
  misc_feature (1)..(25): SEQ ID NO: 1782; WAN024FKK_at; Start 958; Stop 982
cggaatggtttttatgtgattgaca

SEQ ID NO: 210094 - DNA, 25 bp, Artificial
  probe
  misc_feature (1)..(25): SEQ ID NO: 1782; WAN024FKK_at; Start 1216; Stop 1240
tcagtagtgacttcttattgtaaat

SEQ ID NO: 210095 - DNA, 25 bp, Artificial
  probe
  misc_feature (1)..(25): SEQ ID NO: 1782; WAN024FKK_at; Start 736; Stop 760
gctttatcctttataagggtgcaag

SEQ ID NO: 210096 - DNA, 25 bp, Artificial
  probe
  misc_feature (1)..(25): SEQ ID NO: 1782; WAN024FKK_at; Start 350; Stop 374
ccttttgtatgggattagaattcat

SEQ ID NO: 210097 - DNA, 25 bp, Artificial
  probe
  misc_feature (1)..(25): SEQ ID NO: 1782; WAN024FKK_at; Start 1038; Stop 1062
gttatatattataaatgcgatccga

SEQ ID NO: 210098 - DNA, 25 bp, Artificial
  probe
  misc_feature (1)..(25): SEQ ID NO: 1782; WAN024FKK_at; Start 816; Stop 840
tagtttctcgctaaataatcgtgta

SEQ ID NO: 210099 - DNA, 25 bp, Artificial
  probe
  misc_feature (1)..(25): SEQ ID NO: 1782; WAN024FKK_at; Start 60; Stop 84
tctgggtgcttggtataagaatagc

SEQ ID NO: 210100 - DNA, 25 bp, Artificial
  probe
  misc_feature (1)..(25): SEQ ID NO: 1782; WAN024FKK_at; Start 300; Stop 324
aaagtttgaatatttgctctcagtc

SEQ ID NO: 210101 - DNA, 25 bp, Artificial
  probe
  misc_feature (1)..(25): SEQ ID NO: 1782; WAN024FKK_at; Start 942; Stop 966
caatgtgtatgtaattcggaatggt

SEQ ID NO: 210102 - DNA, 25 bp, Artificial
  probe
  misc_feature (1)..(25): SEQ ID NO: 1782; WAN024FKK_at; Start 802; Stop 826
ttacaagatgcagatagtttctcgc

SEQ ID NO: 210103 - DNA, 25 bp, Artificial
  probe
  misc_feature (1)..(25): SEQ ID NO: 1782; WAN024FKK_at; Start 218; Stop 242
taccatcgtttatgaatagagtatc

SEQ ID NO: 210104 - DNA, 25 bp, Artificial
  probe
  misc_feature (1)..(25): SEQ ID NO: 1782; WAN024FKK_at; Start 314; Stop 338
tgctctcagtctttctacaatttat

SEQ ID NO: 210105 - DNA, 25 bp, Artificial
  probe
  misc_feature (1)..(25): SEQ ID NO: 1782; WAN024FKK_at; Start 339; Stop 363
tgtactactaaccttttgtatggga

SEQ ID NO: 210106 - DNA, 25 bp, Artificial
  probe
  misc_feature (1)..(25): SEQ ID NO: 1782; WAN024FKK_at; Start 413; Stop 437
caccaagagttcttcttgatatgag

SEQ ID NO: 210107 - DNA, 25 bp, Artificial
  probe
  misc_feature (1)..(25): SEQ ID NO: 1782; WAN024FKK_at; Start 1053; Stop 1077
tgcgatccgaaaaagtatgactaat

SEQ ID NO: 210108 - DNA, 25 bp, Artificial
  probe
  misc_feature (1)..(25): SEQ ID NO: 1782; WAN024FKK_at; Start 189; Stop 213
gataactacagtgttagtaagctta

SEQ ID NO: 210109 - DNA, 25 bp, Artificial
  probe
  misc_feature (1)..(25): SEQ ID NO: 1782; WAN024FKK_at; Start 535; Stop 559
cttttagaaaagaaatggttgagat

SEQ ID NO: 210110 - DNA, 25 bp, Artificial
  probe
  misc_feature (1)..(25): SEQ ID NO: 1782; WAN024FKK_at; Start 626; Stop 650
tatcgattggagttgtatgttttgc

SEQ ID NO: 210111 - DNA, 25 bp, Artificial
  probe
  misc_feature (1)..(25): SEQ ID NO: 6409; WAN024FKL_at; Start 119; Stop 143
ctgtgaggcataagggctttatacc

SEQ ID NO: 210112 - DNA, 25 bp, Artificial
  probe
  misc_feature (1)..(25): SEQ ID NO: 6409; WAN024FKL_at; Start 176; Stop 200
gagaggattatgaacgatttaaaca

SEQ ID NO: 210113 - DNA, 25 bp, Artificial
  probe
  misc_feature (1)..(25): SEQ ID NO: 6409; WAN024FKL_at; Start 76; Stop 100
aatgacctgacatattatgccttgg

SEQ ID NO: 210114 - DNA, 25 bp, Artificial
  probe
  misc_feature (1)..(25): SEQ ID NO: 6409; WAN024FKL_at; Start 796; Stop 820
caatatagagtcataagtttaggag

SEQ ID NO: 210115 - DNA, 25 bp, Artificial
  probe
  misc_feature (1)..(25): SEQ ID NO: 6409; WAN024FKL_at; Start 359; Stop 383
caatagatggcttacccagcaaagg

SEQ ID NO: 210116 - DNA, 25 bp, Artificial
  probe
  misc_feature (1)..(25): SEQ ID NO: 6409; WAN024FKL_at; Start 749; Stop 773
gtgagaattatataacaccacctcc

SEQ ID NO: 210117 - DNA, 25 bp, Artificial
  probe
  misc_feature (1)..(25): SEQ ID NO: 6409; WAN024FKL_at; Start 410; Stop 434
ggtatttatatagacgaatgatggt

SEQ ID NO: 210118 - DNA, 25 bp, Artificial
  probe
  misc_feature (1)..(25): SEQ ID NO: 6409; WAN024FKL_at; Start 424; Stop 448
cgaatgatggttcaattatctcagt

SEQ ID NO: 210119 - DNA, 25 bp, Artificial
  probe
  misc_feature (1)..(25): SEQ ID NO: 6409; WAN024FKL_at; Start 204; Stop 228
tgctactgaacaaattaatggtaag

SEQ ID NO: 210120 - DNA, 25 bp, Artificial
  probe
  misc_feature (1)..(25): SEQ ID NO: 6409; WAN024FKL_at; Start 589; Stop 613
tattcagtgatggagggttatgcag

SEQ ID NO: 210121 - DNA, 25 bp, Artificial
  probe
  misc_feature (1)..(25): SEQ ID NO: 6409; WAN024FKL_at; Start 3; Stop 27
gaaatcagagatagaaattattcag

SEQ ID NO: 210122 - DNA, 25 bp, Artificial
  probe
  misc_feature (1)..(25): SEQ ID NO: 6409; WAN024FKL_at; Start 466; Stop 490
cagaataaaactgatagaccttggc

SEQ ID NO: 210123 - DNA, 25 bp, Artificial
  probe
  misc_feature (1)..(25): SEQ ID NO: 6409; WAN024FKL_at; Start 104; Stop 128
gaaccttgttaggtgctgtgaggca

SEQ ID NO: 210124 - DNA, 25 bp, Artificial
  probe
  misc_feature (1)..(25): SEQ ID NO: 6409; WAN024FKL_at; Start 540; Stop 564
tctatcatttgaaaaacaacagtac

SEQ ID NO: 210125 - DNA, 25 bp, Artificial
  probe
  misc_feature (1)..(25): SEQ ID NO: 6409; WAN024FKL_at; Start 781; Stop 805
cacagagttcctcatcaatatagag

SEQ ID NO: 210126 - DNA, 25 bp, Artificial
  probe
  misc_feature (1)..(25): SEQ ID NO: 6409; WAN024FKL_at; Start 21; Stop 45
tattcagagtaaaattatagagttg

SEQ ID NO: 210127 - DNA, 25 bp, Artificial
  probe
  misc_feature (1)..(25): SEQ ID NO: 6409; WAN024FKL_at; Start 84; Stop 108
gacatattatgccttgggtggaacc

SEQ ID NO: 210128 - DNA, 25 bp, Artificial
  probe
  misc_feature (1)..(25): SEQ ID NO: 6409; WAN024FKL_at; Start 263; Stop 287
gaaaagcattttctgtgattcgaga

SEQ ID NO: 210129 - DNA, 25 bp, Artificial
  probe
  misc_feature (1)..(25): SEQ ID NO: 6409; WAN024FKL_at; Start 286; Stop 310
gatacttcaacaagaatagtgatga

SEQ ID NO: 210130 - DNA, 25 bp, Artificial
  probe
  misc_feature (1)..(25): SEQ ID NO: 6409; WAN024FKL_at; Start 308; Stop 332
tgaattatagtaatgtcgaacaaga

SEQ ID NO: 210131 - DNA, 25 bp, Artificial
  probe
  misc_feature (1)..(25): SEQ ID NO: 6409; WAN024FKL_at; Start 345; Stop 369
gattgatatatttccaatagatggc

SEQ ID NO: 210132 - DNA, 25 bp, Artificial
  probe
  misc_feature (1)..(25): SEQ ID NO: 6409; WAN024FKL_at; Start 187; Stop 211
gaacgatttaaacaaattgctactg

SEQ ID NO: 210133 - DNA, 25 bp, Artificial
  probe
  misc_feature (1)..(25): SEQ ID NO: 6409; WAN024FKL_at; Start 247; Stop 271
gatacaccaggatatagaaaagcat

SEQ ID NO: 210134 - DNA, 25 bp, Artificial
  probe
  misc_feature (1)..(25): SEQ ID NO: 6409; WAN024FKL_at; Start 61; Stop 85
gatatctgtgaaaataatgacctga

SEQ ID NO: 210135 - DNA, 25 bp, Artificial
  probe
  misc_feature (1)..(25): SEQ ID NO: 6409; WAN024FKL_at; Start 368; Stop 392
gcttacccagcaaaggtataaagaa

SEQ ID NO: 210136 - DNA, 25 bp, Artificial
  probe
  misc_feature (1)..(25): SEQ ID NO: 6409; WAN024FKL_at; Start 321; Stop 345
tgtcgaacaagaagaaagtttgtgg

SEQ ID NO: 210137 - DNA, 25 bp, Artificial
  probe
  misc_feature (1)..(25): SEQ ID NO: 6409; WAN024FKL_at; Start 131; Stop 155
agggctttataccttgggatgatga

SEQ ID NO: 210138 - DNA, 25 bp, Artificial
  probe
  misc_feature (1)..(25): SEQ ID NO: 6409; WAN024FKL_at; Start 150; Stop 174
tgatgatatcgatttgggtatgcca

SEQ ID NO: 210139 - DNA, 25 bp, Artificial
  probe
  misc_feature (1)..(25): SEQ ID NO: 6409; WAN024FKL_at; Start 809; Stop 833
taagtttaggagagaatataggtga

SEQ ID NO: 210140 - DNA, 25 bp, Artificial
  probe
  misc_feature (1)..(25): SEQ ID NO: 6409; WAN024FKL_at; Start 761; Stop 785
taacaccacctccaattgaacacag

SEQ ID NO: 210141 - DNA, 25 bp, Artificial
  probe
  misc_feature (1)..(25): SEQ ID NO: 6409; WAN024FKL_at; Start 480; Stop 504
tagaccttggcatgaaaaattgata

SEQ ID NO: 210142 - DNA, 25 bp, Artificial
  probe
  misc_feature (1)..(25): SEQ ID NO: 6409; WAN024FKL_at; Start 232; Stop 256
cagtttttgagtgaggatacaccag

SEQ ID NO: 210143 - DNA, 25 bp, Artificial
  probe
  misc_feature (1)..(25): SEQ ID NO: 6409; WAN024FKL_at; Start 578; Stop 602
cgataaagaaatattcagtgatgga

SEQ ID NO: 210144 - DNA, 25 bp, Artificial
  probe
  misc_feature (1)..(25): SEQ ID NO: 6409; WAN024FKL_at; Start 91; Stop 115
tatgccttgggtggaaccttgttag

SEQ ID NO: 210145 - DNA, 25 bp, Artificial
  probe
  misc_feature (1)..(25): SEQ ID NO: 6984; WAN024FKM_at; Start 230; Stop 254
tatttttgagtgaagatactccagg

SEQ ID NO: 210146 - DNA, 25 bp, Artificial
  probe
  misc_feature (1)..(25): SEQ ID NO: 6984; WAN024FKM_at; Start 745; Stop 769
ggtgataattatatgacattacctc

SEQ ID NO: 210147 - DNA, 25 bp, Artificial
  probe
  misc_feature (1)..(25): SEQ ID NO: 6984; WAN024FKM_at; Start 468; Stop 492
taaaaccaacagaccttggcaagag

SEQ ID NO: 210148 - DNA, 25 bp, Artificial
  probe
  misc_feature (1)..(25): SEQ ID NO: 6984; WAN024FKM_at; Start 455; Stop 479
tagtgaatcaaaataaaaccaacag

SEQ ID NO: 210149 - DNA, 25 bp, Artificial
  probe
  misc_feature (1)..(25): SEQ ID NO: 6984; WAN024FKM_at; Start 350; Stop 374
tatttcctattgatggtctacctga

SEQ ID NO: 210150 - DNA, 25 bp, Artificial
  probe
  misc_feature (1)..(25): SEQ ID NO: 6984; WAN024FKM_at; Start 567; Stop 591
tctagctactataaagaaatacagt

SEQ ID NO: 210151 - DNA, 25 bp, Artificial
  probe
  misc_feature (1)..(25): SEQ ID NO: 6984; WAN024FKM_at; Start 419; Stop 443
gaagaatgatggtacagttatctca

SEQ ID NO: 210152 - DNA, 25 bp, Artificial
  probe
  misc_feature (1)..(25): SEQ ID NO: 6984; WAN024FKM_at; Start 775; Stop 799
gaacaaagacttccccatcaatatg

SEQ ID NO: 210153 - DNA, 25 bp, Artificial
  probe
  misc_feature (1)..(25): SEQ ID NO: 6984; WAN024FKM_at; Start 547; Stop 571
gaaaaagcgcaacaaaagtatctag

SEQ ID NO: 210154 - DNA, 25 bp, Artificial
  probe
  misc_feature (1)..(25): SEQ ID NO: 6984; WAN024FKM_at; Start 47; Stop 71
aaatttttatcgaaacatgcgaaga

SEQ ID NO: 210155 - DNA, 25 bp, Artificial
  probe
  misc_feature (1)..(25): SEQ ID NO: 6984; WAN024FKM_at; Start 481; Stop 505
ccttggcaagagaaagtaataatta

SEQ ID NO: 210156 - DNA, 25 bp, Artificial
  probe
  misc_feature (1)..(25): SEQ ID NO: 6984; WAN024FKM_at; Start 123; Stop 147
gcatggtggattcattccttgggat

SEQ ID NO: 210157 - DNA, 25 bp, Artificial
  probe
  misc_feature (1)..(25): SEQ ID NO: 6984; WAN024FKM_at; Start 553; Stop 577
gcgcaacaaaagtatctagctacta

SEQ ID NO: 210158 - DNA, 25 bp, Artificial
  probe
  misc_feature (1)..(25): SEQ ID NO: 6984; WAN024FKM_at; Start 759; Stop 783
gacattacctccaattgaacaaaga

SEQ ID NO: 210159 - DNA, 25 bp, Artificial
  probe
  misc_feature (1)..(25): SEQ ID NO: 6984; WAN024FKM_at; Start 371; Stop 395
ctgaaaaaggtgtgaagagaaaact

SEQ ID NO: 210160 - DNA, 25 bp, Artificial
  probe
  misc_feature (1)..(25): SEQ ID NO: 6984; WAN024FKM_at; Start 384; Stop 408
gaagagaaaactacacgagaaacag

SEQ ID NO: 210161 - DNA, 25 bp, Artificial
  probe
  misc_feature (1)..(25): SEQ ID NO: 6984; WAN024FKM_at; Start 786; Stop 810
tccccatcaatatgaaattgttagt

SEQ ID NO: 210162 - DNA, 25 bp, Artificial
  probe
  misc_feature (1)..(25): SEQ ID NO: 6984; WAN024FKM_at; Start 429; Stop 453
ggtacagttatctcaattcaattca

SEQ ID NO: 210163 - DNA, 25 bp, Artificial
  probe
  misc_feature (1)..(25): SEQ ID NO: 6984; WAN024FKM_at; Start 78; Stop 102
cttgacgtattatgcactaggtgga

SEQ ID NO: 210164 - DNA, 25 bp, Artificial
  probe
  misc_feature (1)..(25): SEQ ID NO: 6984; WAN024FKM_at; Start 243; Stop 267
agatactccaggttataaaaaagct

SEQ ID NO: 210165 - DNA, 25 bp, Artificial
  probe
  misc_feature (1)..(25): SEQ ID NO: 6984; WAN024FKM_at; Start 155; Stop 179
tagacattggtatgcccagagaaga

SEQ ID NO: 210166 - DNA, 25 bp, Artificial
  probe
  misc_feature (1)..(25): SEQ ID NO: 6984; WAN024FKM_at; Start 361; Stop 385
gatggtctacctgaaaaaggtgtga

SEQ ID NO: 210167 - DNA, 25 bp, Artificial
  probe
  misc_feature (1)..(25): SEQ ID NO: 6984; WAN024FKM_at; Start 281; Stop 305
gagatacttcaacaaagattgttat

SEQ ID NO: 210168 - DNA, 25 bp, Artificial
  probe
  misc_feature (1)..(25): SEQ ID NO: 6984; WAN024FKM_at; Start 536; Stop 560
tactgtcttttgaaaaagcgcaaca

SEQ ID NO: 210169 - DNA, 25 bp, Artificial
  probe
  misc_feature (1)..(25): SEQ ID NO: 6984; WAN024FKM_at; Start 586; Stop 610
tacagtataacagagggttatgcag

SEQ ID NO: 210170 - DNA, 25 bp, Artificial
  probe
  misc_feature (1)..(25): SEQ ID NO: 6984; WAN024FKM_at; Start 148; Stop 172
gatgatatagacattggtatgccca

SEQ ID NO: 210171 - DNA, 25 bp, Artificial
  probe
  misc_feature (1)..(25): SEQ ID NO: 6984; WAN024FKM_at; Start 165; Stop 189
tatgcccagagaagattatgagaaa

SEQ ID NO: 210172 - DNA, 25 bp, Artificial
  probe
  misc_feature (1)..(25): SEQ ID NO: 6984; WAN024FKM_at; Start 116; Stop 140
ccgttaggcatggtggattcattcc

SEQ ID NO: 210173 - DNA, 25 bp, Artificial
  probe
  misc_feature (1)..(25): SEQ ID NO: 6984; WAN024FKM_at; Start 62; Stop 86
catgcgaagaaaataacttgacgta

SEQ ID NO: 210174 - DNA, 25 bp, Artificial
  probe
  misc_feature (1)..(25): SEQ ID NO: 6984; WAN024FKM_at; Start 411; Stop 435
cctatttagaagaatgatggtacag

SEQ ID NO: 210175 - DNA, 25 bp, Artificial
  probe
  misc_feature (1)..(25): SEQ ID NO: 6984; WAN024FKM_at; Start 399; Stop 423
cgagaaacagtacctatttagaaga

SEQ ID NO: 210176 - DNA, 25 bp, Artificial
  probe
  misc_feature (1)..(25): SEQ ID NO: 6984; WAN024FKM_at; Start 101; Stop 125
gaacattattaggagccgttaggca

SEQ ID NO: 210177 - DNA, 25 bp, Artificial
  probe
  misc_feature (1)..(25): SEQ ID NO: 6984; WAN024FKM_at; Start 93; Stop 117
actaggtggaacattattaggagcc

SEQ ID NO: 210178 - DNA, 25 bp, Artificial
  probe
  misc_feature (1)..(25): SEQ ID NO: 6984; WAN024FKM_at; Start 312; Stop 336
tagtaatatagagcaagaggagagt

SEQ ID NO: 210179 - DNA, 25 bp, Artificial
  probe
  misc_feature (1)..(25): SEQ ID NO: 2566; WAN024FKN_at; Start 291; Stop 315
caaaggttggaatgtggaattgccc

SEQ ID NO: 210180 - DNA, 25 bp, Artificial
  probe
  misc_feature (1)..(25): SEQ ID NO: 2566; WAN024FKN_at; Start 245; Stop 269
taaagaagaccaataacggctgtcg

SEQ ID NO: 210181 - DNA, 25 bp, Artificial
  probe
  misc_feature (1)..(25): SEQ ID NO: 2566; WAN024FKN_at; Start 169; Stop 193
ctcagtgaaacgacgtttaacaccg

SEQ ID NO: 210182 - DNA, 25 bp, Artificial
  probe
  misc_feature (1)..(25): SEQ ID NO: 2566; WAN024FKN_at; Start 10; Stop 34
gtcgtccaacaaggcaatggttctt

SEQ ID NO: 210183 - DNA, 25 bp, Artificial
  probe
  misc_feature (1)..(25): SEQ ID NO: 2566; WAN024FKN_at; Start 208; Stop 232
gtgctcacgcaccaagttcaaatca

SEQ ID NO: 210184 - DNA, 25 bp, Artificial
  probe
  misc_feature (1)..(25): SEQ ID NO: 2566; WAN024FKN_at; Start 252; Stop 276
gaccaataacggctgtcgcattcat

SEQ ID NO: 210185 - DNA, 25 bp, Artificial
  probe
  misc_feature (1)..(25): SEQ ID NO: 2566; WAN024FKN_at; Start 199; Stop 223
tgttttcaagtgctcacgcaccaag

SEQ ID NO: 210186 - DNA, 25 bp, Artificial
  probe
  misc_feature (1)..(25): SEQ ID NO: 2566; WAN024FKN_at; Start 73; Stop 97
gcttgggtatttctgacgagccgca

SEQ ID NO: 210187 - DNA, 25 bp, Artificial
  probe
  misc_feature (1)..(25): SEQ ID NO: 2566; WAN024FKN_at; Start 258; Stop 282
taacggctgtcgcattcatgatatt

SEQ ID NO: 210188 - DNA, 25 bp, Artificial
  probe
  misc_feature (1)..(25): SEQ ID NO: 2566; WAN024FKN_at; Start 36; Stop 60
taaaggtatgcggttgaaagactgc

SEQ ID NO: 210189 - DNA, 25 bp, Artificial
  probe
  misc_feature (1)..(25): SEQ ID NO: 2566; WAN024FKN_at; Start 159; Stop 183
tgacaattttctcagtgaaacgacg

SEQ ID NO: 210190 - DNA, 25 bp, Artificial
  probe
  misc_feature (1)..(25): SEQ ID NO: 2566; WAN024FKN_at; Start 277; Stop 301
gatattgtgacgaccaaaggttgga

SEQ ID NO: 210191 - DNA, 25 bp, Artificial
  probe
  misc_feature (1)..(25): SEQ ID NO: 2566; WAN024FKN_at; Start 298; Stop 322
tggaatgtggaattgccccaagttt

SEQ ID NO: 210192 - DNA, 25 bp, Artificial
  probe
  misc_feature (1)..(25): SEQ ID NO: 2566; WAN024FKN_at; Start 220; Stop 244
caagttcaaatcaaatcctgctgtg

SEQ ID NO: 210193 - DNA, 25 bp, Artificial
  probe
  misc_feature (1)..(25): SEQ ID NO: 2566; WAN024FKN_at; Start 269; Stop 293
gcattcatgatattgtgacgaccaa

SEQ ID NO: 210194 - DNA, 25 bp, Artificial
  probe
  misc_feature (1)..(25): SEQ ID NO: 2566; WAN024FKN_at; Start 148; Stop 172
cactgtatcattgacaattttctca

SEQ ID NO: 210195 - DNA, 25 bp, Artificial
  probe
  misc_feature (1)..(25): SEQ ID NO: 2566; WAN024FKN_at; Start 231; Stop 255
caaatcctgctgtgtaaagaagacc

SEQ ID NO: 210196 - DNA, 25 bp, Artificial
  probe
  misc_feature (1)..(25): SEQ ID NO: 2566; WAN024FKN_at; Start 55; Stop 79
gactgctacaatttccttgcttggg

SEQ ID NO: 210197 - DNA, 25 bp, Artificial
  probe
  misc_feature (1)..(25): SEQ ID NO: 2566; WAN024FKN_at; Start 326; Stop 350
ccacggaaatgaacggtgaaggttg

SEQ ID NO: 210198 - DNA, 25 bp, Artificial
  probe
  misc_feature (1)..(25): SEQ ID NO: 2566; WAN024FKN_at; Start 320; Stop 344
ttttgtccacggaaatgaacggtga

SEQ ID NO: 210199 - DNA, 25 bp, Artificial
  probe
  misc_feature (1)..(25): SEQ ID NO: 2566; WAN024FKN_at; Start 90; Stop 114
gagccgcatccaaggtcgcaataat

SEQ ID NO: 210200 - DNA, 25 bp, Artificial
  probe
  misc_feature (1)..(25): SEQ ID NO: 2566; WAN024FKN_at; Start 79; Stop 103
gtatttctgacgagccgcatccaag

SEQ ID NO: 210201 - DNA, 25 bp, Artificial
  probe
  misc_feature (1)..(25): SEQ ID NO: 2566; WAN024FKN_at; Start 236; Stop 260
cctgctgtgtaaagaagaccaataa

SEQ ID NO: 210202 - DNA, 25 bp, Artificial
  probe
  misc_feature (1)..(25): SEQ ID NO: 2566; WAN024FKN_at; Start 305; Stop 329
tggaattgccccaagttttgtccac

SEQ ID NO: 210203 - DNA, 25 bp, Artificial
  probe
  misc_feature (1)..(25): SEQ ID NO: 2566; WAN024FKN_at; Start 2; Stop 26
tgggcaaagtcgtccaacaaggcaa

SEQ ID NO: 210204 - DNA, 25 bp, Artificial
  probe
  misc_feature (1)..(25): SEQ ID NO: 2566; WAN024FKN_at; Start 24; Stop 48
caatggttcttgtaaaggtatgcgg

SEQ ID NO: 210205 - DNA, 25 bp, Artificial
  probe
  misc_feature (1)..(25): SEQ ID NO: 2566; WAN024FKN_at; Start 100; Stop 124
caaggtcgcaataatttctgttgga

SEQ ID NO: 210206 - DNA, 25 bp, Artificial
  probe
  misc_feature (1)..(25): SEQ ID NO: 2566; WAN024FKN_at; Start 96; Stop 120
catccaaggtcgcaataatttctgt

SEQ ID NO: 210207 - DNA, 25 bp, Artificial
  probe
  misc_feature (1)..(25): SEQ ID NO: 2566; WAN024FKN_at; Start 195; Stop 219
caaatgttttcaagtgctcacgcac

SEQ ID NO: 210208 - DNA, 25 bp, Artificial
  probe
  misc_feature (1)..(25): SEQ ID NO: 2566; WAN024FKN_at; Start 42; Stop 66
tatgcggttgaaagactgctacaat

SEQ ID NO: 210209 - DNA, 25 bp, Artificial
  probe
  misc_feature (1)..(25): SEQ ID NO: 2566; WAN024FKN_at; Start 6; Stop 30
caaagtcgtccaacaaggcaatggt

SEQ ID NO: 210210 - DNA, 25 bp, Artificial
  probe
  misc_feature (1)..(25): SEQ ID NO: 2566; WAN024FKN_at; Start 186; Stop 210
taacaccggcaaatgttttcaagtg

SEQ ID NO: 210211 - DNA, 25 bp, Artificial
  probe
  misc_feature (1)..(25): SEQ ID NO: 2566; WAN024FKN_at; Start 241; Stop 265
tgtgtaaagaagaccaataacggct

SEQ ID NO: 210212 - DNA, 25 bp, Artificial
  probe
  misc_feature (1)..(25): SEQ ID NO: 2566; WAN024FKN_at; Start 68; Stop 92
tccttgcttgggtatttctgacgag

SEQ ID NO: 210213 - DNA, 25 bp, Artificial
  probe
  misc_feature (1)..(25): SEQ ID NO: 5761; WAN024FKO_at; Start 76; Stop 100
gtcgttagcaaagtcaaggtcgcca

SEQ ID NO: 210214 - DNA, 25 bp, Artificial
  probe
  misc_feature (1)..(25): SEQ ID NO: 5761; WAN024FKO_at; Start 212; Stop 236
aaaatttgtggatcgcggaagtggt

SEQ ID NO: 210215 - DNA, 25 bp, Artificial
  probe
  misc_feature (1)..(25): SEQ ID NO: 5761; WAN024FKO_at; Start 108; Stop 132
gccagtttgtgtagtcgttattgac

SEQ ID NO: 210216 - DNA, 25 bp, Artificial
  probe
  misc_feature (1)..(25): SEQ ID NO: 5761; WAN024FKO_at; Start 103; Stop 127
tgcttgccagtttgtgtagtcgtta

SEQ ID NO: 210217 - DNA, 25 bp, Artificial
  probe
  misc_feature (1)..(25): SEQ ID NO: 5761; WAN024FKO_at; Start 210; Stop 234
taaaaatttgtggatcgcggaagtg

SEQ ID NO: 210218 - DNA, 25 bp, Artificial
  probe
  misc_feature (1)..(25): SEQ ID NO: 5761; WAN024FKO_at; Start 72; Stop 96
tacggtcgttagcaaagtcaaggtc

SEQ ID NO: 210219 - DNA, 25 bp, Artificial
  probe
  misc_feature (1)..(25): SEQ ID NO: 5761; WAN024FKO_at; Start 223; Stop 247
atcgcggaagtggtcagtagagtct

SEQ ID NO: 210220 - DNA, 25 bp, Artificial
  probe
  misc_feature (1)..(25): SEQ ID NO: 5761; WAN024FKO_at; Start 236; Stop 260
tcagtagagtctgctggctggtcaa

SEQ ID NO: 210221 - DNA, 25 bp, Artificial
  probe
  misc_feature (1)..(25): SEQ ID NO: 5761; WAN024FKO_at; Start 93; Stop 117
ggtcgccaactgcttgccagtttgt

SEQ ID NO: 210222 - DNA, 25 bp, Artificial
  probe
  misc_feature (1)..(25): SEQ ID NO: 5761; WAN024FKO_at; Start 57; Stop 81
ccatcatgtaggcagtacggtcgtt

SEQ ID NO: 210223 - DNA, 25 bp, Artificial
  probe
  misc_feature (1)..(25): SEQ ID NO: 5761; WAN024FKO_at; Start 250; Stop 274
tggctggtcaatcaagatcttgtca

SEQ ID NO: 210224 - DNA, 25 bp, Artificial
  probe
  misc_feature (1)..(25): SEQ ID NO: 5761; WAN024FKO_at; Start 301; Stop 325
catcaaagcaccgatctggtatggg

SEQ ID NO: 210225 - DNA, 25 bp, Artificial
  probe
  misc_feature (1)..(25): SEQ ID NO: 5761; WAN024FKO_at; Start 315; Stop 339
tctggtatgggtgacggatccagtt

SEQ ID NO: 210226 - DNA, 25 bp, Artificial
  probe
  misc_feature (1)..(25): SEQ ID NO: 5761; WAN024FKO_at; Start 247; Stop 271
tgctggctggtcaatcaagatcttg

SEQ ID NO: 210227 - DNA, 25 bp, Artificial
  probe
  misc_feature (1)..(25): SEQ ID NO: 5761; WAN024FKO_at; Start 65; Stop 89
taggcagtacggtcgttagcaaagt

SEQ ID NO: 210228 - DNA, 25 bp, Artificial
  probe
  misc_feature (1)..(25): SEQ ID NO: 5761; WAN024FKO_at; Start 60; Stop 84
tcatgtaggcagtacggtcgttagc

SEQ ID NO: 210229 - DNA, 25 bp, Artificial
  probe
  misc_feature (1)..(25): SEQ ID NO: 5761; WAN024FKO_at; Start 122; Stop 146
tcgttattgacagccttgtagagac

SEQ ID NO: 210230 - DNA, 25 bp, Artificial
  probe
  misc_feature (1)..(25): SEQ ID NO: 5761; WAN024FKO_at; Start 311; Stop 335
ccgatctggtatgggtgacggatcc

SEQ ID NO: 210231 - DNA, 25 bp, Artificial
  probe
  misc_feature (1)..(25): SEQ ID NO: 5761; WAN024FKO_at; Start 345; Stop 369
cgcgaacatttcctgtataaaatag

SEQ ID NO: 210232 - DNA, 25 bp, Artificial
  probe
  misc_feature (1)..(25): SEQ ID NO: 5761; WAN024FKO_at; Start 255; Stop 279
ggtcaatcaagatcttgtcaatctt

SEQ ID NO: 210233 - DNA, 25 bp, Artificial
  probe
  misc_feature (1)..(25): SEQ ID NO: 5761; WAN024FKO_at; Start 89; Stop 113
tcaaggtcgccaactgcttgccagt

SEQ ID NO: 210234 - DNA, 25 bp, Artificial
  probe
  misc_feature (1)..(25): SEQ ID NO: 5761; WAN024FKO_at; Start 115; Stop 139
tgtgtagtcgttattgacagccttg

SEQ ID NO: 210235 - DNA, 25 bp, Artificial
  probe
  misc_feature (1)..(25): SEQ ID NO: 5761; WAN024FKO_at; Start 53; Stop 77
cattccatcatgtaggcagtacggt

SEQ ID NO: 210236 - DNA, 25 bp, Artificial
  probe
  misc_feature (1)..(25): SEQ ID NO: 5761; WAN024FKO_at; Start 230; Stop 254
aagtggtcagtagagtctgctggct

SEQ ID NO: 210237 - DNA, 25 bp, Artificial
  probe
  misc_feature (1)..(25): SEQ ID NO: 5761; WAN024FKO_at; Start 305; Stop 329
aaagcaccgatctggtatgggtgac

SEQ ID NO: 210238 - DNA, 25 bp, Artificial
  probe
  misc_feature (1)..(25): SEQ ID NO: 5761; WAN024FKO_at; Start 281; Stop 305
gtaatcttaccctccttgtccatca

SEQ ID NO: 210239 - DNA, 25 bp, Artificial
  probe
  misc_feature (1)..(25): SEQ ID NO: 5761; WAN024FKO_at; Start 99; Stop 123
caactgcttgccagtttgtgtagtc

SEQ ID NO: 210240 - DNA, 25 bp, Artificial
  probe
  misc_feature (1)..(25): SEQ ID NO: 5761; WAN024FKO_at; Start 296; Stop 320
ttgtccatcaaagcaccgatctggt

SEQ ID NO: 210241 - DNA, 25 bp, Artificial
  probe
  misc_feature (1)..(25): SEQ ID NO: 5761; WAN024FKO_at; Start 242; Stop 266
gagtctgctggctggtcaatcaaga

SEQ ID NO: 210242 - DNA, 25 bp, Artificial
  probe
  misc_feature (1)..(25): SEQ ID NO: 5761; WAN024FKO_at; Start 270; Stop 294
tgtcaatctttgtaatcttaccctc

SEQ ID NO: 210243 - DNA, 25 bp, Artificial
  probe
  misc_feature (1)..(25): SEQ ID NO: 5761; WAN024FKO_at; Start 83; Stop 107
gcaaagtcaaggtcgccaactgctt

SEQ ID NO: 210244 - DNA, 25 bp, Artificial
  probe
  misc_feature (1)..(25): SEQ ID NO: 5761; WAN024FKO_at; Start 69; Stop 93
cagtacggtcgttagcaaagtcaag

SEQ ID NO: 210245 - DNA, 25 bp, Artificial
  probe
  misc_feature (1)..(25): SEQ ID NO: 5761; WAN024FKO_at; Start 80; Stop 104
ttagcaaagtcaaggtcgccaactg

SEQ ID NO: 210246 - DNA, 25 bp, Artificial
  probe
  misc_feature (1)..(25): SEQ ID NO: 5761; WAN024FKO_at; Start 47; Stop 71
ttaggacattccatcatgtaggcag

SEQ ID NO: 210247 - DNA, 25 bp, Artificial
  probe
  misc_feature (1)..(25): SEQ ID NO: 5866; WAN024FKP_at; Start 205; Stop 229
tgtaatgtgagacaagacatgagac

SEQ ID NO: 210248 - DNA, 25 bp, Artificial
  probe
  misc_feature (1)..(25): SEQ ID NO: 5866; WAN024FKP_at; Start 36; Stop 60
cctcgagacttgtgaaataatctgg

SEQ ID NO: 210249 - DNA, 25 bp, Artificial
  probe
  misc_feature (1)..(25): SEQ ID NO: 5866; WAN024FKP_at; Start 201; Stop 225
tatctgtaatgtgagacaagacatg

SEQ ID NO: 210250 - DNA, 25 bp, Artificial
  probe
  misc_feature (1)..(25): SEQ ID NO: 5866; WAN024FKP_at; Start 129; Stop 153
cgtcagattcaaagacaaaatattt

SEQ ID NO: 210251 - DNA, 25 bp, Artificial
  probe
  misc_feature (1)..(25): SEQ ID NO: 5866; WAN024FKP_at; Start 102; Stop 126
ggtaaggcatgaagtgacgctcata

SEQ ID NO: 210252 - DNA, 25 bp, Artificial
  probe
  misc_feature (1)..(25): SEQ ID NO: 5866; WAN024FKP_at; Start 1; Stop 25
ttgtttggcatagtcgttaaaggca

SEQ ID NO: 210253 - DNA, 25 bp, Artificial
  probe
  misc_feature (1)..(25): SEQ ID NO: 5866; WAN024FKP_at; Start 43; Stop 67
acttgtgaaataatctggatggtca

SEQ ID NO: 210254 - DNA, 25 bp, Artificial
  probe
  misc_feature (1)..(25): SEQ ID NO: 5866; WAN024FKP_at; Start 198; Stop 222
tggtatctgtaatgtgagacaagac

SEQ ID NO: 210255 - DNA, 25 bp, Artificial
  probe
  misc_feature (1)..(25): SEQ ID NO: 5866; WAN024FKP_at; Start 85; Stop 109
aatagagtattctgggtggtaaggc

SEQ ID NO: 210256 - DNA, 25 bp, Artificial
  probe
  misc_feature (1)..(25): SEQ ID NO: 5866; WAN024FKP_at; Start 59; Stop 83
ggatggtcaaagtcaatgttggtga

SEQ ID NO: 210257 - DNA, 25 bp, Artificial
  probe
  misc_feature (1)..(25): SEQ ID NO: 5866; WAN024FKP_at; Start 33; Stop 57
catcctcgagacttgtgaaataatc

SEQ ID NO: 210258 - DNA, 25 bp, Artificial
  probe
  misc_feature (1)..(25): SEQ ID NO: 5866; WAN024FKP_at; Start 100; Stop 124
gtggtaaggcatgaagtgacgctca

SEQ ID NO: 210259 - DNA, 25 bp, Artificial
  probe
  misc_feature (1)..(25): SEQ ID NO: 5866; WAN024FKP_at; Start 161; Stop 185
gccgaaccacgacctgtcccatctc

SEQ ID NO: 210260 - DNA, 25 bp, Artificial
  probe
  misc_feature (1)..(25): SEQ ID NO: 5866; WAN024FKP_at; Start 134; Stop 158
gattcaaagacaaaatatttggcat

SEQ ID NO: 210261 - DNA, 25 bp, Artificial
  probe
  misc_feature (1)..(25): SEQ ID NO: 5866; WAN024FKP_at; Start 7; Stop 31
ggcatagtcgttaaaggcattaaaa

SEQ ID NO: 210262 - DNA, 25 bp, Artificial
  probe
  misc_feature (1)..(25): SEQ ID NO: 5866; WAN024FKP_at; Start 210; Stop 234
tgtgagacaagacatgagacaacat

SEQ ID NO: 210263 - DNA, 25 bp, Artificial
  probe
  misc_feature (1)..(25): SEQ ID NO: 5866; WAN024FKP_at; Start 66; Stop 90
caaagtcaatgttggtgataataga

SEQ ID NO: 210264 - DNA, 25 bp, Artificial
  probe
  misc_feature (1)..(25): SEQ ID NO: 5866; WAN024FKP_at; Start 92; Stop 116
tattctgggtggtaaggcatgaagt

SEQ ID NO: 210265 - DNA, 25 bp, Artificial
  probe
  misc_feature (1)..(25): SEQ ID NO: 5866; WAN024FKP_at; Start 72; Stop 96
caatgttggtgataatagagtattc

SEQ ID NO: 210266 - DNA, 25 bp, Artificial
  probe
  misc_feature (1)..(25): SEQ ID NO: 5866; WAN024FKP_at; Start 18; Stop 42
taaaggcattaaaaacatcctcgag

SEQ ID NO: 210267 - DNA, 25 bp, Artificial
  probe
  misc_feature (1)..(25): SEQ ID NO: 5866; WAN024FKP_at; Start 112; Stop 136
gaagtgacgctcatattcgtcagat

SEQ ID NO: 210268 - DNA, 25 bp, Artificial
  probe
  misc_feature (1)..(25): SEQ ID NO: 5866; WAN024FKP_at; Start 119; Stop 143
cgctcatattcgtcagattcaaaga

SEQ ID NO: 210269 - DNA, 25 bp, Artificial
  probe
  misc_feature (1)..(25): SEQ ID NO: 5866; WAN024FKP_at; Start 27; Stop 51
taaaaacatcctcgagacttgtgaa

SEQ ID NO: 210270 - DNA, 25 bp, Artificial
  probe
  misc_feature (1)..(25): SEQ ID NO: 5866; WAN024FKP_at; Start 4; Stop 28
tttggcatagtcgttaaaggcatta

SEQ ID NO: 210271 - DNA, 25 bp, Artificial
  probe
  misc_feature (1)..(25): SEQ ID NO: 5866; WAN024FKP_at; Start 53; Stop 77
taatctggatggtcaaagtcaatgt

SEQ ID NO: 210272 - DNA, 25 bp, Artificial
  probe
  misc_feature (1)..(25): SEQ ID NO: 5866; WAN024FKP_at; Start 39; Stop 63
cgagacttgtgaaataatctggatg

SEQ ID NO: 210273 - DNA, 25 bp, Artificial
  probe
  misc_feature (1)..(25): SEQ ID NO: 5866; WAN024FKP_at; Start 56; Stop 80
tctggatggtcaaagtcaatgttgg

SEQ ID NO: 210274 - DNA, 25 bp, Artificial
  probe
  misc_feature (1)..(25): SEQ ID NO: 5866; WAN024FKP_at; Start 22; Stop 46
ggcattaaaaacatcctcgagactt

SEQ ID NO: 210275 - DNA, 25 bp, Artificial
  probe
  misc_feature (1)..(25): SEQ ID NO: 5866; WAN024FKP_at; Start 49; Stop 73
gaaataatctggatggtcaaagtca

SEQ ID NO: 210276 - DNA, 25 bp, Artificial
  probe
  misc_feature (1)..(25): SEQ ID NO: 5866; WAN024FKP_at; Start 107; Stop 131
ggcatgaagtgacgctcatattcgt

SEQ ID NO: 210277 - DNA, 25 bp, Artificial
  probe
  misc_feature (1)..(25): SEQ ID NO: 5866; WAN024FKP_at; Start 215; Stop 239
gacaagacatgagacaacatacctg

SEQ ID NO: 210278 - DNA, 25 bp, Artificial
  probe
  misc_feature (1)..(25): SEQ ID NO: 5866; WAN024FKP_at; Start 220; Stop 244
gacatgagacaacatacctgtcgtt

SEQ ID NO: 210279 - DNA, 25 bp, Artificial
  probe
  misc_feature (1)..(25): SEQ ID NO: 5866; WAN024FKP_at; Start 123; Stop 147
catattcgtcagattcaaagacaaa

SEQ ID NO: 210280 - DNA, 25 bp, Artificial
  probe
  misc_feature (1)..(25): SEQ ID NO: 5866; WAN024FKP_at; Start 222; Stop 246
catgagacaacatacctgtcgttga

SEQ ID NO: 210281 - DNA, 25 bp, Artificial
  probe
  misc_feature (1)..(25): SEQ ID NO: 4180; WAN024FKQ_at; Start 5; Stop 29
gctgcaccaaaaggaaaattctggt

SEQ ID NO: 210282 - DNA, 25 bp, Artificial
  probe
  misc_feature (1)..(25): SEQ ID NO: 4180; WAN024FKQ_at; Start 164; Stop 188
tgcgtccaatcttgataaagtctgt

SEQ ID NO: 210283 - DNA, 25 bp, Artificial
  probe
  misc_feature (1)..(25): SEQ ID NO: 4180; WAN024FKQ_at; Start 36; Stop 60
ggatccacttgccatcaaagtaaga

SEQ ID NO: 210284 - DNA, 25 bp, Artificial
  probe
  misc_feature (1)..(25): SEQ ID NO: 4180; WAN024FKQ_at; Start 27; Stop 51
ggtaaaagaggatccacttgccatc

SEQ ID NO: 210285 - DNA, 25 bp, Artificial
  probe
  misc_feature (1)..(25): SEQ ID NO: 4180; WAN024FKQ_at; Start 24; Stop 48
tctggtaaaagaggatccacttgcc

SEQ ID NO: 210286 - DNA, 25 bp, Artificial
  probe
  misc_feature (1)..(25): SEQ ID NO: 4180; WAN024FKQ_at; Start 147; Stop 171
tatgttgaatttcttcttgcgtcca

SEQ ID NO: 210287 - DNA, 25 bp, Artificial
  probe
  misc_feature (1)..(25): SEQ ID NO: 4180; WAN024FKQ_at; Start 188; Stop 212
taacgacgctcagttgtccattcca

SEQ ID NO: 210288 - DNA, 25 bp, Artificial
  probe
  misc_feature (1)..(25): SEQ ID NO: 4180; WAN024FKQ_at; Start 211; Stop 235
cattcattcctccaaaaatcttatc

SEQ ID NO: 210289 - DNA, 25 bp, Artificial
  probe
  misc_feature (1)..(25): SEQ ID NO: 4180; WAN024FKQ_at; Start 258; Stop 282
gataaaaaatgcaagccttttatgt

SEQ ID NO: 210290 - DNA, 25 bp, Artificial
  probe
  misc_feature (1)..(25): SEQ ID NO: 4180; WAN024FKQ_at; Start 153; Stop 177
gaatttcttcttgcgtccaatcttg

SEQ ID NO: 210291 - DNA, 25 bp, Artificial
  probe
  misc_feature (1)..(25): SEQ ID NO: 4180; WAN024FKQ_at; Start 170; Stop 194
caatcttgataaagtctgtaacgac

SEQ ID NO: 210292 - DNA, 25 bp, Artificial
  probe
  misc_feature (1)..(25): SEQ ID NO: 4180; WAN024FKQ_at; Start 45; Stop 69
tgccatcaaagtaagaaaagccatt

SEQ ID NO: 210293 - DNA, 25 bp, Artificial
  probe
  misc_feature (1)..(25): SEQ ID NO: 4180; WAN024FKQ_at; Start 110; Stop 134
tgagtatgccatggagattgtgcca

SEQ ID NO: 210294 - DNA, 25 bp, Artificial
  probe
  misc_feature (1)..(25): SEQ ID NO: 4180; WAN024FKQ_at; Start 74; Stop 98
tcgttgagaagtcctgtttttggct

SEQ ID NO: 210295 - DNA, 25 bp, Artificial
  probe
  misc_feature (1)..(25): SEQ ID NO: 4180; WAN024FKQ_at; Start 228; Stop 252
atcttatcacttttaatagtaactg

SEQ ID NO: 210296 - DNA, 25 bp, Artificial
  probe
  misc_feature (1)..(25): SEQ ID NO: 4180; WAN024FKQ_at; Start 96; Stop 120
gctcaacatggtaatgagtatgcca

SEQ ID NO: 210297 - DNA, 25 bp, Artificial
  probe
  misc_feature (1)..(25): SEQ ID NO: 4180; WAN024FKQ_at; Start 251; Stop 275
tgttttcgataaaaaatgcaagcct

SEQ ID NO: 210298 - DNA, 25 bp, Artificial
  probe
  misc_feature (1)..(25): SEQ ID NO: 4180; WAN024FKQ_at; Start 31; Stop 55
aaagaggatccacttgccatcaaag

SEQ ID NO: 210299 - DNA, 25 bp, Artificial
  probe
  misc_feature (1)..(25): SEQ ID NO: 4180; WAN024FKQ_at; Start 131; Stop 155
gccatattttcctttatatgttgaa

SEQ ID NO: 210300 - DNA, 25 bp, Artificial
  probe
  misc_feature (1)..(25): SEQ ID NO: 4180; WAN024FKQ_at; Start 179; Stop 203
taaagtctgtaacgacgctcagttg

SEQ ID NO: 210301 - DNA, 25 bp, Artificial
  probe
  misc_feature (1)..(25): SEQ ID NO: 4180; WAN024FKQ_at; Start 184; Stop 208
tctgtaacgacgctcagttgtccat

SEQ ID NO: 210302 - DNA, 25 bp, Artificial
  probe
  misc_feature (1)..(25): SEQ ID NO: 4180; WAN024FKQ_at; Start 79; Stop 103
gagaagtcctgtttttggctcaaca

SEQ ID NO: 210303 - DNA, 25 bp, Artificial
  probe
  misc_feature (1)..(25): SEQ ID NO: 4180; WAN024FKQ_at; Start 18; Stop 42
gaaaattctggtaaaagaggatcca

SEQ ID NO: 210304 - DNA, 25 bp, Artificial
  probe
  misc_feature (1)..(25): SEQ ID NO: 4180; WAN024FKQ_at; Start 176; Stop 200
tgataaagtctgtaacgacgctcag

SEQ ID NO: 210305 - DNA, 25 bp, Artificial
  probe
  misc_feature (1)..(25): SEQ ID NO: 4180; WAN024FKQ_at; Start 59; Stop 83
gaaaagccatttgggtcgttgagaa

SEQ ID NO: 210306 - DNA, 25 bp, Artificial
  probe
  misc_feature (1)..(25): SEQ ID NO: 4180; WAN024FKQ_at; Start 85; Stop 109
tcctgtttttggctcaacatggtaa

SEQ ID NO: 210307 - DNA, 25 bp, Artificial
  probe
  misc_feature (1)..(25): SEQ ID NO: 4180; WAN024FKQ_at; Start 192; Stop 216
gacgctcagttgtccattccattca

SEQ ID NO: 210308 - DNA, 25 bp, Artificial
  probe
  misc_feature (1)..(25): SEQ ID NO: 4180; WAN024FKQ_at; Start 118; Stop 142
ccatggagattgtgccatattttcc

SEQ ID NO: 210309 - DNA, 25 bp, Artificial
  probe
  misc_feature (1)..(25): SEQ ID NO: 4180; WAN024FKQ_at; Start 63; Stop 87
agccatttgggtcgttgagaagtcc

SEQ ID NO: 210310 - DNA, 25 bp, Artificial
  probe
  misc_feature (1)..(25): SEQ ID NO: 4180; WAN024FKQ_at; Start 202; Stop 226
tgtccattccattcattcctccaaa

SEQ ID NO: 210311 - DNA, 25 bp, Artificial
  probe
  misc_feature (1)..(25): SEQ ID NO: 4180; WAN024FKQ_at; Start 2; Stop 26
tgggctgcaccaaaaggaaaattct

SEQ ID NO: 210312 - DNA, 25 bp, Artificial
  probe
  misc_feature (1)..(25): SEQ ID NO: 4180; WAN024FKQ_at; Start 66; Stop 90
catttgggtcgttgagaagtcctgt

SEQ ID NO: 210313 - DNA, 25 bp, Artificial
  probe
  misc_feature (1)..(25): SEQ ID NO: 4180; WAN024FKQ_at; Start 123; Stop 147
gagattgtgccatattttcctttat

SEQ ID NO: 210314 - DNA, 25 bp, Artificial
  probe
  misc_feature (1)..(25): SEQ ID NO: 4180; WAN024FKQ_at; Start 246; Stop 270
gtaactgttttcgataaaaaatgca

SEQ ID NO: 210315 - DNA, 25 bp, Artificial
  probe
  misc_feature (1)..(25): SEQ ID NO: 1924; WAN024FKR_at; Start 68; Stop 92
atcaatcaaatttttacgaaaatgt

SEQ ID NO: 210316 - DNA, 25 bp, Artificial
  probe
  misc_feature (1)..(25): SEQ ID NO: 1924; WAN024FKR_at; Start 82; Stop 106
tacgaaaatgtgaaagataatgaaa

SEQ ID NO: 210317 - DNA, 25 bp, Artificial
  probe
  misc_feature (1)..(25): SEQ ID NO: 1924; WAN024FKR_at; Start 154; Stop 178
ctgatgaaacagtcaaaaacaatca

SEQ ID NO: 210318 - DNA, 25 bp, Artificial
  probe
  misc_feature (1)..(25): SEQ ID NO: 1924; WAN024FKR_at; Start 81; Stop 105
ttacgaaaatgtgaaagataatgaa

SEQ ID NO: 210319 - DNA, 25 bp, Artificial
  probe
  misc_feature (1)..(25): SEQ ID NO: 1924; WAN024FKR_at; Start 85; Stop 109
gaaaatgtgaaagataatgaaataa

SEQ ID NO: 210320 - DNA, 25 bp, Artificial
  probe
  misc_feature (1)..(25): SEQ ID NO: 1924; WAN024FKR_at; Start 67; Stop 91
aatcaatcaaatttttacgaaaatg

SEQ ID NO: 210321 - DNA, 25 bp, Artificial
  probe
  misc_feature (1)..(25): SEQ ID NO: 1924; WAN024FKR_at; Start 150; Stop 174
attcctgatgaaacagtcaaaaaca

SEQ ID NO: 210322 - DNA, 25 bp, Artificial
  probe
  misc_feature (1)..(25): SEQ ID NO: 1924; WAN024FKR_at; Start 87; Stop 111
aaatgtgaaagataatgaaataaaa

SEQ ID NO: 210323 - DNA, 25 bp, Artificial
  probe
  misc_feature (1)..(25): SEQ ID NO: 1924; WAN024FKR_at; Start 160; Stop 184
aaacagtcaaaaacaatcaatctaa

SEQ ID NO: 210324 - DNA, 25 bp, Artificial
  probe
  misc_feature (1)..(25): SEQ ID NO: 1924; WAN024FKR_at; Start 53; Stop 77
aaataaatacaggaaatcaatcaaa

SEQ ID NO: 210325 - DNA, 25 bp, Artificial
  probe
  misc_feature (1)..(25): SEQ ID NO: 1924; WAN024FKR_at; Start 158; Stop 182
tgaaacagtcaaaaacaatcaatct

SEQ ID NO: 210326 - DNA, 25 bp, Artificial
  probe
  misc_feature (1)..(25): SEQ ID NO: 1924; WAN024FKR_at; Start 151; Stop 175
ttcctgatgaaacagtcaaaaacaa

SEQ ID NO: 210327 - DNA, 25 bp, Artificial
  probe
  misc_feature (1)..(25): SEQ ID NO: 1924; WAN024FKR_at; Start 56; Stop 80
taaatacaggaaatcaatcaaattt

SEQ ID NO: 210328 - DNA, 25 bp, Artificial
  probe
  misc_feature (1)..(25): SEQ ID NO: 1924; WAN024FKR_at; Start 80; Stop 104
tttacgaaaatgtgaaagataatga

SEQ ID NO: 210329 - DNA, 25 bp, Artificial
  probe
  misc_feature (1)..(25): SEQ ID NO: 1924; WAN024FKR_at; Start 69; Stop 93
tcaatcaaatttttacgaaaatgtg

SEQ ID NO: 210330 - DNA, 25 bp, Artificial
  probe
  misc_feature (1)..(25): SEQ ID NO: 1924; WAN024FKR_at; Start 149; Stop 173
aattcctgatgaaacagtcaaaaac

SEQ ID NO: 210331 - DNA, 25 bp, Artificial
  probe
  misc_feature (1)..(25): SEQ ID NO: 1924; WAN024FKR_at; Start 156; Stop 180
gatgaaacagtcaaaaacaatcaat

SEQ ID NO: 210332 - DNA, 25 bp, Artificial
  probe
  misc_feature (1)..(25): SEQ ID NO: 1924; WAN024FKR_at; Start 84; Stop 108
cgaaaatgtgaaagataatgaaata

SEQ ID NO: 210333 - DNA, 25 bp, Artificial
  probe
  misc_feature (1)..(25): SEQ ID NO: 1924; WAN024FKR_at; Start 152; Stop 176
tcctgatgaaacagtcaaaaacaat

SEQ ID NO: 210334 - DNA, 25 bp, Artificial
  probe
  misc_feature (1)..(25): SEQ ID NO: 1924; WAN024FKR_at; Start 86; Stop 110
aaaatgtgaaagataatgaaataaa

SEQ ID NO: 210335 - DNA, 25 bp, Artificial
  probe
  misc_feature (1)..(25): SEQ ID NO: 1924; WAN024FKR_at; Start 54; Stop 78
aataaatacaggaaatcaatcaaat

SEQ ID NO: 210336 - DNA, 25 bp, Artificial
  probe
  misc_feature (1)..(25): SEQ ID NO: 1924; WAN024FKR_at; Start 55; Stop 79
ataaatacaggaaatcaatcaaatt

SEQ ID NO: 210337 - DNA, 25 bp, Artificial
  probe
  misc_feature (1)..(25): SEQ ID NO: 1924; WAN024FKR_at; Start 159; Stop 183
gaaacagtcaaaaacaatcaatcta

SEQ ID NO: 210338 - DNA, 25 bp, Artificial
  probe
  misc_feature (1)..(25): SEQ ID NO: 1924; WAN024FKR_at; Start 161; Stop 185
aacagtcaaaaacaatcaatctaaa

SEQ ID NO: 210339 - DNA, 25 bp, Artificial
  probe
  misc_feature (1)..(25): SEQ ID NO: 1924; WAN024FKR_at; Start 153; Stop 177
cctgatgaaacagtcaaaaacaatc

SEQ ID NO: 210340 - DNA, 25 bp, Artificial
  probe
  misc_feature (1)..(25): SEQ ID NO: 1924; WAN024FKR_at; Start 79; Stop 103
ttttacgaaaatgtgaaagataatg

SEQ ID NO: 210341 - DNA, 25 bp, Artificial
  probe
  misc_feature (1)..(25): SEQ ID NO: 1924; WAN024FKR_at; Start 83; Stop 107
acgaaaatgtgaaagataatgaaat

SEQ ID NO: 210342 - DNA, 25 bp, Artificial
  probe
  misc_feature (1)..(25): SEQ ID NO: 1924; WAN024FKR_at; Start 155; Stop 179
tgatgaaacagtcaaaaacaatcaa

SEQ ID NO: 210343 - DNA, 25 bp, Artificial
  probe
  misc_feature (1)..(25): SEQ ID NO: 1924; WAN024FKR_at; Start 157; Stop 181
atgaaacagtcaaaaacaatcaatc

SEQ ID NO: 210344 - DNA, 25 bp, Artificial
  probe
  misc_feature (1)..(25): SEQ ID NO: 1924; WAN024FKR_at; Start 70; Stop 94
caatcaaatttttacgaaaatgtga

SEQ ID NO: 210345 - DNA, 25 bp, Artificial
  probe
  misc_feature (1)..(25): SEQ ID NO: 2823; WAN024FKS_at; Start 203; Stop 227
gaaatgcctttcgtccagataacaa

SEQ ID NO: 210346 - DNA, 25 bp, Artificial
  probe
  misc_feature (1)..(25): SEQ ID NO: 2823; WAN024FKS_at; Start 258; Stop 282
tatcagctacaaacgttaccatgag

SEQ ID NO: 210347 - DNA, 25 bp, Artificial
  probe
  misc_feature (1)..(25): SEQ ID NO: 2823; WAN024FKS_at; Start 186; Stop 210
tatggaaattatcgctggaaatgcc

SEQ ID NO: 210348 - DNA, 25 bp, Artificial
  probe
  misc_feature (1)..(25): SEQ ID NO: 2823; WAN024FKS_at; Start 822; Stop 846
tattggtcttctttacacagcagga

SEQ ID NO: 210349 - DNA, 25 bp, Artificial
  probe
  misc_feature (1)..(25): SEQ ID NO: 2823; WAN024FKS_at; Start 371; Stop 395
tcttgtctcacattacagataccag

SEQ ID NO: 210350 - DNA, 25 bp, Artificial
  probe
  misc_feature (1)..(25): SEQ ID NO: 2823; WAN024FKS_at; Start 737; Stop 761
tcaccgttcatttccgtggacaaaa

SEQ ID NO: 210351 - DNA, 25 bp, Artificial
  probe
  misc_feature (1)..(25): SEQ ID NO: 2823; WAN024FKS_at; Start 533; Stop 557
cagattatttcacaagtctcgagga

SEQ ID NO: 210352 - DNA, 25 bp, Artificial
  probe
  misc_feature (1)..(25): SEQ ID NO: 2823; WAN024FKS_at; Start 1261; Stop 1285
ggagcaggagacatccaaacctatg

SEQ ID NO: 210353 - DNA, 25 bp, Artificial
  probe
  misc_feature (1)..(25): SEQ ID NO: 2823; WAN024FKS_at; Start 1013; Stop 1037
aaattgtagcagtctttcaaccgca

SEQ ID NO: 210354 - DNA, 25 bp, Artificial
  probe
  misc_feature (1)..(25): SEQ ID NO: 2823; WAN024FKS_at; Start 1245; Stop 1269
tgtttacgtctttatgggagcagga

SEQ ID NO: 210355 - DNA, 25 bp, Artificial
  probe
  misc_feature (1)..(25): SEQ ID NO: 2823; WAN024FKS_at; Start 1069; Stop 1093
gactttgcccatgctttaaaccaag

SEQ ID NO: 210356 - DNA, 25 bp, Artificial
  probe
  misc_feature (1)..(25): SEQ ID NO: 2823; WAN024FKS_at; Start 512; Stop 536
ccaacattgactttgaccatccaga

SEQ ID NO: 210357 - DNA, 25 bp, Artificial
  probe
  misc_feature (1)..(25): SEQ ID NO: 2823; WAN024FKS_at; Start 1144; Stop 1168
catggtgacgttaaggtagaagacc

SEQ ID NO: 210358 - DNA, 25 bp, Artificial
  probe
  misc_feature (1)..(25): SEQ ID NO: 2823; WAN024FKS_at; Start 1000; Stop 1024
tacccaagcaaggaaattgtagcag

SEQ ID NO: 210359 - DNA, 25 bp, Artificial
  probe
  misc_feature (1)..(25): SEQ ID NO: 2823; WAN024FKS_at; Start 685; Stop 709
ggcaatgactttgtagctagtgatc

SEQ ID NO: 210360 - DNA, 25 bp, Artificial
  probe
  misc_feature (1)..(25): SEQ ID NO: 2823; WAN024FKS_at; Start 1093; Stop 1117
gcagatgctgtttatctagcgcaaa

SEQ ID NO: 210361 - DNA, 25 bp, Artificial
  probe
  misc_feature (1)..(25): SEQ ID NO: 2823; WAN024FKS_at; Start 611; Stop 635
tctatggtgaagatgctgaattgcg

SEQ ID NO: 210362 - DNA, 25 bp, Artificial
  probe
  misc_feature (1)..(25): SEQ ID NO: 2823; WAN024FKS_at; Start 804; Stop 828
catgaatgcgacagccgttattggt

SEQ ID NO: 210363 - DNA, 25 bp, Artificial
  probe
  misc_feature (1)..(25): SEQ ID NO: 2823; WAN024FKS_at; Start 767; Stop 791
ggcaattccacattccaacctttgg

SEQ ID NO: 210364 - DNA, 25 bp, Artificial
  probe
  misc_feature (1)..(25): SEQ ID NO: 2823; WAN024FKS_at; Start 323; Stop 347
tagcaggagcacatggaaaaacttc

SEQ ID NO: 210365 - DNA, 25 bp, Artificial
  probe
  misc_feature (1)..(25): SEQ ID NO: 2823; WAN024FKS_at; Start 1113; Stop 1137
gcaaatttatggctcggctcgtgaa

SEQ ID NO: 210366 - DNA, 25 bp, Artificial
  probe
  misc_feature (1)..(25): SEQ ID NO: 2823; WAN024FKS_at; Start 1209; Stop 1233
tgaaaatgtttctccactcctagac

SEQ ID NO: 210367 - DNA, 25 bp, Artificial
  probe
  misc_feature (1)..(25): SEQ ID NO: 2823; WAN024FKS_at; Start 1128; Stop 1152
ggctcgtgaagtagatcatggtgac

SEQ ID NO: 210368 - DNA, 25 bp, Artificial
  probe
  misc_feature (1)..(25): SEQ ID NO: 2823; WAN024FKS_at; Start 397; Stop 421
ttcttgattggagatgggacaggtc

SEQ ID NO: 210369 - DNA, 25 bp, Artificial
  probe
  misc_feature (1)..(25): SEQ ID NO: 2823; WAN024FKS_at; Start 982; Stop 1006
gatgcggctcgtcagaaatacccaa

SEQ ID NO: 210370 - DNA, 25 bp, Artificial
  probe
  misc_feature (1)..(25): SEQ ID NO: 2823; WAN024FKS_at; Start 634; Stop 658
cgtaagattacgtctgatgcaccaa

SEQ ID NO: 210371 - DNA, 25 bp, Artificial
  probe
  misc_feature (1)..(25): SEQ ID NO: 2823; WAN024FKS_at; Start 336; Stop 360
tggaaaaacttcaacgacaggtatg

SEQ ID NO: 210372 - DNA, 25 bp, Artificial
  probe
  misc_feature (1)..(25): SEQ ID NO: 2823; WAN024FKS_at; Start 965; Stop 989
aaattattgcgaccttggatgcggc

SEQ ID NO: 210373 - DNA, 25 bp, Artificial
  probe
  misc_feature (1)..(25): SEQ ID NO: 2823; WAN024FKS_at; Start 789; Stop 813
tggtcgtcacaatatcatgaatgcg

SEQ ID NO: 210374 - DNA, 25 bp, Artificial
  probe
  misc_feature (1)..(25): SEQ ID NO: 2823; WAN024FKS_at; Start 849; Stop 873
tgatttgaacttggtgcgtgagcac

SEQ ID NO: 210375 - DNA, 25 bp, Artificial
  probe
  misc_feature (1)..(25): SEQ ID NO: 2823; WAN024FKS_at; Start 35; Stop 59
gatcagggatgagtgccttggcctt

SEQ ID NO: 210376 - DNA, 25 bp, Artificial
  probe
  misc_feature (1)..(25): SEQ ID NO: 2823; WAN024FKS_at; Start 311; Stop 335
ttagcatgggagtagcaggagcaca

SEQ ID NO: 210377 - DNA, 25 bp, Artificial
  probe
  misc_feature (1)..(25): SEQ ID NO: 2823; WAN024FKS_at; Start 78; Stop 102
gcacaaggttcagggatcagatgtt

SEQ ID NO: 210378 - DNA, 25 bp, Artificial
  probe
  misc_feature (1)..(25): SEQ ID NO: 2823; WAN024FKS_at; Start 462; Stop 486
cgaatatgagcgtcacttcatgcct

SEQ ID NO: 210379 - DNA, 25 bp, Artificial
  probe
  misc_feature (1)..(25): SEQ ID NO: 2232; WAN024FKT_at; Start 1351; Stop 1375
tctggtcgtgtcttcccacatgcgg

SEQ ID NO: 210380 - DNA, 25 bp, Artificial
  probe
  misc_feature (1)..(25): SEQ ID NO: 2232; WAN024FKT_at; Start 840; Stop 864
ggattacggtttcgaagcctatgca

SEQ ID NO: 210381 - DNA, 25 bp, Artificial
  probe
  misc_feature (1)..(25): SEQ ID NO: 2232; WAN024FKT_at; Start 938; Stop 962
catctgaccgttttgaccaccaagg

SEQ ID NO: 210382 - DNA, 25 bp, Artificial
  probe
  misc_feature (1)..(25): SEQ ID NO: 2232; WAN024FKT_at; Start 867; Stop 891
tcaagccttcaacgctcctgatggg

SEQ ID NO: 210383 - DNA, 25 bp, Artificial
  probe
  misc_feature (1)..(25): SEQ ID NO: 2232; WAN024FKT_at; Start 608; Stop 632
caaactggcaagcagttggcgacct

SEQ ID NO: 210384 - DNA, 25 bp, Artificial
  probe
  misc_feature (1)..(25): SEQ ID NO: 2232; WAN024FKT_at; Start 981; Stop 1005
ggaactcactatcaaagacgacaag

SEQ ID NO: 210385 - DNA, 25 bp, Artificial
  probe
  misc_feature (1)..(25): SEQ ID NO: 2232; WAN024FKT_at; Start 805; Stop 829
gccaaaatggtagatgtgtctcaac

SEQ ID NO: 210386 - DNA, 25 bp, Artificial
  probe
  misc_feature (1)..(25): SEQ ID NO: 2232; WAN024FKT_at; Start 8; Stop 32
ggacaactgagcgtcgttacagact

SEQ ID NO: 210387 - DNA, 25 bp, Artificial
  probe
  misc_feature (1)..(25): SEQ ID NO: 2232; WAN024FKT_at; Start 958; Stop 982
caaggaaccttctctttggtcaagg

SEQ ID NO: 210388 - DNA, 25 bp, Artificial
  probe
  misc_feature (1)..(25): SEQ ID NO: 2232; WAN024FKT_at; Start 642; Stop 666
taacgaccgtactgcctacatgatg

SEQ ID NO: 210389 - DNA, 25 bp, Artificial
  probe
  misc_feature (1)..(25): SEQ ID NO: 2232; WAN024FKT_at; Start 593; Stop 617
tcaataacgactacacaaactggca

SEQ ID NO: 210390 - DNA, 25 bp, Artificial
  probe
  misc_feature (1)..(25): SEQ ID NO: 2232; WAN024FKT_at; Start 451; Stop 475
gacaagatcttgattgaccagccag

SEQ ID NO: 210391 - DNA, 25 bp, Artificial
  probe
  misc_feature (1)..(25): SEQ ID NO: 2232; WAN024FKT_at; Start 825; Stop 849
tcaacttcaaaacatggattacggt

SEQ ID NO: 210392 - DNA, 25 bp, Artificial
  probe
  misc_feature (1)..(25): SEQ ID NO: 2232; WAN024FKT_at; Start 221; Stop 245
aatcttgggcacagctagaaagtga

SEQ ID NO: 210393 - DNA, 25 bp, Artificial
  probe
  misc_feature (1)..(25): SEQ ID NO: 2232; WAN024FKT_at; Start 1099; Stop 1123
gaactcaacttggaagctaatagcc

SEQ ID NO: 210394 - DNA, 25 bp, Artificial
  probe
  misc_feature (1)..(25): SEQ ID NO: 2232; WAN024FKT_at; Start 420; Stop 444
gatggacaaggagggtaagattaca

SEQ ID NO: 210395 - DNA, 25 bp, Artificial
  probe
  misc_feature (1)..(25): SEQ ID NO: 2232; WAN024FKT_at; Start 1256; Stop 1280
gttcttgccctatcgagaatcaggc

SEQ ID NO: 210396 - DNA, 25 bp, Artificial
  probe
  misc_feature (1)..(25): SEQ ID NO: 2232; WAN024FKT_at; Start 477; Stop 501
agactctactgaccacttccgcgat

SEQ ID NO: 210397 - DNA, 25 bp, Artificial
  probe
  misc_feature (1)..(25): SEQ ID NO: 2232; WAN024FKT_at; Start 1169; Stop 1193
caatcaactttgaccttgtaaacgg

SEQ ID NO: 210398 - DNA, 25 bp, Artificial
  probe
  misc_feature (1)..(25): SEQ ID NO: 2232; WAN024FKT_at; Start 27; Stop 51
cagactttatcaagattggacgcaa

SEQ ID NO: 210399 - DNA, 25 bp, Artificial
  probe
  misc_feature (1)..(25): SEQ ID NO: 2232; WAN024FKT_at; Start 1114; Stop 1138
gctaatagccagagcgagattgtct

SEQ ID NO: 210400 - DNA, 25 bp, Artificial
  probe
  misc_feature (1)..(25): SEQ ID NO: 2232; WAN024FKT_at; Start 462; Stop 486
gattgaccagccagcagactctact

SEQ ID NO: 210401 - DNA, 25 bp, Artificial
  probe
  misc_feature (1)..(25): SEQ ID NO: 2232; WAN024FKT_at; Start 307; Stop 331
cacggtgcctactctggttctgcca

SEQ ID NO: 210402 - DNA, 25 bp, Artificial
  probe
  misc_feature (1)..(25): SEQ ID NO: 2232; WAN024FKT_at; Start 1270; Stop 1294
gagaatcaggctactactgctacaa

SEQ ID NO: 210403 - DNA, 25 bp, Artificial
  probe
  misc_feature (1)..(25): SEQ ID NO: 2232; WAN024FKT_at; Start 1015; Stop 1039
tatccagtcgctgctattaaggacc

SEQ ID NO: 210404 - DNA, 25 bp, Artificial
  probe
  misc_feature (1)..(25): SEQ ID NO: 2232; WAN024FKT_at; Start 626; Stop 650
gcgaccttgactttgctaacgaccg

SEQ ID NO: 210405 - DNA, 25 bp, Artificial
  probe
  misc_feature (1)..(25): SEQ ID NO: 2232; WAN024FKT_at; Start 167; Stop 191
gcaagtggatcctcttttaccagaa

SEQ ID NO: 210406 - DNA, 25 bp, Artificial
  probe
  misc_feature (1)..(25): SEQ ID NO: 2232; WAN024FKT_at; Start 109; Stop 133
catgttgagccaaaaacaggacttc

SEQ ID NO: 210407 - DNA, 25 bp, Artificial
  probe
  misc_feature (1)..(25): SEQ ID NO: 2232; WAN024FKT_at; Start 73; Stop 97
gaaaatatggcacaatctccatggc

SEQ ID NO: 210408 - DNA, 25 bp, Artificial
  probe
  misc_feature (1)..(25): SEQ ID NO: 2232; WAN024FKT_at; Start 997; Stop 1021
gacgacaagctctaccagtatccag

SEQ ID NO: 210409 - DNA, 25 bp, Artificial
  probe
  misc_feature (1)..(25): SEQ ID NO: 2232; WAN024FKT_at; Start 882; Stop 906
tcctgatgggcgtgctctagcagtt

SEQ ID NO: 210410 - DNA, 25 bp, Artificial
  probe
  misc_feature (1)..(25): SEQ ID NO: 2232; WAN024FKT_at; Start 188; Stop 212
agaattttccttttggtgcagccca

SEQ ID NO: 210411 - DNA, 25 bp, Artificial
  probe
  misc_feature (1)..(25): SEQ ID NO: 2232; WAN024FKT_at; Start 899; Stop 923
tagcagttagctggcttggtttgcc

SEQ ID NO: 210412 - DNA, 25 bp, Artificial
  probe
  misc_feature (1)..(25): SEQ ID NO: 2232; WAN024FKT_at; Start 127; Stop 151
ggacttctcaacgacccaaatggct

SEQ ID NO: 210413 - DNA, 25 bp, Artificial
  probe
  misc_feature (1)..(25): SEQ ID NO: 5158; WAN024FKU_at; Start 501; Stop 525
tagccgtagagaaggagcaaaaccc

SEQ ID NO: 210414 - DNA, 25 bp, Artificial
  probe
  misc_feature (1)..(25): SEQ ID NO: 5158; WAN024FKU_at; Start 1373; Stop 1397
tcttgtatgcccaaggaaaactggg

SEQ ID NO: 210415 - DNA, 25 bp, Artificial
  probe
  misc_feature (1)..(25): SEQ ID NO: 5158; WAN024FKU_at; Start 1485; Stop 1509
tggtccagtcgatagtccaagtctg

SEQ ID NO: 210416 - DNA, 25 bp, Artificial
  probe
  misc_feature (1)..(25): SEQ ID NO: 5158; WAN024FKU_at; Start 201; Stop 225
cgtgcctactcacccaagtcaaggt

SEQ ID NO: 210417 - DNA, 25 bp, Artificial
  probe
  misc_feature (1)..(25): SEQ ID NO: 5158; WAN024FKU_at; Start 422; Stop 446
aaaaagcagaacaagcaggtccaga

SEQ ID NO: 210418 - DNA, 25 bp, Artificial
  probe
  misc_feature (1)..(25): SEQ ID NO: 5158; WAN024FKU_at; Start 870; Stop 894
tggaacagatgaaccgcaagaacct

SEQ ID NO: 210419 - DNA, 25 bp, Artificial
  probe
  misc_feature (1)..(25): SEQ ID NO: 5158; WAN024FKU_at; Start 253; Stop 277
caaagagaaactcctggtgttccaa

SEQ ID NO: 210420 - DNA, 25 bp, Artificial
  probe
  misc_feature (1)..(25): SEQ ID NO: 5158; WAN024FKU_at; Start 268; Stop 292
ggtgttccaagtcatccaagtcaag

SEQ ID NO: 210421 - DNA, 25 bp, Artificial
  probe
  misc_feature (1)..(25): SEQ ID NO: 5158; WAN024FKU_at; Start 487; Stop 511
gatacatcacgtcgtagccgtagag

SEQ ID NO: 210422 - DNA, 25 bp, Artificial
  probe
  misc_feature (1)..(25): SEQ ID NO: 5158; WAN024FKU_at; Start 100; Stop 124
gatgaggcagtagttcgcactcctg

SEQ ID NO: 210423 - DNA, 25 bp, Artificial
  probe
  misc_feature (1)..(25): SEQ ID NO: 5158; WAN024FKU_at; Start 705; Stop 729
cgttcaagaaatcggtacgacgctt

SEQ ID NO: 210424 - DNA, 25 bp, Artificial
  probe
  misc_feature (1)..(25): SEQ ID NO: 5158; WAN024FKU_at; Start 1468; Stop 1492
aatgtaggtctcatgcctggtccag

SEQ ID NO: 210425 - DNA, 25 bp, Artificial
  probe
  misc_feature (1)..(25): SEQ ID NO: 5158; WAN024FKU_at; Start 221; Stop 245
aaggtgtaccagcttctccagcaga

SEQ ID NO: 210426 - DNA, 25 bp, Artificial
  probe
  misc_feature (1)..(25): SEQ ID NO: 5158; WAN024FKU_at; Start 185; Stop 209
tgagaaaagctcctaccgtgcctac

SEQ ID NO: 210427 - DNA, 25 bp, Artificial
  probe
  misc_feature (1)..(25): SEQ ID NO: 5158; WAN024FKU_at; Start 1259; Stop 1283
ccattgcttccttggtcgaaaaaga

SEQ ID NO: 210428 - DNA, 25 bp, Artificial
  probe
  misc_feature (1)..(25): SEQ ID NO: 5158; WAN024FKU_at; Start 397; Stop 421
gctgtttcctatacgacggcagaga

SEQ ID NO: 210429 - DNA, 25 bp, Artificial
  probe
  misc_feature (1)..(25): SEQ ID NO: 5158; WAN024FKU_at; Start 150; Stop 174
catggctgattccttgtcaacggta

SEQ ID NO: 210430 - DNA, 25 bp, Artificial
  probe
  misc_feature (1)..(25): SEQ ID NO: 5158; WAN024FKU_at; Start 1562; Stop 1586
tagcagatgtcacagaaggcaaggt

SEQ ID NO: 210431 - DNA, 25 bp, Artificial
  probe
  misc_feature (1)..(25): SEQ ID NO: 5158; WAN024FKU_at; Start 785; Stop 809
aaaattataccgacttgaaagcagg

SEQ ID NO: 210432 - DNA, 25 bp, Artificial
  probe
  misc_feature (1)..(25): SEQ ID NO: 5158; WAN024FKU_at; Start 292; Stop 316
gatgtaccttcttctccagcggaag

SEQ ID NO: 210433 - DNA, 25 bp, Artificial
  probe
  misc_feature (1)..(25): SEQ ID NO: 5158; WAN024FKU_at; Start 889; Stop 913
gaacctgtacttgcgactttgacaa

SEQ ID NO: 210434 - DNA, 25 bp, Artificial
  probe
  misc_feature (1)..(25): SEQ ID NO: 5158; WAN024FKU_at; Start 596; Stop 620
tgctctcagcaggtggttactttgg

SEQ ID NO: 210435 - DNA, 25 bp, Artificial
  probe
  misc_feature (1)..(25): SEQ ID NO: 5158; WAN024FKU_at; Start 1406; Stop 1430
tcagtctagctgaggatgttgcgat

SEQ ID NO: 210436 - DNA, 25 bp, Artificial
  probe
  misc_feature (1)..(25): SEQ ID NO: 5158; WAN024FKU_at; Start 1596; Stop 1620
taacaatcaagaagaccacgaccgc

SEQ ID NO: 210437 - DNA, 25 bp, Artificial
  probe
  misc_feature (1)..(25): SEQ ID NO: 5158; WAN024FKU_at; Start 1071; Stop 1095
tttgcctgtaaaagacagcggtgcg

SEQ ID NO: 210438 - DNA, 25 bp, Artificial
  probe
  misc_feature (1)..(25): SEQ ID NO: 5158; WAN024FKU_at; Start 453; Stop 477
tacgcctgctacagaaacagtggat

SEQ ID NO: 210439 - DNA, 25 bp, Artificial
  probe
  misc_feature (1)..(25): SEQ ID NO: 5158; WAN024FKU_at; Start 1086; Stop 1110
cagcggtgcgcgttatcgtttggaa

SEQ ID NO: 210440 - DNA, 25 bp, Artificial
  probe
  misc_feature (1)..(25): SEQ ID NO: 5158; WAN024FKU_at; Start 1025; Stop 1049
cgtttatcagtcaagcagtagcgaa

SEQ ID NO: 210441 - DNA, 25 bp, Artificial
  probe
  misc_feature (1)..(25): SEQ ID NO: 5158; WAN024FKU_at; Start 308; Stop 332
cagcggaagaaagtggatcaagacc

SEQ ID NO: 210442 - DNA, 25 bp, Artificial
  probe
  misc_feature (1)..(25): SEQ ID NO: 5158; WAN024FKU_at; Start 1297; Stop 1321
gaagatcgtaagctcattgcaggtg

SEQ ID NO: 210443 - DNA, 25 bp, Artificial
  probe
  misc_feature (1)..(25): SEQ ID NO: 5158; WAN024FKU_at; Start 1107; Stop 1131
ggaaggataccttttcccagctaca

SEQ ID NO: 210444 - DNA, 25 bp, Artificial
  probe
  misc_feature (1)..(25): SEQ ID NO: 5158; WAN024FKU_at; Start 1282; Stop 1306
gaaggtgccaagacagaagatcgta

SEQ ID NO: 210445 - DNA, 25 bp, Artificial
  probe
  misc_feature (1)..(25): SEQ ID NO: 5158; WAN024FKU_at; Start 1140; Stop 1164
caaggaaagcacaactattgagagc

SEQ ID NO: 210446 - DNA, 25 bp, Artificial
  probe
  misc_feature (1)..(25): SEQ ID NO: 5158; WAN024FKU_at; Start 1501; Stop 1525
ccaagtctggatgcgattgagtcaa

SEQ ID NO: 210447 - DNA, 25 bp, Artificial
  probe
  misc_feature (1)..(25): SEQ ID NO: 4167; WAN024FKV_at; Start 35; Stop 59
gttataaacacgaatcagattccct

SEQ ID NO: 210448 - DNA, 25 bp, Artificial
  probe
  misc_feature (1)..(25): SEQ ID NO: 4167; WAN024FKV_at; Start 11; Stop 35
ttcagcctcttctctttttgaacgg

SEQ ID NO: 210449 - DNA, 25 bp, Artificial
  probe
  misc_feature (1)..(25): SEQ ID NO: 4167; WAN024FKV_at; Start 27; Stop 51
tttgaacggttataaacacgaatca

SEQ ID NO: 210450 - DNA, 25 bp, Artificial
  probe
  misc_feature (1)..(25): SEQ ID NO: 4167; WAN024FKV_at; Start 29; Stop 53
tgaacggttataaacacgaatcaga

SEQ ID NO: 210451 - DNA, 25 bp, Artificial
  probe
  misc_feature (1)..(25): SEQ ID NO: 4167; WAN024FKV_at; Start 55; Stop 79
tccctatttcttgcgatttatgtga

SEQ ID NO: 210452 - DNA, 25 bp, Artificial
  probe
  misc_feature (1)..(25): SEQ ID NO: 4167; WAN024FKV_at; Start 64; Stop 88
cttgcgatttatgtgattccttatt

SEQ ID NO: 210453 - DNA, 25 bp, Artificial
  probe
  misc_feature (1)..(25): SEQ ID NO: 4167; WAN024FKV_at; Start 30; Stop 54
gaacggttataaacacgaatcagat

SEQ ID NO: 210454 - DNA, 25 bp, Artificial
  probe
  misc_feature (1)..(25): SEQ ID NO: 4167; WAN024FKV_at; Start 36; Stop 60
ttataaacacgaatcagattcccta

SEQ ID NO: 210455 - DNA, 25 bp, Artificial
  probe
  misc_feature (1)..(25): SEQ ID NO: 4167; WAN024FKV_at; Start 60; Stop 84
atttcttgcgatttatgtgattcct

SEQ ID NO: 210456 - DNA, 25 bp, Artificial
  probe
  misc_feature (1)..(25): SEQ ID NO: 4167; WAN024FKV_at; Start 12; Stop 36
tcagcctcttctctttttgaacggt

SEQ ID NO: 210457 - DNA, 25 bp, Artificial
  probe
  misc_feature (1)..(25): SEQ ID NO: 4167; WAN024FKV_at; Start 69; Stop 93
gatttatgtgattccttattttcca

SEQ ID NO: 210458 - DNA, 25 bp, Artificial
  probe
  misc_feature (1)..(25): SEQ ID NO: 4167; WAN024FKV_at; Start 72; Stop 96
ttatgtgattccttattttccaatc

SEQ ID NO: 210459 - DNA, 25 bp, Artificial
  probe
  misc_feature (1)..(25): SEQ ID NO: 4167; WAN024FKV_at; Start 63; Stop 87
tcttgcgatttatgtgattccttat

SEQ ID NO: 210460 - DNA, 25 bp, Artificial
  probe
  misc_feature (1)..(25): SEQ ID NO: 4167; WAN024FKV_at; Start 33; Stop 57
cggttataaacacgaatcagattcc

SEQ ID NO: 210461 - DNA, 25 bp, Artificial
  probe
  misc_feature (1)..(25): SEQ ID NO: 4167; WAN024FKV_at; Start 67; Stop 91
gcgatttatgtgattccttattttc

SEQ ID NO: 210462 - DNA, 25 bp, Artificial
  probe
  misc_feature (1)..(25): SEQ ID NO: 4167; WAN024FKV_at; Start 44; Stop 68
acgaatcagattccctatttcttgc

SEQ ID NO: 210463 - DNA, 25 bp, Artificial
  probe
  misc_feature (1)..(25): SEQ ID NO: 4167; WAN024FKV_at; Start 28; Stop 52
ttgaacggttataaacacgaatcag

SEQ ID NO: 210464 - DNA, 25 bp, Artificial
  probe
  misc_feature (1)..(25): SEQ ID NO: 4167; WAN024FKV_at; Start 49; Stop 73
tcagattccctatttcttgcgattt

SEQ ID NO: 210465 - DNA, 25 bp, Artificial
  probe
  misc_feature (1)..(25): SEQ ID NO: 4167; WAN024FKV_at; Start 13; Stop 37
cagcctcttctctttttgaacggtt

SEQ ID NO: 210466 - DNA, 25 bp, Artificial
  probe
  misc_feature (1)..(25): SEQ ID NO: 4167; WAN024FKV_at; Start 1; Stop 25
gtggctcactttcagcctcttctct

SEQ ID NO: 210467 - DNA, 25 bp, Artificial
  probe
  misc_feature (1)..(25): SEQ ID NO: 4167; WAN024FKV_at; Start 39; Stop 63
taaacacgaatcagattccctattt

SEQ ID NO: 210468 - DNA, 25 bp, Artificial
  probe
  misc_feature (1)..(25): SEQ ID NO: 4167; WAN024FKV_at; Start 7; Stop 31
cactttcagcctcttctctttttga

SEQ ID NO: 210469 - DNA, 25 bp, Artificial
  probe
  misc_feature (1)..(25): SEQ ID NO: 4167; WAN024FKV_at; Start 57; Stop 81
cctatttcttgcgatttatgtgatt

SEQ ID NO: 210470 - DNA, 25 bp, Artificial
  probe
  misc_feature (1)..(25): SEQ ID NO: 4167; WAN024FKV_at; Start 46; Stop 70
gaatcagattccctatttcttgcga

SEQ ID NO: 210471 - DNA, 25 bp, Artificial
  probe
  misc_feature (1)..(25): SEQ ID NO: 4167; WAN024FKV_at; Start 2; Stop 26
tggctcactttcagcctcttctctt

SEQ ID NO: 210472 - DNA, 25 bp, Artificial
  probe
  misc_feature (1)..(25): SEQ ID NO: 4167; WAN024FKV_at; Start 37; Stop 61
tataaacacgaatcagattccctat

SEQ ID NO: 210473 - DNA, 25 bp, Artificial
  probe
  misc_feature (1)..(25): SEQ ID NO: 4167; WAN024FKV_at; Start 50; Stop 74
cagattccctatttcttgcgattta

SEQ ID NO: 210474 - DNA, 25 bp, Artificial
  probe
  misc_feature (1)..(25): SEQ ID NO: 4167; WAN024FKV_at; Start 52; Stop 76
gattccctatttcttgcgatttatg

SEQ ID NO: 210475 - DNA, 25 bp, Artificial
  probe
  misc_feature (1)..(25): SEQ ID NO: 4167; WAN024FKV_at; Start 62; Stop 86
ttcttgcgatttatgtgattcctta

SEQ ID NO: 210476 - DNA, 25 bp, Artificial
  probe
  misc_feature (1)..(25): SEQ ID NO: 4167; WAN024FKV_at; Start 43; Stop 67
cacgaatcagattccctatttcttg

SEQ ID NO: 210477 - DNA, 25 bp, Artificial
  probe
  misc_feature (1)..(25): SEQ ID NO: 4167; WAN024FKV_at; Start 34; Stop 58
ggttataaacacgaatcagattccc

SEQ ID NO: 210478 - DNA, 25 bp, Artificial
  probe
  misc_feature (1)..(25): SEQ ID NO: 4167; WAN024FKV_at; Start 47; Stop 71
aatcagattccctatttcttgcgat

SEQ ID NO: 210479 - DNA, 25 bp, Artificial
  probe
  misc_feature (1)..(25): SEQ ID NO: 4167; WAN024FKV_at; Start 32; Stop 56
acggttataaacacgaatcagattc

SEQ ID NO: 210480 - DNA, 25 bp, Artificial
  probe
  misc_feature (1)..(25): SEQ ID NO: 4167; WAN024FKV_at; Start 59; Stop 83
tatttcttgcgatttatgtgattcc

SEQ ID NO: 210481 - DNA, 25 bp, Artificial
  probe
  misc_feature (1)..(25): SEQ ID NO: 5263; WAN024FKW_at; Start 292; Stop 316
caaggaatcggttcaaaactattgc

SEQ ID NO: 210482 - DNA, 25 bp, Artificial
  probe
  misc_feature (1)..(25): SEQ ID NO: 5263; WAN024FKW_at; Start 103; Stop 127
cataaatcgcaagaaatagggaatc

SEQ ID NO: 210483 - DNA, 25 bp, Artificial
  probe
  misc_feature (1)..(25): SEQ ID NO: 5263; WAN024FKW_at; Start 93; Stop 117
taaggaatcacataaatcgcaagaa

SEQ ID NO: 210484 - DNA, 25 bp, Artificial
  probe
  misc_feature (1)..(25): SEQ ID NO: 5263; WAN024FKW_at; Start 330; Stop 354
tgaagctaagaatcgaaattgttgt

SEQ ID NO: 210485 - DNA, 25 bp, Artificial
  probe
  misc_feature (1)..(25): SEQ ID NO: 5263; WAN024FKW_at; Start 109; Stop 133
tcgcaagaaatagggaatctgattc

SEQ ID NO: 210486 - DNA, 25 bp, Artificial
  probe
  misc_feature (1)..(25): SEQ ID NO: 5263; WAN024FKW_at; Start 410; Stop 434
gctacaaggaagttttttctttgca

SEQ ID NO: 210487 - DNA, 25 bp, Artificial
  probe
  misc_feature (1)..(25): SEQ ID NO: 5263; WAN024FKW_at; Start 397; Stop 421
tatcagaaacatggctacaaggaag

SEQ ID NO: 210488 - DNA, 25 bp, Artificial
  probe
  misc_feature (1)..(25): SEQ ID NO: 5263; WAN024FKW_at; Start 128; Stop 152
tgattcgtgtttataaccgttcaaa

SEQ ID NO: 210489 - DNA, 25 bp, Artificial
  probe
  misc_feature (1)..(25): SEQ ID NO: 5263; WAN024FKW_at; Start 142; Stop 166
aaccgttcaaaaagagaagaggctg

SEQ ID NO: 210490 - DNA, 25 bp, Artificial
  probe
  misc_feature (1)..(25): SEQ ID NO: 5263; WAN024FKW_at; Start 311; Stop 335
tattgcaacaggcagaaagtgaagc

SEQ ID NO: 210491 - DNA, 25 bp, Artificial
  probe
  misc_feature (1)..(25): SEQ ID NO: 5263; WAN024FKW_at; Start 155; Stop 179
gagaagaggctgaaagtgagccact

SEQ ID NO: 210492 - DNA, 25 bp, Artificial
  probe
  misc_feature (1)..(25): SEQ ID NO: 5263; WAN024FKW_at; Start 79; Stop 103
tttagattggaaaataaggaatcac

SEQ ID NO: 210493 - DNA, 25 bp, Artificial
  probe
  misc_feature (1)..(25): SEQ ID NO: 5263; WAN024FKW_at; Start 230; Stop 254
cagagacttttggaaattggctaga

SEQ ID NO: 210494 - DNA, 25 bp, Artificial
  probe
  misc_feature (1)..(25): SEQ ID NO: 5263; WAN024FKW_at; Start 262; Stop 286
tatttgtttgtaaaagaggaactgc

SEQ ID NO: 210495 - DNA, 25 bp, Artificial
  probe
  misc_feature (1)..(25): SEQ ID NO: 5263; WAN024FKW_at; Start 247; Stop 271
tggctagaaatcgagtatttgtttg

SEQ ID NO: 210496 - DNA, 25 bp, Artificial
  probe
  misc_feature (1)..(25): SEQ ID NO: 5263; WAN024FKW_at; Start 319; Stop 343
caggcagaaagtgaagctaagaatc

SEQ ID NO: 210497 - DNA, 25 bp, Artificial
  probe
  misc_feature (1)..(25): SEQ ID NO: 5263; WAN024FKW_at; Start 389; Stop 413
cggacttttatcagaaacatggcta

SEQ ID NO: 210498 - DNA, 25 bp, Artificial
  probe
  misc_feature (1)..(25): SEQ ID NO: 5263; WAN024FKW_at; Start 266; Stop 290
tgtttgtaaaagaggaactgcgagg

SEQ ID NO: 210499 - DNA, 25 bp, Artificial
  probe
  misc_feature (1)..(25): SEQ ID NO: 5263; WAN024FKW_at; Start 240; Stop 264
tggaaattggctagaaatcgagtat

SEQ ID NO: 210500 - DNA, 25 bp, Artificial
  probe
  misc_feature (1)..(25): SEQ ID NO: 5263; WAN024FKW_at; Start 220; Stop 244
ggtttgatagcagagacttttggaa

SEQ ID NO: 210501 - DNA, 25 bp, Artificial
  probe
  misc_feature (1)..(25): SEQ ID NO: 5263; WAN024FKW_at; Start 357; Stop 381
tgcctttgtcaatacttaccagttc

SEQ ID NO: 210502 - DNA, 25 bp, Artificial
  probe
  misc_feature (1)..(25): SEQ ID NO: 5263; WAN024FKW_at; Start 191; Stop 215
tcgaagatgaaaagggcaatctcct

SEQ ID NO: 210503 - DNA, 25 bp, Artificial
  probe
  misc_feature (1)..(25): SEQ ID NO: 5263; WAN024FKW_at; Start 343; Stop 367
cgaaattgttgttttgcctttgtca

SEQ ID NO: 210504 - DNA, 25 bp, Artificial
  probe
  misc_feature (1)..(25): SEQ ID NO: 5263; WAN024FKW_at; Start 172; Stop 196
gagccacttaatctttatgtcgaag

SEQ ID NO: 210505 - DNA, 25 bp, Artificial
  probe
  misc_feature (1)..(25): SEQ ID NO: 5263; WAN024FKW_at; Start 381; Stop 405
ccaggcaccggacttttatcagaaa

SEQ ID NO: 210506 - DNA, 25 bp, Artificial
  probe
  misc_feature (1)..(25): SEQ ID NO: 5263; WAN024FKW_at; Start 162; Stop 186
ggctgaaagtgagccacttaatctt

SEQ ID NO: 210507 - DNA, 25 bp, Artificial
  probe
  misc_feature (1)..(25): SEQ ID NO: 5263; WAN024FKW_at; Start 33; Stop 57
aaattccttaatcgatttgcgcatg

SEQ ID NO: 210508 - DNA, 25 bp, Artificial
  probe
  misc_feature (1)..(25): SEQ ID NO: 5263; WAN024FKW_at; Start 183; Stop 207
tctttatgtcgaagatgaaaagggc

SEQ ID NO: 210509 - DNA, 25 bp, Artificial
  probe
  misc_feature (1)..(25): SEQ ID NO: 5263; WAN024FKW_at; Start 405; Stop 429
acatggctacaaggaagttttttct

SEQ ID NO: 210510 - DNA, 25 bp, Artificial
  probe
  misc_feature (1)..(25): SEQ ID NO: 5263; WAN024FKW_at; Start 123; Stop 147
gaatctgattcgtgtttataaccgt

SEQ ID NO: 210511 - DNA, 25 bp, Artificial
  probe
  misc_feature (1)..(25): SEQ ID NO: 5263; WAN024FKW_at; Start 442; Stop 466
ctctacattaggcaaagatattatt

SEQ ID NO: 210512 - DNA, 25 bp, Artificial
  probe
  misc_feature (1)..(25): SEQ ID NO: 5263; WAN024FKW_at; Start 301; Stop 325
ggttcaaaactattgcaacaggcag

SEQ ID NO: 210513 - DNA, 25 bp, Artificial
  probe
  misc_feature (1)..(25): SEQ ID NO: 5263; WAN024FKW_at; Start 367; Stop 391
aatacttaccagttccaggcaccgg

SEQ ID NO: 210514 - DNA, 25 bp, Artificial
  probe
  misc_feature (1)..(25): SEQ ID NO: 5263; WAN024FKW_at; Start 43; Stop 67
atcgatttgcgcatgttttatttca

SEQ ID NO: 210515 - DNA, 25 bp, Artificial
  probe
  misc_feature (1)..(25): SEQ ID NO: 6799; WAN024FKX_at; Start 269; Stop 293
caaataacctcggtttgatggccaa

SEQ ID NO: 210516 - DNA, 25 bp, Artificial
  probe
  misc_feature (1)..(25): SEQ ID NO: 6799; WAN024FKX_at; Start 21; Stop 45
aaccatcaatattggtcctgttacc

SEQ ID NO: 210517 - DNA, 25 bp, Artificial
  probe
  misc_feature (1)..(25): SEQ ID NO: 6799; WAN024FKX_at; Start 584; Stop 608
ggtatccagttgcttttggtgctaa

SEQ ID NO: 210518 - DNA, 25 bp, Artificial
  probe
  misc_feature (1)..(25): SEQ ID NO: 6799; WAN024FKX_at; Start 246; Stop 270
tctatttctatttatggtactggca

SEQ ID NO: 210519 - DNA, 25 bp, Artificial
  probe
  misc_feature (1)..(25): SEQ ID NO: 6799; WAN024FKX_at; Start 510; Stop 534
ggtgttcggaaatatctttgctgga

SEQ ID NO: 210520 - DNA, 25 bp, Artificial
  probe
  misc_feature (1)..(25): SEQ ID NO: 6799; WAN024FKX_at; Start 501; Stop 525
tgccttgcgggtgttcggaaatatc

SEQ ID NO: 210521 - DNA, 25 bp, Artificial
  probe
  misc_feature (1)..(25): SEQ ID NO: 6799; WAN024FKX_at; Start 600; Stop 624
tggtgctaacttggcttggacagcc

SEQ ID NO: 210522 - DNA, 25 bp, Artificial
  probe
  misc_feature (1)..(25): SEQ ID NO: 6799; WAN024FKX_at; Start 441; Stop 465
cacacctggctttatgactcccatg

SEQ ID NO: 210523 - DNA, 25 bp, Artificial
  probe
  misc_feature (1)..(25): SEQ ID NO: 6799; WAN024FKX_at; Start 193; Stop 217
gaacctaacattggtaaaagctaca

SEQ ID NO: 210524 - DNA, 25 bp, Artificial
  probe
  misc_feature (1)..(25): SEQ ID NO: 6799; WAN024FKX_at; Start 666; Stop 690
catgttgtcttctatgtacttagga

SEQ ID NO: 210525 - DNA, 25 bp, Artificial
  probe
  misc_feature (1)..(25): SEQ ID NO: 6799; WAN024FKX_at; Start 650; Stop 674
aagcctatgtgtttaccatgttgtc

SEQ ID NO: 210526 - DNA, 25 bp, Artificial
  probe
  misc_feature (1)..(25): SEQ ID NO: 6799; WAN024FKX_at; Start 4; Stop 28
gaagaaagtatcaatccaaccatca

SEQ ID NO: 210527 - DNA, 25 bp, Artificial
  probe
  misc_feature (1)..(25): SEQ ID NO: 6799; WAN024FKX_at; Start 456; Stop 480
gactcccatgaatatcttagaagag

SEQ ID NO: 210528 - DNA, 25 bp, Artificial
  probe
  misc_feature (1)..(25): SEQ ID NO: 6799; WAN024FKX_at; Start 258; Stop 282
tatggtactggcaaataacctcggt

SEQ ID NO: 210529 - DNA, 25 bp, Artificial
  probe
  misc_feature (1)..(25): SEQ ID NO: 6799; WAN024FKX_at; Start 524; Stop 548
tctttgctggagaagtgatggctag

SEQ ID NO: 210530 - DNA, 25 bp, Artificial
  probe
  misc_feature (1)..(25): SEQ ID NO: 6799; WAN024FKX_at; Start 568; Stop 592
catcaagctctatattggtatccag

SEQ ID NO: 210531 - DNA, 25 bp, Artificial
  probe
  misc_feature (1)..(25): SEQ ID NO: 6799; WAN024FKX_at; Start 487; Stop 511
aactttttatcacttgccttgcggg

SEQ ID NO: 210532 - DNA, 25 bp, Artificial
  probe
  misc_feature (1)..(25): SEQ ID NO: 6799; WAN024FKX_at; Start 554; Stop 578
taatcactctatctcatcaagctct

SEQ ID NO: 210533 - DNA, 25 bp, Artificial
  probe
  misc_feature (1)..(25): SEQ ID NO: 6799; WAN024FKX_at; Start 297; Stop 321
tcaaactacagatgggacaaacctt

SEQ ID NO: 210534 - DNA, 25 bp, Artificial
  probe
  misc_feature (1)..(25): SEQ ID NO: 6799; WAN024FKX_at; Start 98; Stop 122
gctttatctattgggcaagtcgcaa

SEQ ID NO: 210535 - DNA, 25 bp, Artificial
  probe
  misc_feature (1)..(25): SEQ ID NO: 6799; WAN024FKX_at; Start 357; Stop 381
ggccttgtcatttggaattatcctg

SEQ ID NO: 210536 - DNA, 25 bp, Artificial
  probe
  misc_feature (1)..(25): SEQ ID NO: 6799; WAN024FKX_at; Start 339; Stop 363
aaatctccagtttgacttggccttg

SEQ ID NO: 210537 - DNA, 25 bp, Artificial
  probe
  misc_feature (1)..(25): SEQ ID NO: 6799; WAN024FKX_at; Start 311; Stop 335
ggacaaacctttggacatcgccaac

SEQ ID NO: 210538 - DNA, 25 bp, Artificial
  probe
  misc_feature (1)..(25): SEQ ID NO: 6799; WAN024FKX_at; Start 387; Stop 411
ccatattgaagggattcgtcgccgt

SEQ ID NO: 210539 - DNA, 25 bp, Artificial
  probe
  misc_feature (1)..(25): SEQ ID NO: 6799; WAN024FKX_at; Start 426; Stop 450
tctaaaagcctatatcacacctggc

SEQ ID NO: 210540 - DNA, 25 bp, Artificial
  probe
  misc_feature (1)..(25): SEQ ID NO: 6799; WAN024FKX_at; Start 222; Stop 246
agactgctcgctctttttcctttgt

SEQ ID NO: 210541 - DNA, 25 bp, Artificial
  probe
  misc_feature (1)..(25): SEQ ID NO: 6799; WAN024FKX_at; Start 324; Stop 348
gacatcgccaactgcaaatctccag

SEQ ID NO: 210542 - DNA, 25 bp, Artificial
  probe
  misc_feature (1)..(25): SEQ ID NO: 6799; WAN024FKX_at; Start 540; Stop 564
gatggctagtttgctaatcactcta

SEQ ID NO: 210543 - DNA, 25 bp, Artificial
  probe
  misc_feature (1)..(25): SEQ ID NO: 6799; WAN024FKX_at; Start 207; Stop 231
taaaagctacatgaaagactgctcg

SEQ ID NO: 210544 - DNA, 25 bp, Artificial
  probe
  misc_feature (1)..(25): SEQ ID NO: 6799; WAN024FKX_at; Start 154; Stop 178
gtacttgagtatttctatgacttcg

SEQ ID NO: 210545 - DNA, 25 bp, Artificial
  probe
  misc_feature (1)..(25): SEQ ID NO: 6799; WAN024FKX_at; Start 636; Stop 660
tatttcctgcatccaagcctatgtg

SEQ ID NO: 210546 - DNA, 25 bp, Artificial
  probe
  misc_feature (1)..(25): SEQ ID NO: 6799; WAN024FKX_at; Start 49; Stop 73
gatttaaccatgttagccatgacct

SEQ ID NO: 210547 - DNA, 25 bp, Artificial
  probe
  misc_feature (1)..(25): SEQ ID NO: 6799; WAN024FKX_at; Start 285; Stop 309
gatggccaaacttcaaactacagat

SEQ ID NO: 210548 - DNA, 25 bp, Artificial
  probe
  misc_feature (1)..(25): SEQ ID NO: 6799; WAN024FKX_at; Start 371; Stop 395
gaattatcctgatgacccatattga

SEQ ID NO: 210549 - DNA, 25 bp, Artificial
  probe
  misc_feature (1)..(25): SEQ ID NO: 1413; WAN024FKY_at; Start 65; Stop 89
cttccaagatattcatcggtatgac

SEQ ID NO: 210550 - DNA, 25 bp, Artificial
  probe
  misc_feature (1)..(25): SEQ ID NO: 1413; WAN024FKY_at; Start 12; Stop 36
tgcaaagatattcccaaaaatccgc

SEQ ID NO: 210551 - DNA, 25 bp, Artificial
  probe
  misc_feature (1)..(25): SEQ ID NO: 1413; WAN024FKY_at; Start 129; Stop 153
tccacgacgacgaacgctttctata

SEQ ID NO: 210552 - DNA, 25 bp, Artificial
  probe
  misc_feature (1)..(25): SEQ ID NO: 1413; WAN024FKY_at; Start 74; Stop 98
tattcatcggtatgacaaaaacagg

SEQ ID NO: 210553 - DNA, 25 bp, Artificial
  probe
  misc_feature (1)..(25): SEQ ID NO: 1413; WAN024FKY_at; Start 144; Stop 168
gctttctatatgtgtcaacaaaatg

SEQ ID NO: 210554 - DNA, 25 bp, Artificial
  probe
  misc_feature (1)..(25): SEQ ID NO: 1413; WAN024FKY_at; Start 133; Stop 157
cgacgacgaacgctttctatatgtg

SEQ ID NO: 210555 - DNA, 25 bp, Artificial
  probe
  misc_feature (1)..(25): SEQ ID NO: 1413; WAN024FKY_at; Start 77; Stop 101
tcatcggtatgacaaaaacaggact

SEQ ID NO: 210556 - DNA, 25 bp, Artificial
  probe
  misc_feature (1)..(25): SEQ ID NO: 1413; WAN024FKY_at; Start 28; Stop 52
aaaatccgcaaagccaaagataaga

SEQ ID NO: 210557 - DNA, 25 bp, Artificial
  probe
  misc_feature (1)..(25): SEQ ID NO: 1413; WAN024FKY_at; Start 46; Stop 70
gataagaagtttgtaaattcttcca

SEQ ID NO: 210558 - DNA, 25 bp, Artificial
  probe
  misc_feature (1)..(25): SEQ ID NO: 1413; WAN024FKY_at; Start 222; Stop 246
ccagttagtcccatcgatcgtttga

SEQ ID NO: 210559 - DNA, 25 bp, Artificial
  probe
  misc_feature (1)..(25): SEQ ID NO: 1413; WAN024FKY_at; Start 24; Stop 48
cccaaaaatccgcaaagccaaagat

SEQ ID NO: 210560 - DNA, 25 bp, Artificial
  probe
  misc_feature (1)..(25): SEQ ID NO: 1413; WAN024FKY_at; Start 205; Stop 229
gcggttggcgaactccaccagttag

SEQ ID NO: 210561 - DNA, 25 bp, Artificial
  probe
  misc_feature (1)..(25): SEQ ID NO: 1413; WAN024FKY_at; Start 80; Stop 104
tcggtatgacaaaaacaggactcat

SEQ ID NO: 210562 - DNA, 25 bp, Artificial
  probe
  misc_feature (1)..(25): SEQ ID NO: 1413; WAN024FKY_at; Start 59; Stop 83
taaattcttccaagatattcatcgg

SEQ ID NO: 210563 - DNA, 25 bp, Artificial
  probe
  misc_feature (1)..(25): SEQ ID NO: 1413; WAN024FKY_at; Start 125; Stop 149
taaatccacgacgacgaacgctttc

SEQ ID NO: 210564 - DNA, 25 bp, Artificial
  probe
  misc_feature (1)..(25): SEQ ID NO: 1413; WAN024FKY_at; Start 190; Stop 214
tcatactgtaaattagcggttggcg

SEQ ID NO: 210565 - DNA, 25 bp, Artificial
  probe
  misc_feature (1)..(25): SEQ ID NO: 1413; WAN024FKY_at; Start 150; Stop 174
tatatgtgtcaacaaaatgacaaga

SEQ ID NO: 210566 - DNA, 25 bp, Artificial
  probe
  misc_feature (1)..(25): SEQ ID NO: 1413; WAN024FKY_at; Start 136; Stop 160
cgacgaacgctttctatatgtgtca

SEQ ID NO: 210567 - DNA, 25 bp, Artificial
  probe
  misc_feature (1)..(25): SEQ ID NO: 1413; WAN024FKY_at; Start 2; Stop 26
tgacctctcctgcaaagatattccc

SEQ ID NO: 210568 - DNA, 25 bp, Artificial
  probe
  misc_feature (1)..(25): SEQ ID NO: 1413; WAN024FKY_at; Start 214; Stop 238
gaactccaccagttagtcccatcga

SEQ ID NO: 210569 - DNA, 25 bp, Artificial
  probe
  misc_feature (1)..(25): SEQ ID NO: 1413; WAN024FKY_at; Start 198; Stop 222
taaattagcggttggcgaactccac

SEQ ID NO: 210570 - DNA, 25 bp, Artificial
  probe
  misc_feature (1)..(25): SEQ ID NO: 1413; WAN024FKY_at; Start 18; Stop 42
gatattcccaaaaatccgcaaagcc

SEQ ID NO: 210571 - DNA, 25 bp, Artificial
  probe
  misc_feature (1)..(25): SEQ ID NO: 1413; WAN024FKY_at; Start 173; Stop 197
gaaaagataaggttaagtcatactg

SEQ ID NO: 210572 - DNA, 25 bp, Artificial
  probe
  misc_feature (1)..(25): SEQ ID NO: 1413; WAN024FKY_at; Start 196; Stop 220
tgtaaattagcggttggcgaactcc

SEQ ID NO: 210573 - DNA, 25 bp, Artificial
  probe
  misc_feature (1)..(25): SEQ ID NO: 1413; WAN024FKY_at; Start 162; Stop 186
caaaatgacaagaaaagataaggtt

SEQ ID NO: 210574 - DNA, 25 bp, Artificial
  probe
  misc_feature (1)..(25): SEQ ID NO: 1413; WAN024FKY_at; Start 183; Stop 207
ggttaagtcatactgtaaattagcg

SEQ ID NO: 210575 - DNA, 25 bp, Artificial
  probe
  misc_feature (1)..(25): SEQ ID NO: 1413; WAN024FKY_at; Start 210; Stop 234
tggcgaactccaccagttagtccca

SEQ ID NO: 210576 - DNA, 25 bp, Artificial
  probe
  misc_feature (1)..(25): SEQ ID NO: 1413; WAN024FKY_at; Start 202; Stop 226
ttagcggttggcgaactccaccagt

SEQ ID NO: 210577 - DNA, 25 bp, Artificial
  probe
  misc_feature (1)..(25): SEQ ID NO: 1413; WAN024FKY_at; Start 140; Stop 164
gaacgctttctatatgtgtcaacaa

SEQ ID NO: 210578 - DNA, 25 bp, Artificial
  probe
  misc_feature (1)..(25): SEQ ID NO: 1413; WAN024FKY_at; Start 20; Stop 44
tattcccaaaaatccgcaaagccaa

SEQ ID NO: 210579 - DNA, 25 bp, Artificial
  probe
  misc_feature (1)..(25): SEQ ID NO: 1413; WAN024FKY_at; Start 218; Stop 242
tccaccagttagtcccatcgatcgt

SEQ ID NO: 210580 - DNA, 25 bp, Artificial
  probe
  misc_feature (1)..(25): SEQ ID NO: 1413; WAN024FKY_at; Start 207; Stop 231
ggttggcgaactccaccagttagtc

SEQ ID NO: 210581 - DNA, 25 bp, Artificial
  probe
  misc_feature (1)..(25): SEQ ID NO: 1413; WAN024FKY_at; Start 193; Stop 217
tactgtaaattagcggttggcgaac

SEQ ID NO: 210582 - DNA, 25 bp, Artificial
  probe
  misc_feature (1)..(25): SEQ ID NO: 1413; WAN024FKY_at; Start 87; Stop 111
gacaaaaacaggactcataaaagat

SEQ ID NO: 210583 - DNA, 25 bp, Artificial
  probe
  misc_feature (1)..(25): SEQ ID NO: 2202; WAN024FKZ_at; Start 394; Stop 418
gaaagcgttcgtcgtcgtggattta

SEQ ID NO: 210584 - DNA, 25 bp, Artificial
  probe
  misc_feature (1)..(25): SEQ ID NO: 2202; WAN024FKZ_at; Start 386; Stop 410
cacatatagaaagcgttcgtcgtcg

SEQ ID NO: 210585 - DNA, 25 bp, Artificial
  probe
  misc_feature (1)..(25): SEQ ID NO: 2202; WAN024FKZ_at; Start 590; Stop 614
cagtagcctttggagctaatttggc

SEQ ID NO: 210586 - DNA, 25 bp, Artificial
  probe
  misc_feature (1)..(25): SEQ ID NO: 2202; WAN024FKZ_at; Start 34; Stop 58
ggtcctgttatcttcaatctgacta

SEQ ID NO: 210587 - DNA, 25 bp, Artificial
  probe
  misc_feature (1)..(25): SEQ ID NO: 2202; WAN024FKZ_at; Start 98; Stop 122
tctttatttattgggcaagccgcaa

SEQ ID NO: 210588 - DNA, 25 bp, Artificial
  probe
  misc_feature (1)..(25): SEQ ID NO: 2202; WAN024FKZ_at; Start 222; Stop 246
agattactcactctttttcctttgt

SEQ ID NO: 210589 - DNA, 25 bp, Artificial
  probe
  misc_feature (1)..(25): SEQ ID NO: 2202; WAN024FKZ_at; Start 322; Stop 346
tggagttcgccaaccgctaatttac

SEQ ID NO: 210590 - DNA, 25 bp, Artificial
  probe
  misc_feature (1)..(25): SEQ ID NO: 2202; WAN024FKZ_at; Start 672; Stop 696
gacatctgtgtatttagggaataag

SEQ ID NO: 210591 - DNA, 25 bp, Artificial
  probe
  misc_feature (1)..(25): SEQ ID NO: 2202; WAN024FKZ_at; Start 689; Stop 713
ggaataagattaatattgaagagga

SEQ ID NO: 210592 - DNA, 25 bp, Artificial
  probe
  misc_feature (1)..(25): SEQ ID NO: 2202; WAN024FKZ_at; Start 258; Stop 282
catggtgattgccaataaccttggc

SEQ ID NO: 210593 - DNA, 25 bp, Artificial
  probe
  misc_feature (1)..(25): SEQ ID NO: 2202; WAN024FKZ_at; Start 425; Stop 449
gtataaaatcttttatgagtcctgt

SEQ ID NO: 210594 - DNA, 25 bp, Artificial
  probe
  misc_feature (1)..(25): SEQ ID NO: 2202; WAN024FKZ_at; Start 7; Stop 31
gaaagtattaatccaatcatctcta

SEQ ID NO: 210595 - DNA, 25 bp, Artificial
  probe
  misc_feature (1)..(25): SEQ ID NO: 2202; WAN024FKZ_at; Start 316; Stop 340
aactggtggagttcgccaaccgcta

SEQ ID NO: 210596 - DNA, 25 bp, Artificial
  probe
  misc_feature (1)..(25): SEQ ID NO: 2202; WAN024FKZ_at; Start 21; Stop 45
aatcatctctattggtcctgttatc

SEQ ID NO: 210597 - DNA, 25 bp, Artificial
  probe
  misc_feature (1)..(25): SEQ ID NO: 2202; WAN024FKZ_at; Start 47; Stop 71
tcaatctgactatgttagccatgac

SEQ ID NO: 210598 - DNA, 25 bp, Artificial
  probe
  misc_feature (1)..(25): SEQ ID NO: 2202; WAN024FKZ_at; Start 209; Stop 233
cgcgctacatgaaagattactcact

SEQ ID NO: 210599 - DNA, 25 bp, Artificial
  probe
  misc_feature (1)..(25): SEQ ID NO: 2202; WAN024FKZ_at; Start 352; Stop 376
gacttaaccttatcttttcttgtca

SEQ ID NO: 210600 - DNA, 25 bp, Artificial
  probe
  misc_feature (1)..(25): SEQ ID NO: 2202; WAN024FKZ_at; Start 468; Stop 492
tatcttggaagaatttacaaacttc

SEQ ID NO: 210601 - DNA, 25 bp, Artificial
  probe
  misc_feature (1)..(25): SEQ ID NO: 2202; WAN024FKZ_at; Start 561; Stop 585
tctttcccaccaagctatttattgg

SEQ ID NO: 210602 - DNA, 25 bp, Artificial
  probe
  misc_feature (1)..(25): SEQ ID NO: 2202; WAN024FKZ_at; Start 532; Stop 556
ggagaggtcatgacgagtttgttac

SEQ ID NO: 210603 - DNA, 25 bp, Artificial
  probe
  misc_feature (1)..(25): SEQ ID NO: 2202; WAN024FKZ_at; Start 390; Stop 414
tatagaaagcgttcgtcgtcgtgga

SEQ ID NO: 210604 - DNA, 25 bp, Artificial
  probe
  misc_feature (1)..(25): SEQ ID NO: 2202; WAN024FKZ_at; Start 580; Stop 604
tattggtatccagtagcctttggag

SEQ ID NO: 210605 - DNA, 25 bp, Artificial
  probe
  misc_feature (1)..(25): SEQ ID NO: 2202; WAN024FKZ_at; Start 201; Stop 225
cattggttcgcgctacatgaaagat

SEQ ID NO: 210606 - DNA, 25 bp, Artificial
  probe
  misc_feature (1)..(25): SEQ ID NO: 2202; WAN024FKZ_at; Start 270; Stop 294
caataaccttggcttaatgacaaag

SEQ ID NO: 210607 - DNA, 25 bp, Artificial
  probe
  misc_feature (1)..(25): SEQ ID NO: 2202; WAN024FKZ_at; Start 524; Stop 548
tctttgcaggagaggtcatgacgag

SEQ ID NO: 210608 - DNA, 25 bp, Artificial
  probe
  misc_feature (1)..(25): SEQ ID NO: 2202; WAN024FKZ_at; Start 380; Stop 404
tgttgacacatatagaaagcgttcg

SEQ ID NO: 210609 - DNA, 25 bp, Artificial
  probe
  misc_feature (1)..(25): SEQ ID NO: 2202; WAN024FKZ_at; Start 365; Stop 389
cttttcttgtcattttgttgacaca

SEQ ID NO: 210610 - DNA, 25 bp, Artificial
  probe
  misc_feature (1)..(25): SEQ ID NO: 2202; WAN024FKZ_at; Start 193; Stop 217
gaacctaacattggttcgcgctaca

SEQ ID NO: 210611 - DNA, 25 bp, Artificial
  probe
  misc_feature (1)..(25): SEQ ID NO: 2202; WAN024FKZ_at; Start 571; Stop 595
caagctatttattggtatccagtag

SEQ ID NO: 210612 - DNA, 25 bp, Artificial
  probe
  misc_feature (1)..(25): SEQ ID NO: 2202; WAN024FKZ_at; Start 312; Stop 336
gactaactggtggagttcgccaacc

SEQ ID NO: 210613 - DNA, 25 bp, Artificial
  probe
  misc_feature (1)..(25): SEQ ID NO: 2202; WAN024FKZ_at; Start 486; Stop 510
aaacttcttatctttggctttgcgg

SEQ ID NO: 210614 - DNA, 25 bp, Artificial
  probe
  misc_feature (1)..(25): SEQ ID NO: 2202; WAN024FKZ_at; Start 454; Stop 478
gtcataccgatgaatatcttggaag

SEQ ID NO: 210615 - DNA, 25 bp, Artificial
  probe
  misc_feature (1)..(25): SEQ ID NO: 2202; WAN024FKZ_at; Start 253; Stop 277
cttttcatggtgattgccaataacc

SEQ ID NO: 210616 - DNA, 25 bp, Artificial
  probe
  misc_feature (1)..(25): SEQ ID NO: 2202; WAN024FKZ_at; Start 517; Stop 541
gggaatatctttgcaggagaggtca

SEQ ID NO: 210617 - DNA, 25 bp, Artificial
  probe
  misc_feature (1)..(25): SEQ ID NO: 4371; WAN024FL2_at; Start 258; Stop 282
tacaatccgccgtacagggaaaatc

SEQ ID NO: 210618 - DNA, 25 bp, Artificial
  probe
  misc_feature (1)..(25): SEQ ID NO: 4371; WAN024FL2_at; Start 949; Stop 973
ccatttatcgagacacaagcaggag

SEQ ID NO: 210619 - DNA, 25 bp, Artificial
  probe
  misc_feature (1)..(25): SEQ ID NO: 4371; WAN024FL2_at; Start 1200; Stop 1224
tgacttggacgcagcaacacaggct

SEQ ID NO: 210620 - DNA, 25 bp, Artificial
  probe
  misc_feature (1)..(25): SEQ ID NO: 4371; WAN024FL2_at; Start 880; Stop 904
cacagccgtttgcttgagcgctcag

SEQ ID NO: 210621 - DNA, 25 bp, Artificial
  probe
  misc_feature (1)..(25): SEQ ID NO: 4371; WAN024FL2_at; Start 1056; Stop 1080
tattcgtccagccatcgatgcgggt

SEQ ID NO: 210622 - DNA, 25 bp, Artificial
  probe
  misc_feature (1)..(25): SEQ ID NO: 4371; WAN024FL2_at; Start 1033; Stop 1057
ggcgatggcctcttcaatgcaggta

SEQ ID NO: 210623 - DNA, 25 bp, Artificial
  probe
  misc_feature (1)..(25): SEQ ID NO: 4371; WAN024FL2_at; Start 325; Stop 349
gatccgcttggtcgtccagttgacg

SEQ ID NO: 210624 - DNA, 25 bp, Artificial
  probe
  misc_feature (1)..(25): SEQ ID NO: 4371; WAN024FL2_at; Start 507; Stop 531
tgaccgtcagacagggaaaacaacc

SEQ ID NO: 210625 - DNA, 25 bp, Artificial
  probe
  misc_feature (1)..(25): SEQ ID NO: 4371; WAN024FL2_at; Start 925; Stop 949
ggtggtggatcaattacagccctac

SEQ ID NO: 210626 - DNA, 25 bp, Artificial
  probe
  misc_feature (1)..(25): SEQ ID NO: 4371; WAN024FL2_at; Start 1219; Stop 1243
caggctaagttgaaccgtggacgtc

SEQ ID NO: 210627 - DNA, 25 bp, Artificial
  probe
  misc_feature (1)..(25): SEQ ID NO: 4371; WAN024FL2_at; Start 1017; Stop 1041
tggacaaatcttccttggcgatggc

SEQ ID NO: 210628 - DNA, 25 bp, Artificial
  probe
  misc_feature (1)..(25): SEQ ID NO: 4371; WAN024FL2_at; Start 1088; Stop 1112
tatctcgtgtaggtggttctgcaca

SEQ ID NO: 210629 - DNA, 25 bp, Artificial
  probe
  misc_feature (1)..(25): SEQ ID NO: 4371; WAN024FL2_at; Start 275; Stop 299
ggaaaatcatggaagtccctgtagg

SEQ ID NO: 210630 - DNA, 25 bp, Artificial
  probe
  misc_feature (1)..(25): SEQ ID NO: 4371; WAN024FL2_at; Start 232; Stop 256
gactttacagatatccgtgaaggcg

SEQ ID NO: 210631 - DNA, 25 bp, Artificial
  probe
  misc_feature (1)..(25): SEQ ID NO: 4371; WAN024FL2_at; Start 863; Stop 887
gggatgttttctatctccacagccg

SEQ ID NO: 210632 - DNA, 25 bp, Artificial
  probe
  misc_feature (1)..(25): SEQ ID NO: 4371; WAN024FL2_at; Start 1149; Stop 1173
tatcgaccttgcttcataccgtgag

SEQ ID NO: 210633 - DNA, 25 bp, Artificial
  probe
  misc_feature (1)..(25): SEQ ID NO: 4371; WAN024FL2_at; Start 643; Stop 667
tacggtgccttggactacacaatcg

SEQ ID NO: 210634 - DNA, 25 bp, Artificial
  probe
  misc_feature (1)..(25): SEQ ID NO: 4371; WAN024FL2_at; Start 290; Stop 314
tccctgtaggtgaaagtctgattgg

SEQ ID NO: 210635 - DNA, 25 bp, Artificial
  probe
  misc_feature (1)..(25): SEQ ID NO: 4371; WAN024FL2_at; Start 341; Stop 365
cagttgacggtcttggagaaatcca

SEQ ID NO: 210636 - DNA, 25 bp, Artificial
  probe
  misc_feature (1)..(25): SEQ ID NO: 4371; WAN024FL2_at; Start 442; Stop 466
actggtttgaaagctattgacgccc

SEQ ID NO: 210637 - DNA, 25 bp, Artificial
  probe
  misc_feature (1)..(25): SEQ ID NO: 4371; WAN024FL2_at; Start 827; Stop 851
tgcttcgtcgtcctccaggtcgtga

SEQ ID NO: 210638 - DNA, 25 bp, Artificial
  probe
  misc_feature (1)..(25): SEQ ID NO: 4371; WAN024FL2_at; Start 604; Stop 628
gaatcaacagttcgtacgcaagtag

SEQ ID NO: 210639 - DNA, 25 bp, Artificial
  probe
  misc_feature (1)..(25): SEQ ID NO: 4371; WAN024FL2_at; Start 1102; Stop 1126
ggttctgcacaaatcaaagccatga

SEQ ID NO: 210640 - DNA, 25 bp, Artificial
  probe
  misc_feature (1)..(25): SEQ ID NO: 4371; WAN024FL2_at; Start 628; Stop 652
gaaacacttcgtcagtacggtgcct

SEQ ID NO: 210641 - DNA, 25 bp, Artificial
  probe
  misc_feature (1)..(25): SEQ ID NO: 4371; WAN024FL2_at; Start 573; Stop 597
gatctgtatctacgtcgcgattgga

SEQ ID NO: 210642 - DNA, 25 bp, Artificial
  probe
  misc_feature (1)..(25): SEQ ID NO: 4371; WAN024FL2_at; Start 487; Stop 511
caacgtgagttgattatcggtgacc

SEQ ID NO: 210643 - DNA, 25 bp, Artificial
  probe
  misc_feature (1)..(25): SEQ ID NO: 4371; WAN024FL2_at; Start 395; Stop 419
cagctcctggtgttatgcaacgtaa

SEQ ID NO: 210644 - DNA, 25 bp, Artificial
  probe
  misc_feature (1)..(25): SEQ ID NO: 4371; WAN024FL2_at; Start 783; Stop 807
tgatctatcaaaacaagcggtagct

SEQ ID NO: 210645 - DNA, 25 bp, Artificial
  probe
  misc_feature (1)..(25): SEQ ID NO: 4371; WAN024FL2_at; Start 1238; Stop 1262
gacgtcgtaccgttgaggtcttgaa

SEQ ID NO: 210646 - DNA, 25 bp, Artificial
  probe
  misc_feature (1)..(25): SEQ ID NO: 4371; WAN024FL2_at; Start 1438; Stop 1462
gacttgccagaagaagcagtcttgg

SEQ ID NO: 210647 - DNA, 25 bp, Artificial
  probe
  misc_feature (1)..(25): SEQ ID NO: 4371; WAN024FL2_at; Start 456; Stop 480
tattgacgcccttgtaccgattggt

SEQ ID NO: 210648 - DNA, 25 bp, Artificial
  probe
  misc_feature (1)..(25): SEQ ID NO: 4371; WAN024FL2_at; Start 1163; Stop 1187
cataccgtgagttggaagcctttac

SEQ ID NO: 210649 - DNA, 25 bp, Artificial
  probe
  misc_feature (1)..(25): SEQ ID NO: 4371; WAN024FL2_at; Start 167; Stop 191
aaaacggctcttatggtatggctca

SEQ ID NO: 210650 - DNA, 25 bp, Artificial
  probe
  misc_feature (1)..(25): SEQ ID NO: 4371; WAN024FL2_at; Start 1422; Stop 1446
cattcgtgatacaaaagacttgcca

SEQ ID NO: 210651 - DNA, 25 bp, Artificial
  probe
  misc_feature (1)..(25): SEQ ID NO: 1830; WAN024FL3_at; Start 372; Stop 396
tccagtagatacaattcgagtagct

SEQ ID NO: 210652 - DNA, 25 bp, Artificial
  probe
  misc_feature (1)..(25): SEQ ID NO: 1830; WAN024FL3_at; Start 774; Stop 798
cacagctgatactgttgttgcatta

SEQ ID NO: 210653 - DNA, 25 bp, Artificial
  probe
  misc_feature (1)..(25): SEQ ID NO: 1830; WAN024FL3_at; Start 283; Stop 307
gatttccactcgtatatccctgatg

SEQ ID NO: 210654 - DNA, 25 bp, Artificial
  probe
  misc_feature (1)..(25): SEQ ID NO: 1830; WAN024FL3_at; Start 333; Stop 357
cggagcaagcgtgactacctctaaa

SEQ ID NO: 210655 - DNA, 25 bp, Artificial
  probe
  misc_feature (1)..(25): SEQ ID NO: 1830; WAN024FL3_at; Start 147; Stop 171
ggcttgtatcaatagagtccatcag

SEQ ID NO: 210656 - DNA, 25 bp, Artificial
  probe
  misc_feature (1)..(25): SEQ ID NO: 1830; WAN024FL3_at; Start 549; Stop 573
tgttcgaacaaattacccagaatgc

SEQ ID NO: 210657 - DNA, 25 bp, Artificial
  probe
  misc_feature (1)..(25): SEQ ID NO: 1830; WAN024FL3_at; Start 345; Stop 369
gactacctctaaactcatgattgaa

SEQ ID NO: 210658 - DNA, 25 bp, Artificial
  probe
  misc_feature (1)..(25): SEQ ID NO: 1830; WAN024FL3_at; Start 297; Stop 321
tatccctgatggtttagttattgac

SEQ ID NO: 210659 - DNA, 25 bp, Artificial
  probe
  misc_feature (1)..(25): SEQ ID NO: 1830; WAN024FL3_at; Start 995; Stop 1019
ttcaacaattgggttggaagccgag

SEQ ID NO: 210660 - DNA, 25 bp, Artificial
  probe
  misc_feature (1)..(25): SEQ ID NO: 1830; WAN024FL3_at; Start 605; Stop 629
ttctaagtcagtatcaagtcccggc

SEQ ID NO: 210661 - DNA, 25 bp, Artificial
  probe
  misc_feature (1)..(25): SEQ ID NO: 1830; WAN024FL3_at; Start 1033; Stop 1057
gatgcttatgatcgaatgatgagaa

SEQ ID NO: 210662 - DNA, 25 bp, Artificial
  probe
  misc_feature (1)..(25): SEQ ID NO: 1830; WAN024FL3_at; Start 757; Stop 781
gaaggaaattactgctacacagctg

SEQ ID NO: 210663 - DNA, 25 bp, Artificial
  probe
  misc_feature (1)..(25): SEQ ID NO: 1830; WAN024FL3_at; Start 388; Stop 412
cgagtagcttttaatggaacgtatc

SEQ ID NO: 210664 - DNA, 25 bp, Artificial
  probe
  misc_feature (1)..(25): SEQ ID NO: 1830; WAN024FL3_at; Start 703; Stop 727
gctcgtagtgttatgcaagggaaag

SEQ ID NO: 210665 - DNA, 25 bp, Artificial
  probe
  misc_feature (1)..(25): SEQ ID NO: 1830; WAN024FL3_at; Start 534; Stop 558
tcttgatttgacatctgttcgaaca

SEQ ID NO: 210666 - DNA, 25 bp, Artificial
  probe
  misc_feature (1)..(25): SEQ ID NO: 1830; WAN024FL3_at; Start 319; Stop 343
gactatatcattcacggagcaagcg

SEQ ID NO: 210667 - DNA, 25 bp, Artificial
  probe
  misc_feature (1)..(25): SEQ ID NO: 1830; WAN024FL3_at; Start 902; Stop 926
tctctcaaacgagtcaagtggtttt

SEQ ID NO: 210668 - DNA, 25 bp, Artificial
  probe
  misc_feature (1)..(25): SEQ ID NO: 1830; WAN024FL3_at; Start 660; Stop 684
tgcaggcactctaccgggtgaaaat

SEQ ID NO: 210669 - DNA, 25 bp, Artificial
  probe
  misc_feature (1)..(25): SEQ ID NO: 1830; WAN024FL3_at; Start 107; Stop 131
gagtaacaggtttagtaggccttca

SEQ ID NO: 210670 - DNA, 25 bp, Artificial
  probe
  misc_feature (1)..(25): SEQ ID NO: 1830; WAN024FL3_at; Start 40; Stop 64
ttagagataattgcaaaagaagagc

SEQ ID NO: 210671 - DNA, 25 bp, Artificial
  probe
  misc_feature (1)..(25): SEQ ID NO: 1830; WAN024FL3_at; Start 630; Stop 654
taagattgctcgtctatcccagacc

SEQ ID NO: 210672 - DNA, 25 bp, Artificial
  probe
  misc_feature (1)..(25): SEQ ID NO: 1830; WAN024FL3_at; Start 686; Stop 710
gagtatttgctcaatttgctcgtag

SEQ ID NO: 210673 - DNA, 25 bp, Artificial
  probe
  misc_feature (1)..(25): SEQ ID NO: 1830; WAN024FL3_at; Start 874; Stop 898
gatatggcaaaaatggtaacttcgc

SEQ ID NO: 210674 - DNA, 25 bp, Artificial
  probe
  misc_feature (1)..(25): SEQ ID NO: 1830; WAN024FL3_at; Start 85; Stop 109
aattcaactgtttttatcacgggag

SEQ ID NO: 210675 - DNA, 25 bp, Artificial
  probe
  misc_feature (1)..(25): SEQ ID NO: 1830; WAN024FL3_at; Start 733; Stop 757
gttttacatacgttagggcaatcag

SEQ ID NO: 210676 - DNA, 25 bp, Artificial
  probe
  misc_feature (1)..(25): SEQ ID NO: 1830; WAN024FL3_at; Start 481; Stop 505
ggtagctttcagtcagatagaacaa

SEQ ID NO: 210677 - DNA, 25 bp, Artificial
  probe
  misc_feature (1)..(25): SEQ ID NO: 1830; WAN024FL3_at; Start 850; Stop 874
gaagagagtcatacaacaatagcag

SEQ ID NO: 210678 - DNA, 25 bp, Artificial
  probe
  misc_feature (1)..(25): SEQ ID NO: 1830; WAN024FL3_at; Start 916; Stop 940
caagtggtttttgatattccgaaga

SEQ ID NO: 210679 - DNA, 25 bp, Artificial
  probe
  misc_feature (1)..(25): SEQ ID NO: 1830; WAN024FL3_at; Start 888; Stop 912
ggtaacttcgcaattctctcaaacg

SEQ ID NO: 210680 - DNA, 25 bp, Artificial
  probe
  misc_feature (1)..(25): SEQ ID NO: 1830; WAN024FL3_at; Start 644; Stop 668
tatcccagacctttggtgcaggcac

SEQ ID NO: 210681 - DNA, 25 bp, Artificial
  probe
  misc_feature (1)..(25): SEQ ID NO: 1830; WAN024FL3_at; Start 1010; Stop 1034
ggaagccgagggtctctcttgtaga

SEQ ID NO: 210682 - DNA, 25 bp, Artificial
  probe
  misc_feature (1)..(25): SEQ ID NO: 1830; WAN024FL3_at; Start 467; Stop 491
caatggaggtatatggtagctttca

SEQ ID NO: 210683 - DNA, 25 bp, Artificial
  probe
  misc_feature (1)..(25): SEQ ID NO: 1830; WAN024FL3_at; Start 618; Stop 642
tcaagtcccggctaagattgctcgt

SEQ ID NO: 210684 - DNA, 25 bp, Artificial
  probe
  misc_feature (1)..(25): SEQ ID NO: 1830; WAN024FL3_at; Start 268; Stop 292
ggagatgtttcggaagatttccact

SEQ ID NO: 210685 - DNA, 25 bp, Artificial
  probe
  misc_feature (1)..(25): SEQ ID NO: 1135; WAN024FL4_at; Start 474; Stop 498
gacctactctgttgaaagttctaaa

SEQ ID NO: 210686 - DNA, 25 bp, Artificial
  probe
  misc_feature (1)..(25): SEQ ID NO: 1135; WAN024FL4_at; Start 679; Stop 703
cagacagatgacaaaagtgtgcact

SEQ ID NO: 210687 - DNA, 25 bp, Artificial
  probe
  misc_feature (1)..(25): SEQ ID NO: 1135; WAN024FL4_at; Start 837; Stop 861
gacttcactatatttagcttcaggc

SEQ ID NO: 210688 - DNA, 25 bp, Artificial
  probe
  misc_feature (1)..(25): SEQ ID NO: 1135; WAN024FL4_at; Start 952; Stop 976
cctgagttactttctatgattaccg

SEQ ID NO: 210689 - DNA, 25 bp, Artificial
  probe
  misc_feature (1)..(25): SEQ ID NO: 1135; WAN024FL4_at; Start 1009; Stop 1033
gagattattggagaaaggcttcgac

SEQ ID NO: 210690 - DNA, 25 bp, Artificial
  probe
  misc_feature (1)..(25): SEQ ID NO: 1135; WAN024FL4_at; Start 189; Stop 213
gaaaatgtggaagaaaactctttca

SEQ ID NO: 210691 - DNA, 25 bp, Artificial
  probe
  misc_feature (1)..(25): SEQ ID NO: 1135; WAN024FL4_at; Start 419; Stop 443
taaggttatcagaaggcattattgc

SEQ ID NO: 210692 - DNA, 25 bp, Artificial
  probe
  misc_feature (1)..(25): SEQ ID NO: 1135; WAN024FL4_at; Start 784; Stop 808
gagtcttgtatagaaacttatggag

SEQ ID NO: 210693 - DNA, 25 bp, Artificial
  probe
  misc_feature (1)..(25): SEQ ID NO: 1135; WAN024FL4_at; Start 875; Stop 899
tatggtcagaggcagcaatagctag

SEQ ID NO: 210694 - DNA, 25 bp, Artificial
  probe
  misc_feature (1)..(25): SEQ ID NO: 1135; WAN024FL4_at; Start 851; Stop 875
tagcttcaggcataccagtagttgt

SEQ ID NO: 210695 - DNA, 25 bp, Artificial
  probe
  misc_feature (1)..(25): SEQ ID NO: 1135; WAN024FL4_at; Start 601; Stop 625
ttaaagcaacataaagctggatatg

SEQ ID NO: 210696 - DNA, 25 bp, Artificial
  probe
  misc_feature (1)..(25): SEQ ID NO: 1135; WAN024FL4_at; Start 103; Stop 127
tatcagaagttaatagctgagtccg

SEQ ID NO: 210697 - DNA, 25 bp, Artificial
  probe
  misc_feature (1)..(25): SEQ ID NO: 1135; WAN024FL4_at; Start 47; Stop 71
aaaatgcgggtggaaaggctagaca

SEQ ID NO: 210698 - DNA, 25 bp, Artificial
  probe
  misc_feature (1)..(25): SEQ ID NO: 1135; WAN024FL4_at; Start 572; Stop 596
taaatgctccaattgttattgctgg

SEQ ID NO: 210699 - DNA, 25 bp, Artificial
  probe
  misc_feature (1)..(25): SEQ ID NO: 1135; WAN024FL4_at; Start 1033; Stop 1057
caaggtttttatactaaacaagcag

SEQ ID NO: 210700 - DNA, 25 bp, Artificial
  probe
  misc_feature (1)..(25): SEQ ID NO: 1135; WAN024FL4_at; Start 619; Stop 643
ggatatgtctatcatttaccaagca

SEQ ID NO: 210701 - DNA, 25 bp, Artificial
  probe
  misc_feature (1)..(25): SEQ ID NO: 1135; WAN024FL4_at; Start 769; Stop 793
gatggtccgtcatcagagtcttgta

SEQ ID NO: 210702 - DNA, 25 bp, Artificial
  probe
  misc_feature (1)..(25): SEQ ID NO: 1135; WAN024FL4_at; Start 132; Stop 156
gaatgaacgtcaggaattaaatgct

SEQ ID NO: 210703 - DNA, 25 bp, Artificial
  probe
  misc_feature (1)..(25): SEQ ID NO: 1135; WAN024FL4_at; Start 16; Stop 40
gaagaaacgttacttgatgaacagg

SEQ ID NO: 210704 - DNA, 25 bp, Artificial
  probe
  misc_feature (1)..(25): SEQ ID NO: 1135; WAN024FL4_at; Start 350; Stop 374
gatggtcgcagtcaaaatcgatatc

SEQ ID NO: 210705 - DNA, 25 bp, Artificial
  probe
  misc_feature (1)..(25): SEQ ID NO: 1135; WAN024FL4_at; Start 934; Stop 958
tccaatctgagtgaactacctgagt

SEQ ID NO: 210706 - DNA, 25 bp, Artificial
  probe
  misc_feature (1)..(25): SEQ ID NO: 1135; WAN024FL4_at; Start 804; Stop 828
tggagagtatcttcgtgtaaacaac

SEQ ID NO: 210707 - DNA, 25 bp, Artificial
  probe
  misc_feature (1)..(25): SEQ ID NO: 1135; WAN024FL4_at; Start 206; Stop 230
ctctttcagttgttggtaagggtga

SEQ ID NO: 210708 - DNA, 25 bp, Artificial
  probe
  misc_feature (1)..(25): SEQ ID NO: 1135; WAN024FL4_at; Start 63; Stop 87
ggctagacaagacgtcactgatatt

SEQ ID NO: 210709 - DNA, 25 bp, Artificial
  probe
  misc_feature (1)..(25): SEQ ID NO: 1135; WAN024FL4_at; Start 151; Stop 175
aatgctgttcaaagattggttcatc

SEQ ID NO: 210710 - DNA, 25 bp, Artificial
  probe
  misc_feature (1)..(25): SEQ ID NO: 1135; WAN024FL4_at; Start 818; Stop 842
gtgtaaacaaccctcacaagacttc

SEQ ID NO: 210711 - DNA, 25 bp, Artificial
  probe
  misc_feature (1)..(25): SEQ ID NO: 1135; WAN024FL4_at; Start 661; Stop 685
tatggaattggatatgaacagacag

SEQ ID NO: 210712 - DNA, 25 bp, Artificial
  probe
  misc_feature (1)..(25): SEQ ID NO: 1135; WAN024FL4_at; Start 334; Stop 358
gatttagaatcgttgcgatggtcgc

SEQ ID NO: 210713 - DNA, 25 bp, Artificial
  probe
  misc_feature (1)..(25): SEQ ID NO: 1135; WAN024FL4_at; Start 635; Stop 659
taccaagcaatgtggagtttaatct

SEQ ID NO: 210714 - DNA, 25 bp, Artificial
  probe
  misc_feature (1)..(25): SEQ ID NO: 1135; WAN024FL4_at; Start 922; Stop 946
ggtattcttgtatccaatctgagtg

SEQ ID NO: 210715 - DNA, 25 bp, Artificial
  probe
  misc_feature (1)..(25): SEQ ID NO: 1135; WAN024FL4_at; Start 889; Stop 913
gcaatagctagtttcattaaggaga

SEQ ID NO: 210716 - DNA, 25 bp, Artificial
  probe
  misc_feature (1)..(25): SEQ ID NO: 1135; WAN024FL4_at; Start 700; Stop 724
cactactgtggttcttttatgccag

SEQ ID NO: 210717 - DNA, 25 bp, Artificial
  probe
  misc_feature (1)..(25): SEQ ID NO: 1135; WAN024FL4_at; Start 866; Stop 890
cagtagttgtatggtcagaggcagc

SEQ ID NO: 210718 - DNA, 25 bp, Artificial
  probe
  misc_feature (1)..(25): SEQ ID NO: 1135; WAN024FL4_at; Start 715; Stop 739
tttatgccagaagaattaccattcg

SEQ ID NO: 210719 - DNA, 25 bp, Artificial
  probe
  misc_feature (1)..(25): SEQ ID NO: 5483; WAN024FL5_at; Start 81; Stop 105
tgaagctaaatatagtgaagtcttg

SEQ ID NO: 210720 - DNA, 25 bp, Artificial
  probe
  misc_feature (1)..(25): SEQ ID NO: 5483; WAN024FL5_at; Start 71; Stop 95
ctggtatgcctgaagctaaatatag

SEQ ID NO: 210721 - DNA, 25 bp, Artificial
  probe
  misc_feature (1)..(25): SEQ ID NO: 5483; WAN024FL5_at; Start 66; Stop 90
aactactggtatgcctgaagctaaa

SEQ ID NO: 210722 - DNA, 25 bp, Artificial
  probe
  misc_feature (1)..(25): SEQ ID NO: 5483; WAN024FL5_at; Start 73; Stop 97
ggtatgcctgaagctaaatatagtg

SEQ ID NO: 210723 - DNA, 25 bp, Artificial
  probe
  misc_feature (1)..(25): SEQ ID NO: 5483; WAN024FL5_at; Start 77; Stop 101
tgcctgaagctaaatatagtgaagt

SEQ ID NO: 210724 - DNA, 25 bp, Artificial
  probe
  misc_feature (1)..(25): SEQ ID NO: 5483; WAN024FL5_at; Start 61; Stop 85
catacaactactggtatgcctgaag

SEQ ID NO: 210725 - DNA, 25 bp, Artificial
  probe
  misc_feature (1)..(25): SEQ ID NO: 5483; WAN024FL5_at; Start 30; Stop 54
cttaatgaaactagctattgctgcc

SEQ ID NO: 210726 - DNA, 25 bp, Artificial
  probe
  misc_feature (1)..(25): SEQ ID NO: 5483; WAN024FL5_at; Start 28; Stop 52
tccttaatgaaactagctattgctg

SEQ ID NO: 210727 - DNA, 25 bp, Artificial
  probe
  misc_feature (1)..(25): SEQ ID NO: 5483; WAN024FL5_at; Start 48; Stop 72
tgctgcctctgaccatacaactact

SEQ ID NO: 210728 - DNA, 25 bp, Artificial
  probe
  misc_feature (1)..(25): SEQ ID NO: 5483; WAN024FL5_at; Start 45; Stop 69
tattgctgcctctgaccatacaact

SEQ ID NO: 210729 - DNA, 25 bp, Artificial
  probe
  misc_feature (1)..(25): SEQ ID NO: 5483; WAN024FL5_at; Start 79; Stop 103
cctgaagctaaatatagtgaagtct

SEQ ID NO: 210730 - DNA, 25 bp, Artificial
  probe
  misc_feature (1)..(25): SEQ ID NO: 5483; WAN024FL5_at; Start 49; Stop 73
gctgcctctgaccatacaactactg

SEQ ID NO: 210731 - DNA, 25 bp, Artificial
  probe
  misc_feature (1)..(25): SEQ ID NO: 5483; WAN024FL5_at; Start 65; Stop 89
caactactggtatgcctgaagctaa

SEQ ID NO: 210732 - DNA, 25 bp, Artificial
  probe
  misc_feature (1)..(25): SEQ ID NO: 5483; WAN024FL5_at; Start 6; Stop 30
tacaagaataccacaattattctcc

SEQ ID NO: 210733 - DNA, 25 bp, Artificial
  probe
  misc_feature (1)..(25): SEQ ID NO: 5483; WAN024FL5_at; Start 32; Stop 56
taatgaaactagctattgctgcctc

SEQ ID NO: 210734 - DNA, 25 bp, Artificial
  probe
  misc_feature (1)..(25): SEQ ID NO: 5483; WAN024FL5_at; Start 55; Stop 79
tctgaccatacaactactggtatgc

SEQ ID NO: 210735 - DNA, 25 bp, Artificial
  probe
  misc_feature (1)..(25): SEQ ID NO: 5483; WAN024FL5_at; Start 35; Stop 59
tgaaactagctattgctgcctctga

SEQ ID NO: 210736 - DNA, 25 bp, Artificial
  probe
  misc_feature (1)..(25): SEQ ID NO: 5483; WAN024FL5_at; Start 52; Stop 76
gcctctgaccatacaactactggta

SEQ ID NO: 210737 - DNA, 25 bp, Artificial
  probe
  misc_feature (1)..(25): SEQ ID NO: 5483; WAN024FL5_at; Start 1; Stop 25
ttggatacaagaataccacaattat

SEQ ID NO: 210738 - DNA, 25 bp, Artificial
  probe
  misc_feature (1)..(25): SEQ ID NO: 5483; WAN024FL5_at; Start 68; Stop 92
ctactggtatgcctgaagctaaata

SEQ ID NO: 210739 - DNA, 25 bp, Artificial
  probe
  misc_feature (1)..(25): SEQ ID NO: 5483; WAN024FL5_at; Start 40; Stop 64
ctagctattgctgcctctgaccata

SEQ ID NO: 210740 - DNA, 25 bp, Artificial
  probe
  misc_feature (1)..(25): SEQ ID NO: 5483; WAN024FL5_at; Start 38; Stop 62
aactagctattgctgcctctgacca

SEQ ID NO: 210741 - DNA, 25 bp, Artificial
  probe
  misc_feature (1)..(25): SEQ ID NO: 5483; WAN024FL5_at; Start 43; Stop 67
gctattgctgcctctgaccatacaa

SEQ ID NO: 210742 - DNA, 25 bp, Artificial
  probe
  misc_feature (1)..(25): SEQ ID NO: 5483; WAN024FL5_at; Start 29; Stop 53
ccttaatgaaactagctattgctgc

SEQ ID NO: 210743 - DNA, 25 bp, Artificial
  probe
  misc_feature (1)..(25): SEQ ID NO: 5483; WAN024FL5_at; Start 75; Stop 99
tatgcctgaagctaaatatagtgaa

SEQ ID NO: 210744 - DNA, 25 bp, Artificial
  probe
  misc_feature (1)..(25): SEQ ID NO: 5483; WAN024FL5_at; Start 42; Stop 66
agctattgctgcctctgaccataca

SEQ ID NO: 210745 - DNA, 25 bp, Artificial
  probe
  misc_feature (1)..(25): SEQ ID NO: 5483; WAN024FL5_at; Start 3; Stop 27
ggatacaagaataccacaattattc

SEQ ID NO: 210746 - DNA, 25 bp, Artificial
  probe
  misc_feature (1)..(25): SEQ ID NO: 5483; WAN024FL5_at; Start 69; Stop 93
tactggtatgcctgaagctaaatat

SEQ ID NO: 210747 - DNA, 25 bp, Artificial
  probe
  misc_feature (1)..(25): SEQ ID NO: 5483; WAN024FL5_at; Start 58; Stop 82
gaccatacaactactggtatgcctg

SEQ ID NO: 210748 - DNA, 25 bp, Artificial
  probe
  misc_feature (1)..(25): SEQ ID NO: 5483; WAN024FL5_at; Start 36; Stop 60
gaaactagctattgctgcctctgac

SEQ ID NO: 210749 - DNA, 25 bp, Artificial
  probe
  misc_feature (1)..(25): SEQ ID NO: 5483; WAN024FL5_at; Start 26; Stop 50
tctccttaatgaaactagctattgc

SEQ ID NO: 210750 - DNA, 25 bp, Artificial
  probe
  misc_feature (1)..(25): SEQ ID NO: 5483; WAN024FL5_at; Start 63; Stop 87
tacaactactggtatgcctgaagct

SEQ ID NO: 210751 - DNA, 25 bp, Artificial
  probe
  misc_feature (1)..(25): SEQ ID NO: 5483; WAN024FL5_at; Start 51; Stop 75
tgcctctgaccatacaactactggt

SEQ ID NO: 210752 - DNA, 25 bp, Artificial
  probe
  misc_feature (1)..(25): SEQ ID NO: 5483; WAN024FL5_at; Start 14; Stop 38
taccacaattattctccttaatgaa

SEQ ID NO: 210753 - DNA, 25 bp, Artificial
  probe
  misc_feature (1)..(25): SEQ ID NO: 1279; WAN024FL6_at; Start 341; Stop 365
taattacagcagacactatttcaga

SEQ ID NO: 210754 - DNA, 25 bp, Artificial
  probe
  misc_feature (1)..(25): SEQ ID NO: 1279; WAN024FL6_at; Start 461; Stop 485
aagtgcctagtcgtgaacattcgcg

SEQ ID NO: 210755 - DNA, 25 bp, Artificial
  probe
  misc_feature (1)..(25): SEQ ID NO: 1279; WAN024FL6_at; Start 3; Stop 27
gaatttagcagttatttttgctgga

SEQ ID NO: 210756 - DNA, 25 bp, Artificial
  probe
  misc_feature (1)..(25): SEQ ID NO: 1279; WAN024FL6_at; Start 634; Stop 658
gagaatattaagattacaacgcctg

SEQ ID NO: 210757 - DNA, 25 bp, Artificial
  probe
  misc_feature (1)..(25): SEQ ID NO: 1279; WAN024FL6_at; Start 55; Stop 79
gatagacctaagcagtttcttttgg

SEQ ID NO: 210758 - DNA, 25 bp, Artificial
  probe
  misc_feature (1)..(25): SEQ ID NO: 1279; WAN024FL6_at; Start 314; Stop 338
tgttaatccatgatggagtccgtcc

SEQ ID NO: 210759 - DNA, 25 bp, Artificial
  probe
  misc_feature (1)..(25): SEQ ID NO: 1279; WAN024FL6_at; Start 112; Stop 136
gagctatttgagaaccatccagaga

SEQ ID NO: 210760 - DNA, 25 bp, Artificial
  probe
  misc_feature (1)..(25): SEQ ID NO: 1279; WAN024FL6_at; Start 393; Stop 417
aaatgctattacttgtacagtggcc

SEQ ID NO: 210761 - DNA, 25 bp, Artificial
  probe
  misc_feature (1)..(25): SEQ ID NO: 1279; WAN024FL6_at; Start 103; Stop 127
cacactattgagctatttgagaacc

SEQ ID NO: 210762 - DNA, 25 bp, Artificial
  probe
  misc_feature (1)..(25): SEQ ID NO: 1279; WAN024FL6_at; Start 673; Stop 697
tttagggctttgtacgatcttcgtg

SEQ ID NO: 210763 - DNA, 25 bp, Artificial
  probe
  misc_feature (1)..(25): SEQ ID NO: 1279; WAN024FL6_at; Start 511; Stop 535
tggctaaaagatattctaggtgcac

SEQ ID NO: 210764 - DNA, 25 bp, Artificial
  probe
  misc_feature (1)..(25): SEQ ID NO: 1279; WAN024FL6_at; Start 328; Stop 352
ggagtccgtcctttaattacagcag

SEQ ID NO: 210765 - DNA, 25 bp, Artificial
  probe
  misc_feature (1)..(25): SEQ ID NO: 1279; WAN024FL6_at; Start 67; Stop 91
cagtttcttttggtacatggtaagc

SEQ ID NO: 210766 - DNA, 25 bp, Artificial
  probe
  misc_feature (1)..(25): SEQ ID NO: 1279; WAN024FL6_at; Start 174; Stop 198
tccgtatatggaggagatgaaatat

SEQ ID NO: 210767 - DNA, 25 bp, Artificial
  probe
  misc_feature (1)..(25): SEQ ID NO: 1279; WAN024FL6_at; Start 77; Stop 101
tggtacatggtaagccaattattgt

SEQ ID NO: 210768 - DNA, 25 bp, Artificial
  probe
  misc_feature (1)..(25): SEQ ID NO: 1279; WAN024FL6_at; Start 483; Stop 507
gcgatttgccaaggctcctcagagt

SEQ ID NO: 210769 - DNA, 25 bp, Artificial
  probe
  misc_feature (1)..(25): SEQ ID NO: 1279; WAN024FL6_at; Start 90; Stop 114
gccaattattgttcacactattgag

SEQ ID NO: 210770 - DNA, 25 bp, Artificial
  probe
  misc_feature (1)..(25): SEQ ID NO: 1279; WAN024FL6_at; Start 517; Stop 541
aaagatattctaggtgcacatcgag

SEQ ID NO: 210771 - DNA, 25 bp, Artificial
  probe
  misc_feature (1)..(25): SEQ ID NO: 1279; WAN024FL6_at; Start 645; Stop 669
gattacaacgcctgatgatttttat

SEQ ID NO: 210772 - DNA, 25 bp, Artificial
  probe
  misc_feature (1)..(25): SEQ ID NO: 1279; WAN024FL6_at; Start 213; Stop 237
taagattgctaagattgttccaggg

SEQ ID NO: 210773 - DNA, 25 bp, Artificial
  probe
  misc_feature (1)..(25): SEQ ID NO: 1279; WAN024FL6_at; Start 299; Stop 323
tagaggataatgttgtgttaatcca

SEQ ID NO: 210774 - DNA, 25 bp, Artificial
  probe
  misc_feature (1)..(25): SEQ ID NO: 1279; WAN024FL6_at; Start 31; Stop 55
tccggtacgcgaatgaatgcaaagg

SEQ ID NO: 210775 - DNA, 25 bp, Artificial
  probe
  misc_feature (1)..(25): SEQ ID NO: 1279; WAN024FL6_at; Start 127; Stop 151
catccagagattgatggaattatcg

SEQ ID NO: 210776 - DNA, 25 bp, Artificial
  probe
  misc_feature (1)..(25): SEQ ID NO: 1279; WAN024FL6_at; Start 40; Stop 64
cgaatgaatgcaaaggatagaccta

SEQ ID NO: 210777 - DNA, 25 bp, Artificial
  probe
  misc_feature (1)..(25): SEQ ID NO: 1279; WAN024FL6_at; Start 408; Stop 432
tacagtggccaaagaaacagttatc

SEQ ID NO: 210778 - DNA, 25 bp, Artificial
  probe
  misc_feature (1)..(25): SEQ ID NO: 1279; WAN024FL6_at; Start 474; Stop 498
tgaacattcgcgatttgccaaggct

SEQ ID NO: 210779 - DNA, 25 bp, Artificial
  probe
  misc_feature (1)..(25): SEQ ID NO: 1279; WAN024FL6_at; Start 262; Stop 286
tataatggtttagtcgcggctgaac

SEQ ID NO: 210780 - DNA, 25 bp, Artificial
  probe
  misc_feature (1)..(25): SEQ ID NO: 1279; WAN024FL6_at; Start 349; Stop 373
gcagacactatttcagataacatcc

SEQ ID NO: 210781 - DNA, 25 bp, Artificial
  probe
  misc_feature (1)..(25): SEQ ID NO: 1279; WAN024FL6_at; Start 621; Stop 645
tgttggtccgtatgagaatattaag

SEQ ID NO: 210782 - DNA, 25 bp, Artificial
  probe
  misc_feature (1)..(25): SEQ ID NO: 1279; WAN024FL6_at; Start 495; Stop 519
ggctcctcagagtttttggctaaaa

SEQ ID NO: 210783 - DNA, 25 bp, Artificial
  probe
  misc_feature (1)..(25): SEQ ID NO: 1279; WAN024FL6_at; Start 166; Stop 190
gattggattccgtatatggaggaga

SEQ ID NO: 210784 - DNA, 25 bp, Artificial
  probe
  misc_feature (1)..(25): SEQ ID NO: 1279; WAN024FL6_at; Start 364; Stop 388
gataacatccaatccgtaaaagaaa

SEQ ID NO: 210785 - DNA, 25 bp, Artificial
  probe
  misc_feature (1)..(25): SEQ ID NO: 1279; WAN024FL6_at; Start 606; Stop 630
tgatttacatgttgttgttggtccg

SEQ ID NO: 210786 - DNA, 25 bp, Artificial
  probe
  misc_feature (1)..(25): SEQ ID NO: 1279; WAN024FL6_at; Start 570; Stop 594
tattgattcatgcaccatgatgaga

SEQ ID NO: 210787 - DNA, 25 bp, Artificial
  probe
  misc_feature (1)..(25): SEQ ID NO: 627; WAN024FL7_at; Start 755; Stop 779
tattagggagagttttgagcgaacc

SEQ ID NO: 210788 - DNA, 25 bp, Artificial
  probe
  misc_feature (1)..(25): SEQ ID NO: 627; WAN024FL7_at; Start 258; Stop 282
tagagagtcggtagataaatatgct

SEQ ID NO: 210789 - DNA, 25 bp, Artificial
  probe
  misc_feature (1)..(25): SEQ ID NO: 627; WAN024FL7_at; Start 243; Stop 267
tattgtgaaaaaatgtagagagtcg

SEQ ID NO: 210790 - DNA, 25 bp, Artificial
  probe
  misc_feature (1)..(25): SEQ ID NO: 627; WAN024FL7_at; Start 24; Stop 48
caaaagatatggtgtgaaaaatgtg

SEQ ID NO: 210791 - DNA, 25 bp, Artificial
  probe
  misc_feature (1)..(25): SEQ ID NO: 627; WAN024FL7_at; Start 671; Stop 695
tacttgtttcctgtttaatagatga

SEQ ID NO: 210792 - DNA, 25 bp, Artificial
  probe
  misc_feature (1)..(25): SEQ ID NO: 627; WAN024FL7_at; Start 193; Stop 217
tgcgatattatctggtggctatggt

SEQ ID NO: 210793 - DNA, 25 bp, Artificial
  probe
  misc_feature (1)..(25): SEQ ID NO: 627; WAN024FL7_at; Start 480; Stop 504
tgaagatgagatattgaaccaagat

SEQ ID NO: 210794 - DNA, 25 bp, Artificial
  probe
  misc_feature (1)..(25): SEQ ID NO: 627; WAN024FL7_at; Start 601; Stop 625
tcgatacgtgatactttgatttcat

SEQ ID NO: 210795 - DNA, 25 bp, Artificial
  probe
  misc_feature (1)..(25): SEQ ID NO: 627; WAN024FL7_at; Start 400; Stop 424
tcagatttttgtcgaattagccttc

SEQ ID NO: 210796 - DNA, 25 bp, Artificial
  probe
  misc_feature (1)..(25): SEQ ID NO: 627; WAN024FL7_at; Start 63; Stop 87
taatgatgttctaccagtcaatctc

SEQ ID NO: 210797 - DNA, 25 bp, Artificial
  probe
  misc_feature (1)..(25): SEQ ID NO: 627; WAN024FL7_at; Start 214; Stop 238
tggtttcaaggacttgataatgcac

SEQ ID NO: 210798 - DNA, 25 bp, Artificial
  probe
  misc_feature (1)..(25): SEQ ID NO: 627; WAN024FL7_at; Start 279; Stop 303
tgctaaacgcagtggcaaaagggtt

SEQ ID NO: 210799 - DNA, 25 bp, Artificial
  probe
  misc_feature (1)..(25): SEQ ID NO: 627; WAN024FL7_at; Start 70; Stop 94
gttctaccagtcaatctcatctttc

SEQ ID NO: 210800 - DNA, 25 bp, Artificial
  probe
  misc_feature (1)..(25): SEQ ID NO: 627; WAN024FL7_at; Start 761; Stop 785
ggagagttttgagcgaaccatatga

SEQ ID NO: 210801 - DNA, 25 bp, Artificial
  probe
  misc_feature (1)..(25): SEQ ID NO: 627; WAN024FL7_at; Start 166; Stop 190
tcggattcaatcaagagtgaggagg

SEQ ID NO: 210802 - DNA, 25 bp, Artificial
  probe
  misc_feature (1)..(25): SEQ ID NO: 627; WAN024FL7_at; Start 38; Stop 62
tgaaaaatgtggttttacgtgctat

SEQ ID NO: 210803 - DNA, 25 bp, Artificial
  probe
  misc_feature (1)..(25): SEQ ID NO: 627; WAN024FL7_at; Start 112; Stop 136
cgtttgaattggcaagaaaaagtca

SEQ ID NO: 210804 - DNA, 25 bp, Artificial
  probe
  misc_feature (1)..(25): SEQ ID NO: 627; WAN024FL7_at; Start 342; Stop 366
ggtacctaacgaactctatgtgaaa

SEQ ID NO: 210805 - DNA, 25 bp, Artificial
  probe
  misc_feature (1)..(25): SEQ ID NO: 627; WAN024FL7_at; Start 352; Stop 376
gaactctatgtgaaatataagtcag

SEQ ID NO: 210806 - DNA, 25 bp, Artificial
  probe
  misc_feature (1)..(25): SEQ ID NO: 627; WAN024FL7_at; Start 551; Stop 575
tcagtaattggatgttatattcaaa

SEQ ID NO: 210807 - DNA, 25 bp, Artificial
  probe
  misc_feature (1)..(25): SEQ ID NO: 627; WAN024FL7_at; Start 363; Stop 387
gaaatataagtcaggtagtttgcca

SEQ ID NO: 210808 - DNA, 25 bp, Artificial
  probe
  misc_feature (1)..(25): SEQ ID NO: 627; WAN024FL7_at; Start 413; Stop 437
gaattagccttctttctaactatgg

SEQ ID NO: 210809 - DNA, 25 bp, Artificial
  probe
  misc_feature (1)..(25): SEQ ID NO: 627; WAN024FL7_at; Start 271; Stop 295
gataaatatgctaaacgcagtggca

SEQ ID NO: 210810 - DNA, 25 bp, Artificial
  probe
  misc_feature (1)..(25): SEQ ID NO: 627; WAN024FL7_at; Start 203; Stop 227
tctggtggctatggtttcaaggact

SEQ ID NO: 210811 - DNA, 25 bp, Artificial
  probe
  misc_feature (1)..(25): SEQ ID NO: 627; WAN024FL7_at; Start 423; Stop 447
tctttctaactatggaggattatgg

SEQ ID NO: 210812 - DNA, 25 bp, Artificial
  probe
  misc_feature (1)..(25): SEQ ID NO: 627; WAN024FL7_at; Start 293; Stop 317
gcaaaagggttattgagttaacatc

SEQ ID NO: 210813 - DNA, 25 bp, Artificial
  probe
  misc_feature (1)..(25): SEQ ID NO: 627; WAN024FL7_at; Start 103; Stop 127
caactcagacgtttgaattggcaag

SEQ ID NO: 210814 - DNA, 25 bp, Artificial
  probe
  misc_feature (1)..(25): SEQ ID NO: 627; WAN024FL7_at; Start 680; Stop 704
cctgtttaatagatgataataggat

SEQ ID NO: 210815 - DNA, 25 bp, Artificial
  probe
  misc_feature (1)..(25): SEQ ID NO: 627; WAN024FL7_at; Start 741; Stop 765
tacctatcctcacttattagggaga

SEQ ID NO: 210816 - DNA, 25 bp, Artificial
  probe
  misc_feature (1)..(25): SEQ ID NO: 627; WAN024FL7_at; Start 53; Stop 77
tacgtgctattaatgatgttctacc

SEQ ID NO: 210817 - DNA, 25 bp, Artificial
  probe
  misc_feature (1)..(25): SEQ ID NO: 627; WAN024FL7_at; Start 328; Stop 352
tttgaatatattgaggtacctaacg

SEQ ID NO: 210818 - DNA, 25 bp, Artificial
  probe
  misc_feature (1)..(25): SEQ ID NO: 627; WAN024FL7_at; Start 307; Stop 331
gagttaacatctcaaaatttatttg

SEQ ID NO: 210819 - DNA, 25 bp, Artificial
  probe
  misc_feature (1)..(25): SEQ ID NO: 627; WAN024FL7_at; Start 449; Stop 473
ttgattcaactgttctaattacggg

SEQ ID NO: 210820 - DNA, 25 bp, Artificial
  probe
  misc_feature (1)..(25): SEQ ID NO: 627; WAN024FL7_at; Start 634; Stop 658
aagaataatacgatcccagattatt

SEQ ID NO: 210821 - DNA, 25 bp, Artificial
  probe
  misc_feature (1)..(25): SEQ ID NO: 1170; WAN024FL8_at; Start 656; Stop 680
cctggagatcaggtactaaacagta

SEQ ID NO: 210822 - DNA, 25 bp, Artificial
  probe
  misc_feature (1)..(25): SEQ ID NO: 1170; WAN024FL8_at; Start 400; Stop 424
gctgaaaaaggacgccaggctgctt

SEQ ID NO: 210823 - DNA, 25 bp, Artificial
  probe
  misc_feature (1)..(25): SEQ ID NO: 1170; WAN024FL8_at; Start 979; Stop 1003
tcagtttctgaatcaaataaggaac

SEQ ID NO: 210824 - DNA, 25 bp, Artificial
  probe
  misc_feature (1)..(25): SEQ ID NO: 1170; WAN024FL8_at; Start 171; Stop 195
tgattctgttgaaattatctgggct

SEQ ID NO: 210825 - DNA, 25 bp, Artificial
  probe
  misc_feature (1)..(25): SEQ ID NO: 1170; WAN024FL8_at; Start 343; Stop 367
ggacaactagagattcaaacttggc

SEQ ID NO: 210826 - DNA, 25 bp, Artificial
  probe
  misc_feature (1)..(25): SEQ ID NO: 1170; WAN024FL8_at; Start 781; Stop 805
tatgatgatgttgtggatgtctctc

SEQ ID NO: 210827 - DNA, 25 bp, Artificial
  probe
  misc_feature (1)..(25): SEQ ID NO: 1170; WAN024FL8_at; Start 753; Stop 777
cagatcgcatctatatggaaatcaa

SEQ ID NO: 210828 - DNA, 25 bp, Artificial
  probe
  misc_feature (1)..(25): SEQ ID NO: 1170; WAN024FL8_at; Start 410; Stop 434
gacgccaggctgcttatgttaaacg

SEQ ID NO: 210829 - DNA, 25 bp, Artificial
  probe
  misc_feature (1)..(25): SEQ ID NO: 1170; WAN024FL8_at; Start 1053; Stop 1077
gaagaatcatcatcagtttttagaa

SEQ ID NO: 210830 - DNA, 25 bp, Artificial
  probe
  misc_feature (1)..(25): SEQ ID NO: 1170; WAN024FL8_at; Start 235; Stop 259
gagattgtgacttgtcgttaccgta

SEQ ID NO: 210831 - DNA, 25 bp, Artificial
  probe
  misc_feature (1)..(25): SEQ ID NO: 1170; WAN024FL8_at; Start 110; Stop 134
caggagatgcttatagttgcaatcc

SEQ ID NO: 210832 - DNA, 25 bp, Artificial
  probe
  misc_feature (1)..(25): SEQ ID NO: 1170; WAN024FL8_at; Start 796; Stop 820
gatgtctctcagtatagtgatatgc

SEQ ID NO: 210833 - DNA, 25 bp, Artificial
  probe
  misc_feature (1)..(25): SEQ ID NO: 1170; WAN024FL8_at; Start 1112; Stop 1136
tggcgaagattgctgaatattgtaa

SEQ ID NO: 210834 - DNA, 25 bp, Artificial
  probe
  misc_feature (1)..(25): SEQ ID NO: 1170; WAN024FL8_at; Start 227; Stop 251
taccaaaggagattgtgacttgtcg

SEQ ID NO: 210835 - DNA, 25 bp, Artificial
  probe
  misc_feature (1)..(25): SEQ ID NO: 1170; WAN024FL8_at; Start 644; Stop 668
tttatgctccgacctggagatcagg

SEQ ID NO: 210836 - DNA, 25 bp, Artificial
  probe
  misc_feature (1)..(25): SEQ ID NO: 1170; WAN024FL8_at; Start 54; Stop 78
gagaattttctttattatcccgata

SEQ ID NO: 210837 - DNA, 25 bp, Artificial
  probe
  misc_feature (1)..(25): SEQ ID NO: 1170; WAN024FL8_at; Start 707; Stop 731
ctcaagccgttgataaaaaatttgg

SEQ ID NO: 210838 - DNA, 25 bp, Artificial
  probe
  misc_feature (1)..(25): SEQ ID NO: 1170; WAN024FL8_at; Start 915; Stop 939
ccccgatttgaaggattatctagat

SEQ ID NO: 210839 - DNA, 25 bp, Artificial
  probe
  misc_feature (1)..(25): SEQ ID NO: 1170; WAN024FL8_at; Start 95; Stop 119
tttttgaatctttctcaggagatgc

SEQ ID NO: 210840 - DNA, 25 bp, Artificial
  probe
  misc_feature (1)..(25): SEQ ID NO: 1170; WAN024FL8_at; Start 536; Stop 560
tatctattggtatgcctcgaaatga

SEQ ID NO: 210841 - DNA, 25 bp, Artificial
  probe
  misc_feature (1)..(25): SEQ ID NO: 1170; WAN024FL8_at; Start 669; Stop 693
tactaaacagtatgaaacacttgat

SEQ ID NO: 210842 - DNA, 25 bp, Artificial
  probe
  misc_feature (1)..(25): SEQ ID NO: 1170; WAN024FL8_at; Start 330; Stop 354
tccaaagcgtaaaggacaactagag

SEQ ID NO: 210843 - DNA, 25 bp, Artificial
  probe
  misc_feature (1)..(25): SEQ ID NO: 1170; WAN024FL8_at; Start 1075; Stop 1099
gaatcttatgaacaaggagatgcag

SEQ ID NO: 210844 - DNA, 25 bp, Artificial
  probe
  misc_feature (1)..(25): SEQ ID NO: 1170; WAN024FL8_at; Start 250; Stop 274
cgttaccgtagtttcaatcatctga

SEQ ID NO: 210845 - DNA, 25 bp, Artificial
  probe
  misc_feature (1)..(25): SEQ ID NO: 1170; WAN024FL8_at; Start 424; Stop 448
tatgttaaacgacaacggatgcacg

SEQ ID NO: 210846 - DNA, 25 bp, Artificial
  probe
  misc_feature (1)..(25): SEQ ID NO: 1170; WAN024FL8_at; Start 454; Stop 478
gaaacagatctctttattacaagta

SEQ ID NO: 210847 - DNA, 25 bp, Artificial
  probe
  misc_feature (1)..(25): SEQ ID NO: 1170; WAN024FL8_at; Start 189; Stop 213
ctgggcttttaatgatccaaacaaa

SEQ ID NO: 210848 - DNA, 25 bp, Artificial
  probe
  misc_feature (1)..(25): SEQ ID NO: 1170; WAN024FL8_at; Start 439; Stop 463
cggatgcacgttgaagaaacagatc

SEQ ID NO: 210849 - DNA, 25 bp, Artificial
  probe
  misc_feature (1)..(25): SEQ ID NO: 1170; WAN024FL8_at; Start 613; Stop 637
ttgggattaccaaacaataaattga

SEQ ID NO: 210850 - DNA, 25 bp, Artificial
  probe
  misc_feature (1)..(25): SEQ ID NO: 1170; WAN024FL8_at; Start 630; Stop 654
taaattgatagcactttatgctccg

SEQ ID NO: 210851 - DNA, 25 bp, Artificial
  probe
  misc_feature (1)..(25): SEQ ID NO: 1170; WAN024FL8_at; Start 843; Stop 867
tatactgattactgactattcttcg

SEQ ID NO: 210852 - DNA, 25 bp, Artificial
  probe
  misc_feature (1)..(25): SEQ ID NO: 1170; WAN024FL8_at; Start 358; Stop 382
caaacttggcatggaggaggttgct

SEQ ID NO: 210853 - DNA, 25 bp, Artificial
  probe
  misc_feature (1)..(25): SEQ ID NO: 1170; WAN024FL8_at; Start 575; Stop 599
taccaatttcaagtcaagttgagaa

SEQ ID NO: 210854 - DNA, 25 bp, Artificial
  probe
  misc_feature (1)..(25): SEQ ID NO: 1170; WAN024FL8_at; Start 862; Stop 886
tcttcgtctatgtgggatttctctc

SEQ ID NO: 210855 - DNA, 25 bp, Artificial
  probe
  misc_feature (1)..(25): SEQ ID NO: 1185; WAN024FL9_at; Start 296; Stop 320
cagatgactatgttacagatgatta

SEQ ID NO: 210856 - DNA, 25 bp, Artificial
  probe
  misc_feature (1)..(25): SEQ ID NO: 1185; WAN024FL9_at; Start 757; Stop 781
gctgcaacaaaacgtcgagctgtct

SEQ ID NO: 210857 - DNA, 25 bp, Artificial
  probe
  misc_feature (1)..(25): SEQ ID NO: 1185; WAN024FL9_at; Start 87; Stop 111
tttgaattctgttgtgagacagacg

SEQ ID NO: 210858 - DNA, 25 bp, Artificial
  probe
  misc_feature (1)..(25): SEQ ID NO: 1185; WAN024FL9_at; Start 220; Stop 244
cctaatggaggtttgtctgatgcta

SEQ ID NO: 210859 - DNA, 25 bp, Artificial
  probe
  misc_feature (1)..(25): SEQ ID NO: 1185; WAN024FL9_at; Start 612; Stop 636
tgcctgtggttttaacgcaaaatat

SEQ ID NO: 210860 - DNA, 25 bp, Artificial
  probe
  misc_feature (1)..(25): SEQ ID NO: 1185; WAN024FL9_at; Start 628; Stop 652
gcaaaatattattatgagattcggg

SEQ ID NO: 210861 - DNA, 25 bp, Artificial
  probe
  misc_feature (1)..(25): SEQ ID NO: 1185; WAN024FL9_at; Start 899; Stop 923
ctcctaagcgggatagattagctgt

SEQ ID NO: 210862 - DNA, 25 bp, Artificial
  probe
  misc_feature (1)..(25): SEQ ID NO: 1185; WAN024FL9_at; Start 534; Stop 558
tgaaatatgcttccctaaaggaagg

SEQ ID NO: 210863 - DNA, 25 bp, Artificial
  probe
  misc_feature (1)..(25): SEQ ID NO: 1185; WAN024FL9_at; Start 365; Stop 389
tgtcaatgtgttcaatatttgtcca

SEQ ID NO: 210864 - DNA, 25 bp, Artificial
  probe
  misc_feature (1)..(25): SEQ ID NO: 1185; WAN024FL9_at; Start 698; Stop 722
tgttatttatgacagatcaaatgcg

SEQ ID NO: 210865 - DNA, 25 bp, Artificial
  probe
  misc_feature (1)..(25): SEQ ID NO: 1185; WAN024FL9_at; Start 413; Stop 437
tcaataatgggacaggaagagaatt

SEQ ID NO: 210866 - DNA, 25 bp, Artificial
  probe
  misc_feature (1)..(25): SEQ ID NO: 1185; WAN024FL9_at; Start 659; Stop 683
cgattgttacatcatcatttagtga

SEQ ID NO: 210867 - DNA, 25 bp, Artificial
  probe
  misc_feature (1)..(25): SEQ ID NO: 1185; WAN024FL9_at; Start 769; Stop 793
cgtcgagctgtctatgcaagattta

SEQ ID NO: 210868 - DNA, 25 bp, Artificial
  probe
  misc_feature (1)..(25): SEQ ID NO: 1185; WAN024FL9_at; Start 643; Stop 667
gagattcgggaaaattcgattgtta

SEQ ID NO: 210869 - DNA, 25 bp, Artificial
  probe
  misc_feature (1)..(25): SEQ ID NO: 1185; WAN024FL9_at; Start 231; Stop 255
tttgtctgatgctagaaatttcggt

SEQ ID NO: 210870 - DNA, 25 bp, Artificial
  probe
  misc_feature (1)..(25): SEQ ID NO: 1185; WAN024FL9_at; Start 925; Stop 949
agagctctctcccttggattttgca

SEQ ID NO: 210871 - DNA, 25 bp, Artificial
  probe
  misc_feature (1)..(25): SEQ ID NO: 1185; WAN024FL9_at; Start 279; Stop 303
tataacattcgttgattcagatgac

SEQ ID NO: 210872 - DNA, 25 bp, Artificial
  probe
  misc_feature (1)..(25): SEQ ID NO: 1185; WAN024FL9_at; Start 45; Stop 69
tgttttaccagtatacaacgtagag

SEQ ID NO: 210873 - DNA, 25 bp, Artificial
  probe
  misc_feature (1)..(25): SEQ ID NO: 1185; WAN024FL9_at; Start 403; Stop 427
gataaaatgatcaataatgggacag

SEQ ID NO: 210874 - DNA, 25 bp, Artificial
  probe
  misc_feature (1)..(25): SEQ ID NO: 1185; WAN024FL9_at; Start 101; Stop 125
tgagacagacgtataaaaacataga

SEQ ID NO: 210875 - DNA, 25 bp, Artificial
  probe
  misc_feature (1)..(25): SEQ ID NO: 1185; WAN024FL9_at; Start 716; Stop 740
aaatgcgaaattttgttgatcaacg

SEQ ID NO: 210876 - DNA, 25 bp, Artificial
  probe
  misc_feature (1)..(25): SEQ ID NO: 1185; WAN024FL9_at; Start 597; Stop 621
tactgctgggcagattgcctgtggt

SEQ ID NO: 210877 - DNA, 25 bp, Artificial
  probe
  misc_feature (1)..(25): SEQ ID NO: 1185; WAN024FL9_at; Start 463; Stop 487
gaaaaaatgtgctatcatgatgagg

SEQ ID NO: 210878 - DNA, 25 bp, Artificial
  probe
  misc_feature (1)..(25): SEQ ID NO: 1185; WAN024FL9_at; Start 870; Stop 894
caaggaagcgttacttgaaaatcct

SEQ ID NO: 210879 - DNA, 25 bp, Artificial
  probe
  misc_feature (1)..(25): SEQ ID NO: 1185; WAN024FL9_at; Start 783; Stop 807
tgcaagatttagtacccttaaccaa

SEQ ID NO: 210880 - DNA, 25 bp, Artificial
  probe
  misc_feature (1)..(25): SEQ ID NO: 1185; WAN024FL9_at; Start 844; Stop 868
gaaataattcgttttatccaagaca

SEQ ID NO: 210881 - DNA, 25 bp, Artificial
  probe
  misc_feature (1)..(25): SEQ ID NO: 1185; WAN024FL9_at; Start 914; Stop 938
gattagctgttagagctctctccct

SEQ ID NO: 210882 - DNA, 25 bp, Artificial
  probe
  misc_feature (1)..(25): SEQ ID NO: 1185; WAN024FL9_at; Start 885; Stop 909
tgaaaatcctaagactcctaagcgg

SEQ ID NO: 210883 - DNA, 25 bp, Artificial
  probe
  misc_feature (1)..(25): SEQ ID NO: 1185; WAN024FL9_at; Start 554; Stop 578
gaaggatattcgaagatattggaac

SEQ ID NO: 210884 - DNA, 25 bp, Artificial
  probe
  misc_feature (1)..(25): SEQ ID NO: 1185; WAN024FL9_at; Start 856; Stop 880
tttatccaagacaacaaggaagcgt

SEQ ID NO: 210885 - DNA, 25 bp, Artificial
  probe
  misc_feature (1)..(25): SEQ ID NO: 1185; WAN024FL9_at; Start 742; Stop 766
tatccatctttgaaagctgcaacaa

SEQ ID NO: 210886 - DNA, 25 bp, Artificial
  probe
  misc_feature (1)..(25): SEQ ID NO: 1185; WAN024FL9_at; Start 484; Stop 508
gaggtggatacatgtgcttatgcaa

SEQ ID NO: 210887 - DNA, 25 bp, Artificial
  probe
  misc_feature (1)..(25): SEQ ID NO: 1185; WAN024FL9_at; Start 265; Stop 289
tctatgggtgagtttataacattcg

SEQ ID NO: 210888 - DNA, 25 bp, Artificial
  probe
  misc_feature (1)..(25): SEQ ID NO: 1185; WAN024FL9_at; Start 428; Stop 452
gaagagaattgatgatgacagcaga

SEQ ID NO: 210889 - DNA, 25 bp, Artificial
  probe
  misc_feature (1)..(25): SEQ ID NO: 5770; WAN024FLA_at; Start 196; Stop 220
ggtttccaattcaaaagtcaagctg

SEQ ID NO: 210890 - DNA, 25 bp, Artificial
  probe
  misc_feature (1)..(25): SEQ ID NO: 5770; WAN024FLA_at; Start 104; Stop 128
gcattctcagctgtcttggcatcga

SEQ ID NO: 210891 - DNA, 25 bp, Artificial
  probe
  misc_feature (1)..(25): SEQ ID NO: 5770; WAN024FLA_at; Start 91; Stop 115
tgtcatgcccgcagcattctcagct

SEQ ID NO: 210892 - DNA, 25 bp, Artificial
  probe
  misc_feature (1)..(25): SEQ ID NO: 5770; WAN024FLA_at; Start 219; Stop 243
tgtactcttcatccgcttcatttgg

SEQ ID NO: 210893 - DNA, 25 bp, Artificial
  probe
  misc_feature (1)..(25): SEQ ID NO: 5770; WAN024FLA_at; Start 125; Stop 149
tcgataatggcaccgtaaatcatac

SEQ ID NO: 210894 - DNA, 25 bp, Artificial
  probe
  misc_feature (1)..(25): SEQ ID NO: 5770; WAN024FLA_at; Start 145; Stop 169
catactttctgcaaactgaggcaac

SEQ ID NO: 210895 - DNA, 25 bp, Artificial
  probe
  misc_feature (1)..(25): SEQ ID NO: 5770; WAN024FLA_at; Start 79; Stop 103
tgtttgcatggctgtcatgcccgca

SEQ ID NO: 210896 - DNA, 25 bp, Artificial
  probe
  misc_feature (1)..(25): SEQ ID NO: 5770; WAN024FLA_at; Start 5; Stop 29
gtaatcgccgcctgtctggcacggt

SEQ ID NO: 210897 - DNA, 25 bp, Artificial
  probe
  misc_feature (1)..(25): SEQ ID NO: 5770; WAN024FLA_at; Start 133; Stop 157
ggcaccgtaaatcatactttctgca

SEQ ID NO: 210898 - DNA, 25 bp, Artificial
  probe
  misc_feature (1)..(25): SEQ ID NO: 5770; WAN024FLA_at; Start 169; Stop 193
caactgctccagaatttcttctcgg

SEQ ID NO: 210899 - DNA, 25 bp, Artificial
  probe
  misc_feature (1)..(25): SEQ ID NO: 5770; WAN024FLA_at; Start 255; Stop 279
caatcggaagcatttgttccacacg

SEQ ID NO: 210900 - DNA, 25 bp, Artificial
  probe
  misc_feature (1)..(25): SEQ ID NO: 5770; WAN024FLA_at; Start 66; Stop 90
cattatctgtcgctgtttgcatggc

SEQ ID NO: 210901 - DNA, 25 bp, Artificial
  probe
  misc_feature (1)..(25): SEQ ID NO: 5770; WAN024FLA_at; Start 111; Stop 135
cagctgtcttggcatcgataatggc

SEQ ID NO: 210902 - DNA, 25 bp, Artificial
  probe
  misc_feature (1)..(25): SEQ ID NO: 5770; WAN024FLA_at; Start 84; Stop 108
gcatggctgtcatgcccgcagcatt

SEQ ID NO: 210903 - DNA, 25 bp, Artificial
  probe
  misc_feature (1)..(25): SEQ ID NO: 5770; WAN024FLA_at; Start 120; Stop 144
tggcatcgataatggcaccgtaaat

SEQ ID NO: 210904 - DNA, 25 bp, Artificial
  probe
  misc_feature (1)..(25): SEQ ID NO: 5770; WAN024FLA_at; Start 55; Stop 79
gactttcttagcattatctgtcgct

SEQ ID NO: 210905 - DNA, 25 bp, Artificial
  probe
  misc_feature (1)..(25): SEQ ID NO: 5770; WAN024FLA_at; Start 228; Stop 252
catccgcttcatttggatccaagtc

SEQ ID NO: 210906 - DNA, 25 bp, Artificial
  probe
  misc_feature (1)..(25): SEQ ID NO: 5770; WAN024FLA_at; Start 152; Stop 176
tctgcaaactgaggcaacaactgct

SEQ ID NO: 210907 - DNA, 25 bp, Artificial
  probe
  misc_feature (1)..(25): SEQ ID NO: 5770; WAN024FLA_at; Start 188; Stop 212
tctcggctggtttccaattcaaaag

SEQ ID NO: 210908 - DNA, 25 bp, Artificial
  probe
  misc_feature (1)..(25): SEQ ID NO: 5770; WAN024FLA_at; Start 261; Stop 285
gaagcatttgttccacacgcatttg

SEQ ID NO: 210909 - DNA, 25 bp, Artificial
  probe
  misc_feature (1)..(25): SEQ ID NO: 5770; WAN024FLA_at; Start 33; Stop 57
actgaattgtcaaatcattgatgac

SEQ ID NO: 210910 - DNA, 25 bp, Artificial
  probe
  misc_feature (1)..(25): SEQ ID NO: 5770; WAN024FLA_at; Start 71; Stop 95
tctgtcgctgtttgcatggctgtca

SEQ ID NO: 210911 - DNA, 25 bp, Artificial
  probe
  misc_feature (1)..(25): SEQ ID NO: 5770; WAN024FLA_at; Start 210; Stop 234
aagtcaagctgtactcttcatccgc

SEQ ID NO: 210912 - DNA, 25 bp, Artificial
  probe
  misc_feature (1)..(25): SEQ ID NO: 5770; WAN024FLA_at; Start 115; Stop 139
tgtcttggcatcgataatggcaccg

SEQ ID NO: 210913 - DNA, 25 bp, Artificial
  probe
  misc_feature (1)..(25): SEQ ID NO: 5770; WAN024FLA_at; Start 241; Stop 265
tggatccaagtcaacaatcggaagc

SEQ ID NO: 210914 - DNA, 25 bp, Artificial
  probe
  misc_feature (1)..(25): SEQ ID NO: 5770; WAN024FLA_at; Start 14; Stop 38
gcctgtctggcacggttatactgaa

SEQ ID NO: 210915 - DNA, 25 bp, Artificial
  probe
  misc_feature (1)..(25): SEQ ID NO: 5770; WAN024FLA_at; Start 43; Stop 67
caaatcattgatgactttcttagca

SEQ ID NO: 210916 - DNA, 25 bp, Artificial
  probe
  misc_feature (1)..(25): SEQ ID NO: 5770; WAN024FLA_at; Start 246; Stop 270
ccaagtcaacaatcggaagcatttg

SEQ ID NO: 210917 - DNA, 25 bp, Artificial
  probe
  misc_feature (1)..(25): SEQ ID NO: 5770; WAN024FLA_at; Start 22; Stop 46
ggcacggttatactgaattgtcaaa

SEQ ID NO: 210918 - DNA, 25 bp, Artificial
  probe
  misc_feature (1)..(25): SEQ ID NO: 5770; WAN024FLA_at; Start 270; Stop 294
gttccacacgcatttgactggttag

SEQ ID NO: 210919 - DNA, 25 bp, Artificial
  probe
  misc_feature (1)..(25): SEQ ID NO: 5770; WAN024FLA_at; Start 178; Stop 202
cagaatttcttctcggctggtttcc

SEQ ID NO: 210920 - DNA, 25 bp, Artificial
  probe
  misc_feature (1)..(25): SEQ ID NO: 5770; WAN024FLA_at; Start 161; Stop 185
tgaggcaacaactgctccagaattt

SEQ ID NO: 210921 - DNA, 25 bp, Artificial
  probe
  misc_feature (1)..(25): SEQ ID NO: 5770; WAN024FLA_at; Start 156; Stop 180
caaactgaggcaacaactgctccag

SEQ ID NO: 210922 - DNA, 25 bp, Artificial
  probe
  misc_feature (1)..(25): SEQ ID NO: 5770; WAN024FLA_at; Start 237; Stop 261
catttggatccaagtcaacaatcgg

SEQ ID NO: 210923 - DNA, 25 bp, Artificial
  probe
  misc_feature (1)..(25): SEQ ID NO: 2437; WAN024FLB_at; Start 604; Stop 628
gcggatgaagagtacagcttgactt

SEQ ID NO: 210924 - DNA, 25 bp, Artificial
  probe
  misc_feature (1)..(25): SEQ ID NO: 2437; WAN024FLB_at; Start 149; Stop 173
tgcgtaaacttttgacagatatcct

SEQ ID NO: 210925 - DNA, 25 bp, Artificial
  probe
  misc_feature (1)..(25): SEQ ID NO: 2437; WAN024FLB_at; Start 534; Stop 558
tgtcaatacgctaaccagtcaaatg

SEQ ID NO: 210926 - DNA, 25 bp, Artificial
  probe
  misc_feature (1)..(25): SEQ ID NO: 2437; WAN024FLB_at; Start 128; Stop 152
tccaagtttacgctcagaaagtgcg

SEQ ID NO: 210927 - DNA, 25 bp, Artificial
  probe
  misc_feature (1)..(25): SEQ ID NO: 2437; WAN024FLB_at; Start 710; Stop 734
tcgatgccaagacagctgagaatgc

SEQ ID NO: 210928 - DNA, 25 bp, Artificial
  probe
  misc_feature (1)..(25): SEQ ID NO: 2437; WAN024FLB_at; Start 202; Stop 226
aatccgatgttgattagccgttctg

SEQ ID NO: 210929 - DNA, 25 bp, Artificial
  probe
  misc_feature (1)..(25): SEQ ID NO: 2437; WAN024FLB_at; Start 348; Stop 372
tgaaatgatctgtatcggtgggatg

SEQ ID NO: 210930 - DNA, 25 bp, Artificial
  probe
  misc_feature (1)..(25): SEQ ID NO: 2437; WAN024FLB_at; Start 623; Stop 647
tgacttttgaattggaaaccagccg

SEQ ID NO: 210931 - DNA, 25 bp, Artificial
  probe
  misc_feature (1)..(25): SEQ ID NO: 2437; WAN024FLB_at; Start 477; Stop 501
tgttgaaatgtaccaaaatgaactc

SEQ ID NO: 210932 - DNA, 25 bp, Artificial
  probe
  misc_feature (1)..(25): SEQ ID NO: 2437; WAN024FLB_at; Start 668; Stop 692
tgttgcctcagtttgcagaaagtat

SEQ ID NO: 210933 - DNA, 25 bp, Artificial
  probe
  misc_feature (1)..(25): SEQ ID NO: 2437; WAN024FLB_at; Start 247; Stop 271
gttatcacttcagaccgcggtttgg

SEQ ID NO: 210934 - DNA, 25 bp, Artificial
  probe
  misc_feature (1)..(25): SEQ ID NO: 2437; WAN024FLB_at; Start 697; Stop 721
tacggtgccattatcgatgccaaga

SEQ ID NO: 210935 - DNA, 25 bp, Artificial
  probe
  misc_feature (1)..(25): SEQ ID NO: 2437; WAN024FLB_at; Start 368; Stop 392
ggatgggagctgatttctttaaggc

SEQ ID NO: 210936 - DNA, 25 bp, Artificial
  probe
  misc_feature (1)..(25): SEQ ID NO: 2437; WAN024FLB_at; Start 402; Stop 426
tcaaccactttatgaattacgtggc

SEQ ID NO: 210937 - DNA, 25 bp, Artificial
  probe
  misc_feature (1)..(25): SEQ ID NO: 2437; WAN024FLB_at; Start 185; Stop 209
gagctggtgcttcaactaatccgat

SEQ ID NO: 210938 - DNA, 25 bp, Artificial
  probe
  misc_feature (1)..(25): SEQ ID NO: 2437; WAN024FLB_at; Start 516; Stop 540
tgtttgctacaaccaccatgtcaat

SEQ ID NO: 210939 - DNA, 25 bp, Artificial
  probe
  misc_feature (1)..(25): SEQ ID NO: 2437; WAN024FLB_at; Start 231; Stop 255
gaagacaggctatatcgttatcact

SEQ ID NO: 210940 - DNA, 25 bp, Artificial
  probe
  misc_feature (1)..(25): SEQ ID NO: 2437; WAN024FLB_at; Start 637; Stop 661
gaaaccagccgagaagaaattctgg

SEQ ID NO: 210941 - DNA, 25 bp, Artificial
  probe
  misc_feature (1)..(25): SEQ ID NO: 2437; WAN024FLB_at; Start 51; Stop 75
tacgagtcaaatcactaatgccatg

SEQ ID NO: 210942 - DNA, 25 bp, Artificial
  probe
  misc_feature (1)..(25): SEQ ID NO: 2437; WAN024FLB_at; Start 801; Stop 825
tcagtataaccgtgccagacaggcg

SEQ ID NO: 210943 - DNA, 25 bp, Artificial
  probe
  misc_feature (1)..(25): SEQ ID NO: 2437; WAN024FLB_at; Start 683; Stop 707
cagaaagtatgatttacggtgccat

SEQ ID NO: 210944 - DNA, 25 bp, Artificial
  probe
  misc_feature (1)..(25): SEQ ID NO: 2437; WAN024FLB_at; Start 71; Stop 95
ccatgcaaatggtatcggctgctaa

SEQ ID NO: 210945 - DNA, 25 bp, Artificial
  probe
  misc_feature (1)..(25): SEQ ID NO: 2437; WAN024FLB_at; Start 386; Stop 410
ttaaggctcgcggtattcaaccact

SEQ ID NO: 210946 - DNA, 25 bp, Artificial
  probe
  misc_feature (1)..(25): SEQ ID NO: 2437; WAN024FLB_at; Start 586; Stop 610
gacttggatccaaatgaagcggatg

SEQ ID NO: 210947 - DNA, 25 bp, Artificial
  probe
  misc_feature (1)..(25): SEQ ID NO: 2437; WAN024FLB_at; Start 170; Stop 194
tccttcatggtaatggagctggtgc

SEQ ID NO: 210948 - DNA, 25 bp, Artificial
  probe
  misc_feature (1)..(25): SEQ ID NO: 2437; WAN024FLB_at; Start 35; Stop 59
tcgcctcaacaaaaaatacgagtca

SEQ ID NO: 210949 - DNA, 25 bp, Artificial
  probe
  misc_feature (1)..(25): SEQ ID NO: 2437; WAN024FLB_at; Start 568; Stop 592
caaatgcttccgattgttgacttgg

SEQ ID NO: 210950 - DNA, 25 bp, Artificial
  probe
  misc_feature (1)..(25): SEQ ID NO: 2437; WAN024FLB_at; Start 314; Stop 338
tgaaagaagaataccacccagacgg

SEQ ID NO: 210951 - DNA, 25 bp, Artificial
  probe
  misc_feature (1)..(25): SEQ ID NO: 2437; WAN024FLB_at; Start 653; Stop 677
aaattctggagcagttgttgcctca

SEQ ID NO: 210952 - DNA, 25 bp, Artificial
  probe
  misc_feature (1)..(25): SEQ ID NO: 2437; WAN024FLB_at; Start 216; Stop 240
tagccgttctgtgaagaagacaggc

SEQ ID NO: 210953 - DNA, 25 bp, Artificial
  probe
  misc_feature (1)..(25): SEQ ID NO: 2437; WAN024FLB_at; Start 743; Stop 767
tgacagccatgcaaacagcgacaga

SEQ ID NO: 210954 - DNA, 25 bp, Artificial
  probe
  misc_feature (1)..(25): SEQ ID NO: 2437; WAN024FLB_at; Start 553; Stop 577
caaatgcgtgtggaacaaatgcttc

SEQ ID NO: 210955 - DNA, 25 bp, Artificial
  probe
  misc_feature (1)..(25): SEQ ID NO: 2437; WAN024FLB_at; Start 109; Stop 133
gaagaagctgctcgcaacttccaag

SEQ ID NO: 210956 - DNA, 25 bp, Artificial
  probe
  misc_feature (1)..(25): SEQ ID NO: 2437; WAN024FLB_at; Start 842; Stop 866
ttacagaaatcgtagcaggtgctag

SEQ ID NO: 210957 - DNA, 25 bp, Artificial
  probe
  misc_feature (1)..(25): SEQ ID NO: 6356; WAN024FLC_at; Start 987; Stop 1011
tattttaagtttactgactgcgact

SEQ ID NO: 210958 - DNA, 25 bp, Artificial
  probe
  misc_feature (1)..(25): SEQ ID NO: 6356; WAN024FLC_at; Start 690; Stop 714
cacgcttacctattttgttaatgcc

SEQ ID NO: 210959 - DNA, 25 bp, Artificial
  probe
  misc_feature (1)..(25): SEQ ID NO: 6356; WAN024FLC_at; Start 573; Stop 597
tttagaaactgattcacgactgact

SEQ ID NO: 210960 - DNA, 25 bp, Artificial
  probe
  misc_feature (1)..(25): SEQ ID NO: 6356; WAN024FLC_at; Start 862; Stop 886
cagaaaattgcttgggttggaaacg

SEQ ID NO: 210961 - DNA, 25 bp, Artificial
  probe
  misc_feature (1)..(25): SEQ ID NO: 6356; WAN024FLC_at; Start 632; Stop 656
tggctatgaagctaatccctactgt

SEQ ID NO: 210962 - DNA, 25 bp, Artificial
  probe
  misc_feature (1)..(25): SEQ ID NO: 6356; WAN024FLC_at; Start 1020; Stop 1044
gcttttgagaaagggacaaattgtc

SEQ ID NO: 210963 - DNA, 25 bp, Artificial
  probe
  misc_feature (1)..(25): SEQ ID NO: 6356; WAN024FLC_at; Start 423; Stop 447
tactagagttcgacactatcttgga

SEQ ID NO: 210964 - DNA, 25 bp, Artificial
  probe
  misc_feature (1)..(25): SEQ ID NO: 6356; WAN024FLC_at; Start 406; Stop 430
tacattgagttttcatctactagag

SEQ ID NO: 210965 - DNA, 25 bp, Artificial
  probe
  misc_feature (1)..(25): SEQ ID NO: 6356; WAN024FLC_at; Start 69; Stop 93
cctattttcgctattggatgtaagt

SEQ ID NO: 210966 - DNA, 25 bp, Artificial
  probe
  misc_feature (1)..(25): SEQ ID NO: 6356; WAN024FLC_at; Start 1002; Stop 1026
gactgcgactttagtgaagcttttg

SEQ ID NO: 210967 - DNA, 25 bp, Artificial
  probe
  misc_feature (1)..(25): SEQ ID NO: 6356; WAN024FLC_at; Start 954; Stop 978
tcttcaacattttgggctgatagct

SEQ ID NO: 210968 - DNA, 25 bp, Artificial
  probe
  misc_feature (1)..(25): SEQ ID NO: 6356; WAN024FLC_at; Start 291; Stop 315
gatatatagcttgagggatattccc

SEQ ID NO: 210969 - DNA, 25 bp, Artificial
  probe
  misc_feature (1)..(25): SEQ ID NO: 6356; WAN024FLC_at; Start 738; Stop 762
aaattacttaaggacatcaaatgcc

SEQ ID NO: 210970 - DNA, 25 bp, Artificial
  probe
  misc_feature (1)..(25): SEQ ID NO: 6356; WAN024FLC_at; Start 97; Stop 121
tacgttcagtatatatctcctatgc

SEQ ID NO: 210971 - DNA, 25 bp, Artificial
  probe
  misc_feature (1)..(25): SEQ ID NO: 6356; WAN024FLC_at; Start 890; Stop 914
tgaatgcgcaaggagaacgaagtac

SEQ ID NO: 210972 - DNA, 25 bp, Artificial
  probe
  misc_feature (1)..(25): SEQ ID NO: 6356; WAN024FLC_at; Start 587; Stop 611
cacgactgacttttatcagttcgag

SEQ ID NO: 210973 - DNA, 25 bp, Artificial
  probe
  misc_feature (1)..(25): SEQ ID NO: 6356; WAN024FLC_at; Start 332; Stop 356
aagtagcctttatcattagtgttgc

SEQ ID NO: 210974 - DNA, 25 bp, Artificial
  probe
  misc_feature (1)..(25): SEQ ID NO: 6356; WAN024FLC_at; Start 1074; Stop 1098
ccatgctttgattgacgatttgata

SEQ ID NO: 210975 - DNA, 25 bp, Artificial
  probe
  misc_feature (1)..(25): SEQ ID NO: 6356; WAN024FLC_at; Start 349; Stop 373
agtgttgctatgttgttccttgtga

SEQ ID NO: 210976 - DNA, 25 bp, Artificial
  probe
  misc_feature (1)..(25): SEQ ID NO: 6356; WAN024FLC_at; Start 1189; Stop 1213
gagaatgattccttacgtagaactg

SEQ ID NO: 210977 - DNA, 25 bp, Artificial
  probe
  misc_feature (1)..(25): SEQ ID NO: 6356; WAN024FLC_at; Start 876; Stop 900
ggttggaaacgccttgaatgcgcaa

SEQ ID NO: 210978 - DNA, 25 bp, Artificial
  probe
  misc_feature (1)..(25): SEQ ID NO: 6356; WAN024FLC_at; Start 904; Stop 928
gaacgaagtacggatgcatatttat

SEQ ID NO: 210979 - DNA, 25 bp, Artificial
  probe
  misc_feature (1)..(25): SEQ ID NO: 6356; WAN024FLC_at; Start 841; Stop 865
tatggttatgggattcttgggcaga

SEQ ID NO: 210980 - DNA, 25 bp, Artificial
  probe
  misc_feature (1)..(25): SEQ ID NO: 6356; WAN024FLC_at; Start 176; Stop 200
tatctgggagtaatagctttgagtc

SEQ ID NO: 210981 - DNA, 25 bp, Artificial
  probe
  misc_feature (1)..(25): SEQ ID NO: 6356; WAN024FLC_at; Start 218; Stop 242
gggtttctacgctctattttatcat

SEQ ID NO: 210982 - DNA, 25 bp, Artificial
  probe
  misc_feature (1)..(25): SEQ ID NO: 6356; WAN024FLC_at; Start 272; Stop 296
tagtcttagggctatctctgatata

SEQ ID NO: 210983 - DNA, 25 bp, Artificial
  probe
  misc_feature (1)..(25): SEQ ID NO: 6356; WAN024FLC_at; Start 195; Stop 219
tgagtctctattgggtttactaggg

SEQ ID NO: 210984 - DNA, 25 bp, Artificial
  probe
  misc_feature (1)..(25): SEQ ID NO: 6356; WAN024FLC_at; Start 242; Stop 266
taggtagtgtaacgagctatacttc

SEQ ID NO: 210985 - DNA, 25 bp, Artificial
  probe
  misc_feature (1)..(25): SEQ ID NO: 6356; WAN024FLC_at; Start 110; Stop 134
tatctcctatgctatataaagctgc

SEQ ID NO: 210986 - DNA, 25 bp, Artificial
  probe
  misc_feature (1)..(25): SEQ ID NO: 6356; WAN024FLC_at; Start 602; Stop 626
tcagttcgagtttgttactattagc

SEQ ID NO: 210987 - DNA, 25 bp, Artificial
  probe
  misc_feature (1)..(25): SEQ ID NO: 6356; WAN024FLC_at; Start 1056; Stop 1080
tatagtttctctgagtttccatgct

SEQ ID NO: 210988 - DNA, 25 bp, Artificial
  probe
  misc_feature (1)..(25): SEQ ID NO: 6356; WAN024FLC_at; Start 1165; Stop 1189
tctgaagaaaggtatggagaagttg

SEQ ID NO: 210989 - DNA, 25 bp, Artificial
  probe
  misc_feature (1)..(25): SEQ ID NO: 6356; WAN024FLC_at; Start 780; Stop 804
tcatcaagcagatcaattcttaggg

SEQ ID NO: 210990 - DNA, 25 bp, Artificial
  probe
  misc_feature (1)..(25): SEQ ID NO: 6356; WAN024FLC_at; Start 514; Stop 538
caagaaacagtatcgtatcagcgcc

SEQ ID NO: 210991 - DNA, 25 bp, Artificial
  probe
  misc_feature (1)..(25): SEQ ID NO: 758; WAN024FLD_at; Start 526; Stop 550
tcatatccgcgtcttcttgtattgt

SEQ ID NO: 210992 - DNA, 25 bp, Artificial
  probe
  misc_feature (1)..(25): SEQ ID NO: 758; WAN024FLD_at; Start 601; Stop 625
attaattcgtgtttgtttctactgg

SEQ ID NO: 210993 - DNA, 25 bp, Artificial
  probe
  misc_feature (1)..(25): SEQ ID NO: 758; WAN024FLD_at; Start 705; Stop 729
tattaatgcctgtttgagttactgg

SEQ ID NO: 210994 - DNA, 25 bp, Artificial
  probe
  misc_feature (1)..(25): SEQ ID NO: 758; WAN024FLD_at; Start 692; Stop 716
cgttcacctactttattaatgcctg

SEQ ID NO: 210995 - DNA, 25 bp, Artificial
  probe
  misc_feature (1)..(25): SEQ ID NO: 758; WAN024FLD_at; Start 83; Stop 107
taagtataactctttatgcccaata

SEQ ID NO: 210996 - DNA, 25 bp, Artificial
  probe
  misc_feature (1)..(25): SEQ ID NO: 758; WAN024FLD_at; Start 844; Stop 868
ggatataagttgttaggtcaaaaga

SEQ ID NO: 210997 - DNA, 25 bp, Artificial
  probe
  misc_feature (1)..(25): SEQ ID NO: 758; WAN024FLD_at; Start 653; Stop 677
ccatcattgaaaaggtagggagact

SEQ ID NO: 210998 - DNA, 25 bp, Artificial
  probe
  misc_feature (1)..(25): SEQ ID NO: 758; WAN024FLD_at; Start 209; Stop 233
gattattcgtgatttttactctctg

SEQ ID NO: 210999 - DNA, 25 bp, Artificial
  probe
  misc_feature (1)..(25): SEQ ID NO: 758; WAN024FLD_at; Start 750; Stop 774
cacctcaaatgttgttttgaatcaa

SEQ ID NO: 211000 - DNA, 25 bp, Artificial
  probe
  misc_feature (1)..(25): SEQ ID NO: 758; WAN024FLD_at; Start 803; Stop 827
gaggacgtatttattattctaatcg

SEQ ID NO: 211001 - DNA, 25 bp, Artificial
  probe
  misc_feature (1)..(25): SEQ ID NO: 758; WAN024FLD_at; Start 345; Stop 369
cattagtattagtgtattgctccta

SEQ ID NO: 211002 - DNA, 25 bp, Artificial
  probe
  misc_feature (1)..(25): SEQ ID NO: 758; WAN024FLD_at; Start 469; Stop 493
tcaacgcttatgatgaatatcatag

SEQ ID NO: 211003 - DNA, 25 bp, Artificial
  probe
  misc_feature (1)..(25): SEQ ID NO: 758; WAN024FLD_at; Start 581; Stop 605
cagattcacgtttgacttttattaa

SEQ ID NO: 211004 - DNA, 25 bp, Artificial
  probe
  misc_feature (1)..(25): SEQ ID NO: 758; WAN024FLD_at; Start 195; Stop 219
taaatctgtgattggattattcgtg

SEQ ID NO: 211005 - DNA, 25 bp, Artificial
  probe
  misc_feature (1)..(25): SEQ ID NO: 758; WAN024FLD_at; Start 733; Stop 757
gcgaagacttacttaaacacctcaa

SEQ ID NO: 211006 - DNA, 25 bp, Artificial
  probe
  misc_feature (1)..(25): SEQ ID NO: 758; WAN024FLD_at; Start 958; Stop 982
caacattttggtttgatagtttcgg

SEQ ID NO: 211007 - DNA, 25 bp, Artificial
  probe
  misc_feature (1)..(25): SEQ ID NO: 758; WAN024FLD_at; Start 554; Stop 578
tactttcaggatggttatacgtaga

SEQ ID NO: 211008 - DNA, 25 bp, Artificial
  probe
  misc_feature (1)..(25): SEQ ID NO: 758; WAN024FLD_at; Start 316; Stop 340
ttttcagacgtagccaaagtctcct

SEQ ID NO: 211009 - DNA, 25 bp, Artificial
  probe
  misc_feature (1)..(25): SEQ ID NO: 758; WAN024FLD_at; Start 162; Stop 186
tctgaaggaacttatatctgagagt

SEQ ID NO: 211010 - DNA, 25 bp, Artificial
  probe
  misc_feature (1)..(25): SEQ ID NO: 758; WAN024FLD_at; Start 903; Stop 927
ggagcgtagcacagaaacatatttg

SEQ ID NO: 211011 - DNA, 25 bp, Artificial
  probe
  misc_feature (1)..(25): SEQ ID NO: 758; WAN024FLD_at; Start 420; Stop 444
gcctaccagagttagacactatctt

SEQ ID NO: 211012 - DNA, 25 bp, Artificial
  probe
  misc_feature (1)..(25): SEQ ID NO: 758; WAN024FLD_at; Start 365; Stop 389
tcctagtagtattgagtagtaagct

SEQ ID NO: 211013 - DNA, 25 bp, Artificial
  probe
  misc_feature (1)..(25): SEQ ID NO: 758; WAN024FLD_at; Start 566; Stop 590
ggttatacgtagaaacagattcacg

SEQ ID NO: 211014 - DNA, 25 bp, Artificial
  probe
  misc_feature (1)..(25): SEQ ID NO: 758; WAN024FLD_at; Start 879; Stop 903
tggaaatggcttgagcatacaaggg

SEQ ID NO: 211015 - DNA, 25 bp, Artificial
  probe
  misc_feature (1)..(25): SEQ ID NO: 758; WAN024FLD_at; Start 380; Stop 404
gtagtaagcttggtattattcctga

SEQ ID NO: 211016 - DNA, 25 bp, Artificial
  probe
  misc_feature (1)..(25): SEQ ID NO: 758; WAN024FLD_at; Start 290; Stop 314
tgatttatagtcttagaaatctccc

SEQ ID NO: 211017 - DNA, 25 bp, Artificial
  probe
  misc_feature (1)..(25): SEQ ID NO: 758; WAN024FLD_at; Start 328; Stop 352
gccaaagtctcctttatcattagta

SEQ ID NO: 211018 - DNA, 25 bp, Artificial
  probe
  misc_feature (1)..(25): SEQ ID NO: 758; WAN024FLD_at; Start 720; Stop 744
gagttactggattgcgaagacttac

SEQ ID NO: 211019 - DNA, 25 bp, Artificial
  probe
  misc_feature (1)..(25): SEQ ID NO: 758; WAN024FLD_at; Start 789; Stop 813
ggatcaatttcttggaggacgtatt

SEQ ID NO: 211020 - DNA, 25 bp, Artificial
  probe
  misc_feature (1)..(25): SEQ ID NO: 758; WAN024FLD_at; Start 639; Stop 663
gaaattgtcaccttccatcattgaa

SEQ ID NO: 211021 - DNA, 25 bp, Artificial
  probe
  misc_feature (1)..(25): SEQ ID NO: 758; WAN024FLD_at; Start 230; Stop 254
tctgcttcatcataggtaccgtcac

SEQ ID NO: 211022 - DNA, 25 bp, Artificial
  probe
  misc_feature (1)..(25): SEQ ID NO: 758; WAN024FLD_at; Start 305; Stop 329
gaaatctccctttttcagacgtagc

SEQ ID NO: 211023 - DNA, 25 bp, Artificial
  probe
  misc_feature (1)..(25): SEQ ID NO: 758; WAN024FLD_at; Start 454; Stop 478
tattcattacttccatcaacgctta

SEQ ID NO: 211024 - DNA, 25 bp, Artificial
  probe
  misc_feature (1)..(25): SEQ ID NO: 758; WAN024FLD_at; Start 864; Stop 888
aaagattgattggattggaaatggc

SEQ ID NO: 211025 - DNA, 25 bp, Artificial
  probe
  misc_feature (1)..(25): SEQ ID NO: 1646; WAN024FLE_at; Start 639; Stop 663
tcagatgaatgagccaccaggagca

SEQ ID NO: 211026 - DNA, 25 bp, Artificial
  probe
  misc_feature (1)..(25): SEQ ID NO: 1646; WAN024FLE_at; Start 1319; Stop 1343
gtaaatacgaccacttgccagaaga

SEQ ID NO: 211027 - DNA, 25 bp, Artificial
  probe
  misc_feature (1)..(25): SEQ ID NO: 1646; WAN024FLE_at; Start 690; Stop 714
gacaatcgctgaatacttccgtgat

SEQ ID NO: 211028 - DNA, 25 bp, Artificial
  probe
  misc_feature (1)..(25): SEQ ID NO: 1646; WAN024FLE_at; Start 655; Stop 679
ccaggagcacgtatgcgtgttgccc

SEQ ID NO: 211029 - DNA, 25 bp, Artificial
  probe
  misc_feature (1)..(25): SEQ ID NO: 1646; WAN024FLE_at; Start 845; Stop 869
tgggtcaattgcaagaacgtatcac

SEQ ID NO: 211030 - DNA, 25 bp, Artificial
  probe
  misc_feature (1)..(25): SEQ ID NO: 1646; WAN024FLE_at; Start 586; Stop 610
tactgggaaatgaaagaatcaggcg

SEQ ID NO: 211031 - DNA, 25 bp, Artificial
  probe
  misc_feature (1)..(25): SEQ ID NO: 1646; WAN024FLE_at; Start 209; Stop 233
gaatggaagtattggacacaggtcg

SEQ ID NO: 211032 - DNA, 25 bp, Artificial
  probe
  misc_feature (1)..(25): SEQ ID NO: 1646; WAN024FLE_at; Start 1275; Stop 1299
tccagttgctgaaactgtacgtggc

SEQ ID NO: 211033 - DNA, 25 bp, Artificial
  probe
  misc_feature (1)..(25): SEQ ID NO: 1646; WAN024FLE_at; Start 275; Stop 299
tcttcaacgttttgggagataccat

SEQ ID NO: 211034 - DNA, 25 bp, Artificial
  probe
  misc_feature (1)..(25): SEQ ID NO: 1646; WAN024FLE_at; Start 918; Stop 942
agcggatgactatactgacccagcg

SEQ ID NO: 211035 - DNA, 25 bp, Artificial
  probe
  misc_feature (1)..(25): SEQ ID NO: 1646; WAN024FLE_at; Start 1062; Stop 1086
aatcgttggagaagagcactatgca

SEQ ID NO: 211036 - DNA, 25 bp, Artificial
  probe
  misc_feature (1)..(25): SEQ ID NO: 1646; WAN024FLE_at; Start 325; Stop 349
gacgcagagcgtcagccaattcata

SEQ ID NO: 211037 - DNA, 25 bp, Artificial
  probe
  misc_feature (1)..(25): SEQ ID NO: 1646; WAN024FLE_at; Start 609; Stop 633
cgttatcgagaaaacagccatggtc

SEQ ID NO: 211038 - DNA, 25 bp, Artificial
  probe
  misc_feature (1)..(25): SEQ ID NO: 1646; WAN024FLE_at; Start 1177; Stop 1201
gaaaagaccttggttgctcgcgccc

SEQ ID NO: 211039 - DNA, 25 bp, Artificial
  probe
  misc_feature (1)..(25): SEQ ID NO: 1646; WAN024FLE_at; Start 789; Stop 813
ccttttgggtcgtatgccatcagcc

SEQ ID NO: 211040 - DNA, 25 bp, Artificial
  probe
  misc_feature (1)..(25): SEQ ID NO: 1646; WAN024FLE_at; Start 157; Stop 181
gatggtatggttcgtactatcgcca

SEQ ID NO: 211041 - DNA, 25 bp, Artificial
  probe
  misc_feature (1)..(25): SEQ ID NO: 1646; WAN024FLE_at; Start 13; Stop 37
aaaattgctcaggttatcggtcccg

SEQ ID NO: 211042 - DNA, 25 bp, Artificial
  probe
  misc_feature (1)..(25): SEQ ID NO: 1646; WAN024FLE_at; Start 1047; Stop 1071
tgccttggcacctgaaatcgttgga

SEQ ID NO: 211043 - DNA, 25 bp, Artificial
  probe
  misc_feature (1)..(25): SEQ ID NO: 1646; WAN024FLE_at; Start 675; Stop 699
tgcccttactggtttgacaatcgct

SEQ ID NO: 211044 - DNA, 25 bp, Artificial
  probe
  misc_feature (1)..(25): SEQ ID NO: 1646; WAN024FLE_at; Start 1255; Stop 1279
ggtcagccaggttcttatgttccag

SEQ ID NO: 211045 - DNA, 25 bp, Artificial
  probe
  misc_feature (1)..(25): SEQ ID NO: 1646; WAN024FLE_at; Start 126; Stop 150
aatcgtccttgaagtagccttggag

SEQ ID NO: 211046 - DNA, 25 bp, Artificial
  probe
  misc_feature (1)..(25): SEQ ID NO: 1646; WAN024FLE_at; Start 1336; Stop 1360
ccagaagatgccttccgtggtgtag

SEQ ID NO: 211047 - DNA, 25 bp, Artificial
  probe
  misc_feature (1)..(25): SEQ ID NO: 1646; WAN024FLE_at; Start 765; Stop 789
tcaggctggttcagaagtatctgcc

SEQ ID NO: 211048 - DNA, 25 bp, Artificial
  probe
  misc_feature (1)..(25): SEQ ID NO: 1646; WAN024FLE_at; Start 229; Stop 253
ggtcgtccaatctctgtaccagtag

SEQ ID NO: 211049 - DNA, 25 bp, Artificial
  probe
  misc_feature (1)..(25): SEQ ID NO: 1646; WAN024FLE_at; Start 707; Stop 731
tccgtgatgtggaaggccaagacgt

SEQ ID NO: 211050 - DNA, 25 bp, Artificial
  probe
  misc_feature (1)..(25): SEQ ID NO: 1646; WAN024FLE_at; Start 39; Stop 63
tgtagacgttttgtttgcagcaggg

SEQ ID NO: 211051 - DNA, 25 bp, Artificial
  probe
  misc_feature (1)..(25): SEQ ID NO: 1646; WAN024FLE_at; Start 827; Stop 851
caacacttgctacggaaatgggtca

SEQ ID NO: 211052 - DNA, 25 bp, Artificial
  probe
  misc_feature (1)..(25): SEQ ID NO: 1646; WAN024FLE_at; Start 510; Stop 534
caacattgcccaagagcacggtggt

SEQ ID NO: 211053 - DNA, 25 bp, Artificial
  probe
  misc_feature (1)..(25): SEQ ID NO: 1646; WAN024FLE_at; Start 1083; Stop 1107
tgcagttgctgctgaagtaaaacgt

SEQ ID NO: 211054 - DNA, 25 bp, Artificial
  probe
  misc_feature (1)..(25): SEQ ID NO: 1646; WAN024FLE_at; Start 307; Stop 331
gaagctccttttacagaagacgcag

SEQ ID NO: 211055 - DNA, 25 bp, Artificial
  probe
  misc_feature (1)..(25): SEQ ID NO: 1646; WAN024FLE_at; Start 174; Stop 198
tatcgccatggaatcaacagatggg

SEQ ID NO: 211056 - DNA, 25 bp, Artificial
  probe
  misc_feature (1)..(25): SEQ ID NO: 1646; WAN024FLE_at; Start 623; Stop 647
cagccatggtctttggtcagatgaa

SEQ ID NO: 211057 - DNA, 25 bp, Artificial
  probe
  misc_feature (1)..(25): SEQ ID NO: 1646; WAN024FLE_at; Start 749; Stop 773
atatcttccgtttcactcaggctgg

SEQ ID NO: 211058 - DNA, 25 bp, Artificial
  probe
  misc_feature (1)..(25): SEQ ID NO: 1646; WAN024FLE_at; Start 1240; Stop 1264
gcggaacaatttactggtcagccag

SEQ ID NO: 211059 - DNA, 25 bp, Artificial
  probe
  misc_feature (1)..(25): SEQ ID NO: 5288; WAN024FLF_at; Start 18; Stop 42
cacgacgttcttggtcaatcaaatg

SEQ ID NO: 211060 - DNA, 25 bp, Artificial
  probe
  misc_feature (1)..(25): SEQ ID NO: 5288; WAN024FLF_at; Start 105; Stop 129
tatcgatatcacgagcacgttctgc

SEQ ID NO: 211061 - DNA, 25 bp, Artificial
  probe
  misc_feature (1)..(25): SEQ ID NO: 5288; WAN024FLF_at; Start 45; Stop 69
tgtcttgtgcttcttcaattgcacg

SEQ ID NO: 211062 - DNA, 25 bp, Artificial
  probe
  misc_feature (1)..(25): SEQ ID NO: 5288; WAN024FLF_at; Start 119; Stop 143
gcacgttctgcagagtcagcgacga

SEQ ID NO: 211063 - DNA, 25 bp, Artificial
  probe
  misc_feature (1)..(25): SEQ ID NO: 5288; WAN024FLF_at; Start 59; Stop 83
tcaattgcacgttctgcacgaagtt

SEQ ID NO: 211064 - DNA, 25 bp, Artificial
  probe
  misc_feature (1)..(25): SEQ ID NO: 5288; WAN024FLF_at; Start 77; Stop 101
cgaagtttggcacgttctgcacgac

SEQ ID NO: 211065 - DNA, 25 bp, Artificial
  probe
  misc_feature (1)..(25): SEQ ID NO: 5288; WAN024FLF_at; Start 188; Stop 212
gcaatccagttcacgtgatctttat

SEQ ID NO: 211066 - DNA, 25 bp, Artificial
  probe
  misc_feature (1)..(25): SEQ ID NO: 5288; WAN024FLF_at; Start 210; Stop 234
tatcatcgatacgttttacctttac

SEQ ID NO: 211067 - DNA, 25 bp, Artificial
  probe
  misc_feature (1)..(25): SEQ ID NO: 5288; WAN024FLF_at; Start 159; Stop 183
tggcaatttcaataacgccaccgtt

SEQ ID NO: 211068 - DNA, 25 bp, Artificial
  probe
  misc_feature (1)..(25): SEQ ID NO: 5288; WAN024FLF_at; Start 124; Stop 148
ttctgcagagtcagcgacgattgtg

SEQ ID NO: 211069 - DNA, 25 bp, Artificial
  probe
  misc_feature (1)..(25): SEQ ID NO: 5288; WAN024FLF_at; Start 2; Stop 26
tgcaaagcaatcttagcacgacgtt

SEQ ID NO: 211070 - DNA, 25 bp, Artificial
  probe
  misc_feature (1)..(25): SEQ ID NO: 5288; WAN024FLF_at; Start 81; Stop 105
gtttggcacgttctgcacgactgat

SEQ ID NO: 211071 - DNA, 25 bp, Artificial
  probe
  misc_feature (1)..(25): SEQ ID NO: 5288; WAN024FLF_at; Start 153; Stop 177
tatcattggcaatttcaataacgcc

SEQ ID NO: 211072 - DNA, 25 bp, Artificial
  probe
  misc_feature (1)..(25): SEQ ID NO: 5288; WAN024FLF_at; Start 222; Stop 246
gttttacctttacttcatcaactgc

SEQ ID NO: 211073 - DNA, 25 bp, Artificial
  probe
  misc_feature (1)..(25): SEQ ID NO: 5288; WAN024FLF_at; Start 194; Stop 218
cagttcacgtgatctttatcatcga

SEQ ID NO: 211074 - DNA, 25 bp, Artificial
  probe
  misc_feature (1)..(25): SEQ ID NO: 5288; WAN024FLF_at; Start 134; Stop 158
tcagcgacgattgtgatcatatcat

SEQ ID NO: 211075 - DNA, 25 bp, Artificial
  probe
  misc_feature (1)..(25): SEQ ID NO: 5288; WAN024FLF_at; Start 37; Stop 61
caaatgtttgtcttgtgcttcttca

SEQ ID NO: 211076 - DNA, 25 bp, Artificial
  probe
  misc_feature (1)..(25): SEQ ID NO: 5288; WAN024FLF_at; Start 8; Stop 32
gcaatcttagcacgacgttcttggt

SEQ ID NO: 211077 - DNA, 25 bp, Artificial
  probe
  misc_feature (1)..(25): SEQ ID NO: 5288; WAN024FLF_at; Start 198; Stop 222
tcacgtgatctttatcatcgatacg

SEQ ID NO: 211078 - DNA, 25 bp, Artificial
  probe
  misc_feature (1)..(25): SEQ ID NO: 5288; WAN024FLF_at; Start 92; Stop 116
tctgcacgactgatatcgatatcac

SEQ ID NO: 211079 - DNA, 25 bp, Artificial
  probe
  misc_feature (1)..(25): SEQ ID NO: 5288; WAN024FLF_at; Start 15; Stop 39
tagcacgacgttcttggtcaatcaa

SEQ ID NO: 211080 - DNA, 25 bp, Artificial
  probe
  misc_feature (1)..(25): SEQ ID NO: 5288; WAN024FLF_at; Start 109; Stop 133
gatatcacgagcacgttctgcagag

SEQ ID NO: 211081 - DNA, 25 bp, Artificial
  probe
  misc_feature (1)..(25): SEQ ID NO: 5288; WAN024FLF_at; Start 99; Stop 123
gactgatatcgatatcacgagcacg

SEQ ID NO: 211082 - DNA, 25 bp, Artificial
  probe
  misc_feature (1)..(25): SEQ ID NO: 5288; WAN024FLF_at; Start 180; Stop 204
cgtttactgcaatccagttcacgtg

SEQ ID NO: 211083 - DNA, 25 bp, Artificial
  probe
  misc_feature (1)..(25): SEQ ID NO: 5288; WAN024FLF_at; Start 86; Stop 110
gcacgttctgcacgactgatatcga

SEQ ID NO: 211084 - DNA, 25 bp, Artificial
  probe
  misc_feature (1)..(25): SEQ ID NO: 5288; WAN024FLF_at; Start 128; Stop 152
gcagagtcagcgacgattgtgatca

SEQ ID NO: 211085 - DNA, 25 bp, Artificial
  probe
  misc_feature (1)..(25): SEQ ID NO: 5288; WAN024FLF_at; Start 23; Stop 47
cgttcttggtcaatcaaatgtttgt

SEQ ID NO: 211086 - DNA, 25 bp, Artificial
  probe
  misc_feature (1)..(25): SEQ ID NO: 5288; WAN024FLF_at; Start 139; Stop 163
gacgattgtgatcatatcattggca

SEQ ID NO: 211087 - DNA, 25 bp, Artificial
  probe
  misc_feature (1)..(25): SEQ ID NO: 5288; WAN024FLF_at; Start 52; Stop 76
tgcttcttcaattgcacgttctgca

SEQ ID NO: 211088 - DNA, 25 bp, Artificial
  probe
  misc_feature (1)..(25): SEQ ID NO: 5288; WAN024FLF_at; Start 71; Stop 95
tctgcacgaagtttggcacgttctg

SEQ ID NO: 211089 - DNA, 25 bp, Artificial
  probe
  misc_feature (1)..(25): SEQ ID NO: 5288; WAN024FLF_at; Start 66; Stop 90
cacgttctgcacgaagtttggcacg

SEQ ID NO: 211090 - DNA, 25 bp, Artificial
  probe
  misc_feature (1)..(25): SEQ ID NO: 5288; WAN024FLF_at; Start 172; Stop 196
aacgccaccgtttactgcaatccag

SEQ ID NO: 211091 - DNA, 25 bp, Artificial
  probe
  misc_feature (1)..(25): SEQ ID NO: 5288; WAN024FLF_at; Start 113; Stop 137
tcacgagcacgttctgcagagtcag

SEQ ID NO: 211092 - DNA, 25 bp, Artificial
  probe
  misc_feature (1)..(25): SEQ ID NO: 5288; WAN024FLF_at; Start 116; Stop 140
cgagcacgttctgcagagtcagcga

SEQ ID NO: 211093 - DNA, 25 bp, Artificial
  probe
  misc_feature (1)..(25): SEQ ID NO: 2500; WAN024FLG_at; Start 149; Stop 173
taaaggtaaaacgtatcgatgataa

SEQ ID NO: 211094 - DNA, 25 bp, Artificial
  probe
  misc_feature (1)..(25): SEQ ID NO: 2500; WAN024FLG_at; Start 283; Stop 307
cgtgcagaacgtgccaaacttcgtg

SEQ ID NO: 211095 - DNA, 25 bp, Artificial
  probe
  misc_feature (1)..(25): SEQ ID NO: 2500; WAN024FLG_at; Start 55; Stop 79
catgccagctatgtatcggttcgaa

SEQ ID NO: 211096 - DNA, 25 bp, Artificial
  probe
  misc_feature (1)..(25): SEQ ID NO: 2500; WAN024FLG_at; Start 136; Stop 160
gcagttgatgaagtaaaggtaaaac

SEQ ID NO: 211097 - DNA, 25 bp, Artificial
  probe
  misc_feature (1)..(25): SEQ ID NO: 2500; WAN024FLG_at; Start 231; Stop 255
gatcacaatcgtcgctgactctgca

SEQ ID NO: 211098 - DNA, 25 bp, Artificial
  probe
  misc_feature (1)..(25): SEQ ID NO: 2500; WAN024FLG_at; Start 107; Stop 131
cacgacatgaaaatatgattgcggt

SEQ ID NO: 211099 - DNA, 25 bp, Artificial
  probe
  misc_feature (1)..(25): SEQ ID NO: 2500; WAN024FLG_at; Start 17; Stop 41
tccagatcgtgacaccagatggtct

SEQ ID NO: 211100 - DNA, 25 bp, Artificial
  probe
  misc_feature (1)..(25): SEQ ID NO: 2500; WAN024FLG_at; Start 62; Stop 86
gctatgtatcggttcgaactctgga

SEQ ID NO: 211101 - DNA, 25 bp, Artificial
  probe
  misc_feature (1)..(25): SEQ ID NO: 2500; WAN024FLG_at; Start 180; Stop 204
cgtgaactggattgcagtaaacggt

SEQ ID NO: 211102 - DNA, 25 bp, Artificial
  probe
  misc_feature (1)..(25): SEQ ID NO: 2500; WAN024FLG_at; Start 362; Stop 386
gtgctaagattgctttgcaacgtgc

SEQ ID NO: 211103 - DNA, 25 bp, Artificial
  probe
  misc_feature (1)..(25): SEQ ID NO: 2500; WAN024FLG_at; Start 37; Stop 61
ggtctcgtctatgatcaccatgcca

SEQ ID NO: 211104 - DNA, 25 bp, Artificial
  probe
  misc_feature (1)..(25): SEQ ID NO: 2500; WAN024FLG_at; Start 334; Stop 358
gacaaacatttgattgaccaagaac

SEQ ID NO: 211105 - DNA, 25 bp, Artificial
  probe
  misc_feature (1)..(25): SEQ ID NO: 2500; WAN024FLG_at; Start 296; Stop 320
ccaaacttcgtgcagaacgtgcaat

SEQ ID NO: 211106 - DNA, 25 bp, Artificial
  probe
  misc_feature (1)..(25): SEQ ID NO: 2500; WAN024FLG_at; Start 3; Stop 27
ggctcagttaactgtccagatcgtg

SEQ ID NO: 211107 - DNA, 25 bp, Artificial
  probe
  misc_feature (1)..(25): SEQ ID NO: 2500; WAN024FLG_at; Start 29; Stop 53
caccagatggtctcgtctatgatca

SEQ ID NO: 211108 - DNA, 25 bp, Artificial
  probe
  misc_feature (1)..(25): SEQ ID NO: 2500; WAN024FLG_at; Start 244; Stop 268
gctgactctgcagaacgtgctcgtg

SEQ ID NO: 211109 - DNA, 25 bp, Artificial
  probe
  misc_feature (1)..(25): SEQ ID NO: 2500; WAN024FLG_at; Start 225; Stop 249
tgatatgatcacaatcgtcgctgac

SEQ ID NO: 211110 - DNA, 25 bp, Artificial
  probe
  misc_feature (1)..(25): SEQ ID NO: 2500; WAN024FLG_at; Start 342; Stop 366
tttgattgaccaagaacgtcgtgct

SEQ ID NO: 211111 - DNA, 25 bp, Artificial
  probe
  misc_feature (1)..(25): SEQ ID NO: 2500; WAN024FLG_at; Start 44; Stop 68
tctatgatcaccatgccagctatgt

SEQ ID NO: 211112 - DNA, 25 bp, Artificial
  probe
  misc_feature (1)..(25): SEQ ID NO: 2500; WAN024FLG_at; Start 97; Stop 121
gggatcttgccacgacatgaaaata

SEQ ID NO: 211113 - DNA, 25 bp, Artificial
  probe
  misc_feature (1)..(25): SEQ ID NO: 2500; WAN024FLG_at; Start 171; Stop 195
taaagatcacgtgaactggattgca

SEQ ID NO: 211114 - DNA, 25 bp, Artificial
  probe
  misc_feature (1)..(25): SEQ ID NO: 2500; WAN024FLG_at; Start 236; Stop 260
caatcgtcgctgactctgcagaacg

SEQ ID NO: 211115 - DNA, 25 bp, Artificial
  probe
  misc_feature (1)..(25): SEQ ID NO: 2500; WAN024FLG_at; Start 351; Stop 375
ccaagaacgtcgtgctaagattgct

SEQ ID NO: 211116 - DNA, 25 bp, Artificial
  probe
  misc_feature (1)..(25): SEQ ID NO: 2500; WAN024FLG_at; Start 123; Stop 147
gattgcggttttagcagttgatgaa

SEQ ID NO: 211117 - DNA, 25 bp, Artificial
  probe
  misc_feature (1)..(25): SEQ ID NO: 2500; WAN024FLG_at; Start 253; Stop 277
gcagaacgtgctcgtgatatcgata

SEQ ID NO: 211118 - DNA, 25 bp, Artificial
  probe
  misc_feature (1)..(25): SEQ ID NO: 2500; WAN024FLG_at; Start 289; Stop 313
gaacgtgccaaacttcgtgcagaac

SEQ ID NO: 211119 - DNA, 25 bp, Artificial
  probe
  misc_feature (1)..(25): SEQ ID NO: 2500; WAN024FLG_at; Start 213; Stop 237
tgaaattgccaatgatatgatcaca

SEQ ID NO: 211120 - DNA, 25 bp, Artificial
  probe
  misc_feature (1)..(25): SEQ ID NO: 2500; WAN024FLG_at; Start 321; Stop 345
tgaagaagcacaagacaaacatttg

SEQ ID NO: 211121 - DNA, 25 bp, Artificial
  probe
  misc_feature (1)..(25): SEQ ID NO: 2500; WAN024FLG_at; Start 160; Stop 184
cgtatcgatgataaagatcacgtga

SEQ ID NO: 211122 - DNA, 25 bp, Artificial
  probe
  misc_feature (1)..(25): SEQ ID NO: 2500; WAN024FLG_at; Start 393; Stop 417
ccgtattaatgtcggaaatagacta

SEQ ID NO: 211123 - DNA, 25 bp, Artificial
  probe
  misc_feature (1)..(25): SEQ ID NO: 2500; WAN024FLG_at; Start 10; Stop 34
ttaactgtccagatcgtgacaccag

SEQ ID NO: 211124 - DNA, 25 bp, Artificial
  probe
  misc_feature (1)..(25): SEQ ID NO: 2500; WAN024FLG_at; Start 356; Stop 380
aacgtcgtgctaagattgctttgca

SEQ ID NO: 211125 - DNA, 25 bp, Artificial
  probe
  misc_feature (1)..(25): SEQ ID NO: 2500; WAN024FLG_at; Start 71; Stop 95
cggttcgaactctggatggtgagat

SEQ ID NO: 211126 - DNA, 25 bp, Artificial
  probe
  misc_feature (1)..(25): SEQ ID NO: 2500; WAN024FLG_at; Start 306; Stop 330
tgcagaacgtgcaattgaagaagca

SEQ ID NO: 211127 - DNA, 25 bp, Artificial
  probe
  misc_feature (1)..(25): SEQ ID NO: 3398; WAN024FLH_at; Start 306; Stop 330
tcctgtggaactaaaagcacttgct

SEQ ID NO: 211128 - DNA, 25 bp, Artificial
  probe
  misc_feature (1)..(25): SEQ ID NO: 3398; WAN024FLH_at; Start 301; Stop 325
gttaatcctgtggaactaaaagcac

SEQ ID NO: 211129 - DNA, 25 bp, Artificial
  probe
  misc_feature (1)..(25): SEQ ID NO: 3398; WAN024FLH_at; Start 277; Stop 301
gatgtcccagatggaagcacagtag

SEQ ID NO: 211130 - DNA, 25 bp, Artificial
  probe
  misc_feature (1)..(25): SEQ ID NO: 3398; WAN024FLH_at; Start 312; Stop 336
ggaactaaaagcacttgcttcaaaa

SEQ ID NO: 211131 - DNA, 25 bp, Artificial
  probe
  misc_feature (1)..(25): SEQ ID NO: 3398; WAN024FLH_at; Start 60; Stop 84
caatttttcacatcgtgggatggga

SEQ ID NO: 211132 - DNA, 25 bp, Artificial
  probe
  misc_feature (1)..(25): SEQ ID NO: 3398; WAN024FLH_at; Start 272; Stop 296
tacatgatgtcccagatggaagcac

SEQ ID NO: 211133 - DNA, 25 bp, Artificial
  probe
  misc_feature (1)..(25): SEQ ID NO: 3398; WAN024FLH_at; Start 136; Stop 160
catgtaacattaggaattaaaaacg

SEQ ID NO: 211134 - DNA, 25 bp, Artificial
  probe
  misc_feature (1)..(25): SEQ ID NO: 3398; WAN024FLH_at; Start 54; Stop 78
aaacgtcaatttttcacatcgtggg

SEQ ID NO: 211135 - DNA, 25 bp, Artificial
  probe
  misc_feature (1)..(25): SEQ ID NO: 3398; WAN024FLH_at; Start 186; Stop 210
gaactgttttataggagcctatgca

SEQ ID NO: 211136 - DNA, 25 bp, Artificial
  probe
  misc_feature (1)..(25): SEQ ID NO: 3398; WAN024FLH_at; Start 126; Stop 150
tatacaacatcatgtaacattagga

SEQ ID NO: 211137 - DNA, 25 bp, Artificial
  probe
  misc_feature (1)..(25): SEQ ID NO: 3398; WAN024FLH_at; Start 16; Stop 40
tatggttttgagtgcccacgtaaag

SEQ ID NO: 211138 - DNA, 25 bp, Artificial
  probe
  misc_feature (1)..(25): SEQ ID NO: 3398; WAN024FLH_at; Start 290; Stop 314
gaagcacagtagttaatcctgtgga

SEQ ID NO: 211139 - DNA, 25 bp, Artificial
  probe
  misc_feature (1)..(25): SEQ ID NO: 3398; WAN024FLH_at; Start 286; Stop 310
gatggaagcacagtagttaatcctg

SEQ ID NO: 211140 - DNA, 25 bp, Artificial
  probe
  misc_feature (1)..(25): SEQ ID NO: 3398; WAN024FLH_at; Start 82; Stop 106
ggaacagttgtaagtagtaatgcta

SEQ ID NO: 211141 - DNA, 25 bp, Artificial
  probe
  misc_feature (1)..(25): SEQ ID NO: 3398; WAN024FLH_at; Start 281; Stop 305
tcccagatggaagcacagtagttaa

SEQ ID NO: 211142 - DNA, 25 bp, Artificial
  probe
  misc_feature (1)..(25): SEQ ID NO: 3398; WAN024FLH_at; Start 261; Stop 285
tacgatggttttacatgatgtccca

SEQ ID NO: 211143 - DNA, 25 bp, Artificial
  probe
  misc_feature (1)..(25): SEQ ID NO: 3398; WAN024FLH_at; Start 11; Stop 35
ttctatatggttttgagtgcccacg

SEQ ID NO: 211144 - DNA, 25 bp, Artificial
  probe
  misc_feature (1)..(25): SEQ ID NO: 3398; WAN024FLH_at; Start 239; Stop 263
caaattctaagattggagcaggtac

SEQ ID NO: 211145 - DNA, 25 bp, Artificial
  probe
  misc_feature (1)..(25): SEQ ID NO: 3398; WAN024FLH_at; Start 254; Stop 278
gagcaggtacgatggttttacatga

SEQ ID NO: 211146 - DNA, 25 bp, Artificial
  probe
  misc_feature (1)..(25): SEQ ID NO: 3398; WAN024FLH_at; Start 215; Stop 239
tcttaggaaatgtaaaaattggtgc

SEQ ID NO: 211147 - DNA, 25 bp, Artificial
  probe
  misc_feature (1)..(25): SEQ ID NO: 3398; WAN024FLH_at; Start 233; Stop 257
ttggtgcaaattctaagattggagc

SEQ ID NO: 211148 - DNA, 25 bp, Artificial
  probe
  misc_feature (1)..(25): SEQ ID NO: 3398; WAN024FLH_at; Start 199; Stop 223
ggagcctatgcatttatcttaggaa

SEQ ID NO: 211149 - DNA, 25 bp, Artificial
  probe
  misc_feature (1)..(25): SEQ ID NO: 3398; WAN024FLH_at; Start 182; Stop 206
gggagaactgttttataggagccta

SEQ ID NO: 211150 - DNA, 25 bp, Artificial
  probe
  misc_feature (1)..(25): SEQ ID NO: 3398; WAN024FLH_at; Start 324; Stop 348
acttgcttcaaaaaaagacgttcag

SEQ ID NO: 211151 - DNA, 25 bp, Artificial
  probe
  misc_feature (1)..(25): SEQ ID NO: 3398; WAN024FLH_at; Start 28; Stop 52
tgcccacgtaaagctaaaattggga

SEQ ID NO: 211152 - DNA, 25 bp, Artificial
  probe
  misc_feature (1)..(25): SEQ ID NO: 3398; WAN024FLH_at; Start 113; Stop 137
gggataatgtgactatacaacatca

SEQ ID NO: 211153 - DNA, 25 bp, Artificial
  probe
  misc_feature (1)..(25): SEQ ID NO: 3398; WAN024FLH_at; Start 249; Stop 273
gattggagcaggtacgatggtttta

SEQ ID NO: 211154 - DNA, 25 bp, Artificial
  probe
  misc_feature (1)..(25): SEQ ID NO: 3398; WAN024FLH_at; Start 90; Stop 114
tgtaagtagtaatgctatcattggg

SEQ ID NO: 211155 - DNA, 25 bp, Artificial
  probe
  misc_feature (1)..(25): SEQ ID NO: 3398; WAN024FLH_at; Start 1; Stop 25
ctgctcagagttctatatggttttg

SEQ ID NO: 211156 - DNA, 25 bp, Artificial
  probe
  misc_feature (1)..(25): SEQ ID NO: 3398; WAN024FLH_at; Start 244; Stop 268
tctaagattggagcaggtacgatgg

SEQ ID NO: 211157 - DNA, 25 bp, Artificial
  probe
  misc_feature (1)..(25): SEQ ID NO: 3398; WAN024FLH_at; Start 146; Stop 170
taggaattaaaaacgataatgatag

SEQ ID NO: 211158 - DNA, 25 bp, Artificial
  probe
  misc_feature (1)..(25): SEQ ID NO: 3398; WAN024FLH_at; Start 68; Stop 92
cacatcgtgggatgggaacagttgt

SEQ ID NO: 211159 - DNA, 25 bp, Artificial
  probe
  misc_feature (1)..(25): SEQ ID NO: 3398; WAN024FLH_at; Start 25; Stop 49
gagtgcccacgtaaagctaaaattg

SEQ ID NO: 211160 - DNA, 25 bp, Artificial
  probe
  misc_feature (1)..(25): SEQ ID NO: 3398; WAN024FLH_at; Start 159; Stop 183
cgataatgatagaattatcatcggg

SEQ ID NO: 211161 - DNA, 25 bp, Artificial
  probe
  misc_feature (1)..(25): SEQ ID NO: 2154; WAN024FLI_at; Start 1164; Stop 1188
ttcttccgttcttgcagagtttgca

SEQ ID NO: 211162 - DNA, 25 bp, Artificial
  probe
  misc_feature (1)..(25): SEQ ID NO: 2154; WAN024FLI_at; Start 838; Stop 862
caatttcaagaatttaaagtgcgac

SEQ ID NO: 211163 - DNA, 25 bp, Artificial
  probe
  misc_feature (1)..(25): SEQ ID NO: 2154; WAN024FLI_at; Start 139; Stop 163
tacacaacagcagtggtaggttatt

SEQ ID NO: 211164 - DNA, 25 bp, Artificial
  probe
  misc_feature (1)..(25): SEQ ID NO: 2154; WAN024FLI_at; Start 125; Stop 149
tagggatttttagctacacaacagc

SEQ ID NO: 211165 - DNA, 25 bp, Artificial
  probe
  misc_feature (1)..(25): SEQ ID NO: 2154; WAN024FLI_at; Start 1356; Stop 1380
tggagtcgcagtatatattctatcg

SEQ ID NO: 211166 - DNA, 25 bp, Artificial
  probe
  misc_feature (1)..(25): SEQ ID NO: 2154; WAN024FLI_at; Start 739; Stop 763
tatgagcaggctcaaaaaattgagc

SEQ ID NO: 211167 - DNA, 25 bp, Artificial
  probe
  misc_feature (1)..(25): SEQ ID NO: 2154; WAN024FLI_at; Start 857; Stop 881
tgcgacttgaacaatcgataaggtt

SEQ ID NO: 211168 - DNA, 25 bp, Artificial
  probe
  misc_feature (1)..(25): SEQ ID NO: 2154; WAN024FLI_at; Start 94; Stop 118
tatatttcacgtgttctaaacgctg

SEQ ID NO: 211169 - DNA, 25 bp, Artificial
  probe
  misc_feature (1)..(25): SEQ ID NO: 2154; WAN024FLI_at; Start 690; Stop 714
taagacaatgataggttggttttcc

SEQ ID NO: 211170 - DNA, 25 bp, Artificial
  probe
  misc_feature (1)..(25): SEQ ID NO: 2154; WAN024FLI_at; Start 182; Stop 206
taggaattgcaacttacggacaact

SEQ ID NO: 211171 - DNA, 25 bp, Artificial
  probe
  misc_feature (1)..(25): SEQ ID NO: 2154; WAN024FLI_at; Start 589; Stop 613
caaagagttaagttggctgagatta

SEQ ID NO: 211172 - DNA, 25 bp, Artificial
  probe
  misc_feature (1)..(25): SEQ ID NO: 2154; WAN024FLI_at; Start 202; Stop 226
caactacaagttgctaaataccaag

SEQ ID NO: 211173 - DNA, 25 bp, Artificial
  probe
  misc_feature (1)..(25): SEQ ID NO: 2154; WAN024FLI_at; Start 906; Stop 930
gagtttaggattagtagggatagca

SEQ ID NO: 211174 - DNA, 25 bp, Artificial
  probe
  misc_feature (1)..(25): SEQ ID NO: 2154; WAN024FLI_at; Start 1147; Stop 1171
tcactgggtgctgcgatttcttccg

SEQ ID NO: 211175 - DNA, 25 bp, Artificial
  probe
  misc_feature (1)..(25): SEQ ID NO: 2154; WAN024FLI_at; Start 753; Stop 777
aaaaattgagcagatggttgtgaca

SEQ ID NO: 211176 - DNA, 25 bp, Artificial
  probe
  misc_feature (1)..(25): SEQ ID NO: 2154; WAN024FLI_at; Start 795; Stop 819
tgtagtaacgatgcctagaatgact

SEQ ID NO: 211177 - DNA, 25 bp, Artificial
  probe
  misc_feature (1)..(25): SEQ ID NO: 2154; WAN024FLI_at; Start 398; Stop 422
catggtttttgcagggtcttgaaga

SEQ ID NO: 211178 - DNA, 25 bp, Artificial
  probe
  misc_feature (1)..(25): SEQ ID NO: 2154; WAN024FLI_at; Start 727; Stop 751
gaaaatggttattatgagcaggctc

SEQ ID NO: 211179 - DNA, 25 bp, Artificial
  probe
  misc_feature (1)..(25): SEQ ID NO: 2154; WAN024FLI_at; Start 571; Stop 595
tatgtacctaaatatgttcaaagag

SEQ ID NO: 211180 - DNA, 25 bp, Artificial
  probe
  misc_feature (1)..(25): SEQ ID NO: 2154; WAN024FLI_at; Start 1306; Stop 1330
gagctactatctcctccttcgtgga

SEQ ID NO: 211181 - DNA, 25 bp, Artificial
  probe
  misc_feature (1)..(25): SEQ ID NO: 2154; WAN024FLI_at; Start 1321; Stop 1345
ccttcgtggacagttgttataatac

SEQ ID NO: 211182 - DNA, 25 bp, Artificial
  probe
  misc_feature (1)..(25): SEQ ID NO: 2154; WAN024FLI_at; Start 1026; Stop 1050
taatgcattagggaagcaaatactt

SEQ ID NO: 211183 - DNA, 25 bp, Artificial
  probe
  misc_feature (1)..(25): SEQ ID NO: 2154; WAN024FLI_at; Start 1247; Stop 1271
gaacagcagtgaaataccttggatc

SEQ ID NO: 211184 - DNA, 25 bp, Artificial
  probe
  misc_feature (1)..(25): SEQ ID NO: 2154; WAN024FLI_at; Start 1041; Stop 1065
gcaaatacttatgccttcagggcag

SEQ ID NO: 211185 - DNA, 25 bp, Artificial
  probe
  misc_feature (1)..(25): SEQ ID NO: 2154; WAN024FLI_at; Start 1343; Stop 1367
tacaagtcattgttggagtcgcagt

SEQ ID NO: 211186 - DNA, 25 bp, Artificial
  probe
  misc_feature (1)..(25): SEQ ID NO: 2154; WAN024FLI_at; Start 1216; Stop 1240
agaaattgtattcctcctaaatggg

SEQ ID NO: 211187 - DNA, 25 bp, Artificial
  probe
  misc_feature (1)..(25): SEQ ID NO: 2154; WAN024FLI_at; Start 1231; Stop 1255
cctaaatgggttattagaacagcag

SEQ ID NO: 211188 - DNA, 25 bp, Artificial
  probe
  misc_feature (1)..(25): SEQ ID NO: 2154; WAN024FLI_at; Start 528; Stop 552
tatgaacgcatcaacactgcttgga

SEQ ID NO: 211189 - DNA, 25 bp, Artificial
  probe
  misc_feature (1)..(25): SEQ ID NO: 2154; WAN024FLI_at; Start 436; Stop 460
gtgatgcgtaataccctaataaagg

SEQ ID NO: 211190 - DNA, 25 bp, Artificial
  probe
  misc_feature (1)..(25): SEQ ID NO: 2154; WAN024FLI_at; Start 108; Stop 132
tctaaacgctgatgggatagggatt

SEQ ID NO: 211191 - DNA, 25 bp, Artificial
  probe
  misc_feature (1)..(25): SEQ ID NO: 2154; WAN024FLI_at; Start 1096; Stop 1120
ggtgctgttatcaatatagtcttca

SEQ ID NO: 211192 - DNA, 25 bp, Artificial
  probe
  misc_feature (1)..(25): SEQ ID NO: 2154; WAN024FLI_at; Start 1430; Stop 1454
gaaaactaaatgttcttgcaaggaa

SEQ ID NO: 211193 - DNA, 25 bp, Artificial
  probe
  misc_feature (1)..(25): SEQ ID NO: 2154; WAN024FLI_at; Start 1054; Stop 1078
ccttcagggcagcaaagggcttata

SEQ ID NO: 211194 - DNA, 25 bp, Artificial
  probe
  misc_feature (1)..(25): SEQ ID NO: 2154; WAN024FLI_at; Start 1293; Stop 1317
tattaggacaatagagctactatct

SEQ ID NO: 211195 - DNA, 25 bp, Artificial
  probe
  misc_feature (1)..(25): SEQ ID NO: 2629; WAN024FLJ_at; Start 826; Stop 850
ctgcagtcaacaaaagcgtttattg

SEQ ID NO: 211196 - DNA, 25 bp, Artificial
  probe
  misc_feature (1)..(25): SEQ ID NO: 2629; WAN024FLJ_at; Start 370; Stop 394
tcaactaaacaggaatatcatcaaa

SEQ ID NO: 211197 - DNA, 25 bp, Artificial
  probe
  misc_feature (1)..(25): SEQ ID NO: 2629; WAN024FLJ_at; Start 187; Stop 211
gatagtaatttaggctttgctaggg

SEQ ID NO: 211198 - DNA, 25 bp, Artificial
  probe
  misc_feature (1)..(25): SEQ ID NO: 2629; WAN024FLJ_at; Start 34; Stop 58
tttaaagaaactaaacaatgcgtca

SEQ ID NO: 211199 - DNA, 25 bp, Artificial
  probe
  misc_feature (1)..(25): SEQ ID NO: 2629; WAN024FLJ_at; Start 105; Stop 129
tgataattgttctcctaatggctca

SEQ ID NO: 211200 - DNA, 25 bp, Artificial
  probe
  misc_feature (1)..(25): SEQ ID NO: 2629; WAN024FLJ_at; Start 355; Stop 379
ggtccagatatatattcaactaaac

SEQ ID NO: 211201 - DNA, 25 bp, Artificial
  probe
  misc_feature (1)..(25): SEQ ID NO: 2629; WAN024FLJ_at; Start 463; Stop 487
gataggctaaggttcttagttcctg

SEQ ID NO: 211202 - DNA, 25 bp, Artificial
  probe
  misc_feature (1)..(25): SEQ ID NO: 2629; WAN024FLJ_at; Start 252; Stop 276
tccagattttattgttgtaatgaac

SEQ ID NO: 211203 - DNA, 25 bp, Artificial
  probe
  misc_feature (1)..(25): SEQ ID NO: 2629; WAN024FLJ_at; Start 757; Stop 781
gaagatgtggcaacagattcaacgt

SEQ ID NO: 211204 - DNA, 25 bp, Artificial
  probe
  misc_feature (1)..(25): SEQ ID NO: 2629; WAN024FLJ_at; Start 689; Stop 713
tacattatatggcattgaagaacaa

SEQ ID NO: 211205 - DNA, 25 bp, Artificial
  probe
  misc_feature (1)..(25): SEQ ID NO: 2629; WAN024FLJ_at; Start 812; Stop 836
caatcaggtgtctactgcagtcaac

SEQ ID NO: 211206 - DNA, 25 bp, Artificial
  probe
  misc_feature (1)..(25): SEQ ID NO: 2629; WAN024FLJ_at; Start 321; Stop 345
tgaaagttacgcaaagtatggctac

SEQ ID NO: 211207 - DNA, 25 bp, Artificial
  probe
  misc_feature (1)..(25): SEQ ID NO: 2629; WAN024FLJ_at; Start 576; Stop 600
aaaaaatccgttattacatggctcg

SEQ ID NO: 211208 - DNA, 25 bp, Artificial
  probe
  misc_feature (1)..(25): SEQ ID NO: 2629; WAN024FLJ_at; Start 592; Stop 616
catggctcgtgttatgttttttcta

SEQ ID NO: 211209 - DNA, 25 bp, Artificial
  probe
  misc_feature (1)..(25): SEQ ID NO: 2629; WAN024FLJ_at; Start 45; Stop 69
taaacaatgcgtcaattcaattaag

SEQ ID NO: 211210 - DNA, 25 bp, Artificial
  probe
  misc_feature (1)..(25): SEQ ID NO: 2629; WAN024FLJ_at; Start 404; Stop 428
caagaaaggttctggataggtctga

SEQ ID NO: 211211 - DNA, 25 bp, Artificial
  probe
  misc_feature (1)..(25): SEQ ID NO: 2629; WAN024FLJ_at; Start 669; Stop 693
gtatatggaggcagaaattttacat

SEQ ID NO: 211212 - DNA, 25 bp, Artificial
  probe
  misc_feature (1)..(25): SEQ ID NO: 2629; WAN024FLJ_at; Start 432; Stop 456
gaagttattatatcgaaagctagtt

SEQ ID NO: 211213 - DNA, 25 bp, Artificial
  probe
  misc_feature (1)..(25): SEQ ID NO: 2629; WAN024FLJ_at; Start 624; Stop 648
tactgaaaaacatcaacacacatgt

SEQ ID NO: 211214 - DNA, 25 bp, Artificial
  probe
  misc_feature (1)..(25): SEQ ID NO: 2629; WAN024FLJ_at; Start 744; Stop 768
agtttaccatcatgaagatgtggca

SEQ ID NO: 211215 - DNA, 25 bp, Artificial
  probe
  misc_feature (1)..(25): SEQ ID NO: 2629; WAN024FLJ_at; Start 715; Stop 739
gaattaatgctttattacccagatt

SEQ ID NO: 211216 - DNA, 25 bp, Artificial
  probe
  misc_feature (1)..(25): SEQ ID NO: 2629; WAN024FLJ_at; Start 121; Stop 145
aatggctcatatagtagtttagtag

SEQ ID NO: 211217 - DNA, 25 bp, Artificial
  probe
  misc_feature (1)..(25): SEQ ID NO: 2629; WAN024FLJ_at; Start 414; Stop 438
tctggataggtctgatttgaagtta

SEQ ID NO: 211218 - DNA, 25 bp, Artificial
  probe
  misc_feature (1)..(25): SEQ ID NO: 2629; WAN024FLJ_at; Start 387; Stop 411
tcatcaaaatcctcagacaagaaag

SEQ ID NO: 211219 - DNA, 25 bp, Artificial
  probe
  misc_feature (1)..(25): SEQ ID NO: 2629; WAN024FLJ_at; Start 13; Stop 37
gtggtgttgcattacatggttttta

SEQ ID NO: 211220 - DNA, 25 bp, Artificial
  probe
  misc_feature (1)..(25): SEQ ID NO: 2629; WAN024FLJ_at; Start 140; Stop 164
tagtagatgcttttggttgtgataa

SEQ ID NO: 211221 - DNA, 25 bp, Artificial
  probe
  misc_feature (1)..(25): SEQ ID NO: 2629; WAN024FLJ_at; Start 337; Stop 361
tatggctactatatattaggtccag

SEQ ID NO: 211222 - DNA, 25 bp, Artificial
  probe
  misc_feature (1)..(25): SEQ ID NO: 2629; WAN024FLJ_at; Start 783; Stop 807
tgtaaagcaatataagaaatcgttc

SEQ ID NO: 211223 - DNA, 25 bp, Artificial
  probe
  misc_feature (1)..(25): SEQ ID NO: 2629; WAN024FLJ_at; Start 232; Stop 256
tatgcagttgaaaattttaatccag

SEQ ID NO: 211224 - DNA, 25 bp, Artificial
  probe
  misc_feature (1)..(25): SEQ ID NO: 2629; WAN024FLJ_at; Start 767; Stop 791
caacagattcaacgtttgtaaagca

SEQ ID NO: 211225 - DNA, 25 bp, Artificial
  probe
  misc_feature (1)..(25): SEQ ID NO: 2629; WAN024FLJ_at; Start 798; Stop 822
gaaatcgttcttctcaatcaggtgt

SEQ ID NO: 211226 - DNA, 25 bp, Artificial
  probe
  misc_feature (1)..(25): SEQ ID NO: 2629; WAN024FLJ_at; Start 445; Stop 469
cgaaagctagttattaaagataggc

SEQ ID NO: 211227 - DNA, 25 bp, Artificial
  probe
  misc_feature (1)..(25): SEQ ID NO: 2629; WAN024FLJ_at; Start 219; Stop 243
tcttggttataaatatgcagttgaa

SEQ ID NO: 211228 - DNA, 25 bp, Artificial
  probe
  misc_feature (1)..(25): SEQ ID NO: 2629; WAN024FLJ_at; Start 177; Stop 201
tatgaagtcagatagtaatttaggc

SEQ ID NO: 211229 - DNA, 25 bp, Artificial
  probe
  misc_feature (1)..(25): SEQ ID NO: 1803; WAN024FLK_at; Start 152; Stop 176
tgctaaagtttgtatcgttgaaata

SEQ ID NO: 211230 - DNA, 25 bp, Artificial
  probe
  misc_feature (1)..(25): SEQ ID NO: 1803; WAN024FLK_at; Start 10; Stop 34
gaagctataggtttacctggaagcg

SEQ ID NO: 211231 - DNA, 25 bp, Artificial
  probe
  misc_feature (1)..(25): SEQ ID NO: 1803; WAN024FLK_at; Start 601; Stop 625
gcaatctataataatgacaaaaaac

SEQ ID NO: 211232 - DNA, 25 bp, Artificial
  probe
  misc_feature (1)..(25): SEQ ID NO: 1803; WAN024FLK_at; Start 361; Stop 385
aatattgtgaaattatgtgctgact

SEQ ID NO: 211233 - DNA, 25 bp, Artificial
  probe
  misc_feature (1)..(25): SEQ ID NO: 1803; WAN024FLK_at; Start 335; Stop 359
tattactagatgagggaatgtatca

SEQ ID NO: 211234 - DNA, 25 bp, Artificial
  probe
  misc_feature (1)..(25): SEQ ID NO: 1803; WAN024FLK_at; Start 225; Stop 249
gcttccgtatgagagtaaatttgat

SEQ ID NO: 211235 - DNA, 25 bp, Artificial
  probe
  misc_feature (1)..(25): SEQ ID NO: 1803; WAN024FLK_at; Start 13; Stop 37
gctataggtttacctggaagcggaa

SEQ ID NO: 211236 - DNA, 25 bp, Artificial
  probe
  misc_feature (1)..(25): SEQ ID NO: 1803; WAN024FLK_at; Start 548; Stop 572
tagaaactacccagttgagcaagat

SEQ ID NO: 211237 - DNA, 25 bp, Artificial
  probe
  misc_feature (1)..(25): SEQ ID NO: 1803; WAN024FLK_at; Start 510; Stop 534
tgaaaaacgtaatcgacatgtgtct

SEQ ID NO: 211238 - DNA, 25 bp, Artificial
  probe
  misc_feature (1)..(25): SEQ ID NO: 1803; WAN024FLK_at; Start 483; Stop 507
tccaatttctgagacactattgtct

SEQ ID NO: 211239 - DNA, 25 bp, Artificial
  probe
  misc_feature (1)..(25): SEQ ID NO: 1803; WAN024FLK_at; Start 68; Stop 92
aatttcggagtaattcaatcagaac

SEQ ID NO: 211240 - DNA, 25 bp, Artificial
  probe
  misc_feature (1)..(25): SEQ ID NO: 1803; WAN024FLK_at; Start 615; Stop 639
tgacaaaaaacagataatatcagtt

SEQ ID NO: 211241 - DNA, 25 bp, Artificial
  probe
  misc_feature (1)..(25): SEQ ID NO: 1803; WAN024FLK_at; Start 564; Stop 588
gagcaagatattagataactacgat

SEQ ID NO: 211242 - DNA, 25 bp, Artificial
  probe
  misc_feature (1)..(25): SEQ ID NO: 1803; WAN024FLK_at; Start 421; Stop 445
gaaaaatgtgtattgttaagtagat

SEQ ID NO: 211243 - DNA, 25 bp, Artificial
  probe
  misc_feature (1)..(25): SEQ ID NO: 1803; WAN024FLK_at; Start 579; Stop 603
taactacgataaactaaataatgca

SEQ ID NO: 211244 - DNA, 25 bp, Artificial
  probe
  misc_feature (1)..(25): SEQ ID NO: 1803; WAN024FLK_at; Start 555; Stop 579
tacccagttgagcaagatattagat

SEQ ID NO: 211245 - DNA, 25 bp, Artificial
  probe
  misc_feature (1)..(25): SEQ ID NO: 1803; WAN024FLK_at; Start 283; Stop 307
gcgcttatgcttctctttatctata

SEQ ID NO: 211246 - DNA, 25 bp, Artificial
  probe
  misc_feature (1)..(25): SEQ ID NO: 1803; WAN024FLK_at; Start 253; Stop 277
tatgaaaatccagattattgtgtga

SEQ ID NO: 211247 - DNA, 25 bp, Artificial
  probe
  misc_feature (1)..(25): SEQ ID NO: 1803; WAN024FLK_at; Start 495; Stop 519
gacactattgtctattgaaaaacgt

SEQ ID NO: 211248 - DNA, 25 bp, Artificial
  probe
  misc_feature (1)..(25): SEQ ID NO: 1803; WAN024FLK_at; Start 474; Stop 498
caatatttttccaatttctgagaca

SEQ ID NO: 211249 - DNA, 25 bp, Artificial
  probe
  misc_feature (1)..(25): SEQ ID NO: 1803; WAN024FLK_at; Start 113; Stop 137
cacggaataatatttcagtcaaaat

SEQ ID NO: 211250 - DNA, 25 bp, Artificial
  probe
  misc_feature (1)..(25): SEQ ID NO: 1803; WAN024FLK_at; Start 374; Stop 398
tatgtgctgactttgatttttcaat

SEQ ID NO: 211251 - DNA, 25 bp, Artificial
  probe
  misc_feature (1)..(25): SEQ ID NO: 1803; WAN024FLK_at; Start 96; Stop 120
taattttactgaattatcacggaat

SEQ ID NO: 211252 - DNA, 25 bp, Artificial
  probe
  misc_feature (1)..(25): SEQ ID NO: 1803; WAN024FLK_at; Start 437; Stop 461
taagtagattaaatgatagtaagca

SEQ ID NO: 211253 - DNA, 25 bp, Artificial
  probe
  misc_feature (1)..(25): SEQ ID NO: 1803; WAN024FLK_at; Start 203; Stop 227
tatacgatattctttctgaagagct

SEQ ID NO: 211254 - DNA, 25 bp, Artificial
  probe
  misc_feature (1)..(25): SEQ ID NO: 1803; WAN024FLK_at; Start 47; Stop 71
tattccatgagcttgaaaaagaatt

SEQ ID NO: 211255 - DNA, 25 bp, Artificial
  probe
  misc_feature (1)..(25): SEQ ID NO: 1803; WAN024FLK_at; Start 268; Stop 292
tattgtgtgaattatgcgcttatgc

SEQ ID NO: 211256 - DNA, 25 bp, Artificial
  probe
  misc_feature (1)..(25): SEQ ID NO: 1803; WAN024FLK_at; Start 538; Stop 562
tttgatgaactagaaactacccagt

SEQ ID NO: 211257 - DNA, 25 bp, Artificial
  probe
  misc_feature (1)..(25): SEQ ID NO: 1803; WAN024FLK_at; Start 37; Stop 61
aaaacgtttttattccatgagcttg

SEQ ID NO: 211258 - DNA, 25 bp, Artificial
  probe
  misc_feature (1)..(25): SEQ ID NO: 1803; WAN024FLK_at; Start 346; Stop 370
gagggaatgtatcataatattgtga

SEQ ID NO: 211259 - DNA, 25 bp, Artificial
  probe
  misc_feature (1)..(25): SEQ ID NO: 1803; WAN024FLK_at; Start 393; Stop 417
ttcaatcagactatcaaataagtta

SEQ ID NO: 211260 - DNA, 25 bp, Artificial
  probe
  misc_feature (1)..(25): SEQ ID NO: 1803; WAN024FLK_at; Start 625; Stop 649
cagataatatcagtttttagaaagg

SEQ ID NO: 211261 - DNA, 25 bp, Artificial
  probe
  misc_feature (1)..(25): SEQ ID NO: 1803; WAN024FLK_at; Start 523; Stop 547
cgacatgtgtctaaatttgatgaac

SEQ ID NO: 211262 - DNA, 25 bp, Artificial
  probe
  misc_feature (1)..(25): SEQ ID NO: 1803; WAN024FLK_at; Start 217; Stop 241
tctgaagagcttccgtatgagagta

SEQ ID NO: 211263 - DNA, 25 bp, Artificial
  probe
  misc_feature (1)..(25): SEQ ID NO: 5491; WAN024FLL_at; Start 797; Stop 821
caaggctcacattatttaaatacgg

SEQ ID NO: 211264 - DNA, 25 bp, Artificial
  probe
  misc_feature (1)..(25): SEQ ID NO: 5491; WAN024FLL_at; Start 1066; Stop 1090
cgtgttgcaagtataaatgataagg

SEQ ID NO: 211265 - DNA, 25 bp, Artificial
  probe
  misc_feature (1)..(25): SEQ ID NO: 5491; WAN024FLL_at; Start 722; Stop 746
tacttcctgttctaggcttgggagc

SEQ ID NO: 211266 - DNA, 25 bp, Artificial
  probe
  misc_feature (1)..(25): SEQ ID NO: 5491; WAN024FLL_at; Start 1153; Stop 1177
tatccgggaacgaattcaatggtaa

SEQ ID NO: 211267 - DNA, 25 bp, Artificial
  probe
  misc_feature (1)..(25): SEQ ID NO: 5491; WAN024FLL_at; Start 1205; Stop 1229
tgagatatagtgacaagtggaggat

SEQ ID NO: 211268 - DNA, 25 bp, Artificial
  probe
  misc_feature (1)..(25): SEQ ID NO: 5491; WAN024FLL_at; Start 745; Stop 769
gcagtggttgggtttgaacaattta

SEQ ID NO: 211269 - DNA, 25 bp, Artificial
  probe
  misc_feature (1)..(25): SEQ ID NO: 5491; WAN024FLL_at; Start 505; Stop 529
ggtacgccaggtcaagtaattaatc

SEQ ID NO: 211270 - DNA, 25 bp, Artificial
  probe
  misc_feature (1)..(25): SEQ ID NO: 5491; WAN024FLL_at; Start 704; Stop 728
catcaatgaaaaagagagtacttcc

SEQ ID NO: 211271 - DNA, 25 bp, Artificial
  probe
  misc_feature (1)..(25): SEQ ID NO: 5491; WAN024FLL_at; Start 620; Stop 644
tgctgtctacattaaaaacacgggc

SEQ ID NO: 211272 - DNA, 25 bp, Artificial
  probe
  misc_feature (1)..(25): SEQ ID NO: 5491; WAN024FLL_at; Start 882; Stop 906
tattgctgctaaaaactattctctg

SEQ ID NO: 211273 - DNA, 25 bp, Artificial
  probe
  misc_feature (1)..(25): SEQ ID NO: 5491; WAN024FLL_at; Start 512; Stop 536
caggtcaagtaattaatctctcgat

SEQ ID NO: 211274 - DNA, 25 bp, Artificial
  probe
  misc_feature (1)..(25): SEQ ID NO: 5491; WAN024FLL_at; Start 442; Stop 466
tttataggcttaggaatgcatcaag

SEQ ID NO: 211275 - DNA, 25 bp, Artificial
  probe
  misc_feature (1)..(25): SEQ ID NO: 5491; WAN024FLL_at; Start 982; Stop 1006
tatccaatgatttttgcacaatttg

SEQ ID NO: 211276 - DNA, 25 bp, Artificial
  probe
  misc_feature (1)..(25): SEQ ID NO: 5491; WAN024FLL_at; Start 405; Stop 429
cttatctgttttgattgtcttagca

SEQ ID NO: 211277 - DNA, 25 bp, Artificial
  probe
  misc_feature (1)..(25): SEQ ID NO: 5491; WAN024FLL_at; Start 79; Stop 103
gaaaagtattttgtatatgctcagt

SEQ ID NO: 211278 - DNA, 25 bp, Artificial
  probe
  misc_feature (1)..(25): SEQ ID NO: 5491; WAN024FLL_at; Start 1172; Stop 1196
tggtaataacaacgtttctaatctg

SEQ ID NO: 211279 - DNA, 25 bp, Artificial
  probe
  misc_feature (1)..(25): SEQ ID NO: 5491; WAN024FLL_at; Start 856; Stop 880
agtggttttgctacatatggatccg

SEQ ID NO: 211280 - DNA, 25 bp, Artificial
  probe
  misc_feature (1)..(25): SEQ ID NO: 5491; WAN024FLL_at; Start 1053; Stop 1077
tagattattattacgtgttgcaagt

SEQ ID NO: 211281 - DNA, 25 bp, Artificial
  probe
  misc_feature (1)..(25): SEQ ID NO: 5491; WAN024FLL_at; Start 997; Stop 1021
gcacaatttggatttttaggaggaa

SEQ ID NO: 211282 - DNA, 25 bp, Artificial
  probe
  misc_feature (1)..(25): SEQ ID NO: 5491; WAN024FLL_at; Start 464; Stop 488
aagaatatcgctatggtttaccaac

SEQ ID NO: 211283 - DNA, 25 bp, Artificial
  probe
  misc_feature (1)..(25): SEQ ID NO: 5491; WAN024FLL_at; Start 871; Stop 895
tatggatccgatattgctgctaaaa

SEQ ID NO: 211284 - DNA, 25 bp, Artificial
  probe
  misc_feature (1)..(25): SEQ ID NO: 5491; WAN024FLL_at; Start 1122; Stop 1146
taatgttgtcttatcgtctattcaa

SEQ ID NO: 211285 - DNA, 25 bp, Artificial
  probe
  misc_feature (1)..(25): SEQ ID NO: 5491; WAN024FLL_at; Start 927; Stop 951
tcataacagatatggaatgaatcca

SEQ ID NO: 211286 - DNA, 25 bp, Artificial
  probe
  misc_feature (1)..(25): SEQ ID NO: 5491; WAN024FLL_at; Start 336; Stop 360
tctcaatgacttaacgcataaagaa

SEQ ID NO: 211287 - DNA, 25 bp, Artificial
  probe
  misc_feature (1)..(25): SEQ ID NO: 5491; WAN024FLL_at; Start 634; Stop 658
aaaacacgggcaattgtcttagcaa

SEQ ID NO: 211288 - DNA, 25 bp, Artificial
  probe
  misc_feature (1)..(25): SEQ ID NO: 5491; WAN024FLL_at; Start 831; Stop 855
aatgagacgctattttcctctggga

SEQ ID NO: 211289 - DNA, 25 bp, Artificial
  probe
  misc_feature (1)..(25): SEQ ID NO: 5491; WAN024FLL_at; Start 817; Stop 841
tacggtatgcttacaatgagacgct

SEQ ID NO: 211290 - DNA, 25 bp, Artificial
  probe
  misc_feature (1)..(25): SEQ ID NO: 5491; WAN024FLL_at; Start 455; Stop 479
gaatgcatcaagaatatcgctatgg

SEQ ID NO: 211291 - DNA, 25 bp, Artificial
  probe
  misc_feature (1)..(25): SEQ ID NO: 5491; WAN024FLL_at; Start 1140; Stop 1164
tattcaatcatcttatccgggaacg

SEQ ID NO: 211292 - DNA, 25 bp, Artificial
  probe
  misc_feature (1)..(25): SEQ ID NO: 5491; WAN024FLL_at; Start 236; Stop 260
caaatttttggaataatgtgcaaac

SEQ ID NO: 211293 - DNA, 25 bp, Artificial
  probe
  misc_feature (1)..(25): SEQ ID NO: 5491; WAN024FLL_at; Start 98; Stop 122
ctcagtatattgatgaaatagttgc

SEQ ID NO: 211294 - DNA, 25 bp, Artificial
  probe
  misc_feature (1)..(25): SEQ ID NO: 5491; WAN024FLL_at; Start 783; Stop 807
gacttctgatactccaaggctcaca

SEQ ID NO: 211295 - DNA, 25 bp, Artificial
  probe
  misc_feature (1)..(25): SEQ ID NO: 5491; WAN024FLL_at; Start 846; Stop 870
tcctctgggaagtggttttgctaca

SEQ ID NO: 211296 - DNA, 25 bp, Artificial
  probe
  misc_feature (1)..(25): SEQ ID NO: 5491; WAN024FLL_at; Start 323; Stop 347
gggcacaatcttttctcaatgactt

SEQ ID NO: 211297 - DNA, 25 bp, Artificial
  probe
  misc_feature (1)..(25): SEQ ID NO: 1579; WAN024FLM_at; Start 659; Stop 683
tgttctgcttacttggttgtttagg

SEQ ID NO: 211298 - DNA, 25 bp, Artificial
  probe
  misc_feature (1)..(25): SEQ ID NO: 1579; WAN024FLM_at; Start 876; Stop 900
tcgagttgttgagaaaatgaatttc

SEQ ID NO: 211299 - DNA, 25 bp, Artificial
  probe
  misc_feature (1)..(25): SEQ ID NO: 1579; WAN024FLM_at; Start 122; Stop 146
taccgtctttaacgttgcttgtcta

SEQ ID NO: 211300 - DNA, 25 bp, Artificial
  probe
  misc_feature (1)..(25): SEQ ID NO: 1579; WAN024FLM_at; Start 43; Stop 67
tcttgtctgggtataatagcgatgc

SEQ ID NO: 211301 - DNA, 25 bp, Artificial
  probe
  misc_feature (1)..(25): SEQ ID NO: 1579; WAN024FLM_at; Start 369; Stop 393
tcaaccggatgttattggtgttagc

SEQ ID NO: 211302 - DNA, 25 bp, Artificial
  probe
  misc_feature (1)..(25): SEQ ID NO: 1579; WAN024FLM_at; Start 542; Stop 566
ttatagattcgtttgcgtcgcgtca

SEQ ID NO: 211303 - DNA, 25 bp, Artificial
  probe
  misc_feature (1)..(25): SEQ ID NO: 1579; WAN024FLM_at; Start 859; Stop 883
gcgcatatggtactttttcgagttg

SEQ ID NO: 211304 - DNA, 25 bp, Artificial
  probe
  misc_feature (1)..(25): SEQ ID NO: 1579; WAN024FLM_at; Start 565; Stop 589
catagttttttatactgctccccgt

SEQ ID NO: 211305 - DNA, 25 bp, Artificial
  probe
  misc_feature (1)..(25): SEQ ID NO: 1579; WAN024FLM_at; Start 318; Stop 342
gattgaaggatttactgaagctaca

SEQ ID NO: 211306 - DNA, 25 bp, Artificial
  probe
  misc_feature (1)..(25): SEQ ID NO: 1579; WAN024FLM_at; Start 380; Stop 404
ttattggtgttagctggacgattgg

SEQ ID NO: 211307 - DNA, 25 bp, Artificial
  probe
  misc_feature (1)..(25): SEQ ID NO: 1579; WAN024FLM_at; Start 302; Stop 326
gaagtttttcgcatttgattgaagg

SEQ ID NO: 211308 - DNA, 25 bp, Artificial
  probe
  misc_feature (1)..(25): SEQ ID NO: 1579; WAN024FLM_at; Start 555; Stop 579
tgcgtcgcgtcatagttttttatac

SEQ ID NO: 211309 - DNA, 25 bp, Artificial
  probe
  misc_feature (1)..(25): SEQ ID NO: 1579; WAN024FLM_at; Start 586; Stop 610
ccgttctttcttggaggtggcctca

SEQ ID NO: 211310 - DNA, 25 bp, Artificial
  probe
  misc_feature (1)..(25): SEQ ID NO: 1579; WAN024FLM_at; Start 82; Stop 106
gctgactatcaaatttatggttgga

SEQ ID NO: 211311 - DNA, 25 bp, Artificial
  probe
  misc_feature (1)..(25): SEQ ID NO: 1579; WAN024FLM_at; Start 910; Stop 934
tttggtaaaggctggcttagcttca

SEQ ID NO: 211312 - DNA, 25 bp, Artificial
  probe
  misc_feature (1)..(25): SEQ ID NO: 1579; WAN024FLM_at; Start 708; Stop 732
cattcaaccttggtttaaaatggat

SEQ ID NO: 211313 - DNA, 25 bp, Artificial
  probe
  misc_feature (1)..(25): SEQ ID NO: 1579; WAN024FLM_at; Start 642; Stop 666
tgtttcgcaacgtaaattgttctgc

SEQ ID NO: 211314 - DNA, 25 bp, Artificial
  probe
  misc_feature (1)..(25): SEQ ID NO: 1579; WAN024FLM_at; Start 513; Stop 537
tgagatatattacttcactgataag

SEQ ID NO: 211315 - DNA, 25 bp, Artificial
  probe
  misc_feature (1)..(25): SEQ ID NO: 1579; WAN024FLM_at; Start 996; Stop 1020
gacaagtttttctaggagattgcta

SEQ ID NO: 211316 - DNA, 25 bp, Artificial
  probe
  misc_feature (1)..(25): SEQ ID NO: 1579; WAN024FLM_at; Start 29; Stop 53
gattacgagtaatttcttgtctggg

SEQ ID NO: 211317 - DNA, 25 bp, Artificial
  probe
  misc_feature (1)..(25): SEQ ID NO: 1579; WAN024FLM_at; Start 104; Stop 128
ggatatttgaagtgttcgtaccgtc

SEQ ID NO: 211318 - DNA, 25 bp, Artificial
  probe
  misc_feature (1)..(25): SEQ ID NO: 1579; WAN024FLM_at; Start 847; Stop 871
gaactttatttagcgcatatggtac

SEQ ID NO: 211319 - DNA, 25 bp, Artificial
  probe
  misc_feature (1)..(25): SEQ ID NO: 1579; WAN024FLM_at; Start 172; Stop 196
ggaatgttttgtggctattacgagc

SEQ ID NO: 211320 - DNA, 25 bp, Artificial
  probe
  misc_feature (1)..(25): SEQ ID NO: 1579; WAN024FLM_at; Start 6; Stop 30
gaagcgatatgataatttggatgga

SEQ ID NO: 211321 - DNA, 25 bp, Artificial
  probe
  misc_feature (1)..(25): SEQ ID NO: 1579; WAN024FLM_at; Start 337; Stop 361
gctacacttgtcttcggccttctgc

SEQ ID NO: 211322 - DNA, 25 bp, Artificial
  probe
  misc_feature (1)..(25): SEQ ID NO: 1579; WAN024FLM_at; Start 59; Stop 83
tagcgatgcatattaaagctaatgc

SEQ ID NO: 211323 - DNA, 25 bp, Artificial
  probe
  misc_feature (1)..(25): SEQ ID NO: 1579; WAN024FLM_at; Start 766; Stop 790
ccatggctttgctatgctataagcg

SEQ ID NO: 211324 - DNA, 25 bp, Artificial
  probe
  misc_feature (1)..(25): SEQ ID NO: 1579; WAN024FLM_at; Start 352; Stop 376
ggccttctgccgaataatcaaccgg

SEQ ID NO: 211325 - DNA, 25 bp, Artificial
  probe
  misc_feature (1)..(25): SEQ ID NO: 1579; WAN024FLM_at; Start 749; Stop 773
tgttacttctttaccttccatggct

SEQ ID NO: 211326 - DNA, 25 bp, Artificial
  probe
  misc_feature (1)..(25): SEQ ID NO: 1579; WAN024FLM_at; Start 601; Stop 625
ggtggcctcatttatatgtacagaa

SEQ ID NO: 211327 - DNA, 25 bp, Artificial
  probe
  misc_feature (1)..(25): SEQ ID NO: 1579; WAN024FLM_at; Start 448; Stop 472
ctatgctgggataaaaagagggcgt

SEQ ID NO: 211328 - DNA, 25 bp, Artificial
  probe
  misc_feature (1)..(25): SEQ ID NO: 1579; WAN024FLM_at; Start 689; Stop 713
caggtttccattatctattcattca

SEQ ID NO: 211329 - DNA, 25 bp, Artificial
  probe
  misc_feature (1)..(25): SEQ ID NO: 1579; WAN024FLM_at; Start 919; Stop 943
ggctggcttagcttcatattagttt

SEQ ID NO: 211330 - DNA, 25 bp, Artificial
  probe
  misc_feature (1)..(25): SEQ ID NO: 1579; WAN024FLM_at; Start 185; Stop 209
gctattacgagcgatttaaagaagg

SEQ ID NO: 211331 - DNA, 25 bp, Artificial
  probe
  misc_feature (1)..(25): SEQ ID NO: 2533; WAN024FLN_at; Start 63; Stop 87
gagtgtaagacaagcatttcatttg

SEQ ID NO: 211332 - DNA, 25 bp, Artificial
  probe
  misc_feature (1)..(25): SEQ ID NO: 2533; WAN024FLN_at; Start 79; Stop 103
tttcatttgacacgaggcttggagc

SEQ ID NO: 211333 - DNA, 25 bp, Artificial
  probe
  misc_feature (1)..(25): SEQ ID NO: 2533; WAN024FLN_at; Start 135; Stop 159
ccttggtttagctggcaaaacagct

SEQ ID NO: 211334 - DNA, 25 bp, Artificial
  probe
  misc_feature (1)..(25): SEQ ID NO: 2533; WAN024FLN_at; Start 129; Stop 153
gactagccttggtttagctggcaaa

SEQ ID NO: 211335 - DNA, 25 bp, Artificial
  probe
  misc_feature (1)..(25): SEQ ID NO: 2533; WAN024FLN_at; Start 21; Stop 45
ggaaatcactctatcccttacattt

SEQ ID NO: 211336 - DNA, 25 bp, Artificial
  probe
  misc_feature (1)..(25): SEQ ID NO: 2533; WAN024FLN_at; Start 35; Stop 59
cccttacatttaggagcgagaaagt

SEQ ID NO: 211337 - DNA, 25 bp, Artificial
  probe
  misc_feature (1)..(25): SEQ ID NO: 2533; WAN024FLN_at; Start 56; Stop 80
aagtaaggagtgtaagacaagcatt

SEQ ID NO: 211338 - DNA, 25 bp, Artificial
  probe
  misc_feature (1)..(25): SEQ ID NO: 2533; WAN024FLN_at; Start 109; Stop 133
ggctggcgagccaaggctaagacta

SEQ ID NO: 211339 - DNA, 25 bp, Artificial
  probe
  misc_feature (1)..(25): SEQ ID NO: 2533; WAN024FLN_at; Start 132; Stop 156
tagccttggtttagctggcaaaaca

SEQ ID NO: 211340 - DNA, 25 bp, Artificial
  probe
  misc_feature (1)..(25): SEQ ID NO: 2533; WAN024FLN_at; Start 156; Stop 180
agcttcaagggttcctcgtgtcaaa

SEQ ID NO: 211341 - DNA, 25 bp, Artificial
  probe
  misc_feature (1)..(25): SEQ ID NO: 2533; WAN024FLN_at; Start 41; Stop 65
catttaggagcgagaaagtaaggag

SEQ ID NO: 211342 - DNA, 25 bp, Artificial
  probe
  misc_feature (1)..(25): SEQ ID NO: 2533; WAN024FLN_at; Start 104; Stop 128
tgttaggctggcgagccaaggctaa

SEQ ID NO: 211343 - DNA, 25 bp, Artificial
  probe
  misc_feature (1)..(25): SEQ ID NO: 2533; WAN024FLN_at; Start 36; Stop 60
ccttacatttaggagcgagaaagta

SEQ ID NO: 211344 - DNA, 25 bp, Artificial
  probe
  misc_feature (1)..(25): SEQ ID NO: 2533; WAN024FLN_at; Start 59; Stop 83
taaggagtgtaagacaagcatttca

SEQ ID NO: 211345 - DNA, 25 bp, Artificial
  probe
  misc_feature (1)..(25): SEQ ID NO: 2533; WAN024FLN_at; Start 88; Stop 112
acacgaggcttggagctgttaggct

SEQ ID NO: 211346 - DNA, 25 bp, Artificial
  probe
  misc_feature (1)..(25): SEQ ID NO: 2533; WAN024FLN_at; Start 106; Stop 130
ttaggctggcgagccaaggctaaga

SEQ ID NO: 211347 - DNA, 25 bp, Artificial
  probe
  misc_feature (1)..(25): SEQ ID NO: 2533; WAN024FLN_at; Start 77; Stop 101
catttcatttgacacgaggcttgga

SEQ ID NO: 211348 - DNA, 25 bp, Artificial
  probe
  misc_feature (1)..(25): SEQ ID NO: 2533; WAN024FLN_at; Start 126; Stop 150
taagactagccttggtttagctggc

SEQ ID NO: 211349 - DNA, 25 bp, Artificial
  probe
  misc_feature (1)..(25): SEQ ID NO: 2533; WAN024FLN_at; Start 82; Stop 106
catttgacacgaggcttggagctgt

SEQ ID NO: 211350 - DNA, 25 bp, Artificial
  probe
  misc_feature (1)..(25): SEQ ID NO: 2533; WAN024FLN_at; Start 13; Stop 37
tccttaaaggaaatcactctatccc

SEQ ID NO: 211351 - DNA, 25 bp, Artificial
  probe
  misc_feature (1)..(25): SEQ ID NO: 2533; WAN024FLN_at; Start 154; Stop 178
acagcttcaagggttcctcgtgtca

SEQ ID NO: 211352 - DNA, 25 bp, Artificial
  probe
  misc_feature (1)..(25): SEQ ID NO: 2533; WAN024FLN_at; Start 152; Stop 176
aaacagcttcaagggttcctcgtgt

SEQ ID NO: 211353 - DNA, 25 bp, Artificial
  probe
  misc_feature (1)..(25): SEQ ID NO: 2533; WAN024FLN_at; Start 32; Stop 56
tatcccttacatttaggagcgagaa

SEQ ID NO: 211354 - DNA, 25 bp, Artificial
  probe
  misc_feature (1)..(25): SEQ ID NO: 2533; WAN024FLN_at; Start 114; Stop 138
gcgagccaaggctaagactagcctt

SEQ ID NO: 211355 - DNA, 25 bp, Artificial
  probe
  misc_feature (1)..(25): SEQ ID NO: 2533; WAN024FLN_at; Start 81; Stop 105
tcatttgacacgaggcttggagctg

SEQ ID NO: 211356 - DNA, 25 bp, Artificial
  probe
  misc_feature (1)..(25): SEQ ID NO: 2533; WAN024FLN_at; Start 85; Stop 109
ttgacacgaggcttggagctgttag

SEQ ID NO: 211357 - DNA, 25 bp, Artificial
  probe
  misc_feature (1)..(25): SEQ ID NO: 2533; WAN024FLN_at; Start 111; Stop 135
ctggcgagccaaggctaagactagc

SEQ ID NO: 211358 - DNA, 25 bp, Artificial
  probe
  misc_feature (1)..(25): SEQ ID NO: 2533; WAN024FLN_at; Start 68; Stop 92
taagacaagcatttcatttgacacg

SEQ ID NO: 211359 - DNA, 25 bp, Artificial
  probe
  misc_feature (1)..(25): SEQ ID NO: 2533; WAN024FLN_at; Start 30; Stop 54
tctatcccttacatttaggagcgag

SEQ ID NO: 211360 - DNA, 25 bp, Artificial
  probe
  misc_feature (1)..(25): SEQ ID NO: 2533; WAN024FLN_at; Start 71; Stop 95
gacaagcatttcatttgacacgagg

SEQ ID NO: 211361 - DNA, 25 bp, Artificial
  probe
  misc_feature (1)..(25): SEQ ID NO: 2533; WAN024FLN_at; Start 148; Stop 172
ggcaaaacagcttcaagggttcctc

SEQ ID NO: 211362 - DNA, 25 bp, Artificial
  probe
  misc_feature (1)..(25): SEQ ID NO: 2533; WAN024FLN_at; Start 150; Stop 174
caaaacagcttcaagggttcctcgt

SEQ ID NO: 211363 - DNA, 25 bp, Artificial
  probe
  misc_feature (1)..(25): SEQ ID NO: 2533; WAN024FLN_at; Start 73; Stop 97
caagcatttcatttgacacgaggct

SEQ ID NO: 211364 - DNA, 25 bp, Artificial
  probe
  misc_feature (1)..(25): SEQ ID NO: 2533; WAN024FLN_at; Start 26; Stop 50
tcactctatcccttacatttaggag

SEQ ID NO: 211365 - DNA, 25 bp, Artificial
  probe
  misc_feature (1)..(25): SEQ ID NO: 3074; WAN024FLO_at; Start 635; Stop 659
gaaggcctgctagaattattagaga

SEQ ID NO: 211366 - DNA, 25 bp, Artificial
  probe
  misc_feature (1)..(25): SEQ ID NO: 3074; WAN024FLO_at; Start 575; Stop 599
tagttgctacaggtagtttagtaaa

SEQ ID NO: 211367 - DNA, 25 bp, Artificial
  probe
  misc_feature (1)..(25): SEQ ID NO: 3074; WAN024FLO_at; Start 161; Stop 185
aaatcattgatactcatttatcacg

SEQ ID NO: 211368 - DNA, 25 bp, Artificial
  probe
  misc_feature (1)..(25): SEQ ID NO: 3074; WAN024FLO_at; Start 205; Stop 229
aaagatggctctaatcatatctctc

SEQ ID NO: 211369 - DNA, 25 bp, Artificial
  probe
  misc_feature (1)..(25): SEQ ID NO: 3074; WAN024FLO_at; Start 315; Stop 339
tatagagcaaggaggtacggttaaa

SEQ ID NO: 211370 - DNA, 25 bp, Artificial
  probe
  misc_feature (1)..(25): SEQ ID NO: 3074; WAN024FLO_at; Start 279; Stop 303
gagaaatattctattatctagtgga

SEQ ID NO: 211371 - DNA, 25 bp, Artificial
  probe
  misc_feature (1)..(25): SEQ ID NO: 3074; WAN024FLO_at; Start 169; Stop 193
gatactcatttatcacgttttacta

SEQ ID NO: 211372 - DNA, 25 bp, Artificial
  probe
  misc_feature (1)..(25): SEQ ID NO: 3074; WAN024FLO_at; Start 237; Stop 261
gagtagattatttatttatgatggg

SEQ ID NO: 211373 - DNA, 25 bp, Artificial
  probe
  misc_feature (1)..(25): SEQ ID NO: 3074; WAN024FLO_at; Start 228; Stop 252
tcctcatgagagtagattatttatt

SEQ ID NO: 211374 - DNA, 25 bp, Artificial
  probe
  misc_feature (1)..(25): SEQ ID NO: 3074; WAN024FLO_at; Start 553; Stop 577
agtgttcttcctttttctactgtag

SEQ ID NO: 211375 - DNA, 25 bp, Artificial
  probe
  misc_feature (1)..(25): SEQ ID NO: 3074; WAN024FLO_at; Start 623; Stop 647
ttttgatagctggaaggcctgctag

SEQ ID NO: 211376 - DNA, 25 bp, Artificial
  probe
  misc_feature (1)..(25): SEQ ID NO: 3074; WAN024FLO_at; Start 620; Stop 644
acattttgatagctggaaggcctgc

SEQ ID NO: 211377 - DNA, 25 bp, Artificial
  probe
  misc_feature (1)..(25): SEQ ID NO: 3074; WAN024FLO_at; Start 631; Stop 655
gctggaaggcctgctagaattatta

SEQ ID NO: 211378 - DNA, 25 bp, Artificial
  probe
  misc_feature (1)..(25): SEQ ID NO: 3074; WAN024FLO_at; Start 341; Stop 365
taggagataatgtctcttttaacag

SEQ ID NO: 211379 - DNA, 25 bp, Artificial
  probe
  misc_feature (1)..(25): SEQ ID NO: 3074; WAN024FLO_at; Start 216; Stop 240
taatcatatctctcctcatgagagt

SEQ ID NO: 211380 - DNA, 25 bp, Artificial
  probe
  misc_feature (1)..(25): SEQ ID NO: 3074; WAN024FLO_at; Start 363; Stop 387
cagaaattcttcgatcttttgtaaa

SEQ ID NO: 211381 - DNA, 25 bp, Artificial
  probe
  misc_feature (1)..(25): SEQ ID NO: 3074; WAN024FLO_at; Start 114; Stop 138
tatatatgttcattttaatactcga

SEQ ID NO: 211382 - DNA, 25 bp, Artificial
  probe
  misc_feature (1)..(25): SEQ ID NO: 3074; WAN024FLO_at; Start 265; Stop 289
caattaattctagggagaaatattc

SEQ ID NO: 211383 - DNA, 25 bp, Artificial
  probe
  misc_feature (1)..(25): SEQ ID NO: 3074; WAN024FLO_at; Start 220; Stop 244
catatctctcctcatgagagtagat

SEQ ID NO: 211384 - DNA, 25 bp, Artificial
  probe
  misc_feature (1)..(25): SEQ ID NO: 3074; WAN024FLO_at; Start 298; Stop 322
agtggatttaatttgtgtatagagc

SEQ ID NO: 211385 - DNA, 25 bp, Artificial
  probe
  misc_feature (1)..(25): SEQ ID NO: 3074; WAN024FLO_at; Start 351; Stop 375
tgtctcttttaacagaaattcttcg

SEQ ID NO: 211386 - DNA, 25 bp, Artificial
  probe
  misc_feature (1)..(25): SEQ ID NO: 3074; WAN024FLO_at; Start 604; Stop 628
gagtttaatcagagtaacattttga

SEQ ID NO: 211387 - DNA, 25 bp, Artificial
  probe
  misc_feature (1)..(25): SEQ ID NO: 3074; WAN024FLO_at; Start 506; Stop 530
taggagagaattgctggataacagc

SEQ ID NO: 211388 - DNA, 25 bp, Artificial
  probe
  misc_feature (1)..(25): SEQ ID NO: 3074; WAN024FLO_at; Start 568; Stop 592
tctactgtagttgctacaggtagtt

SEQ ID NO: 211389 - DNA, 25 bp, Artificial
  probe
  misc_feature (1)..(25): SEQ ID NO: 3074; WAN024FLO_at; Start 617; Stop 641
gtaacattttgatagctggaaggcc

SEQ ID NO: 211390 - DNA, 25 bp, Artificial
  probe
  misc_feature (1)..(25): SEQ ID NO: 3074; WAN024FLO_at; Start 150; Stop 174
gggagacataaaaatcattgatact

SEQ ID NO: 211391 - DNA, 25 bp, Artificial
  probe
  misc_feature (1)..(25): SEQ ID NO: 3074; WAN024FLO_at; Start 309; Stop 333
tttgtgtatagagcaaggaggtacg

SEQ ID NO: 211392 - DNA, 25 bp, Artificial
  probe
  misc_feature (1)..(25): SEQ ID NO: 3074; WAN024FLO_at; Start 211; Stop 235
ggctctaatcatatctctcctcatg

SEQ ID NO: 211393 - DNA, 25 bp, Artificial
  probe
  misc_feature (1)..(25): SEQ ID NO: 3074; WAN024FLO_at; Start 513; Stop 537
gaattgctggataacagcagactca

SEQ ID NO: 211394 - DNA, 25 bp, Artificial
  probe
  misc_feature (1)..(25): SEQ ID NO: 3074; WAN024FLO_at; Start 448; Stop 472
aatggacataggatctattatcagg

SEQ ID NO: 211395 - DNA, 25 bp, Artificial
  probe
  misc_feature (1)..(25): SEQ ID NO: 3074; WAN024FLO_at; Start 626; Stop 650
tgatagctggaaggcctgctagaat

SEQ ID NO: 211396 - DNA, 25 bp, Artificial
  probe
  misc_feature (1)..(25): SEQ ID NO: 3074; WAN024FLO_at; Start 539; Stop 563
tcattcttaaaaatagtgttcttcc

SEQ ID NO: 211397 - DNA, 25 bp, Artificial
  probe
  misc_feature (1)..(25): SEQ ID NO: 3074; WAN024FLO_at; Start 562; Stop 586
cctttttctactgtagttgctacag

SEQ ID NO: 211398 - DNA, 25 bp, Artificial
  probe
  misc_feature (1)..(25): SEQ ID NO: 3074; WAN024FLO_at; Start 498; Stop 522
tattgtaataggagagaattgctgg

SEQ ID NO: 211399 - DNA, 25 bp, Artificial
  probe
  misc_feature (1)..(25): SEQ ID NO: 3843; WAN024FLP_at; Start 402; Stop 426
ttttcaattgatggaagactatcaa

SEQ ID NO: 211400 - DNA, 25 bp, Artificial
  probe
  misc_feature (1)..(25): SEQ ID NO: 3843; WAN024FLP_at; Start 75; Stop 99
gatatcatacccatatgtgtcgcgt

SEQ ID NO: 211401 - DNA, 25 bp, Artificial
  probe
  misc_feature (1)..(25): SEQ ID NO: 3843; WAN024FLP_at; Start 1340; Stop 1364
ctgctttactaagcgcaattttata

SEQ ID NO: 211402 - DNA, 25 bp, Artificial
  probe
  misc_feature (1)..(25): SEQ ID NO: 3843; WAN024FLP_at; Start 1300; Stop 1324
tctcagtacgtttcatcaaattata

SEQ ID NO: 211403 - DNA, 25 bp, Artificial
  probe
  misc_feature (1)..(25): SEQ ID NO: 3843; WAN024FLP_at; Start 99; Stop 123
tattttatctgtggatgggctgggt

SEQ ID NO: 211404 - DNA, 25 bp, Artificial
  probe
  misc_feature (1)..(25): SEQ ID NO: 3843; WAN024FLP_at; Start 1143; Stop 1167
taatggttcagctttggttacagtt

SEQ ID NO: 211405 - DNA, 25 bp, Artificial
  probe
  misc_feature (1)..(25): SEQ ID NO: 3843; WAN024FLP_at; Start 681; Stop 705
tttagatgttacttttctgggcttc

SEQ ID NO: 211406 - DNA, 25 bp, Artificial
  probe
  misc_feature (1)..(25): SEQ ID NO: 3843; WAN024FLP_at; Start 185; Stop 209
atgtctacgctgttagagaaggtgc

SEQ ID NO: 211407 - DNA, 25 bp, Artificial
  probe
  misc_feature (1)..(25): SEQ ID NO: 3843; WAN024FLP_at; Start 170; Stop 194
caatctttggaattaatgtctacgc

SEQ ID NO: 211408 - DNA, 25 bp, Artificial
  probe
  misc_feature (1)..(25): SEQ ID NO: 3843; WAN024FLP_at; Start 320; Stop 344
tacctgctctatcagaatatagaag

SEQ ID NO: 211409 - DNA, 25 bp, Artificial
  probe
  misc_feature (1)..(25): SEQ ID NO: 3843; WAN024FLP_at; Start 789; Stop 813
agttattttgacacctcgtctagca

SEQ ID NO: 211410 - DNA, 25 bp, Artificial
  probe
  misc_feature (1)..(25): SEQ ID NO: 3843; WAN024FLP_at; Start 998; Stop 1022
caattctattctctaatttgaatgc

SEQ ID NO: 211411 - DNA, 25 bp, Artificial
  probe
  misc_feature (1)..(25): SEQ ID NO: 3843; WAN024FLP_at; Start 508; Stop 532
tatgtgtacgctctaattacagttg

SEQ ID NO: 211412 - DNA, 25 bp, Artificial
  probe
  misc_feature (1)..(25): SEQ ID NO: 3843; WAN024FLP_at; Start 88; Stop 112
tatgtgtcgcgtattttatctgtgg

SEQ ID NO: 211413 - DNA, 25 bp, Artificial
  probe
  misc_feature (1)..(25): SEQ ID NO: 3843; WAN024FLP_at; Start 51; Stop 75
gaccttgtctattctatttcccctg

SEQ ID NO: 211414 - DNA, 25 bp, Artificial
  probe
  misc_feature (1)..(25): SEQ ID NO: 3843; WAN024FLP_at; Start 782; Stop 806
ctgttacagttattttgacacctcg

SEQ ID NO: 211415 - DNA, 25 bp, Artificial
  probe
  misc_feature (1)..(25): SEQ ID NO: 3843; WAN024FLP_at; Start 1332; Stop 1356
tatttcaactgctttactaagcgca

SEQ ID NO: 211416 - DNA, 25 bp, Artificial
  probe
  misc_feature (1)..(25): SEQ ID NO: 3843; WAN024FLP_at; Start 234; Stop 258
acttgggaagtttgtaacggagatg

SEQ ID NO: 211417 - DNA, 25 bp, Artificial
  probe
  misc_feature (1)..(25): SEQ ID NO: 3843; WAN024FLP_at; Start 1130; Stop 1154
cagtaatggattttaatggttcagc

SEQ ID NO: 211418 - DNA, 25 bp, Artificial
  probe
  misc_feature (1)..(25): SEQ ID NO: 3843; WAN024FLP_at; Start 432; Stop 456
aacacttcgtgcaattatatttcaa

SEQ ID NO: 211419 - DNA, 25 bp, Artificial
  probe
  misc_feature (1)..(25): SEQ ID NO: 3843; WAN024FLP_at; Start 65; Stop 89
tatttcccctgatatcatacccata

SEQ ID NO: 211420 - DNA, 25 bp, Artificial
  probe
  misc_feature (1)..(25): SEQ ID NO: 3843; WAN024FLP_at; Start 694; Stop 718
tttctgggcttctttaaaaatgatc

SEQ ID NO: 211421 - DNA, 25 bp, Artificial
  probe
  misc_feature (1)..(25): SEQ ID NO: 3843; WAN024FLP_at; Start 11; Stop 35
aatccattgcccgaaattatttact

SEQ ID NO: 211422 - DNA, 25 bp, Artificial
  probe
  misc_feature (1)..(25): SEQ ID NO: 3843; WAN024FLP_at; Start 631; Stop 655
ccgatgtttctgatatttttaacct

SEQ ID NO: 211423 - DNA, 25 bp, Artificial
  probe
  misc_feature (1)..(25): SEQ ID NO: 3843; WAN024FLP_at; Start 155; Stop 179
atttcgtactaattgcaatctttgg

SEQ ID NO: 211424 - DNA, 25 bp, Artificial
  probe
  misc_feature (1)..(25): SEQ ID NO: 3843; WAN024FLP_at; Start 1016; Stop 1040
tgaatgctttattaattacacctat

SEQ ID NO: 211425 - DNA, 25 bp, Artificial
  probe
  misc_feature (1)..(25): SEQ ID NO: 3843; WAN024FLP_at; Start 114; Stop 138
tgggctgggtgcaatcaatttttca

SEQ ID NO: 211426 - DNA, 25 bp, Artificial
  probe
  misc_feature (1)..(25): SEQ ID NO: 3843; WAN024FLP_at; Start 884; Stop 908
tacttgctataccagttgttatagg

SEQ ID NO: 211427 - DNA, 25 bp, Artificial
  probe
  misc_feature (1)..(25): SEQ ID NO: 3843; WAN024FLP_at; Start 38; Stop 62
atttgataaaaacgaccttgtctat

SEQ ID NO: 211428 - DNA, 25 bp, Artificial
  probe
  misc_feature (1)..(25): SEQ ID NO: 3843; WAN024FLP_at; Start 1286; Stop 1310
tcaagattgttatttctcagtacgt

SEQ ID NO: 211429 - DNA, 25 bp, Artificial
  probe
  misc_feature (1)..(25): SEQ ID NO: 3843; WAN024FLP_at; Start 392; Stop 416
tggagtggttttttcaattgatgga

SEQ ID NO: 211430 - DNA, 25 bp, Artificial
  probe
  misc_feature (1)..(25): SEQ ID NO: 3843; WAN024FLP_at; Start 418; Stop 442
gactatcaatatataacacttcgtg

SEQ ID NO: 211431 - DNA, 25 bp, Artificial
  probe
  misc_feature (1)..(25): SEQ ID NO: 3843; WAN024FLP_at; Start 1; Stop 25
gtgaaaaggaaatccattgcccgaa

SEQ ID NO: 211432 - DNA, 25 bp, Artificial
  probe
  misc_feature (1)..(25): SEQ ID NO: 3843; WAN024FLP_at; Start 216; Stop 240
tcgagatgataaaaagttacttggg

SEQ ID NO: 211433 - DNA, 25 bp, Artificial
  probe
  misc_feature (1)..(25): SEQ ID NO: 1474; WAN024FLQ_at; Start 471; Stop 495
gatgcccatggtttatctagttcaa

SEQ ID NO: 211434 - DNA, 25 bp, Artificial
  probe
  misc_feature (1)..(25): SEQ ID NO: 1474; WAN024FLQ_at; Start 938; Stop 962
ctaaaatcggaatctctctaatggc

SEQ ID NO: 211435 - DNA, 25 bp, Artificial
  probe
  misc_feature (1)..(25): SEQ ID NO: 1474; WAN024FLQ_at; Start 512; Stop 536
tctatccatggtcctcagagtatct

SEQ ID NO: 211436 - DNA, 25 bp, Artificial
  probe
  misc_feature (1)..(25): SEQ ID NO: 1474; WAN024FLQ_at; Start 501; Stop 525
tgaaccaggtttctatccatggtcc

SEQ ID NO: 211437 - DNA, 25 bp, Artificial
  probe
  misc_feature (1)..(25): SEQ ID NO: 1474; WAN024FLQ_at; Start 881; Stop 905
taataaaatcgttagggaagatgtc

SEQ ID NO: 211438 - DNA, 25 bp, Artificial
  probe
  misc_feature (1)..(25): SEQ ID NO: 1474; WAN024FLQ_at; Start 486; Stop 510
tctagttcaagactatgaaccaggt

SEQ ID NO: 211439 - DNA, 25 bp, Artificial
  probe
  misc_feature (1)..(25): SEQ ID NO: 1474; WAN024FLQ_at; Start 553; Stop 577
tatcatctagataaccagcttgttg

SEQ ID NO: 211440 - DNA, 25 bp, Artificial
  probe
  misc_feature (1)..(25): SEQ ID NO: 1474; WAN024FLQ_at; Start 1151; Stop 1175
cgaaaaacgatgattatataaatgg

SEQ ID NO: 211441 - DNA, 25 bp, Artificial
  probe
  misc_feature (1)..(25): SEQ ID NO: 1474; WAN024FLQ_at; Start 346; Stop 370
gatttatctaagaatcgttctccat

SEQ ID NO: 211442 - DNA, 25 bp, Artificial
  probe
  misc_feature (1)..(25): SEQ ID NO: 1474; WAN024FLQ_at; Start 1108; Stop 1132
gaattacattttttaacaacatctg

SEQ ID NO: 211443 - DNA, 25 bp, Artificial
  probe
  misc_feature (1)..(25): SEQ ID NO: 1474; WAN024FLQ_at; Start 765; Stop 789
tcagttaatctgtatggcattggaa

SEQ ID NO: 211444 - DNA, 25 bp, Artificial
  probe
  misc_feature (1)..(25): SEQ ID NO: 1474; WAN024FLQ_at; Start 977; Stop 1001
gctatcctccgttagaaatggctac

SEQ ID NO: 211445 - DNA, 25 bp, Artificial
  probe
  misc_feature (1)..(25): SEQ ID NO: 1474; WAN024FLQ_at; Start 910; Stop 934
gaagaatacgcaaaatttatgttgg

SEQ ID NO: 211446 - DNA, 25 bp, Artificial
  probe
  misc_feature (1)..(25): SEQ ID NO: 1474; WAN024FLQ_at; Start 324; Stop 348
tagtgagtctaggattatttgcgat

SEQ ID NO: 211447 - DNA, 25 bp, Artificial
  probe
  misc_feature (1)..(25): SEQ ID NO: 1474; WAN024FLQ_at; Start 835; Stop 859
tctgcaggagaagatttaaaagata

SEQ ID NO: 211448 - DNA, 25 bp, Artificial
  probe
  misc_feature (1)..(25): SEQ ID NO: 1474; WAN024FLQ_at; Start 774; Stop 798
ctgtatggcattggaaaaatggagc

SEQ ID NO: 211449 - DNA, 25 bp, Artificial
  probe
  misc_feature (1)..(25): SEQ ID NO: 1474; WAN024FLQ_at; Start 818; Stop 842
caaattgggaaattttttctgcagg

SEQ ID NO: 211450 - DNA, 25 bp, Artificial
  probe
  misc_feature (1)..(25): SEQ ID NO: 1474; WAN024FLQ_at; Start 391; Stop 415
tattttctatcaacaatgtggtaca

SEQ ID NO: 211451 - DNA, 25 bp, Artificial
  probe
  misc_feature (1)..(25): SEQ ID NO: 1474; WAN024FLQ_at; Start 375; Stop 399
tattagggagcgtgattattttcta

SEQ ID NO: 211452 - DNA, 25 bp, Artificial
  probe
  misc_feature (1)..(25): SEQ ID NO: 1474; WAN024FLQ_at; Start 566; Stop 590
accagcttgttgtctttaattctaa

SEQ ID NO: 211453 - DNA, 25 bp, Artificial
  probe
  misc_feature (1)..(25): SEQ ID NO: 1474; WAN024FLQ_at; Start 1169; Stop 1193
taaatggtattagccagcttgatac

SEQ ID NO: 211454 - DNA, 25 bp, Artificial
  probe
  misc_feature (1)..(25): SEQ ID NO: 1474; WAN024FLQ_at; Start 266; Stop 290
cgtctctttatcaagttcctggttt

SEQ ID NO: 211455 - DNA, 25 bp, Artificial
  probe
  misc_feature (1)..(25): SEQ ID NO: 1474; WAN024FLQ_at; Start 927; Stop 951
tatgttggaatctaaaatcggaatc

SEQ ID NO: 211456 - DNA, 25 bp, Artificial
  probe
  misc_feature (1)..(25): SEQ ID NO: 1474; WAN024FLQ_at; Start 1005; Stop 1029
tggtatgaaagtcataacgaattct

SEQ ID NO: 211457 - DNA, 25 bp, Artificial
  probe
  misc_feature (1)..(25): SEQ ID NO: 1474; WAN024FLQ_at; Start 691; Stop 715
gcagagctttctaatattgaaagga

SEQ ID NO: 211458 - DNA, 25 bp, Artificial
  probe
  misc_feature (1)..(25): SEQ ID NO: 1474; WAN024FLQ_at; Start 737; Stop 761
gaaggcctagtaaagctagaaatgc

SEQ ID NO: 211459 - DNA, 25 bp, Artificial
  probe
  misc_feature (1)..(25): SEQ ID NO: 1474; WAN024FLQ_at; Start 538; Stop 562
ttggctgagagcacatatcatctag

SEQ ID NO: 211460 - DNA, 25 bp, Artificial
  probe
  misc_feature (1)..(25): SEQ ID NO: 1474; WAN024FLQ_at; Start 456; Stop 480
aatttttgggaaacggatgcccatg

SEQ ID NO: 211461 - DNA, 25 bp, Artificial
  probe
  misc_feature (1)..(25): SEQ ID NO: 1474; WAN024FLQ_at; Start 1179; Stop 1203
tagccagcttgatacaattgtagat

SEQ ID NO: 211462 - DNA, 25 bp, Artificial
  probe
  misc_feature (1)..(25): SEQ ID NO: 1474; WAN024FLQ_at; Start 731; Stop 755
tttatggaaggcctagtaaagctag

SEQ ID NO: 211463 - DNA, 25 bp, Artificial
  probe
  misc_feature (1)..(25): SEQ ID NO: 1474; WAN024FLQ_at; Start 751; Stop 775
gctagaaatgcttttcagttaatct

SEQ ID NO: 211464 - DNA, 25 bp, Artificial
  probe
  misc_feature (1)..(25): SEQ ID NO: 1474; WAN024FLQ_at; Start 158; Stop 182
ctcaggatgtatatgctggcatcaa

SEQ ID NO: 211465 - DNA, 25 bp, Artificial
  probe
  misc_feature (1)..(25): SEQ ID NO: 1474; WAN024FLQ_at; Start 897; Stop 921
gaagatgtcagttgaagaatacgca

SEQ ID NO: 211466 - DNA, 25 bp, Artificial
  probe
  misc_feature (1)..(25): SEQ ID NO: 1474; WAN024FLQ_at; Start 527; Stop 551
cagagtatcttttggctgagagcac

SEQ ID NO: 211467 - DNA, 25 bp, Artificial
  probe
  misc_feature (1)..(25): SEQ ID NO: 1471; WAN024FLR_at; Start 134; Stop 158
accacttgaaaaaccaagataggct

SEQ ID NO: 211468 - DNA, 25 bp, Artificial
  probe
  misc_feature (1)..(25): SEQ ID NO: 1471; WAN024FLR_at; Start 3; Stop 27
gactggcaacatcacaactgctaaa

SEQ ID NO: 211469 - DNA, 25 bp, Artificial
  probe
  misc_feature (1)..(25): SEQ ID NO: 1471; WAN024FLR_at; Start 2; Stop 26
tgactggcaacatcacaactgctaa

SEQ ID NO: 211470 - DNA, 25 bp, Artificial
  probe
  misc_feature (1)..(25): SEQ ID NO: 1471; WAN024FLR_at; Start 80; Stop 104
tcagtcccaataataaggttactaa

SEQ ID NO: 211471 - DNA, 25 bp, Artificial
  probe
  misc_feature (1)..(25): SEQ ID NO: 1471; WAN024FLR_at; Start 136; Stop 160
cacttgaaaaaccaagataggctaa

SEQ ID NO: 211472 - DNA, 25 bp, Artificial
  probe
  misc_feature (1)..(25): SEQ ID NO: 1471; WAN024FLR_at; Start 1; Stop 25
atgactggcaacatcacaactgcta

SEQ ID NO: 211473 - DNA, 25 bp, Artificial
  probe
  misc_feature (1)..(25): SEQ ID NO: 1471; WAN024FLR_at; Start 9; Stop 33
caacatcacaactgctaaaaagtct

SEQ ID NO: 211474 - DNA, 25 bp, Artificial
  probe
  misc_feature (1)..(25): SEQ ID NO: 1471; WAN024FLR_at; Start 105; Stop 129
aaataccgtaattgccttgttatct

SEQ ID NO: 211475 - DNA, 25 bp, Artificial
  probe
  misc_feature (1)..(25): SEQ ID NO: 1471; WAN024FLR_at; Start 17; Stop 41
caactgctaaaaagtctaaaacagg

SEQ ID NO: 211476 - DNA, 25 bp, Artificial
  probe
  misc_feature (1)..(25): SEQ ID NO: 1471; WAN024FLR_at; Start 182; Stop 206
taaatacttcctttctattgttctc

SEQ ID NO: 211477 - DNA, 25 bp, Artificial
  probe
  misc_feature (1)..(25): SEQ ID NO: 1471; WAN024FLR_at; Start 195; Stop 219
tctattgttctctcattataccatt

SEQ ID NO: 211478 - DNA, 25 bp, Artificial
  probe
  misc_feature (1)..(25): SEQ ID NO: 1471; WAN024FLR_at; Start 77; Stop 101
gattcagtcccaataataaggttac

SEQ ID NO: 211479 - DNA, 25 bp, Artificial
  probe
  misc_feature (1)..(25): SEQ ID NO: 1471; WAN024FLR_at; Start 186; Stop 210
tacttcctttctattgttctctcat

SEQ ID NO: 211480 - DNA, 25 bp, Artificial
  probe
  misc_feature (1)..(25): SEQ ID NO: 1471; WAN024FLR_at; Start 164; Stop 188
gtttctctttttgctccataaatac

SEQ ID NO: 211481 - DNA, 25 bp, Artificial
  probe
  misc_feature (1)..(25): SEQ ID NO: 1471; WAN024FLR_at; Start 21; Stop 45
tgctaaaaagtctaaaacaggtgaa

SEQ ID NO: 211482 - DNA, 25 bp, Artificial
  probe
  misc_feature (1)..(25): SEQ ID NO: 1471; WAN024FLR_at; Start 6; Stop 30
tggcaacatcacaactgctaaaaag

SEQ ID NO: 211483 - DNA, 25 bp, Artificial
  probe
  misc_feature (1)..(25): SEQ ID NO: 1471; WAN024FLR_at; Start 7; Stop 31
ggcaacatcacaactgctaaaaagt

SEQ ID NO: 211484 - DNA, 25 bp, Artificial
  probe
  misc_feature (1)..(25): SEQ ID NO: 1471; WAN024FLR_at; Start 19; Stop 43
actgctaaaaagtctaaaacaggtg

SEQ ID NO: 211485 - DNA, 25 bp, Artificial
  probe
  misc_feature (1)..(25): SEQ ID NO: 1471; WAN024FLR_at; Start 140; Stop 164
tgaaaaaccaagataggctaaaatg

SEQ ID NO: 211486 - DNA, 25 bp, Artificial
  probe
  misc_feature (1)..(25): SEQ ID NO: 1471; WAN024FLR_at; Start 117; Stop 141
tgccttgttatctaaaaaccacttg

SEQ ID NO: 211487 - DNA, 25 bp, Artificial
  probe
  misc_feature (1)..(25): SEQ ID NO: 1471; WAN024FLR_at; Start 38; Stop 62
caggtgaaaatagaaaactaatctt

SEQ ID NO: 211488 - DNA, 25 bp, Artificial
  probe
  misc_feature (1)..(25): SEQ ID NO: 1471; WAN024FLR_at; Start 175; Stop 199
tgctccataaatacttcctttctat

SEQ ID NO: 211489 - DNA, 25 bp, Artificial
  probe
  misc_feature (1)..(25): SEQ ID NO: 1471; WAN024FLR_at; Start 73; Stop 97
aaaagattcagtcccaataataagg

SEQ ID NO: 211490 - DNA, 25 bp, Artificial
  probe
  misc_feature (1)..(25): SEQ ID NO: 1471; WAN024FLR_at; Start 148; Stop 172
caagataggctaaaatgtttctctt

SEQ ID NO: 211491 - DNA, 25 bp, Artificial
  probe
  misc_feature (1)..(25): SEQ ID NO: 1471; WAN024FLR_at; Start 160; Stop 184
aaatgtttctctttttgctccataa

SEQ ID NO: 211492 - DNA, 25 bp, Artificial
  probe
  misc_feature (1)..(25): SEQ ID NO: 1471; WAN024FLR_at; Start 146; Stop 170
accaagataggctaaaatgtttctc

SEQ ID NO: 211493 - DNA, 25 bp, Artificial
  probe
  misc_feature (1)..(25): SEQ ID NO: 1471; WAN024FLR_at; Start 118; Stop 142
gccttgttatctaaaaaccacttga

SEQ ID NO: 211494 - DNA, 25 bp, Artificial
  probe
  misc_feature (1)..(25): SEQ ID NO: 1471; WAN024FLR_at; Start 12; Stop 36
catcacaactgctaaaaagtctaaa

SEQ ID NO: 211495 - DNA, 25 bp, Artificial
  probe
  misc_feature (1)..(25): SEQ ID NO: 1471; WAN024FLR_at; Start 169; Stop 193
tctttttgctccataaatacttcct

SEQ ID NO: 211496 - DNA, 25 bp, Artificial
  probe
  misc_feature (1)..(25): SEQ ID NO: 1471; WAN024FLR_at; Start 14; Stop 38
tcacaactgctaaaaagtctaaaac

SEQ ID NO: 211497 - DNA, 25 bp, Artificial
  probe
  misc_feature (1)..(25): SEQ ID NO: 1471; WAN024FLR_at; Start 75; Stop 99
aagattcagtcccaataataaggtt

SEQ ID NO: 211498 - DNA, 25 bp, Artificial
  probe
  misc_feature (1)..(25): SEQ ID NO: 1471; WAN024FLR_at; Start 113; Stop 137
taattgccttgttatctaaaaacca

SEQ ID NO: 211499 - DNA, 25 bp, Artificial
  probe
  misc_feature (1)..(25): SEQ ID NO: 1471; WAN024FLR_at; Start 172; Stop 196
ttttgctccataaatacttcctttc

SEQ ID NO: 211500 - DNA, 25 bp, Artificial
  probe
  misc_feature (1)..(25): SEQ ID NO: 1471; WAN024FLR_at; Start 108; Stop 132
taccgtaattgccttgttatctaaa

SEQ ID NO: 211501 - DNA, 25 bp, Artificial
  probe
  misc_feature (1)..(25): SEQ ID NO: 5417; WAN024FLS_at; Start 38; Stop 62
gatatagtgttccagaaattctgga

SEQ ID NO: 211502 - DNA, 25 bp, Artificial
  probe
  misc_feature (1)..(25): SEQ ID NO: 5417; WAN024FLS_at; Start 83; Stop 107
caactcttgataatactcataagca

SEQ ID NO: 211503 - DNA, 25 bp, Artificial
  probe
  misc_feature (1)..(25): SEQ ID NO: 5417; WAN024FLS_at; Start 106; Stop 130
cagtatccaaatcgtccatttcttg

SEQ ID NO: 211504 - DNA, 25 bp, Artificial
  probe
  misc_feature (1)..(25): SEQ ID NO: 5417; WAN024FLS_at; Start 204; Stop 228
taacgctcctgctccagataaatag

SEQ ID NO: 211505 - DNA, 25 bp, Artificial
  probe
  misc_feature (1)..(25): SEQ ID NO: 5417; WAN024FLS_at; Start 201; Stop 225
tcataacgctcctgctccagataaa

SEQ ID NO: 211506 - DNA, 25 bp, Artificial
  probe
  misc_feature (1)..(25): SEQ ID NO: 5417; WAN024FLS_at; Start 34; Stop 58
gatagatatagtgttccagaaattc

SEQ ID NO: 211507 - DNA, 25 bp, Artificial
  probe
  misc_feature (1)..(25): SEQ ID NO: 5417; WAN024FLS_at; Start 191; Stop 215
tagaatatcctcataacgctcctgc

SEQ ID NO: 211508 - DNA, 25 bp, Artificial
  probe
  misc_feature (1)..(25): SEQ ID NO: 5417; WAN024FLS_at; Start 141; Stop 165
gcaatcatccacttggtcaaaagat

SEQ ID NO: 211509 - DNA, 25 bp, Artificial
  probe
  misc_feature (1)..(25): SEQ ID NO: 5417; WAN024FLS_at; Start 193; Stop 217
gaatatcctcataacgctcctgctc

SEQ ID NO: 211510 - DNA, 25 bp, Artificial
  probe
  misc_feature (1)..(25): SEQ ID NO: 5417; WAN024FLS_at; Start 27; Stop 51
cgcaagagatagatatagtgttcca

SEQ ID NO: 211511 - DNA, 25 bp, Artificial
  probe
  misc_feature (1)..(25): SEQ ID NO: 5417; WAN024FLS_at; Start 120; Stop 144
tccatttcttgataagaacgagcaa

SEQ ID NO: 211512 - DNA, 25 bp, Artificial
  probe
  misc_feature (1)..(25): SEQ ID NO: 5417; WAN024FLS_at; Start 15; Stop 39
tgtcccaattcacgcaagagataga

SEQ ID NO: 211513 - DNA, 25 bp, Artificial
  probe
  misc_feature (1)..(25): SEQ ID NO: 5417; WAN024FLS_at; Start 145; Stop 169
tcatccacttggtcaaaagattttc

SEQ ID NO: 211514 - DNA, 25 bp, Artificial
  probe
  misc_feature (1)..(25): SEQ ID NO: 5417; WAN024FLS_at; Start 150; Stop 174
cacttggtcaaaagattttctggct

SEQ ID NO: 211515 - DNA, 25 bp, Artificial
  probe
  misc_feature (1)..(25): SEQ ID NO: 5417; WAN024FLS_at; Start 126; Stop 150
tcttgataagaacgagcaatcatcc

SEQ ID NO: 211516 - DNA, 25 bp, Artificial
  probe
  misc_feature (1)..(25): SEQ ID NO: 5417; WAN024FLS_at; Start 29; Stop 53
caagagatagatatagtgttccaga

SEQ ID NO: 211517 - DNA, 25 bp, Artificial
  probe
  misc_feature (1)..(25): SEQ ID NO: 5417; WAN024FLS_at; Start 49; Stop 73
ccagaaattctggattgtccttcaa

SEQ ID NO: 211518 - DNA, 25 bp, Artificial
  probe
  misc_feature (1)..(25): SEQ ID NO: 5417; WAN024FLS_at; Start 12; Stop 36
aaatgtcccaattcacgcaagagat

SEQ ID NO: 211519 - DNA, 25 bp, Artificial
  probe
  misc_feature (1)..(25): SEQ ID NO: 5417; WAN024FLS_at; Start 102; Stop 126
taagcagtatccaaatcgtccattt

SEQ ID NO: 211520 - DNA, 25 bp, Artificial
  probe
  misc_feature (1)..(25): SEQ ID NO: 5417; WAN024FLS_at; Start 158; Stop 182
caaaagattttctggctcctcactc

SEQ ID NO: 211521 - DNA, 25 bp, Artificial
  probe
  misc_feature (1)..(25): SEQ ID NO: 5417; WAN024FLS_at; Start 172; Stop 196
gctcctcactctgcaattctagaat

SEQ ID NO: 211522 - DNA, 25 bp, Artificial
  probe
  misc_feature (1)..(25): SEQ ID NO: 5417; WAN024FLS_at; Start 139; Stop 163
gagcaatcatccacttggtcaaaag

SEQ ID NO: 211523 - DNA, 25 bp, Artificial
  probe
  misc_feature (1)..(25): SEQ ID NO: 5417; WAN024FLS_at; Start 57; Stop 81
tctggattgtccttcaaatctcctg

SEQ ID NO: 211524 - DNA, 25 bp, Artificial
  probe
  misc_feature (1)..(25): SEQ ID NO: 5417; WAN024FLS_at; Start 10; Stop 34
caaaatgtcccaattcacgcaagag

SEQ ID NO: 211525 - DNA, 25 bp, Artificial
  probe
  misc_feature (1)..(25): SEQ ID NO: 5417; WAN024FLS_at; Start 99; Stop 123
tcataagcagtatccaaatcgtcca

SEQ ID NO: 211526 - DNA, 25 bp, Artificial
  probe
  misc_feature (1)..(25): SEQ ID NO: 5417; WAN024FLS_at; Start 20; Stop 44
caattcacgcaagagatagatatag

SEQ ID NO: 211527 - DNA, 25 bp, Artificial
  probe
  misc_feature (1)..(25): SEQ ID NO: 5417; WAN024FLS_at; Start 135; Stop 159
gaacgagcaatcatccacttggtca

SEQ ID NO: 211528 - DNA, 25 bp, Artificial
  probe
  misc_feature (1)..(25): SEQ ID NO: 5417; WAN024FLS_at; Start 2; Stop 26
tgcttcttcaaaatgtcccaattca

SEQ ID NO: 211529 - DNA, 25 bp, Artificial
  probe
  misc_feature (1)..(25): SEQ ID NO: 5417; WAN024FLS_at; Start 163; Stop 187
gattttctggctcctcactctgcaa

SEQ ID NO: 211530 - DNA, 25 bp, Artificial
  probe
  misc_feature (1)..(25): SEQ ID NO: 5417; WAN024FLS_at; Start 132; Stop 156
taagaacgagcaatcatccacttgg

SEQ ID NO: 211531 - DNA, 25 bp, Artificial
  probe
  misc_feature (1)..(25): SEQ ID NO: 5417; WAN024FLS_at; Start 184; Stop 208
gcaattctagaatatcctcataacg

SEQ ID NO: 211532 - DNA, 25 bp, Artificial
  probe
  misc_feature (1)..(25): SEQ ID NO: 5417; WAN024FLS_at; Start 17; Stop 41
tcccaattcacgcaagagatagata

SEQ ID NO: 211533 - DNA, 25 bp, Artificial
  probe
  misc_feature (1)..(25): SEQ ID NO: 5417; WAN024FLS_at; Start 155; Stop 179
ggtcaaaagattttctggctcctca

SEQ ID NO: 211534 - DNA, 25 bp, Artificial
  probe
  misc_feature (1)..(25): SEQ ID NO: 5417; WAN024FLS_at; Start 170; Stop 194
tggctcctcactctgcaattctaga

SEQ ID NO: 211535 - DNA, 25 bp, Artificial
  probe
  misc_feature (1)..(25): SEQ ID NO: 3971; WAN024FLT_at; Start 377; Stop 401
tggaggccttgacctactcagagga

SEQ ID NO: 211536 - DNA, 25 bp, Artificial
  probe
  misc_feature (1)..(25): SEQ ID NO: 3971; WAN024FLT_at; Start 28; Stop 52
caacagatgttacaggctttggagg

SEQ ID NO: 211537 - DNA, 25 bp, Artificial
  probe
  misc_feature (1)..(25): SEQ ID NO: 3971; WAN024FLT_at; Start 69; Stop 93
ggctgagcattatttcgccaaagct

SEQ ID NO: 211538 - DNA, 25 bp, Artificial
  probe
  misc_feature (1)..(25): SEQ ID NO: 3971; WAN024FLT_at; Start 769; Stop 793
gaagccctgcgtatcgctaagcaag

SEQ ID NO: 211539 - DNA, 25 bp, Artificial
  probe
  misc_feature (1)..(25): SEQ ID NO: 3971; WAN024FLT_at; Start 986; Stop 1010
tgcagagtgaggagccagaaaatct

SEQ ID NO: 211540 - DNA, 25 bp, Artificial
  probe
  misc_feature (1)..(25): SEQ ID NO: 3971; WAN024FLT_at; Start 472; Stop 496
tatgcccagttagataatcgctcga

SEQ ID NO: 211541 - DNA, 25 bp, Artificial
  probe
  misc_feature (1)..(25): SEQ ID NO: 3971; WAN024FLT_at; Start 865; Stop 889
gctagtggtgcagaaaattatctcc

SEQ ID NO: 211542 - DNA, 25 bp, Artificial
  probe
  misc_feature (1)..(25): SEQ ID NO: 3971; WAN024FLT_at; Start 205; Stop 229
gaggttcatcttaatctagctgcaa

SEQ ID NO: 211543 - DNA, 25 bp, Artificial
  probe
  misc_feature (1)..(25): SEQ ID NO: 3971; WAN024FLT_at; Start 1159; Stop 1183
tttgaagaagcaaaagtccatgctc

SEQ ID NO: 211544 - DNA, 25 bp, Artificial
  probe
  misc_feature (1)..(25): SEQ ID NO: 3971; WAN024FLT_at; Start 362; Stop 386
cacgtgagaaattattggaggcctt

SEQ ID NO: 211545 - DNA, 25 bp, Artificial
  probe
  misc_feature (1)..(25): SEQ ID NO: 3971; WAN024FLT_at; Start 813; Stop 837
tgaaactcgcctcttgctagctgct

SEQ ID NO: 211546 - DNA, 25 bp, Artificial
  probe
  misc_feature (1)..(25): SEQ ID NO: 3971; WAN024FLT_at; Start 1200; Stop 1224
ggttccagatgatgtgcaaatgcaa

SEQ ID NO: 211547 - DNA, 25 bp, Artificial
  probe
  misc_feature (1)..(25): SEQ ID NO: 3971; WAN024FLT_at; Start 443; Stop 467
tggaaaattaccaagcggctattca

SEQ ID NO: 211548 - DNA, 25 bp, Artificial
  probe
  misc_feature (1)..(25): SEQ ID NO: 3971; WAN024FLT_at; Start 589; Stop 613
aaagccctggagttagaatacgatg

SEQ ID NO: 211549 - DNA, 25 bp, Artificial
  probe
  misc_feature (1)..(25): SEQ ID NO: 3971; WAN024FLT_at; Start 253; Stop 277
gaagaagcctttacctatcttgagg

SEQ ID NO: 211550 - DNA, 25 bp, Artificial
  probe
  misc_feature (1)..(25): SEQ ID NO: 3971; WAN024FLT_at; Start 1133; Stop 1157
tctatctcttgcgtgaattgggaca

SEQ ID NO: 211551 - DNA, 25 bp, Artificial
  probe
  misc_feature (1)..(25): SEQ ID NO: 3971; WAN024FLT_at; Start 694; Stop 718
gataccatttctcctgactttgaag

SEQ ID NO: 211552 - DNA, 25 bp, Artificial
  probe
  misc_feature (1)..(25): SEQ ID NO: 3971; WAN024FLT_at; Start 147; Stop 171
gattggtttctatcctcaggccaag

SEQ ID NO: 211553 - DNA, 25 bp, Artificial
  probe
  misc_feature (1)..(25): SEQ ID NO: 3971; WAN024FLT_at; Start 617; Stop 641
taacagcttttgagttggccagtct

SEQ ID NO: 211554 - DNA, 25 bp, Artificial
  probe
  misc_feature (1)..(25): SEQ ID NO: 3971; WAN024FLT_at; Start 941; Stop 965
ccactatttatctggagcaggagcg

SEQ ID NO: 211555 - DNA, 25 bp, Artificial
  probe
  misc_feature (1)..(25): SEQ ID NO: 3971; WAN024FLT_at; Start 907; Stop 931
gctgaggatacagaagaaatcttgc

SEQ ID NO: 211556 - DNA, 25 bp, Artificial
  probe
  misc_feature (1)..(25): SEQ ID NO: 3971; WAN024FLT_at; Start 888; Stop 912
ccttactgcaaaagaagacgctgag

SEQ ID NO: 211557 - DNA, 25 bp, Artificial
  probe
  misc_feature (1)..(25): SEQ ID NO: 3971; WAN024FLT_at; Start 321; Stop 345
gaaggcagacctttaccagctggaa

SEQ ID NO: 211558 - DNA, 25 bp, Artificial
  probe
  misc_feature (1)..(25): SEQ ID NO: 3971; WAN024FLT_at; Start 754; Stop 778
gaacatcaagttcaagaagccctgc

SEQ ID NO: 211559 - DNA, 25 bp, Artificial
  probe
  misc_feature (1)..(25): SEQ ID NO: 3971; WAN024FLT_at; Start 711; Stop 735
ctttgaaggctatgagtatgggtac

SEQ ID NO: 211560 - DNA, 25 bp, Artificial
  probe
  misc_feature (1)..(25): SEQ ID NO: 3971; WAN024FLT_at; Start 273; Stop 297
tgaggaaatccaagctgacagtgac

SEQ ID NO: 211561 - DNA, 25 bp, Artificial
  probe
  misc_feature (1)..(25): SEQ ID NO: 3971; WAN024FLT_at; Start 1013; Stop 1037
tgaccaagtggatgattgctcgttc

SEQ ID NO: 211562 - DNA, 25 bp, Artificial
  probe
  misc_feature (1)..(25): SEQ ID NO: 3971; WAN024FLT_at; Start 492; Stop 516
ctcgatttatgagcaaacgggcatt

SEQ ID NO: 211563 - DNA, 25 bp, Artificial
  probe
  misc_feature (1)..(25): SEQ ID NO: 3971; WAN024FLT_at; Start 957; Stop 981
gcaggagcgttatgaggatattcta

SEQ ID NO: 211564 - DNA, 25 bp, Artificial
  probe
  misc_feature (1)..(25): SEQ ID NO: 3971; WAN024FLT_at; Start 655; Stop 679
gaagaatatcaaaaagccaccctct

SEQ ID NO: 211565 - DNA, 25 bp, Artificial
  probe
  misc_feature (1)..(25): SEQ ID NO: 3971; WAN024FLT_at; Start 507; Stop 531
aacgggcatttccacctatcaacga

SEQ ID NO: 211566 - DNA, 25 bp, Artificial
  probe
  misc_feature (1)..(25): SEQ ID NO: 3971; WAN024FLT_at; Start 226; Stop 250
gcaattgctagcgaggatggtcaaa

SEQ ID NO: 211567 - DNA, 25 bp, Artificial
  probe
  misc_feature (1)..(25): SEQ ID NO: 3971; WAN024FLT_at; Start 922; Stop 946
gaaatcttgcttcgtttagccacta

SEQ ID NO: 211568 - DNA, 25 bp, Artificial
  probe
  misc_feature (1)..(25): SEQ ID NO: 3971; WAN024FLT_at; Start 733; Stop 757
tacagtcaggctttacataaggaac

SEQ ID NO: 211569 - DNA, 25 bp, Artificial
  probe
  misc_feature (1)..(25): SEQ ID NO: 5852; WAN024FLU_at; Start 687; Stop 711
ccaagaaaattgaaggaacctgttg

SEQ ID NO: 211570 - DNA, 25 bp, Artificial
  probe
  misc_feature (1)..(25): SEQ ID NO: 5852; WAN024FLU_at; Start 1103; Stop 1127
tattccggtttatgcctctgctaag

SEQ ID NO: 211571 - DNA, 25 bp, Artificial
  probe
  misc_feature (1)..(25): SEQ ID NO: 5852; WAN024FLU_at; Start 896; Stop 920
catgcttcctgctctagtattgggt

SEQ ID NO: 211572 - DNA, 25 bp, Artificial
  probe
  misc_feature (1)..(25): SEQ ID NO: 5852; WAN024FLU_at; Start 1142; Stop 1166
cattttcgaatggtataaggtagtc

SEQ ID NO: 211573 - DNA, 25 bp, Artificial
  probe
  misc_feature (1)..(25): SEQ ID NO: 5852; WAN024FLU_at; Start 474; Stop 498
gatttcagacctcaattagagcaag

SEQ ID NO: 211574 - DNA, 25 bp, Artificial
  probe
  misc_feature (1)..(25): SEQ ID NO: 5852; WAN024FLU_at; Start 503; Stop 527
gaccaatttttctagccaggctaca

SEQ ID NO: 211575 - DNA, 25 bp, Artificial
  probe
  misc_feature (1)..(25): SEQ ID NO: 5852; WAN024FLU_at; Start 390; Stop 414
ttgacctttgcaagaaacgttcctg

SEQ ID NO: 211576 - DNA, 25 bp, Artificial
  probe
  misc_feature (1)..(25): SEQ ID NO: 5852; WAN024FLU_at; Start 205; Stop 229
tagcagttgtgatgttgccagtcat

SEQ ID NO: 211577 - DNA, 25 bp, Artificial
  probe
  misc_feature (1)..(25): SEQ ID NO: 5852; WAN024FLU_at; Start 815; Stop 839
tattggtctacgctatgcggttacg

SEQ ID NO: 211578 - DNA, 25 bp, Artificial
  probe
  misc_feature (1)..(25): SEQ ID NO: 5852; WAN024FLU_at; Start 655; Stop 679
aaggcttgcgtaactatttgaccca

SEQ ID NO: 211579 - DNA, 25 bp, Artificial
  probe
  misc_feature (1)..(25): SEQ ID NO: 5852; WAN024FLU_at; Start 443; Stop 467
taatggattggtagcccagcacctg

SEQ ID NO: 211580 - DNA, 25 bp, Artificial
  probe
  misc_feature (1)..(25): SEQ ID NO: 5852; WAN024FLU_at; Start 1012; Stop 1036
tgggaagtcaattaaacatccaccc

SEQ ID NO: 211581 - DNA, 25 bp, Artificial
  probe
  misc_feature (1)..(25): SEQ ID NO: 5852; WAN024FLU_at; Start 60; Stop 84
gagaaacattttagcctatcttggt

SEQ ID NO: 211582 - DNA, 25 bp, Artificial
  probe
  misc_feature (1)..(25): SEQ ID NO: 5852; WAN024FLU_at; Start 518; Stop 542
ccaggctacagttttggcaagtaag

SEQ ID NO: 211583 - DNA, 25 bp, Artificial
  probe
  misc_feature (1)..(25): SEQ ID NO: 5852; WAN024FLU_at; Start 882; Stop 906
ggtagctttctagccatgcttcctg

SEQ ID NO: 211584 - DNA, 25 bp, Artificial
  probe
  misc_feature (1)..(25): SEQ ID NO: 5852; WAN024FLU_at; Start 723; Stop 747
tcagatgtgaatcaacagttgtcca

SEQ ID NO: 211585 - DNA, 25 bp, Artificial
  probe
  misc_feature (1)..(25): SEQ ID NO: 5852; WAN024FLU_at; Start 910; Stop 934
tagtattgggtttgattgctggtcc

SEQ ID NO: 211586 - DNA, 25 bp, Artificial
  probe
  misc_feature (1)..(25): SEQ ID NO: 5852; WAN024FLU_at; Start 967; Stop 991
tcgtagaacaaactattgaaggccg

SEQ ID NO: 211587 - DNA, 25 bp, Artificial
  probe
  misc_feature (1)..(25): SEQ ID NO: 5852; WAN024FLU_at; Start 927; Stop 951
gctggtccagtcatgcttttgaaag

SEQ ID NO: 211588 - DNA, 25 bp, Artificial
  probe
  misc_feature (1)..(25): SEQ ID NO: 5852; WAN024FLU_at; Start 639; Stop 663
ctcttgcgtgatgggaaaggcttgc

SEQ ID NO: 211589 - DNA, 25 bp, Artificial
  probe
  misc_feature (1)..(25): SEQ ID NO: 5852; WAN024FLU_at; Start 533; Stop 557
ggcaagtaaggtttcatctcaggca

SEQ ID NO: 211590 - DNA, 25 bp, Artificial
  probe
  misc_feature (1)..(25): SEQ ID NO: 5852; WAN024FLU_at; Start 327; Stop 351
atcatcgctctctttatcatttggg

SEQ ID NO: 211591 - DNA, 25 bp, Artificial
  probe
  misc_feature (1)..(25): SEQ ID NO: 5852; WAN024FLU_at; Start 863; Stop 887
aaatctggtcccttatcttggtagc

SEQ ID NO: 211592 - DNA, 25 bp, Artificial
  probe
  misc_feature (1)..(25): SEQ ID NO: 5852; WAN024FLU_at; Start 129; Stop 153
gtaaccttattattgggactgaatc

SEQ ID NO: 211593 - DNA, 25 bp, Artificial
  probe
  misc_feature (1)..(25): SEQ ID NO: 5852; WAN024FLU_at; Start 984; Stop 1008
gaaggccgttttgtctctccattga

SEQ ID NO: 211594 - DNA, 25 bp, Artificial
  probe
  misc_feature (1)..(25): SEQ ID NO: 5852; WAN024FLU_at; Start 350; Stop 374
gggcttggcagtcgccattccaaat

SEQ ID NO: 211595 - DNA, 25 bp, Artificial
  probe
  misc_feature (1)..(25): SEQ ID NO: 5852; WAN024FLU_at; Start 1119; Stop 1143
tctgctaaggttgtcatttcagcca

SEQ ID NO: 211596 - DNA, 25 bp, Artificial
  probe
  misc_feature (1)..(25): SEQ ID NO: 5852; WAN024FLU_at; Start 458; Stop 482
ccagcacctgccagatgatttcaga

SEQ ID NO: 211597 - DNA, 25 bp, Artificial
  probe
  misc_feature (1)..(25): SEQ ID NO: 5852; WAN024FLU_at; Start 561; Stop 585
aactgggtgagtgcctttattagcg

SEQ ID NO: 211598 - DNA, 25 bp, Artificial
  probe
  misc_feature (1)..(25): SEQ ID NO: 5852; WAN024FLU_at; Start 738; Stop 762
cagttgtccaactatgttcgagggc

SEQ ID NO: 211599 - DNA, 25 bp, Artificial
  probe
  misc_feature (1)..(25): SEQ ID NO: 5852; WAN024FLU_at; Start 261; Stop 285
cctattgttgattggatggagaagc

SEQ ID NO: 211600 - DNA, 25 bp, Artificial
  probe
  misc_feature (1)..(25): SEQ ID NO: 5852; WAN024FLU_at; Start 365; Stop 389
cattccaaatctgcaacgtcaggtt

SEQ ID NO: 211601 - DNA, 25 bp, Artificial
  probe
  misc_feature (1)..(25): SEQ ID NO: 5852; WAN024FLU_at; Start 756; Stop 780
cgagggcaagtgacagtggctatta

SEQ ID NO: 211602 - DNA, 25 bp, Artificial
  probe
  misc_feature (1)..(25): SEQ ID NO: 5852; WAN024FLU_at; Start 547; Stop 571
catctcaggcagtcaactgggtgag

SEQ ID NO: 211603 - DNA, 25 bp, Artificial
  probe
  misc_feature (1)..(25): SEQ ID NO: 5526; WAN024FLV_at; Start 57; Stop 81
tacctgcagtaccaaattcaagatt

SEQ ID NO: 211604 - DNA, 25 bp, Artificial
  probe
  misc_feature (1)..(25): SEQ ID NO: 5526; WAN024FLV_at; Start 268; Stop 292
tatctgcttcgaacatctcttcaaa

SEQ ID NO: 211605 - DNA, 25 bp, Artificial
  probe
  misc_feature (1)..(25): SEQ ID NO: 5526; WAN024FLV_at; Start 143; Stop 167
tcaggaagctccacaaaatcaaccc

SEQ ID NO: 211606 - DNA, 25 bp, Artificial
  probe
  misc_feature (1)..(25): SEQ ID NO: 5526; WAN024FLV_at; Start 18; Stop 42
tgttgatacggtttgtaccagcacc

SEQ ID NO: 211607 - DNA, 25 bp, Artificial
  probe
  misc_feature (1)..(25): SEQ ID NO: 5526; WAN024FLV_at; Start 75; Stop 99
caagatttgtatagaaggcatcttc

SEQ ID NO: 211608 - DNA, 25 bp, Artificial
  probe
  misc_feature (1)..(25): SEQ ID NO: 5526; WAN024FLV_at; Start 2; Stop 26
tggcgaacaacgtagatgttgatac

SEQ ID NO: 211609 - DNA, 25 bp, Artificial
  probe
  misc_feature (1)..(25): SEQ ID NO: 5526; WAN024FLV_at; Start 260; Stop 284
taaaaccttatctgcttcgaacatc

SEQ ID NO: 211610 - DNA, 25 bp, Artificial
  probe
  misc_feature (1)..(25): SEQ ID NO: 5526; WAN024FLV_at; Start 152; Stop 176
tccacaaaatcaacccatttctggt

SEQ ID NO: 211611 - DNA, 25 bp, Artificial
  probe
  misc_feature (1)..(25): SEQ ID NO: 5526; WAN024FLV_at; Start 115; Stop 139
catattttccaaatcttgacgaagg

SEQ ID NO: 211612 - DNA, 25 bp, Artificial
  probe
  misc_feature (1)..(25): SEQ ID NO: 5526; WAN024FLV_at; Start 82; Stop 106
tgtatagaaggcatcttccttagtt

SEQ ID NO: 211613 - DNA, 25 bp, Artificial
  probe
  misc_feature (1)..(25): SEQ ID NO: 5526; WAN024FLV_at; Start 146; Stop 170
ggaagctccacaaaatcaacccatt

SEQ ID NO: 211614 - DNA, 25 bp, Artificial
  probe
  misc_feature (1)..(25): SEQ ID NO: 5526; WAN024FLV_at; Start 272; Stop 296
tgcttcgaacatctcttcaaaccag

SEQ ID NO: 211615 - DNA, 25 bp, Artificial
  probe
  misc_feature (1)..(25): SEQ ID NO: 5526; WAN024FLV_at; Start 132; Stop 156
gacgaaggtagtcaggaagctccac

SEQ ID NO: 211616 - DNA, 25 bp, Artificial
  probe
  misc_feature (1)..(25): SEQ ID NO: 5526; WAN024FLV_at; Start 186; Stop 210
ggtaagacattcaaattctccttta

SEQ ID NO: 211617 - DNA, 25 bp, Artificial
  probe
  misc_feature (1)..(25): SEQ ID NO: 5526; WAN024FLV_at; Start 59; Stop 83
cctgcagtaccaaattcaagatttg

SEQ ID NO: 211618 - DNA, 25 bp, Artificial
  probe
  misc_feature (1)..(25): SEQ ID NO: 5526; WAN024FLV_at; Start 120; Stop 144
tttccaaatcttgacgaaggtagtc

SEQ ID NO: 211619 - DNA, 25 bp, Artificial
  probe
  misc_feature (1)..(25): SEQ ID NO: 5526; WAN024FLV_at; Start 24; Stop 48
tacggtttgtaccagcaccaaccaa

SEQ ID NO: 211620 - DNA, 25 bp, Artificial
  probe
  misc_feature (1)..(25): SEQ ID NO: 5526; WAN024FLV_at; Start 14; Stop 38
tagatgttgatacggtttgtaccag

SEQ ID NO: 211621 - DNA, 25 bp, Artificial
  probe
  misc_feature (1)..(25): SEQ ID NO: 5526; WAN024FLV_at; Start 43; Stop 67
aaccaagccacgcatacctgcagta

SEQ ID NO: 211622 - DNA, 25 bp, Artificial
  probe
  misc_feature (1)..(25): SEQ ID NO: 5526; WAN024FLV_at; Start 128; Stop 152
tcttgacgaaggtagtcaggaagct

SEQ ID NO: 211623 - DNA, 25 bp, Artificial
  probe
  misc_feature (1)..(25): SEQ ID NO: 5526; WAN024FLV_at; Start 28; Stop 52
gtttgtaccagcaccaaccaagcca

SEQ ID NO: 211624 - DNA, 25 bp, Artificial
  probe
  misc_feature (1)..(25): SEQ ID NO: 5526; WAN024FLV_at; Start 135; Stop 159
gaaggtagtcaggaagctccacaaa

SEQ ID NO: 211625 - DNA, 25 bp, Artificial
  probe
  misc_feature (1)..(25): SEQ ID NO: 5526; WAN024FLV_at; Start 171; Stop 195
tctggtaattttcttggtaagacat

SEQ ID NO: 211626 - DNA, 25 bp, Artificial
  probe
  misc_feature (1)..(25): SEQ ID NO: 5526; WAN024FLV_at; Start 162; Stop 186
caacccatttctggtaattttcttg

SEQ ID NO: 211627 - DNA, 25 bp, Artificial
  probe
  misc_feature (1)..(25): SEQ ID NO: 5526; WAN024FLV_at; Start 54; Stop 78
gcatacctgcagtaccaaattcaag

SEQ ID NO: 211628 - DNA, 25 bp, Artificial
  probe
  misc_feature (1)..(25): SEQ ID NO: 5526; WAN024FLV_at; Start 69; Stop 93
caaattcaagatttgtatagaaggc

SEQ ID NO: 211629 - DNA, 25 bp, Artificial
  probe
  misc_feature (1)..(25): SEQ ID NO: 5526; WAN024FLV_at; Start 257; Stop 281
tagtaaaaccttatctgcttcgaac

SEQ ID NO: 211630 - DNA, 25 bp, Artificial
  probe
  misc_feature (1)..(25): SEQ ID NO: 5526; WAN024FLV_at; Start 182; Stop 206
tcttggtaagacattcaaattctcc

SEQ ID NO: 211631 - DNA, 25 bp, Artificial
  probe
  misc_feature (1)..(25): SEQ ID NO: 5526; WAN024FLV_at; Start 92; Stop 116
gcatcttccttagttttttcgtcca

SEQ ID NO: 211632 - DNA, 25 bp, Artificial
  probe
  misc_feature (1)..(25): SEQ ID NO: 5526; WAN024FLV_at; Start 21; Stop 45
tgatacggtttgtaccagcaccaac

SEQ ID NO: 211633 - DNA, 25 bp, Artificial
  probe
  misc_feature (1)..(25): SEQ ID NO: 5526; WAN024FLV_at; Start 138; Stop 162
ggtagtcaggaagctccacaaaatc

SEQ ID NO: 211634 - DNA, 25 bp, Artificial
  probe
  misc_feature (1)..(25): SEQ ID NO: 5526; WAN024FLV_at; Start 124; Stop 148
caaatcttgacgaaggtagtcagga

SEQ ID NO: 211635 - DNA, 25 bp, Artificial
  probe
  misc_feature (1)..(25): SEQ ID NO: 5526; WAN024FLV_at; Start 5; Stop 29
cgaacaacgtagatgttgatacggt

SEQ ID NO: 211636 - DNA, 25 bp, Artificial
  probe
  misc_feature (1)..(25): SEQ ID NO: 5526; WAN024FLV_at; Start 47; Stop 71
aagccacgcatacctgcagtaccaa

SEQ ID NO: 211637 - DNA, 25 bp, Artificial
  probe
  misc_feature (1)..(25): SEQ ID NO: 5279; WAN024FLW_at; Start 203; Stop 227
taatcgctttgatttgttcagcacc

SEQ ID NO: 211638 - DNA, 25 bp, Artificial
  probe
  misc_feature (1)..(25): SEQ ID NO: 5279; WAN024FLW_at; Start 233; Stop 257
cacctgaaagagtaacagagattgt

SEQ ID NO: 211639 - DNA, 25 bp, Artificial
  probe
  misc_feature (1)..(25): SEQ ID NO: 5279; WAN024FLW_at; Start 141; Stop 165
ttctacgacagtgatagctgttgcg

SEQ ID NO: 211640 - DNA, 25 bp, Artificial
  probe
  misc_feature (1)..(25): SEQ ID NO: 5279; WAN024FLW_at; Start 7; Stop 31
tttggttctgtacctgaagggcgaa

SEQ ID NO: 211641 - DNA, 25 bp, Artificial
  probe
  misc_feature (1)..(25): SEQ ID NO: 5279; WAN024FLW_at; Start 229; Stop 253
tcgacacctgaaagagtaacagaga

SEQ ID NO: 211642 - DNA, 25 bp, Artificial
  probe
  misc_feature (1)..(25): SEQ ID NO: 5279; WAN024FLW_at; Start 89; Stop 113
tcaagtttgtaacagtaccgtcagc

SEQ ID NO: 211643 - DNA, 25 bp, Artificial
  probe
  misc_feature (1)..(25): SEQ ID NO: 5279; WAN024FLW_at; Start 59; Stop 83
tgtatttcaacacatcacttggagg

SEQ ID NO: 211644 - DNA, 25 bp, Artificial
  probe
  misc_feature (1)..(25): SEQ ID NO: 5279; WAN024FLW_at; Start 121; Stop 145
gcagtttgtgccttgaagtcttcta

SEQ ID NO: 211645 - DNA, 25 bp, Artificial
  probe
  misc_feature (1)..(25): SEQ ID NO: 5279; WAN024FLW_at; Start 246; Stop 270
aacagagattgttttttctgcgtag

SEQ ID NO: 211646 - DNA, 25 bp, Artificial
  probe
  misc_feature (1)..(25): SEQ ID NO: 5279; WAN024FLW_at; Start 116; Stop 140
cagtagcagtttgtgccttgaagtc

SEQ ID NO: 211647 - DNA, 25 bp, Artificial
  probe
  misc_feature (1)..(25): SEQ ID NO: 5279; WAN024FLW_at; Start 208; Stop 232
gctttgatttgttcagcaccatcga

SEQ ID NO: 211648 - DNA, 25 bp, Artificial
  probe
  misc_feature (1)..(25): SEQ ID NO: 5279; WAN024FLW_at; Start 213; Stop 237
gatttgttcagcaccatcgacacct

SEQ ID NO: 211649 - DNA, 25 bp, Artificial
  probe
  misc_feature (1)..(25): SEQ ID NO: 5279; WAN024FLW_at; Start 155; Stop 179
tagctgttgcgttccattctgttgg

SEQ ID NO: 211650 - DNA, 25 bp, Artificial
  probe
  misc_feature (1)..(25): SEQ ID NO: 5279; WAN024FLW_at; Start 134; Stop 158
tgaagtcttctacgacagtgatagc

SEQ ID NO: 211651 - DNA, 25 bp, Artificial
  probe
  misc_feature (1)..(25): SEQ ID NO: 5279; WAN024FLW_at; Start 223; Stop 247
gcaccatcgacacctgaaagagtaa

SEQ ID NO: 211652 - DNA, 25 bp, Artificial
  probe
  misc_feature (1)..(25): SEQ ID NO: 5279; WAN024FLW_at; Start 25; Stop 49
gggcgaacggcaatccatgaaccgt

SEQ ID NO: 211653 - DNA, 25 bp, Artificial
  probe
  misc_feature (1)..(25): SEQ ID NO: 5279; WAN024FLW_at; Start 130; Stop 154
gccttgaagtcttctacgacagtga

SEQ ID NO: 211654 - DNA, 25 bp, Artificial
  probe
  misc_feature (1)..(25): SEQ ID NO: 5279; WAN024FLW_at; Start 38; Stop 62
tccatgaaccgtcagcaagtgtgta

SEQ ID NO: 211655 - DNA, 25 bp, Artificial
  probe
  misc_feature (1)..(25): SEQ ID NO: 5279; WAN024FLW_at; Start 181; Stop 205
gcattgttgcggaatttagccataa

SEQ ID NO: 211656 - DNA, 25 bp, Artificial
  probe
  misc_feature (1)..(25): SEQ ID NO: 5279; WAN024FLW_at; Start 33; Stop 57
ggcaatccatgaaccgtcagcaagt

SEQ ID NO: 211657 - DNA, 25 bp, Artificial
  probe
  misc_feature (1)..(25): SEQ ID NO: 5279; WAN024FLW_at; Start 98; Stop 122
taacagtaccgtcagcaacagtagc

SEQ ID NO: 211658 - DNA, 25 bp, Artificial
  probe
  misc_feature (1)..(25): SEQ ID NO: 5279; WAN024FLW_at; Start 94; Stop 118
tttgtaacagtaccgtcagcaacag

SEQ ID NO: 211659 - DNA, 25 bp, Artificial
  probe
  misc_feature (1)..(25): SEQ ID NO: 5279; WAN024FLW_at; Start 46; Stop 70
ccgtcagcaagtgtgtatttcaaca

SEQ ID NO: 211660 - DNA, 25 bp, Artificial
  probe
  misc_feature (1)..(25): SEQ ID NO: 5279; WAN024FLW_at; Start 189; Stop 213
gcggaatttagccataatcgctttg

SEQ ID NO: 211661 - DNA, 25 bp, Artificial
  probe
  misc_feature (1)..(25): SEQ ID NO: 5279; WAN024FLW_at; Start 109; Stop 133
tcagcaacagtagcagtttgtgcct

SEQ ID NO: 211662 - DNA, 25 bp, Artificial
  probe
  misc_feature (1)..(25): SEQ ID NO: 5279; WAN024FLW_at; Start 2; Stop 26
tgatttttggttctgtacctgaagg

SEQ ID NO: 211663 - DNA, 25 bp, Artificial
  probe
  misc_feature (1)..(25): SEQ ID NO: 5279; WAN024FLW_at; Start 169; Stop 193
cattctgttggagcattgttgcgga

SEQ ID NO: 211664 - DNA, 25 bp, Artificial
  probe
  misc_feature (1)..(25): SEQ ID NO: 5279; WAN024FLW_at; Start 20; Stop 44
ctgaagggcgaacggcaatccatga

SEQ ID NO: 211665 - DNA, 25 bp, Artificial
  probe
  misc_feature (1)..(25): SEQ ID NO: 5279; WAN024FLW_at; Start 177; Stop 201
tggagcattgttgcggaatttagcc

SEQ ID NO: 211666 - DNA, 25 bp, Artificial
  probe
  misc_feature (1)..(25): SEQ ID NO: 5279; WAN024FLW_at; Start 13; Stop 37
tctgtacctgaagggcgaacggcaa

SEQ ID NO: 211667 - DNA, 25 bp, Artificial
  probe
  misc_feature (1)..(25): SEQ ID NO: 5279; WAN024FLW_at; Start 149; Stop 173
cagtgatagctgttgcgttccattc

SEQ ID NO: 211668 - DNA, 25 bp, Artificial
  probe
  misc_feature (1)..(25): SEQ ID NO: 5279; WAN024FLW_at; Start 74; Stop 98
cacttggaggagttgtcaagtttgt

SEQ ID NO: 211669 - DNA, 25 bp, Artificial
  probe
  misc_feature (1)..(25): SEQ ID NO: 5279; WAN024FLW_at; Start 104; Stop 128
taccgtcagcaacagtagcagtttg

SEQ ID NO: 211670 - DNA, 25 bp, Artificial
  probe
  misc_feature (1)..(25): SEQ ID NO: 5279; WAN024FLW_at; Start 67; Stop 91
aacacatcacttggaggagttgtca

SEQ ID NO: 211671 - DNA, 25 bp, Artificial
  probe
  misc_feature (1)..(25): SEQ ID NO: 5359; WAN024FLX_at; Start 469; Stop 493
tgtggctggctgtgaccatgatacc

SEQ ID NO: 211672 - DNA, 25 bp, Artificial
  probe
  misc_feature (1)..(25): SEQ ID NO: 5359; WAN024FLX_at; Start 105; Stop 129
tcagcagttgcttgcgcttcaacaa

SEQ ID NO: 211673 - DNA, 25 bp, Artificial
  probe
  misc_feature (1)..(25): SEQ ID NO: 5359; WAN024FLX_at; Start 358; Stop 382
caaatgggttttcgattgcacggat

SEQ ID NO: 211674 - DNA, 25 bp, Artificial
  probe
  misc_feature (1)..(25): SEQ ID NO: 5359; WAN024FLX_at; Start 65; Stop 89
gctttctgggtttggagatgttaca

SEQ ID NO: 211675 - DNA, 25 bp, Artificial
  probe
  misc_feature (1)..(25): SEQ ID NO: 5359; WAN024FLX_at; Start 132; Stop 156
tgaacagagtcaaatcctgcttggg

SEQ ID NO: 211676 - DNA, 25 bp, Artificial
  probe
  misc_feature (1)..(25): SEQ ID NO: 5359; WAN024FLX_at; Start 239; Stop 263
caaggctgggttgatgtttatgtcc

SEQ ID NO: 211677 - DNA, 25 bp, Artificial
  probe
  misc_feature (1)..(25): SEQ ID NO: 5359; WAN024FLX_at; Start 37; Stop 61
gttcttcagcaagggcaaaggctgc

SEQ ID NO: 211678 - DNA, 25 bp, Artificial
  probe
  misc_feature (1)..(25): SEQ ID NO: 5359; WAN024FLX_at; Start 268; Stop 292
cctctttaaggtattctatgtcaac

SEQ ID NO: 211679 - DNA, 25 bp, Artificial
  probe
  misc_feature (1)..(25): SEQ ID NO: 5359; WAN024FLX_at; Start 117; Stop 141
tgcgcttcaacaacttgaacagagt

SEQ ID NO: 211680 - DNA, 25 bp, Artificial
  probe
  misc_feature (1)..(25): SEQ ID NO: 5359; WAN024FLX_at; Start 159; Stop 183
agagcacgacgagccaacatttcac

SEQ ID NO: 211681 - DNA, 25 bp, Artificial
  probe
  misc_feature (1)..(25): SEQ ID NO: 5359; WAN024FLX_at; Start 392; Stop 416
caaagcgtccgcatcgtgtggaggc

SEQ ID NO: 211682 - DNA, 25 bp, Artificial
  probe
  misc_feature (1)..(25): SEQ ID NO: 5359; WAN024FLX_at; Start 175; Stop 199
acatttcaccagtaccatgaagtgg

SEQ ID NO: 211683 - DNA, 25 bp, Artificial
  probe
  misc_feature (1)..(25): SEQ ID NO: 5359; WAN024FLX_at; Start 224; Stop 248
accaaattcttcaatcaaggctggg

SEQ ID NO: 211684 - DNA, 25 bp, Artificial
  probe
  misc_feature (1)..(25): SEQ ID NO: 5359; WAN024FLX_at; Start 502; Stop 526
agttgagatgacgaactgcaaatga

SEQ ID NO: 211685 - DNA, 25 bp, Artificial
  probe
  misc_feature (1)..(25): SEQ ID NO: 5359; WAN024FLX_at; Start 299; Stop 323
gccgataacttcaatcaagccagaa

SEQ ID NO: 211686 - DNA, 25 bp, Artificial
  probe
  misc_feature (1)..(25): SEQ ID NO: 5359; WAN024FLX_at; Start 13; Stop 37
catctgcaccaacttgacgaccaag

SEQ ID NO: 211687 - DNA, 25 bp, Artificial
  probe
  misc_feature (1)..(25): SEQ ID NO: 5359; WAN024FLX_at; Start 490; Stop 514
tacctgcgaaacagttgagatgacg

SEQ ID NO: 211688 - DNA, 25 bp, Artificial
  probe
  misc_feature (1)..(25): SEQ ID NO: 5359; WAN024FLX_at; Start 206; Stop 230
gacaatcttcatgtctttaccaaat

SEQ ID NO: 211689 - DNA, 25 bp, Artificial
  probe
  misc_feature (1)..(25): SEQ ID NO: 5359; WAN024FLX_at; Start 284; Stop 308
tatgtcaacagcttcgccgataact

SEQ ID NO: 211690 - DNA, 25 bp, Artificial
  probe
  misc_feature (1)..(25): SEQ ID NO: 5359; WAN024FLX_at; Start 321; Stop 345
gaagctttttcagtttccacatcag

SEQ ID NO: 211691 - DNA, 25 bp, Artificial
  probe
  misc_feature (1)..(25): SEQ ID NO: 5359; WAN024FLX_at; Start 146; Stop 170
tcctgcttgggcaagagcacgacga

SEQ ID NO: 211692 - DNA, 25 bp, Artificial
  probe
  misc_feature (1)..(25): SEQ ID NO: 5359; WAN024FLX_at; Start 189; Stop 213
ccatgaagtggtgtgtagacaatct

SEQ ID NO: 211693 - DNA, 25 bp, Artificial
  probe
  misc_feature (1)..(25): SEQ ID NO: 5359; WAN024FLX_at; Start 86; Stop 110
tacagttgaaaagtctgggtcagca

SEQ ID NO: 211694 - DNA, 25 bp, Artificial
  probe
  misc_feature (1)..(25): SEQ ID NO: 5359; WAN024FLX_at; Start 382; Stop 406
tataagtagtcaaagcgtccgcatc

SEQ ID NO: 211695 - DNA, 25 bp, Artificial
  probe
  misc_feature (1)..(25): SEQ ID NO: 5359; WAN024FLX_at; Start 414; Stop 438
ggcatttgtccaccgtcttcaccgt

SEQ ID NO: 211696 - DNA, 25 bp, Artificial
  probe
  misc_feature (1)..(25): SEQ ID NO: 5359; WAN024FLX_at; Start 476; Stop 500
ggctgtgaccatgatacctgcgaaa

SEQ ID NO: 211697 - DNA, 25 bp, Artificial
  probe
  misc_feature (1)..(25): SEQ ID NO: 5359; WAN024FLX_at; Start 443; Stop 467
cttgtaaccgttaaatggagcaggg

SEQ ID NO: 211698 - DNA, 25 bp, Artificial
  probe
  misc_feature (1)..(25): SEQ ID NO: 5359; WAN024FLX_at; Start 342; Stop 366
tcagcaacttcaactgcaaatgggt

SEQ ID NO: 211699 - DNA, 25 bp, Artificial
  probe
  misc_feature (1)..(25): SEQ ID NO: 5359; WAN024FLX_at; Start 95; Stop 119
aaagtctgggtcagcagttgcttgc

SEQ ID NO: 211700 - DNA, 25 bp, Artificial
  probe
  misc_feature (1)..(25): SEQ ID NO: 5359; WAN024FLX_at; Start 369; Stop 393
tcgattgcacggatataagtagtca

SEQ ID NO: 211701 - DNA, 25 bp, Artificial
  probe
  misc_feature (1)..(25): SEQ ID NO: 5359; WAN024FLX_at; Start 401; Stop 425
cgcatcgtgtggaggcatttgtcca

SEQ ID NO: 211702 - DNA, 25 bp, Artificial
  probe
  misc_feature (1)..(25): SEQ ID NO: 5359; WAN024FLX_at; Start 27; Stop 51
tgacgaccaagttcttcagcaaggg

SEQ ID NO: 211703 - DNA, 25 bp, Artificial
  probe
  misc_feature (1)..(25): SEQ ID NO: 5359; WAN024FLX_at; Start 2; Stop 26
tgcgacaagaacatctgcaccaact

SEQ ID NO: 211704 - DNA, 25 bp, Artificial
  probe
  misc_feature (1)..(25): SEQ ID NO: 5359; WAN024FLX_at; Start 52; Stop 76
caaaggctgcttggctttctgggtt

SEQ ID NO: 211705 - DNA, 25 bp, Artificial
  probe
  misc_feature (1)..(25): SEQ ID NO: 2940; WAN024FLY_at; Start 183; Stop 207
cgttgttcgccaagctactgaagga

SEQ ID NO: 211706 - DNA, 25 bp, Artificial
  probe
  misc_feature (1)..(25): SEQ ID NO: 2940; WAN024FLY_at; Start 499; Stop 523
gatgcggacgctttgactacttata

SEQ ID NO: 211707 - DNA, 25 bp, Artificial
  probe
  misc_feature (1)..(25): SEQ ID NO: 2940; WAN024FLY_at; Start 1425; Stop 1449
tatggctaaattccgcaacaatgct

SEQ ID NO: 211708 - DNA, 25 bp, Artificial
  probe
  misc_feature (1)..(25): SEQ ID NO: 2940; WAN024FLY_at; Start 564; Stop 588
tgtggaaactgaaaaagcttctggc

SEQ ID NO: 211709 - DNA, 25 bp, Artificial
  probe
  misc_feature (1)..(25): SEQ ID NO: 2940; WAN024FLY_at; Start 243; Stop 267
gaaagaacgcggtgtagcaattgcc

SEQ ID NO: 211710 - DNA, 25 bp, Artificial
  probe
  misc_feature (1)..(25): SEQ ID NO: 2940; WAN024FLY_at; Start 1353; Stop 1377
tggctactacgcagaaaaaacaatc

SEQ ID NO: 211711 - DNA, 25 bp, Artificial
  probe
  misc_feature (1)..(25): SEQ ID NO: 2940; WAN024FLY_at; Start 292; Stop 316
gagtttgcctttgaatctgcggcag

SEQ ID NO: 211712 - DNA, 25 bp, Artificial
  probe
  misc_feature (1)..(25): SEQ ID NO: 2940; WAN024FLY_at; Start 896; Stop 920
ttgtcgcaactgacccagacgctga

SEQ ID NO: 211713 - DNA, 25 bp, Artificial
  probe
  misc_feature (1)..(25): SEQ ID NO: 2940; WAN024FLY_at; Start 406; Stop 430
ttcgcaggtatcatggtcacagcca

SEQ ID NO: 211714 - DNA, 25 bp, Artificial
  probe
  misc_feature (1)..(25): SEQ ID NO: 2940; WAN024FLY_at; Start 939; Stop 963
tcttcaaaaagatggtagctacctc

SEQ ID NO: 211715 - DNA, 25 bp, Artificial
  probe
  misc_feature (1)..(25): SEQ ID NO: 2940; WAN024FLY_at; Start 1007; Stop 1031
tcttggaagctcacaaaaacgctgg

SEQ ID NO: 211716 - DNA, 25 bp, Artificial
  probe
  misc_feature (1)..(25): SEQ ID NO: 2940; WAN024FLY_at; Start 1588; Stop 1612
tggattgccgttcgcccttcaggta

SEQ ID NO: 211717 - DNA, 25 bp, Artificial
  probe
  misc_feature (1)..(25): SEQ ID NO: 2940; WAN024FLY_at; Start 1650; Stop 1674
ggaaaccaacgaagaatcacaagct

SEQ ID NO: 211718 - DNA, 25 bp, Artificial
  probe
  misc_feature (1)..(25): SEQ ID NO: 2940; WAN024FLY_at; Start 520; Stop 544
tatatccgtgcaatcgaaaacccat

SEQ ID NO: 211719 - DNA, 25 bp, Artificial
  probe
  misc_feature (1)..(25): SEQ ID NO: 2940; WAN024FLY_at; Start 310; Stop 334
gcggcagttcttgctaaacacggca

SEQ ID NO: 211720 - DNA, 25 bp, Artificial
  probe
  misc_feature (1)..(25): SEQ ID NO: 2940; WAN024FLY_at; Start 271; Stop 295
gatagccgtcacttctcacctgagt

SEQ ID NO: 211721 - DNA, 25 bp, Artificial
  probe
  misc_feature (1)..(25): SEQ ID NO: 2940; WAN024FLY_at; Start 744; Stop 768
tcttgcccaagcaggatttgactct

SEQ ID NO: 211722 - DNA, 25 bp, Artificial
  probe
  misc_feature (1)..(25): SEQ ID NO: 2940; WAN024FLY_at; Start 1383; Stop 1407
tactctttcaggtgtcgatggtgct

SEQ ID NO: 211723 - DNA, 25 bp, Artificial
  probe
  misc_feature (1)..(25): SEQ ID NO: 2940; WAN024FLY_at; Start 153; Stop 177
tggtgctggtacaaaccgtatcaac

SEQ ID NO: 211724 - DNA, 25 bp, Artificial
  probe
  misc_feature (1)..(25): SEQ ID NO: 2940; WAN024FLY_at; Start 1399; Stop 1423
gatggtgctgaacaaatcaaagcga

SEQ ID NO: 211725 - DNA, 25 bp, Artificial
  probe
  misc_feature (1)..(25): SEQ ID NO: 2940; WAN024FLY_at; Start 1245; Stop 1269
tgataaagatgccatccaagccgtt

SEQ ID NO: 211726 - DNA, 25 bp, Artificial
  probe
  misc_feature (1)..(25): SEQ ID NO: 2940; WAN024FLY_at; Start 777; Stop 801
tgttgaagcgcaagcaactgctgac

SEQ ID NO: 211727 - DNA, 25 bp, Artificial
  probe
  misc_feature (1)..(25): SEQ ID NO: 2940; WAN024FLY_at; Start 724; Stop 748
gaaatgttggctcgtcgtgctcttg

SEQ ID NO: 211728 - DNA, 25 bp, Artificial
  probe
  misc_feature (1)..(25): SEQ ID NO: 2940; WAN024FLY_at; Start 351; Stop 375
tgaaagccttcgtccgactccagaa

SEQ ID NO: 211729 - DNA, 25 bp, Artificial
  probe
  misc_feature (1)..(25): SEQ ID NO: 2940; WAN024FLY_at; Start 468; Stop 492
cggtgaagacggtggacaaatgcct

SEQ ID NO: 211730 - DNA, 25 bp, Artificial
  probe
  misc_feature (1)..(25): SEQ ID NO: 2940; WAN024FLY_at; Start 978; Stop 1002
ccaaatcggtgctatcatggctaaa

SEQ ID NO: 211731 - DNA, 25 bp, Artificial
  probe
  misc_feature (1)..(25): SEQ ID NO: 2940; WAN024FLY_at; Start 1108; Stop 1132
ggcgcaactatgttcaacgtcttga

SEQ ID NO: 211732 - DNA, 25 bp, Artificial
  probe
  misc_feature (1)..(25): SEQ ID NO: 2940; WAN024FLY_at; Start 483; Stop 507
acaaatgcctccacacgatgcggac

SEQ ID NO: 211733 - DNA, 25 bp, Artificial
  probe
  misc_feature (1)..(25): SEQ ID NO: 2940; WAN024FLY_at; Start 1314; Stop 1338
gacacttgctgacggtatcgaagaa

SEQ ID NO: 211734 - DNA, 25 bp, Artificial
  probe
  misc_feature (1)..(25): SEQ ID NO: 2940; WAN024FLY_at; Start 1042; Stop 1066
gaaaatgccgctctctgcaaatcta

SEQ ID NO: 211735 - DNA, 25 bp, Artificial
  probe
  misc_feature (1)..(25): SEQ ID NO: 2940; WAN024FLY_at; Start 1278; Stop 1302
tgctgaacttgctgcctactaccgt

SEQ ID NO: 211736 - DNA, 25 bp, Artificial
  probe
  misc_feature (1)..(25): SEQ ID NO: 2940; WAN024FLY_at; Start 1484; Stop 1508
tagaagacttcaaggcacaaactgc

SEQ ID NO: 211737 - DNA, 25 bp, Artificial
  probe
  misc_feature (1)..(25): SEQ ID NO: 2940; WAN024FLY_at; Start 1499; Stop 1523
cacaaactgctactgttgctgacgg

SEQ ID NO: 211738 - DNA, 25 bp, Artificial
  probe
  misc_feature (1)..(25): SEQ ID NO: 2940; WAN024FLY_at; Start 854; Stop 878
cccttgctgaagaacttggtcgtca

SEQ ID NO: 211739 - DNA, 25 bp, Artificial
  probe
  misc_feature (1)..(25): SEQ ID NO: 3836; WAN024FLZ_at; Start 130; Stop 154
cattcagcatttactctatataaga

SEQ ID NO: 211740 - DNA, 25 bp, Artificial
  probe
  misc_feature (1)..(25): SEQ ID NO: 3836; WAN024FLZ_at; Start 736; Stop 760
cgattttttgttgacttattagcta

SEQ ID NO: 211741 - DNA, 25 bp, Artificial
  probe
  misc_feature (1)..(25): SEQ ID NO: 3836; WAN024FLZ_at; Start 261; Stop 285
gattgagaaattattaactagtaag

SEQ ID NO: 211742 - DNA, 25 bp, Artificial
  probe
  misc_feature (1)..(25): SEQ ID NO: 3836; WAN024FLZ_at; Start 523; Stop 547
catgtactgagtttcttgattcata

SEQ ID NO: 211743 - DNA, 25 bp, Artificial
  probe
  misc_feature (1)..(25): SEQ ID NO: 3836; WAN024FLZ_at; Start 540; Stop 564
gattcatataacgttagtaagtgca

SEQ ID NO: 211744 - DNA, 25 bp, Artificial
  probe
  misc_feature (1)..(25): SEQ ID NO: 3836; WAN024FLZ_at; Start 115; Stop 139
caatatttaaatagtcattcagcat

SEQ ID NO: 211745 - DNA, 25 bp, Artificial
  probe
  misc_feature (1)..(25): SEQ ID NO: 3836; WAN024FLZ_at; Start 509; Stop 533
ccttatatattatacatgtactgag

SEQ ID NO: 211746 - DNA, 25 bp, Artificial
  probe
  misc_feature (1)..(25): SEQ ID NO: 3836; WAN024FLZ_at; Start 405; Stop 429
gttattaggaaattctcacttatgg

SEQ ID NO: 211747 - DNA, 25 bp, Artificial
  probe
  misc_feature (1)..(25): SEQ ID NO: 3836; WAN024FLZ_at; Start 376; Stop 400
ttttggagagctataactggtcaat

SEQ ID NO: 211748 - DNA, 25 bp, Artificial
  probe
  misc_feature (1)..(25): SEQ ID NO: 3836; WAN024FLZ_at; Start 638; Stop 662
tggaaaatcacaaatggattagcct

SEQ ID NO: 211749 - DNA, 25 bp, Artificial
  probe
  misc_feature (1)..(25): SEQ ID NO: 3836; WAN024FLZ_at; Start 214; Stop 238
tcgggtgtatttttctctattcaaa

SEQ ID NO: 211750 - DNA, 25 bp, Artificial
  probe
  misc_feature (1)..(25): SEQ ID NO: 3836; WAN024FLZ_at; Start 390; Stop 414
aactggtcaattcttgttattagga

SEQ ID NO: 211751 - DNA, 25 bp, Artificial
  probe
  misc_feature (1)..(25): SEQ ID NO: 3836; WAN024FLZ_at; Start 83; Stop 107
tatcgagcaattatggtggaatgga

SEQ ID NO: 211752 - DNA, 25 bp, Artificial
  probe
  misc_feature (1)..(25): SEQ ID NO: 3836; WAN024FLZ_at; Start 764; Stop 788
taggatcacttatttgttacaatat

SEQ ID NO: 211753 - DNA, 25 bp, Artificial
  probe
  misc_feature (1)..(25): SEQ ID NO: 3836; WAN024FLZ_at; Start 243; Stop 267
aaaagatcgatggaataagattgag

SEQ ID NO: 211754 - DNA, 25 bp, Artificial
  probe
  misc_feature (1)..(25): SEQ ID NO: 3836; WAN024FLZ_at; Start 50; Stop 74
tagttgtgttaagtcatagtgcgta

SEQ ID NO: 211755 - DNA, 25 bp, Artificial
  probe
  misc_feature (1)..(25): SEQ ID NO: 3836; WAN024FLZ_at; Start 467; Stop 491
tttattgtttaagaagagatacttc

SEQ ID NO: 211756 - DNA, 25 bp, Artificial
  probe
  misc_feature (1)..(25): SEQ ID NO: 3836; WAN024FLZ_at; Start 197; Stop 221
cattatttatggctatatcgggtgt

SEQ ID NO: 211757 - DNA, 25 bp, Artificial
  probe
  misc_feature (1)..(25): SEQ ID NO: 3836; WAN024FLZ_at; Start 486; Stop 510
tacttctatatttgtatacttgtcc

SEQ ID NO: 211758 - DNA, 25 bp, Artificial
  probe
  misc_feature (1)..(25): SEQ ID NO: 3836; WAN024FLZ_at; Start 150; Stop 174
taagatacttggtaaatttatggaa

SEQ ID NO: 211759 - DNA, 25 bp, Artificial
  probe
  misc_feature (1)..(25): SEQ ID NO: 3836; WAN024FLZ_at; Start 841; Stop 865
ctcattttgattaatggtttaggga

SEQ ID NO: 211760 - DNA, 25 bp, Artificial
  probe
  misc_feature (1)..(25): SEQ ID NO: 3836; WAN024FLZ_at; Start 590; Stop 614
ccatgggatttttgttcgaatctaa

SEQ ID NO: 211761 - DNA, 25 bp, Artificial
  probe
  misc_feature (1)..(25): SEQ ID NO: 3836; WAN024FLZ_at; Start 748; Stop 772
gacttattagctattttaggatcac

SEQ ID NO: 211762 - DNA, 25 bp, Artificial
  probe
  misc_feature (1)..(25): SEQ ID NO: 3836; WAN024FLZ_at; Start 561; Stop 585
tgcaccattgcagtttcttttttgg

SEQ ID NO: 211763 - DNA, 25 bp, Artificial
  probe
  misc_feature (1)..(25): SEQ ID NO: 3836; WAN024FLZ_at; Start 652; Stop 676
tggattagccttttattctttgtgt

SEQ ID NO: 211764 - DNA, 25 bp, Artificial
  probe
  misc_feature (1)..(25): SEQ ID NO: 3836; WAN024FLZ_at; Start 548; Stop 572
taacgttagtaagtgcaccattgca

SEQ ID NO: 211765 - DNA, 25 bp, Artificial
  probe
  misc_feature (1)..(25): SEQ ID NO: 3836; WAN024FLZ_at; Start 713; Stop 737
aaagcgattttaaagtattgagtcg

SEQ ID NO: 211766 - DNA, 25 bp, Artificial
  probe
  misc_feature (1)..(25): SEQ ID NO: 3836; WAN024FLZ_at; Start 825; Stop 849
tagtaaactacttaatctcattttg

SEQ ID NO: 211767 - DNA, 25 bp, Artificial
  probe
  misc_feature (1)..(25): SEQ ID NO: 3836; WAN024FLZ_at; Start 346; Stop 370
tatatatcaaactactacaatggtg

SEQ ID NO: 211768 - DNA, 25 bp, Artificial
  probe
  misc_feature (1)..(25): SEQ ID NO: 3836; WAN024FLZ_at; Start 66; Stop 90
tagtgcgtattataaaatatcgagc

SEQ ID NO: 211769 - DNA, 25 bp, Artificial
  probe
  misc_feature (1)..(25): SEQ ID NO: 3836; WAN024FLZ_at; Start 417; Stop 441
ttctcacttatggtatttgtatgca

SEQ ID NO: 211770 - DNA, 25 bp, Artificial
  probe
  misc_feature (1)..(25): SEQ ID NO: 3836; WAN024FLZ_at; Start 96; Stop 120
tggtggaatggattatcaacaatat

SEQ ID NO: 211771 - DNA, 25 bp, Artificial
  probe
  misc_feature (1)..(25): SEQ ID NO: 3836; WAN024FLZ_at; Start 992; Stop 1016
ttttgggattagtctttacattgct

SEQ ID NO: 211772 - DNA, 25 bp, Artificial
  probe
  misc_feature (1)..(25): SEQ ID NO: 3836; WAN024FLZ_at; Start 602; Stop 626
tgttcgaatctaaaagaaggaagta

SEQ ID NO: 211773 - DNA, 25 bp, Artificial
  probe
  misc_feature (1)..(25): SEQ ID NO: 4309; WAN024FM2_at; Start 178; Stop 202
tctaaagctaaagatgatgacagag

SEQ ID NO: 211774 - DNA, 25 bp, Artificial
  probe
  misc_feature (1)..(25): SEQ ID NO: 4309; WAN024FM2_at; Start 232; Stop 256
ggagaaaattacctatcatgttaac

SEQ ID NO: 211775 - DNA, 25 bp, Artificial
  probe
  misc_feature (1)..(25): SEQ ID NO: 4309; WAN024FM2_at; Start 164; Stop 188
taaactcagctgcttctaaagctaa

SEQ ID NO: 211776 - DNA, 25 bp, Artificial
  probe
  misc_feature (1)..(25): SEQ ID NO: 4309; WAN024FM2_at; Start 15; Stop 39
ccaggatttcatgagcatatctaag

SEQ ID NO: 211777 - DNA, 25 bp, Artificial
  probe
  misc_feature (1)..(25): SEQ ID NO: 4309; WAN024FM2_at; Start 58; Stop 82
gactggaagaaaactttcacagtga

SEQ ID NO: 211778 - DNA, 25 bp, Artificial
  probe
  misc_feature (1)..(25): SEQ ID NO: 4309; WAN024FM2_at; Start 216; Stop 240
gaagactcttataccaggagaaaat

SEQ ID NO: 211779 - DNA, 25 bp, Artificial
  probe
  misc_feature (1)..(25): SEQ ID NO: 4309; WAN024FM2_at; Start 169; Stop 193
tcagctgcttctaaagctaaagatg

SEQ ID NO: 211780 - DNA, 25 bp, Artificial
  probe
  misc_feature (1)..(25): SEQ ID NO: 4309; WAN024FM2_at; Start 157; Stop 181
acttggctaaactcagctgcttcta

SEQ ID NO: 211781 - DNA, 25 bp, Artificial
  probe
  misc_feature (1)..(25): SEQ ID NO: 4309; WAN024FM2_at; Start 153; Stop 177
cccaacttggctaaactcagctgct

SEQ ID NO: 211782 - DNA, 25 bp, Artificial
  probe
  misc_feature (1)..(25): SEQ ID NO: 4309; WAN024FM2_at; Start 155; Stop 179
caacttggctaaactcagctgcttc

SEQ ID NO: 211783 - DNA, 25 bp, Artificial
  probe
  misc_feature (1)..(25): SEQ ID NO: 4309; WAN024FM2_at; Start 219; Stop 243
gactcttataccaggagaaaattac

SEQ ID NO: 211784 - DNA, 25 bp, Artificial
  probe
  misc_feature (1)..(25): SEQ ID NO: 4309; WAN024FM2_at; Start 12; Stop 36
tgaccaggatttcatgagcatatct

SEQ ID NO: 211785 - DNA, 25 bp, Artificial
  probe
  misc_feature (1)..(25): SEQ ID NO: 4309; WAN024FM2_at; Start 212; Stop 236
tactgaagactcttataccaggaga

SEQ ID NO: 211786 - DNA, 25 bp, Artificial
  probe
  misc_feature (1)..(25): SEQ ID NO: 4309; WAN024FM2_at; Start 175; Stop 199
gcttctaaagctaaagatgatgaca

SEQ ID NO: 211787 - DNA, 25 bp, Artificial
  probe
  misc_feature (1)..(25): SEQ ID NO: 4309; WAN024FM2_at; Start 55; Stop 79
tcagactggaagaaaactttcacag

SEQ ID NO: 211788 - DNA, 25 bp, Artificial
  probe
  misc_feature (1)..(25): SEQ ID NO: 4309; WAN024FM2_at; Start 28; Stop 52
agcatatctaagtctaataaaagtg

SEQ ID NO: 211789 - DNA, 25 bp, Artificial
  probe
  misc_feature (1)..(25): SEQ ID NO: 4309; WAN024FM2_at; Start 214; Stop 238
ctgaagactcttataccaggagaaa

SEQ ID NO: 211790 - DNA, 25 bp, Artificial
  probe
  misc_feature (1)..(25): SEQ ID NO: 4309; WAN024FM2_at; Start 227; Stop 251
taccaggagaaaattacctatcatg

SEQ ID NO: 211791 - DNA, 25 bp, Artificial
  probe
  misc_feature (1)..(25): SEQ ID NO: 4309; WAN024FM2_at; Start 6; Stop 30
gaatgttgaccaggatttcatgagc

SEQ ID NO: 211792 - DNA, 25 bp, Artificial
  probe
  misc_feature (1)..(25): SEQ ID NO: 4309; WAN024FM2_at; Start 19; Stop 43
gatttcatgagcatatctaagtcta

SEQ ID NO: 211793 - DNA, 25 bp, Artificial
  probe
  misc_feature (1)..(25): SEQ ID NO: 4309; WAN024FM2_at; Start 9; Stop 33
tgttgaccaggatttcatgagcata

SEQ ID NO: 211794 - DNA, 25 bp, Artificial
  probe
  misc_feature (1)..(25): SEQ ID NO: 4309; WAN024FM2_at; Start 209; Stop 233
aactactgaagactcttataccagg

SEQ ID NO: 211795 - DNA, 25 bp, Artificial
  probe
  misc_feature (1)..(25): SEQ ID NO: 4309; WAN024FM2_at; Start 24; Stop 48
catgagcatatctaagtctaataaa

SEQ ID NO: 211796 - DNA, 25 bp, Artificial
  probe
  misc_feature (1)..(25): SEQ ID NO: 4309; WAN024FM2_at; Start 61; Stop 85
tggaagaaaactttcacagtgagga

SEQ ID NO: 211797 - DNA, 25 bp, Artificial
  probe
  misc_feature (1)..(25): SEQ ID NO: 4309; WAN024FM2_at; Start 106; Stop 130
gacttgaataatgtcttgaaacagg

SEQ ID NO: 211798 - DNA, 25 bp, Artificial
  probe
  misc_feature (1)..(25): SEQ ID NO: 4309; WAN024FM2_at; Start 98; Stop 122
tagcaaatgacttgaataatgtctt

SEQ ID NO: 211799 - DNA, 25 bp, Artificial
  probe
  misc_feature (1)..(25): SEQ ID NO: 4309; WAN024FM2_at; Start 148; Stop 172
aataccccaacttggctaaactcag

SEQ ID NO: 211800 - DNA, 25 bp, Artificial
  probe
  misc_feature (1)..(25): SEQ ID NO: 4309; WAN024FM2_at; Start 235; Stop 259
gaaaattacctatcatgttaactaa

SEQ ID NO: 211801 - DNA, 25 bp, Artificial
  probe
  misc_feature (1)..(25): SEQ ID NO: 4309; WAN024FM2_at; Start 133; Stop 157
gataaagatactcctaataccccaa

SEQ ID NO: 211802 - DNA, 25 bp, Artificial
  probe
  misc_feature (1)..(25): SEQ ID NO: 4309; WAN024FM2_at; Start 172; Stop 196
gctgcttctaaagctaaagatgatg

SEQ ID NO: 211803 - DNA, 25 bp, Artificial
  probe
  misc_feature (1)..(25): SEQ ID NO: 4309; WAN024FM2_at; Start 160; Stop 184
tggctaaactcagctgcttctaaag

SEQ ID NO: 211804 - DNA, 25 bp, Artificial
  probe
  misc_feature (1)..(25): SEQ ID NO: 4309; WAN024FM2_at; Start 222; Stop 246
tcttataccaggagaaaattaccta

SEQ ID NO: 211805 - DNA, 25 bp, Artificial
  probe
  misc_feature (1)..(25): SEQ ID NO: 4309; WAN024FM2_at; Start 139; Stop 163
gatactcctaataccccaacttggc

SEQ ID NO: 211806 - DNA, 25 bp, Artificial
  probe
  misc_feature (1)..(25): SEQ ID NO: 4309; WAN024FM2_at; Start 1; Stop 25
gtgttgaatgttgaccaggatttca

SEQ ID NO: 211807 - DNA, 25 bp, Artificial
  probe
  misc_feature (1)..(25): SEQ ID NO: 6865; WAN024FM3_at; Start 807; Stop 831
gttactcctattgactgagaaatca

SEQ ID NO: 211808 - DNA, 25 bp, Artificial
  probe
  misc_feature (1)..(25): SEQ ID NO: 6865; WAN024FM3_at; Start 345; Stop 369
gattcttccagcattactttctaaa

SEQ ID NO: 211809 - DNA, 25 bp, Artificial
  probe
  misc_feature (1)..(25): SEQ ID NO: 6865; WAN024FM3_at; Start 686; Stop 710
gcacgatttcaacggcaggtataag

SEQ ID NO: 211810 - DNA, 25 bp, Artificial
  probe
  misc_feature (1)..(25): SEQ ID NO: 6865; WAN024FM3_at; Start 80; Stop 104
tatacaccgtaaagtctgaacctct

SEQ ID NO: 211811 - DNA, 25 bp, Artificial
  probe
  misc_feature (1)..(25): SEQ ID NO: 6865; WAN024FM3_at; Start 1201; Stop 1225
gataaaaacagtattcaaaatagac

SEQ ID NO: 211812 - DNA, 25 bp, Artificial
  probe
  misc_feature (1)..(25): SEQ ID NO: 6865; WAN024FM3_at; Start 694; Stop 718
tcaacggcaggtataagtattatcg

SEQ ID NO: 211813 - DNA, 25 bp, Artificial
  probe
  misc_feature (1)..(25): SEQ ID NO: 6865; WAN024FM3_at; Start 677; Stop 701
caatgttaagcacgatttcaacggc

SEQ ID NO: 211814 - DNA, 25 bp, Artificial
  probe
  misc_feature (1)..(25): SEQ ID NO: 6865; WAN024FM3_at; Start 333; Stop 357
tatgaatagaaagattcttccagca

SEQ ID NO: 211815 - DNA, 25 bp, Artificial
  probe
  misc_feature (1)..(25): SEQ ID NO: 6865; WAN024FM3_at; Start 796; Stop 820
ggcttctctttgttactcctattga

SEQ ID NO: 211816 - DNA, 25 bp, Artificial
  probe
  misc_feature (1)..(25): SEQ ID NO: 6865; WAN024FM3_at; Start 252; Stop 276
cattggtgctaatgttactatctta

SEQ ID NO: 211817 - DNA, 25 bp, Artificial
  probe
  misc_feature (1)..(25): SEQ ID NO: 6865; WAN024FM3_at; Start 701; Stop 725
caggtataagtattatcgggttagc

SEQ ID NO: 211818 - DNA, 25 bp, Artificial
  probe
  misc_feature (1)..(25): SEQ ID NO: 6865; WAN024FM3_at; Start 775; Stop 799
ttccctgtcacagtaggtttaggct

SEQ ID NO: 211819 - DNA, 25 bp, Artificial
  probe
  misc_feature (1)..(25): SEQ ID NO: 6865; WAN024FM3_at; Start 944; Stop 968
cacatattccaacgtttataagagg

SEQ ID NO: 211820 - DNA, 25 bp, Artificial
  probe
  misc_feature (1)..(25): SEQ ID NO: 6865; WAN024FM3_at; Start 1042; Stop 1066
cctatgatcctattattatttaaga

SEQ ID NO: 211821 - DNA, 25 bp, Artificial
  probe
  misc_feature (1)..(25): SEQ ID NO: 6865; WAN024FM3_at; Start 1027; Stop 1051
ctaatctatttttctcctatgatcc

SEQ ID NO: 211822 - DNA, 25 bp, Artificial
  probe
  misc_feature (1)..(25): SEQ ID NO: 6865; WAN024FM3_at; Start 1081; Stop 1105
gattttaaatttgcgattatcctat

SEQ ID NO: 211823 - DNA, 25 bp, Artificial
  probe
  misc_feature (1)..(25): SEQ ID NO: 6865; WAN024FM3_at; Start 783; Stop 807
cacagtaggtttaggcttctctttg

SEQ ID NO: 211824 - DNA, 25 bp, Artificial
  probe
  misc_feature (1)..(25): SEQ ID NO: 6865; WAN024FM3_at; Start 760; Stop 784
gcaaaacttttactattccctgtca

SEQ ID NO: 211825 - DNA, 25 bp, Artificial
  probe
  misc_feature (1)..(25): SEQ ID NO: 6865; WAN024FM3_at; Start 65; Stop 89
tacagtgttattctatatacaccgt

SEQ ID NO: 211826 - DNA, 25 bp, Artificial
  probe
  misc_feature (1)..(25): SEQ ID NO: 6865; WAN024FM3_at; Start 93; Stop 117
gtctgaacctcttactttaatcgtg

SEQ ID NO: 211827 - DNA, 25 bp, Artificial
  probe
  misc_feature (1)..(25): SEQ ID NO: 6865; WAN024FM3_at; Start 212; Stop 236
ggctgtattttacagcaatagttac

SEQ ID NO: 211828 - DNA, 25 bp, Artificial
  probe
  misc_feature (1)..(25): SEQ ID NO: 6865; WAN024FM3_at; Start 524; Stop 548
aacagatgactttttttgggatcca

SEQ ID NO: 211829 - DNA, 25 bp, Artificial
  probe
  misc_feature (1)..(25): SEQ ID NO: 6865; WAN024FM3_at; Start 1143; Stop 1167
gtacttatttttctggattttagca

SEQ ID NO: 211830 - DNA, 25 bp, Artificial
  probe
  misc_feature (1)..(25): SEQ ID NO: 6865; WAN024FM3_at; Start 951; Stop 975
tccaacgtttataagaggtgtaggc

SEQ ID NO: 211831 - DNA, 25 bp, Artificial
  probe
  misc_feature (1)..(25): SEQ ID NO: 6865; WAN024FM3_at; Start 1006; Stop 1030
cagggaggattatttctatttctaa

SEQ ID NO: 211832 - DNA, 25 bp, Artificial
  probe
  misc_feature (1)..(25): SEQ ID NO: 6865; WAN024FM3_at; Start 744; Stop 768
tacgaatcgtcataaggcaaaactt

SEQ ID NO: 211833 - DNA, 25 bp, Artificial
  probe
  misc_feature (1)..(25): SEQ ID NO: 6865; WAN024FM3_at; Start 114; Stop 138
cgtgccattattaattacaaccgta

SEQ ID NO: 211834 - DNA, 25 bp, Artificial
  probe
  misc_feature (1)..(25): SEQ ID NO: 6865; WAN024FM3_at; Start 30; Stop 54
tatactagattatgtatggttaaca

SEQ ID NO: 211835 - DNA, 25 bp, Artificial
  probe
  misc_feature (1)..(25): SEQ ID NO: 6865; WAN024FM3_at; Start 194; Stop 218
aatttatctatatgttagggctgta

SEQ ID NO: 211836 - DNA, 25 bp, Artificial
  probe
  misc_feature (1)..(25): SEQ ID NO: 6865; WAN024FM3_at; Start 640; Stop 664
tctgataaaaataataagcgtaata

SEQ ID NO: 211837 - DNA, 25 bp, Artificial
  probe
  misc_feature (1)..(25): SEQ ID NO: 6865; WAN024FM3_at; Start 542; Stop 566
ggatccatataatacgaaattcagg

SEQ ID NO: 211838 - DNA, 25 bp, Artificial
  probe
  misc_feature (1)..(25): SEQ ID NO: 6865; WAN024FM3_at; Start 999; Stop 1023
tttggctcagggaggattatttcta

SEQ ID NO: 211839 - DNA, 25 bp, Artificial
  probe
  misc_feature (1)..(25): SEQ ID NO: 6865; WAN024FM3_at; Start 731; Stop 755
tatataaaatagctacgaatcgtca

SEQ ID NO: 211840 - DNA, 25 bp, Artificial
  probe
  misc_feature (1)..(25): SEQ ID NO: 6865; WAN024FM3_at; Start 960; Stop 984
tataagaggtgtaggctatagtaac

SEQ ID NO: 211841 - DNA, 25 bp, Artificial
  probe
  misc_feature (1)..(25): SEQ ID NO: 2873; WAN024FM4_at; Start 628; Stop 652
tttgataaaaatagcaagcgtaata

SEQ ID NO: 211842 - DNA, 25 bp, Artificial
  probe
  misc_feature (1)..(25): SEQ ID NO: 2873; WAN024FM4_at; Start 349; Stop 373
ctatcaaaatttgtaaacgtagtag

SEQ ID NO: 211843 - DNA, 25 bp, Artificial
  probe
  misc_feature (1)..(25): SEQ ID NO: 2873; WAN024FM4_at; Start 993; Stop 1017
ggctcagggaggtttattattattc

SEQ ID NO: 211844 - DNA, 25 bp, Artificial
  probe
  misc_feature (1)..(25): SEQ ID NO: 2873; WAN024FM4_at; Start 1020; Stop 1044
gatttatttttctccaatgatacta

SEQ ID NO: 211845 - DNA, 25 bp, Artificial
  probe
  misc_feature (1)..(25): SEQ ID NO: 2873; WAN024FM4_at; Start 331; Stop 355
gaaattttttcagcgttactatcaa

SEQ ID NO: 211846 - DNA, 25 bp, Artificial
  probe
  misc_feature (1)..(25): SEQ ID NO: 2873; WAN024FM4_at; Start 932; Stop 956
aatcacatatctcaacgtttacaag

SEQ ID NO: 211847 - DNA, 25 bp, Artificial
  probe
  misc_feature (1)..(25): SEQ ID NO: 2873; WAN024FM4_at; Start 668; Stop 692
tgttaagtacaatttcaacgacagg

SEQ ID NO: 211848 - DNA, 25 bp, Artificial
  probe
  misc_feature (1)..(25): SEQ ID NO: 2873; WAN024FM4_at; Start 689; Stop 713
caggtattattattgtcgggttagc

SEQ ID NO: 211849 - DNA, 25 bp, Artificial
  probe
  misc_feature (1)..(25): SEQ ID NO: 2873; WAN024FM4_at; Start 797; Stop 821
tattgctcctattggctgagaaatc

SEQ ID NO: 211850 - DNA, 25 bp, Artificial
  probe
  misc_feature (1)..(25): SEQ ID NO: 2873; WAN024FM4_at; Start 787; Stop 811
ggactctctttattgctcctattgg

SEQ ID NO: 211851 - DNA, 25 bp, Artificial
  probe
  misc_feature (1)..(25): SEQ ID NO: 2873; WAN024FM4_at; Start 146; Stop 170
tgttactcaatttattacgattcac

SEQ ID NO: 211852 - DNA, 25 bp, Artificial
  probe
  misc_feature (1)..(25): SEQ ID NO: 2873; WAN024FM4_at; Start 742; Stop 766
cgttggatgacaaaactcttacttc

SEQ ID NO: 211853 - DNA, 25 bp, Artificial
  probe
  misc_feature (1)..(25): SEQ ID NO: 2873; WAN024FM4_at; Start 270; Stop 294
tacgaagtattttataatgcttcct

SEQ ID NO: 211854 - DNA, 25 bp, Artificial
  probe
  misc_feature (1)..(25): SEQ ID NO: 2873; WAN024FM4_at; Start 1182; Stop 1206
tgtaacattagataaaactggaacg

SEQ ID NO: 211855 - DNA, 25 bp, Artificial
  probe
  misc_feature (1)..(25): SEQ ID NO: 2873; WAN024FM4_at; Start 114; Stop 138
tgtgccatttttagttacaacagca

SEQ ID NO: 211856 - DNA, 25 bp, Artificial
  probe
  misc_feature (1)..(25): SEQ ID NO: 2873; WAN024FM4_at; Start 84; Stop 108
tacagtaaaatctgaacctcttaat

SEQ ID NO: 211857 - DNA, 25 bp, Artificial
  probe
  misc_feature (1)..(25): SEQ ID NO: 2873; WAN024FM4_at; Start 1126; Stop 1150
gaagggacatttttatttctctgga

SEQ ID NO: 211858 - DNA, 25 bp, Artificial
  probe
  misc_feature (1)..(25): SEQ ID NO: 2873; WAN024FM4_at; Start 758; Stop 782
tcttacttctccctgtcacattgag

SEQ ID NO: 211859 - DNA, 25 bp, Artificial
  probe
  misc_feature (1)..(25): SEQ ID NO: 2873; WAN024FM4_at; Start 161; Stop 185
tacgattcactttgtcaataaaata

SEQ ID NO: 211860 - DNA, 25 bp, Artificial
  probe
  misc_feature (1)..(25): SEQ ID NO: 2873; WAN024FM4_at; Start 771; Stop 795
tgtcacattgagcttaggactctct

SEQ ID NO: 211861 - DNA, 25 bp, Artificial
  probe
  misc_feature (1)..(25): SEQ ID NO: 2873; WAN024FM4_at; Start 674; Stop 698
gtacaatttcaacgacaggtattat

SEQ ID NO: 211862 - DNA, 25 bp, Artificial
  probe
  misc_feature (1)..(25): SEQ ID NO: 2873; WAN024FM4_at; Start 243; Stop 267
aggtgctaatgttactcccttaaat

SEQ ID NO: 211863 - DNA, 25 bp, Artificial
  probe
  misc_feature (1)..(25): SEQ ID NO: 2873; WAN024FM4_at; Start 28; Stop 52
gatatactggactatatgtggataa

SEQ ID NO: 211864 - DNA, 25 bp, Artificial
  probe
  misc_feature (1)..(25): SEQ ID NO: 2873; WAN024FM4_at; Start 719; Stop 743
tatataaaataatgactactagtcg

SEQ ID NO: 211865 - DNA, 25 bp, Artificial
  probe
  misc_feature (1)..(25): SEQ ID NO: 2873; WAN024FM4_at; Start 131; Stop 155
caacagcaatgttgttgttactcaa

SEQ ID NO: 211866 - DNA, 25 bp, Artificial
  probe
  misc_feature (1)..(25): SEQ ID NO: 2873; WAN024FM4_at; Start 67; Stop 91
cagtgtcattcaatatatacagtaa

SEQ ID NO: 211867 - DNA, 25 bp, Artificial
  probe
  misc_feature (1)..(25): SEQ ID NO: 2873; WAN024FM4_at; Start 237; Stop 261
taacataggtgctaatgttactccc

SEQ ID NO: 211868 - DNA, 25 bp, Artificial
  probe
  misc_feature (1)..(25): SEQ ID NO: 2873; WAN024FM4_at; Start 947; Stop 971
cgtttacaagaaatttaggctatag

SEQ ID NO: 211869 - DNA, 25 bp, Artificial
  probe
  misc_feature (1)..(25): SEQ ID NO: 2873; WAN024FM4_at; Start 202; Stop 226
ctatattttatagcaatggctacat

SEQ ID NO: 211870 - DNA, 25 bp, Artificial
  probe
  misc_feature (1)..(25): SEQ ID NO: 2873; WAN024FM4_at; Start 532; Stop 556
ttccgtataatacggaattcaggaa

SEQ ID NO: 211871 - DNA, 25 bp, Artificial
  probe
  misc_feature (1)..(25): SEQ ID NO: 2873; WAN024FM4_at; Start 1164; Stop 1188
gtatagctacttttcctttgtaaca

SEQ ID NO: 211872 - DNA, 25 bp, Artificial
  probe
  misc_feature (1)..(25): SEQ ID NO: 2873; WAN024FM4_at; Start 53; Stop 77
tattaattattgtacagtgtcattc

SEQ ID NO: 211873 - DNA, 25 bp, Artificial
  probe
  misc_feature (1)..(25): SEQ ID NO: 2873; WAN024FM4_at; Start 732; Stop 756
gactactagtcgttggatgacaaaa

SEQ ID NO: 211874 - DNA, 25 bp, Artificial
  probe
  misc_feature (1)..(25): SEQ ID NO: 2873; WAN024FM4_at; Start 1149; Stop 1173
gattttaacattatcgtatagctac

SEQ ID NO: 211875 - DNA, 25 bp, Artificial
  probe
  misc_feature (1)..(25): SEQ ID NO: 5462; WAN024FM5_at; Start 95; Stop 119
tcttagaaaagatagctgcacgact

SEQ ID NO: 211876 - DNA, 25 bp, Artificial
  probe
  misc_feature (1)..(25): SEQ ID NO: 5462; WAN024FM5_at; Start 423; Stop 447
tattgctagaaaatttgaagatggg

SEQ ID NO: 211877 - DNA, 25 bp, Artificial
  probe
  misc_feature (1)..(25): SEQ ID NO: 5462; WAN024FM5_at; Start 35; Stop 59
tgacaagagaatacatgaaattgaa

SEQ ID NO: 211878 - DNA, 25 bp, Artificial
  probe
  misc_feature (1)..(25): SEQ ID NO: 5462; WAN024FM5_at; Start 781; Stop 805
ccaataattcgaaaacaggttgata

SEQ ID NO: 211879 - DNA, 25 bp, Artificial
  probe
  misc_feature (1)..(25): SEQ ID NO: 5462; WAN024FM5_at; Start 395; Stop 419
tagagacatttgttaaaattcctga

SEQ ID NO: 211880 - DNA, 25 bp, Artificial
  probe
  misc_feature (1)..(25): SEQ ID NO: 5462; WAN024FM5_at; Start 571; Stop 595
gagttttatactattcgtgcgaagg

SEQ ID NO: 211881 - DNA, 25 bp, Artificial
  probe
  misc_feature (1)..(25): SEQ ID NO: 5462; WAN024FM5_at; Start 508; Stop 532
ggtatctggttcgatgcaactattt

SEQ ID NO: 211882 - DNA, 25 bp, Artificial
  probe
  misc_feature (1)..(25): SEQ ID NO: 5462; WAN024FM5_at; Start 796; Stop 820
caggttgataaggtaattaccaaca

SEQ ID NO: 211883 - DNA, 25 bp, Artificial
  probe
  misc_feature (1)..(25): SEQ ID NO: 5462; WAN024FM5_at; Start 329; Stop 353
tacaaacccaaaaagaatatgctga

SEQ ID NO: 211884 - DNA, 25 bp, Artificial
  probe
  misc_feature (1)..(25): SEQ ID NO: 5462; WAN024FM5_at; Start 500; Stop 524
aatacggtggtatctggttcgatgc

SEQ ID NO: 211885 - DNA, 25 bp, Artificial
  probe
  misc_feature (1)..(25): SEQ ID NO: 5462; WAN024FM5_at; Start 760; Stop 784
gagttaggctatgagtataatccaa

SEQ ID NO: 211886 - DNA, 25 bp, Artificial
  probe
  misc_feature (1)..(25): SEQ ID NO: 5462; WAN024FM5_at; Start 349; Stop 373
gctgaaagatttggttatgaataca

SEQ ID NO: 211887 - DNA, 25 bp, Artificial
  probe
  misc_feature (1)..(25): SEQ ID NO: 5462; WAN024FM5_at; Start 81; Stop 105
tgcaaataatatgctcttagaaaag

SEQ ID NO: 211888 - DNA, 25 bp, Artificial
  probe
  misc_feature (1)..(25): SEQ ID NO: 5462; WAN024FM5_at; Start 629; Stop 653
gacgttgggccttgttttgtatagc

SEQ ID NO: 211889 - DNA, 25 bp, Artificial
  probe
  misc_feature (1)..(25): SEQ ID NO: 5462; WAN024FM5_at; Start 220; Stop 244
tctacctattcttatgatttcgaaa

SEQ ID NO: 211890 - DNA, 25 bp, Artificial
  probe
  misc_feature (1)..(25): SEQ ID NO: 5462; WAN024FM5_at; Start 808; Stop 832
gtaattaccaacaaccaagatctct

SEQ ID NO: 211891 - DNA, 25 bp, Artificial
  probe
  misc_feature (1)..(25): SEQ ID NO: 5462; WAN024FM5_at; Start 70; Stop 94
tctacccaaattgcaaataatatgc

SEQ ID NO: 211892 - DNA, 25 bp, Artificial
  probe
  misc_feature (1)..(25): SEQ ID NO: 5462; WAN024FM5_at; Start 303; Stop 327
tgctccagaaattgttcaaaaatcc

SEQ ID NO: 211893 - DNA, 25 bp, Artificial
  probe
  misc_feature (1)..(25): SEQ ID NO: 5462; WAN024FM5_at; Start 926; Stop 950
tatatgtaagcgataaattggacac

SEQ ID NO: 211894 - DNA, 25 bp, Artificial
  probe
  misc_feature (1)..(25): SEQ ID NO: 5462; WAN024FM5_at; Start 601; Stop 625
gaaacctatcctaagtatgttgcgg

SEQ ID NO: 211895 - DNA, 25 bp, Artificial
  probe
  misc_feature (1)..(25): SEQ ID NO: 5462; WAN024FM5_at; Start 610; Stop 634
cctaagtatgttgcggatggacgtt

SEQ ID NO: 211896 - DNA, 25 bp, Artificial
  probe
  misc_feature (1)..(25): SEQ ID NO: 5462; WAN024FM5_at; Start 107; Stop 131
tagctgcacgactatcaagatataa

SEQ ID NO: 211897 - DNA, 25 bp, Artificial
  probe
  misc_feature (1)..(25): SEQ ID NO: 5462; WAN024FM5_at; Start 864; Stop 888
cagggatgaggattggaaaaaagta

SEQ ID NO: 211898 - DNA, 25 bp, Artificial
  probe
  misc_feature (1)..(25): SEQ ID NO: 5462; WAN024FM5_at; Start 850; Stop 874
ttttctaatatgtacagggatgagg

SEQ ID NO: 211899 - DNA, 25 bp, Artificial
  probe
  misc_feature (1)..(25): SEQ ID NO: 5462; WAN024FM5_at; Start 377; Stop 401
tgttagataagtcaaatttagagac

SEQ ID NO: 211900 - DNA, 25 bp, Artificial
  probe
  misc_feature (1)..(25): SEQ ID NO: 5462; WAN024FM5_at; Start 239; Stop 263
tcgaaaaatctaatgagcaaaatgg

SEQ ID NO: 211901 - DNA, 25 bp, Artificial
  probe
  misc_feature (1)..(25): SEQ ID NO: 5462; WAN024FM5_at; Start 3; Stop 27
ggagagtgaaatcttgaataaaatc

SEQ ID NO: 211902 - DNA, 25 bp, Artificial
  probe
  misc_feature (1)..(25): SEQ ID NO: 5462; WAN024FM5_at; Start 744; Stop 768
gatagactatttaatggagttaggc

SEQ ID NO: 211903 - DNA, 25 bp, Artificial
  probe
  misc_feature (1)..(25): SEQ ID NO: 5462; WAN024FM5_at; Start 315; Stop 339
tgttcaaaaatccatacaaacccaa

SEQ ID NO: 211904 - DNA, 25 bp, Artificial
  probe
  misc_feature (1)..(25): SEQ ID NO: 5462; WAN024FM5_at; Start 270; Stop 294
gattttttcattatggcttcaagga

SEQ ID NO: 211905 - DNA, 25 bp, Artificial
  probe
  misc_feature (1)..(25): SEQ ID NO: 5462; WAN024FM5_at; Start 586; Stop 610
cgtgcgaagggagatgaaacctatc

SEQ ID NO: 211906 - DNA, 25 bp, Artificial
  probe
  misc_feature (1)..(25): SEQ ID NO: 5462; WAN024FM5_at; Start 293; Stop 317
gatatgaaaatgctccagaaattgt

SEQ ID NO: 211907 - DNA, 25 bp, Artificial
  probe
  misc_feature (1)..(25): SEQ ID NO: 5462; WAN024FM5_at; Start 646; Stop 670
tgtatagctggatatcgtaatggga

SEQ ID NO: 211908 - DNA, 25 bp, Artificial
  probe
  misc_feature (1)..(25): SEQ ID NO: 5462; WAN024FM5_at; Start 438; Stop 462
tgaagatgggaaaatagatgcaata

SEQ ID NO: 211909 - DNA, 25 bp, Artificial
  probe
  misc_feature (1)..(25): SEQ ID NO: 6300; WAN024FM6_at; Start 602; Stop 626
tatctaaggtagcaattcaagtatt

SEQ ID NO: 211910 - DNA, 25 bp, Artificial
  probe
  misc_feature (1)..(25): SEQ ID NO: 6300; WAN024FM6_at; Start 109; Stop 133
gtgtcaatgttttcaaatgctgaag

SEQ ID NO: 211911 - DNA, 25 bp, Artificial
  probe
  misc_feature (1)..(25): SEQ ID NO: 6300; WAN024FM6_at; Start 854; Stop 878
caattgttagctttgactgtccaac

SEQ ID NO: 211912 - DNA, 25 bp, Artificial
  probe
  misc_feature (1)..(25): SEQ ID NO: 6300; WAN024FM6_at; Start 567; Stop 591
tggacgctttgataaacaaaaaggc

SEQ ID NO: 211913 - DNA, 25 bp, Artificial
  probe
  misc_feature (1)..(25): SEQ ID NO: 6300; WAN024FM6_at; Start 11; Stop 35
taggtatagtgagatggcaaatgca

SEQ ID NO: 211914 - DNA, 25 bp, Artificial
  probe
  misc_feature (1)..(25): SEQ ID NO: 6300; WAN024FM6_at; Start 295; Stop 319
ggaactgcaagtacattaggaatga

SEQ ID NO: 211915 - DNA, 25 bp, Artificial
  probe
  misc_feature (1)..(25): SEQ ID NO: 6300; WAN024FM6_at; Start 79; Stop 103
gagttgtcacaaaaatatgaggtcc

SEQ ID NO: 211916 - DNA, 25 bp, Artificial
  probe
  misc_feature (1)..(25): SEQ ID NO: 6300; WAN024FM6_at; Start 399; Stop 423
ggcatccagatttgcagataagata

SEQ ID NO: 211917 - DNA, 25 bp, Artificial
  probe
  misc_feature (1)..(25): SEQ ID NO: 6300; WAN024FM6_at; Start 28; Stop 52
caaatgcatactgctggtggtggag

SEQ ID NO: 211918 - DNA, 25 bp, Artificial
  probe
  misc_feature (1)..(25): SEQ ID NO: 6300; WAN024FM6_at; Start 383; Stop 407
gaattcaaaggtatgtggcatccag

SEQ ID NO: 211919 - DNA, 25 bp, Artificial
  probe
  misc_feature (1)..(25): SEQ ID NO: 6300; WAN024FM6_at; Start 65; Stop 89
taaatttagcaagtgagttgtcaca

SEQ ID NO: 211920 - DNA, 25 bp, Artificial
  probe
  misc_feature (1)..(25): SEQ ID NO: 6300; WAN024FM6_at; Start 278; Stop 302
taagtatgaattgtattggaactgc

SEQ ID NO: 211921 - DNA, 25 bp, Artificial
  probe
  misc_feature (1)..(25): SEQ ID NO: 6300; WAN024FM6_at; Start 94; Stop 118
tatgaggtccatctagtgtcaatgt

SEQ ID NO: 211922 - DNA, 25 bp, Artificial
  probe
  misc_feature (1)..(25): SEQ ID NO: 6300; WAN024FM6_at; Start 549; Stop 573
taagaaacttattactgttggacgc

SEQ ID NO: 211923 - DNA, 25 bp, Artificial
  probe
  misc_feature (1)..(25): SEQ ID NO: 6300; WAN024FM6_at; Start 682; Stop 706
aaacaaaatttgatcactgcattgg

SEQ ID NO: 211924 - DNA, 25 bp, Artificial
  probe
  misc_feature (1)..(25): SEQ ID NO: 6300; WAN024FM6_at; Start 652; Stop 676
gacatatatggttcgggtaatgatc

SEQ ID NO: 211925 - DNA, 25 bp, Artificial
  probe
  misc_feature (1)..(25): SEQ ID NO: 6300; WAN024FM6_at; Start 352; Stop 376
tcgatcgttgatttagatactagag

SEQ ID NO: 211926 - DNA, 25 bp, Artificial
  probe
  misc_feature (1)..(25): SEQ ID NO: 6300; WAN024FM6_at; Start 832; Stop 856
gaggcaaaacaatatggattaccaa

SEQ ID NO: 211927 - DNA, 25 bp, Artificial
  probe
  misc_feature (1)..(25): SEQ ID NO: 6300; WAN024FM6_at; Start 987; Stop 1011
gagattaagattttcacgaaatgcg

SEQ ID NO: 211928 - DNA, 25 bp, Artificial
  probe
  misc_feature (1)..(25): SEQ ID NO: 6300; WAN024FM6_at; Start 491; Stop 515
actatatttataactggatggatcc

SEQ ID NO: 211929 - DNA, 25 bp, Artificial
  probe
  misc_feature (1)..(25): SEQ ID NO: 6300; WAN024FM6_at; Start 255; Stop 279
tgatatcgttttgggcattggagta

SEQ ID NO: 211930 - DNA, 25 bp, Artificial
  probe
  misc_feature (1)..(25): SEQ ID NO: 6300; WAN024FM6_at; Start 426; Stop 450
tacacttactacatcggatagagag

SEQ ID NO: 211931 - DNA, 25 bp, Artificial
  probe
  misc_feature (1)..(25): SEQ ID NO: 6300; WAN024FM6_at; Start 695; Stop 719
tcactgcattggataaaggtggtgt

SEQ ID NO: 211932 - DNA, 25 bp, Artificial
  probe
  misc_feature (1)..(25): SEQ ID NO: 6300; WAN024FM6_at; Start 41; Stop 65
ctggtggtggagaaaaagtagcaat

SEQ ID NO: 211933 - DNA, 25 bp, Artificial
  probe
  misc_feature (1)..(25): SEQ ID NO: 6300; WAN024FM6_at; Start 630; Stop 654
aaataatccagattgggaatgggac

SEQ ID NO: 211934 - DNA, 25 bp, Artificial
  probe
  misc_feature (1)..(25): SEQ ID NO: 6300; WAN024FM6_at; Start 506; Stop 530
ggatggatccacttgtagtagataa

SEQ ID NO: 211935 - DNA, 25 bp, Artificial
  probe
  misc_feature (1)..(25): SEQ ID NO: 6300; WAN024FM6_at; Start 760; Stop 784
gaaaatatttatccaggacatgcta

SEQ ID NO: 211936 - DNA, 25 bp, Artificial
  probe
  misc_feature (1)..(25): SEQ ID NO: 6300; WAN024FM6_at; Start 308; Stop 332
cattaggaatgaaggcgaaatttgt

SEQ ID NO: 211937 - DNA, 25 bp, Artificial
  probe
  misc_feature (1)..(25): SEQ ID NO: 6300; WAN024FM6_at; Start 209; Stop 233
tagaagccgtgaaaaaattgagaac

SEQ ID NO: 211938 - DNA, 25 bp, Artificial
  probe
  misc_feature (1)..(25): SEQ ID NO: 6300; WAN024FM6_at; Start 173; Stop 197
tattttcaaaaaagctatcaatgag

SEQ ID NO: 211939 - DNA, 25 bp, Artificial
  probe
  misc_feature (1)..(25): SEQ ID NO: 6300; WAN024FM6_at; Start 227; Stop 251
tgagaacatacattattgaacatga

SEQ ID NO: 211940 - DNA, 25 bp, Artificial
  probe
  misc_feature (1)..(25): SEQ ID NO: 6300; WAN024FM6_at; Start 868; Stop 892
gactgtccaacaggtccatctgaga

SEQ ID NO: 211941 - DNA, 25 bp, Artificial
  probe
  misc_feature (1)..(25): SEQ ID NO: 6300; WAN024FM6_at; Start 772; Stop 796
ccaggacatgctatttatgtaatga

SEQ ID NO: 211942 - DNA, 25 bp, Artificial
  probe
  misc_feature (1)..(25): SEQ ID NO: 6300; WAN024FM6_at; Start 335; Stop 359
catgtgatcatacaaattcgatcgt

SEQ ID NO: 211943 - DNA, 25 bp, Artificial
  probe
  misc_feature (1)..(25): SEQ ID NO: 6438; WAN024FM7_at; Start 79; Stop 103
gaattatcaaaagtgtacgaggtac

SEQ ID NO: 211944 - DNA, 25 bp, Artificial
  probe
  misc_feature (1)..(25): SEQ ID NO: 6438; WAN024FM7_at; Start 502; Stop 526
aattggatgaattctatagatgcag

SEQ ID NO: 211945 - DNA, 25 bp, Artificial
  probe
  misc_feature (1)..(25): SEQ ID NO: 6438; WAN024FM7_at; Start 323; Stop 347
ctaaatttatttcttgtgatcacac

SEQ ID NO: 211946 - DNA, 25 bp, Artificial
  probe
  misc_feature (1)..(25): SEQ ID NO: 6438; WAN024FM7_at; Start 252; Stop 276
catagaagttctatttggaataggg

SEQ ID NO: 211947 - DNA, 25 bp, Artificial
  probe
  misc_feature (1)..(25): SEQ ID NO: 6438; WAN024FM7_at; Start 574; Stop 598
tttcacaagcaaaaaggttatgact

SEQ ID NO: 211948 - DNA, 25 bp, Artificial
  probe
  misc_feature (1)..(25): SEQ ID NO: 6438; WAN024FM7_at; Start 13; Stop 37
gctttagttaagtggattatagacg

SEQ ID NO: 211949 - DNA, 25 bp, Artificial
  probe
  misc_feature (1)..(25): SEQ ID NO: 6438; WAN024FM7_at; Start 94; Stop 118
tacgaggtacatctaatttcagtca

SEQ ID NO: 211950 - DNA, 25 bp, Artificial
  probe
  misc_feature (1)..(25): SEQ ID NO: 6438; WAN024FM7_at; Start 191; Stop 215
caatgagtaagaacttcgttaaggc

SEQ ID NO: 211951 - DNA, 25 bp, Artificial
  probe
  misc_feature (1)..(25): SEQ ID NO: 6438; WAN024FM7_at; Start 27; Stop 51
gattatagacggtacagatggtggc

SEQ ID NO: 211952 - DNA, 25 bp, Artificial
  probe
  misc_feature (1)..(25): SEQ ID NO: 6438; WAN024FM7_at; Start 878; Stop 902
caggtccagcagaaattgtattgga

SEQ ID NO: 211953 - DNA, 25 bp, Artificial
  probe
  misc_feature (1)..(25): SEQ ID NO: 6438; WAN024FM7_at; Start 291; Stop 315
tgtaggcataacaagtacaattggt

SEQ ID NO: 211954 - DNA, 25 bp, Artificial
  probe
  misc_feature (1)..(25): SEQ ID NO: 6438; WAN024FM7_at; Start 354; Stop 378
tatcgtagatatagacactactatg

SEQ ID NO: 211955 - DNA, 25 bp, Artificial
  probe
  misc_feature (1)..(25): SEQ ID NO: 6438; WAN024FM7_at; Start 377; Stop 401
tgaaaaaacttcaaagatatgtggg

SEQ ID NO: 211956 - DNA, 25 bp, Artificial
  probe
  misc_feature (1)..(25): SEQ ID NO: 6438; WAN024FM7_at; Start 50; Stop 74
gcttgaaagtttccacagatcttgc

SEQ ID NO: 211957 - DNA, 25 bp, Artificial
  probe
  misc_feature (1)..(25): SEQ ID NO: 6438; WAN024FM7_at; Start 896; Stop 920
tattggatggagaaaatggttatct

SEQ ID NO: 211958 - DNA, 25 bp, Artificial
  probe
  misc_feature (1)..(25): SEQ ID NO: 6438; WAN024FM7_at; Start 39; Stop 63
tacagatggtggcttgaaagtttcc

SEQ ID NO: 211959 - DNA, 25 bp, Artificial
  probe
  misc_feature (1)..(25): SEQ ID NO: 6438; WAN024FM7_at; Start 175; Stop 199
tcttcacaaaagatatcaatgagta

SEQ ID NO: 211960 - DNA, 25 bp, Artificial
  probe
  misc_feature (1)..(25): SEQ ID NO: 6438; WAN024FM7_at; Start 760; Stop 784
gataatatttatccagaccatacta

SEQ ID NO: 211961 - DNA, 25 bp, Artificial
  probe
  misc_feature (1)..(25): SEQ ID NO: 6438; WAN024FM7_at; Start 477; Stop 501
cccaaaaagagttgattacatttat

SEQ ID NO: 211962 - DNA, 25 bp, Artificial
  probe
  misc_feature (1)..(25): SEQ ID NO: 6438; WAN024FM7_at; Start 628; Stop 652
tcaatatatcctgaatggcaatggg

SEQ ID NO: 211963 - DNA, 25 bp, Artificial
  probe
  misc_feature (1)..(25): SEQ ID NO: 6438; WAN024FM7_at; Start 987; Stop 1011
gagattaggattttcgcaaaatgcg

SEQ ID NO: 211964 - DNA, 25 bp, Artificial
  probe
  misc_feature (1)..(25): SEQ ID NO: 6438; WAN024FM7_at; Start 137; Stop 161
tttttccactaaataatgcagttcg

SEQ ID NO: 211965 - DNA, 25 bp, Artificial
  probe
  misc_feature (1)..(25): SEQ ID NO: 6438; WAN024FM7_at; Start 652; Stop 676
gatatatatggttcgggtgatgagc

SEQ ID NO: 211966 - DNA, 25 bp, Artificial
  probe
  misc_feature (1)..(25): SEQ ID NO: 6438; WAN024FM7_at; Start 561; Stop 585
tactgtaggtagatttcacaagcaa

SEQ ID NO: 211967 - DNA, 25 bp, Artificial
  probe
  misc_feature (1)..(25): SEQ ID NO: 6438; WAN024FM7_at; Start 210; Stop 234
taaggcggtgaaattactaagaaca

SEQ ID NO: 211968 - DNA, 25 bp, Artificial
  probe
  misc_feature (1)..(25): SEQ ID NO: 6438; WAN024FM7_at; Start 63; Stop 87
cacagatcttgctaatgaattatca

SEQ ID NO: 211969 - DNA, 25 bp, Artificial
  probe
  misc_feature (1)..(25): SEQ ID NO: 6438; WAN024FM7_at; Start 274; Stop 298
gggatgactatgaatattgtaggca

SEQ ID NO: 211970 - DNA, 25 bp, Artificial
  probe
  misc_feature (1)..(25): SEQ ID NO: 6438; WAN024FM7_at; Start 420; Stop 444
gataattacactaactactgctgat

SEQ ID NO: 211971 - DNA, 25 bp, Artificial
  probe
  misc_feature (1)..(25): SEQ ID NO: 6438; WAN024FM7_at; Start 848; Stop 872
gactacctattgtcagttttaattg

SEQ ID NO: 211972 - DNA, 25 bp, Artificial
  probe
  misc_feature (1)..(25): SEQ ID NO: 6438; WAN024FM7_at; Start 865; Stop 889
tttaattgtcctacaggtccagcag

SEQ ID NO: 211973 - DNA, 25 bp, Artificial
  probe
  misc_feature (1)..(25): SEQ ID NO: 6438; WAN024FM7_at; Start 392; Stop 416
gatatgtgggagctaaactttcaga

SEQ ID NO: 211974 - DNA, 25 bp, Artificial
  probe
  misc_feature (1)..(25): SEQ ID NO: 6438; WAN024FM7_at; Start 832; Stop 856
gaagcaaaacaatatggactaccta

SEQ ID NO: 211975 - DNA, 25 bp, Artificial
  probe
  misc_feature (1)..(25): SEQ ID NO: 6438; WAN024FM7_at; Start 1041; Stop 1065
gaacattactaaacaatggattgaa

SEQ ID NO: 211976 - DNA, 25 bp, Artificial
  probe
  misc_feature (1)..(25): SEQ ID NO: 6438; WAN024FM7_at; Start 337; Stop 361
tgtgatcacactaattctatcgtag

SEQ ID NO: 211977 - DNA, 25 bp, Artificial
  probe
  misc_feature (1)..(25): SEQ ID NO: 6319; WAN024FM8_at; Start 204; Stop 228
gaaagaagtatcatcttcagaagaa

SEQ ID NO: 211978 - DNA, 25 bp, Artificial
  probe
  misc_feature (1)..(25): SEQ ID NO: 6319; WAN024FM8_at; Start 366; Stop 390
tactttttctgatgatggcgcggga

SEQ ID NO: 211979 - DNA, 25 bp, Artificial
  probe
  misc_feature (1)..(25): SEQ ID NO: 6319; WAN024FM8_at; Start 434; Stop 458
ctcagaaaaaagatataaaagaatt

SEQ ID NO: 211980 - DNA, 25 bp, Artificial
  probe
  misc_feature (1)..(25): SEQ ID NO: 6319; WAN024FM8_at; Start 143; Stop 167
cagaaaaatggaataaagtgagaca

SEQ ID NO: 211981 - DNA, 25 bp, Artificial
  probe
  misc_feature (1)..(25): SEQ ID NO: 6319; WAN024FM8_at; Start 63; Stop 87
tggaaaacaaatgattacaaaagaa

SEQ ID NO: 211982 - DNA, 25 bp, Artificial
  probe
  misc_feature (1)..(25): SEQ ID NO: 6319; WAN024FM8_at; Start 194; Stop 218
tcataactgtgaaagaagtatcatc

SEQ ID NO: 211983 - DNA, 25 bp, Artificial
  probe
  misc_feature (1)..(25): SEQ ID NO: 6319; WAN024FM8_at; Start 27; Stop 51
gatctttgtaactggggtactcgcc

SEQ ID NO: 211984 - DNA, 25 bp, Artificial
  probe
  misc_feature (1)..(25): SEQ ID NO: 6319; WAN024FM8_at; Start 421; Stop 445
gaagagttgaattctcagaaaaaag

SEQ ID NO: 211985 - DNA, 25 bp, Artificial
  probe
  misc_feature (1)..(25): SEQ ID NO: 6319; WAN024FM8_at; Start 276; Stop 300
tcgtgaagaagaagtgaagaaattc

SEQ ID NO: 211986 - DNA, 25 bp, Artificial
  probe
  misc_feature (1)..(25): SEQ ID NO: 6319; WAN024FM8_at; Start 161; Stop 185
tgagacaagtagaaacggaagaagc

SEQ ID NO: 211987 - DNA, 25 bp, Artificial
  probe
  misc_feature (1)..(25): SEQ ID NO: 6319; WAN024FM8_at; Start 328; Stop 352
gactctaagcataataaactaattg

SEQ ID NO: 211988 - DNA, 25 bp, Artificial
  probe
  misc_feature (1)..(25): SEQ ID NO: 6319; WAN024FM8_at; Start 121; Stop 145
tatacgctttcttctagtgatacag

SEQ ID NO: 211989 - DNA, 25 bp, Artificial
  probe
  misc_feature (1)..(25): SEQ ID NO: 6319; WAN024FM8_at; Start 18; Stop 42
tattgctttgatctttgtaactggg

SEQ ID NO: 211990 - DNA, 25 bp, Artificial
  probe
  misc_feature (1)..(25): SEQ ID NO: 6319; WAN024FM8_at; Start 383; Stop 407
gcgcgggatttgtggtagcaaactt

SEQ ID NO: 211991 - DNA, 25 bp, Artificial
  probe
  misc_feature (1)..(25): SEQ ID NO: 6319; WAN024FM8_at; Start 412; Stop 436
tacggtaaagaagagttgaattctc

SEQ ID NO: 211992 - DNA, 25 bp, Artificial
  probe
  misc_feature (1)..(25): SEQ ID NO: 6319; WAN024FM8_at; Start 314; Stop 338
gagacaccatagaggactctaagca

SEQ ID NO: 211993 - DNA, 25 bp, Artificial
  probe
  misc_feature (1)..(25): SEQ ID NO: 6319; WAN024FM8_at; Start 296; Stop 320
aattcaataatggtttaggagacac

SEQ ID NO: 211994 - DNA, 25 bp, Artificial
  probe
  misc_feature (1)..(25): SEQ ID NO: 6319; WAN024FM8_at; Start 393; Stop 417
tgtggtagcaaactttgactacggt

SEQ ID NO: 211995 - DNA, 25 bp, Artificial
  probe
  misc_feature (1)..(25): SEQ ID NO: 6319; WAN024FM8_at; Start 156; Stop 180
taaagtgagacaagtagaaacggaa

SEQ ID NO: 211996 - DNA, 25 bp, Artificial
  probe
  misc_feature (1)..(25): SEQ ID NO: 6319; WAN024FM8_at; Start 309; Stop 333
tttaggagacaccatagaggactct

SEQ ID NO: 211997 - DNA, 25 bp, Artificial
  probe
  misc_feature (1)..(25): SEQ ID NO: 6319; WAN024FM8_at; Start 242; Stop 266
tcattgcaaatggagctgctacggg

SEQ ID NO: 211998 - DNA, 25 bp, Artificial
  probe
  misc_feature (1)..(25): SEQ ID NO: 6319; WAN024FM8_at; Start 323; Stop 347
tagaggactctaagcataataaact

SEQ ID NO: 211999 - DNA, 25 bp, Artificial
  probe
  misc_feature (1)..(25): SEQ ID NO: 6319; WAN024FM8_at; Start 130; Stop 154
tcttctagtgatacagaaaaatgga

SEQ ID NO: 212000 - DNA, 25 bp, Artificial
  probe
  misc_feature (1)..(25): SEQ ID NO: 6319; WAN024FM8_at; Start 181; Stop 205
gaagctatatacttcataactgtga

SEQ ID NO: 212001 - DNA, 25 bp, Artificial
  probe
  misc_feature (1)..(25): SEQ ID NO: 6319; WAN024FM8_at; Start 220; Stop 244
tcagaagaagtattttcaaacatca

SEQ ID NO: 212002 - DNA, 25 bp, Artificial
  probe
  misc_feature (1)..(25): SEQ ID NO: 6319; WAN024FM8_at; Start 268; Stop 292
ttcggagttcgtgaagaagaagtga

SEQ ID NO: 212003 - DNA, 25 bp, Artificial
  probe
  misc_feature (1)..(25): SEQ ID NO: 6319; WAN024FM8_at; Start 85; Stop 109
gaaaatatcaataagccaacggtag

SEQ ID NO: 212004 - DNA, 25 bp, Artificial
  probe
  misc_feature (1)..(25): SEQ ID NO: 6319; WAN024FM8_at; Start 170; Stop 194
tagaaacggaagaagctatatactt

SEQ ID NO: 212005 - DNA, 25 bp, Artificial
  probe
  misc_feature (1)..(25): SEQ ID NO: 6319; WAN024FM8_at; Start 104; Stop 128
cggtagagttaacaatctatacgct

SEQ ID NO: 212006 - DNA, 25 bp, Artificial
  probe
  misc_feature (1)..(25): SEQ ID NO: 6319; WAN024FM8_at; Start 398; Stop 422
tagcaaactttgactacggtaaaga

SEQ ID NO: 212007 - DNA, 25 bp, Artificial
  probe
  misc_feature (1)..(25): SEQ ID NO: 6319; WAN024FM8_at; Start 370; Stop 394
ttttctgatgatggcgcgggatttg

SEQ ID NO: 212008 - DNA, 25 bp, Artificial
  probe
  misc_feature (1)..(25): SEQ ID NO: 6319; WAN024FM8_at; Start 109; Stop 133
gagttaacaatctatacgctttctt

SEQ ID NO: 212009 - DNA, 25 bp, Artificial
  probe
  misc_feature (1)..(25): SEQ ID NO: 6319; WAN024FM8_at; Start 235; Stop 259
tcaaacatcattgcaaatggagctg

SEQ ID NO: 212010 - DNA, 25 bp, Artificial
  probe
  misc_feature (1)..(25): SEQ ID NO: 6319; WAN024FM8_at; Start 96; Stop 120
taagccaacggtagagttaacaatc

SEQ ID NO: 212011 - DNA, 25 bp, Artificial
  probe
  misc_feature (1)..(25): SEQ ID NO: 626; WAN024FM9_at; Start 264; Stop 288
tgtagtgttttctattgctccggct

SEQ ID NO: 212012 - DNA, 25 bp, Artificial
  probe
  misc_feature (1)..(25): SEQ ID NO: 626; WAN024FM9_at; Start 835; Stop 859
gaagctaaacagtatggactaccga

SEQ ID NO: 212013 - DNA, 25 bp, Artificial
  probe
  misc_feature (1)..(25): SEQ ID NO: 626; WAN024FM9_at; Start 1047; Stop 1071
gattataaagcagtgggaagactta

SEQ ID NO: 212014 - DNA, 25 bp, Artificial
  probe
  misc_feature (1)..(25): SEQ ID NO: 626; WAN024FM9_at; Start 418; Stop 442
gacaaaattgtaactttgactgagg

SEQ ID NO: 212015 - DNA, 25 bp, Artificial
  probe
  misc_feature (1)..(25): SEQ ID NO: 626; WAN024FM9_at; Start 590; Stop 614
aaggatatgactatttagctaaagc

SEQ ID NO: 212016 - DNA, 25 bp, Artificial
  probe
  misc_feature (1)..(25): SEQ ID NO: 626; WAN024FM9_at; Start 514; Stop 538
gaagacattaataacattcccgcat

SEQ ID NO: 212017 - DNA, 25 bp, Artificial
  probe
  misc_feature (1)..(25): SEQ ID NO: 626; WAN024FM9_at; Start 714; Stop 738
aggtggcgttttatcgcgggttcat

SEQ ID NO: 212018 - DNA, 25 bp, Artificial
  probe
  misc_feature (1)..(25): SEQ ID NO: 626; WAN024FM9_at; Start 934; Stop 958
tacgatgttgattacatgagtagaa

SEQ ID NO: 212019 - DNA, 25 bp, Artificial
  probe
  misc_feature (1)..(25): SEQ ID NO: 626; WAN024FM9_at; Start 381; Stop 405
tcgcgagatacaaagatatattggg

SEQ ID NO: 212020 - DNA, 25 bp, Artificial
  probe
  misc_feature (1)..(25): SEQ ID NO: 626; WAN024FM9_at; Start 72; Stop 96
ggctaatgaattttctcaaaaccac

SEQ ID NO: 212021 - DNA, 25 bp, Artificial
  probe
  misc_feature (1)..(25): SEQ ID NO: 626; WAN024FM9_at; Start 844; Stop 868
cagtatggactaccgattgttagtt

SEQ ID NO: 212022 - DNA, 25 bp, Artificial
  probe
  misc_feature (1)..(25): SEQ ID NO: 626; WAN024FM9_at; Start 220; Stop 244
gctatgctgaagttaagaaaacact

SEQ ID NO: 212023 - DNA, 25 bp, Artificial
  probe
  misc_feature (1)..(25): SEQ ID NO: 626; WAN024FM9_at; Start 297; Stop 321
tattatctttttagcaacgttagga

SEQ ID NO: 212024 - DNA, 25 bp, Artificial
  probe
  misc_feature (1)..(25): SEQ ID NO: 626; WAN024FM9_at; Start 655; Stop 679
gacatatacggttcgggaaacgagc

SEQ ID NO: 212025 - DNA, 25 bp, Artificial
  probe
  misc_feature (1)..(25): SEQ ID NO: 626; WAN024FM9_at; Start 241; Stop 265
cacttgataaagaatgaaattgatg

SEQ ID NO: 212026 - DNA, 25 bp, Artificial
  probe
  misc_feature (1)..(25): SEQ ID NO: 626; WAN024FM9_at; Start 868; Stop 892
tttaaatgtccaacgggtccatcag

SEQ ID NO: 212027 - DNA, 25 bp, Artificial
  probe
  misc_feature (1)..(25): SEQ ID NO: 626; WAN024FM9_at; Start 497; Stop 521
caatctataattggatggaagacat

SEQ ID NO: 212028 - DNA, 25 bp, Artificial
  probe
  misc_feature (1)..(25): SEQ ID NO: 626; WAN024FM9_at; Start 634; Stop 658
aaatataaagactgggaatgggaca

SEQ ID NO: 212029 - DNA, 25 bp, Artificial
  probe
  misc_feature (1)..(25): SEQ ID NO: 626; WAN024FM9_at; Start 370; Stop 394
gacactttcagtcgcgagatacaaa

SEQ ID NO: 212030 - DNA, 25 bp, Artificial
  probe
  misc_feature (1)..(25): SEQ ID NO: 626; WAN024FM9_at; Start 361; Stop 385
gagtttcaagacactttcagtcgcg

SEQ ID NO: 212031 - DNA, 25 bp, Artificial
  probe
  misc_feature (1)..(25): SEQ ID NO: 626; WAN024FM9_at; Start 279; Stop 303
tgctccggctacaaatattattatc

SEQ ID NO: 212032 - DNA, 25 bp, Artificial
  probe
  misc_feature (1)..(25): SEQ ID NO: 626; WAN024FM9_at; Start 205; Stop 229
aaagtgataattccagctatgctga

SEQ ID NO: 212033 - DNA, 25 bp, Artificial
  probe
  misc_feature (1)..(25): SEQ ID NO: 626; WAN024FM9_at; Start 548; Stop 572
aaagcaagagcattataacagttgg

SEQ ID NO: 212034 - DNA, 25 bp, Artificial
  probe
  misc_feature (1)..(25): SEQ ID NO: 626; WAN024FM9_at; Start 346; Stop 370
gaccaccatagtttagagtttcaag

SEQ ID NO: 212035 - DNA, 25 bp, Artificial
  probe
  misc_feature (1)..(25): SEQ ID NO: 626; WAN024FM9_at; Start 50; Stop 74
ctgaaaaagttgctataaatatggc

SEQ ID NO: 212036 - DNA, 25 bp, Artificial
  probe
  misc_feature (1)..(25): SEQ ID NO: 626; WAN024FM9_at; Start 563; Stop 587
taacagttggaagaatagaatatca

SEQ ID NO: 212037 - DNA, 25 bp, Artificial
  probe
  misc_feature (1)..(25): SEQ ID NO: 626; WAN024FM9_at; Start 1065; Stop 1089
agacttaattgaagaaatgacaggg

SEQ ID NO: 212038 - DNA, 25 bp, Artificial
  probe
  misc_feature (1)..(25): SEQ ID NO: 626; WAN024FM9_at; Start 126; Stop 150
tgaagacaagaacataaattatgac

SEQ ID NO: 212039 - DNA, 25 bp, Artificial
  probe
  misc_feature (1)..(25): SEQ ID NO: 626; WAN024FM9_at; Start 1003; Stop 1027
tcagatgaatcaatgaaagatactg

SEQ ID NO: 212040 - DNA, 25 bp, Artificial
  probe
  misc_feature (1)..(25): SEQ ID NO: 626; WAN024FM9_at; Start 330; Stop 354
aaaaactgtcttttgtgaccaccat

SEQ ID NO: 212041 - DNA, 25 bp, Artificial
  probe
  misc_feature (1)..(25): SEQ ID NO: 626; WAN024FM9_at; Start 880; Stop 904
acgggtccatcagaaatagttttag

SEQ ID NO: 212042 - DNA, 25 bp, Artificial
  probe
  misc_feature (1)..(25): SEQ ID NO: 626; WAN024FM9_at; Start 154; Stop 178
tcatctgatgttgaagttgagtcct

SEQ ID NO: 212043 - DNA, 25 bp, Artificial
  probe
  misc_feature (1)..(25): SEQ ID NO: 626; WAN024FM9_at; Start 531; Stop 555
tcccgcatatactaataaaagcaag

SEQ ID NO: 212044 - DNA, 25 bp, Artificial
  probe
  misc_feature (1)..(25): SEQ ID NO: 626; WAN024FM9_at; Start 431; Stop 455
ctttgactgaggaagataaaaatag

SEQ ID NO: 212045 - DNA, 25 bp, Artificial
  probe
  misc_feature (1)..(25): SEQ ID NO: 2624; WAN024FMA_at; Start 374; Stop 398
tgggaattattgcaagtgactatag

SEQ ID NO: 212046 - DNA, 25 bp, Artificial
  probe
  misc_feature (1)..(25): SEQ ID NO: 2624; WAN024FMA_at; Start 214; Stop 238
cagtttgtactattgctaaattggc

SEQ ID NO: 212047 - DNA, 25 bp, Artificial
  probe
  misc_feature (1)..(25): SEQ ID NO: 2624; WAN024FMA_at; Start 255; Stop 279
gaatttacttgacggtgttgacgga

SEQ ID NO: 212048 - DNA, 25 bp, Artificial
  probe
  misc_feature (1)..(25): SEQ ID NO: 2624; WAN024FMA_at; Start 73; Stop 97
tttgctttctatgtaggtagacctc

SEQ ID NO: 212049 - DNA, 25 bp, Artificial
  probe
  misc_feature (1)..(25): SEQ ID NO: 2624; WAN024FMA_at; Start 310; Stop 334
cctatgggaagtgttatagatgcaa

SEQ ID NO: 212050 - DNA, 25 bp, Artificial
  probe
  misc_feature (1)..(25): SEQ ID NO: 2624; WAN024FMA_at; Start 196; Stop 220
gtaacagtaagttctaatcagtttg

SEQ ID NO: 212051 - DNA, 25 bp, Artificial
  probe
  misc_feature (1)..(25): SEQ ID NO: 2624; WAN024FMA_at; Start 398; Stop 422
gtcaaacactattctttacacaaaa

SEQ ID NO: 212052 - DNA, 25 bp, Artificial
  probe
  misc_feature (1)..(25): SEQ ID NO: 2624; WAN024FMA_at; Start 575; Stop 599
taacctctataacaggatttgctca

SEQ ID NO: 212053 - DNA, 25 bp, Artificial
  probe
  misc_feature (1)..(25): SEQ ID NO: 2624; WAN024FMA_at; Start 126; Stop 150
taaaacaaaaatgacaccgaatcag

SEQ ID NO: 212054 - DNA, 25 bp, Artificial
  probe
  misc_feature (1)..(25): SEQ ID NO: 2624; WAN024FMA_at; Start 285; Stop 309
tgctcgtttcaagggaattacctct

SEQ ID NO: 212055 - DNA, 25 bp, Artificial
  probe
  misc_feature (1)..(25): SEQ ID NO: 2624; WAN024FMA_at; Start 565; Stop 589
gcacttaatgtaacctctataacag

SEQ ID NO: 212056 - DNA, 25 bp, Artificial
  probe
  misc_feature (1)..(25): SEQ ID NO: 2624; WAN024FMA_at; Start 676; Stop 700
gttatggtgatctctattaaaaaga

SEQ ID NO: 212057 - DNA, 25 bp, Artificial
  probe
  misc_feature (1)..(25): SEQ ID NO: 2624; WAN024FMA_at; Start 383; Stop 407
ttgcaagtgactatagtcaaacact

SEQ ID NO: 212058 - DNA, 25 bp, Artificial
  probe
  misc_feature (1)..(25): SEQ ID NO: 2624; WAN024FMA_at; Start 500; Stop 524
ctgtaggaagtaagaatagtgagca

SEQ ID NO: 212059 - DNA, 25 bp, Artificial
  probe
  misc_feature (1)..(25): SEQ ID NO: 2624; WAN024FMA_at; Start 346; Stop 370
gctgcaatgtatttatcattcctca

SEQ ID NO: 212060 - DNA, 25 bp, Artificial
  probe
  misc_feature (1)..(25): SEQ ID NO: 2624; WAN024FMA_at; Start 616; Stop 640
gcaatattattaaaattgagcgact

SEQ ID NO: 212061 - DNA, 25 bp, Artificial
  probe
  misc_feature (1)..(25): SEQ ID NO: 2624; WAN024FMA_at; Start 88; Stop 112
ggtagacctctatcatacatattga

SEQ ID NO: 212062 - DNA, 25 bp, Artificial
  probe
  misc_feature (1)..(25): SEQ ID NO: 2624; WAN024FMA_at; Start 105; Stop 129
catattgacaattccttttcttaaa

SEQ ID NO: 212063 - DNA, 25 bp, Artificial
  probe
  misc_feature (1)..(25): SEQ ID NO: 2624; WAN024FMA_at; Start 17; Stop 41
gtatagaacaaaaaacgatgacgga

SEQ ID NO: 212064 - DNA, 25 bp, Artificial
  probe
  misc_feature (1)..(25): SEQ ID NO: 2624; WAN024FMA_at; Start 556; Stop 580
gaaatgattgcacttaatgtaacct

SEQ ID NO: 212065 - DNA, 25 bp, Artificial
  probe
  misc_feature (1)..(25): SEQ ID NO: 2624; WAN024FMA_at; Start 332; Stop 356
caatggcaggctatgctgcaatgta

SEQ ID NO: 212066 - DNA, 25 bp, Artificial
  probe
  misc_feature (1)..(25): SEQ ID NO: 2624; WAN024FMA_at; Start 482; Stop 506
tgcacaaagctataaatactgtagg

SEQ ID NO: 212067 - DNA, 25 bp, Artificial
  probe
  misc_feature (1)..(25): SEQ ID NO: 2624; WAN024FMA_at; Start 628; Stop 652
aaattgagcgacttatttacactag

SEQ ID NO: 212068 - DNA, 25 bp, Artificial
  probe
  misc_feature (1)..(25): SEQ ID NO: 2624; WAN024FMA_at; Start 182; Stop 206
tcggaacagctttggtaacagtaag

SEQ ID NO: 212069 - DNA, 25 bp, Artificial
  probe
  misc_feature (1)..(25): SEQ ID NO: 2624; WAN024FMA_at; Start 277; Stop 301
ggaaatgttgctcgtttcaagggaa

SEQ ID NO: 212070 - DNA, 25 bp, Artificial
  probe
  misc_feature (1)..(25): SEQ ID NO: 2624; WAN024FMA_at; Start 266; Stop 290
acggtgttgacggaaatgttgctcg

SEQ ID NO: 212071 - DNA, 25 bp, Artificial
  probe
  misc_feature (1)..(25): SEQ ID NO: 2624; WAN024FMA_at; Start 431; Stop 455
taattttagggtcactatctggtgt

SEQ ID NO: 212072 - DNA, 25 bp, Artificial
  probe
  misc_feature (1)..(25): SEQ ID NO: 2624; WAN024FMA_at; Start 513; Stop 537
gaatagtgagcagtacaaaggtaga

SEQ ID NO: 212073 - DNA, 25 bp, Artificial
  probe
  misc_feature (1)..(25): SEQ ID NO: 2624; WAN024FMA_at; Start 468; Stop 492
tcctagattaattatgcacaaagct

SEQ ID NO: 212074 - DNA, 25 bp, Artificial
  probe
  misc_feature (1)..(25): SEQ ID NO: 2624; WAN024FMA_at; Start 142; Stop 166
ccgaatcagatttctatattgtcta

SEQ ID NO: 212075 - DNA, 25 bp, Artificial
  probe
  misc_feature (1)..(25): SEQ ID NO: 2624; WAN024FMA_at; Start 168; Stop 192
tgtacctttaattatcggaacagct

SEQ ID NO: 212076 - DNA, 25 bp, Artificial
  probe
  misc_feature (1)..(25): SEQ ID NO: 2624; WAN024FMA_at; Start 595; Stop 619
gctcaattgtttatgcttattgcaa

SEQ ID NO: 212077 - DNA, 25 bp, Artificial
  probe
  misc_feature (1)..(25): SEQ ID NO: 2624; WAN024FMA_at; Start 247; Stop 271
ttcttatggaatttacttgacggtg

SEQ ID NO: 212078 - DNA, 25 bp, Artificial
  probe
  misc_feature (1)..(25): SEQ ID NO: 2624; WAN024FMA_at; Start 298; Stop 322
ggaattacctctcctatgggaagtg

SEQ ID NO: 212079 - DNA, 25 bp, Artificial
  probe
  misc_feature (1)..(25): SEQ ID NO: 5509; WAN024FMC_at; Start 189; Stop 213
tctggtgttgataaacggtcatacc

SEQ ID NO: 212080 - DNA, 25 bp, Artificial
  probe
  misc_feature (1)..(25): SEQ ID NO: 5509; WAN024FMC_at; Start 37; Stop 61
gaacttctgggtctggattcactgg

SEQ ID NO: 212081 - DNA, 25 bp, Artificial
  probe
  misc_feature (1)..(25): SEQ ID NO: 5509; WAN024FMC_at; Start 87; Stop 111
tctggagttggtttatctggtgttg

SEQ ID NO: 212082 - DNA, 25 bp, Artificial
  probe
  misc_feature (1)..(25): SEQ ID NO: 5509; WAN024FMC_at; Start 3; Stop 27
ggcaattcctctctcttacctgtct

SEQ ID NO: 212083 - DNA, 25 bp, Artificial
  probe
  misc_feature (1)..(25): SEQ ID NO: 5509; WAN024FMC_at; Start 132; Stop 156
tctgggtttggtgtcggaacacttg

SEQ ID NO: 212084 - DNA, 25 bp, Artificial
  probe
  misc_feature (1)..(25): SEQ ID NO: 5509; WAN024FMC_at; Start 177; Stop 201
gggattggtttttctggtgttgata

SEQ ID NO: 212085 - DNA, 25 bp, Artificial
  probe
  misc_feature (1)..(25): SEQ ID NO: 5509; WAN024FMC_at; Start 16; Stop 40
tcttacctgtctcataagtcggaac

SEQ ID NO: 212086 - DNA, 25 bp, Artificial
  probe
  misc_feature (1)..(25): SEQ ID NO: 5509; WAN024FMC_at; Start 56; Stop 80
cactggagtttcagtttttggagta

SEQ ID NO: 212087 - DNA, 25 bp, Artificial
  probe
  misc_feature (1)..(25): SEQ ID NO: 5509; WAN024FMC_at; Start 145; Stop 169
tcggaacacttggatgctctggatt

SEQ ID NO: 212088 - DNA, 25 bp, Artificial
  probe
  misc_feature (1)..(25): SEQ ID NO: 5509; WAN024FMC_at; Start 52; Stop 76
gattcactggagtttcagtttttgg

SEQ ID NO: 212089 - DNA, 25 bp, Artificial
  probe
  misc_feature (1)..(25): SEQ ID NO: 5509; WAN024FMC_at; Start 39; Stop 63
acttctgggtctggattcactggag

SEQ ID NO: 212090 - DNA, 25 bp, Artificial
  probe
  misc_feature (1)..(25): SEQ ID NO: 5509; WAN024FMC_at; Start 118; Stop 142
cttgatttggtagttctgggtttgg

SEQ ID NO: 212091 - DNA, 25 bp, Artificial
  probe
  misc_feature (1)..(25): SEQ ID NO: 5509; WAN024FMC_at; Start 72; Stop 96
tttggagtacctggttctggagttg

SEQ ID NO: 212092 - DNA, 25 bp, Artificial
  probe
  misc_feature (1)..(25): SEQ ID NO: 5509; WAN024FMC_at; Start 139; Stop 163
ttggtgtcggaacacttggatgctc

SEQ ID NO: 212093 - DNA, 25 bp, Artificial
  probe
  misc_feature (1)..(25): SEQ ID NO: 5509; WAN024FMC_at; Start 143; Stop 167
tgtcggaacacttggatgctctgga

SEQ ID NO: 212094 - DNA, 25 bp, Artificial
  probe
  misc_feature (1)..(25): SEQ ID NO: 5509; WAN024FMC_at; Start 46; Stop 70
ggtctggattcactggagtttcagt

SEQ ID NO: 212095 - DNA, 25 bp, Artificial
  probe
  misc_feature (1)..(25): SEQ ID NO: 5509; WAN024FMC_at; Start 98; Stop 122
tttatctggtgttggagtctcttga

SEQ ID NO: 212096 - DNA, 25 bp, Artificial
  probe
  misc_feature (1)..(25): SEQ ID NO: 5509; WAN024FMC_at; Start 23; Stop 47
tgtctcataagtcggaacttctggg

SEQ ID NO: 212097 - DNA, 25 bp, Artificial
  probe
  misc_feature (1)..(25): SEQ ID NO: 5509; WAN024FMC_at; Start 19; Stop 43
tacctgtctcataagtcggaacttc

SEQ ID NO: 212098 - DNA, 25 bp, Artificial
  probe
  misc_feature (1)..(25): SEQ ID NO: 5509; WAN024FMC_at; Start 95; Stop 119
tggtttatctggtgttggagtctct

SEQ ID NO: 212099 - DNA, 25 bp, Artificial
  probe
  misc_feature (1)..(25): SEQ ID NO: 5509; WAN024FMC_at; Start 28; Stop 52
cataagtcggaacttctgggtctgg

SEQ ID NO: 212100 - DNA, 25 bp, Artificial
  probe
  misc_feature (1)..(25): SEQ ID NO: 5509; WAN024FMC_at; Start 128; Stop 152
tagttctgggtttggtgtcggaaca

SEQ ID NO: 212101 - DNA, 25 bp, Artificial
  probe
  misc_feature (1)..(25): SEQ ID NO: 5509; WAN024FMC_at; Start 81; Stop 105
cctggttctggagttggtttatctg

SEQ ID NO: 212102 - DNA, 25 bp, Artificial
  probe
  misc_feature (1)..(25): SEQ ID NO: 5509; WAN024FMC_at; Start 151; Stop 175
cacttggatgctctggatttggttg

SEQ ID NO: 212103 - DNA, 25 bp, Artificial
  probe
  misc_feature (1)..(25): SEQ ID NO: 5509; WAN024FMC_at; Start 1; Stop 25
ttggcaattcctctctcttacctgt

SEQ ID NO: 212104 - DNA, 25 bp, Artificial
  probe
  misc_feature (1)..(25): SEQ ID NO: 5509; WAN024FMC_at; Start 33; Stop 57
gtcggaacttctgggtctggattca

SEQ ID NO: 212105 - DNA, 25 bp, Artificial
  probe
  misc_feature (1)..(25): SEQ ID NO: 5509; WAN024FMC_at; Start 194; Stop 218
tgttgataaacggtcataccttacc

SEQ ID NO: 212106 - DNA, 25 bp, Artificial
  probe
  misc_feature (1)..(25): SEQ ID NO: 5509; WAN024FMC_at; Start 67; Stop 91
cagtttttggagtacctggttctgg

SEQ ID NO: 212107 - DNA, 25 bp, Artificial
  probe
  misc_feature (1)..(25): SEQ ID NO: 5509; WAN024FMC_at; Start 30; Stop 54
taagtcggaacttctgggtctggat

SEQ ID NO: 212108 - DNA, 25 bp, Artificial
  probe
  misc_feature (1)..(25): SEQ ID NO: 5509; WAN024FMC_at; Start 158; Stop 182
atgctctggatttggttgtgggatt

SEQ ID NO: 212109 - DNA, 25 bp, Artificial
  probe
  misc_feature (1)..(25): SEQ ID NO: 5509; WAN024FMC_at; Start 213; Stop 237
cttaccgttatttctttatcactag

SEQ ID NO: 212110 - DNA, 25 bp, Artificial
  probe
  misc_feature (1)..(25): SEQ ID NO: 5509; WAN024FMC_at; Start 112; Stop 136
gagtctcttgatttggtagttctgg

SEQ ID NO: 212111 - DNA, 25 bp, Artificial
  probe
  misc_feature (1)..(25): SEQ ID NO: 5509; WAN024FMC_at; Start 43; Stop 67
ctgggtctggattcactggagtttc

SEQ ID NO: 212112 - DNA, 25 bp, Artificial
  probe
  misc_feature (1)..(25): SEQ ID NO: 5509; WAN024FMC_at; Start 148; Stop 172
gaacacttggatgctctggatttgg

SEQ ID NO: 212113 - DNA, 25 bp, Artificial
  probe
  misc_feature (1)..(25): SEQ ID NO: 4914; WAN024FMD_at; Start 207; Stop 231
gataactcggtcttctttgtcctca

SEQ ID NO: 212114 - DNA, 25 bp, Artificial
  probe
  misc_feature (1)..(25): SEQ ID NO: 4914; WAN024FMD_at; Start 225; Stop 249
gtcctcagttgttgttttcccttca

SEQ ID NO: 212115 - DNA, 25 bp, Artificial
  probe
  misc_feature (1)..(25): SEQ ID NO: 4914; WAN024FMD_at; Start 316; Stop 340
aacttctcttgcctaccttctttat

SEQ ID NO: 212116 - DNA, 25 bp, Artificial
  probe
  misc_feature (1)..(25): SEQ ID NO: 4914; WAN024FMD_at; Start 3; Stop 27
gaacaacatcttcttttacattttg

SEQ ID NO: 212117 - DNA, 25 bp, Artificial
  probe
  misc_feature (1)..(25): SEQ ID NO: 4914; WAN024FMD_at; Start 170; Stop 194
caggagttgctaccaaggtgtatgt

SEQ ID NO: 212118 - DNA, 25 bp, Artificial
  probe
  misc_feature (1)..(25): SEQ ID NO: 4914; WAN024FMD_at; Start 264; Stop 288
tgtggtatactcagaacctatcgct

SEQ ID NO: 212119 - DNA, 25 bp, Artificial
  probe
  misc_feature (1)..(25): SEQ ID NO: 4914; WAN024FMD_at; Start 292; Stop 316
tcagcttttataacagactctacca

SEQ ID NO: 212120 - DNA, 25 bp, Artificial
  probe
  misc_feature (1)..(25): SEQ ID NO: 4914; WAN024FMD_at; Start 259; Stop 283
gattctgtggtatactcagaaccta

SEQ ID NO: 212121 - DNA, 25 bp, Artificial
  probe
  misc_feature (1)..(25): SEQ ID NO: 4914; WAN024FMD_at; Start 81; Stop 105
tagaggttgctgttttgggaaccac

SEQ ID NO: 212122 - DNA, 25 bp, Artificial
  probe
  misc_feature (1)..(25): SEQ ID NO: 4914; WAN024FMD_at; Start 230; Stop 254
cagttgttgttttcccttcaatagt

SEQ ID NO: 212123 - DNA, 25 bp, Artificial
  probe
  misc_feature (1)..(25): SEQ ID NO: 4914; WAN024FMD_at; Start 178; Stop 202
gctaccaaggtgtatgttgttttcc

SEQ ID NO: 212124 - DNA, 25 bp, Artificial
  probe
  misc_feature (1)..(25): SEQ ID NO: 4914; WAN024FMD_at; Start 106; Stop 130
tgtttcctcaacattctcacggtag

SEQ ID NO: 212125 - DNA, 25 bp, Artificial
  probe
  misc_feature (1)..(25): SEQ ID NO: 4914; WAN024FMD_at; Start 28; Stop 52
gttcgtaactttatcaacgtaatga

SEQ ID NO: 212126 - DNA, 25 bp, Artificial
  probe
  misc_feature (1)..(25): SEQ ID NO: 4914; WAN024FMD_at; Start 139; Stop 163
aactgttgcaccgtcttctggtacg

SEQ ID NO: 212127 - DNA, 25 bp, Artificial
  probe
  misc_feature (1)..(25): SEQ ID NO: 4914; WAN024FMD_at; Start 277; Stop 301
gaacctatcgctaaatcagctttta

SEQ ID NO: 212128 - DNA, 25 bp, Artificial
  probe
  misc_feature (1)..(25): SEQ ID NO: 4914; WAN024FMD_at; Start 117; Stop 141
cattctcacggtagtaatagtcaac

SEQ ID NO: 212129 - DNA, 25 bp, Artificial
  probe
  misc_feature (1)..(25): SEQ ID NO: 4914; WAN024FMD_at; Start 192; Stop 216
tgttgttttccttgtgataactcgg

SEQ ID NO: 212130 - DNA, 25 bp, Artificial
  probe
  misc_feature (1)..(25): SEQ ID NO: 4914; WAN024FMD_at; Start 97; Stop 121
gggaaccactgtttcctcaacattc

SEQ ID NO: 212131 - DNA, 25 bp, Artificial
  probe
  misc_feature (1)..(25): SEQ ID NO: 4914; WAN024FMD_at; Start 197; Stop 221
ttttccttgtgataactcggtcttc

SEQ ID NO: 212132 - DNA, 25 bp, Artificial
  probe
  misc_feature (1)..(25): SEQ ID NO: 4914; WAN024FMD_at; Start 143; Stop 167
gttgcaccgtcttctggtacgcatt

SEQ ID NO: 212133 - DNA, 25 bp, Artificial
  probe
  misc_feature (1)..(25): SEQ ID NO: 4914; WAN024FMD_at; Start 38; Stop 62
ttatcaacgtaatgaatgatacgcg

SEQ ID NO: 212134 - DNA, 25 bp, Artificial
  probe
  misc_feature (1)..(25): SEQ ID NO: 4914; WAN024FMD_at; Start 244; Stop 268
ccttcaatagtttttgattctgtgg

SEQ ID NO: 212135 - DNA, 25 bp, Artificial
  probe
  misc_feature (1)..(25): SEQ ID NO: 4914; WAN024FMD_at; Start 128; Stop 152
tagtaatagtcaactgttgcaccgt

SEQ ID NO: 212136 - DNA, 25 bp, Artificial
  probe
  misc_feature (1)..(25): SEQ ID NO: 4914; WAN024FMD_at; Start 135; Stop 159
agtcaactgttgcaccgtcttctgg

SEQ ID NO: 212137 - DNA, 25 bp, Artificial
  probe
  misc_feature (1)..(25): SEQ ID NO: 4914; WAN024FMD_at; Start 271; Stop 295
tactcagaacctatcgctaaatcag

SEQ ID NO: 212138 - DNA, 25 bp, Artificial
  probe
  misc_feature (1)..(25): SEQ ID NO: 4914; WAN024FMD_at; Start 50; Stop 74
tgaatgatacgcgttatagtcttcg

SEQ ID NO: 212139 - DNA, 25 bp, Artificial
  probe
  misc_feature (1)..(25): SEQ ID NO: 4914; WAN024FMD_at; Start 302; Stop 326
taacagactctaccaacttctcttg

SEQ ID NO: 212140 - DNA, 25 bp, Artificial
  probe
  misc_feature (1)..(25): SEQ ID NO: 4914; WAN024FMD_at; Start 66; Stop 90
tagtcttcgtctcagtagaggttgc

SEQ ID NO: 212141 - DNA, 25 bp, Artificial
  probe
  misc_feature (1)..(25): SEQ ID NO: 4914; WAN024FMD_at; Start 214; Stop 238
cggtcttctttgtcctcagttgttg

SEQ ID NO: 212142 - DNA, 25 bp, Artificial
  probe
  misc_feature (1)..(25): SEQ ID NO: 4914; WAN024FMD_at; Start 88; Stop 112
tgctgttttgggaaccactgtttcc

SEQ ID NO: 212143 - DNA, 25 bp, Artificial
  probe
  misc_feature (1)..(25): SEQ ID NO: 4914; WAN024FMD_at; Start 59; Stop 83
cgcgttatagtcttcgtctcagtag

SEQ ID NO: 212144 - DNA, 25 bp, Artificial
  probe
  misc_feature (1)..(25): SEQ ID NO: 4914; WAN024FMD_at; Start 69; Stop 93
tcttcgtctcagtagaggttgctgt

SEQ ID NO: 212145 - DNA, 25 bp, Artificial
  probe
  misc_feature (1)..(25): SEQ ID NO: 4914; WAN024FMD_at; Start 123; Stop 147
cacggtagtaatagtcaactgttgc

SEQ ID NO: 212146 - DNA, 25 bp, Artificial
  probe
  misc_feature (1)..(25): SEQ ID NO: 4914; WAN024FMD_at; Start 19; Stop 43
tacattttggttcgtaactttatca

SEQ ID NO: 212147 - DNA, 25 bp, Artificial
  probe
  misc_feature (1)..(25): SEQ ID NO: 4227; WAN024FME_s_at; Start 91; Stop 115
gaagatgttgttcaacctgtaacct

SEQ ID NO: 212148 - DNA, 25 bp, Artificial
  probe
  misc_feature (1)..(25): SEQ ID NO: 4227; WAN024FME_s_at; Start 220; Stop 244
aaagatccagatattccaacagttg

SEQ ID NO: 212149 - DNA, 25 bp, Artificial
  probe
  misc_feature (1)..(25): SEQ ID NO: 4227; WAN024FME_s_at; Start 207; Stop 231
gattgacaagtacaaagatccagat

SEQ ID NO: 212150 - DNA, 25 bp, Artificial
  probe
  misc_feature (1)..(25): SEQ ID NO: 4227; WAN024FME_s_at; Start 416; Stop 440
caaacacaggtacagaagctaatgc

SEQ ID NO: 212151 - DNA, 25 bp, Artificial
  probe
  misc_feature (1)..(25): SEQ ID NO: 4227; WAN024FME_s_at; Start 293; Stop 317
ggtatgaccgtttatcaacaccaga

SEQ ID NO: 212152 - DNA, 25 bp, Artificial
  probe
  misc_feature (1)..(25): SEQ ID NO: 4227; WAN024FME_s_at; Start 143; Stop 167
tcacgggagttgtaacctacggtga

SEQ ID NO: 212153 - DNA, 25 bp, Artificial
  probe
  misc_feature (1)..(25): SEQ ID NO: 4227; WAN024FME_s_at; Start 54; Stop 78
tcattacgttgataaagttacgaac

SEQ ID NO: 212154 - DNA, 25 bp, Artificial
  probe
  misc_feature (1)..(25): SEQ ID NO: 4227; WAN024FME_s_at; Start 376; Stop 400
gaagttccgacttatgagacaggta

SEQ ID NO: 212155 - DNA, 25 bp, Artificial
  probe
  misc_feature (1)..(25): SEQ ID NO: 4227; WAN024FME_s_at; Start 363; Stop 387
gaatccagacccagaagttccgact

SEQ ID NO: 212156 - DNA, 25 bp, Artificial
  probe
  misc_feature (1)..(25): SEQ ID NO: 4227; WAN024FME_s_at; Start 74; Stop 98
cgaaccaaaatgtaaaagaagatgt

SEQ ID NO: 212157 - DNA, 25 bp, Artificial
  probe
  misc_feature (1)..(25): SEQ ID NO: 4227; WAN024FME_s_at; Start 248; Stop 272
cacaagaagttacgtcagactctag

SEQ ID NO: 212158 - DNA, 25 bp, Artificial
  probe
  misc_feature (1)..(25): SEQ ID NO: 4227; WAN024FME_s_at; Start 234; Stop 258
tccaacagttgaatcacaagaagtt

SEQ ID NO: 212159 - DNA, 25 bp, Artificial
  probe
  misc_feature (1)..(25): SEQ ID NO: 4227; WAN024FME_s_at; Start 308; Stop 332
caacaccagataaaccaactccaga

SEQ ID NO: 212160 - DNA, 25 bp, Artificial
  probe
  misc_feature (1)..(25): SEQ ID NO: 4227; WAN024FME_s_at; Start 267; Stop 291
ctctagtgataaagaaataacggta

SEQ ID NO: 212161 - DNA, 25 bp, Artificial
  probe
  misc_feature (1)..(25): SEQ ID NO: 4227; WAN024FME_s_at; Start 430; Stop 454
gaagctaatgctaccttggctagtg

SEQ ID NO: 212162 - DNA, 25 bp, Artificial
  probe
  misc_feature (1)..(25): SEQ ID NO: 4227; WAN024FME_s_at; Start 339; Stop 363
tactccaaaaactgaaactccagtg

SEQ ID NO: 212163 - DNA, 25 bp, Artificial
  probe
  misc_feature (1)..(25): SEQ ID NO: 4227; WAN024FME_s_at; Start 167; Stop 191
aatggacaacaggaaactgggacga

SEQ ID NO: 212164 - DNA, 25 bp, Artificial
  probe
  misc_feature (1)..(25): SEQ ID NO: 4227; WAN024FME_s_at; Start 443; Stop 467
ccttggctagtgctggtatcatgac

SEQ ID NO: 212165 - DNA, 25 bp, Artificial
  probe
  misc_feature (1)..(25): SEQ ID NO: 4227; WAN024FME_s_at; Start 399; Stop 423
taagagagaggaattgccaaacaca

SEQ ID NO: 212166 - DNA, 25 bp, Artificial
  probe
  misc_feature (1)..(25): SEQ ID NO: 4227; WAN024FME_s_at; Start 258; Stop 282
tacgtcagactctagtgataaagaa

SEQ ID NO: 212167 - DNA, 25 bp, Artificial
  probe
  misc_feature (1)..(25): SEQ ID NO: 4227; WAN024FME_s_at; Start 410; Stop 434
aattgccaaacacaggtacagaagc

SEQ ID NO: 212168 - DNA, 25 bp, Artificial
  probe
  misc_feature (1)..(25): SEQ ID NO: 4227; WAN024FME_s_at; Start 115; Stop 139
ttaagccgtacaaaaactgagaaca

SEQ ID NO: 212169 - DNA, 25 bp, Artificial
  probe
  misc_feature (1)..(25): SEQ ID NO: 4227; WAN024FME_s_at; Start 357; Stop 381
tccagtgaatccagacccagaagtt

SEQ ID NO: 212170 - DNA, 25 bp, Artificial
  probe
  misc_feature (1)..(25): SEQ ID NO: 4227; WAN024FME_s_at; Start 351; Stop 375
tgaaactccagtgaatccagaccca

SEQ ID NO: 212171 - DNA, 25 bp, Artificial
  probe
  misc_feature (1)..(25): SEQ ID NO: 4227; WAN024FME_s_at; Start 63; Stop 87
tgataaagttacgaaccaaaatgta

SEQ ID NO: 212172 - DNA, 25 bp, Artificial
  probe
  misc_feature (1)..(25): SEQ ID NO: 4227; WAN024FME_s_at; Start 102; Stop 126
tcaacctgtaaccttaagccgtaca

SEQ ID NO: 212173 - DNA, 25 bp, Artificial
  probe
  misc_feature (1)..(25): SEQ ID NO: 4227; WAN024FME_s_at; Start 30; Stop 54
gacgaagactataacgcgtatcatt

SEQ ID NO: 212174 - DNA, 25 bp, Artificial
  probe
  misc_feature (1)..(25): SEQ ID NO: 4227; WAN024FME_s_at; Start 154; Stop 178
gtaacctacggtgaatggacaacag

SEQ ID NO: 212175 - DNA, 25 bp, Artificial
  probe
  misc_feature (1)..(25): SEQ ID NO: 4227; WAN024FME_s_at; Start 160; Stop 184
tacggtgaatggacaacaggaaact

SEQ ID NO: 212176 - DNA, 25 bp, Artificial
  probe
  misc_feature (1)..(25): SEQ ID NO: 4227; WAN024FME_s_at; Start 453; Stop 477
tgctggtatcatgaccttgttagct

SEQ ID NO: 212177 - DNA, 25 bp, Artificial
  probe
  misc_feature (1)..(25): SEQ ID NO: 4227; WAN024FME_s_at; Start 41; Stop 65
taacgcgtatcattcattacgttga

SEQ ID NO: 212178 - DNA, 25 bp, Artificial
  probe
  misc_feature (1)..(25): SEQ ID NO: 4227; WAN024FME_s_at; Start 125; Stop 149
caaaaactgagaacaaggtcacggg

SEQ ID NO: 212179 - DNA, 25 bp, Artificial
  probe
  misc_feature (1)..(25): SEQ ID NO: 4227; WAN024FME_s_at; Start 393; Stop 417
gacaggtaagagagaggaattgcca

SEQ ID NO: 212180 - DNA, 25 bp, Artificial
  probe
  misc_feature (1)..(25): SEQ ID NO: 4227; WAN024FME_s_at; Start 131; Stop 155
ctgagaacaaggtcacgggagttgt

SEQ ID NO: 212181 - DNA, 25 bp, Artificial
  probe
  misc_feature (1)..(25): SEQ ID NO: 4226; WAN024FMF_at; Start 354; Stop 378
tgttccgacaccaaacccagaacta

SEQ ID NO: 212182 - DNA, 25 bp, Artificial
  probe
  misc_feature (1)..(25): SEQ ID NO: 4226; WAN024FMF_at; Start 335; Stop 359
caaatccagagcatccaagtgttcc

SEQ ID NO: 212183 - DNA, 25 bp, Artificial
  probe
  misc_feature (1)..(25): SEQ ID NO: 4226; WAN024FMF_at; Start 380; Stop 404
caaatcaagagactccaacaccaga

SEQ ID NO: 212184 - DNA, 25 bp, Artificial
  probe
  misc_feature (1)..(25): SEQ ID NO: 4226; WAN024FMF_at; Start 306; Stop 330
atcaacaccagaaaaaccaatccca

SEQ ID NO: 212185 - DNA, 25 bp, Artificial
  probe
  misc_feature (1)..(25): SEQ ID NO: 4226; WAN024FMF_at; Start 332; Stop 356
aaccaaatccagagcatccaagtgt

SEQ ID NO: 212186 - DNA, 25 bp, Artificial
  probe
  misc_feature (1)..(25): SEQ ID NO: 4226; WAN024FMF_at; Start 375; Stop 399
actaccaaatcaagagactccaaca

SEQ ID NO: 212187 - DNA, 25 bp, Artificial
  probe
  misc_feature (1)..(25): SEQ ID NO: 4226; WAN024FMF_at; Start 367; Stop 391
aacccagaactaccaaatcaagaga

SEQ ID NO: 212188 - DNA, 25 bp, Artificial
  probe
  misc_feature (1)..(25): SEQ ID NO: 4226; WAN024FMF_at; Start 337; Stop 361
aatccagagcatccaagtgttccga

SEQ ID NO: 212189 - DNA, 25 bp, Artificial
  probe
  misc_feature (1)..(25): SEQ ID NO: 4226; WAN024FMF_at; Start 305; Stop 329
tatcaacaccagaaaaaccaatccc

SEQ ID NO: 212190 - DNA, 25 bp, Artificial
  probe
  misc_feature (1)..(25): SEQ ID NO: 4226; WAN024FMF_at; Start 384; Stop 408
tcaagagactccaacaccagataaa

SEQ ID NO: 212191 - DNA, 25 bp, Artificial
  probe
  misc_feature (1)..(25): SEQ ID NO: 4226; WAN024FMF_at; Start 385; Stop 409
caagagactccaacaccagataaac

SEQ ID NO: 212192 - DNA, 25 bp, Artificial
  probe
  misc_feature (1)..(25): SEQ ID NO: 4226; WAN024FMF_at; Start 377; Stop 401
taccaaatcaagagactccaacacc

SEQ ID NO: 212193 - DNA, 25 bp, Artificial
  probe
  misc_feature (1)..(25): SEQ ID NO: 4226; WAN024FMF_at; Start 379; Stop 403
ccaaatcaagagactccaacaccag

SEQ ID NO: 212194 - DNA, 25 bp, Artificial
  probe
  misc_feature (1)..(25): SEQ ID NO: 4226; WAN024FMF_at; Start 343; Stop 367
gagcatccaagtgttccgacaccaa

SEQ ID NO: 212195 - DNA, 25 bp, Artificial
  probe
  misc_feature (1)..(25): SEQ ID NO: 4226; WAN024FMF_at; Start 350; Stop 374
caagtgttccgacaccaaacccaga

SEQ ID NO: 212196 - DNA, 25 bp, Artificial
  probe
  misc_feature (1)..(25): SEQ ID NO: 4226; WAN024FMF_at; Start 336; Stop 360
aaatccagagcatccaagtgttccg

SEQ ID NO: 212197 - DNA, 25 bp, Artificial
  probe
  misc_feature (1)..(25): SEQ ID NO: 4226; WAN024FMF_at; Start 340; Stop 364
ccagagcatccaagtgttccgacac

SEQ ID NO: 212198 - DNA, 25 bp, Artificial
  probe
  misc_feature (1)..(25): SEQ ID NO: 4226; WAN024FMF_at; Start 366; Stop 390
aaacccagaactaccaaatcaagag

SEQ ID NO: 212199 - DNA, 25 bp, Artificial
  probe
  misc_feature (1)..(25): SEQ ID NO: 4226; WAN024FMF_at; Start 331; Stop 355
caaccaaatccagagcatccaagtg

SEQ ID NO: 212200 - DNA, 25 bp, Artificial
  probe
  misc_feature (1)..(25): SEQ ID NO: 4226; WAN024FMF_at; Start 333; Stop 357
accaaatccagagcatccaagtgtt

SEQ ID NO: 212201 - DNA, 25 bp, Artificial
  probe
  misc_feature (1)..(25): SEQ ID NO: 4226; WAN024FMF_at; Start 342; Stop 366
agagcatccaagtgttccgacacca

SEQ ID NO: 212202 - DNA, 25 bp, Artificial
  probe
  misc_feature (1)..(25): SEQ ID NO: 4226; WAN024FMF_at; Start 364; Stop 388
ccaaacccagaactaccaaatcaag

SEQ ID NO: 212203 - DNA, 25 bp, Artificial
  probe
  misc_feature (1)..(25): SEQ ID NO: 4226; WAN024FMF_at; Start 339; Stop 363
tccagagcatccaagtgttccgaca

SEQ ID NO: 212204 - DNA, 25 bp, Artificial
  probe
  misc_feature (1)..(25): SEQ ID NO: 4226; WAN024FMF_at; Start 344; Stop 368
agcatccaagtgttccgacaccaaa

SEQ ID NO: 212205 - DNA, 25 bp, Artificial
  probe
  misc_feature (1)..(25): SEQ ID NO: 4226; WAN024FMF_at; Start 345; Stop 369
gcatccaagtgttccgacaccaaac

SEQ ID NO: 212206 - DNA, 25 bp, Artificial
  probe
  misc_feature (1)..(25): SEQ ID NO: 4226; WAN024FMF_at; Start 338; Stop 362
atccagagcatccaagtgttccgac

SEQ ID NO: 212207 - DNA, 25 bp, Artificial
  probe
  misc_feature (1)..(25): SEQ ID NO: 4226; WAN024FMF_at; Start 373; Stop 397
gaactaccaaatcaagagactccaa

SEQ ID NO: 212208 - DNA, 25 bp, Artificial
  probe
  misc_feature (1)..(25): SEQ ID NO: 4226; WAN024FMF_at; Start 324; Stop 348
aatcccacaaccaaatccagagcat

SEQ ID NO: 212209 - DNA, 25 bp, Artificial
  probe
  misc_feature (1)..(25): SEQ ID NO: 4226; WAN024FMF_at; Start 303; Stop 327
tttatcaacaccagaaaaaccaatc

SEQ ID NO: 212210 - DNA, 25 bp, Artificial
  probe
  misc_feature (1)..(25): SEQ ID NO: 4226; WAN024FMF_at; Start 371; Stop 395
cagaactaccaaatcaagagactcc

SEQ ID NO: 212211 - DNA, 25 bp, Artificial
  probe
  misc_feature (1)..(25): SEQ ID NO: 4226; WAN024FMF_at; Start 329; Stop 353
cacaaccaaatccagagcatccaag

SEQ ID NO: 212212 - DNA, 25 bp, Artificial
  probe
  misc_feature (1)..(25): SEQ ID NO: 4226; WAN024FMF_at; Start 334; Stop 358
ccaaatccagagcatccaagtgttc

SEQ ID NO: 212213 - DNA, 25 bp, Artificial
  probe
  misc_feature (1)..(25): SEQ ID NO: 4226; WAN024FMF_at; Start 382; Stop 406
aatcaagagactccaacaccagata

SEQ ID NO: 212214 - DNA, 25 bp, Artificial
  probe
  misc_feature (1)..(25): SEQ ID NO: 4226; WAN024FMF_at; Start 369; Stop 393
cccagaactaccaaatcaagagact

SEQ ID NO: 212215 - DNA, 25 bp, Artificial
  probe
  misc_feature (1)..(25): SEQ ID NO: 4069; WAN024FMG_at; Start 941; Stop 965
caactgaggacaaagaagaccgagt

SEQ ID NO: 212216 - DNA, 25 bp, Artificial
  probe
  misc_feature (1)..(25): SEQ ID NO: 4069; WAN024FMG_at; Start 385; Stop 409
caagatactgtggaaccatcacgaa

SEQ ID NO: 212217 - DNA, 25 bp, Artificial
  probe
  misc_feature (1)..(25): SEQ ID NO: 4069; WAN024FMG_at; Start 974; Stop 998
ggaaaacaacatacaccttggtagc

SEQ ID NO: 212218 - DNA, 25 bp, Artificial
  probe
  misc_feature (1)..(25): SEQ ID NO: 4069; WAN024FMG_at; Start 211; Stop 235
gatagcaaactaggaaaaggcggct

SEQ ID NO: 212219 - DNA, 25 bp, Artificial
  probe
  misc_feature (1)..(25): SEQ ID NO: 4069; WAN024FMG_at; Start 319; Stop 343
ggagtaaacactcaaagtcaccgtg

SEQ ID NO: 212220 - DNA, 25 bp, Artificial
  probe
  misc_feature (1)..(25): SEQ ID NO: 4069; WAN024FMG_at; Start 94; Stop 118
tctgaagagttcaaaaagttctccc

SEQ ID NO: 212221 - DNA, 25 bp, Artificial
  probe
  misc_feature (1)..(25): SEQ ID NO: 4069; WAN024FMG_at; Start 743; Stop 767
taactgggaatattgtaagcgaagg

SEQ ID NO: 212222 - DNA, 25 bp, Artificial
  probe
  misc_feature (1)..(25): SEQ ID NO: 4069; WAN024FMG_at; Start 726; Stop 750
tacaaattctgcaagtttaactggg

SEQ ID NO: 212223 - DNA, 25 bp, Artificial
  probe
  misc_feature (1)..(25): SEQ ID NO: 4069; WAN024FMG_at; Start 627; Stop 651
taaaaaacaactgattggtaccagc

SEQ ID NO: 212224 - DNA, 25 bp, Artificial
  probe
  misc_feature (1)..(25): SEQ ID NO: 4069; WAN024FMG_at; Start 370; Stop 394
gacttttcagtcatccaagatactg

SEQ ID NO: 212225 - DNA, 25 bp, Artificial
  probe
  misc_feature (1)..(25): SEQ ID NO: 4069; WAN024FMG_at; Start 225; Stop 249
aaaaggcggctatttctctactggg

SEQ ID NO: 212226 - DNA, 25 bp, Artificial
  probe
  misc_feature (1)..(25): SEQ ID NO: 4069; WAN024FMG_at; Start 518; Stop 542
tctcagaaaatgtgaaagttcgcta

SEQ ID NO: 212227 - DNA, 25 bp, Artificial
  probe
  misc_feature (1)..(25): SEQ ID NO: 4069; WAN024FMG_at; Start 1017; Stop 1041
ccagaagacggtgcaacagttgact

SEQ ID NO: 212228 - DNA, 25 bp, Artificial
  probe
  misc_feature (1)..(25): SEQ ID NO: 4069; WAN024FMG_at; Start 502; Stop 526
gaattggcagaactaatctcagaaa

SEQ ID NO: 212229 - DNA, 25 bp, Artificial
  probe
  misc_feature (1)..(25): SEQ ID NO: 4069; WAN024FMG_at; Start 1061; Stop 1085
tgaggaaacagtggttcccaaaaca

SEQ ID NO: 212230 - DNA, 25 bp, Artificial
  probe
  misc_feature (1)..(25): SEQ ID NO: 4069; WAN024FMG_at; Start 955; Stop 979
gaagaccgagttatcacaaggaaaa

SEQ ID NO: 212231 - DNA, 25 bp, Artificial
  probe
  misc_feature (1)..(25): SEQ ID NO: 4069; WAN024FMG_at; Start 782; Stop 806
tagtttatagagaaagcgaagcgcc

SEQ ID NO: 212232 - DNA, 25 bp, Artificial
  probe
  misc_feature (1)..(25): SEQ ID NO: 4069; WAN024FMG_at; Start 821; Stop 845
taacagccaattactataaagaagg

SEQ ID NO: 212233 - DNA, 25 bp, Artificial
  probe
  misc_feature (1)..(25): SEQ ID NO: 4069; WAN024FMG_at; Start 82; Stop 106
gctagatctggttctgaagagttca

SEQ ID NO: 212234 - DNA, 25 bp, Artificial
  probe
  misc_feature (1)..(25): SEQ ID NO: 4069; WAN024FMG_at; Start 756; Stop 780
tgtaagcgaaggtagaacagtgacc

SEQ ID NO: 212235 - DNA, 25 bp, Artificial
  probe
  misc_feature (1)..(25): SEQ ID NO: 4069; WAN024FMG_at; Start 158; Stop 182
tactgactggtaaaaaactatctga

SEQ ID NO: 212236 - DNA, 25 bp, Artificial
  probe
  misc_feature (1)..(25): SEQ ID NO: 4069; WAN024FMG_at; Start 66; Stop 90
ccttaataatggttgggctagatct

SEQ ID NO: 212237 - DNA, 25 bp, Artificial
  probe
  misc_feature (1)..(25): SEQ ID NO: 4069; WAN024FMG_at; Start 536; Stop 560
ttcgctatgttgatgaacaagggcg

SEQ ID NO: 212238 - DNA, 25 bp, Artificial
  probe
  misc_feature (1)..(25): SEQ ID NO: 4069; WAN024FMG_at; Start 1046; Stop 1070
ctaccgtgagaatgttgaggaaaca

SEQ ID NO: 212239 - DNA, 25 bp, Artificial
  probe
  misc_feature (1)..(25): SEQ ID NO: 4069; WAN024FMG_at; Start 268; Stop 292
gatgttgtttcttataccgtacaag

SEQ ID NO: 212240 - DNA, 25 bp, Artificial
  probe
  misc_feature (1)..(25): SEQ ID NO: 4069; WAN024FMG_at; Start 1031; Stop 1055
aacagttgactattactaccgtgag

SEQ ID NO: 212241 - DNA, 25 bp, Artificial
  probe
  misc_feature (1)..(25): SEQ ID NO: 4069; WAN024FMG_at; Start 337; Stop 361
caccgtgttcagtataatctcccaa

SEQ ID NO: 212242 - DNA, 25 bp, Artificial
  probe
  misc_feature (1)..(25): SEQ ID NO: 4069; WAN024FMG_at; Start 887; Stop 911
tagcgataggttctgagtataccac

SEQ ID NO: 212243 - DNA, 25 bp, Artificial
  probe
  misc_feature (1)..(25): SEQ ID NO: 4069; WAN024FMG_at; Start 140; Stop 164
ggattgtgcgaacgaatgtactgac

SEQ ID NO: 212244 - DNA, 25 bp, Artificial
  probe
  misc_feature (1)..(25): SEQ ID NO: 4069; WAN024FMG_at; Start 799; Stop 823
gaagcgccaaccactgctacagtaa

SEQ ID NO: 212245 - DNA, 25 bp, Artificial
  probe
  misc_feature (1)..(25): SEQ ID NO: 4069; WAN024FMG_at; Start 550; Stop 574
gaacaagggcgtttgctatcattga

SEQ ID NO: 212246 - DNA, 25 bp, Artificial
  probe
  misc_feature (1)..(25): SEQ ID NO: 4069; WAN024FMG_at; Start 601; Stop 625
gaaagtgacggaacctacattacca

SEQ ID NO: 212247 - DNA, 25 bp, Artificial
  probe
  misc_feature (1)..(25): SEQ ID NO: 4069; WAN024FMG_at; Start 680; Stop 704
gcatgactactactgacggaaaata

SEQ ID NO: 212248 - DNA, 25 bp, Artificial
  probe
  misc_feature (1)..(25): SEQ ID NO: 4069; WAN024FMG_at; Start 927; Stop 951
tgaagggaaaacaacaactgaggac

SEQ ID NO: 212249 - DNA, 25 bp, Artificial
  probe
  misc_feature (1)..(25): SEQ ID NO: 2367; WAN024FMH_at; Start 754; Stop 778
tcagttcttggtgagcataaaggcg

SEQ ID NO: 212250 - DNA, 25 bp, Artificial
  probe
  misc_feature (1)..(25): SEQ ID NO: 2367; WAN024FMH_at; Start 668; Stop 692
taacatcacttggaggacctacagg

SEQ ID NO: 212251 - DNA, 25 bp, Artificial
  probe
  misc_feature (1)..(25): SEQ ID NO: 2367; WAN024FMH_at; Start 680; Stop 704
gaggacctacaggacctgccttgaa

SEQ ID NO: 212252 - DNA, 25 bp, Artificial
  probe
  misc_feature (1)..(25): SEQ ID NO: 2367; WAN024FMH_at; Start 200; Stop 224
acatcaaccctgctttcactctagg

SEQ ID NO: 212253 - DNA, 25 bp, Artificial
  probe
  misc_feature (1)..(25): SEQ ID NO: 2367; WAN024FMH_at; Start 380; Stop 404
caactatttcaagtattgaccatgg

SEQ ID NO: 212254 - DNA, 25 bp, Artificial
  probe
  misc_feature (1)..(25): SEQ ID NO: 2367; WAN024FMH_at; Start 560; Stop 584
aaacagttgatttttctgacttggc

SEQ ID NO: 212255 - DNA, 25 bp, Artificial
  probe
  misc_feature (1)..(25): SEQ ID NO: 2367; WAN024FMH_at; Start 327; Stop 351
ccgtccattctacttgaaaactgaa

SEQ ID NO: 212256 - DNA, 25 bp, Artificial
  probe
  misc_feature (1)..(25): SEQ ID NO: 2367; WAN024FMH_at; Start 131; Stop 155
tcatcgctgttggttatggtatggg

SEQ ID NO: 212257 - DNA, 25 bp, Artificial
  probe
  misc_feature (1)..(25): SEQ ID NO: 2367; WAN024FMH_at; Start 646; Stop 670
ggattcctcgttatggctttggtaa

SEQ ID NO: 212258 - DNA, 25 bp, Artificial
  probe
  misc_feature (1)..(25): SEQ ID NO: 2367; WAN024FMH_at; Start 44; Stop 68
gaactgccattttgatcattcttgg

SEQ ID NO: 212259 - DNA, 25 bp, Artificial
  probe
  misc_feature (1)..(25): SEQ ID NO: 2367; WAN024FMH_at; Start 28; Stop 52
gccactgaatttttgggaactgcca

SEQ ID NO: 212260 - DNA, 25 bp, Artificial
  probe
  misc_feature (1)..(25): SEQ ID NO: 2367; WAN024FMH_at; Start 715; Stop 739
gacttgggaccacgtctccttcatg

SEQ ID NO: 212261 - DNA, 25 bp, Artificial
  probe
  misc_feature (1)..(25): SEQ ID NO: 2367; WAN024FMH_at; Start 245; Stop 269
tcccttgggcacaagtggtacctta

SEQ ID NO: 212262 - DNA, 25 bp, Artificial
  probe
  misc_feature (1)..(25): SEQ ID NO: 2367; WAN024FMH_at; Start 115; Stop 139
caaagtggctggatcgtcatcgctg

SEQ ID NO: 212263 - DNA, 25 bp, Artificial
  probe
  misc_feature (1)..(25): SEQ ID NO: 2367; WAN024FMH_at; Start 661; Stop 685
gctttggtaacatcacttggaggac

SEQ ID NO: 212264 - DNA, 25 bp, Artificial
  probe
  misc_feature (1)..(25): SEQ ID NO: 2367; WAN024FMH_at; Start 60; Stop 84
cattcttgggaatggtgcagttgcc

SEQ ID NO: 212265 - DNA, 25 bp, Artificial
  probe
  misc_feature (1)..(25): SEQ ID NO: 2367; WAN024FMH_at; Start 476; Stop 500
tctttgcagctcttggtttgactaa

SEQ ID NO: 212266 - DNA, 25 bp, Artificial
  probe
  misc_feature (1)..(25): SEQ ID NO: 2367; WAN024FMH_at; Start 356; Stop 380
caaataacatcttgggaactttctc

SEQ ID NO: 212267 - DNA, 25 bp, Artificial
  probe
  misc_feature (1)..(25): SEQ ID NO: 2367; WAN024FMH_at; Start 631; Stop 655
gctcacttggcacttggattcctcg

SEQ ID NO: 212268 - DNA, 25 bp, Artificial
  probe
  misc_feature (1)..(25): SEQ ID NO: 2367; WAN024FMH_at; Start 597; Stop 621
ggtggctccacacactgcttcagga

SEQ ID NO: 212269 - DNA, 25 bp, Artificial
  probe
  misc_feature (1)..(25): SEQ ID NO: 2367; WAN024FMH_at; Start 793; Stop 817
tattcttgggtaccagtagtagcac

SEQ ID NO: 212270 - DNA, 25 bp, Artificial
  probe
  misc_feature (1)..(25): SEQ ID NO: 2367; WAN024FMH_at; Start 504; Stop 528
cttctttggtgctgaagtgcttcaa

SEQ ID NO: 212271 - DNA, 25 bp, Artificial
  probe
  misc_feature (1)..(25): SEQ ID NO: 2367; WAN024FMH_at; Start 102; Stop 126
tacgaaaggtcaccaaagtggctgg

SEQ ID NO: 212272 - DNA, 25 bp, Artificial
  probe
  misc_feature (1)..(25): SEQ ID NO: 2367; WAN024FMH_at; Start 233; Stop 257
ttagcggtcttttcccttgggcaca

SEQ ID NO: 212273 - DNA, 25 bp, Artificial
  probe
  misc_feature (1)..(25): SEQ ID NO: 2367; WAN024FMH_at; Start 836; Stop 860
cggcagtagctgtattcaaattcct

SEQ ID NO: 212274 - DNA, 25 bp, Artificial
  probe
  misc_feature (1)..(25): SEQ ID NO: 2367; WAN024FMH_at; Start 396; Stop 420
tgaccatggtacaaaagaaagtcgc

SEQ ID NO: 212275 - DNA, 25 bp, Artificial
  probe
  misc_feature (1)..(25): SEQ ID NO: 2367; WAN024FMH_at; Start 412; Stop 436
gaaagtcgctatgcagcaactgtca

SEQ ID NO: 212276 - DNA, 25 bp, Artificial
  probe
  misc_feature (1)..(25): SEQ ID NO: 2367; WAN024FMH_at; Start 77; Stop 101
cagttgccaacgttgaacttaaagg

SEQ ID NO: 212277 - DNA, 25 bp, Artificial
  probe
  misc_feature (1)..(25): SEQ ID NO: 2367; WAN024FMH_at; Start 613; Stop 637
gcttcaggactttctgtggctcact

SEQ ID NO: 212278 - DNA, 25 bp, Artificial
  probe
  misc_feature (1)..(25): SEQ ID NO: 2367; WAN024FMH_at; Start 582; Stop 606
ggctattaaagcacaggtggctcca

SEQ ID NO: 212279 - DNA, 25 bp, Artificial
  probe
  misc_feature (1)..(25): SEQ ID NO: 2367; WAN024FMH_at; Start 823; Stop 847
gcagcagcaattgcggcagtagctg

SEQ ID NO: 212280 - DNA, 25 bp, Artificial
  probe
  misc_feature (1)..(25): SEQ ID NO: 2367; WAN024FMH_at; Start 769; Stop 793
cataaaggcgattcaaaatggtggt

SEQ ID NO: 212281 - DNA, 25 bp, Artificial
  probe
  misc_feature (1)..(25): SEQ ID NO: 2367; WAN024FMH_at; Start 169; Stop 193
gccttgatgtttggtaacgtatctg

SEQ ID NO: 212282 - DNA, 25 bp, Artificial
  probe
  misc_feature (1)..(25): SEQ ID NO: 2367; WAN024FMH_at; Start 702; Stop 726
gaacccagcccgtgacttgggacca

SEQ ID NO: 212283 - DNA, 25 bp, Artificial
  probe
  misc_feature (1)..(25): SEQ ID NO: 3328; WAN024FMI_at; Start 89; Stop 113
cagacttacaagatagggaacccat

SEQ ID NO: 212284 - DNA, 25 bp, Artificial
  probe
  misc_feature (1)..(25): SEQ ID NO: 3328; WAN024FMI_at; Start 222; Stop 246
actgcaacctactatagtccattga

SEQ ID NO: 212285 - DNA, 25 bp, Artificial
  probe
  misc_feature (1)..(25): SEQ ID NO: 3328; WAN024FMI_at; Start 218; Stop 242
ttcaactgcaacctactatagtcca

SEQ ID NO: 212286 - DNA, 25 bp, Artificial
  probe
  misc_feature (1)..(25): SEQ ID NO: 3328; WAN024FMI_at; Start 10; Stop 34
ttgttgaggaaggtaaatcaattcc

SEQ ID NO: 212287 - DNA, 25 bp, Artificial
  probe
  misc_feature (1)..(25): SEQ ID NO: 3328; WAN024FMI_at; Start 38; Stop 62
caatgtttgagaaagaagggaggac

SEQ ID NO: 212288 - DNA, 25 bp, Artificial
  probe
  misc_feature (1)..(25): SEQ ID NO: 3328; WAN024FMI_at; Start 43; Stop 67
tttgagaaagaagggaggactattc

SEQ ID NO: 212289 - DNA, 25 bp, Artificial
  probe
  misc_feature (1)..(25): SEQ ID NO: 3328; WAN024FMI_at; Start 32; Stop 56
tcctcacaatgtttgagaaagaagg

SEQ ID NO: 212290 - DNA, 25 bp, Artificial
  probe
  misc_feature (1)..(25): SEQ ID NO: 3328; WAN024FMI_at; Start 102; Stop 126
tagggaacccatctccgataatatt

SEQ ID NO: 212291 - DNA, 25 bp, Artificial
  probe
  misc_feature (1)..(25): SEQ ID NO: 3328; WAN024FMI_at; Start 97; Stop 121
caagatagggaacccatctccgata

SEQ ID NO: 212292 - DNA, 25 bp, Artificial
  probe
  misc_feature (1)..(25): SEQ ID NO: 3328; WAN024FMI_at; Start 52; Stop 76
gaagggaggactattccaacttcaa

SEQ ID NO: 212293 - DNA, 25 bp, Artificial
  probe
  misc_feature (1)..(25): SEQ ID NO: 3328; WAN024FMI_at; Start 134; Stop 158
tatatagtagaatgaaaactgcaca

SEQ ID NO: 212294 - DNA, 25 bp, Artificial
  probe
  misc_feature (1)..(25): SEQ ID NO: 3328; WAN024FMI_at; Start 126; Stop 150
tccgataatatatagtagaatgaaa

SEQ ID NO: 212295 - DNA, 25 bp, Artificial
  probe
  misc_feature (1)..(25): SEQ ID NO: 3328; WAN024FMI_at; Start 87; Stop 111
agcagacttacaagatagggaaccc

SEQ ID NO: 212296 - DNA, 25 bp, Artificial
  probe
  misc_feature (1)..(25): SEQ ID NO: 3328; WAN024FMI_at; Start 209; Stop 233
gtctattatttcaactgcaacctac

SEQ ID NO: 212297 - DNA, 25 bp, Artificial
  probe
  misc_feature (1)..(25): SEQ ID NO: 3328; WAN024FMI_at; Start 111; Stop 135
catctccgataatattccgataata

SEQ ID NO: 212298 - DNA, 25 bp, Artificial
  probe
  misc_feature (1)..(25): SEQ ID NO: 3328; WAN024FMI_at; Start 73; Stop 97
tcaacccactataaagcagacttac

SEQ ID NO: 212299 - DNA, 25 bp, Artificial
  probe
  misc_feature (1)..(25): SEQ ID NO: 3328; WAN024FMI_at; Start 1; Stop 25
ctgaacattttgttgaggaaggtaa

SEQ ID NO: 212300 - DNA, 25 bp, Artificial
  probe
  misc_feature (1)..(25): SEQ ID NO: 3328; WAN024FMI_at; Start 25; Stop 49
aatcaattcctcacaatgtttgaga

SEQ ID NO: 212301 - DNA, 25 bp, Artificial
  probe
  misc_feature (1)..(25): SEQ ID NO: 3328; WAN024FMI_at; Start 205; Stop 229
aagggtctattatttcaactgcaac

SEQ ID NO: 212302 - DNA, 25 bp, Artificial
  probe
  misc_feature (1)..(25): SEQ ID NO: 3328; WAN024FMI_at; Start 56; Stop 80
ggaggactattccaacttcaaccca

SEQ ID NO: 212303 - DNA, 25 bp, Artificial
  probe
  misc_feature (1)..(25): SEQ ID NO: 3328; WAN024FMI_at; Start 139; Stop 163
agtagaatgaaaactgcacaatttg

SEQ ID NO: 212304 - DNA, 25 bp, Artificial
  probe
  misc_feature (1)..(25): SEQ ID NO: 3328; WAN024FMI_at; Start 59; Stop 83
ggactattccaacttcaacccacta

SEQ ID NO: 212305 - DNA, 25 bp, Artificial
  probe
  misc_feature (1)..(25): SEQ ID NO: 3328; WAN024FMI_at; Start 106; Stop 130
gaacccatctccgataatattccga

SEQ ID NO: 212306 - DNA, 25 bp, Artificial
  probe
  misc_feature (1)..(25): SEQ ID NO: 3328; WAN024FMI_at; Start 18; Stop 42
gaaggtaaatcaattcctcacaatg

SEQ ID NO: 212307 - DNA, 25 bp, Artificial
  probe
  misc_feature (1)..(25): SEQ ID NO: 3328; WAN024FMI_at; Start 68; Stop 92
caacttcaacccactataaagcaga

SEQ ID NO: 212308 - DNA, 25 bp, Artificial
  probe
  misc_feature (1)..(25): SEQ ID NO: 3328; WAN024FMI_at; Start 94; Stop 118
ttacaagatagggaacccatctccg

SEQ ID NO: 212309 - DNA, 25 bp, Artificial
  probe
  misc_feature (1)..(25): SEQ ID NO: 3328; WAN024FMI_at; Start 91; Stop 115
gacttacaagatagggaacccatct

SEQ ID NO: 212310 - DNA, 25 bp, Artificial
  probe
  misc_feature (1)..(25): SEQ ID NO: 3328; WAN024FMI_at; Start 100; Stop 124
gatagggaacccatctccgataata

SEQ ID NO: 212311 - DNA, 25 bp, Artificial
  probe
  misc_feature (1)..(25): SEQ ID NO: 3328; WAN024FMI_at; Start 202; Stop 226
aacaagggtctattatttcaactgc

SEQ ID NO: 212312 - DNA, 25 bp, Artificial
  probe
  misc_feature (1)..(25): SEQ ID NO: 3328; WAN024FMI_at; Start 46; Stop 70
gagaaagaagggaggactattccaa

SEQ ID NO: 212313 - DNA, 25 bp, Artificial
  probe
  misc_feature (1)..(25): SEQ ID NO: 3328; WAN024FMI_at; Start 82; Stop 106
tataaagcagacttacaagataggg

SEQ ID NO: 212314 - DNA, 25 bp, Artificial
  probe
  misc_feature (1)..(25): SEQ ID NO: 3328; WAN024FMI_at; Start 157; Stop 181
caatttgattggagaattcaaacca

SEQ ID NO: 212315 - DNA, 25 bp, Artificial
  probe
  misc_feature (1)..(25): SEQ ID NO: 3328; WAN024FMI_at; Start 175; Stop 199
caaaccaatttctcacaatgtttta

SEQ ID NO: 212316 - DNA, 25 bp, Artificial
  probe
  misc_feature (1)..(25): SEQ ID NO: 3328; WAN024FMI_at; Start 147; Stop 171
gaaaactgcacaatttgattggaga

SEQ ID NO: 212317 - DNA, 25 bp, Artificial
  probe
  misc_feature (1)..(25): SEQ ID NO: 7252; WAN024FMJ_at; Start 238; Stop 262
caacatccaatgtacggagtgcgtg

SEQ ID NO: 212318 - DNA, 25 bp, Artificial
  probe
  misc_feature (1)..(25): SEQ ID NO: 7252; WAN024FMJ_at; Start 664; Stop 688
gaagagctaccagaaaacgttgagt

SEQ ID NO: 212319 - DNA, 25 bp, Artificial
  probe
  misc_feature (1)..(25): SEQ ID NO: 7252; WAN024FMJ_at; Start 858; Stop 882
tatctggaaagaagctgcgttagca

SEQ ID NO: 212320 - DNA, 25 bp, Artificial
  probe
  misc_feature (1)..(25): SEQ ID NO: 7252; WAN024FMJ_at; Start 871; Stop 895
gctgcgttagcacagtttattgaag

SEQ ID NO: 212321 - DNA, 25 bp, Artificial
  probe
  misc_feature (1)..(25): SEQ ID NO: 7252; WAN024FMJ_at; Start 698; Stop 722
gtttacctccaaataaattgcctca

SEQ ID NO: 212322 - DNA, 25 bp, Artificial
  probe
  misc_feature (1)..(25): SEQ ID NO: 7252; WAN024FMJ_at; Start 500; Stop 524
tgcaaatattcgactacctagatcc

SEQ ID NO: 212323 - DNA, 25 bp, Artificial
  probe
  misc_feature (1)..(25): SEQ ID NO: 7252; WAN024FMJ_at; Start 570; Stop 594
gaatctagcaaaaggaaaaagttca

SEQ ID NO: 212324 - DNA, 25 bp, Artificial
  probe
  misc_feature (1)..(25): SEQ ID NO: 7252; WAN024FMJ_at; Start 769; Stop 793
gaaacttgtagtggaaatactggta

SEQ ID NO: 212325 - DNA, 25 bp, Artificial
  probe
  misc_feature (1)..(25): SEQ ID NO: 7252; WAN024FMJ_at; Start 945; Stop 969
gatgcaaaatatatctgagggcgaa

SEQ ID NO: 212326 - DNA, 25 bp, Artificial
  probe
  misc_feature (1)..(25): SEQ ID NO: 7252; WAN024FMJ_at; Start 1032; Stop 1056
tcgtcaggcgatatctaagtgcaaa

SEQ ID NO: 212327 - DNA, 25 bp, Artificial
  probe
  misc_feature (1)..(25): SEQ ID NO: 7252; WAN024FMJ_at; Start 606; Stop 630
gttgttagaaaatgaactgaacttc

SEQ ID NO: 212328 - DNA, 25 bp, Artificial
  probe
  misc_feature (1)..(25): SEQ ID NO: 7252; WAN024FMJ_at; Start 380; Stop 404
caacaaatgctattgcagacaaaga

SEQ ID NO: 212329 - DNA, 25 bp, Artificial
  probe
  misc_feature (1)..(25): SEQ ID NO: 7252; WAN024FMJ_at; Start 434; Stop 458
cccataatccgaaaatgacagaata

SEQ ID NO: 212330 - DNA, 25 bp, Artificial
  probe
  misc_feature (1)..(25): SEQ ID NO: 7252; WAN024FMJ_at; Start 225; Stop 249
tgtagttatttaccaacatccaatg

SEQ ID NO: 212331 - DNA, 25 bp, Artificial
  probe
  misc_feature (1)..(25): SEQ ID NO: 7252; WAN024FMJ_at; Start 514; Stop 538
tacctagatccatcagaaatagaag

SEQ ID NO: 212332 - DNA, 25 bp, Artificial
  probe
  misc_feature (1)..(25): SEQ ID NO: 7252; WAN024FMJ_at; Start 60; Stop 84
taaagcgcctgatgatatagaaaaa

SEQ ID NO: 212333 - DNA, 25 bp, Artificial
  probe
  misc_feature (1)..(25): SEQ ID NO: 7252; WAN024FMJ_at; Start 821; Stop 845
aaacctcattatatcttgcttcagg

SEQ ID NO: 212334 - DNA, 25 bp, Artificial
  probe
  misc_feature (1)..(25): SEQ ID NO: 7252; WAN024FMJ_at; Start 187; Stop 211
aattggataagtctgttgtggagac

SEQ ID NO: 212335 - DNA, 25 bp, Artificial
  probe
  misc_feature (1)..(25): SEQ ID NO: 7252; WAN024FMJ_at; Start 450; Stop 474
gacagaatatttagaagggataggg

SEQ ID NO: 212336 - DNA, 25 bp, Artificial
  probe
  misc_feature (1)..(25): SEQ ID NO: 7252; WAN024FMJ_at; Start 750; Stop 774
ttgggacggtgatagtctagaaact

SEQ ID NO: 212337 - DNA, 25 bp, Artificial
  probe
  misc_feature (1)..(25): SEQ ID NO: 7252; WAN024FMJ_at; Start 986; Stop 1010
gaaatacaatgcaattgggtgaaaa

SEQ ID NO: 212338 - DNA, 25 bp, Artificial
  probe
  misc_feature (1)..(25): SEQ ID NO: 7252; WAN024FMJ_at; Start 45; Stop 69
aaatacagccgggattaaagcgcct

SEQ ID NO: 212339 - DNA, 25 bp, Artificial
  probe
  misc_feature (1)..(25): SEQ ID NO: 7252; WAN024FMJ_at; Start 652; Stop 676
aattttattaacgaagagctaccag

SEQ ID NO: 212340 - DNA, 25 bp, Artificial
  probe
  misc_feature (1)..(25): SEQ ID NO: 7252; WAN024FMJ_at; Start 158; Stop 182
aactctggcttttttgtgttgtagg

SEQ ID NO: 212341 - DNA, 25 bp, Artificial
  probe
  misc_feature (1)..(25): SEQ ID NO: 7252; WAN024FMJ_at; Start 1017; Stop 1041
aaatggatatttttatcgtcaggcg

SEQ ID NO: 212342 - DNA, 25 bp, Artificial
  probe
  misc_feature (1)..(25): SEQ ID NO: 7252; WAN024FMJ_at; Start 332; Stop 356
tagaatcgttaagaaaaggaatcca

SEQ ID NO: 212343 - DNA, 25 bp, Artificial
  probe
  misc_feature (1)..(25): SEQ ID NO: 7252; WAN024FMJ_at; Start 349; Stop 373
ggaatccaaggagtcattgaagata

SEQ ID NO: 212344 - DNA, 25 bp, Artificial
  probe
  misc_feature (1)..(25): SEQ ID NO: 7252; WAN024FMJ_at; Start 94; Stop 118
gaattgggaatgaaagaaatacgct

SEQ ID NO: 212345 - DNA, 25 bp, Artificial
  probe
  misc_feature (1)..(25): SEQ ID NO: 7252; WAN024FMJ_at; Start 252; Stop 276
cggagtgcgtgttgcaaattttgca

SEQ ID NO: 212346 - DNA, 25 bp, Artificial
  probe
  misc_feature (1)..(25): SEQ ID NO: 7252; WAN024FMJ_at; Start 844; Stop 868
ggaatacctgtaattatctggaaag

SEQ ID NO: 212347 - DNA, 25 bp, Artificial
  probe
  misc_feature (1)..(25): SEQ ID NO: 7252; WAN024FMJ_at; Start 421; Stop 445
gataaagtgatttcccataatccga

SEQ ID NO: 212348 - DNA, 25 bp, Artificial
  probe
  misc_feature (1)..(25): SEQ ID NO: 7252; WAN024FMJ_at; Start 711; Stop 735
taaattgcctcaaaagctagtaggt

SEQ ID NO: 212349 - DNA, 25 bp, Artificial
  probe
  misc_feature (1)..(25): SEQ ID NO: 7252; WAN024FMJ_at; Start 928; Stop 952
tcagaaattgagtttgtgatgcaaa

SEQ ID NO: 212350 - DNA, 25 bp, Artificial
  probe
  misc_feature (1)..(25): SEQ ID NO: 7252; WAN024FMJ_at; Start 958; Stop 982
tctgagggcgaatatttatcaataa

SEQ ID NO: 212351 - DNA, 25 bp, Artificial
  probe
  misc_feature (1)..(25): SEQ ID NO: 2537; WAN024FMK_at; Start 1013; Stop 1037
gagagggttatttttatcgtcaatc

SEQ ID NO: 212352 - DNA, 25 bp, Artificial
  probe
  misc_feature (1)..(25): SEQ ID NO: 2537; WAN024FMK_at; Start 868; Stop 892
gctgccttagcggaatttattgaaa

SEQ ID NO: 212353 - DNA, 25 bp, Artificial
  probe
  misc_feature (1)..(25): SEQ ID NO: 2537; WAN024FMK_at; Start 325; Stop 349
gatttggaatcactaagaaaaggta

SEQ ID NO: 212354 - DNA, 25 bp, Artificial
  probe
  misc_feature (1)..(25): SEQ ID NO: 2537; WAN024FMK_at; Start 56; Stop 80
taaaagctccggatgatatagagag

SEQ ID NO: 212355 - DNA, 25 bp, Artificial
  probe
  misc_feature (1)..(25): SEQ ID NO: 2537; WAN024FMK_at; Start 757; Stop 781
gatagtttagatacctgtggcggaa

SEQ ID NO: 212356 - DNA, 25 bp, Artificial
  probe
  misc_feature (1)..(25): SEQ ID NO: 2537; WAN024FMK_at; Start 64; Stop 88
ccggatgatatagagagaatttcaa

SEQ ID NO: 212357 - DNA, 25 bp, Artificial
  probe
  misc_feature (1)..(25): SEQ ID NO: 2537; WAN024FMK_at; Start 695; Stop 719
gtttaacaccaaatgaattacctca

SEQ ID NO: 212358 - DNA, 25 bp, Artificial
  probe
  misc_feature (1)..(25): SEQ ID NO: 2537; WAN024FMK_at; Start 855; Stop 879
tatatggaaagaagctgccttagcg

SEQ ID NO: 212359 - DNA, 25 bp, Artificial
  probe
  misc_feature (1)..(25): SEQ ID NO: 2537; WAN024FMK_at; Start 255; Stop 279
gagagtgtccaattgtttgattcca

SEQ ID NO: 212360 - DNA, 25 bp, Artificial
  probe
  misc_feature (1)..(25): SEQ ID NO: 2537; WAN024FMK_at; Start 228; Stop 252
tatatatcaacacccaatgtacgga

SEQ ID NO: 212361 - DNA, 25 bp, Artificial
  probe
  misc_feature (1)..(25): SEQ ID NO: 2537; WAN024FMK_at; Start 567; Stop 591
caatctagctaaaggtaagagctcc

SEQ ID NO: 212362 - DNA, 25 bp, Artificial
  probe
  misc_feature (1)..(25): SEQ ID NO: 2537; WAN024FMK_at; Start 171; Stop 195
tgtcataggctacaagtggacgagc

SEQ ID NO: 212363 - DNA, 25 bp, Artificial
  probe
  misc_feature (1)..(25): SEQ ID NO: 2537; WAN024FMK_at; Start 98; Stop 122
gaatgcaagaattactattccctaa

SEQ ID NO: 212364 - DNA, 25 bp, Artificial
  probe
  misc_feature (1)..(25): SEQ ID NO: 2537; WAN024FMK_at; Start 707; Stop 731
atgaattacctcaaaaactagtagg

SEQ ID NO: 212365 - DNA, 25 bp, Artificial
  probe
  misc_feature (1)..(25): SEQ ID NO: 2537; WAN024FMK_at; Start 657; Stop 681
tattgaagaattgccagagaatgtt

SEQ ID NO: 212366 - DNA, 25 bp, Artificial
  probe
  misc_feature (1)..(25): SEQ ID NO: 2537; WAN024FMK_at; Start 803; Stop 827
ttaataatccgcacaaaacatccct

SEQ ID NO: 212367 - DNA, 25 bp, Artificial
  probe
  misc_feature (1)..(25): SEQ ID NO: 2537; WAN024FMK_at; Start 341; Stop 365
gaaaaggtattcaaggagttatcga

SEQ ID NO: 212368 - DNA, 25 bp, Artificial
  probe
  misc_feature (1)..(25): SEQ ID NO: 2537; WAN024FMK_at; Start 156; Stop 180
actctggctttttagtgtcataggc

SEQ ID NO: 212369 - DNA, 25 bp, Artificial
  probe
  misc_feature (1)..(25): SEQ ID NO: 2537; WAN024FMK_at; Start 447; Stop 471
gacaaattatttggaagggattgga

SEQ ID NO: 212370 - DNA, 25 bp, Artificial
  probe
  misc_feature (1)..(25): SEQ ID NO: 2537; WAN024FMK_at; Start 818; Stop 842
aaacatccctatatcttgcttctgg

SEQ ID NO: 212371 - DNA, 25 bp, Artificial
  probe
  misc_feature (1)..(25): SEQ ID NO: 2537; WAN024FMK_at; Start 838; Stop 862
tctggaataccagtgattatatgga

SEQ ID NO: 212372 - DNA, 25 bp, Artificial
  probe
  misc_feature (1)..(25): SEQ ID NO: 2537; WAN024FMK_at; Start 382; Stop 406
aatactattgcagatacagagttgc

SEQ ID NO: 212373 - DNA, 25 bp, Artificial
  probe
  misc_feature (1)..(25): SEQ ID NO: 2537; WAN024FMK_at; Start 42; Stop 66
aaatactgccggaataaaagctccg

SEQ ID NO: 212374 - DNA, 25 bp, Artificial
  probe
  misc_feature (1)..(25): SEQ ID NO: 2537; WAN024FMK_at; Start 671; Stop 695
cagagaatgttaaatactatggtag

SEQ ID NO: 212375 - DNA, 25 bp, Artificial
  probe
  misc_feature (1)..(25): SEQ ID NO: 2537; WAN024FMK_at; Start 241; Stop 265
ccaatgtacggagtgagagtgtcca

SEQ ID NO: 212376 - DNA, 25 bp, Artificial
  probe
  misc_feature (1)..(25): SEQ ID NO: 2537; WAN024FMK_at; Start 520; Stop 544
ccatcggaaatgaaagaaaaaactg

SEQ ID NO: 212377 - DNA, 25 bp, Artificial
  probe
  misc_feature (1)..(25): SEQ ID NO: 2537; WAN024FMK_at; Start 503; Stop 527
tatttgattatctggacccatcgga

SEQ ID NO: 212378 - DNA, 25 bp, Artificial
  probe
  misc_feature (1)..(25): SEQ ID NO: 2537; WAN024FMK_at; Start 202; Stop 226
tggaaacttaaaaccaatgatgtag

SEQ ID NO: 212379 - DNA, 25 bp, Artificial
  probe
  misc_feature (1)..(25): SEQ ID NO: 2537; WAN024FMK_at; Start 187; Stop 211
tggacgagccttttatggaaactta

SEQ ID NO: 212380 - DNA, 25 bp, Artificial
  probe
  misc_feature (1)..(25): SEQ ID NO: 2537; WAN024FMK_at; Start 580; Stop 604
ggtaagagctcctatatttacaagc

SEQ ID NO: 212381 - DNA, 25 bp, Artificial
  probe
  misc_feature (1)..(25): SEQ ID NO: 2537; WAN024FMK_at; Start 977; Stop 1001
tgaaagcaaatacaatggaagtggg

SEQ ID NO: 212382 - DNA, 25 bp, Artificial
  probe
  misc_feature (1)..(25): SEQ ID NO: 2537; WAN024FMK_at; Start 770; Stop 794
cctgtggcggaaacactggtaatta

SEQ ID NO: 212383 - DNA, 25 bp, Artificial
  probe
  misc_feature (1)..(25): SEQ ID NO: 2537; WAN024FMK_at; Start 551; Stop 575
gagtagttatagctggcaatctagc

SEQ ID NO: 212384 - DNA, 25 bp, Artificial
  probe
  misc_feature (1)..(25): SEQ ID NO: 2537; WAN024FMK_at; Start 396; Stop 420
tacagagttgctatcgaaattcgat

SEQ ID NO: 212385 - DNA, 25 bp, Artificial
  probe
  misc_feature (1)..(25): SEQ ID NO: 6483; WAN024FML_at; Start 384; Stop 408
caatattagtaaagcgcaggtcaag

SEQ ID NO: 212386 - DNA, 25 bp, Artificial
  probe
  misc_feature (1)..(25): SEQ ID NO: 6483; WAN024FML_at; Start 467; Stop 491
caaaggaatatgcaaagaaaagagt

SEQ ID NO: 212387 - DNA, 25 bp, Artificial
  probe
  misc_feature (1)..(25): SEQ ID NO: 6483; WAN024FML_at; Start 842; Stop 866
ctgattactcttcaacaatatggga

SEQ ID NO: 212388 - DNA, 25 bp, Artificial
  probe
  misc_feature (1)..(25): SEQ ID NO: 6483; WAN024FML_at; Start 202; Stop 226
gaaaaatatcctgatgtaaaagcag

SEQ ID NO: 212389 - DNA, 25 bp, Artificial
  probe
  misc_feature (1)..(25): SEQ ID NO: 6483; WAN024FML_at; Start 112; Stop 136
gcagagactatttcttgcaatccaa

SEQ ID NO: 212390 - DNA, 25 bp, Artificial
  probe
  misc_feature (1)..(25): SEQ ID NO: 6483; WAN024FML_at; Start 630; Stop 654
tccaacatggcgagatgatgcttca

SEQ ID NO: 212391 - DNA, 25 bp, Artificial
  probe
  misc_feature (1)..(25): SEQ ID NO: 6483; WAN024FML_at; Start 80; Stop 104
aaaaacgccgagttctgctgaaaag

SEQ ID NO: 212392 - DNA, 25 bp, Artificial
  probe
  misc_feature (1)..(25): SEQ ID NO: 6483; WAN024FML_at; Start 610; Stop 634
tgttctatagtaatttatgctccaa

SEQ ID NO: 212393 - DNA, 25 bp, Artificial
  probe
  misc_feature (1)..(25): SEQ ID NO: 6483; WAN024FML_at; Start 710; Stop 734
caaaagtgagtattttagtacgtgg

SEQ ID NO: 212394 - DNA, 25 bp, Artificial
  probe
  misc_feature (1)..(25): SEQ ID NO: 6483; WAN024FML_at; Start 726; Stop 750
agtacgtggtcatcatcttcaaaag

SEQ ID NO: 212395 - DNA, 25 bp, Artificial
  probe
  misc_feature (1)..(25): SEQ ID NO: 6483; WAN024FML_at; Start 661; Stop 685
gaagagatagattatgaaagcttac

SEQ ID NO: 212396 - DNA, 25 bp, Artificial
  probe
  misc_feature (1)..(25): SEQ ID NO: 6483; WAN024FML_at; Start 870; Stop 894
gattcatggagggaaaaaagtatta

SEQ ID NO: 212397 - DNA, 25 bp, Artificial
  probe
  misc_feature (1)..(25): SEQ ID NO: 6483; WAN024FML_at; Start 547; Stop 571
cgtaatcaagcagatgatggtctaa

SEQ ID NO: 212398 - DNA, 25 bp, Artificial
  probe
  misc_feature (1)..(25): SEQ ID NO: 6483; WAN024FML_at; Start 581; Stop 605
taaaaaatcgacttggaatagatga

SEQ ID NO: 212399 - DNA, 25 bp, Artificial
  probe
  misc_feature (1)..(25): SEQ ID NO: 6483; WAN024FML_at; Start 981; Stop 1005
taacgaagagttgattgcatatatc

SEQ ID NO: 212400 - DNA, 25 bp, Artificial
  probe
  misc_feature (1)..(25): SEQ ID NO: 6483; WAN024FML_at; Start 397; Stop 421
gcgcaggtcaagcaaattaaaaaga

SEQ ID NO: 212401 - DNA, 25 bp, Artificial
  probe
  misc_feature (1)..(25): SEQ ID NO: 6483; WAN024FML_at; Start 339; Stop 363
tacatggcatggaggtggagcatac

SEQ ID NO: 212402 - DNA, 25 bp, Artificial
  probe
  misc_feature (1)..(25): SEQ ID NO: 6483; WAN024FML_at; Start 414; Stop 438
taaaaagagtgcagagttggaagat

SEQ ID NO: 212403 - DNA, 25 bp, Artificial
  probe
  misc_feature (1)..(25): SEQ ID NO: 6483; WAN024FML_at; Start 355; Stop 379
ggagcatacaaagatagtgacaatt

SEQ ID NO: 212404 - DNA, 25 bp, Artificial
  probe
  misc_feature (1)..(25): SEQ ID NO: 6483; WAN024FML_at; Start 169; Stop 193
cgttatgaattagtgtgggtgttga

SEQ ID NO: 212405 - DNA, 25 bp, Artificial
  probe
  misc_feature (1)..(25): SEQ ID NO: 6483; WAN024FML_at; Start 218; Stop 242
taaaagcagtaaagtatatgtcgtt

SEQ ID NO: 212406 - DNA, 25 bp, Artificial
  probe
  misc_feature (1)..(25): SEQ ID NO: 6483; WAN024FML_at; Start 1078; Stop 1102
ggaaatgcaactcaaaaaatagtgg

SEQ ID NO: 212407 - DNA, 25 bp, Artificial
  probe
  misc_feature (1)..(25): SEQ ID NO: 6483; WAN024FML_at; Start 646; Stop 670
gatgcttcagctattgaagagatag

SEQ ID NO: 212408 - DNA, 25 bp, Artificial
  probe
  misc_feature (1)..(25): SEQ ID NO: 6483; WAN024FML_at; Start 504; Stop 528
taaaatactagagatagggacacct

SEQ ID NO: 212409 - DNA, 25 bp, Artificial
  probe
  misc_feature (1)..(25): SEQ ID NO: 6483; WAN024FML_at; Start 1040; Stop 1064
tagagaaccataagattagatttgg

SEQ ID NO: 212410 - DNA, 25 bp, Artificial
  probe
  misc_feature (1)..(25): SEQ ID NO: 6483; WAN024FML_at; Start 514; Stop 538
gagatagggacacctcgaaatgatt

SEQ ID NO: 212411 - DNA, 25 bp, Artificial
  probe
  misc_feature (1)..(25): SEQ ID NO: 6483; WAN024FML_at; Start 450; Stop 474
gagttgtgcagtctttacaaaggaa

SEQ ID NO: 212412 - DNA, 25 bp, Artificial
  probe
  misc_feature (1)..(25): SEQ ID NO: 6483; WAN024FML_at; Start 958; Stop 982
tggaacattccatactttaaaacta

SEQ ID NO: 212413 - DNA, 25 bp, Artificial
  probe
  misc_feature (1)..(25): SEQ ID NO: 6483; WAN024FML_at; Start 695; Stop 719
taagagagacatatccaaaagtgag

SEQ ID NO: 212414 - DNA, 25 bp, Artificial
  probe
  misc_feature (1)..(25): SEQ ID NO: 6483; WAN024FML_at; Start 1024; Stop 1048
aatatggaagaaatgatagagaacc

SEQ ID NO: 212415 - DNA, 25 bp, Artificial
  probe
  misc_feature (1)..(25): SEQ ID NO: 6483; WAN024FML_at; Start 96; Stop 120
gctgaaaagttataatgcagagact

SEQ ID NO: 212416 - DNA, 25 bp, Artificial
  probe
  misc_feature (1)..(25): SEQ ID NO: 6483; WAN024FML_at; Start 188; Stop 212
tgttgaaggagccagaaaaatatcc

SEQ ID NO: 212417 - DNA, 25 bp, Artificial
  probe
  misc_feature (1)..(25): SEQ ID NO: 6483; WAN024FML_at; Start 270; Stop 294
tcaatacgtaatatcaaatacggga

SEQ ID NO: 212418 - DNA, 25 bp, Artificial
  probe
  misc_feature (1)..(25): SEQ ID NO: 6483; WAN024FML_at; Start 1064; Stop 1088
gaagttttgaacacggaaatgcaac

SEQ ID NO: 212419 - DNA, 25 bp, Artificial
  probe
  misc_feature (1)..(25): SEQ ID NO: 1161; WAN024FMM_at; Start 733; Stop 757
gggcatcaccttcaaaagaacttgg

SEQ ID NO: 212420 - DNA, 25 bp, Artificial
  probe
  misc_feature (1)..(25): SEQ ID NO: 1161; WAN024FMM_at; Start 327; Stop 351
gatatatctgaacacatggcacggg

SEQ ID NO: 212421 - DNA, 25 bp, Artificial
  probe
  misc_feature (1)..(25): SEQ ID NO: 1161; WAN024FMM_at; Start 542; Stop 566
taattcataaccatgataatgcttc

SEQ ID NO: 212422 - DNA, 25 bp, Artificial
  probe
  misc_feature (1)..(25): SEQ ID NO: 1161; WAN024FMM_at; Start 355; Stop 379
ggagcgtataaagatagtgacaatc

SEQ ID NO: 212423 - DNA, 25 bp, Artificial
  probe
  misc_feature (1)..(25): SEQ ID NO: 1161; WAN024FMM_at; Start 392; Stop 416
gtaaagcgcaaataacccaaactca

SEQ ID NO: 212424 - DNA, 25 bp, Artificial
  probe
  misc_feature (1)..(25): SEQ ID NO: 1161; WAN024FMM_at; Start 1065; Stop 1089
tagttttgaacatgggaacgctacc

SEQ ID NO: 212425 - DNA, 25 bp, Artificial
  probe
  misc_feature (1)..(25): SEQ ID NO: 1161; WAN024FMM_at; Start 444; Stop 468
tatttcgagttgtgccgtttttaca

SEQ ID NO: 212426 - DNA, 25 bp, Artificial
  probe
  misc_feature (1)..(25): SEQ ID NO: 1161; WAN024FMM_at; Start 646; Stop 670
gacgcttctactatagaggatttag

SEQ ID NO: 212427 - DNA, 25 bp, Artificial
  probe
  misc_feature (1)..(25): SEQ ID NO: 1161; WAN024FMM_at; Start 459; Stop 483
cgtttttacaaaggagtacgcagag

SEQ ID NO: 212428 - DNA, 25 bp, Artificial
  probe
  misc_feature (1)..(25): SEQ ID NO: 1161; WAN024FMM_at; Start 68; Stop 92
tgttgaaggtaagggaagaacgcat

SEQ ID NO: 212429 - DNA, 25 bp, Artificial
  probe
  misc_feature (1)..(25): SEQ ID NO: 1161; WAN024FMM_at; Start 844; Stop 868
gattactcatcatcaatttgggata

SEQ ID NO: 212430 - DNA, 25 bp, Artificial
  probe
  misc_feature (1)..(25): SEQ ID NO: 1161; WAN024FMM_at; Start 695; Stop 719
taagagaaaaatattcagaagtgac

SEQ ID NO: 212431 - DNA, 25 bp, Artificial
  probe
  misc_feature (1)..(25): SEQ ID NO: 1161; WAN024FMM_at; Start 587; Stop 611
gaagattaaatattgcagatgatca

SEQ ID NO: 212432 - DNA, 25 bp, Artificial
  probe
  misc_feature (1)..(25): SEQ ID NO: 1161; WAN024FMM_at; Start 974; Stop 998
ttaagactaatgaggagttgattca

SEQ ID NO: 212433 - DNA, 25 bp, Artificial
  probe
  misc_feature (1)..(25): SEQ ID NO: 1161; WAN024FMM_at; Start 870; Stop 894
gattcatggaggtaagaaagttttg

SEQ ID NO: 212434 - DNA, 25 bp, Artificial
  probe
  misc_feature (1)..(25): SEQ ID NO: 1161; WAN024FMM_at; Start 631; Stop 655
ccaacatggcgtgatgacgcttcta

SEQ ID NO: 212435 - DNA, 25 bp, Artificial
  probe
  misc_feature (1)..(25): SEQ ID NO: 1161; WAN024FMM_at; Start 475; Stop 499
tacgcagagaaaagactaggattca

SEQ ID NO: 212436 - DNA, 25 bp, Artificial
  probe
  misc_feature (1)..(25): SEQ ID NO: 1161; WAN024FMM_at; Start 518; Stop 542
tgggtacgccgagaaatgattatct

SEQ ID NO: 212437 - DNA, 25 bp, Artificial
  probe
  misc_feature (1)..(25): SEQ ID NO: 1161; WAN024FMM_at; Start 112; Stop 136
gcagaaaatatatcgtgtaatccaa

SEQ ID NO: 212438 - DNA, 25 bp, Artificial
  probe
  misc_feature (1)..(25): SEQ ID NO: 1161; WAN024FMM_at; Start 212; Stop 236
cggaggtaaaagctataaagtatat

SEQ ID NO: 212439 - DNA, 25 bp, Artificial
  probe
  misc_feature (1)..(25): SEQ ID NO: 1161; WAN024FMM_at; Start 1026; Stop 1050
catggacgaagtaatgaagaatcat

SEQ ID NO: 212440 - DNA, 25 bp, Artificial
  probe
  misc_feature (1)..(25): SEQ ID NO: 1161; WAN024FMM_at; Start 1010; Stop 1034
caaatggatttactaacatggacga

SEQ ID NO: 212441 - DNA, 25 bp, Artificial
  probe
  misc_feature (1)..(25): SEQ ID NO: 1161; WAN024FMM_at; Start 415; Stop 439
caaaaaagtgctgaattggaagatt

SEQ ID NO: 212442 - DNA, 25 bp, Artificial
  probe
  misc_feature (1)..(25): SEQ ID NO: 1161; WAN024FMM_at; Start 959; Stop 983
ggagtattccatattttaagactaa

SEQ ID NO: 212443 - DNA, 25 bp, Artificial
  probe
  misc_feature (1)..(25): SEQ ID NO: 1161; WAN024FMM_at; Start 404; Stop 428
taacccaaactcaaaaaagtgctga

SEQ ID NO: 212444 - DNA, 25 bp, Artificial
  probe
  misc_feature (1)..(25): SEQ ID NO: 1161; WAN024FMM_at; Start 376; Stop 400
aatctaagtaatataagtaaagcgc

SEQ ID NO: 212445 - DNA, 25 bp, Artificial
  probe
  misc_feature (1)..(25): SEQ ID NO: 1161; WAN024FMM_at; Start 1075; Stop 1099
catgggaacgctacccaaaaaatag

SEQ ID NO: 212446 - DNA, 25 bp, Artificial
  probe
  misc_feature (1)..(25): SEQ ID NO: 1161; WAN024FMM_at; Start 885; Stop 909
gaaagttttgttatatactccagat

SEQ ID NO: 212447 - DNA, 25 bp, Artificial
  probe
  misc_feature (1)..(25): SEQ ID NO: 1161; WAN024FMM_at; Start 676; Stop 700
gatagtttgctagagtgtttaagag

SEQ ID NO: 212448 - DNA, 25 bp, Artificial
  probe
  misc_feature (1)..(25): SEQ ID NO: 1161; WAN024FMM_at; Start 270; Stop 294
taagtatgtgataacaaatacaggt

SEQ ID NO: 212449 - DNA, 25 bp, Artificial
  probe
  misc_feature (1)..(25): SEQ ID NO: 1161; WAN024FMM_at; Start 717; Stop 741
gactattttagtccgagggcatcac

SEQ ID NO: 212450 - DNA, 25 bp, Artificial
  probe
  misc_feature (1)..(25): SEQ ID NO: 1161; WAN024FMM_at; Start 104; Stop 128
gctatgatgcagaaaatatatcgtg

SEQ ID NO: 212451 - DNA, 25 bp, Artificial
  probe
  misc_feature (1)..(25): SEQ ID NO: 1161; WAN024FMM_at; Start 600; Stop 624
tgcagatgatcatttcatagtaatc

SEQ ID NO: 212452 - DNA, 25 bp, Artificial
  probe
  misc_feature (1)..(25): SEQ ID NO: 1161; WAN024FMM_at; Start 256; Stop 280
tatatagcaacatctaagtatgtga

SEQ ID NO: 212453 - DNA, 25 bp, Artificial
  probe
  misc_feature (1)..(25): SEQ ID NO: 4007; WAN024FMN_at; Start 417; Stop 441
gatttctgggactcgagtccgtagt

SEQ ID NO: 212454 - DNA, 25 bp, Artificial
  probe
  misc_feature (1)..(25): SEQ ID NO: 4007; WAN024FMN_at; Start 570; Stop 594
gctgtatgatgaaacggattctcga

SEQ ID NO: 212455 - DNA, 25 bp, Artificial
  probe
  misc_feature (1)..(25): SEQ ID NO: 4007; WAN024FMN_at; Start 426; Stop 450
gactcgagtccgtagttatttagga

SEQ ID NO: 212456 - DNA, 25 bp, Artificial
  probe
  misc_feature (1)..(25): SEQ ID NO: 4007; WAN024FMN_at; Start 460; Stop 484
gcactattcccatctatcttgatga

SEQ ID NO: 212457 - DNA, 25 bp, Artificial
  probe
  misc_feature (1)..(25): SEQ ID NO: 4007; WAN024FMN_at; Start 730; Stop 754
tgggtctcctttacctatctcaatt

SEQ ID NO: 212458 - DNA, 25 bp, Artificial
  probe
  misc_feature (1)..(25): SEQ ID NO: 4007; WAN024FMN_at; Start 644; Stop 668
gatggatcccagaactattctctaa

SEQ ID NO: 212459 - DNA, 25 bp, Artificial
  probe
  misc_feature (1)..(25): SEQ ID NO: 4007; WAN024FMN_at; Start 894; Stop 918
gaccattgaaggagttagaaactat

SEQ ID NO: 212460 - DNA, 25 bp, Artificial
  probe
  misc_feature (1)..(25): SEQ ID NO: 4007; WAN024FMN_at; Start 788; Stop 812
aattagactatatattaggtggtcg

SEQ ID NO: 212461 - DNA, 25 bp, Artificial
  probe
  misc_feature (1)..(25): SEQ ID NO: 4007; WAN024FMN_at; Start 324; Stop 348
aagcgtggcaaaaacttctttagca

SEQ ID NO: 212462 - DNA, 25 bp, Artificial
  probe
  misc_feature (1)..(25): SEQ ID NO: 4007; WAN024FMN_at; Start 1020; Stop 1044
taaagtgattaagagacgcgaatgg

SEQ ID NO: 212463 - DNA, 25 bp, Artificial
  probe
  misc_feature (1)..(25): SEQ ID NO: 4007; WAN024FMN_at; Start 859; Stop 883
ttcggacgaccagttgaatggaatg

SEQ ID NO: 212464 - DNA, 25 bp, Artificial
  probe
  misc_feature (1)..(25): SEQ ID NO: 4007; WAN024FMN_at; Start 584; Stop 608
cggattctcgattaacattttatag

SEQ ID NO: 212465 - DNA, 25 bp, Artificial
  probe
  misc_feature (1)..(25): SEQ ID NO: 4007; WAN024FMN_at; Start 607; Stop 631
agttcctgtatattgttgatatgca

SEQ ID NO: 212466 - DNA, 25 bp, Artificial
  probe
  misc_feature (1)..(25): SEQ ID NO: 4007; WAN024FMN_at; Start 207; Stop 231
cataagtctatttgctacagttttg

SEQ ID NO: 212467 - DNA, 25 bp, Artificial
  probe
  misc_feature (1)..(25): SEQ ID NO: 4007; WAN024FMN_at; Start 1150; Stop 1174
taccccgattatcaattttctgatg

SEQ ID NO: 212468 - DNA, 25 bp, Artificial
  probe
  misc_feature (1)..(25): SEQ ID NO: 4007; WAN024FMN_at; Start 629; Stop 653
gcagtttattaataagatggatccc

SEQ ID NO: 212469 - DNA, 25 bp, Artificial
  probe
  misc_feature (1)..(25): SEQ ID NO: 4007; WAN024FMN_at; Start 970; Stop 994
ggtttactcgctctaggaataatgc

SEQ ID NO: 212470 - DNA, 25 bp, Artificial
  probe
  misc_feature (1)..(25): SEQ ID NO: 4007; WAN024FMN_at; Start 1070; Stop 1094
tgagttttcattccatgattgatga

SEQ ID NO: 212471 - DNA, 25 bp, Artificial
  probe
  misc_feature (1)..(25): SEQ ID NO: 4007; WAN024FMN_at; Start 100; Stop 124
tatgttcagtatcttccaaaagttg

SEQ ID NO: 212472 - DNA, 25 bp, Artificial
  probe
  misc_feature (1)..(25): SEQ ID NO: 4007; WAN024FMN_at; Start 559; Stop 583
tctgcttattggctgtatgatgaaa

SEQ ID NO: 212473 - DNA, 25 bp, Artificial
  probe
  misc_feature (1)..(25): SEQ ID NO: 4007; WAN024FMN_at; Start 844; Stop 868
tatggttttggattattcggacgac

SEQ ID NO: 212474 - DNA, 25 bp, Artificial
  probe
  misc_feature (1)..(25): SEQ ID NO: 4007; WAN024FMN_at; Start 985; Stop 1009
ggaataatgctcctagtcctaactt

SEQ ID NO: 212475 - DNA, 25 bp, Artificial
  probe
  misc_feature (1)..(25): SEQ ID NO: 4007; WAN024FMN_at; Start 714; Stop 738
tgcagttgttagtttttgggtctcc

SEQ ID NO: 212476 - DNA, 25 bp, Artificial
  probe
  misc_feature (1)..(25): SEQ ID NO: 4007; WAN024FMN_at; Start 17; Stop 41
taaaaagaaagtctttgccagagat

SEQ ID NO: 212477 - DNA, 25 bp, Artificial
  probe
  misc_feature (1)..(25): SEQ ID NO: 4007; WAN024FMN_at; Start 115; Stop 139
ccaaaagttgtttataagatactga

SEQ ID NO: 212478 - DNA, 25 bp, Artificial
  probe
  misc_feature (1)..(25): SEQ ID NO: 4007; WAN024FMN_at; Start 446; Stop 470
taggatttaggtacgcactattccc

SEQ ID NO: 212479 - DNA, 25 bp, Artificial
  probe
  misc_feature (1)..(25): SEQ ID NO: 4007; WAN024FMN_at; Start 476; Stop 500
tcttgatgatgaacatagtcgctat

SEQ ID NO: 212480 - DNA, 25 bp, Artificial
  probe
  misc_feature (1)..(25): SEQ ID NO: 4007; WAN024FMN_at; Start 224; Stop 248
cagttttgatgtatctccttatagg

SEQ ID NO: 212481 - DNA, 25 bp, Artificial
  probe
  misc_feature (1)..(25): SEQ ID NO: 4007; WAN024FMN_at; Start 1169; Stop 1193
ctgatgaaagtgatgaagagttagg

SEQ ID NO: 212482 - DNA, 25 bp, Artificial
  probe
  misc_feature (1)..(25): SEQ ID NO: 4007; WAN024FMN_at; Start 337; Stop 361
acttctttagcagtaagtgtactca

SEQ ID NO: 212483 - DNA, 25 bp, Artificial
  probe
  misc_feature (1)..(25): SEQ ID NO: 4007; WAN024FMN_at; Start 1034; Stop 1058
gacgcgaatgggttctgtcttttat

SEQ ID NO: 212484 - DNA, 25 bp, Artificial
  probe
  misc_feature (1)..(25): SEQ ID NO: 4007; WAN024FMN_at; Start 294; Stop 318
catttatgctttacgcgatattcct

SEQ ID NO: 212485 - DNA, 25 bp, Artificial
  probe
  misc_feature (1)..(25): SEQ ID NO: 4007; WAN024FMN_at; Start 245; Stop 269
tagggagggtgagtactcttaactc

SEQ ID NO: 212486 - DNA, 25 bp, Artificial
  probe
  misc_feature (1)..(25): SEQ ID NO: 4007; WAN024FMN_at; Start 911; Stop 935
gaaactatcagacctatctgtatgt

SEQ ID NO: 212487 - DNA, 25 bp, Artificial
  probe
  misc_feature (1)..(25): SEQ ID NO: 740; WAN024FMO_at; Start 1036; Stop 1060
cagtgggtcattgcttttattttaa

SEQ ID NO: 212488 - DNA, 25 bp, Artificial
  probe
  misc_feature (1)..(25): SEQ ID NO: 740; WAN024FMO_at; Start 527; Stop 551
ggtattggcagtggttattactaac

SEQ ID NO: 212489 - DNA, 25 bp, Artificial
  probe
  misc_feature (1)..(25): SEQ ID NO: 740; WAN024FMO_at; Start 902; Stop 926
gagtcaggaattatcagacctatct

SEQ ID NO: 212490 - DNA, 25 bp, Artificial
  probe
  misc_feature (1)..(25): SEQ ID NO: 740; WAN024FMO_at; Start 116; Stop 140
aaattgttcacaggatactgatagc

SEQ ID NO: 212491 - DNA, 25 bp, Artificial
  probe
  misc_feature (1)..(25): SEQ ID NO: 740; WAN024FMO_at; Start 742; Stop 766
tatctcggatcaaacaattcttttg

SEQ ID NO: 212492 - DNA, 25 bp, Artificial
  probe
  misc_feature (1)..(25): SEQ ID NO: 740; WAN024FMO_at; Start 376; Stop 400
gctagcgcaaagttgggagttatta

SEQ ID NO: 212493 - DNA, 25 bp, Artificial
  probe
  misc_feature (1)..(25): SEQ ID NO: 740; WAN024FMO_at; Start 337; Stop 361
tctttagcggtaagtgtgttcatgt

SEQ ID NO: 212494 - DNA, 25 bp, Artificial
  probe
  misc_feature (1)..(25): SEQ ID NO: 740; WAN024FMO_at; Start 891; Stop 915
gaccattgaaggagtcaggaattat

SEQ ID NO: 212495 - DNA, 25 bp, Artificial
  probe
  misc_feature (1)..(25): SEQ ID NO: 740; WAN024FMO_at; Start 787; Stop 811
ttaaatcacatgttaggtggtcgac

SEQ ID NO: 212496 - DNA, 25 bp, Artificial
  probe
  misc_feature (1)..(25): SEQ ID NO: 740; WAN024FMO_at; Start 428; Stop 452
gagtccgtagctatctaggtttcag

SEQ ID NO: 212497 - DNA, 25 bp, Artificial
  probe
  misc_feature (1)..(25): SEQ ID NO: 740; WAN024FMO_at; Start 567; Stop 591
ggtatatggacaaactgattctcgc

SEQ ID NO: 212498 - DNA, 25 bp, Artificial
  probe
  misc_feature (1)..(25): SEQ ID NO: 740; WAN024FMO_at; Start 103; Stop 127
cagtatctgccgaaaattgttcaca

SEQ ID NO: 212499 - DNA, 25 bp, Artificial
  probe
  misc_feature (1)..(25): SEQ ID NO: 740; WAN024FMO_at; Start 971; Stop 995
tactcgttctagttttaatgttagc

SEQ ID NO: 212500 - DNA, 25 bp, Artificial
  probe
  misc_feature (1)..(25): SEQ ID NO: 740; WAN024FMO_at; Start 1085; Stop 1109
tagacgatctaaacatgtaccttca

SEQ ID NO: 212501 - DNA, 25 bp, Artificial
  probe
  misc_feature (1)..(25): SEQ ID NO: 740; WAN024FMO_at; Start 14; Stop 38
tacaaagaaggtctttgccagaaat

SEQ ID NO: 212502 - DNA, 25 bp, Artificial
  probe
  misc_feature (1)..(25): SEQ ID NO: 740; WAN024FMO_at; Start 1021; Stop 1045
gctataaagaaagatcagtgggtca

SEQ ID NO: 212503 - DNA, 25 bp, Artificial
  probe
  misc_feature (1)..(25): SEQ ID NO: 740; WAN024FMO_at; Start 237; Stop 261
ccttatagggaagatgagtactttt

SEQ ID NO: 212504 - DNA, 25 bp, Artificial
  probe
  misc_feature (1)..(25): SEQ ID NO: 740; WAN024FMO_at; Start 1067; Stop 1091
tgagttttcaatccatgatagacga

SEQ ID NO: 212505 - DNA, 25 bp, Artificial
  probe
  misc_feature (1)..(25): SEQ ID NO: 740; WAN024FMO_at; Start 417; Stop 441
ttctgggccccgagtccgtagctat

SEQ ID NO: 212506 - DNA, 25 bp, Artificial
  probe
  misc_feature (1)..(25): SEQ ID NO: 740; WAN024FMO_at; Start 443; Stop 467
taggtttcagatatgccttgtatcc

SEQ ID NO: 212507 - DNA, 25 bp, Artificial
  probe
  misc_feature (1)..(25): SEQ ID NO: 740; WAN024FMO_at; Start 483; Stop 507
gaatgtcattgcgattacactttat

SEQ ID NO: 212508 - DNA, 25 bp, Artificial
  probe
  misc_feature (1)..(25): SEQ ID NO: 740; WAN024FMO_at; Start 471; Stop 495
aatcctacttatgaatgtcattgcg

SEQ ID NO: 212509 - DNA, 25 bp, Artificial
  probe
  misc_feature (1)..(25): SEQ ID NO: 740; WAN024FMO_at; Start 457; Stop 481
gccttgtatccatcaatcctactta

SEQ ID NO: 212510 - DNA, 25 bp, Artificial
  probe
  misc_feature (1)..(25): SEQ ID NO: 740; WAN024FMO_at; Start 360; Stop 384
gttactctttgttatagctagcgca

SEQ ID NO: 212511 - DNA, 25 bp, Artificial
  probe
  misc_feature (1)..(25): SEQ ID NO: 740; WAN024FMO_at; Start 291; Stop 315
tatttatgttttacgcgatatccct

SEQ ID NO: 212512 - DNA, 25 bp, Artificial
  probe
  misc_feature (1)..(25): SEQ ID NO: 740; WAN024FMO_at; Start 642; Stop 666
gtggttccctgatattttgtctaag

SEQ ID NO: 212513 - DNA, 25 bp, Artificial
  probe
  misc_feature (1)..(25): SEQ ID NO: 740; WAN024FMO_at; Start 626; Stop 650
tcaatatactaataaagtggttccc

SEQ ID NO: 212514 - DNA, 25 bp, Artificial
  probe
  misc_feature (1)..(25): SEQ ID NO: 740; WAN024FMO_at; Start 322; Stop 346
agtgtggcaaaaatttctttagcgg

SEQ ID NO: 212515 - DNA, 25 bp, Artificial
  probe
  misc_feature (1)..(25): SEQ ID NO: 740; WAN024FMO_at; Start 1151; Stop 1175
ctcagtatcactattctaatgaggg

SEQ ID NO: 212516 - DNA, 25 bp, Artificial
  probe
  misc_feature (1)..(25): SEQ ID NO: 740; WAN024FMO_at; Start 1131; Stop 1155
gataggaagtttaatatacactcag

SEQ ID NO: 212517 - DNA, 25 bp, Artificial
  probe
  misc_feature (1)..(25): SEQ ID NO: 740; WAN024FMO_at; Start 580; Stop 604
actgattctcgcttaacattttaca

SEQ ID NO: 212518 - DNA, 25 bp, Artificial
  probe
  misc_feature (1)..(25): SEQ ID NO: 740; WAN024FMO_at; Start 860; Stop 884
gaaaacaggttgactggaatggaaa

SEQ ID NO: 212519 - DNA, 25 bp, Artificial
  probe
  misc_feature (1)..(25): SEQ ID NO: 740; WAN024FMO_at; Start 551; Stop 575
ccttgtctgtttactgggtatatgg

SEQ ID NO: 212520 - DNA, 25 bp, Artificial
  probe
  misc_feature (1)..(25): SEQ ID NO: 740; WAN024FMO_at; Start 802; Stop 826
ggtggtcgacttttcttagctaata

SEQ ID NO: 212521 - DNA, 25 bp, Artificial
  probe
  misc_feature (1)..(25): SEQ ID NO: 871; WAN024FMP_at; Start 134; Stop 158
cacctgagtattctagtacgacacg

SEQ ID NO: 212522 - DNA, 25 bp, Artificial
  probe
  misc_feature (1)..(25): SEQ ID NO: 871; WAN024FMP_at; Start 194; Stop 218
cagggttgacgaaccaggatttgca

SEQ ID NO: 212523 - DNA, 25 bp, Artificial
  probe
  misc_feature (1)..(25): SEQ ID NO: 871; WAN024FMP_at; Start 562; Stop 586
ggagcagtgatggtagtttcagtct

SEQ ID NO: 212524 - DNA, 25 bp, Artificial
  probe
  misc_feature (1)..(25): SEQ ID NO: 871; WAN024FMP_at; Start 632; Stop 656
tggaagaagtaatgcagattgcact

SEQ ID NO: 212525 - DNA, 25 bp, Artificial
  probe
  misc_feature (1)..(25): SEQ ID NO: 871; WAN024FMP_at; Start 200; Stop 224
tgacgaaccaggatttgcaggctgg

SEQ ID NO: 212526 - DNA, 25 bp, Artificial
  probe
  misc_feature (1)..(25): SEQ ID NO: 871; WAN024FMP_at; Start 175; Stop 199
cgaaatcaatcggaaaaagcagggt

SEQ ID NO: 212527 - DNA, 25 bp, Artificial
  probe
  misc_feature (1)..(25): SEQ ID NO: 871; WAN024FMP_at; Start 163; Stop 187
tatgtggtcaatcgaaatcaatcgg

SEQ ID NO: 212528 - DNA, 25 bp, Artificial
  probe
  misc_feature (1)..(25): SEQ ID NO: 871; WAN024FMP_at; Start 387; Stop 411
tgcacaaccagaagaagctagccgt

SEQ ID NO: 212529 - DNA, 25 bp, Artificial
  probe
  misc_feature (1)..(25): SEQ ID NO: 871; WAN024FMP_at; Start 344; Stop 368
cagtacctgtggatactcgtatcgt

SEQ ID NO: 212530 - DNA, 25 bp, Artificial
  probe
  misc_feature (1)..(25): SEQ ID NO: 871; WAN024FMP_at; Start 94; Stop 118
gcagctgtcctagcttttgctgtaa

SEQ ID NO: 212531 - DNA, 25 bp, Artificial
  probe
  misc_feature (1)..(25): SEQ ID NO: 871; WAN024FMP_at; Start 326; Stop 350
gcaagaagattcaggtaacagtacc

SEQ ID NO: 212532 - DNA, 25 bp, Artificial
  probe
  misc_feature (1)..(25): SEQ ID NO: 871; WAN024FMP_at; Start 75; Stop 99
tatactaactgcgattgtagcagct

SEQ ID NO: 212533 - DNA, 25 bp, Artificial
  probe
  misc_feature (1)..(25): SEQ ID NO: 871; WAN024FMP_at; Start 311; Stop 335
cagttaaggaattaagcaagaagat

SEQ ID NO: 212534 - DNA, 25 bp, Artificial
  probe
  misc_feature (1)..(25): SEQ ID NO: 871; WAN024FMP_at; Start 289; Stop 313
tcaaatcttaaactagagaaaacag

SEQ ID NO: 212535 - DNA, 25 bp, Artificial
  probe
  misc_feature (1)..(25): SEQ ID NO: 871; WAN024FMP_at; Start 119; Stop 143
gtagttttgtactgacacctgagta

SEQ ID NO: 212536 - DNA, 25 bp, Artificial
  probe
  misc_feature (1)..(25): SEQ ID NO: 871; WAN024FMP_at; Start 227; Stop 251
cctatctggtaaaggactataagga

SEQ ID NO: 212537 - DNA, 25 bp, Artificial
  probe
  misc_feature (1)..(25): SEQ ID NO: 871; WAN024FMP_at; Start 506; Stop 530
taagtccttcatcacctaatattcg

SEQ ID NO: 212538 - DNA, 25 bp, Artificial
  probe
  misc_feature (1)..(25): SEQ ID NO: 871; WAN024FMP_at; Start 371; Stop 395
caattactgtaaaaaatgcacaacc

SEQ ID NO: 212539 - DNA, 25 bp, Artificial
  probe
  misc_feature (1)..(25): SEQ ID NO: 871; WAN024FMP_at; Start 84; Stop 108
tgcgattgtagcagctgtcctagct

SEQ ID NO: 212540 - DNA, 25 bp, Artificial
  probe
  misc_feature (1)..(25): SEQ ID NO: 871; WAN024FMP_at; Start 426; Stop 450
tcgtgaagtggctgctgaaaaaatc

SEQ ID NO: 212541 - DNA, 25 bp, Artificial
  probe
  misc_feature (1)..(25): SEQ ID NO: 871; WAN024FMP_at; Start 455; Stop 479
ctgtaactcgtgtatctgatgtgac

SEQ ID NO: 212542 - DNA, 25 bp, Artificial
  probe
  misc_feature (1)..(25): SEQ ID NO: 871; WAN024FMP_at; Start 106; Stop 130
gcttttgctgtaagtagttttgtac

SEQ ID NO: 212543 - DNA, 25 bp, Artificial
  probe
  misc_feature (1)..(25): SEQ ID NO: 871; WAN024FMP_at; Start 63; Stop 87
gaaaacctctattatactaactgcg

SEQ ID NO: 212544 - DNA, 25 bp, Artificial
  probe
  misc_feature (1)..(25): SEQ ID NO: 871; WAN024FMP_at; Start 442; Stop 466
gaaaaaatcatttctgtaactcgtg

SEQ ID NO: 212545 - DNA, 25 bp, Artificial
  probe
  misc_feature (1)..(25): SEQ ID NO: 871; WAN024FMP_at; Start 411; Stop 435
tatcgcaaatgctcttcgtgaagtg

SEQ ID NO: 212546 - DNA, 25 bp, Artificial
  probe
  misc_feature (1)..(25): SEQ ID NO: 871; WAN024FMP_at; Start 148; Stop 172
agtacgacacgtatttatgtggtca

SEQ ID NO: 212547 - DNA, 25 bp, Artificial
  probe
  misc_feature (1)..(25): SEQ ID NO: 871; WAN024FMP_at; Start 357; Stop 381
tactcgtatcgtatcaattactgta

SEQ ID NO: 212548 - DNA, 25 bp, Artificial
  probe
  misc_feature (1)..(25): SEQ ID NO: 871; WAN024FMP_at; Start 181; Stop 205
caatcggaaaaagcagggttgacga

SEQ ID NO: 212549 - DNA, 25 bp, Artificial
  probe
  misc_feature (1)..(25): SEQ ID NO: 871; WAN024FMP_at; Start 639; Stop 663
agtaatgcagattgcacttctaggg

SEQ ID NO: 212550 - DNA, 25 bp, Artificial
  probe
  misc_feature (1)..(25): SEQ ID NO: 871; WAN024FMP_at; Start 581; Stop 605
cagtcttgttacttgagttgttgga

SEQ ID NO: 212551 - DNA, 25 bp, Artificial
  probe
  misc_feature (1)..(25): SEQ ID NO: 871; WAN024FMP_at; Start 470; Stop 494
ctgatgtgacaacattggaagaagc

SEQ ID NO: 212552 - DNA, 25 bp, Artificial
  probe
  misc_feature (1)..(25): SEQ ID NO: 871; WAN024FMP_at; Start 400; Stop 424
gaagctagccgtatcgcaaatgctc

SEQ ID NO: 212553 - DNA, 25 bp, Artificial
  probe
  misc_feature (1)..(25): SEQ ID NO: 871; WAN024FMP_at; Start 234; Stop 258
ggtaaaggactataaggaaatcatc

SEQ ID NO: 212554 - DNA, 25 bp, Artificial
  probe
  misc_feature (1)..(25): SEQ ID NO: 871; WAN024FMP_at; Start 519; Stop 543
acctaatattcgtcgtaataccctg

SEQ ID NO: 212555 - DNA, 25 bp, Artificial
  probe
  misc_feature (1)..(25): SEQ ID NO: 4916; WAN024FMQ_at; Start 19; Stop 43
caaaaaatcacaccgttactatctt

SEQ ID NO: 212556 - DNA, 25 bp, Artificial
  probe
  misc_feature (1)..(25): SEQ ID NO: 4916; WAN024FMQ_at; Start 50; Stop 74
aattaaaagcaaagcaagtgattga

SEQ ID NO: 212557 - DNA, 25 bp, Artificial
  probe
  misc_feature (1)..(25): SEQ ID NO: 4916; WAN024FMQ_at; Start 27; Stop 51
cacaccgttactatcttcgaataaa

SEQ ID NO: 212558 - DNA, 25 bp, Artificial
  probe
  misc_feature (1)..(25): SEQ ID NO: 4916; WAN024FMQ_at; Start 40; Stop 64
tcttcgaataaattaaaagcaaagc

SEQ ID NO: 212559 - DNA, 25 bp, Artificial
  probe
  misc_feature (1)..(25): SEQ ID NO: 4916; WAN024FMQ_at; Start 61; Stop 85
aagcaagtgattgatagaaaatcgg

SEQ ID NO: 212560 - DNA, 25 bp, Artificial
  probe
  misc_feature (1)..(25): SEQ ID NO: 4916; WAN024FMQ_at; Start 64; Stop 88
caagtgattgatagaaaatcggctc

SEQ ID NO: 212561 - DNA, 25 bp, Artificial
  probe
  misc_feature (1)..(25): SEQ ID NO: 4916; WAN024FMQ_at; Start 68; Stop 92
tgattgatagaaaatcggctctttg

SEQ ID NO: 212562 - DNA, 25 bp, Artificial
  probe
  misc_feature (1)..(25): SEQ ID NO: 4916; WAN024FMQ_at; Start 62; Stop 86
agcaagtgattgatagaaaatcggc

SEQ ID NO: 212563 - DNA, 25 bp, Artificial
  probe
  misc_feature (1)..(25): SEQ ID NO: 4916; WAN024FMQ_at; Start 45; Stop 69
gaataaattaaaagcaaagcaagtg

SEQ ID NO: 212564 - DNA, 25 bp, Artificial
  probe
  misc_feature (1)..(25): SEQ ID NO: 4916; WAN024FMQ_at; Start 70; Stop 94
attgatagaaaatcggctctttgtc

SEQ ID NO: 212565 - DNA, 25 bp, Artificial
  probe
  misc_feature (1)..(25): SEQ ID NO: 4916; WAN024FMQ_at; Start 65; Stop 89
aagtgattgatagaaaatcggctct

SEQ ID NO: 212566 - DNA, 25 bp, Artificial
  probe
  misc_feature (1)..(25): SEQ ID NO: 4916; WAN024FMQ_at; Start 69; Stop 93
gattgatagaaaatcggctctttgt

SEQ ID NO: 212567 - DNA, 25 bp, Artificial
  probe
  misc_feature (1)..(25): SEQ ID NO: 4916; WAN024FMQ_at; Start 54; Stop 78
aaaagcaaagcaagtgattgataga

SEQ ID NO: 212568 - DNA, 25 bp, Artificial
  probe
  misc_feature (1)..(25): SEQ ID NO: 4916; WAN024FMQ_at; Start 48; Stop 72
taaattaaaagcaaagcaagtgatt

SEQ ID NO: 212569 - DNA, 25 bp, Artificial
  probe
  misc_feature (1)..(25): SEQ ID NO: 4916; WAN024FMQ_at; Start 43; Stop 67
tcgaataaattaaaagcaaagcaag

SEQ ID NO: 212570 - DNA, 25 bp, Artificial
  probe
  misc_feature (1)..(25): SEQ ID NO: 4916; WAN024FMQ_at; Start 44; Stop 68
cgaataaattaaaagcaaagcaagt

SEQ ID NO: 212571 - DNA, 25 bp, Artificial
  probe
  misc_feature (1)..(25): SEQ ID NO: 4916; WAN024FMQ_at; Start 71; Stop 95
ttgatagaaaatcggctctttgtca

SEQ ID NO: 212572 - DNA, 25 bp, Artificial
  probe
  misc_feature (1)..(25): SEQ ID NO: 4916; WAN024FMQ_at; Start 29; Stop 53
caccgttactatcttcgaataaatt

SEQ ID NO: 212573 - DNA, 25 bp, Artificial
  probe
  misc_feature (1)..(25): SEQ ID NO: 4916; WAN024FMQ_at; Start 26; Stop 50
tcacaccgttactatcttcgaataa

SEQ ID NO: 212574 - DNA, 25 bp, Artificial
  probe
  misc_feature (1)..(25): SEQ ID NO: 4916; WAN024FMQ_at; Start 23; Stop 47
aaatcacaccgttactatcttcgaa

SEQ ID NO: 212575 - DNA, 25 bp, Artificial
  probe
  misc_feature (1)..(25): SEQ ID NO: 4916; WAN024FMQ_at; Start 67; Stop 91
gtgattgatagaaaatcggctcttt

SEQ ID NO: 212576 - DNA, 25 bp, Artificial
  probe
  misc_feature (1)..(25): SEQ ID NO: 4916; WAN024FMQ_at; Start 28; Stop 52
acaccgttactatcttcgaataaat

SEQ ID NO: 212577 - DNA, 25 bp, Artificial
  probe
  misc_feature (1)..(25): SEQ ID NO: 4916; WAN024FMQ_at; Start 22; Stop 46
aaaatcacaccgttactatcttcga

SEQ ID NO: 212578 - DNA, 25 bp, Artificial
  probe
  misc_feature (1)..(25): SEQ ID NO: 4916; WAN024FMQ_at; Start 35; Stop 59
tactatcttcgaataaattaaaagc

SEQ ID NO: 212579 - DNA, 25 bp, Artificial
  probe
  misc_feature (1)..(25): SEQ ID NO: 4916; WAN024FMQ_at; Start 59; Stop 83
caaagcaagtgattgatagaaaatc

SEQ ID NO: 212580 - DNA, 25 bp, Artificial
  probe
  misc_feature (1)..(25): SEQ ID NO: 4916; WAN024FMQ_at; Start 58; Stop 82
gcaaagcaagtgattgatagaaaat

SEQ ID NO: 212581 - DNA, 25 bp, Artificial
  probe
  misc_feature (1)..(25): SEQ ID NO: 4916; WAN024FMQ_at; Start 63; Stop 87
gcaagtgattgatagaaaatcggct

SEQ ID NO: 212582 - DNA, 25 bp, Artificial
  probe
  misc_feature (1)..(25): SEQ ID NO: 4916; WAN024FMQ_at; Start 21; Stop 45
aaaaatcacaccgttactatcttcg

SEQ ID NO: 212583 - DNA, 25 bp, Artificial
  probe
  misc_feature (1)..(25): SEQ ID NO: 4916; WAN024FMQ_at; Start 66; Stop 90
agtgattgatagaaaatcggctctt

SEQ ID NO: 212584 - DNA, 25 bp, Artificial
  probe
  misc_feature (1)..(25): SEQ ID NO: 4916; WAN024FMQ_at; Start 74; Stop 98
atagaaaatcggctctttgtcaact

SEQ ID NO: 212585 - DNA, 25 bp, Artificial
  probe
  misc_feature (1)..(25): SEQ ID NO: 4916; WAN024FMQ_at; Start 56; Stop 80
aagcaaagcaagtgattgatagaaa

SEQ ID NO: 212586 - DNA, 25 bp, Artificial
  probe
  misc_feature (1)..(25): SEQ ID NO: 4916; WAN024FMQ_at; Start 53; Stop 77
taaaagcaaagcaagtgattgatag

SEQ ID NO: 212587 - DNA, 25 bp, Artificial
  probe
  misc_feature (1)..(25): SEQ ID NO: 4916; WAN024FMQ_at; Start 55; Stop 79
aaagcaaagcaagtgattgatagaa

SEQ ID NO: 212588 - DNA, 25 bp, Artificial
  probe
  misc_feature (1)..(25): SEQ ID NO: 4916; WAN024FMQ_at; Start 24; Stop 48
aatcacaccgttactatcttcgaat

SEQ ID NO: 212589 - DNA, 25 bp, Artificial
  probe
  misc_feature (1)..(25): SEQ ID NO: 730; WAN024FMR_at; Start 943; Stop 967
caagctggtgatgtagttgcaacct

SEQ ID NO: 212590 - DNA, 25 bp, Artificial
  probe
  misc_feature (1)..(25): SEQ ID NO: 730; WAN024FMR_at; Start 904; Stop 928
gattatgatttctcatctgctcaga

SEQ ID NO: 212591 - DNA, 25 bp, Artificial
  probe
  misc_feature (1)..(25): SEQ ID NO: 730; WAN024FMR_at; Start 165; Stop 189
tcgtttatcaacaattcaagaggag

SEQ ID NO: 212592 - DNA, 25 bp, Artificial
  probe
  misc_feature (1)..(25): SEQ ID NO: 730; WAN024FMR_at; Start 787; Stop 811
gggttaccaattcctccttatgcta

SEQ ID NO: 212593 - DNA, 25 bp, Artificial
  probe
  misc_feature (1)..(25): SEQ ID NO: 730; WAN024FMR_at; Start 307; Stop 331
caagcaggtgttcgttattctatca

SEQ ID NO: 212594 - DNA, 25 bp, Artificial
  probe
  misc_feature (1)..(25): SEQ ID NO: 730; WAN024FMR_at; Start 1014; Stop 1038
gactagtcttagaaatggcttgaga

SEQ ID NO: 212595 - DNA, 25 bp, Artificial
  probe
  misc_feature (1)..(25): SEQ ID NO: 730; WAN024FMR_at; Start 49; Stop 73
gcagctggctttattggtgctaatc

SEQ ID NO: 212596 - DNA, 25 bp, Artificial
  probe
  misc_feature (1)..(25): SEQ ID NO: 730; WAN024FMR_at; Start 256; Stop 280
gaagaaatttttgagacgtatagac

SEQ ID NO: 212597 - DNA, 25 bp, Artificial
  probe
  misc_feature (1)..(25): SEQ ID NO: 730; WAN024FMR_at; Start 715; Stop 739
tatattgacgatattgttgaaggcg

SEQ ID NO: 212598 - DNA, 25 bp, Artificial
  probe
  misc_feature (1)..(25): SEQ ID NO: 730; WAN024FMR_at; Start 961; Stop 985
gcaacctatgcagatataagtctat

SEQ ID NO: 212599 - DNA, 25 bp, Artificial
  probe
  misc_feature (1)..(25): SEQ ID NO: 730; WAN024FMR_at; Start 511; Stop 535
tatgcagttacgaagaaaacaaatg

SEQ ID NO: 212600 - DNA, 25 bp, Artificial
  probe
  misc_feature (1)..(25): SEQ ID NO: 730; WAN024FMR_at; Start 478; Stop 502
gaattagatgcagtagacaatcctg

SEQ ID NO: 212601 - DNA, 25 bp, Artificial
  probe
  misc_feature (1)..(25): SEQ ID NO: 730; WAN024FMR_at; Start 176; Stop 200
caattcaagaggagtgtcaatcatc

SEQ ID NO: 212602 - DNA, 25 bp, Artificial
  probe
  misc_feature (1)..(25): SEQ ID NO: 730; WAN024FMR_at; Start 740; Stop 764
ttaaaagagtgatgactggagctcc

SEQ ID NO: 212603 - DNA, 25 bp, Artificial
  probe
  misc_feature (1)..(25): SEQ ID NO: 730; WAN024FMR_at; Start 771; Stop 795
agaaattggagaagatgggttacca

SEQ ID NO: 212604 - DNA, 25 bp, Artificial
  probe
  misc_feature (1)..(25): SEQ ID NO: 730; WAN024FMR_at; Start 225; Stop 249
caaaggagatattgctgattctgat

SEQ ID NO: 212605 - DNA, 25 bp, Artificial
  probe
  misc_feature (1)..(25): SEQ ID NO: 730; WAN024FMR_at; Start 814; Stop 838
tataatattggaaatcaccaaccag

SEQ ID NO: 212606 - DNA, 25 bp, Artificial
  probe
  misc_feature (1)..(25): SEQ ID NO: 730; WAN024FMR_at; Start 33; Stop 57
aattcttgttacaggagcagctggc

SEQ ID NO: 212607 - DNA, 25 bp, Artificial
  probe
  misc_feature (1)..(25): SEQ ID NO: 730; WAN024FMR_at; Start 755; Stop 779
ctggagctcctcaaaaagaaattgg

SEQ ID NO: 212608 - DNA, 25 bp, Artificial
  probe
  misc_feature (1)..(25): SEQ ID NO: 730; WAN024FMR_at; Start 927; Stop 951
gaaacttgttccaatgcaagctggt

SEQ ID NO: 212609 - DNA, 25 bp, Artificial
  probe
  misc_feature (1)..(25): SEQ ID NO: 730; WAN024FMR_at; Start 493; Stop 517
gacaatcctgtttctttatatgcag

SEQ ID NO: 212610 - DNA, 25 bp, Artificial
  probe
  misc_feature (1)..(25): SEQ ID NO: 730; WAN024FMR_at; Start 530; Stop 554
caaatgaattagaagcacatgcgta

SEQ ID NO: 212611 - DNA, 25 bp, Artificial
  probe
  misc_feature (1)..(25): SEQ ID NO: 730; WAN024FMR_at; Start 878; Stop 902
tgatagctgcttctattttaccaga

SEQ ID NO: 212612 - DNA, 25 bp, Artificial
  probe
  misc_feature (1)..(25): SEQ ID NO: 730; WAN024FMR_at; Start 1031; Stop 1055
gcttgagaaattttgcagaatggta

SEQ ID NO: 212613 - DNA, 25 bp, Artificial
  probe
  misc_feature (1)..(25): SEQ ID NO: 730; WAN024FMR_at; Start 434; Stop 458
catcctcttctgtttatggtggaaa

SEQ ID NO: 212614 - DNA, 25 bp, Artificial
  probe
  misc_feature (1)..(25): SEQ ID NO: 730; WAN024FMR_at; Start 863; Stop 887
tcttgcaagaaaaattgatagctgc

SEQ ID NO: 212615 - DNA, 25 bp, Artificial
  probe
  misc_feature (1)..(25): SEQ ID NO: 730; WAN024FMR_at; Start 578; Stop 602
caacaggcctgagattttttacagt

SEQ ID NO: 212616 - DNA, 25 bp, Artificial
  probe
  misc_feature (1)..(25): SEQ ID NO: 730; WAN024FMR_at; Start 597; Stop 621
tacagtttatggaccagctggaaga

SEQ ID NO: 212617 - DNA, 25 bp, Artificial
  probe
  misc_feature (1)..(25): SEQ ID NO: 730; WAN024FMR_at; Start 684; Stop 708
caattatgggaattgtcaacgtgat

SEQ ID NO: 212618 - DNA, 25 bp, Artificial
  probe
  misc_feature (1)..(25): SEQ ID NO: 730; WAN024FMR_at; Start 270; Stop 294
gacgtatagacctcaaattgtagtg

SEQ ID NO: 212619 - DNA, 25 bp, Artificial
  probe
  misc_feature (1)..(25): SEQ ID NO: 730; WAN024FMR_at; Start 544; Stop 568
gcacatgcgtattcaaaattgtaca

SEQ ID NO: 212620 - DNA, 25 bp, Artificial
  probe
  misc_feature (1)..(25): SEQ ID NO: 730; WAN024FMR_at; Start 290; Stop 314
tagtgaatttggcagcacaagcagg

SEQ ID NO: 212621 - DNA, 25 bp, Artificial
  probe
  misc_feature (1)..(25): SEQ ID NO: 730; WAN024FMR_at; Start 611; Stop 635
cagctggaagacctgatatggctta

SEQ ID NO: 212622 - DNA, 25 bp, Artificial
  probe
  misc_feature (1)..(25): SEQ ID NO: 730; WAN024FMR_at; Start 564; Stop 588
gtacaatattccaacaacaggcctg

SEQ ID NO: 212623 - DNA, 25 bp, Artificial
  probe
  misc_feature (1)..(25): SEQ ID NO: 5276; WAN024FMS_at; Start 194; Stop 218
tcatctgtaatagcaccataaggtg

SEQ ID NO: 212624 - DNA, 25 bp, Artificial
  probe
  misc_feature (1)..(25): SEQ ID NO: 5276; WAN024FMS_at; Start 122; Stop 146
tcatttttactcttccagtccagac

SEQ ID NO: 212625 - DNA, 25 bp, Artificial
  probe
  misc_feature (1)..(25): SEQ ID NO: 5276; WAN024FMS_at; Start 116; Stop 140
gatgcttcatttttactcttccagt

SEQ ID NO: 212626 - DNA, 25 bp, Artificial
  probe
  misc_feature (1)..(25): SEQ ID NO: 5276; WAN024FMS_at; Start 40; Stop 64
gactgtcggactgtgaatatcatgc

SEQ ID NO: 212627 - DNA, 25 bp, Artificial
  probe
  misc_feature (1)..(25): SEQ ID NO: 5276; WAN024FMS_at; Start 64; Stop 88
catcaaaacgatagagccattagct

SEQ ID NO: 212628 - DNA, 25 bp, Artificial
  probe
  misc_feature (1)..(25): SEQ ID NO: 5276; WAN024FMS_at; Start 212; Stop 236
taaggtggacgcatgagtttagaac

SEQ ID NO: 212629 - DNA, 25 bp, Artificial
  probe
  misc_feature (1)..(25): SEQ ID NO: 5276; WAN024FMS_at; Start 199; Stop 223
tgtaatagcaccataaggtggacgc

SEQ ID NO: 212630 - DNA, 25 bp, Artificial
  probe
  misc_feature (1)..(25): SEQ ID NO: 5276; WAN024FMS_at; Start 206; Stop 230
gcaccataaggtggacgcatgagtt

SEQ ID NO: 212631 - DNA, 25 bp, Artificial
  probe
  misc_feature (1)..(25): SEQ ID NO: 5276; WAN024FMS_at; Start 26; Stop 50
cttggcaaggcattgactgtcggac

SEQ ID NO: 212632 - DNA, 25 bp, Artificial
  probe
  misc_feature (1)..(25): SEQ ID NO: 5276; WAN024FMS_at; Start 165; Stop 189
taaagctcaaatccaagctattgcg

SEQ ID NO: 212633 - DNA, 25 bp, Artificial
  probe
  misc_feature (1)..(25): SEQ ID NO: 5276; WAN024FMS_at; Start 169; Stop 193
gctcaaatccaagctattgcgaata

SEQ ID NO: 212634 - DNA, 25 bp, Artificial
  probe
  misc_feature (1)..(25): SEQ ID NO: 5276; WAN024FMS_at; Start 147; Stop 171
tatccacatcccacatgataaagct

SEQ ID NO: 212635 - DNA, 25 bp, Artificial
  probe
  misc_feature (1)..(25): SEQ ID NO: 5276; WAN024FMS_at; Start 22; Stop 46
gacccttggcaaggcattgactgtc

SEQ ID NO: 212636 - DNA, 25 bp, Artificial
  probe
  misc_feature (1)..(25): SEQ ID NO: 5276; WAN024FMS_at; Start 57; Stop 81
tatcatgcatcaaaacgatagagcc

SEQ ID NO: 212637 - DNA, 25 bp, Artificial
  probe
  misc_feature (1)..(25): SEQ ID NO: 5276; WAN024FMS_at; Start 226; Stop 250
gagtttagaactagaacccagcact

SEQ ID NO: 212638 - DNA, 25 bp, Artificial
  probe
  misc_feature (1)..(25): SEQ ID NO: 5276; WAN024FMS_at; Start 219; Stop 243
gacgcatgagtttagaactagaacc

SEQ ID NO: 212639 - DNA, 25 bp, Artificial
  probe
  misc_feature (1)..(25): SEQ ID NO: 5276; WAN024FMS_at; Start 215; Stop 239
ggtggacgcatgagtttagaactag

SEQ ID NO: 212640 - DNA, 25 bp, Artificial
  probe
  misc_feature (1)..(25): SEQ ID NO: 5276; WAN024FMS_at; Start 99; Stop 123
gaatttctgtcaaaatagatgcttc

SEQ ID NO: 212641 - DNA, 25 bp, Artificial
  probe
  misc_feature (1)..(25): SEQ ID NO: 5276; WAN024FMS_at; Start 158; Stop 182
cacatgataaagctcaaatccaagc

SEQ ID NO: 212642 - DNA, 25 bp, Artificial
  probe
  misc_feature (1)..(25): SEQ ID NO: 5276; WAN024FMS_at; Start 230; Stop 254
ttagaactagaacccagcactttag

SEQ ID NO: 212643 - DNA, 25 bp, Artificial
  probe
  misc_feature (1)..(25): SEQ ID NO: 5276; WAN024FMS_at; Start 14; Stop 38
tactcaatgacccttggcaaggcat

SEQ ID NO: 212644 - DNA, 25 bp, Artificial
  probe
  misc_feature (1)..(25): SEQ ID NO: 5276; WAN024FMS_at; Start 187; Stop 211
gcgaatatcatctgtaatagcacca

SEQ ID NO: 212645 - DNA, 25 bp, Artificial
  probe
  misc_feature (1)..(25): SEQ ID NO: 5276; WAN024FMS_at; Start 36; Stop 60
cattgactgtcggactgtgaatatc

SEQ ID NO: 212646 - DNA, 25 bp, Artificial
  probe
  misc_feature (1)..(25): SEQ ID NO: 5276; WAN024FMS_at; Start 3; Stop 27
gatttttcaaatactcaatgaccct

SEQ ID NO: 212647 - DNA, 25 bp, Artificial
  probe
  misc_feature (1)..(25): SEQ ID NO: 5276; WAN024FMS_at; Start 70; Stop 94
aacgatagagccattagctacttga

SEQ ID NO: 212648 - DNA, 25 bp, Artificial
  probe
  misc_feature (1)..(25): SEQ ID NO: 5276; WAN024FMS_at; Start 234; Stop 258
aactagaacccagcactttagttag

SEQ ID NO: 212649 - DNA, 25 bp, Artificial
  probe
  misc_feature (1)..(25): SEQ ID NO: 5276; WAN024FMS_at; Start 151; Stop 175
cacatcccacatgataaagctcaaa

SEQ ID NO: 212650 - DNA, 25 bp, Artificial
  probe
  misc_feature (1)..(25): SEQ ID NO: 5276; WAN024FMS_at; Start 178; Stop 202
caagctattgcgaatatcatctgta

SEQ ID NO: 212651 - DNA, 25 bp, Artificial
  probe
  misc_feature (1)..(25): SEQ ID NO: 5276; WAN024FMS_at; Start 209; Stop 233
ccataaggtggacgcatgagtttag

SEQ ID NO: 212652 - DNA, 25 bp, Artificial
  probe
  misc_feature (1)..(25): SEQ ID NO: 5276; WAN024FMS_at; Start 46; Stop 70
cggactgtgaatatcatgcatcaaa

SEQ ID NO: 212653 - DNA, 25 bp, Artificial
  probe
  misc_feature (1)..(25): SEQ ID NO: 5276; WAN024FMS_at; Start 31; Stop 55
caaggcattgactgtcggactgtga

SEQ ID NO: 212654 - DNA, 25 bp, Artificial
  probe
  misc_feature (1)..(25): SEQ ID NO: 5276; WAN024FMS_at; Start 142; Stop 166
cagactatccacatcccacatgata

SEQ ID NO: 212655 - DNA, 25 bp, Artificial
  probe
  misc_feature (1)..(25): SEQ ID NO: 5276; WAN024FMS_at; Start 11; Stop 35
aaatactcaatgacccttggcaagg

SEQ ID NO: 212656 - DNA, 25 bp, Artificial
  probe
  misc_feature (1)..(25): SEQ ID NO: 5276; WAN024FMS_at; Start 128; Stop 152
ttactcttccagtccagactatcca

SEQ ID NO: 212657 - DNA, 25 bp, Artificial
  probe
  misc_feature (1)..(25): SEQ ID NO: 5328; WAN024FMT_at; Start 960; Stop 984
gaaaaatgtttctgggaatgaggac

SEQ ID NO: 212658 - DNA, 25 bp, Artificial
  probe
  misc_feature (1)..(25): SEQ ID NO: 5328; WAN024FMT_at; Start 874; Stop 898
gatgatggtccaaatccagcaacga

SEQ ID NO: 212659 - DNA, 25 bp, Artificial
  probe
  misc_feature (1)..(25): SEQ ID NO: 5328; WAN024FMT_at; Start 75; Stop 99
tggcagacacgggaaaacgagacat

SEQ ID NO: 212660 - DNA, 25 bp, Artificial
  probe
  misc_feature (1)..(25): SEQ ID NO: 5328; WAN024FMT_at; Start 1003; Stop 1027
tctgaaggtcatgttgttggaaacc

SEQ ID NO: 212661 - DNA, 25 bp, Artificial
  probe
  misc_feature (1)..(25): SEQ ID NO: 5328; WAN024FMT_at; Start 422; Stop 446
gagtcgttaatcgtaatgtgaccaa

SEQ ID NO: 212662 - DNA, 25 bp, Artificial
  probe
  misc_feature (1)..(25): SEQ ID NO: 5328; WAN024FMT_at; Start 1034; Stop 1058
ggagccatccgattctctcgcaact

SEQ ID NO: 212663 - DNA, 25 bp, Artificial
  probe
  misc_feature (1)..(25): SEQ ID NO: 5328; WAN024FMT_at; Start 1370; Stop 1394
cctttgtgaccataccagagatgct

SEQ ID NO: 212664 - DNA, 25 bp, Artificial
  probe
  misc_feature (1)..(25): SEQ ID NO: 5328; WAN024FMT_at; Start 739; Stop 763
aatttagaagagatagccttgccag

SEQ ID NO: 212665 - DNA, 25 bp, Artificial
  probe
  misc_feature (1)..(25): SEQ ID NO: 5328; WAN024FMT_at; Start 1170; Stop 1194
tattcgcaatagcttggatttgagc

SEQ ID NO: 212666 - DNA, 25 bp, Artificial
  probe
  misc_feature (1)..(25): SEQ ID NO: 5328; WAN024FMT_at; Start 561; Stop 585
tgctagtaaggctaaggaacagctg

SEQ ID NO: 212667 - DNA, 25 bp, Artificial
  probe
  misc_feature (1)..(25): SEQ ID NO: 5328; WAN024FMT_at; Start 1101; Stop 1125
tgtgctaactaaagtgctgggttct

SEQ ID NO: 212668 - DNA, 25 bp, Artificial
  probe
  misc_feature (1)..(25): SEQ ID NO: 5328; WAN024FMT_at; Start 544; Stop 568
gaccaactgttttcagatgctagta

SEQ ID NO: 212669 - DNA, 25 bp, Artificial
  probe
  misc_feature (1)..(25): SEQ ID NO: 5328; WAN024FMT_at; Start 623; Stop 647
tagagcaagaccagagtgagcagat

SEQ ID NO: 212670 - DNA, 25 bp, Artificial
  probe
  misc_feature (1)..(25): SEQ ID NO: 5328; WAN024FMT_at; Start 579; Stop 603
acagctgataaaagagttgacctcc

SEQ ID NO: 212671 - DNA, 25 bp, Artificial
  probe
  misc_feature (1)..(25): SEQ ID NO: 5328; WAN024FMT_at; Start 351; Stop 375
taaggacaagctagaaagtaaggac

SEQ ID NO: 212672 - DNA, 25 bp, Artificial
  probe
  misc_feature (1)..(25): SEQ ID NO: 5328; WAN024FMT_at; Start 854; Stop 878
aagttgtcgctctaacctttgatga

SEQ ID NO: 212673 - DNA, 25 bp, Artificial
  probe
  misc_feature (1)..(25): SEQ ID NO: 5328; WAN024FMT_at; Start 793; Stop 817
tcgtacttactcgaaaaagatgcgg

SEQ ID NO: 212674 - DNA, 25 bp, Artificial
  probe
  misc_feature (1)..(25): SEQ ID NO: 5328; WAN024FMT_at; Start 244; Stop 268
aatcagaaggagcattttcgtcagg

SEQ ID NO: 212675 - DNA, 25 bp, Artificial
  probe
  misc_feature (1)..(25): SEQ ID NO: 5328; WAN024FMT_at; Start 128; Stop 152
caatttctatttgcctattaggcgg

SEQ ID NO: 212676 - DNA, 25 bp, Artificial
  probe
  misc_feature (1)..(25): SEQ ID NO: 5328; WAN024FMT_at; Start 708; Stop 732
gattatcctttatccaagtcctgtg

SEQ ID NO: 212677 - DNA, 25 bp, Artificial
  probe
  misc_feature (1)..(25): SEQ ID NO: 5328; WAN024FMT_at; Start 511; Stop 535
cacttaacagaagatgggcaacctt

SEQ ID NO: 212678 - DNA, 25 bp, Artificial
  probe
  misc_feature (1)..(25): SEQ ID NO: 5328; WAN024FMT_at; Start 1296; Stop 1320
gatgcatgatattcacagtccgaca

SEQ ID NO: 212679 - DNA, 25 bp, Artificial
  probe
  misc_feature (1)..(25): SEQ ID NO: 5328; WAN024FMT_at; Start 391; Stop 415
tatacagagcaagaagagtcaggtt

SEQ ID NO: 212680 - DNA, 25 bp, Artificial
  probe
  misc_feature (1)..(25): SEQ ID NO: 5328; WAN024FMT_at; Start 58; Stop 82
aaaagtagactaggacgtggcagac

SEQ ID NO: 212681 - DNA, 25 bp, Artificial
  probe
  misc_feature (1)..(25): SEQ ID NO: 5328; WAN024FMT_at; Start 1314; Stop 1338
tccgacagtcaatgccttgccaagg

SEQ ID NO: 212682 - DNA, 25 bp, Artificial
  probe
  misc_feature (1)..(25): SEQ ID NO: 5328; WAN024FMT_at; Start 1086; Stop 1110
tactgatactgaggatgtgctaact

SEQ ID NO: 212683 - DNA, 25 bp, Artificial
  probe
  misc_feature (1)..(25): SEQ ID NO: 5328; WAN024FMT_at; Start 1385; Stop 1409
cagagatgctcaatactcgcctaaa

SEQ ID NO: 212684 - DNA, 25 bp, Artificial
  probe
  misc_feature (1)..(25): SEQ ID NO: 5328; WAN024FMT_at; Start 940; Stop 964
gcgactttctttgtgcttgggaaaa

SEQ ID NO: 212685 - DNA, 25 bp, Artificial
  probe
  misc_feature (1)..(25): SEQ ID NO: 5328; WAN024FMT_at; Start 811; Stop 835
gatgcggccttgtaccaatcttact

SEQ ID NO: 212686 - DNA, 25 bp, Artificial
  probe
  misc_feature (1)..(25): SEQ ID NO: 5328; WAN024FMT_at; Start 523; Stop 547
gatgggcaaccttttacacttgacc

SEQ ID NO: 212687 - DNA, 25 bp, Artificial
  probe
  misc_feature (1)..(25): SEQ ID NO: 5328; WAN024FMT_at; Start 492; Stop 516
gaccagtctaggaaaggttcactta

SEQ ID NO: 212688 - DNA, 25 bp, Artificial
  probe
  misc_feature (1)..(25): SEQ ID NO: 5328; WAN024FMT_at; Start 897; Stop 921
gaccccgcaggtattagagacccta

SEQ ID NO: 212689 - DNA, 25 bp, Artificial
  probe
  misc_feature (1)..(25): SEQ ID NO: 5328; WAN024FMT_at; Start 282; Stop 306
gattgcctattatcctctccaaggg

SEQ ID NO: 212690 - DNA, 25 bp, Artificial
  probe
  misc_feature (1)..(25): SEQ ID NO: 5328; WAN024FMT_at; Start 309; Stop 333
gaaagtgatttcctctgttagggag

SEQ ID NO: 212691 - DNA, 25 bp, Artificial
  probe
  misc_feature (1)..(25): SEQ ID NO: 4193; WAN024FMU_at; Start 432; Stop 456
ggtgaaatcagtaacaacttatctt

SEQ ID NO: 212692 - DNA, 25 bp, Artificial
  probe
  misc_feature (1)..(25): SEQ ID NO: 4193; WAN024FMU_at; Start 84; Stop 108
tcagttttgttcacatttagaacgc

SEQ ID NO: 212693 - DNA, 25 bp, Artificial
  probe
  misc_feature (1)..(25): SEQ ID NO: 4193; WAN024FMU_at; Start 142; Stop 166
aatcaagatggacattttgtagctc

SEQ ID NO: 212694 - DNA, 25 bp, Artificial
  probe
  misc_feature (1)..(25): SEQ ID NO: 4193; WAN024FMU_at; Start 67; Stop 91
gaagcagcagactttattcagtttt

SEQ ID NO: 212695 - DNA, 25 bp, Artificial
  probe
  misc_feature (1)..(25): SEQ ID NO: 4193; WAN024FMU_at; Start 379; Stop 403
caatccgctttttatataccaggta

SEQ ID NO: 212696 - DNA, 25 bp, Artificial
  probe
  misc_feature (1)..(25): SEQ ID NO: 4193; WAN024FMU_at; Start 391; Stop 415
tatataccaggtattgaaacaaaaa

SEQ ID NO: 212697 - DNA, 25 bp, Artificial
  probe
  misc_feature (1)..(25): SEQ ID NO: 4193; WAN024FMU_at; Start 492; Stop 516
cgactttgtagagtttttgaataca

SEQ ID NO: 212698 - DNA, 25 bp, Artificial
  probe
  misc_feature (1)..(25): SEQ ID NO: 4193; WAN024FMU_at; Start 39; Stop 63
tcgttctcccactatcaatatgtat

SEQ ID NO: 212699 - DNA, 25 bp, Artificial
  probe
  misc_feature (1)..(25): SEQ ID NO: 4193; WAN024FMU_at; Start 17; Stop 41
gtcatgatttgggtctacaatttcg

SEQ ID NO: 212700 - DNA, 25 bp, Artificial
  probe
  misc_feature (1)..(25): SEQ ID NO: 4193; WAN024FMU_at; Start 241; Stop 265
gccaaaagagtagattttgatcaat

SEQ ID NO: 212701 - DNA, 25 bp, Artificial
  probe
  misc_feature (1)..(25): SEQ ID NO: 4193; WAN024FMU_at; Start 196; Stop 220
cattataatagctttgaagagtttg

SEQ ID NO: 212702 - DNA, 25 bp, Artificial
  probe
  misc_feature (1)..(25): SEQ ID NO: 4193; WAN024FMU_at; Start 321; Stop 345
tgatacgttaccctataagaataaa

SEQ ID NO: 212703 - DNA, 25 bp, Artificial
  probe
  misc_feature (1)..(25): SEQ ID NO: 4193; WAN024FMU_at; Start 106; Stop 130
cgctatttaaaagaagacttatctt

SEQ ID NO: 212704 - DNA, 25 bp, Artificial
  probe
  misc_feature (1)..(25): SEQ ID NO: 4193; WAN024FMU_at; Start 224; Stop 248
aaaaatggtctgaacgtgccaaaag

SEQ ID NO: 212705 - DNA, 25 bp, Artificial
  probe
  misc_feature (1)..(25): SEQ ID NO: 4193; WAN024FMU_at; Start 54; Stop 78
caatatgtatatagaagcagcagac

SEQ ID NO: 212706 - DNA, 25 bp, Artificial
  probe
  misc_feature (1)..(25): SEQ ID NO: 4193; WAN024FMU_at; Start 366; Stop 390
gatgccagaaattcaatccgctttt

SEQ ID NO: 212707 - DNA, 25 bp, Artificial
  probe
  misc_feature (1)..(25): SEQ ID NO: 4193; WAN024FMU_at; Start 28; Stop 52
ggtctacaatttcgttctcccacta

SEQ ID NO: 212708 - DNA, 25 bp, Artificial
  probe
  misc_feature (1)..(25): SEQ ID NO: 4193; WAN024FMU_at; Start 518; Stop 542
gaaggaaacaattaagtaagtatga

SEQ ID NO: 212709 - DNA, 25 bp, Artificial
  probe
  misc_feature (1)..(25): SEQ ID NO: 4193; WAN024FMU_at; Start 270; Stop 294
tcttatgatgtctgaacgagatggc

SEQ ID NO: 212710 - DNA, 25 bp, Artificial
  probe
  misc_feature (1)..(25): SEQ ID NO: 4193; WAN024FMU_at; Start 354; Stop 378
tacaagtaaaaagatgccagaaatt

SEQ ID NO: 212711 - DNA, 25 bp, Artificial
  probe
  misc_feature (1)..(25): SEQ ID NO: 4193; WAN024FMU_at; Start 7; Stop 31
ggactgattagtcatgatttgggtc

SEQ ID NO: 212712 - DNA, 25 bp, Artificial
  probe
  misc_feature (1)..(25): SEQ ID NO: 4193; WAN024FMU_at; Start 150; Stop 174
tggacattttgtagctctttgtggg

SEQ ID NO: 212713 - DNA, 25 bp, Artificial
  probe
  misc_feature (1)..(25): SEQ ID NO: 4193; WAN024FMU_at; Start 460; Stop 484
tcctttacaggaaaacgatatatag

SEQ ID NO: 212714 - DNA, 25 bp, Artificial
  probe
  misc_feature (1)..(25): SEQ ID NO: 4193; WAN024FMU_at; Start 275; Stop 299
tgatgtctgaacgagatggctgtcg

SEQ ID NO: 212715 - DNA, 25 bp, Artificial
  probe
  misc_feature (1)..(25): SEQ ID NO: 4193; WAN024FMU_at; Start 421; Stop 445
caaaaacataaggtgaaatcagtaa

SEQ ID NO: 212716 - DNA, 25 bp, Artificial
  probe
  misc_feature (1)..(25): SEQ ID NO: 4193; WAN024FMU_at; Start 446; Stop 470
caacttatcttaactcctttacagg

SEQ ID NO: 212717 - DNA, 25 bp, Artificial
  probe
  misc_feature (1)..(25): SEQ ID NO: 4193; WAN024FMU_at; Start 286; Stop 310
cgagatggctgtcgttatgaagata

SEQ ID NO: 212718 - DNA, 25 bp, Artificial
  probe
  misc_feature (1)..(25): SEQ ID NO: 4193; WAN024FMU_at; Start 509; Stop 533
tgaatacaggaaggaaacaattaag

SEQ ID NO: 212719 - DNA, 25 bp, Artificial
  probe
  misc_feature (1)..(25): SEQ ID NO: 4193; WAN024FMU_at; Start 293; Stop 317
gctgtcgttatgaagatattgtgaa

SEQ ID NO: 212720 - DNA, 25 bp, Artificial
  probe
  misc_feature (1)..(25): SEQ ID NO: 4193; WAN024FMU_at; Start 97; Stop 121
catttagaacgctatttaaaagaag

SEQ ID NO: 212721 - DNA, 25 bp, Artificial
  probe
  misc_feature (1)..(25): SEQ ID NO: 4193; WAN024FMU_at; Start 309; Stop 333
tattgtgaagtttgatacgttaccc

SEQ ID NO: 212722 - DNA, 25 bp, Artificial
  probe
  misc_feature (1)..(25): SEQ ID NO: 4193; WAN024FMU_at; Start 232; Stop 256
tctgaacgtgccaaaagagtagatt

SEQ ID NO: 212723 - DNA, 25 bp, Artificial
  probe
  misc_feature (1)..(25): SEQ ID NO: 4193; WAN024FMU_at; Start 130; Stop 154
tttattgaagtaaatcaagatggac

SEQ ID NO: 212724 - DNA, 25 bp, Artificial
  probe
  misc_feature (1)..(25): SEQ ID NO: 4193; WAN024FMU_at; Start 480; Stop 504
tatagatttattcgactttgtagag

SEQ ID NO: 212725 - DNA, 25 bp, Artificial
  probe
  misc_feature (1)..(25): SEQ ID NO: 7474; WAN024FMV_at; Start 45; Stop 69
agagattacgttttttccagaatca

SEQ ID NO: 212726 - DNA, 25 bp, Artificial
  probe
  misc_feature (1)..(25): SEQ ID NO: 7474; WAN024FMV_at; Start 78; Stop 102
aaaatttagtccagagcattataat

SEQ ID NO: 212727 - DNA, 25 bp, Artificial
  probe
  misc_feature (1)..(25): SEQ ID NO: 7474; WAN024FMV_at; Start 30; Stop 54
taaaatattatttgaagagattacg

SEQ ID NO: 212728 - DNA, 25 bp, Artificial
  probe
  misc_feature (1)..(25): SEQ ID NO: 7474; WAN024FMV_at; Start 127; Stop 151
ttactggagaagcaagatggaaaca

SEQ ID NO: 212729 - DNA, 25 bp, Artificial
  probe
  misc_feature (1)..(25): SEQ ID NO: 7474; WAN024FMV_at; Start 89; Stop 113
cagagcattataatttagagtttgg

SEQ ID NO: 212730 - DNA, 25 bp, Artificial
  probe
  misc_feature (1)..(25): SEQ ID NO: 7474; WAN024FMV_at; Start 71; Stop 95
gttttggaaaatttagtccagagca

SEQ ID NO: 212731 - DNA, 25 bp, Artificial
  probe
  misc_feature (1)..(25): SEQ ID NO: 7474; WAN024FMV_at; Start 46; Stop 70
gagattacgttttttccagaatcag

SEQ ID NO: 212732 - DNA, 25 bp, Artificial
  probe
  misc_feature (1)..(25): SEQ ID NO: 7474; WAN024FMV_at; Start 47; Stop 71
agattacgttttttccagaatcagg

SEQ ID NO: 212733 - DNA, 25 bp, Artificial
  probe
  misc_feature (1)..(25): SEQ ID NO: 7474; WAN024FMV_at; Start 121; Stop 145
attactttactggagaagcaagatg

SEQ ID NO: 212734 - DNA, 25 bp, Artificial
  probe
  misc_feature (1)..(25): SEQ ID NO: 7474; WAN024FMV_at; Start 128; Stop 152
tactggagaagcaagatggaaacaa

SEQ ID NO: 212735 - DNA, 25 bp, Artificial
  probe
  misc_feature (1)..(25): SEQ ID NO: 7474; WAN024FMV_at; Start 62; Stop 86
cagaatcaggttttggaaaatttag

SEQ ID NO: 212736 - DNA, 25 bp, Artificial
  probe
  misc_feature (1)..(25): SEQ ID NO: 7474; WAN024FMV_at; Start 94; Stop 118
cattataatttagagtttggaaagg

SEQ ID NO: 212737 - DNA, 25 bp, Artificial
  probe
  misc_feature (1)..(25): SEQ ID NO: 7474; WAN024FMV_at; Start 84; Stop 108
tagtccagagcattataatttagag

SEQ ID NO: 212738 - DNA, 25 bp, Artificial
  probe
  misc_feature (1)..(25): SEQ ID NO: 7474; WAN024FMV_at; Start 4; Stop 28
aggtgcgatttttatattgtgaatg

SEQ ID NO: 212739 - DNA, 25 bp, Artificial
  probe
  misc_feature (1)..(25): SEQ ID NO: 7474; WAN024FMV_at; Start 8; Stop 32
gcgatttttatattgtgaatgataa

SEQ ID NO: 212740 - DNA, 25 bp, Artificial
  probe
  misc_feature (1)..(25): SEQ ID NO: 7474; WAN024FMV_at; Start 75; Stop 99
tggaaaatttagtccagagcattat

SEQ ID NO: 212741 - DNA, 25 bp, Artificial
  probe
  misc_feature (1)..(25): SEQ ID NO: 7474; WAN024FMV_at; Start 82; Stop 106
tttagtccagagcattataatttag

SEQ ID NO: 212742 - DNA, 25 bp, Artificial
  probe
  misc_feature (1)..(25): SEQ ID NO: 7474; WAN024FMV_at; Start 124; Stop 148
actttactggagaagcaagatggaa

SEQ ID NO: 212743 - DNA, 25 bp, Artificial
  probe
  misc_feature (1)..(25): SEQ ID NO: 7474; WAN024FMV_at; Start 120; Stop 144
tattactttactggagaagcaagat

SEQ ID NO: 212744 - DNA, 25 bp, Artificial
  probe
  misc_feature (1)..(25): SEQ ID NO: 7474; WAN024FMV_at; Start 123; Stop 147
tactttactggagaagcaagatgga

SEQ ID NO: 212745 - DNA, 25 bp, Artificial
  probe
  misc_feature (1)..(25): SEQ ID NO: 7474; WAN024FMV_at; Start 125; Stop 149
ctttactggagaagcaagatggaaa

SEQ ID NO: 212746 - DNA, 25 bp, Artificial
  probe
  misc_feature (1)..(25): SEQ ID NO: 7474; WAN024FMV_at; Start 77; Stop 101
gaaaatttagtccagagcattataa

SEQ ID NO: 212747 - DNA, 25 bp, Artificial
  probe
  misc_feature (1)..(25): SEQ ID NO: 7474; WAN024FMV_at; Start 72; Stop 96
ttttggaaaatttagtccagagcat

SEQ ID NO: 212748 - DNA, 25 bp, Artificial
  probe
  misc_feature (1)..(25): SEQ ID NO: 7474; WAN024FMV_at; Start 126; Stop 150
tttactggagaagcaagatggaaac

SEQ ID NO: 212749 - DNA, 25 bp, Artificial
  probe
  misc_feature (1)..(25): SEQ ID NO: 7474; WAN024FMV_at; Start 129; Stop 153
actggagaagcaagatggaaacaaa

SEQ ID NO: 212750 - DNA, 25 bp, Artificial
  probe
  misc_feature (1)..(25): SEQ ID NO: 7474; WAN024FMV_at; Start 91; Stop 115
gagcattataatttagagtttggaa

SEQ ID NO: 212751 - DNA, 25 bp, Artificial
  probe
  misc_feature (1)..(25): SEQ ID NO: 7474; WAN024FMV_at; Start 42; Stop 66
tgaagagattacgttttttccagaa

SEQ ID NO: 212752 - DNA, 25 bp, Artificial
  probe
  misc_feature (1)..(25): SEQ ID NO: 7474; WAN024FMV_at; Start 76; Stop 100
ggaaaatttagtccagagcattata

SEQ ID NO: 212753 - DNA, 25 bp, Artificial
  probe
  misc_feature (1)..(25): SEQ ID NO: 7474; WAN024FMV_at; Start 74; Stop 98
ttggaaaatttagtccagagcatta

SEQ ID NO: 212754 - DNA, 25 bp, Artificial
  probe
  misc_feature (1)..(25): SEQ ID NO: 7474; WAN024FMV_at; Start 85; Stop 109
agtccagagcattataatttagagt

SEQ ID NO: 212755 - DNA, 25 bp, Artificial
  probe
  misc_feature (1)..(25): SEQ ID NO: 7474; WAN024FMV_at; Start 88; Stop 112
ccagagcattataatttagagtttg

SEQ ID NO: 212756 - DNA, 25 bp, Artificial
  probe
  misc_feature (1)..(25): SEQ ID NO: 7474; WAN024FMV_at; Start 2; Stop 26
tgaggtgcgatttttatattgtgaa

SEQ ID NO: 212757 - DNA, 25 bp, Artificial
  probe
  misc_feature (1)..(25): SEQ ID NO: 7474; WAN024FMV_at; Start 122; Stop 146
ttactttactggagaagcaagatgg

SEQ ID NO: 212758 - DNA, 25 bp, Artificial
  probe
  misc_feature (1)..(25): SEQ ID NO: 7474; WAN024FMV_at; Start 86; Stop 110
gtccagagcattataatttagagtt

SEQ ID NO: 212759 - DNA, 25 bp, Artificial
  probe
  misc_feature (1)..(25): SEQ ID NO: 6441; WAN024FMW_at; Start 408; Stop 432
tatttttggtcgtgaatggccttat

SEQ ID NO: 212760 - DNA, 25 bp, Artificial
  probe
  misc_feature (1)..(25): SEQ ID NO: 6441; WAN024FMW_at; Start 624; Stop 648
tccgtccgataaaaataagacgata

SEQ ID NO: 212761 - DNA, 25 bp, Artificial
  probe
  misc_feature (1)..(25): SEQ ID NO: 6441; WAN024FMW_at; Start 220; Stop 244
gaatatgttattccgactcttggtg

SEQ ID NO: 212762 - DNA, 25 bp, Artificial
  probe
  misc_feature (1)..(25): SEQ ID NO: 6441; WAN024FMW_at; Start 799; Stop 823
tatccagaacagtatgatgtagagt

SEQ ID NO: 212763 - DNA, 25 bp, Artificial
  probe
  misc_feature (1)..(25): SEQ ID NO: 6441; WAN024FMW_at; Start 553; Stop 577
gaccgttttacaaatcataagagaa

SEQ ID NO: 212764 - DNA, 25 bp, Artificial
  probe
  misc_feature (1)..(25): SEQ ID NO: 6441; WAN024FMW_at; Start 651; Stop 675
gaagcctgctgaactgtctgaaatg

SEQ ID NO: 212765 - DNA, 25 bp, Artificial
  probe
  misc_feature (1)..(25): SEQ ID NO: 6441; WAN024FMW_at; Start 701; Stop 725
aagagatgccatttgtgagatgtga

SEQ ID NO: 212766 - DNA, 25 bp, Artificial
  probe
  misc_feature (1)..(25): SEQ ID NO: 6441; WAN024FMW_at; Start 315; Stop 339
tagtggcagtattatcattgtaaaa

SEQ ID NO: 212767 - DNA, 25 bp, Artificial
  probe
  misc_feature (1)..(25): SEQ ID NO: 6441; WAN024FMW_at; Start 665; Stop 689
tgtctgaaatgattgaacttgtgag

SEQ ID NO: 212768 - DNA, 25 bp, Artificial
  probe
  misc_feature (1)..(25): SEQ ID NO: 6441; WAN024FMW_at; Start 471; Stop 495
gacggatgaatcgaatcaagaatta

SEQ ID NO: 212769 - DNA, 25 bp, Artificial
  probe
  misc_feature (1)..(25): SEQ ID NO: 6441; WAN024FMW_at; Start 591; Stop 615
caactggaagcagcaagaatttatg

SEQ ID NO: 212770 - DNA, 25 bp, Artificial
  probe
  misc_feature (1)..(25): SEQ ID NO: 6441; WAN024FMW_at; Start 283; Stop 307
ccaaattcttttgtgatgaaaacca

SEQ ID NO: 212771 - DNA, 25 bp, Artificial
  probe
  misc_feature (1)..(25): SEQ ID NO: 6441; WAN024FMW_at; Start 95; Stop 119
taaaaaatcctaagaccttcaatga

SEQ ID NO: 212772 - DNA, 25 bp, Artificial
  probe
  misc_feature (1)..(25): SEQ ID NO: 6441; WAN024FMW_at; Start 231; Stop 255
tccgactcttggtgtttatcatcat

SEQ ID NO: 212773 - DNA, 25 bp, Artificial
  probe
  misc_feature (1)..(25): SEQ ID NO: 6441; WAN024FMW_at; Start 330; Stop 354
cattgtaaaaaacaaagaagacttg

SEQ ID NO: 212774 - DNA, 25 bp, Artificial
  probe
  misc_feature (1)..(25): SEQ ID NO: 6441; WAN024FMW_at; Start 459; Stop 483
tgaagagtttatgacggatgaatcg

SEQ ID NO: 212775 - DNA, 25 bp, Artificial
  probe
  misc_feature (1)..(25): SEQ ID NO: 6441; WAN024FMW_at; Start 185; Stop 209
tagtgaaggactatattgccaagac

SEQ ID NO: 212776 - DNA, 25 bp, Artificial
  probe
  misc_feature (1)..(25): SEQ ID NO: 6441; WAN024FMW_at; Start 686; Stop 710
tgagaaaattatcaaaagagatgcc

SEQ ID NO: 212777 - DNA, 25 bp, Artificial
  probe
  misc_feature (1)..(25): SEQ ID NO: 6441; WAN024FMW_at; Start 192; Stop 216
ggactatattgccaagacacttggg

SEQ ID NO: 212778 - DNA, 25 bp, Artificial
  probe
  misc_feature (1)..(25): SEQ ID NO: 6441; WAN024FMW_at; Start 608; Stop 632
aatttatgtatgcttttccgtccga

SEQ ID NO: 212779 - DNA, 25 bp, Artificial
  probe
  misc_feature (1)..(25): SEQ ID NO: 6441; WAN024FMW_at; Start 581; Stop 605
tttatgatagcaactggaagcagca

SEQ ID NO: 212780 - DNA, 25 bp, Artificial
  probe
  misc_feature (1)..(25): SEQ ID NO: 6441; WAN024FMW_at; Start 744; Stop 768
caaaattttgtttggtgagatgact

SEQ ID NO: 212781 - DNA, 25 bp, Artificial
  probe
  misc_feature (1)..(25): SEQ ID NO: 6441; WAN024FMW_at; Start 110; Stop 134
ccttcaatgaaaaattacaatggct

SEQ ID NO: 212782 - DNA, 25 bp, Artificial
  probe
  misc_feature (1)..(25): SEQ ID NO: 6441; WAN024FMW_at; Start 172; Stop 196
gcggataagattttagtgaaggact

SEQ ID NO: 212783 - DNA, 25 bp, Artificial
  probe
  misc_feature (1)..(25): SEQ ID NO: 6441; WAN024FMW_at; Start 762; Stop 786
gatgactttttgtccaggttcaggg

SEQ ID NO: 212784 - DNA, 25 bp, Artificial
  probe
  misc_feature (1)..(25): SEQ ID NO: 6441; WAN024FMW_at; Start 637; Stop 661
aataagacgatagagaagcctgctg

SEQ ID NO: 212785 - DNA, 25 bp, Artificial
  probe
  misc_feature (1)..(25): SEQ ID NO: 6441; WAN024FMW_at; Start 359; Stop 383
ttcaagaagcaagagaaaagctaca

SEQ ID NO: 212786 - DNA, 25 bp, Artificial
  probe
  misc_feature (1)..(25): SEQ ID NO: 6441; WAN024FMW_at; Start 844; Stop 868
ccggagaagcatgaatggaaacaaa

SEQ ID NO: 212787 - DNA, 25 bp, Artificial
  probe
  misc_feature (1)..(25): SEQ ID NO: 6441; WAN024FMW_at; Start 523; Stop 547
ggtcttcctaagtttgttcatgtag

SEQ ID NO: 212788 - DNA, 25 bp, Artificial
  probe
  misc_feature (1)..(25): SEQ ID NO: 6441; WAN024FMW_at; Start 422; Stop 446
aatggccttataaaaatattgaacg

SEQ ID NO: 212789 - DNA, 25 bp, Artificial
  probe
  misc_feature (1)..(25): SEQ ID NO: 6441; WAN024FMW_at; Start 540; Stop 564
tcatgtagattatgaccgttttaca

SEQ ID NO: 212790 - DNA, 25 bp, Artificial
  probe
  misc_feature (1)..(25): SEQ ID NO: 6441; WAN024FMW_at; Start 300; Stop 324
gaaaaccaatcatgatagtggcagt

SEQ ID NO: 212791 - DNA, 25 bp, Artificial
  probe
  misc_feature (1)..(25): SEQ ID NO: 6441; WAN024FMW_at; Start 262; Stop 286
gagattgattttgatgagcttccaa

SEQ ID NO: 212792 - DNA, 25 bp, Artificial
  probe
  misc_feature (1)..(25): SEQ ID NO: 6441; WAN024FMW_at; Start 837; Stop 861
tactttaccggagaagcatgaatgg

SEQ ID NO: 212793 - DNA, 25 bp, Artificial
  probe
  misc_feature (1)..(25): SEQ ID NO: 2145; WAN024FMX_at; Start 222; Stop 246
gaccttaagaagagaaaatgtcttg

SEQ ID NO: 212794 - DNA, 25 bp, Artificial
  probe
  misc_feature (1)..(25): SEQ ID NO: 2145; WAN024FMX_at; Start 359; Stop 383
tgaacttgagaatgtatcgggatgt

SEQ ID NO: 212795 - DNA, 25 bp, Artificial
  probe
  misc_feature (1)..(25): SEQ ID NO: 2145; WAN024FMX_at; Start 1274; Stop 1298
cgatgacttttctgccaatccttgg

SEQ ID NO: 212796 - DNA, 25 bp, Artificial
  probe
  misc_feature (1)..(25): SEQ ID NO: 2145; WAN024FMX_at; Start 808; Stop 832
tcagcagtagaagagtttgaagaag

SEQ ID NO: 212797 - DNA, 25 bp, Artificial
  probe
  misc_feature (1)..(25): SEQ ID NO: 2145; WAN024FMX_at; Start 626; Stop 650
tattgaaatattcagcacccatgat

SEQ ID NO: 212798 - DNA, 25 bp, Artificial
  probe
  misc_feature (1)..(25): SEQ ID NO: 2145; WAN024FMX_at; Start 857; Stop 881
aagtttttcaccaatattatgcagc

SEQ ID NO: 212799 - DNA, 25 bp, Artificial
  probe
  misc_feature (1)..(25): SEQ ID NO: 2145; WAN024FMX_at; Start 588; Stop 612
tactagcggaagatttgaaaaacaa

SEQ ID NO: 212800 - DNA, 25 bp, Artificial
  probe
  misc_feature (1)..(25): SEQ ID NO: 2145; WAN024FMX_at; Start 927; Stop 951
tatgaaagtatatgttagtccaagc

SEQ ID NO: 212801 - DNA, 25 bp, Artificial
  probe
  misc_feature (1)..(25): SEQ ID NO: 2145; WAN024FMX_at; Start 464; Stop 488
tagcgagtattgtctttctagttcc

SEQ ID NO: 212802 - DNA, 25 bp, Artificial
  probe
  misc_feature (1)..(25): SEQ ID NO: 2145; WAN024FMX_at; Start 1108; Stop 1132
gcgatgtttattcctatgcttggag

SEQ ID NO: 212803 - DNA, 25 bp, Artificial
  probe
  misc_feature (1)..(25): SEQ ID NO: 2145; WAN024FMX_at; Start 653; Stop 677
taaatggtattgcatggtggattac

SEQ ID NO: 212804 - DNA, 25 bp, Artificial
  probe
  misc_feature (1)..(25): SEQ ID NO: 2145; WAN024FMX_at; Start 1336; Stop 1360
taccaagaacaggaatttctagcag

SEQ ID NO: 212805 - DNA, 25 bp, Artificial
  probe
  misc_feature (1)..(25): SEQ ID NO: 2145; WAN024FMX_at; Start 1293; Stop 1317
ccttggcattgttttttcagtcgta

SEQ ID NO: 212806 - DNA, 25 bp, Artificial
  probe
  misc_feature (1)..(25): SEQ ID NO: 2145; WAN024FMX_at; Start 1122; Stop 1146
tatgcttggagtattaggcgcttcc

SEQ ID NO: 212807 - DNA, 25 bp, Artificial
  probe
  misc_feature (1)..(25): SEQ ID NO: 2145; WAN024FMX_at; Start 777; Stop 801
tactggagtatttaatcaggcatgg

SEQ ID NO: 212808 - DNA, 25 bp, Artificial
  probe
  misc_feature (1)..(25): SEQ ID NO: 2145; WAN024FMX_at; Start 942; Stop 966
tagtccaagcttttatgaagcatgg

SEQ ID NO: 212809 - DNA, 25 bp, Artificial
  probe
  misc_feature (1)..(25): SEQ ID NO: 2145; WAN024FMX_at; Start 312; Stop 336
gctctatcctactttgtcagagtgg

SEQ ID NO: 212810 - DNA, 25 bp, Artificial
  probe
  misc_feature (1)..(25): SEQ ID NO: 2145; WAN024FMX_at; Start 957; Stop 981
tgaagcatggcaatatgctccgttt

SEQ ID NO: 212811 - DNA, 25 bp, Artificial
  probe
  misc_feature (1)..(25): SEQ ID NO: 2145; WAN024FMX_at; Start 1062; Stop 1086
tatatacacgacgattgctggtgct

SEQ ID NO: 212812 - DNA, 25 bp, Artificial
  probe
  misc_feature (1)..(25): SEQ ID NO: 2145; WAN024FMX_at; Start 555; Stop 579
tatcttatttttcggaggagtctgg

SEQ ID NO: 212813 - DNA, 25 bp, Artificial
  probe
  misc_feature (1)..(25): SEQ ID NO: 2145; WAN024FMX_at; Start 747; Stop 771
tgcaaagttacccttattaatcgga

SEQ ID NO: 212814 - DNA, 25 bp, Artificial
  probe
  misc_feature (1)..(25): SEQ ID NO: 2145; WAN024FMX_at; Start 992; Stop 1016
caagtgtagtttcaggaatcgccgc

SEQ ID NO: 212815 - DNA, 25 bp, Artificial
  probe
  misc_feature (1)..(25): SEQ ID NO: 2145; WAN024FMX_at; Start 703; Stop 727
caatggtttatggatgatagagcgg

SEQ ID NO: 212816 - DNA, 25 bp, Artificial
  probe
  misc_feature (1)..(25): SEQ ID NO: 2145; WAN024FMX_at; Start 376; Stop 400
cgggatgtttttgcgattcaattga

SEQ ID NO: 212817 - DNA, 25 bp, Artificial
  probe
  misc_feature (1)..(25): SEQ ID NO: 2145; WAN024FMX_at; Start 668; Stop 692
ggtggattacaaatgcctcagatcg

SEQ ID NO: 212818 - DNA, 25 bp, Artificial
  probe
  misc_feature (1)..(25): SEQ ID NO: 2145; WAN024FMX_at; Start 1023; Stop 1047
gacaggtttttatgttgcgcaaaag

SEQ ID NO: 212819 - DNA, 25 bp, Artificial
  probe
  misc_feature (1)..(25): SEQ ID NO: 2145; WAN024FMX_at; Start 1258; Stop 1282
tgtattcagaccattacgatgactt

SEQ ID NO: 212820 - DNA, 25 bp, Artificial
  probe
  misc_feature (1)..(25): SEQ ID NO: 2145; WAN024FMX_at; Start 1004; Stop 1028
caggaatcgccgcatttatgacagg

SEQ ID NO: 212821 - DNA, 25 bp, Artificial
  probe
  misc_feature (1)..(25): SEQ ID NO: 2145; WAN024FMX_at; Start 1146; Stop 1170
cattgcgacctttctatcatggttt

SEQ ID NO: 212822 - DNA, 25 bp, Artificial
  probe
  misc_feature (1)..(25): SEQ ID NO: 2145; WAN024FMX_at; Start 735; Stop 759
gtatggtgttgttgcaaagttaccc

SEQ ID NO: 212823 - DNA, 25 bp, Artificial
  probe
  misc_feature (1)..(25): SEQ ID NO: 2145; WAN024FMX_at; Start 1131; Stop 1155
agtattaggcgcttccattgcgacc

SEQ ID NO: 212824 - DNA, 25 bp, Artificial
  probe
  misc_feature (1)..(25): SEQ ID NO: 2145; WAN024FMX_at; Start 258; Stop 282
tatcatttcgatacttgggactatt

SEQ ID NO: 212825 - DNA, 25 bp, Artificial
  probe
  misc_feature (1)..(25): SEQ ID NO: 2145; WAN024FMX_at; Start 793; Stop 817
caggcatggattatttcagcagtag

SEQ ID NO: 212826 - DNA, 25 bp, Artificial
  probe
  misc_feature (1)..(25): SEQ ID NO: 2145; WAN024FMX_at; Start 683; Stop 707
cctcagatcggtttatgttgcaatg

SEQ ID NO: 212827 - DNA, 25 bp, Artificial
  probe
  misc_feature (1)..(25): SEQ ID NO: 5173; WAN024FMY_at; Start 67; Stop 91
gaaatctttagtaaaagattatcga

SEQ ID NO: 212828 - DNA, 25 bp, Artificial
  probe
  misc_feature (1)..(25): SEQ ID NO: 5173; WAN024FMY_at; Start 37; Stop 61
aatcaaaaagataataagagtattt

SEQ ID NO: 212829 - DNA, 25 bp, Artificial
  probe
  misc_feature (1)..(25): SEQ ID NO: 5173; WAN024FMY_at; Start 80; Stop 104
aaagattatcgacaaagaattcaaa

SEQ ID NO: 212830 - DNA, 25 bp, Artificial
  probe
  misc_feature (1)..(25): SEQ ID NO: 5173; WAN024FMY_at; Start 36; Stop 60
aaatcaaaaagataataagagtatt

SEQ ID NO: 212831 - DNA, 25 bp, Artificial
  probe
  misc_feature (1)..(25): SEQ ID NO: 5173; WAN024FMY_at; Start 75; Stop 99
tagtaaaagattatcgacaaagaat

SEQ ID NO: 212832 - DNA, 25 bp, Artificial
  probe
  misc_feature (1)..(25): SEQ ID NO: 5173; WAN024FMY_at; Start 77; Stop 101
gtaaaagattatcgacaaagaattc

SEQ ID NO: 212833 - DNA, 25 bp, Artificial
  probe
  misc_feature (1)..(25): SEQ ID NO: 5173; WAN024FMY_at; Start 81; Stop 105
aagattatcgacaaagaattcaaaa

SEQ ID NO: 212834 - DNA, 25 bp, Artificial
  probe
  misc_feature (1)..(25): SEQ ID NO: 5173; WAN024FMY_at; Start 70; Stop 94
atctttagtaaaagattatcgacaa

SEQ ID NO: 212835 - DNA, 25 bp, Artificial
  probe
  misc_feature (1)..(25): SEQ ID NO: 5173; WAN024FMY_at; Start 71; Stop 95
tctttagtaaaagattatcgacaaa

SEQ ID NO: 212836 - DNA, 25 bp, Artificial
  probe
  misc_feature (1)..(25): SEQ ID NO: 5173; WAN024FMY_at; Start 74; Stop 98
ttagtaaaagattatcgacaaagaa

SEQ ID NO: 212837 - DNA, 25 bp, Artificial
  probe
  misc_feature (1)..(25): SEQ ID NO: 5173; WAN024FMY_at; Start 73; Stop 97
tttagtaaaagattatcgacaaaga

SEQ ID NO: 212838 - DNA, 25 bp, Artificial
  probe
  misc_feature (1)..(25): SEQ ID NO: 5173; WAN024FMY_at; Start 35; Stop 59
aaaatcaaaaagataataagagtat

SEQ ID NO: 212839 - DNA, 25 bp, Artificial
  probe
  misc_feature (1)..(25): SEQ ID NO: 5173; WAN024FMY_at; Start 38; Stop 62
atcaaaaagataataagagtatttt

SEQ ID NO: 212840 - DNA, 25 bp, Artificial
  probe
  misc_feature (1)..(25): SEQ ID NO: 5173; WAN024FMY_at; Start 72; Stop 96
ctttagtaaaagattatcgacaaag

SEQ ID NO: 212841 - DNA, 25 bp, Artificial
  probe
  misc_feature (1)..(25): SEQ ID NO: 5173; WAN024FMY_at; Start 79; Stop 103
aaaagattatcgacaaagaattcaa

SEQ ID NO: 212842 - DNA, 25 bp, Artificial
  probe
  misc_feature (1)..(25): SEQ ID NO: 5173; WAN024FMY_at; Start 76; Stop 100
agtaaaagattatcgacaaagaatt

SEQ ID NO: 212843 - DNA, 25 bp, Artificial
  probe
  misc_feature (1)..(25): SEQ ID NO: 5173; WAN024FMY_at; Start 69; Stop 93
aatctttagtaaaagattatcgaca

SEQ ID NO: 212844 - DNA, 25 bp, Artificial
  probe
  misc_feature (1)..(25): SEQ ID NO: 5173; WAN024FMY_at; Start 78; Stop 102
taaaagattatcgacaaagaattca

SEQ ID NO: 212845 - DNA, 25 bp, Artificial
  probe
  misc_feature (1)..(25): SEQ ID NO: 7376; WAN024FMZ_at; Start 921; Stop 945
gaaaggtgtcaaacgattattgaag

SEQ ID NO: 212846 - DNA, 25 bp, Artificial
  probe
  misc_feature (1)..(25): SEQ ID NO: 7376; WAN024FMZ_at; Start 895; Stop 919
tatccagtctattttcaggaaaagt

SEQ ID NO: 212847 - DNA, 25 bp, Artificial
  probe
  misc_feature (1)..(25): SEQ ID NO: 7376; WAN024FMZ_at; Start 516; Stop 540
tgttgcaggaagtatcactcgtgtt

SEQ ID NO: 212848 - DNA, 25 bp, Artificial
  probe
  misc_feature (1)..(25): SEQ ID NO: 7376; WAN024FMZ_at; Start 783; Stop 807
gtctatttcaaatgatgtttctgct

SEQ ID NO: 212849 - DNA, 25 bp, Artificial
  probe
  misc_feature (1)..(25): SEQ ID NO: 7376; WAN024FMZ_at; Start 581; Stop 605
tgattgcagatctttctggtttaag

SEQ ID NO: 212850 - DNA, 25 bp, Artificial
  probe
  misc_feature (1)..(25): SEQ ID NO: 7376; WAN024FMZ_at; Start 909; Stop 933
tcaggaaaagtggaaaggtgtcaaa

SEQ ID NO: 212851 - DNA, 25 bp, Artificial
  probe
  misc_feature (1)..(25): SEQ ID NO: 7376; WAN024FMZ_at; Start 130; Stop 154
gattatccggaaaatgtgcaagttt

SEQ ID NO: 212852 - DNA, 25 bp, Artificial
  probe
  misc_feature (1)..(25): SEQ ID NO: 7376; WAN024FMZ_at; Start 938; Stop 962
tattgaagaaaatagggaggtcaga

SEQ ID NO: 212853 - DNA, 25 bp, Artificial
  probe
  misc_feature (1)..(25): SEQ ID NO: 7376; WAN024FMZ_at; Start 524; Stop 548
gaagtatcactcgtgtttatcaaaa

SEQ ID NO: 212854 - DNA, 25 bp, Artificial
  probe
  misc_feature (1)..(25): SEQ ID NO: 7376; WAN024FMZ_at; Start 602; Stop 626
taagttatcatttccgacgtgggta

SEQ ID NO: 212855 - DNA, 25 bp, Artificial
  probe
  misc_feature (1)..(25): SEQ ID NO: 7376; WAN024FMZ_at; Start 117; Stop 141
caagaggacatttgattatccggaa

SEQ ID NO: 212856 - DNA, 25 bp, Artificial
  probe
  misc_feature (1)..(25): SEQ ID NO: 7376; WAN024FMZ_at; Start 429; Stop 453
taatcgcagatttaaattatcgtct

SEQ ID NO: 212857 - DNA, 25 bp, Artificial
  probe
  misc_feature (1)..(25): SEQ ID NO: 7376; WAN024FMZ_at; Start 667; Stop 691
ctacctatgattttttcttgggaag

SEQ ID NO: 212858 - DNA, 25 bp, Artificial
  probe
  misc_feature (1)..(25): SEQ ID NO: 7376; WAN024FMZ_at; Start 574; Stop 598
gataaagtgattgcagatctttctg

SEQ ID NO: 212859 - DNA, 25 bp, Artificial
  probe
  misc_feature (1)..(25): SEQ ID NO: 7376; WAN024FMZ_at; Start 709; Stop 733
tattcggtacaaaacaatcaagtgc

SEQ ID NO: 212860 - DNA, 25 bp, Artificial
  probe
  misc_feature (1)..(25): SEQ ID NO: 7376; WAN024FMZ_at; Start 550; Stop 574
aatggattcccaataggaagattag

SEQ ID NO: 212861 - DNA, 25 bp, Artificial
  probe
  misc_feature (1)..(25): SEQ ID NO: 7376; WAN024FMZ_at; Start 236; Stop 260
taggagattataagcctttattcgg

SEQ ID NO: 212862 - DNA, 25 bp, Artificial
  probe
  misc_feature (1)..(25): SEQ ID NO: 7376; WAN024FMZ_at; Start 399; Stop 423
tatgggtatttatagaaattctcct

SEQ ID NO: 212863 - DNA, 25 bp, Artificial
  probe
  misc_feature (1)..(25): SEQ ID NO: 7376; WAN024FMZ_at; Start 735; Stop 759
aaaaaatgagttcttgtatgtacac

SEQ ID NO: 212864 - DNA, 25 bp, Artificial
  probe
  misc_feature (1)..(25): SEQ ID NO: 7376; WAN024FMZ_at; Start 442; Stop 466
aaattatcgtctgatttggatcgta

SEQ ID NO: 212865 - DNA, 25 bp, Artificial
  probe
  misc_feature (1)..(25): SEQ ID NO: 7376; WAN024FMZ_at; Start 558; Stop 582
cccaataggaagattagataaagtg

SEQ ID NO: 212866 - DNA, 25 bp, Artificial
  probe
  misc_feature (1)..(25): SEQ ID NO: 7376; WAN024FMZ_at; Start 413; Stop 437
gaaattctcctgaagttaatcgcag

SEQ ID NO: 212867 - DNA, 25 bp, Artificial
  probe
  misc_feature (1)..(25): SEQ ID NO: 7376; WAN024FMZ_at; Start 653; Stop 677
cctatttaccaaatctacctatgat

SEQ ID NO: 212868 - DNA, 25 bp, Artificial
  probe
  misc_feature (1)..(25): SEQ ID NO: 7376; WAN024FMZ_at; Start 615; Stop 639
ccgacgtgggtattattcagatgat

SEQ ID NO: 212869 - DNA, 25 bp, Artificial
  probe
  misc_feature (1)..(25): SEQ ID NO: 7376; WAN024FMZ_at; Start 835; Stop 859
gagatgcctaaagagataactgttg

SEQ ID NO: 212870 - DNA, 25 bp, Artificial
  probe
  misc_feature (1)..(25): SEQ ID NO: 7376; WAN024FMZ_at; Start 383; Stop 407
tgatgttttttggacatatgggtat

SEQ ID NO: 212871 - DNA, 25 bp, Artificial
  probe
  misc_feature (1)..(25): SEQ ID NO: 7376; WAN024FMZ_at; Start 108; Stop 132
tacagatgacaagaggacatttgat

SEQ ID NO: 212872 - DNA, 25 bp, Artificial
  probe
  misc_feature (1)..(25): SEQ ID NO: 7376; WAN024FMZ_at; Start 643; Stop 667
gagacatttacctatttaccaaatc

SEQ ID NO: 212873 - DNA, 25 bp, Artificial
  probe
  misc_feature (1)..(25): SEQ ID NO: 7376; WAN024FMZ_at; Start 353; Stop 377
cagatgagttattagataaatacga

SEQ ID NO: 212874 - DNA, 25 bp, Artificial
  probe
  misc_feature (1)..(25): SEQ ID NO: 7376; WAN024FMZ_at; Start 804; Stop 828
tgcttatttaatcgttccaaatggt

SEQ ID NO: 212875 - DNA, 25 bp, Artificial
  probe
  misc_feature (1)..(25): SEQ ID NO: 7376; WAN024FMZ_at; Start 747; Stop 771
cttgtatgtacactttaagcgtaga

SEQ ID NO: 212876 - DNA, 25 bp, Artificial
  probe
  misc_feature (1)..(25): SEQ ID NO: 7376; WAN024FMZ_at; Start 148; Stop 172
caagttttctatactactttggaag

SEQ ID NO: 212877 - DNA, 25 bp, Artificial
  probe
  misc_feature (1)..(25): SEQ ID NO: 7376; WAN024FMZ_at; Start 762; Stop 786
taagcgtagaaaaatgattcagtct

SEQ ID NO: 212878 - DNA, 25 bp, Artificial
  probe
  misc_feature (1)..(25): SEQ ID NO: 7376; WAN024FMZ_at; Start 820; Stop 844
ccaaatggttttgttgagatgccta

SEQ ID NO: 212879 - DNA, 25 bp, Artificial
  probe
  misc_feature (1)..(25): SEQ ID NO: 7211; WAN024FN2_at; Start 581; Stop 605
tgattgcggatctttctggtacaag

SEQ ID NO: 212880 - DNA, 25 bp, Artificial
  probe
  misc_feature (1)..(25): SEQ ID NO: 7211; WAN024FN2_at; Start 537; Stop 561
tatctatcagaaaaatggattcccc

SEQ ID NO: 212881 - DNA, 25 bp, Artificial
  probe
  misc_feature (1)..(25): SEQ ID NO: 7211; WAN024FN2_at; Start 600; Stop 624
tacaagttatcattttcgacgaggg

SEQ ID NO: 212882 - DNA, 25 bp, Artificial
  probe
  misc_feature (1)..(25): SEQ ID NO: 7211; WAN024FN2_at; Start 896; Stop 920
atccagtttattttgaagaaaagtg

SEQ ID NO: 212883 - DNA, 25 bp, Artificial
  probe
  misc_feature (1)..(25): SEQ ID NO: 7211; WAN024FN2_at; Start 701; Stop 725
cgtattgttattcggttaagaatca

SEQ ID NO: 212884 - DNA, 25 bp, Artificial
  probe
  misc_feature (1)..(25): SEQ ID NO: 7211; WAN024FN2_at; Start 516; Stop 540
tgttgcaggaagtattactcgtatc

SEQ ID NO: 212885 - DNA, 25 bp, Artificial
  probe
  misc_feature (1)..(25): SEQ ID NO: 7211; WAN024FN2_at; Start 799; Stop 823
gcttctacttatttaatcgtcccaa

SEQ ID NO: 212886 - DNA, 25 bp, Artificial
  probe
  misc_feature (1)..(25): SEQ ID NO: 7211; WAN024FN2_at; Start 667; Stop 691
gagcctatgattttttcatgggaag

SEQ ID NO: 212887 - DNA, 25 bp, Artificial
  probe
  misc_feature (1)..(25): SEQ ID NO: 7211; WAN024FN2_at; Start 428; Stop 452
tcaatcgtagatttgaattgtcgtc

SEQ ID NO: 212888 - DNA, 25 bp, Artificial
  probe
  misc_feature (1)..(25): SEQ ID NO: 7211; WAN024FN2_at; Start 777; Stop 801
gattcaagatataccagatgatgct

SEQ ID NO: 212889 - DNA, 25 bp, Artificial
  probe
  misc_feature (1)..(25): SEQ ID NO: 7211; WAN024FN2_at; Start 610; Stop 634
cattttcgacgagggtacatttcag

SEQ ID NO: 212890 - DNA, 25 bp, Artificial
  probe
  misc_feature (1)..(25): SEQ ID NO: 7211; WAN024FN2_at; Start 822; Stop 846
aagtggttttgccttgatgcctgaa

SEQ ID NO: 212891 - DNA, 25 bp, Artificial
  probe
  misc_feature (1)..(25): SEQ ID NO: 7211; WAN024FN2_at; Start 409; Stop 433
tataaaaattctcccgaagtcaatc

SEQ ID NO: 212892 - DNA, 25 bp, Artificial
  probe
  misc_feature (1)..(25): SEQ ID NO: 7211; WAN024FN2_at; Start 836; Stop 860
tgatgcctgaagagataacggttga

SEQ ID NO: 212893 - DNA, 25 bp, Artificial
  probe
  misc_feature (1)..(25): SEQ ID NO: 7211; WAN024FN2_at; Start 442; Stop 466
gaattgtcgtctgatttgaatcgta

SEQ ID NO: 212894 - DNA, 25 bp, Artificial
  probe
  misc_feature (1)..(25): SEQ ID NO: 7211; WAN024FN2_at; Start 108; Stop 132
tacagatgacaagagaaaatttgac

SEQ ID NO: 212895 - DNA, 25 bp, Artificial
  probe
  misc_feature (1)..(25): SEQ ID NO: 7211; WAN024FN2_at; Start 727; Stop 751
caagtgcaaaaagatgagtttatgt

SEQ ID NO: 212896 - DNA, 25 bp, Artificial
  probe
  misc_feature (1)..(25): SEQ ID NO: 7211; WAN024FN2_at; Start 813; Stop 837
aatcgtcccaagtggttttgccttg

SEQ ID NO: 212897 - DNA, 25 bp, Artificial
  probe
  misc_feature (1)..(25): SEQ ID NO: 7211; WAN024FN2_at; Start 130; Stop 154
gactatccagaaaatgtgcaagtat

SEQ ID NO: 212898 - DNA, 25 bp, Artificial
  probe
  misc_feature (1)..(25): SEQ ID NO: 7211; WAN024FN2_at; Start 712; Stop 736
tcggttaagaatcatcaagtgcaaa

SEQ ID NO: 212899 - DNA, 25 bp, Artificial
  probe
  misc_feature (1)..(25): SEQ ID NO: 7211; WAN024FN2_at; Start 553; Stop 577
ggattccccattggaaaattagatg

SEQ ID NO: 212900 - DNA, 25 bp, Artificial
  probe
  misc_feature (1)..(25): SEQ ID NO: 7211; WAN024FN2_at; Start 148; Stop 172
caagtattttatacgactttggaag

SEQ ID NO: 212901 - DNA, 25 bp, Artificial
  probe
  misc_feature (1)..(25): SEQ ID NO: 7211; WAN024FN2_at; Start 523; Stop 547
ggaagtattactcgtatctatcaga

SEQ ID NO: 212902 - DNA, 25 bp, Artificial
  probe
  misc_feature (1)..(25): SEQ ID NO: 7211; WAN024FN2_at; Start 353; Stop 377
cagatgaattactagaaaaatacga

SEQ ID NO: 212903 - DNA, 25 bp, Artificial
  probe
  misc_feature (1)..(25): SEQ ID NO: 7211; WAN024FN2_at; Start 784; Stop 808
gatataccagatgatgcttctactt

SEQ ID NO: 212904 - DNA, 25 bp, Artificial
  probe
  misc_feature (1)..(25): SEQ ID NO: 7211; WAN024FN2_at; Start 418; Stop 442
tctcccgaagtcaatcgtagatttg

SEQ ID NO: 212905 - DNA, 25 bp, Artificial
  probe
  misc_feature (1)..(25): SEQ ID NO: 7211; WAN024FN2_at; Start 651; Stop 675
tacttatttaccatatgagcctatg

SEQ ID NO: 212906 - DNA, 25 bp, Artificial
  probe
  misc_feature (1)..(25): SEQ ID NO: 7211; WAN024FN2_at; Start 585; Stop 609
tgcggatctttctggtacaagttat

SEQ ID NO: 212907 - DNA, 25 bp, Artificial
  probe
  misc_feature (1)..(25): SEQ ID NO: 7211; WAN024FN2_at; Start 938; Stop 962
tatggaataaaatttggaggtcgga

SEQ ID NO: 212908 - DNA, 25 bp, Artificial
  probe
  misc_feature (1)..(25): SEQ ID NO: 7211; WAN024FN2_at; Start 225; Stop 249
ggcttataaactcggagattataaa

SEQ ID NO: 212909 - DNA, 25 bp, Artificial
  probe
  misc_feature (1)..(25): SEQ ID NO: 7211; WAN024FN2_at; Start 762; Stop 786
taagcgtcgaaaaatgattcaagat

SEQ ID NO: 212910 - DNA, 25 bp, Artificial
  probe
  misc_feature (1)..(25): SEQ ID NO: 7211; WAN024FN2_at; Start 115; Stop 139
gacaagagaaaatttgactatccag

SEQ ID NO: 212911 - DNA, 25 bp, Artificial
  probe
  misc_feature (1)..(25): SEQ ID NO: 7211; WAN024FN2_at; Start 568; Stop 592
aaattagatgaggtgattgcggatc

SEQ ID NO: 212912 - DNA, 25 bp, Artificial
  probe
  misc_feature (1)..(25): SEQ ID NO: 7211; WAN024FN2_at; Start 747; Stop 771
tatgtatgttcactttaagcgtcga

SEQ ID NO: 212913 - DNA, 25 bp, Artificial
  probe
  misc_feature (1)..(25): SEQ ID NO: 3075; WAN024FN3_at; Start 146; Stop 170
gggtacctagagaagtgataaatgg

SEQ ID NO: 212914 - DNA, 25 bp, Artificial
  probe
  misc_feature (1)..(25): SEQ ID NO: 3075; WAN024FN3_at; Start 187; Stop 211
tggaatgctcgaacaagctgtactt

SEQ ID NO: 212915 - DNA, 25 bp, Artificial
  probe
  misc_feature (1)..(25): SEQ ID NO: 3075; WAN024FN3_at; Start 116; Stop 140
tgctgacctattgttatccatcacg

SEQ ID NO: 212916 - DNA, 25 bp, Artificial
  probe
  misc_feature (1)..(25): SEQ ID NO: 3075; WAN024FN3_at; Start 784; Stop 808
gaactccgaaaccaattaggtatca

SEQ ID NO: 212917 - DNA, 25 bp, Artificial
  probe
  misc_feature (1)..(25): SEQ ID NO: 3075; WAN024FN3_at; Start 40; Stop 64
cctaataaagatggtgttcaatttg

SEQ ID NO: 212918 - DNA, 25 bp, Artificial
  probe
  misc_feature (1)..(25): SEQ ID NO: 3075; WAN024FN3_at; Start 1015; Stop 1039
gatcaagaatttataagagctattg

SEQ ID NO: 212919 - DNA, 25 bp, Artificial
  probe
  misc_feature (1)..(25): SEQ ID NO: 3075; WAN024FN3_at; Start 176; Stop 200
gagtcattcgttggaatgctcgaac

SEQ ID NO: 212920 - DNA, 25 bp, Artificial
  probe
  misc_feature (1)..(25): SEQ ID NO: 3075; WAN024FN3_at; Start 70; Stop 94
caatatttagcagaaggattggtta

SEQ ID NO: 212921 - DNA, 25 bp, Artificial
  probe
  misc_feature (1)..(25): SEQ ID NO: 3075; WAN024FN3_at; Start 980; Stop 1004
tcaactatttgtctggaggaatcac

SEQ ID NO: 212922 - DNA, 25 bp, Artificial
  probe
  misc_feature (1)..(25): SEQ ID NO: 3075; WAN024FN3_at; Start 389; Stop 413
tgcattggcatagacaatcattcaa

SEQ ID NO: 212923 - DNA, 25 bp, Artificial
  probe
  misc_feature (1)..(25): SEQ ID NO: 3075; WAN024FN3_at; Start 8; Stop 32
tgaaaattttaataaccactcatac

SEQ ID NO: 212924 - DNA, 25 bp, Artificial
  probe
  misc_feature (1)..(25): SEQ ID NO: 3075; WAN024FN3_at; Start 20; Stop 44
taaccactcatacttatcttcctaa

SEQ ID NO: 212925 - DNA, 25 bp, Artificial
  probe
  misc_feature (1)..(25): SEQ ID NO: 3075; WAN024FN3_at; Start 998; Stop 1022
gaatcactgcttgtagtgatcaaga

SEQ ID NO: 212926 - DNA, 25 bp, Artificial
  probe
  misc_feature (1)..(25): SEQ ID NO: 3075; WAN024FN3_at; Start 511; Stop 535
cacccaaaagattatagtgtggctt

SEQ ID NO: 212927 - DNA, 25 bp, Artificial
  probe
  misc_feature (1)..(25): SEQ ID NO: 3075; WAN024FN3_at; Start 679; Stop 703
gcggttgagtattttttgaaaagca

SEQ ID NO: 212928 - DNA, 25 bp, Artificial
  probe
  misc_feature (1)..(25): SEQ ID NO: 3075; WAN024FN3_at; Start 127; Stop 151
tgttatccatcacgtacaagggtac

SEQ ID NO: 212929 - DNA, 25 bp, Artificial
  probe
  misc_feature (1)..(25): SEQ ID NO: 3075; WAN024FN3_at; Start 352; Stop 376
gtcttatatattcattcgatatggg

SEQ ID NO: 212930 - DNA, 25 bp, Artificial
  probe
  misc_feature (1)..(25): SEQ ID NO: 3075; WAN024FN3_at; Start 139; Stop 163
cgtacaagggtacctagagaagtga

SEQ ID NO: 212931 - DNA, 25 bp, Artificial
  probe
  misc_feature (1)..(25): SEQ ID NO: 3075; WAN024FN3_at; Start 362; Stop 386
ttcattcgatatgggatttcaactg

SEQ ID NO: 212932 - DNA, 25 bp, Artificial
  probe
  misc_feature (1)..(25): SEQ ID NO: 3075; WAN024FN3_at; Start 788; Stop 812
tccgaaaccaattaggtatcacttc

SEQ ID NO: 212933 - DNA, 25 bp, Artificial
  probe
  misc_feature (1)..(25): SEQ ID NO: 3075; WAN024FN3_at; Start 960; Stop 984
ctcttctgatgtaggaattgtcaac

SEQ ID NO: 212934 - DNA, 25 bp, Artificial
  probe
  misc_feature (1)..(25): SEQ ID NO: 3075; WAN024FN3_at; Start 183; Stop 207
tcgttggaatgctcgaacaagctgt

SEQ ID NO: 212935 - DNA, 25 bp, Artificial
  probe
  misc_feature (1)..(25): SEQ ID NO: 3075; WAN024FN3_at; Start 618; Stop 642
caaaaagcaatcttacattgtaaat

SEQ ID NO: 212936 - DNA, 25 bp, Artificial
  probe
  misc_feature (1)..(25): SEQ ID NO: 3075; WAN024FN3_at; Start 312; Stop 336
ttggttatttccgatattttctcag

SEQ ID NO: 212937 - DNA, 25 bp, Artificial
  probe
  misc_feature (1)..(25): SEQ ID NO: 3075; WAN024FN3_at; Start 293; Stop 317
cacagactgctttaacagattggtt

SEQ ID NO: 212938 - DNA, 25 bp, Artificial
  probe
  misc_feature (1)..(25): SEQ ID NO: 3075; WAN024FN3_at; Start 161; Stop 185
tgataaatggtgttagagtcattcg

SEQ ID NO: 212939 - DNA, 25 bp, Artificial
  probe
  misc_feature (1)..(25): SEQ ID NO: 3075; WAN024FN3_at; Start 47; Stop 71
aagatggtgttcaatttgttaatca

SEQ ID NO: 212940 - DNA, 25 bp, Artificial
  probe
  misc_feature (1)..(25): SEQ ID NO: 3075; WAN024FN3_at; Start 200; Stop 224
caagctgtactttccataaaggaga

SEQ ID NO: 212941 - DNA, 25 bp, Artificial
  probe
  misc_feature (1)..(25): SEQ ID NO: 3075; WAN024FN3_at; Start 301; Stop 325
gctttaacagattggttatttccga

SEQ ID NO: 212942 - DNA, 25 bp, Artificial
  probe
  misc_feature (1)..(25): SEQ ID NO: 3075; WAN024FN3_at; Start 989; Stop 1013
tgtctggaggaatcactgcttgtag

SEQ ID NO: 212943 - DNA, 25 bp, Artificial
  probe
  misc_feature (1)..(25): SEQ ID NO: 3075; WAN024FN3_at; Start 63; Stop 87
tgttaatcaatatttagcagaagga

SEQ ID NO: 212944 - DNA, 25 bp, Artificial
  probe
  misc_feature (1)..(25): SEQ ID NO: 3075; WAN024FN3_at; Start 974; Stop 998
gaattgtcaactatttgtctggagg

SEQ ID NO: 212945 - DNA, 25 bp, Artificial
  probe
  misc_feature (1)..(25): SEQ ID NO: 3075; WAN024FN3_at; Start 404; Stop 428
aatcattcaagcgatttgttgctaa

SEQ ID NO: 212946 - DNA, 25 bp, Artificial
  probe
  misc_feature (1)..(25): SEQ ID NO: 3075; WAN024FN3_at; Start 394; Stop 418
tggcatagacaatcattcaagcgat

SEQ ID NO: 212947 - DNA, 25 bp, Artificial
  probe
  misc_feature (1)..(25): SEQ ID NO: 792; WAN024FN4_at; Start 421; Stop 445
gatttgatttggaatagcccctttg

SEQ ID NO: 212948 - DNA, 25 bp, Artificial
  probe
  misc_feature (1)..(25): SEQ ID NO: 792; WAN024FN4_at; Start 609; Stop 633
tgatcaaaatacgatgaagcgacgt

SEQ ID NO: 212949 - DNA, 25 bp, Artificial
  probe
  misc_feature (1)..(25): SEQ ID NO: 792; WAN024FN4_at; Start 72; Stop 96
caatcaaacttatgataattgggaa

SEQ ID NO: 212950 - DNA, 25 bp, Artificial
  probe
  misc_feature (1)..(25): SEQ ID NO: 792; WAN024FN4_at; Start 193; Stop 217
aaaaatgtaggtctttccgcgacat

SEQ ID NO: 212951 - DNA, 25 bp, Artificial
  probe
  misc_feature (1)..(25): SEQ ID NO: 792; WAN024FN4_at; Start 252; Stop 276
tattgctagaatggatgatgatgat

SEQ ID NO: 212952 - DNA, 25 bp, Artificial
  probe
  misc_feature (1)..(25): SEQ ID NO: 792; WAN024FN4_at; Start 292; Stop 316
cgctttgaaagacaagtcgactatt

SEQ ID NO: 212953 - DNA, 25 bp, Artificial
  probe
  misc_feature (1)..(25): SEQ ID NO: 792; WAN024FN4_at; Start 741; Stop 765
tctagtaacactcgttaaaaggaga

SEQ ID NO: 212954 - DNA, 25 bp, Artificial
  probe
  misc_feature (1)..(25): SEQ ID NO: 792; WAN024FN4_at; Start 52; Stop 76
acagctgttcaaagtattttcaatc

SEQ ID NO: 212955 - DNA, 25 bp, Artificial
  probe
  misc_feature (1)..(25): SEQ ID NO: 792; WAN024FN4_at; Start 283; Stop 307
tatcccgagcgctttgaaagacaag

SEQ ID NO: 212956 - DNA, 25 bp, Artificial
  probe
  misc_feature (1)..(25): SEQ ID NO: 792; WAN024FN4_at; Start 509; Stop 533
cagaaactgttcgtgggcaagatta

SEQ ID NO: 212957 - DNA, 25 bp, Artificial
  probe
  misc_feature (1)..(25): SEQ ID NO: 792; WAN024FN4_at; Start 22; Stop 46
ggcattcataatggtgaaaagcgct

SEQ ID NO: 212958 - DNA, 25 bp, Artificial
  probe
  misc_feature (1)..(25): SEQ ID NO: 792; WAN024FN4_at; Start 236; Stop 260
caagtagtggagaatttattgctag

SEQ ID NO: 212959 - DNA, 25 bp, Artificial
  probe
  misc_feature (1)..(25): SEQ ID NO: 792; WAN024FN4_at; Start 624; Stop 648
gaagcgacgtacgtttaaagctcga

SEQ ID NO: 212960 - DNA, 25 bp, Artificial
  probe
  misc_feature (1)..(25): SEQ ID NO: 792; WAN024FN4_at; Start 448; Stop 472
catcctgttaccatgtttcgtagag

SEQ ID NO: 212961 - DNA, 25 bp, Artificial
  probe
  misc_feature (1)..(25): SEQ ID NO: 792; WAN024FN4_at; Start 461; Stop 485
tgtttcgtagagatgccttgcttga

SEQ ID NO: 212962 - DNA, 25 bp, Artificial
  probe
  misc_feature (1)..(25): SEQ ID NO: 792; WAN024FN4_at; Start 222; Stop 246
ccgttgcattgaagcaagtagtgga

SEQ ID NO: 212963 - DNA, 25 bp, Artificial
  probe
  misc_feature (1)..(25): SEQ ID NO: 792; WAN024FN4_at; Start 208; Stop 232
tccgcgacattaaaccgttgcattg

SEQ ID NO: 212964 - DNA, 25 bp, Artificial
  probe
  misc_feature (1)..(25): SEQ ID NO: 792; WAN024FN4_at; Start 367; Stop 391
gatggagaagtagttgtaggtacac

SEQ ID NO: 212965 - DNA, 25 bp, Artificial
  probe
  misc_feature (1)..(25): SEQ ID NO: 792; WAN024FN4_at; Start 586; Stop 610
gaaccactatttcgctatacgattg

SEQ ID NO: 212966 - DNA, 25 bp, Artificial
  probe
  misc_feature (1)..(25): SEQ ID NO: 792; WAN024FN4_at; Start 143; Stop 167
tacaaggattatatggacaggattc

SEQ ID NO: 212967 - DNA, 25 bp, Artificial
  probe
  misc_feature (1)..(25): SEQ ID NO: 792; WAN024FN4_at; Start 310; Stop 334
gactatttgttccatcatccagaga

SEQ ID NO: 212968 - DNA, 25 bp, Artificial
  probe
  misc_feature (1)..(25): SEQ ID NO: 792; WAN024FN4_at; Start 490; Stop 514
ggcggttatagagtttctccagaaa

SEQ ID NO: 212969 - DNA, 25 bp, Artificial
  probe
  misc_feature (1)..(25): SEQ ID NO: 792; WAN024FN4_at; Start 432; Stop 456
gaatagcccctttgttcatcctgtt

SEQ ID NO: 212970 - DNA, 25 bp, Artificial
  probe
  misc_feature (1)..(25): SEQ ID NO: 792; WAN024FN4_at; Start 270; Stop 294
tgatgatatttgttatcccgagcgc

SEQ ID NO: 212971 - DNA, 25 bp, Artificial
  probe
  misc_feature (1)..(25): SEQ ID NO: 792; WAN024FN4_at; Start 730; Stop 754
ttagtagctcatctagtaacactcg

SEQ ID NO: 212972 - DNA, 25 bp, Artificial
  probe
  misc_feature (1)..(25): SEQ ID NO: 792; WAN024FN4_at; Start 677; Stop 701
gttatcgtgcgatgaaagttccatt

SEQ ID NO: 212973 - DNA, 25 bp, Artificial
  probe
  misc_feature (1)..(25): SEQ ID NO: 792; WAN024FN4_at; Start 112; Stop 136
gatgcttccacagataaaacgtttg

SEQ ID NO: 212974 - DNA, 25 bp, Artificial
  probe
  misc_feature (1)..(25): SEQ ID NO: 792; WAN024FN4_at; Start 327; Stop 351
tccagagattgattttgtttcttca

SEQ ID NO: 212975 - DNA, 25 bp, Artificial
  probe
  misc_feature (1)..(25): SEQ ID NO: 792; WAN024FN4_at; Start 663; Stop 687
tattcgctataaaggttatcgtgcg

SEQ ID NO: 212976 - DNA, 25 bp, Artificial
  probe
  misc_feature (1)..(25): SEQ ID NO: 792; WAN024FN4_at; Start 37; Stop 61
gaaaagcgctttgaaacagctgttc

SEQ ID NO: 212977 - DNA, 25 bp, Artificial
  probe
  misc_feature (1)..(25): SEQ ID NO: 792; WAN024FN4_at; Start 381; Stop 405
tgtaggtacacggattttacttgat

SEQ ID NO: 212978 - DNA, 25 bp, Artificial
  probe
  misc_feature (1)..(25): SEQ ID NO: 792; WAN024FN4_at; Start 157; Stop 181
ggacaggattcacgttttatcttat

SEQ ID NO: 212979 - DNA, 25 bp, Artificial
  probe
  misc_feature (1)..(25): SEQ ID NO: 792; WAN024FN4_at; Start 476; Stop 500
ccttgcttgaagttggcggttatag

SEQ ID NO: 212980 - DNA, 25 bp, Artificial
  probe
  misc_feature (1)..(25): SEQ ID NO: 792; WAN024FN4_at; Start 99; Stop 123
tattatttgtgatgatgcttccaca

SEQ ID NO: 212981 - DNA, 25 bp, Artificial
  probe
  misc_feature (1)..(25): SEQ ID NO: 3846; WAN024FN5_at; Start 1120; Stop 1144
gattattctttaattgcggaagcct

SEQ ID NO: 212982 - DNA, 25 bp, Artificial
  probe
  misc_feature (1)..(25): SEQ ID NO: 3846; WAN024FN5_at; Start 694; Stop 718
gatagaaccgtaggtttagcaggga

SEQ ID NO: 212983 - DNA, 25 bp, Artificial
  probe
  misc_feature (1)..(25): SEQ ID NO: 3846; WAN024FN5_at; Start 617; Stop 641
taaaatctgaggaaacttggagcaa

SEQ ID NO: 212984 - DNA, 25 bp, Artificial
  probe
  misc_feature (1)..(25): SEQ ID NO: 3846; WAN024FN5_at; Start 884; Stop 908
ctgcggtagtagaaatgataggaac

SEQ ID NO: 212985 - DNA, 25 bp, Artificial
  probe
  misc_feature (1)..(25): SEQ ID NO: 3846; WAN024FN5_at; Start 802; Stop 826
gcagctgttgtagtgatgtatttaa

SEQ ID NO: 212986 - DNA, 25 bp, Artificial
  probe
  misc_feature (1)..(25): SEQ ID NO: 3846; WAN024FN5_at; Start 100; Stop 124
ggcgttgtcagtgctagtttagtac

SEQ ID NO: 212987 - DNA, 25 bp, Artificial
  probe
  misc_feature (1)..(25): SEQ ID NO: 3846; WAN024FN5_at; Start 990; Stop 1014
tattgcagccatcattacaggacta

SEQ ID NO: 212988 - DNA, 25 bp, Artificial
  probe
  misc_feature (1)..(25): SEQ ID NO: 3846; WAN024FN5_at; Start 329; Stop 353
aatgtcttattgcagcctttatggc

SEQ ID NO: 212989 - DNA, 25 bp, Artificial
  probe
  misc_feature (1)..(25): SEQ ID NO: 3846; WAN024FN5_at; Start 528; Stop 552
gatgatacgtttcgttggaagccta

SEQ ID NO: 212990 - DNA, 25 bp, Artificial
  probe
  misc_feature (1)..(25): SEQ ID NO: 3846; WAN024FN5_at; Start 868; Stop 892
gtttcaggactacaaactgcggtag

SEQ ID NO: 212991 - DNA, 25 bp, Artificial
  probe
  misc_feature (1)..(25): SEQ ID NO: 3846; WAN024FN5_at; Start 853; Stop 877
caacaagattctaaagtttcaggac

SEQ ID NO: 212992 - DNA, 25 bp, Artificial
  probe
  misc_feature (1)..(25): SEQ ID NO: 3846; WAN024FN5_at; Start 1244; Stop 1268
tattctcacaatatgctagcttgat

SEQ ID NO: 212993 - DNA, 25 bp, Artificial
  probe
  misc_feature (1)..(25): SEQ ID NO: 3846; WAN024FN5_at; Start 232; Stop 256
caggtattgttatattcacttggag

SEQ ID NO: 212994 - DNA, 25 bp, Artificial
  probe
  misc_feature (1)..(25): SEQ ID NO: 3846; WAN024FN5_at; Start 216; Stop 240
cctttttcaaaatggacaggtattg

SEQ ID NO: 212995 - DNA, 25 bp, Artificial
  probe
  misc_feature (1)..(25): SEQ ID NO: 3846; WAN024FN5_at; Start 1074; Stop 1098
tccaacggaattattagatacaatc

SEQ ID NO: 212996 - DNA, 25 bp, Artificial
  probe
  misc_feature (1)..(25): SEQ ID NO: 3846; WAN024FN5_at; Start 768; Stop 792
gattaagttttctcagtatgccttg

SEQ ID NO: 212997 - DNA, 25 bp, Artificial
  probe
  misc_feature (1)..(25): SEQ ID NO: 3846; WAN024FN5_at; Start 1355; Stop 1379
tagcactcatacttgtctctcgttc

SEQ ID NO: 212998 - DNA, 25 bp, Artificial
  probe
  misc_feature (1)..(25): SEQ ID NO: 3846; WAN024FN5_at; Start 659; Stop 683
tcttaggttggagtataatggctgc

SEQ ID NO: 212999 - DNA, 25 bp, Artificial
  probe
  misc_feature (1)..(25): SEQ ID NO: 3846; WAN024FN5_at; Start 84; Stop 108
tacagaagatttagaaggcgttgtc

SEQ ID NO: 213000 - DNA, 25 bp, Artificial
  probe
  misc_feature (1)..(25): SEQ ID NO: 3846; WAN024FN5_at; Start 975; Stop 999
tagaggaaaatcatatattgcagcc

SEQ ID NO: 213001 - DNA, 25 bp, Artificial
  probe
  misc_feature (1)..(25): SEQ ID NO: 3846; WAN024FN5_at; Start 289; Stop 313
gatgaaaccatcgtactacaatcag

SEQ ID NO: 213002 - DNA, 25 bp, Artificial
  probe
  misc_feature (1)..(25): SEQ ID NO: 3846; WAN024FN5_at; Start 543; Stop 567
tggaagcctacctacaataacagtg

SEQ ID NO: 213003 - DNA, 25 bp, Artificial
  probe
  misc_feature (1)..(25): SEQ ID NO: 3846; WAN024FN5_at; Start 840; Stop 864
tcaatttaggatgcaacaagattct

SEQ ID NO: 213004 - DNA, 25 bp, Artificial
  probe
  misc_feature (1)..(25): SEQ ID NO: 3846; WAN024FN5_at; Start 679; Stop 703
gctgctttaacaggagatagaaccg

SEQ ID NO: 213005 - DNA, 25 bp, Artificial
  probe
  misc_feature (1)..(25): SEQ ID NO: 3846; WAN024FN5_at; Start 348; Stop 372
tatggctggagtcttttctacgaag

SEQ ID NO: 213006 - DNA, 25 bp, Artificial
  probe
  misc_feature (1)..(25): SEQ ID NO: 3846; WAN024FN5_at; Start 1057; Stop 1081
tcagaatggaatgcatatccaacgg

SEQ ID NO: 213007 - DNA, 25 bp, Artificial
  probe
  misc_feature (1)..(25): SEQ ID NO: 3846; WAN024FN5_at; Start 712; Stop 736
gcagggattgttacgttagctttaa

SEQ ID NO: 213008 - DNA, 25 bp, Artificial
  probe
  misc_feature (1)..(25): SEQ ID NO: 3846; WAN024FN5_at; Start 69; Stop 93
tatgatgccaacctttacagaagat

SEQ ID NO: 213009 - DNA, 25 bp, Artificial
  probe
  misc_feature (1)..(25): SEQ ID NO: 3846; WAN024FN5_at; Start 471; Stop 495
tgctttaccctttatgatgatgaag

SEQ ID NO: 213010 - DNA, 25 bp, Artificial
  probe
  misc_feature (1)..(25): SEQ ID NO: 3846; WAN024FN5_at; Start 1279; Stop 1303
tcatggtttacccttccaagaagaa

SEQ ID NO: 213011 - DNA, 25 bp, Artificial
  probe
  misc_feature (1)..(25): SEQ ID NO: 3846; WAN024FN5_at; Start 405; Stop 429
ggatcaattagaacgagaaaaactg

SEQ ID NO: 213012 - DNA, 25 bp, Artificial
  probe
  misc_feature (1)..(25): SEQ ID NO: 3846; WAN024FN5_at; Start 364; Stop 388
tctacgaagaaagaggtatcaaaac

SEQ ID NO: 213013 - DNA, 25 bp, Artificial
  probe
  misc_feature (1)..(25): SEQ ID NO: 3846; WAN024FN5_at; Start 504; Stop 528
caccagtacatctgggtattttgcg

SEQ ID NO: 213014 - DNA, 25 bp, Artificial
  probe
  misc_feature (1)..(25): SEQ ID NO: 3846; WAN024FN5_at; Start 1339; Stop 1363
gtattattttttggactagcactca

SEQ ID NO: 213015 - DNA, 25 bp, Artificial
  probe
  misc_feature (1)..(25): SEQ ID NO: 5201; WAN024FN6_at; Start 295; Stop 319
ggtttgctgactattccaaagcttg

SEQ ID NO: 213016 - DNA, 25 bp, Artificial
  probe
  misc_feature (1)..(25): SEQ ID NO: 5201; WAN024FN6_at; Start 229; Stop 253
caaatccaaataatccaagcccagt

SEQ ID NO: 213017 - DNA, 25 bp, Artificial
  probe
  misc_feature (1)..(25): SEQ ID NO: 5201; WAN024FN6_at; Start 242; Stop 266
tccaagcccagtttttctatagatt

SEQ ID NO: 213018 - DNA, 25 bp, Artificial
  probe
  misc_feature (1)..(25): SEQ ID NO: 5201; WAN024FN6_at; Start 51; Stop 75
cgatagttgcagtttcaagcaaggc

SEQ ID NO: 213019 - DNA, 25 bp, Artificial
  probe
  misc_feature (1)..(25): SEQ ID NO: 5201; WAN024FN6_at; Start 192; Stop 216
ctctgagcggttttgggttcggcca

SEQ ID NO: 213020 - DNA, 25 bp, Artificial
  probe
  misc_feature (1)..(25): SEQ ID NO: 5201; WAN024FN6_at; Start 39; Stop 63
tgaccgcaggaacgatagttgcagt

SEQ ID NO: 213021 - DNA, 25 bp, Artificial
  probe
  misc_feature (1)..(25): SEQ ID NO: 5201; WAN024FN6_at; Start 352; Stop 376
gctatctttgattgcttgaccaaca

SEQ ID NO: 213022 - DNA, 25 bp, Artificial
  probe
  misc_feature (1)..(25): SEQ ID NO: 5201; WAN024FN6_at; Start 15; Stop 39
cacctggcgccaagcgaacttgatt

SEQ ID NO: 213023 - DNA, 25 bp, Artificial
  probe
  misc_feature (1)..(25): SEQ ID NO: 5201; WAN024FN6_at; Start 261; Stop 285
tagatttttccaaagcttgacgagt

SEQ ID NO: 213024 - DNA, 25 bp, Artificial
  probe
  misc_feature (1)..(25): SEQ ID NO: 5201; WAN024FN6_at; Start 65; Stop 89
tcaagcaaggcatccaaatgatggg

SEQ ID NO: 213025 - DNA, 25 bp, Artificial
  probe
  misc_feature (1)..(25): SEQ ID NO: 5201; WAN024FN6_at; Start 361; Stop 385
gattgcttgaccaacactttcttca

SEQ ID NO: 213026 - DNA, 25 bp, Artificial
  probe
  misc_feature (1)..(25): SEQ ID NO: 5201; WAN024FN6_at; Start 164; Stop 188
gcattgcgagttttccatgcgtcat

SEQ ID NO: 213027 - DNA, 25 bp, Artificial
  probe
  misc_feature (1)..(25): SEQ ID NO: 5201; WAN024FN6_at; Start 29; Stop 53
cgaacttgattgaccgcaggaacga

SEQ ID NO: 213028 - DNA, 25 bp, Artificial
  probe
  misc_feature (1)..(25): SEQ ID NO: 5201; WAN024FN6_at; Start 411; Stop 435
tatgacgataaccagccttcaaggc

SEQ ID NO: 213029 - DNA, 25 bp, Artificial
  probe
  misc_feature (1)..(25): SEQ ID NO: 5201; WAN024FN6_at; Start 281; Stop 305
cgagtttgctcataggtttgctgac

SEQ ID NO: 213030 - DNA, 25 bp, Artificial
  probe
  misc_feature (1)..(25): SEQ ID NO: 5201; WAN024FN6_at; Start 213; Stop 237
gccaatgaatcaaatacaaatccaa

SEQ ID NO: 213031 - DNA, 25 bp, Artificial
  probe
  misc_feature (1)..(25): SEQ ID NO: 5201; WAN024FN6_at; Start 380; Stop 404
tcttcattctgataaatcgccgccg

SEQ ID NO: 213032 - DNA, 25 bp, Artificial
  probe
  misc_feature (1)..(25): SEQ ID NO: 5201; WAN024FN6_at; Start 89; Stop 113
ggaagaaaattgctaacgccgatag

SEQ ID NO: 213033 - DNA, 25 bp, Artificial
  probe
  misc_feature (1)..(25): SEQ ID NO: 5201; WAN024FN6_at; Start 318; Stop 342
tggtagttacgaacatttcttcacg

SEQ ID NO: 213034 - DNA, 25 bp, Artificial
  probe
  misc_feature (1)..(25): SEQ ID NO: 5201; WAN024FN6_at; Start 102; Stop 126
taacgccgatagcacggattttccc

SEQ ID NO: 213035 - DNA, 25 bp, Artificial
  probe
  misc_feature (1)..(25): SEQ ID NO: 5201; WAN024FN6_at; Start 205; Stop 229
tgggttcggccaatgaatcaaatac

SEQ ID NO: 213036 - DNA, 25 bp, Artificial
  probe
  misc_feature (1)..(25): SEQ ID NO: 5201; WAN024FN6_at; Start 149; Stop 173
gctctccaaacttccgcattgcgag

SEQ ID NO: 213037 - DNA, 25 bp, Artificial
  probe
  misc_feature (1)..(25): SEQ ID NO: 5201; WAN024FN6_at; Start 401; Stop 425
gccgtatcaatatgacgataaccag

SEQ ID NO: 213038 - DNA, 25 bp, Artificial
  probe
  misc_feature (1)..(25): SEQ ID NO: 5201; WAN024FN6_at; Start 134; Stop 158
tagaggtcttccatcgctctccaaa

SEQ ID NO: 213039 - DNA, 25 bp, Artificial
  probe
  misc_feature (1)..(25): SEQ ID NO: 5201; WAN024FN6_at; Start 341; Stop 365
cgtggaactccgctatctttgattg

SEQ ID NO: 213040 - DNA, 25 bp, Artificial
  probe
  misc_feature (1)..(25): SEQ ID NO: 5201; WAN024FN6_at; Start 328; Stop 352
gaacatttcttcacgtggaactccg

SEQ ID NO: 213041 - DNA, 25 bp, Artificial
  probe
  misc_feature (1)..(25): SEQ ID NO: 5201; WAN024FN6_at; Start 114; Stop 138
cacggattttcccttcttgatagag

SEQ ID NO: 213042 - DNA, 25 bp, Artificial
  probe
  misc_feature (1)..(25): SEQ ID NO: 5201; WAN024FN6_at; Start 128; Stop 152
tcttgatagaggtcttccatcgctc

SEQ ID NO: 213043 - DNA, 25 bp, Artificial
  probe
  misc_feature (1)..(25): SEQ ID NO: 5201; WAN024FN6_at; Start 393; Stop 417
aaatcgccgccgtatcaatatgacg

SEQ ID NO: 213044 - DNA, 25 bp, Artificial
  probe
  misc_feature (1)..(25): SEQ ID NO: 5201; WAN024FN6_at; Start 271; Stop 295
caaagcttgacgagtttgctcatag

SEQ ID NO: 213045 - DNA, 25 bp, Artificial
  probe
  misc_feature (1)..(25): SEQ ID NO: 5201; WAN024FN6_at; Start 309; Stop 333
tccaaagcttggtagttacgaacat

SEQ ID NO: 213046 - DNA, 25 bp, Artificial
  probe
  misc_feature (1)..(25): SEQ ID NO: 5201; WAN024FN6_at; Start 1; Stop 25
ttgatcttgatacacacctggcgcc

SEQ ID NO: 213047 - DNA, 25 bp, Artificial
  probe
  misc_feature (1)..(25): SEQ ID NO: 5201; WAN024FN6_at; Start 417; Stop 441
gataaccagccttcaaggcttctaa

SEQ ID NO: 213048 - DNA, 25 bp, Artificial
  probe
  misc_feature (1)..(25): SEQ ID NO: 5201; WAN024FN6_at; Start 177; Stop 201
tccatgcgtcattttctctgagcgg

SEQ ID NO: 213049 - DNA, 25 bp, Artificial
  probe
  misc_feature (1)..(25): SEQ ID NO: 2747; WAN024FN7_at; Start 82; Stop 106
gcctatcgtgcagtgttagaagcct

SEQ ID NO: 213050 - DNA, 25 bp, Artificial
  probe
  misc_feature (1)..(25): SEQ ID NO: 2747; WAN024FN7_at; Start 448; Stop 472
ccccatcatttggatgccttgcttg

SEQ ID NO: 213051 - DNA, 25 bp, Artificial
  probe
  misc_feature (1)..(25): SEQ ID NO: 2747; WAN024FN7_at; Start 439; Stop 463
aattttcttccccatcatttggatg

SEQ ID NO: 213052 - DNA, 25 bp, Artificial
  probe
  misc_feature (1)..(25): SEQ ID NO: 2747; WAN024FN7_at; Start 173; Stop 197
caatcaaagatagcggagttccacg

SEQ ID NO: 213053 - DNA, 25 bp, Artificial
  probe
  misc_feature (1)..(25): SEQ ID NO: 2747; WAN024FN7_at; Start 113; Stop 137
ctggttatcgtcatattgatacggc

SEQ ID NO: 213054 - DNA, 25 bp, Artificial
  probe
  misc_feature (1)..(25): SEQ ID NO: 2747; WAN024FN7_at; Start 386; Stop 410
gagcgatggaagacctctatcaaga

SEQ ID NO: 213055 - DNA, 25 bp, Artificial
  probe
  misc_feature (1)..(25): SEQ ID NO: 2747; WAN024FN7_at; Start 33; Stop 57
aattccagtattgggatttggaact

SEQ ID NO: 213056 - DNA, 25 bp, Artificial
  probe
  misc_feature (1)..(25): SEQ ID NO: 2747; WAN024FN7_at; Start 683; Stop 707
tggcagaaggatttttaccacttcc

SEQ ID NO: 213057 - DNA, 25 bp, Artificial
  probe
  misc_feature (1)..(25): SEQ ID NO: 2747; WAN024FN7_at; Start 657; Stop 681
tgctcagatagccttggcctggagc

SEQ ID NO: 213058 - DNA, 25 bp, Artificial
  probe
  misc_feature (1)..(25): SEQ ID NO: 2747; WAN024FN7_at; Start 143; Stop 167
tttatcagaatgaagaaagtgttgg

SEQ ID NO: 213059 - DNA, 25 bp, Artificial
  probe
  misc_feature (1)..(25): SEQ ID NO: 2747; WAN024FN7_at; Start 70; Stop 94
gatggagaagaagcctatcgtgcag

SEQ ID NO: 213060 - DNA, 25 bp, Artificial
  probe
  misc_feature (1)..(25): SEQ ID NO: 2747; WAN024FN7_at; Start 444; Stop 468
tcttccccatcatttggatgccttg

SEQ ID NO: 213061 - DNA, 25 bp, Artificial
  probe
  misc_feature (1)..(25): SEQ ID NO: 2747; WAN024FN7_at; Start 400; Stop 424
ctctatcaagaagggaaaatccgtg

SEQ ID NO: 213062 - DNA, 25 bp, Artificial
  probe
  misc_feature (1)..(25): SEQ ID NO: 2747; WAN024FN7_at; Start 169; Stop 193
caagcaatcaaagatagcggagttc

SEQ ID NO: 213063 - DNA, 25 bp, Artificial
  probe
  misc_feature (1)..(25): SEQ ID NO: 2747; WAN024FN7_at; Start 393; Stop 417
ggaagacctctatcaagaagggaaa

SEQ ID NO: 213064 - DNA, 25 bp, Artificial
  probe
  misc_feature (1)..(25): SEQ ID NO: 2747; WAN024FN7_at; Start 85; Stop 109
tatcgtgcagtgttagaagccttga

SEQ ID NO: 213065 - DNA, 25 bp, Artificial
  probe
  misc_feature (1)..(25): SEQ ID NO: 2747; WAN024FN7_at; Start 51; Stop 75
tggaacttttaaggctaaggatgga

SEQ ID NO: 213066 - DNA, 25 bp, Artificial
  probe
  misc_feature (1)..(25): SEQ ID NO: 2747; WAN024FN7_at; Start 104; Stop 128
ccttgaaggctggttatcgtcatat

SEQ ID NO: 213067 - DNA, 25 bp, Artificial
  probe
  misc_feature (1)..(25): SEQ ID NO: 2747; WAN024FN7_at; Start 378; Stop 402
agtttggagagcgatggaagacctc

SEQ ID NO: 213068 - DNA, 25 bp, Artificial
  probe
  misc_feature (1)..(25): SEQ ID NO: 2747; WAN024FN7_at; Start 101; Stop 125
aagccttgaaggctggttatcgtca

SEQ ID NO: 213069 - DNA, 25 bp, Artificial
  probe
  misc_feature (1)..(25): SEQ ID NO: 2747; WAN024FN7_at; Start 665; Stop 689
tagccttggcctggagcttggcaga

SEQ ID NO: 213070 - DNA, 25 bp, Artificial
  probe
  misc_feature (1)..(25): SEQ ID NO: 2747; WAN024FN7_at; Start 660; Stop 684
tcagatagccttggcctggagcttg

SEQ ID NO: 213071 - DNA, 25 bp, Artificial
  probe
  misc_feature (1)..(25): SEQ ID NO: 2747; WAN024FN7_at; Start 736; Stop 760
gctaatcttgattgctttggaattg

SEQ ID NO: 213072 - DNA, 25 bp, Artificial
  probe
  misc_feature (1)..(25): SEQ ID NO: 2747; WAN024FN7_at; Start 60; Stop 84
taaggctaaggatggagaagaagcc

SEQ ID NO: 213073 - DNA, 25 bp, Artificial
  probe
  misc_feature (1)..(25): SEQ ID NO: 2747; WAN024FN7_at; Start 6; Stop 30
tacctatcaattaaataatggagta

SEQ ID NO: 213074 - DNA, 25 bp, Artificial
  probe
  misc_feature (1)..(25): SEQ ID NO: 2747; WAN024FN7_at; Start 90; Stop 114
tgcagtgttagaagccttgaaggct

SEQ ID NO: 213075 - DNA, 25 bp, Artificial
  probe
  misc_feature (1)..(25): SEQ ID NO: 2747; WAN024FN7_at; Start 76; Stop 100
gaagaagcctatcgtgcagtgttag

SEQ ID NO: 213076 - DNA, 25 bp, Artificial
  probe
  misc_feature (1)..(25): SEQ ID NO: 2747; WAN024FN7_at; Start 678; Stop 702
gagcttggcagaaggatttttacca

SEQ ID NO: 213077 - DNA, 25 bp, Artificial
  probe
  misc_feature (1)..(25): SEQ ID NO: 2747; WAN024FN7_at; Start 382; Stop 406
tggagagcgatggaagacctctatc

SEQ ID NO: 213078 - DNA, 25 bp, Artificial
  probe
  misc_feature (1)..(25): SEQ ID NO: 2747; WAN024FN7_at; Start 79; Stop 103
gaagcctatcgtgcagtgttagaag

SEQ ID NO: 213079 - DNA, 25 bp, Artificial
  probe
  misc_feature (1)..(25): SEQ ID NO: 2747; WAN024FN7_at; Start 390; Stop 414
gatggaagacctctatcaagaaggg

SEQ ID NO: 213080 - DNA, 25 bp, Artificial
  probe
  misc_feature (1)..(25): SEQ ID NO: 2747; WAN024FN7_at; Start 64; Stop 88
gctaaggatggagaagaagcctatc

SEQ ID NO: 213081 - DNA, 25 bp, Artificial
  probe
  misc_feature (1)..(25): SEQ ID NO: 2747; WAN024FN7_at; Start 108; Stop 132
gaaggctggttatcgtcatattgat

SEQ ID NO: 213082 - DNA, 25 bp, Artificial
  probe
  misc_feature (1)..(25): SEQ ID NO: 2747; WAN024FN7_at; Start 674; Stop 698
cctggagcttggcagaaggattttt

SEQ ID NO: 213083 - DNA, 25 bp, Artificial
  probe
  misc_feature (1)..(25): SEQ ID NO: 2529; WAN024FN8_at; Start 1097; Stop 1121
tactagaaataatagaacagactgc

SEQ ID NO: 213084 - DNA, 25 bp, Artificial
  probe
  misc_feature (1)..(25): SEQ ID NO: 2529; WAN024FN8_at; Start 172; Stop 196
caacgttctccgtttcatctaggca

SEQ ID NO: 213085 - DNA, 25 bp, Artificial
  probe
  misc_feature (1)..(25): SEQ ID NO: 2529; WAN024FN8_at; Start 906; Stop 930
gaccatcaatagaggacacgccagt

SEQ ID NO: 213086 - DNA, 25 bp, Artificial
  probe
  misc_feature (1)..(25): SEQ ID NO: 2529; WAN024FN8_at; Start 565; Stop 589
tatcgtaaagaattgaaactgcctg

SEQ ID NO: 213087 - DNA, 25 bp, Artificial
  probe
  misc_feature (1)..(25): SEQ ID NO: 2529; WAN024FN8_at; Start 813; Stop 837
cgcttgttctgatatatgtgttgca

SEQ ID NO: 213088 - DNA, 25 bp, Artificial
  probe
  misc_feature (1)..(25): SEQ ID NO: 2529; WAN024FN8_at; Start 935; Stop 959
tacaagatggacaaaacggtctatt

SEQ ID NO: 213089 - DNA, 25 bp, Artificial
  probe
  misc_feature (1)..(25): SEQ ID NO: 2529; WAN024FN8_at; Start 221; Stop 245
gaaaaattttgaagtctggaggcta

SEQ ID NO: 213090 - DNA, 25 bp, Artificial
  probe
  misc_feature (1)..(25): SEQ ID NO: 2529; WAN024FN8_at; Start 1007; Stop 1031
taatgaaggatactaagaagaagca

SEQ ID NO: 213091 - DNA, 25 bp, Artificial
  probe
  misc_feature (1)..(25): SEQ ID NO: 2529; WAN024FN8_at; Start 707; Stop 731
taggaattgattataccaagggtga

SEQ ID NO: 213092 - DNA, 25 bp, Artificial
  probe
  misc_feature (1)..(25): SEQ ID NO: 2529; WAN024FN8_at; Start 279; Stop 303
tttggtgggacgactggcttcttta

SEQ ID NO: 213093 - DNA, 25 bp, Artificial
  probe
  misc_feature (1)..(25): SEQ ID NO: 2529; WAN024FN8_at; Start 874; Stop 898
gaagcaatgttttgtcacgttccag

SEQ ID NO: 213094 - DNA, 25 bp, Artificial
  probe
  misc_feature (1)..(25): SEQ ID NO: 2529; WAN024FN8_at; Start 545; Stop 569
caaatcaagttagagaacgttatcg

SEQ ID NO: 213095 - DNA, 25 bp, Artificial
  probe
  misc_feature (1)..(25): SEQ ID NO: 2529; WAN024FN8_at; Start 25; Stop 49
gtagtagccaatgtagtcaaagaac

SEQ ID NO: 213096 - DNA, 25 bp, Artificial
  probe
  misc_feature (1)..(25): SEQ ID NO: 2529; WAN024FN8_at; Start 529; Stop 553
cggttttcaccccaatcaaatcaag

SEQ ID NO: 213097 - DNA, 25 bp, Artificial
  probe
  misc_feature (1)..(25): SEQ ID NO: 2529; WAN024FN8_at; Start 971; Stop 995
gaaatacaaagcaattagtagaggc

SEQ ID NO: 213098 - DNA, 25 bp, Artificial
  probe
  misc_feature (1)..(25): SEQ ID NO: 2529; WAN024FN8_at; Start 499; Stop 523
ctagtgagtggaatgggagtaaaac

SEQ ID NO: 213099 - DNA, 25 bp, Artificial
  probe
  misc_feature (1)..(25): SEQ ID NO: 2529; WAN024FN8_at; Start 889; Stop 913
cacgttccagttgttgcgaccatca

SEQ ID NO: 213100 - DNA, 25 bp, Artificial
  probe
  misc_feature (1)..(25): SEQ ID NO: 2529; WAN024FN8_at; Start 308; Stop 332
tgcgaaaacaaggaacaagagtcat

SEQ ID NO: 213101 - DNA, 25 bp, Artificial
  probe
  misc_feature (1)..(25): SEQ ID NO: 2529; WAN024FN8_at; Start 655; Stop 679
catgctatgaaaaagcttgtggatc

SEQ ID NO: 213102 - DNA, 25 bp, Artificial
  probe
  misc_feature (1)..(25): SEQ ID NO: 2529; WAN024FN8_at; Start 394; Stop 418
tacccaattgaaaagctactgtccc

SEQ ID NO: 213103 - DNA, 25 bp, Artificial
  probe
  misc_feature (1)..(25): SEQ ID NO: 2529; WAN024FN8_at; Start 347; Stop 371
gatatcatttttacaaaggagcaac

SEQ ID NO: 213104 - DNA, 25 bp, Artificial
  probe
  misc_feature (1)..(25): SEQ ID NO: 2529; WAN024FN8_at; Start 77; Stop 101
tcaaagaaatgacaaaaagagggtg

SEQ ID NO: 213105 - DNA, 25 bp, Artificial
  probe
  misc_feature (1)..(25): SEQ ID NO: 2529; WAN024FN8_at; Start 253; Stop 277
gtttactgtcatactcctgttggag

SEQ ID NO: 213106 - DNA, 25 bp, Artificial
  probe
  misc_feature (1)..(25): SEQ ID NO: 2529; WAN024FN8_at; Start 1044; Stop 1068
gcaagctagtgcgaatttagaacaa

SEQ ID NO: 213107 - DNA, 25 bp, Artificial
  probe
  misc_feature (1)..(25): SEQ ID NO: 2529; WAN024FN8_at; Start 780; Stop 804
tttagggtggagagaagatattgcc

SEQ ID NO: 213108 - DNA, 25 bp, Artificial
  probe
  misc_feature (1)..(25): SEQ ID NO: 2529; WAN024FN8_at; Start 294; Stop 318
ggcttctttaggattgcgaaaacaa

SEQ ID NO: 213109 - DNA, 25 bp, Artificial
  probe
  misc_feature (1)..(25): SEQ ID NO: 2529; WAN024FN8_at; Start 189; Stop 213
tctaggcactctcaaaagtatctgg

SEQ ID NO: 213110 - DNA, 25 bp, Artificial
  probe
  misc_feature (1)..(25): SEQ ID NO: 2529; WAN024FN8_at; Start 578; Stop 602
tgaaactgcctgaggatgcgactgt

SEQ ID NO: 213111 - DNA, 25 bp, Artificial
  probe
  misc_feature (1)..(25): SEQ ID NO: 2529; WAN024FN8_at; Start 748; Stop 772
caatccttgaatttatccgatcgag

SEQ ID NO: 213112 - DNA, 25 bp, Artificial
  probe
  misc_feature (1)..(25): SEQ ID NO: 2529; WAN024FN8_at; Start 130; Stop 154
gaaacagttccctattgtcaccaac

SEQ ID NO: 213113 - DNA, 25 bp, Artificial
  probe
  misc_feature (1)..(25): SEQ ID NO: 2529; WAN024FN8_at; Start 920; Stop 944
gacacgccagtattatacaagatgg

SEQ ID NO: 213114 - DNA, 25 bp, Artificial
  probe
  misc_feature (1)..(25): SEQ ID NO: 2529; WAN024FN8_at; Start 482; Stop 506
aacaggttcaatcctatctagtgag

SEQ ID NO: 213115 - DNA, 25 bp, Artificial
  probe
  misc_feature (1)..(25): SEQ ID NO: 2529; WAN024FN8_at; Start 831; Stop 855
tgttgcaacaagtattcgagaagga

SEQ ID NO: 213116 - DNA, 25 bp, Artificial
  probe
  misc_feature (1)..(25): SEQ ID NO: 2529; WAN024FN8_at; Start 1031; Stop 1055
aagaattagtggagcaagctagtgc

SEQ ID NO: 213117 - DNA, 25 bp, Artificial
  probe
  misc_feature (1)..(25): SEQ ID NO: 2525; WAN024FN9_at; Start 565; Stop 589
tccctccagcaattggaacaaactg

SEQ ID NO: 213118 - DNA, 25 bp, Artificial
  probe
  misc_feature (1)..(25): SEQ ID NO: 2525; WAN024FN9_at; Start 371; Stop 395
cgaatcccttatctctattaaggag

SEQ ID NO: 213119 - DNA, 25 bp, Artificial
  probe
  misc_feature (1)..(25): SEQ ID NO: 2525; WAN024FN9_at; Start 464; Stop 488
caatcggccaagtaatagatgctgc

SEQ ID NO: 213120 - DNA, 25 bp, Artificial
  probe
  misc_feature (1)..(25): SEQ ID NO: 2525; WAN024FN9_at; Start 230; Stop 254
cagtgatgtcaggaatgtttcattc

SEQ ID NO: 213121 - DNA, 25 bp, Artificial
  probe
  misc_feature (1)..(25): SEQ ID NO: 2525; WAN024FN9_at; Start 302; Stop 326
gaatggcggattctatgcaggaaac

SEQ ID NO: 213122 - DNA, 25 bp, Artificial
  probe
  misc_feature (1)..(25): SEQ ID NO: 2525; WAN024FN9_at; Start 355; Stop 379
gcaggagtcgtttcaccgaatccct

SEQ ID NO: 213123 - DNA, 25 bp, Artificial
  probe
  misc_feature (1)..(25): SEQ ID NO: 2525; WAN024FN9_at; Start 55; Stop 79
gaatattttaatgccttacagacca

SEQ ID NO: 213124 - DNA, 25 bp, Artificial
  probe
  misc_feature (1)..(25): SEQ ID NO: 2525; WAN024FN9_at; Start 649; Stop 673
tattatggaaaaaacaccgcgagcg

SEQ ID NO: 213125 - DNA, 25 bp, Artificial
  probe
  misc_feature (1)..(25): SEQ ID NO: 2525; WAN024FN9_at; Start 341; Stop 365
tctatatattacaagcaggagtcgt

SEQ ID NO: 213126 - DNA, 25 bp, Artificial
  probe
  misc_feature (1)..(25): SEQ ID NO: 2525; WAN024FN9_at; Start 534; Stop 558
gaggaaaacgacacgcagacaaatt

SEQ ID NO: 213127 - DNA, 25 bp, Artificial
  probe
  misc_feature (1)..(25): SEQ ID NO: 2525; WAN024FN9_at; Start 285; Stop 309
tttatctggcaaagcgggaatggcg

SEQ ID NO: 213128 - DNA, 25 bp, Artificial
  probe
  misc_feature (1)..(25): SEQ ID NO: 2525; WAN024FN9_at; Start 105; Stop 129
gaaagtcatttctgttacttccaca

SEQ ID NO: 213129 - DNA, 25 bp, Artificial
  probe
  misc_feature (1)..(25): SEQ ID NO: 2525; WAN024FN9_at; Start 663; Stop 687
caccgcgagcgagactgaaagatat

SEQ ID NO: 213130 - DNA, 25 bp, Artificial
  probe
  misc_feature (1)..(25): SEQ ID NO: 2525; WAN024FN9_at; Start 488; Stop 512
caattattgcccaacaatgtgatgg

SEQ ID NO: 213131 - DNA, 25 bp, Artificial
  probe
  misc_feature (1)..(25): SEQ ID NO: 2525; WAN024FN9_at; Start 71; Stop 95
tacagaccaatattcaacttagtgg

SEQ ID NO: 213132 - DNA, 25 bp, Artificial
  probe
  misc_feature (1)..(25): SEQ ID NO: 2525; WAN024FN9_at; Start 188; Stop 212
caggctataaagtcctgttactgga

SEQ ID NO: 213133 - DNA, 25 bp, Artificial
  probe
  misc_feature (1)..(25): SEQ ID NO: 2525; WAN024FN9_at; Start 88; Stop 112
cttagtggtgatggactgaaagtca

SEQ ID NO: 213134 - DNA, 25 bp, Artificial
  probe
  misc_feature (1)..(25): SEQ ID NO: 2525; WAN024FN9_at; Start 201; Stop 225
cctgttactggatgtggatttacgt

SEQ ID NO: 213135 - DNA, 25 bp, Artificial
  probe
  misc_feature (1)..(25): SEQ ID NO: 2525; WAN024FN9_at; Start 524; Stop 548
tcactgaaatgaggaaaacgacacg

SEQ ID NO: 213136 - DNA, 25 bp, Artificial
  probe
  misc_feature (1)..(25): SEQ ID NO: 2525; WAN024FN9_at; Start 603; Stop 627
gggccttgtggccaataaagcaatt

SEQ ID NO: 213137 - DNA, 25 bp, Artificial
  probe
  misc_feature (1)..(25): SEQ ID NO: 2525; WAN024FN9_at; Start 216; Stop 240
ggatttacgtaattcagtgatgtca

SEQ ID NO: 213138 - DNA, 25 bp, Artificial
  probe
  misc_feature (1)..(25): SEQ ID NO: 2525; WAN024FN9_at; Start 318; Stop 342
gcaggaaactactttagataatctc

SEQ ID NO: 213139 - DNA, 25 bp, Artificial
  probe
  misc_feature (1)..(25): SEQ ID NO: 2525; WAN024FN9_at; Start 508; Stop 532
gatgggatatttttggtcactgaaa

SEQ ID NO: 213140 - DNA, 25 bp, Artificial
  probe
  misc_feature (1)..(25): SEQ ID NO: 2525; WAN024FN9_at; Start 158; Stop 182
cagttggcttgtccatgtccttggc

SEQ ID NO: 213141 - DNA, 25 bp, Artificial
  probe
  misc_feature (1)..(25): SEQ ID NO: 2525; WAN024FN9_at; Start 126; Stop 150
cacagtaaaaaacgaaggcaaatcg

SEQ ID NO: 213142 - DNA, 25 bp, Artificial
  probe
  misc_feature (1)..(25): SEQ ID NO: 2525; WAN024FN9_at; Start 551; Stop 575
gacaaattttttcttccctccagca

SEQ ID NO: 213143 - DNA, 25 bp, Artificial
  probe
  misc_feature (1)..(25): SEQ ID NO: 2525; WAN024FN9_at; Start 249; Stop 273
tcattctagggaaagaataacaggt

SEQ ID NO: 213144 - DNA, 25 bp, Artificial
  probe
  misc_feature (1)..(25): SEQ ID NO: 2525; WAN024FN9_at; Start 449; Stop 473
tagtagatactccaccaatcggcca

SEQ ID NO: 213145 - DNA, 25 bp, Artificial
  probe
  misc_feature (1)..(25): SEQ ID NO: 2525; WAN024FN9_at; Start 142; Stop 166
ggcaaatcgactatatcagttggct

SEQ ID NO: 213146 - DNA, 25 bp, Artificial
  probe
  misc_feature (1)..(25): SEQ ID NO: 2525; WAN024FN9_at; Start 173; Stop 197
tgtccttggccttatcaggctataa

SEQ ID NO: 213147 - DNA, 25 bp, Artificial
  probe
  misc_feature (1)..(25): SEQ ID NO: 2525; WAN024FN9_at; Start 574; Stop 598
caattggaacaaactggagttcccg

SEQ ID NO: 213148 - DNA, 25 bp, Artificial
  probe
  misc_feature (1)..(25): SEQ ID NO: 2525; WAN024FN9_at; Start 11; Stop 35
tagaactaacacgtaagtactatca

SEQ ID NO: 213149 - DNA, 25 bp, Artificial
  probe
  misc_feature (1)..(25): SEQ ID NO: 2525; WAN024FN9_at; Start 639; Stop 663
tagctatggctattatggaaaaaac

SEQ ID NO: 213150 - DNA, 25 bp, Artificial
  probe
  misc_feature (1)..(25): SEQ ID NO: 2525; WAN024FN9_at; Start 270; Stop 294
aggtttgactgaatatttatctggc

SEQ ID NO: 213151 - DNA, 25 bp, Artificial
  probe
  misc_feature (1)..(25): SEQ ID NO: 1188; WAN024FNA_at; Start 306; Stop 330
ggaatctctagcttcgaaaattaaa

SEQ ID NO: 213152 - DNA, 25 bp, Artificial
  probe
  misc_feature (1)..(25): SEQ ID NO: 1188; WAN024FNA_at; Start 421; Stop 445
aaggtagctgcccttaaaatcaagg

SEQ ID NO: 213153 - DNA, 25 bp, Artificial
  probe
  misc_feature (1)..(25): SEQ ID NO: 1188; WAN024FNA_at; Start 499; Stop 523
actccgtcaggaccgcatgtgcgaa

SEQ ID NO: 213154 - DNA, 25 bp, Artificial
  probe
  misc_feature (1)..(25): SEQ ID NO: 1188; WAN024FNA_at; Start 214; Stop 238
ggaagtgctctaacaaaggattaca

SEQ ID NO: 213155 - DNA, 25 bp, Artificial
  probe
  misc_feature (1)..(25): SEQ ID NO: 1188; WAN024FNA_at; Start 126; Stop 150
tgtacccaaaacctatacaagtgat

SEQ ID NO: 213156 - DNA, 25 bp, Artificial
  probe
  misc_feature (1)..(25): SEQ ID NO: 1188; WAN024FNA_at; Start 338; Stop 362
tccctgcggaaactcgaattatttc

SEQ ID NO: 213157 - DNA, 25 bp, Artificial
  probe
  misc_feature (1)..(25): SEQ ID NO: 1188; WAN024FNA_at; Start 378; Stop 402
tacgaactcagatgaagctgctcga

SEQ ID NO: 213158 - DNA, 25 bp, Artificial
  probe
  misc_feature (1)..(25): SEQ ID NO: 1188; WAN024FNA_at; Start 295; Stop 319
gaatcaactttggaatctctagctt

SEQ ID NO: 213159 - DNA, 25 bp, Artificial
  probe
  misc_feature (1)..(25): SEQ ID NO: 1188; WAN024FNA_at; Start 202; Stop 226
gatttgcaagcaggaagtgctctaa

SEQ ID NO: 213160 - DNA, 25 bp, Artificial
  probe
  misc_feature (1)..(25): SEQ ID NO: 1188; WAN024FNA_at; Start 363; Stop 387
cattagtgttacaaatacgaactca

SEQ ID NO: 213161 - DNA, 25 bp, Artificial
  probe
  misc_feature (1)..(25): SEQ ID NO: 1188; WAN024FNA_at; Start 433; Stop 457
cttaaaatcaaggaagtaactcaag

SEQ ID NO: 213162 - DNA, 25 bp, Artificial
  probe
  misc_feature (1)..(25): SEQ ID NO: 1188; WAN024FNA_at; Start 563; Stop 587
cagtctttctagtagttgccaagga

SEQ ID NO: 213163 - DNA, 25 bp, Artificial
  probe
  misc_feature (1)..(25): SEQ ID NO: 1188; WAN024FNA_at; Start 509; Stop 533
gaccgcatgtgcgaaaatctactac

SEQ ID NO: 213164 - DNA, 25 bp, Artificial
  probe
  misc_feature (1)..(25): SEQ ID NO: 1188; WAN024FNA_at; Start 391; Stop 415
gaagctgctcgaatagcaaatggga

SEQ ID NO: 213165 - DNA, 25 bp, Artificial
  probe
  misc_feature (1)..(25): SEQ ID NO: 1188; WAN024FNA_at; Start 449; Stop 473
taactcaagttacagatgtcaccac

SEQ ID NO: 213166 - DNA, 25 bp, Artificial
  probe
  misc_feature (1)..(25): SEQ ID NO: 1188; WAN024FNA_at; Start 632; Stop 656
tgggaatccctattttaggctcaat

SEQ ID NO: 213167 - DNA, 25 bp, Artificial
  probe
  misc_feature (1)..(25): SEQ ID NO: 1188; WAN024FNA_at; Start 520; Stop 544
cgaaaatctactacagcagggcttg

SEQ ID NO: 213168 - DNA, 25 bp, Artificial
  probe
  misc_feature (1)..(25): SEQ ID NO: 1188; WAN024FNA_at; Start 465; Stop 489
tgtcaccactttacagactgcacgc

SEQ ID NO: 213169 - DNA, 25 bp, Artificial
  probe
  misc_feature (1)..(25): SEQ ID NO: 1188; WAN024FNA_at; Start 50; Stop 74
tatggcttcgtaaatggatcattgt

SEQ ID NO: 213170 - DNA, 25 bp, Artificial
  probe
  misc_feature (1)..(25): SEQ ID NO: 1188; WAN024FNA_at; Start 3; Stop 27
gaataatcgtatagtagacatcagt

SEQ ID NO: 213171 - DNA, 25 bp, Artificial
  probe
  misc_feature (1)..(25): SEQ ID NO: 1188; WAN024FNA_at; Start 251; Stop 275
tatcagatgaagtgttagaagaaac

SEQ ID NO: 213172 - DNA, 25 bp, Artificial
  probe
  misc_feature (1)..(25): SEQ ID NO: 1188; WAN024FNA_at; Start 580; Stop 604
gccaaggaaatattagatgatcgca

SEQ ID NO: 213173 - DNA, 25 bp, Artificial
  probe
  misc_feature (1)..(25): SEQ ID NO: 1188; WAN024FNA_at; Start 329; Stop 353
aaatttctatccctgcggaaactcg

SEQ ID NO: 213174 - DNA, 25 bp, Artificial
  probe
  misc_feature (1)..(25): SEQ ID NO: 1188; WAN024FNA_at; Start 38; Stop 62
tattgaatgtcttatggcttcgtaa

SEQ ID NO: 213175 - DNA, 25 bp, Artificial
  probe
  misc_feature (1)..(25): SEQ ID NO: 1188; WAN024FNA_at; Start 535; Stop 559
gcagggcttgttcttggtgcattct

SEQ ID NO: 213176 - DNA, 25 bp, Artificial
  probe
  misc_feature (1)..(25): SEQ ID NO: 1188; WAN024FNA_at; Start 132; Stop 156
caaaacctatacaagtgatactcgt

SEQ ID NO: 213177 - DNA, 25 bp, Artificial
  probe
  misc_feature (1)..(25): SEQ ID NO: 1188; WAN024FNA_at; Start 407; Stop 431
caaatgggataaggaaggtagctgc

SEQ ID NO: 213178 - DNA, 25 bp, Artificial
  probe
  misc_feature (1)..(25): SEQ ID NO: 1188; WAN024FNA_at; Start 176; Stop 200
gggataataaaaatctgtctaatgc

SEQ ID NO: 213179 - DNA, 25 bp, Artificial
  probe
  misc_feature (1)..(25): SEQ ID NO: 1188; WAN024FNA_at; Start 550; Stop 574
ggtgcattcttaacagtctttctag

SEQ ID NO: 213180 - DNA, 25 bp, Artificial
  probe
  misc_feature (1)..(25): SEQ ID NO: 1188; WAN024FNA_at; Start 352; Stop 376
cgaattatttccattagtgttacaa

SEQ ID NO: 213181 - DNA, 25 bp, Artificial
  probe
  misc_feature (1)..(25): SEQ ID NO: 1188; WAN024FNA_at; Start 595; Stop 619
gatgatcgcataaaacgttttgaag

SEQ ID NO: 213182 - DNA, 25 bp, Artificial
  probe
  misc_feature (1)..(25): SEQ ID NO: 1188; WAN024FNA_at; Start 153; Stop 177
tcgtatatatgtggtaagcaaaggg

SEQ ID NO: 213183 - DNA, 25 bp, Artificial
  probe
  misc_feature (1)..(25): SEQ ID NO: 1188; WAN024FNA_at; Start 615; Stop 639
tgaagaacttgaaaaattgggaatc

SEQ ID NO: 213184 - DNA, 25 bp, Artificial
  probe
  misc_feature (1)..(25): SEQ ID NO: 1188; WAN024FNA_at; Start 191; Stop 215
tgtctaatgcagatttgcaagcagg

SEQ ID NO: 213185 - DNA, 25 bp, Artificial
  probe
  misc_feature (1)..(25): SEQ ID NO: 5656; WAN024FNB_at; Start 79; Stop 103
gaaaaagctaagaccaaatgggagc

SEQ ID NO: 213186 - DNA, 25 bp, Artificial
  probe
  misc_feature (1)..(25): SEQ ID NO: 5656; WAN024FNB_at; Start 82; Stop 106
aaagctaagaccaaatgggagcaag

SEQ ID NO: 213187 - DNA, 25 bp, Artificial
  probe
  misc_feature (1)..(25): SEQ ID NO: 5656; WAN024FNB_at; Start 37; Stop 61
tacatgaaactgcaaaaagatactg

SEQ ID NO: 213188 - DNA, 25 bp, Artificial
  probe
  misc_feature (1)..(25): SEQ ID NO: 5656; WAN024FNB_at; Start 33; Stop 57
caagtacatgaaactgcaaaaagat

SEQ ID NO: 213189 - DNA, 25 bp, Artificial
  probe
  misc_feature (1)..(25): SEQ ID NO: 5656; WAN024FNB_at; Start 27; Stop 51
taactacaagtacatgaaactgcaa

SEQ ID NO: 213190 - DNA, 25 bp, Artificial
  probe
  misc_feature (1)..(25): SEQ ID NO: 5656; WAN024FNB_at; Start 42; Stop 66
gaaactgcaaaaagatactgtaaca

SEQ ID NO: 213191 - DNA, 25 bp, Artificial
  probe
  misc_feature (1)..(25): SEQ ID NO: 5656; WAN024FNB_at; Start 12; Stop 36
taagggtgatggcaataactacaag

SEQ ID NO: 213192 - DNA, 25 bp, Artificial
  probe
  misc_feature (1)..(25): SEQ ID NO: 5656; WAN024FNB_at; Start 25; Stop 49
aataactacaagtacatgaaactgc

SEQ ID NO: 213193 - DNA, 25 bp, Artificial
  probe
  misc_feature (1)..(25): SEQ ID NO: 5656; WAN024FNB_at; Start 83; Stop 107
aagctaagaccaaatgggagcaaga

SEQ ID NO: 213194 - DNA, 25 bp, Artificial
  probe
  misc_feature (1)..(25): SEQ ID NO: 5656; WAN024FNB_at; Start 19; Stop 43
gatggcaataactacaagtacatga

SEQ ID NO: 213195 - DNA, 25 bp, Artificial
  probe
  misc_feature (1)..(25): SEQ ID NO: 5656; WAN024FNB_at; Start 97; Stop 121
tgggagcaagaaagcaaaaaagcaa

SEQ ID NO: 213196 - DNA, 25 bp, Artificial
  probe
  misc_feature (1)..(25): SEQ ID NO: 5656; WAN024FNB_at; Start 80; Stop 104
aaaaagctaagaccaaatgggagca

SEQ ID NO: 213197 - DNA, 25 bp, Artificial
  probe
  misc_feature (1)..(25): SEQ ID NO: 5656; WAN024FNB_at; Start 95; Stop 119
aatgggagcaagaaagcaaaaaagc

SEQ ID NO: 213198 - DNA, 25 bp, Artificial
  probe
  misc_feature (1)..(25): SEQ ID NO: 5656; WAN024FNB_at; Start 78; Stop 102
tgaaaaagctaagaccaaatgggag

SEQ ID NO: 213199 - DNA, 25 bp, Artificial
  probe
  misc_feature (1)..(25): SEQ ID NO: 5656; WAN024FNB_at; Start 110; Stop 134
gcaaaaaagcaatcgaaaaagccca

SEQ ID NO: 213200 - DNA, 25 bp, Artificial
  probe
  misc_feature (1)..(25): SEQ ID NO: 5656; WAN024FNB_at; Start 18; Stop 42
tgatggcaataactacaagtacatg

SEQ ID NO: 213201 - DNA, 25 bp, Artificial
  probe
  misc_feature (1)..(25): SEQ ID NO: 5656; WAN024FNB_at; Start 16; Stop 40
ggtgatggcaataactacaagtaca

SEQ ID NO: 213202 - DNA, 25 bp, Artificial
  probe
  misc_feature (1)..(25): SEQ ID NO: 5656; WAN024FNB_at; Start 9; Stop 33
tattaagggtgatggcaataactac

SEQ ID NO: 213203 - DNA, 25 bp, Artificial
  probe
  misc_feature (1)..(25): SEQ ID NO: 5656; WAN024FNB_at; Start 47; Stop 71
tgcaaaaagatactgtaacaaccaa

SEQ ID NO: 213204 - DNA, 25 bp, Artificial
  probe
  misc_feature (1)..(25): SEQ ID NO: 5656; WAN024FNB_at; Start 6; Stop 30
tggtattaagggtgatggcaataac

SEQ ID NO: 213205 - DNA, 25 bp, Artificial
  probe
  misc_feature (1)..(25): SEQ ID NO: 5656; WAN024FNB_at; Start 39; Stop 63
catgaaactgcaaaaagatactgta

SEQ ID NO: 213206 - DNA, 25 bp, Artificial
  probe
  misc_feature (1)..(25): SEQ ID NO: 5656; WAN024FNB_at; Start 31; Stop 55
tacaagtacatgaaactgcaaaaag

SEQ ID NO: 213207 - DNA, 25 bp, Artificial
  probe
  misc_feature (1)..(25): SEQ ID NO: 5656; WAN024FNB_at; Start 100; Stop 124
gagcaagaaagcaaaaaagcaatcg

SEQ ID NO: 213208 - DNA, 25 bp, Artificial
  probe
  misc_feature (1)..(25): SEQ ID NO: 5656; WAN024FNB_at; Start 22; Stop 46
ggcaataactacaagtacatgaaac

SEQ ID NO: 213209 - DNA, 25 bp, Artificial
  probe
  misc_feature (1)..(25): SEQ ID NO: 5656; WAN024FNB_at; Start 41; Stop 65
tgaaactgcaaaaagatactgtaac

SEQ ID NO: 213210 - DNA, 25 bp, Artificial
  probe
  misc_feature (1)..(25): SEQ ID NO: 5656; WAN024FNB_at; Start 15; Stop 39
gggtgatggcaataactacaagtac

SEQ ID NO: 213211 - DNA, 25 bp, Artificial
  probe
  misc_feature (1)..(25): SEQ ID NO: 5656; WAN024FNB_at; Start 102; Stop 126
gcaagaaagcaaaaaagcaatcgaa

SEQ ID NO: 213212 - DNA, 25 bp, Artificial
  probe
  misc_feature (1)..(25): SEQ ID NO: 5656; WAN024FNB_at; Start 48; Stop 72
gcaaaaagatactgtaacaaccaaa

SEQ ID NO: 213213 - DNA, 25 bp, Artificial
  probe
  misc_feature (1)..(25): SEQ ID NO: 5656; WAN024FNB_at; Start 90; Stop 114
gaccaaatgggagcaagaaagcaaa

SEQ ID NO: 213214 - DNA, 25 bp, Artificial
  probe
  misc_feature (1)..(25): SEQ ID NO: 5656; WAN024FNB_at; Start 88; Stop 112
aagaccaaatgggagcaagaaagca

SEQ ID NO: 213215 - DNA, 25 bp, Artificial
  probe
  misc_feature (1)..(25): SEQ ID NO: 5656; WAN024FNB_at; Start 92; Stop 116
ccaaatgggagcaagaaagcaaaaa

SEQ ID NO: 213216 - DNA, 25 bp, Artificial
  probe
  misc_feature (1)..(25): SEQ ID NO: 5656; WAN024FNB_at; Start 85; Stop 109
gctaagaccaaatgggagcaagaaa

SEQ ID NO: 213217 - DNA, 25 bp, Artificial
  probe
  misc_feature (1)..(25): SEQ ID NO: 5656; WAN024FNB_at; Start 45; Stop 69
actgcaaaaagatactgtaacaacc

SEQ ID NO: 213218 - DNA, 25 bp, Artificial
  probe
  misc_feature (1)..(25): SEQ ID NO: 5656; WAN024FNB_at; Start 122; Stop 146
tcgaaaaagcccaaaaagaagcaga

SEQ ID NO: 213219 - DNA, 25 bp, Artificial
  probe
  misc_feature (1)..(25): SEQ ID NO: 1988; WAN024FNC_at; Start 190; Stop 214
gatgcagatagtgaaaacaaagatg

SEQ ID NO: 213220 - DNA, 25 bp, Artificial
  probe
  misc_feature (1)..(25): SEQ ID NO: 1988; WAN024FNC_at; Start 318; Stop 342
agtgatgccatttacaagagggcat

SEQ ID NO: 213221 - DNA, 25 bp, Artificial
  probe
  misc_feature (1)..(25): SEQ ID NO: 1988; WAN024FNC_at; Start 54; Stop 78
tcaggatccatcaacttatctcaat

SEQ ID NO: 213222 - DNA, 25 bp, Artificial
  probe
  misc_feature (1)..(25): SEQ ID NO: 1988; WAN024FNC_at; Start 232; Stop 256
aaatatgctgaagcacaggcttgga

SEQ ID NO: 213223 - DNA, 25 bp, Artificial
  probe
  misc_feature (1)..(25): SEQ ID NO: 1988; WAN024FNC_at; Start 262; Stop 286
gacaattctctcattatgtcagcta

SEQ ID NO: 213224 - DNA, 25 bp, Artificial
  probe
  misc_feature (1)..(25): SEQ ID NO: 1988; WAN024FNC_at; Start 315; Stop 339
caaagtgatgccatttacaagaggg

SEQ ID NO: 213225 - DNA, 25 bp, Artificial
  probe
  misc_feature (1)..(25): SEQ ID NO: 1988; WAN024FNC_at; Start 80; Stop 104
ctttcaatgcagagaatggcttcta

SEQ ID NO: 213226 - DNA, 25 bp, Artificial
  probe
  misc_feature (1)..(25): SEQ ID NO: 1988; WAN024FNC_at; Start 166; Stop 190
gatacctacactaagatgctcaaag

SEQ ID NO: 213227 - DNA, 25 bp, Artificial
  probe
  misc_feature (1)..(25): SEQ ID NO: 1988; WAN024FNC_at; Start 280; Stop 304
tcagctatgtcaagtggtggcacag

SEQ ID NO: 213228 - DNA, 25 bp, Artificial
  probe
  misc_feature (1)..(25): SEQ ID NO: 1988; WAN024FNC_at; Start 115; Stop 139
tttggaccggatgccaaggaagata

SEQ ID NO: 213229 - DNA, 25 bp, Artificial
  probe
  misc_feature (1)..(25): SEQ ID NO: 1988; WAN024FNC_at; Start 228; Stop 252
tgaaaaatatgctgaagcacaggct

SEQ ID NO: 213230 - DNA, 25 bp, Artificial
  probe
  misc_feature (1)..(25): SEQ ID NO: 1988; WAN024FNC_at; Start 14; Stop 38
gaggctatgatttgagctttgatgg

SEQ ID NO: 213231 - DNA, 25 bp, Artificial
  probe
  misc_feature (1)..(25): SEQ ID NO: 1988; WAN024FNC_at; Start 247; Stop 271
caggcttggatgattgacaattctc

SEQ ID NO: 213232 - DNA, 25 bp, Artificial
  probe
  misc_feature (1)..(25): SEQ ID NO: 1988; WAN024FNC_at; Start 155; Stop 179
gcctaggtcttgatacctacactaa

SEQ ID NO: 213233 - DNA, 25 bp, Artificial
  probe
  misc_feature (1)..(25): SEQ ID NO: 1988; WAN024FNC_at; Start 207; Stop 231
caaagatgtagccaaacgctatgaa

SEQ ID NO: 213234 - DNA, 25 bp, Artificial
  probe
  misc_feature (1)..(25): SEQ ID NO: 1988; WAN024FNC_at; Start 307; Stop 331
tctgtaaccaaagtgatgccattta

SEQ ID NO: 213235 - DNA, 25 bp, Artificial
  probe
  misc_feature (1)..(25): SEQ ID NO: 1988; WAN024FNC_at; Start 202; Stop 226
gaaaacaaagatgtagccaaacgct

SEQ ID NO: 213236 - DNA, 25 bp, Artificial
  probe
  misc_feature (1)..(25): SEQ ID NO: 1988; WAN024FNC_at; Start 276; Stop 300
tatgtcagctatgtcaagtggtggc

SEQ ID NO: 213237 - DNA, 25 bp, Artificial
  probe
  misc_feature (1)..(25): SEQ ID NO: 1988; WAN024FNC_at; Start 89; Stop 113
cagagaatggcttctatctcaaaat

SEQ ID NO: 213238 - DNA, 25 bp, Artificial
  probe
  misc_feature (1)..(25): SEQ ID NO: 1988; WAN024FNC_at; Start 297; Stop 321
tggcacagcatctgtaaccaaagtg

SEQ ID NO: 213239 - DNA, 25 bp, Artificial
  probe
  misc_feature (1)..(25): SEQ ID NO: 1988; WAN024FNC_at; Start 45; Stop 69
gggtgactatcaggatccatcaact

SEQ ID NO: 213240 - DNA, 25 bp, Artificial
  probe
  misc_feature (1)..(25): SEQ ID NO: 1988; WAN024FNC_at; Start 19; Stop 43
tatgatttgagctttgatggttggg

SEQ ID NO: 213241 - DNA, 25 bp, Artificial
  probe
  misc_feature (1)..(25): SEQ ID NO: 1988; WAN024FNC_at; Start 136; Stop 160
gataaggaaaaaatcactagcctag

SEQ ID NO: 213242 - DNA, 25 bp, Artificial
  probe
  misc_feature (1)..(25): SEQ ID NO: 1988; WAN024FNC_at; Start 291; Stop 315
aagtggtggcacagcatctgtaacc

SEQ ID NO: 213243 - DNA, 25 bp, Artificial
  probe
  misc_feature (1)..(25): SEQ ID NO: 1988; WAN024FNC_at; Start 121; Stop 145
ccggatgccaaggaagataaggaaa

SEQ ID NO: 213244 - DNA, 25 bp, Artificial
  probe
  misc_feature (1)..(25): SEQ ID NO: 1988; WAN024FNC_at; Start 172; Stop 196
tacactaagatgctcaaagatgcag

SEQ ID NO: 213245 - DNA, 25 bp, Artificial
  probe
  misc_feature (1)..(25): SEQ ID NO: 1988; WAN024FNC_at; Start 241; Stop 265
gaagcacaggcttggatgattgaca

SEQ ID NO: 213246 - DNA, 25 bp, Artificial
  probe
  misc_feature (1)..(25): SEQ ID NO: 1988; WAN024FNC_at; Start 215; Stop 239
tagccaaacgctatgaaaaatatgc

SEQ ID NO: 213247 - DNA, 25 bp, Artificial
  probe
  misc_feature (1)..(25): SEQ ID NO: 1988; WAN024FNC_at; Start 106; Stop 130
ctcaaaatttttggaccggatgcca

SEQ ID NO: 213248 - DNA, 25 bp, Artificial
  probe
  misc_feature (1)..(25): SEQ ID NO: 1988; WAN024FNC_at; Start 42; Stop 66
ggtgggtgactatcaggatccatca

SEQ ID NO: 213249 - DNA, 25 bp, Artificial
  probe
  misc_feature (1)..(25): SEQ ID NO: 1988; WAN024FNC_at; Start 285; Stop 309
tatgtcaagtggtggcacagcatct

SEQ ID NO: 213250 - DNA, 25 bp, Artificial
  probe
  misc_feature (1)..(25): SEQ ID NO: 1988; WAN024FNC_at; Start 69; Stop 93
ttatctcaatcctttcaatgcagag

SEQ ID NO: 213251 - DNA, 25 bp, Artificial
  probe
  misc_feature (1)..(25): SEQ ID NO: 1988; WAN024FNC_at; Start 75; Stop 99
caatcctttcaatgcagagaatggc

SEQ ID NO: 213252 - DNA, 25 bp, Artificial
  probe
  misc_feature (1)..(25): SEQ ID NO: 1988; WAN024FNC_at; Start 142; Stop 166
gaaaaaatcactagcctaggtcttg

SEQ ID NO: 213253 - DNA, 25 bp, Artificial
  probe
  misc_feature (1)..(25): SEQ ID NO: 5510; WAN024FND_at; Start 118; Stop 142
gtagatcagacaagtaaaaatgccg

SEQ ID NO: 213254 - DNA, 25 bp, Artificial
  probe
  misc_feature (1)..(25): SEQ ID NO: 5510; WAN024FND_at; Start 216; Stop 240
gcaactttcaacagatgattttaat

SEQ ID NO: 213255 - DNA, 25 bp, Artificial
  probe
  misc_feature (1)..(25): SEQ ID NO: 5510; WAN024FND_at; Start 211; Stop 235
gttcagcaactttcaacagatgatt

SEQ ID NO: 213256 - DNA, 25 bp, Artificial
  probe
  misc_feature (1)..(25): SEQ ID NO: 5510; WAN024FND_at; Start 237; Stop 261
taataatgtaccttcttggcaccga

SEQ ID NO: 213257 - DNA, 25 bp, Artificial
  probe
  misc_feature (1)..(25): SEQ ID NO: 5510; WAN024FND_at; Start 144; Stop 168
tacaggcatgaactcagttaagcag

SEQ ID NO: 213258 - DNA, 25 bp, Artificial
  probe
  misc_feature (1)..(25): SEQ ID NO: 5510; WAN024FND_at; Start 104; Stop 128
acgtgaatgtggcagtagatcagac

SEQ ID NO: 213259 - DNA, 25 bp, Artificial
  probe
  misc_feature (1)..(25): SEQ ID NO: 5510; WAN024FND_at; Start 12; Stop 36
tcaggatgcctatttcaacaaagaa

SEQ ID NO: 213260 - DNA, 25 bp, Artificial
  probe
  misc_feature (1)..(25): SEQ ID NO: 5510; WAN024FND_at; Start 121; Stop 145
gatcagacaagtaaaaatgccgtta

SEQ ID NO: 213261 - DNA, 25 bp, Artificial
  probe
  misc_feature (1)..(25): SEQ ID NO: 5510; WAN024FND_at; Start 241; Stop 265
aatgtaccttcttggcaccgatgcc

SEQ ID NO: 213262 - DNA, 25 bp, Artificial
  probe
  misc_feature (1)..(25): SEQ ID NO: 5510; WAN024FND_at; Start 18; Stop 42
tgcctatttcaacaaagaaaaagcc

SEQ ID NO: 213263 - DNA, 25 bp, Artificial
  probe
  misc_feature (1)..(25): SEQ ID NO: 5510; WAN024FND_at; Start 251; Stop 275
cttggcaccgatgccagctgataga

SEQ ID NO: 213264 - DNA, 25 bp, Artificial
  probe
  misc_feature (1)..(25): SEQ ID NO: 5510; WAN024FND_at; Start 139; Stop 163
gccgttacaggcatgaactcagtta

SEQ ID NO: 213265 - DNA, 25 bp, Artificial
  probe
  misc_feature (1)..(25): SEQ ID NO: 5510; WAN024FND_at; Start 153; Stop 177
gaactcagttaagcagactctggag

SEQ ID NO: 213266 - DNA, 25 bp, Artificial
  probe
  misc_feature (1)..(25): SEQ ID NO: 5510; WAN024FND_at; Start 157; Stop 181
tcagttaagcagactctggagtcag

SEQ ID NO: 213267 - DNA, 25 bp, Artificial
  probe
  misc_feature (1)..(25): SEQ ID NO: 5510; WAN024FND_at; Start 25; Stop 49
ttcaacaaagaaaaagcccaagcaa

SEQ ID NO: 213268 - DNA, 25 bp, Artificial
  probe
  misc_feature (1)..(25): SEQ ID NO: 5510; WAN024FND_at; Start 169; Stop 193
actctggagtcagttttaggtgctg

SEQ ID NO: 213269 - DNA, 25 bp, Artificial
  probe
  misc_feature (1)..(25): SEQ ID NO: 5510; WAN024FND_at; Start 69; Stop 93
agaattggcaagtcaaggtgtgact

SEQ ID NO: 213270 - DNA, 25 bp, Artificial
  probe
  misc_feature (1)..(25): SEQ ID NO: 5510; WAN024FND_at; Start 196; Stop 220
aacattgttattgatgttcagcaac

SEQ ID NO: 213271 - DNA, 25 bp, Artificial
  probe
  misc_feature (1)..(25): SEQ ID NO: 5510; WAN024FND_at; Start 1; Stop 25
ttggcagatgctcaggatgcctatt

SEQ ID NO: 213272 - DNA, 25 bp, Artificial
  probe
  misc_feature (1)..(25): SEQ ID NO: 5510; WAN024FND_at; Start 132; Stop 156
taaaaatgccgttacaggcatgaac

SEQ ID NO: 213273 - DNA, 25 bp, Artificial
  probe
  misc_feature (1)..(25): SEQ ID NO: 5510; WAN024FND_at; Start 37; Stop 61
aaagcccaagcaaaatttgcggaag

SEQ ID NO: 213274 - DNA, 25 bp, Artificial
  probe
  misc_feature (1)..(25): SEQ ID NO: 5510; WAN024FND_at; Start 77; Stop 101
caagtcaaggtgtgactttccctat

SEQ ID NO: 213275 - DNA, 25 bp, Artificial
  probe
  misc_feature (1)..(25): SEQ ID NO: 5510; WAN024FND_at; Start 208; Stop 232
gatgttcagcaactttcaacagatg

SEQ ID NO: 213276 - DNA, 25 bp, Artificial
  probe
  misc_feature (1)..(25): SEQ ID NO: 5510; WAN024FND_at; Start 43; Stop 67
caagcaaaatttgcggaagctaaaa

SEQ ID NO: 213277 - DNA, 25 bp, Artificial
  probe
  misc_feature (1)..(25): SEQ ID NO: 5510; WAN024FND_at; Start 175; Stop 199
gagtcagttttaggtgctgataaca

SEQ ID NO: 213278 - DNA, 25 bp, Artificial
  probe
  misc_feature (1)..(25): SEQ ID NO: 5510; WAN024FND_at; Start 33; Stop 57
agaaaaagcccaagcaaaatttgcg

SEQ ID NO: 213279 - DNA, 25 bp, Artificial
  probe
  misc_feature (1)..(25): SEQ ID NO: 5510; WAN024FND_at; Start 179; Stop 203
cagttttaggtgctgataacattgt

SEQ ID NO: 213280 - DNA, 25 bp, Artificial
  probe
  misc_feature (1)..(25): SEQ ID NO: 5510; WAN024FND_at; Start 232; Stop 256
gattttaataatgtaccttcttggc

SEQ ID NO: 213281 - DNA, 25 bp, Artificial
  probe
  misc_feature (1)..(25): SEQ ID NO: 5510; WAN024FND_at; Start 126; Stop 150
gacaagtaaaaatgccgttacaggc

SEQ ID NO: 213282 - DNA, 25 bp, Artificial
  probe
  misc_feature (1)..(25): SEQ ID NO: 5510; WAN024FND_at; Start 107; Stop 131
tgaatgtggcagtagatcagacaag

SEQ ID NO: 213283 - DNA, 25 bp, Artificial
  probe
  misc_feature (1)..(25): SEQ ID NO: 5510; WAN024FND_at; Start 150; Stop 174
catgaactcagttaagcagactctg

SEQ ID NO: 213284 - DNA, 25 bp, Artificial
  probe
  misc_feature (1)..(25): SEQ ID NO: 5510; WAN024FND_at; Start 111; Stop 135
tgtggcagtagatcagacaagtaaa

SEQ ID NO: 213285 - DNA, 25 bp, Artificial
  probe
  misc_feature (1)..(25): SEQ ID NO: 5510; WAN024FND_at; Start 245; Stop 269
taccttcttggcaccgatgccagct

SEQ ID NO: 213286 - DNA, 25 bp, Artificial
  probe
  misc_feature (1)..(25): SEQ ID NO: 5510; WAN024FND_at; Start 7; Stop 31
gatgctcaggatgcctatttcaaca

SEQ ID NO: 213287 - DNA, 25 bp, Artificial
  probe
  misc_feature (1)..(25): SEQ ID NO: 5782; WAN024FNE_at; Start 343; Stop 367
ttgaacaaaaacttccgccaagcag

SEQ ID NO: 213288 - DNA, 25 bp, Artificial
  probe
  misc_feature (1)..(25): SEQ ID NO: 5782; WAN024FNE_at; Start 292; Stop 316
cacactactaaaacgacagatgagc

SEQ ID NO: 213289 - DNA, 25 bp, Artificial
  probe
  misc_feature (1)..(25): SEQ ID NO: 5782; WAN024FNE_at; Start 198; Stop 222
gaccaaggagaaatataaggataat

SEQ ID NO: 213290 - DNA, 25 bp, Artificial
  probe
  misc_feature (1)..(25): SEQ ID NO: 5782; WAN024FNE_at; Start 64; Stop 88
catgccaaagtatcgattgaacacg

SEQ ID NO: 213291 - DNA, 25 bp, Artificial
  probe
  misc_feature (1)..(25): SEQ ID NO: 5782; WAN024FNE_at; Start 441; Stop 465
taacaccttggtgctcctacatttg

SEQ ID NO: 213292 - DNA, 25 bp, Artificial
  probe
  misc_feature (1)..(25): SEQ ID NO: 5782; WAN024FNE_at; Start 49; Stop 73
ccacattactatgatcatgccaaag

SEQ ID NO: 213293 - DNA, 25 bp, Artificial
  probe
  misc_feature (1)..(25): SEQ ID NO: 5782; WAN024FNE_at; Start 39; Stop 63
tgtgaaaaacccacattactatgat

SEQ ID NO: 213294 - DNA, 25 bp, Artificial
  probe
  misc_feature (1)..(25): SEQ ID NO: 5782; WAN024FNE_at; Start 110; Stop 134
gatcagatcaagaattgactatccg

SEQ ID NO: 213295 - DNA, 25 bp, Artificial
  probe
  misc_feature (1)..(25): SEQ ID NO: 5782; WAN024FNE_at; Start 331; Stop 355
gagacagctgtcttgaacaaaaact

SEQ ID NO: 213296 - DNA, 25 bp, Artificial
  probe
  misc_feature (1)..(25): SEQ ID NO: 5782; WAN024FNE_at; Start 450; Stop 474
ggtgctcctacatttgtccaagttg

SEQ ID NO: 213297 - DNA, 25 bp, Artificial
  probe
  misc_feature (1)..(25): SEQ ID NO: 5782; WAN024FNE_at; Start 142; Stop 166
gaaagtggagcttattctatcgctg

SEQ ID NO: 213298 - DNA, 25 bp, Artificial
  probe
  misc_feature (1)..(25): SEQ ID NO: 5782; WAN024FNE_at; Start 231; Stop 255
tagcttgcaggacaagacttcttgg

SEQ ID NO: 213299 - DNA, 25 bp, Artificial
  probe
  misc_feature (1)..(25): SEQ ID NO: 5782; WAN024FNE_at; Start 353; Stop 377
acttccgccaagcagtaaactttgc

SEQ ID NO: 213300 - DNA, 25 bp, Artificial
  probe
  misc_feature (1)..(25): SEQ ID NO: 5782; WAN024FNE_at; Start 10; Stop 34
gatttcacatcaaaatcatttatcg

SEQ ID NO: 213301 - DNA, 25 bp, Artificial
  probe
  misc_feature (1)..(25): SEQ ID NO: 5782; WAN024FNE_at; Start 74; Stop 98
tatcgattgaacacgtgaaattggc

SEQ ID NO: 213302 - DNA, 25 bp, Artificial
  probe
  misc_feature (1)..(25): SEQ ID NO: 5782; WAN024FNE_at; Start 429; Stop 453
caagacccttcgtaacaccttggtg

SEQ ID NO: 213303 - DNA, 25 bp, Artificial
  probe
  misc_feature (1)..(25): SEQ ID NO: 5782; WAN024FNE_at; Start 318; Stop 342
gaagaagtcaactgagacagctgtc

SEQ ID NO: 213304 - DNA, 25 bp, Artificial
  probe
  misc_feature (1)..(25): SEQ ID NO: 5782; WAN024FNE_at; Start 185; Stop 209
cgaactttgctaagaccaaggagaa

SEQ ID NO: 213305 - DNA, 25 bp, Artificial
  probe
  misc_feature (1)..(25): SEQ ID NO: 5782; WAN024FNE_at; Start 260; Stop 284
taaatttcaatgtcaatcgcgaggc

SEQ ID NO: 213306 - DNA, 25 bp, Artificial
  probe
  misc_feature (1)..(25): SEQ ID NO: 5782; WAN024FNE_at; Start 82; Stop 106
gaacacgtgaaattggcttacttta

SEQ ID NO: 213307 - DNA, 25 bp, Artificial
  probe
  misc_feature (1)..(25): SEQ ID NO: 5782; WAN024FNE_at; Start 464; Stop 488
tgtccaagttggagacaagaccttt

SEQ ID NO: 213308 - DNA, 25 bp, Artificial
  probe
  misc_feature (1)..(25): SEQ ID NO: 5782; WAN024FNE_at; Start 368; Stop 392
taaactttgccttggaccgcacagc

SEQ ID NO: 213309 - DNA, 25 bp, Artificial
  probe
  misc_feature (1)..(25): SEQ ID NO: 5782; WAN024FNE_at; Start 278; Stop 302
gcgaggcttgcaatcacactactaa

SEQ ID NO: 213310 - DNA, 25 bp, Artificial
  probe
  misc_feature (1)..(25): SEQ ID NO: 5782; WAN024FNE_at; Start 96; Stop 120
ggcttactttaatggatcagatcaa

SEQ ID NO: 213311 - DNA, 25 bp, Artificial
  probe
  misc_feature (1)..(25): SEQ ID NO: 5782; WAN024FNE_at; Start 26; Stop 50
catttatcgagtatgtgaaaaaccc

SEQ ID NO: 213312 - DNA, 25 bp, Artificial
  probe
  misc_feature (1)..(25): SEQ ID NO: 5782; WAN024FNE_at; Start 471; Stop 495
gttggagacaagacctttggagaag

SEQ ID NO: 213313 - DNA, 25 bp, Artificial
  probe
  misc_feature (1)..(25): SEQ ID NO: 5782; WAN024FNE_at; Start 149; Stop 173
gagcttattctatcgctggagttta

SEQ ID NO: 213314 - DNA, 25 bp, Artificial
  probe
  misc_feature (1)..(25): SEQ ID NO: 5782; WAN024FNE_at; Start 125; Stop 149
tgactatccgtaactttgaaagtgg

SEQ ID NO: 213315 - DNA, 25 bp, Artificial
  probe
  misc_feature (1)..(25): SEQ ID NO: 5782; WAN024FNE_at; Start 165; Stop 189
tggagtttatccaaatagttcgaac

SEQ ID NO: 213316 - DNA, 25 bp, Artificial
  probe
  misc_feature (1)..(25): SEQ ID NO: 5782; WAN024FNE_at; Start 217; Stop 241
gataatatcgtctatagcttgcagg

SEQ ID NO: 213317 - DNA, 25 bp, Artificial
  probe
  misc_feature (1)..(25): SEQ ID NO: 5782; WAN024FNE_at; Start 180; Stop 204
tagttcgaactttgctaagaccaag

SEQ ID NO: 213318 - DNA, 25 bp, Artificial
  probe
  misc_feature (1)..(25): SEQ ID NO: 5782; WAN024FNE_at; Start 415; Stop 439
gaagaggcggctagcaagacccttc

SEQ ID NO: 213319 - DNA, 25 bp, Artificial
  probe
  misc_feature (1)..(25): SEQ ID NO: 5782; WAN024FNE_at; Start 270; Stop 294
tgtcaatcgcgaggcttgcaatcac

SEQ ID NO: 213320 - DNA, 25 bp, Artificial
  probe
  misc_feature (1)..(25): SEQ ID NO: 5782; WAN024FNE_at; Start 238; Stop 262
caggacaagacttcttggtatttaa

SEQ ID NO: 213321 - DNA, 25 bp, Artificial
  probe
  misc_feature (1)..(25): SEQ ID NO: 5844; WAN024FNF_at; Start 132; Stop 156
aaattttctaccaacttatctactg

SEQ ID NO: 213322 - DNA, 25 bp, Artificial
  probe
  misc_feature (1)..(25): SEQ ID NO: 5844; WAN024FNF_at; Start 177; Stop 201
tcataaaaaatacttgcatagttct

SEQ ID NO: 213323 - DNA, 25 bp, Artificial
  probe
  misc_feature (1)..(25): SEQ ID NO: 5844; WAN024FNF_at; Start 36; Stop 60
attaatttctgctgaacaaaccaat

SEQ ID NO: 213324 - DNA, 25 bp, Artificial
  probe
  misc_feature (1)..(25): SEQ ID NO: 5844; WAN024FNF_at; Start 99; Stop 123
tgataagaatctaagaccgcttgta

SEQ ID NO: 213325 - DNA, 25 bp, Artificial
  probe
  misc_feature (1)..(25): SEQ ID NO: 5844; WAN024FNF_at; Start 33; Stop 57
tcaattaatttctgctgaacaaacc

SEQ ID NO: 213326 - DNA, 25 bp, Artificial
  probe
  misc_feature (1)..(25): SEQ ID NO: 5844; WAN024FNF_at; Start 192; Stop 216
gcatagttcttatcataagtcgaag

SEQ ID NO: 213327 - DNA, 25 bp, Artificial
  probe
  misc_feature (1)..(25): SEQ ID NO: 5844; WAN024FNF_at; Start 148; Stop 172
tatctactgtcaaaaagctgcgcca

SEQ ID NO: 213328 - DNA, 25 bp, Artificial
  probe
  misc_feature (1)..(25): SEQ ID NO: 5844; WAN024FNF_at; Start 234; Stop 258
gaatgccaactatacttcttctgaa

SEQ ID NO: 213329 - DNA, 25 bp, Artificial
  probe
  misc_feature (1)..(25): SEQ ID NO: 5844; WAN024FNF_at; Start 298; Stop 322
gaaattcctcttctgtcaagaaata

SEQ ID NO: 213330 - DNA, 25 bp, Artificial
  probe
  misc_feature (1)..(25): SEQ ID NO: 5844; WAN024FNF_at; Start 102; Stop 126
taagaatctaagaccgcttgtacac

SEQ ID NO: 213331 - DNA, 25 bp, Artificial
  probe
  misc_feature (1)..(25): SEQ ID NO: 5844; WAN024FNF_at; Start 164; Stop 188
gctgcgccagtattcataaaaaata

SEQ ID NO: 213332 - DNA, 25 bp, Artificial
  probe
  misc_feature (1)..(25): SEQ ID NO: 5844; WAN024FNF_at; Start 210; Stop 234
gtcgaagaaccaaaatcattcaatg

SEQ ID NO: 213333 - DNA, 25 bp, Artificial
  probe
  misc_feature (1)..(25): SEQ ID NO: 5844; WAN024FNF_at; Start 216; Stop 240
gaaccaaaatcattcaatgaatgcc

SEQ ID NO: 213334 - DNA, 25 bp, Artificial
  probe
  misc_feature (1)..(25): SEQ ID NO: 5844; WAN024FNF_at; Start 162; Stop 186
aagctgcgccagtattcataaaaaa

SEQ ID NO: 213335 - DNA, 25 bp, Artificial
  probe
  misc_feature (1)..(25): SEQ ID NO: 5844; WAN024FNF_at; Start 150; Stop 174
tctactgtcaaaaagctgcgccagt

SEQ ID NO: 213336 - DNA, 25 bp, Artificial
  probe
  misc_feature (1)..(25): SEQ ID NO: 5844; WAN024FNF_at; Start 276; Stop 300
tgattacaaattttttccgcttgaa

SEQ ID NO: 213337 - DNA, 25 bp, Artificial
  probe
  misc_feature (1)..(25): SEQ ID NO: 5844; WAN024FNF_at; Start 202; Stop 226
tatcataagtcgaagaaccaaaatc

SEQ ID NO: 213338 - DNA, 25 bp, Artificial
  probe
  misc_feature (1)..(25): SEQ ID NO: 5844; WAN024FNF_at; Start 226; Stop 250
cattcaatgaatgccaactatactt

SEQ ID NO: 213339 - DNA, 25 bp, Artificial
  probe
  misc_feature (1)..(25): SEQ ID NO: 5844; WAN024FNF_at; Start 259; Stop 283
aaagttctacgagagattgattaca

SEQ ID NO: 213340 - DNA, 25 bp, Artificial
  probe
  misc_feature (1)..(25): SEQ ID NO: 5844; WAN024FNF_at; Start 294; Stop 318
gcttgaaattcctcttctgtcaaga

SEQ ID NO: 213341 - DNA, 25 bp, Artificial
  probe
  misc_feature (1)..(25): SEQ ID NO: 5844; WAN024FNF_at; Start 253; Stop 277
tctgaaaaagttctacgagagattg

SEQ ID NO: 213342 - DNA, 25 bp, Artificial
  probe
  misc_feature (1)..(25): SEQ ID NO: 5844; WAN024FNF_at; Start 199; Stop 223
tcttatcataagtcgaagaaccaaa

SEQ ID NO: 213343 - DNA, 25 bp, Artificial
  probe
  misc_feature (1)..(25): SEQ ID NO: 5844; WAN024FNF_at; Start 205; Stop 229
cataagtcgaagaaccaaaatcatt

SEQ ID NO: 213344 - DNA, 25 bp, Artificial
  probe
  misc_feature (1)..(25): SEQ ID NO: 5844; WAN024FNF_at; Start 117; Stop 141
gcttgtacactacctaaattttcta

SEQ ID NO: 213345 - DNA, 25 bp, Artificial
  probe
  misc_feature (1)..(25): SEQ ID NO: 5844; WAN024FNF_at; Start 110; Stop 134
taagaccgcttgtacactacctaaa

SEQ ID NO: 213346 - DNA, 25 bp, Artificial
  probe
  misc_feature (1)..(25): SEQ ID NO: 5844; WAN024FNF_at; Start 106; Stop 130
aatctaagaccgcttgtacactacc

SEQ ID NO: 213347 - DNA, 25 bp, Artificial
  probe
  misc_feature (1)..(25): SEQ ID NO: 5844; WAN024FNF_at; Start 238; Stop 262
gccaactatacttcttctgaaaaag

SEQ ID NO: 213348 - DNA, 25 bp, Artificial
  probe
  misc_feature (1)..(25): SEQ ID NO: 5844; WAN024FNF_at; Start 247; Stop 271
acttcttctgaaaaagttctacgag

SEQ ID NO: 213349 - DNA, 25 bp, Artificial
  probe
  misc_feature (1)..(25): SEQ ID NO: 5844; WAN024FNF_at; Start 309; Stop 333
tctgtcaagaaatacttgcgactaa

SEQ ID NO: 213350 - DNA, 25 bp, Artificial
  probe
  misc_feature (1)..(25): SEQ ID NO: 5844; WAN024FNF_at; Start 147; Stop 171
ttatctactgtcaaaaagctgcgcc

SEQ ID NO: 213351 - DNA, 25 bp, Artificial
  probe
  misc_feature (1)..(25): SEQ ID NO: 5844; WAN024FNF_at; Start 155; Stop 179
tgtcaaaaagctgcgccagtattca

SEQ ID NO: 213352 - DNA, 25 bp, Artificial
  probe
  misc_feature (1)..(25): SEQ ID NO: 5844; WAN024FNF_at; Start 306; Stop 330
tcttctgtcaagaaatacttgcgac

SEQ ID NO: 213353 - DNA, 25 bp, Artificial
  probe
  misc_feature (1)..(25): SEQ ID NO: 5844; WAN024FNF_at; Start 289; Stop 313
tttccgcttgaaattcctcttctgt

SEQ ID NO: 213354 - DNA, 25 bp, Artificial
  probe
  misc_feature (1)..(25): SEQ ID NO: 5844; WAN024FNF_at; Start 264; Stop 288
tctacgagagattgattacaaattt

SEQ ID NO: 213355 - DNA, 25 bp, Artificial
  probe
  misc_feature (1)..(25): SEQ ID NO: 2708; WAN024FNG_at; Start 2; Stop 26
tggttgaatatattagtcgcaagta

SEQ ID NO: 213356 - DNA, 25 bp, Artificial
  probe
  misc_feature (1)..(25): SEQ ID NO: 2708; WAN024FNG_at; Start 17; Stop 41
gtcgcaagtatttcttgacagaaga

SEQ ID NO: 213357 - DNA, 25 bp, Artificial
  probe
  misc_feature (1)..(25): SEQ ID NO: 2708; WAN024FNG_at; Start 30; Stop 54
cttgacagaagaggaatttcaagcg

SEQ ID NO: 213358 - DNA, 25 bp, Artificial
  probe
  misc_feature (1)..(25): SEQ ID NO: 2708; WAN024FNG_at; Start 10; Stop 34
tatattagtcgcaagtatttcttga

SEQ ID NO: 213359 - DNA, 25 bp, Artificial
  probe
  misc_feature (1)..(25): SEQ ID NO: 2708; WAN024FNG_at; Start 32; Stop 56
tgacagaagaggaatttcaagcgga

SEQ ID NO: 213360 - DNA, 25 bp, Artificial
  probe
  misc_feature (1)..(25): SEQ ID NO: 2708; WAN024FNG_at; Start 295; Stop 319
gttcagcagaaattaattgaaaaag

SEQ ID NO: 213361 - DNA, 25 bp, Artificial
  probe
  misc_feature (1)..(25): SEQ ID NO: 2708; WAN024FNG_at; Start 22; Stop 46
aagtatttcttgacagaagaggaat

SEQ ID NO: 213362 - DNA, 25 bp, Artificial
  probe
  misc_feature (1)..(25): SEQ ID NO: 2708; WAN024FNG_at; Start 3; Stop 27
ggttgaatatattagtcgcaagtat

SEQ ID NO: 213363 - DNA, 25 bp, Artificial
  probe
  misc_feature (1)..(25): SEQ ID NO: 2708; WAN024FNG_at; Start 291; Stop 315
gtttgttcagcagaaattaattgaa

SEQ ID NO: 213364 - DNA, 25 bp, Artificial
  probe
  misc_feature (1)..(25): SEQ ID NO: 2708; WAN024FNG_at; Start 19; Stop 43
cgcaagtatttcttgacagaagagg

SEQ ID NO: 213365 - DNA, 25 bp, Artificial
  probe
  misc_feature (1)..(25): SEQ ID NO: 2708; WAN024FNG_at; Start 116; Stop 140
tgaatgattttggttcttcgactta

SEQ ID NO: 213366 - DNA, 25 bp, Artificial
  probe
  misc_feature (1)..(25): SEQ ID NO: 2708; WAN024FNG_at; Start 18; Stop 42
tcgcaagtatttcttgacagaagag

SEQ ID NO: 213367 - DNA, 25 bp, Artificial
  probe
  misc_feature (1)..(25): SEQ ID NO: 2708; WAN024FNG_at; Start 290; Stop 314
ggtttgttcagcagaaattaattga

SEQ ID NO: 213368 - DNA, 25 bp, Artificial
  probe
  misc_feature (1)..(25): SEQ ID NO: 2708; WAN024FNG_at; Start 15; Stop 39
tagtcgcaagtatttcttgacagaa

SEQ ID NO: 213369 - DNA, 25 bp, Artificial
  probe
  misc_feature (1)..(25): SEQ ID NO: 2708; WAN024FNG_at; Start 119; Stop 143
atgattttggttcttcgacttatga

SEQ ID NO: 213370 - DNA, 25 bp, Artificial
  probe
  misc_feature (1)..(25): SEQ ID NO: 2708; WAN024FNG_at; Start 29; Stop 53
tcttgacagaagaggaatttcaagc

SEQ ID NO: 213371 - DNA, 25 bp, Artificial
  probe
  misc_feature (1)..(25): SEQ ID NO: 2708; WAN024FNG_at; Start 12; Stop 36
tattagtcgcaagtatttcttgaca

SEQ ID NO: 213372 - DNA, 25 bp, Artificial
  probe
  misc_feature (1)..(25): SEQ ID NO: 2708; WAN024FNG_at; Start 21; Stop 45
caagtatttcttgacagaagaggaa

SEQ ID NO: 213373 - DNA, 25 bp, Artificial
  probe
  misc_feature (1)..(25): SEQ ID NO: 2708; WAN024FNG_at; Start 35; Stop 59
cagaagaggaatttcaagcggaaaa

SEQ ID NO: 213374 - DNA, 25 bp, Artificial
  probe
  misc_feature (1)..(25): SEQ ID NO: 2708; WAN024FNG_at; Start 25; Stop 49
tatttcttgacagaagaggaatttc

SEQ ID NO: 213375 - DNA, 25 bp, Artificial
  probe
  misc_feature (1)..(25): SEQ ID NO: 2708; WAN024FNG_at; Start 16; Stop 40
agtcgcaagtatttcttgacagaag

SEQ ID NO: 213376 - DNA, 25 bp, Artificial
  probe
  misc_feature (1)..(25): SEQ ID NO: 2708; WAN024FNG_at; Start 121; Stop 145
gattttggttcttcgacttatgata

SEQ ID NO: 213377 - DNA, 25 bp, Artificial
  probe
  misc_feature (1)..(25): SEQ ID NO: 2708; WAN024FNG_at; Start 31; Stop 55
ttgacagaagaggaatttcaagcgg

SEQ ID NO: 213378 - DNA, 25 bp, Artificial
  probe
  misc_feature (1)..(25): SEQ ID NO: 2708; WAN024FNG_at; Start 104; Stop 128
gttggcattcattgaatgattttgg

SEQ ID NO: 213379 - DNA, 25 bp, Artificial
  probe
  misc_feature (1)..(25): SEQ ID NO: 2708; WAN024FNG_at; Start 33; Stop 57
gacagaagaggaatttcaagcggaa

SEQ ID NO: 213380 - DNA, 25 bp, Artificial
  probe
  misc_feature (1)..(25): SEQ ID NO: 2708; WAN024FNG_at; Start 124; Stop 148
tttggttcttcgacttatgataaga

SEQ ID NO: 213381 - DNA, 25 bp, Artificial
  probe
  misc_feature (1)..(25): SEQ ID NO: 2708; WAN024FNG_at; Start 118; Stop 142
aatgattttggttcttcgacttatg

SEQ ID NO: 213382 - DNA, 25 bp, Artificial
  probe
  misc_feature (1)..(25): SEQ ID NO: 2708; WAN024FNG_at; Start 27; Stop 51
tttcttgacagaagaggaatttcaa

SEQ ID NO: 213383 - DNA, 25 bp, Artificial
  probe
  misc_feature (1)..(25): SEQ ID NO: 2708; WAN024FNG_at; Start 125; Stop 149
ttggttcttcgacttatgataagaa

SEQ ID NO: 213384 - DNA, 25 bp, Artificial
  probe
  misc_feature (1)..(25): SEQ ID NO: 2708; WAN024FNG_at; Start 20; Stop 44
gcaagtatttcttgacagaagagga

SEQ ID NO: 213385 - DNA, 25 bp, Artificial
  probe
  misc_feature (1)..(25): SEQ ID NO: 2708; WAN024FNG_at; Start 13; Stop 37
attagtcgcaagtatttcttgacag

SEQ ID NO: 213386 - DNA, 25 bp, Artificial
  probe
  misc_feature (1)..(25): SEQ ID NO: 2708; WAN024FNG_at; Start 7; Stop 31
gaatatattagtcgcaagtatttct

SEQ ID NO: 213387 - DNA, 25 bp, Artificial
  probe
  misc_feature (1)..(25): SEQ ID NO: 2708; WAN024FNG_at; Start 113; Stop 137
cattgaatgattttggttcttcgac

SEQ ID NO: 213388 - DNA, 25 bp, Artificial
  probe
  misc_feature (1)..(25): SEQ ID NO: 2708; WAN024FNG_at; Start 34; Stop 58
acagaagaggaatttcaagcggaaa

SEQ ID NO: 213389 - DNA, 25 bp, Artificial
  probe
  misc_feature (1)..(25): SEQ ID NO: 1641; WAN024FNH_at; Start 256; Stop 280
tcaacacgagccttgataaagtcca

SEQ ID NO: 213390 - DNA, 25 bp, Artificial
  probe
  misc_feature (1)..(25): SEQ ID NO: 1641; WAN024FNH_at; Start 241; Stop 265
gagcccatcatcttatcaacacgag

SEQ ID NO: 213391 - DNA, 25 bp, Artificial
  probe
  misc_feature (1)..(25): SEQ ID NO: 1641; WAN024FNH_at; Start 163; Stop 187
gcacttgctgcttccaacatatctg

SEQ ID NO: 213392 - DNA, 25 bp, Artificial
  probe
  misc_feature (1)..(25): SEQ ID NO: 1641; WAN024FNH_at; Start 182; Stop 206
tatctgccacaacaaagtttgaacc

SEQ ID NO: 213393 - DNA, 25 bp, Artificial
  probe
  misc_feature (1)..(25): SEQ ID NO: 1641; WAN024FNH_at; Start 98; Stop 122
taaaggcacgagaaagtgattcaac

SEQ ID NO: 213394 - DNA, 25 bp, Artificial
  probe
  misc_feature (1)..(25): SEQ ID NO: 1641; WAN024FNH_at; Start 265; Stop 289
gccttgataaagtccataacctctg

SEQ ID NO: 213395 - DNA, 25 bp, Artificial
  probe
  misc_feature (1)..(25): SEQ ID NO: 1641; WAN024FNH_at; Start 159; Stop 183
gagagcacttgctgcttccaacata

SEQ ID NO: 213396 - DNA, 25 bp, Artificial
  probe
  misc_feature (1)..(25): SEQ ID NO: 1641; WAN024FNH_at; Start 225; Stop 249
gatatcttttggagtagagcccatc

SEQ ID NO: 213397 - DNA, 25 bp, Artificial
  probe
  misc_feature (1)..(25): SEQ ID NO: 1641; WAN024FNH_at; Start 139; Stop 163
tcttccttgcttacttctacgagag

SEQ ID NO: 213398 - DNA, 25 bp, Artificial
  probe
  misc_feature (1)..(25): SEQ ID NO: 1641; WAN024FNH_at; Start 3; Stop 27
gagtgtttctactgcttctgccaaa

SEQ ID NO: 213399 - DNA, 25 bp, Artificial
  probe
  misc_feature (1)..(25): SEQ ID NO: 1641; WAN024FNH_at; Start 191; Stop 215
caacaaagtttgaacctgcaagaac

SEQ ID NO: 213400 - DNA, 25 bp, Artificial
  probe
  misc_feature (1)..(25): SEQ ID NO: 1641; WAN024FNH_at; Start 34; Stop 58
tcttggtcattctcaaatagtgctg

SEQ ID NO: 213401 - DNA, 25 bp, Artificial
  probe
  misc_feature (1)..(25): SEQ ID NO: 1641; WAN024FNH_at; Start 197; Stop 221
agtttgaacctgcaagaactgcttc

SEQ ID NO: 213402 - DNA, 25 bp, Artificial
  probe
  misc_feature (1)..(25): SEQ ID NO: 1641; WAN024FNH_at; Start 24; Stop 48
caaagctttttcttggtcattctca

SEQ ID NO: 213403 - DNA, 25 bp, Artificial
  probe
  misc_feature (1)..(25): SEQ ID NO: 1641; WAN024FNH_at; Start 92; Stop 116
ccaggttaaaggcacgagaaagtga

SEQ ID NO: 213404 - DNA, 25 bp, Artificial
  probe
  misc_feature (1)..(25): SEQ ID NO: 1641; WAN024FNH_at; Start 202; Stop 226
gaacctgcaagaactgcttccttga

SEQ ID NO: 213405 - DNA, 25 bp, Artificial
  probe
  misc_feature (1)..(25): SEQ ID NO: 1641; WAN024FNH_at; Start 149; Stop 173
ttacttctacgagagcacttgctgc

SEQ ID NO: 213406 - DNA, 25 bp, Artificial
  probe
  misc_feature (1)..(25): SEQ ID NO: 1641; WAN024FNH_at; Start 269; Stop 293
tgataaagtccataacctctgcttt

SEQ ID NO: 213407 - DNA, 25 bp, Artificial
  probe
  misc_feature (1)..(25): SEQ ID NO: 1641; WAN024FNH_at; Start 260; Stop 284
cacgagccttgataaagtccataac

SEQ ID NO: 213408 - DNA, 25 bp, Artificial
  probe
  misc_feature (1)..(25): SEQ ID NO: 1641; WAN024FNH_at; Start 109; Stop 133
gaaagtgattcaacagatggtttaa

SEQ ID NO: 213409 - DNA, 25 bp, Artificial
  probe
  misc_feature (1)..(25): SEQ ID NO: 1641; WAN024FNH_at; Start 235; Stop 259
ggagtagagcccatcatcttatcaa

SEQ ID NO: 213410 - DNA, 25 bp, Artificial
  probe
  misc_feature (1)..(25): SEQ ID NO: 1641; WAN024FNH_at; Start 221; Stop 245
ccttgatatcttttggagtagagcc

SEQ ID NO: 213411 - DNA, 25 bp, Artificial
  probe
  misc_feature (1)..(25): SEQ ID NO: 1641; WAN024FNH_at; Start 104; Stop 128
cacgagaaagtgattcaacagatgg

SEQ ID NO: 213412 - DNA, 25 bp, Artificial
  probe
  misc_feature (1)..(25): SEQ ID NO: 1641; WAN024FNH_at; Start 124; Stop 148
gatggtttaaaatcttcttccttgc

SEQ ID NO: 213413 - DNA, 25 bp, Artificial
  probe
  misc_feature (1)..(25): SEQ ID NO: 1641; WAN024FNH_at; Start 175; Stop 199
tccaacatatctgccacaacaaagt

SEQ ID NO: 213414 - DNA, 25 bp, Artificial
  probe
  misc_feature (1)..(25): SEQ ID NO: 1641; WAN024FNH_at; Start 279; Stop 303
cataacctctgctttattttcataa

SEQ ID NO: 213415 - DNA, 25 bp, Artificial
  probe
  misc_feature (1)..(25): SEQ ID NO: 1641; WAN024FNH_at; Start 246; Stop 270
catcatcttatcaacacgagccttg

SEQ ID NO: 213416 - DNA, 25 bp, Artificial
  probe
  misc_feature (1)..(25): SEQ ID NO: 1641; WAN024FNH_at; Start 44; Stop 68
tctcaaatagtgctgaatcaaccgt

SEQ ID NO: 213417 - DNA, 25 bp, Artificial
  probe
  misc_feature (1)..(25): SEQ ID NO: 1641; WAN024FNH_at; Start 169; Stop 193
gctgcttccaacatatctgccacaa

SEQ ID NO: 213418 - DNA, 25 bp, Artificial
  probe
  misc_feature (1)..(25): SEQ ID NO: 1641; WAN024FNH_at; Start 6; Stop 30
tgtttctactgcttctgccaaagct

SEQ ID NO: 213419 - DNA, 25 bp, Artificial
  probe
  misc_feature (1)..(25): SEQ ID NO: 1641; WAN024FNH_at; Start 18; Stop 42
ttctgccaaagctttttcttggtca

SEQ ID NO: 213420 - DNA, 25 bp, Artificial
  probe
  misc_feature (1)..(25): SEQ ID NO: 1641; WAN024FNH_at; Start 229; Stop 253
tcttttggagtagagcccatcatct

SEQ ID NO: 213421 - DNA, 25 bp, Artificial
  probe
  misc_feature (1)..(25): SEQ ID NO: 1641; WAN024FNH_at; Start 154; Stop 178
tctacgagagcacttgctgcttcca

SEQ ID NO: 213422 - DNA, 25 bp, Artificial
  probe
  misc_feature (1)..(25): SEQ ID NO: 1641; WAN024FNH_at; Start 212; Stop 236
gaactgcttccttgatatcttttgg

SEQ ID NO: 213423 - DNA, 25 bp, Artificial
  probe
  misc_feature (1)..(25): SEQ ID NO: 5625; WAN024FNI_at; Start 292; Stop 316
gatacgtacaccatgttttgcctca

SEQ ID NO: 213424 - DNA, 25 bp, Artificial
  probe
  misc_feature (1)..(25): SEQ ID NO: 5625; WAN024FNI_at; Start 124; Stop 148
gagttttccatcttgatcacgaaca

SEQ ID NO: 213425 - DNA, 25 bp, Artificial
  probe
  misc_feature (1)..(25): SEQ ID NO: 5625; WAN024FNI_at; Start 164; Stop 188
tgttccttcatagaagtcaccaaga

SEQ ID NO: 213426 - DNA, 25 bp, Artificial
  probe
  misc_feature (1)..(25): SEQ ID NO: 5625; WAN024FNI_at; Start 241; Stop 265
tgggtattcaaccaaattcaagact

SEQ ID NO: 213427 - DNA, 25 bp, Artificial
  probe
  misc_feature (1)..(25): SEQ ID NO: 5625; WAN024FNI_at; Start 2; Stop 26
tggtcttcacgccagaagaattctc

SEQ ID NO: 213428 - DNA, 25 bp, Artificial
  probe
  misc_feature (1)..(25): SEQ ID NO: 5625; WAN024FNI_at; Start 67; Stop 91
gatgacatttttcaaacgctctgcg

SEQ ID NO: 213429 - DNA, 25 bp, Artificial
  probe
  misc_feature (1)..(25): SEQ ID NO: 5625; WAN024FNI_at; Start 17; Stop 41
aagaattctccgtcttccaagcggg

SEQ ID NO: 213430 - DNA, 25 bp, Artificial
  probe
  misc_feature (1)..(25): SEQ ID NO: 5625; WAN024FNI_at; Start 384; Stop 408
gaaggtcttcttcatagctcaatgc

SEQ ID NO: 213431 - DNA, 25 bp, Artificial
  probe
  misc_feature (1)..(25): SEQ ID NO: 5625; WAN024FNI_at; Start 20; Stop 44
aattctccgtcttccaagcgggcta

SEQ ID NO: 213432 - DNA, 25 bp, Artificial
  probe
  misc_feature (1)..(25): SEQ ID NO: 5625; WAN024FNI_at; Start 220; Stop 244
aaaacttcccatgaaggcagttggg

SEQ ID NO: 213433 - DNA, 25 bp, Artificial
  probe
  misc_feature (1)..(25): SEQ ID NO: 5625; WAN024FNI_at; Start 273; Stop 297
gcaaatccgcatcaatttcgatacg

SEQ ID NO: 213434 - DNA, 25 bp, Artificial
  probe
  misc_feature (1)..(25): SEQ ID NO: 5625; WAN024FNI_at; Start 325; Stop 349
gatttggtcaacaatcatttgctca

SEQ ID NO: 213435 - DNA, 25 bp, Artificial
  probe
  misc_feature (1)..(25): SEQ ID NO: 5625; WAN024FNI_at; Start 99; Stop 123
tacgaacagaaatgaagtttggcaa

SEQ ID NO: 213436 - DNA, 25 bp, Artificial
  probe
  misc_feature (1)..(25): SEQ ID NO: 5625; WAN024FNI_at; Start 345; Stop 369
gctcacgttcacatggatctgcgat

SEQ ID NO: 213437 - DNA, 25 bp, Artificial
  probe
  misc_feature (1)..(25): SEQ ID NO: 5625; WAN024FNI_at; Start 155; Stop 179
taacgctggtgttccttcatagaag

SEQ ID NO: 213438 - DNA, 25 bp, Artificial
  probe
  misc_feature (1)..(25): SEQ ID NO: 5625; WAN024FNI_at; Start 197; Stop 221
ggaacttcaaggtatttagcatcaa

SEQ ID NO: 213439 - DNA, 25 bp, Artificial
  probe
  misc_feature (1)..(25): SEQ ID NO: 5625; WAN024FNI_at; Start 336; Stop 360
caatcatttgctcacgttcacatgg

SEQ ID NO: 213440 - DNA, 25 bp, Artificial
  probe
  misc_feature (1)..(25): SEQ ID NO: 5625; WAN024FNI_at; Start 212; Stop 236
ttagcatcaaaacttcccatgaagg

SEQ ID NO: 213441 - DNA, 25 bp, Artificial
  probe
  misc_feature (1)..(25): SEQ ID NO: 5625; WAN024FNI_at; Start 356; Stop 380
catggatctgcgattacaaactgct

SEQ ID NO: 213442 - DNA, 25 bp, Artificial
  probe
  misc_feature (1)..(25): SEQ ID NO: 5625; WAN024FNI_at; Start 82; Stop 106
acgctctgcgtttccgttacgaaca

SEQ ID NO: 213443 - DNA, 25 bp, Artificial
  probe
  misc_feature (1)..(25): SEQ ID NO: 5625; WAN024FNI_at; Start 49; Stop 73
gactttttcatttcctttgatgaca

SEQ ID NO: 213444 - DNA, 25 bp, Artificial
  probe
  misc_feature (1)..(25): SEQ ID NO: 5625; WAN024FNI_at; Start 387; Stop 411
ggtcttcttcatagctcaatgctga

SEQ ID NO: 213445 - DNA, 25 bp, Artificial
  probe
  misc_feature (1)..(25): SEQ ID NO: 5625; WAN024FNI_at; Start 296; Stop 320
cgtacaccatgttttgcctcaattt

SEQ ID NO: 213446 - DNA, 25 bp, Artificial
  probe
  misc_feature (1)..(25): SEQ ID NO: 5625; WAN024FNI_at; Start 111; Stop 135
tgaagtttggcaagagttttccatc

SEQ ID NO: 213447 - DNA, 25 bp, Artificial
  probe
  misc_feature (1)..(25): SEQ ID NO: 5625; WAN024FNI_at; Start 140; Stop 164
tcacgaacaacaaagtaacgctggt

SEQ ID NO: 213448 - DNA, 25 bp, Artificial
  probe
  misc_feature (1)..(25): SEQ ID NO: 5625; WAN024FNI_at; Start 34; Stop 58
caagcgggctaccaagactttttca

SEQ ID NO: 213449 - DNA, 25 bp, Artificial
  probe
  misc_feature (1)..(25): SEQ ID NO: 5625; WAN024FNI_at; Start 229; Stop 253
catgaaggcagttgggtattcaacc

SEQ ID NO: 213450 - DNA, 25 bp, Artificial
  probe
  misc_feature (1)..(25): SEQ ID NO: 5625; WAN024FNI_at; Start 281; Stop 305
gcatcaatttcgatacgtacaccat

SEQ ID NO: 213451 - DNA, 25 bp, Artificial
  probe
  misc_feature (1)..(25): SEQ ID NO: 5625; WAN024FNI_at; Start 176; Stop 200
gaagtcaccaagacttcttctggaa

SEQ ID NO: 213452 - DNA, 25 bp, Artificial
  probe
  misc_feature (1)..(25): SEQ ID NO: 5625; WAN024FNI_at; Start 258; Stop 282
tcaagacttcattcagcaaatccgc

SEQ ID NO: 213453 - DNA, 25 bp, Artificial
  probe
  misc_feature (1)..(25): SEQ ID NO: 5625; WAN024FNI_at; Start 184; Stop 208
caagacttcttctggaacttcaagg

SEQ ID NO: 213454 - DNA, 25 bp, Artificial
  probe
  misc_feature (1)..(25): SEQ ID NO: 5625; WAN024FNI_at; Start 364; Stop 388
tgcgattacaaactgcttacgaagg

SEQ ID NO: 213455 - DNA, 25 bp, Artificial
  probe
  misc_feature (1)..(25): SEQ ID NO: 5625; WAN024FNI_at; Start 372; Stop 396
caaactgcttacgaaggtcttcttc

SEQ ID NO: 213456 - DNA, 25 bp, Artificial
  probe
  misc_feature (1)..(25): SEQ ID NO: 5625; WAN024FNI_at; Start 89; Stop 113
gcgtttccgttacgaacagaaatga

SEQ ID NO: 213457 - DNA, 25 bp, Artificial
  probe
  misc_feature (1)..(25): SEQ ID NO: 3253; WAN024FNJ_at; Start 309; Stop 333
gatggaaacttcaccaaagcagctc

SEQ ID NO: 213458 - DNA, 25 bp, Artificial
  probe
  misc_feature (1)..(25): SEQ ID NO: 3253; WAN024FNJ_at; Start 1319; Stop 1343
tggtgaaactccagcggtggcagct

SEQ ID NO: 213459 - DNA, 25 bp, Artificial
  probe
  misc_feature (1)..(25): SEQ ID NO: 3253; WAN024FNJ_at; Start 1658; Stop 1682
gatgatgggctctactccaaaagat

SEQ ID NO: 213460 - DNA, 25 bp, Artificial
  probe
  misc_feature (1)..(25): SEQ ID NO: 3253; WAN024FNJ_at; Start 959; Stop 983
tgttcgtaacggaaacgcagagcgt

SEQ ID NO: 213461 - DNA, 25 bp, Artificial
  probe
  misc_feature (1)..(25): SEQ ID NO: 3253; WAN024FNJ_at; Start 144; Stop 168
gaaaaaatggcagccttcctcaagg

SEQ ID NO: 213462 - DNA, 25 bp, Artificial
  probe
  misc_feature (1)..(25): SEQ ID NO: 3253; WAN024FNJ_at; Start 654; Stop 678
tcagcattgagctatgaagaagacc

SEQ ID NO: 213463 - DNA, 25 bp, Artificial
  probe
  misc_feature (1)..(25): SEQ ID NO: 3253; WAN024FNJ_at; Start 1498; Stop 1522
ttcgtcgtgcaactcaaggtgtggt

SEQ ID NO: 213464 - DNA, 25 bp, Artificial
  probe
  misc_feature (1)..(25): SEQ ID NO: 3253; WAN024FNJ_at; Start 511; Stop 535
gaaatagctttgaatacatccgccc

SEQ ID NO: 213465 - DNA, 25 bp, Artificial
  probe
  misc_feature (1)..(25): SEQ ID NO: 3253; WAN024FNJ_at; Start 745; Stop 769
aaattgaggcaaaacatggtgtacg

SEQ ID NO: 213466 - DNA, 25 bp, Artificial
  probe
  misc_feature (1)..(25): SEQ ID NO: 3253; WAN024FNJ_at; Start 1882; Stop 1906
ctttggcagaagcagtagaaacact

SEQ ID NO: 213467 - DNA, 25 bp, Artificial
  probe
  misc_feature (1)..(25): SEQ ID NO: 3253; WAN024FNJ_at; Start 1993; Stop 2017
taatggctgaagatcaggctgtccg

SEQ ID NO: 213468 - DNA, 25 bp, Artificial
  probe
  misc_feature (1)..(25): SEQ ID NO: 3253; WAN024FNJ_at; Start 1359; Stop 1383
tacatgcctacatcagctgaaggag

SEQ ID NO: 213469 - DNA, 25 bp, Artificial
  probe
  misc_feature (1)..(25): SEQ ID NO: 3253; WAN024FNJ_at; Start 1949; Stop 1973
tgcgcttagcccagtcattgatgct

SEQ ID NO: 213470 - DNA, 25 bp, Artificial
  probe
  misc_feature (1)..(25): SEQ ID NO: 3253; WAN024FNJ_at; Start 812; Stop 836
ggttgaatacccaactgccttcatg

SEQ ID NO: 213471 - DNA, 25 bp, Artificial
  probe
  misc_feature (1)..(25): SEQ ID NO: 3253; WAN024FNJ_at; Start 1048; Stop 1072
tctggcgtgaagaccaaaaattggt

SEQ ID NO: 213472 - DNA, 25 bp, Artificial
  probe
  misc_feature (1)..(25): SEQ ID NO: 3253; WAN024FNJ_at; Start 1221; Stop 1245
cgtgcagcagccatttacaagtttg

SEQ ID NO: 213473 - DNA, 25 bp, Artificial
  probe
  misc_feature (1)..(25): SEQ ID NO: 3253; WAN024FNJ_at; Start 2038; Stop 2062
tgtcacaactaaccaagaaagcagc

SEQ ID NO: 213474 - DNA, 25 bp, Artificial
  probe
  misc_feature (1)..(25): SEQ ID NO: 3253; WAN024FNJ_at; Start 1333; Stop 1357
cggtggcagctgctattcgtgaaca

SEQ ID NO: 213475 - DNA, 25 bp, Artificial
  probe
  misc_feature (1)..(25): SEQ ID NO: 3253; WAN024FNJ_at; Start 2; Stop 26
gacgtccccagtacctaaggtgcat

SEQ ID NO: 213476 - DNA, 25 bp, Artificial
  probe
  misc_feature (1)..(25): SEQ ID NO: 3253; WAN024FNJ_at; Start 1737; Stop 1761
gcagcaagtgctctcgtagaagtaa

SEQ ID NO: 213477 - DNA, 25 bp, Artificial
  probe
  misc_feature (1)..(25): SEQ ID NO: 3253; WAN024FNJ_at; Start 884; Stop 908
gacttctatgaaggaacaccagcgt

SEQ ID NO: 213478 - DNA, 25 bp, Artificial
  probe
  misc_feature (1)..(25): SEQ ID NO: 3253; WAN024FNJ_at; Start 1482; Stop 1506
aatgacccttatgcccttcgtcgtg

SEQ ID NO: 213479 - DNA, 25 bp, Artificial
  probe
  misc_feature (1)..(25): SEQ ID NO: 3253; WAN024FNJ_at; Start 1024; Stop 1048
cccgcttggaagacggagaattctt

SEQ ID NO: 213480 - DNA, 25 bp, Artificial
  probe
  misc_feature (1)..(25): SEQ ID NO: 3253; WAN024FNJ_at; Start 371; Stop 395
tatcgaattccgtgaaatcaagggt

SEQ ID NO: 213481 - DNA, 25 bp, Artificial
  probe
  misc_feature (1)..(25): SEQ ID NO: 3253; WAN024FNJ_at; Start 683; Stop 707
taagcagtttgtaatcgcagatcca

SEQ ID NO: 213482 - DNA, 25 bp, Artificial
  probe
  misc_feature (1)..(25): SEQ ID NO: 3253; WAN024FNJ_at; Start 324; Stop 348
aaagcagctcaaggatttgtccgtg

SEQ ID NO: 213483 - DNA, 25 bp, Artificial
  probe
  misc_feature (1)..(25): SEQ ID NO: 3253; WAN024FNJ_at; Start 1204; Stop 1228
aaacagttgaccttgctcgtgcagc

SEQ ID NO: 213484 - DNA, 25 bp, Artificial
  probe
  misc_feature (1)..(25): SEQ ID NO: 3253; WAN024FNJ_at; Start 1621; Stop 1645
cagaggttatggactttatcaaggc

SEQ ID NO: 213485 - DNA, 25 bp, Artificial
  probe
  misc_feature (1)..(25): SEQ ID NO: 3253; WAN024FNJ_at; Start 1381; Stop 1405
gagaacttccagagagcaaggtcgg

SEQ ID NO: 213486 - DNA, 25 bp, Artificial
  probe
  misc_feature (1)..(25): SEQ ID NO: 3253; WAN024FNJ_at; Start 698; Stop 722
cgcagatccatgtgaacgtgagcaa

SEQ ID NO: 213487 - DNA, 25 bp, Artificial
  probe
  misc_feature (1)..(25): SEQ ID NO: 3253; WAN024FNJ_at; Start 1007; Stop 1031
tgaaaaagtcttggtagcccgcttg

SEQ ID NO: 213488 - DNA, 25 bp, Artificial
  probe
  misc_feature (1)..(25): SEQ ID NO: 3253; WAN024FNJ_at; Start 2007; Stop 2031
caggctgtccgtcaaaatcgtttgg

SEQ ID NO: 213489 - DNA, 25 bp, Artificial
  probe
  misc_feature (1)..(25): SEQ ID NO: 3253; WAN024FNJ_at; Start 482; Stop 506
gactttccctgtcagcatgcactgg

SEQ ID NO: 213490 - DNA, 25 bp, Artificial
  probe
  misc_feature (1)..(25): SEQ ID NO: 3253; WAN024FNJ_at; Start 1134; Stop 1158
cgtgaacacatgattcgtacgggtc

SEQ ID NO: 213491 - DNA, 25 bp, Artificial
  probe
  misc_feature (1)..(25): SEQ ID NO: 2830; WAN024FNK_at; Start 1114; Stop 1138
gctttgaacctaattctgattccag

SEQ ID NO: 213492 - DNA, 25 bp, Artificial
  probe
  misc_feature (1)..(25): SEQ ID NO: 2830; WAN024FNK_at; Start 764; Stop 788
aattgctgataactgtgattaccgc

SEQ ID NO: 213493 - DNA, 25 bp, Artificial
  probe
  misc_feature (1)..(25): SEQ ID NO: 2830; WAN024FNK_at; Start 490; Stop 514
tttgttagagatactgacgatgcag

SEQ ID NO: 213494 - DNA, 25 bp, Artificial
  probe
  misc_feature (1)..(25): SEQ ID NO: 2830; WAN024FNK_at; Start 393; Stop 417
taatatcgattggttctatcaagga

SEQ ID NO: 213495 - DNA, 25 bp, Artificial
  probe
  misc_feature (1)..(25): SEQ ID NO: 2830; WAN024FNK_at; Start 1051; Stop 1075
ctaacatttggagatgagcgaaagc

SEQ ID NO: 213496 - DNA, 25 bp, Artificial
  probe
  misc_feature (1)..(25): SEQ ID NO: 2830; WAN024FNK_at; Start 958; Stop 982
gatagttttataccagcagtgttaa

SEQ ID NO: 213497 - DNA, 25 bp, Artificial
  probe
  misc_feature (1)..(25): SEQ ID NO: 2830; WAN024FNK_at; Start 1205; Stop 1229
actactatgcgaaaaaacgtgtgac

SEQ ID NO: 213498 - DNA, 25 bp, Artificial
  probe
  misc_feature (1)..(25): SEQ ID NO: 2830; WAN024FNK_at; Start 695; Stop 719
ccactatgattggtgctatggtagg

SEQ ID NO: 213499 - DNA, 25 bp, Artificial
  probe
  misc_feature (1)..(25): SEQ ID NO: 2830; WAN024FNK_at; Start 97; Stop 121
gcacggataattttagctagtggag

SEQ ID NO: 213500 - DNA, 25 bp, Artificial
  probe
  misc_feature (1)..(25): SEQ ID NO: 2830; WAN024FNK_at; Start 1160; Stop 1184
cgttggcatctgtgattagtgaaac

SEQ ID NO: 213501 - DNA, 25 bp, Artificial
  probe
  misc_feature (1)..(25): SEQ ID NO: 2830; WAN024FNK_at; Start 167; Stop 191
cgatagctgctatgggtattccaaa

SEQ ID NO: 213502 - DNA, 25 bp, Artificial
  probe
  misc_feature (1)..(25): SEQ ID NO: 2830; WAN024FNK_at; Start 673; Stop 697
gaaatctatactatgctggatacca

SEQ ID NO: 213503 - DNA, 25 bp, Artificial
  probe
  misc_feature (1)..(25): SEQ ID NO: 2830; WAN024FNK_at; Start 408; Stop 432
ctatcaaggaaaagaggactatgca

SEQ ID NO: 213504 - DNA, 25 bp, Artificial
  probe
  misc_feature (1)..(25): SEQ ID NO: 2830; WAN024FNK_at; Start 1085; Stop 1109
gcacaattttaggagcgcttagtaa

SEQ ID NO: 213505 - DNA, 25 bp, Artificial
  probe
  misc_feature (1)..(25): SEQ ID NO: 2830; WAN024FNK_at; Start 1240; Stop 1264
gacttaggattttatttgccaactg

SEQ ID NO: 213506 - DNA, 25 bp, Artificial
  probe
  misc_feature (1)..(25): SEQ ID NO: 2830; WAN024FNK_at; Start 157; Stop 181
tactttacaacgatagctgctatgg

SEQ ID NO: 213507 - DNA, 25 bp, Artificial
  probe
  misc_feature (1)..(25): SEQ ID NO: 2830; WAN024FNK_at; Start 78; Stop 102
agtatccgcaacatatactgcacgg

SEQ ID NO: 213508 - DNA, 25 bp, Artificial
  probe
  misc_feature (1)..(25): SEQ ID NO: 2830; WAN024FNK_at; Start 1066; Stop 1090
gagcgaaagcttttgattagcacaa

SEQ ID NO: 213509 - DNA, 25 bp, Artificial
  probe
  misc_feature (1)..(25): SEQ ID NO: 2830; WAN024FNK_at; Start 779; Stop 803
tgattaccgctattggaggagtgct

SEQ ID NO: 213510 - DNA, 25 bp, Artificial
  probe
  misc_feature (1)..(25): SEQ ID NO: 2830; WAN024FNK_at; Start 350; Stop 374
caatgtatcttgctgtgggtttaac

SEQ ID NO: 213511 - DNA, 25 bp, Artificial
  probe
  misc_feature (1)..(25): SEQ ID NO: 2830; WAN024FNK_at; Start 1145; Stop 1169
ctcaaaatggagcagcgttggcatc

SEQ ID NO: 213512 - DNA, 25 bp, Artificial
  probe
  misc_feature (1)..(25): SEQ ID NO: 2830; WAN024FNK_at; Start 1189; Stop 1213
gttactttaacagcatactactatg

SEQ ID NO: 213513 - DNA, 25 bp, Artificial
  probe
  misc_feature (1)..(25): SEQ ID NO: 2830; WAN024FNK_at; Start 722; Stop 746
cgactgaggtaggttattatacaaa

SEQ ID NO: 213514 - DNA, 25 bp, Artificial
  probe
  misc_feature (1)..(25): SEQ ID NO: 2830; WAN024FNK_at; Start 1100; Stop 1124
cgcttagtaatatcgctttgaacct

SEQ ID NO: 213515 - DNA, 25 bp, Artificial
  probe
  misc_feature (1)..(25): SEQ ID NO: 2830; WAN024FNK_at; Start 216; Stop 240
aactagaaataaagaagaggctacg

SEQ ID NO: 213516 - DNA, 25 bp, Artificial
  probe
  misc_feature (1)..(25): SEQ ID NO: 2830; WAN024FNK_at; Start 127; Stop 151
gaggtctcgtttgcacaaaatgttg

SEQ ID NO: 213517 - DNA, 25 bp, Artificial
  probe
  misc_feature (1)..(25): SEQ ID NO: 2830; WAN024FNK_at; Start 708; Stop 732
tgctatggtaggaacgactgaggta

SEQ ID NO: 213518 - DNA, 25 bp, Artificial
  probe
  misc_feature (1)..(25): SEQ ID NO: 2830; WAN024FNK_at; Start 532; Stop 556
tctagcttagcaattggcgggaata

SEQ ID NO: 213519 - DNA, 25 bp, Artificial
  probe
  misc_feature (1)..(25): SEQ ID NO: 2830; WAN024FNK_at; Start 423; Stop 447
ggactatgcatacatcacgaaacgt

SEQ ID NO: 213520 - DNA, 25 bp, Artificial
  probe
  misc_feature (1)..(25): SEQ ID NO: 2830; WAN024FNK_at; Start 1130; Stop 1154
tgattccagtaatggctcaaaatgg

SEQ ID NO: 213521 - DNA, 25 bp, Artificial
  probe
  misc_feature (1)..(25): SEQ ID NO: 2830; WAN024FNK_at; Start 1270; Stop 1294
tcaacaataatcatgggtggagcta

SEQ ID NO: 213522 - DNA, 25 bp, Artificial
  probe
  misc_feature (1)..(25): SEQ ID NO: 2830; WAN024FNK_at; Start 902; Stop 926
cagcccaagttgcattaattctagt

SEQ ID NO: 213523 - DNA, 25 bp, Artificial
  probe
  misc_feature (1)..(25): SEQ ID NO: 2830; WAN024FNK_at; Start 794; Stop 818
gaggagtgcttttaccacgactaag

SEQ ID NO: 213524 - DNA, 25 bp, Artificial
  probe
  misc_feature (1)..(25): SEQ ID NO: 2830; WAN024FNK_at; Start 921; Stop 945
tctagttgcaccagtaattatgccg

SEQ ID NO: 213525 - DNA, 25 bp, Artificial
  probe
  misc_feature (1)..(25): SEQ ID NO: 4317; WAN024FNL_at; Start 728; Stop 752
ggaaagatagattcccacgggaggc

SEQ ID NO: 213526 - DNA, 25 bp, Artificial
  probe
  misc_feature (1)..(25): SEQ ID NO: 4317; WAN024FNL_at; Start 742; Stop 766
ccacgggaggcagcgatatcaggtt

SEQ ID NO: 213527 - DNA, 25 bp, Artificial
  probe
  misc_feature (1)..(25): SEQ ID NO: 4317; WAN024FNL_at; Start 308; Stop 332
gcgttgacaattatttgaagcgtaa

SEQ ID NO: 213528 - DNA, 25 bp, Artificial
  probe
  misc_feature (1)..(25): SEQ ID NO: 4317; WAN024FNL_at; Start 277; Stop 301
gagtctattcaaaaagcagtatggt

SEQ ID NO: 213529 - DNA, 25 bp, Artificial
  probe
  misc_feature (1)..(25): SEQ ID NO: 4317; WAN024FNL_at; Start 162; Stop 186
gaatcctgcgtttagagaatatgtt

SEQ ID NO: 213530 - DNA, 25 bp, Artificial
  probe
  misc_feature (1)..(25): SEQ ID NO: 4317; WAN024FNL_at; Start 293; Stop 317
cagtatggtggatgagcgttgacaa

SEQ ID NO: 213531 - DNA, 25 bp, Artificial
  probe
  misc_feature (1)..(25): SEQ ID NO: 4317; WAN024FNL_at; Start 761; Stop 785
caggttgttgtgtgataactgggaa

SEQ ID NO: 213532 - DNA, 25 bp, Artificial
  probe
  misc_feature (1)..(25): SEQ ID NO: 4317; WAN024FNL_at; Start 263; Stop 287
tagccgctaatctagagtctattca

SEQ ID NO: 213533 - DNA, 25 bp, Artificial
  probe
  misc_feature (1)..(25): SEQ ID NO: 4317; WAN024FNL_at; Start 651; Stop 675
tgagaatatgtcaactgaacaggtg

SEQ ID NO: 213534 - DNA, 25 bp, Artificial
  probe
  misc_feature (1)..(25): SEQ ID NO: 4317; WAN024FNL_at; Start 128; Stop 152
cttattatggtagtgaaagtgctcc

SEQ ID NO: 213535 - DNA, 25 bp, Artificial
  probe
  misc_feature (1)..(25): SEQ ID NO: 4317; WAN024FNL_at; Start 430; Stop 454
gagattccccatctttatcaaagtg

SEQ ID NO: 213536 - DNA, 25 bp, Artificial
  probe
  misc_feature (1)..(25): SEQ ID NO: 4317; WAN024FNL_at; Start 247; Stop 271
gaaattaatccggatttagccgcta

SEQ ID NO: 213537 - DNA, 25 bp, Artificial
  probe
  misc_feature (1)..(25): SEQ ID NO: 4317; WAN024FNL_at; Start 518; Stop 542
taaacgagtcttatattcagcgatc

SEQ ID NO: 213538 - DNA, 25 bp, Artificial
  probe
  misc_feature (1)..(25): SEQ ID NO: 4317; WAN024FNL_at; Start 713; Stop 737
ttggcaaccatcctgggaaagatag

SEQ ID NO: 213539 - DNA, 25 bp, Artificial
  probe
  misc_feature (1)..(25): SEQ ID NO: 4317; WAN024FNL_at; Start 618; Stop 642
taaacaggctccagaattaacgttc

SEQ ID NO: 213540 - DNA, 25 bp, Artificial
  probe
  misc_feature (1)..(25): SEQ ID NO: 4317; WAN024FNL_at; Start 1; Stop 25
gtgtttaatatcaatgaccagtcta

SEQ ID NO: 213541 - DNA, 25 bp, Artificial
  probe
  misc_feature (1)..(25): SEQ ID NO: 4317; WAN024FNL_at; Start 904; Stop 928
gacaaacatactgttgactttgaga

SEQ ID NO: 213542 - DNA, 25 bp, Artificial
  probe
  misc_feature (1)..(25): SEQ ID NO: 4317; WAN024FNL_at; Start 51; Stop 75
taataaaacaggtggaacggagctc

SEQ ID NO: 213543 - DNA, 25 bp, Artificial
  probe
  misc_feature (1)..(25): SEQ ID NO: 4317; WAN024FNL_at; Start 874; Stop 898
gagaccctgaaatcatgcttaaaaa

SEQ ID NO: 213544 - DNA, 25 bp, Artificial
  probe
  misc_feature (1)..(25): SEQ ID NO: 4317; WAN024FNL_at; Start 531; Stop 555
tattcagcgatctatttcaacagac

SEQ ID NO: 213545 - DNA, 25 bp, Artificial
  probe
  misc_feature (1)..(25): SEQ ID NO: 4317; WAN024FNL_at; Start 445; Stop 469
tatcaaagtgaatacgccaagcaat

SEQ ID NO: 213546 - DNA, 25 bp, Artificial
  probe
  misc_feature (1)..(25): SEQ ID NO: 4317; WAN024FNL_at; Start 602; Stop 626
ttactcgtgagctaattaaacaggc

SEQ ID NO: 213547 - DNA, 25 bp, Artificial
  probe
  misc_feature (1)..(25): SEQ ID NO: 4317; WAN024FNL_at; Start 65; Stop 89
gaacggagctcgtccatcaattagt

SEQ ID NO: 213548 - DNA, 25 bp, Artificial
  probe
  misc_feature (1)..(25): SEQ ID NO: 4317; WAN024FNL_at; Start 631; Stop 655
gaattaacgttctctccaattgaga

SEQ ID NO: 213549 - DNA, 25 bp, Artificial
  probe
  misc_feature (1)..(25): SEQ ID NO: 4317; WAN024FNL_at; Start 474; Stop 498
tctagctaaaggtgtcaaaaagtac

SEQ ID NO: 213550 - DNA, 25 bp, Artificial
  probe
  misc_feature (1)..(25): SEQ ID NO: 4317; WAN024FNL_at; Start 415; Stop 439
tatagaatagataaagagattcccc

SEQ ID NO: 213551 - DNA, 25 bp, Artificial
  probe
  misc_feature (1)..(25): SEQ ID NO: 4317; WAN024FNL_at; Start 841; Stop 865
gaagacactgttgaaaatatcccca

SEQ ID NO: 213552 - DNA, 25 bp, Artificial
  probe
  misc_feature (1)..(25): SEQ ID NO: 4317; WAN024FNL_at; Start 705; Stop 729
tattgattttggcaaccatcctggg

SEQ ID NO: 213553 - DNA, 25 bp, Artificial
  probe
  misc_feature (1)..(25): SEQ ID NO: 4317; WAN024FNL_at; Start 113; Stop 137
ggaaagctatcgttgcttattatgg

SEQ ID NO: 213554 - DNA, 25 bp, Artificial
  probe
  misc_feature (1)..(25): SEQ ID NO: 4317; WAN024FNL_at; Start 460; Stop 484
gccaagcaatttcttctagctaaag

SEQ ID NO: 213555 - DNA, 25 bp, Artificial
  probe
  misc_feature (1)..(25): SEQ ID NO: 4317; WAN024FNL_at; Start 858; Stop 882
tatccccaacattattgagaccctg

SEQ ID NO: 213556 - DNA, 25 bp, Artificial
  probe
  misc_feature (1)..(25): SEQ ID NO: 4317; WAN024FNL_at; Start 776; Stop 800
taactgggaaacgaggttctgcaaa

SEQ ID NO: 213557 - DNA, 25 bp, Artificial
  probe
  misc_feature (1)..(25): SEQ ID NO: 4317; WAN024FNL_at; Start 589; Stop 613
aaagggattgaatttactcgtgagc

SEQ ID NO: 213558 - DNA, 25 bp, Artificial
  probe
  misc_feature (1)..(25): SEQ ID NO: 4317; WAN024FNL_at; Start 147; Stop 171
tgctccaaatgaggtgaatcctgcg

SEQ ID NO: 213559 - DNA, 25 bp, Artificial
  probe
  misc_feature (1)..(25): SEQ ID NO: 4999; WAN024FNM_at; Start 559; Stop 583
tttgtaagagttgttgcagatgctg

SEQ ID NO: 213560 - DNA, 25 bp, Artificial
  probe
  misc_feature (1)..(25): SEQ ID NO: 4999; WAN024FNM_at; Start 180; Stop 204
gcttgggacttctctatttgttata

SEQ ID NO: 213561 - DNA, 25 bp, Artificial
  probe
  misc_feature (1)..(25): SEQ ID NO: 4999; WAN024FNM_at; Start 1038; Stop 1062
tgcggatggacgtttattaggagtt

SEQ ID NO: 213562 - DNA, 25 bp, Artificial
  probe
  misc_feature (1)..(25): SEQ ID NO: 4999; WAN024FNM_at; Start 999; Stop 1023
caaggcaaatgcatatgtctctctg

SEQ ID NO: 213563 - DNA, 25 bp, Artificial
  probe
  misc_feature (1)..(25): SEQ ID NO: 4999; WAN024FNM_at; Start 1064; Stop 1088
taataggatcccttctatatggtgc

SEQ ID NO: 213564 - DNA, 25 bp, Artificial
  probe
  misc_feature (1)..(25): SEQ ID NO: 4999; WAN024FNM_at; Start 1087; Stop 1111
gccttttgtggctatatcttttgca

SEQ ID NO: 213565 - DNA, 25 bp, Artificial
  probe
  misc_feature (1)..(25): SEQ ID NO: 4999; WAN024FNM_at; Start 55; Stop 79
acgtataggacgtttctcaatccca

SEQ ID NO: 213566 - DNA, 25 bp, Artificial
  probe
  misc_feature (1)..(25): SEQ ID NO: 4999; WAN024FNM_at; Start 771; Stop 795
ttatttttatttcgcaatgtcccca

SEQ ID NO: 213567 - DNA, 25 bp, Artificial
  probe
  misc_feature (1)..(25): SEQ ID NO: 4999; WAN024FNM_at; Start 421; Stop 445
gataccagtggattaaagaatttca

SEQ ID NO: 213568 - DNA, 25 bp, Artificial
  probe
  misc_feature (1)..(25): SEQ ID NO: 4999; WAN024FNM_at; Start 388; Stop 412
aacttagttagacaatctgcgcagg

SEQ ID NO: 213569 - DNA, 25 bp, Artificial
  probe
  misc_feature (1)..(25): SEQ ID NO: 4999; WAN024FNM_at; Start 690; Stop 714
agtaaattatggtatgctaggttca

SEQ ID NO: 213570 - DNA, 25 bp, Artificial
  probe
  misc_feature (1)..(25): SEQ ID NO: 4999; WAN024FNM_at; Start 19; Stop 43
gccttgacaataggatcagtggtat

SEQ ID NO: 213571 - DNA, 25 bp, Artificial
  probe
  misc_feature (1)..(25): SEQ ID NO: 4999; WAN024FNM_at; Start 356; Stop 380
cactggtatcattaataagaggtgg

SEQ ID NO: 213572 - DNA, 25 bp, Artificial
  probe
  misc_feature (1)..(25): SEQ ID NO: 4999; WAN024FNM_at; Start 405; Stop 429
tgcgcaggatgcagtagataccagt

SEQ ID NO: 213573 - DNA, 25 bp, Artificial
  probe
  misc_feature (1)..(25): SEQ ID NO: 4999; WAN024FNM_at; Start 945; Stop 969
cacaatgattgcgaatactgatgca

SEQ ID NO: 213574 - DNA, 25 bp, Artificial
  probe
  misc_feature (1)..(25): SEQ ID NO: 4999; WAN024FNM_at; Start 634; Stop 658
gcaaataggttctctgaaaaaactg

SEQ ID NO: 213575 - DNA, 25 bp, Artificial
  probe
  misc_feature (1)..(25): SEQ ID NO: 4999; WAN024FNM_at; Start 502; Stop 526
gatttctggagcaataaaaaaggca

SEQ ID NO: 213576 - DNA, 25 bp, Artificial
  probe
  misc_feature (1)..(25): SEQ ID NO: 4999; WAN024FNM_at; Start 705; Stop 729
gctaggttcaattatcttatggcta

SEQ ID NO: 213577 - DNA, 25 bp, Artificial
  probe
  misc_feature (1)..(25): SEQ ID NO: 4999; WAN024FNM_at; Start 573; Stop 597
tgcagatgctggtagaacgcctcta

SEQ ID NO: 213578 - DNA, 25 bp, Artificial
  probe
  misc_feature (1)..(25): SEQ ID NO: 4999; WAN024FNM_at; Start 253; Stop 277
ggcggtaactcatattttacaacag

SEQ ID NO: 213579 - DNA, 25 bp, Artificial
  probe
  misc_feature (1)..(25): SEQ ID NO: 4999; WAN024FNM_at; Start 137; Stop 161
tccaacttttcgagattagtactca

SEQ ID NO: 213580 - DNA, 25 bp, Artificial
  probe
  misc_feature (1)..(25): SEQ ID NO: 4999; WAN024FNM_at; Start 587; Stop 611
gaacgcctctatttaatgttgtcat

SEQ ID NO: 213581 - DNA, 25 bp, Artificial
  probe
  misc_feature (1)..(25): SEQ ID NO: 4999; WAN024FNM_at; Start 339; Stop 363
gccagatttcttttcctcactggta

SEQ ID NO: 213582 - DNA, 25 bp, Artificial
  probe
  misc_feature (1)..(25): SEQ ID NO: 4999; WAN024FNM_at; Start 932; Stop 956
tattagaagcatacacaatgattgc

SEQ ID NO: 213583 - DNA, 25 bp, Artificial
  probe
  misc_feature (1)..(25): SEQ ID NO: 4999; WAN024FNM_at; Start 737; Stop 761
tatctaggacaacaacctccgttta

SEQ ID NO: 213584 - DNA, 25 bp, Artificial
  probe
  misc_feature (1)..(25): SEQ ID NO: 4999; WAN024FNM_at; Start 1108; Stop 1132
tgcaggtatatccagcaacaaaata

SEQ ID NO: 213585 - DNA, 25 bp, Artificial
  probe
  misc_feature (1)..(25): SEQ ID NO: 4999; WAN024FNM_at; Start 791; Stop 815
ccccaatactattagaaaagtggag

SEQ ID NO: 213586 - DNA, 25 bp, Artificial
  probe
  misc_feature (1)..(25): SEQ ID NO: 4999; WAN024FNM_at; Start 968; Stop 992
caatctggtataatattgcacctgg

SEQ ID NO: 213587 - DNA, 25 bp, Artificial
  probe
  misc_feature (1)..(25): SEQ ID NO: 4999; WAN024FNM_at; Start 722; Stop 746
tatggctatcaactttatctaggac

SEQ ID NO: 213588 - DNA, 25 bp, Artificial
  probe
  misc_feature (1)..(25): SEQ ID NO: 4999; WAN024FNM_at; Start 1213; Stop 1237
tatgcaattgcattcgtactcttat

SEQ ID NO: 213589 - DNA, 25 bp, Artificial
  probe
  misc_feature (1)..(25): SEQ ID NO: 4999; WAN024FNM_at; Start 456; Stop 480
tattgttattcctagtgccatggta

SEQ ID NO: 213590 - DNA, 25 bp, Artificial
  probe
  misc_feature (1)..(25): SEQ ID NO: 4999; WAN024FNM_at; Start 3; Stop 27
gaatcttagtatgttagccttgaca

SEQ ID NO: 213591 - DNA, 25 bp, Artificial
  probe
  misc_feature (1)..(25): SEQ ID NO: 4999; WAN024FNM_at; Start 981; Stop 1005
tattgcacctggtttgaccaaggca

SEQ ID NO: 213592 - DNA, 25 bp, Artificial
  probe
  misc_feature (1)..(25): SEQ ID NO: 4999; WAN024FNM_at; Start 213; Stop 237
gatagcaatttggtttcgggataaa

SEQ ID NO: 213593 - DNA, 25 bp, Artificial
  probe
  misc_feature (1)..(25): SEQ ID NO: 1286; WAN024FNN_at; Start 118; Stop 142
caaaatggcagtatagaaagggtag

SEQ ID NO: 213594 - DNA, 25 bp, Artificial
  probe
  misc_feature (1)..(25): SEQ ID NO: 1286; WAN024FNN_at; Start 699; Stop 723
gacagtatttgatccttctattgta

SEQ ID NO: 213595 - DNA, 25 bp, Artificial
  probe
  misc_feature (1)..(25): SEQ ID NO: 1286; WAN024FNN_at; Start 30; Stop 54
tcgtaccagcaatgacactatagag

SEQ ID NO: 213596 - DNA, 25 bp, Artificial
  probe
  misc_feature (1)..(25): SEQ ID NO: 1286; WAN024FNN_at; Start 732; Stop 756
taaagaggactcatcaacaaattcg

SEQ ID NO: 213597 - DNA, 25 bp, Artificial
  probe
  misc_feature (1)..(25): SEQ ID NO: 1286; WAN024FNN_at; Start 105; Stop 129
tgataacgcttctcaaaatggcagt

SEQ ID NO: 213598 - DNA, 25 bp, Artificial
  probe
  misc_feature (1)..(25): SEQ ID NO: 1286; WAN024FNN_at; Start 223; Stop 247
ggatacgcctatgctcggactcaaa

SEQ ID NO: 213599 - DNA, 25 bp, Artificial
  probe
  misc_feature (1)..(25): SEQ ID NO: 1286; WAN024FNN_at; Start 216; Stop 240
taatattggatacgcctatgctcgg

SEQ ID NO: 213600 - DNA, 25 bp, Artificial
  probe
  misc_feature (1)..(25): SEQ ID NO: 1286; WAN024FNN_at; Start 537; Stop 561
tgcagaccctataggatatcaggaa

SEQ ID NO: 213601 - DNA, 25 bp, Artificial
  probe
  misc_feature (1)..(25): SEQ ID NO: 1286; WAN024FNN_at; Start 332; Stop 356
gaaattctcagtttcatatcgctgg

SEQ ID NO: 213602 - DNA, 25 bp, Artificial
  probe
  misc_feature (1)..(25): SEQ ID NO: 1286; WAN024FNN_at; Start 348; Stop 372
tatcgctggtccagacattgtctct

SEQ ID NO: 213603 - DNA, 25 bp, Artificial
  probe
  misc_feature (1)..(25): SEQ ID NO: 1286; WAN024FNN_at; Start 15; Stop 39
tgtgattttgcattatcgtaccagc

SEQ ID NO: 213604 - DNA, 25 bp, Artificial
  probe
  misc_feature (1)..(25): SEQ ID NO: 1286; WAN024FNN_at; Start 574; Stop 598
catgggagttgtgtaattttttcac

SEQ ID NO: 213605 - DNA, 25 bp, Artificial
  probe
  misc_feature (1)..(25): SEQ ID NO: 1286; WAN024FNN_at; Start 521; Stop 545
taaatagagtaagtgctgcagaccc

SEQ ID NO: 213606 - DNA, 25 bp, Artificial
  probe
  misc_feature (1)..(25): SEQ ID NO: 1286; WAN024FNN_at; Start 186; Stop 210
cacgaaaaacttaggatttgctgca

SEQ ID NO: 213607 - DNA, 25 bp, Artificial
  probe
  misc_feature (1)..(25): SEQ ID NO: 1286; WAN024FNN_at; Start 596; Stop 620
caccattatatgtttcagaggagga

SEQ ID NO: 213608 - DNA, 25 bp, Artificial
  probe
  misc_feature (1)..(25): SEQ ID NO: 1286; WAN024FNN_at; Start 368; Stop 392
tctctcttgtagatggtcatcatca

SEQ ID NO: 213609 - DNA, 25 bp, Artificial
  probe
  misc_feature (1)..(25): SEQ ID NO: 1286; WAN024FNN_at; Start 722; Stop 746
taatttatcataaagaggactcatc

SEQ ID NO: 213610 - DNA, 25 bp, Artificial
  probe
  misc_feature (1)..(25): SEQ ID NO: 1286; WAN024FNN_at; Start 60; Stop 84
caaatcgattcaaaagcttgaggga

SEQ ID NO: 213611 - DNA, 25 bp, Artificial
  probe
  misc_feature (1)..(25): SEQ ID NO: 1286; WAN024FNN_at; Start 200; Stop 224
gatttgctgcaggaaataatattgg

SEQ ID NO: 213612 - DNA, 25 bp, Artificial
  probe
  misc_feature (1)..(25): SEQ ID NO: 1286; WAN024FNN_at; Start 639; Stop 663
tacgttcatgtatatggaagagcct

SEQ ID NO: 213613 - DNA, 25 bp, Artificial
  probe
  misc_feature (1)..(25): SEQ ID NO: 1286; WAN024FNN_at; Start 749; Stop 773
caaattcgttgtataatgcggcata

SEQ ID NO: 213614 - DNA, 25 bp, Artificial
  probe
  misc_feature (1)..(25): SEQ ID NO: 1286; WAN024FNN_at; Start 133; Stop 157
gaaagggtagaagccttatttgcaa

SEQ ID NO: 213615 - DNA, 25 bp, Artificial
  probe
  misc_feature (1)..(25): SEQ ID NO: 1286; WAN024FNN_at; Start 765; Stop 789
tgcggcatatgcaaaaagagagttt

SEQ ID NO: 213616 - DNA, 25 bp, Artificial
  probe
  misc_feature (1)..(25): SEQ ID NO: 1286; WAN024FNN_at; Start 625; Stop 649
gcttttagaccagatacgttcatgt

SEQ ID NO: 213617 - DNA, 25 bp, Artificial
  probe
  misc_feature (1)..(25): SEQ ID NO: 1286; WAN024FNN_at; Start 408; Stop 432
gaagatcaattctatatctaaggca

SEQ ID NO: 213618 - DNA, 25 bp, Artificial
  probe
  misc_feature (1)..(25): SEQ ID NO: 1286; WAN024FNN_at; Start 149; Stop 173
tatttgcaaataatgacgagatagt

SEQ ID NO: 213619 - DNA, 25 bp, Artificial
  probe
  misc_feature (1)..(25): SEQ ID NO: 1286; WAN024FNN_at; Start 651; Stop 675
tatggaagagcctattctatatgaa

SEQ ID NO: 213620 - DNA, 25 bp, Artificial
  probe
  misc_feature (1)..(25): SEQ ID NO: 1286; WAN024FNN_at; Start 235; Stop 259
gctcggactcaaataaaagctaata

SEQ ID NO: 213621 - DNA, 25 bp, Artificial
  probe
  misc_feature (1)..(25): SEQ ID NO: 1286; WAN024FNN_at; Start 379; Stop 403
gatggtcatcatcaaagtcctgttg

SEQ ID NO: 213622 - DNA, 25 bp, Artificial
  probe
  misc_feature (1)..(25): SEQ ID NO: 1286; WAN024FNN_at; Start 45; Stop 69
cactatagagtgtatcaaatcgatt

SEQ ID NO: 213623 - DNA, 25 bp, Artificial
  probe
  misc_feature (1)..(25): SEQ ID NO: 1286; WAN024FNN_at; Start 391; Stop 415
caaagtcctgttgttgagaagatca

SEQ ID NO: 213624 - DNA, 25 bp, Artificial
  probe
  misc_feature (1)..(25): SEQ ID NO: 1286; WAN024FNN_at; Start 485; Stop 509
tatatgagctgatgactagacagcc

SEQ ID NO: 213625 - DNA, 25 bp, Artificial
  probe
  misc_feature (1)..(25): SEQ ID NO: 1286; WAN024FNN_at; Start 90; Stop 114
taaaattgtaattgttgataacgct

SEQ ID NO: 213626 - DNA, 25 bp, Artificial
  probe
  misc_feature (1)..(25): SEQ ID NO: 1286; WAN024FNN_at; Start 611; Stop 635
cagaggaggagtttgcttttagacc

SEQ ID NO: 213627 - DNA, 25 bp, Artificial
  probe
  misc_feature (1)..(25): SEQ ID NO: 649; WAN024FNO_at; Start 900; Stop 924
tgtttccagcgcaagtgctggagga

SEQ ID NO: 213628 - DNA, 25 bp, Artificial
  probe
  misc_feature (1)..(25): SEQ ID NO: 649; WAN024FNO_at; Start 210; Stop 234
tagaagtggaatttatccccagatt

SEQ ID NO: 213629 - DNA, 25 bp, Artificial
  probe
  misc_feature (1)..(25): SEQ ID NO: 649; WAN024FNO_at; Start 483; Stop 507
caatgattgtaaagtagtgggcgta

SEQ ID NO: 213630 - DNA, 25 bp, Artificial
  probe
  misc_feature (1)..(25): SEQ ID NO: 649; WAN024FNO_at; Start 411; Stop 435
gctcaataagagaaccaagacagtt

SEQ ID NO: 213631 - DNA, 25 bp, Artificial
  probe
  misc_feature (1)..(25): SEQ ID NO: 649; WAN024FNO_at; Start 888; Stop 912
taagttgtctgttgtttccagcgca

SEQ ID NO: 213632 - DNA, 25 bp, Artificial
  probe
  misc_feature (1)..(25): SEQ ID NO: 649; WAN024FNO_at; Start 103; Stop 127
taccaatgtgacgtgatgtattatc

SEQ ID NO: 213633 - DNA, 25 bp, Artificial
  probe
  misc_feature (1)..(25): SEQ ID NO: 649; WAN024FNO_at; Start 29; Stop 53
gaccttaccaagttactccaaatga

SEQ ID NO: 213634 - DNA, 25 bp, Artificial
  probe
  misc_feature (1)..(25): SEQ ID NO: 649; WAN024FNO_at; Start 822; Stop 846
acaactatttgtgctcccgtcgatt

SEQ ID NO: 213635 - DNA, 25 bp, Artificial
  probe
  misc_feature (1)..(25): SEQ ID NO: 649; WAN024FNO_at; Start 73; Stop 97
ggattagcttctgctctcagtcagc

SEQ ID NO: 213636 - DNA, 25 bp, Artificial
  probe
  misc_feature (1)..(25): SEQ ID NO: 649; WAN024FNO_at; Start 929; Stop 953
cactgattcaagatggtataaacgg

SEQ ID NO: 213637 - DNA, 25 bp, Artificial
  probe
  misc_feature (1)..(25): SEQ ID NO: 649; WAN024FNO_at; Start 57; Stop 81
caaccttcaggagcttggattagct

SEQ ID NO: 213638 - DNA, 25 bp, Artificial
  probe
  misc_feature (1)..(25): SEQ ID NO: 649; WAN024FNO_at; Start 440; Stop 464
gcaagacagaaaaggcaaagcatta

SEQ ID NO: 213639 - DNA, 25 bp, Artificial
  probe
  misc_feature (1)..(25): SEQ ID NO: 649; WAN024FNO_at; Start 1015; Stop 1039
aacccattggaattgaaacggcttg

SEQ ID NO: 213640 - DNA, 25 bp, Artificial
  probe
  misc_feature (1)..(25): SEQ ID NO: 649; WAN024FNO_at; Start 1076; Stop 1100
tgtggtcttcaattgcgagaaaaat

SEQ ID NO: 213641 - DNA, 25 bp, Artificial
  probe
  misc_feature (1)..(25): SEQ ID NO: 649; WAN024FNO_at; Start 1062; Stop 1086
tacggaacagtttatgtggtcttca

SEQ ID NO: 213642 - DNA, 25 bp, Artificial
  probe
  misc_feature (1)..(25): SEQ ID NO: 649; WAN024FNO_at; Start 775; Stop 799
caaccttatttaaagaactctcagc

SEQ ID NO: 213643 - DNA, 25 bp, Artificial
  probe
  misc_feature (1)..(25): SEQ ID NO: 649; WAN024FNO_at; Start 14; Stop 38
taattgtccgaagtggaccttacca

SEQ ID NO: 213644 - DNA, 25 bp, Artificial
  probe
  misc_feature (1)..(25): SEQ ID NO: 649; WAN024FNO_at; Start 967; Stop 991
gattttaatgatgaacactgggtgg

SEQ ID NO: 213645 - DNA, 25 bp, Artificial
  probe
  misc_feature (1)..(25): SEQ ID NO: 649; WAN024FNO_at; Start 273; Stop 297
tatttccgagtatagccagattatg

SEQ ID NO: 213646 - DNA, 25 bp, Artificial
  probe
  misc_feature (1)..(25): SEQ ID NO: 649; WAN024FNO_at; Start 87; Stop 111
tctcagtcagcagggataccaatgt

SEQ ID NO: 213647 - DNA, 25 bp, Artificial
  probe
  misc_feature (1)..(25): SEQ ID NO: 649; WAN024FNO_at; Start 834; Stop 858
gctcccgtcgattcaagagattttt

SEQ ID NO: 213648 - DNA, 25 bp, Artificial
  probe
  misc_feature (1)..(25): SEQ ID NO: 649; WAN024FNO_at; Start 604; Stop 628
gtaggctcactatcaaaaagaaaaa

SEQ ID NO: 213649 - DNA, 25 bp, Artificial
  probe
  misc_feature (1)..(25): SEQ ID NO: 649; WAN024FNO_at; Start 859; Stop 883
ggtatggtattacttgaggcaatgt

SEQ ID NO: 213650 - DNA, 25 bp, Artificial
  probe
  misc_feature (1)..(25): SEQ ID NO: 649; WAN024FNO_at; Start 915; Stop 939
tgctggaggagagacactgattcaa

SEQ ID NO: 213651 - DNA, 25 bp, Artificial
  probe
  misc_feature (1)..(25): SEQ ID NO: 649; WAN024FNO_at; Start 425; Stop 449
ccaagacagttttctgcaagacaga

SEQ ID NO: 213652 - DNA, 25 bp, Artificial
  probe
  misc_feature (1)..(25): SEQ ID NO: 649; WAN024FNO_at; Start 47; Stop 71
caaatgaatacaaccttcaggagct

SEQ ID NO: 213653 - DNA, 25 bp, Artificial
  probe
  misc_feature (1)..(25): SEQ ID NO: 649; WAN024FNO_at; Start 982; Stop 1006
cactgggtggattgtatagaaaatc

SEQ ID NO: 213654 - DNA, 25 bp, Artificial
  probe
  misc_feature (1)..(25): SEQ ID NO: 649; WAN024FNO_at; Start 500; Stop 524
tgggcgtaggtctagatgttgaaaa

SEQ ID NO: 213655 - DNA, 25 bp, Artificial
  probe
  misc_feature (1)..(25): SEQ ID NO: 649; WAN024FNO_at; Start 368; Stop 392
tccccattattgaatctatgtacga

SEQ ID NO: 213656 - DNA, 25 bp, Artificial
  probe
  misc_feature (1)..(25): SEQ ID NO: 649; WAN024FNO_at; Start 1047; Stop 1071
tgcccataagcgaattacggaacag

SEQ ID NO: 213657 - DNA, 25 bp, Artificial
  probe
  misc_feature (1)..(25): SEQ ID NO: 649; WAN024FNO_at; Start 589; Stop 613
caaaatattctttatgtaggctcac

SEQ ID NO: 213658 - DNA, 25 bp, Artificial
  probe
  misc_feature (1)..(25): SEQ ID NO: 649; WAN024FNO_at; Start 544; Stop 568
cctacggagaatactatagaacttt

SEQ ID NO: 213659 - DNA, 25 bp, Artificial
  probe
  misc_feature (1)..(25): SEQ ID NO: 649; WAN024FNO_at; Start 1029; Stop 1053
gaaacggcttggagaatgtgcccat

SEQ ID NO: 213660 - DNA, 25 bp, Artificial
  probe
  misc_feature (1)..(25): SEQ ID NO: 649; WAN024FNO_at; Start 528; Stop 552
tgaacaagaagaggaacctacggag

SEQ ID NO: 213661 - DNA, 25 bp, Artificial
  probe
  misc_feature (1)..(25): SEQ ID NO: 2903; WAN024FNP_at; Start 348; Stop 372
agtaataaaatcaacagtccccgtg

SEQ ID NO: 213662 - DNA, 25 bp, Artificial
  probe
  misc_feature (1)..(25): SEQ ID NO: 2903; WAN024FNP_at; Start 1083; Stop 1107
gcctactctaaaagataatggtacg

SEQ ID NO: 213663 - DNA, 25 bp, Artificial
  probe
  misc_feature (1)..(25): SEQ ID NO: 2903; WAN024FNP_at; Start 232; Stop 256
tcttttatcgtagtagcgacgccaa

SEQ ID NO: 213664 - DNA, 25 bp, Artificial
  probe
  misc_feature (1)..(25): SEQ ID NO: 2903; WAN024FNP_at; Start 301; Stop 325
gaatcggttattcaacaggttcaga

SEQ ID NO: 213665 - DNA, 25 bp, Artificial
  probe
  misc_feature (1)..(25): SEQ ID NO: 2903; WAN024FNP_at; Start 772; Stop 796
tacggtggatattgcttaccaaagg

SEQ ID NO: 213666 - DNA, 25 bp, Artificial
  probe
  misc_feature (1)..(25): SEQ ID NO: 2903; WAN024FNP_at; Start 286; Stop 310
gatacatcagcagttgaatcggtta

SEQ ID NO: 213667 - DNA, 25 bp, Artificial
  probe
  misc_feature (1)..(25): SEQ ID NO: 2903; WAN024FNP_at; Start 791; Stop 815
caaaggacactaagcaacttttagc

SEQ ID NO: 213668 - DNA, 25 bp, Artificial
  probe
  misc_feature (1)..(25): SEQ ID NO: 2903; WAN024FNP_at; Start 1041; Stop 1065
gaaacgtattaaggatagaggagct

SEQ ID NO: 213669 - DNA, 25 bp, Artificial
  probe
  misc_feature (1)..(25): SEQ ID NO: 2903; WAN024FNP_at; Start 536; Stop 560
tctctaatcttttagtgcaaggtgc

SEQ ID NO: 213670 - DNA, 25 bp, Artificial
  probe
  misc_feature (1)..(25): SEQ ID NO: 2903; WAN024FNP_at; Start 1150; Stop 1174
gcaaagtgcgatgcgattattgcaa

SEQ ID NO: 213671 - DNA, 25 bp, Artificial
  probe
  misc_feature (1)..(25): SEQ ID NO: 2903; WAN024FNP_at; Start 210; Stop 234
tgaaacagcttataaagatgcctct

SEQ ID NO: 213672 - DNA, 25 bp, Artificial
  probe
  misc_feature (1)..(25): SEQ ID NO: 2903; WAN024FNP_at; Start 422; Stop 446
tcagccctgaatttttgcgcgaatc

SEQ ID NO: 213673 - DNA, 25 bp, Artificial
  probe
  misc_feature (1)..(25): SEQ ID NO: 2903; WAN024FNP_at; Start 1024; Stop 1048
tcaatacagggagttatgaaacgta

SEQ ID NO: 213674 - DNA, 25 bp, Artificial
  probe
  misc_feature (1)..(25): SEQ ID NO: 2903; WAN024FNP_at; Start 678; Stop 702
tgcagagaccaaaggactagatact

SEQ ID NO: 213675 - DNA, 25 bp, Artificial
  probe
  misc_feature (1)..(25): SEQ ID NO: 2903; WAN024FNP_at; Start 195; Stop 219
tgcaacaatagacgctgaaacagct

SEQ ID NO: 213676 - DNA, 25 bp, Artificial
  probe
  misc_feature (1)..(25): SEQ ID NO: 2903; WAN024FNP_at; Start 720; Stop 744
tgttagtttagatccccgtatcgga

SEQ ID NO: 213677 - DNA, 25 bp, Artificial
  probe
  misc_feature (1)..(25): SEQ ID NO: 2903; WAN024FNP_at; Start 998; Stop 1022
gtaacagtgataactttcgtcagag

SEQ ID NO: 213678 - DNA, 25 bp, Artificial
  probe
  misc_feature (1)..(25): SEQ ID NO: 2903; WAN024FNP_at; Start 70; Stop 94
caacaccatcatgtagtagcagtag

SEQ ID NO: 213679 - DNA, 25 bp, Artificial
  probe
  misc_feature (1)..(25): SEQ ID NO: 2903; WAN024FNP_at; Start 1099; Stop 1123
aatggtacgttctttgggaacgctg

SEQ ID NO: 213680 - DNA, 25 bp, Artificial
  probe
  misc_feature (1)..(25): SEQ ID NO: 2903; WAN024FNP_at; Start 814; Stop 838
gctaattatgagaatatcccagaag

SEQ ID NO: 213681 - DNA, 25 bp, Artificial
  probe
  misc_feature (1)..(25): SEQ ID NO: 2903; WAN024FNP_at; Start 663; Stop 687
tgaattagatacttatgcagagacc

SEQ ID NO: 213682 - DNA, 25 bp, Artificial
  probe
  misc_feature (1)..(25): SEQ ID NO: 2903; WAN024FNP_at; Start 1216; Stop 1240
tatacacgagatatcttcagaagag

SEQ ID NO: 213683 - DNA, 25 bp, Artificial
  probe
  misc_feature (1)..(25): SEQ ID NO: 2903; WAN024FNP_at; Start 928; Stop 952
gaagacgatatttctgtcagacaga

SEQ ID NO: 213684 - DNA, 25 bp, Artificial
  probe
  misc_feature (1)..(25): SEQ ID NO: 2903; WAN024FNP_at; Start 1011; Stop 1035
ctttcgtcagagttcaatacaggga

SEQ ID NO: 213685 - DNA, 25 bp, Artificial
  probe
  misc_feature (1)..(25): SEQ ID NO: 2903; WAN024FNP_at; Start 1135; Stop 1159
ttagaagagttcaaagcaaagtgcg

SEQ ID NO: 213686 - DNA, 25 bp, Artificial
  probe
  misc_feature (1)..(25): SEQ ID NO: 2903; WAN024FNP_at; Start 627; Stop 651
taatacctacttagcattgcgggta

SEQ ID NO: 213687 - DNA, 25 bp, Artificial
  probe
  misc_feature (1)..(25): SEQ ID NO: 2903; WAN024FNP_at; Start 436; Stop 460
ttgcgcgaatcaagagcactttatg

SEQ ID NO: 213688 - DNA, 25 bp, Artificial
  probe
  misc_feature (1)..(25): SEQ ID NO: 2903; WAN024FNP_at; Start 368; Stop 392
ccgtgggttttactgattcaattcg

SEQ ID NO: 213689 - DNA, 25 bp, Artificial
  probe
  misc_feature (1)..(25): SEQ ID NO: 2903; WAN024FNP_at; Start 553; Stop 577
caaggtgctatcaaaaaagatatcc

SEQ ID NO: 213690 - DNA, 25 bp, Artificial
  probe
  misc_feature (1)..(25): SEQ ID NO: 2903; WAN024FNP_at; Start 11; Stop 35
tgaaaattgcagtagttgggactgg

SEQ ID NO: 213691 - DNA, 25 bp, Artificial
  probe
  misc_feature (1)..(25): SEQ ID NO: 2903; WAN024FNP_at; Start 1183; Stop 1207
gatgaaatgttgaacgacgttaagg

SEQ ID NO: 213692 - DNA, 25 bp, Artificial
  probe
  misc_feature (1)..(25): SEQ ID NO: 2903; WAN024FNP_at; Start 751; Stop 775
tataataatccgagctttgggtacg

SEQ ID NO: 213693 - DNA, 25 bp, Artificial
  probe
  misc_feature (1)..(25): SEQ ID NO: 2903; WAN024FNP_at; Start 859; Stop 883
cgtagcaatgcaacacgtaaggatt

SEQ ID NO: 213694 - DNA, 25 bp, Artificial
  probe
  misc_feature (1)..(25): SEQ ID NO: 2903; WAN024FNP_at; Start 473; Stop 497
caagtcggatcatagttggaacaga

SEQ ID NO: 213695 - DNA, 25 bp, Artificial
  probe
  misc_feature (1)..(25): SEQ ID NO: 6679; WAN024FNQ_at; Start 183; Stop 207
taacatcaaggtcaaccaagtcgcc

SEQ ID NO: 213696 - DNA, 25 bp, Artificial
  probe
  misc_feature (1)..(25): SEQ ID NO: 6679; WAN024FNQ_at; Start 139; Stop 163
cacgaagatacggaagtcatcaaag

SEQ ID NO: 213697 - DNA, 25 bp, Artificial
  probe
  misc_feature (1)..(25): SEQ ID NO: 6679; WAN024FNQ_at; Start 96; Stop 120
tgcgaagcaattcttgcgcattgcg

SEQ ID NO: 213698 - DNA, 25 bp, Artificial
  probe
  misc_feature (1)..(25): SEQ ID NO: 6679; WAN024FNQ_at; Start 121; Stop 145
caatttctcagtaatcttcacgaag

SEQ ID NO: 213699 - DNA, 25 bp, Artificial
  probe
  misc_feature (1)..(25): SEQ ID NO: 6679; WAN024FNQ_at; Start 118; Stop 142
gcgcaatttctcagtaatcttcacg

SEQ ID NO: 213700 - DNA, 25 bp, Artificial
  probe
  misc_feature (1)..(25): SEQ ID NO: 6679; WAN024FNQ_at; Start 9; Stop 33
tcgtagtttgatccaacaagtccaa

SEQ ID NO: 213701 - DNA, 25 bp, Artificial
  probe
  misc_feature (1)..(25): SEQ ID NO: 6679; WAN024FNQ_at; Start 110; Stop 134
tgcgcattgcgcaatttctcagtaa

SEQ ID NO: 213702 - DNA, 25 bp, Artificial
  probe
  misc_feature (1)..(25): SEQ ID NO: 6679; WAN024FNQ_at; Start 207; Stop 231
cacttgggttaaatgcttgaagaga

SEQ ID NO: 213703 - DNA, 25 bp, Artificial
  probe
  misc_feature (1)..(25): SEQ ID NO: 6679; WAN024FNQ_at; Start 142; Stop 166
gaagatacggaagtcatcaaagatg

SEQ ID NO: 213704 - DNA, 25 bp, Artificial
  probe
  misc_feature (1)..(25): SEQ ID NO: 6679; WAN024FNQ_at; Start 135; Stop 159
tcttcacgaagatacggaagtcatc

SEQ ID NO: 213705 - DNA, 25 bp, Artificial
  probe
  misc_feature (1)..(25): SEQ ID NO: 6679; WAN024FNQ_at; Start 151; Stop 175
gaagtcatcaaagatggcatccaat

SEQ ID NO: 213706 - DNA, 25 bp, Artificial
  probe
  misc_feature (1)..(25): SEQ ID NO: 6679; WAN024FNQ_at; Start 99; Stop 123
gaagcaattcttgcgcattgcgcaa

SEQ ID NO: 213707 - DNA, 25 bp, Artificial
  probe
  misc_feature (1)..(25): SEQ ID NO: 6679; WAN024FNQ_at; Start 41; Stop 65
cattctttcggtctcctatcttaca

SEQ ID NO: 213708 - DNA, 25 bp, Artificial
  probe
  misc_feature (1)..(25): SEQ ID NO: 6679; WAN024FNQ_at; Start 213; Stop 237
ggttaaatgcttgaagagagtgtga

SEQ ID NO: 213709 - DNA, 25 bp, Artificial
  probe
  misc_feature (1)..(25): SEQ ID NO: 6679; WAN024FNQ_at; Start 163; Stop 187
gatggcatccaatttcttgataaca

SEQ ID NO: 213710 - DNA, 25 bp, Artificial
  probe
  misc_feature (1)..(25): SEQ ID NO: 6679; WAN024FNQ_at; Start 181; Stop 205
gataacatcaaggtcaaccaagtcg

SEQ ID NO: 213711 - DNA, 25 bp, Artificial
  probe
  misc_feature (1)..(25): SEQ ID NO: 6679; WAN024FNQ_at; Start 27; Stop 51
agtccaacaaatttcattctttcgg

SEQ ID NO: 213712 - DNA, 25 bp, Artificial
  probe
  misc_feature (1)..(25): SEQ ID NO: 6679; WAN024FNQ_at; Start 78; Stop 102
caaagtcttcagcatctttgcgaag

SEQ ID NO: 213713 - DNA, 25 bp, Artificial
  probe
  misc_feature (1)..(25): SEQ ID NO: 6679; WAN024FNQ_at; Start 89; Stop 113
gcatctttgcgaagcaattcttgcg

SEQ ID NO: 213714 - DNA, 25 bp, Artificial
  probe
  misc_feature (1)..(25): SEQ ID NO: 6679; WAN024FNQ_at; Start 147; Stop 171
tacggaagtcatcaaagatggcatc

SEQ ID NO: 213715 - DNA, 25 bp, Artificial
  probe
  misc_feature (1)..(25): SEQ ID NO: 6679; WAN024FNQ_at; Start 199; Stop 223
caagtcgccacttgggttaaatgct

SEQ ID NO: 213716 - DNA, 25 bp, Artificial
  probe
  misc_feature (1)..(25): SEQ ID NO: 6679; WAN024FNQ_at; Start 3; Stop 27
gattgatcgtagtttgatccaacaa

SEQ ID NO: 213717 - DNA, 25 bp, Artificial
  probe
  misc_feature (1)..(25): SEQ ID NO: 6679; WAN024FNQ_at; Start 18; Stop 42
gatccaacaagtccaacaaatttca

SEQ ID NO: 213718 - DNA, 25 bp, Artificial
  probe
  misc_feature (1)..(25): SEQ ID NO: 6679; WAN024FNQ_at; Start 166; Stop 190
ggcatccaatttcttgataacatca

SEQ ID NO: 213719 - DNA, 25 bp, Artificial
  probe
  misc_feature (1)..(25): SEQ ID NO: 6679; WAN024FNQ_at; Start 12; Stop 36
tagtttgatccaacaagtccaacaa

SEQ ID NO: 213720 - DNA, 25 bp, Artificial
  probe
  misc_feature (1)..(25): SEQ ID NO: 6679; WAN024FNQ_at; Start 69; Stop 93
tttcccagtcaaagtcttcagcatc

SEQ ID NO: 213721 - DNA, 25 bp, Artificial
  probe
  misc_feature (1)..(25): SEQ ID NO: 6679; WAN024FNQ_at; Start 190; Stop 214
aaggtcaaccaagtcgccacttggg

SEQ ID NO: 213722 - DNA, 25 bp, Artificial
  probe
  misc_feature (1)..(25): SEQ ID NO: 6679; WAN024FNQ_at; Start 66; Stop 90
aattttcccagtcaaagtcttcagc

SEQ ID NO: 213723 - DNA, 25 bp, Artificial
  probe
  misc_feature (1)..(25): SEQ ID NO: 6679; WAN024FNQ_at; Start 186; Stop 210
catcaaggtcaaccaagtcgccact

SEQ ID NO: 213724 - DNA, 25 bp, Artificial
  probe
  misc_feature (1)..(25): SEQ ID NO: 6679; WAN024FNQ_at; Start 51; Stop 75
gtctcctatcttacaaattttccca

SEQ ID NO: 213725 - DNA, 25 bp, Artificial
  probe
  misc_feature (1)..(25): SEQ ID NO: 6679; WAN024FNQ_at; Start 159; Stop 183
caaagatggcatccaatttcttgat

SEQ ID NO: 213726 - DNA, 25 bp, Artificial
  probe
  misc_feature (1)..(25): SEQ ID NO: 6679; WAN024FNQ_at; Start 34; Stop 58
caaatttcattctttcggtctccta

SEQ ID NO: 213727 - DNA, 25 bp, Artificial
  probe
  misc_feature (1)..(25): SEQ ID NO: 6679; WAN024FNQ_at; Start 81; Stop 105
agtcttcagcatctttgcgaagcaa

SEQ ID NO: 213728 - DNA, 25 bp, Artificial
  probe
  misc_feature (1)..(25): SEQ ID NO: 6679; WAN024FNQ_at; Start 203; Stop 227
tcgccacttgggttaaatgcttgaa

SEQ ID NO: 213729 - DNA, 25 bp, Artificial
  probe
  misc_feature (1)..(25): SEQ ID NO: 4039; WAN024FNR_at; Start 24; Stop 48
ccattctggatcgtcagggtcaact

SEQ ID NO: 213730 - DNA, 25 bp, Artificial
  probe
  misc_feature (1)..(25): SEQ ID NO: 4039; WAN024FNR_at; Start 49; Stop 73
tctgtgatggttgtagcgattggtt

SEQ ID NO: 213731 - DNA, 25 bp, Artificial
  probe
  misc_feature (1)..(25): SEQ ID NO: 4039; WAN024FNR_at; Start 31; Stop 55
ggatcgtcagggtcaacttctgtga

SEQ ID NO: 213732 - DNA, 25 bp, Artificial
  probe
  misc_feature (1)..(25): SEQ ID NO: 4039; WAN024FNR_at; Start 34; Stop 58
tcgtcagggtcaacttctgtgatgg

SEQ ID NO: 213733 - DNA, 25 bp, Artificial
  probe
  misc_feature (1)..(25): SEQ ID NO: 4039; WAN024FNR_at; Start 56; Stop 80
tggttgtagcgattggttttccaca

SEQ ID NO: 213734 - DNA, 25 bp, Artificial
  probe
  misc_feature (1)..(25): SEQ ID NO: 4039; WAN024FNR_at; Start 152; Stop 176
tatctaagcaagtttcaaggaattt

SEQ ID NO: 213735 - DNA, 25 bp, Artificial
  probe
  misc_feature (1)..(25): SEQ ID NO: 4039; WAN024FNR_at; Start 203; Stop 227
cgttgttatcaaaagcttccttagc

SEQ ID NO: 213736 - DNA, 25 bp, Artificial
  probe
  misc_feature (1)..(25): SEQ ID NO: 4039; WAN024FNR_at; Start 80; Stop 104
aatccaagtcttctgattcgattgg

SEQ ID NO: 213737 - DNA, 25 bp, Artificial
  probe
  misc_feature (1)..(25): SEQ ID NO: 4039; WAN024FNR_at; Start 10; Stop 34
gcaactttttctacccattctggat

SEQ ID NO: 213738 - DNA, 25 bp, Artificial
  probe
  misc_feature (1)..(25): SEQ ID NO: 4039; WAN024FNR_at; Start 143; Stop 167
taacaaagttatctaagcaagtttc

SEQ ID NO: 213739 - DNA, 25 bp, Artificial
  probe
  misc_feature (1)..(25): SEQ ID NO: 4039; WAN024FNR_at; Start 183; Stop 207
gccttcgttggtgatatttccgttg

SEQ ID NO: 213740 - DNA, 25 bp, Artificial
  probe
  misc_feature (1)..(25): SEQ ID NO: 4039; WAN024FNR_at; Start 240; Stop 264
gaattcgttacctggaagcgtgtag

SEQ ID NO: 213741 - DNA, 25 bp, Artificial
  probe
  misc_feature (1)..(25): SEQ ID NO: 4039; WAN024FNR_at; Start 171; Stop 195
gaatttaacagtgccttcgttggtg

SEQ ID NO: 213742 - DNA, 25 bp, Artificial
  probe
  misc_feature (1)..(25): SEQ ID NO: 4039; WAN024FNR_at; Start 137; Stop 161
cgtatttaacaaagttatctaagca

SEQ ID NO: 213743 - DNA, 25 bp, Artificial
  probe
  misc_feature (1)..(25): SEQ ID NO: 4039; WAN024FNR_at; Start 18; Stop 42
ttctacccattctggatcgtcaggg

SEQ ID NO: 213744 - DNA, 25 bp, Artificial
  probe
  misc_feature (1)..(25): SEQ ID NO: 4039; WAN024FNR_at; Start 222; Stop 246
cttagctttaccaagaaggaattcg

SEQ ID NO: 213745 - DNA, 25 bp, Artificial
  probe
  misc_feature (1)..(25): SEQ ID NO: 4039; WAN024FNR_at; Start 21; Stop 45
tacccattctggatcgtcagggtca

SEQ ID NO: 213746 - DNA, 25 bp, Artificial
  probe
  misc_feature (1)..(25): SEQ ID NO: 4039; WAN024FNR_at; Start 237; Stop 261
aaggaattcgttacctggaagcgtg

SEQ ID NO: 213747 - DNA, 25 bp, Artificial
  probe
  misc_feature (1)..(25): SEQ ID NO: 4039; WAN024FNR_at; Start 116; Stop 140
tcaatttcgaaacgactcctacgta

SEQ ID NO: 213748 - DNA, 25 bp, Artificial
  probe
  misc_feature (1)..(25): SEQ ID NO: 4039; WAN024FNR_at; Start 7; Stop 31
gctgcaactttttctacccattctg

SEQ ID NO: 213749 - DNA, 25 bp, Artificial
  probe
  misc_feature (1)..(25): SEQ ID NO: 4039; WAN024FNR_at; Start 166; Stop 190
tcaaggaatttaacagtgccttcgt

SEQ ID NO: 213750 - DNA, 25 bp, Artificial
  probe
  misc_feature (1)..(25): SEQ ID NO: 4039; WAN024FNR_at; Start 217; Stop 241
gcttccttagctttaccaagaagga

SEQ ID NO: 213751 - DNA, 25 bp, Artificial
  probe
  misc_feature (1)..(25): SEQ ID NO: 4039; WAN024FNR_at; Start 44; Stop 68
caacttctgtgatggttgtagcgat

SEQ ID NO: 213752 - DNA, 25 bp, Artificial
  probe
  misc_feature (1)..(25): SEQ ID NO: 4039; WAN024FNR_at; Start 37; Stop 61
tcagggtcaacttctgtgatggttg

SEQ ID NO: 213753 - DNA, 25 bp, Artificial
  probe
  misc_feature (1)..(25): SEQ ID NO: 4039; WAN024FNR_at; Start 179; Stop 203
cagtgccttcgttggtgatatttcc

SEQ ID NO: 213754 - DNA, 25 bp, Artificial
  probe
  misc_feature (1)..(25): SEQ ID NO: 4039; WAN024FNR_at; Start 233; Stop 257
caagaaggaattcgttacctggaag

SEQ ID NO: 213755 - DNA, 25 bp, Artificial
  probe
  misc_feature (1)..(25): SEQ ID NO: 4039; WAN024FNR_at; Start 62; Stop 86
tagcgattggttttccacaatccaa

SEQ ID NO: 213756 - DNA, 25 bp, Artificial
  probe
  misc_feature (1)..(25): SEQ ID NO: 4039; WAN024FNR_at; Start 28; Stop 52
tctggatcgtcagggtcaacttctg

SEQ ID NO: 213757 - DNA, 25 bp, Artificial
  probe
  misc_feature (1)..(25): SEQ ID NO: 4039; WAN024FNR_at; Start 70; Stop 94
ggttttccacaatccaagtcttctg

SEQ ID NO: 213758 - DNA, 25 bp, Artificial
  probe
  misc_feature (1)..(25): SEQ ID NO: 4039; WAN024FNR_at; Start 188; Stop 212
cgttggtgatatttccgttgttatc

SEQ ID NO: 213759 - DNA, 25 bp, Artificial
  probe
  misc_feature (1)..(25): SEQ ID NO: 4039; WAN024FNR_at; Start 88; Stop 112
tcttctgattcgattggttttggtt

SEQ ID NO: 213760 - DNA, 25 bp, Artificial
  probe
  misc_feature (1)..(25): SEQ ID NO: 4039; WAN024FNR_at; Start 148; Stop 172
aagttatctaagcaagtttcaagga

SEQ ID NO: 213761 - DNA, 25 bp, Artificial
  probe
  misc_feature (1)..(25): SEQ ID NO: 4039; WAN024FNR_at; Start 160; Stop 184
caagtttcaaggaatttaacagtgc

SEQ ID NO: 213762 - DNA, 25 bp, Artificial
  probe
  misc_feature (1)..(25): SEQ ID NO: 4039; WAN024FNR_at; Start 75; Stop 99
tccacaatccaagtcttctgattcg

SEQ ID NO: 213763 - DNA, 25 bp, Artificial
  probe
  misc_feature (1)..(25): SEQ ID NO: 989; WAN024FNS_at; Start 968; Stop 992
caggttctcctgcaggtgttatcaa

SEQ ID NO: 213764 - DNA, 25 bp, Artificial
  probe
  misc_feature (1)..(25): SEQ ID NO: 989; WAN024FNS_at; Start 460; Stop 484
ggaaatatcaccaacgaaggcactg

SEQ ID NO: 213765 - DNA, 25 bp, Artificial
  probe
  misc_feature (1)..(25): SEQ ID NO: 989; WAN024FNS_at; Start 438; Stop 462
taaggaagcttttgataacaacgga

SEQ ID NO: 213766 - DNA, 25 bp, Artificial
  probe
  misc_feature (1)..(25): SEQ ID NO: 989; WAN024FNS_at; Start 379; Stop 403
gatgctccaggtgttaatgcctaca

SEQ ID NO: 213767 - DNA, 25 bp, Artificial
  probe
  misc_feature (1)..(25): SEQ ID NO: 989; WAN024FNS_at; Start 915; Stop 939
ggttatcggaacacttcgcaacgga

SEQ ID NO: 213768 - DNA, 25 bp, Artificial
  probe
  misc_feature (1)..(25): SEQ ID NO: 989; WAN024FNS_at; Start 300; Stop 324
caagcctgttatgattgtgggtgca

SEQ ID NO: 213769 - DNA, 25 bp, Artificial
  probe
  misc_feature (1)..(25): SEQ ID NO: 989; WAN024FNS_at; Start 365; Stop 389
ttcgtaaaatccttgatgctccagg

SEQ ID NO: 213770 - DNA, 25 bp, Artificial
  probe
  misc_feature (1)..(25): SEQ ID NO: 989; WAN024FNS_at; Start 695; Stop 719
tggaccacggtatcctaacagttaa

SEQ ID NO: 213771 - DNA, 25 bp, Artificial
  probe
  misc_feature (1)..(25): SEQ ID NO: 989; WAN024FNS_at; Start 1152; Stop 1176
tggagacgccgatgctacttctggc

SEQ ID NO: 213772 - DNA, 25 bp, Artificial
  probe
  misc_feature (1)..(25): SEQ ID NO: 989; WAN024FNS_at; Start 417; Stop 441
cgaattccttcttggtaaagctaag

SEQ ID NO: 213773 - DNA, 25 bp, Artificial
  probe
  misc_feature (1)..(25): SEQ ID NO: 989; WAN024FNS_at; Start 808; Stop 832
caagatccagacactatgttcgcta

SEQ ID NO: 213774 - DNA, 25 bp, Artificial
  probe
  misc_feature (1)..(25): SEQ ID NO: 989; WAN024FNS_at; Start 947; Stop 971
aatacgtccgtacgatcgttccagg

SEQ ID NO: 213775 - DNA, 25 bp, Artificial
  probe
  misc_feature (1)..(25): SEQ ID NO: 989; WAN024FNS_at; Start 593; Stop 617
caatcgctacaaccatcacagaagt

SEQ ID NO: 213776 - DNA, 25 bp, Artificial
  probe
  misc_feature (1)..(25): SEQ ID NO: 989; WAN024FNS_at; Start 1076; Stop 1100
ttgactggtacctaaaagagactgg

SEQ ID NO: 213777 - DNA, 25 bp, Artificial
  probe
  misc_feature (1)..(25): SEQ ID NO: 989; WAN024FNS_at; Start 1222; Stop 1246
gctacagccggtgcaagttactaac

SEQ ID NO: 213778 - DNA, 25 bp, Artificial
  probe
  misc_feature (1)..(25): SEQ ID NO: 989; WAN024FNS_at; Start 831; Stop 855
taaacgtgtaccacctcaatcaggt

SEQ ID NO: 213779 - DNA, 25 bp, Artificial
  probe
  misc_feature (1)..(25): SEQ ID NO: 989; WAN024FNS_at; Start 285; Stop 309
tcatccatttgaaaacaagcctgtt

SEQ ID NO: 213780 - DNA, 25 bp, Artificial
  probe
  misc_feature (1)..(25): SEQ ID NO: 989; WAN024FNS_at; Start 611; Stop 635
cagaagttgaccctgacgatccaga

SEQ ID NO: 213781 - DNA, 25 bp, Artificial
  probe
  misc_feature (1)..(25): SEQ ID NO: 989; WAN024FNS_at; Start 930; Stop 954
tcgcaacggaaaccaagaatacgtc

SEQ ID NO: 213782 - DNA, 25 bp, Artificial
  probe
  misc_feature (1)..(25): SEQ ID NO: 989; WAN024FNS_at; Start 1123; Stop 1147
ggaccatttgctcctgctgccggag

SEQ ID NO: 213783 - DNA, 25 bp, Artificial
  probe
  misc_feature (1)..(25): SEQ ID NO: 989; WAN024FNS_at; Start 749; Stop 773
catttgaattgacatacgctgacga

SEQ ID NO: 213784 - DNA, 25 bp, Artificial
  probe
  misc_feature (1)..(25): SEQ ID NO: 989; WAN024FNS_at; Start 1059; Stop 1083
taacttccaaccatggcttgactgg

SEQ ID NO: 213785 - DNA, 25 bp, Artificial
  probe
  misc_feature (1)..(25): SEQ ID NO: 989; WAN024FNS_at; Start 394; Stop 418
aatgcctacacgcttccaggtaacg

SEQ ID NO: 213786 - DNA, 25 bp, Artificial
  probe
  misc_feature (1)..(25): SEQ ID NO: 989; WAN024FNS_at; Start 1006; Stop 1030
caagcaatgtactatcctgatggat

SEQ ID NO: 213787 - DNA, 25 bp, Artificial
  probe
  misc_feature (1)..(25): SEQ ID NO: 989; WAN024FNS_at; Start 679; Stop 703
gatacctatgtcaaattggaccacg

SEQ ID NO: 213788 - DNA, 25 bp, Artificial
  probe
  misc_feature (1)..(25): SEQ ID NO: 989; WAN024FNS_at; Start 318; Stop 342
gggtgcatcatactatgaccaagga

SEQ ID NO: 213789 - DNA, 25 bp, Artificial
  probe
  misc_feature (1)..(25): SEQ ID NO: 989; WAN024FNS_at; Start 1020; Stop 1044
tcctgatggatcatacgctggtatc

SEQ ID NO: 213790 - DNA, 25 bp, Artificial
  probe
  misc_feature (1)..(25): SEQ ID NO: 989; WAN024FNS_at; Start 877; Stop 901
ggttctcttccaccagcacgtatga

SEQ ID NO: 213791 - DNA, 25 bp, Artificial
  probe
  misc_feature (1)..(25): SEQ ID NO: 989; WAN024FNS_at; Start 334; Stop 358
gaccaaggaacatcacgtgctcaag

SEQ ID NO: 213792 - DNA, 25 bp, Artificial
  probe
  misc_feature (1)..(25): SEQ ID NO: 989; WAN024FNS_at; Start 1167; Stop 1191
tacttctggcgcttctgattcaggg

SEQ ID NO: 213793 - DNA, 25 bp, Artificial
  probe
  misc_feature (1)..(25): SEQ ID NO: 989; WAN024FNS_at; Start 851; Stop 875
caggtagccgtatgtcgactgttca

SEQ ID NO: 213794 - DNA, 25 bp, Artificial
  probe
  misc_feature (1)..(25): SEQ ID NO: 989; WAN024FNS_at; Start 265; Stop 289
gaatggctttcatacgaagttcatc

SEQ ID NO: 213795 - DNA, 25 bp, Artificial
  probe
  misc_feature (1)..(25): SEQ ID NO: 989; WAN024FNS_at; Start 569; Stop 593
cagaagacttggattgtggaaaacc

SEQ ID NO: 213796 - DNA, 25 bp, Artificial
  probe
  misc_feature (1)..(25): SEQ ID NO: 989; WAN024FNS_at; Start 660; Stop 684
cactggtgctgtttctggtgatacc

SEQ ID NO: 213797 - DNA, 25 bp, Artificial
  probe
  misc_feature (1)..(25): SEQ ID NO: 2980; WAN024FNT_at; Start 255; Stop 279
gatgagcgctcttgcttggttgtct

SEQ ID NO: 213798 - DNA, 25 bp, Artificial
  probe
  misc_feature (1)..(25): SEQ ID NO: 2980; WAN024FNT_at; Start 158; Stop 182
tacctgctgaaatattggaaattgc

SEQ ID NO: 213799 - DNA, 25 bp, Artificial
  probe
  misc_feature (1)..(25): SEQ ID NO: 2980; WAN024FNT_at; Start 38; Stop 62
aacgttctacaaaccgtcaattgct

SEQ ID NO: 213800 - DNA, 25 bp, Artificial
  probe
  misc_feature (1)..(25): SEQ ID NO: 2980; WAN024FNT_at; Start 240; Stop 264
tattccagctgttttgatgagcgct

SEQ ID NO: 213801 - DNA, 25 bp, Artificial
  probe
  misc_feature (1)..(25): SEQ ID NO: 2980; WAN024FNT_at; Start 289; Stop 313
tacccacttttgaacaaaccaatca

SEQ ID NO: 213802 - DNA, 25 bp, Artificial
  probe
  misc_feature (1)..(25): SEQ ID NO: 2980; WAN024FNT_at; Start 441; Stop 465
tcaagcatttaacccaagtggcgac

SEQ ID NO: 213803 - DNA, 25 bp, Artificial
  probe
  misc_feature (1)..(25): SEQ ID NO: 2980; WAN024FNT_at; Start 303; Stop 327
caaaccaatcatgattacaggtgct

SEQ ID NO: 213804 - DNA, 25 bp, Artificial
  probe
  misc_feature (1)..(25): SEQ ID NO: 2980; WAN024FNT_at; Start 134; Stop 158
tcaacaaaccagctgacaagcaagt

SEQ ID NO: 213805 - DNA, 25 bp, Artificial
  probe
  misc_feature (1)..(25): SEQ ID NO: 2980; WAN024FNT_at; Start 342; Stop 366
tggttcatctcgtgcccaattgcaa

SEQ ID NO: 213806 - DNA, 25 bp, Artificial
  probe
  misc_feature (1)..(25): SEQ ID NO: 2980; WAN024FNT_at; Start 485; Stop 509
tcaagaaattggatgccatctttga

SEQ ID NO: 213807 - DNA, 25 bp, Artificial
  probe
  misc_feature (1)..(25): SEQ ID NO: 2980; WAN024FNT_at; Start 455; Stop 479
caagtggcgacttggttgaccttga

SEQ ID NO: 213808 - DNA, 25 bp, Artificial
  probe
  misc_feature (1)..(25): SEQ ID NO: 2980; WAN024FNT_at; Start 380; Stop 404
tgaatgctcctgaaatcaaggcaaa

SEQ ID NO: 213809 - DNA, 25 bp, Artificial
  probe
  misc_feature (1)..(25): SEQ ID NO: 2980; WAN024FNT_at; Start 396; Stop 420
caaggcaaatgttcttccagatgaa

SEQ ID NO: 213810 - DNA, 25 bp, Artificial
  probe
  misc_feature (1)..(25): SEQ ID NO: 2980; WAN024FNT_at; Start 174; Stop 198
ggaaattgctgctaaaatcgaagag

SEQ ID NO: 213811 - DNA, 25 bp, Artificial
  probe
  misc_feature (1)..(25): SEQ ID NO: 2980; WAN024FNT_at; Start 352; Stop 376
cgtgcccaattgcaacttcgtcaaa

SEQ ID NO: 213812 - DNA, 25 bp, Artificial
  probe
  misc_feature (1)..(25): SEQ ID NO: 2980; WAN024FNT_at; Start 325; Stop 349
gcttcttacggtacgcttggttcat

SEQ ID NO: 213813 - DNA, 25 bp, Artificial
  probe
  misc_feature (1)..(25): SEQ ID NO: 2980; WAN024FNT_at; Start 49; Stop 73
aaccgtcaattgcttcaatacatgc

SEQ ID NO: 213814 - DNA, 25 bp, Artificial
  probe
  misc_feature (1)..(25): SEQ ID NO: 2980; WAN024FNT_at; Start 217; Stop 241
ggtactcctgagtatgatcactcta

SEQ ID NO: 213815 - DNA, 25 bp, Artificial
  probe
  misc_feature (1)..(25): SEQ ID NO: 2980; WAN024FNT_at; Start 426; Stop 450
gctctcacactctcttcaagcattt

SEQ ID NO: 213816 - DNA, 25 bp, Artificial
  probe
  misc_feature (1)..(25): SEQ ID NO: 2980; WAN024FNT_at; Start 315; Stop 339
gattacaggtgcttcttacggtacg

SEQ ID NO: 213817 - DNA, 25 bp, Artificial
  probe
  misc_feature (1)..(25): SEQ ID NO: 2980; WAN024FNT_at; Start 463; Stop 487
gacttggttgaccttgatgttatca

SEQ ID NO: 213818 - DNA, 25 bp, Artificial
  probe
  misc_feature (1)..(25): SEQ ID NO: 2980; WAN024FNT_at; Start 200; Stop 224
cagatggcgttattatcggtactcc

SEQ ID NO: 213819 - DNA, 25 bp, Artificial
  probe
  misc_feature (1)..(25): SEQ ID NO: 2980; WAN024FNT_at; Start 411; Stop 435
tccagatgaattcttgctctcacac

SEQ ID NO: 213820 - DNA, 25 bp, Artificial
  probe
  misc_feature (1)..(25): SEQ ID NO: 2980; WAN024FNT_at; Start 206; Stop 230
gcgttattatcggtactcctgagta

SEQ ID NO: 213821 - DNA, 25 bp, Artificial
  probe
  misc_feature (1)..(25): SEQ ID NO: 2980; WAN024FNT_at; Start 125; Stop 149
ttcctgtcttcaacaaaccagctga

SEQ ID NO: 213822 - DNA, 25 bp, Artificial
  probe
  misc_feature (1)..(25): SEQ ID NO: 2980; WAN024FNT_at; Start 145; Stop 169
gctgacaagcaagtacctgctgaaa

SEQ ID NO: 213823 - DNA, 25 bp, Artificial
  probe
  misc_feature (1)..(25): SEQ ID NO: 2980; WAN024FNT_at; Start 227; Stop 251
agtatgatcactctattccagctgt

SEQ ID NO: 213824 - DNA, 25 bp, Artificial
  probe
  misc_feature (1)..(25): SEQ ID NO: 2980; WAN024FNT_at; Start 367; Stop 391
cttcgtcaaatcttgaatgctcctg

SEQ ID NO: 213825 - DNA, 25 bp, Artificial
  probe
  misc_feature (1)..(25): SEQ ID NO: 2980; WAN024FNT_at; Start 60; Stop 84
gcttcaatacatgcaaaaacacttt

SEQ ID NO: 213826 - DNA, 25 bp, Artificial
  probe
  misc_feature (1)..(25): SEQ ID NO: 2980; WAN024FNT_at; Start 335; Stop 359
gtacgcttggttcatctcgtgccca

SEQ ID NO: 213827 - DNA, 25 bp, Artificial
  probe
  misc_feature (1)..(25): SEQ ID NO: 2980; WAN024FNT_at; Start 271; Stop 295
tggttgtcttatggtatttacccac

SEQ ID NO: 213828 - DNA, 25 bp, Artificial
  probe
  misc_feature (1)..(25): SEQ ID NO: 2980; WAN024FNT_at; Start 8; Stop 32
aacttattgctattgttggaacaaa

SEQ ID NO: 213829 - DNA, 25 bp, Artificial
  probe
  misc_feature (1)..(25): SEQ ID NO: 2980; WAN024FNT_at; Start 24; Stop 48
tggaacaaattcaaaacgttctaca

SEQ ID NO: 213830 - DNA, 25 bp, Artificial
  probe
  misc_feature (1)..(25): SEQ ID NO: 2980; WAN024FNT_at; Start 496; Stop 520
gatgccatctttgatgacttccgta

SEQ ID NO: 213831 - DNA, 25 bp, Artificial
  probe
  misc_feature (1)..(25): SEQ ID NO: 7541; WAN024FNU_at; Start 162; Stop 186
tgacgaacagcttggacgatatccc

SEQ ID NO: 213832 - DNA, 25 bp, Artificial
  probe
  misc_feature (1)..(25): SEQ ID NO: 7541; WAN024FNU_at; Start 71; Stop 95
tacagggacttgcaaatccttggca

SEQ ID NO: 213833 - DNA, 25 bp, Artificial
  probe
  misc_feature (1)..(25): SEQ ID NO: 7541; WAN024FNU_at; Start 188; Stop 212
tgtccctggttctcctttggtacga

SEQ ID NO: 213834 - DNA, 25 bp, Artificial
  probe
  misc_feature (1)..(25): SEQ ID NO: 7541; WAN024FNU_at; Start 61; Stop 85
ggaccaattctacagggacttgcaa

SEQ ID NO: 213835 - DNA, 25 bp, Artificial
  probe
  misc_feature (1)..(25): SEQ ID NO: 7541; WAN024FNU_at; Start 100; Stop 124
cataaagctcgtcctcacgtaagtt

SEQ ID NO: 213836 - DNA, 25 bp, Artificial
  probe
  misc_feature (1)..(25): SEQ ID NO: 7541; WAN024FNU_at; Start 9; Stop 33
cctccagcagcgaaatttacaactg

SEQ ID NO: 213837 - DNA, 25 bp, Artificial
  probe
  misc_feature (1)..(25): SEQ ID NO: 7541; WAN024FNU_at; Start 96; Stop 120
gcaacataaagctcgtcctcacgta

SEQ ID NO: 213838 - DNA, 25 bp, Artificial
  probe
  misc_feature (1)..(25): SEQ ID NO: 7541; WAN024FNU_at; Start 115; Stop 139
cacgtaagttttgaatgcggcgaat

SEQ ID NO: 213839 - DNA, 25 bp, Artificial
  probe
  misc_feature (1)..(25): SEQ ID NO: 7541; WAN024FNU_at; Start 43; Stop 67
catgttcatgaacatattggaccaa

SEQ ID NO: 213840 - DNA, 25 bp, Artificial
  probe
  misc_feature (1)..(25): SEQ ID NO: 7541; WAN024FNU_at; Start 176; Stop 200
gacgatatcccctgtccctggttct

SEQ ID NO: 213841 - DNA, 25 bp, Artificial
  probe
  misc_feature (1)..(25): SEQ ID NO: 7541; WAN024FNU_at; Start 119; Stop 143
taagttttgaatgcggcgaatttcc

SEQ ID NO: 213842 - DNA, 25 bp, Artificial
  probe
  misc_feature (1)..(25): SEQ ID NO: 7541; WAN024FNU_at; Start 87; Stop 111
tccttggcagcaacataaagctcgt

SEQ ID NO: 213843 - DNA, 25 bp, Artificial
  probe
  misc_feature (1)..(25): SEQ ID NO: 7541; WAN024FNU_at; Start 82; Stop 106
gcaaatccttggcagcaacataaag

SEQ ID NO: 213844 - DNA, 25 bp, Artificial
  probe
  misc_feature (1)..(25): SEQ ID NO: 7541; WAN024FNU_at; Start 31; Stop 55
ctggcaattttccatgttcatgaac

SEQ ID NO: 213845 - DNA, 25 bp, Artificial
  probe
  misc_feature (1)..(25): SEQ ID NO: 7541; WAN024FNU_at; Start 111; Stop 135
tcctcacgtaagttttgaatgcggc

SEQ ID NO: 213846 - DNA, 25 bp, Artificial
  probe
  misc_feature (1)..(25): SEQ ID NO: 7541; WAN024FNU_at; Start 131; Stop 155
gcggcgaatttcctgattcatcata

SEQ ID NO: 213847 - DNA, 25 bp, Artificial
  probe
  misc_feature (1)..(25): SEQ ID NO: 7541; WAN024FNU_at; Start 75; Stop 99
gggacttgcaaatccttggcagcaa

SEQ ID NO: 213848 - DNA, 25 bp, Artificial
  probe
  misc_feature (1)..(25): SEQ ID NO: 7541; WAN024FNU_at; Start 228; Stop 252
tcagcgatacgacgcaaggcttcac

SEQ ID NO: 213849 - DNA, 25 bp, Artificial
  probe
  misc_feature (1)..(25): SEQ ID NO: 7541; WAN024FNU_at; Start 15; Stop 39
gcagcgaaatttacaactggcaatt

SEQ ID NO: 213850 - DNA, 25 bp, Artificial
  probe
  misc_feature (1)..(25): SEQ ID NO: 7541; WAN024FNU_at; Start 205; Stop 229
tggtacgaatcatggaagcaccttc

SEQ ID NO: 213851 - DNA, 25 bp, Artificial
  probe
  misc_feature (1)..(25): SEQ ID NO: 7541; WAN024FNU_at; Start 201; Stop 225
cctttggtacgaatcatggaagcac

SEQ ID NO: 213852 - DNA, 25 bp, Artificial
  probe
  misc_feature (1)..(25): SEQ ID NO: 7541; WAN024FNU_at; Start 217; Stop 241
tggaagcaccttcagcgatacgacg

SEQ ID NO: 213853 - DNA, 25 bp, Artificial
  probe
  misc_feature (1)..(25): SEQ ID NO: 7541; WAN024FNU_at; Start 1; Stop 25
ttgcaacacctccagcagcgaaatt

SEQ ID NO: 213854 - DNA, 25 bp, Artificial
  probe
  misc_feature (1)..(25): SEQ ID NO: 7541; WAN024FNU_at; Start 91; Stop 115
tggcagcaacataaagctcgtcctc

SEQ ID NO: 213855 - DNA, 25 bp, Artificial
  probe
  misc_feature (1)..(25): SEQ ID NO: 7541; WAN024FNU_at; Start 152; Stop 176
catacgcatatgacgaacagcttgg

SEQ ID NO: 213856 - DNA, 25 bp, Artificial
  probe
  misc_feature (1)..(25): SEQ ID NO: 7541; WAN024FNU_at; Start 195; Stop 219
ggttctcctttggtacgaatcatgg

SEQ ID NO: 213857 - DNA, 25 bp, Artificial
  probe
  misc_feature (1)..(25): SEQ ID NO: 7541; WAN024FNU_at; Start 157; Stop 181
gcatatgacgaacagcttggacgat

SEQ ID NO: 213858 - DNA, 25 bp, Artificial
  probe
  misc_feature (1)..(25): SEQ ID NO: 7541; WAN024FNU_at; Start 211; Stop 235
gaatcatggaagcaccttcagcgat

SEQ ID NO: 213859 - DNA, 25 bp, Artificial
  probe
  misc_feature (1)..(25): SEQ ID NO: 7541; WAN024FNU_at; Start 142; Stop 166
cctgattcatcatacgcatatgacg

SEQ ID NO: 213860 - DNA, 25 bp, Artificial
  probe
  misc_feature (1)..(25): SEQ ID NO: 7541; WAN024FNU_at; Start 240; Stop 264
cgcaaggcttcacccaaatccttag

SEQ ID NO: 213861 - DNA, 25 bp, Artificial
  probe
  misc_feature (1)..(25): SEQ ID NO: 7541; WAN024FNU_at; Start 233; Stop 257
gatacgacgcaaggcttcacccaaa

SEQ ID NO: 213862 - DNA, 25 bp, Artificial
  probe
  misc_feature (1)..(25): SEQ ID NO: 7541; WAN024FNU_at; Start 222; Stop 246
gcaccttcagcgatacgacgcaagg

SEQ ID NO: 213863 - DNA, 25 bp, Artificial
  probe
  misc_feature (1)..(25): SEQ ID NO: 7541; WAN024FNU_at; Start 166; Stop 190
gaacagcttggacgatatcccctgt

SEQ ID NO: 213864 - DNA, 25 bp, Artificial
  probe
  misc_feature (1)..(25): SEQ ID NO: 7541; WAN024FNU_at; Start 55; Stop 79
catattggaccaattctacagggac

SEQ ID NO: 213865 - DNA, 25 bp, Artificial
  probe
  misc_feature (1)..(25): SEQ ID NO: 1996; WAN024FNV_at; Start 67; Stop 91
tgggtcgctcatgcgggaaactcct

SEQ ID NO: 213866 - DNA, 25 bp, Artificial
  probe
  misc_feature (1)..(25): SEQ ID NO: 1996; WAN024FNV_at; Start 53; Stop 77
tccttaatcatctttgggtcgctca

SEQ ID NO: 213867 - DNA, 25 bp, Artificial
  probe
  misc_feature (1)..(25): SEQ ID NO: 1996; WAN024FNV_at; Start 102; Stop 126
gaatatcagccggaattcgttccaa

SEQ ID NO: 213868 - DNA, 25 bp, Artificial
  probe
  misc_feature (1)..(25): SEQ ID NO: 1996; WAN024FNV_at; Start 25; Stop 49
tactggaatactaaccgcttcttgg

SEQ ID NO: 213869 - DNA, 25 bp, Artificial
  probe
  misc_feature (1)..(25): SEQ ID NO: 1996; WAN024FNV_at; Start 113; Stop 137
ggaattcgttccaaggccatcacag

SEQ ID NO: 213870 - DNA, 25 bp, Artificial
  probe
  misc_feature (1)..(25): SEQ ID NO: 1996; WAN024FNV_at; Start 2; Stop 26
tgcccgattctgaccttagccatta

SEQ ID NO: 213871 - DNA, 25 bp, Artificial
  probe
  misc_feature (1)..(25): SEQ ID NO: 1996; WAN024FNV_at; Start 149; Stop 173
gcagcttctgcgatacgagcctgtt

SEQ ID NO: 213872 - DNA, 25 bp, Artificial
  probe
  misc_feature (1)..(25): SEQ ID NO: 1996; WAN024FNV_at; Start 160; Stop 184
gatacgagcctgttcaggattctgc

SEQ ID NO: 213873 - DNA, 25 bp, Artificial
  probe
  misc_feature (1)..(25): SEQ ID NO: 1996; WAN024FNV_at; Start 165; Stop 189
gagcctgttcaggattctgcacatc

SEQ ID NO: 213874 - DNA, 25 bp, Artificial
  probe
  misc_feature (1)..(25): SEQ ID NO: 1996; WAN024FNV_at; Start 63; Stop 87
tctttgggtcgctcatgcgggaaac

SEQ ID NO: 213875 - DNA, 25 bp, Artificial
  probe
  misc_feature (1)..(25): SEQ ID NO: 1996; WAN024FNV_at; Start 27; Stop 51
ctggaatactaaccgcttcttggat

SEQ ID NO: 213876 - DNA, 25 bp, Artificial
  probe
  misc_feature (1)..(25): SEQ ID NO: 1996; WAN024FNV_at; Start 115; Stop 139
aattcgttccaaggccatcacagct

SEQ ID NO: 213877 - DNA, 25 bp, Artificial
  probe
  misc_feature (1)..(25): SEQ ID NO: 1996; WAN024FNV_at; Start 143; Stop 167
gcaccagcagcttctgcgatacgag

SEQ ID NO: 213878 - DNA, 25 bp, Artificial
  probe
  misc_feature (1)..(25): SEQ ID NO: 1996; WAN024FNV_at; Start 38; Stop 62
accgcttcttggatttccttaatca

SEQ ID NO: 213879 - DNA, 25 bp, Artificial
  probe
  misc_feature (1)..(25): SEQ ID NO: 1996; WAN024FNV_at; Start 83; Stop 107
gaaactcctccagctgcacgaatat

SEQ ID NO: 213880 - DNA, 25 bp, Artificial
  probe
  misc_feature (1)..(25): SEQ ID NO: 1996; WAN024FNV_at; Start 155; Stop 179
tctgcgatacgagcctgttcaggat

SEQ ID NO: 213881 - DNA, 25 bp, Artificial
  probe
  misc_feature (1)..(25): SEQ ID NO: 1996; WAN024FNV_at; Start 139; Stop 163
tgccgcaccagcagcttctgcgata

SEQ ID NO: 213882 - DNA, 25 bp, Artificial
  probe
  misc_feature (1)..(25): SEQ ID NO: 1996; WAN024FNV_at; Start 210; Stop 234
gcatctgtgccaagtttttatttag

SEQ ID NO: 213883 - DNA, 25 bp, Artificial
  probe
  misc_feature (1)..(25): SEQ ID NO: 1996; WAN024FNV_at; Start 170; Stop 194
tgttcaggattctgcacatccataa

SEQ ID NO: 213884 - DNA, 25 bp, Artificial
  probe
  misc_feature (1)..(25): SEQ ID NO: 1996; WAN024FNV_at; Start 177; Stop 201
gattctgcacatccataataacacc

SEQ ID NO: 213885 - DNA, 25 bp, Artificial
  probe
  misc_feature (1)..(25): SEQ ID NO: 1996; WAN024FNV_at; Start 91; Stop 115
tccagctgcacgaatatcagccgga

SEQ ID NO: 213886 - DNA, 25 bp, Artificial
  probe
  misc_feature (1)..(25): SEQ ID NO: 1996; WAN024FNV_at; Start 58; Stop 82
aatcatctttgggtcgctcatgcgg

SEQ ID NO: 213887 - DNA, 25 bp, Artificial
  probe
  misc_feature (1)..(25): SEQ ID NO: 1996; WAN024FNV_at; Start 81; Stop 105
gggaaactcctccagctgcacgaat

SEQ ID NO: 213888 - DNA, 25 bp, Artificial
  probe
  misc_feature (1)..(25): SEQ ID NO: 1996; WAN024FNV_at; Start 195; Stop 219
taacaccacccttgagcatctgtgc

SEQ ID NO: 213889 - DNA, 25 bp, Artificial
  probe
  misc_feature (1)..(25): SEQ ID NO: 1996; WAN024FNV_at; Start 199; Stop 223
accacccttgagcatctgtgccaag

SEQ ID NO: 213890 - DNA, 25 bp, Artificial
  probe
  misc_feature (1)..(25): SEQ ID NO: 1996; WAN024FNV_at; Start 152; Stop 176
gcttctgcgatacgagcctgttcag

SEQ ID NO: 213891 - DNA, 25 bp, Artificial
  probe
  misc_feature (1)..(25): SEQ ID NO: 1996; WAN024FNV_at; Start 110; Stop 134
gccggaattcgttccaaggccatca

SEQ ID NO: 213892 - DNA, 25 bp, Artificial
  probe
  misc_feature (1)..(25): SEQ ID NO: 1996; WAN024FNV_at; Start 186; Stop 210
catccataataacaccacccttgag

SEQ ID NO: 213893 - DNA, 25 bp, Artificial
  probe
  misc_feature (1)..(25): SEQ ID NO: 1996; WAN024FNV_at; Start 95; Stop 119
gctgcacgaatatcagccggaattc

SEQ ID NO: 213894 - DNA, 25 bp, Artificial
  probe
  misc_feature (1)..(25): SEQ ID NO: 1996; WAN024FNV_at; Start 203; Stop 227
cccttgagcatctgtgccaagtttt

SEQ ID NO: 213895 - DNA, 25 bp, Artificial
  probe
  misc_feature (1)..(25): SEQ ID NO: 1996; WAN024FNV_at; Start 7; Stop 31
gattctgaccttagccattactgga

SEQ ID NO: 213896 - DNA, 25 bp, Artificial
  probe
  misc_feature (1)..(25): SEQ ID NO: 1996; WAN024FNV_at; Start 18; Stop 42
tagccattactggaatactaaccgc

SEQ ID NO: 213897 - DNA, 25 bp, Artificial
  probe
  misc_feature (1)..(25): SEQ ID NO: 1996; WAN024FNV_at; Start 105; Stop 129
tatcagccggaattcgttccaaggc

SEQ ID NO: 213898 - DNA, 25 bp, Artificial
  probe
  misc_feature (1)..(25): SEQ ID NO: 1996; WAN024FNV_at; Start 74; Stop 98
ctcatgcgggaaactcctccagctg

SEQ ID NO: 213899 - DNA, 25 bp, Artificial
  probe
  misc_feature (1)..(25): SEQ ID NO: 1744; WAN024FNW_at; Start 379; Stop 403
caagttccttttgtctgtggtgcta

SEQ ID NO: 213900 - DNA, 25 bp, Artificial
  probe
  misc_feature (1)..(25): SEQ ID NO: 1744; WAN024FNW_at; Start 155; Stop 179
gaattccggctgatattcgtgcagc

SEQ ID NO: 213901 - DNA, 25 bp, Artificial
  probe
  misc_feature (1)..(25): SEQ ID NO: 1744; WAN024FNW_at; Start 312; Stop 336
ttatatcgacgagagtgaagttcta

SEQ ID NO: 213902 - DNA, 25 bp, Artificial
  probe
  misc_feature (1)..(25): SEQ ID NO: 1744; WAN024FNW_at; Start 415; Stop 439
gaagccttgcgtcgtatcgctgaag

SEQ ID NO: 213903 - DNA, 25 bp, Artificial
  probe
  misc_feature (1)..(25): SEQ ID NO: 1744; WAN024FNW_at; Start 758; Stop 782
cgagtgccattgttaaggctgtgac

SEQ ID NO: 213904 - DNA, 25 bp, Artificial
  probe
  misc_feature (1)..(25): SEQ ID NO: 1744; WAN024FNW_at; Start 212; Stop 236
tgattaaggaaatccaagaagcggt

SEQ ID NO: 213905 - DNA, 25 bp, Artificial
  probe
  misc_feature (1)..(25): SEQ ID NO: 1744; WAN024FNW_at; Start 434; Stop 458
ctgaaggtgcttccatgattcgtac

SEQ ID NO: 213906 - DNA, 25 bp, Artificial
  probe
  misc_feature (1)..(25): SEQ ID NO: 1744; WAN024FNW_at; Start 41; Stop 65
taaataaaaacttggcacagatgct

SEQ ID NO: 213907 - DNA, 25 bp, Artificial
  probe
  misc_feature (1)..(25): SEQ ID NO: 1744; WAN024FNW_at; Start 341; Stop 365
cagctgatgaccgtttccatgtgga

SEQ ID NO: 213908 - DNA, 25 bp, Artificial
  probe
  misc_feature (1)..(25): SEQ ID NO: 1744; WAN024FNW_at; Start 722; Stop 746
caggtattttcaagtcaggagatcc

SEQ ID NO: 213909 - DNA, 25 bp, Artificial
  probe
  misc_feature (1)..(25): SEQ ID NO: 1744; WAN024FNW_at; Start 582; Stop 606
gcaagtccctgtagaattggtccaa

SEQ ID NO: 213910 - DNA, 25 bp, Artificial
  probe
  misc_feature (1)..(25): SEQ ID NO: 1744; WAN024FNW_at; Start 168; Stop 192
tattcgtgcagctggaggagtttcc

SEQ ID NO: 213911 - DNA, 25 bp, Artificial
  probe
  misc_feature (1)..(25): SEQ ID NO: 1744; WAN024FNW_at; Start 263; Stop 287
gaatcgggcattttgttgaagctca

SEQ ID NO: 213912 - DNA, 25 bp, Artificial
  probe
  misc_feature (1)..(25): SEQ ID NO: 1744; WAN024FNW_at; Start 56; Stop 80
cacagatgctcaagggtggtgttat

SEQ ID NO: 213913 - DNA, 25 bp, Artificial
  probe
  misc_feature (1)..(25): SEQ ID NO: 1744; WAN024FNW_at; Start 644; Stop 668
tcgctgctggaggtgttgcaacgcc

SEQ ID NO: 213914 - DNA, 25 bp, Artificial
  probe
  misc_feature (1)..(25): SEQ ID NO: 1744; WAN024FNW_at; Start 744; Stop 768
tcctgttaaacgagcgagtgccatt

SEQ ID NO: 213915 - DNA, 25 bp, Artificial
  probe
  misc_feature (1)..(25): SEQ ID NO: 1744; WAN024FNW_at; Start 610; Stop 634
gttcatgaacatggaaaattgccag

SEQ ID NO: 213916 - DNA, 25 bp, Artificial
  probe
  misc_feature (1)..(25): SEQ ID NO: 1744; WAN024FNW_at; Start 657; Stop 681
tgttgcaacgccagcagatgctgcg

SEQ ID NO: 213917 - DNA, 25 bp, Artificial
  probe
  misc_feature (1)..(25): SEQ ID NO: 1744; WAN024FNW_at; Start 626; Stop 650
aattgccagttgtaaatttcgctgc

SEQ ID NO: 213918 - DNA, 25 bp, Artificial
  probe
  misc_feature (1)..(25): SEQ ID NO: 1744; WAN024FNW_at; Start 489; Stop 513
ccaagctgttcgtcatatgcgtatg

SEQ ID NO: 213919 - DNA, 25 bp, Artificial
  probe
  misc_feature (1)..(25): SEQ ID NO: 1744; WAN024FNW_at; Start 226; Stop 250
caagaagcggttagtattccagtaa

SEQ ID NO: 213920 - DNA, 25 bp, Artificial
  probe
  misc_feature (1)..(25): SEQ ID NO: 1744; WAN024FNW_at; Start 510; Stop 534
tatgatgaatcaggaaattcgccgc

SEQ ID NO: 213921 - DNA, 25 bp, Artificial
  probe
  misc_feature (1)..(25): SEQ ID NO: 1744; WAN024FNW_at; Start 670; Stop 694
gcagatgctgcgttaatgatgcaat

SEQ ID NO: 213922 - DNA, 25 bp, Artificial
  probe
  misc_feature (1)..(25): SEQ ID NO: 1744; WAN024FNW_at; Start 85; Stop 109
gatgtgcagaatcctgaacaggctc

SEQ ID NO: 213923 - DNA, 25 bp, Artificial
  probe
  misc_feature (1)..(25): SEQ ID NO: 1744; WAN024FNW_at; Start 183; Stop 207
aggagtttcccgcatgagcgaccca

SEQ ID NO: 213924 - DNA, 25 bp, Artificial
  probe
  misc_feature (1)..(25): SEQ ID NO: 1744; WAN024FNW_at; Start 863; Stop 887
tccaaattctcatggctgaacgagg

SEQ ID NO: 213925 - DNA, 25 bp, Artificial
  probe
  misc_feature (1)..(25): SEQ ID NO: 1744; WAN024FNW_at; Start 140; Stop 164
tgatggccttggaacgaattccggc

SEQ ID NO: 213926 - DNA, 25 bp, Artificial
  probe
  misc_feature (1)..(25): SEQ ID NO: 1744; WAN024FNW_at; Start 567; Stop 591
tgctgccaaggatttgcaagtccct

SEQ ID NO: 213927 - DNA, 25 bp, Artificial
  probe
  misc_feature (1)..(25): SEQ ID NO: 1744; WAN024FNW_at; Start 545; Stop 569
tacgtgaggacgagctttatgttgc

SEQ ID NO: 213928 - DNA, 25 bp, Artificial
  probe
  misc_feature (1)..(25): SEQ ID NO: 1744; WAN024FNW_at; Start 817; Stop 841
tctgaagatttaggagaagccatgg

SEQ ID NO: 213929 - DNA, 25 bp, Artificial
  probe
  misc_feature (1)..(25): SEQ ID NO: 1744; WAN024FNW_at; Start 774; Stop 798
ggctgtgactaacttccgtaatcct

SEQ ID NO: 213930 - DNA, 25 bp, Artificial
  probe
  misc_feature (1)..(25): SEQ ID NO: 1744; WAN024FNW_at; Start 248; Stop 272
taatggctaaggtcagaatcgggca

SEQ ID NO: 213931 - DNA, 25 bp, Artificial
  probe
  misc_feature (1)..(25): SEQ ID NO: 1744; WAN024FNW_at; Start 327; Stop 351
tgaagttctatctccagctgatgac

SEQ ID NO: 213932 - DNA, 25 bp, Artificial
  probe
  misc_feature (1)..(25): SEQ ID NO: 1744; WAN024FNW_at; Start 197; Stop 221
tgagcgacccaaagatgattaagga

SEQ ID NO: 213933 - DNA, 25 bp, Artificial
  probe
  misc_feature (1)..(25): SEQ ID NO: 765; WAN024FNX_at; Start 158; Stop 182
caaccatgggcaagctcttacgtga

SEQ ID NO: 213934 - DNA, 25 bp, Artificial
  probe
  misc_feature (1)..(25): SEQ ID NO: 765; WAN024FNX_at; Start 347; Stop 371
taggaagtttctacacggaagcaga

SEQ ID NO: 213935 - DNA, 25 bp, Artificial
  probe
  misc_feature (1)..(25): SEQ ID NO: 765; WAN024FNX_at; Start 226; Stop 250
ttaccagtgtttgggacctgtgcgg

SEQ ID NO: 213936 - DNA, 25 bp, Artificial
  probe
  misc_feature (1)..(25): SEQ ID NO: 765; WAN024FNX_at; Start 465; Stop 489
caatcaaattgttgcagcccaagaa

SEQ ID NO: 213937 - DNA, 25 bp, Artificial
  probe
  misc_feature (1)..(25): SEQ ID NO: 765; WAN024FNX_at; Start 375; Stop 399
taagggagttggcaagattccaatg

SEQ ID NO: 213938 - DNA, 25 bp, Artificial
  probe
  misc_feature (1)..(25): SEQ ID NO: 765; WAN024FNX_at; Start 360; Stop 384
cacggaagcagaatgtaagggagtt

SEQ ID NO: 213939 - DNA, 25 bp, Artificial
  probe
  misc_feature (1)..(25): SEQ ID NO: 765; WAN024FNX_at; Start 415; Stop 439
ccgattatcagtagtgttggtgagg

SEQ ID NO: 213940 - DNA, 25 bp, Artificial
  probe
  misc_feature (1)..(25): SEQ ID NO: 765; WAN024FNX_at; Start 501; Stop 525
ggtaagttcttttcatccagaattg

SEQ ID NO: 213941 - DNA, 25 bp, Artificial
  probe
  misc_feature (1)..(25): SEQ ID NO: 765; WAN024FNX_at; Start 336; Stop 360
tgggcgccaattaggaagtttctac

SEQ ID NO: 213942 - DNA, 25 bp, Artificial
  probe
  misc_feature (1)..(25): SEQ ID NO: 765; WAN024FNX_at; Start 179; Stop 203
gtgaccagaacatgctacttcccat

SEQ ID NO: 213943 - DNA, 25 bp, Artificial
  probe
  misc_feature (1)..(25): SEQ ID NO: 765; WAN024FNX_at; Start 405; Stop 429
tatccgtggtccgattatcagtagt

SEQ ID NO: 213944 - DNA, 25 bp, Artificial
  probe
  misc_feature (1)..(25): SEQ ID NO: 765; WAN024FNX_at; Start 108; Stop 132
gcaagatcagagtgacttgtcgggt

SEQ ID NO: 213945 - DNA, 25 bp, Artificial
  probe
  misc_feature (1)..(25): SEQ ID NO: 765; WAN024FNX_at; Start 45; Stop 69
tgcaaaagtgctagatcaattaggt

SEQ ID NO: 213946 - DNA, 25 bp, Artificial
  probe
  misc_feature (1)..(25): SEQ ID NO: 765; WAN024FNX_at; Start 6; Stop 30
aatcggaatattggccttgcaaggg

SEQ ID NO: 213947 - DNA, 25 bp, Artificial
  probe
  misc_feature (1)..(25): SEQ ID NO: 765; WAN024FNX_at; Start 149; Stop 173
gtgagtctacaaccatgggcaagct

SEQ ID NO: 213948 - DNA, 25 bp, Artificial
  probe
  misc_feature (1)..(25): SEQ ID NO: 765; WAN024FNX_at; Start 297; Stop 321
tctaggaactatggatatggtggtc

SEQ ID NO: 213949 - DNA, 25 bp, Artificial
  probe
  misc_feature (1)..(25): SEQ ID NO: 765; WAN024FNX_at; Start 135; Stop 159
gattttgcctggtggtgagtctaca

SEQ ID NO: 213950 - DNA, 25 bp, Artificial
  probe
  misc_feature (1)..(25): SEQ ID NO: 765; WAN024FNX_at; Start 29; Stop 53
gggcctttgcagaacatgcaaaagt

SEQ ID NO: 213951 - DNA, 25 bp, Artificial
  probe
  misc_feature (1)..(25): SEQ ID NO: 765; WAN024FNX_at; Start 390; Stop 414
gattccaatgacctttatccgtggt

SEQ ID NO: 213952 - DNA, 25 bp, Artificial
  probe
  misc_feature (1)..(25): SEQ ID NO: 765; WAN024FNX_at; Start 121; Stop 145
gacttgtcgggtttgattttgcctg

SEQ ID NO: 213953 - DNA, 25 bp, Artificial
  probe
  misc_feature (1)..(25): SEQ ID NO: 765; WAN024FNX_at; Start 270; Stop 294
ggaaatcacttctcagaaagagagt

SEQ ID NO: 213954 - DNA, 25 bp, Artificial
  probe
  misc_feature (1)..(25): SEQ ID NO: 765; WAN024FNX_at; Start 536; Stop 560
tgcgcttgcaccagtactttatcaa

SEQ ID NO: 213955 - DNA, 25 bp, Artificial
  probe
  misc_feature (1)..(25): SEQ ID NO: 765; WAN024FNX_at; Start 86; Stop 110
tcagaaatctagatgattttcagca

SEQ ID NO: 213956 - DNA, 25 bp, Artificial
  probe
  misc_feature (1)..(25): SEQ ID NO: 765; WAN024FNX_at; Start 525; Stop 549
gactgatgatgtgcgcttgcaccag

SEQ ID NO: 213957 - DNA, 25 bp, Artificial
  probe
  misc_feature (1)..(25): SEQ ID NO: 765; WAN024FNX_at; Start 166; Stop 190
ggcaagctcttacgtgaccagaaca

SEQ ID NO: 213958 - DNA, 25 bp, Artificial
  probe
  misc_feature (1)..(25): SEQ ID NO: 765; WAN024FNX_at; Start 254; Stop 278
taattttgctggctaaggaaatcac

SEQ ID NO: 213959 - DNA, 25 bp, Artificial
  probe
  misc_feature (1)..(25): SEQ ID NO: 765; WAN024FNX_at; Start 71; Stop 95
tcgagagtgtagaactcagaaatct

SEQ ID NO: 213960 - DNA, 25 bp, Artificial
  probe
  misc_feature (1)..(25): SEQ ID NO: 765; WAN024FNX_at; Start 205; Stop 229
cgagaagccattctatctggcttac

SEQ ID NO: 213961 - DNA, 25 bp, Artificial
  probe
  misc_feature (1)..(25): SEQ ID NO: 765; WAN024FNX_at; Start 220; Stop 244
tctggcttaccagtgtttgggacct

SEQ ID NO: 213962 - DNA, 25 bp, Artificial
  probe
  misc_feature (1)..(25): SEQ ID NO: 765; WAN024FNX_at; Start 516; Stop 540
tccagaattgactgatgatgtgcgc

SEQ ID NO: 213963 - DNA, 25 bp, Artificial
  probe
  misc_feature (1)..(25): SEQ ID NO: 765; WAN024FNX_at; Start 305; Stop 329
ctatggatatggtggtcgagcgtaa

SEQ ID NO: 213964 - DNA, 25 bp, Artificial
  probe
  misc_feature (1)..(25): SEQ ID NO: 765; WAN024FNX_at; Start 282; Stop 306
tcagaaagagagtcatctaggaact

SEQ ID NO: 213965 - DNA, 25 bp, Artificial
  probe
  misc_feature (1)..(25): SEQ ID NO: 765; WAN024FNX_at; Start 100; Stop 124
gattttcagcaagatcagagtgact

SEQ ID NO: 213966 - DNA, 25 bp, Artificial
  probe
  misc_feature (1)..(25): SEQ ID NO: 765; WAN024FNX_at; Start 61; Stop 85
caattaggtgtcgagagtgtagaac

SEQ ID NO: 213967 - DNA, 25 bp, Artificial
  probe
  misc_feature (1)..(25): SEQ ID NO: 6864; WAN024FNY_at; Start 67; Stop 91
tctattttaaatggtgagtataact

SEQ ID NO: 213968 - DNA, 25 bp, Artificial
  probe
  misc_feature (1)..(25): SEQ ID NO: 6864; WAN024FNY_at; Start 143; Stop 167
gcttgaaagtgtttagtaaggagac

SEQ ID NO: 213969 - DNA, 25 bp, Artificial
  probe
  misc_feature (1)..(25): SEQ ID NO: 6864; WAN024FNY_at; Start 126; Stop 150
gaatgaggaaagtaaacgcttgaaa

SEQ ID NO: 213970 - DNA, 25 bp, Artificial
  probe
  misc_feature (1)..(25): SEQ ID NO: 6864; WAN024FNY_at; Start 142; Stop 166
cgcttgaaagtgtttagtaaggaga

SEQ ID NO: 213971 - DNA, 25 bp, Artificial
  probe
  misc_feature (1)..(25): SEQ ID NO: 6864; WAN024FNY_at; Start 27; Stop 51
tattgaagagaagactgaagaagaa

SEQ ID NO: 213972 - DNA, 25 bp, Artificial
  probe
  misc_feature (1)..(25): SEQ ID NO: 6864; WAN024FNY_at; Start 147; Stop 171
gaaagtgtttagtaaggagacgcac

SEQ ID NO: 213973 - DNA, 25 bp, Artificial
  probe
  misc_feature (1)..(25): SEQ ID NO: 6864; WAN024FNY_at; Start 21; Stop 45
tgtacttattgaagagaagactgaa

SEQ ID NO: 213974 - DNA, 25 bp, Artificial
  probe
  misc_feature (1)..(25): SEQ ID NO: 6864; WAN024FNY_at; Start 109; Stop 133
cgtagattaagacgactgaatgagg

SEQ ID NO: 213975 - DNA, 25 bp, Artificial
  probe
  misc_feature (1)..(25): SEQ ID NO: 6864; WAN024FNY_at; Start 100; Stop 124
gatgtaagtcgtagattaagacgac

SEQ ID NO: 213976 - DNA, 25 bp, Artificial
  probe
  misc_feature (1)..(25): SEQ ID NO: 6864; WAN024FNY_at; Start 28; Stop 52
attgaagagaagactgaagaagaaa

SEQ ID NO: 213977 - DNA, 25 bp, Artificial
  probe
  misc_feature (1)..(25): SEQ ID NO: 6864; WAN024FNY_at; Start 79; Stop 103
ggtgagtataacttatctgatgatg

SEQ ID NO: 213978 - DNA, 25 bp, Artificial
  probe
  misc_feature (1)..(25): SEQ ID NO: 6864; WAN024FNY_at; Start 145; Stop 169
ttgaaagtgtttagtaaggagacgc

SEQ ID NO: 213979 - DNA, 25 bp, Artificial
  probe
  misc_feature (1)..(25): SEQ ID NO: 6864; WAN024FNY_at; Start 113; Stop 137
gattaagacgactgaatgaggaaag

SEQ ID NO: 213980 - DNA, 25 bp, Artificial
  probe
  misc_feature (1)..(25): SEQ ID NO: 6864; WAN024FNY_at; Start 74; Stop 98
taaatggtgagtataacttatctga

SEQ ID NO: 213981 - DNA, 25 bp, Artificial
  probe
  misc_feature (1)..(25): SEQ ID NO: 6864; WAN024FNY_at; Start 25; Stop 49
cttattgaagagaagactgaagaag

SEQ ID NO: 213982 - DNA, 25 bp, Artificial
  probe
  misc_feature (1)..(25): SEQ ID NO: 6864; WAN024FNY_at; Start 116; Stop 140
taagacgactgaatgaggaaagtaa

SEQ ID NO: 213983 - DNA, 25 bp, Artificial
  probe
  misc_feature (1)..(25): SEQ ID NO: 6864; WAN024FNY_at; Start 23; Stop 47
tacttattgaagagaagactgaaga

SEQ ID NO: 213984 - DNA, 25 bp, Artificial
  probe
  misc_feature (1)..(25): SEQ ID NO: 6864; WAN024FNY_at; Start 111; Stop 135
tagattaagacgactgaatgaggaa

SEQ ID NO: 213985 - DNA, 25 bp, Artificial
  probe
  misc_feature (1)..(25): SEQ ID NO: 6864; WAN024FNY_at; Start 76; Stop 100
aatggtgagtataacttatctgatg

SEQ ID NO: 213986 - DNA, 25 bp, Artificial
  probe
  misc_feature (1)..(25): SEQ ID NO: 6864; WAN024FNY_at; Start 97; Stop 121
gatgatgtaagtcgtagattaagac

SEQ ID NO: 213987 - DNA, 25 bp, Artificial
  probe
  misc_feature (1)..(25): SEQ ID NO: 6864; WAN024FNY_at; Start 129; Stop 153
tgaggaaagtaaacgcttgaaagtg

SEQ ID NO: 213988 - DNA, 25 bp, Artificial
  probe
  misc_feature (1)..(25): SEQ ID NO: 6864; WAN024FNY_at; Start 121; Stop 145
cgactgaatgaggaaagtaaacgct

SEQ ID NO: 213989 - DNA, 25 bp, Artificial
  probe
  misc_feature (1)..(25): SEQ ID NO: 6864; WAN024FNY_at; Start 94; Stop 118
tctgatgatgtaagtcgtagattaa

SEQ ID NO: 213990 - DNA, 25 bp, Artificial
  probe
  misc_feature (1)..(25): SEQ ID NO: 6864; WAN024FNY_at; Start 124; Stop 148
ctgaatgaggaaagtaaacgcttga

SEQ ID NO: 213991 - DNA, 25 bp, Artificial
  probe
  misc_feature (1)..(25): SEQ ID NO: 6864; WAN024FNY_at; Start 119; Stop 143
gacgactgaatgaggaaagtaaacg

SEQ ID NO: 213992 - DNA, 25 bp, Artificial
  probe
  misc_feature (1)..(25): SEQ ID NO: 6864; WAN024FNY_at; Start 123; Stop 147
actgaatgaggaaagtaaacgcttg

SEQ ID NO: 213993 - DNA, 25 bp, Artificial
  probe
  misc_feature (1)..(25): SEQ ID NO: 6864; WAN024FNY_at; Start 87; Stop 111
taacttatctgatgatgtaagtcgt

SEQ ID NO: 213994 - DNA, 25 bp, Artificial
  probe
  misc_feature (1)..(25): SEQ ID NO: 6864; WAN024FNY_at; Start 90; Stop 114
cttatctgatgatgtaagtcgtaga

SEQ ID NO: 213995 - DNA, 25 bp, Artificial
  probe
  misc_feature (1)..(25): SEQ ID NO: 6864; WAN024FNY_at; Start 115; Stop 139
ttaagacgactgaatgaggaaagta

SEQ ID NO: 213996 - DNA, 25 bp, Artificial
  probe
  misc_feature (1)..(25): SEQ ID NO: 6864; WAN024FNY_at; Start 82; Stop 106
gagtataacttatctgatgatgtaa

SEQ ID NO: 213997 - DNA, 25 bp, Artificial
  probe
  misc_feature (1)..(25): SEQ ID NO: 6864; WAN024FNY_at; Start 122; Stop 146
gactgaatgaggaaagtaaacgctt

SEQ ID NO: 213998 - DNA, 25 bp, Artificial
  probe
  misc_feature (1)..(25): SEQ ID NO: 6864; WAN024FNY_at; Start 104; Stop 128
taagtcgtagattaagacgactgaa

SEQ ID NO: 213999 - DNA, 25 bp, Artificial
  probe
  misc_feature (1)..(25): SEQ ID NO: 6864; WAN024FNY_at; Start 102; Stop 126
tgtaagtcgtagattaagacgactg

SEQ ID NO: 214000 - DNA, 25 bp, Artificial
  probe
  misc_feature (1)..(25): SEQ ID NO: 6864; WAN024FNY_at; Start 125; Stop 149
tgaatgaggaaagtaaacgcttgaa

SEQ ID NO: 214001 - DNA, 25 bp, Artificial
  probe
  misc_feature (1)..(25): SEQ ID NO: 7023; WAN024FNZ_at; Start 9; Stop 33
tttcttcatcagttttctcttcaac

SEQ ID NO: 214002 - DNA, 25 bp, Artificial
  probe
  misc_feature (1)..(25): SEQ ID NO: 7023; WAN024FNZ_at; Start 3; Stop 27
gttgtttttcttcatcagttttctc

SEQ ID NO: 214003 - DNA, 25 bp, Artificial
  probe
  misc_feature (1)..(25): SEQ ID NO: 7023; WAN024FNZ_at; Start 21; Stop 45
ttttctcttcaacaagtacatcttt

SEQ ID NO: 214004 - DNA, 25 bp, Artificial
  probe
  misc_feature (1)..(25): SEQ ID NO: 7023; WAN024FNZ_at; Start 10; Stop 34
ttcttcatcagttttctcttcaaca

SEQ ID NO: 214005 - DNA, 25 bp, Artificial
  probe
  misc_feature (1)..(25): SEQ ID NO: 7023; WAN024FNZ_at; Start 54; Stop 78
ctaccattattcacacctcattggt

SEQ ID NO: 214006 - DNA, 25 bp, Artificial
  probe
  misc_feature (1)..(25): SEQ ID NO: 7023; WAN024FNZ_at; Start 18; Stop 42
cagttttctcttcaacaagtacatc

SEQ ID NO: 214007 - DNA, 25 bp, Artificial
  probe
  misc_feature (1)..(25): SEQ ID NO: 7023; WAN024FNZ_at; Start 48; Stop 72
aaattactaccattattcacacctc

SEQ ID NO: 214008 - DNA, 25 bp, Artificial
  probe
  misc_feature (1)..(25): SEQ ID NO: 7023; WAN024FNZ_at; Start 23; Stop 47
ttctcttcaacaagtacatctttaa

SEQ ID NO: 214009 - DNA, 25 bp, Artificial
  probe
  misc_feature (1)..(25): SEQ ID NO: 7023; WAN024FNZ_at; Start 2; Stop 26
tgttgtttttcttcatcagttttct

SEQ ID NO: 214010 - DNA, 25 bp, Artificial
  probe
  misc_feature (1)..(25): SEQ ID NO: 7023; WAN024FNZ_at; Start 8; Stop 32
ttttcttcatcagttttctcttcaa

SEQ ID NO: 214011 - DNA, 25 bp, Artificial
  probe
  misc_feature (1)..(25): SEQ ID NO: 7023; WAN024FNZ_at; Start 6; Stop 30
gtttttcttcatcagttttctcttc

SEQ ID NO: 214012 - DNA, 25 bp, Artificial
  probe
  misc_feature (1)..(25): SEQ ID NO: 7023; WAN024FNZ_at; Start 14; Stop 38
tcatcagttttctcttcaacaagta

SEQ ID NO: 214013 - DNA, 25 bp, Artificial
  probe
  misc_feature (1)..(25): SEQ ID NO: 7023; WAN024FNZ_at; Start 25; Stop 49
ctcttcaacaagtacatctttaaaa

SEQ ID NO: 214014 - DNA, 25 bp, Artificial
  probe
  misc_feature (1)..(25): SEQ ID NO: 7023; WAN024FNZ_at; Start 47; Stop 71
aaaattactaccattattcacacct

SEQ ID NO: 214015 - DNA, 25 bp, Artificial
  probe
  misc_feature (1)..(25): SEQ ID NO: 7023; WAN024FNZ_at; Start 12; Stop 36
cttcatcagttttctcttcaacaag

SEQ ID NO: 214016 - DNA, 25 bp, Artificial
  probe
  misc_feature (1)..(25): SEQ ID NO: 7023; WAN024FNZ_at; Start 24; Stop 48
tctcttcaacaagtacatctttaaa

SEQ ID NO: 214017 - DNA, 25 bp, Artificial
  probe
  misc_feature (1)..(25): SEQ ID NO: 7023; WAN024FNZ_at; Start 20; Stop 44
gttttctcttcaacaagtacatctt

SEQ ID NO: 214018 - DNA, 25 bp, Artificial
  probe
  misc_feature (1)..(25): SEQ ID NO: 7023; WAN024FNZ_at; Start 13; Stop 37
ttcatcagttttctcttcaacaagt

SEQ ID NO: 214019 - DNA, 25 bp, Artificial
  probe
  misc_feature (1)..(25): SEQ ID NO: 7023; WAN024FNZ_at; Start 27; Stop 51
cttcaacaagtacatctttaaaaat

SEQ ID NO: 214020 - DNA, 25 bp, Artificial
  probe
  misc_feature (1)..(25): SEQ ID NO: 7023; WAN024FNZ_at; Start 39; Stop 63
catctttaaaaattactaccattat

SEQ ID NO: 214021 - DNA, 25 bp, Artificial
  probe
  misc_feature (1)..(25): SEQ ID NO: 7023; WAN024FNZ_at; Start 50; Stop 74
attactaccattattcacacctcat

SEQ ID NO: 214022 - DNA, 25 bp, Artificial
  probe
  misc_feature (1)..(25): SEQ ID NO: 7023; WAN024FNZ_at; Start 52; Stop 76
tactaccattattcacacctcattg

SEQ ID NO: 214023 - DNA, 25 bp, Artificial
  probe
  misc_feature (1)..(25): SEQ ID NO: 7023; WAN024FNZ_at; Start 45; Stop 69
taaaaattactaccattattcacac

SEQ ID NO: 214024 - DNA, 25 bp, Artificial
  probe
  misc_feature (1)..(25): SEQ ID NO: 7023; WAN024FNZ_at; Start 29; Stop 53
tcaacaagtacatctttaaaaatta

SEQ ID NO: 214025 - DNA, 25 bp, Artificial
  probe
  misc_feature (1)..(25): SEQ ID NO: 7023; WAN024FNZ_at; Start 26; Stop 50
tcttcaacaagtacatctttaaaaa

SEQ ID NO: 214026 - DNA, 25 bp, Artificial
  probe
  misc_feature (1)..(25): SEQ ID NO: 7023; WAN024FNZ_at; Start 11; Stop 35
tcttcatcagttttctcttcaacaa

SEQ ID NO: 214027 - DNA, 25 bp, Artificial
  probe
  misc_feature (1)..(25): SEQ ID NO: 7023; WAN024FNZ_at; Start 51; Stop 75
ttactaccattattcacacctcatt

SEQ ID NO: 214028 - DNA, 25 bp, Artificial
  probe
  misc_feature (1)..(25): SEQ ID NO: 7023; WAN024FNZ_at; Start 49; Stop 73
aattactaccattattcacacctca

SEQ ID NO: 214029 - DNA, 25 bp, Artificial
  probe
  misc_feature (1)..(25): SEQ ID NO: 7023; WAN024FNZ_at; Start 17; Stop 41
tcagttttctcttcaacaagtacat

SEQ ID NO: 214030 - DNA, 25 bp, Artificial
  probe
  misc_feature (1)..(25): SEQ ID NO: 7023; WAN024FNZ_at; Start 16; Stop 40
atcagttttctcttcaacaagtaca

SEQ ID NO: 214031 - DNA, 25 bp, Artificial
  probe
  misc_feature (1)..(25): SEQ ID NO: 7023; WAN024FNZ_at; Start 22; Stop 46
tttctcttcaacaagtacatcttta

SEQ ID NO: 214032 - DNA, 25 bp, Artificial
  probe
  misc_feature (1)..(25): SEQ ID NO: 7023; WAN024FNZ_at; Start 15; Stop 39
catcagttttctcttcaacaagtac

SEQ ID NO: 214033 - DNA, 25 bp, Artificial
  probe
  misc_feature (1)..(25): SEQ ID NO: 7023; WAN024FNZ_at; Start 53; Stop 77
actaccattattcacacctcattgg

SEQ ID NO: 214034 - DNA, 25 bp, Artificial
  probe
  misc_feature (1)..(25): SEQ ID NO: 7023; WAN024FNZ_at; Start 19; Stop 43
agttttctcttcaacaagtacatct

SEQ ID NO: 214035 - DNA, 25 bp, Artificial
  probe
  misc_feature (1)..(25): SEQ ID NO: 2734; WAN024FO2_x_at; Start 81; Stop 105
tgagaatgttagagcttttgattgt

SEQ ID NO: 214036 - DNA, 25 bp, Artificial
  probe
  misc_feature (1)..(25): SEQ ID NO: 2734; WAN024FO2_x_at; Start 11; Stop 35
tttttaaagatgtacttgttgaaga

SEQ ID NO: 214037 - DNA, 25 bp, Artificial
  probe
  misc_feature (1)..(25): SEQ ID NO: 2734; WAN024FO2_x_at; Start 78; Stop 102
tgatgagaatgttagagcttttgat

SEQ ID NO: 214038 - DNA, 25 bp, Artificial
  probe
  misc_feature (1)..(25): SEQ ID NO: 2734; WAN024FO2_x_at; Start 87; Stop 111
tgttagagcttttgattgtggatat

SEQ ID NO: 214039 - DNA, 25 bp, Artificial
  probe
  misc_feature (1)..(25): SEQ ID NO: 2734; WAN024FO2_x_at; Start 42; Stop 66
tgatgaagaaaaacaacatatttta

SEQ ID NO: 214040 - DNA, 25 bp, Artificial
  probe
  misc_feature (1)..(25): SEQ ID NO: 2734; WAN024FO2_x_at; Start 84; Stop 108
gaatgttagagcttttgattgtgga

SEQ ID NO: 214041 - DNA, 25 bp, Artificial
  probe
  misc_feature (1)..(25): SEQ ID NO: 2734; WAN024FO2_x_at; Start 46; Stop 70
gaagaaaaacaacatattttatcta

SEQ ID NO: 214042 - DNA, 25 bp, Artificial
  probe
  misc_feature (1)..(25): SEQ ID NO: 2734; WAN024FO2_x_at; Start 43; Stop 67
gatgaagaaaaacaacatattttat

SEQ ID NO: 214043 - DNA, 25 bp, Artificial
  probe
  misc_feature (1)..(25): SEQ ID NO: 2734; WAN024FO2_x_at; Start 12; Stop 36
ttttaaagatgtacttgttgaagag

SEQ ID NO: 214044 - DNA, 25 bp, Artificial
  probe
  misc_feature (1)..(25): SEQ ID NO: 2734; WAN024FO2_x_at; Start 8; Stop 32
taatttttaaagatgtacttgttga

SEQ ID NO: 214045 - DNA, 25 bp, Artificial
  probe
  misc_feature (1)..(25): SEQ ID NO: 2734; WAN024FO2_x_at; Start 83; Stop 107
agaatgttagagcttttgattgtgg

SEQ ID NO: 214046 - DNA, 25 bp, Artificial
  probe
  misc_feature (1)..(25): SEQ ID NO: 2734; WAN024FO2_x_at; Start 14; Stop 38
ttaaagatgtacttgttgaagagaa

SEQ ID NO: 214047 - DNA, 25 bp, Artificial
  probe
  misc_feature (1)..(25): SEQ ID NO: 2734; WAN024FO2_x_at; Start 45; Stop 69
tgaagaaaaacaacatattttatct

SEQ ID NO: 214048 - DNA, 25 bp, Artificial
  probe
  misc_feature (1)..(25): SEQ ID NO: 2734; WAN024FO2_x_at; Start 86; Stop 110
atgttagagcttttgattgtggata

SEQ ID NO: 214049 - DNA, 25 bp, Artificial
  probe
  misc_feature (1)..(25): SEQ ID NO: 2734; WAN024FO2_x_at; Start 47; Stop 71
aagaaaaacaacatattttatctat

SEQ ID NO: 214050 - DNA, 25 bp, Artificial
  probe
  misc_feature (1)..(25): SEQ ID NO: 2734; WAN024FO2_x_at; Start 77; Stop 101
atgatgagaatgttagagcttttga

SEQ ID NO: 214051 - DNA, 25 bp, Artificial
  probe
  misc_feature (1)..(25): SEQ ID NO: 2734; WAN024FO2_x_at; Start 80; Stop 104
atgagaatgttagagcttttgattg

SEQ ID NO: 214052 - DNA, 25 bp, Artificial
  probe
  misc_feature (1)..(25): SEQ ID NO: 2734; WAN024FO2_x_at; Start 13; Stop 37
tttaaagatgtacttgttgaagaga

SEQ ID NO: 214053 - DNA, 25 bp, Artificial
  probe
  misc_feature (1)..(25): SEQ ID NO: 2734; WAN024FO2_x_at; Start 10; Stop 34
atttttaaagatgtacttgttgaag

SEQ ID NO: 214054 - DNA, 25 bp, Artificial
  probe
  misc_feature (1)..(25): SEQ ID NO: 2734; WAN024FO2_x_at; Start 85; Stop 109
aatgttagagcttttgattgtggat

SEQ ID NO: 214055 - DNA, 25 bp, Artificial
  probe
  misc_feature (1)..(25): SEQ ID NO: 2734; WAN024FO2_x_at; Start 44; Stop 68
atgaagaaaaacaacatattttatc

SEQ ID NO: 214056 - DNA, 25 bp, Artificial
  probe
  misc_feature (1)..(25): SEQ ID NO: 2734; WAN024FO2_x_at; Start 82; Stop 106
gagaatgttagagcttttgattgtg

SEQ ID NO: 214057 - DNA, 25 bp, Artificial
  probe
  misc_feature (1)..(25): SEQ ID NO: 2734; WAN024FO2_x_at; Start 41; Stop 65
ctgatgaagaaaaacaacatatttt

SEQ ID NO: 214058 - DNA, 25 bp, Artificial
  probe
  misc_feature (1)..(25): SEQ ID NO: 2734; WAN024FO2_x_at; Start 79; Stop 103
gatgagaatgttagagcttttgatt

SEQ ID NO: 214059 - DNA, 25 bp, Artificial
  probe
  misc_feature (1)..(25): SEQ ID NO: 2734; WAN024FO2_x_at; Start 48; Stop 72
agaaaaacaacatattttatctatt

SEQ ID NO: 214060 - DNA, 25 bp, Artificial
  probe
  misc_feature (1)..(25): SEQ ID NO: 2734; WAN024FO2_x_at; Start 40; Stop 64
actgatgaagaaaaacaacatattt

SEQ ID NO: 214061 - DNA, 25 bp, Artificial
  probe
  misc_feature (1)..(25): SEQ ID NO: 1976; WAN024FO3_at; Start 243; Stop 267
caataatcagatagccaaaccagtt

SEQ ID NO: 214062 - DNA, 25 bp, Artificial
  probe
  misc_feature (1)..(25): SEQ ID NO: 1976; WAN024FO3_at; Start 154; Stop 178
caggtaaagagcaaggctaaatttc

SEQ ID NO: 214063 - DNA, 25 bp, Artificial
  probe
  misc_feature (1)..(25): SEQ ID NO: 1976; WAN024FO3_at; Start 204; Stop 228
tatagagaataccaaagatggtcgt

SEQ ID NO: 214064 - DNA, 25 bp, Artificial
  probe
  misc_feature (1)..(25): SEQ ID NO: 1976; WAN024FO3_at; Start 34; Stop 58
ggcataaaatccagctccaactgta

SEQ ID NO: 214065 - DNA, 25 bp, Artificial
  probe
  misc_feature (1)..(25): SEQ ID NO: 1976; WAN024FO3_at; Start 254; Stop 278
tagccaaaccagttattcatcaagg

SEQ ID NO: 214066 - DNA, 25 bp, Artificial
  probe
  misc_feature (1)..(25): SEQ ID NO: 1976; WAN024FO3_at; Start 223; Stop 247
ggtcgttccccattggatgacaata

SEQ ID NO: 214067 - DNA, 25 bp, Artificial
  probe
  misc_feature (1)..(25): SEQ ID NO: 1976; WAN024FO3_at; Start 262; Stop 286
ccagttattcatcaaggtcaagaca

SEQ ID NO: 214068 - DNA, 25 bp, Artificial
  probe
  misc_feature (1)..(25): SEQ ID NO: 1976; WAN024FO3_at; Start 210; Stop 234
gaataccaaagatggtcgttcccca

SEQ ID NO: 214069 - DNA, 25 bp, Artificial
  probe
  misc_feature (1)..(25): SEQ ID NO: 1976; WAN024FO3_at; Start 78; Stop 102
ccatgagactccagaaaacgggtgt

SEQ ID NO: 214070 - DNA, 25 bp, Artificial
  probe
  misc_feature (1)..(25): SEQ ID NO: 1976; WAN024FO3_at; Start 216; Stop 240
caaagatggtcgttccccattggat

SEQ ID NO: 214071 - DNA, 25 bp, Artificial
  probe
  misc_feature (1)..(25): SEQ ID NO: 1976; WAN024FO3_at; Start 55; Stop 79
tgtataacagagtccgccagttacc

SEQ ID NO: 214072 - DNA, 25 bp, Artificial
  probe
  misc_feature (1)..(25): SEQ ID NO: 1976; WAN024FO3_at; Start 230; Stop 254
ccccattggatgacaataatcagat

SEQ ID NO: 214073 - DNA, 25 bp, Artificial
  probe
  misc_feature (1)..(25): SEQ ID NO: 1976; WAN024FO3_at; Start 91; Stop 115
gaaaacgggtgtcgtttgactgata

SEQ ID NO: 214074 - DNA, 25 bp, Artificial
  probe
  misc_feature (1)..(25): SEQ ID NO: 1976; WAN024FO3_at; Start 142; Stop 166
ccagcccataatcaggtaaagagca

SEQ ID NO: 214075 - DNA, 25 bp, Artificial
  probe
  misc_feature (1)..(25): SEQ ID NO: 1976; WAN024FO3_at; Start 81; Stop 105
tgagactccagaaaacgggtgtcgt

SEQ ID NO: 214076 - DNA, 25 bp, Artificial
  probe
  misc_feature (1)..(25): SEQ ID NO: 1976; WAN024FO3_at; Start 162; Stop 186
gagcaaggctaaatttctcattgac

SEQ ID NO: 214077 - DNA, 25 bp, Artificial
  probe
  misc_feature (1)..(25): SEQ ID NO: 1976; WAN024FO3_at; Start 109; Stop 133
actgataatggcaggaatgatagcc

SEQ ID NO: 214078 - DNA, 25 bp, Artificial
  probe
  misc_feature (1)..(25): SEQ ID NO: 1976; WAN024FO3_at; Start 267; Stop 291
tattcatcaaggtcaagacaacggg

SEQ ID NO: 214079 - DNA, 25 bp, Artificial
  probe
  misc_feature (1)..(25): SEQ ID NO: 1976; WAN024FO3_at; Start 47; Stop 71
gctccaactgtataacagagtccgc

SEQ ID NO: 214080 - DNA, 25 bp, Artificial
  probe
  misc_feature (1)..(25): SEQ ID NO: 1976; WAN024FO3_at; Start 10; Stop 34
catgtggaaataaggttttttcttg

SEQ ID NO: 214081 - DNA, 25 bp, Artificial
  probe
  misc_feature (1)..(25): SEQ ID NO: 1976; WAN024FO3_at; Start 177; Stop 201
tctcattgacctttttagcaaagat

SEQ ID NO: 214082 - DNA, 25 bp, Artificial
  probe
  misc_feature (1)..(25): SEQ ID NO: 1976; WAN024FO3_at; Start 274; Stop 298
caaggtcaagacaacgggcgtgtat

SEQ ID NO: 214083 - DNA, 25 bp, Artificial
  probe
  misc_feature (1)..(25): SEQ ID NO: 1976; WAN024FO3_at; Start 2; Stop 26
tgccaaatcatgtggaaataaggtt

SEQ ID NO: 214084 - DNA, 25 bp, Artificial
  probe
  misc_feature (1)..(25): SEQ ID NO: 1976; WAN024FO3_at; Start 129; Stop 153
tagccagaaccaaccagcccataat

SEQ ID NO: 214085 - DNA, 25 bp, Artificial
  probe
  misc_feature (1)..(25): SEQ ID NO: 1976; WAN024FO3_at; Start 122; Stop 146
ggaatgatagccagaaccaaccagc

SEQ ID NO: 214086 - DNA, 25 bp, Artificial
  probe
  misc_feature (1)..(25): SEQ ID NO: 1976; WAN024FO3_at; Start 148; Stop 172
cataatcaggtaaagagcaaggcta

SEQ ID NO: 214087 - DNA, 25 bp, Artificial
  probe
  misc_feature (1)..(25): SEQ ID NO: 1976; WAN024FO3_at; Start 119; Stop 143
gcaggaatgatagccagaaccaacc

SEQ ID NO: 214088 - DNA, 25 bp, Artificial
  probe
  misc_feature (1)..(25): SEQ ID NO: 1976; WAN024FO3_at; Start 27; Stop 51
ttttcttggcataaaatccagctcc

SEQ ID NO: 214089 - DNA, 25 bp, Artificial
  probe
  misc_feature (1)..(25): SEQ ID NO: 1976; WAN024FO3_at; Start 270; Stop 294
tcatcaaggtcaagacaacgggcgt

SEQ ID NO: 214090 - DNA, 25 bp, Artificial
  probe
  misc_feature (1)..(25): SEQ ID NO: 1976; WAN024FO3_at; Start 67; Stop 91
tccgccagttaccatgagactccag

SEQ ID NO: 214091 - DNA, 25 bp, Artificial
  probe
  misc_feature (1)..(25): SEQ ID NO: 1976; WAN024FO3_at; Start 61; Stop 85
acagagtccgccagttaccatgaga

SEQ ID NO: 214092 - DNA, 25 bp, Artificial
  probe
  misc_feature (1)..(25): SEQ ID NO: 1976; WAN024FO3_at; Start 192; Stop 216
tagcaaagattttatagagaatacc

SEQ ID NO: 214093 - DNA, 25 bp, Artificial
  probe
  misc_feature (1)..(25): SEQ ID NO: 1976; WAN024FO3_at; Start 100; Stop 124
tgtcgtttgactgataatggcagga

SEQ ID NO: 214094 - DNA, 25 bp, Artificial
  probe
  misc_feature (1)..(25): SEQ ID NO: 1976; WAN024FO3_at; Start 51; Stop 75
caactgtataacagagtccgccagt

SEQ ID NO: 214095 - DNA, 25 bp, Artificial
  probe
  misc_feature (1)..(25): SEQ ID NO: 1018; WAN024FO4_at; Start 67; Stop 91
catgctgtgggtgcagtcatcatgc

SEQ ID NO: 214096 - DNA, 25 bp, Artificial
  probe
  misc_feature (1)..(25): SEQ ID NO: 1018; WAN024FO4_at; Start 24; Stop 48
caaacaactcagttttggagaggag

SEQ ID NO: 214097 - DNA, 25 bp, Artificial
  probe
  misc_feature (1)..(25): SEQ ID NO: 1018; WAN024FO4_at; Start 267; Stop 291
tatgatttacgttgccattgccggc

SEQ ID NO: 214098 - DNA, 25 bp, Artificial
  probe
  misc_feature (1)..(25): SEQ ID NO: 1018; WAN024FO4_at; Start 502; Stop 526
tggagtctcatggtaactggcggac

SEQ ID NO: 214099 - DNA, 25 bp, Artificial
  probe
  misc_feature (1)..(25): SEQ ID NO: 1018; WAN024FO4_at; Start 360; Stop 384
gggaacgaccatctttggtattctc

SEQ ID NO: 214100 - DNA, 25 bp, Artificial
  probe
  misc_feature (1)..(25): SEQ ID NO: 1018; WAN024FO4_at; Start 449; Stop 473
ggttggttctggctatcattcctgc

SEQ ID NO: 214101 - DNA, 25 bp, Artificial
  probe
  misc_feature (1)..(25): SEQ ID NO: 1018; WAN024FO4_at; Start 152; Stop 176
tcggcgtttccattttcgtcatcag

SEQ ID NO: 214102 - DNA, 25 bp, Artificial
  probe
  misc_feature (1)..(25): SEQ ID NO: 1018; WAN024FO4_at; Start 306; Stop 330
tgtcttgaccttgatgaataactgg

SEQ ID NO: 214103 - DNA, 25 bp, Artificial
  probe
  misc_feature (1)..(25): SEQ ID NO: 1018; WAN024FO4_at; Start 98; Stop 122
tgctgcctatttcatccatctatag

SEQ ID NO: 214104 - DNA, 25 bp, Artificial
  probe
  misc_feature (1)..(25): SEQ ID NO: 1018; WAN024FO4_at; Start 114; Stop 138
catctatagttatgaagcacacgga

SEQ ID NO: 214105 - DNA, 25 bp, Artificial
  probe
  misc_feature (1)..(25): SEQ ID NO: 1018; WAN024FO4_at; Start 216; Stop 240
tatggcctatggttcgacccacaaa

SEQ ID NO: 214106 - DNA, 25 bp, Artificial
  probe
  misc_feature (1)..(25): SEQ ID NO: 1018; WAN024FO4_at; Start 534; Stop 558
tacagttggagctggattttatgcc

SEQ ID NO: 214107 - DNA, 25 bp, Artificial
  probe
  misc_feature (1)..(25): SEQ ID NO: 1018; WAN024FO4_at; Start 239; Stop 263
aatatgttttgcgaatcattgacca

SEQ ID NO: 214108 - DNA, 25 bp, Artificial
  probe
  misc_feature (1)..(25): SEQ ID NO: 1018; WAN024FO4_at; Start 225; Stop 249
tggttcgacccacaaatatgttttg

SEQ ID NO: 214109 - DNA, 25 bp, Artificial
  probe
  misc_feature (1)..(25): SEQ ID NO: 1018; WAN024FO4_at; Start 390; Stop 414
aatctttgctaaaaaggtcaatgag

SEQ ID NO: 214110 - DNA, 25 bp, Artificial
  probe
  misc_feature (1)..(25): SEQ ID NO: 1018; WAN024FO4_at; Start 295; Stop 319
tacacgcccgttgtcttgaccttga

SEQ ID NO: 214111 - DNA, 25 bp, Artificial
  probe
  misc_feature (1)..(25): SEQ ID NO: 1018; WAN024FO4_at; Start 283; Stop 307
attgccggctcatacacgcccgttg

SEQ ID NO: 214112 - DNA, 25 bp, Artificial
  probe
  misc_feature (1)..(25): SEQ ID NO: 1018; WAN024FO4_at; Start 566; Stop 590
aaccttatttccacatgatttggca

SEQ ID NO: 214113 - DNA, 25 bp, Artificial
  probe
  misc_feature (1)..(25): SEQ ID NO: 1018; WAN024FO4_at; Start 321; Stop 345
gaataactggtttggctatctgatt

SEQ ID NO: 214114 - DNA, 25 bp, Artificial
  probe
  misc_feature (1)..(25): SEQ ID NO: 1018; WAN024FO4_at; Start 133; Stop 157
cacggatttttatcctctatcggcg

SEQ ID NO: 214115 - DNA, 25 bp, Artificial
  probe
  misc_feature (1)..(25): SEQ ID NO: 1018; WAN024FO4_at; Start 579; Stop 603
catgatttggcatctctttatccta

SEQ ID NO: 214116 - DNA, 25 bp, Artificial
  probe
  misc_feature (1)..(25): SEQ ID NO: 1018; WAN024FO4_at; Start 515; Stop 539
taactggcggactctgttatacagt

SEQ ID NO: 214117 - DNA, 25 bp, Artificial
  probe
  misc_feature (1)..(25): SEQ ID NO: 1018; WAN024FO4_at; Start 407; Stop 431
tcaatgagaaatttagccttgctct

SEQ ID NO: 214118 - DNA, 25 bp, Artificial
  probe
  misc_feature (1)..(25): SEQ ID NO: 1018; WAN024FO4_at; Start 2; Stop 26
tgaacactagtcttaaactcagcaa

SEQ ID NO: 214119 - DNA, 25 bp, Artificial
  probe
  misc_feature (1)..(25): SEQ ID NO: 1018; WAN024FO4_at; Start 441; Stop 465
tatgggctggttggttctggctatc

SEQ ID NO: 214120 - DNA, 25 bp, Artificial
  probe
  misc_feature (1)..(25): SEQ ID NO: 1018; WAN024FO4_at; Start 38; Stop 62
ttggagaggagattgctaatagcgt

SEQ ID NO: 214121 - DNA, 25 bp, Artificial
  probe
  misc_feature (1)..(25): SEQ ID NO: 1018; WAN024FO4_at; Start 204; Stop 228
catttatcactctatggcctatggt

SEQ ID NO: 214122 - DNA, 25 bp, Artificial
  probe
  misc_feature (1)..(25): SEQ ID NO: 1018; WAN024FO4_at; Start 337; Stop 361
tatctgattattgtcatccaatggg

SEQ ID NO: 214123 - DNA, 25 bp, Artificial
  probe
  misc_feature (1)..(25): SEQ ID NO: 1018; WAN024FO4_at; Start 82; Stop 106
gtcatcatgcttatcttgctgccta

SEQ ID NO: 214124 - DNA, 25 bp, Artificial
  probe
  misc_feature (1)..(25): SEQ ID NO: 1018; WAN024FO4_at; Start 11; Stop 35
gtcttaaactcagcaaacaactcag

SEQ ID NO: 214125 - DNA, 25 bp, Artificial
  probe
  misc_feature (1)..(25): SEQ ID NO: 1018; WAN024FO4_at; Start 544; Stop 568
gctggattttatgccaagaaaaaac

SEQ ID NO: 214126 - DNA, 25 bp, Artificial
  probe
  misc_feature (1)..(25): SEQ ID NO: 1018; WAN024FO4_at; Start 426; Stop 450
tgctctttacctgattatgggctgg

SEQ ID NO: 214127 - DNA, 25 bp, Artificial
  probe
  misc_feature (1)..(25): SEQ ID NO: 1018; WAN024FO4_at; Start 52; Stop 76
gctaatagcgtgacccatgctgtgg

SEQ ID NO: 214128 - DNA, 25 bp, Artificial
  probe
  misc_feature (1)..(25): SEQ ID NO: 1018; WAN024FO4_at; Start 174; Stop 198
cagtctctttctcatgttcctatca

SEQ ID NO: 214129 - DNA, 25 bp, Artificial
  probe
  misc_feature (1)..(25): SEQ ID NO: 6819; WAN024FO5_at; Start 567; Stop 591
tcaaaaatattgtttacatggatca

SEQ ID NO: 214130 - DNA, 25 bp, Artificial
  probe
  misc_feature (1)..(25): SEQ ID NO: 6819; WAN024FO5_at; Start 742; Stop 766
gaagatcaatcgtcgctacaaagtt

SEQ ID NO: 214131 - DNA, 25 bp, Artificial
  probe
  misc_feature (1)..(25): SEQ ID NO: 6819; WAN024FO5_at; Start 354; Stop 378
tagtaatactattggagcgattgga

SEQ ID NO: 214132 - DNA, 25 bp, Artificial
  probe
  misc_feature (1)..(25): SEQ ID NO: 6819; WAN024FO5_at; Start 533; Stop 557
aagttaatgatttttcggctccaag

SEQ ID NO: 214133 - DNA, 25 bp, Artificial
  probe
  misc_feature (1)..(25): SEQ ID NO: 6819; WAN024FO5_at; Start 847; Stop 871
gataacctatctaatattatagaaa

SEQ ID NO: 214134 - DNA, 25 bp, Artificial
  probe
  misc_feature (1)..(25): SEQ ID NO: 6819; WAN024FO5_at; Start 697; Stop 721
ggtctcgatatgttgtatataccta

SEQ ID NO: 214135 - DNA, 25 bp, Artificial
  probe
  misc_feature (1)..(25): SEQ ID NO: 6819; WAN024FO5_at; Start 193; Stop 217
catatttgtgtagtggataataact

SEQ ID NO: 214136 - DNA, 25 bp, Artificial
  probe
  misc_feature (1)..(25): SEQ ID NO: 6819; WAN024FO5_at; Start 756; Stop 780
gctacaaagttttaataatgatgac

SEQ ID NO: 214137 - DNA, 25 bp, Artificial
  probe
  misc_feature (1)..(25): SEQ ID NO: 6819; WAN024FO5_at; Start 600; Stop 624
tcttaccgagaattatttagataaa

SEQ ID NO: 214138 - DNA, 25 bp, Artificial
  probe
  misc_feature (1)..(25): SEQ ID NO: 6819; WAN024FO5_at; Start 738; Stop 762
taaagaagatcaatcgtcgctacaa

SEQ ID NO: 214139 - DNA, 25 bp, Artificial
  probe
  misc_feature (1)..(25): SEQ ID NO: 6819; WAN024FO5_at; Start 725; Stop 749
tctcaatctatcataaagaagatca

SEQ ID NO: 214140 - DNA, 25 bp, Artificial
  probe
  misc_feature (1)..(25): SEQ ID NO: 6819; WAN024FO5_at; Start 864; Stop 888
tatagaaaattcaatcaaggaaaaa

SEQ ID NO: 214141 - DNA, 25 bp, Artificial
  probe
  misc_feature (1)..(25): SEQ ID NO: 6819; WAN024FO5_at; Start 830; Stop 854
tatatagaagctcaatagataacct

SEQ ID NO: 214142 - DNA, 25 bp, Artificial
  probe
  misc_feature (1)..(25): SEQ ID NO: 6819; WAN024FO5_at; Start 836; Stop 860
gaagctcaatagataacctatctaa

SEQ ID NO: 214143 - DNA, 25 bp, Artificial
  probe
  misc_feature (1)..(25): SEQ ID NO: 6819; WAN024FO5_at; Start 443; Stop 467
caagtattaaattgttgattatcaa

SEQ ID NO: 214144 - DNA, 25 bp, Artificial
  probe
  misc_feature (1)..(25): SEQ ID NO: 6819; WAN024FO5_at; Start 550; Stop 574
gctccaagatacaacaatcaaaaat

SEQ ID NO: 214145 - DNA, 25 bp, Artificial
  probe
  misc_feature (1)..(25): SEQ ID NO: 6819; WAN024FO5_at; Start 503; Stop 527
aaagacgttatctatcttcatgggc

SEQ ID NO: 214146 - DNA, 25 bp, Artificial
  probe
  misc_feature (1)..(25): SEQ ID NO: 6819; WAN024FO5_at; Start 358; Stop 382
aatactattggagcgattggaacaa

SEQ ID NO: 214147 - DNA, 25 bp, Artificial
  probe
  misc_feature (1)..(25): SEQ ID NO: 6819; WAN024FO5_at; Start 805; Stop 829
caaagtatttggtctagtatgcgaa

SEQ ID NO: 214148 - DNA, 25 bp, Artificial
  probe
  misc_feature (1)..(25): SEQ ID NO: 6819; WAN024FO5_at; Start 541; Stop 565
gatttttcggctccaagatacaaca

SEQ ID NO: 214149 - DNA, 25 bp, Artificial
  probe
  misc_feature (1)..(25): SEQ ID NO: 6819; WAN024FO5_at; Start 401; Stop 425
gcttagatcaaaatccagcctattt

SEQ ID NO: 214150 - DNA, 25 bp, Artificial
  probe
  misc_feature (1)..(25): SEQ ID NO: 6819; WAN024FO5_at; Start 655; Stop 679
tactatgaagaagtgattttaggta

SEQ ID NO: 214151 - DNA, 25 bp, Artificial
  probe
  misc_feature (1)..(25): SEQ ID NO: 6819; WAN024FO5_at; Start 396; Stop 420
tgatggcttagatcaaaatccagcc

SEQ ID NO: 214152 - DNA, 25 bp, Artificial
  probe
  misc_feature (1)..(25): SEQ ID NO: 6819; WAN024FO5_at; Start 748; Stop 772
caatcgtcgctacaaagttttaata

SEQ ID NO: 214153 - DNA, 25 bp, Artificial
  probe
  misc_feature (1)..(25): SEQ ID NO: 6819; WAN024FO5_at; Start 818; Stop 842
ctagtatgcgaatatatagaagctc

SEQ ID NO: 214154 - DNA, 25 bp, Artificial
  probe
  misc_feature (1)..(25): SEQ ID NO: 6819; WAN024FO5_at; Start 710; Stop 734
tgtatatacctaacttctcaatcta

SEQ ID NO: 214155 - DNA, 25 bp, Artificial
  probe
  misc_feature (1)..(25): SEQ ID NO: 6819; WAN024FO5_at; Start 464; Stop 488
tcaatttattagctttttctaaagc

SEQ ID NO: 214156 - DNA, 25 bp, Artificial
  probe
  misc_feature (1)..(25): SEQ ID NO: 6819; WAN024FO5_at; Start 387; Stop 411
tattggttctgatggcttagatcaa

SEQ ID NO: 214157 - DNA, 25 bp, Artificial
  probe
  misc_feature (1)..(25): SEQ ID NO: 6819; WAN024FO5_at; Start 178; Stop 202
aacgacaagaatattcatatttgtg

SEQ ID NO: 214158 - DNA, 25 bp, Artificial
  probe
  misc_feature (1)..(25): SEQ ID NO: 6819; WAN024FO5_at; Start 547; Stop 571
tcggctccaagatacaacaatcaaa

SEQ ID NO: 214159 - DNA, 25 bp, Artificial
  probe
  misc_feature (1)..(25): SEQ ID NO: 6819; WAN024FO5_at; Start 416; Stop 440
cagcctattttccaatatcttttaa

SEQ ID NO: 214160 - DNA, 25 bp, Artificial
  probe
  misc_feature (1)..(25): SEQ ID NO: 6819; WAN024FO5_at; Start 574; Stop 598
tattgtttacatggatcagttatct

SEQ ID NO: 214161 - DNA, 25 bp, Artificial
  probe
  misc_feature (1)..(25): SEQ ID NO: 6819; WAN024FO5_at; Start 790; Stop 814
cgtcgttatttgttgcaaagtattt

SEQ ID NO: 214162 - DNA, 25 bp, Artificial
  probe
  misc_feature (1)..(25): SEQ ID NO: 6819; WAN024FO5_at; Start 587; Stop 611
gatcagttatctttcttaccgagaa

SEQ ID NO: 214163 - DNA, 25 bp, Artificial
  probe
  misc_feature (1)..(25): SEQ ID NO: 6818; WAN024FO6_at; Start 325; Stop 349
tatataagtaaattaatagacattg

SEQ ID NO: 214164 - DNA, 25 bp, Artificial
  probe
  misc_feature (1)..(25): SEQ ID NO: 6818; WAN024FO6_at; Start 691; Stop 715
aaggcaggtcttgatatgctgtata

SEQ ID NO: 214165 - DNA, 25 bp, Artificial
  probe
  misc_feature (1)..(25): SEQ ID NO: 6818; WAN024FO6_at; Start 708; Stop 732
gctgtatatacctgagttttcaatt

SEQ ID NO: 214166 - DNA, 25 bp, Artificial
  probe
  misc_feature (1)..(25): SEQ ID NO: 6818; WAN024FO6_at; Start 738; Stop 762
taaagaggaccaatcttcaattcga

SEQ ID NO: 214167 - DNA, 25 bp, Artificial
  probe
  misc_feature (1)..(25): SEQ ID NO: 6818; WAN024FO6_at; Start 871; Stop 895
gactctatatataaacatattaagg

SEQ ID NO: 214168 - DNA, 25 bp, Artificial
  probe
  misc_feature (1)..(25): SEQ ID NO: 6818; WAN024FO6_at; Start 354; Stop 378
tgatgggaatattggagctattgga

SEQ ID NO: 214169 - DNA, 25 bp, Artificial
  probe
  misc_feature (1)..(25): SEQ ID NO: 6818; WAN024FO6_at; Start 99; Stop 123
taatcaaaactttgaagctgtcata

SEQ ID NO: 214170 - DNA, 25 bp, Artificial
  probe
  misc_feature (1)..(25): SEQ ID NO: 6818; WAN024FO6_at; Start 850; Stop 874
gaactcccgaatattgttagtgact

SEQ ID NO: 214171 - DNA, 25 bp, Artificial
  probe
  misc_feature (1)..(25): SEQ ID NO: 6818; WAN024FO6_at; Start 805; Stop 829
aatagcatttggtctagttttaaag

SEQ ID NO: 214172 - DNA, 25 bp, Artificial
  probe
  misc_feature (1)..(25): SEQ ID NO: 6818; WAN024FO6_at; Start 86; Stop 110
tgcgattgcaaagtaatcaaaactt

SEQ ID NO: 214173 - DNA, 25 bp, Artificial
  probe
  misc_feature (1)..(25): SEQ ID NO: 6818; WAN024FO6_at; Start 756; Stop 780
aattcgaagctttaataatgatgac

SEQ ID NO: 214174 - DNA, 25 bp, Artificial
  probe
  misc_feature (1)..(25): SEQ ID NO: 6818; WAN024FO6_at; Start 485; Stop 509
aagttattgcttctatcaaaaagcg

SEQ ID NO: 214175 - DNA, 25 bp, Artificial
  probe
  misc_feature (1)..(25): SEQ ID NO: 6818; WAN024FO6_at; Start 847; Stop 871
gaagaactcccgaatattgttagtg

SEQ ID NO: 214176 - DNA, 25 bp, Artificial
  probe
  misc_feature (1)..(25): SEQ ID NO: 6818; WAN024FO6_at; Start 75; Stop 99
cataagtagtttgcgattgcaaagt

SEQ ID NO: 214177 - DNA, 25 bp, Artificial
  probe
  misc_feature (1)..(25): SEQ ID NO: 6818; WAN024FO6_at; Start 837; Stop 861
tgctaaccaggaagaactcccgaat

SEQ ID NO: 214178 - DNA, 25 bp, Artificial
  probe
  misc_feature (1)..(25): SEQ ID NO: 6818; WAN024FO6_at; Start 699; Stop 723
tcttgatatgctgtatatacctgag

SEQ ID NO: 214179 - DNA, 25 bp, Artificial
  probe
  misc_feature (1)..(25): SEQ ID NO: 6818; WAN024FO6_at; Start 705; Stop 729
tatgctgtatatacctgagttttca

SEQ ID NO: 214180 - DNA, 25 bp, Artificial
  probe
  misc_feature (1)..(25): SEQ ID NO: 6818; WAN024FO6_at; Start 797; Stop 821
atttgttgaatagcatttggtctag

SEQ ID NO: 214181 - DNA, 25 bp, Artificial
  probe
  misc_feature (1)..(25): SEQ ID NO: 6818; WAN024FO6_at; Start 570; Stop 594
aaaatactttctacatggatcggtt

SEQ ID NO: 214182 - DNA, 25 bp, Artificial
  probe
  misc_feature (1)..(25): SEQ ID NO: 6818; WAN024FO6_at; Start 742; Stop 766
gaggaccaatcttcaattcgaagct

SEQ ID NO: 214183 - DNA, 25 bp, Artificial
  probe
  misc_feature (1)..(25): SEQ ID NO: 6818; WAN024FO6_at; Start 843; Stop 867
ccaggaagaactcccgaatattgtt

SEQ ID NO: 214184 - DNA, 25 bp, Artificial
  probe
  misc_feature (1)..(25): SEQ ID NO: 6818; WAN024FO6_at; Start 66; Stop 90
tttagattgcataagtagtttgcga

SEQ ID NO: 214185 - DNA, 25 bp, Artificial
  probe
  misc_feature (1)..(25): SEQ ID NO: 6818; WAN024FO6_at; Start 834; Stop 858
tcttgctaaccaggaagaactcccg

SEQ ID NO: 214186 - DNA, 25 bp, Artificial
  probe
  misc_feature (1)..(25): SEQ ID NO: 6818; WAN024FO6_at; Start 547; Stop 571
tcaagtccaaagactagtaaacaaa

SEQ ID NO: 214187 - DNA, 25 bp, Artificial
  probe
  misc_feature (1)..(25): SEQ ID NO: 6818; WAN024FO6_at; Start 574; Stop 598
tactttctacatggatcggttattt

SEQ ID NO: 214188 - DNA, 25 bp, Artificial
  probe
  misc_feature (1)..(25): SEQ ID NO: 6818; WAN024FO6_at; Start 855; Stop 879
cccgaatattgttagtgactctata

SEQ ID NO: 214189 - DNA, 25 bp, Artificial
  probe
  misc_feature (1)..(25): SEQ ID NO: 6818; WAN024FO6_at; Start 578; Stop 602
ttctacatggatcggttatttttct

SEQ ID NO: 214190 - DNA, 25 bp, Artificial
  probe
  misc_feature (1)..(25): SEQ ID NO: 6818; WAN024FO6_at; Start 488; Stop 512
ttattgcttctatcaaaaagcgttt

SEQ ID NO: 214191 - DNA, 25 bp, Artificial
  probe
  misc_feature (1)..(25): SEQ ID NO: 6818; WAN024FO6_at; Start 832; Stop 856
tatcttgctaaccaggaagaactcc

SEQ ID NO: 214192 - DNA, 25 bp, Artificial
  probe
  misc_feature (1)..(25): SEQ ID NO: 6818; WAN024FO6_at; Start 338; Stop 362
taatagacattgaatatgatgggaa

SEQ ID NO: 214193 - DNA, 25 bp, Artificial
  probe
  misc_feature (1)..(25): SEQ ID NO: 6818; WAN024FO6_at; Start 531; Stop 555
aaaagctaatgatttttcaagtcca

SEQ ID NO: 214194 - DNA, 25 bp, Artificial
  probe
  misc_feature (1)..(25): SEQ ID NO: 6818; WAN024FO6_at; Start 731; Stop 755
tttaccataaagaggaccaatcttc

SEQ ID NO: 214195 - DNA, 25 bp, Artificial
  probe
  misc_feature (1)..(25): SEQ ID NO: 6818; WAN024FO6_at; Start 825; Stop 849
taaagtttatcttgctaaccaggaa

SEQ ID NO: 214196 - DNA, 25 bp, Artificial
  probe
  misc_feature (1)..(25): SEQ ID NO: 6818; WAN024FO6_at; Start 790; Stop 814
cgtcgttatttgttgaatagcattt

SEQ ID NO: 214197 - DNA, 25 bp, Artificial
  probe
  misc_feature (1)..(25): SEQ ID NO: 2275; WAN024FO7_at; Start 846; Stop 870
gaatagactctctatactggtgaag

SEQ ID NO: 214198 - DNA, 25 bp, Artificial
  probe
  misc_feature (1)..(25): SEQ ID NO: 2275; WAN024FO7_at; Start 818; Stop 842
ctagctttaaggtacatttttgtgc

SEQ ID NO: 214199 - DNA, 25 bp, Artificial
  probe
  misc_feature (1)..(25): SEQ ID NO: 2275; WAN024FO7_at; Start 531; Stop 555
aagagctaatgacttttcaaatcca

SEQ ID NO: 214200 - DNA, 25 bp, Artificial
  probe
  misc_feature (1)..(25): SEQ ID NO: 2275; WAN024FO7_at; Start 755; Stop 779
ctttggaaagttttgcaaatgatga

SEQ ID NO: 214201 - DNA, 25 bp, Artificial
  probe
  misc_feature (1)..(25): SEQ ID NO: 2275; WAN024FO7_at; Start 708; Stop 732
gttgtatgtacctgacttttcaatt

SEQ ID NO: 214202 - DNA, 25 bp, Artificial
  probe
  misc_feature (1)..(25): SEQ ID NO: 2275; WAN024FO7_at; Start 832; Stop 856
catttttgtgcaacgaatagactct

SEQ ID NO: 214203 - DNA, 25 bp, Artificial
  probe
  misc_feature (1)..(25): SEQ ID NO: 2275; WAN024FO7_at; Start 705; Stop 729
tatgttgtatgtacctgacttttca

SEQ ID NO: 214204 - DNA, 25 bp, Artificial
  probe
  misc_feature (1)..(25): SEQ ID NO: 2275; WAN024FO7_at; Start 738; Stop 762
taaagaagatcaatcatctttggaa

SEQ ID NO: 214205 - DNA, 25 bp, Artificial
  probe
  misc_feature (1)..(25): SEQ ID NO: 2275; WAN024FO7_at; Start 579; Stop 603
cctacatggatcagtcatttttctt

SEQ ID NO: 214206 - DNA, 25 bp, Artificial
  probe
  misc_feature (1)..(25): SEQ ID NO: 2275; WAN024FO7_at; Start 858; Stop 882
tatactggtgaaggagtcaataaag

SEQ ID NO: 214207 - DNA, 25 bp, Artificial
  probe
  misc_feature (1)..(25): SEQ ID NO: 2275; WAN024FO7_at; Start 782; Stop 806
tgattaggcgtaaatttttattgaa

SEQ ID NO: 214208 - DNA, 25 bp, Artificial
  probe
  misc_feature (1)..(25): SEQ ID NO: 2275; WAN024FO7_at; Start 519; Stop 543
ttcatggacgaaaagagctaatgac

SEQ ID NO: 214209 - DNA, 25 bp, Artificial
  probe
  misc_feature (1)..(25): SEQ ID NO: 2275; WAN024FO7_at; Start 841; Stop 865
gcaacgaatagactctctatactgg

SEQ ID NO: 214210 - DNA, 25 bp, Artificial
  probe
  misc_feature (1)..(25): SEQ ID NO: 2275; WAN024FO7_at; Start 864; Stop 888
ggtgaaggagtcaataaagtatgat

SEQ ID NO: 214211 - DNA, 25 bp, Artificial
  probe
  misc_feature (1)..(25): SEQ ID NO: 2275; WAN024FO7_at; Start 849; Stop 873
tagactctctatactggtgaaggag

SEQ ID NO: 214212 - DNA, 25 bp, Artificial
  probe
  misc_feature (1)..(25): SEQ ID NO: 2275; WAN024FO7_at; Start 809; Stop 833
gcatattctctagctttaaggtaca

SEQ ID NO: 214213 - DNA, 25 bp, Artificial
  probe
  misc_feature (1)..(25): SEQ ID NO: 2275; WAN024FO7_at; Start 798; Stop 822
tttattgaaaagcatattctctagc

SEQ ID NO: 214214 - DNA, 25 bp, Artificial
  probe
  misc_feature (1)..(25): SEQ ID NO: 2275; WAN024FO7_at; Start 533; Stop 557
gagctaatgacttttcaaatccaaa

SEQ ID NO: 214215 - DNA, 25 bp, Artificial
  probe
  misc_feature (1)..(25): SEQ ID NO: 2275; WAN024FO7_at; Start 836; Stop 860
tttgtgcaacgaatagactctctat

SEQ ID NO: 214216 - DNA, 25 bp, Artificial
  probe
  misc_feature (1)..(25): SEQ ID NO: 2275; WAN024FO7_at; Start 570; Stop 594
aaaatacttcctacatggatcagtc

SEQ ID NO: 214217 - DNA, 25 bp, Artificial
  probe
  misc_feature (1)..(25): SEQ ID NO: 2275; WAN024FO7_at; Start 770; Stop 794
caaatgatgatttgattaggcgtaa

SEQ ID NO: 214218 - DNA, 25 bp, Artificial
  probe
  misc_feature (1)..(25): SEQ ID NO: 2275; WAN024FO7_at; Start 574; Stop 598
tacttcctacatggatcagtcattt

SEQ ID NO: 214219 - DNA, 25 bp, Artificial
  probe
  misc_feature (1)..(25): SEQ ID NO: 2275; WAN024FO7_at; Start 521; Stop 545
catggacgaaaagagctaatgactt

SEQ ID NO: 214220 - DNA, 25 bp, Artificial
  probe
  misc_feature (1)..(25): SEQ ID NO: 2275; WAN024FO7_at; Start 853; Stop 877
ctctctatactggtgaaggagtcaa

SEQ ID NO: 214221 - DNA, 25 bp, Artificial
  probe
  misc_feature (1)..(25): SEQ ID NO: 2275; WAN024FO7_at; Start 825; Stop 849
taaggtacatttttgtgcaacgaat

SEQ ID NO: 214222 - DNA, 25 bp, Artificial
  probe
  misc_feature (1)..(25): SEQ ID NO: 2275; WAN024FO7_at; Start 560; Stop 584
ccgatgaacaaaaatacttcctaca

SEQ ID NO: 214223 - DNA, 25 bp, Artificial
  probe
  misc_feature (1)..(25): SEQ ID NO: 2275; WAN024FO7_at; Start 834; Stop 858
tttttgtgcaacgaatagactctct

SEQ ID NO: 214224 - DNA, 25 bp, Artificial
  probe
  misc_feature (1)..(25): SEQ ID NO: 2275; WAN024FO7_at; Start 748; Stop 772
caatcatctttggaaagttttgcaa

SEQ ID NO: 214225 - DNA, 25 bp, Artificial
  probe
  misc_feature (1)..(25): SEQ ID NO: 2275; WAN024FO7_at; Start 742; Stop 766
gaagatcaatcatctttggaaagtt

SEQ ID NO: 214226 - DNA, 25 bp, Artificial
  probe
  misc_feature (1)..(25): SEQ ID NO: 2275; WAN024FO7_at; Start 862; Stop 886
ctggtgaaggagtcaataaagtatg

SEQ ID NO: 214227 - DNA, 25 bp, Artificial
  probe
  misc_feature (1)..(25): SEQ ID NO: 2275; WAN024FO7_at; Start 855; Stop 879
ctctatactggtgaaggagtcaata

SEQ ID NO: 214228 - DNA, 25 bp, Artificial
  probe
  misc_feature (1)..(25): SEQ ID NO: 2275; WAN024FO7_at; Start 485; Stop 509
aagttatcacttttatcaaaaagcg

SEQ ID NO: 214229 - DNA, 25 bp, Artificial
  probe
  misc_feature (1)..(25): SEQ ID NO: 2275; WAN024FO7_at; Start 547; Stop 571
tcaaatccaaaaaccgatgaacaaa

SEQ ID NO: 214230 - DNA, 25 bp, Artificial
  probe
  misc_feature (1)..(25): SEQ ID NO: 2275; WAN024FO7_at; Start 699; Stop 723
tcttgatatgttgtatgtacctgac

SEQ ID NO: 214231 - DNA, 25 bp, Artificial
  probe
  misc_feature (1)..(25): SEQ ID NO: 1526; WAN024FO8_at; Start 316; Stop 340
gaagaatatgttacacttccaaata

SEQ ID NO: 214232 - DNA, 25 bp, Artificial
  probe
  misc_feature (1)..(25): SEQ ID NO: 1526; WAN024FO8_at; Start 488; Stop 512
aaaatgattttgtaagcttgagaac

SEQ ID NO: 214233 - DNA, 25 bp, Artificial
  probe
  misc_feature (1)..(25): SEQ ID NO: 1526; WAN024FO8_at; Start 208; Stop 232
tggtttcagggtgaggataaagcac

SEQ ID NO: 214234 - DNA, 25 bp, Artificial
  probe
  misc_feature (1)..(25): SEQ ID NO: 1526; WAN024FO8_at; Start 203; Stop 227
tttgctggtttcagggtgaggataa

SEQ ID NO: 214235 - DNA, 25 bp, Artificial
  probe
  misc_feature (1)..(25): SEQ ID NO: 1526; WAN024FO8_at; Start 586; Stop 610
aaattggttcaatatactgctttat

SEQ ID NO: 214236 - DNA, 25 bp, Artificial
  probe
  misc_feature (1)..(25): SEQ ID NO: 1526; WAN024FO8_at; Start 268; Stop 292
aaacatgcctcaggctacgatgtca

SEQ ID NO: 214237 - DNA, 25 bp, Artificial
  probe
  misc_feature (1)..(25): SEQ ID NO: 1526; WAN024FO8_at; Start 718; Stop 742
gaacggcctgtattgggaaatcaac

SEQ ID NO: 214238 - DNA, 25 bp, Artificial
  probe
  misc_feature (1)..(25): SEQ ID NO: 1526; WAN024FO8_at; Start 703; Stop 727
gaatcatacatggaagaacggcctg

SEQ ID NO: 214239 - DNA, 25 bp, Artificial
  probe
  misc_feature (1)..(25): SEQ ID NO: 1526; WAN024FO8_at; Start 266; Stop 290
gaaaacatgcctcaggctacgatgt

SEQ ID NO: 214240 - DNA, 25 bp, Artificial
  probe
  misc_feature (1)..(25): SEQ ID NO: 1526; WAN024FO8_at; Start 582; Stop 606
ttttaaattggttcaatatactgct

SEQ ID NO: 214241 - DNA, 25 bp, Artificial
  probe
  misc_feature (1)..(25): SEQ ID NO: 1526; WAN024FO8_at; Start 217; Stop 241
ggtgaggataaagcaccagatttag

SEQ ID NO: 214242 - DNA, 25 bp, Artificial
  probe
  misc_feature (1)..(25): SEQ ID NO: 1526; WAN024FO8_at; Start 227; Stop 251
aagcaccagatttagtaaaaaagtg

SEQ ID NO: 214243 - DNA, 25 bp, Artificial
  probe
  misc_feature (1)..(25): SEQ ID NO: 1526; WAN024FO8_at; Start 220; Stop 244
gaggataaagcaccagatttagtaa

SEQ ID NO: 214244 - DNA, 25 bp, Artificial
  probe
  misc_feature (1)..(25): SEQ ID NO: 1526; WAN024FO8_at; Start 715; Stop 739
gaagaacggcctgtattgggaaatc

SEQ ID NO: 214245 - DNA, 25 bp, Artificial
  probe
  misc_feature (1)..(25): SEQ ID NO: 1526; WAN024FO8_at; Start 312; Stop 336
tatagaagaatatgttacacttcca

SEQ ID NO: 214246 - DNA, 25 bp, Artificial
  probe
  misc_feature (1)..(25): SEQ ID NO: 1526; WAN024FO8_at; Start 702; Stop 726
tgaatcatacatggaagaacggcct

SEQ ID NO: 214247 - DNA, 25 bp, Artificial
  probe
  misc_feature (1)..(25): SEQ ID NO: 1526; WAN024FO8_at; Start 628; Stop 652
gagaaatatgatcgctttatagatt

SEQ ID NO: 214248 - DNA, 25 bp, Artificial
  probe
  misc_feature (1)..(25): SEQ ID NO: 1526; WAN024FO8_at; Start 706; Stop 730
tcatacatggaagaacggcctgtat

SEQ ID NO: 214249 - DNA, 25 bp, Artificial
  probe
  misc_feature (1)..(25): SEQ ID NO: 1526; WAN024FO8_at; Start 211; Stop 235
tttcagggtgaggataaagcaccag

SEQ ID NO: 214250 - DNA, 25 bp, Artificial
  probe
  misc_feature (1)..(25): SEQ ID NO: 1526; WAN024FO8_at; Start 709; Stop 733
tacatggaagaacggcctgtattgg

SEQ ID NO: 214251 - DNA, 25 bp, Artificial
  probe
  misc_feature (1)..(25): SEQ ID NO: 1526; WAN024FO8_at; Start 719; Stop 743
aacggcctgtattgggaaatcaacg

SEQ ID NO: 214252 - DNA, 25 bp, Artificial
  probe
  misc_feature (1)..(25): SEQ ID NO: 1526; WAN024FO8_at; Start 882; Stop 906
taaaaaaattgtagaggatggagaa

SEQ ID NO: 214253 - DNA, 25 bp, Artificial
  probe
  misc_feature (1)..(25): SEQ ID NO: 1526; WAN024FO8_at; Start 188; Stop 212
tgaataaaatttggatttgctggtt

SEQ ID NO: 214254 - DNA, 25 bp, Artificial
  probe
  misc_feature (1)..(25): SEQ ID NO: 1526; WAN024FO8_at; Start 271; Stop 295
catgcctcaggctacgatgtcatta

SEQ ID NO: 214255 - DNA, 25 bp, Artificial
  probe
  misc_feature (1)..(25): SEQ ID NO: 1526; WAN024FO8_at; Start 324; Stop 348
tgttacacttccaaatattgtttta

SEQ ID NO: 214256 - DNA, 25 bp, Artificial
  probe
  misc_feature (1)..(25): SEQ ID NO: 1526; WAN024FO8_at; Start 52; Stop 76
cgaatacctatatcttttatttcta

SEQ ID NO: 214257 - DNA, 25 bp, Artificial
  probe
  misc_feature (1)..(25): SEQ ID NO: 1526; WAN024FO8_at; Start 637; Stop 661
gatcgctttatagattatttcttac

SEQ ID NO: 214258 - DNA, 25 bp, Artificial
  probe
  misc_feature (1)..(25): SEQ ID NO: 1526; WAN024FO8_at; Start 222; Stop 246
ggataaagcaccagatttagtaaaa

SEQ ID NO: 214259 - DNA, 25 bp, Artificial
  probe
  misc_feature (1)..(25): SEQ ID NO: 1526; WAN024FO8_at; Start 456; Stop 480
gactagggatttagatttgtctata

SEQ ID NO: 214260 - DNA, 25 bp, Artificial
  probe
  misc_feature (1)..(25): SEQ ID NO: 1526; WAN024FO8_at; Start 214; Stop 238
cagggtgaggataaagcaccagatt

SEQ ID NO: 214261 - DNA, 25 bp, Artificial
  probe
  misc_feature (1)..(25): SEQ ID NO: 1526; WAN024FO8_at; Start 704; Stop 728
aatcatacatggaagaacggcctgt

SEQ ID NO: 214262 - DNA, 25 bp, Artificial
  probe
  misc_feature (1)..(25): SEQ ID NO: 1526; WAN024FO8_at; Start 700; Stop 724
tatgaatcatacatggaagaacggc

SEQ ID NO: 214263 - DNA, 25 bp, Artificial
  probe
  misc_feature (1)..(25): SEQ ID NO: 1526; WAN024FO8_at; Start 272; Stop 296
atgcctcaggctacgatgtcattat

SEQ ID NO: 214264 - DNA, 25 bp, Artificial
  probe
  misc_feature (1)..(25): SEQ ID NO: 1526; WAN024FO8_at; Start 687; Stop 711
taaagatttgaattatgaatcatac

SEQ ID NO: 214265 - DNA, 25 bp, Artificial
  probe
  misc_feature (1)..(25): SEQ ID NO: 6532; WAN024FO9_at; Start 974; Stop 998
tgggatggtcaggtctattttcagc

SEQ ID NO: 214266 - DNA, 25 bp, Artificial
  probe
  misc_feature (1)..(25): SEQ ID NO: 6532; WAN024FO9_at; Start 909; Stop 933
tcaagagcgaaaacaggaaaatcct

SEQ ID NO: 214267 - DNA, 25 bp, Artificial
  probe
  misc_feature (1)..(25): SEQ ID NO: 6532; WAN024FO9_at; Start 878; Stop 902
gagtcagagttctttatgatatacc

SEQ ID NO: 214268 - DNA, 25 bp, Artificial
  probe
  misc_feature (1)..(25): SEQ ID NO: 6532; WAN024FO9_at; Start 516; Stop 540
tcttagcgtacggtcttcttatgcc

SEQ ID NO: 214269 - DNA, 25 bp, Artificial
  probe
  misc_feature (1)..(25): SEQ ID NO: 6532; WAN024FO9_at; Start 895; Stop 919
gatatacctataactcaagagcgaa

SEQ ID NO: 214270 - DNA, 25 bp, Artificial
  probe
  misc_feature (1)..(25): SEQ ID NO: 6532; WAN024FO9_at; Start 398; Stop 422
tggaatacgccaaaaatgctaaagt

SEQ ID NO: 214271 - DNA, 25 bp, Artificial
  probe
  misc_feature (1)..(25): SEQ ID NO: 6532; WAN024FO9_at; Start 787; Stop 811
tcgggtggatcaggacaagcttata

SEQ ID NO: 214272 - DNA, 25 bp, Artificial
  probe
  misc_feature (1)..(25): SEQ ID NO: 6532; WAN024FO9_at; Start 686; Stop 710
cgattgctgggcgtgatattgtcat

SEQ ID NO: 214273 - DNA, 25 bp, Artificial
  probe
  misc_feature (1)..(25): SEQ ID NO: 6532; WAN024FO9_at; Start 748; Stop 772
agtttggattgtgccagtgcaattc

SEQ ID NO: 214274 - DNA, 25 bp, Artificial
  probe
  misc_feature (1)..(25): SEQ ID NO: 6532; WAN024FO9_at; Start 1015; Stop 1039
cacacatttagtattttaaaggagt

SEQ ID NO: 214275 - DNA, 25 bp, Artificial
  probe
  misc_feature (1)..(25): SEQ ID NO: 6532; WAN024FO9_at; Start 624; Stop 648
tatctatggccctagtgccaaggac

SEQ ID NO: 214276 - DNA, 25 bp, Artificial
  probe
  misc_feature (1)..(25): SEQ ID NO: 6532; WAN024FO9_at; Start 931; Stop 955
cctatggtaaatgcaagcttagata

SEQ ID NO: 214277 - DNA, 25 bp, Artificial
  probe
  misc_feature (1)..(25): SEQ ID NO: 6532; WAN024FO9_at; Start 524; Stop 548
tacggtcttcttatgccagttcaaa

SEQ ID NO: 214278 - DNA, 25 bp, Artificial
  probe
  misc_feature (1)..(25): SEQ ID NO: 6532; WAN024FO9_at; Start 989; Stop 1013
tattttcagctgaagtaggcttcca

SEQ ID NO: 214279 - DNA, 25 bp, Artificial
  probe
  misc_feature (1)..(25): SEQ ID NO: 6532; WAN024FO9_at; Start 700; Stop 724
gatattgtcatgaaaagtacaggta

SEQ ID NO: 214280 - DNA, 25 bp, Artificial
  probe
  misc_feature (1)..(25): SEQ ID NO: 6532; WAN024FO9_at; Start 757; Stop 781
tgtgccagtgcaattctaagtgttc

SEQ ID NO: 214281 - DNA, 25 bp, Artificial
  probe
  misc_feature (1)..(25): SEQ ID NO: 6532; WAN024FO9_at; Start 639; Stop 663
tgccaaggactctgataatcgtgta

SEQ ID NO: 214282 - DNA, 25 bp, Artificial
  probe
  misc_feature (1)..(25): SEQ ID NO: 6532; WAN024FO9_at; Start 924; Stop 948
ggaaaatcctatggtaaatgcaagc

SEQ ID NO: 214283 - DNA, 25 bp, Artificial
  probe
  misc_feature (1)..(25): SEQ ID NO: 6532; WAN024FO9_at; Start 611; Stop 635
taaggccaggacatatctatggccc

SEQ ID NO: 214284 - DNA, 25 bp, Artificial
  probe
  misc_feature (1)..(25): SEQ ID NO: 6532; WAN024FO9_at; Start 600; Stop 624
aataatgatagtaaggccaggacat

SEQ ID NO: 214285 - DNA, 25 bp, Artificial
  probe
  misc_feature (1)..(25): SEQ ID NO: 6532; WAN024FO9_at; Start 865; Stop 889
gcagatacttcaggagtcagagttc

SEQ ID NO: 214286 - DNA, 25 bp, Artificial
  probe
  misc_feature (1)..(25): SEQ ID NO: 6532; WAN024FO9_at; Start 721; Stop 745
ggtagtcagttaagatcctattgtt

SEQ ID NO: 214287 - DNA, 25 bp, Artificial
  probe
  misc_feature (1)..(25): SEQ ID NO: 6532; WAN024FO9_at; Start 773; Stop 797
taagtgttcttctttcgggtggatc

SEQ ID NO: 214288 - DNA, 25 bp, Artificial
  probe
  misc_feature (1)..(25): SEQ ID NO: 6532; WAN024FO9_at; Start 842; Stop 866
taaaacagatggcaacttgcattgc

SEQ ID NO: 214289 - DNA, 25 bp, Artificial
  probe
  misc_feature (1)..(25): SEQ ID NO: 6532; WAN024FO9_at; Start 183; Stop 207
tttttgttgtggaagagagtttgaa

SEQ ID NO: 214290 - DNA, 25 bp, Artificial
  probe
  misc_feature (1)..(25): SEQ ID NO: 6532; WAN024FO9_at; Start 1003; Stop 1027
gtaggcttccatcacacatttagta

SEQ ID NO: 214291 - DNA, 25 bp, Artificial
  probe
  misc_feature (1)..(25): SEQ ID NO: 6532; WAN024FO9_at; Start 948; Stop 972
cttagatagtaagaaaattgagtcc

SEQ ID NO: 214292 - DNA, 25 bp, Artificial
  probe
  misc_feature (1)..(25): SEQ ID NO: 6532; WAN024FO9_at; Start 714; Stop 738
aagtacaggtagtcagttaagatcc

SEQ ID NO: 214293 - DNA, 25 bp, Artificial
  probe
  misc_feature (1)..(25): SEQ ID NO: 6532; WAN024FO9_at; Start 962; Stop 986
aaattgagtccttgggatggtcagg

SEQ ID NO: 214294 - DNA, 25 bp, Artificial
  probe
  misc_feature (1)..(25): SEQ ID NO: 6532; WAN024FO9_at; Start 856; Stop 880
acttgcattgcagatacttcaggag

SEQ ID NO: 214295 - DNA, 25 bp, Artificial
  probe
  misc_feature (1)..(25): SEQ ID NO: 6532; WAN024FO9_at; Start 538; Stop 562
gccagttcaaaaagagctactgaaa

SEQ ID NO: 214296 - DNA, 25 bp, Artificial
  probe
  misc_feature (1)..(25): SEQ ID NO: 6532; WAN024FO9_at; Start 386; Stop 410
tgtataatctactggaatacgccaa

SEQ ID NO: 214297 - DNA, 25 bp, Artificial
  probe
  misc_feature (1)..(25): SEQ ID NO: 6532; WAN024FO9_at; Start 580; Stop 604
gcttccgagtatggaatcaaaataa

SEQ ID NO: 214298 - DNA, 25 bp, Artificial
  probe
  misc_feature (1)..(25): SEQ ID NO: 6532; WAN024FO9_at; Start 480; Stop 504
tcctttggacgaaaattatattgga

SEQ ID NO: 214299 - DNA, 25 bp, Artificial
  probe
  misc_feature (1)..(25): SEQ ID NO: 1389; WAN024FOA_s_at; Start 312; Stop 336
tgctgctagtcctgctagtcctgaa

SEQ ID NO: 214300 - DNA, 25 bp, Artificial
  probe
  misc_feature (1)..(25): SEQ ID NO: 1389; WAN024FOA_s_at; Start 216; Stop 240
aaaacgatttggtagacaaacagag

SEQ ID NO: 214301 - DNA, 25 bp, Artificial
  probe
  misc_feature (1)..(25): SEQ ID NO: 1389; WAN024FOA_s_at; Start 25; Stop 49
tatagacaagatgtagaatcttctc

SEQ ID NO: 214302 - DNA, 25 bp, Artificial
  probe
  misc_feature (1)..(25): SEQ ID NO: 1389; WAN024FOA_s_at; Start 813; Stop 837
tgtttccaatccaaattcaattatt

SEQ ID NO: 214303 - DNA, 25 bp, Artificial
  probe
  misc_feature (1)..(25): SEQ ID NO: 1389; WAN024FOA_s_at; Start 293; Stop 317
cagtggactacattattcatgctgc

SEQ ID NO: 214304 - DNA, 25 bp, Artificial
  probe
  misc_feature (1)..(25): SEQ ID NO: 1389; WAN024FOA_s_at; Start 802; Stop 826
caagcttataatgtttccaatccaa

SEQ ID NO: 214305 - DNA, 25 bp, Artificial
  probe
  misc_feature (1)..(25): SEQ ID NO: 1389; WAN024FOA_s_at; Start 146; Stop 170
tattgctaaatgaaataaggaattt

SEQ ID NO: 214306 - DNA, 25 bp, Artificial
  probe
  misc_feature (1)..(25): SEQ ID NO: 1389; WAN024FOA_s_at; Start 344; Stop 368
ttaatcagcctgtagaaacaatggc

SEQ ID NO: 214307 - DNA, 25 bp, Artificial
  probe
  misc_feature (1)..(25): SEQ ID NO: 1389; WAN024FOA_s_at; Start 349; Stop 373
cagcctgtagaaacaatggctagta

SEQ ID NO: 214308 - DNA, 25 bp, Artificial
  probe
  misc_feature (1)..(25): SEQ ID NO: 1389; WAN024FOA_s_at; Start 438; Stop 462
tatctcatctagtgaagtttatgga

SEQ ID NO: 214309 - DNA, 25 bp, Artificial
  probe
  misc_feature (1)..(25): SEQ ID NO: 1389; WAN024FOA_s_at; Start 317; Stop 341
ctagtcctgctagtcctgaattata

SEQ ID NO: 214310 - DNA, 25 bp, Artificial
  probe
  misc_feature (1)..(25): SEQ ID NO: 1389; WAN024FOA_s_at; Start 289; Stop 313
tttgcagtggactacattattcatg

SEQ ID NO: 214311 - DNA, 25 bp, Artificial
  probe
  misc_feature (1)..(25): SEQ ID NO: 1389; WAN024FOA_s_at; Start 109; Stop 133
tctggtttgattggttcaagtgtca

SEQ ID NO: 214312 - DNA, 25 bp, Artificial
  probe
  misc_feature (1)..(25): SEQ ID NO: 1389; WAN024FOA_s_at; Start 830; Stop 854
caattattactataaaacagatggc

SEQ ID NO: 214313 - DNA, 25 bp, Artificial
  probe
  misc_feature (1)..(25): SEQ ID NO: 1389; WAN024FOA_s_at; Start 136; Stop 160
gaccagttattattgctaaatgaaa

SEQ ID NO: 214314 - DNA, 25 bp, Artificial
  probe
  misc_feature (1)..(25): SEQ ID NO: 1389; WAN024FOA_s_at; Start 95; Stop 119
taattactggagcttctggtttgat

SEQ ID NO: 214315 - DNA, 25 bp, Artificial
  probe
  misc_feature (1)..(25): SEQ ID NO: 1389; WAN024FOA_s_at; Start 203; Stop 227
ttgaatcattagaaaaacgatttgg

SEQ ID NO: 214316 - DNA, 25 bp, Artificial
  probe
  misc_feature (1)..(25): SEQ ID NO: 1389; WAN024FOA_s_at; Start 301; Stop 325
tacattattcatgctgctagtcctg

SEQ ID NO: 214317 - DNA, 25 bp, Artificial
  probe
  misc_feature (1)..(25): SEQ ID NO: 1389; WAN024FOA_s_at; Start 223; Stop 247
tttggtagacaaacagagtatttac

SEQ ID NO: 214318 - DNA, 25 bp, Artificial
  probe
  misc_feature (1)..(25): SEQ ID NO: 1389; WAN024FOA_s_at; Start 103; Stop 127
ggagcttctggtttgattggttcaa

SEQ ID NO: 214319 - DNA, 25 bp, Artificial
  probe
  misc_feature (1)..(25): SEQ ID NO: 1389; WAN024FOA_s_at; Start 652; Stop 676
gataatcgtgtatcatcatttttta

SEQ ID NO: 214320 - DNA, 25 bp, Artificial
  probe
  misc_feature (1)..(25): SEQ ID NO: 1389; WAN024FOA_s_at; Start 40; Stop 64
gaatcttctctagaaacaatcgtca

SEQ ID NO: 214321 - DNA, 25 bp, Artificial
  probe
  misc_feature (1)..(25): SEQ ID NO: 1389; WAN024FOA_s_at; Start 249; Stop 273
ctttgtgttctatgatgcgactaaa

SEQ ID NO: 214322 - DNA, 25 bp, Artificial
  probe
  misc_feature (1)..(25): SEQ ID NO: 1389; WAN024FOA_s_at; Start 409; Stop 433
aaaaatgctaaagtttcaaatctag

SEQ ID NO: 214323 - DNA, 25 bp, Artificial
  probe
  misc_feature (1)..(25): SEQ ID NO: 1389; WAN024FOA_s_at; Start 50; Stop 74
tagaaacaatcgtcaatattaatga

SEQ ID NO: 214324 - DNA, 25 bp, Artificial
  probe
  misc_feature (1)..(25): SEQ ID NO: 1389; WAN024FOA_s_at; Start 503; Stop 527
gaactgttgatcatcttagcgtacg

SEQ ID NO: 214325 - DNA, 25 bp, Artificial
  probe
  misc_feature (1)..(25): SEQ ID NO: 1389; WAN024FOA_s_at; Start 77; Stop 101
tgaatggcaagtcaattttaattac

SEQ ID NO: 214326 - DNA, 25 bp, Artificial
  probe
  misc_feature (1)..(25): SEQ ID NO: 1389; WAN024FOA_s_at; Start 425; Stop 449
caaatctagtttatatctcatctag

SEQ ID NO: 214327 - DNA, 25 bp, Artificial
  probe
  misc_feature (1)..(25): SEQ ID NO: 1389; WAN024FOA_s_at; Start 498; Stop 522
tattggaactgttgatcatcttagc

SEQ ID NO: 214328 - DNA, 25 bp, Artificial
  probe
  misc_feature (1)..(25): SEQ ID NO: 1389; WAN024FOA_s_at; Start 89; Stop 113
caattttaattactggagcttctgg

SEQ ID NO: 214329 - DNA, 25 bp, Artificial
  probe
  misc_feature (1)..(25): SEQ ID NO: 1389; WAN024FOA_s_at; Start 117; Stop 141
gattggttcaagtgtcattgaccag

SEQ ID NO: 214330 - DNA, 25 bp, Artificial
  probe
  misc_feature (1)..(25): SEQ ID NO: 1389; WAN024FOA_s_at; Start 209; Stop 233
cattagaaaaacgatttggtagaca

SEQ ID NO: 214331 - DNA, 25 bp, Artificial
  probe
  misc_feature (1)..(25): SEQ ID NO: 1389; WAN024FOA_s_at; Start 305; Stop 329
ttattcatgctgctagtcctgctag

SEQ ID NO: 214332 - DNA, 25 bp, Artificial
  probe
  misc_feature (1)..(25): SEQ ID NO: 1389; WAN024FOA_s_at; Start 127; Stop 151
agtgtcattgaccagttattattgc

SEQ ID NO: 214333 - DNA, 25 bp, Artificial
  probe
  misc_feature (1)..(25): SEQ ID NO: 7581; WAN024FOB_at; Start 25; Stop 49
gtctacctactagtttatcatactt

SEQ ID NO: 214334 - DNA, 25 bp, Artificial
  probe
  misc_feature (1)..(25): SEQ ID NO: 7581; WAN024FOB_at; Start 41; Stop 65
atcatactttgaaacagggaagtta

SEQ ID NO: 214335 - DNA, 25 bp, Artificial
  probe
  misc_feature (1)..(25): SEQ ID NO: 7581; WAN024FOB_at; Start 57; Stop 81
gggaagttatatattttatctatca

SEQ ID NO: 214336 - DNA, 25 bp, Artificial
  probe
  misc_feature (1)..(25): SEQ ID NO: 7581; WAN024FOB_at; Start 63; Stop 87
ttatatattttatctatcaaagaga

SEQ ID NO: 214337 - DNA, 25 bp, Artificial
  probe
  misc_feature (1)..(25): SEQ ID NO: 7581; WAN024FOB_at; Start 29; Stop 53
acctactagtttatcatactttgaa

SEQ ID NO: 214338 - DNA, 25 bp, Artificial
  probe
  misc_feature (1)..(25): SEQ ID NO: 7581; WAN024FOB_at; Start 23; Stop 47
ttgtctacctactagtttatcatac

SEQ ID NO: 214339 - DNA, 25 bp, Artificial
  probe
  misc_feature (1)..(25): SEQ ID NO: 7581; WAN024FOB_at; Start 36; Stop 60
agtttatcatactttgaaacaggga

SEQ ID NO: 214340 - DNA, 25 bp, Artificial
  probe
  misc_feature (1)..(25): SEQ ID NO: 7581; WAN024FOB_at; Start 45; Stop 69
tactttgaaacagggaagttatata

SEQ ID NO: 214341 - DNA, 25 bp, Artificial
  probe
  misc_feature (1)..(25): SEQ ID NO: 7581; WAN024FOB_at; Start 35; Stop 59
tagtttatcatactttgaaacaggg

SEQ ID NO: 214342 - DNA, 25 bp, Artificial
  probe
  misc_feature (1)..(25): SEQ ID NO: 7581; WAN024FOB_at; Start 42; Stop 66
tcatactttgaaacagggaagttat

SEQ ID NO: 214343 - DNA, 25 bp, Artificial
  probe
  misc_feature (1)..(25): SEQ ID NO: 7581; WAN024FOB_at; Start 39; Stop 63
ttatcatactttgaaacagggaagt

SEQ ID NO: 214344 - DNA, 25 bp, Artificial
  probe
  misc_feature (1)..(25): SEQ ID NO: 7581; WAN024FOB_at; Start 28; Stop 52
tacctactagtttatcatactttga

SEQ ID NO: 214345 - DNA, 25 bp, Artificial
  probe
  misc_feature (1)..(25): SEQ ID NO: 7581; WAN024FOB_at; Start 53; Stop 77
aacagggaagttatatattttatct

SEQ ID NO: 214346 - DNA, 25 bp, Artificial
  probe
  misc_feature (1)..(25): SEQ ID NO: 7581; WAN024FOB_at; Start 47; Stop 71
ctttgaaacagggaagttatatatt

SEQ ID NO: 214347 - DNA, 25 bp, Artificial
  probe
  misc_feature (1)..(25): SEQ ID NO: 7581; WAN024FOB_at; Start 37; Stop 61
gtttatcatactttgaaacagggaa

SEQ ID NO: 214348 - DNA, 25 bp, Artificial
  probe
  misc_feature (1)..(25): SEQ ID NO: 7581; WAN024FOB_at; Start 30; Stop 54
cctactagtttatcatactttgaaa

SEQ ID NO: 214349 - DNA, 25 bp, Artificial
  probe
  misc_feature (1)..(25): SEQ ID NO: 7581; WAN024FOB_at; Start 24; Stop 48
tgtctacctactagtttatcatact

SEQ ID NO: 214350 - DNA, 25 bp, Artificial
  probe
  misc_feature (1)..(25): SEQ ID NO: 7581; WAN024FOB_at; Start 59; Stop 83
gaagttatatattttatctatcaaa

SEQ ID NO: 214351 - DNA, 25 bp, Artificial
  probe
  misc_feature (1)..(25): SEQ ID NO: 7581; WAN024FOB_at; Start 43; Stop 67
catactttgaaacagggaagttata

SEQ ID NO: 214352 - DNA, 25 bp, Artificial
  probe
  misc_feature (1)..(25): SEQ ID NO: 7581; WAN024FOB_at; Start 32; Stop 56
tactagtttatcatactttgaaaca

SEQ ID NO: 214353 - DNA, 25 bp, Artificial
  probe
  misc_feature (1)..(25): SEQ ID NO: 7581; WAN024FOB_at; Start 50; Stop 74
tgaaacagggaagttatatatttta

SEQ ID NO: 214354 - DNA, 25 bp, Artificial
  probe
  misc_feature (1)..(25): SEQ ID NO: 7581; WAN024FOB_at; Start 62; Stop 86
gttatatattttatctatcaaagag

SEQ ID NO: 214355 - DNA, 25 bp, Artificial
  probe
  misc_feature (1)..(25): SEQ ID NO: 7581; WAN024FOB_at; Start 55; Stop 79
cagggaagttatatattttatctat

SEQ ID NO: 214356 - DNA, 25 bp, Artificial
  probe
  misc_feature (1)..(25): SEQ ID NO: 7581; WAN024FOB_at; Start 40; Stop 64
tatcatactttgaaacagggaagtt

SEQ ID NO: 214357 - DNA, 25 bp, Artificial
  probe
  misc_feature (1)..(25): SEQ ID NO: 7581; WAN024FOB_at; Start 33; Stop 57
actagtttatcatactttgaaacag

SEQ ID NO: 214358 - DNA, 25 bp, Artificial
  probe
  misc_feature (1)..(25): SEQ ID NO: 7581; WAN024FOB_at; Start 58; Stop 82
ggaagttatatattttatctatcaa

SEQ ID NO: 214359 - DNA, 25 bp, Artificial
  probe
  misc_feature (1)..(25): SEQ ID NO: 7581; WAN024FOB_at; Start 26; Stop 50
tctacctactagtttatcatacttt

SEQ ID NO: 214360 - DNA, 25 bp, Artificial
  probe
  misc_feature (1)..(25): SEQ ID NO: 7581; WAN024FOB_at; Start 56; Stop 80
agggaagttatatattttatctatc

SEQ ID NO: 214361 - DNA, 25 bp, Artificial
  probe
  misc_feature (1)..(25): SEQ ID NO: 7581; WAN024FOB_at; Start 31; Stop 55
ctactagtttatcatactttgaaac

SEQ ID NO: 214362 - DNA, 25 bp, Artificial
  probe
  misc_feature (1)..(25): SEQ ID NO: 7581; WAN024FOB_at; Start 34; Stop 58
ctagtttatcatactttgaaacagg

SEQ ID NO: 214363 - DNA, 25 bp, Artificial
  probe
  misc_feature (1)..(25): SEQ ID NO: 7581; WAN024FOB_at; Start 44; Stop 68
atactttgaaacagggaagttatat

SEQ ID NO: 214364 - DNA, 25 bp, Artificial
  probe
  misc_feature (1)..(25): SEQ ID NO: 7581; WAN024FOB_at; Start 27; Stop 51
ctacctactagtttatcatactttg

SEQ ID NO: 214365 - DNA, 25 bp, Artificial
  probe
  misc_feature (1)..(25): SEQ ID NO: 7581; WAN024FOB_at; Start 38; Stop 62
tttatcatactttgaaacagggaag

SEQ ID NO: 214366 - DNA, 25 bp, Artificial
  probe
  misc_feature (1)..(25): SEQ ID NO: 7581; WAN024FOB_at; Start 54; Stop 78
acagggaagttatatattttatcta

SEQ ID NO: 214367 - DNA, 25 bp, Artificial
  probe
  misc_feature (1)..(25): SEQ ID NO: 1647; WAN024FOC_at; Start 125; Stop 149
gggcaccaccaattgtcaacataat

SEQ ID NO: 214368 - DNA, 25 bp, Artificial
  probe
  misc_feature (1)..(25): SEQ ID NO: 1647; WAN024FOC_at; Start 304; Stop 328
gattcattctaccatgcttctgccg

SEQ ID NO: 214369 - DNA, 25 bp, Artificial
  probe
  misc_feature (1)..(25): SEQ ID NO: 1647; WAN024FOC_at; Start 130; Stop 154
ccaccaattgtcaacataattgttg

SEQ ID NO: 214370 - DNA, 25 bp, Artificial
  probe
  misc_feature (1)..(25): SEQ ID NO: 1647; WAN024FOC_at; Start 117; Stop 141
gccaaaaagggcaccaccaattgtc

SEQ ID NO: 214371 - DNA, 25 bp, Artificial
  probe
  misc_feature (1)..(25): SEQ ID NO: 1647; WAN024FOC_at; Start 180; Stop 204
gattccatcaaagaccgaacgtagg

SEQ ID NO: 214372 - DNA, 25 bp, Artificial
  probe
  misc_feature (1)..(25): SEQ ID NO: 1647; WAN024FOC_at; Start 267; Stop 291
cgttgtaacattcataaaaacatcc

SEQ ID NO: 214373 - DNA, 25 bp, Artificial
  probe
  misc_feature (1)..(25): SEQ ID NO: 1647; WAN024FOC_at; Start 245; Stop 269
ggtaccaatctgatgctaaaatcgt

SEQ ID NO: 214374 - DNA, 25 bp, Artificial
  probe
  misc_feature (1)..(25): SEQ ID NO: 1647; WAN024FOC_at; Start 281; Stop 305
taaaaacatcctcttctgataatga

SEQ ID NO: 214375 - DNA, 25 bp, Artificial
  probe
  misc_feature (1)..(25): SEQ ID NO: 1647; WAN024FOC_at; Start 201; Stop 225
taggctaaacagcttgccatccgga

SEQ ID NO: 214376 - DNA, 25 bp, Artificial
  probe
  misc_feature (1)..(25): SEQ ID NO: 1647; WAN024FOC_at; Start 237; Stop 261
caagttttggtaccaatctgatgct

SEQ ID NO: 214377 - DNA, 25 bp, Artificial
  probe
  misc_feature (1)..(25): SEQ ID NO: 1647; WAN024FOC_at; Start 57; Stop 81
gggatataaaatcttgacacgattg

SEQ ID NO: 214378 - DNA, 25 bp, Artificial
  probe
  misc_feature (1)..(25): SEQ ID NO: 1647; WAN024FOC_at; Start 321; Stop 345
ttctgccgtcaatgaaattatttgc

SEQ ID NO: 214379 - DNA, 25 bp, Artificial
  probe
  misc_feature (1)..(25): SEQ ID NO: 1647; WAN024FOC_at; Start 161; Stop 185
gttgttggacaattctagggattcc

SEQ ID NO: 214380 - DNA, 25 bp, Artificial
  probe
  misc_feature (1)..(25): SEQ ID NO: 1647; WAN024FOC_at; Start 195; Stop 219
cgaacgtaggctaaacagcttgcca

SEQ ID NO: 214381 - DNA, 25 bp, Artificial
  probe
  misc_feature (1)..(25): SEQ ID NO: 1647; WAN024FOC_at; Start 184; Stop 208
ccatcaaagaccgaacgtaggctaa

SEQ ID NO: 214382 - DNA, 25 bp, Artificial
  probe
  misc_feature (1)..(25): SEQ ID NO: 1647; WAN024FOC_at; Start 30; Stop 54
taagaaactaacaaagaaggcctgc

SEQ ID NO: 214383 - DNA, 25 bp, Artificial
  probe
  misc_feature (1)..(25): SEQ ID NO: 1647; WAN024FOC_at; Start 72; Stop 96
gacacgattgatcttcacaatggca

SEQ ID NO: 214384 - DNA, 25 bp, Artificial
  probe
  misc_feature (1)..(25): SEQ ID NO: 1647; WAN024FOC_at; Start 41; Stop 65
caaagaaggcctgcaagggatataa

SEQ ID NO: 214385 - DNA, 25 bp, Artificial
  probe
  misc_feature (1)..(25): SEQ ID NO: 1647; WAN024FOC_at; Start 228; Stop 252
caattgcatcaagttttggtaccaa

SEQ ID NO: 214386 - DNA, 25 bp, Artificial
  probe
  misc_feature (1)..(25): SEQ ID NO: 1647; WAN024FOC_at; Start 188; Stop 212
caaagaccgaacgtaggctaaacag

SEQ ID NO: 214387 - DNA, 25 bp, Artificial
  probe
  misc_feature (1)..(25): SEQ ID NO: 1647; WAN024FOC_at; Start 121; Stop 145
aaaagggcaccaccaattgtcaaca

SEQ ID NO: 214388 - DNA, 25 bp, Artificial
  probe
  misc_feature (1)..(25): SEQ ID NO: 1647; WAN024FOC_at; Start 146; Stop 170
taattgttgttggaagttgttggac

SEQ ID NO: 214389 - DNA, 25 bp, Artificial
  probe
  misc_feature (1)..(25): SEQ ID NO: 1647; WAN024FOC_at; Start 77; Stop 101
gattgatcttcacaatggcaaaaag

SEQ ID NO: 214390 - DNA, 25 bp, Artificial
  probe
  misc_feature (1)..(25): SEQ ID NO: 1647; WAN024FOC_at; Start 47; Stop 71
aggcctgcaagggatataaaatctt

SEQ ID NO: 214391 - DNA, 25 bp, Artificial
  probe
  misc_feature (1)..(25): SEQ ID NO: 1647; WAN024FOC_at; Start 35; Stop 59
aactaacaaagaaggcctgcaaggg

SEQ ID NO: 214392 - DNA, 25 bp, Artificial
  probe
  misc_feature (1)..(25): SEQ ID NO: 1647; WAN024FOC_at; Start 216; Stop 240
gccatccggaatcaattgcatcaag

SEQ ID NO: 214393 - DNA, 25 bp, Artificial
  probe
  misc_feature (1)..(25): SEQ ID NO: 1647; WAN024FOC_at; Start 2; Stop 26
tgagttgcaccaaaatcggtgtccc

SEQ ID NO: 214394 - DNA, 25 bp, Artificial
  probe
  misc_feature (1)..(25): SEQ ID NO: 1647; WAN024FOC_at; Start 206; Stop 230
taaacagcttgccatccggaatcaa

SEQ ID NO: 214395 - DNA, 25 bp, Artificial
  probe
  misc_feature (1)..(25): SEQ ID NO: 1647; WAN024FOC_at; Start 331; Stop 355
aatgaaattatttgctacggtcaga

SEQ ID NO: 214396 - DNA, 25 bp, Artificial
  probe
  misc_feature (1)..(25): SEQ ID NO: 1647; WAN024FOC_at; Start 289; Stop 313
tcctcttctgataatgattcattct

SEQ ID NO: 214397 - DNA, 25 bp, Artificial
  probe
  misc_feature (1)..(25): SEQ ID NO: 1647; WAN024FOC_at; Start 313; Stop 337
taccatgcttctgccgtcaatgaaa

SEQ ID NO: 214398 - DNA, 25 bp, Artificial
  probe
  misc_feature (1)..(25): SEQ ID NO: 1647; WAN024FOC_at; Start 256; Stop 280
gatgctaaaatcgttgtaacattca

SEQ ID NO: 214399 - DNA, 25 bp, Artificial
  probe
  misc_feature (1)..(25): SEQ ID NO: 1647; WAN024FOC_at; Start 92; Stop 116
tggcaaaaagaagcgccaaaaccaa

SEQ ID NO: 214400 - DNA, 25 bp, Artificial
  probe
  misc_feature (1)..(25): SEQ ID NO: 1647; WAN024FOC_at; Start 176; Stop 200
tagggattccatcaaagaccgaacg

SEQ ID NO: 214401 - DNA, 25 bp, Artificial
  probe
  misc_feature (1)..(25): SEQ ID NO: 1259; WAN024FOD_at; Start 288; Stop 312
ctactacggaatccctttggctttg

SEQ ID NO: 214402 - DNA, 25 bp, Artificial
  probe
  misc_feature (1)..(25): SEQ ID NO: 1259; WAN024FOD_at; Start 552; Stop 576
gattaattccctcatcggtttgacc

SEQ ID NO: 214403 - DNA, 25 bp, Artificial
  probe
  misc_feature (1)..(25): SEQ ID NO: 1259; WAN024FOD_at; Start 54; Stop 78
gattccggatggcaagctgtttagc

SEQ ID NO: 214404 - DNA, 25 bp, Artificial
  probe
  misc_feature (1)..(25): SEQ ID NO: 1259; WAN024FOD_at; Start 508; Stop 532
cgagtgattattcctaatgcagcgg

SEQ ID NO: 214405 - DNA, 25 bp, Artificial
  probe
  misc_feature (1)..(25): SEQ ID NO: 1259; WAN024FOD_at; Start 399; Stop 423
tgaggcagcttatgctagtgaaacc

SEQ ID NO: 214406 - DNA, 25 bp, Artificial
  probe
  misc_feature (1)..(25): SEQ ID NO: 1259; WAN024FOD_at; Start 740; Stop 764
gaaaaatggctatttctgcacctga

SEQ ID NO: 214407 - DNA, 25 bp, Artificial
  probe
  misc_feature (1)..(25): SEQ ID NO: 1259; WAN024FOD_at; Start 187; Stop 211
gccattgtgaagatcaatcgtgtca

SEQ ID NO: 214408 - DNA, 25 bp, Artificial
  probe
  misc_feature (1)..(25): SEQ ID NO: 1259; WAN024FOD_at; Start 523; Stop 547
aatgcagcggtggtagctactccaa

SEQ ID NO: 214409 - DNA, 25 bp, Artificial
  probe
  misc_feature (1)..(25): SEQ ID NO: 1259; WAN024FOD_at; Start 719; Stop 743
gcctcggtcgtttcatcgagagaaa

SEQ ID NO: 214410 - DNA, 25 bp, Artificial
  probe
  misc_feature (1)..(25): SEQ ID NO: 1259; WAN024FOD_at; Start 566; Stop 590
tcggtttgaccaagggaacatctct

SEQ ID NO: 214411 - DNA, 25 bp, Artificial
  probe
  misc_feature (1)..(25): SEQ ID NO: 1259; WAN024FOD_at; Start 609; Stop 633
tgtggaagtctttgcccaagctcag

SEQ ID NO: 214412 - DNA, 25 bp, Artificial
  probe
  misc_feature (1)..(25): SEQ ID NO: 1259; WAN024FOD_at; Start 447; Stop 471
taatcctggtgagattgaggcggca

SEQ ID NO: 214413 - DNA, 25 bp, Artificial
  probe
  misc_feature (1)..(25): SEQ ID NO: 1259; WAN024FOD_at; Start 433; Stop 457
gccattctctcagttaatcctggtg

SEQ ID NO: 214414 - DNA, 25 bp, Artificial
  probe
  misc_feature (1)..(25): SEQ ID NO: 1259; WAN024FOD_at; Start 258; Stop 282
gacaccgattttggtgcaactcatg

SEQ ID NO: 214415 - DNA, 25 bp, Artificial
  probe
  misc_feature (1)..(25): SEQ ID NO: 1259; WAN024FOD_at; Start 649; Stop 673
gattatcgctattttgaacgcttca

SEQ ID NO: 214416 - DNA, 25 bp, Artificial
  probe
  misc_feature (1)..(25): SEQ ID NO: 1259; WAN024FOD_at; Start 703; Stop 727
aatatcggaattgaaagcctcggtc

SEQ ID NO: 214417 - DNA, 25 bp, Artificial
  probe
  misc_feature (1)..(25): SEQ ID NO: 1259; WAN024FOD_at; Start 581; Stop 605
gaacatctctagcttttagtgcggg

SEQ ID NO: 214418 - DNA, 25 bp, Artificial
  probe
  misc_feature (1)..(25): SEQ ID NO: 1259; WAN024FOD_at; Start 363; Stop 387
agctgcagcttttgcgattgtcgcc

SEQ ID NO: 214419 - DNA, 25 bp, Artificial
  probe
  misc_feature (1)..(25): SEQ ID NO: 1259; WAN024FOD_at; Start 310; Stop 334
ttgaaagccctcaatcagcaatggg

SEQ ID NO: 214420 - DNA, 25 bp, Artificial
  probe
  misc_feature (1)..(25): SEQ ID NO: 1259; WAN024FOD_at; Start 485; Stop 509
tgacccgagcgcaagtttatcgacg

SEQ ID NO: 214421 - DNA, 25 bp, Artificial
  probe
  misc_feature (1)..(25): SEQ ID NO: 1259; WAN024FOD_at; Start 37; Stop 61
caaaacttgatgcaattgattccgg

SEQ ID NO: 214422 - DNA, 25 bp, Artificial
  probe
  misc_feature (1)..(25): SEQ ID NO: 1259; WAN024FOD_at; Start 760; Stop 784
cctgatacagtgcaaacagatgtga

SEQ ID NO: 214423 - DNA, 25 bp, Artificial
  probe
  misc_feature (1)..(25): SEQ ID NO: 1259; WAN024FOD_at; Start 414; Stop 438
tagtgaaaccattcgtgcagccatt

SEQ ID NO: 214424 - DNA, 25 bp, Artificial
  probe
  misc_feature (1)..(25): SEQ ID NO: 1259; WAN024FOD_at; Start 211; Stop 235
aagattttatatcccttgcaggcct

SEQ ID NO: 214425 - DNA, 25 bp, Artificial
  probe
  misc_feature (1)..(25): SEQ ID NO: 1259; WAN024FOD_at; Start 80; Stop 104
tacgttcggtctttgatggaatccc

SEQ ID NO: 214426 - DNA, 25 bp, Artificial
  probe
  misc_feature (1)..(25): SEQ ID NO: 1259; WAN024FOD_at; Start 94; Stop 118
gatggaatccctagaattgtccaac

SEQ ID NO: 214427 - DNA, 25 bp, Artificial
  probe
  misc_feature (1)..(25): SEQ ID NO: 1259; WAN024FOD_at; Start 273; Stop 297
gcaactcatgttgacctactacgga

SEQ ID NO: 214428 - DNA, 25 bp, Artificial
  probe
  misc_feature (1)..(25): SEQ ID NO: 1259; WAN024FOD_at; Start 348; Stop 372
tatcaatgcgattccagctgcagct

SEQ ID NO: 214429 - DNA, 25 bp, Artificial
  probe
  misc_feature (1)..(25): SEQ ID NO: 1259; WAN024FOD_at; Start 468; Stop 492
ggcacgcagtctgggtatgacccga

SEQ ID NO: 214430 - DNA, 25 bp, Artificial
  probe
  misc_feature (1)..(25): SEQ ID NO: 1259; WAN024FOD_at; Start 378; Stop 402
gattgtcgcctttgcctttaatgag

SEQ ID NO: 214431 - DNA, 25 bp, Artificial
  probe
  misc_feature (1)..(25): SEQ ID NO: 1259; WAN024FOD_at; Start 772; Stop 796
caaacagatgtgaaaggagaccttc

SEQ ID NO: 214432 - DNA, 25 bp, Artificial
  probe
  misc_feature (1)..(25): SEQ ID NO: 1259; WAN024FOD_at; Start 334; Stop 358
ggaactggtctcaatatcaatgcga

SEQ ID NO: 214433 - DNA, 25 bp, Artificial
  probe
  misc_feature (1)..(25): SEQ ID NO: 1259; WAN024FOD_at; Start 141; Stop 165
gacaattggtggtgccctttttggc

SEQ ID NO: 214434 - DNA, 25 bp, Artificial
  probe
  misc_feature (1)..(25): SEQ ID NO: 1259; WAN024FOD_at; Start 14; Stop 38
cgattttagcatcagattggtacca

SEQ ID NO: 214435 - DNA, 25 bp, Artificial
  probe
  misc_feature (1)..(25): SEQ ID NO: 2220; WAN024FOE_at; Start 159; Stop 183
tacattttgtgaattaacaggattg

SEQ ID NO: 214436 - DNA, 25 bp, Artificial
  probe
  misc_feature (1)..(25): SEQ ID NO: 2220; WAN024FOE_at; Start 644; Stop 668
taattaacgtatgggtacataagaa

SEQ ID NO: 214437 - DNA, 25 bp, Artificial
  probe
  misc_feature (1)..(25): SEQ ID NO: 2220; WAN024FOE_at; Start 512; Stop 536
taatgtctagagaaatgatggatga

SEQ ID NO: 214438 - DNA, 25 bp, Artificial
  probe
  misc_feature (1)..(25): SEQ ID NO: 2220; WAN024FOE_at; Start 338; Stop 362
caaagagtatgaacgagtataacgg

SEQ ID NO: 214439 - DNA, 25 bp, Artificial
  probe
  misc_feature (1)..(25): SEQ ID NO: 2220; WAN024FOE_at; Start 402; Stop 426
taaagtttgggaaatgtgtagacag

SEQ ID NO: 214440 - DNA, 25 bp, Artificial
  probe
  misc_feature (1)..(25): SEQ ID NO: 2220; WAN024FOE_at; Start 215; Stop 239
ttgttggtttatgccattatagacg

SEQ ID NO: 214441 - DNA, 25 bp, Artificial
  probe
  misc_feature (1)..(25): SEQ ID NO: 2220; WAN024FOE_at; Start 655; Stop 679
tgggtacataagaaacaactaactg

SEQ ID NO: 214442 - DNA, 25 bp, Artificial
  probe
  misc_feature (1)..(25): SEQ ID NO: 2220; WAN024FOE_at; Start 697; Stop 721
ttttcaacagaagaaccaggattct

SEQ ID NO: 214443 - DNA, 25 bp, Artificial
  probe
  misc_feature (1)..(25): SEQ ID NO: 2220; WAN024FOE_at; Start 603; Stop 627
tagttacaatactcgtatgattggt

SEQ ID NO: 214444 - DNA, 25 bp, Artificial
  probe
  misc_feature (1)..(25): SEQ ID NO: 2220; WAN024FOE_at; Start 48; Stop 72
tcaagaccaggacctatatatccct

SEQ ID NO: 214445 - DNA, 25 bp, Artificial
  probe
  misc_feature (1)..(25): SEQ ID NO: 2220; WAN024FOE_at; Start 355; Stop 379
tataacgggtatactgctgaagagt

SEQ ID NO: 214446 - DNA, 25 bp, Artificial
  probe
  misc_feature (1)..(25): SEQ ID NO: 2220; WAN024FOE_at; Start 324; Stop 348
tgtaatattaccatcaaagagtatg

SEQ ID NO: 214447 - DNA, 25 bp, Artificial
  probe
  misc_feature (1)..(25): SEQ ID NO: 2220; WAN024FOE_at; Start 593; Stop 617
caagatatgatagttacaatactcg

SEQ ID NO: 214448 - DNA, 25 bp, Artificial
  probe
  misc_feature (1)..(25): SEQ ID NO: 2220; WAN024FOE_at; Start 616; Stop 640
cgtatgattggttttgttgccgaac

SEQ ID NO: 214449 - DNA, 25 bp, Artificial
  probe
  misc_feature (1)..(25): SEQ ID NO: 2220; WAN024FOE_at; Start 528; Stop 552
gatggatgaatattgcagttggtta

SEQ ID NO: 214450 - DNA, 25 bp, Artificial
  probe
  misc_feature (1)..(25): SEQ ID NO: 2220; WAN024FOE_at; Start 68; Stop 92
tccctatattggtgggcgcggataa

SEQ ID NO: 214451 - DNA, 25 bp, Artificial
  probe
  misc_feature (1)..(25): SEQ ID NO: 2220; WAN024FOE_at; Start 37; Stop 61
tataatcaagttcaagaccaggacc

SEQ ID NO: 214452 - DNA, 25 bp, Artificial
  probe
  misc_feature (1)..(25): SEQ ID NO: 2220; WAN024FOE_at; Start 227; Stop 251
gccattatagacgttattttgggaa

SEQ ID NO: 214453 - DNA, 25 bp, Artificial
  probe
  misc_feature (1)..(25): SEQ ID NO: 2220; WAN024FOE_at; Start 82; Stop 106
ggcgcggataagaatattggagaaa

SEQ ID NO: 214454 - DNA, 25 bp, Artificial
  probe
  misc_feature (1)..(25): SEQ ID NO: 2220; WAN024FOE_at; Start 114; Stop 138
tttaagagataatcagggagataat

SEQ ID NO: 214455 - DNA, 25 bp, Artificial
  probe
  misc_feature (1)..(25): SEQ ID NO: 2220; WAN024FOE_at; Start 448; Stop 472
gattaccttgatgcttttaattggt

SEQ ID NO: 214456 - DNA, 25 bp, Artificial
  probe
  misc_feature (1)..(25): SEQ ID NO: 2220; WAN024FOE_at; Start 370; Stop 394
gctgaagagttttttaacaagaatc

SEQ ID NO: 214457 - DNA, 25 bp, Artificial
  probe
  misc_feature (1)..(25): SEQ ID NO: 2220; WAN024FOE_at; Start 9; Stop 33
gaagctatacgtcgcaacacataaa

SEQ ID NO: 214458 - DNA, 25 bp, Artificial
  probe
  misc_feature (1)..(25): SEQ ID NO: 2220; WAN024FOE_at; Start 387; Stop 411
caagaatcacgatcataaagtttgg

SEQ ID NO: 214459 - DNA, 25 bp, Artificial
  probe
  misc_feature (1)..(25): SEQ ID NO: 2220; WAN024FOE_at; Start 433; Stop 457
tcagaaaacaataaagattaccttg

SEQ ID NO: 214460 - DNA, 25 bp, Artificial
  probe
  misc_feature (1)..(25): SEQ ID NO: 2220; WAN024FOE_at; Start 145; Stop 169
tctgatagaaactttacattttgtg

SEQ ID NO: 214461 - DNA, 25 bp, Artificial
  probe
  misc_feature (1)..(25): SEQ ID NO: 2220; WAN024FOE_at; Start 2; Stop 26
tggaagtgaagctatacgtcgcaac

SEQ ID NO: 214462 - DNA, 25 bp, Artificial
  probe
  misc_feature (1)..(25): SEQ ID NO: 2220; WAN024FOE_at; Start 417; Stop 441
gtgtagacagattatttcagaaaac

SEQ ID NO: 214463 - DNA, 25 bp, Artificial
  probe
  misc_feature (1)..(25): SEQ ID NO: 2220; WAN024FOE_at; Start 175; Stop 199
acaggattgtattggatttggaaaa

SEQ ID NO: 214464 - DNA, 25 bp, Artificial
  probe
  misc_feature (1)..(25): SEQ ID NO: 2220; WAN024FOE_at; Start 538; Stop 562
tattgcagttggttatttccgattc

SEQ ID NO: 214465 - DNA, 25 bp, Artificial
  probe
  misc_feature (1)..(25): SEQ ID NO: 2220; WAN024FOE_at; Start 22; Stop 46
gcaacacataaatcttataatcaag

SEQ ID NO: 214466 - DNA, 25 bp, Artificial
  probe
  misc_feature (1)..(25): SEQ ID NO: 2220; WAN024FOE_at; Start 555; Stop 579
tccgattctttttgaactagataag

SEQ ID NO: 214467 - DNA, 25 bp, Artificial
  probe
  misc_feature (1)..(25): SEQ ID NO: 2220; WAN024FOE_at; Start 62; Stop 86
tatatatccctatattggtgggcgc

SEQ ID NO: 214468 - DNA, 25 bp, Artificial
  probe
  misc_feature (1)..(25): SEQ ID NO: 2220; WAN024FOE_at; Start 712; Stop 736
ccaggattcttacaaagaattcaga

SEQ ID NO: 214469 - DNA, 25 bp, Artificial
  probe
  misc_feature (1)..(25): SEQ ID NO: 3983; WAN024FOF_at; Start 366; Stop 390
tgtaggaactgttatagtaagctct

SEQ ID NO: 214470 - DNA, 25 bp, Artificial
  probe
  misc_feature (1)..(25): SEQ ID NO: 3983; WAN024FOF_at; Start 873; Stop 897
tcaatgggatgcttcggcgaattct

SEQ ID NO: 214471 - DNA, 25 bp, Artificial
  probe
  misc_feature (1)..(25): SEQ ID NO: 3983; WAN024FOF_at; Start 731; Stop 755
cgtatatgacttattggctgacagc

SEQ ID NO: 214472 - DNA, 25 bp, Artificial
  probe
  misc_feature (1)..(25): SEQ ID NO: 3983; WAN024FOF_at; Start 409; Stop 433
aacgagctagccttaacatattcag

SEQ ID NO: 214473 - DNA, 25 bp, Artificial
  probe
  misc_feature (1)..(25): SEQ ID NO: 3983; WAN024FOF_at; Start 333; Stop 357
ggtaaggaatacaatgttctgccag

SEQ ID NO: 214474 - DNA, 25 bp, Artificial
  probe
  misc_feature (1)..(25): SEQ ID NO: 3983; WAN024FOF_at; Start 448; Stop 472
tcacggtatggactaggttttcact

SEQ ID NO: 214475 - DNA, 25 bp, Artificial
  probe
  misc_feature (1)..(25): SEQ ID NO: 3983; WAN024FOF_at; Start 479; Stop 503
catttactccgaattatttcctgag

SEQ ID NO: 214476 - DNA, 25 bp, Artificial
  probe
  misc_feature (1)..(25): SEQ ID NO: 3983; WAN024FOF_at; Start 463; Stop 487
ggttttcactacacatcatttactc

SEQ ID NO: 214477 - DNA, 25 bp, Artificial
  probe
  misc_feature (1)..(25): SEQ ID NO: 3983; WAN024FOF_at; Start 436; Stop 460
ggtgtgatccgctcacggtatggac

SEQ ID NO: 214478 - DNA, 25 bp, Artificial
  probe
  misc_feature (1)..(25): SEQ ID NO: 3983; WAN024FOF_at; Start 497; Stop 521
tcctgagtatattgctggaatatgt

SEQ ID NO: 214479 - DNA, 25 bp, Artificial
  probe
  misc_feature (1)..(25): SEQ ID NO: 3983; WAN024FOF_at; Start 61; Stop 85
ttttatccttggctaatagcatggc

SEQ ID NO: 214480 - DNA, 25 bp, Artificial
  probe
  misc_feature (1)..(25): SEQ ID NO: 3983; WAN024FOF_at; Start 248; Stop 272
taagttatgataatggtaacgcctc

SEQ ID NO: 214481 - DNA, 25 bp, Artificial
  probe
  misc_feature (1)..(25): SEQ ID NO: 3983; WAN024FOF_at; Start 887; Stop 911
cggcgaattcttatctttatgtaga

SEQ ID NO: 214482 - DNA, 25 bp, Artificial
  probe
  misc_feature (1)..(25): SEQ ID NO: 3983; WAN024FOF_at; Start 860; Stop 884
ttggaactcatattcaatgggatgc

SEQ ID NO: 214483 - DNA, 25 bp, Artificial
  probe
  misc_feature (1)..(25): SEQ ID NO: 3983; WAN024FOF_at; Start 396; Stop 420
tggtattattcctaacgagctagcc

SEQ ID NO: 214484 - DNA, 25 bp, Artificial
  probe
  misc_feature (1)..(25): SEQ ID NO: 3983; WAN024FOF_at; Start 590; Stop 614
tttataaatacacagatacccgtct

SEQ ID NO: 214485 - DNA, 25 bp, Artificial
  probe
  misc_feature (1)..(25): SEQ ID NO: 3983; WAN024FOF_at; Start 350; Stop 374
tctgccagattggagttgtaggaac

SEQ ID NO: 214486 - DNA, 25 bp, Artificial
  probe
  misc_feature (1)..(25): SEQ ID NO: 3983; WAN024FOF_at; Start 636; Stop 660
ccttcttttgatatcgttttcgaga

SEQ ID NO: 214487 - DNA, 25 bp, Artificial
  probe
  misc_feature (1)..(25): SEQ ID NO: 3983; WAN024FOF_at; Start 745; Stop 769
tggctgacagcaaaatttgatagta

SEQ ID NO: 214488 - DNA, 25 bp, Artificial
  probe
  misc_feature (1)..(25): SEQ ID NO: 3983; WAN024FOF_at; Start 258; Stop 282
taatggtaacgcctcctttgtagca

SEQ ID NO: 214489 - DNA, 25 bp, Artificial
  probe
  misc_feature (1)..(25): SEQ ID NO: 3983; WAN024FOF_at; Start 290; Stop 314
tgactcttatatattcttcaaggga

SEQ ID NO: 214490 - DNA, 25 bp, Artificial
  probe
  misc_feature (1)..(25): SEQ ID NO: 3983; WAN024FOF_at; Start 75; Stop 99
aatagcatggctgtttacttcgacc

SEQ ID NO: 214491 - DNA, 25 bp, Artificial
  probe
  misc_feature (1)..(25): SEQ ID NO: 3983; WAN024FOF_at; Start 137; Stop 161
aaacttgggagtatgtgggattatt

SEQ ID NO: 214492 - DNA, 25 bp, Artificial
  probe
  misc_feature (1)..(25): SEQ ID NO: 3983; WAN024FOF_at; Start 1031; Stop 1055
tgttaattttttggtcagtaagagc

SEQ ID NO: 214493 - DNA, 25 bp, Artificial
  probe
  misc_feature (1)..(25): SEQ ID NO: 3983; WAN024FOF_at; Start 649; Stop 673
tcgttttcgagaagatttgtatcaa

SEQ ID NO: 214494 - DNA, 25 bp, Artificial
  probe
  misc_feature (1)..(25): SEQ ID NO: 3983; WAN024FOF_at; Start 839; Stop 863
ggagataccctctaagattatttgg

SEQ ID NO: 214495 - DNA, 25 bp, Artificial
  probe
  misc_feature (1)..(25): SEQ ID NO: 3983; WAN024FOF_at; Start 268; Stop 292
gcctcctttgtagcatatactttga

SEQ ID NO: 214496 - DNA, 25 bp, Artificial
  probe
  misc_feature (1)..(25): SEQ ID NO: 3983; WAN024FOF_at; Start 821; Stop 845
tcggtcaagaaggtttaaggagata

SEQ ID NO: 214497 - DNA, 25 bp, Artificial
  probe
  misc_feature (1)..(25): SEQ ID NO: 3983; WAN024FOF_at; Start 910; Stop 934
gattcgtcgtacattaatatactta

SEQ ID NO: 214498 - DNA, 25 bp, Artificial
  probe
  misc_feature (1)..(25): SEQ ID NO: 3983; WAN024FOF_at; Start 804; Stop 828
gagtcaaaggttgagattcggtcaa

SEQ ID NO: 214499 - DNA, 25 bp, Artificial
  probe
  misc_feature (1)..(25): SEQ ID NO: 3983; WAN024FOF_at; Start 1110; Stop 1134
tgcgagaacgtttttagatgaaaga

SEQ ID NO: 214500 - DNA, 25 bp, Artificial
  probe
  misc_feature (1)..(25): SEQ ID NO: 3983; WAN024FOF_at; Start 708; Stop 732
tactcttatttatccaattatggcg

SEQ ID NO: 214501 - DNA, 25 bp, Artificial
  probe
  misc_feature (1)..(25): SEQ ID NO: 3983; WAN024FOF_at; Start 1046; Stop 1070
cagtaagagcttgtattgacccaca

SEQ ID NO: 214502 - DNA, 25 bp, Artificial
  probe
  misc_feature (1)..(25): SEQ ID NO: 3983; WAN024FOF_at; Start 1; Stop 25
gtgagtctatcaagagttaaaactg

SEQ ID NO: 214503 - DNA, 25 bp, Artificial
  probe
  misc_feature (1)..(25): SEQ ID NO: 883; WAN024FOG_at; Start 312; Stop 336
gaatattgagggaaaggtcgtcagt

SEQ ID NO: 214504 - DNA, 25 bp, Artificial
  probe
  misc_feature (1)..(25): SEQ ID NO: 883; WAN024FOG_at; Start 232; Stop 256
caagatgactttgagttagcaaaac

SEQ ID NO: 214505 - DNA, 25 bp, Artificial
  probe
  misc_feature (1)..(25): SEQ ID NO: 883; WAN024FOG_at; Start 552; Stop 576
tccaagtgagttatggcatgtgtca

SEQ ID NO: 214506 - DNA, 25 bp, Artificial
  probe
  misc_feature (1)..(25): SEQ ID NO: 883; WAN024FOG_at; Start 670; Stop 694
ggagtttggccaagtaatcctattc

SEQ ID NO: 214507 - DNA, 25 bp, Artificial
  probe
  misc_feature (1)..(25): SEQ ID NO: 883; WAN024FOG_at; Start 402; Stop 426
tgaagttgacgcaattgatgagtgt

SEQ ID NO: 214508 - DNA, 25 bp, Artificial
  probe
  misc_feature (1)..(25): SEQ ID NO: 883; WAN024FOG_at; Start 33; Stop 57
tatatgtgtatcgaataattacgat

SEQ ID NO: 214509 - DNA, 25 bp, Artificial
  probe
  misc_feature (1)..(25): SEQ ID NO: 883; WAN024FOG_at; Start 217; Stop 241
caagatattagttttcaagatgact

SEQ ID NO: 214510 - DNA, 25 bp, Artificial
  probe
  misc_feature (1)..(25): SEQ ID NO: 883; WAN024FOG_at; Start 79; Stop 103
tcatctttatctagacaaaaggatg

SEQ ID NO: 214511 - DNA, 25 bp, Artificial
  probe
  misc_feature (1)..(25): SEQ ID NO: 883; WAN024FOG_at; Start 616; Stop 640
caatggttattgaaaaaatactcta

SEQ ID NO: 214512 - DNA, 25 bp, Artificial
  probe
  misc_feature (1)..(25): SEQ ID NO: 883; WAN024FOG_at; Start 368; Stop 392
caaaggcggctggtaaatctataag

SEQ ID NO: 214513 - DNA, 25 bp, Artificial
  probe
  misc_feature (1)..(25): SEQ ID NO: 883; WAN024FOG_at; Start 563; Stop 587
tatggcatgtgtcagatgggaaatc

SEQ ID NO: 214514 - DNA, 25 bp, Artificial
  probe
  misc_feature (1)..(25): SEQ ID NO: 883; WAN024FOG_at; Start 483; Stop 507
tacctggcatttatatggaacagac

SEQ ID NO: 214515 - DNA, 25 bp, Artificial
  probe
  misc_feature (1)..(25): SEQ ID NO: 883; WAN024FOG_at; Start 389; Stop 413
taagtgcccctgttgaagttgacgc

SEQ ID NO: 214516 - DNA, 25 bp, Artificial
  probe
  misc_feature (1)..(25): SEQ ID NO: 883; WAN024FOG_at; Start 376; Stop 400
gctggtaaatctataagtgcccctg

SEQ ID NO: 214517 - DNA, 25 bp, Artificial
  probe
  misc_feature (1)..(25): SEQ ID NO: 883; WAN024FOG_at; Start 468; Stop 492
tagtataatcggtcctacctggcat

SEQ ID NO: 214518 - DNA, 25 bp, Artificial
  probe
  misc_feature (1)..(25): SEQ ID NO: 883; WAN024FOG_at; Start 92; Stop 116
gacaaaaggatgttaattatgaact

SEQ ID NO: 214519 - DNA, 25 bp, Artificial
  probe
  misc_feature (1)..(25): SEQ ID NO: 883; WAN024FOG_at; Start 522; Stop 546
gaagttaatcaattcgccagtatta

SEQ ID NO: 214520 - DNA, 25 bp, Artificial
  probe
  misc_feature (1)..(25): SEQ ID NO: 883; WAN024FOG_at; Start 597; Stop 621
taattattttgatgcgatacaatgg

SEQ ID NO: 214521 - DNA, 25 bp, Artificial
  probe
  misc_feature (1)..(25): SEQ ID NO: 883; WAN024FOG_at; Start 677; Stop 701
ggccaagtaatcctattctattaaa

SEQ ID NO: 214522 - DNA, 25 bp, Artificial
  probe
  misc_feature (1)..(25): SEQ ID NO: 883; WAN024FOG_at; Start 318; Stop 342
tgagggaaaggtcgtcagtttttca

SEQ ID NO: 214523 - DNA, 25 bp, Artificial
  probe
  misc_feature (1)..(25): SEQ ID NO: 883; WAN024FOG_at; Start 458; Stop 482
caaatcaatttagtataatcggtcc

SEQ ID NO: 214524 - DNA, 25 bp, Artificial
  probe
  misc_feature (1)..(25): SEQ ID NO: 883; WAN024FOG_at; Start 333; Stop 357
cagtttttcaaatatttttcatggg

SEQ ID NO: 214525 - DNA, 25 bp, Artificial
  probe
  misc_feature (1)..(25): SEQ ID NO: 883; WAN024FOG_at; Start 250; Stop 274
gcaaaactagaatcttattgtagaa

SEQ ID NO: 214526 - DNA, 25 bp, Artificial
  probe
  misc_feature (1)..(25): SEQ ID NO: 883; WAN024FOG_at; Start 572; Stop 596
tgtcagatgggaaatctttaaacct

SEQ ID NO: 214527 - DNA, 25 bp, Artificial
  probe
  misc_feature (1)..(25): SEQ ID NO: 883; WAN024FOG_at; Start 172; Stop 196
tttggaggcaaacaagcaaaaggtg

SEQ ID NO: 214528 - DNA, 25 bp, Artificial
  probe
  misc_feature (1)..(25): SEQ ID NO: 883; WAN024FOG_at; Start 141; Stop 165
tggatttaattctgctgctgaggct

SEQ ID NO: 214529 - DNA, 25 bp, Artificial
  probe
  misc_feature (1)..(25): SEQ ID NO: 883; WAN024FOG_at; Start 278; Stop 302
ccatatttggagtagcaggagtagc

SEQ ID NO: 214530 - DNA, 25 bp, Artificial
  probe
  misc_feature (1)..(25): SEQ ID NO: 883; WAN024FOG_at; Start 537; Stop 561
gccagtattagtttttccaagtgag

SEQ ID NO: 214531 - DNA, 25 bp, Artificial
  probe
  misc_feature (1)..(25): SEQ ID NO: 883; WAN024FOG_at; Start 265; Stop 289
tattgtagaaattccatatttggag

SEQ ID NO: 214532 - DNA, 25 bp, Artificial
  probe
  misc_feature (1)..(25): SEQ ID NO: 883; WAN024FOG_at; Start 157; Stop 181
gctgaggctttgaattttggaggca

SEQ ID NO: 214533 - DNA, 25 bp, Artificial
  probe
  misc_feature (1)..(25): SEQ ID NO: 883; WAN024FOG_at; Start 418; Stop 442
gatgagtgtttgattattattccga

SEQ ID NO: 214534 - DNA, 25 bp, Artificial
  probe
  misc_feature (1)..(25): SEQ ID NO: 883; WAN024FOG_at; Start 515; Stop 539
tacagatgaagttaatcaattcgcc

SEQ ID NO: 214535 - DNA, 25 bp, Artificial
  probe
  misc_feature (1)..(25): SEQ ID NO: 883; WAN024FOG_at; Start 180; Stop 204
caaacaagcaaaaggtgattatcta

SEQ ID NO: 214536 - DNA, 25 bp, Artificial
  probe
  misc_feature (1)..(25): SEQ ID NO: 883; WAN024FOG_at; Start 499; Stop 523
ggaacagactatgcattacagatga

SEQ ID NO: 214537 - DNA, 25 bp, Artificial
  probe
  misc_feature (1)..(25): SEQ ID NO: 5204; WAN024FOH_at; Start 578; Stop 602
gacatgtaggcagattcaatattca

SEQ ID NO: 214538 - DNA, 25 bp, Artificial
  probe
  misc_feature (1)..(25): SEQ ID NO: 5204; WAN024FOH_at; Start 471; Stop 495
taaagttatacataatgccagggat

SEQ ID NO: 214539 - DNA, 25 bp, Artificial
  probe
  misc_feature (1)..(25): SEQ ID NO: 5204; WAN024FOH_at; Start 752; Stop 776
tgaatcggtattcggatatgcaatc

SEQ ID NO: 214540 - DNA, 25 bp, Artificial
  probe
  misc_feature (1)..(25): SEQ ID NO: 5204; WAN024FOH_at; Start 520; Stop 544
catcttcgccgagtatttcggacaa

SEQ ID NO: 214541 - DNA, 25 bp, Artificial
  probe
  misc_feature (1)..(25): SEQ ID NO: 5204; WAN024FOH_at; Start 15; Stop 39
gcatattccaacaggaggtttgttt

SEQ ID NO: 214542 - DNA, 25 bp, Artificial
  probe
  misc_feature (1)..(25): SEQ ID NO: 5204; WAN024FOH_at; Start 320; Stop 344
gagttcctgtaagaatagcgcatag

SEQ ID NO: 214543 - DNA, 25 bp, Artificial
  probe
  misc_feature (1)..(25): SEQ ID NO: 5204; WAN024FOH_at; Start 1000; Stop 1024
tctagagaaaatattgacctagctc

SEQ ID NO: 214544 - DNA, 25 bp, Artificial
  probe
  misc_feature (1)..(25): SEQ ID NO: 5204; WAN024FOH_at; Start 895; Stop 919
gagtgcatcttcacaaacagtatcc

SEQ ID NO: 214545 - DNA, 25 bp, Artificial
  probe
  misc_feature (1)..(25): SEQ ID NO: 5204; WAN024FOH_at; Start 798; Stop 822
aatgttattaccgagtttatacgag

SEQ ID NO: 214546 - DNA, 25 bp, Artificial
  probe
  misc_feature (1)..(25): SEQ ID NO: 5204; WAN024FOH_at; Start 250; Stop 274
tacgatgttgtacatgttcacggga

SEQ ID NO: 214547 - DNA, 25 bp, Artificial
  probe
  misc_feature (1)..(25): SEQ ID NO: 5204; WAN024FOH_at; Start 439; Stop 463
gcaggagaatggctttttaaggata

SEQ ID NO: 214548 - DNA, 25 bp, Artificial
  probe
  misc_feature (1)..(25): SEQ ID NO: 5204; WAN024FOH_at; Start 507; Stop 531
tagttttaatcctcatcttcgccga

SEQ ID NO: 214549 - DNA, 25 bp, Artificial
  probe
  misc_feature (1)..(25): SEQ ID NO: 5204; WAN024FOH_at; Start 926; Stop 950
taccaattgacaacgtaagtacttg

SEQ ID NO: 214550 - DNA, 25 bp, Artificial
  probe
  misc_feature (1)..(25): SEQ ID NO: 5204; WAN024FOH_at; Start 192; Stop 216
gaaatcctcaatactggcatatatg

SEQ ID NO: 214551 - DNA, 25 bp, Artificial
  probe
  misc_feature (1)..(25): SEQ ID NO: 5204; WAN024FOH_at; Start 486; Stop 510
tgccagggatgtagaaaaatatagt

SEQ ID NO: 214552 - DNA, 25 bp, Artificial
  probe
  misc_feature (1)..(25): SEQ ID NO: 5204; WAN024FOH_at; Start 108; Stop 132
gattctagctaccaataaaccgttg

SEQ ID NO: 214553 - DNA, 25 bp, Artificial
  probe
  misc_feature (1)..(25): SEQ ID NO: 5204; WAN024FOH_at; Start 771; Stop 795
gcaatcgtttatttctgctatggat

SEQ ID NO: 214554 - DNA, 25 bp, Artificial
  probe
  misc_feature (1)..(25): SEQ ID NO: 5204; WAN024FOH_at; Start 268; Stop 292
cacgggagtagtgctcttatgtcaa

SEQ ID NO: 214555 - DNA, 25 bp, Artificial
  probe
  misc_feature (1)..(25): SEQ ID NO: 5204; WAN024FOH_at; Start 232; Stop 256
ctcttaaaagtaggaaaatacgatg

SEQ ID NO: 214556 - DNA, 25 bp, Artificial
  probe
  misc_feature (1)..(25): SEQ ID NO: 5204; WAN024FOH_at; Start 68; Stop 92
catacctcgaatacatggacttgag

SEQ ID NO: 214557 - DNA, 25 bp, Artificial
  probe
  misc_feature (1)..(25): SEQ ID NO: 5204; WAN024FOH_at; Start 369; Stop 393
tctactagacagaatgttacgtcct

SEQ ID NO: 214558 - DNA, 25 bp, Artificial
  probe
  misc_feature (1)..(25): SEQ ID NO: 5204; WAN024FOH_at; Start 878; Stop 902
caacgacaatttctgatgagtgcat

SEQ ID NO: 214559 - DNA, 25 bp, Artificial
  probe
  misc_feature (1)..(25): SEQ ID NO: 5204; WAN024FOH_at; Start 208; Stop 232
gcatatatgagagaattccttgaac

SEQ ID NO: 214560 - DNA, 25 bp, Artificial
  probe
  misc_feature (1)..(25): SEQ ID NO: 5204; WAN024FOH_at; Start 414; Stop 438
tcaatcttgggcgtgtggtgaaaag

SEQ ID NO: 214561 - DNA, 25 bp, Artificial
  probe
  misc_feature (1)..(25): SEQ ID NO: 5204; WAN024FOH_at; Start 1015; Stop 1039
gacctagctcaaaaatcaaactatg

SEQ ID NO: 214562 - DNA, 25 bp, Artificial
  probe
  misc_feature (1)..(25): SEQ ID NO: 5204; WAN024FOH_at; Start 96; Stop 120
aattgaagtgacgattctagctacc

SEQ ID NO: 214563 - DNA, 25 bp, Artificial
  probe
  misc_feature (1)..(25): SEQ ID NO: 5204; WAN024FOH_at; Start 1031; Stop 1055
caaactatgatatcaggattgaggc

SEQ ID NO: 214564 - DNA, 25 bp, Artificial
  probe
  misc_feature (1)..(25): SEQ ID NO: 5204; WAN024FOH_at; Start 678; Stop 702
cggtgaaggagaaaaagtagaagat

SEQ ID NO: 214565 - DNA, 25 bp, Artificial
  probe
  misc_feature (1)..(25): SEQ ID NO: 5204; WAN024FOH_at; Start 536; Stop 560
ttcggacaacacattcattaaaaga

SEQ ID NO: 214566 - DNA, 25 bp, Artificial
  probe
  misc_feature (1)..(25): SEQ ID NO: 5204; WAN024FOH_at; Start 827; Stop 851
tacctttagttgctattgagtggca

SEQ ID NO: 214567 - DNA, 25 bp, Artificial
  probe
  misc_feature (1)..(25): SEQ ID NO: 5204; WAN024FOH_at; Start 402; Stop 426
cactttatatactcaatcttgggcg

SEQ ID NO: 214568 - DNA, 25 bp, Artificial
  probe
  misc_feature (1)..(25): SEQ ID NO: 5204; WAN024FOH_at; Start 559; Stop 583
gaaaatacacttgcattaggacatg

SEQ ID NO: 214569 - DNA, 25 bp, Artificial
  probe
  misc_feature (1)..(25): SEQ ID NO: 5204; WAN024FOH_at; Start 1046; Stop 1070
ggattgaggctaaaaaattagagca

SEQ ID NO: 214570 - DNA, 25 bp, Artificial
  probe
  misc_feature (1)..(25): SEQ ID NO: 5204; WAN024FOH_at; Start 335; Stop 359
tagcgcatagtcataatacaacgtg

SEQ ID NO: 214571 - DNA, 25 bp, Artificial
  probe
  misc_feature (1)..(25): SEQ ID NO: 1882; WAN024FOI_at; Start 214; Stop 238
ggtggtcctgctacatttatgaatg

SEQ ID NO: 214572 - DNA, 25 bp, Artificial
  probe
  misc_feature (1)..(25): SEQ ID NO: 1882; WAN024FOI_at; Start 453; Stop 477
aaatttgattgcagaattagttgag

SEQ ID NO: 214573 - DNA, 25 bp, Artificial
  probe
  misc_feature (1)..(25): SEQ ID NO: 1882; WAN024FOI_at; Start 349; Stop 373
gatttagtagtcatagaggatatta

SEQ ID NO: 214574 - DNA, 25 bp, Artificial
  probe
  misc_feature (1)..(25): SEQ ID NO: 1882; WAN024FOI_at; Start 112; Stop 136
ggtttttcagactatcaacctcgat

SEQ ID NO: 214575 - DNA, 25 bp, Artificial
  probe
  misc_feature (1)..(25): SEQ ID NO: 1882; WAN024FOI_at; Start 231; Stop 255
tatgaatgttattgctaatgggaaa

SEQ ID NO: 214576 - DNA, 25 bp, Artificial
  probe
  misc_feature (1)..(25): SEQ ID NO: 1882; WAN024FOI_at; Start 200; Stop 224
tagttattactcatggtggtcctgc

SEQ ID NO: 214577 - DNA, 25 bp, Artificial
  probe
  misc_feature (1)..(25): SEQ ID NO: 1882; WAN024FOI_at; Start 337; Stop 361
caggagggatatgatttagtagtca

SEQ ID NO: 214578 - DNA, 25 bp, Artificial
  probe
  misc_feature (1)..(25): SEQ ID NO: 1882; WAN024FOI_at; Start 396; Stop 420
tccatctagtagtattgccgttaaa

SEQ ID NO: 214579 - DNA, 25 bp, Artificial
  probe
  misc_feature (1)..(25): SEQ ID NO: 1882; WAN024FOI_at; Start 322; Stop 346
tgtaataggattgttcaggagggat

SEQ ID NO: 214580 - DNA, 25 bp, Artificial
  probe
  misc_feature (1)..(25): SEQ ID NO: 1882; WAN024FOI_at; Start 57; Stop 81
gattgatgaattgaaagcagaggga

SEQ ID NO: 214581 - DNA, 25 bp, Artificial
  probe
  misc_feature (1)..(25): SEQ ID NO: 1882; WAN024FOI_at; Start 257; Stop 281
gaccagtagttgttccgagaagaaa

SEQ ID NO: 214582 - DNA, 25 bp, Artificial
  probe
  misc_feature (1)..(25): SEQ ID NO: 1882; WAN024FOI_at; Start 187; Stop 211
gaagaagcggatatagttattactc

SEQ ID NO: 214583 - DNA, 25 bp, Artificial
  probe
  misc_feature (1)..(25): SEQ ID NO: 1882; WAN024FOI_at; Start 422; Stop 446
ctaataatgaatgctttgtacaaca

SEQ ID NO: 214584 - DNA, 25 bp, Artificial
  probe
  misc_feature (1)..(25): SEQ ID NO: 1882; WAN024FOI_at; Start 143; Stop 167
gatgggaacgttttctttcgtatga

SEQ ID NO: 214585 - DNA, 25 bp, Artificial
  probe
  misc_feature (1)..(25): SEQ ID NO: 1882; WAN024FOI_at; Start 173; Stop 197
tgaataacctaatggaagaagcgga

SEQ ID NO: 214586 - DNA, 25 bp, Artificial
  probe
  misc_feature (1)..(25): SEQ ID NO: 1882; WAN024FOI_at; Start 383; Stop 407
gagaatacctgaatccatctagtag

SEQ ID NO: 214587 - DNA, 25 bp, Artificial
  probe
  misc_feature (1)..(25): SEQ ID NO: 1882; WAN024FOI_at; Start 240; Stop 264
tattgctaatgggaaaagaccagta

SEQ ID NO: 214588 - DNA, 25 bp, Artificial
  probe
  misc_feature (1)..(25): SEQ ID NO: 1882; WAN024FOI_at; Start 68; Stop 92
tgaaagcagagggagttattacgtc

SEQ ID NO: 214589 - DNA, 25 bp, Artificial
  probe
  misc_feature (1)..(25): SEQ ID NO: 1882; WAN024FOI_at; Start 204; Stop 228
tattactcatggtggtcctgctaca

SEQ ID NO: 214590 - DNA, 25 bp, Artificial
  probe
  misc_feature (1)..(25): SEQ ID NO: 1882; WAN024FOI_at; Start 157; Stop 181
ctttcgtatgatgagatgaataacc

SEQ ID NO: 214591 - DNA, 25 bp, Artificial
  probe
  misc_feature (1)..(25): SEQ ID NO: 1882; WAN024FOI_at; Start 74; Stop 98
cagagggagttattacgtcggatgt

SEQ ID NO: 214592 - DNA, 25 bp, Artificial
  probe
  misc_feature (1)..(25): SEQ ID NO: 1882; WAN024FOI_at; Start 17; Stop 41
tcggtacgcatgagcaacaatttaa

SEQ ID NO: 214593 - DNA, 25 bp, Artificial
  probe
  misc_feature (1)..(25): SEQ ID NO: 1882; WAN024FOI_at; Start 127; Stop 151
caacctcgattttgtagatgggaac

SEQ ID NO: 214594 - DNA, 25 bp, Artificial
  probe
  misc_feature (1)..(25): SEQ ID NO: 1882; WAN024FOI_at; Start 101; Stop 125
ttatccaagttggtttttcagacta

SEQ ID NO: 214595 - DNA, 25 bp, Artificial
  probe
  misc_feature (1)..(25): SEQ ID NO: 1882; WAN024FOI_at; Start 89; Stop 113
cgtcggatgtatttatccaagttgg

SEQ ID NO: 214596 - DNA, 25 bp, Artificial
  probe
  misc_feature (1)..(25): SEQ ID NO: 1882; WAN024FOI_at; Start 375; Stop 399
aaaaatccgagaatacctgaatcca

SEQ ID NO: 214597 - DNA, 25 bp, Artificial
  probe
  misc_feature (1)..(25): SEQ ID NO: 1882; WAN024FOI_at; Start 11; Stop 35
taactgtcggtacgcatgagcaaca

SEQ ID NO: 214598 - DNA, 25 bp, Artificial
  probe
  misc_feature (1)..(25): SEQ ID NO: 1882; WAN024FOI_at; Start 307; Stop 331
catcagttagatttttgtaatagga

SEQ ID NO: 214599 - DNA, 25 bp, Artificial
  probe
  misc_feature (1)..(25): SEQ ID NO: 1882; WAN024FOI_at; Start 442; Stop 466
caacatttttcaaatttgattgcag

SEQ ID NO: 214600 - DNA, 25 bp, Artificial
  probe
  misc_feature (1)..(25): SEQ ID NO: 1882; WAN024FOI_at; Start 23; Stop 47
cgcatgagcaacaatttaatagact

SEQ ID NO: 214601 - DNA, 25 bp, Artificial
  probe
  misc_feature (1)..(25): SEQ ID NO: 1882; WAN024FOI_at; Start 2; Stop 26
tgatttttgtaactgtcggtacgca

SEQ ID NO: 214602 - DNA, 25 bp, Artificial
  probe
  misc_feature (1)..(25): SEQ ID NO: 1882; WAN024FOI_at; Start 42; Stop 66
tagactaataaaagagattgatgaa

SEQ ID NO: 214603 - DNA, 25 bp, Artificial
  probe
  misc_feature (1)..(25): SEQ ID NO: 1882; WAN024FOI_at; Start 411; Stop 435
tgccgttaaatctaataatgaatgc

SEQ ID NO: 214604 - DNA, 25 bp, Artificial
  probe
  misc_feature (1)..(25): SEQ ID NO: 1882; WAN024FOI_at; Start 254; Stop 278
aaagaccagtagttgttccgagaag

SEQ ID NO: 214605 - DNA, 25 bp, Artificial
  probe
  misc_feature (1)..(25): SEQ ID NO: 1367; WAN024FOJ_at; Start 718; Stop 742
tacttaaaacatatgtatggtgact

SEQ ID NO: 214606 - DNA, 25 bp, Artificial
  probe
  misc_feature (1)..(25): SEQ ID NO: 1367; WAN024FOJ_at; Start 511; Stop 535
gccacacatgtgttctcaatatctt

SEQ ID NO: 214607 - DNA, 25 bp, Artificial
  probe
  misc_feature (1)..(25): SEQ ID NO: 1367; WAN024FOJ_at; Start 424; Stop 448
tggttattccgaaatctattatgga

SEQ ID NO: 214608 - DNA, 25 bp, Artificial
  probe
  misc_feature (1)..(25): SEQ ID NO: 1367; WAN024FOJ_at; Start 733; Stop 757
tatggtgactatatgcagcttccac

SEQ ID NO: 214609 - DNA, 25 bp, Artificial
  probe
  misc_feature (1)..(25): SEQ ID NO: 1367; WAN024FOJ_at; Start 93; Stop 117
gatgctagcaggaacttttctaggg

SEQ ID NO: 214610 - DNA, 25 bp, Artificial
  probe
  misc_feature (1)..(25): SEQ ID NO: 1367; WAN024FOJ_at; Start 480; Stop 504
aaaacgattagcgtataaactagct

SEQ ID NO: 214611 - DNA, 25 bp, Artificial
  probe
  misc_feature (1)..(25): SEQ ID NO: 1367; WAN024FOJ_at; Start 203; Stop 227
tatgtgtttcggatttggacaggga

SEQ ID NO: 214612 - DNA, 25 bp, Artificial
  probe
  misc_feature (1)..(25): SEQ ID NO: 1367; WAN024FOJ_at; Start 747; Stop 771
gcagcttccacctgagaatcaacga

SEQ ID NO: 214613 - DNA, 25 bp, Artificial
  probe
  misc_feature (1)..(25): SEQ ID NO: 1367; WAN024FOJ_at; Start 326; Stop 350
tagatgcaaatgttcatgatggaat

SEQ ID NO: 214614 - DNA, 25 bp, Artificial
  probe
  misc_feature (1)..(25): SEQ ID NO: 1367; WAN024FOJ_at; Start 150; Stop 174
cgatgatatggattttggtatgcca

SEQ ID NO: 214615 - DNA, 25 bp, Artificial
  probe
  misc_feature (1)..(25): SEQ ID NO: 1367; WAN024FOJ_at; Start 83; Stop 107
taaaaatcgtgatgctagcaggaac

SEQ ID NO: 214616 - DNA, 25 bp, Artificial
  probe
  misc_feature (1)..(25): SEQ ID NO: 1367; WAN024FOJ_at; Start 553; Stop 577
gagaagtgtatattactagggcaga

SEQ ID NO: 214617 - DNA, 25 bp, Artificial
  probe
  misc_feature (1)..(25): SEQ ID NO: 1367; WAN024FOJ_at; Start 538; Stop 562
ttgaaaaagatgaaggagaagtgta

SEQ ID NO: 214618 - DNA, 25 bp, Artificial
  probe
  misc_feature (1)..(25): SEQ ID NO: 1367; WAN024FOJ_at; Start 310; Stop 334
tctgaggaattttctttagatgcaa

SEQ ID NO: 214619 - DNA, 25 bp, Artificial
  probe
  misc_feature (1)..(25): SEQ ID NO: 1367; WAN024FOJ_at; Start 383; Stop 407
gtcccaagccttttagacgattcat

SEQ ID NO: 214620 - DNA, 25 bp, Artificial
  probe
  misc_feature (1)..(25): SEQ ID NO: 1367; WAN024FOJ_at; Start 237; Stop 261
tctacagacagatcaaacagatttg

SEQ ID NO: 214621 - DNA, 25 bp, Artificial
  probe
  misc_feature (1)..(25): SEQ ID NO: 1367; WAN024FOJ_at; Start 640; Stop 664
ccaaaagtgtggttagacgaagttg

SEQ ID NO: 214622 - DNA, 25 bp, Artificial
  probe
  misc_feature (1)..(25): SEQ ID NO: 1367; WAN024FOJ_at; Start 116; Stop 140
gggctatacgccataatggattcat

SEQ ID NO: 214623 - DNA, 25 bp, Artificial
  probe
  misc_feature (1)..(25): SEQ ID NO: 1367; WAN024FOJ_at; Start 495; Stop 519
taaactagctaagcttgccacacat

SEQ ID NO: 214624 - DNA, 25 bp, Artificial
  probe
  misc_feature (1)..(25): SEQ ID NO: 1367; WAN024FOJ_at; Start 369; Stop 393
gattgataatatctgtcccaagcct

SEQ ID NO: 214625 - DNA, 25 bp, Artificial
  probe
  misc_feature (1)..(25): SEQ ID NO: 1367; WAN024FOJ_at; Start 765; Stop 789
tcaacgaaatcatcacaaacgaatt

SEQ ID NO: 214626 - DNA, 25 bp, Artificial
  probe
  misc_feature (1)..(25): SEQ ID NO: 1367; WAN024FOJ_at; Start 294; Stop 318
caataatacacatgtttctgaggaa

SEQ ID NO: 214627 - DNA, 25 bp, Artificial
  probe
  misc_feature (1)..(25): SEQ ID NO: 1367; WAN024FOJ_at; Start 396; Stop 420
tagacgattcattcaacttaaagga

SEQ ID NO: 214628 - DNA, 25 bp, Artificial
  probe
  misc_feature (1)..(25): SEQ ID NO: 1367; WAN024FOJ_at; Start 566; Stop 590
tactagggcagagtaccaatgctga

SEQ ID NO: 214629 - DNA, 25 bp, Artificial
  probe
  misc_feature (1)..(25): SEQ ID NO: 1367; WAN024FOJ_at; Start 696; Stop 720
gggaatgaagaattatagagcatac

SEQ ID NO: 214630 - DNA, 25 bp, Artificial
  probe
  misc_feature (1)..(25): SEQ ID NO: 1367; WAN024FOJ_at; Start 581; Stop 605
ccaatgctgataatgtagtggttag

SEQ ID NO: 214631 - DNA, 25 bp, Artificial
  probe
  misc_feature (1)..(25): SEQ ID NO: 1367; WAN024FOJ_at; Start 269; Stop 293
catttaattttgtgaaactacgtct

SEQ ID NO: 214632 - DNA, 25 bp, Artificial
  probe
  misc_feature (1)..(25): SEQ ID NO: 1367; WAN024FOJ_at; Start 46; Stop 70
gcttcagaagtgttaaaaatatgtg

SEQ ID NO: 214633 - DNA, 25 bp, Artificial
  probe
  misc_feature (1)..(25): SEQ ID NO: 1367; WAN024FOJ_at; Start 282; Stop 306
gaaactacgtctcaataatacacat

SEQ ID NO: 214634 - DNA, 25 bp, Artificial
  probe
  misc_feature (1)..(25): SEQ ID NO: 1367; WAN024FOJ_at; Start 2; Stop 26
tgacagatgaattagaacggttaca

SEQ ID NO: 214635 - DNA, 25 bp, Artificial
  probe
  misc_feature (1)..(25): SEQ ID NO: 1367; WAN024FOJ_at; Start 222; Stop 246
cagggaaaaatattttctacagaca

SEQ ID NO: 214636 - DNA, 25 bp, Artificial
  probe
  misc_feature (1)..(25): SEQ ID NO: 1367; WAN024FOJ_at; Start 790; Stop 814
aaaattgattttggcccatacgtgg

SEQ ID NO: 214637 - DNA, 25 bp, Artificial
  probe
  misc_feature (1)..(25): SEQ ID NO: 1367; WAN024FOJ_at; Start 31; Stop 55
ttagaacttttgttagcttcagaag

SEQ ID NO: 214638 - DNA, 25 bp, Artificial
  probe
  misc_feature (1)..(25): SEQ ID NO: 1367; WAN024FOJ_at; Start 129; Stop 153
taatggattcatcccgtgggacgat

SEQ ID NO: 214639 - DNA, 25 bp, Artificial
  probe
  misc_feature (1)..(25): SEQ ID NO: 652; WAN024FOK_at; Start 162; Stop 186
acaaagaaaaacactcgtagaggct

SEQ ID NO: 214640 - DNA, 25 bp, Artificial
  probe
  misc_feature (1)..(25): SEQ ID NO: 652; WAN024FOK_at; Start 193; Stop 217
tatgttgatttagtaatacctgaag

SEQ ID NO: 214641 - DNA, 25 bp, Artificial
  probe
  misc_feature (1)..(25): SEQ ID NO: 652; WAN024FOK_at; Start 338; Stop 362
tatcacggactcctgaaatcagtac

SEQ ID NO: 214642 - DNA, 25 bp, Artificial
  probe
  misc_feature (1)..(25): SEQ ID NO: 652; WAN024FOK_at; Start 372; Stop 396
taagaattcattggcaaccagagaa

SEQ ID NO: 214643 - DNA, 25 bp, Artificial
  probe
  misc_feature (1)..(25): SEQ ID NO: 652; WAN024FOK_at; Start 49; Stop 73
catattaatcttcttaaaagggcta

SEQ ID NO: 214644 - DNA, 25 bp, Artificial
  probe
  misc_feature (1)..(25): SEQ ID NO: 652; WAN024FOK_at; Start 236; Stop 260
tgacagatgtccatgaatatcacat

SEQ ID NO: 214645 - DNA, 25 bp, Artificial
  probe
  misc_feature (1)..(25): SEQ ID NO: 652; WAN024FOK_at; Start 260; Stop 284
tagatacctttgtcatgggagatga

SEQ ID NO: 214646 - DNA, 25 bp, Artificial
  probe
  misc_feature (1)..(25): SEQ ID NO: 652; WAN024FOK_at; Start 102; Stop 126
gatttccactgacgaattcaactgg

SEQ ID NO: 214647 - DNA, 25 bp, Artificial
  probe
  misc_feature (1)..(25): SEQ ID NO: 652; WAN024FOK_at; Start 367; Stop 391
gaaattaagaattcattggcaacca

SEQ ID NO: 214648 - DNA, 25 bp, Artificial
  probe
  misc_feature (1)..(25): SEQ ID NO: 652; WAN024FOK_at; Start 211; Stop 235
cctgaagaatcatgggaacaaaaag

SEQ ID NO: 214649 - DNA, 25 bp, Artificial
  probe
  misc_feature (1)..(25): SEQ ID NO: 652; WAN024FOK_at; Start 155; Stop 179
catatgaacaaagaaaaacactcgt

SEQ ID NO: 214650 - DNA, 25 bp, Artificial
  probe
  misc_feature (1)..(25): SEQ ID NO: 652; WAN024FOK_at; Start 203; Stop 227
tagtaatacctgaagaatcatggga

SEQ ID NO: 214651 - DNA, 25 bp, Artificial
  probe
  misc_feature (1)..(25): SEQ ID NO: 652; WAN024FOK_at; Start 223; Stop 247
tgggaacaaaaagtgacagatgtcc

SEQ ID NO: 214652 - DNA, 25 bp, Artificial
  probe
  misc_feature (1)..(25): SEQ ID NO: 652; WAN024FOK_at; Start 315; Stop 339
ggaaggagttgaagtggtctattta

SEQ ID NO: 214653 - DNA, 25 bp, Artificial
  probe
  misc_feature (1)..(25): SEQ ID NO: 652; WAN024FOK_at; Start 173; Stop 197
cactcgtagaggctgttaggtatgt

SEQ ID NO: 214654 - DNA, 25 bp, Artificial
  probe
  misc_feature (1)..(25): SEQ ID NO: 652; WAN024FOK_at; Start 356; Stop 380
tcagtacaactgaaattaagaattc

SEQ ID NO: 214655 - DNA, 25 bp, Artificial
  probe
  misc_feature (1)..(25): SEQ ID NO: 652; WAN024FOK_at; Start 2; Stop 26
tgaaaaaagttataacatatggaac

SEQ ID NO: 214656 - DNA, 25 bp, Artificial
  probe
  misc_feature (1)..(25): SEQ ID NO: 652; WAN024FOK_at; Start 330; Stop 354
ggtctatttatcacggactcctgaa

SEQ ID NO: 214657 - DNA, 25 bp, Artificial
  probe
  misc_feature (1)..(25): SEQ ID NO: 652; WAN024FOK_at; Start 167; Stop 191
gaaaaacactcgtagaggctgttag

SEQ ID NO: 214658 - DNA, 25 bp, Artificial
  probe
  misc_feature (1)..(25): SEQ ID NO: 652; WAN024FOK_at; Start 217; Stop 241
gaatcatgggaacaaaaagtgacag

SEQ ID NO: 214659 - DNA, 25 bp, Artificial
  probe
  misc_feature (1)..(25): SEQ ID NO: 652; WAN024FOK_at; Start 325; Stop 349
gaagtggtctatttatcacggactc

SEQ ID NO: 214660 - DNA, 25 bp, Artificial
  probe
  misc_feature (1)..(25): SEQ ID NO: 652; WAN024FOK_at; Start 23; Stop 47
gaacatttgatttgttgcactatgg

SEQ ID NO: 214661 - DNA, 25 bp, Artificial
  probe
  misc_feature (1)..(25): SEQ ID NO: 652; WAN024FOK_at; Start 256; Stop 280
cacatagatacctttgtcatgggag

SEQ ID NO: 214662 - DNA, 25 bp, Artificial
  probe
  misc_feature (1)..(25): SEQ ID NO: 652; WAN024FOK_at; Start 266; Stop 290
cctttgtcatgggagatgattggaa

SEQ ID NO: 214663 - DNA, 25 bp, Artificial
  probe
  misc_feature (1)..(25): SEQ ID NO: 652; WAN024FOK_at; Start 243; Stop 267
tgtccatgaatatcacatagatacc

SEQ ID NO: 214664 - DNA, 25 bp, Artificial
  probe
  misc_feature (1)..(25): SEQ ID NO: 652; WAN024FOK_at; Start 92; Stop 116
taattgttgtgatttccactgacga

SEQ ID NO: 214665 - DNA, 25 bp, Artificial
  probe
  misc_feature (1)..(25): SEQ ID NO: 652; WAN024FOK_at; Start 108; Stop 132
cactgacgaattcaactggaatgaa

SEQ ID NO: 214666 - DNA, 25 bp, Artificial
  probe
  misc_feature (1)..(25): SEQ ID NO: 652; WAN024FOK_at; Start 31; Stop 55
gatttgttgcactatggtcatatta

SEQ ID NO: 214667 - DNA, 25 bp, Artificial
  probe
  misc_feature (1)..(25): SEQ ID NO: 652; WAN024FOK_at; Start 76; Stop 100
tcgttaggcgattatttaattgttg

SEQ ID NO: 214668 - DNA, 25 bp, Artificial
  probe
  misc_feature (1)..(25): SEQ ID NO: 652; WAN024FOK_at; Start 114; Stop 138
cgaattcaactggaatgaaaaacaa

SEQ ID NO: 214669 - DNA, 25 bp, Artificial
  probe
  misc_feature (1)..(25): SEQ ID NO: 652; WAN024FOK_at; Start 345; Stop 369
gactcctgaaatcagtacaactgaa

SEQ ID NO: 214670 - DNA, 25 bp, Artificial
  probe
  misc_feature (1)..(25): SEQ ID NO: 652; WAN024FOK_at; Start 177; Stop 201
cgtagaggctgttaggtatgttgat

SEQ ID NO: 214671 - DNA, 25 bp, Artificial
  probe
  misc_feature (1)..(25): SEQ ID NO: 652; WAN024FOK_at; Start 66; Stop 90
aagggctaaatcgttaggcgattat

SEQ ID NO: 214672 - DNA, 25 bp, Artificial
  probe
  misc_feature (1)..(25): SEQ ID NO: 652; WAN024FOK_at; Start 375; Stop 399
gaattcattggcaaccagagaatat

SEQ ID NO: 214673 - DNA, 25 bp, Artificial
  probe
  misc_feature (1)..(25): SEQ ID NO: 1800; WAN024FOL_at; Start 1141; Stop 1165
tatcagaatctttcgggtatccaaa

SEQ ID NO: 214674 - DNA, 25 bp, Artificial
  probe
  misc_feature (1)..(25): SEQ ID NO: 1800; WAN024FOL_at; Start 741; Stop 765
cacatataagtgtattcgagataag

SEQ ID NO: 214675 - DNA, 25 bp, Artificial
  probe
  misc_feature (1)..(25): SEQ ID NO: 1800; WAN024FOL_at; Start 804; Stop 828
tactctggtaggcattggttcgatt

SEQ ID NO: 214676 - DNA, 25 bp, Artificial
  probe
  misc_feature (1)..(25): SEQ ID NO: 1800; WAN024FOL_at; Start 760; Stop 784
gataagaaatatactgaactaggga

SEQ ID NO: 214677 - DNA, 25 bp, Artificial
  probe
  misc_feature (1)..(25): SEQ ID NO: 1800; WAN024FOL_at; Start 39; Stop 63
ggaacaatatggtgtatactctgta

SEQ ID NO: 214678 - DNA, 25 bp, Artificial
  probe
  misc_feature (1)..(25): SEQ ID NO: 1800; WAN024FOL_at; Start 791; Stop 815
caaatcttttaattactctggtagg

SEQ ID NO: 214679 - DNA, 25 bp, Artificial
  probe
  misc_feature (1)..(25): SEQ ID NO: 1800; WAN024FOL_at; Start 57; Stop 81
ctctgtatatcaatcatggtattca

SEQ ID NO: 214680 - DNA, 25 bp, Artificial
  probe
  misc_feature (1)..(25): SEQ ID NO: 1800; WAN024FOL_at; Start 183; Stop 207
gggactaacaacaacagttacagct

SEQ ID NO: 214681 - DNA, 25 bp, Artificial
  probe
  misc_feature (1)..(25): SEQ ID NO: 1800; WAN024FOL_at; Start 29; Stop 53
tattgacaacggaacaatatggtgt

SEQ ID NO: 214682 - DNA, 25 bp, Artificial
  probe
  misc_feature (1)..(25): SEQ ID NO: 1800; WAN024FOL_at; Start 425; Stop 449
ttttatcgacttataaagcggaggc

SEQ ID NO: 214683 - DNA, 25 bp, Artificial
  probe
  misc_feature (1)..(25): SEQ ID NO: 1800; WAN024FOL_at; Start 452; Stop 476
gagttatctcatttgtgttagttca

SEQ ID NO: 214684 - DNA, 25 bp, Artificial
  probe
  misc_feature (1)..(25): SEQ ID NO: 1800; WAN024FOL_at; Start 582; Stop 606
tcctcattatttatcgcaatcagtt

SEQ ID NO: 214685 - DNA, 25 bp, Artificial
  probe
  misc_feature (1)..(25): SEQ ID NO: 1800; WAN024FOL_at; Start 636; Stop 660
ttcaatggtaggaatgggagaagca

SEQ ID NO: 214686 - DNA, 25 bp, Artificial
  probe
  misc_feature (1)..(25): SEQ ID NO: 1800; WAN024FOL_at; Start 272; Stop 296
tactaatcttagtgatgttctttga

SEQ ID NO: 214687 - DNA, 25 bp, Artificial
  probe
  misc_feature (1)..(25): SEQ ID NO: 1800; WAN024FOL_at; Start 868; Stop 892
gcaccaaaacaatattacgaagcaa

SEQ ID NO: 214688 - DNA, 25 bp, Artificial
  probe
  misc_feature (1)..(25): SEQ ID NO: 1800; WAN024FOL_at; Start 1062; Stop 1086
tattgcggcaggctatacaacttta

SEQ ID NO: 214689 - DNA, 25 bp, Artificial
  probe
  misc_feature (1)..(25): SEQ ID NO: 1800; WAN024FOL_at; Start 244; Stop 268
tggaactcgttgttaggcttaccta

SEQ ID NO: 214690 - DNA, 25 bp, Artificial
  probe
  misc_feature (1)..(25): SEQ ID NO: 1800; WAN024FOL_at; Start 80; Stop 104
caataattggagtttttgcaacact

SEQ ID NO: 214691 - DNA, 25 bp, Artificial
  probe
  misc_feature (1)..(25): SEQ ID NO: 1800; WAN024FOL_at; Start 704; Stop 728
tagtgacaagtgctataaacagctc

SEQ ID NO: 214692 - DNA, 25 bp, Artificial
  probe
  misc_feature (1)..(25): SEQ ID NO: 1800; WAN024FOL_at; Start 228; Stop 252
aatagggattgatttttggaactcg

SEQ ID NO: 214693 - DNA, 25 bp, Artificial
  probe
  misc_feature (1)..(25): SEQ ID NO: 1800; WAN024FOL_at; Start 1266; Stop 1290
tatctcactcatcctaggaggatgt

SEQ ID NO: 214694 - DNA, 25 bp, Artificial
  probe
  misc_feature (1)..(25): SEQ ID NO: 1800; WAN024FOL_at; Start 539; Stop 563
aaaaatattggctctatgctttgaa

SEQ ID NO: 214695 - DNA, 25 bp, Artificial
  probe
  misc_feature (1)..(25): SEQ ID NO: 1800; WAN024FOL_at; Start 667; Stop 691
tatagtgttgcttacagcatatcaa

SEQ ID NO: 214696 - DNA, 25 bp, Artificial
  probe
  misc_feature (1)..(25): SEQ ID NO: 1800; WAN024FOL_at; Start 438; Stop 462
taaagcggaggctagagttatctca

SEQ ID NO: 214697 - DNA, 25 bp, Artificial
  probe
  misc_feature (1)..(25): SEQ ID NO: 1800; WAN024FOL_at; Start 168; Stop 192
tacttcctctatgcagggactaaca

SEQ ID NO: 214698 - DNA, 25 bp, Artificial
  probe
  misc_feature (1)..(25): SEQ ID NO: 1800; WAN024FOL_at; Start 883; Stop 907
tacgaagcaatatggattattcctc

SEQ ID NO: 214699 - DNA, 25 bp, Artificial
  probe
  misc_feature (1)..(25): SEQ ID NO: 1800; WAN024FOL_at; Start 940; Stop 964
tatcccatttttggtaacattgagt

SEQ ID NO: 214700 - DNA, 25 bp, Artificial
  probe
  misc_feature (1)..(25): SEQ ID NO: 1800; WAN024FOL_at; Start 955; Stop 979
aacattgagttttactttgaagcaa

SEQ ID NO: 214701 - DNA, 25 bp, Artificial
  probe
  misc_feature (1)..(25): SEQ ID NO: 1800; WAN024FOL_at; Start 97; Stop 121
gcaacactaaacctatattatggag

SEQ ID NO: 214702 - DNA, 25 bp, Artificial
  probe
  misc_feature (1)..(25): SEQ ID NO: 1800; WAN024FOL_at; Start 977; Stop 1001
caaatcattttgtaatgtgggcttc

SEQ ID NO: 214703 - DNA, 25 bp, Artificial
  probe
  misc_feature (1)..(25): SEQ ID NO: 1800; WAN024FOL_at; Start 720; Stop 744
aaacagctcttttattccttacaca

SEQ ID NO: 214704 - DNA, 25 bp, Artificial
  probe
  misc_feature (1)..(25): SEQ ID NO: 1800; WAN024FOL_at; Start 838; Stop 862
tctcttggaccagaaatcattcaat

SEQ ID NO: 214705 - DNA, 25 bp, Artificial
  probe
  misc_feature (1)..(25): SEQ ID NO: 1800; WAN024FOL_at; Start 825; Stop 849
gattttaactatttctcttggacca

SEQ ID NO: 214706 - DNA, 25 bp, Artificial
  probe
  misc_feature (1)..(25): SEQ ID NO: 1800; WAN024FOL_at; Start 774; Stop 798
tgaactagggaaaagtgcaaatctt

SEQ ID NO: 214707 - DNA, 25 bp, Artificial
  probe
  misc_feature (1)..(25): SEQ ID NO: 6941; WAN024FOM_at; Start 934; Stop 958
tatgattatgatgattacttgcggg

SEQ ID NO: 214708 - DNA, 25 bp, Artificial
  probe
  misc_feature (1)..(25): SEQ ID NO: 6941; WAN024FOM_at; Start 579; Stop 603
tgataagtctaatccagtgagttca

SEQ ID NO: 214709 - DNA, 25 bp, Artificial
  probe
  misc_feature (1)..(25): SEQ ID NO: 6941; WAN024FOM_at; Start 224; Stop 248
aatatctcgtgatgatggcagaggc

SEQ ID NO: 214710 - DNA, 25 bp, Artificial
  probe
  misc_feature (1)..(25): SEQ ID NO: 6941; WAN024FOM_at; Start 592; Stop 616
ccagtgagttcattaatacaggaat

SEQ ID NO: 214711 - DNA, 25 bp, Artificial
  probe
  misc_feature (1)..(25): SEQ ID NO: 6941; WAN024FOM_at; Start 330; Stop 354
taacttcgttggaggtgcctatcta

SEQ ID NO: 214712 - DNA, 25 bp, Artificial
  probe
  misc_feature (1)..(25): SEQ ID NO: 6941; WAN024FOM_at; Start 841; Stop 865
gaattactcaaatgttcaaatgttt

SEQ ID NO: 214713 - DNA, 25 bp, Artificial
  probe
  misc_feature (1)..(25): SEQ ID NO: 6941; WAN024FOM_at; Start 769; Stop 793
tcaaaagaaaaaactatcgataaga

SEQ ID NO: 214714 - DNA, 25 bp, Artificial
  probe
  misc_feature (1)..(25): SEQ ID NO: 6941; WAN024FOM_at; Start 703; Stop 727
gaacacttaaataattggtgtgaag

SEQ ID NO: 214715 - DNA, 25 bp, Artificial
  probe
  misc_feature (1)..(25): SEQ ID NO: 6941; WAN024FOM_at; Start 233; Stop 257
tgatgatggcagaggcacctgaaac

SEQ ID NO: 214716 - DNA, 25 bp, Artificial
  probe
  misc_feature (1)..(25): SEQ ID NO: 6941; WAN024FOM_at; Start 278; Stop 302
caaagtatatttttacagcaactgg

SEQ ID NO: 214717 - DNA, 25 bp, Artificial
  probe
  misc_feature (1)..(25): SEQ ID NO: 6941; WAN024FOM_at; Start 673; Stop 697
caaatagatctagataagttaatgg

SEQ ID NO: 214718 - DNA, 25 bp, Artificial
  probe
  misc_feature (1)..(25): SEQ ID NO: 6941; WAN024FOM_at; Start 799; Stop 823
tcttcgataattgacgtgacaaatg

SEQ ID NO: 214719 - DNA, 25 bp, Artificial
  probe
  misc_feature (1)..(25): SEQ ID NO: 6941; WAN024FOM_at; Start 855; Stop 879
ttcaaatgttttaataactgactac

SEQ ID NO: 214720 - DNA, 25 bp, Artificial
  probe
  misc_feature (1)..(25): SEQ ID NO: 6941; WAN024FOM_at; Start 540; Stop 564
tatattagaacttggtcaacctagg

SEQ ID NO: 214721 - DNA, 25 bp, Artificial
  probe
  misc_feature (1)..(25): SEQ ID NO: 6941; WAN024FOM_at; Start 293; Stop 317
cagcaactggtatttttgatattgg

SEQ ID NO: 214722 - DNA, 25 bp, Artificial
  probe
  misc_feature (1)..(25): SEQ ID NO: 6941; WAN024FOM_at; Start 946; Stop 970
gattacttgcgggtggatcgttcgc

SEQ ID NO: 214723 - DNA, 25 bp, Artificial
  probe
  misc_feature (1)..(25): SEQ ID NO: 6941; WAN024FOM_at; Start 547; Stop 571
gaacttggtcaacctaggaatgact

SEQ ID NO: 214724 - DNA, 25 bp, Artificial
  probe
  misc_feature (1)..(25): SEQ ID NO: 6941; WAN024FOM_at; Start 780; Stop 804
aactatcgataagaaatattcttcg

SEQ ID NO: 214725 - DNA, 25 bp, Artificial
  probe
  misc_feature (1)..(25): SEQ ID NO: 6941; WAN024FOM_at; Start 1063; Stop 1087
gatgattatagagaagaacgtgaaa

SEQ ID NO: 214726 - DNA, 25 bp, Artificial
  probe
  misc_feature (1)..(25): SEQ ID NO: 6941; WAN024FOM_at; Start 339; Stop 363
tggaggtgcctatctaattaatcta

SEQ ID NO: 214727 - DNA, 25 bp, Artificial
  probe
  misc_feature (1)..(25): SEQ ID NO: 6941; WAN024FOM_at; Start 792; Stop 816
gaaatattcttcgataattgacgtg

SEQ ID NO: 214728 - DNA, 25 bp, Artificial
  probe
  misc_feature (1)..(25): SEQ ID NO: 6941; WAN024FOM_at; Start 239; Stop 263
tggcagaggcacctgaaactcggaa

SEQ ID NO: 214729 - DNA, 25 bp, Artificial
  probe
  misc_feature (1)..(25): SEQ ID NO: 6941; WAN024FOM_at; Start 247; Stop 271
gcacctgaaactcggaaaattgtta

SEQ ID NO: 214730 - DNA, 25 bp, Artificial
  probe
  misc_feature (1)..(25): SEQ ID NO: 6941; WAN024FOM_at; Start 58; Stop 82
tcggtgcctaagacaaataaattgt

SEQ ID NO: 214731 - DNA, 25 bp, Artificial
  probe
  misc_feature (1)..(25): SEQ ID NO: 6941; WAN024FOM_at; Start 352; Stop 376
ctaattaatctatggcatggcattc

SEQ ID NO: 214732 - DNA, 25 bp, Artificial
  probe
  misc_feature (1)..(25): SEQ ID NO: 6941; WAN024FOM_at; Start 51; Stop 75
tagtagttcggtgcctaagacaaat

SEQ ID NO: 214733 - DNA, 25 bp, Artificial
  probe
  misc_feature (1)..(25): SEQ ID NO: 6941; WAN024FOM_at; Start 951; Stop 975
cttgcgggtggatcgttcgctatat

SEQ ID NO: 214734 - DNA, 25 bp, Artificial
  probe
  misc_feature (1)..(25): SEQ ID NO: 6941; WAN024FOM_at; Start 324; Stop 348
aaatgctaacttcgttggaggtgcc

SEQ ID NO: 214735 - DNA, 25 bp, Artificial
  probe
  misc_feature (1)..(25): SEQ ID NO: 6941; WAN024FOM_at; Start 685; Stop 709
gataagttaatggatttagaacact

SEQ ID NO: 214736 - DNA, 25 bp, Artificial
  probe
  misc_feature (1)..(25): SEQ ID NO: 6941; WAN024FOM_at; Start 309; Stop 333
tgatattggagaacaaaatgctaac

SEQ ID NO: 214737 - DNA, 25 bp, Artificial
  probe
  misc_feature (1)..(25): SEQ ID NO: 6941; WAN024FOM_at; Start 41; Stop 65
atttatacattagtagttcggtgcc

SEQ ID NO: 214738 - DNA, 25 bp, Artificial
  probe
  misc_feature (1)..(25): SEQ ID NO: 6941; WAN024FOM_at; Start 552; Stop 576
tggtcaacctaggaatgactatttt

SEQ ID NO: 214739 - DNA, 25 bp, Artificial
  probe
  misc_feature (1)..(25): SEQ ID NO: 6941; WAN024FOM_at; Start 75; Stop 99
taaattgttaatttttggatcatgg

SEQ ID NO: 214740 - DNA, 25 bp, Artificial
  probe
  misc_feature (1)..(25): SEQ ID NO: 6941; WAN024FOM_at; Start 1073; Stop 1097
gagaagaacgtgaaaatatcaaaac

SEQ ID NO: 214741 - DNA, 25 bp, Artificial
  probe
  misc_feature (1)..(25): SEQ ID NO: 1104; WAN024FON_at; Start 583; Stop 607
tatccagtaagttcgctaatacaag

SEQ ID NO: 214742 - DNA, 25 bp, Artificial
  probe
  misc_feature (1)..(25): SEQ ID NO: 1104; WAN024FON_at; Start 540; Stop 564
agaacttggacagcctagaaatgac

SEQ ID NO: 214743 - DNA, 25 bp, Artificial
  probe
  misc_feature (1)..(25): SEQ ID NO: 1104; WAN024FON_at; Start 293; Stop 317
caggtatttttgatatcggagtaga

SEQ ID NO: 214744 - DNA, 25 bp, Artificial
  probe
  misc_feature (1)..(25): SEQ ID NO: 1104; WAN024FON_at; Start 35; Stop 59
tgctgctttatacctcaacttttcc

SEQ ID NO: 214745 - DNA, 25 bp, Artificial
  probe
  misc_feature (1)..(25): SEQ ID NO: 1104; WAN024FON_at; Start 794; Stop 818
catcaataattgatgtgacaaatga

SEQ ID NO: 214746 - DNA, 25 bp, Artificial
  probe
  misc_feature (1)..(25): SEQ ID NO: 1104; WAN024FON_at; Start 835; Stop 859
gaattactcaaatattcaaagatct

SEQ ID NO: 214747 - DNA, 25 bp, Artificial
  probe
  misc_feature (1)..(25): SEQ ID NO: 1104; WAN024FON_at; Start 574; Stop 598
gatgagtcttatccagtaagttcgc

SEQ ID NO: 214748 - DNA, 25 bp, Artificial
  probe
  misc_feature (1)..(25): SEQ ID NO: 1104; WAN024FON_at; Start 697; Stop 721
aatcgattaaataaatggtgtgaag

SEQ ID NO: 214749 - DNA, 25 bp, Artificial
  probe
  misc_feature (1)..(25): SEQ ID NO: 1104; WAN024FON_at; Start 940; Stop 964
gattatttgaggattgatcgttcgc

SEQ ID NO: 214750 - DNA, 25 bp, Artificial
  probe
  misc_feature (1)..(25): SEQ ID NO: 1104; WAN024FON_at; Start 346; Stop 370
ttaattaacctttggcatggcattc

SEQ ID NO: 214751 - DNA, 25 bp, Artificial
  probe
  misc_feature (1)..(25): SEQ ID NO: 1104; WAN024FON_at; Start 271; Stop 295
gctaaatatatttttacaactacag

SEQ ID NO: 214752 - DNA, 25 bp, Artificial
  probe
  misc_feature (1)..(25): SEQ ID NO: 1104; WAN024FON_at; Start 546; Stop 570
tggacagcctagaaatgactatttt

SEQ ID NO: 214753 - DNA, 25 bp, Artificial
  probe
  misc_feature (1)..(25): SEQ ID NO: 1104; WAN024FON_at; Start 317; Stop 341
aaaatagtaggttgattggcggtgc

SEQ ID NO: 214754 - DNA, 25 bp, Artificial
  probe
  misc_feature (1)..(25): SEQ ID NO: 1104; WAN024FON_at; Start 1057; Stop 1081
gatgattataggaaaaagcgtgaaa

SEQ ID NO: 214755 - DNA, 25 bp, Artificial
  probe
  misc_feature (1)..(25): SEQ ID NO: 1104; WAN024FON_at; Start 849; Stop 873
ttcaaagatcttaataactgactac

SEQ ID NO: 214756 - DNA, 25 bp, Artificial
  probe
  misc_feature (1)..(25): SEQ ID NO: 1104; WAN024FON_at; Start 306; Stop 330
tatcggagtagaaaatagtaggttg

SEQ ID NO: 214757 - DNA, 25 bp, Artificial
  probe
  misc_feature (1)..(25): SEQ ID NO: 1104; WAN024FON_at; Start 534; Stop 558
tatattagaacttggacagcctaga

SEQ ID NO: 214758 - DNA, 25 bp, Artificial
  probe
  misc_feature (1)..(25): SEQ ID NO: 1104; WAN024FON_at; Start 657; Stop 681
aggaaagaaacaaattcctctagat

SEQ ID NO: 214759 - DNA, 25 bp, Artificial
  probe
  misc_feature (1)..(25): SEQ ID NO: 1104; WAN024FON_at; Start 667; Stop 691
caaattcctctagataatttaatgg

SEQ ID NO: 214760 - DNA, 25 bp, Artificial
  probe
  misc_feature (1)..(25): SEQ ID NO: 1104; WAN024FON_at; Start 343; Stop 367
tttttaattaacctttggcatggca

SEQ ID NO: 214761 - DNA, 25 bp, Artificial
  probe
  misc_feature (1)..(25): SEQ ID NO: 1104; WAN024FON_at; Start 230; Stop 254
tgatggcagatgagagtgaagctca

SEQ ID NO: 214762 - DNA, 25 bp, Artificial
  probe
  misc_feature (1)..(25): SEQ ID NO: 1104; WAN024FON_at; Start 595; Stop 619
tcgctaatacaagaattaaaaagta

SEQ ID NO: 214763 - DNA, 25 bp, Artificial
  probe
  misc_feature (1)..(25): SEQ ID NO: 1104; WAN024FON_at; Start 253; Stop 277
cataaaattatgaagaaagctaaat

SEQ ID NO: 214764 - DNA, 25 bp, Artificial
  probe
  misc_feature (1)..(25): SEQ ID NO: 1104; WAN024FON_at; Start 29; Stop 53
tattaatgctgctttatacctcaac

SEQ ID NO: 214765 - DNA, 25 bp, Artificial
  probe
  misc_feature (1)..(25): SEQ ID NO: 1104; WAN024FON_at; Start 945; Stop 969
tttgaggattgatcgttcgctatat

SEQ ID NO: 214766 - DNA, 25 bp, Artificial
  probe
  misc_feature (1)..(25): SEQ ID NO: 1104; WAN024FON_at; Start 222; Stop 246
tcccgtgatgatggcagatgagagt

SEQ ID NO: 214767 - DNA, 25 bp, Artificial
  probe
  misc_feature (1)..(25): SEQ ID NO: 1104; WAN024FON_at; Start 69; Stop 93
gaaaatactgatttttggatcatgg

SEQ ID NO: 214768 - DNA, 25 bp, Artificial
  probe
  misc_feature (1)..(25): SEQ ID NO: 1104; WAN024FON_at; Start 57; Stop 81
tccaagatgtgagaaaatactgatt

SEQ ID NO: 214769 - DNA, 25 bp, Artificial
  probe
  misc_feature (1)..(25): SEQ ID NO: 1104; WAN024FON_at; Start 47; Stop 71
cctcaacttttccaagatgtgagaa

SEQ ID NO: 214770 - DNA, 25 bp, Artificial
  probe
  misc_feature (1)..(25): SEQ ID NO: 1104; WAN024FON_at; Start 329; Stop 353
tgattggcggtgcttttttaattaa

SEQ ID NO: 214771 - DNA, 25 bp, Artificial
  probe
  misc_feature (1)..(25): SEQ ID NO: 1104; WAN024FON_at; Start 218; Stop 242
aatatcccgtgatgatggcagatga

SEQ ID NO: 214772 - DNA, 25 bp, Artificial
  probe
  misc_feature (1)..(25): SEQ ID NO: 1104; WAN024FON_at; Start 287; Stop 311
caactacaggtatttttgatatcgg

SEQ ID NO: 214773 - DNA, 25 bp, Artificial
  probe
  misc_feature (1)..(25): SEQ ID NO: 1104; WAN024FON_at; Start 774; Stop 798
aacacttgagaaagaatattcatca

SEQ ID NO: 214774 - DNA, 25 bp, Artificial
  probe
  misc_feature (1)..(25): SEQ ID NO: 1104; WAN024FON_at; Start 241; Stop 265
gagagtgaagctcataaaattatga

SEQ ID NO: 214775 - DNA, 25 bp, Artificial
  probe
  misc_feature (1)..(25): SEQ ID NO: 5616; WAN024FOO_at; Start 201; Stop 225
tgtgctcaacaccaagattttcaag

SEQ ID NO: 214776 - DNA, 25 bp, Artificial
  probe
  misc_feature (1)..(25): SEQ ID NO: 5616; WAN024FOO_at; Start 327; Stop 351
caccttcaatcaaagctacttttag

SEQ ID NO: 214777 - DNA, 25 bp, Artificial
  probe
  misc_feature (1)..(25): SEQ ID NO: 5616; WAN024FOO_at; Start 150; Stop 174
tcactttcttaaaatcaccatggtc

SEQ ID NO: 214778 - DNA, 25 bp, Artificial
  probe
  misc_feature (1)..(25): SEQ ID NO: 5616; WAN024FOO_at; Start 317; Stop 341
cctggcagaccaccttcaatcaaag

SEQ ID NO: 214779 - DNA, 25 bp, Artificial
  probe
  misc_feature (1)..(25): SEQ ID NO: 5616; WAN024FOO_at; Start 212; Stop 236
ccaagattttcaagtggttcaaaca

SEQ ID NO: 214780 - DNA, 25 bp, Artificial
  probe
  misc_feature (1)..(25): SEQ ID NO: 5616; WAN024FOO_at; Start 237; Stop 261
tcttttcagccaattcaggtccact

SEQ ID NO: 214781 - DNA, 25 bp, Artificial
  probe
  misc_feature (1)..(25): SEQ ID NO: 5616; WAN024FOO_at; Start 5; Stop 29
tcacggaagaaagcaccatcacaca

SEQ ID NO: 214782 - DNA, 25 bp, Artificial
  probe
  misc_feature (1)..(25): SEQ ID NO: 5616; WAN024FOO_at; Start 303; Stop 327
tattcatctgaccacctggcagacc

SEQ ID NO: 214783 - DNA, 25 bp, Artificial
  probe
  misc_feature (1)..(25): SEQ ID NO: 5616; WAN024FOO_at; Start 191; Stop 215
taaccataaatgtgctcaacaccaa

SEQ ID NO: 214784 - DNA, 25 bp, Artificial
  probe
  misc_feature (1)..(25): SEQ ID NO: 5616; WAN024FOO_at; Start 17; Stop 41
gcaccatcacacacagcacagtaag

SEQ ID NO: 214785 - DNA, 25 bp, Artificial
  probe
  misc_feature (1)..(25): SEQ ID NO: 5616; WAN024FOO_at; Start 231; Stop 255
caaacatcttttcagccaattcagg

SEQ ID NO: 214786 - DNA, 25 bp, Artificial
  probe
  misc_feature (1)..(25): SEQ ID NO: 5616; WAN024FOO_at; Start 320; Stop 344
ggcagaccaccttcaatcaaagcta

SEQ ID NO: 214787 - DNA, 25 bp, Artificial
  probe
  misc_feature (1)..(25): SEQ ID NO: 5616; WAN024FOO_at; Start 247; Stop 271
caattcaggtccactaatattagcg

SEQ ID NO: 214788 - DNA, 25 bp, Artificial
  probe
  misc_feature (1)..(25): SEQ ID NO: 5616; WAN024FOO_at; Start 275; Stop 299
cctgggtaattttcgatatcagatg

SEQ ID NO: 214789 - DNA, 25 bp, Artificial
  probe
  misc_feature (1)..(25): SEQ ID NO: 5616; WAN024FOO_at; Start 266; Stop 290
ttagcgtatcctgggtaattttcga

SEQ ID NO: 214790 - DNA, 25 bp, Artificial
  probe
  misc_feature (1)..(25): SEQ ID NO: 5616; WAN024FOO_at; Start 37; Stop 61
gtaagaaacaccacgactgttcagt

SEQ ID NO: 214791 - DNA, 25 bp, Artificial
  probe
  misc_feature (1)..(25): SEQ ID NO: 5616; WAN024FOO_at; Start 138; Stop 162
ggtcatcagtcatcactttcttaaa

SEQ ID NO: 214792 - DNA, 25 bp, Artificial
  probe
  misc_feature (1)..(25): SEQ ID NO: 5616; WAN024FOO_at; Start 183; Stop 207
tttcaacataaccataaatgtgctc

SEQ ID NO: 214793 - DNA, 25 bp, Artificial
  probe
  misc_feature (1)..(25): SEQ ID NO: 5616; WAN024FOO_at; Start 222; Stop 246
caagtggttcaaacatcttttcagc

SEQ ID NO: 214794 - DNA, 25 bp, Artificial
  probe
  misc_feature (1)..(25): SEQ ID NO: 5616; WAN024FOO_at; Start 101; Stop 125
ccagttgctacgataactgtacgtg

SEQ ID NO: 214795 - DNA, 25 bp, Artificial
  probe
  misc_feature (1)..(25): SEQ ID NO: 5616; WAN024FOO_at; Start 117; Stop 141
ctgtacgtgtttcatatgtttggtc

SEQ ID NO: 214796 - DNA, 25 bp, Artificial
  probe
  misc_feature (1)..(25): SEQ ID NO: 5616; WAN024FOO_at; Start 10; Stop 34
gaagaaagcaccatcacacacagca

SEQ ID NO: 214797 - DNA, 25 bp, Artificial
  probe
  misc_feature (1)..(25): SEQ ID NO: 5616; WAN024FOO_at; Start 1; Stop 25
ttggtcacggaagaaagcaccatca

SEQ ID NO: 214798 - DNA, 25 bp, Artificial
  probe
  misc_feature (1)..(25): SEQ ID NO: 5616; WAN024FOO_at; Start 159; Stop 183
taaaatcaccatggtcttcgacatt

SEQ ID NO: 214799 - DNA, 25 bp, Artificial
  probe
  misc_feature (1)..(25): SEQ ID NO: 5616; WAN024FOO_at; Start 96; Stop 120
tagaaccagttgctacgataactgt

SEQ ID NO: 214800 - DNA, 25 bp, Artificial
  probe
  misc_feature (1)..(25): SEQ ID NO: 5616; WAN024FOO_at; Start 259; Stop 283
actaatattagcgtatcctgggtaa

SEQ ID NO: 214801 - DNA, 25 bp, Artificial
  probe
  misc_feature (1)..(25): SEQ ID NO: 5616; WAN024FOO_at; Start 87; Stop 111
gacggtgtttagaaccagttgctac

SEQ ID NO: 214802 - DNA, 25 bp, Artificial
  probe
  misc_feature (1)..(25): SEQ ID NO: 5616; WAN024FOO_at; Start 129; Stop 153
catatgtttggtcatcagtcatcac

SEQ ID NO: 214803 - DNA, 25 bp, Artificial
  probe
  misc_feature (1)..(25): SEQ ID NO: 5616; WAN024FOO_at; Start 51; Stop 75
gactgttcagttcttcttctccagg

SEQ ID NO: 214804 - DNA, 25 bp, Artificial
  probe
  misc_feature (1)..(25): SEQ ID NO: 5616; WAN024FOO_at; Start 66; Stop 90
cttctccaggtactcccaaaggacg

SEQ ID NO: 214805 - DNA, 25 bp, Artificial
  probe
  misc_feature (1)..(25): SEQ ID NO: 5616; WAN024FOO_at; Start 170; Stop 194
tggtcttcgacattttcaacataac

SEQ ID NO: 214806 - DNA, 25 bp, Artificial
  probe
  misc_feature (1)..(25): SEQ ID NO: 5616; WAN024FOO_at; Start 28; Stop 52
cacagcacagtaagaaacaccacga

SEQ ID NO: 214807 - DNA, 25 bp, Artificial
  probe
  misc_feature (1)..(25): SEQ ID NO: 5616; WAN024FOO_at; Start 107; Stop 131
gctacgataactgtacgtgtttcat

SEQ ID NO: 214808 - DNA, 25 bp, Artificial
  probe
  misc_feature (1)..(25): SEQ ID NO: 5616; WAN024FOO_at; Start 298; Stop 322
tgtattattcatctgaccacctggc

SEQ ID NO: 214809 - DNA, 25 bp, Artificial
  probe
  misc_feature (1)..(25): SEQ ID NO: 3044; WAN024FOP_at; Start 155; Stop 179
gcctgatcttggatattcaattctt

SEQ ID NO: 214810 - DNA, 25 bp, Artificial
  probe
  misc_feature (1)..(25): SEQ ID NO: 3044; WAN024FOP_at; Start 340; Stop 364
ttcattcgcaaaggcgcgatcttgt

SEQ ID NO: 214811 - DNA, 25 bp, Artificial
  probe
  misc_feature (1)..(25): SEQ ID NO: 3044; WAN024FOP_at; Start 301; Stop 325
gatttccttcactacagaatcccag

SEQ ID NO: 214812 - DNA, 25 bp, Artificial
  probe
  misc_feature (1)..(25): SEQ ID NO: 3044; WAN024FOP_at; Start 28; Stop 52
ttgaccagcgatagctccatctcca

SEQ ID NO: 214813 - DNA, 25 bp, Artificial
  probe
  misc_feature (1)..(25): SEQ ID NO: 3044; WAN024FOP_at; Start 188; Stop 212
tcgctaagagggtccaaaccaacat

SEQ ID NO: 214814 - DNA, 25 bp, Artificial
  probe
  misc_feature (1)..(25): SEQ ID NO: 3044; WAN024FOP_at; Start 278; Stop 302
gattctactctgttttcacccttga

SEQ ID NO: 214815 - DNA, 25 bp, Artificial
  probe
  misc_feature (1)..(25): SEQ ID NO: 3044; WAN024FOP_at; Start 92; Stop 116
tctccaactgcaaagataccgtcga

SEQ ID NO: 214816 - DNA, 25 bp, Artificial
  probe
  misc_feature (1)..(25): SEQ ID NO: 3044; WAN024FOP_at; Start 213; Stop 237
agataaagacaccaccgaaggcttg

SEQ ID NO: 214817 - DNA, 25 bp, Artificial
  probe
  misc_feature (1)..(25): SEQ ID NO: 3044; WAN024FOP_at; Start 239; Stop 263
tctgtcacttgacctgttttcacat

SEQ ID NO: 214818 - DNA, 25 bp, Artificial
  probe
  misc_feature (1)..(25): SEQ ID NO: 3044; WAN024FOP_at; Start 166; Stop 190
gatattcaattctttaacaaaatcg

SEQ ID NO: 214819 - DNA, 25 bp, Artificial
  probe
  misc_feature (1)..(25): SEQ ID NO: 3044; WAN024FOP_at; Start 293; Stop 317
tcacccttgatttccttcactacag

SEQ ID NO: 214820 - DNA, 25 bp, Artificial
  probe
  misc_feature (1)..(25): SEQ ID NO: 3044; WAN024FOP_at; Start 56; Stop 80
gctgttgttacttggcgaaggtctt

SEQ ID NO: 214821 - DNA, 25 bp, Artificial
  probe
  misc_feature (1)..(25): SEQ ID NO: 3044; WAN024FOP_at; Start 325; Stop 349
gataaagctgattttttcattcgca

SEQ ID NO: 214822 - DNA, 25 bp, Artificial
  probe
  misc_feature (1)..(25): SEQ ID NO: 3044; WAN024FOP_at; Start 244; Stop 268
cacttgacctgttttcacattttca

SEQ ID NO: 214823 - DNA, 25 bp, Artificial
  probe
  misc_feature (1)..(25): SEQ ID NO: 3044; WAN024FOP_at; Start 72; Stop 96
gaaggtctttcaagcgaacatctcc

SEQ ID NO: 214824 - DNA, 25 bp, Artificial
  probe
  misc_feature (1)..(25): SEQ ID NO: 3044; WAN024FOP_at; Start 98; Stop 122
actgcaaagataccgtcgactgcag

SEQ ID NO: 214825 - DNA, 25 bp, Artificial
  probe
  misc_feature (1)..(25): SEQ ID NO: 3044; WAN024FOP_at; Start 317; Stop 341
gaatcccagataaagctgatttttt

SEQ ID NO: 214826 - DNA, 25 bp, Artificial
  probe
  misc_feature (1)..(25): SEQ ID NO: 3044; WAN024FOP_at; Start 304; Stop 328
ttccttcactacagaatcccagata

SEQ ID NO: 214827 - DNA, 25 bp, Artificial
  probe
  misc_feature (1)..(25): SEQ ID NO: 3044; WAN024FOP_at; Start 85; Stop 109
gcgaacatctccaactgcaaagata

SEQ ID NO: 214828 - DNA, 25 bp, Artificial
  probe
  misc_feature (1)..(25): SEQ ID NO: 3044; WAN024FOP_at; Start 197; Stop 221
gggtccaaaccaacatagataaaga

SEQ ID NO: 214829 - DNA, 25 bp, Artificial
  probe
  misc_feature (1)..(25): SEQ ID NO: 3044; WAN024FOP_at; Start 82; Stop 106
caagcgaacatctccaactgcaaag

SEQ ID NO: 214830 - DNA, 25 bp, Artificial
  probe
  misc_feature (1)..(25): SEQ ID NO: 3044; WAN024FOP_at; Start 64; Stop 88
tacttggcgaaggtctttcaagcga

SEQ ID NO: 214831 - DNA, 25 bp, Artificial
  probe
  misc_feature (1)..(25): SEQ ID NO: 3044; WAN024FOP_at; Start 210; Stop 234
catagataaagacaccaccgaaggc

SEQ ID NO: 214832 - DNA, 25 bp, Artificial
  probe
  misc_feature (1)..(25): SEQ ID NO: 3044; WAN024FOP_at; Start 75; Stop 99
ggtctttcaagcgaacatctccaac

SEQ ID NO: 214833 - DNA, 25 bp, Artificial
  probe
  misc_feature (1)..(25): SEQ ID NO: 3044; WAN024FOP_at; Start 23; Stop 47
gcttcttgaccagcgatagctccat

SEQ ID NO: 214834 - DNA, 25 bp, Artificial
  probe
  misc_feature (1)..(25): SEQ ID NO: 3044; WAN024FOP_at; Start 337; Stop 361
tttttcattcgcaaaggcgcgatct

SEQ ID NO: 214835 - DNA, 25 bp, Artificial
  probe
  misc_feature (1)..(25): SEQ ID NO: 3044; WAN024FOP_at; Start 180; Stop 204
taacaaaatcgctaagagggtccaa

SEQ ID NO: 214836 - DNA, 25 bp, Artificial
  probe
  misc_feature (1)..(25): SEQ ID NO: 3044; WAN024FOP_at; Start 192; Stop 216
taagagggtccaaaccaacatagat

SEQ ID NO: 214837 - DNA, 25 bp, Artificial
  probe
  misc_feature (1)..(25): SEQ ID NO: 3044; WAN024FOP_at; Start 20; Stop 44
taggcttcttgaccagcgatagctc

SEQ ID NO: 214838 - DNA, 25 bp, Artificial
  probe
  misc_feature (1)..(25): SEQ ID NO: 3044; WAN024FOP_at; Start 95; Stop 119
ccaactgcaaagataccgtcgactg

SEQ ID NO: 214839 - DNA, 25 bp, Artificial
  probe
  misc_feature (1)..(25): SEQ ID NO: 3044; WAN024FOP_at; Start 152; Stop 176
cctgcctgatcttggatattcaatt

SEQ ID NO: 214840 - DNA, 25 bp, Artificial
  probe
  misc_feature (1)..(25): SEQ ID NO: 3044; WAN024FOP_at; Start 205; Stop 229
accaacatagataaagacaccaccg

SEQ ID NO: 214841 - DNA, 25 bp, Artificial
  probe
  misc_feature (1)..(25): SEQ ID NO: 3044; WAN024FOP_at; Start 69; Stop 93
ggcgaaggtctttcaagcgaacatc

SEQ ID NO: 214842 - DNA, 25 bp, Artificial
  probe
  misc_feature (1)..(25): SEQ ID NO: 3044; WAN024FOP_at; Start 333; Stop 357
tgattttttcattcgcaaaggcgcg

SEQ ID NO: 214843 - DNA, 25 bp, Artificial
  probe
  misc_feature (1)..(25): SEQ ID NO: 2775; WAN024FOQ_at; Start 299; Stop 323
cacgtacagttatcgtagcaactgg

SEQ ID NO: 214844 - DNA, 25 bp, Artificial
  probe
  misc_feature (1)..(25): SEQ ID NO: 2775; WAN024FOQ_at; Start 134; Stop 158
tcgaaaattacccaggatacgctaa

SEQ ID NO: 214845 - DNA, 25 bp, Artificial
  probe
  misc_feature (1)..(25): SEQ ID NO: 2775; WAN024FOQ_at; Start 80; Stop 104
tagctttgattgaaggtggtctgcc

SEQ ID NO: 214846 - DNA, 25 bp, Artificial
  probe
  misc_feature (1)..(25): SEQ ID NO: 2775; WAN024FOQ_at; Start 512; Stop 536
gtcgtgaccaacttcgtgcccaaaa

SEQ ID NO: 214847 - DNA, 25 bp, Artificial
  probe
  misc_feature (1)..(25): SEQ ID NO: 2775; WAN024FOQ_at; Start 463; Stop 487
gaagccctcttcttgactcgttttg

SEQ ID NO: 214848 - DNA, 25 bp, Artificial
  probe
  misc_feature (1)..(25): SEQ ID NO: 2775; WAN024FOQ_at; Start 314; Stop 338
tagcaactggttctaaacaccgtcc

SEQ ID NO: 214849 - DNA, 25 bp, Artificial
  probe
  misc_feature (1)..(25): SEQ ID NO: 2775; WAN024FOQ_at; Start 15; Stop 39
tattatcggtgctggacctgcaggg

SEQ ID NO: 214850 - DNA, 25 bp, Artificial
  probe
  misc_feature (1)..(25): SEQ ID NO: 2775; WAN024FOQ_at; Start 58; Stop 82
gctgctcgaagcaatctaaaagtag

SEQ ID NO: 214851 - DNA, 25 bp, Artificial
  probe
  misc_feature (1)..(25): SEQ ID NO: 2775; WAN024FOQ_at; Start 572; Stop 596
tcagctttatctgggattctgtagt

SEQ ID NO: 214852 - DNA, 25 bp, Artificial
  probe
  misc_feature (1)..(25): SEQ ID NO: 2775; WAN024FOQ_at; Start 230; Stop 254
gttatgttgaaaatgtcgaagacca

SEQ ID NO: 214853 - DNA, 25 bp, Artificial
  probe
  misc_feature (1)..(25): SEQ ID NO: 2775; WAN024FOQ_at; Start 177; Stop 201
ggctgaaaagatgtttgaaccactt

SEQ ID NO: 214854 - DNA, 25 bp, Artificial
  probe
  misc_feature (1)..(25): SEQ ID NO: 2775; WAN024FOQ_at; Start 494; Stop 518
ctgttaccattgttcaccgtcgtga

SEQ ID NO: 214855 - DNA, 25 bp, Artificial
  probe
  misc_feature (1)..(25): SEQ ID NO: 2775; WAN024FOQ_at; Start 247; Stop 271
gaagaccatggtgattttaagaaag

SEQ ID NO: 214856 - DNA, 25 bp, Artificial
  probe
  misc_feature (1)..(25): SEQ ID NO: 2775; WAN024FOQ_at; Start 383; Stop 407
cttactgtgctgtgtgtgatggtgc

SEQ ID NO: 214857 - DNA, 25 bp, Artificial
  probe
  misc_feature (1)..(25): SEQ ID NO: 2775; WAN024FOQ_at; Start 643; Stop 667
aatgtgaaaacaggtcaagtgacag

SEQ ID NO: 214858 - DNA, 25 bp, Artificial
  probe
  misc_feature (1)..(25): SEQ ID NO: 2775; WAN024FOQ_at; Start 283; Stop 307
gaccaaacatatgaaacacgtacag

SEQ ID NO: 214859 - DNA, 25 bp, Artificial
  probe
  misc_feature (1)..(25): SEQ ID NO: 2775; WAN024FOQ_at; Start 267; Stop 291
gaaagtgatgactgatgaccaaaca

SEQ ID NO: 214860 - DNA, 25 bp, Artificial
  probe
  misc_feature (1)..(25): SEQ ID NO: 2775; WAN024FOQ_at; Start 42; Stop 66
gactgcggccttgtatgctgctcga

SEQ ID NO: 214861 - DNA, 25 bp, Artificial
  probe
  misc_feature (1)..(25): SEQ ID NO: 2775; WAN024FOQ_at; Start 477; Stop 501
gactcgttttgctaagactgttacc

SEQ ID NO: 214862 - DNA, 25 bp, Artificial
  probe
  misc_feature (1)..(25): SEQ ID NO: 2775; WAN024FOQ_at; Start 363; Stop 387
actgaacagtcgtggtgtttcttac

SEQ ID NO: 214863 - DNA, 25 bp, Artificial
  probe
  misc_feature (1)..(25): SEQ ID NO: 2775; WAN024FOQ_at; Start 198; Stop 222
acttgaaaatcttggtgttgagcac

SEQ ID NO: 214864 - DNA, 25 bp, Artificial
  probe
  misc_feature (1)..(25): SEQ ID NO: 2775; WAN024FOQ_at; Start 448; Stop 472
gattcagctgttgaagaagccctct

SEQ ID NO: 214865 - DNA, 25 bp, Artificial
  probe
  misc_feature (1)..(25): SEQ ID NO: 2775; WAN024FOQ_at; Start 704; Stop 728
tggaccctcttagcgattttgttaa

SEQ ID NO: 214866 - DNA, 25 bp, Artificial
  probe
  misc_feature (1)..(25): SEQ ID NO: 2775; WAN024FOQ_at; Start 101; Stop 125
tgccaggtggtcagatgaataatac

SEQ ID NO: 214867 - DNA, 25 bp, Artificial
  probe
  misc_feature (1)..(25): SEQ ID NO: 2775; WAN024FOQ_at; Start 863; Stop 887
gagctatcgctggtcaagaagccta

SEQ ID NO: 214868 - DNA, 25 bp, Artificial
  probe
  misc_feature (1)..(25): SEQ ID NO: 2775; WAN024FOQ_at; Start 29; Stop 53
gacctgcagggatgactgcggcctt

SEQ ID NO: 214869 - DNA, 25 bp, Artificial
  probe
  misc_feature (1)..(25): SEQ ID NO: 2775; WAN024FOQ_at; Start 677; Stop 701
tcggtggtgtctttatctatgttgg

SEQ ID NO: 214870 - DNA, 25 bp, Artificial
  probe
  misc_feature (1)..(25): SEQ ID NO: 2775; WAN024FOQ_at; Start 400; Stop 424
gatggtgctttcttccgtgaccaag

SEQ ID NO: 214871 - DNA, 25 bp, Artificial
  probe
  misc_feature (1)..(25): SEQ ID NO: 2775; WAN024FOQ_at; Start 730; Stop 754
gaattgaatatccaagatcaggcag

SEQ ID NO: 214872 - DNA, 25 bp, Artificial
  probe
  misc_feature (1)..(25): SEQ ID NO: 2775; WAN024FOQ_at; Start 125; Stop 149
catctgatatcgaaaattacccagg

SEQ ID NO: 214873 - DNA, 25 bp, Artificial
  probe
  misc_feature (1)..(25): SEQ ID NO: 2775; WAN024FOQ_at; Start 349; Stop 373
cctggagaagaagaactgaacagtc

SEQ ID NO: 214874 - DNA, 25 bp, Artificial
  probe
  misc_feature (1)..(25): SEQ ID NO: 2775; WAN024FOQ_at; Start 788; Stop 812
cagtcgacggtatctttgcagttgg

SEQ ID NO: 214875 - DNA, 25 bp, Artificial
  probe
  misc_feature (1)..(25): SEQ ID NO: 2775; WAN024FOQ_at; Start 162; Stop 186
tagtggacctgaattggctgaaaag

SEQ ID NO: 214876 - DNA, 25 bp, Artificial
  probe
  misc_feature (1)..(25): SEQ ID NO: 2775; WAN024FOQ_at; Start 149; Stop 173
gatacgctaatattagtggacctga

SEQ ID NO: 214877 - DNA, 25 bp, Artificial
  probe
  misc_feature (1)..(25): SEQ ID NO: 6590; WAN024FOR_at; Start 805; Stop 829
ctatgtttaaaatctgtcatgatgc

SEQ ID NO: 214878 - DNA, 25 bp, Artificial
  probe
  misc_feature (1)..(25): SEQ ID NO: 6590; WAN024FOR_at; Start 735; Stop 759
gattaatttattatataagtctcga

SEQ ID NO: 214879 - DNA, 25 bp, Artificial
  probe
  misc_feature (1)..(25): SEQ ID NO: 6590; WAN024FOR_at; Start 817; Stop 841
tctgtcatgatgctatccattttag

SEQ ID NO: 214880 - DNA, 25 bp, Artificial
  probe
  misc_feature (1)..(25): SEQ ID NO: 6590; WAN024FOR_at; Start 828; Stop 852
gctatccattttagaatatataatc

SEQ ID NO: 214881 - DNA, 25 bp, Artificial
  probe
  misc_feature (1)..(25): SEQ ID NO: 6590; WAN024FOR_at; Start 864; Stop 888
gaatttattatatacaaagactaac

SEQ ID NO: 214882 - DNA, 25 bp, Artificial
  probe
  misc_feature (1)..(25): SEQ ID NO: 6590; WAN024FOR_at; Start 860; Stop 884
tgatgaatttattatatacaaagac

SEQ ID NO: 214883 - DNA, 25 bp, Artificial
  probe
  misc_feature (1)..(25): SEQ ID NO: 6590; WAN024FOR_at; Start 753; Stop 777
gtctcgatactactataatgtaaag

SEQ ID NO: 214884 - DNA, 25 bp, Artificial
  probe
  misc_feature (1)..(25): SEQ ID NO: 6590; WAN024FOR_at; Start 693; Stop 717
ttcaacttctataaatgagagatat

SEQ ID NO: 214885 - DNA, 25 bp, Artificial
  probe
  misc_feature (1)..(25): SEQ ID NO: 6590; WAN024FOR_at; Start 741; Stop 765
tttattatataagtctcgatactac

SEQ ID NO: 214886 - DNA, 25 bp, Artificial
  probe
  misc_feature (1)..(25): SEQ ID NO: 6590; WAN024FOR_at; Start 878; Stop 902
caaagactaactataagaaaattca

SEQ ID NO: 214887 - DNA, 25 bp, Artificial
  probe
  misc_feature (1)..(25): SEQ ID NO: 6590; WAN024FOR_at; Start 813; Stop 837
aaaatctgtcatgatgctatccatt

SEQ ID NO: 214888 - DNA, 25 bp, Artificial
  probe
  misc_feature (1)..(25): SEQ ID NO: 6590; WAN024FOR_at; Start 841; Stop 865
gaatatataatcttagatatgatga

SEQ ID NO: 214889 - DNA, 25 bp, Artificial
  probe
  misc_feature (1)..(25): SEQ ID NO: 6590; WAN024FOR_at; Start 806; Stop 830
tatgtttaaaatctgtcatgatgct

SEQ ID NO: 214890 - DNA, 25 bp, Artificial
  probe
  misc_feature (1)..(25): SEQ ID NO: 6590; WAN024FOR_at; Start 754; Stop 778
tctcgatactactataatgtaaagt

SEQ ID NO: 214891 - DNA, 25 bp, Artificial
  probe
  misc_feature (1)..(25): SEQ ID NO: 6590; WAN024FOR_at; Start 811; Stop 835
ttaaaatctgtcatgatgctatcca

SEQ ID NO: 214892 - DNA, 25 bp, Artificial
  probe
  misc_feature (1)..(25): SEQ ID NO: 6590; WAN024FOR_at; Start 819; Stop 843
tgtcatgatgctatccattttagaa

SEQ ID NO: 214893 - DNA, 25 bp, Artificial
  probe
  misc_feature (1)..(25): SEQ ID NO: 6590; WAN024FOR_at; Start 750; Stop 774
taagtctcgatactactataatgta

SEQ ID NO: 214894 - DNA, 25 bp, Artificial
  probe
  misc_feature (1)..(25): SEQ ID NO: 6590; WAN024FOR_at; Start 748; Stop 772
tataagtctcgatactactataatg

SEQ ID NO: 214895 - DNA, 25 bp, Artificial
  probe
  misc_feature (1)..(25): SEQ ID NO: 6590; WAN024FOR_at; Start 822; Stop 846
catgatgctatccattttagaatat

SEQ ID NO: 214896 - DNA, 25 bp, Artificial
  probe
  misc_feature (1)..(25): SEQ ID NO: 6590; WAN024FOR_at; Start 872; Stop 896
tatatacaaagactaactataagaa

SEQ ID NO: 214897 - DNA, 25 bp, Artificial
  probe
  misc_feature (1)..(25): SEQ ID NO: 6590; WAN024FOR_at; Start 808; Stop 832
tgtttaaaatctgtcatgatgctat

SEQ ID NO: 214898 - DNA, 25 bp, Artificial
  probe
  misc_feature (1)..(25): SEQ ID NO: 6590; WAN024FOR_at; Start 818; Stop 842
ctgtcatgatgctatccattttaga

SEQ ID NO: 214899 - DNA, 25 bp, Artificial
  probe
  misc_feature (1)..(25): SEQ ID NO: 6590; WAN024FOR_at; Start 812; Stop 836
taaaatctgtcatgatgctatccat

SEQ ID NO: 214900 - DNA, 25 bp, Artificial
  probe
  misc_feature (1)..(25): SEQ ID NO: 6590; WAN024FOR_at; Start 755; Stop 779
ctcgatactactataatgtaaagta

SEQ ID NO: 214901 - DNA, 25 bp, Artificial
  probe
  misc_feature (1)..(25): SEQ ID NO: 6590; WAN024FOR_at; Start 757; Stop 781
cgatactactataatgtaaagtata

SEQ ID NO: 214902 - DNA, 25 bp, Artificial
  probe
  misc_feature (1)..(25): SEQ ID NO: 6590; WAN024FOR_at; Start 833; Stop 857
ccattttagaatatataatcttaga

SEQ ID NO: 214903 - DNA, 25 bp, Artificial
  probe
  misc_feature (1)..(25): SEQ ID NO: 6590; WAN024FOR_at; Start 810; Stop 834
tttaaaatctgtcatgatgctatcc

SEQ ID NO: 214904 - DNA, 25 bp, Artificial
  probe
  misc_feature (1)..(25): SEQ ID NO: 6590; WAN024FOR_at; Start 695; Stop 719
caacttctataaatgagagatataa

SEQ ID NO: 214905 - DNA, 25 bp, Artificial
  probe
  misc_feature (1)..(25): SEQ ID NO: 6590; WAN024FOR_at; Start 704; Stop 728
taaatgagagatataaaaagaaaaa

SEQ ID NO: 214906 - DNA, 25 bp, Artificial
  probe
  misc_feature (1)..(25): SEQ ID NO: 6590; WAN024FOR_at; Start 700; Stop 724
tctataaatgagagatataaaaaga

SEQ ID NO: 214907 - DNA, 25 bp, Artificial
  probe
  misc_feature (1)..(25): SEQ ID NO: 6590; WAN024FOR_at; Start 801; Stop 825
aaaactatgtttaaaatctgtcatg

SEQ ID NO: 214908 - DNA, 25 bp, Artificial
  probe
  misc_feature (1)..(25): SEQ ID NO: 6590; WAN024FOR_at; Start 743; Stop 767
tattatataagtctcgatactacta

SEQ ID NO: 214909 - DNA, 25 bp, Artificial
  probe
  misc_feature (1)..(25): SEQ ID NO: 6590; WAN024FOR_at; Start 825; Stop 849
gatgctatccattttagaatatata

SEQ ID NO: 214910 - DNA, 25 bp, Artificial
  probe
  misc_feature (1)..(25): SEQ ID NO: 6590; WAN024FOR_at; Start 820; Stop 844
gtcatgatgctatccattttagaat

SEQ ID NO: 214911 - DNA, 25 bp, Artificial
  probe
  misc_feature (1)..(25): SEQ ID NO: 2584; WAN024FOS_at; Start 809; Stop 833
gcctaaaactattcatgtttttatc

SEQ ID NO: 214912 - DNA, 25 bp, Artificial
  probe
  misc_feature (1)..(25): SEQ ID NO: 2584; WAN024FOS_at; Start 802; Stop 826
aaaatttgcctaaaactattcatgt

SEQ ID NO: 214913 - DNA, 25 bp, Artificial
  probe
  misc_feature (1)..(25): SEQ ID NO: 2584; WAN024FOS_at; Start 735; Stop 759
gatagttttactatataatgctcgt

SEQ ID NO: 214914 - DNA, 25 bp, Artificial
  probe
  misc_feature (1)..(25): SEQ ID NO: 2584; WAN024FOS_at; Start 839; Stop 863
ttgaatactcgatactagattatat

SEQ ID NO: 214915 - DNA, 25 bp, Artificial
  probe
  misc_feature (1)..(25): SEQ ID NO: 2584; WAN024FOS_at; Start 763; Stop 787
tattacaatgtgacgtatcaaaata

SEQ ID NO: 214916 - DNA, 25 bp, Artificial
  probe
  misc_feature (1)..(25): SEQ ID NO: 2584; WAN024FOS_at; Start 755; Stop 779
ctcgttattattacaatgtgacgta

SEQ ID NO: 214917 - DNA, 25 bp, Artificial
  probe
  misc_feature (1)..(25): SEQ ID NO: 2584; WAN024FOS_at; Start 730; Stop 754
gaacagatagttttactatataatg

SEQ ID NO: 214918 - DNA, 25 bp, Artificial
  probe
  misc_feature (1)..(25): SEQ ID NO: 2584; WAN024FOS_at; Start 693; Stop 717
ttcaacttctataaacgagaagtat

SEQ ID NO: 214919 - DNA, 25 bp, Artificial
  probe
  misc_feature (1)..(25): SEQ ID NO: 2584; WAN024FOS_at; Start 832; Stop 856
tctattattgaatactcgatactag

SEQ ID NO: 214920 - DNA, 25 bp, Artificial
  probe
  misc_feature (1)..(25): SEQ ID NO: 2584; WAN024FOS_at; Start 760; Stop 784
tattattacaatgtgacgtatcaaa

SEQ ID NO: 214921 - DNA, 25 bp, Artificial
  probe
  misc_feature (1)..(25): SEQ ID NO: 2584; WAN024FOS_at; Start 833; Stop 857
ctattattgaatactcgatactaga

SEQ ID NO: 214922 - DNA, 25 bp, Artificial
  probe
  misc_feature (1)..(25): SEQ ID NO: 2584; WAN024FOS_at; Start 757; Stop 781
cgttattattacaatgtgacgtatc

SEQ ID NO: 214923 - DNA, 25 bp, Artificial
  probe
  misc_feature (1)..(25): SEQ ID NO: 2584; WAN024FOS_at; Start 733; Stop 757
cagatagttttactatataatgctc

SEQ ID NO: 214924 - DNA, 25 bp, Artificial
  probe
  misc_feature (1)..(25): SEQ ID NO: 2584; WAN024FOS_at; Start 769; Stop 793
aatgtgacgtatcaaaatattagct

SEQ ID NO: 214925 - DNA, 25 bp, Artificial
  probe
  misc_feature (1)..(25): SEQ ID NO: 2584; WAN024FOS_at; Start 837; Stop 861
tattgaatactcgatactagattat

SEQ ID NO: 214926 - DNA, 25 bp, Artificial
  probe
  misc_feature (1)..(25): SEQ ID NO: 2584; WAN024FOS_at; Start 758; Stop 782
gttattattacaatgtgacgtatca

SEQ ID NO: 214927 - DNA, 25 bp, Artificial
  probe
  misc_feature (1)..(25): SEQ ID NO: 2584; WAN024FOS_at; Start 845; Stop 869
actcgatactagattatattaaacg

SEQ ID NO: 214928 - DNA, 25 bp, Artificial
  probe
  misc_feature (1)..(25): SEQ ID NO: 2584; WAN024FOS_at; Start 801; Stop 825
aaaaatttgcctaaaactattcatg

SEQ ID NO: 214929 - DNA, 25 bp, Artificial
  probe
  misc_feature (1)..(25): SEQ ID NO: 2584; WAN024FOS_at; Start 804; Stop 828
aatttgcctaaaactattcatgttt

SEQ ID NO: 214930 - DNA, 25 bp, Artificial
  probe
  misc_feature (1)..(25): SEQ ID NO: 2584; WAN024FOS_at; Start 834; Stop 858
tattattgaatactcgatactagat

SEQ ID NO: 214931 - DNA, 25 bp, Artificial
  probe
  misc_feature (1)..(25): SEQ ID NO: 2584; WAN024FOS_at; Start 700; Stop 724
tctataaacgagaagtataaaaaga

SEQ ID NO: 214932 - DNA, 25 bp, Artificial
  probe
  misc_feature (1)..(25): SEQ ID NO: 2584; WAN024FOS_at; Start 768; Stop 792
caatgtgacgtatcaaaatattagc

SEQ ID NO: 214933 - DNA, 25 bp, Artificial
  probe
  misc_feature (1)..(25): SEQ ID NO: 2584; WAN024FOS_at; Start 841; Stop 865
gaatactcgatactagattatatta

SEQ ID NO: 214934 - DNA, 25 bp, Artificial
  probe
  misc_feature (1)..(25): SEQ ID NO: 2584; WAN024FOS_at; Start 774; Stop 798
gacgtatcaaaatattagctttttg

SEQ ID NO: 214935 - DNA, 25 bp, Artificial
  probe
  misc_feature (1)..(25): SEQ ID NO: 2584; WAN024FOS_at; Start 771; Stop 795
tgtgacgtatcaaaatattagcttt

SEQ ID NO: 214936 - DNA, 25 bp, Artificial
  probe
  misc_feature (1)..(25): SEQ ID NO: 2584; WAN024FOS_at; Start 850; Stop 874
atactagattatattaaacgaaagg

SEQ ID NO: 214937 - DNA, 25 bp, Artificial
  probe
  misc_feature (1)..(25): SEQ ID NO: 2584; WAN024FOS_at; Start 754; Stop 778
gctcgttattattacaatgtgacgt

SEQ ID NO: 214938 - DNA, 25 bp, Artificial
  probe
  misc_feature (1)..(25): SEQ ID NO: 2584; WAN024FOS_at; Start 737; Stop 761
tagttttactatataatgctcgtta

SEQ ID NO: 214939 - DNA, 25 bp, Artificial
  probe
  misc_feature (1)..(25): SEQ ID NO: 2584; WAN024FOS_at; Start 753; Stop 777
tgctcgttattattacaatgtgacg

SEQ ID NO: 214940 - DNA, 25 bp, Artificial
  probe
  misc_feature (1)..(25): SEQ ID NO: 2584; WAN024FOS_at; Start 849; Stop 873
gatactagattatattaaacgaaag

SEQ ID NO: 214941 - DNA, 25 bp, Artificial
  probe
  misc_feature (1)..(25): SEQ ID NO: 2584; WAN024FOS_at; Start 695; Stop 719
caacttctataaacgagaagtataa

SEQ ID NO: 214942 - DNA, 25 bp, Artificial
  probe
  misc_feature (1)..(25): SEQ ID NO: 2584; WAN024FOS_at; Start 825; Stop 849
gtttttatctattattgaatactcg

SEQ ID NO: 214943 - DNA, 25 bp, Artificial
  probe
  misc_feature (1)..(25): SEQ ID NO: 2584; WAN024FOS_at; Start 772; Stop 796
gtgacgtatcaaaatattagctttt

SEQ ID NO: 214944 - DNA, 25 bp, Artificial
  probe
  misc_feature (1)..(25): SEQ ID NO: 2584; WAN024FOS_at; Start 847; Stop 871
tcgatactagattatattaaacgaa

SEQ ID NO: 214945 - DNA, 25 bp, Artificial
  probe
  misc_feature (1)..(25): SEQ ID NO: 1710; WAN024FOT_at; Start 123; Stop 147
tgtacgtggaatcggatttggtcaa

SEQ ID NO: 214946 - DNA, 25 bp, Artificial
  probe
  misc_feature (1)..(25): SEQ ID NO: 1710; WAN024FOT_at; Start 163; Stop 187
ttcattggacaaggagtttctatct

SEQ ID NO: 214947 - DNA, 25 bp, Artificial
  probe
  misc_feature (1)..(25): SEQ ID NO: 1710; WAN024FOT_at; Start 172; Stop 196
caaggagtttctatcttagcaaagc

SEQ ID NO: 214948 - DNA, 25 bp, Artificial
  probe
  misc_feature (1)..(25): SEQ ID NO: 1710; WAN024FOT_at; Start 243; Stop 267
tatagatgcactgtcaaaagaagga

SEQ ID NO: 214949 - DNA, 25 bp, Artificial
  probe
  misc_feature (1)..(25): SEQ ID NO: 1710; WAN024FOT_at; Start 468; Stop 492
taattatagtgatttagataaactc

SEQ ID NO: 214950 - DNA, 25 bp, Artificial
  probe
  misc_feature (1)..(25): SEQ ID NO: 1710; WAN024FOT_at; Start 298; Stop 322
gattattctcaaattattggcacag

SEQ ID NO: 214951 - DNA, 25 bp, Artificial
  probe
  misc_feature (1)..(25): SEQ ID NO: 1710; WAN024FOT_at; Start 426; Stop 450
tgttatcgcaggtcagaatgttcgt

SEQ ID NO: 214952 - DNA, 25 bp, Artificial
  probe
  misc_feature (1)..(25): SEQ ID NO: 1710; WAN024FOT_at; Start 37; Stop 61
aaaacagtagacattcatccagatg

SEQ ID NO: 214953 - DNA, 25 bp, Artificial
  probe
  misc_feature (1)..(25): SEQ ID NO: 1710; WAN024FOT_at; Start 340; Stop 364
gggattggcttgaaaatcggtaaga

SEQ ID NO: 214954 - DNA, 25 bp, Artificial
  probe
  misc_feature (1)..(25): SEQ ID NO: 1710; WAN024FOT_at; Start 176; Stop 200
gagtttctatcttagcaaagcgtaa

SEQ ID NO: 214955 - DNA, 25 bp, Artificial
  probe
  misc_feature (1)..(25): SEQ ID NO: 1710; WAN024FOT_at; Start 262; Stop 286
gaaggaatccattttgcagataatg

SEQ ID NO: 214956 - DNA, 25 bp, Artificial
  probe
  misc_feature (1)..(25): SEQ ID NO: 1710; WAN024FOT_at; Start 250; Stop 274
gcactgtcaaaagaaggaatccatt

SEQ ID NO: 214957 - DNA, 25 bp, Artificial
  probe
  misc_feature (1)..(25): SEQ ID NO: 1710; WAN024FOT_at; Start 231; Stop 255
taaaaaggtgtctatagatgcactg

SEQ ID NO: 214958 - DNA, 25 bp, Artificial
  probe
  misc_feature (1)..(25): SEQ ID NO: 1710; WAN024FOT_at; Start 514; Stop 538
cgaaagggaatttcagtaggtgata

SEQ ID NO: 214959 - DNA, 25 bp, Artificial
  probe
  misc_feature (1)..(25): SEQ ID NO: 1710; WAN024FOT_at; Start 304; Stop 328
tctcaaattattggcacaggttcta

SEQ ID NO: 214960 - DNA, 25 bp, Artificial
  probe
  misc_feature (1)..(25): SEQ ID NO: 1710; WAN024FOT_at; Start 52; Stop 76
catccagatgtacctttgtcgtata

SEQ ID NO: 214961 - DNA, 25 bp, Artificial
  probe
  misc_feature (1)..(25): SEQ ID NO: 1710; WAN024FOT_at; Start 27; Stop 51
gattactggaaaaacagtagacatt

SEQ ID NO: 214962 - DNA, 25 bp, Artificial
  probe
  misc_feature (1)..(25): SEQ ID NO: 1710; WAN024FOT_at; Start 411; Stop 435
cacaattggtgataatgttatcgca

SEQ ID NO: 214963 - DNA, 25 bp, Artificial
  probe
  misc_feature (1)..(25): SEQ ID NO: 1710; WAN024FOT_at; Start 222; Stop 246
tcgaattggtaaaaaggtgtctata

SEQ ID NO: 214964 - DNA, 25 bp, Artificial
  probe
  misc_feature (1)..(25): SEQ ID NO: 1710; WAN024FOT_at; Start 12; Stop 36
gagtttcataaaaaagattactgga

SEQ ID NO: 214965 - DNA, 25 bp, Artificial
  probe
  misc_feature (1)..(25): SEQ ID NO: 1710; WAN024FOT_at; Start 312; Stop 336
tattggcacaggttctataaaaaat

SEQ ID NO: 214966 - DNA, 25 bp, Artificial
  probe
  misc_feature (1)..(25): SEQ ID NO: 1710; WAN024FOT_at; Start 439; Stop 463
cagaatgttcgttttcatgctgaaa

SEQ ID NO: 214967 - DNA, 25 bp, Artificial
  probe
  misc_feature (1)..(25): SEQ ID NO: 1710; WAN024FOT_at; Start 389; Stop 413
tatttggttctgctggaggtatcac

SEQ ID NO: 214968 - DNA, 25 bp, Artificial
  probe
  misc_feature (1)..(25): SEQ ID NO: 1710; WAN024FOT_at; Start 397; Stop 421
tctgctggaggtatcacaattggtg

SEQ ID NO: 214969 - DNA, 25 bp, Artificial
  probe
  misc_feature (1)..(25): SEQ ID NO: 1710; WAN024FOT_at; Start 483; Stop 507
agataaactcattgttgaacaaggg

SEQ ID NO: 214970 - DNA, 25 bp, Artificial
  probe
  misc_feature (1)..(25): SEQ ID NO: 1710; WAN024FOT_at; Start 507; Stop 531
ggtatctcgaaagggaatttcagta

SEQ ID NO: 214971 - DNA, 25 bp, Artificial
  probe
  misc_feature (1)..(25): SEQ ID NO: 1710; WAN024FOT_at; Start 557; Stop 581
gatctgtttttttggatgggtccag

SEQ ID NO: 214972 - DNA, 25 bp, Artificial
  probe
  misc_feature (1)..(25): SEQ ID NO: 1710; WAN024FOT_at; Start 530; Stop 554
taggtgataattgttggattggtgc

SEQ ID NO: 214973 - DNA, 25 bp, Artificial
  probe
  misc_feature (1)..(25): SEQ ID NO: 1710; WAN024FOT_at; Start 151; Stop 175
gacaaacgtttattcattggacaag

SEQ ID NO: 214974 - DNA, 25 bp, Artificial
  probe
  misc_feature (1)..(25): SEQ ID NO: 1710; WAN024FOT_at; Start 68; Stop 92
tgtcgtatatactacaaagaggtat

SEQ ID NO: 214975 - DNA, 25 bp, Artificial
  probe
  misc_feature (1)..(25): SEQ ID NO: 1710; WAN024FOT_at; Start 190; Stop 214
gcaaagcgtaaattatttgttggaa

SEQ ID NO: 214976 - DNA, 25 bp, Artificial
  probe
  misc_feature (1)..(25): SEQ ID NO: 1710; WAN024FOT_at; Start 538; Stop 562
aattgttggattggtgctggatctg

SEQ ID NO: 214977 - DNA, 25 bp, Artificial
  probe
  misc_feature (1)..(25): SEQ ID NO: 1710; WAN024FOT_at; Start 276; Stop 300
tgcagataatgtaaagattggagat

SEQ ID NO: 214978 - DNA, 25 bp, Artificial
  probe
  misc_feature (1)..(25): SEQ ID NO: 1710; WAN024FOT_at; Start 382; Stop 406
tatagtttatttggttctgctggag

SEQ ID NO: 214979 - DNA, 25 bp, Artificial
  probe
  misc_feature (1)..(25): SEQ ID NO: 2090; WAN024FOU_at; Start 156; Stop 180
catcttgaacagagtgagagacgat

SEQ ID NO: 214980 - DNA, 25 bp, Artificial
  probe
  misc_feature (1)..(25): SEQ ID NO: 2090; WAN024FOU_at; Start 204; Stop 228
ccaaatcgtaggcttcctgtggagt

SEQ ID NO: 214981 - DNA, 25 bp, Artificial
  probe
  misc_feature (1)..(25): SEQ ID NO: 2090; WAN024FOU_at; Start 232; Stop 256
gccttcttcaacaatattaggtacc

SEQ ID NO: 214982 - DNA, 25 bp, Artificial
  probe
  misc_feature (1)..(25): SEQ ID NO: 2090; WAN024FOU_at; Start 109; Stop 133
cacgttacggtcaacagacaggcaa

SEQ ID NO: 214983 - DNA, 25 bp, Artificial
  probe
  misc_feature (1)..(25): SEQ ID NO: 2090; WAN024FOU_at; Start 62; Stop 86
tcaaagtagtcaacagtaacgcggg

SEQ ID NO: 214984 - DNA, 25 bp, Artificial
  probe
  misc_feature (1)..(25): SEQ ID NO: 2090; WAN024FOU_at; Start 223; Stop 247
tggagtttcgccttcttcaacaata

SEQ ID NO: 214985 - DNA, 25 bp, Artificial
  probe
  misc_feature (1)..(25): SEQ ID NO: 2090; WAN024FOU_at; Start 139; Stop 163
tccttcgccaagagcagcatcttga

SEQ ID NO: 214986 - DNA, 25 bp, Artificial
  probe
  misc_feature (1)..(25): SEQ ID NO: 2090; WAN024FOU_at; Start 128; Stop 152
aggcaaccttctccttcgccaagag

SEQ ID NO: 214987 - DNA, 25 bp, Artificial
  probe
  misc_feature (1)..(25): SEQ ID NO: 2090; WAN024FOU_at; Start 9; Stop 33
caacaatggagttgtagcctttgag

SEQ ID NO: 214988 - DNA, 25 bp, Artificial
  probe
  misc_feature (1)..(25): SEQ ID NO: 2090; WAN024FOU_at; Start 90; Stop 114
ggcgaacaacatagccaggcacgtt

SEQ ID NO: 214989 - DNA, 25 bp, Artificial
  probe
  misc_feature (1)..(25): SEQ ID NO: 2090; WAN024FOU_at; Start 181; Stop 205
ttttggattgtacataatggcttcc

SEQ ID NO: 214990 - DNA, 25 bp, Artificial
  probe
  misc_feature (1)..(25): SEQ ID NO: 2090; WAN024FOU_at; Start 193; Stop 217
cataatggcttccaaatcgtaggct

SEQ ID NO: 214991 - DNA, 25 bp, Artificial
  probe
  misc_feature (1)..(25): SEQ ID NO: 2090; WAN024FOU_at; Start 67; Stop 91
gtagtcaacagtaacgcgggcatgg

SEQ ID NO: 214992 - DNA, 25 bp, Artificial
  probe
  misc_feature (1)..(25): SEQ ID NO: 2090; WAN024FOU_at; Start 39; Stop 63
tacggtgtttttctccatctttgtc

SEQ ID NO: 214993 - DNA, 25 bp, Artificial
  probe
  misc_feature (1)..(25): SEQ ID NO: 2090; WAN024FOU_at; Start 162; Stop 186
gaacagagtgagagacgatttttgg

SEQ ID NO: 214994 - DNA, 25 bp, Artificial
  probe
  misc_feature (1)..(25): SEQ ID NO: 2090; WAN024FOU_at; Start 249; Stop 273
taggtaccaaaacagcgataatgcg

SEQ ID NO: 214995 - DNA, 25 bp, Artificial
  probe
  misc_feature (1)..(25): SEQ ID NO: 2090; WAN024FOU_at; Start 54; Stop 78
catctttgtcaaagtagtcaacagt

SEQ ID NO: 214996 - DNA, 25 bp, Artificial
  probe
  misc_feature (1)..(25): SEQ ID NO: 2090; WAN024FOU_at; Start 210; Stop 234
cgtaggcttcctgtggagtttcgcc

SEQ ID NO: 214997 - DNA, 25 bp, Artificial
  probe
  misc_feature (1)..(25): SEQ ID NO: 2090; WAN024FOU_at; Start 21; Stop 45
tgtagcctttgagtttgatacggtg

SEQ ID NO: 214998 - DNA, 25 bp, Artificial
  probe
  misc_feature (1)..(25): SEQ ID NO: 2090; WAN024FOU_at; Start 251; Stop 275
ggtaccaaaacagcgataatgcgtt

SEQ ID NO: 214999 - DNA, 25 bp, Artificial
  probe
  misc_feature (1)..(25): SEQ ID NO: 2090; WAN024FOU_at; Start 114; Stop 138
tacggtcaacagacaggcaaccttc

SEQ ID NO: 215000 - DNA, 25 bp, Artificial
  probe
  misc_feature (1)..(25): SEQ ID NO: 2090; WAN024FOU_at; Start 121; Stop 145
aacagacaggcaaccttctccttcg

SEQ ID NO: 215001 - DNA, 25 bp, Artificial
  probe
  misc_feature (1)..(25): SEQ ID NO: 2090; WAN024FOU_at; Start 150; Stop 174
gagcagcatcttgaacagagtgaga

SEQ ID NO: 215002 - DNA, 25 bp, Artificial
  probe
  misc_feature (1)..(25): SEQ ID NO: 2090; WAN024FOU_at; Start 31; Stop 55
gagtttgatacggtgtttttctcca

SEQ ID NO: 215003 - DNA, 25 bp, Artificial
  probe
  misc_feature (1)..(25): SEQ ID NO: 2090; WAN024FOU_at; Start 171; Stop 195
gagagacgatttttggattgtacat

SEQ ID NO: 215004 - DNA, 25 bp, Artificial
  probe
  misc_feature (1)..(25): SEQ ID NO: 2090; WAN024FOU_at; Start 3; Stop 27
gctgaacaacaatggagttgtagcc

SEQ ID NO: 215005 - DNA, 25 bp, Artificial
  probe
  misc_feature (1)..(25): SEQ ID NO: 2090; WAN024FOU_at; Start 98; Stop 122
acatagccaggcacgttacggtcaa

SEQ ID NO: 215006 - DNA, 25 bp, Artificial
  probe
  misc_feature (1)..(25): SEQ ID NO: 2090; WAN024FOU_at; Start 101; Stop 125
tagccaggcacgttacggtcaacag

SEQ ID NO: 215007 - DNA, 25 bp, Artificial
  probe
  misc_feature (1)..(25): SEQ ID NO: 2090; WAN024FOU_at; Start 199; Stop 223
ggcttccaaatcgtaggcttcctgt

SEQ ID NO: 215008 - DNA, 25 bp, Artificial
  probe
  misc_feature (1)..(25): SEQ ID NO: 2090; WAN024FOU_at; Start 255; Stop 279
ccaaaacagcgataatgcgttttga

SEQ ID NO: 215009 - DNA, 25 bp, Artificial
  probe
  misc_feature (1)..(25): SEQ ID NO: 2090; WAN024FOU_at; Start 82; Stop 106
gcgggcatggcgaacaacatagcca

SEQ ID NO: 215010 - DNA, 25 bp, Artificial
  probe
  misc_feature (1)..(25): SEQ ID NO: 2090; WAN024FOU_at; Start 78; Stop 102
taacgcgggcatggcgaacaacata

SEQ ID NO: 215011 - DNA, 25 bp, Artificial
  probe
  misc_feature (1)..(25): SEQ ID NO: 2090; WAN024FOU_at; Start 218; Stop 242
tcctgtggagtttcgccttcttcaa

SEQ ID NO: 215012 - DNA, 25 bp, Artificial
  probe
  misc_feature (1)..(25): SEQ ID NO: 2090; WAN024FOU_at; Start 243; Stop 267
caatattaggtaccaaaacagcgat

SEQ ID NO: 215013 - DNA, 25 bp, Artificial
  probe
  misc_feature (1)..(25): SEQ ID NO: 2935; WAN024FOV_at; Start 175; Stop 199
cctgtcatggctgaaaaaatgggac

SEQ ID NO: 215014 - DNA, 25 bp, Artificial
  probe
  misc_feature (1)..(25): SEQ ID NO: 2935; WAN024FOV_at; Start 398; Stop 422
ttgaccgtaacgtgcctggctatgt

SEQ ID NO: 215015 - DNA, 25 bp, Artificial
  probe
  misc_feature (1)..(25): SEQ ID NO: 2935; WAN024FOV_at; Start 296; Stop 320
cacaggaagcctacgatttggaagc

SEQ ID NO: 215016 - DNA, 25 bp, Artificial
  probe
  misc_feature (1)..(25): SEQ ID NO: 2935; WAN024FOV_at; Start 360; Stop 384
agatgctgctcttggcgaaggagaa

SEQ ID NO: 215017 - DNA, 25 bp, Artificial
  probe
  misc_feature (1)..(25): SEQ ID NO: 2935; WAN024FOV_at; Start 488; Stop 512
tcaaaggctacaactccattgttgt

SEQ ID NO: 215018 - DNA, 25 bp, Artificial
  probe
  misc_feature (1)..(25): SEQ ID NO: 2935; WAN024FOV_at; Start 473; Stop 497
aacaccgtatcaaactcaaaggcta

SEQ ID NO: 215019 - DNA, 25 bp, Artificial
  probe
  misc_feature (1)..(25): SEQ ID NO: 2935; WAN024FOV_at; Start 28; Stop 52
gctgctcacttaattgatatgaacg

SEQ ID NO: 215020 - DNA, 25 bp, Artificial
  probe
  misc_feature (1)..(25): SEQ ID NO: 2935; WAN024FOV_at; Start 428; Stop 452
gccatgcccgcgttactgttgacta

SEQ ID NO: 215021 - DNA, 25 bp, Artificial
  probe
  misc_feature (1)..(25): SEQ ID NO: 2935; WAN024FOV_at; Start 415; Stop 439
ggctatgttgttcgccatgcccgcg

SEQ ID NO: 215022 - DNA, 25 bp, Artificial
  probe
  misc_feature (1)..(25): SEQ ID NO: 2935; WAN024FOV_at; Start 520; Stop 544
gaaattgaccacattaacggtatca

SEQ ID NO: 215023 - DNA, 25 bp, Artificial
  probe
  misc_feature (1)..(25): SEQ ID NO: 2935; WAN024FOV_at; Start 337; Stop 361
aaaatcgtctctcactctgttcaag

SEQ ID NO: 215024 - DNA, 25 bp, Artificial
  probe
  misc_feature (1)..(25): SEQ ID NO: 2935; WAN024FOV_at; Start 160; Stop 184
aaacattcccaagatcctgtcatgg

SEQ ID NO: 215025 - DNA, 25 bp, Artificial
  probe
  misc_feature (1)..(25): SEQ ID NO: 2935; WAN024FOV_at; Start 129; Stop 153
catcctaggcgaaaagatgatgcaa

SEQ ID NO: 215026 - DNA, 25 bp, Artificial
  probe
  misc_feature (1)..(25): SEQ ID NO: 2935; WAN024FOV_at; Start 346; Stop 370
tctcactctgttcaagatgctgctc

SEQ ID NO: 215027 - DNA, 25 bp, Artificial
  probe
  misc_feature (1)..(25): SEQ ID NO: 2935; WAN024FOV_at; Start 457; Stop 481
gacaaagatggagaaaaacaccgta

SEQ ID NO: 215028 - DNA, 25 bp, Artificial
  probe
  misc_feature (1)..(25): SEQ ID NO: 2935; WAN024FOV_at; Start 235; Stop 259
gatatctcaaaacgcattatcgctg

SEQ ID NO: 215029 - DNA, 25 bp, Artificial
  probe
  misc_feature (1)..(25): SEQ ID NO: 2935; WAN024FOV_at; Start 206; Stop 230
gtggtgttggactggctgctcccca

SEQ ID NO: 215030 - DNA, 25 bp, Artificial
  probe
  misc_feature (1)..(25): SEQ ID NO: 2935; WAN024FOV_at; Start 550; Stop 574
tacgatcgcatcaatgaaaaagacc

SEQ ID NO: 215031 - DNA, 25 bp, Artificial
  probe
  misc_feature (1)..(25): SEQ ID NO: 2935; WAN024FOV_at; Start 144; Stop 168
gatgatgcaattccttaaacattcc

SEQ ID NO: 215032 - DNA, 25 bp, Artificial
  probe
  misc_feature (1)..(25): SEQ ID NO: 2935; WAN024FOV_at; Start 273; Stop 297
tattgttgaagaaggcgaaactcca

SEQ ID NO: 215033 - DNA, 25 bp, Artificial
  probe
  misc_feature (1)..(25): SEQ ID NO: 2935; WAN024FOV_at; Start 386; Stop 410
gttgcctgtctgttgaccgtaacgt

SEQ ID NO: 215034 - DNA, 25 bp, Artificial
  probe
  misc_feature (1)..(25): SEQ ID NO: 2935; WAN024FOV_at; Start 535; Stop 559
aacggtatcatgttttacgatcgca

SEQ ID NO: 215035 - DNA, 25 bp, Artificial
  probe
  misc_feature (1)..(25): SEQ ID NO: 2935; WAN024FOV_at; Start 185; Stop 209
ctgaaaaaatgggactccgcggtgg

SEQ ID NO: 215036 - DNA, 25 bp, Artificial
  probe
  misc_feature (1)..(25): SEQ ID NO: 2935; WAN024FOV_at; Start 441; Stop 465
tactgttgactactttgacaaagat

SEQ ID NO: 215037 - DNA, 25 bp, Artificial
  probe
  misc_feature (1)..(25): SEQ ID NO: 2935; WAN024FOV_at; Start 280; Stop 304
gaagaaggcgaaactccacaggaag

SEQ ID NO: 215038 - DNA, 25 bp, Artificial
  probe
  misc_feature (1)..(25): SEQ ID NO: 2935; WAN024FOV_at; Start 568; Stop 592
aaagacccatttgcagttaaagatg

SEQ ID NO: 215039 - DNA, 25 bp, Artificial
  probe
  misc_feature (1)..(25): SEQ ID NO: 2935; WAN024FOV_at; Start 113; Stop 137
tatctgaccaggaaatcatcctagg

SEQ ID NO: 215040 - DNA, 25 bp, Artificial
  probe
  misc_feature (1)..(25): SEQ ID NO: 2935; WAN024FOV_at; Start 324; Stop 348
tatgtacaatccaaaaatcgtctct

SEQ ID NO: 215041 - DNA, 25 bp, Artificial
  probe
  misc_feature (1)..(25): SEQ ID NO: 2935; WAN024FOV_at; Start 589; Stop 613
gatggtttactgattcttgaataac

SEQ ID NO: 215042 - DNA, 25 bp, Artificial
  probe
  misc_feature (1)..(25): SEQ ID NO: 2935; WAN024FOV_at; Start 507; Stop 531
tgttgttcagcatgaaattgaccac

SEQ ID NO: 215043 - DNA, 25 bp, Artificial
  probe
  misc_feature (1)..(25): SEQ ID NO: 2935; WAN024FOV_at; Start 13; Stop 37
gaacgtattacaaaagctgctcact

SEQ ID NO: 215044 - DNA, 25 bp, Artificial
  probe
  misc_feature (1)..(25): SEQ ID NO: 2935; WAN024FOV_at; Start 247; Stop 271
cgcattatcgctgttttggtaccta

SEQ ID NO: 215045 - DNA, 25 bp, Artificial
  probe
  misc_feature (1)..(25): SEQ ID NO: 2935; WAN024FOV_at; Start 307; Stop 331
tacgatttggaagccattatgtaca

SEQ ID NO: 215046 - DNA, 25 bp, Artificial
  probe
  misc_feature (1)..(25): SEQ ID NO: 2935; WAN024FOV_at; Start 220; Stop 244
gctgctccccagttagatatctcaa

SEQ ID NO: 215047 - DNA, 25 bp, Artificial
  probe
  misc_feature (1)..(25): SEQ ID NO: 5142; WAN024FOW_at; Start 4; Stop 28
agtaagttacagctagagtttaggt

SEQ ID NO: 215048 - DNA, 25 bp, Artificial
  probe
  misc_feature (1)..(25): SEQ ID NO: 5142; WAN024FOW_at; Start 28; Stop 52
tttgattatatcagatatttagatg

SEQ ID NO: 215049 - DNA, 25 bp, Artificial
  probe
  misc_feature (1)..(25): SEQ ID NO: 5142; WAN024FOW_at; Start 37; Stop 61
atcagatatttagatgatttggaaa

SEQ ID NO: 215050 - DNA, 25 bp, Artificial
  probe
  misc_feature (1)..(25): SEQ ID NO: 5142; WAN024FOW_at; Start 3; Stop 27
gagtaagttacagctagagtttagg

SEQ ID NO: 215051 - DNA, 25 bp, Artificial
  probe
  misc_feature (1)..(25): SEQ ID NO: 5142; WAN024FOW_at; Start 14; Stop 38
agctagagtttaggtttgattatat

SEQ ID NO: 215052 - DNA, 25 bp, Artificial
  probe
  misc_feature (1)..(25): SEQ ID NO: 5142; WAN024FOW_at; Start 25; Stop 49
aggtttgattatatcagatatttag

SEQ ID NO: 215053 - DNA, 25 bp, Artificial
  probe
  misc_feature (1)..(25): SEQ ID NO: 5142; WAN024FOW_at; Start 20; Stop 44
agtttaggtttgattatatcagata

SEQ ID NO: 215054 - DNA, 25 bp, Artificial
  probe
  misc_feature (1)..(25): SEQ ID NO: 5142; WAN024FOW_at; Start 23; Stop 47
ttaggtttgattatatcagatattt

SEQ ID NO: 215055 - DNA, 25 bp, Artificial
  probe
  misc_feature (1)..(25): SEQ ID NO: 5142; WAN024FOW_at; Start 21; Stop 45
gtttaggtttgattatatcagatat

SEQ ID NO: 215056 - DNA, 25 bp, Artificial
  probe
  misc_feature (1)..(25): SEQ ID NO: 5142; WAN024FOW_at; Start 33; Stop 57
ttatatcagatatttagatgatttg

SEQ ID NO: 215057 - DNA, 25 bp, Artificial
  probe
  misc_feature (1)..(25): SEQ ID NO: 5142; WAN024FOW_at; Start 24; Stop 48
taggtttgattatatcagatattta

SEQ ID NO: 215058 - DNA, 25 bp, Artificial
  probe
  misc_feature (1)..(25): SEQ ID NO: 5142; WAN024FOW_at; Start 8; Stop 32
agttacagctagagtttaggtttga

SEQ ID NO: 215059 - DNA, 25 bp, Artificial
  probe
  misc_feature (1)..(25): SEQ ID NO: 5142; WAN024FOW_at; Start 19; Stop 43
gagtttaggtttgattatatcagat

SEQ ID NO: 215060 - DNA, 25 bp, Artificial
  probe
  misc_feature (1)..(25): SEQ ID NO: 5142; WAN024FOW_at; Start 30; Stop 54
tgattatatcagatatttagatgat

SEQ ID NO: 215061 - DNA, 25 bp, Artificial
  probe
  misc_feature (1)..(25): SEQ ID NO: 5142; WAN024FOW_at; Start 11; Stop 35
tacagctagagtttaggtttgatta

SEQ ID NO: 215062 - DNA, 25 bp, Artificial
  probe
  misc_feature (1)..(25): SEQ ID NO: 5142; WAN024FOW_at; Start 17; Stop 41
tagagtttaggtttgattatatcag

SEQ ID NO: 215063 - DNA, 25 bp, Artificial
  probe
  misc_feature (1)..(25): SEQ ID NO: 5142; WAN024FOW_at; Start 29; Stop 53
ttgattatatcagatatttagatga

SEQ ID NO: 215064 - DNA, 25 bp, Artificial
  probe
  misc_feature (1)..(25): SEQ ID NO: 5142; WAN024FOW_at; Start 2; Stop 26
tgagtaagttacagctagagtttag

SEQ ID NO: 215065 - DNA, 25 bp, Artificial
  probe
  misc_feature (1)..(25): SEQ ID NO: 5142; WAN024FOW_at; Start 35; Stop 59
atatcagatatttagatgatttgga

SEQ ID NO: 215066 - DNA, 25 bp, Artificial
  probe
  misc_feature (1)..(25): SEQ ID NO: 5142; WAN024FOW_at; Start 31; Stop 55
gattatatcagatatttagatgatt

SEQ ID NO: 215067 - DNA, 25 bp, Artificial
  probe
  misc_feature (1)..(25): SEQ ID NO: 5142; WAN024FOW_at; Start 9; Stop 33
gttacagctagagtttaggtttgat

SEQ ID NO: 215068 - DNA, 25 bp, Artificial
  probe
  misc_feature (1)..(25): SEQ ID NO: 5142; WAN024FOW_at; Start 26; Stop 50
ggtttgattatatcagatatttaga

SEQ ID NO: 215069 - DNA, 25 bp, Artificial
  probe
  misc_feature (1)..(25): SEQ ID NO: 5142; WAN024FOW_at; Start 13; Stop 37
cagctagagtttaggtttgattata

SEQ ID NO: 215070 - DNA, 25 bp, Artificial
  probe
  misc_feature (1)..(25): SEQ ID NO: 5142; WAN024FOW_at; Start 7; Stop 31
aagttacagctagagtttaggtttg

SEQ ID NO: 215071 - DNA, 25 bp, Artificial
  probe
  misc_feature (1)..(25): SEQ ID NO: 5142; WAN024FOW_at; Start 36; Stop 60
tatcagatatttagatgatttggaa

SEQ ID NO: 215072 - DNA, 25 bp, Artificial
  probe
  misc_feature (1)..(25): SEQ ID NO: 5142; WAN024FOW_at; Start 16; Stop 40
ctagagtttaggtttgattatatca

SEQ ID NO: 215073 - DNA, 25 bp, Artificial
  probe
  misc_feature (1)..(25): SEQ ID NO: 5142; WAN024FOW_at; Start 34; Stop 58
tatatcagatatttagatgatttgg

SEQ ID NO: 215074 - DNA, 25 bp, Artificial
  probe
  misc_feature (1)..(25): SEQ ID NO: 5142; WAN024FOW_at; Start 22; Stop 46
tttaggtttgattatatcagatatt

SEQ ID NO: 215075 - DNA, 25 bp, Artificial
  probe
  misc_feature (1)..(25): SEQ ID NO: 5142; WAN024FOW_at; Start 27; Stop 51
gtttgattatatcagatatttagat

SEQ ID NO: 215076 - DNA, 25 bp, Artificial
  probe
  misc_feature (1)..(25): SEQ ID NO: 5142; WAN024FOW_at; Start 1; Stop 25
ttgagtaagttacagctagagttta

SEQ ID NO: 215077 - DNA, 25 bp, Artificial
  probe
  misc_feature (1)..(25): SEQ ID NO: 5142; WAN024FOW_at; Start 15; Stop 39
gctagagtttaggtttgattatatc

SEQ ID NO: 215078 - DNA, 25 bp, Artificial
  probe
  misc_feature (1)..(25): SEQ ID NO: 5142; WAN024FOW_at; Start 18; Stop 42
agagtttaggtttgattatatcaga

SEQ ID NO: 215079 - DNA, 25 bp, Artificial
  probe
  misc_feature (1)..(25): SEQ ID NO: 5142; WAN024FOW_at; Start 10; Stop 34
ttacagctagagtttaggtttgatt

SEQ ID NO: 215080 - DNA, 25 bp, Artificial
  probe
  misc_feature (1)..(25): SEQ ID NO: 5142; WAN024FOW_at; Start 12; Stop 36
acagctagagtttaggtttgattat

SEQ ID NO: 215081 - DNA, 25 bp, Artificial
  probe
  misc_feature (1)..(25): SEQ ID NO: 5317; WAN024FOX_at; Start 180; Stop 204
gagcctgaatcaattcattgttttc

SEQ ID NO: 215082 - DNA, 25 bp, Artificial
  probe
  misc_feature (1)..(25): SEQ ID NO: 5317; WAN024FOX_at; Start 213; Stop 237
gagcgccattagcaacaaccagaac

SEQ ID NO: 215083 - DNA, 25 bp, Artificial
  probe
  misc_feature (1)..(25): SEQ ID NO: 5317; WAN024FOX_at; Start 144; Stop 168
tcaaagccttgttgacaatggcgtc

SEQ ID NO: 215084 - DNA, 25 bp, Artificial
  probe
  misc_feature (1)..(25): SEQ ID NO: 5317; WAN024FOX_at; Start 168; Stop 192
catcccatgtctgagcctgaatcaa

SEQ ID NO: 215085 - DNA, 25 bp, Artificial
  probe
  misc_feature (1)..(25): SEQ ID NO: 5317; WAN024FOX_at; Start 23; Stop 47
tcaatcatttctggagtcataaaac

SEQ ID NO: 215086 - DNA, 25 bp, Artificial
  probe
  misc_feature (1)..(25): SEQ ID NO: 5317; WAN024FOX_at; Start 103; Stop 127
tacaacaaactggtcctgacacgct

SEQ ID NO: 215087 - DNA, 25 bp, Artificial
  probe
  misc_feature (1)..(25): SEQ ID NO: 5317; WAN024FOX_at; Start 127; Stop 151
tcgacccttgaaatgagtcaaagcc

SEQ ID NO: 215088 - DNA, 25 bp, Artificial
  probe
  misc_feature (1)..(25): SEQ ID NO: 5317; WAN024FOX_at; Start 201; Stop 225
tttcaaaaatacgagcgccattagc

SEQ ID NO: 215089 - DNA, 25 bp, Artificial
  probe
  misc_feature (1)..(25): SEQ ID NO: 5317; WAN024FOX_at; Start 195; Stop 219
cattgttttcaaaaatacgagcgcc

SEQ ID NO: 215090 - DNA, 25 bp, Artificial
  probe
  misc_feature (1)..(25): SEQ ID NO: 5317; WAN024FOX_at; Start 64; Stop 88
aatcgtaccttccttgacaaaatca

SEQ ID NO: 215091 - DNA, 25 bp, Artificial
  probe
  misc_feature (1)..(25): SEQ ID NO: 5317; WAN024FOX_at; Start 150; Stop 174
ccttgttgacaatggcgtcatccca

SEQ ID NO: 215092 - DNA, 25 bp, Artificial
  probe
  misc_feature (1)..(25): SEQ ID NO: 5317; WAN024FOX_at; Start 106; Stop 130
aacaaactggtcctgacacgctcga

SEQ ID NO: 215093 - DNA, 25 bp, Artificial
  probe
  misc_feature (1)..(25): SEQ ID NO: 5317; WAN024FOX_at; Start 221; Stop 245
ttagcaacaaccagaaccactcgat

SEQ ID NO: 215094 - DNA, 25 bp, Artificial
  probe
  misc_feature (1)..(25): SEQ ID NO: 5317; WAN024FOX_at; Start 240; Stop 264
ctcgatccaccaagggactcagtag

SEQ ID NO: 215095 - DNA, 25 bp, Artificial
  probe
  misc_feature (1)..(25): SEQ ID NO: 5317; WAN024FOX_at; Start 207; Stop 231
aaatacgagcgccattagcaacaac

SEQ ID NO: 215096 - DNA, 25 bp, Artificial
  probe
  misc_feature (1)..(25): SEQ ID NO: 5317; WAN024FOX_at; Start 157; Stop 181
gacaatggcgtcatcccatgtctga

SEQ ID NO: 215097 - DNA, 25 bp, Artificial
  probe
  misc_feature (1)..(25): SEQ ID NO: 5317; WAN024FOX_at; Start 119; Stop 143
tgacacgctcgacccttgaaatgag

SEQ ID NO: 215098 - DNA, 25 bp, Artificial
  probe
  misc_feature (1)..(25): SEQ ID NO: 5317; WAN024FOX_at; Start 210; Stop 234
tacgagcgccattagcaacaaccag

SEQ ID NO: 215099 - DNA, 25 bp, Artificial
  probe
  misc_feature (1)..(25): SEQ ID NO: 5317; WAN024FOX_at; Start 175; Stop 199
tgtctgagcctgaatcaattcattg

SEQ ID NO: 215100 - DNA, 25 bp, Artificial
  probe
  misc_feature (1)..(25): SEQ ID NO: 5317; WAN024FOX_at; Start 122; Stop 146
cacgctcgacccttgaaatgagtca

SEQ ID NO: 215101 - DNA, 25 bp, Artificial
  probe
  misc_feature (1)..(25): SEQ ID NO: 5317; WAN024FOX_at; Start 99; Stop 123
ccgttacaacaaactggtcctgaca

SEQ ID NO: 215102 - DNA, 25 bp, Artificial
  probe
  misc_feature (1)..(25): SEQ ID NO: 5317; WAN024FOX_at; Start 172; Stop 196
ccatgtctgagcctgaatcaattca

SEQ ID NO: 215103 - DNA, 25 bp, Artificial
  probe
  misc_feature (1)..(25): SEQ ID NO: 5317; WAN024FOX_at; Start 51; Stop 75
caagatctgtaaaaatcgtaccttc

SEQ ID NO: 215104 - DNA, 25 bp, Artificial
  probe
  misc_feature (1)..(25): SEQ ID NO: 5317; WAN024FOX_at; Start 12; Stop 36
ggtagaatttttcaatcatttctgg

SEQ ID NO: 215105 - DNA, 25 bp, Artificial
  probe
  misc_feature (1)..(25): SEQ ID NO: 5317; WAN024FOX_at; Start 2; Stop 26
tgcatccgttggtagaatttttcaa

SEQ ID NO: 215106 - DNA, 25 bp, Artificial
  probe
  misc_feature (1)..(25): SEQ ID NO: 5317; WAN024FOX_at; Start 73; Stop 97
ttccttgacaaaatcacccttcatc

SEQ ID NO: 215107 - DNA, 25 bp, Artificial
  probe
  misc_feature (1)..(25): SEQ ID NO: 5317; WAN024FOX_at; Start 163; Stop 187
ggcgtcatcccatgtctgagcctga

SEQ ID NO: 215108 - DNA, 25 bp, Artificial
  probe
  misc_feature (1)..(25): SEQ ID NO: 5317; WAN024FOX_at; Start 93; Stop 117
tcatccccgttacaacaaactggtc

SEQ ID NO: 215109 - DNA, 25 bp, Artificial
  probe
  misc_feature (1)..(25): SEQ ID NO: 5317; WAN024FOX_at; Start 234; Stop 258
gaaccactcgatccaccaagggact

SEQ ID NO: 215110 - DNA, 25 bp, Artificial
  probe
  misc_feature (1)..(25): SEQ ID NO: 5317; WAN024FOX_at; Start 131; Stop 155
cccttgaaatgagtcaaagccttgt

SEQ ID NO: 215111 - DNA, 25 bp, Artificial
  probe
  misc_feature (1)..(25): SEQ ID NO: 5317; WAN024FOX_at; Start 115; Stop 139
gtcctgacacgctcgacccttgaaa

SEQ ID NO: 215112 - DNA, 25 bp, Artificial
  probe
  misc_feature (1)..(25): SEQ ID NO: 5317; WAN024FOX_at; Start 28; Stop 52
catttctggagtcataaaactttca

SEQ ID NO: 215113 - DNA, 25 bp, Artificial
  probe
  misc_feature (1)..(25): SEQ ID NO: 5317; WAN024FOX_at; Start 58; Stop 82
tgtaaaaatcgtaccttccttgaca

SEQ ID NO: 215114 - DNA, 25 bp, Artificial
  probe
  misc_feature (1)..(25): SEQ ID NO: 5317; WAN024FOX_at; Start 36; Stop 60
gagtcataaaactttcaagatctgt

SEQ ID NO: 215115 - DNA, 25 bp, Artificial
  probe
  misc_feature (1)..(25): SEQ ID NO: 1747; WAN024FOY_at; Start 583; Stop 607
caagctgggattcataaagcatggg

SEQ ID NO: 215116 - DNA, 25 bp, Artificial
  probe
  misc_feature (1)..(25): SEQ ID NO: 1747; WAN024FOY_at; Start 6; Stop 30
gattaaggtaattgcgacagatatg

SEQ ID NO: 215117 - DNA, 25 bp, Artificial
  probe
  misc_feature (1)..(25): SEQ ID NO: 1747; WAN024FOY_at; Start 396; Stop 420
gattgaaaaattctaccaacggatg

SEQ ID NO: 215118 - DNA, 25 bp, Artificial
  probe
  misc_feature (1)..(25): SEQ ID NO: 1747; WAN024FOY_at; Start 527; Stop 551
tctttgatggccgtgtccgagctgt

SEQ ID NO: 215119 - DNA, 25 bp, Artificial
  probe
  misc_feature (1)..(25): SEQ ID NO: 1747; WAN024FOY_at; Start 68; Stop 92
tcccacgattggaaaagattttaga

SEQ ID NO: 215120 - DNA, 25 bp, Artificial
  probe
  misc_feature (1)..(25): SEQ ID NO: 1747; WAN024FOY_at; Start 433; Stop 457
gaattaacatctgacctctttggtg

SEQ ID NO: 215121 - DNA, 25 bp, Artificial
  probe
  misc_feature (1)..(25): SEQ ID NO: 1747; WAN024FOY_at; Start 766; Stop 790
ccagccaacagccaaggaggagttt

SEQ ID NO: 215122 - DNA, 25 bp, Artificial
  probe
  misc_feature (1)..(25): SEQ ID NO: 1747; WAN024FOY_at; Start 790; Stop 814
tatcaagtcttggaaaactggttag

SEQ ID NO: 215123 - DNA, 25 bp, Artificial
  probe
  misc_feature (1)..(25): SEQ ID NO: 1747; WAN024FOY_at; Start 143; Stop 167
ttcaccgcatgagacaactactgag

SEQ ID NO: 215124 - DNA, 25 bp, Artificial
  probe
  misc_feature (1)..(25): SEQ ID NO: 1747; WAN024FOY_at; Start 185; Stop 209
tggttctggttgttgctaatggcgc

SEQ ID NO: 215125 - DNA, 25 bp, Artificial
  probe
  misc_feature (1)..(25): SEQ ID NO: 1747; WAN024FOY_at; Start 681; Stop 705
tgttgaaatgcttgaaatggctgga

SEQ ID NO: 215126 - DNA, 25 bp, Artificial
  probe
  misc_feature (1)..(25): SEQ ID NO: 1747; WAN024FOY_at; Start 373; Stop 397
gaaagttttatgactccagaaatga

SEQ ID NO: 215127 - DNA, 25 bp, Artificial
  probe
  misc_feature (1)..(25): SEQ ID NO: 1747; WAN024FOY_at; Start 709; Stop 733
gcctatgcgatggaaaatgctgatg

SEQ ID NO: 215128 - DNA, 25 bp, Artificial
  probe
  misc_feature (1)..(25): SEQ ID NO: 1747; WAN024FOY_at; Start 774; Stop 798
cagccaaggaggagtttatcaagtc

SEQ ID NO: 215129 - DNA, 25 bp, Artificial
  probe
  misc_feature (1)..(25): SEQ ID NO: 1747; WAN024FOY_at; Start 157; Stop 181
caactactgagtcccttggtggatc

SEQ ID NO: 215130 - DNA, 25 bp, Artificial
  probe
  misc_feature (1)..(25): SEQ ID NO: 1747; WAN024FOY_at; Start 463; Stop 487
ctcaagatgagcatggttgttggtg

SEQ ID NO: 215131 - DNA, 25 bp, Artificial
  probe
  misc_feature (1)..(25): SEQ ID NO: 1747; WAN024FOY_at; Start 741; Stop 765
caaagctgtggcgactgctctagca

SEQ ID NO: 215132 - DNA, 25 bp, Artificial
  probe
  misc_feature (1)..(25): SEQ ID NO: 1747; WAN024FOY_at; Start 409; Stop 433
taccaacggatgcaatttgtggatg

SEQ ID NO: 215133 - DNA, 25 bp, Artificial
  probe
  misc_feature (1)..(25): SEQ ID NO: 1747; WAN024FOY_at; Start 237; Stop 261
tcaggctcagacatgggatgacgcc

SEQ ID NO: 215134 - DNA, 25 bp, Artificial
  probe
  misc_feature (1)..(25): SEQ ID NO: 1747; WAN024FOY_at; Start 126; Stop 150
tgcgacgggcaatgaaattcaccgc

SEQ ID NO: 215135 - DNA, 25 bp, Artificial
  probe
  misc_feature (1)..(25): SEQ ID NO: 1747; WAN024FOY_at; Start 726; Stop 750
tgctgatgagaaagccaaagctgtg

SEQ ID NO: 215136 - DNA, 25 bp, Artificial
  probe
  misc_feature (1)..(25): SEQ ID NO: 1747; WAN024FOY_at; Start 694; Stop 718
gaaatggctggaattgcctatgcga

SEQ ID NO: 215137 - DNA, 25 bp, Artificial
  probe
  misc_feature (1)..(25): SEQ ID NO: 1747; WAN024FOY_at; Start 613; Stop 637
gaggaattactcaagcgctgggact

SEQ ID NO: 215138 - DNA, 25 bp, Artificial
  probe
  misc_feature (1)..(25): SEQ ID NO: 1747; WAN024FOY_at; Start 345; Stop 369
caaggaaggtacgatttttacagat

SEQ ID NO: 215139 - DNA, 25 bp, Artificial
  probe
  misc_feature (1)..(25): SEQ ID NO: 1747; WAN024FOY_at; Start 111; Stop 135
cattcgttttgtcattgcgacgggc

SEQ ID NO: 215140 - DNA, 25 bp, Artificial
  probe
  misc_feature (1)..(25): SEQ ID NO: 1747; WAN024FOY_at; Start 201; Stop 225
taatggcgctcgtatttttgaaaac

SEQ ID NO: 215141 - DNA, 25 bp, Artificial
  probe
  misc_feature (1)..(25): SEQ ID NO: 1747; WAN024FOY_at; Start 542; Stop 566
tccgagctgtatccagtggctatgg

SEQ ID NO: 215142 - DNA, 25 bp, Artificial
  probe
  misc_feature (1)..(25): SEQ ID NO: 1747; WAN024FOY_at; Start 252; Stop 276
ggatgacgccattgtcaacaaggct

SEQ ID NO: 215143 - DNA, 25 bp, Artificial
  probe
  misc_feature (1)..(25): SEQ ID NO: 1747; WAN024FOY_at; Start 282; Stop 306
tcatttcaagggtcgagcgtgtcag

SEQ ID NO: 215144 - DNA, 25 bp, Artificial
  probe
  misc_feature (1)..(25): SEQ ID NO: 1747; WAN024FOY_at; Start 624; Stop 648
caagcgctgggacttgaaatcccaa

SEQ ID NO: 215145 - DNA, 25 bp, Artificial
  probe
  misc_feature (1)..(25): SEQ ID NO: 1747; WAN024FOY_at; Start 225; Stop 249
caatgaattgattcaggctcagaca

SEQ ID NO: 215146 - DNA, 25 bp, Artificial
  probe
  misc_feature (1)..(25): SEQ ID NO: 1747; WAN024FOY_at; Start 445; Stop 469
gacctctttggtggtgtgctcaaga

SEQ ID NO: 215147 - DNA, 25 bp, Artificial
  probe
  misc_feature (1)..(25): SEQ ID NO: 1747; WAN024FOY_at; Start 55; Stop 79
ggtcagcttgatctcccacgattgg

SEQ ID NO: 215148 - DNA, 25 bp, Artificial
  probe
  misc_feature (1)..(25): SEQ ID NO: 1747; WAN024FOY_at; Start 568; Stop 592
tgcattgatatcctccaagctggga

SEQ ID NO: 215149 - DNA, 25 bp, Artificial
  probe
  misc_feature (1)..(25): SEQ ID NO: 3927; WAN024FOZ_at; Start 1080; Stop 1104
catagcttttgtggtgatgattagc

SEQ ID NO: 215150 - DNA, 25 bp, Artificial
  probe
  misc_feature (1)..(25): SEQ ID NO: 3927; WAN024FOZ_at; Start 834; Stop 858
tgcgggacgaacaaatactatttcc

SEQ ID NO: 215151 - DNA, 25 bp, Artificial
  probe
  misc_feature (1)..(25): SEQ ID NO: 3927; WAN024FOZ_at; Start 153; Stop 177
tgtagattcttattctgcagggaaa

SEQ ID NO: 215152 - DNA, 25 bp, Artificial
  probe
  misc_feature (1)..(25): SEQ ID NO: 3927; WAN024FOZ_at; Start 118; Stop 142
gacttattattgttggcagcagcag

SEQ ID NO: 215153 - DNA, 25 bp, Artificial
  probe
  misc_feature (1)..(25): SEQ ID NO: 3927; WAN024FOZ_at; Start 329; Stop 353
caaatagctatctagatgatagaac

SEQ ID NO: 215154 - DNA, 25 bp, Artificial
  probe
  misc_feature (1)..(25): SEQ ID NO: 3927; WAN024FOZ_at; Start 907; Stop 931
gggaaaggactaggttcatactctg

SEQ ID NO: 215155 - DNA, 25 bp, Artificial
  probe
  misc_feature (1)..(25): SEQ ID NO: 3927; WAN024FOZ_at; Start 943; Stop 967
tatgaacttggtaaaatgcttgcag

SEQ ID NO: 215156 - DNA, 25 bp, Artificial
  probe
  misc_feature (1)..(25): SEQ ID NO: 3927; WAN024FOZ_at; Start 166; Stop 190
tctgcagggaaaataagagttaaaa

SEQ ID NO: 215157 - DNA, 25 bp, Artificial
  probe
  misc_feature (1)..(25): SEQ ID NO: 3927; WAN024FOZ_at; Start 1154; Stop 1178
tctttctagcaataggtaatgcagc

SEQ ID NO: 215158 - DNA, 25 bp, Artificial
  probe
  misc_feature (1)..(25): SEQ ID NO: 3927; WAN024FOZ_at; Start 506; Stop 530
gcttagccttaagtgttttatctac

SEQ ID NO: 215159 - DNA, 25 bp, Artificial
  probe
  misc_feature (1)..(25): SEQ ID NO: 3927; WAN024FOZ_at; Start 705; Stop 729
tagtacagctgctggaatatctctt

SEQ ID NO: 215160 - DNA, 25 bp, Artificial
  probe
  misc_feature (1)..(25): SEQ ID NO: 3927; WAN024FOZ_at; Start 960; Stop 984
gcttgcagatggtggttttatttca

SEQ ID NO: 215161 - DNA, 25 bp, Artificial
  probe
  misc_feature (1)..(25): SEQ ID NO: 3927; WAN024FOZ_at; Start 695; Stop 719
tacgaataattagtacagctgctgg

SEQ ID NO: 215162 - DNA, 25 bp, Artificial
  probe
  misc_feature (1)..(25): SEQ ID NO: 3927; WAN024FOZ_at; Start 346; Stop 370
gatagaaccttttcatcattgataa

SEQ ID NO: 215163 - DNA, 25 bp, Artificial
  probe
  misc_feature (1)..(25): SEQ ID NO: 3927; WAN024FOZ_at; Start 437; Stop 461
tgcaccctgacttcactaatgggat

SEQ ID NO: 215164 - DNA, 25 bp, Artificial
  probe
  misc_feature (1)..(25): SEQ ID NO: 3927; WAN024FOZ_at; Start 24; Stop 48
cataaatagctgtatcaagttgtta

SEQ ID NO: 215165 - DNA, 25 bp, Artificial
  probe
  misc_feature (1)..(25): SEQ ID NO: 3927; WAN024FOZ_at; Start 795; Stop 819
tgttacaaaggcattatcatatgag

SEQ ID NO: 215166 - DNA, 25 bp, Artificial
  probe
  misc_feature (1)..(25): SEQ ID NO: 3927; WAN024FOZ_at; Start 423; Stop 447
tatagtattacatttgcaccctgac

SEQ ID NO: 215167 - DNA, 25 bp, Artificial
  probe
  misc_feature (1)..(25): SEQ ID NO: 3927; WAN024FOZ_at; Start 3; Stop 27
gacatcaagtatgactaagtacata

SEQ ID NO: 215168 - DNA, 25 bp, Artificial
  probe
  misc_feature (1)..(25): SEQ ID NO: 3927; WAN024FOZ_at; Start 822; Stop 846
taggacagagtttgcgggacgaaca

SEQ ID NO: 215169 - DNA, 25 bp, Artificial
  probe
  misc_feature (1)..(25): SEQ ID NO: 3927; WAN024FOZ_at; Start 489; Stop 513
aatccaaggattttattgcttagcc

SEQ ID NO: 215170 - DNA, 25 bp, Artificial
  probe
  misc_feature (1)..(25): SEQ ID NO: 3927; WAN024FOZ_at; Start 752; Stop 776
tcattgagatagttttacctgataa

SEQ ID NO: 215171 - DNA, 25 bp, Artificial
  probe
  misc_feature (1)..(25): SEQ ID NO: 3927; WAN024FOZ_at; Start 293; Stop 317
gatatatactgggagcatttctagt

SEQ ID NO: 215172 - DNA, 25 bp, Artificial
  probe
  misc_feature (1)..(25): SEQ ID NO: 3927; WAN024FOZ_at; Start 284; Stop 308
tgagaggaagatatatactgggagc

SEQ ID NO: 215173 - DNA, 25 bp, Artificial
  probe
  misc_feature (1)..(25): SEQ ID NO: 3927; WAN024FOZ_at; Start 737; Stop 761
taattgcctataaactcattgagat

SEQ ID NO: 215174 - DNA, 25 bp, Artificial
  probe
  misc_feature (1)..(25): SEQ ID NO: 3927; WAN024FOZ_at; Start 1168; Stop 1192
ggtaatgcagcgtataagtctacta

SEQ ID NO: 215175 - DNA, 25 bp, Artificial
  probe
  misc_feature (1)..(25): SEQ ID NO: 3927; WAN024FOZ_at; Start 590; Stop 614
cgtgtataatttgtgcattagcaga

SEQ ID NO: 215176 - DNA, 25 bp, Artificial
  probe
  misc_feature (1)..(25): SEQ ID NO: 3927; WAN024FOZ_at; Start 812; Stop 836
catatgagaataggacagagtttgc

SEQ ID NO: 215177 - DNA, 25 bp, Artificial
  probe
  misc_feature (1)..(25): SEQ ID NO: 3927; WAN024FOZ_at; Start 376; Stop 400
gcttattttatgcagatattgaacc

SEQ ID NO: 215178 - DNA, 25 bp, Artificial
  probe
  misc_feature (1)..(25): SEQ ID NO: 3927; WAN024FOZ_at; Start 892; Stop 916
attagtgctatatttgggaaaggac

SEQ ID NO: 215179 - DNA, 25 bp, Artificial
  probe
  misc_feature (1)..(25): SEQ ID NO: 3927; WAN024FOZ_at; Start 97; Stop 121
tctctattatttacgatacctgact

SEQ ID NO: 215180 - DNA, 25 bp, Artificial
  probe
  misc_feature (1)..(25): SEQ ID NO: 3927; WAN024FOZ_at; Start 1053; Stop 1077
gcaaagtgaaagactaattgtatcc

SEQ ID NO: 215181 - DNA, 25 bp, Artificial
  probe
  misc_feature (1)..(25): SEQ ID NO: 3927; WAN024FOZ_at; Start 1037; Stop 1061
ctagaggaaaaaataagcaaagtga

SEQ ID NO: 215182 - DNA, 25 bp, Artificial
  probe
  misc_feature (1)..(25): SEQ ID NO: 3927; WAN024FOZ_at; Start 849; Stop 873
tactatttccttcctatgggacaac

SEQ ID NO: 215183 - DNA, 25 bp, Artificial
  probe
  misc_feature (1)..(25): SEQ ID NO: 7346; WAN024FP2-3_at; Start 1264; Stop 1288
aattaagccagagccaggagcacaa

SEQ ID NO: 215184 - DNA, 25 bp, Artificial
  probe
  misc_feature (1)..(25): SEQ ID NO: 7346; WAN024FP2-3_at; Start 2008; Stop 2032
tgcaagcctattgtaccgtagtaag

SEQ ID NO: 215185 - DNA, 25 bp, Artificial
  probe
  misc_feature (1)..(25): SEQ ID NO: 7346; WAN024FP2-3_at; Start 1939; Stop 1963
taagttgccaaatacaggagaaaca

SEQ ID NO: 215186 - DNA, 25 bp, Artificial
  probe
  misc_feature (1)..(25): SEQ ID NO: 7346; WAN024FP2-3_at; Start 1257; Stop 1281
tatctaaaattaagccagagccagg

SEQ ID NO: 215187 - DNA, 25 bp, Artificial
  probe
  misc_feature (1)..(25): SEQ ID NO: 7346; WAN024FP2-3_at; Start 1588; Stop 1612
agtaaccccaccaagcccagaagag

SEQ ID NO: 215188 - DNA, 25 bp, Artificial
  probe
  misc_feature (1)..(25): SEQ ID NO: 7346; WAN024FP2-3_at; Start 1996; Stop 2020
tactgcagtttttgcaagcctattg

SEQ ID NO: 215189 - DNA, 25 bp, Artificial
  probe
  misc_feature (1)..(25): SEQ ID NO: 7346; WAN024FP2-3_at; Start 1947; Stop 1971
caaatacaggagaaacaacaggaac

SEQ ID NO: 215190 - DNA, 25 bp, Artificial
  probe
  misc_feature (1)..(25): SEQ ID NO: 7346; WAN024FP2-3_at; Start 1260; Stop 1284
ctaaaattaagccagagccaggagc

SEQ ID NO: 215191 - DNA, 25 bp, Artificial
  probe
  misc_feature (1)..(25): SEQ ID NO: 7346; WAN024FP2-3_at; Start 1937; Stop 1961
gataagttgccaaatacaggagaaa

SEQ ID NO: 215192 - DNA, 25 bp, Artificial
  probe
  misc_feature (1)..(25): SEQ ID NO: 7346; WAN024FP2-3_at; Start 1906; Stop 1930
tacagaccaaagtgctgataaagat

SEQ ID NO: 215193 - DNA, 25 bp, Artificial
  probe
  misc_feature (1)..(25): SEQ ID NO: 7346; WAN024FP2-3_at; Start 1924; Stop 1948
taaagataagcaagataagttgcca

SEQ ID NO: 215194 - DNA, 25 bp, Artificial
  probe
  misc_feature (1)..(25): SEQ ID NO: 7346; WAN024FP2-3_at; Start 1600; Stop 1624
aagcccagaagagccaggagcacaa

SEQ ID NO: 215195 - DNA, 25 bp, Artificial
  probe
  misc_feature (1)..(25): SEQ ID NO: 7346; WAN024FP2-3_at; Start 1992; Stop 2016
tgattactgcagtttttgcaagcct

SEQ ID NO: 215196 - DNA, 25 bp, Artificial
  probe
  misc_feature (1)..(25): SEQ ID NO: 7346; WAN024FP2-3_at; Start 1270; Stop 1294
gccagagccaggagcacaagaagtt

SEQ ID NO: 215197 - DNA, 25 bp, Artificial
  probe
  misc_feature (1)..(25): SEQ ID NO: 7346; WAN024FP2-3_at; Start 1933; Stop 1957
gcaagataagttgccaaatacagga

SEQ ID NO: 215198 - DNA, 25 bp, Artificial
  probe
  misc_feature (1)..(25): SEQ ID NO: 7346; WAN024FP2-3_at; Start 1910; Stop 1934
gaccaaagtgctgataaagataagc

SEQ ID NO: 215199 - DNA, 25 bp, Artificial
  probe
  misc_feature (1)..(25): SEQ ID NO: 7346; WAN024FP2-3_at; Start 1980; Stop 2004
caatacttggtatgattactgcagt

SEQ ID NO: 215200 - DNA, 25 bp, Artificial
  probe
  misc_feature (1)..(25): SEQ ID NO: 7346; WAN024FP2-3_at; Start 1951; Stop 1975
tacaggagaaacaacaggaacttat

SEQ ID NO: 215201 - DNA, 25 bp, Artificial
  probe
  misc_feature (1)..(25): SEQ ID NO: 7346; WAN024FP2-3_at; Start 1902; Stop 1926
cggttacagaccaaagtgctgataa

SEQ ID NO: 215202 - DNA, 25 bp, Artificial
  probe
  misc_feature (1)..(25): SEQ ID NO: 7346; WAN024FP2-3_at; Start 2010; Stop 2034
caagcctattgtaccgtagtaagaa

SEQ ID NO: 215203 - DNA, 25 bp, Artificial
  probe
  misc_feature (1)..(25): SEQ ID NO: 7346; WAN024FP2-3_at; Start 2001; Stop 2025
cagtttttgcaagcctattgtaccg

SEQ ID NO: 215204 - DNA, 25 bp, Artificial
  probe
  misc_feature (1)..(25): SEQ ID NO: 7346; WAN024FP2-3_at; Start 1965; Stop 1989
caggaacttatttgtcaatacttgg

SEQ ID NO: 215205 - DNA, 25 bp, Artificial
  probe
  misc_feature (1)..(25): SEQ ID NO: 7346; WAN024FP2-3_at; Start 1977; Stop 2001
tgtcaatacttggtatgattactgc

SEQ ID NO: 215206 - DNA, 25 bp, Artificial
  probe
  misc_feature (1)..(25): SEQ ID NO: 7346; WAN024FP2-3_at; Start 1272; Stop 1296
cagagccaggagcacaagaagttca

SEQ ID NO: 215207 - DNA, 25 bp, Artificial
  probe
  misc_feature (1)..(25): SEQ ID NO: 7346; WAN024FP2-3_at; Start 1944; Stop 1968
tgccaaatacaggagaaacaacagg

SEQ ID NO: 215208 - DNA, 25 bp, Artificial
  probe
  misc_feature (1)..(25): SEQ ID NO: 7346; WAN024FP2-3_at; Start 1913; Stop 1937
caaagtgctgataaagataagcaag

SEQ ID NO: 215209 - DNA, 25 bp, Artificial
  probe
  misc_feature (1)..(25): SEQ ID NO: 7346; WAN024FP2-3_at; Start 1266; Stop 1290
ttaagccagagccaggagcacaaga

SEQ ID NO: 215210 - DNA, 25 bp, Artificial
  probe
  misc_feature (1)..(25): SEQ ID NO: 7346; WAN024FP2-3_at; Start 1608; Stop 1632
aagagccaggagcacaagaagttca

SEQ ID NO: 215211 - DNA, 25 bp, Artificial
  probe
  misc_feature (1)..(25): SEQ ID NO: 7346; WAN024FP2-3_at; Start 1597; Stop 1621
accaagcccagaagagccaggagca

SEQ ID NO: 215212 - DNA, 25 bp, Artificial
  probe
  misc_feature (1)..(25): SEQ ID NO: 7346; WAN024FP2-3_at; Start 2004; Stop 2028
tttttgcaagcctattgtaccgtag

SEQ ID NO: 215213 - DNA, 25 bp, Artificial
  probe
  misc_feature (1)..(25): SEQ ID NO: 7346; WAN024FP2-3_at; Start 1605; Stop 1629
cagaagagccaggagcacaagaagt

SEQ ID NO: 215214 - DNA, 25 bp, Artificial
  probe
  misc_feature (1)..(25): SEQ ID NO: 7346; WAN024FP2-3_at; Start 1243; Stop 1267
tcagactgtagttgtatctaaaatt

SEQ ID NO: 215215 - DNA, 25 bp, Artificial
  probe
  misc_feature (1)..(25): SEQ ID NO: 7346; WAN024FP2-3_at; Start 1956; Stop 1980
gagaaacaacaggaacttatttgtc

SEQ ID NO: 215216 - DNA, 25 bp, Artificial
  probe
  misc_feature (1)..(25): SEQ ID NO: 7346; WAN024FP2-3_at; Start 1262; Stop 1286
aaaattaagccagagccaggagcac

SEQ ID NO: 215217 - DNA, 25 bp, Artificial
  probe
  misc_feature (1)..(25): SEQ ID NO: 7455; WAN024FP2-5_at; Start 1111; Stop 1135
gaagctcagaatgataagaccatca

SEQ ID NO: 215218 - DNA, 25 bp, Artificial
  probe
  misc_feature (1)..(25): SEQ ID NO: 7455; WAN024FP2-5_at; Start 243; Stop 267
tcccactgatattgttaaaagagcc

SEQ ID NO: 215219 - DNA, 25 bp, Artificial
  probe
  misc_feature (1)..(25): SEQ ID NO: 7455; WAN024FP2-5_at; Start 672; Stop 696
gggtcggactacatttgaaattcca

SEQ ID NO: 215220 - DNA, 25 bp, Artificial
  probe
  misc_feature (1)..(25): SEQ ID NO: 7455; WAN024FP2-5_at; Start 657; Stop 681
tatagagccagataagggtcggact

SEQ ID NO: 215221 - DNA, 25 bp, Artificial
  probe
  misc_feature (1)..(25): SEQ ID NO: 7455; WAN024FP2-5_at; Start 533; Stop 557
ggaaaattgaaccagctaccattac

SEQ ID NO: 215222 - DNA, 25 bp, Artificial
  probe
  misc_feature (1)..(25): SEQ ID NO: 7455; WAN024FP2-5_at; Start 6; Stop 30
ggtgattacatctgatacacacgag

SEQ ID NO: 215223 - DNA, 25 bp, Artificial
  probe
  misc_feature (1)..(25): SEQ ID NO: 7455; WAN024FP2-5_at; Start 25; Stop 49
cacgagaactctgataattttgcct

SEQ ID NO: 215224 - DNA, 25 bp, Artificial
  probe
  misc_feature (1)..(25): SEQ ID NO: 7455; WAN024FP2-5_at; Start 1048; Stop 1072
gcacccgtatctttctatgtggaag

SEQ ID NO: 215225 - DNA, 25 bp, Artificial
  probe
  misc_feature (1)..(25): SEQ ID NO: 7455; WAN024FP2-5_at; Start 1010; Stop 1034
taacagaagaaaaagcaccagatgg

SEQ ID NO: 215226 - DNA, 25 bp, Artificial
  probe
  misc_feature (1)..(25): SEQ ID NO: 7455; WAN024FP2-5_at; Start 979; Stop 1003
gatatcgacctggatgcaggctcct

SEQ ID NO: 215227 - DNA, 25 bp, Artificial
  probe
  misc_feature (1)..(25): SEQ ID NO: 7455; WAN024FP2-5_at; Start 762; Stop 786
taaagactttacagcaggtcaacct

SEQ ID NO: 215228 - DNA, 25 bp, Artificial
  probe
  misc_feature (1)..(25): SEQ ID NO: 7455; WAN024FP2-5_at; Start 1030; Stop 1054
gatggctacatgctagctgcacccg

SEQ ID NO: 215229 - DNA, 25 bp, Artificial
  probe
  misc_feature (1)..(25): SEQ ID NO: 7455; WAN024FP2-5_at; Start 965; Stop 989
ttggacagcctgttgatatcgacct

SEQ ID NO: 215230 - DNA, 25 bp, Artificial
  probe
  misc_feature (1)..(25): SEQ ID NO: 7455; WAN024FP2-5_at; Start 742; Stop 766
gaaggtcgcgattggaaacataaag

SEQ ID NO: 215231 - DNA, 25 bp, Artificial
  probe
  misc_feature (1)..(25): SEQ ID NO: 7455; WAN024FP2-5_at; Start 727; Stop 751
aaagaagttgataaagaaggtcgcg

SEQ ID NO: 215232 - DNA, 25 bp, Artificial
  probe
  misc_feature (1)..(25): SEQ ID NO: 7455; WAN024FP2-5_at; Start 598; Stop 622
aagcctgaggtctggattcaattgc

SEQ ID NO: 215233 - DNA, 25 bp, Artificial
  probe
  misc_feature (1)..(25): SEQ ID NO: 7455; WAN024FP2-5_at; Start 571; Stop 595
tgggaaaatgtaaaagaaggagctg

SEQ ID NO: 215234 - DNA, 25 bp, Artificial
  probe
  misc_feature (1)..(25): SEQ ID NO: 7455; WAN024FP2-5_at; Start 1134; Stop 1158
cacgatggtggatgaaaagattaaa

SEQ ID NO: 215235 - DNA, 25 bp, Artificial
  probe
  misc_feature (1)..(25): SEQ ID NO: 7455; WAN024FP2-5_at; Start 444; Stop 468
tacagtcccatatgaaaatcttgaa

SEQ ID NO: 215236 - DNA, 25 bp, Artificial
  probe
  misc_feature (1)..(25): SEQ ID NO: 7455; WAN024FP2-5_at; Start 511; Stop 535
caagctttagcaacagttagatgga

SEQ ID NO: 215237 - DNA, 25 bp, Artificial
  probe
  misc_feature (1)..(25): SEQ ID NO: 7455; WAN024FP2-5_at; Start 270; Stop 294
gggaaccgatttaaatacagctcga

SEQ ID NO: 215238 - DNA, 25 bp, Artificial
  probe
  misc_feature (1)..(25): SEQ ID NO: 7455; WAN024FP2-5_at; Start 195; Stop 219
tcaagcatgggatactttctcaaga

SEQ ID NO: 215239 - DNA, 25 bp, Artificial
  probe
  misc_feature (1)..(25): SEQ ID NO: 7455; WAN024FP2-5_at; Start 784; Stop 808
cctgtaaacaaaggaaatggtcact

SEQ ID NO: 215240 - DNA, 25 bp, Artificial
  probe
  misc_feature (1)..(25): SEQ ID NO: 7455; WAN024FP2-5_at; Start 994; Stop 1018
gcaggctcctatacattaacagaag

SEQ ID NO: 215241 - DNA, 25 bp, Artificial
  probe
  misc_feature (1)..(25): SEQ ID NO: 7455; WAN024FP2-5_at; Start 226; Stop 250
tatatgtatttgaaagatcccactg

SEQ ID NO: 215242 - DNA, 25 bp, Artificial
  probe
  misc_feature (1)..(25): SEQ ID NO: 7455; WAN024FP2-5_at; Start 854; Stop 878
catttaaaaagattgcaggcgacac

SEQ ID NO: 215243 - DNA, 25 bp, Artificial
  probe
  misc_feature (1)..(25): SEQ ID NO: 7455; WAN024FP2-5_at; Start 84; Stop 108
tactgatgagaaacctaaaggaatc

SEQ ID NO: 215244 - DNA, 25 bp, Artificial
  probe
  misc_feature (1)..(25): SEQ ID NO: 7455; WAN024FP2-5_at; Start 1081; Stop 1105
caaattatcctaccaaaaggtgagg

SEQ ID NO: 215245 - DNA, 25 bp, Artificial
  probe
  misc_feature (1)..(25): SEQ ID NO: 7455; WAN024FP2-5_at; Start 620; Stop 644
tgctcaaagatgacaaacctgaagg

SEQ ID NO: 215246 - DNA, 25 bp, Artificial
  probe
  misc_feature (1)..(25): SEQ ID NO: 7455; WAN024FP2-5_at; Start 644; Stop 668
gggatcgaaaacgtatagagccaga

SEQ ID NO: 215247 - DNA, 25 bp, Artificial
  probe
  misc_feature (1)..(25): SEQ ID NO: 7455; WAN024FP2-5_at; Start 950; Stop 974
aacaatgggatacaattggacagcc

SEQ ID NO: 215248 - DNA, 25 bp, Artificial
  probe
  misc_feature (1)..(25): SEQ ID NO: 7455; WAN024FP2-5_at; Start 891; Stop 915
ggcaggcgcacatcttgtcttaaag

SEQ ID NO: 215249 - DNA, 25 bp, Artificial
  probe
  misc_feature (1)..(25): SEQ ID NO: 7455; WAN024FP2-5_at; Start 408; Stop 432
ggccttggaaatgattcgtactgac

SEQ ID NO: 215250 - DNA, 25 bp, Artificial
  probe
  misc_feature (1)..(25): SEQ ID NO: 7455; WAN024FP2-5_at; Start 878; Stop 902
caaataaagatttggcaggcgcaca

SEQ ID NO: 215251 - DNA, 25 bp, Artificial
  probe
  misc_feature (1)..(25): SEQ ID NO: 6586; WAN024FP3_at; Start 140; Stop 164
acatctgtcggacggtcggtgtcac

SEQ ID NO: 215252 - DNA, 25 bp, Artificial
  probe
  misc_feature (1)..(25): SEQ ID NO: 6586; WAN024FP3_at; Start 58; Stop 82
catctctgccaattctggattttca

SEQ ID NO: 215253 - DNA, 25 bp, Artificial
  probe
  misc_feature (1)..(25): SEQ ID NO: 6586; WAN024FP3_at; Start 38; Stop 62
taggcatcaaactcagacatcatct

SEQ ID NO: 215254 - DNA, 25 bp, Artificial
  probe
  misc_feature (1)..(25): SEQ ID NO: 6586; WAN024FP3_at; Start 89; Stop 113
tcctcttcgtcaaaggcaatttcca

SEQ ID NO: 215255 - DNA, 25 bp, Artificial
  probe
  misc_feature (1)..(25): SEQ ID NO: 6586; WAN024FP3_at; Start 202; Stop 226
cacaaaagtgactgccatctccttg

SEQ ID NO: 215256 - DNA, 25 bp, Artificial
  probe
  misc_feature (1)..(25): SEQ ID NO: 6586; WAN024FP3_at; Start 32; Stop 56
ccaatataggcatcaaactcagaca

SEQ ID NO: 215257 - DNA, 25 bp, Artificial
  probe
  misc_feature (1)..(25): SEQ ID NO: 6586; WAN024FP3_at; Start 2; Stop 26
tgagccttatcgatagagatgaaca

SEQ ID NO: 215258 - DNA, 25 bp, Artificial
  probe
  misc_feature (1)..(25): SEQ ID NO: 6586; WAN024FP3_at; Start 129; Stop 153
caaggctgatgacatctgtcggacg

SEQ ID NO: 215259 - DNA, 25 bp, Artificial
  probe
  misc_feature (1)..(25): SEQ ID NO: 6586; WAN024FP3_at; Start 194; Stop 218
tcattggtcacaaaagtgactgcca

SEQ ID NO: 215260 - DNA, 25 bp, Artificial
  probe
  misc_feature (1)..(25): SEQ ID NO: 6586; WAN024FP3_at; Start 162; Stop 186
cacggtactccagattaagttcatg

SEQ ID NO: 215261 - DNA, 25 bp, Artificial
  probe
  misc_feature (1)..(25): SEQ ID NO: 6586; WAN024FP3_at; Start 151; Stop 175
acggtcggtgtcacggtactccaga

SEQ ID NO: 215262 - DNA, 25 bp, Artificial
  probe
  misc_feature (1)..(25): SEQ ID NO: 6586; WAN024FP3_at; Start 177; Stop 201
taagttcatgactacgctcattggt

SEQ ID NO: 215263 - DNA, 25 bp, Artificial
  probe
  misc_feature (1)..(25): SEQ ID NO: 6586; WAN024FP3_at; Start 21; Stop 45
tgaacaattccccaatataggcatc

SEQ ID NO: 215264 - DNA, 25 bp, Artificial
  probe
  misc_feature (1)..(25): SEQ ID NO: 6586; WAN024FP3_at; Start 65; Stop 89
gccaattctggattttcaagcaaat

SEQ ID NO: 215265 - DNA, 25 bp, Artificial
  probe
  misc_feature (1)..(25): SEQ ID NO: 6586; WAN024FP3_at; Start 165; Stop 189
ggtactccagattaagttcatgact

SEQ ID NO: 215266 - DNA, 25 bp, Artificial
  probe
  misc_feature (1)..(25): SEQ ID NO: 6586; WAN024FP3_at; Start 80; Stop 104
tcaagcaaatcctcttcgtcaaagg

SEQ ID NO: 215267 - DNA, 25 bp, Artificial
  probe
  misc_feature (1)..(25): SEQ ID NO: 6586; WAN024FP3_at; Start 25; Stop 49
caattccccaatataggcatcaaac

SEQ ID NO: 215268 - DNA, 25 bp, Artificial
  probe
  misc_feature (1)..(25): SEQ ID NO: 6586; WAN024FP3_at; Start 17; Stop 41
gagatgaacaattccccaatatagg

SEQ ID NO: 215269 - DNA, 25 bp, Artificial
  probe
  misc_feature (1)..(25): SEQ ID NO: 6586; WAN024FP3_at; Start 53; Stop 77
gacatcatctctgccaattctggat

SEQ ID NO: 215270 - DNA, 25 bp, Artificial
  probe
  misc_feature (1)..(25): SEQ ID NO: 6586; WAN024FP3_at; Start 147; Stop 171
tcggacggtcggtgtcacggtactc

SEQ ID NO: 215271 - DNA, 25 bp, Artificial
  probe
  misc_feature (1)..(25): SEQ ID NO: 6586; WAN024FP3_at; Start 207; Stop 231
aagtgactgccatctccttgtcttc

SEQ ID NO: 215272 - DNA, 25 bp, Artificial
  probe
  misc_feature (1)..(25): SEQ ID NO: 6586; WAN024FP3_at; Start 84; Stop 108
gcaaatcctcttcgtcaaaggcaat

SEQ ID NO: 215273 - DNA, 25 bp, Artificial
  probe
  misc_feature (1)..(25): SEQ ID NO: 6586; WAN024FP3_at; Start 215; Stop 239
gccatctccttgtcttcttttccta

SEQ ID NO: 215274 - DNA, 25 bp, Artificial
  probe
  misc_feature (1)..(25): SEQ ID NO: 6586; WAN024FP3_at; Start 119; Stop 143
ggtttatactcaaggctgatgacat

SEQ ID NO: 215275 - DNA, 25 bp, Artificial
  probe
  misc_feature (1)..(25): SEQ ID NO: 6586; WAN024FP3_at; Start 189; Stop 213
tacgctcattggtcacaaaagtgac

SEQ ID NO: 215276 - DNA, 25 bp, Artificial
  probe
  misc_feature (1)..(25): SEQ ID NO: 6586; WAN024FP3_at; Start 9; Stop 33
tatcgatagagatgaacaattcccc

SEQ ID NO: 215277 - DNA, 25 bp, Artificial
  probe
  misc_feature (1)..(25): SEQ ID NO: 6586; WAN024FP3_at; Start 125; Stop 149
tactcaaggctgatgacatctgtcg

SEQ ID NO: 215278 - DNA, 25 bp, Artificial
  probe
  misc_feature (1)..(25): SEQ ID NO: 6586; WAN024FP3_at; Start 115; Stop 139
ttctggtttatactcaaggctgatg

SEQ ID NO: 215279 - DNA, 25 bp, Artificial
  probe
  misc_feature (1)..(25): SEQ ID NO: 6586; WAN024FP3_at; Start 96; Stop 120
cgtcaaaggcaatttccaattctgg

SEQ ID NO: 215280 - DNA, 25 bp, Artificial
  probe
  misc_feature (1)..(25): SEQ ID NO: 6586; WAN024FP3_at; Start 156; Stop 180
cggtgtcacggtactccagattaag

SEQ ID NO: 215281 - DNA, 25 bp, Artificial
  probe
  misc_feature (1)..(25): SEQ ID NO: 6586; WAN024FP3_at; Start 135; Stop 159
tgatgacatctgtcggacggtcggt

SEQ ID NO: 215282 - DNA, 25 bp, Artificial
  probe
  misc_feature (1)..(25): SEQ ID NO: 6586; WAN024FP3_at; Start 185; Stop 209
tgactacgctcattggtcacaaaag

SEQ ID NO: 215283 - DNA, 25 bp, Artificial
  probe
  misc_feature (1)..(25): SEQ ID NO: 6586; WAN024FP3_at; Start 110; Stop 134
tccaattctggtttatactcaaggc

SEQ ID NO: 215284 - DNA, 25 bp, Artificial
  probe
  misc_feature (1)..(25): SEQ ID NO: 6586; WAN024FP3_at; Start 172; Stop 196
cagattaagttcatgactacgctca

SEQ ID NO: 215285 - DNA, 25 bp, Artificial
  probe
  misc_feature (1)..(25): SEQ ID NO: 2263; WAN024FP4_at; Start 124; Stop 148
acggctctagtggtcatccttgcag

SEQ ID NO: 215286 - DNA, 25 bp, Artificial
  probe
  misc_feature (1)..(25): SEQ ID NO: 2263; WAN024FP4_at; Start 282; Stop 306
gctggctaaaaatgccaaggatatg

SEQ ID NO: 215287 - DNA, 25 bp, Artificial
  probe
  misc_feature (1)..(25): SEQ ID NO: 2263; WAN024FP4_at; Start 265; Stop 289
cactatcacttttccatgctggcta

SEQ ID NO: 215288 - DNA, 25 bp, Artificial
  probe
  misc_feature (1)..(25): SEQ ID NO: 2263; WAN024FP4_at; Start 268; Stop 292
tatcacttttccatgctggctaaaa

SEQ ID NO: 215289 - DNA, 25 bp, Artificial
  probe
  misc_feature (1)..(25): SEQ ID NO: 2263; WAN024FP4_at; Start 123; Stop 147
gacggctctagtggtcatccttgca

SEQ ID NO: 215290 - DNA, 25 bp, Artificial
  probe
  misc_feature (1)..(25): SEQ ID NO: 2263; WAN024FP4_at; Start 367; Stop 391
ctcccacgaatctgggatttattat

SEQ ID NO: 215291 - DNA, 25 bp, Artificial
  probe
  misc_feature (1)..(25): SEQ ID NO: 2263; WAN024FP4_at; Start 166; Stop 190
tcacgaatcgaatggctctttctcc

SEQ ID NO: 215292 - DNA, 25 bp, Artificial
  probe
  misc_feature (1)..(25): SEQ ID NO: 2263; WAN024FP4_at; Start 8; Stop 32
cacaagacaataaacgaaaatggaa

SEQ ID NO: 215293 - DNA, 25 bp, Artificial
  probe
  misc_feature (1)..(25): SEQ ID NO: 2263; WAN024FP4_at; Start 279; Stop 303
catgctggctaaaaatgccaaggat

SEQ ID NO: 215294 - DNA, 25 bp, Artificial
  probe
  misc_feature (1)..(25): SEQ ID NO: 2263; WAN024FP4_at; Start 119; Stop 143
cagtgacggctctagtggtcatcct

SEQ ID NO: 215295 - DNA, 25 bp, Artificial
  probe
  misc_feature (1)..(25): SEQ ID NO: 2263; WAN024FP4_at; Start 173; Stop 197
tcgaatggctctttctcctattgag

SEQ ID NO: 215296 - DNA, 25 bp, Artificial
  probe
  misc_feature (1)..(25): SEQ ID NO: 2263; WAN024FP4_at; Start 169; Stop 193
cgaatcgaatggctctttctcctat

SEQ ID NO: 215297 - DNA, 25 bp, Artificial
  probe
  misc_feature (1)..(25): SEQ ID NO: 2263; WAN024FP4_at; Start 273; Stop 297
cttttccatgctggctaaaaatgcc

SEQ ID NO: 215298 - DNA, 25 bp, Artificial
  probe
  misc_feature (1)..(25): SEQ ID NO: 2263; WAN024FP4_at; Start 251; Stop 275
tggatttggccagtcactatcactt

SEQ ID NO: 215299 - DNA, 25 bp, Artificial
  probe
  misc_feature (1)..(25): SEQ ID NO: 2263; WAN024FP4_at; Start 157; Stop 181
tttcaggtgtcacgaatcgaatggc

SEQ ID NO: 215300 - DNA, 25 bp, Artificial
  probe
  misc_feature (1)..(25): SEQ ID NO: 2263; WAN024FP4_at; Start 275; Stop 299
tttccatgctggctaaaaatgccaa

SEQ ID NO: 215301 - DNA, 25 bp, Artificial
  probe
  misc_feature (1)..(25): SEQ ID NO: 2263; WAN024FP4_at; Start 277; Stop 301
tccatgctggctaaaaatgccaagg

SEQ ID NO: 215302 - DNA, 25 bp, Artificial
  probe
  misc_feature (1)..(25): SEQ ID NO: 2263; WAN024FP4_at; Start 263; Stop 287
gtcactatcacttttccatgctggc

SEQ ID NO: 215303 - DNA, 25 bp, Artificial
  probe
  misc_feature (1)..(25): SEQ ID NO: 2263; WAN024FP4_at; Start 118; Stop 142
gcagtgacggctctagtggtcatcc

SEQ ID NO: 215304 - DNA, 25 bp, Artificial
  probe
  misc_feature (1)..(25): SEQ ID NO: 2263; WAN024FP4_at; Start 249; Stop 273
ggtggatttggccagtcactatcac

SEQ ID NO: 215305 - DNA, 25 bp, Artificial
  probe
  misc_feature (1)..(25): SEQ ID NO: 2263; WAN024FP4_at; Start 160; Stop 184
caggtgtcacgaatcgaatggctct

SEQ ID NO: 215306 - DNA, 25 bp, Artificial
  probe
  misc_feature (1)..(25): SEQ ID NO: 2263; WAN024FP4_at; Start 77; Stop 101
tttttactgctatcaaggaagaacg

SEQ ID NO: 215307 - DNA, 25 bp, Artificial
  probe
  misc_feature (1)..(25): SEQ ID NO: 2263; WAN024FP4_at; Start 253; Stop 277
gatttggccagtcactatcactttt

SEQ ID NO: 215308 - DNA, 25 bp, Artificial
  probe
  misc_feature (1)..(25): SEQ ID NO: 2263; WAN024FP4_at; Start 371; Stop 395
cacgaatctgggatttattatttta

SEQ ID NO: 215309 - DNA, 25 bp, Artificial
  probe
  misc_feature (1)..(25): SEQ ID NO: 2263; WAN024FP4_at; Start 287; Stop 311
ctaaaaatgccaaggatatggcggc

SEQ ID NO: 215310 - DNA, 25 bp, Artificial
  probe
  misc_feature (1)..(25): SEQ ID NO: 2263; WAN024FP4_at; Start 126; Stop 150
ggctctagtggtcatccttgcaggt

SEQ ID NO: 215311 - DNA, 25 bp, Artificial
  probe
  misc_feature (1)..(25): SEQ ID NO: 2263; WAN024FP4_at; Start 162; Stop 186
ggtgtcacgaatcgaatggctcttt

SEQ ID NO: 215312 - DNA, 25 bp, Artificial
  probe
  misc_feature (1)..(25): SEQ ID NO: 2263; WAN024FP4_at; Start 130; Stop 154
ctagtggtcatccttgcaggttttg

SEQ ID NO: 215313 - DNA, 25 bp, Artificial
  probe
  misc_feature (1)..(25): SEQ ID NO: 2263; WAN024FP4_at; Start 159; Stop 183
tcaggtgtcacgaatcgaatggctc

SEQ ID NO: 215314 - DNA, 25 bp, Artificial
  probe
  misc_feature (1)..(25): SEQ ID NO: 2263; WAN024FP4_at; Start 355; Stop 379
gcattgatttttctcccacgaatct

SEQ ID NO: 215315 - DNA, 25 bp, Artificial
  probe
  misc_feature (1)..(25): SEQ ID NO: 2263; WAN024FP4_at; Start 127; Stop 151
gctctagtggtcatccttgcaggtt

SEQ ID NO: 215316 - DNA, 25 bp, Artificial
  probe
  misc_feature (1)..(25): SEQ ID NO: 2263; WAN024FP4_at; Start 6; Stop 30
ctcacaagacaataaacgaaaatgg

SEQ ID NO: 215317 - DNA, 25 bp, Artificial
  probe
  misc_feature (1)..(25): SEQ ID NO: 2263; WAN024FP4_at; Start 164; Stop 188
tgtcacgaatcgaatggctctttct

SEQ ID NO: 215318 - DNA, 25 bp, Artificial
  probe
  misc_feature (1)..(25): SEQ ID NO: 2263; WAN024FP4_at; Start 258; Stop 282
ggccagtcactatcacttttccatg

SEQ ID NO: 215319 - DNA, 25 bp, Artificial
  probe
  misc_feature (1)..(25): SEQ ID NO: 2793; WAN024FP5_at; Start 50; Stop 74
tgcaacaaacccaagaaattttgga

SEQ ID NO: 215320 - DNA, 25 bp, Artificial
  probe
  misc_feature (1)..(25): SEQ ID NO: 2793; WAN024FP5_at; Start 377; Stop 401
tcttggcagtacacggctttttaca

SEQ ID NO: 215321 - DNA, 25 bp, Artificial
  probe
  misc_feature (1)..(25): SEQ ID NO: 2793; WAN024FP5_at; Start 453; Stop 477
tttacaagaagaaattttgacagcc

SEQ ID NO: 215322 - DNA, 25 bp, Artificial
  probe
  misc_feature (1)..(25): SEQ ID NO: 2793; WAN024FP5_at; Start 396; Stop 420
tttacatattaacggctatgatcac

SEQ ID NO: 215323 - DNA, 25 bp, Artificial
  probe
  misc_feature (1)..(25): SEQ ID NO: 2793; WAN024FP5_at; Start 128; Stop 152
tgaccaatgagcgtagtcatgaact

SEQ ID NO: 215324 - DNA, 25 bp, Artificial
  probe
  misc_feature (1)..(25): SEQ ID NO: 2793; WAN024FP5_at; Start 369; Stop 393
gatgggcttcttggcagtacacggc

SEQ ID NO: 215325 - DNA, 25 bp, Artificial
  probe
  misc_feature (1)..(25): SEQ ID NO: 2793; WAN024FP5_at; Start 192; Stop 216
catcagccttgagtataaaccagaa

SEQ ID NO: 215326 - DNA, 25 bp, Artificial
  probe
  misc_feature (1)..(25): SEQ ID NO: 2793; WAN024FP5_at; Start 268; Stop 292
gagatgatgtctgagtttgatgcct

SEQ ID NO: 215327 - DNA, 25 bp, Artificial
  probe
  misc_feature (1)..(25): SEQ ID NO: 2793; WAN024FP5_at; Start 37; Stop 61
tcaaaagaaatgttgcaacaaaccc

SEQ ID NO: 215328 - DNA, 25 bp, Artificial
  probe
  misc_feature (1)..(25): SEQ ID NO: 2793; WAN024FP5_at; Start 105; Stop 129
caaggagatggcagtcacttttgtg

SEQ ID NO: 215329 - DNA, 25 bp, Artificial
  probe
  misc_feature (1)..(25): SEQ ID NO: 2793; WAN024FP5_at; Start 321; Stop 345
taaggctcatgagcaggccgaagaa

SEQ ID NO: 215330 - DNA, 25 bp, Artificial
  probe
  misc_feature (1)..(25): SEQ ID NO: 2793; WAN024FP5_at; Start 136; Stop 160
gagcgtagtcatgaacttaatctgg

SEQ ID NO: 215331 - DNA, 25 bp, Artificial
  probe
  misc_feature (1)..(25): SEQ ID NO: 2793; WAN024FP5_at; Start 276; Stop 300
gtctgagtttgatgcctatattggg

SEQ ID NO: 215332 - DNA, 25 bp, Artificial
  probe
  misc_feature (1)..(25): SEQ ID NO: 2793; WAN024FP5_at; Start 315; Stop 339
tatcgataaggctcatgagcaggcc

SEQ ID NO: 215333 - DNA, 25 bp, Artificial
  probe
  misc_feature (1)..(25): SEQ ID NO: 2793; WAN024FP5_at; Start 328; Stop 352
catgagcaggccgaagaatatggtc

SEQ ID NO: 215334 - DNA, 25 bp, Artificial
  probe
  misc_feature (1)..(25): SEQ ID NO: 2793; WAN024FP5_at; Start 225; Stop 249
tgcctttgacgaagaggatttgctt

SEQ ID NO: 215335 - DNA, 25 bp, Artificial
  probe
  misc_feature (1)..(25): SEQ ID NO: 2793; WAN024FP5_at; Start 43; Stop 67
gaaatgttgcaacaaacccaagaaa

SEQ ID NO: 215336 - DNA, 25 bp, Artificial
  probe
  misc_feature (1)..(25): SEQ ID NO: 2793; WAN024FP5_at; Start 257; Stop 281
cagaattggcagagatgatgtctga

SEQ ID NO: 215337 - DNA, 25 bp, Artificial
  probe
  misc_feature (1)..(25): SEQ ID NO: 2793; WAN024FP5_at; Start 91; Stop 115
ttaggaaaagaagacaaggagatgg

SEQ ID NO: 215338 - DNA, 25 bp, Artificial
  probe
  misc_feature (1)..(25): SEQ ID NO: 2793; WAN024FP5_at; Start 6; Stop 30
tattgaaatggtagatgaaactggt

SEQ ID NO: 215339 - DNA, 25 bp, Artificial
  probe
  misc_feature (1)..(25): SEQ ID NO: 2793; WAN024FP5_at; Start 144; Stop 168
tcatgaacttaatctggagtaccgt

SEQ ID NO: 215340 - DNA, 25 bp, Artificial
  probe
  misc_feature (1)..(25): SEQ ID NO: 2793; WAN024FP5_at; Start 173; Stop 197
ccgaccgtccgacagatgtcatcag

SEQ ID NO: 215341 - DNA, 25 bp, Artificial
  probe
  misc_feature (1)..(25): SEQ ID NO: 2793; WAN024FP5_at; Start 197; Stop 221
gccttgagtataaaccagaattgga

SEQ ID NO: 215342 - DNA, 25 bp, Artificial
  probe
  misc_feature (1)..(25): SEQ ID NO: 2793; WAN024FP5_at; Start 60; Stop 84
ccaagaaattttggaatttgcagcc

SEQ ID NO: 215343 - DNA, 25 bp, Artificial
  probe
  misc_feature (1)..(25): SEQ ID NO: 2793; WAN024FP5_at; Start 388; Stop 412
cacggctttttacatattaacggct

SEQ ID NO: 215344 - DNA, 25 bp, Artificial
  probe
  misc_feature (1)..(25): SEQ ID NO: 2793; WAN024FP5_at; Start 301; Stop 325
gaattgttcatctctatcgataagg

SEQ ID NO: 215345 - DNA, 25 bp, Artificial
  probe
  misc_feature (1)..(25): SEQ ID NO: 2793; WAN024FP5_at; Start 463; Stop 487
gaaattttgacagcctatggactca

SEQ ID NO: 215346 - DNA, 25 bp, Artificial
  probe
  misc_feature (1)..(25): SEQ ID NO: 2793; WAN024FP5_at; Start 24; Stop 48
aactggtcaagtttcaaaagaaatg

SEQ ID NO: 215347 - DNA, 25 bp, Artificial
  probe
  misc_feature (1)..(25): SEQ ID NO: 2793; WAN024FP5_at; Start 119; Stop 143
tcacttttgtgaccaatgagcgtag

SEQ ID NO: 215348 - DNA, 25 bp, Artificial
  probe
  misc_feature (1)..(25): SEQ ID NO: 2793; WAN024FP5_at; Start 334; Stop 358
caggccgaagaatatggtcacagct

SEQ ID NO: 215349 - DNA, 25 bp, Artificial
  probe
  misc_feature (1)..(25): SEQ ID NO: 2793; WAN024FP5_at; Start 354; Stop 378
cagctttgagcgtgagatgggcttc

SEQ ID NO: 215350 - DNA, 25 bp, Artificial
  probe
  misc_feature (1)..(25): SEQ ID NO: 2793; WAN024FP5_at; Start 211; Stop 235
ccagaattggaaattgcctttgacg

SEQ ID NO: 215351 - DNA, 25 bp, Artificial
  probe
  misc_feature (1)..(25): SEQ ID NO: 2793; WAN024FP5_at; Start 183; Stop 207
gacagatgtcatcagccttgagtat

SEQ ID NO: 215352 - DNA, 25 bp, Artificial
  probe
  misc_feature (1)..(25): SEQ ID NO: 2793; WAN024FP5_at; Start 343; Stop 367
gaatatggtcacagctttgagcgtg

SEQ ID NO: 215353 - DNA, 25 bp, Artificial
  probe
  misc_feature (1)..(25): SEQ ID NO: 6393; WAN024FP6_at; Start 387; Stop 411
taatgggacgactataaaagaagag

SEQ ID NO: 215354 - DNA, 25 bp, Artificial
  probe
  misc_feature (1)..(25): SEQ ID NO: 6393; WAN024FP6_at; Start 401; Stop 425
taaaagaagaggtcctaaatcagga

SEQ ID NO: 215355 - DNA, 25 bp, Artificial
  probe
  misc_feature (1)..(25): SEQ ID NO: 6393; WAN024FP6_at; Start 208; Stop 232
gcagcaagaaatactggtctacagt

SEQ ID NO: 215356 - DNA, 25 bp, Artificial
  probe
  misc_feature (1)..(25): SEQ ID NO: 6393; WAN024FP6_at; Start 521; Stop 545
aataccctgttggtttatttgcaga

SEQ ID NO: 215357 - DNA, 25 bp, Artificial
  probe
  misc_feature (1)..(25): SEQ ID NO: 6393; WAN024FP6_at; Start 197; Stop 221
cagggctaggtgcagcaagaaatac

SEQ ID NO: 215358 - DNA, 25 bp, Artificial
  probe
  misc_feature (1)..(25): SEQ ID NO: 6393; WAN024FP6_at; Start 504; Stop 528
gattgctagagaggttaaataccct

SEQ ID NO: 215359 - DNA, 25 bp, Artificial
  probe
  misc_feature (1)..(25): SEQ ID NO: 6393; WAN024FP6_at; Start 761; Stop 785
gaatcgattttaatcttttgtgcag

SEQ ID NO: 215360 - DNA, 25 bp, Artificial
  probe
  misc_feature (1)..(25): SEQ ID NO: 6393; WAN024FP6_at; Start 823; Stop 847
tatagccaagaaatagtggttctac

SEQ ID NO: 215361 - DNA, 25 bp, Artificial
  probe
  misc_feature (1)..(25): SEQ ID NO: 6393; WAN024FP6_at; Start 690; Stop 714
tctagtcgtagaagaagcaaaggtt

SEQ ID NO: 215362 - DNA, 25 bp, Artificial
  probe
  misc_feature (1)..(25): SEQ ID NO: 6393; WAN024FP6_at; Start 225; Stop 249
tctacagtatataacaggaaatgcg

SEQ ID NO: 215363 - DNA, 25 bp, Artificial
  probe
  misc_feature (1)..(25): SEQ ID NO: 6393; WAN024FP6_at; Start 779; Stop 803
tgtgcagaattgctttatcggaaaa

SEQ ID NO: 215364 - DNA, 25 bp, Artificial
  probe
  misc_feature (1)..(25): SEQ ID NO: 6393; WAN024FP6_at; Start 676; Stop 700
gaaaagatatgggatctagtcgtag

SEQ ID NO: 215365 - DNA, 25 bp, Artificial
  probe
  misc_feature (1)..(25): SEQ ID NO: 6393; WAN024FP6_at; Start 742; Stop 766
gccaaggtgaatagatatagaatcg

SEQ ID NO: 215366 - DNA, 25 bp, Artificial
  probe
  misc_feature (1)..(25): SEQ ID NO: 6393; WAN024FP6_at; Start 553; Stop 577
cctgcagcatttggttatattatac

SEQ ID NO: 215367 - DNA, 25 bp, Artificial
  probe
  misc_feature (1)..(25): SEQ ID NO: 6393; WAN024FP6_at; Start 182; Stop 206
taaatcaaaagaatgcagggctagg

SEQ ID NO: 215368 - DNA, 25 bp, Artificial
  probe
  misc_feature (1)..(25): SEQ ID NO: 6393; WAN024FP6_at; Start 60; Stop 84
ggattccgttgttaatcaaacatac

SEQ ID NO: 215369 - DNA, 25 bp, Artificial
  probe
  misc_feature (1)..(25): SEQ ID NO: 6393; WAN024FP6_at; Start 544; Stop 568
gaagacgtccctgcagcatttggtt

SEQ ID NO: 215370 - DNA, 25 bp, Artificial
  probe
  misc_feature (1)..(25): SEQ ID NO: 6393; WAN024FP6_at; Start 76; Stop 100
caaacatacaaagatattgaagtga

SEQ ID NO: 215371 - DNA, 25 bp, Artificial
  probe
  misc_feature (1)..(25): SEQ ID NO: 6393; WAN024FP6_at; Start 727; Stop 751
gattatattttatatgccaaggtga

SEQ ID NO: 215372 - DNA, 25 bp, Artificial
  probe
  misc_feature (1)..(25): SEQ ID NO: 6393; WAN024FP6_at; Start 488; Stop 512
aactttataagagagagattgctag

SEQ ID NO: 215373 - DNA, 25 bp, Artificial
  probe
  misc_feature (1)..(25): SEQ ID NO: 6393; WAN024FP6_at; Start 145; Stop 169
gaagaatacgttgctaaatattcca

SEQ ID NO: 215374 - DNA, 25 bp, Artificial
  probe
  misc_feature (1)..(25): SEQ ID NO: 6393; WAN024FP6_at; Start 239; Stop 263
caggaaatgcggtaacttttgtcga

SEQ ID NO: 215375 - DNA, 25 bp, Artificial
  probe
  misc_feature (1)..(25): SEQ ID NO: 6393; WAN024FP6_at; Start 2; Stop 26
tgaaagtaagtgtaataatacctgt

SEQ ID NO: 215376 - DNA, 25 bp, Artificial
  probe
  misc_feature (1)..(25): SEQ ID NO: 6393; WAN024FP6_at; Start 248; Stop 272
cggtaacttttgtcgattctgatga

SEQ ID NO: 215377 - DNA, 25 bp, Artificial
  probe
  misc_feature (1)..(25): SEQ ID NO: 6393; WAN024FP6_at; Start 705; Stop 729
agcaaaggtttatgggaacgaggat

SEQ ID NO: 215378 - DNA, 25 bp, Artificial
  probe
  misc_feature (1)..(25): SEQ ID NO: 6393; WAN024FP6_at; Start 531; Stop 555
tggtttatttgcagaagacgtccct

SEQ ID NO: 215379 - DNA, 25 bp, Artificial
  probe
  misc_feature (1)..(25): SEQ ID NO: 6393; WAN024FP6_at; Start 930; Stop 954
tgattatacgctaggaagaaatgtt

SEQ ID NO: 215380 - DNA, 25 bp, Artificial
  probe
  misc_feature (1)..(25): SEQ ID NO: 6393; WAN024FP6_at; Start 893; Stop 917
cgttttctaggaaggtgatatttag

SEQ ID NO: 215381 - DNA, 25 bp, Artificial
  probe
  misc_feature (1)..(25): SEQ ID NO: 6393; WAN024FP6_at; Start 627; Stop 651
taatgataatagtttaacggctaaa

SEQ ID NO: 215382 - DNA, 25 bp, Artificial
  probe
  misc_feature (1)..(25): SEQ ID NO: 6393; WAN024FP6_at; Start 808; Stop 832
tctgatatagaaaaatatagccaag

SEQ ID NO: 215383 - DNA, 25 bp, Artificial
  probe
  misc_feature (1)..(25): SEQ ID NO: 6393; WAN024FP6_at; Start 414; Stop 438
cctaaatcaggaacagtttgcaaaa

SEQ ID NO: 215384 - DNA, 25 bp, Artificial
  probe
  misc_feature (1)..(25): SEQ ID NO: 6393; WAN024FP6_at; Start 266; Stop 290
ctgatgattggttagagttagatgc

SEQ ID NO: 215385 - DNA, 25 bp, Artificial
  probe
  misc_feature (1)..(25): SEQ ID NO: 6393; WAN024FP6_at; Start 374; Stop 398
ctaatgaaggaactaatgggacgac

SEQ ID NO: 215386 - DNA, 25 bp, Artificial
  probe
  misc_feature (1)..(25): SEQ ID NO: 6393; WAN024FP6_at; Start 641; Stop 665
taacggctaaatttacagataaaga

SEQ ID NO: 215387 - DNA, 25 bp, Artificial
  probe
  misc_feature (1)..(25): SEQ ID NO: 6778; WAN024FP7_at; Start 293; Stop 317
cggtagaatatcttgtagaactggc

SEQ ID NO: 215388 - DNA, 25 bp, Artificial
  probe
  misc_feature (1)..(25): SEQ ID NO: 6778; WAN024FP7_at; Start 533; Stop 557
aactttttgaagatttggctatagc

SEQ ID NO: 215389 - DNA, 25 bp, Artificial
  probe
  misc_feature (1)..(25): SEQ ID NO: 6778; WAN024FP7_at; Start 518; Stop 542
ggcctttcccagatcaactttttga

SEQ ID NO: 215390 - DNA, 25 bp, Artificial
  probe
  misc_feature (1)..(25): SEQ ID NO: 6778; WAN024FP7_at; Start 334; Stop 358
gatttagtagtaaccccattgagag

SEQ ID NO: 215391 - DNA, 25 bp, Artificial
  probe
  misc_feature (1)..(25): SEQ ID NO: 6778; WAN024FP7_at; Start 372; Stop 396
tattcaaggtggaaatgcatcctca

SEQ ID NO: 215392 - DNA, 25 bp, Artificial
  probe
  misc_feature (1)..(25): SEQ ID NO: 6778; WAN024FP7_at; Start 799; Stop 823
gaatctggaatgactaaagaagtaa

SEQ ID NO: 215393 - DNA, 25 bp, Artificial
  probe
  misc_feature (1)..(25): SEQ ID NO: 6778; WAN024FP7_at; Start 733; Stop 757
gaattatctattgctttgaaaacca

SEQ ID NO: 215394 - DNA, 25 bp, Artificial
  probe
  misc_feature (1)..(25): SEQ ID NO: 6778; WAN024FP7_at; Start 832; Stop 856
tctttagagtataggaaagatctac

SEQ ID NO: 215395 - DNA, 25 bp, Artificial
  probe
  misc_feature (1)..(25): SEQ ID NO: 6778; WAN024FP7_at; Start 46; Stop 70
tatttaaaatatagcataggaggta

SEQ ID NO: 215396 - DNA, 25 bp, Artificial
  probe
  misc_feature (1)..(25): SEQ ID NO: 6778; WAN024FP7_at; Start 227; Stop 251
gattgcaacattcaacttctgactg

SEQ ID NO: 215397 - DNA, 25 bp, Artificial
  probe
  misc_feature (1)..(25): SEQ ID NO: 6778; WAN024FP7_at; Start 182; Stop 206
taatttcagttgagaatggaggaca

SEQ ID NO: 215398 - DNA, 25 bp, Artificial
  probe
  misc_feature (1)..(25): SEQ ID NO: 6778; WAN024FP7_at; Start 325; Stop 349
tatggatcggatttagtagtaaccc

SEQ ID NO: 215399 - DNA, 25 bp, Artificial
  probe
  misc_feature (1)..(25): SEQ ID NO: 6778; WAN024FP7_at; Start 579; Stop 603
taagaaggtagctgtatcaaatcaa

SEQ ID NO: 215400 - DNA, 25 bp, Artificial
  probe
  misc_feature (1)..(25): SEQ ID NO: 6778; WAN024FP7_at; Start 195; Stop 219
gaatggaggacaaggaaaagctaga

SEQ ID NO: 215401 - DNA, 25 bp, Artificial
  probe
  misc_feature (1)..(25): SEQ ID NO: 6778; WAN024FP7_at; Start 347; Stop 371
ccccattgagagtagtaagagatca

SEQ ID NO: 215402 - DNA, 25 bp, Artificial
  probe
  misc_feature (1)..(25): SEQ ID NO: 6778; WAN024FP7_at; Start 619; Stop 643
tatcaacgtgttggaagtacaacga

SEQ ID NO: 215403 - DNA, 25 bp, Artificial
  probe
  misc_feature (1)..(25): SEQ ID NO: 6778; WAN024FP7_at; Start 308; Stop 332
tagaactggctgaacgatatggatc

SEQ ID NO: 215404 - DNA, 25 bp, Artificial
  probe
  misc_feature (1)..(25): SEQ ID NO: 6778; WAN024FP7_at; Start 470; Stop 494
gggctacaccatgtggtaaattata

SEQ ID NO: 215405 - DNA, 25 bp, Artificial
  probe
  misc_feature (1)..(25): SEQ ID NO: 6778; WAN024FP7_at; Start 549; Stop 573
ggctatagcttataaacatttaatg

SEQ ID NO: 215406 - DNA, 25 bp, Artificial
  probe
  misc_feature (1)..(25): SEQ ID NO: 6778; WAN024FP7_at; Start 749; Stop 773
tgaaaaccagaatgtttacaggagg

SEQ ID NO: 215407 - DNA, 25 bp, Artificial
  probe
  misc_feature (1)..(25): SEQ ID NO: 6778; WAN024FP7_at; Start 506; Stop 530
tattagaaaaatggcctttcccaga

SEQ ID NO: 215408 - DNA, 25 bp, Artificial
  probe
  misc_feature (1)..(25): SEQ ID NO: 6778; WAN024FP7_at; Start 382; Stop 406
ggaaatgcatcctcaatcaagaatg

SEQ ID NO: 215409 - DNA, 25 bp, Artificial
  probe
  misc_feature (1)..(25): SEQ ID NO: 6778; WAN024FP7_at; Start 635; Stop 659
gtacaacgaagagtagatatacatc

SEQ ID NO: 215410 - DNA, 25 bp, Artificial
  probe
  misc_feature (1)..(25): SEQ ID NO: 6778; WAN024FP7_at; Start 869; Stop 893
tcaatagtagaatcactaaaaacca

SEQ ID NO: 215411 - DNA, 25 bp, Artificial
  probe
  misc_feature (1)..(25): SEQ ID NO: 6778; WAN024FP7_at; Start 447; Stop 471
aatgtattacggaagactcttaggg

SEQ ID NO: 215412 - DNA, 25 bp, Artificial
  probe
  misc_feature (1)..(25): SEQ ID NO: 6778; WAN024FP7_at; Start 60; Stop 84
cataggaggtattctaaaacaaagt

SEQ ID NO: 215413 - DNA, 25 bp, Artificial
  probe
  misc_feature (1)..(25): SEQ ID NO: 6778; WAN024FP7_at; Start 127; Stop 151
gataattctcttgctatatgtgaag

SEQ ID NO: 215414 - DNA, 25 bp, Artificial
  probe
  misc_feature (1)..(25): SEQ ID NO: 6778; WAN024FP7_at; Start 565; Stop 589
catttaatgagtgctaagaaggtag

SEQ ID NO: 215415 - DNA, 25 bp, Artificial
  probe
  misc_feature (1)..(25): SEQ ID NO: 6778; WAN024FP7_at; Start 359; Stop 383
tagtaagagatcatattcaaggtgg

SEQ ID NO: 215416 - DNA, 25 bp, Artificial
  probe
  misc_feature (1)..(25): SEQ ID NO: 6778; WAN024FP7_at; Start 765; Stop 789
tacaggaggttttcaagtagtgaac

SEQ ID NO: 215417 - DNA, 25 bp, Artificial
  probe
  misc_feature (1)..(25): SEQ ID NO: 6778; WAN024FP7_at; Start 115; Stop 139
gatggttcccaggataattctcttg

SEQ ID NO: 215418 - DNA, 25 bp, Artificial
  probe
  misc_feature (1)..(25): SEQ ID NO: 6778; WAN024FP7_at; Start 903; Stop 927
gcatatactattcagcatcaatcct

SEQ ID NO: 215419 - DNA, 25 bp, Artificial
  probe
  misc_feature (1)..(25): SEQ ID NO: 6778; WAN024FP7_at; Start 782; Stop 806
tagtgaactctatgattgaatctgg

SEQ ID NO: 215420 - DNA, 25 bp, Artificial
  probe
  misc_feature (1)..(25): SEQ ID NO: 6778; WAN024FP7_at; Start 211; Stop 235
aaagctagaaatattggattgcaac

SEQ ID NO: 215421 - DNA, 25 bp, Artificial
  probe
  misc_feature (1)..(25): SEQ ID NO: 1133; WAN024FP8_at; Start 378; Stop 402
tgaagaaattaagaagtcgccggta

SEQ ID NO: 215422 - DNA, 25 bp, Artificial
  probe
  misc_feature (1)..(25): SEQ ID NO: 1133; WAN024FP8_at; Start 688; Stop 712
gatttagtaactgaagaagctgagg

SEQ ID NO: 215423 - DNA, 25 bp, Artificial
  probe
  misc_feature (1)..(25): SEQ ID NO: 1133; WAN024FP8_at; Start 267; Stop 291
cgatgattggcttgaattagacgca

SEQ ID NO: 215424 - DNA, 25 bp, Artificial
  probe
  misc_feature (1)..(25): SEQ ID NO: 1133; WAN024FP8_at; Start 493; Stop 517
tataagaaagaaattgcttgtgagg

SEQ ID NO: 215425 - DNA, 25 bp, Artificial
  probe
  misc_feature (1)..(25): SEQ ID NO: 1133; WAN024FP8_at; Start 536; Stop 560
tatttgctgaagatgtacccgcagc

SEQ ID NO: 215426 - DNA, 25 bp, Artificial
  probe
  misc_feature (1)..(25): SEQ ID NO: 1133; WAN024FP8_at; Start 205; Stop 229
ggtgcggctagaaataaaggtttgc

SEQ ID NO: 215427 - DNA, 25 bp, Artificial
  probe
  misc_feature (1)..(25): SEQ ID NO: 1133; WAN024FP8_at; Start 229; Stop 253
cagtatgtaacaggtgatgcgatta

SEQ ID NO: 215428 - DNA, 25 bp, Artificial
  probe
  misc_feature (1)..(25): SEQ ID NO: 1133; WAN024FP8_at; Start 66; Stop 90
cattgttaatcagacatataaggac

SEQ ID NO: 215429 - DNA, 25 bp, Artificial
  probe
  misc_feature (1)..(25): SEQ ID NO: 1133; WAN024FP8_at; Start 508; Stop 532
gcttgtgaggttaaatatccagttg

SEQ ID NO: 215430 - DNA, 25 bp, Artificial
  probe
  misc_feature (1)..(25): SEQ ID NO: 1133; WAN024FP8_at; Start 674; Stop 698
tagagaagatttgggatttagtaac

SEQ ID NO: 215431 - DNA, 25 bp, Artificial
  probe
  misc_feature (1)..(25): SEQ ID NO: 1133; WAN024FP8_at; Start 219; Stop 243
taaaggtttgcagtatgtaacaggt

SEQ ID NO: 215432 - DNA, 25 bp, Artificial
  probe
  misc_feature (1)..(25): SEQ ID NO: 1133; WAN024FP8_at; Start 188; Stop 212
aaaataatgcaggtttaggtgcggc

SEQ ID NO: 215433 - DNA, 25 bp, Artificial
  probe
  misc_feature (1)..(25): SEQ ID NO: 1133; WAN024FP8_at; Start 244; Stop 268
gatgcgattactttcgtagattccg

SEQ ID NO: 215434 - DNA, 25 bp, Artificial
  probe
  misc_feature (1)..(25): SEQ ID NO: 1133; WAN024FP8_at; Start 412; Stop 436
gttctaactcagaaacagtttgcga

SEQ ID NO: 215435 - DNA, 25 bp, Artificial
  probe
  misc_feature (1)..(25): SEQ ID NO: 1133; WAN024FP8_at; Start 364; Stop 388
gagtatactcctagtgaagaaatta

SEQ ID NO: 215436 - DNA, 25 bp, Artificial
  probe
  misc_feature (1)..(25): SEQ ID NO: 1133; WAN024FP8_at; Start 556; Stop 580
gcagctttcagctatattatacgtt

SEQ ID NO: 215437 - DNA, 25 bp, Artificial
  probe
  misc_feature (1)..(25): SEQ ID NO: 1133; WAN024FP8_at; Start 299; Stop 323
attacgtggaatctatgaaaaagag

SEQ ID NO: 215438 - DNA, 25 bp, Artificial
  probe
  misc_feature (1)..(25): SEQ ID NO: 1133; WAN024FP8_at; Start 284; Stop 308
tagacgcaattgaatattacgtgga

SEQ ID NO: 215439 - DNA, 25 bp, Artificial
  probe
  misc_feature (1)..(25): SEQ ID NO: 1133; WAN024FP8_at; Start 575; Stop 599
tacgttcacaaaatatattctatag

SEQ ID NO: 215440 - DNA, 25 bp, Artificial
  probe
  misc_feature (1)..(25): SEQ ID NO: 1133; WAN024FP8_at; Start 641; Stop 665
taacagcgaattttacaaataaaga

SEQ ID NO: 215441 - DNA, 25 bp, Artificial
  probe
  misc_feature (1)..(25): SEQ ID NO: 1133; WAN024FP8_at; Start 394; Stop 418
tcgccggtaacagaggaagttctaa

SEQ ID NO: 215442 - DNA, 25 bp, Artificial
  probe
  misc_feature (1)..(25): SEQ ID NO: 1133; WAN024FP8_at; Start 350; Stop 374
tgattaggaaaaaagagtatactcc

SEQ ID NO: 215443 - DNA, 25 bp, Artificial
  probe
  misc_feature (1)..(25): SEQ ID NO: 1133; WAN024FP8_at; Start 774; Stop 798
tcttttgtgtaggatagcactatca

SEQ ID NO: 215444 - DNA, 25 bp, Artificial
  probe
  misc_feature (1)..(25): SEQ ID NO: 1133; WAN024FP8_at; Start 3; Stop 27
gaaggttagtgtaataatacctatc

SEQ ID NO: 215445 - DNA, 25 bp, Artificial
  probe
  misc_feature (1)..(25): SEQ ID NO: 1133; WAN024FP8_at; Start 590; Stop 614
tattctatagcacaaaagtaactta

SEQ ID NO: 215446 - DNA, 25 bp, Artificial
  probe
  misc_feature (1)..(25): SEQ ID NO: 1133; WAN024FP8_at; Start 790; Stop 814
gcactatcagaagataaaacagata

SEQ ID NO: 215447 - DNA, 25 bp, Artificial
  probe
  misc_feature (1)..(25): SEQ ID NO: 1133; WAN024FP8_at; Start 480; Stop 504
ttgtgccaaactttataagaaagaa

SEQ ID NO: 215448 - DNA, 25 bp, Artificial
  probe
  misc_feature (1)..(25): SEQ ID NO: 1133; WAN024FP8_at; Start 893; Stop 917
cgttttctagaaaagtgatattgag

SEQ ID NO: 215449 - DNA, 25 bp, Artificial
  probe
  misc_feature (1)..(25): SEQ ID NO: 1133; WAN024FP8_at; Start 50; Stop 74
gaaggtgtctagaatccattgttaa

SEQ ID NO: 215450 - DNA, 25 bp, Artificial
  probe
  misc_feature (1)..(25): SEQ ID NO: 1133; WAN024FP8_at; Start 545; Stop 569
aagatgtacccgcagctttcagcta

SEQ ID NO: 215451 - DNA, 25 bp, Artificial
  probe
  misc_feature (1)..(25): SEQ ID NO: 1133; WAN024FP8_at; Start 523; Stop 547
tatccagttggtttatttgctgaag

SEQ ID NO: 215452 - DNA, 25 bp, Artificial
  probe
  misc_feature (1)..(25): SEQ ID NO: 1133; WAN024FP8_at; Start 258; Stop 282
cgtagattccgatgattggcttgaa

SEQ ID NO: 215453 - DNA, 25 bp, Artificial
  probe
  misc_feature (1)..(25): SEQ ID NO: 1133; WAN024FP8_at; Start 704; Stop 728
aagctgaggattttggaaacgagga

SEQ ID NO: 215454 - DNA, 25 bp, Artificial
  probe
  misc_feature (1)..(25): SEQ ID NO: 1133; WAN024FP8_at; Start 627; Stop 651
taacgataatagtttaacagcgaat

SEQ ID NO: 215455 - DNA, 25 bp, Artificial
  probe
  misc_feature (1)..(25): SEQ ID NO: 4062; WAN024FP9_at; Start 1; Stop 25
gtgcagtccatcagttgtatattct

SEQ ID NO: 215456 - DNA, 25 bp, Artificial
  probe
  misc_feature (1)..(25): SEQ ID NO: 4062; WAN024FP9_at; Start 145; Stop 169
gcggatatagactgcctgctggtac

SEQ ID NO: 215457 - DNA, 25 bp, Artificial
  probe
  misc_feature (1)..(25): SEQ ID NO: 4062; WAN024FP9_at; Start 197; Stop 221
gaaagcaatttaatctctgtcaatg

SEQ ID NO: 215458 - DNA, 25 bp, Artificial
  probe
  misc_feature (1)..(25): SEQ ID NO: 4062; WAN024FP9_at; Start 287; Stop 311
tcctttccgatatcatttgtcccaa

SEQ ID NO: 215459 - DNA, 25 bp, Artificial
  probe
  misc_feature (1)..(25): SEQ ID NO: 4062; WAN024FP9_at; Start 164; Stop 188
tggtactcctctctctcattgacag

SEQ ID NO: 215460 - DNA, 25 bp, Artificial
  probe
  misc_feature (1)..(25): SEQ ID NO: 4062; WAN024FP9_at; Start 85; Stop 109
catataggcagatgcaagctcttga

SEQ ID NO: 215461 - DNA, 25 bp, Artificial
  probe
  misc_feature (1)..(25): SEQ ID NO: 4062; WAN024FP9_at; Start 267; Stop 291
gagcctcattcacaggaacatcctt

SEQ ID NO: 215462 - DNA, 25 bp, Artificial
  probe
  misc_feature (1)..(25): SEQ ID NO: 4062; WAN024FP9_at; Start 234; Stop 258
caacggattgaatgatagcttcgag

SEQ ID NO: 215463 - DNA, 25 bp, Artificial
  probe
  misc_feature (1)..(25): SEQ ID NO: 4062; WAN024FP9_at; Start 277; Stop 301
cacaggaacatcctttccgatatca

SEQ ID NO: 215464 - DNA, 25 bp, Artificial
  probe
  misc_feature (1)..(25): SEQ ID NO: 4062; WAN024FP9_at; Start 318; Stop 342
gaaaaattttatctactgctccacc

SEQ ID NO: 215465 - DNA, 25 bp, Artificial
  probe
  misc_feature (1)..(25): SEQ ID NO: 4062; WAN024FP9_at; Start 216; Stop 240
tcaatggataatcgcgagcaacgga

SEQ ID NO: 215466 - DNA, 25 bp, Artificial
  probe
  misc_feature (1)..(25): SEQ ID NO: 4062; WAN024FP9_at; Start 100; Stop 124
aagctcttgataggcttgattccag

SEQ ID NO: 215467 - DNA, 25 bp, Artificial
  probe
  misc_feature (1)..(25): SEQ ID NO: 4062; WAN024FP9_at; Start 122; Stop 146
cagttctgaattttttcattcgagc

SEQ ID NO: 215468 - DNA, 25 bp, Artificial
  probe
  misc_feature (1)..(25): SEQ ID NO: 4062; WAN024FP9_at; Start 224; Stop 248
taatcgcgagcaacggattgaatga

SEQ ID NO: 215469 - DNA, 25 bp, Artificial
  probe
  misc_feature (1)..(25): SEQ ID NO: 4062; WAN024FP9_at; Start 46; Stop 70
gtctgtcaaacaatcaaatactggc

SEQ ID NO: 215470 - DNA, 25 bp, Artificial
  probe
  misc_feature (1)..(25): SEQ ID NO: 4062; WAN024FP9_at; Start 74; Stop 98
aattccacctgcatataggcagatg

SEQ ID NO: 215471 - DNA, 25 bp, Artificial
  probe
  misc_feature (1)..(25): SEQ ID NO: 4062; WAN024FP9_at; Start 183; Stop 207
tgacaggcaaaatggaaagcaattt

SEQ ID NO: 215472 - DNA, 25 bp, Artificial
  probe
  misc_feature (1)..(25): SEQ ID NO: 4062; WAN024FP9_at; Start 18; Stop 42
tatattcttttttgagttggcctgc

SEQ ID NO: 215473 - DNA, 25 bp, Artificial
  probe
  misc_feature (1)..(25): SEQ ID NO: 4062; WAN024FP9_at; Start 31; Stop 55
gagttggcctgcttggtctgtcaaa

SEQ ID NO: 215474 - DNA, 25 bp, Artificial
  probe
  misc_feature (1)..(25): SEQ ID NO: 4062; WAN024FP9_at; Start 173; Stop 197
tctctctcattgacaggcaaaatgg

SEQ ID NO: 215475 - DNA, 25 bp, Artificial
  probe
  misc_feature (1)..(25): SEQ ID NO: 4062; WAN024FP9_at; Start 36; Stop 60
ggcctgcttggtctgtcaaacaatc

SEQ ID NO: 215476 - DNA, 25 bp, Artificial
  probe
  misc_feature (1)..(25): SEQ ID NO: 4062; WAN024FP9_at; Start 251; Stop 275
gcttcgagattattgagagcctcat

SEQ ID NO: 215477 - DNA, 25 bp, Artificial
  probe
  misc_feature (1)..(25): SEQ ID NO: 4062; WAN024FP9_at; Start 150; Stop 174
tatagactgcctgctggtactcctc

SEQ ID NO: 215478 - DNA, 25 bp, Artificial
  probe
  misc_feature (1)..(25): SEQ ID NO: 4062; WAN024FP9_at; Start 68; Stop 92
ggcacaaattccacctgcatatagg

SEQ ID NO: 215479 - DNA, 25 bp, Artificial
  probe
  misc_feature (1)..(25): SEQ ID NO: 4062; WAN024FP9_at; Start 295; Stop 319
gatatcatttgtcccaatcagaaga

SEQ ID NO: 215480 - DNA, 25 bp, Artificial
  probe
  misc_feature (1)..(25): SEQ ID NO: 4062; WAN024FP9_at; Start 61; Stop 85
aaatactggcacaaattccacctgc

SEQ ID NO: 215481 - DNA, 25 bp, Artificial
  probe
  misc_feature (1)..(25): SEQ ID NO: 4062; WAN024FP9_at; Start 91; Stop 115
ggcagatgcaagctcttgataggct

SEQ ID NO: 215482 - DNA, 25 bp, Artificial
  probe
  misc_feature (1)..(25): SEQ ID NO: 4062; WAN024FP9_at; Start 324; Stop 348
ttttatctactgctccaccatatag

SEQ ID NO: 215483 - DNA, 25 bp, Artificial
  probe
  misc_feature (1)..(25): SEQ ID NO: 4062; WAN024FP9_at; Start 263; Stop 287
ttgagagcctcattcacaggaacat

SEQ ID NO: 215484 - DNA, 25 bp, Artificial
  probe
  misc_feature (1)..(25): SEQ ID NO: 4062; WAN024FP9_at; Start 304; Stop 328
tgtcccaatcagaagaaaaatttta

SEQ ID NO: 215485 - DNA, 25 bp, Artificial
  probe
  misc_feature (1)..(25): SEQ ID NO: 4062; WAN024FP9_at; Start 207; Stop 231
taatctctgtcaatggataatcgcg

SEQ ID NO: 215486 - DNA, 25 bp, Artificial
  probe
  misc_feature (1)..(25): SEQ ID NO: 4062; WAN024FP9_at; Start 137; Stop 161
tcattcgagcggatatagactgcct

SEQ ID NO: 215487 - DNA, 25 bp, Artificial
  probe
  misc_feature (1)..(25): SEQ ID NO: 4062; WAN024FP9_at; Start 247; Stop 271
gatagcttcgagattattgagagcc

SEQ ID NO: 215488 - DNA, 25 bp, Artificial
  probe
  misc_feature (1)..(25): SEQ ID NO: 4062; WAN024FP9_at; Start 107; Stop 131
tgataggcttgattccagttctgaa

SEQ ID NO: 215489 - DNA, 25 bp, Artificial
  probe
  misc_feature (1)..(25): SEQ ID NO: 4158; WAN024FPA_at; Start 475; Stop 499
gagcttgcatctgcctatatgcagg

SEQ ID NO: 215490 - DNA, 25 bp, Artificial
  probe
  misc_feature (1)..(25): SEQ ID NO: 4158; WAN024FPA_at; Start 490; Stop 514
tatatgcaggtggaatttgtgccag

SEQ ID NO: 215491 - DNA, 25 bp, Artificial
  probe
  misc_feature (1)..(25): SEQ ID NO: 4158; WAN024FPA_at; Start 238; Stop 262
ggtggagcagtagataaaatttttc

SEQ ID NO: 215492 - DNA, 25 bp, Artificial
  probe
  misc_feature (1)..(25): SEQ ID NO: 4158; WAN024FPA_at; Start 196; Stop 220
cagacaggactgttactagagaacc

SEQ ID NO: 215493 - DNA, 25 bp, Artificial
  probe
  misc_feature (1)..(25): SEQ ID NO: 4158; WAN024FPA_at; Start 556; Stop 580
gaatatacaactgatggactgcacc

SEQ ID NO: 215494 - DNA, 25 bp, Artificial
  probe
  misc_feature (1)..(25): SEQ ID NO: 4158; WAN024FPA_at; Start 357; Stop 381
tccattgacagagattaaattgctt

SEQ ID NO: 215495 - DNA, 25 bp, Artificial
  probe
  misc_feature (1)..(25): SEQ ID NO: 4158; WAN024FPA_at; Start 588; Stop 612
tgctggttatcaggctttgtcaaaa

SEQ ID NO: 215496 - DNA, 25 bp, Artificial
  probe
  misc_feature (1)..(25): SEQ ID NO: 4158; WAN024FPA_at; Start 223; Stop 247
gatgctcatctatatggtggagcag

SEQ ID NO: 215497 - DNA, 25 bp, Artificial
  probe
  misc_feature (1)..(25): SEQ ID NO: 4158; WAN024FPA_at; Start 410; Stop 434
agtaccagcaggcagtctatatccg

SEQ ID NO: 215498 - DNA, 25 bp, Artificial
  probe
  misc_feature (1)..(25): SEQ ID NO: 4158; WAN024FPA_at; Start 113; Stop 137
gggattccattgtcgagtattatcc

SEQ ID NO: 215499 - DNA, 25 bp, Artificial
  probe
  misc_feature (1)..(25): SEQ ID NO: 4158; WAN024FPA_at; Start 312; Stop 336
tctcaataatctcgaagctatcatt

SEQ ID NO: 215500 - DNA, 25 bp, Artificial
  probe
  misc_feature (1)..(25): SEQ ID NO: 4158; WAN024FPA_at; Start 75; Stop 99
tcacatttctgttgtagaaccaaac

SEQ ID NO: 215501 - DNA, 25 bp, Artificial
  probe
  misc_feature (1)..(25): SEQ ID NO: 4158; WAN024FPA_at; Start 275; Stop 299
caaatgatatcggaaaggatgttcc

SEQ ID NO: 215502 - DNA, 25 bp, Artificial
  probe
  misc_feature (1)..(25): SEQ ID NO: 4158; WAN024FPA_at; Start 252; Stop 276
taaaatttttcttctgattgggaca

SEQ ID NO: 215503 - DNA, 25 bp, Artificial
  probe
  misc_feature (1)..(25): SEQ ID NO: 4158; WAN024FPA_at; Start 168; Stop 192
gattgtcaatcgaggaattcgtggc

SEQ ID NO: 215504 - DNA, 25 bp, Artificial
  probe
  misc_feature (1)..(25): SEQ ID NO: 4158; WAN024FPA_at; Start 572; Stop 596
gactgcacctcagtattgctggtta

SEQ ID NO: 215505 - DNA, 25 bp, Artificial
  probe
  misc_feature (1)..(25): SEQ ID NO: 4158; WAN024FPA_at; Start 328; Stop 352
gctatcattcaatccgttgctcgcg

SEQ ID NO: 215506 - DNA, 25 bp, Artificial
  probe
  misc_feature (1)..(25): SEQ ID NO: 4158; WAN024FPA_at; Start 126; Stop 150
cgagtattatcctctacaggagcta

SEQ ID NO: 215507 - DNA, 25 bp, Artificial
  probe
  misc_feature (1)..(25): SEQ ID NO: 4158; WAN024FPA_at; Start 17; Stop 41
tagaaaattggctcctaaaggaaca

SEQ ID NO: 215508 - DNA, 25 bp, Artificial
  probe
  misc_feature (1)..(25): SEQ ID NO: 4158; WAN024FPA_at; Start 509; Stop 533
tgccagtatttgattgtttgacaga

SEQ ID NO: 215509 - DNA, 25 bp, Artificial
  probe
  misc_feature (1)..(25): SEQ ID NO: 4158; WAN024FPA_at; Start 61; Stop 85
tatcgtcacctaaatcacatttctg

SEQ ID NO: 215510 - DNA, 25 bp, Artificial
  probe
  misc_feature (1)..(25): SEQ ID NO: 4158; WAN024FPA_at; Start 459; Stop 483
gaatcaagcctatcaagagcttgca

SEQ ID NO: 215511 - DNA, 25 bp, Artificial
  probe
  misc_feature (1)..(25): SEQ ID NO: 4158; WAN024FPA_at; Start 429; Stop 453
tatccgctcgaatgaaaaaattcag

SEQ ID NO: 215512 - DNA, 25 bp, Artificial
  probe
  misc_feature (1)..(25): SEQ ID NO: 4158; WAN024FPA_at; Start 182; Stop 206
gaattcgtggctatcagacaggact

SEQ ID NO: 215513 - DNA, 25 bp, Artificial
  probe
  misc_feature (1)..(25): SEQ ID NO: 4158; WAN024FPA_at; Start 138; Stop 162
tctacaggagctatttgggacttca

SEQ ID NO: 215514 - DNA, 25 bp, Artificial
  probe
  misc_feature (1)..(25): SEQ ID NO: 4158; WAN024FPA_at; Start 264; Stop 288
tctgattgggacaaatgatatcgga

SEQ ID NO: 215515 - DNA, 25 bp, Artificial
  probe
  misc_feature (1)..(25): SEQ ID NO: 4158; WAN024FPA_at; Start 535; Stop 559
caagcaggccaactcaaaaaagaat

SEQ ID NO: 215516 - DNA, 25 bp, Artificial
  probe
  misc_feature (1)..(25): SEQ ID NO: 4158; WAN024FPA_at; Start 4; Stop 28
gcagtacagttattagaaaattggc

SEQ ID NO: 215517 - DNA, 25 bp, Artificial
  probe
  misc_feature (1)..(25): SEQ ID NO: 4158; WAN024FPA_at; Start 417; Stop 441
gcaggcagtctatatccgctcgaat

SEQ ID NO: 215518 - DNA, 25 bp, Artificial
  probe
  misc_feature (1)..(25): SEQ ID NO: 4158; WAN024FPA_at; Start 209; Stop 233
tactagagaaccttgatgctcatct

SEQ ID NO: 215519 - DNA, 25 bp, Artificial
  probe
  misc_feature (1)..(25): SEQ ID NO: 4158; WAN024FPA_at; Start 373; Stop 397
aaattgctttccattttgcctgtca

SEQ ID NO: 215520 - DNA, 25 bp, Artificial
  probe
  misc_feature (1)..(25): SEQ ID NO: 4158; WAN024FPA_at; Start 153; Stop 177
tgggacttcaaagacgattgtcaat

SEQ ID NO: 215521 - DNA, 25 bp, Artificial
  probe
  misc_feature (1)..(25): SEQ ID NO: 4158; WAN024FPA_at; Start 343; Stop 367
gttgctcgcgattatccattgacag

SEQ ID NO: 215522 - DNA, 25 bp, Artificial
  probe
  misc_feature (1)..(25): SEQ ID NO: 4158; WAN024FPA_at; Start 285; Stop 309
cggaaaggatgttcctgtgaatgag

SEQ ID NO: 215523 - DNA, 25 bp, Artificial
  probe
  misc_feature (1)..(25): SEQ ID NO: 6362; WAN024FPB_at; Start 679; Stop 703
aaagctcttctcaaatctaaaaaag

SEQ ID NO: 215524 - DNA, 25 bp, Artificial
  probe
  misc_feature (1)..(25): SEQ ID NO: 6362; WAN024FPB_at; Start 52; Stop 76
gatataccgaaacaatttatacatg

SEQ ID NO: 215525 - DNA, 25 bp, Artificial
  probe
  misc_feature (1)..(25): SEQ ID NO: 6362; WAN024FPB_at; Start 395; Stop 419
cagtggctgcaattccttgtgttga

SEQ ID NO: 215526 - DNA, 25 bp, Artificial
  probe
  misc_feature (1)..(25): SEQ ID NO: 6362; WAN024FPB_at; Start 244; Stop 268
ggtcagttatctatctataatggtc

SEQ ID NO: 215527 - DNA, 25 bp, Artificial
  probe
  misc_feature (1)..(25): SEQ ID NO: 6362; WAN024FPB_at; Start 190; Stop 214
gctagacagtttaatattacgaaac

SEQ ID NO: 215528 - DNA, 25 bp, Artificial
  probe
  misc_feature (1)..(25): SEQ ID NO: 6362; WAN024FPB_at; Start 381; Stop 405
tagatatggaaatgcagtggctgca

SEQ ID NO: 215529 - DNA, 25 bp, Artificial
  probe
  misc_feature (1)..(25): SEQ ID NO: 6362; WAN024FPB_at; Start 282; Stop 306
gaaaaataatatagatcggcaagtg

SEQ ID NO: 215530 - DNA, 25 bp, Artificial
  probe
  misc_feature (1)..(25): SEQ ID NO: 6362; WAN024FPB_at; Start 574; Stop 598
gcagcttcctgtgaattaatgaaga

SEQ ID NO: 215531 - DNA, 25 bp, Artificial
  probe
  misc_feature (1)..(25): SEQ ID NO: 6362; WAN024FPB_at; Start 488; Stop 512
ggagaacgcagacaccacatgttta

SEQ ID NO: 215532 - DNA, 25 bp, Artificial
  probe
  misc_feature (1)..(25): SEQ ID NO: 6362; WAN024FPB_at; Start 365; Stop 389
cgttttcaacgtatagtagatatgg

SEQ ID NO: 215533 - DNA, 25 bp, Artificial
  probe
  misc_feature (1)..(25): SEQ ID NO: 6362; WAN024FPB_at; Start 158; Stop 182
taaaaggctgggaagaaatgttgaa

SEQ ID NO: 215534 - DNA, 25 bp, Artificial
  probe
  misc_feature (1)..(25): SEQ ID NO: 6362; WAN024FPB_at; Start 69; Stop 93
tatacatgttgacaataagccactc

SEQ ID NO: 215535 - DNA, 25 bp, Artificial
  probe
  misc_feature (1)..(25): SEQ ID NO: 6362; WAN024FPB_at; Start 327; Stop 351
taatcgaccgatggtaagcaacgaa

SEQ ID NO: 215536 - DNA, 25 bp, Artificial
  probe
  misc_feature (1)..(25): SEQ ID NO: 6362; WAN024FPB_at; Start 560; Stop 584
gaataactgaggttgcagcttcctg

SEQ ID NO: 215537 - DNA, 25 bp, Artificial
  probe
  misc_feature (1)..(25): SEQ ID NO: 6362; WAN024FPB_at; Start 298; Stop 322
cggcaagtgactgttttaattcatg

SEQ ID NO: 215538 - DNA, 25 bp, Artificial
  probe
  misc_feature (1)..(25): SEQ ID NO: 6362; WAN024FPB_at; Start 17; Stop 41
tgacagcgtcaggaataggaagccg

SEQ ID NO: 215539 - DNA, 25 bp, Artificial
  probe
  misc_feature (1)..(25): SEQ ID NO: 6362; WAN024FPB_at; Start 229; Stop 253
aatggcggagaaactggtcagttat

SEQ ID NO: 215540 - DNA, 25 bp, Artificial
  probe
  misc_feature (1)..(25): SEQ ID NO: 6362; WAN024FPB_at; Start 478; Stop 502
gagttattgaggagaacgcagacac

SEQ ID NO: 215541 - DNA, 25 bp, Artificial
  probe
  misc_feature (1)..(25): SEQ ID NO: 6362; WAN024FPB_at; Start 124; Stop 148
catccaaacattgatgaaatttgtg

SEQ ID NO: 215542 - DNA, 25 bp, Artificial
  probe
  misc_feature (1)..(25): SEQ ID NO: 6362; WAN024FPB_at; Start 215; Stop 239
taaaatatatagtaaatggcggaga

SEQ ID NO: 215543 - DNA, 25 bp, Artificial
  probe
  misc_feature (1)..(25): SEQ ID NO: 6362; WAN024FPB_at; Start 38; Stop 62
gccgaataaaacaagatataccgaa

SEQ ID NO: 215544 - DNA, 25 bp, Artificial
  probe
  misc_feature (1)..(25): SEQ ID NO: 6362; WAN024FPB_at; Start 527; Stop 551
tactagaacttcataacagagcttt

SEQ ID NO: 215545 - DNA, 25 bp, Artificial
  probe
  misc_feature (1)..(25): SEQ ID NO: 6362; WAN024FPB_at; Start 2; Stop 26
tgaaaattgcactactgacagcgtc

SEQ ID NO: 215546 - DNA, 25 bp, Artificial
  probe
  misc_feature (1)..(25): SEQ ID NO: 6362; WAN024FPB_at; Start 434; Stop 458
tagataatgagactgaaaatcattc

SEQ ID NO: 215547 - DNA, 25 bp, Artificial
  probe
  misc_feature (1)..(25): SEQ ID NO: 6362; WAN024FPB_at; Start 545; Stop 569
gagctttagaaaatggaataactga

SEQ ID NO: 215548 - DNA, 25 bp, Artificial
  probe
  misc_feature (1)..(25): SEQ ID NO: 6362; WAN024FPB_at; Start 176; Stop 200
tgttgaaaacatatgctagacagtt

SEQ ID NO: 215549 - DNA, 25 bp, Artificial
  probe
  misc_feature (1)..(25): SEQ ID NO: 6362; WAN024FPB_at; Start 650; Stop 674
taacgaccttagatgatttagaaat

SEQ ID NO: 215550 - DNA, 25 bp, Artificial
  probe
  misc_feature (1)..(25): SEQ ID NO: 6362; WAN024FPB_at; Start 335; Stop 359
cgatggtaagcaacgaaatcattga

SEQ ID NO: 215551 - DNA, 25 bp, Artificial
  probe
  misc_feature (1)..(25): SEQ ID NO: 6362; WAN024FPB_at; Start 87; Stop 111
gccactcatcattcatacgctagaa

SEQ ID NO: 215552 - DNA, 25 bp, Artificial
  probe
  misc_feature (1)..(25): SEQ ID NO: 6362; WAN024FPB_at; Start 351; Stop 375
aatcattgatgatgcgttttcaacg

SEQ ID NO: 215553 - DNA, 25 bp, Artificial
  probe
  misc_feature (1)..(25): SEQ ID NO: 6362; WAN024FPB_at; Start 25; Stop 49
tcaggaataggaagccgaataaaac

SEQ ID NO: 215554 - DNA, 25 bp, Artificial
  probe
  misc_feature (1)..(25): SEQ ID NO: 6362; WAN024FPB_at; Start 145; Stop 169
tgtgtagtagtattaaaaggctggg

SEQ ID NO: 215555 - DNA, 25 bp, Artificial
  probe
  misc_feature (1)..(25): SEQ ID NO: 6362; WAN024FPB_at; Start 314; Stop 338
taattcatgatggtaatcgaccgat

SEQ ID NO: 215556 - DNA, 25 bp, Artificial
  probe
  misc_feature (1)..(25): SEQ ID NO: 6362; WAN024FPB_at; Start 593; Stop 617
tgaagatgttcggaaaagaaacgta

SEQ ID NO: 215557 - DNA, 25 bp, Artificial
  probe
  misc_feature (1)..(25): SEQ ID NO: 922; WAN024FPC_at; Start 215; Stop 239
taaagatgataactttgggagggaa

SEQ ID NO: 215558 - DNA, 25 bp, Artificial
  probe
  misc_feature (1)..(25): SEQ ID NO: 922; WAN024FPC_at; Start 96; Stop 120
tatctatacccttgaaaaatttcaa

SEQ ID NO: 215559 - DNA, 25 bp, Artificial
  probe
  misc_feature (1)..(25): SEQ ID NO: 922; WAN024FPC_at; Start 471; Stop 495
gaatcgtgacttgttgagacgaaca

SEQ ID NO: 215560 - DNA, 25 bp, Artificial
  probe
  misc_feature (1)..(25): SEQ ID NO: 922; WAN024FPC_at; Start 525; Stop 549
tattctatcgcttcatgaaaaagca

SEQ ID NO: 215561 - DNA, 25 bp, Artificial
  probe
  misc_feature (1)..(25): SEQ ID NO: 922; WAN024FPC_at; Start 244; Stop 268
ggtcaagaatcaatttataacggtc

SEQ ID NO: 215562 - DNA, 25 bp, Artificial
  probe
  misc_feature (1)..(25): SEQ ID NO: 922; WAN024FPC_at; Start 511; Stop 535
taccatcttgataatattctatcgc

SEQ ID NO: 215563 - DNA, 25 bp, Artificial
  probe
  misc_feature (1)..(25): SEQ ID NO: 922; WAN024FPC_at; Start 486; Stop 510
gagacgaacacaaactcctcatgtt

SEQ ID NO: 215564 - DNA, 25 bp, Artificial
  probe
  misc_feature (1)..(25): SEQ ID NO: 922; WAN024FPC_at; Start 466; Stop 490
gcattgaatcgtgacttgttgagac

SEQ ID NO: 215565 - DNA, 25 bp, Artificial
  probe
  misc_feature (1)..(25): SEQ ID NO: 922; WAN024FPC_at; Start 219; Stop 243
gatgataactttgggagggaagtct

SEQ ID NO: 215566 - DNA, 25 bp, Artificial
  probe
  misc_feature (1)..(25): SEQ ID NO: 922; WAN024FPC_at; Start 407; Stop 431
taccaacgactgaggtagtatttgt

SEQ ID NO: 215567 - DNA, 25 bp, Artificial
  probe
  misc_feature (1)..(25): SEQ ID NO: 922; WAN024FPC_at; Start 644; Stop 668
tgaaaattacgactgtagaagatct

SEQ ID NO: 215568 - DNA, 25 bp, Artificial
  probe
  misc_feature (1)..(25): SEQ ID NO: 922; WAN024FPC_at; Start 640; Stop 664
aacttgaaaattacgactgtagaag

SEQ ID NO: 215569 - DNA, 25 bp, Artificial
  probe
  misc_feature (1)..(25): SEQ ID NO: 922; WAN024FPC_at; Start 57; Stop 81
ccctaaacaatttattcatgttgaa

SEQ ID NO: 215570 - DNA, 25 bp, Artificial
  probe
  misc_feature (1)..(25): SEQ ID NO: 922; WAN024FPC_at; Start 232; Stop 256
ggagggaagtctggtcaagaatcaa

SEQ ID NO: 215571 - DNA, 25 bp, Artificial
  probe
  misc_feature (1)..(25): SEQ ID NO: 922; WAN024FPC_at; Start 457; Stop 481
tccacagaagcattgaatcgtgact

SEQ ID NO: 215572 - DNA, 25 bp, Artificial
  probe
  misc_feature (1)..(25): SEQ ID NO: 922; WAN024FPC_at; Start 563; Stop 587
taactgatgttgcagcatcatgcca

SEQ ID NO: 215573 - DNA, 25 bp, Artificial
  probe
  misc_feature (1)..(25): SEQ ID NO: 922; WAN024FPC_at; Start 481; Stop 505
ttgttgagacgaacacaaactcctc

SEQ ID NO: 215574 - DNA, 25 bp, Artificial
  probe
  misc_feature (1)..(25): SEQ ID NO: 922; WAN024FPC_at; Start 292; Stop 316
cccaatgaggatgtgactgtattaa

SEQ ID NO: 215575 - DNA, 25 bp, Artificial
  probe
  misc_feature (1)..(25): SEQ ID NO: 922; WAN024FPC_at; Start 538; Stop 562
catgaaaaagcattagaaaatggga

SEQ ID NO: 215576 - DNA, 25 bp, Artificial
  probe
  misc_feature (1)..(25): SEQ ID NO: 922; WAN024FPC_at; Start 555; Stop 579
aaatgggataactgatgttgcagca

SEQ ID NO: 215577 - DNA, 25 bp, Artificial
  probe
  misc_feature (1)..(25): SEQ ID NO: 922; WAN024FPC_at; Start 250; Stop 274
gaatcaatttataacggtcttagag

SEQ ID NO: 215578 - DNA, 25 bp, Artificial
  probe
  misc_feature (1)..(25): SEQ ID NO: 922; WAN024FPC_at; Start 123; Stop 147
tcatccagaaattgatgaaatctgt

SEQ ID NO: 215579 - DNA, 25 bp, Artificial
  probe
  misc_feature (1)..(25): SEQ ID NO: 922; WAN024FPC_at; Start 570; Stop 594
tgttgcagcatcatgccaactcatg

SEQ ID NO: 215580 - DNA, 25 bp, Artificial
  probe
  misc_feature (1)..(25): SEQ ID NO: 922; WAN024FPC_at; Start 301; Stop 325
gatgtgactgtattaattcatgacg

SEQ ID NO: 215581 - DNA, 25 bp, Artificial
  probe
  misc_feature (1)..(25): SEQ ID NO: 922; WAN024FPC_at; Start 497; Stop 521
aaactcctcatgtttaccatcttga

SEQ ID NO: 215582 - DNA, 25 bp, Artificial
  probe
  misc_feature (1)..(25): SEQ ID NO: 922; WAN024FPC_at; Start 45; Stop 69
tggtcaagatatccctaaacaattt

SEQ ID NO: 215583 - DNA, 25 bp, Artificial
  probe
  misc_feature (1)..(25): SEQ ID NO: 922; WAN024FPC_at; Start 577; Stop 601
gcatcatgccaactcatgcaactat

SEQ ID NO: 215584 - DNA, 25 bp, Artificial
  probe
  misc_feature (1)..(25): SEQ ID NO: 922; WAN024FPC_at; Start 200; Stop 224
ttggaattacaaagttaaagatgat

SEQ ID NO: 215585 - DNA, 25 bp, Artificial
  probe
  misc_feature (1)..(25): SEQ ID NO: 922; WAN024FPC_at; Start 89; Stop 113
cagtcattatctatacccttgaaaa

SEQ ID NO: 215586 - DNA, 25 bp, Artificial
  probe
  misc_feature (1)..(25): SEQ ID NO: 922; WAN024FPC_at; Start 414; Stop 438
gactgaggtagtatttgttttagaa

SEQ ID NO: 215587 - DNA, 25 bp, Artificial
  probe
  misc_feature (1)..(25): SEQ ID NO: 922; WAN024FPC_at; Start 277; Stop 301
gttaagaaagctcatcccaatgagg

SEQ ID NO: 215588 - DNA, 25 bp, Artificial
  probe
  misc_feature (1)..(25): SEQ ID NO: 922; WAN024FPC_at; Start 282; Stop 306
gaaagctcatcccaatgaggatgtg

SEQ ID NO: 215589 - DNA, 25 bp, Artificial
  probe
  misc_feature (1)..(25): SEQ ID NO: 922; WAN024FPC_at; Start 189; Stop 213
tgcggaacaatttggaattacaaag

SEQ ID NO: 215590 - DNA, 25 bp, Artificial
  probe
  misc_feature (1)..(25): SEQ ID NO: 922; WAN024FPC_at; Start 184; Stop 208
gcttatgcggaacaatttggaatta

SEQ ID NO: 215591 - DNA, 25 bp, Artificial
  probe
  misc_feature (1)..(25): SEQ ID NO: 1790; WAN024FPD_at; Start 47; Stop 71
taatgttggcaacaaacggcgtgaa

SEQ ID NO: 215592 - DNA, 25 bp, Artificial
  probe
  misc_feature (1)..(25): SEQ ID NO: 1790; WAN024FPD_at; Start 844; Stop 868
gctgccatgccagaatttgtattaa

SEQ ID NO: 215593 - DNA, 25 bp, Artificial
  probe
  misc_feature (1)..(25): SEQ ID NO: 1790; WAN024FPD_at; Start 641; Stop 665
tcgctaacgaattagcacagatctg

SEQ ID NO: 215594 - DNA, 25 bp, Artificial
  probe
  misc_feature (1)..(25): SEQ ID NO: 1790; WAN024FPD_at; Start 277; Stop 301
tatgtgattgaagctacgaaaacgg

SEQ ID NO: 215595 - DNA, 25 bp, Artificial
  probe
  misc_feature (1)..(25): SEQ ID NO: 1790; WAN024FPD_at; Start 625; Stop 649
gctgtaaatattgctttcgctaacg

SEQ ID NO: 215596 - DNA, 25 bp, Artificial
  probe
  misc_feature (1)..(25): SEQ ID NO: 1790; WAN024FPD_at; Start 514; Stop 538
gaaatcggctataaagtgaaagagc

SEQ ID NO: 215597 - DNA, 25 bp, Artificial
  probe
  misc_feature (1)..(25): SEQ ID NO: 1790; WAN024FPD_at; Start 450; Stop 474
tattccagggaatatggtctatgaa

SEQ ID NO: 215598 - DNA, 25 bp, Artificial
  probe
  misc_feature (1)..(25): SEQ ID NO: 1790; WAN024FPD_at; Start 826; Stop 850
cattctatgcgaacaaatgctgcca

SEQ ID NO: 215599 - DNA, 25 bp, Artificial
  probe
  misc_feature (1)..(25): SEQ ID NO: 1790; WAN024FPD_at; Start 306; Stop 330
tgataattgcaataaaggagcggtt

SEQ ID NO: 215600 - DNA, 25 bp, Artificial
  probe
  misc_feature (1)..(25): SEQ ID NO: 1790; WAN024FPD_at; Start 989; Stop 1013
tagaatctatgagccgccatctggc

SEQ ID NO: 215601 - DNA, 25 bp, Artificial
  probe
  misc_feature (1)..(25): SEQ ID NO: 1790; WAN024FPD_at; Start 954; Stop 978
agatgatatgcgtgaatctccaacg

SEQ ID NO: 215602 - DNA, 25 bp, Artificial
  probe
  misc_feature (1)..(25): SEQ ID NO: 1790; WAN024FPD_at; Start 1050; Stop 1074
aaaagatgttgtggcgaatcagtca

SEQ ID NO: 215603 - DNA, 25 bp, Artificial
  probe
  misc_feature (1)..(25): SEQ ID NO: 1790; WAN024FPD_at; Start 486; Stop 510
taaccgtacaattggagctgatgac

SEQ ID NO: 215604 - DNA, 25 bp, Artificial
  probe
  misc_feature (1)..(25): SEQ ID NO: 1790; WAN024FPD_at; Start 88; Stop 112
tacaatcaggatttggtgagaactt

SEQ ID NO: 215605 - DNA, 25 bp, Artificial
  probe
  misc_feature (1)..(25): SEQ ID NO: 1790; WAN024FPD_at; Start 930; Stop 954
tggtcttacctacaaagagaatgta

SEQ ID NO: 215606 - DNA, 25 bp, Artificial
  probe
  misc_feature (1)..(25): SEQ ID NO: 1790; WAN024FPD_at; Start 1004; Stop 1028
gccatctggcaacacctgctattaa

SEQ ID NO: 215607 - DNA, 25 bp, Artificial
  probe
  misc_feature (1)..(25): SEQ ID NO: 1790; WAN024FPD_at; Start 725; Stop 749
taaatattctacaacctggacctgg

SEQ ID NO: 215608 - DNA, 25 bp, Artificial
  probe
  misc_feature (1)..(25): SEQ ID NO: 1790; WAN024FPD_at; Start 967; Stop 991
gaatctccaacgcttcagttattag

SEQ ID NO: 215609 - DNA, 25 bp, Artificial
  probe
  misc_feature (1)..(25): SEQ ID NO: 1790; WAN024FPD_at; Start 292; Stop 316
acgaaaacggtacttgataattgca

SEQ ID NO: 215610 - DNA, 25 bp, Artificial
  probe
  misc_feature (1)..(25): SEQ ID NO: 1790; WAN024FPD_at; Start 339; Stop 363
tgaatcgaccgtatcaccaggaacg

SEQ ID NO: 215611 - DNA, 25 bp, Artificial
  probe
  misc_feature (1)..(25): SEQ ID NO: 1790; WAN024FPD_at; Start 435; Stop 459
tgctccagaacgtattattccaggg

SEQ ID NO: 215612 - DNA, 25 bp, Artificial
  probe
  misc_feature (1)..(25): SEQ ID NO: 1790; WAN024FPD_at; Start 1115; Stop 1139
tactgttggttggtcatgatgagat

SEQ ID NO: 215613 - DNA, 25 bp, Artificial
  probe
  misc_feature (1)..(25): SEQ ID NO: 1790; WAN024FPD_at; Start 131; Stop 155
cctttaaagaagatggattggatga

SEQ ID NO: 215614 - DNA, 25 bp, Artificial
  probe
  misc_feature (1)..(25): SEQ ID NO: 1790; WAN024FPD_at; Start 702; Stop 726
gatctgtaatatgcacccacgggta

SEQ ID NO: 215615 - DNA, 25 bp, Artificial
  probe
  misc_feature (1)..(25): SEQ ID NO: 1790; WAN024FPD_at; Start 895; Stop 919
catcatctaacagatattagtcggg

SEQ ID NO: 215616 - DNA, 25 bp, Artificial
  probe
  misc_feature (1)..(25): SEQ ID NO: 1790; WAN024FPD_at; Start 577; Stop 601
gatattagaactgcggagatgacca

SEQ ID NO: 215617 - DNA, 25 bp, Artificial
  probe
  misc_feature (1)..(25): SEQ ID NO: 1790; WAN024FPD_at; Start 367; Stop 391
gataaatttattcgacctgttgtag

SEQ ID NO: 215618 - DNA, 25 bp, Artificial
  probe
  misc_feature (1)..(25): SEQ ID NO: 1790; WAN024FPD_at; Start 418; Stop 442
gatattcatcttgtccatgctccag

SEQ ID NO: 215619 - DNA, 25 bp, Artificial
  probe
  misc_feature (1)..(25): SEQ ID NO: 1790; WAN024FPD_at; Start 793; Stop 817
ggagattatcctgagttgacaaatg

SEQ ID NO: 215620 - DNA, 25 bp, Artificial
  probe
  misc_feature (1)..(25): SEQ ID NO: 1790; WAN024FPD_at; Start 755; Stop 779
gtgggcattgtatttctgtggatcc

SEQ ID NO: 215621 - DNA, 25 bp, Artificial
  probe
  misc_feature (1)..(25): SEQ ID NO: 1790; WAN024FPD_at; Start 181; Stop 205
ggtgtggactttacaaccgaatatc

SEQ ID NO: 215622 - DNA, 25 bp, Artificial
  probe
  misc_feature (1)..(25): SEQ ID NO: 1790; WAN024FPD_at; Start 915; Stop 939
tcgggttggtctatatggtcttacc

SEQ ID NO: 215623 - DNA, 25 bp, Artificial
  probe
  misc_feature (1)..(25): SEQ ID NO: 1790; WAN024FPD_at; Start 74; Stop 98
tagttggaactgactacaatcagga

SEQ ID NO: 215624 - DNA, 25 bp, Artificial
  probe
  misc_feature (1)..(25): SEQ ID NO: 1790; WAN024FPD_at; Start 500; Stop 524
gagctgatgacctagaaatcggcta

SEQ ID NO: 215625 - DNA, 25 bp, Artificial
  probe
  misc_feature (1)..(25): SEQ ID NO: 1629; WAN024FPE_at; Start 1337; Stop 1361
taactgtaggtttatgtattgcgag

SEQ ID NO: 215626 - DNA, 25 bp, Artificial
  probe
  misc_feature (1)..(25): SEQ ID NO: 1629; WAN024FPE_at; Start 1073; Stop 1097
gacaaactggaaattgtacaaccat

SEQ ID NO: 215627 - DNA, 25 bp, Artificial
  probe
  misc_feature (1)..(25): SEQ ID NO: 1629; WAN024FPE_at; Start 688; Stop 712
tggaaaaatgtatatgctacctctg

SEQ ID NO: 215628 - DNA, 25 bp, Artificial
  probe
  misc_feature (1)..(25): SEQ ID NO: 1629; WAN024FPE_at; Start 62; Stop 86
cgagtgttttagctttcatagttag

SEQ ID NO: 215629 - DNA, 25 bp, Artificial
  probe
  misc_feature (1)..(25): SEQ ID NO: 1629; WAN024FPE_at; Start 703; Stop 727
gctacctctgttcgacaaatcttta

SEQ ID NO: 215630 - DNA, 25 bp, Artificial
  probe
  misc_feature (1)..(25): SEQ ID NO: 1629; WAN024FPE_at; Start 1095; Stop 1119
catttttcgtttgggagaaggatat

SEQ ID NO: 215631 - DNA, 25 bp, Artificial
  probe
  misc_feature (1)..(25): SEQ ID NO: 1629; WAN024FPE_at; Start 176; Stop 200
tagggatcggatcatcaattgctta

SEQ ID NO: 215632 - DNA, 25 bp, Artificial
  probe
  misc_feature (1)..(25): SEQ ID NO: 1629; WAN024FPE_at; Start 991; Stop 1015
ccttttatcactatttggattggag

SEQ ID NO: 215633 - DNA, 25 bp, Artificial
  probe
  misc_feature (1)..(25): SEQ ID NO: 1629; WAN024FPE_at; Start 1035; Stop 1059
tacaggtgtgattgcaatagttggt

SEQ ID NO: 215634 - DNA, 25 bp, Artificial
  probe
  misc_feature (1)..(25): SEQ ID NO: 1629; WAN024FPE_at; Start 191; Stop 215
caattgcttatttgatgtacaaacc

SEQ ID NO: 215635 - DNA, 25 bp, Artificial
  probe
  misc_feature (1)..(25): SEQ ID NO: 1629; WAN024FPE_at; Start 355; Stop 379
gcagaagatttgaactatacagcat

SEQ ID NO: 215636 - DNA, 25 bp, Artificial
  probe
  misc_feature (1)..(25): SEQ ID NO: 1629; WAN024FPE_at; Start 210; Stop 234
caaacctttagcagaaaaagatggg

SEQ ID NO: 215637 - DNA, 25 bp, Artificial
  probe
  misc_feature (1)..(25): SEQ ID NO: 1629; WAN024FPE_at; Start 313; Stop 337
tgtctcgttccttttttaccagtca

SEQ ID NO: 215638 - DNA, 25 bp, Artificial
  probe
  misc_feature (1)..(25): SEQ ID NO: 1629; WAN024FPE_at; Start 44; Stop 68
tagttggtactatcatatcgagtgt

SEQ ID NO: 215639 - DNA, 25 bp, Artificial
  probe
  misc_feature (1)..(25): SEQ ID NO: 1629; WAN024FPE_at; Start 1372; Stop 1396
tctcgattggttagagtgaatagta

SEQ ID NO: 215640 - DNA, 25 bp, Artificial
  probe
  misc_feature (1)..(25): SEQ ID NO: 1629; WAN024FPE_at; Start 98; Stop 122
tccgagttttgggagagacttatct

SEQ ID NO: 215641 - DNA, 25 bp, Artificial
  probe
  misc_feature (1)..(25): SEQ ID NO: 1629; WAN024FPE_at; Start 120; Stop 144
tctaggtttcaatggtctatacacc

SEQ ID NO: 215642 - DNA, 25 bp, Artificial
  probe
  misc_feature (1)..(25): SEQ ID NO: 1629; WAN024FPE_at; Start 864; Stop 888
ggcttctattggaaacctatctctg

SEQ ID NO: 215643 - DNA, 25 bp, Artificial
  probe
  misc_feature (1)..(25): SEQ ID NO: 1629; WAN024FPE_at; Start 78; Stop 102
catagttagaacagtgtttatccga

SEQ ID NO: 215644 - DNA, 25 bp, Artificial
  probe
  misc_feature (1)..(25): SEQ ID NO: 1629; WAN024FPE_at; Start 1281; Stop 1305
agtacttagtcgtccactatcagag

SEQ ID NO: 215645 - DNA, 25 bp, Artificial
  probe
  misc_feature (1)..(25): SEQ ID NO: 1629; WAN024FPE_at; Start 1220; Stop 1244
gaacaatgttaggatttggtttcca

SEQ ID NO: 215646 - DNA, 25 bp, Artificial
  probe
  misc_feature (1)..(25): SEQ ID NO: 1629; WAN024FPE_at; Start 661; Stop 685
cttccaaaaatggaaagacgactag

SEQ ID NO: 215647 - DNA, 25 bp, Artificial
  probe
  misc_feature (1)..(25): SEQ ID NO: 1629; WAN024FPE_at; Start 233; Stop 257
gggacaaattagctcaagtagttca

SEQ ID NO: 215648 - DNA, 25 bp, Artificial
  probe
  misc_feature (1)..(25): SEQ ID NO: 1629; WAN024FPE_at; Start 1007; Stop 1031
ggattggagaaaattacactttatc

SEQ ID NO: 215649 - DNA, 25 bp, Artificial
  probe
  misc_feature (1)..(25): SEQ ID NO: 1629; WAN024FPE_at; Start 961; Stop 985
tgctcaagttgtcttctagtattgg

SEQ ID NO: 215650 - DNA, 25 bp, Artificial
  probe
  misc_feature (1)..(25): SEQ ID NO: 1629; WAN024FPE_at; Start 785; Stop 809
tggttggtaagtattcgaactatgc

SEQ ID NO: 215651 - DNA, 25 bp, Artificial
  probe
  misc_feature (1)..(25): SEQ ID NO: 1629; WAN024FPE_at; Start 133; Stop 157
ggtctatacaccaatatcttaacag

SEQ ID NO: 215652 - DNA, 25 bp, Artificial
  probe
  misc_feature (1)..(25): SEQ ID NO: 1629; WAN024FPE_at; Start 1322; Stop 1346
tgcagacgatcttattaactgtagg

SEQ ID NO: 215653 - DNA, 25 bp, Artificial
  probe
  misc_feature (1)..(25): SEQ ID NO: 1629; WAN024FPE_at; Start 856; Stop 880
ccgattcaggcttctattggaaacc

SEQ ID NO: 215654 - DNA, 25 bp, Artificial
  probe
  misc_feature (1)..(25): SEQ ID NO: 1629; WAN024FPE_at; Start 1248; Stop 1272
tatactggtggatacaattgttact

SEQ ID NO: 215655 - DNA, 25 bp, Artificial
  probe
  misc_feature (1)..(25): SEQ ID NO: 1629; WAN024FPE_at; Start 1132; Stop 1156
catttttctcctttaatcgcgggca

SEQ ID NO: 215656 - DNA, 25 bp, Artificial
  probe
  misc_feature (1)..(25): SEQ ID NO: 1629; WAN024FPE_at; Start 1308; Stop 1332
ttatttaagatggttgcagacgatc

SEQ ID NO: 215657 - DNA, 25 bp, Artificial
  probe
  misc_feature (1)..(25): SEQ ID NO: 1629; WAN024FPE_at; Start 1058; Stop 1082
gtatgttattcgttagacaaactgg

SEQ ID NO: 215658 - DNA, 25 bp, Artificial
  probe
  misc_feature (1)..(25): SEQ ID NO: 1629; WAN024FPE_at; Start 842; Stop 866
gaggaatttttaatccgattcaggc

SEQ ID NO: 215659 - DNA, 25 bp, Artificial
  probe
  misc_feature (1)..(25): SEQ ID NO: 793; WAN024FPF_at; Start 1015; Stop 1039
gatgagtgtatagttgaacacctca

SEQ ID NO: 215660 - DNA, 25 bp, Artificial
  probe
  misc_feature (1)..(25): SEQ ID NO: 793; WAN024FPF_at; Start 881; Stop 905
ttccatctatttgggaggaaccagc

SEQ ID NO: 215661 - DNA, 25 bp, Artificial
  probe
  misc_feature (1)..(25): SEQ ID NO: 793; WAN024FPF_at; Start 934; Stop 958
tcagggaaatatgttattacaacag

SEQ ID NO: 215662 - DNA, 25 bp, Artificial
  probe
  misc_feature (1)..(25): SEQ ID NO: 793; WAN024FPF_at; Start 319; Stop 343
gatacagttttgattgaaaatcgcc

SEQ ID NO: 215663 - DNA, 25 bp, Artificial
  probe
  misc_feature (1)..(25): SEQ ID NO: 793; WAN024FPF_at; Start 413; Stop 437
taatggacaatgagtattctgtaga

SEQ ID NO: 215664 - DNA, 25 bp, Artificial
  probe
  misc_feature (1)..(25): SEQ ID NO: 793; WAN024FPF_at; Start 713; Stop 737
taaaattactagctgttggtagttc

SEQ ID NO: 215665 - DNA, 25 bp, Artificial
  probe
  misc_feature (1)..(25): SEQ ID NO: 793; WAN024FPF_at; Start 581; Stop 605
tatcagatcttaaaaatcagttgga

SEQ ID NO: 215666 - DNA, 25 bp, Artificial
  probe
  misc_feature (1)..(25): SEQ ID NO: 793; WAN024FPF_at; Start 835; Stop 859
tacaaagacattcctaagtatcatc

SEQ ID NO: 215667 - DNA, 25 bp, Artificial
  probe
  misc_feature (1)..(25): SEQ ID NO: 793; WAN024FPF_at; Start 114; Stop 138
tcatgatgaaattacggtcgttagt

SEQ ID NO: 215668 - DNA, 25 bp, Artificial
  probe
  misc_feature (1)..(25): SEQ ID NO: 793; WAN024FPF_at; Start 912; Stop 936
gacggtctgtgaagctttgatatca

SEQ ID NO: 215669 - DNA, 25 bp, Artificial
  probe
  misc_feature (1)..(25): SEQ ID NO: 793; WAN024FPF_at; Start 1070; Stop 1094
ggaaatgctcttcggttattacttc

SEQ ID NO: 215670 - DNA, 25 bp, Artificial
  probe
  misc_feature (1)..(25): SEQ ID NO: 793; WAN024FPF_at; Start 779; Stop 803
tacggcaattggcaaaacaagcatc

SEQ ID NO: 215671 - DNA, 25 bp, Artificial
  probe
  misc_feature (1)..(25): SEQ ID NO: 793; WAN024FPF_at; Start 526; Stop 550
gtctataatggtattgacacagaac

SEQ ID NO: 215672 - DNA, 25 bp, Artificial
  probe
  misc_feature (1)..(25): SEQ ID NO: 793; WAN024FPF_at; Start 1029; Stop 1053
tgaacacctcaaaacagccctattg

SEQ ID NO: 215673 - DNA, 25 bp, Artificial
  probe
  misc_feature (1)..(25): SEQ ID NO: 793; WAN024FPF_at; Start 1150; Stop 1174
aaagagctcacacaaaatgaaagaa

SEQ ID NO: 215674 - DNA, 25 bp, Artificial
  probe
  misc_feature (1)..(25): SEQ ID NO: 793; WAN024FPF_at; Start 1042; Stop 1066
acagccctattgagtgtctaccaaa

SEQ ID NO: 215675 - DNA, 25 bp, Artificial
  probe
  misc_feature (1)..(25): SEQ ID NO: 793; WAN024FPF_at; Start 788; Stop 812
tggcaaaacaagcatcagataaagt

SEQ ID NO: 215676 - DNA, 25 bp, Artificial
  probe
  misc_feature (1)..(25): SEQ ID NO: 793; WAN024FPF_at; Start 819; Stop 843
tacaggctatgttaattacaaagac

SEQ ID NO: 215677 - DNA, 25 bp, Artificial
  probe
  misc_feature (1)..(25): SEQ ID NO: 793; WAN024FPF_at; Start 732; Stop 756
tagttctatatttggtcagacggag

SEQ ID NO: 215678 - DNA, 25 bp, Artificial
  probe
  misc_feature (1)..(25): SEQ ID NO: 793; WAN024FPF_at; Start 273; Stop 297
cgtagggaacgcttatatcagtcaa

SEQ ID NO: 215679 - DNA, 25 bp, Artificial
  probe
  misc_feature (1)..(25): SEQ ID NO: 793; WAN024FPF_at; Start 997; Stop 1021
gcccttgtggtagcaaatgatgagt

SEQ ID NO: 215680 - DNA, 25 bp, Artificial
  probe
  misc_feature (1)..(25): SEQ ID NO: 793; WAN024FPF_at; Start 748; Stop 772
cagacggagttggatactttcacaa

SEQ ID NO: 215681 - DNA, 25 bp, Artificial
  probe
  misc_feature (1)..(25): SEQ ID NO: 793; WAN024FPF_at; Start 333; Stop 357
tgaaaatcgccctgaatacggttat

SEQ ID NO: 215682 - DNA, 25 bp, Artificial
  probe
  misc_feature (1)..(25): SEQ ID NO: 793; WAN024FPF_at; Start 302; Stop 326
cagacttgtctggttttgatacagt

SEQ ID NO: 215683 - DNA, 25 bp, Artificial
  probe
  misc_feature (1)..(25): SEQ ID NO: 793; WAN024FPF_at; Start 60; Stop 84
gggagcagtagaaaatctcattgat

SEQ ID NO: 215684 - DNA, 25 bp, Artificial
  probe
  misc_feature (1)..(25): SEQ ID NO: 793; WAN024FPF_at; Start 663; Stop 687
tatcaaagaactgcttgaagccttc

SEQ ID NO: 215685 - DNA, 25 bp, Artificial
  probe
  misc_feature (1)..(25): SEQ ID NO: 793; WAN024FPF_at; Start 849; Stop 873
taagtatcatcatattgcagattgc

SEQ ID NO: 215686 - DNA, 25 bp, Artificial
  probe
  misc_feature (1)..(25): SEQ ID NO: 793; WAN024FPF_at; Start 1056; Stop 1080
tgtctaccaaaaagggaaatgctct

SEQ ID NO: 215687 - DNA, 25 bp, Artificial
  probe
  misc_feature (1)..(25): SEQ ID NO: 793; WAN024FPF_at; Start 4; Stop 28
aaaatttgcattgtttcagtcggag

SEQ ID NO: 215688 - DNA, 25 bp, Artificial
  probe
  misc_feature (1)..(25): SEQ ID NO: 793; WAN024FPF_at; Start 134; Stop 158
ttagttgtgaccataaggaggcgcg

SEQ ID NO: 215689 - DNA, 25 bp, Artificial
  probe
  misc_feature (1)..(25): SEQ ID NO: 793; WAN024FPF_at; Start 35; Stop 59
gactaccgattccagctgtaaaagg

SEQ ID NO: 215690 - DNA, 25 bp, Artificial
  probe
  misc_feature (1)..(25): SEQ ID NO: 793; WAN024FPF_at; Start 288; Stop 312
tatcagtcaattgccagacttgtct

SEQ ID NO: 215691 - DNA, 25 bp, Artificial
  probe
  misc_feature (1)..(25): SEQ ID NO: 793; WAN024FPF_at; Start 505; Stop 529
tcaggtgttccgatacagactgtct

SEQ ID NO: 215692 - DNA, 25 bp, Artificial
  probe
  misc_feature (1)..(25): SEQ ID NO: 793; WAN024FPF_at; Start 148; Stop 172
aaggaggcgcgtgaggcttcaaaaa

SEQ ID NO: 215693 - DNA, 25 bp, Artificial
  probe
  misc_feature (1)..(25): SEQ ID NO: 741; WAN024FPG_at; Start 790; Stop 814
gagaaaagtttctcccaatctgaaa

SEQ ID NO: 215694 - DNA, 25 bp, Artificial
  probe
  misc_feature (1)..(25): SEQ ID NO: 741; WAN024FPG_at; Start 274; Stop 298
gctattaagggtctttctccagagg

SEQ ID NO: 215695 - DNA, 25 bp, Artificial
  probe
  misc_feature (1)..(25): SEQ ID NO: 741; WAN024FPG_at; Start 347; Stop 371
tagctcgaaagaaacttaattgcag

SEQ ID NO: 215696 - DNA, 25 bp, Artificial
  probe
  misc_feature (1)..(25): SEQ ID NO: 741; WAN024FPG_at; Start 331; Stop 355
gggattcgtctccttttagctcgaa

SEQ ID NO: 215697 - DNA, 25 bp, Artificial
  probe
  misc_feature (1)..(25): SEQ ID NO: 741; WAN024FPG_at; Start 562; Stop 586
tatgggtcggatacagcgttctttc

SEQ ID NO: 215698 - DNA, 25 bp, Artificial
  probe
  misc_feature (1)..(25): SEQ ID NO: 741; WAN024FPG_at; Start 492; Stop 516
tcggacgcaagatgataattatgtt

SEQ ID NO: 215699 - DNA, 25 bp, Artificial
  probe
  misc_feature (1)..(25): SEQ ID NO: 741; WAN024FPG_at; Start 825; Stop 849
gcgctttccgactcaaaaatatcaa

SEQ ID NO: 215700 - DNA, 25 bp, Artificial
  probe
  misc_feature (1)..(25): SEQ ID NO: 741; WAN024FPG_at; Start 719; Stop 743
agttaaatacggagcaaccaattgt

SEQ ID NO: 215701 - DNA, 25 bp, Artificial
  probe
  misc_feature (1)..(25): SEQ ID NO: 741; WAN024FPG_at; Start 456; Stop 480
tactcccattttgataaaagaacag

SEQ ID NO: 215702 - DNA, 25 bp, Artificial
  probe
  misc_feature (1)..(25): SEQ ID NO: 741; WAN024FPG_at; Start 528; Stop 552
gggaattcctttatcgcaagctcca

SEQ ID NO: 215703 - DNA, 25 bp, Artificial
  probe
  misc_feature (1)..(25): SEQ ID NO: 741; WAN024FPG_at; Start 698; Stop 722
tagcagagtctctaagtaaaaagtt

SEQ ID NO: 215704 - DNA, 25 bp, Artificial
  probe
  misc_feature (1)..(25): SEQ ID NO: 741; WAN024FPG_at; Start 1089; Stop 1113
gaatgcactgcactatatccttgaa

SEQ ID NO: 215705 - DNA, 25 bp, Artificial
  probe
  misc_feature (1)..(25): SEQ ID NO: 741; WAN024FPG_at; Start 478; Stop 502
cagataccaattattcggacgcaag

SEQ ID NO: 215706 - DNA, 25 bp, Artificial
  probe
  misc_feature (1)..(25): SEQ ID NO: 741; WAN024FPG_at; Start 594; Stop 618
tagccagattaaggaagattttcgt

SEQ ID NO: 215707 - DNA, 25 bp, Artificial
  probe
  misc_feature (1)..(25): SEQ ID NO: 741; WAN024FPG_at; Start 104; Stop 128
tcacttcagaaatggataaaatccc

SEQ ID NO: 215708 - DNA, 25 bp, Artificial
  probe
  misc_feature (1)..(25): SEQ ID NO: 741; WAN024FPG_at; Start 1037; Stop 1061
cattaaaaatgattgcgagtctaga

SEQ ID NO: 215709 - DNA, 25 bp, Artificial
  probe
  misc_feature (1)..(25): SEQ ID NO: 741; WAN024FPG_at; Start 762; Stop 786
tacaaatggagagtatggagaagct

SEQ ID NO: 215710 - DNA, 25 bp, Artificial
  probe
  misc_feature (1)..(25): SEQ ID NO: 741; WAN024FPG_at; Start 543; Stop 567
gcaagctccatggatttcttatggg

SEQ ID NO: 215711 - DNA, 25 bp, Artificial
  probe
  misc_feature (1)..(25): SEQ ID NO: 741; WAN024FPG_at; Start 578; Stop 602
cgttctttcacgcagatagccagat

SEQ ID NO: 215712 - DNA, 25 bp, Artificial
  probe
  misc_feature (1)..(25): SEQ ID NO: 741; WAN024FPG_at; Start 1060; Stop 1084
gataaagagaagagacaagagtact

SEQ ID NO: 215713 - DNA, 25 bp, Artificial
  probe
  misc_feature (1)..(25): SEQ ID NO: 741; WAN024FPG_at; Start 658; Stop 682
tacgcaggaaagttagatgagcata

SEQ ID NO: 215714 - DNA, 25 bp, Artificial
  probe
  misc_feature (1)..(25): SEQ ID NO: 741; WAN024FPG_at; Start 289; Stop 313
tctccagaggtattgtatattcatg

SEQ ID NO: 215715 - DNA, 25 bp, Artificial
  probe
  misc_feature (1)..(25): SEQ ID NO: 741; WAN024FPG_at; Start 679; Stop 703
cataagggtgggatgtttttagcag

SEQ ID NO: 215716 - DNA, 25 bp, Artificial
  probe
  misc_feature (1)..(25): SEQ ID NO: 741; WAN024FPG_at; Start 643; Stop 667
gctcttatttgtgtttacgcaggaa

SEQ ID NO: 215717 - DNA, 25 bp, Artificial
  probe
  misc_feature (1)..(25): SEQ ID NO: 741; WAN024FPG_at; Start 30; Stop 54
tcatccagatgcaggttaccagatt

SEQ ID NO: 215718 - DNA, 25 bp, Artificial
  probe
  misc_feature (1)..(25): SEQ ID NO: 741; WAN024FPG_at; Start 990; Stop 1014
taatggttggacgttcaaggctaac

SEQ ID NO: 215719 - DNA, 25 bp, Artificial
  probe
  misc_feature (1)..(25): SEQ ID NO: 741; WAN024FPG_at; Start 908; Stop 932
taagtttttatgatgcacaggcctg

SEQ ID NO: 215720 - DNA, 25 bp, Artificial
  probe
  misc_feature (1)..(25): SEQ ID NO: 741; WAN024FPG_at; Start 775; Stop 799
tatggagaagctgtcgagaaaagtt

SEQ ID NO: 215721 - DNA, 25 bp, Artificial
  probe
  misc_feature (1)..(25): SEQ ID NO: 741; WAN024FPG_at; Start 921; Stop 945
tgcacaggcctgtggtttaccagtt

SEQ ID NO: 215722 - DNA, 25 bp, Artificial
  probe
  misc_feature (1)..(25): SEQ ID NO: 741; WAN024FPG_at; Start 1075; Stop 1099
caagagtactctcagaatgcactgc

SEQ ID NO: 215723 - DNA, 25 bp, Artificial
  probe
  misc_feature (1)..(25): SEQ ID NO: 741; WAN024FPG_at; Start 179; Stop 203
gaagttacgaagagaagcatcatgt

SEQ ID NO: 215724 - DNA, 25 bp, Artificial
  probe
  misc_feature (1)..(25): SEQ ID NO: 741; WAN024FPG_at; Start 854; Stop 878
tagcacagttttttcaggtagcaga

SEQ ID NO: 215725 - DNA, 25 bp, Artificial
  probe
  misc_feature (1)..(25): SEQ ID NO: 741; WAN024FPG_at; Start 192; Stop 216
gaagcatcatgtgaagattattcgc

SEQ ID NO: 215726 - DNA, 25 bp, Artificial
  probe
  misc_feature (1)..(25): SEQ ID NO: 741; WAN024FPG_at; Start 242; Stop 266
gacgtgcgattttttctggaaagct

SEQ ID NO: 215727 - DNA, 25 bp, Artificial
  probe
  misc_feature (1)..(25): SEQ ID NO: 1730; WAN024FPH_at; Start 463; Stop 487
gccatgacagcttatatgattaatg

SEQ ID NO: 215728 - DNA, 25 bp, Artificial
  probe
  misc_feature (1)..(25): SEQ ID NO: 1730; WAN024FPH_at; Start 545; Stop 569
tctcagcgtggaattttattagata

SEQ ID NO: 215729 - DNA, 25 bp, Artificial
  probe
  misc_feature (1)..(25): SEQ ID NO: 1730; WAN024FPH_at; Start 957; Stop 981
gcatgatatgggaagttttggttta

SEQ ID NO: 215730 - DNA, 25 bp, Artificial
  probe
  misc_feature (1)..(25): SEQ ID NO: 1730; WAN024FPH_at; Start 1159; Stop 1183
tactacaggtggaaagtgcaggaaa

SEQ ID NO: 215731 - DNA, 25 bp, Artificial
  probe
  misc_feature (1)..(25): SEQ ID NO: 1730; WAN024FPH_at; Start 843; Stop 867
gatttatgatactgtttggtctgca

SEQ ID NO: 215732 - DNA, 25 bp, Artificial
  probe
  misc_feature (1)..(25): SEQ ID NO: 1730; WAN024FPH_at; Start 283; Stop 307
tcctttctgattcgtccagttcctg

SEQ ID NO: 215733 - DNA, 25 bp, Artificial
  probe
  misc_feature (1)..(25): SEQ ID NO: 1730; WAN024FPH_at; Start 1068; Stop 1092
gatgtttctagaagtatatgttcac

SEQ ID NO: 215734 - DNA, 25 bp, Artificial
  probe
  misc_feature (1)..(25): SEQ ID NO: 1730; WAN024FPH_at; Start 859; Stop 883
tggtctgcaatacaggaaaaaccct

SEQ ID NO: 215735 - DNA, 25 bp, Artificial
  probe
  misc_feature (1)..(25): SEQ ID NO: 1730; WAN024FPH_at; Start 994; Stop 1018
tcggctttctttgcttcttcagtaa

SEQ ID NO: 215736 - DNA, 25 bp, Artificial
  probe
  misc_feature (1)..(25): SEQ ID NO: 1730; WAN024FPH_at; Start 309; Stop 333
gatattagtagcgatgctgttagct

SEQ ID NO: 215737 - DNA, 25 bp, Artificial
  probe
  misc_feature (1)..(25): SEQ ID NO: 1730; WAN024FPH_at; Start 448; Stop 472
tctttatcttattatgccatgacag

SEQ ID NO: 215738 - DNA, 25 bp, Artificial
  probe
  misc_feature (1)..(25): SEQ ID NO: 1730; WAN024FPH_at; Start 324; Stop 348
gctgttagctaagaataatcatata

SEQ ID NO: 215739 - DNA, 25 bp, Artificial
  probe
  misc_feature (1)..(25): SEQ ID NO: 1730; WAN024FPH_at; Start 11; Stop 35
gaatttattatcaccttttggctat

SEQ ID NO: 215740 - DNA, 25 bp, Artificial
  probe
  misc_feature (1)..(25): SEQ ID NO: 1730; WAN024FPH_at; Start 758; Stop 782
catggctcttgaatatggacggtgg

SEQ ID NO: 215741 - DNA, 25 bp, Artificial
  probe
  misc_feature (1)..(25): SEQ ID NO: 1730; WAN024FPH_at; Start 392; Stop 416
cattgacatcatttttagcagccct

SEQ ID NO: 215742 - DNA, 25 bp, Artificial
  probe
  misc_feature (1)..(25): SEQ ID NO: 1730; WAN024FPH_at; Start 594; Stop 618
taatgcactctcaggaggtgggaga

SEQ ID NO: 215743 - DNA, 25 bp, Artificial
  probe
  misc_feature (1)..(25): SEQ ID NO: 1730; WAN024FPH_at; Start 792; Stop 816
gttgaacttcttcggcagacctgaa

SEQ ID NO: 215744 - DNA, 25 bp, Artificial
  probe
  misc_feature (1)..(25): SEQ ID NO: 1730; WAN024FPH_at; Start 43; Stop 67
tggactcttccaaattcttatgctt

SEQ ID NO: 215745 - DNA, 25 bp, Artificial
  probe
  misc_feature (1)..(25): SEQ ID NO: 1730; WAN024FPH_at; Start 502; Stop 526
tacaaagagaaaatattggaggagc

SEQ ID NO: 215746 - DNA, 25 bp, Artificial
  probe
  misc_feature (1)..(25): SEQ ID NO: 1730; WAN024FPH_at; Start 777; Stop 801
cggtggagagcgattgttgaacttc

SEQ ID NO: 215747 - DNA, 25 bp, Artificial
  probe
  misc_feature (1)..(25): SEQ ID NO: 1730; WAN024FPH_at; Start 1111; Stop 1135
tatcttgcagatggtagactatggt

SEQ ID NO: 215748 - DNA, 25 bp, Artificial
  probe
  misc_feature (1)..(25): SEQ ID NO: 1730; WAN024FPH_at; Start 1176; Stop 1200
gcaggaaaaggatgaagttagcaat

SEQ ID NO: 215749 - DNA, 25 bp, Artificial
  probe
  misc_feature (1)..(25): SEQ ID NO: 1730; WAN024FPH_at; Start 517; Stop 541
ttggaggagcaactgacgtatttca

SEQ ID NO: 215750 - DNA, 25 bp, Artificial
  probe
  misc_feature (1)..(25): SEQ ID NO: 1730; WAN024FPH_at; Start 1143; Stop 1167
gatctttacttattgttactacagg

SEQ ID NO: 215751 - DNA, 25 bp, Artificial
  probe
  misc_feature (1)..(25): SEQ ID NO: 1730; WAN024FPH_at; Start 1082; Stop 1106
tatatgttcacatgagtttcagtgg

SEQ ID NO: 215752 - DNA, 25 bp, Artificial
  probe
  misc_feature (1)..(25): SEQ ID NO: 1730; WAN024FPH_at; Start 531; Stop 555
gacgtatttcagattctcagcgtgg

SEQ ID NO: 215753 - DNA, 25 bp, Artificial
  probe
  misc_feature (1)..(25): SEQ ID NO: 1730; WAN024FPH_at; Start 359; Stop 383
taaaatggtcagaacctatgatgct

SEQ ID NO: 215754 - DNA, 25 bp, Artificial
  probe
  misc_feature (1)..(25): SEQ ID NO: 1730; WAN024FPH_at; Start 404; Stop 428
ttttagcagccctatctcctagaaa

SEQ ID NO: 215755 - DNA, 25 bp, Artificial
  probe
  misc_feature (1)..(25): SEQ ID NO: 1730; WAN024FPH_at; Start 1127; Stop 1151
gactatggtttttggtgatctttac

SEQ ID NO: 215756 - DNA, 25 bp, Artificial
  probe
  misc_feature (1)..(25): SEQ ID NO: 1730; WAN024FPH_at; Start 586; Stop 610
caagcttttaatgcactctcaggag

SEQ ID NO: 215757 - DNA, 25 bp, Artificial
  probe
  misc_feature (1)..(25): SEQ ID NO: 1730; WAN024FPH_at; Start 109; Stop 133
caaattgcaggttctcttttggctg

SEQ ID NO: 215758 - DNA, 25 bp, Artificial
  probe
  misc_feature (1)..(25): SEQ ID NO: 1730; WAN024FPH_at; Start 375; Stop 399
tatgatgcttttctatacattgaca

SEQ ID NO: 215759 - DNA, 25 bp, Artificial
  probe
  misc_feature (1)..(25): SEQ ID NO: 1730; WAN024FPH_at; Start 1096; Stop 1120
agtttcagtggaagctatcttgcag

SEQ ID NO: 215760 - DNA, 25 bp, Artificial
  probe
  misc_feature (1)..(25): SEQ ID NO: 1730; WAN024FPH_at; Start 347; Stop 371
taaaaggtttcataaaatggtcaga

SEQ ID NO: 215761 - DNA, 25 bp, Artificial
  probe
  misc_feature (1)..(25): SEQ ID NO: 1147; WAN024FPI_at; Start 505; Stop 529
gacatggattcacaaacagctaagt

SEQ ID NO: 215762 - DNA, 25 bp, Artificial
  probe
  misc_feature (1)..(25): SEQ ID NO: 1147; WAN024FPI_at; Start 577; Stop 601
caaaaaggttttgatctggctcttg

SEQ ID NO: 215763 - DNA, 25 bp, Artificial
  probe
  misc_feature (1)..(25): SEQ ID NO: 1147; WAN024FPI_at; Start 1004; Stop 1028
ttccagcagaagaattgtcaacaac

SEQ ID NO: 215764 - DNA, 25 bp, Artificial
  probe
  misc_feature (1)..(25): SEQ ID NO: 1147; WAN024FPI_at; Start 452; Stop 476
tttacaaagagaatcgtcctaaggc

SEQ ID NO: 215765 - DNA, 25 bp, Artificial
  probe
  misc_feature (1)..(25): SEQ ID NO: 1147; WAN024FPI_at; Start 144; Stop 168
actttcagatagagttcaggtgagc

SEQ ID NO: 215766 - DNA, 25 bp, Artificial
  probe
  misc_feature (1)..(25): SEQ ID NO: 1147; WAN024FPI_at; Start 818; Stop 842
tagaagctaaaaactgccagatgcc

SEQ ID NO: 215767 - DNA, 25 bp, Artificial
  probe
  misc_feature (1)..(25): SEQ ID NO: 1147; WAN024FPI_at; Start 210; Stop 234
taaagttagtggagctttgcgaaaa

SEQ ID NO: 215768 - DNA, 25 bp, Artificial
  probe
  misc_feature (1)..(25): SEQ ID NO: 1147; WAN024FPI_at; Start 44; Stop 68
gagtgcagcgtgtcacgacagctct

SEQ ID NO: 215769 - DNA, 25 bp, Artificial
  probe
  misc_feature (1)..(25): SEQ ID NO: 1147; WAN024FPI_at; Start 592; Stop 616
ctggctcttgaggtagctagtcaaa

SEQ ID NO: 215770 - DNA, 25 bp, Artificial
  probe
  misc_feature (1)..(25): SEQ ID NO: 1147; WAN024FPI_at; Start 959; Stop 983
tgactagtttagagttgcgagaaca

SEQ ID NO: 215771 - DNA, 25 bp, Artificial
  probe
  misc_feature (1)..(25): SEQ ID NO: 1147; WAN024FPI_at; Start 679; Stop 703
ttagaggagaaagtcagggaatacc

SEQ ID NO: 215772 - DNA, 25 bp, Artificial
  probe
  misc_feature (1)..(25): SEQ ID NO: 1147; WAN024FPI_at; Start 1030; Stop 1054
tatatcctagataagtggaacaatc

SEQ ID NO: 215773 - DNA, 25 bp, Artificial
  probe
  misc_feature (1)..(25): SEQ ID NO: 1147; WAN024FPI_at; Start 989; Stop 1013
caaaatcgagtgttattccagcaga

SEQ ID NO: 215774 - DNA, 25 bp, Artificial
  probe
  misc_feature (1)..(25): SEQ ID NO: 1147; WAN024FPI_at; Start 692; Stop 716
tcagggaataccaattagaaggctt

SEQ ID NO: 215775 - DNA, 25 bp, Artificial
  probe
  misc_feature (1)..(25): SEQ ID NO: 1147; WAN024FPI_at; Start 741; Stop 765
gaatgttcgggagctctatcctgac

SEQ ID NO: 215776 - DNA, 25 bp, Artificial
  probe
  misc_feature (1)..(25): SEQ ID NO: 1147; WAN024FPI_at; Start 99; Stop 123
tacaattatcagcatcttttcggaa

SEQ ID NO: 215777 - DNA, 25 bp, Artificial
  probe
  misc_feature (1)..(25): SEQ ID NO: 1147; WAN024FPI_at; Start 340; Stop 364
gaacatcagtgtttttactttggga

SEQ ID NO: 215778 - DNA, 25 bp, Artificial
  probe
  misc_feature (1)..(25): SEQ ID NO: 1147; WAN024FPI_at; Start 646; Stop 670
gacatttatggtgatggccccgata

SEQ ID NO: 215779 - DNA, 25 bp, Artificial
  probe
  misc_feature (1)..(25): SEQ ID NO: 1147; WAN024FPI_at; Start 974; Stop 998
tgcgagaacaagttgcaaaatcgag

SEQ ID NO: 215780 - DNA, 25 bp, Artificial
  probe
  misc_feature (1)..(25): SEQ ID NO: 1147; WAN024FPI_at; Start 726; Stop 750
gaaagggcttgttcagaatgttcgg

SEQ ID NO: 215781 - DNA, 25 bp, Artificial
  probe
  misc_feature (1)..(25): SEQ ID NO: 1147; WAN024FPI_at; Start 29; Stop 53
tttcaaaaataggaggagtgcagcg

SEQ ID NO: 215782 - DNA, 25 bp, Artificial
  probe
  misc_feature (1)..(25): SEQ ID NO: 1147; WAN024FPI_at; Start 266; Stop 290
tatcgtcaggaactggtctagtatc

SEQ ID NO: 215783 - DNA, 25 bp, Artificial
  probe
  misc_feature (1)..(25): SEQ ID NO: 1147; WAN024FPI_at; Start 160; Stop 184
caggtgagctatcttttgaaagaac

SEQ ID NO: 215784 - DNA, 25 bp, Artificial
  probe
  misc_feature (1)..(25): SEQ ID NO: 1147; WAN024FPI_at; Start 56; Stop 80
tcacgacagctcttgttaatgaact

SEQ ID NO: 215785 - DNA, 25 bp, Artificial
  probe
  misc_feature (1)..(25): SEQ ID NO: 1147; WAN024FPI_at; Start 628; Stop 652
tatccagattggcagtgggacattt

SEQ ID NO: 215786 - DNA, 25 bp, Artificial
  probe
  misc_feature (1)..(25): SEQ ID NO: 1147; WAN024FPI_at; Start 128; Stop 152
agctaccagcttttggactttcaga

SEQ ID NO: 215787 - DNA, 25 bp, Artificial
  probe
  misc_feature (1)..(25): SEQ ID NO: 1147; WAN024FPI_at; Start 466; Stop 490
cgtcctaaggctcatattgaacaaa

SEQ ID NO: 215788 - DNA, 25 bp, Artificial
  probe
  misc_feature (1)..(25): SEQ ID NO: 1147; WAN024FPI_at; Start 113; Stop 137
tcttttcggaaaatgagctaccagc

SEQ ID NO: 215789 - DNA, 25 bp, Artificial
  probe
  misc_feature (1)..(25): SEQ ID NO: 1147; WAN024FPI_at; Start 321; Stop 345
taccagacttttggcatgggaacat

SEQ ID NO: 215790 - DNA, 25 bp, Artificial
  probe
  misc_feature (1)..(25): SEQ ID NO: 1147; WAN024FPI_at; Start 851; Stop 875
catttgattgtaactgtggaccctc

SEQ ID NO: 215791 - DNA, 25 bp, Artificial
  probe
  misc_feature (1)..(25): SEQ ID NO: 1147; WAN024FPI_at; Start 393; Stop 417
aaagctagcctgtcgttttgctgag

SEQ ID NO: 215792 - DNA, 25 bp, Artificial
  probe
  misc_feature (1)..(25): SEQ ID NO: 1147; WAN024FPI_at; Start 523; Stop 547
gctaagtgtcagctctcttctaaaa

SEQ ID NO: 215793 - DNA, 25 bp, Artificial
  probe
  misc_feature (1)..(25): SEQ ID NO: 1147; WAN024FPI_at; Start 304; Stop 328
gctagtttgggaattcctaccagac

SEQ ID NO: 215794 - DNA, 25 bp, Artificial
  probe
  misc_feature (1)..(25): SEQ ID NO: 1147; WAN024FPI_at; Start 658; Stop 682
gatggccccgatagagaaaaattag

SEQ ID NO: 215795 - DNA, 25 bp, Artificial
  probe
  misc_feature (1)..(25): SEQ ID NO: 6366; WAN024FPJ_at; Start 728; Stop 752
tggcttctatctgggatcagcgtaa

SEQ ID NO: 215796 - DNA, 25 bp, Artificial
  probe
  misc_feature (1)..(25): SEQ ID NO: 6366; WAN024FPJ_at; Start 960; Stop 984
taacttagaagctattgcctgtgga

SEQ ID NO: 215797 - DNA, 25 bp, Artificial
  probe
  misc_feature (1)..(25): SEQ ID NO: 6366; WAN024FPJ_at; Start 230; Stop 254
gagcagcaactagaaaatttatcac

SEQ ID NO: 215798 - DNA, 25 bp, Artificial
  probe
  misc_feature (1)..(25): SEQ ID NO: 6366; WAN024FPJ_at; Start 393; Stop 417
tactggacatggtgcttactttgat

SEQ ID NO: 215799 - DNA, 25 bp, Artificial
  probe
  misc_feature (1)..(25): SEQ ID NO: 6366; WAN024FPJ_at; Start 50; Stop 74
gaatttgtacggatatcgcaaccgc

SEQ ID NO: 215800 - DNA, 25 bp, Artificial
  probe
  misc_feature (1)..(25): SEQ ID NO: 6366; WAN024FPJ_at; Start 94; Stop 118
gaagttaagattgcatatggacgtg

SEQ ID NO: 215801 - DNA, 25 bp, Artificial
  probe
  misc_feature (1)..(25): SEQ ID NO: 6366; WAN024FPJ_at; Start 71; Stop 95
ccgctttaacaaagaagggtcatga

SEQ ID NO: 215802 - DNA, 25 bp, Artificial
  probe
  misc_feature (1)..(25): SEQ ID NO: 6366; WAN024FPJ_at; Start 427; Stop 451
tgtgaaaaaattggacagtgccatc

SEQ ID NO: 215803 - DNA, 25 bp, Artificial
  probe
  misc_feature (1)..(25): SEQ ID NO: 6366; WAN024FPJ_at; Start 555; Stop 579
tattacaccatcagagtggttggca

SEQ ID NO: 215804 - DNA, 25 bp, Artificial
  probe
  misc_feature (1)..(25): SEQ ID NO: 6366; WAN024FPJ_at; Start 905; Stop 929
acacgttggcagatgtatttatcaa

SEQ ID NO: 215805 - DNA, 25 bp, Artificial
  probe
  misc_feature (1)..(25): SEQ ID NO: 6366; WAN024FPJ_at; Start 252; Stop 276
cacttgggtgaaagaatatgatcct

SEQ ID NO: 215806 - DNA, 25 bp, Artificial
  probe
  misc_feature (1)..(25): SEQ ID NO: 6366; WAN024FPJ_at; Start 639; Stop 663
tgatactacgatatttaaaccaagg

SEQ ID NO: 215807 - DNA, 25 bp, Artificial
  probe
  misc_feature (1)..(25): SEQ ID NO: 6366; WAN024FPJ_at; Start 176; Stop 200
taaataggcatgtcttacaagctcg

SEQ ID NO: 215808 - DNA, 25 bp, Artificial
  probe
  misc_feature (1)..(25): SEQ ID NO: 6366; WAN024FPJ_at; Start 847; Stop 871
cctaaagagattattggtctgacca

SEQ ID NO: 215809 - DNA, 25 bp, Artificial
  probe
  misc_feature (1)..(25): SEQ ID NO: 6366; WAN024FPJ_at; Start 600; Stop 624
tttgaaagaatatcccgtaacagtc

SEQ ID NO: 215810 - DNA, 25 bp, Artificial
  probe
  misc_feature (1)..(25): SEQ ID NO: 6366; WAN024FPJ_at; Start 442; Stop 466
cagtgccatcattcgagtcaaaaaa

SEQ ID NO: 215811 - DNA, 25 bp, Artificial
  probe
  misc_feature (1)..(25): SEQ ID NO: 6366; WAN024FPJ_at; Start 696; Stop 720
tcgcttagaaggaaaacaggtattg

SEQ ID NO: 215812 - DNA, 25 bp, Artificial
  probe
  misc_feature (1)..(25): SEQ ID NO: 6366; WAN024FPJ_at; Start 127; Stop 151
cctacacagtatcgaaattacgcgg

SEQ ID NO: 215813 - DNA, 25 bp, Artificial
  probe
  misc_feature (1)..(25): SEQ ID NO: 6366; WAN024FPJ_at; Start 990; Stop 1014
agttgtgacctacccaactggtggg

SEQ ID NO: 215814 - DNA, 25 bp, Artificial
  probe
  misc_feature (1)..(25): SEQ ID NO: 6366; WAN024FPJ_at; Start 1004; Stop 1028
caactggtgggagtatagaaagtac

SEQ ID NO: 215815 - DNA, 25 bp, Artificial
  probe
  misc_feature (1)..(25): SEQ ID NO: 6366; WAN024FPJ_at; Start 334; Stop 358
tcctatttgaaaacttgcggaaaga

SEQ ID NO: 215816 - DNA, 25 bp, Artificial
  probe
  misc_feature (1)..(25): SEQ ID NO: 6366; WAN024FPJ_at; Start 215; Stop 239
ctggttttgtaggtagagcagcaac

SEQ ID NO: 215817 - DNA, 25 bp, Artificial
  probe
  misc_feature (1)..(25): SEQ ID NO: 6366; WAN024FPJ_at; Start 975; Stop 999
tgcctgtggaacaccagttgtgacc

SEQ ID NO: 215818 - DNA, 25 bp, Artificial
  probe
  misc_feature (1)..(25): SEQ ID NO: 6366; WAN024FPJ_at; Start 711; Stop 735
acaggtattgcttggtgtggcttct

SEQ ID NO: 215819 - DNA, 25 bp, Artificial
  probe
  misc_feature (1)..(25): SEQ ID NO: 6366; WAN024FPJ_at; Start 1076; Stop 1100
tagagtccctaaaagaagtgagtca

SEQ ID NO: 215820 - DNA, 25 bp, Artificial
  probe
  misc_feature (1)..(25): SEQ ID NO: 6366; WAN024FPJ_at; Start 374; Stop 398
tacatgattgttgggcttttactgg

SEQ ID NO: 215821 - DNA, 25 bp, Artificial
  probe
  misc_feature (1)..(25): SEQ ID NO: 6366; WAN024FPJ_at; Start 1095; Stop 1119
gagtcaatgtaaaaggagtcctaat

SEQ ID NO: 215822 - DNA, 25 bp, Artificial
  probe
  misc_feature (1)..(25): SEQ ID NO: 6366; WAN024FPJ_at; Start 109; Stop 133
tatggacgtgagtatgttcctacac

SEQ ID NO: 215823 - DNA, 25 bp, Artificial
  probe
  misc_feature (1)..(25): SEQ ID NO: 6366; WAN024FPJ_at; Start 886; Stop 910
gaagaactttctgcttggtacacgt

SEQ ID NO: 215824 - DNA, 25 bp, Artificial
  probe
  misc_feature (1)..(25): SEQ ID NO: 6366; WAN024FPJ_at; Start 744; Stop 768
tcagcgtaaaggattggatgatcta

SEQ ID NO: 215825 - DNA, 25 bp, Artificial
  probe
  misc_feature (1)..(25): SEQ ID NO: 6366; WAN024FPJ_at; Start 920; Stop 944
tatttatcaacccaacaacacagga

SEQ ID NO: 215826 - DNA, 25 bp, Artificial
  probe
  misc_feature (1)..(25): SEQ ID NO: 6366; WAN024FPJ_at; Start 145; Stop 169
tacgcggttaagatagggtctagag

SEQ ID NO: 215827 - DNA, 25 bp, Artificial
  probe
  misc_feature (1)..(25): SEQ ID NO: 6366; WAN024FPJ_at; Start 527; Stop 551
tgtttacaggtgttccaaacttgac

SEQ ID NO: 215828 - DNA, 25 bp, Artificial
  probe
  misc_feature (1)..(25): SEQ ID NO: 6366; WAN024FPJ_at; Start 861; Stop 885
tggtctgaccacaacagatagtgta

SEQ ID NO: 215829 - DNA, 25 bp, Artificial
  probe
  misc_feature (1)..(25): SEQ ID NO: 1134; WAN024FPK_at; Start 85; Stop 109
gaaggatatgaggttaaaatcgcct

SEQ ID NO: 215830 - DNA, 25 bp, Artificial
  probe
  misc_feature (1)..(25): SEQ ID NO: 1134; WAN024FPK_at; Start 813; Stop 837
gatagggttaaaagataggcaactc

SEQ ID NO: 215831 - DNA, 25 bp, Artificial
  probe
  misc_feature (1)..(25): SEQ ID NO: 1134; WAN024FPK_at; Start 149; Stop 173
cagtgaaaattggtacaaagtctga

SEQ ID NO: 215832 - DNA, 25 bp, Artificial
  probe
  misc_feature (1)..(25): SEQ ID NO: 1134; WAN024FPK_at; Start 989; Stop 1013
cagttatcagctatccgacaggtgg

SEQ ID NO: 215833 - DNA, 25 bp, Artificial
  probe
  misc_feature (1)..(25): SEQ ID NO: 1134; WAN024FPK_at; Start 187; Stop 211
gcgattcgttctcgattatttgacg

SEQ ID NO: 215834 - DNA, 25 bp, Artificial
  probe
  misc_feature (1)..(25): SEQ ID NO: 1134; WAN024FPK_at; Start 203; Stop 227
tatttgacgaatctggctttggaag

SEQ ID NO: 215835 - DNA, 25 bp, Artificial
  probe
  misc_feature (1)..(25): SEQ ID NO: 1134; WAN024FPK_at; Start 979; Stop 1003
tgtgggacaccagttatcagctatc

SEQ ID NO: 215836 - DNA, 25 bp, Artificial
  probe
  misc_feature (1)..(25): SEQ ID NO: 1134; WAN024FPK_at; Start 445; Stop 469
tgtgaccatccatctcagaaaaatg

SEQ ID NO: 215837 - DNA, 25 bp, Artificial
  probe
  misc_feature (1)..(25): SEQ ID NO: 1134; WAN024FPK_at; Start 1059; Stop 1083
aaacgtagcttctattttatcttcg

SEQ ID NO: 215838 - DNA, 25 bp, Artificial
  probe
  misc_feature (1)..(25): SEQ ID NO: 1134; WAN024FPK_at; Start 1046; Stop 1070
tttgtcaggatagaaacgtagcttc

SEQ ID NO: 215839 - DNA, 25 bp, Artificial
  probe
  misc_feature (1)..(25): SEQ ID NO: 1134; WAN024FPK_at; Start 596; Stop 620
catttttaaaagaatatccagtgaa

SEQ ID NO: 215840 - DNA, 25 bp, Artificial
  probe
  misc_feature (1)..(25): SEQ ID NO: 1134; WAN024FPK_at; Start 1021; Stop 1045
gaaagtgctaaactttatggtctcg

SEQ ID NO: 215841 - DNA, 25 bp, Artificial
  probe
  misc_feature (1)..(25): SEQ ID NO: 1134; WAN024FPK_at; Start 1090; Stop 1114
aaagtctctcagctatctaaaacag

SEQ ID NO: 215842 - DNA, 25 bp, Artificial
  probe
  misc_feature (1)..(25): SEQ ID NO: 1134; WAN024FPK_at; Start 347; Stop 371
tatgcggtaaaaagattatatggac

SEQ ID NO: 215843 - DNA, 25 bp, Artificial
  probe
  misc_feature (1)..(25): SEQ ID NO: 1134; WAN024FPK_at; Start 1002; Stop 1026
tccgacaggtggtagtgtagaaagt

SEQ ID NO: 215844 - DNA, 25 bp, Artificial
  probe
  misc_feature (1)..(25): SEQ ID NO: 1134; WAN024FPK_at; Start 165; Stop 189
aaagtctgatattcgttttcatgcg

SEQ ID NO: 215845 - DNA, 25 bp, Artificial
  probe
  misc_feature (1)..(25): SEQ ID NO: 1134; WAN024FPK_at; Start 218; Stop 242
gctttggaagtagacaggcaactgt

SEQ ID NO: 215846 - DNA, 25 bp, Artificial
  probe
  misc_feature (1)..(25): SEQ ID NO: 1134; WAN024FPK_at; Start 655; Stop 679
caaccgaggctaatagccgctcaaa

SEQ ID NO: 215847 - DNA, 25 bp, Artificial
  probe
  misc_feature (1)..(25): SEQ ID NO: 1134; WAN024FPK_at; Start 61; Stop 85
gatctcgcaactgctttgacagaag

SEQ ID NO: 215848 - DNA, 25 bp, Artificial
  probe
  misc_feature (1)..(25): SEQ ID NO: 1134; WAN024FPK_at; Start 967; Stop 991
gaagctatttcttgtgggacaccag

SEQ ID NO: 215849 - DNA, 25 bp, Artificial
  probe
  misc_feature (1)..(25): SEQ ID NO: 1134; WAN024FPK_at; Start 1031; Stop 1055
aactttatggtctcgtttgtcagga

SEQ ID NO: 215850 - DNA, 25 bp, Artificial
  probe
  misc_feature (1)..(25): SEQ ID NO: 1134; WAN024FPK_at; Start 1078; Stop 1102
tcttcgttagaaaaagtctctcagc

SEQ ID NO: 215851 - DNA, 25 bp, Artificial
  probe
  misc_feature (1)..(25): SEQ ID NO: 1134; WAN024FPK_at; Start 640; Stop 664
gatactactgtctttcaaccgaggc

SEQ ID NO: 215852 - DNA, 25 bp, Artificial
  probe
  misc_feature (1)..(25): SEQ ID NO: 1134; WAN024FPK_at; Start 111; Stop 135
tggtcgtgagtatgttccgaaacaa

SEQ ID NO: 215853 - DNA, 25 bp, Artificial
  probe
  misc_feature (1)..(25): SEQ ID NO: 1134; WAN024FPK_at; Start 96; Stop 120
ggttaaaatcgcctatggtcgtgag

SEQ ID NO: 215854 - DNA, 25 bp, Artificial
  probe
  misc_feature (1)..(25): SEQ ID NO: 1134; WAN024FPK_at; Start 949; Stop 973
tacccgacaactaatttagaagcta

SEQ ID NO: 215855 - DNA, 25 bp, Artificial
  probe
  misc_feature (1)..(25): SEQ ID NO: 1134; WAN024FPK_at; Start 799; Stop 823
cagagaatagttttgatagggttaa

SEQ ID NO: 215856 - DNA, 25 bp, Artificial
  probe
  misc_feature (1)..(25): SEQ ID NO: 1134; WAN024FPK_at; Start 129; Stop 153
gaaacaatttcaacagtatgcagtg

SEQ ID NO: 215857 - DNA, 25 bp, Artificial
  probe
  misc_feature (1)..(25): SEQ ID NO: 1134; WAN024FPK_at; Start 73; Stop 97
gctttgacagaagaaggatatgagg

SEQ ID NO: 215858 - DNA, 25 bp, Artificial
  probe
  misc_feature (1)..(25): SEQ ID NO: 1134; WAN024FPK_at; Start 374; Stop 398
tgcatgattgttgggcatttacagg

SEQ ID NO: 215859 - DNA, 25 bp, Artificial
  probe
  misc_feature (1)..(25): SEQ ID NO: 1134; WAN024FPK_at; Start 415; Stop 439
gattgtttggaatgtgagtcaaagg

SEQ ID NO: 215860 - DNA, 25 bp, Artificial
  probe
  misc_feature (1)..(25): SEQ ID NO: 1134; WAN024FPK_at; Start 898; Stop 922
gcatggtatacactagcggatgtat

SEQ ID NO: 215861 - DNA, 25 bp, Artificial
  probe
  misc_feature (1)..(25): SEQ ID NO: 1134; WAN024FPK_at; Start 320; Stop 344
ttgaactgttatttgattatctccg

SEQ ID NO: 215862 - DNA, 25 bp, Artificial
  probe
  misc_feature (1)..(25): SEQ ID NO: 1134; WAN024FPK_at; Start 384; Stop 408
ttgggcatttacaggacactcggct

SEQ ID NO: 215863 - DNA, 25 bp, Artificial
  probe
  misc_feature (1)..(25): SEQ ID NO: 719; WAN024FPL_at; Start 62; Stop 86
taaagagagcaaagcaattaggaga

SEQ ID NO: 215864 - DNA, 25 bp, Artificial
  probe
  misc_feature (1)..(25): SEQ ID NO: 719; WAN024FPL_at; Start 239; Stop 263
cagatattaaagaatatcacattga

SEQ ID NO: 215865 - DNA, 25 bp, Artificial
  probe
  misc_feature (1)..(25): SEQ ID NO: 719; WAN024FPL_at; Start 93; Stop 117
cattgttgtagtttcaagcgatgag

SEQ ID NO: 215866 - DNA, 25 bp, Artificial
  probe
  misc_feature (1)..(25): SEQ ID NO: 719; WAN024FPL_at; Start 107; Stop 131
caagcgatgagttcaatttgaaaga

SEQ ID NO: 215867 - DNA, 25 bp, Artificial
  probe
  misc_feature (1)..(25): SEQ ID NO: 719; WAN024FPL_at; Start 13; Stop 37
attacttatggaacctttgatttgc

SEQ ID NO: 215868 - DNA, 25 bp, Artificial
  probe
  misc_feature (1)..(25): SEQ ID NO: 719; WAN024FPL_at; Start 53; Stop 77
tcaatttgttaaagagagcaaagca

SEQ ID NO: 215869 - DNA, 25 bp, Artificial
  probe
  misc_feature (1)..(25): SEQ ID NO: 719; WAN024FPL_at; Start 338; Stop 362
taccaagaactaaagaaatatctac

SEQ ID NO: 215870 - DNA, 25 bp, Artificial
  probe
  misc_feature (1)..(25): SEQ ID NO: 719; WAN024FPL_at; Start 181; Stop 205
gaagcaataagatatgttgatctgg

SEQ ID NO: 215871 - DNA, 25 bp, Artificial
  probe
  misc_feature (1)..(25): SEQ ID NO: 719; WAN024FPL_at; Start 198; Stop 222
tgatctggtgatttctgaaacaagc

SEQ ID NO: 215872 - DNA, 25 bp, Artificial
  probe
  misc_feature (1)..(25): SEQ ID NO: 719; WAN024FPL_at; Start 184; Stop 208
gcaataagatatgttgatctggtga

SEQ ID NO: 215873 - DNA, 25 bp, Artificial
  probe
  misc_feature (1)..(25): SEQ ID NO: 719; WAN024FPL_at; Start 163; Stop 187
catagaaaaaatttggttgaagcaa

SEQ ID NO: 215874 - DNA, 25 bp, Artificial
  probe
  misc_feature (1)..(25): SEQ ID NO: 719; WAN024FPL_at; Start 96; Stop 120
tgttgtagtttcaagcgatgagttc

SEQ ID NO: 215875 - DNA, 25 bp, Artificial
  probe
  misc_feature (1)..(25): SEQ ID NO: 719; WAN024FPL_at; Start 175; Stop 199
ttggttgaagcaataagatatgttg

SEQ ID NO: 215876 - DNA, 25 bp, Artificial
  probe
  misc_feature (1)..(25): SEQ ID NO: 719; WAN024FPL_at; Start 344; Stop 368
gaactaaagaaatatctacaactaa

SEQ ID NO: 215877 - DNA, 25 bp, Artificial
  probe
  misc_feature (1)..(25): SEQ ID NO: 719; WAN024FPL_at; Start 98; Stop 122
ttgtagtttcaagcgatgagttcaa

SEQ ID NO: 215878 - DNA, 25 bp, Artificial
  probe
  misc_feature (1)..(25): SEQ ID NO: 719; WAN024FPL_at; Start 66; Stop 90
gagagcaaagcaattaggagattat

SEQ ID NO: 215879 - DNA, 25 bp, Artificial
  probe
  misc_feature (1)..(25): SEQ ID NO: 719; WAN024FPL_at; Start 70; Stop 94
gcaaagcaattaggagattatctca

SEQ ID NO: 215880 - DNA, 25 bp, Artificial
  probe
  misc_feature (1)..(25): SEQ ID NO: 719; WAN024FPL_at; Start 312; Stop 336
agaagaaggagtggaagtaatttat

SEQ ID NO: 215881 - DNA, 25 bp, Artificial
  probe
  misc_feature (1)..(25): SEQ ID NO: 719; WAN024FPL_at; Start 207; Stop 231
gatttctgaaacaagctgggaacag

SEQ ID NO: 215882 - DNA, 25 bp, Artificial
  probe
  misc_feature (1)..(25): SEQ ID NO: 719; WAN024FPL_at; Start 205; Stop 229
gtgatttctgaaacaagctgggaac

SEQ ID NO: 215883 - DNA, 25 bp, Artificial
  probe
  misc_feature (1)..(25): SEQ ID NO: 719; WAN024FPL_at; Start 80; Stop 104
taggagattatctcattgttgtagt

SEQ ID NO: 215884 - DNA, 25 bp, Artificial
  probe
  misc_feature (1)..(25): SEQ ID NO: 719; WAN024FPL_at; Start 59; Stop 83
tgttaaagagagcaaagcaattagg

SEQ ID NO: 215885 - DNA, 25 bp, Artificial
  probe
  misc_feature (1)..(25): SEQ ID NO: 719; WAN024FPL_at; Start 47; Stop 71
gacatatcaatttgttaaagagagc

SEQ ID NO: 215886 - DNA, 25 bp, Artificial
  probe
  misc_feature (1)..(25): SEQ ID NO: 719; WAN024FPL_at; Start 88; Stop 112
tatctcattgttgtagtttcaagcg

SEQ ID NO: 215887 - DNA, 25 bp, Artificial
  probe
  misc_feature (1)..(25): SEQ ID NO: 719; WAN024FPL_at; Start 191; Stop 215
gatatgttgatctggtgatttctga

SEQ ID NO: 215888 - DNA, 25 bp, Artificial
  probe
  misc_feature (1)..(25): SEQ ID NO: 719; WAN024FPL_at; Start 49; Stop 73
catatcaatttgttaaagagagcaa

SEQ ID NO: 215889 - DNA, 25 bp, Artificial
  probe
  misc_feature (1)..(25): SEQ ID NO: 719; WAN024FPL_at; Start 254; Stop 278
atcacattgatacatttgttatggg

SEQ ID NO: 215890 - DNA, 25 bp, Artificial
  probe
  misc_feature (1)..(25): SEQ ID NO: 719; WAN024FPL_at; Start 102; Stop 126
agtttcaagcgatgagttcaatttg

SEQ ID NO: 215891 - DNA, 25 bp, Artificial
  probe
  misc_feature (1)..(25): SEQ ID NO: 719; WAN024FPL_at; Start 221; Stop 245
gctgggaacagaaaaaaacagatat

SEQ ID NO: 215892 - DNA, 25 bp, Artificial
  probe
  misc_feature (1)..(25): SEQ ID NO: 719; WAN024FPL_at; Start 211; Stop 235
tctgaaacaagctgggaacagaaaa

SEQ ID NO: 215893 - DNA, 25 bp, Artificial
  probe
  misc_feature (1)..(25): SEQ ID NO: 719; WAN024FPL_at; Start 356; Stop 380
tatctacaactaaaattaaagaaga

SEQ ID NO: 215894 - DNA, 25 bp, Artificial
  probe
  misc_feature (1)..(25): SEQ ID NO: 719; WAN024FPL_at; Start 201; Stop 225
tctggtgatttctgaaacaagctgg

SEQ ID NO: 215895 - DNA, 25 bp, Artificial
  probe
  misc_feature (1)..(25): SEQ ID NO: 719; WAN024FPL_at; Start 17; Stop 41
cttatggaacctttgatttgcttca

SEQ ID NO: 215896 - DNA, 25 bp, Artificial
  probe
  misc_feature (1)..(25): SEQ ID NO: 719; WAN024FPL_at; Start 111; Stop 135
cgatgagttcaatttgaaagaaaaa

SEQ ID NO: 215897 - DNA, 25 bp, Artificial
  probe
  misc_feature (1)..(25): SEQ ID NO: 4655; WAN024FPM_at; Start 16; Stop 40
gcggcactctggtatactgttgcaa

SEQ ID NO: 215898 - DNA, 25 bp, Artificial
  probe
  misc_feature (1)..(25): SEQ ID NO: 4655; WAN024FPM_at; Start 380; Stop 404
tagaattttatttggcacgtcagag

SEQ ID NO: 215899 - DNA, 25 bp, Artificial
  probe
  misc_feature (1)..(25): SEQ ID NO: 4655; WAN024FPM_at; Start 1119; Stop 1143
tatatttgggtatcaagctgcagct

SEQ ID NO: 215900 - DNA, 25 bp, Artificial
  probe
  misc_feature (1)..(25): SEQ ID NO: 4655; WAN024FPM_at; Start 901; Stop 925
tcaattctatttgcaccagaactaa

SEQ ID NO: 215901 - DNA, 25 bp, Artificial
  probe
  misc_feature (1)..(25): SEQ ID NO: 4655; WAN024FPM_at; Start 789; Stop 813
taatcaatcaataatgccgcataca

SEQ ID NO: 215902 - DNA, 25 bp, Artificial
  probe
  misc_feature (1)..(25): SEQ ID NO: 4655; WAN024FPM_at; Start 803; Stop 827
tgccgcatacatttcaagctttgaa

SEQ ID NO: 215903 - DNA, 25 bp, Artificial
  probe
  misc_feature (1)..(25): SEQ ID NO: 4655; WAN024FPM_at; Start 130; Stop 154
caatcatggtttgtactatttgcta

SEQ ID NO: 215904 - DNA, 25 bp, Artificial
  probe
  misc_feature (1)..(25): SEQ ID NO: 4655; WAN024FPM_at; Start 838; Stop 862
tattgtgggatacatgggagcacca

SEQ ID NO: 215905 - DNA, 25 bp, Artificial
  probe
  misc_feature (1)..(25): SEQ ID NO: 4655; WAN024FPM_at; Start 935; Stop 959
taggcggcaataaatataaggaatc

SEQ ID NO: 215906 - DNA, 25 bp, Artificial
  probe
  misc_feature (1)..(25): SEQ ID NO: 4655; WAN024FPM_at; Start 968; Stop 992
tagtacctccaattgccatctcggt

SEQ ID NO: 215907 - DNA, 25 bp, Artificial
  probe
  misc_feature (1)..(25): SEQ ID NO: 4655; WAN024FPM_at; Start 106; Stop 130
gattacggtacattgatactttacc

SEQ ID NO: 215908 - DNA, 25 bp, Artificial
  probe
  misc_feature (1)..(25): SEQ ID NO: 4655; WAN024FPM_at; Start 917; Stop 941
cagaactaattgttattttaggcgg

SEQ ID NO: 215909 - DNA, 25 bp, Artificial
  probe
  misc_feature (1)..(25): SEQ ID NO: 4655; WAN024FPM_at; Start 707; Stop 731
tgtttgatggtaaggagaaattagc

SEQ ID NO: 215910 - DNA, 25 bp, Artificial
  probe
  misc_feature (1)..(25): SEQ ID NO: 4655; WAN024FPM_at; Start 738; Stop 762
tagtctagcttattctgtatcaatg

SEQ ID NO: 215911 - DNA, 25 bp, Artificial
  probe
  misc_feature (1)..(25): SEQ ID NO: 4655; WAN024FPM_at; Start 647; Stop 671
tgataccgcatttcttatcgcacta

SEQ ID NO: 215912 - DNA, 25 bp, Artificial
  probe
  misc_feature (1)..(25): SEQ ID NO: 4655; WAN024FPM_at; Start 1071; Stop 1095
cacaggtgcggctctttcaaatatt

SEQ ID NO: 215913 - DNA, 25 bp, Artificial
  probe
  misc_feature (1)..(25): SEQ ID NO: 4655; WAN024FPM_at; Start 160; Stop 184
gcgaccttgaatctttctcaaacag

SEQ ID NO: 215914 - DNA, 25 bp, Artificial
  probe
  misc_feature (1)..(25): SEQ ID NO: 4655; WAN024FPM_at; Start 577; Stop 601
ttttcagggagaaggcaacttaaga

SEQ ID NO: 215915 - DNA, 25 bp, Artificial
  probe
  misc_feature (1)..(25): SEQ ID NO: 4655; WAN024FPM_at; Start 667; Stop 691
cactatattttgaatcagtctgacc

SEQ ID NO: 215916 - DNA, 25 bp, Artificial
  probe
  misc_feature (1)..(25): SEQ ID NO: 4655; WAN024FPM_at; Start 1227; Stop 1251
tgaggaactttataacatgaagatg

SEQ ID NO: 215917 - DNA, 25 bp, Artificial
  probe
  misc_feature (1)..(25): SEQ ID NO: 4655; WAN024FPM_at; Start 516; Stop 540
aattgtattggatgctattatccga

SEQ ID NO: 215918 - DNA, 25 bp, Artificial
  probe
  misc_feature (1)..(25): SEQ ID NO: 4655; WAN024FPM_at; Start 146; Stop 170
tatttgctatttttgcgaccttgaa

SEQ ID NO: 215919 - DNA, 25 bp, Artificial
  probe
  misc_feature (1)..(25): SEQ ID NO: 4655; WAN024FPM_at; Start 174; Stop 198
ttctcaaacagcttataataaggga

SEQ ID NO: 215920 - DNA, 25 bp, Artificial
  probe
  misc_feature (1)..(25): SEQ ID NO: 4655; WAN024FPM_at; Start 1; Stop 25
tctgtcgggatgaaagcggcactct

SEQ ID NO: 215921 - DNA, 25 bp, Artificial
  probe
  misc_feature (1)..(25): SEQ ID NO: 4655; WAN024FPM_at; Start 1056; Stop 1080
gatttcgttagtttccacaggtgcg

SEQ ID NO: 215922 - DNA, 25 bp, Artificial
  probe
  misc_feature (1)..(25): SEQ ID NO: 4655; WAN024FPM_at; Start 632; Stop 656
gttattcattacctttgataccgca

SEQ ID NO: 215923 - DNA, 25 bp, Artificial
  probe
  misc_feature (1)..(25): SEQ ID NO: 4655; WAN024FPM_at; Start 955; Stop 979
gaatcaatttggctagtacctccaa

SEQ ID NO: 215924 - DNA, 25 bp, Artificial
  probe
  misc_feature (1)..(25): SEQ ID NO: 4655; WAN024FPM_at; Start 850; Stop 874
catgggagcaccaaatggctttttg

SEQ ID NO: 215925 - DNA, 25 bp, Artificial
  probe
  misc_feature (1)..(25): SEQ ID NO: 4655; WAN024FPM_at; Start 309; Stop 333
taaagatagtactggattaactccc

SEQ ID NO: 215926 - DNA, 25 bp, Artificial
  probe
  misc_feature (1)..(25): SEQ ID NO: 4655; WAN024FPM_at; Start 1160; Stop 1184
gctatatattgttggcgttttctca

SEQ ID NO: 215927 - DNA, 25 bp, Artificial
  probe
  misc_feature (1)..(25): SEQ ID NO: 4655; WAN024FPM_at; Start 886; Stop 910
gggattacagctctctcaattctat

SEQ ID NO: 215928 - DNA, 25 bp, Artificial
  probe
  misc_feature (1)..(25): SEQ ID NO: 4655; WAN024FPM_at; Start 682; Stop 706
cagtctgaccgtttgatgattaaca

SEQ ID NO: 215929 - DNA, 25 bp, Artificial
  probe
  misc_feature (1)..(25): SEQ ID NO: 4655; WAN024FPM_at; Start 1134; Stop 1158
agctgcagcttacactacattatta

SEQ ID NO: 215930 - DNA, 25 bp, Artificial
  probe
  misc_feature (1)..(25): SEQ ID NO: 4655; WAN024FPM_at; Start 322; Stop 346
ggattaactcccagtttcatgatat

SEQ ID NO: 215931 - DNA, 25 bp, Artificial
  probe
  misc_feature (1)..(25): SEQ ID NO: 1221; WAN024FPN_at; Start 57; Stop 81
taatgaatataaaatgcaagagctg

SEQ ID NO: 215932 - DNA, 25 bp, Artificial
  probe
  misc_feature (1)..(25): SEQ ID NO: 1221; WAN024FPN_at; Start 305; Stop 329
gaaaatcctatgtaatgtcattaag

SEQ ID NO: 215933 - DNA, 25 bp, Artificial
  probe
  misc_feature (1)..(25): SEQ ID NO: 1221; WAN024FPN_at; Start 1030; Stop 1054
gataagatactgtcttttaacaact

SEQ ID NO: 215934 - DNA, 25 bp, Artificial
  probe
  misc_feature (1)..(25): SEQ ID NO: 1221; WAN024FPN_at; Start 226; Stop 250
gtcttactattgaaggataaattag

SEQ ID NO: 215935 - DNA, 25 bp, Artificial
  probe
  misc_feature (1)..(25): SEQ ID NO: 1221; WAN024FPN_at; Start 1037; Stop 1061
tactgtcttttaacaacttgctgca

SEQ ID NO: 215936 - DNA, 25 bp, Artificial
  probe
  misc_feature (1)..(25): SEQ ID NO: 1221; WAN024FPN_at; Start 162; Stop 186
aaataatggtggtgcgttctatgac

SEQ ID NO: 215937 - DNA, 25 bp, Artificial
  probe
  misc_feature (1)..(25): SEQ ID NO: 1221; WAN024FPN_at; Start 719; Stop 743
tggcaaacctaaacacatatctaag

SEQ ID NO: 215938 - DNA, 25 bp, Artificial
  probe
  misc_feature (1)..(25): SEQ ID NO: 1221; WAN024FPN_at; Start 688; Stop 712
ggcattccgttacttgaaacactag

SEQ ID NO: 215939 - DNA, 25 bp, Artificial
  probe
  misc_feature (1)..(25): SEQ ID NO: 1221; WAN024FPN_at; Start 681; Stop 705
tcctttaggcattccgttacttgaa

SEQ ID NO: 215940 - DNA, 25 bp, Artificial
  probe
  misc_feature (1)..(25): SEQ ID NO: 1221; WAN024FPN_at; Start 714; Stop 738
tgaactggcaaacctaaacacatat

SEQ ID NO: 215941 - DNA, 25 bp, Artificial
  probe
  misc_feature (1)..(25): SEQ ID NO: 1221; WAN024FPN_at; Start 152; Stop 176
ctgattttgaaaataatggtggtgc

SEQ ID NO: 215942 - DNA, 25 bp, Artificial
  probe
  misc_feature (1)..(25): SEQ ID NO: 1221; WAN024FPN_at; Start 118; Stop 142
gaacttcgtaacagtattgtcattg

SEQ ID NO: 215943 - DNA, 25 bp, Artificial
  probe
  misc_feature (1)..(25): SEQ ID NO: 1221; WAN024FPN_at; Start 252; Stop 276
taaagaattaccagaaaatgtagat

SEQ ID NO: 215944 - DNA, 25 bp, Artificial
  probe
  misc_feature (1)..(25): SEQ ID NO: 1221; WAN024FPN_at; Start 402; Stop 426
tggatgctttcctttaaaaagtaca

SEQ ID NO: 215945 - DNA, 25 bp, Artificial
  probe
  misc_feature (1)..(25): SEQ ID NO: 1221; WAN024FPN_at; Start 1042; Stop 1066
tcttttaacaacttgctgcacttta

SEQ ID NO: 215946 - DNA, 25 bp, Artificial
  probe
  misc_feature (1)..(25): SEQ ID NO: 1221; WAN024FPN_at; Start 105; Stop 129
tacaaagcagaaggaacttcgtaac

SEQ ID NO: 215947 - DNA, 25 bp, Artificial
  probe
  misc_feature (1)..(25): SEQ ID NO: 1221; WAN024FPN_at; Start 294; Stop 318
gcccagtttacgaaaatcctatgta

SEQ ID NO: 215948 - DNA, 25 bp, Artificial
  probe
  misc_feature (1)..(25): SEQ ID NO: 1221; WAN024FPN_at; Start 112; Stop 136
cagaaggaacttcgtaacagtattg

SEQ ID NO: 215949 - DNA, 25 bp, Artificial
  probe
  misc_feature (1)..(25): SEQ ID NO: 1221; WAN024FPN_at; Start 166; Stop 190
aatggtggtgcgttctatgactatc

SEQ ID NO: 215950 - DNA, 25 bp, Artificial
  probe
  misc_feature (1)..(25): SEQ ID NO: 1221; WAN024FPN_at; Start 76; Stop 100
gagctgtttgatagtcttgttagta

SEQ ID NO: 215951 - DNA, 25 bp, Artificial
  probe
  misc_feature (1)..(25): SEQ ID NO: 1221; WAN024FPN_at; Start 138; Stop 162
cattgaatgtcatactgattttgaa

SEQ ID NO: 215952 - DNA, 25 bp, Artificial
  probe
  misc_feature (1)..(25): SEQ ID NO: 1221; WAN024FPN_at; Start 184; Stop 208
gactatctaatcaataatgagtata

SEQ ID NO: 215953 - DNA, 25 bp, Artificial
  probe
  misc_feature (1)..(25): SEQ ID NO: 1221; WAN024FPN_at; Start 172; Stop 196
ggtgcgttctatgactatctaatca

SEQ ID NO: 215954 - DNA, 25 bp, Artificial
  probe
  misc_feature (1)..(25): SEQ ID NO: 1221; WAN024FPN_at; Start 292; Stop 316
aagcccagtttacgaaaatcctatg

SEQ ID NO: 215955 - DNA, 25 bp, Artificial
  probe
  misc_feature (1)..(25): SEQ ID NO: 1221; WAN024FPN_at; Start 724; Stop 748
aacctaaacacatatctaagccaac

SEQ ID NO: 215956 - DNA, 25 bp, Artificial
  probe
  misc_feature (1)..(25): SEQ ID NO: 1221; WAN024FPN_at; Start 122; Stop 146
ttcgtaacagtattgtcattgaatg

SEQ ID NO: 215957 - DNA, 25 bp, Artificial
  probe
  misc_feature (1)..(25): SEQ ID NO: 1221; WAN024FPN_at; Start 339; Stop 363
tacttttgataatgatatgcttcgt

SEQ ID NO: 215958 - DNA, 25 bp, Artificial
  probe
  misc_feature (1)..(25): SEQ ID NO: 1221; WAN024FPN_at; Start 217; Stop 241
tataaaattgtcttactattgaagg

SEQ ID NO: 215959 - DNA, 25 bp, Artificial
  probe
  misc_feature (1)..(25): SEQ ID NO: 1221; WAN024FPN_at; Start 710; Stop 734
tagatgaactggcaaacctaaacac

SEQ ID NO: 215960 - DNA, 25 bp, Artificial
  probe
  misc_feature (1)..(25): SEQ ID NO: 1221; WAN024FPN_at; Start 703; Stop 727
gaaacactagatgaactggcaaacc

SEQ ID NO: 215961 - DNA, 25 bp, Artificial
  probe
  misc_feature (1)..(25): SEQ ID NO: 1221; WAN024FPN_at; Start 169; Stop 193
ggtggtgcgttctatgactatctaa

SEQ ID NO: 215962 - DNA, 25 bp, Artificial
  probe
  misc_feature (1)..(25): SEQ ID NO: 1221; WAN024FPN_at; Start 95; Stop 119
ttagtatttttacaaagcagaagga

SEQ ID NO: 215963 - DNA, 25 bp, Artificial
  probe
  misc_feature (1)..(25): SEQ ID NO: 1221; WAN024FPN_at; Start 317; Stop 341
taatgtcattaagtaaattctttac

SEQ ID NO: 215964 - DNA, 25 bp, Artificial
  probe
  misc_feature (1)..(25): SEQ ID NO: 1221; WAN024FPN_at; Start 67; Stop 91
aaaatgcaagagctgtttgatagtc

SEQ ID NO: 215965 - DNA, 25 bp, Artificial
  probe
  misc_feature (1)..(25): SEQ ID NO: 2986; WAN024FPO_at; Start 309; Stop 333
cgtctgggtaggaaataatgtgata

SEQ ID NO: 215966 - DNA, 25 bp, Artificial
  probe
  misc_feature (1)..(25): SEQ ID NO: 2986; WAN024FPO_at; Start 386; Stop 410
cagttattggaagaattccagcagg

SEQ ID NO: 215967 - DNA, 25 bp, Artificial
  probe
  misc_feature (1)..(25): SEQ ID NO: 2986; WAN024FPO_at; Start 440; Stop 464
cattcagatttagaaacatggaaca

SEQ ID NO: 215968 - DNA, 25 bp, Artificial
  probe
  misc_feature (1)..(25): SEQ ID NO: 2986; WAN024FPO_at; Start 46; Stop 70
tatcgtataaaaagaaaggcagcgc

SEQ ID NO: 215969 - DNA, 25 bp, Artificial
  probe
  misc_feature (1)..(25): SEQ ID NO: 2986; WAN024FPO_at; Start 93; Stop 117
gggaggcaaaacgtttgttactgca

SEQ ID NO: 215970 - DNA, 25 bp, Artificial
  probe
  misc_feature (1)..(25): SEQ ID NO: 2986; WAN024FPO_at; Start 163; Stop 187
tatggtgaagggaaaataagcattg

SEQ ID NO: 215971 - DNA, 25 bp, Artificial
  probe
  misc_feature (1)..(25): SEQ ID NO: 2986; WAN024FPO_at; Start 120; Stop 144
tacgtaccttgatgaaaatgtttca

SEQ ID NO: 215972 - DNA, 25 bp, Artificial
  probe
  misc_feature (1)..(25): SEQ ID NO: 2986; WAN024FPO_at; Start 364; Stop 388
gcaatcattcaagcaggaagtacag

SEQ ID NO: 215973 - DNA, 25 bp, Artificial
  probe
  misc_feature (1)..(25): SEQ ID NO: 2986; WAN024FPO_at; Start 345; Stop 369
tgcgattattgaggaaggtgcaatc

SEQ ID NO: 215974 - DNA, 25 bp, Artificial
  probe
  misc_feature (1)..(25): SEQ ID NO: 2986; WAN024FPO_at; Start 107; Stop 131
ttgttactgcaaatacgtaccttga

SEQ ID NO: 215975 - DNA, 25 bp, Artificial
  probe
  misc_feature (1)..(25): SEQ ID NO: 2986; WAN024FPO_at; Start 70; Stop 94
caatgcggtgggagagtgtatacgg

SEQ ID NO: 215976 - DNA, 25 bp, Artificial
  probe
  misc_feature (1)..(25): SEQ ID NO: 2986; WAN024FPO_at; Start 371; Stop 395
ttcaagcaggaagtacagttattgg

SEQ ID NO: 215977 - DNA, 25 bp, Artificial
  probe
  misc_feature (1)..(25): SEQ ID NO: 2986; WAN024FPO_at; Start 398; Stop 422
gaattccagcaggtgcaattgcagg

SEQ ID NO: 215978 - DNA, 25 bp, Artificial
  probe
  misc_feature (1)..(25): SEQ ID NO: 2986; WAN024FPO_at; Start 281; Stop 305
tacataaagacgtcttaattgaaga

SEQ ID NO: 215979 - DNA, 25 bp, Artificial
  probe
  misc_feature (1)..(25): SEQ ID NO: 2986; WAN024FPO_at; Start 336; Stop 360
tttaggtggtgcgattattgaggaa

SEQ ID NO: 215980 - DNA, 25 bp, Artificial
  probe
  misc_feature (1)..(25): SEQ ID NO: 2986; WAN024FPO_at; Start 148; Stop 172
aatggtatgtcaatgtatggtgaag

SEQ ID NO: 215981 - DNA, 25 bp, Artificial
  probe
  misc_feature (1)..(25): SEQ ID NO: 2986; WAN024FPO_at; Start 421; Stop 445
ggtggacatccagcaaaaccattca

SEQ ID NO: 215982 - DNA, 25 bp, Artificial
  probe
  misc_feature (1)..(25): SEQ ID NO: 2986; WAN024FPO_at; Start 429; Stop 453
tccagcaaaaccattcagatttaga

SEQ ID NO: 215983 - DNA, 25 bp, Artificial
  probe
  misc_feature (1)..(25): SEQ ID NO: 2986; WAN024FPO_at; Start 55; Stop 79
aaaagaaaggcagcgcaatgcggtg

SEQ ID NO: 215984 - DNA, 25 bp, Artificial
  probe
  misc_feature (1)..(25): SEQ ID NO: 2986; WAN024FPO_at; Start 229; Stop 253
tcctttcataattatgacttgggcg

SEQ ID NO: 215985 - DNA, 25 bp, Artificial
  probe
  misc_feature (1)..(25): SEQ ID NO: 2986; WAN024FPO_at; Start 195; Stop 219
ttttcattcaggattgaattgccaa

SEQ ID NO: 215986 - DNA, 25 bp, Artificial
  probe
  misc_feature (1)..(25): SEQ ID NO: 2986; WAN024FPO_at; Start 252; Stop 276
cgataaaattccttatgatgagagt

SEQ ID NO: 215987 - DNA, 25 bp, Artificial
  probe
  misc_feature (1)..(25): SEQ ID NO: 2986; WAN024FPO_at; Start 358; Stop 382
gaaggtgcaatcattcaagcaggaa

SEQ ID NO: 215988 - DNA, 25 bp, Artificial
  probe
  misc_feature (1)..(25): SEQ ID NO: 2986; WAN024FPO_at; Start 463; Stop 487
cattataatcaacttaaacggcaaa

SEQ ID NO: 215989 - DNA, 25 bp, Artificial
  probe
  misc_feature (1)..(25): SEQ ID NO: 2986; WAN024FPO_at; Start 324; Stop 348
taatgtgataattttaggtggtgcg

SEQ ID NO: 215990 - DNA, 25 bp, Artificial
  probe
  misc_feature (1)..(25): SEQ ID NO: 2986; WAN024FPO_at; Start 241; Stop 265
tatgacttgggcgataaaattcctt

SEQ ID NO: 215991 - DNA, 25 bp, Artificial
  probe
  misc_feature (1)..(25): SEQ ID NO: 2986; WAN024FPO_at; Start 293; Stop 317
tcttaattgaagataacgtctgggt

SEQ ID NO: 215992 - DNA, 25 bp, Artificial
  probe
  misc_feature (1)..(25): SEQ ID NO: 2986; WAN024FPO_at; Start 452; Stop 476
gaaacatggaacattataatcaact

SEQ ID NO: 215993 - DNA, 25 bp, Artificial
  probe
  misc_feature (1)..(25): SEQ ID NO: 2986; WAN024FPO_at; Start 270; Stop 294
tgagagttatatacataaagacgtc

SEQ ID NO: 215994 - DNA, 25 bp, Artificial
  probe
  misc_feature (1)..(25): SEQ ID NO: 2986; WAN024FPO_at; Start 182; Stop 206
gcattggtaaaaattttcattcagg

SEQ ID NO: 215995 - DNA, 25 bp, Artificial
  probe
  misc_feature (1)..(25): SEQ ID NO: 2986; WAN024FPO_at; Start 210; Stop 234
gaattgccaaattatcacttccttt

SEQ ID NO: 215996 - DNA, 25 bp, Artificial
  probe
  misc_feature (1)..(25): SEQ ID NO: 2986; WAN024FPO_at; Start 306; Stop 330
taacgtctgggtaggaaataatgtg

SEQ ID NO: 215997 - DNA, 25 bp, Artificial
  probe
  misc_feature (1)..(25): SEQ ID NO: 2986; WAN024FPO_at; Start 411; Stop 435
tgcaattgcaggtggacatccagca

SEQ ID NO: 215998 - DNA, 25 bp, Artificial
  probe
  misc_feature (1)..(25): SEQ ID NO: 2986; WAN024FPO_at; Start 135; Stop 159
aaatgtttcatttaatggtatgtca

SEQ ID NO: 215999 - DNA, 25 bp, Artificial
  probe
  misc_feature (1)..(25): SEQ ID NO: 1514; WAN024FPP_at; Start 790; Stop 814
ggtcgataccaaatttggcgcattg

SEQ ID NO: 216000 - DNA, 25 bp, Artificial
  probe
  misc_feature (1)..(25): SEQ ID NO: 1514; WAN024FPP_at; Start 553; Stop 577
gcacagttgctgttgattttaacga

SEQ ID NO: 216001 - DNA, 25 bp, Artificial
  probe
  misc_feature (1)..(25): SEQ ID NO: 1514; WAN024FPP_at; Start 708; Stop 732
tattgcatctgttgtgatgttagca

SEQ ID NO: 216002 - DNA, 25 bp, Artificial
  probe
  misc_feature (1)..(25): SEQ ID NO: 1514; WAN024FPP_at; Start 455; Stop 479
cttttttaggacatgttcaggtgat

SEQ ID NO: 216003 - DNA, 25 bp, Artificial
  probe
  misc_feature (1)..(25): SEQ ID NO: 1514; WAN024FPP_at; Start 929; Stop 953
ttttacagttagcacttgatagtgg

SEQ ID NO: 216004 - DNA, 25 bp, Artificial
  probe
  misc_feature (1)..(25): SEQ ID NO: 1514; WAN024FPP_at; Start 197; Stop 221
tcgccattcatcagcatgctttttt

SEQ ID NO: 216005 - DNA, 25 bp, Artificial
  probe
  misc_feature (1)..(25): SEQ ID NO: 1514; WAN024FPP_at; Start 20; Stop 44
agctgatatttgcattttttagcag

SEQ ID NO: 216006 - DNA, 25 bp, Artificial
  probe
  misc_feature (1)..(25): SEQ ID NO: 1514; WAN024FPP_at; Start 919; Stop 943
cataatcaagttttacagttagcac

SEQ ID NO: 216007 - DNA, 25 bp, Artificial
  probe
  misc_feature (1)..(25): SEQ ID NO: 1514; WAN024FPP_at; Start 561; Stop 585
gctgttgattttaacgattatcaat

SEQ ID NO: 216008 - DNA, 25 bp, Artificial
  probe
  misc_feature (1)..(25): SEQ ID NO: 1514; WAN024FPP_at; Start 591; Stop 615
tttttcagatgtctctctctctaaa

SEQ ID NO: 216009 - DNA, 25 bp, Artificial
  probe
  misc_feature (1)..(25): SEQ ID NO: 1514; WAN024FPP_at; Start 17; Stop 41
cgaagctgatatttgcattttttag

SEQ ID NO: 216010 - DNA, 25 bp, Artificial
  probe
  misc_feature (1)..(25): SEQ ID NO: 1514; WAN024FPP_at; Start 468; Stop 492
tgttcaggtgatttcccaatatagt

SEQ ID NO: 216011 - DNA, 25 bp, Artificial
  probe
  misc_feature (1)..(25): SEQ ID NO: 1514; WAN024FPP_at; Start 191; Stop 215
gaaatatcgccattcatcagcatgc

SEQ ID NO: 216012 - DNA, 25 bp, Artificial
  probe
  misc_feature (1)..(25): SEQ ID NO: 1514; WAN024FPP_at; Start 831; Stop 855
tcaagtgaaatggtttggatatggt

SEQ ID NO: 216013 - DNA, 25 bp, Artificial
  probe
  misc_feature (1)..(25): SEQ ID NO: 1514; WAN024FPP_at; Start 801; Stop 825
aatttggcgcattgtgtatgctacc

SEQ ID NO: 216014 - DNA, 25 bp, Artificial
  probe
  misc_feature (1)..(25): SEQ ID NO: 1514; WAN024FPP_at; Start 334; Stop 358
gaagttcgagataagaaatcaatag

SEQ ID NO: 216015 - DNA, 25 bp, Artificial
  probe
  misc_feature (1)..(25): SEQ ID NO: 1514; WAN024FPP_at; Start 864; Stop 888
ctttcaatttaaacttccgtggcag

SEQ ID NO: 216016 - DNA, 25 bp, Artificial
  probe
  misc_feature (1)..(25): SEQ ID NO: 1514; WAN024FPP_at; Start 329; Stop 353
ttaatgaagttcgagataagaaatc

SEQ ID NO: 216017 - DNA, 25 bp, Artificial
  probe
  misc_feature (1)..(25): SEQ ID NO: 1514; WAN024FPP_at; Start 177; Stop 201
aaaaatattatctcgaaatatcgcc

SEQ ID NO: 216018 - DNA, 25 bp, Artificial
  probe
  misc_feature (1)..(25): SEQ ID NO: 1514; WAN024FPP_at; Start 798; Stop 822
ccaaatttggcgcattgtgtatgct

SEQ ID NO: 216019 - DNA, 25 bp, Artificial
  probe
  misc_feature (1)..(25): SEQ ID NO: 1514; WAN024FPP_at; Start 863; Stop 887
gctttcaatttaaacttccgtggca

SEQ ID NO: 216020 - DNA, 25 bp, Artificial
  probe
  misc_feature (1)..(25): SEQ ID NO: 1514; WAN024FPP_at; Start 805; Stop 829
tggcgcattgtgtatgctaccattc

SEQ ID NO: 216021 - DNA, 25 bp, Artificial
  probe
  misc_feature (1)..(25): SEQ ID NO: 1514; WAN024FPP_at; Start 296; Stop 320
cgattttctatccaatattcatcta

SEQ ID NO: 216022 - DNA, 25 bp, Artificial
  probe
  misc_feature (1)..(25): SEQ ID NO: 1514; WAN024FPP_at; Start 786; Stop 810
taatggtcgataccaaatttggcgc

SEQ ID NO: 216023 - DNA, 25 bp, Artificial
  probe
  misc_feature (1)..(25): SEQ ID NO: 1514; WAN024FPP_at; Start 701; Stop 725
taacttttattgcatctgttgtgat

SEQ ID NO: 216024 - DNA, 25 bp, Artificial
  probe
  misc_feature (1)..(25): SEQ ID NO: 1514; WAN024FPP_at; Start 996; Stop 1020
gatcttttcaactaaaaatattcaa

SEQ ID NO: 216025 - DNA, 25 bp, Artificial
  probe
  misc_feature (1)..(25): SEQ ID NO: 1514; WAN024FPP_at; Start 340; Stop 364
cgagataagaaatcaatagtgttaa

SEQ ID NO: 216026 - DNA, 25 bp, Artificial
  probe
  misc_feature (1)..(25): SEQ ID NO: 1514; WAN024FPP_at; Start 195; Stop 219
tatcgccattcatcagcatgctttt

SEQ ID NO: 216027 - DNA, 25 bp, Artificial
  probe
  misc_feature (1)..(25): SEQ ID NO: 1514; WAN024FPP_at; Start 673; Stop 697
tggaaaagaggaaggaagatatctg

SEQ ID NO: 216028 - DNA, 25 bp, Artificial
  probe
  misc_feature (1)..(25): SEQ ID NO: 1514; WAN024FPP_at; Start 793; Stop 817
cgataccaaatttggcgcattgtgt

SEQ ID NO: 216029 - DNA, 25 bp, Artificial
  probe
  misc_feature (1)..(25): SEQ ID NO: 1514; WAN024FPP_at; Start 395; Stop 419
ctttattcgttatcaatacgattga

SEQ ID NO: 216030 - DNA, 25 bp, Artificial
  probe
  misc_feature (1)..(25): SEQ ID NO: 1514; WAN024FPP_at; Start 292; Stop 316
caatcgattttctatccaatattca

SEQ ID NO: 216031 - DNA, 25 bp, Artificial
  probe
  misc_feature (1)..(25): SEQ ID NO: 1514; WAN024FPP_at; Start 712; Stop 736
gcatctgttgtgatgttagcattag

SEQ ID NO: 216032 - DNA, 25 bp, Artificial
  probe
  misc_feature (1)..(25): SEQ ID NO: 1514; WAN024FPP_at; Start 453; Stop 477
tacttttttaggacatgttcaggtg

SEQ ID NO: 216033 - DNA, 25 bp, Artificial
  probe
  misc_feature (1)..(25): SEQ ID NO: 1691; WAN024FPQ_at; Start 511; Stop 535
gaatatttcacaatctatcctgaag

SEQ ID NO: 216034 - DNA, 25 bp, Artificial
  probe
  misc_feature (1)..(25): SEQ ID NO: 1691; WAN024FPQ_at; Start 197; Stop 221
gcgattatgcaagacttaaaattat

SEQ ID NO: 216035 - DNA, 25 bp, Artificial
  probe
  misc_feature (1)..(25): SEQ ID NO: 1691; WAN024FPQ_at; Start 133; Stop 157
tgtattgaaaatcaaaatcaatttg

SEQ ID NO: 216036 - DNA, 25 bp, Artificial
  probe
  misc_feature (1)..(25): SEQ ID NO: 1691; WAN024FPQ_at; Start 426; Stop 450
gaaagatgaattgttatgtcctgaa

SEQ ID NO: 216037 - DNA, 25 bp, Artificial
  probe
  misc_feature (1)..(25): SEQ ID NO: 1691; WAN024FPQ_at; Start 213; Stop 237
taaaattatatatgaaaatggaggt

SEQ ID NO: 216038 - DNA, 25 bp, Artificial
  probe
  misc_feature (1)..(25): SEQ ID NO: 1691; WAN024FPQ_at; Start 95; Stop 119
ctgattatgaaattattgaatggac

SEQ ID NO: 216039 - DNA, 25 bp, Artificial
  probe
  misc_feature (1)..(25): SEQ ID NO: 1691; WAN024FPQ_at; Start 470; Stop 494
aacgtcttggttatacttattctga

SEQ ID NO: 216040 - DNA, 25 bp, Artificial
  probe
  misc_feature (1)..(25): SEQ ID NO: 1691; WAN024FPQ_at; Start 19; Stop 43
cattattgttggttcggtggcaaac

SEQ ID NO: 216041 - DNA, 25 bp, Artificial
  probe
  misc_feature (1)..(25): SEQ ID NO: 1691; WAN024FPQ_at; Start 275; Stop 299
tagataagttgttggaaaataaagc

SEQ ID NO: 216042 - DNA, 25 bp, Artificial
  probe
  misc_feature (1)..(25): SEQ ID NO: 1691; WAN024FPQ_at; Start 394; Stop 418
ttgtatgatgaaatagaatttgatc

SEQ ID NO: 216043 - DNA, 25 bp, Artificial
  probe
  misc_feature (1)..(25): SEQ ID NO: 1691; WAN024FPQ_at; Start 160; Stop 184
caggatgcatatagagataaagcat

SEQ ID NO: 216044 - DNA, 25 bp, Artificial
  probe
  misc_feature (1)..(25): SEQ ID NO: 1691; WAN024FPQ_at; Start 455; Stop 479
atacacctgtatttaaacgtcttgg

SEQ ID NO: 216045 - DNA, 25 bp, Artificial
  probe
  misc_feature (1)..(25): SEQ ID NO: 1691; WAN024FPQ_at; Start 165; Stop 189
tgcatatagagataaagcatgggct

SEQ ID NO: 216046 - DNA, 25 bp, Artificial
  probe
  misc_feature (1)..(25): SEQ ID NO: 1691; WAN024FPQ_at; Start 487; Stop 511
tattctgactgtgttgtaaaaaacg

SEQ ID NO: 216047 - DNA, 25 bp, Artificial
  probe
  misc_feature (1)..(25): SEQ ID NO: 1691; WAN024FPQ_at; Start 284; Stop 308
tgttggaaaataaagcattctttgg

SEQ ID NO: 216048 - DNA, 25 bp, Artificial
  probe
  misc_feature (1)..(25): SEQ ID NO: 1691; WAN024FPQ_at; Start 295; Stop 319
aaagcattctttggagttcatcaag

SEQ ID NO: 216049 - DNA, 25 bp, Artificial
  probe
  misc_feature (1)..(25): SEQ ID NO: 1691; WAN024FPQ_at; Start 100; Stop 124
tatgaaattattgaatggactgaaa

SEQ ID NO: 216050 - DNA, 25 bp, Artificial
  probe
  misc_feature (1)..(25): SEQ ID NO: 1691; WAN024FPQ_at; Start 440; Stop 464
tatgtcctgaattaaatacacctgt

SEQ ID NO: 216051 - DNA, 25 bp, Artificial
  probe
  misc_feature (1)..(25): SEQ ID NO: 1691; WAN024FPQ_at; Start 498; Stop 522
tgttgtaaaaaacgaatatttcaca

SEQ ID NO: 216052 - DNA, 25 bp, Artificial
  probe
  misc_feature (1)..(25): SEQ ID NO: 1691; WAN024FPQ_at; Start 232; Stop 256
ggaggtatttatttagatactgatg

SEQ ID NO: 216053 - DNA, 25 bp, Artificial
  probe
  misc_feature (1)..(25): SEQ ID NO: 1691; WAN024FPQ_at; Start 490; Stop 514
tctgactgtgttgtaaaaaacgaat

SEQ ID NO: 216054 - DNA, 25 bp, Artificial
  probe
  misc_feature (1)..(25): SEQ ID NO: 1691; WAN024FPQ_at; Start 302; Stop 326
tctttggagttcatcaagttaatca

SEQ ID NO: 216055 - DNA, 25 bp, Artificial
  probe
  misc_feature (1)..(25): SEQ ID NO: 1691; WAN024FPQ_at; Start 606; Stop 630
tcattatagtgcttcttggacttcc

SEQ ID NO: 216056 - DNA, 25 bp, Artificial
  probe
  misc_feature (1)..(25): SEQ ID NO: 1691; WAN024FPQ_at; Start 526; Stop 550
tatcctgaagaatattttgatccga

SEQ ID NO: 216057 - DNA, 25 bp, Artificial
  probe
  misc_feature (1)..(25): SEQ ID NO: 1691; WAN024FPQ_at; Start 80; Stop 104
ggaaaaaattttgtcctgattatga

SEQ ID NO: 216058 - DNA, 25 bp, Artificial
  probe
  misc_feature (1)..(25): SEQ ID NO: 1691; WAN024FPQ_at; Start 2; Stop 26
tgatacctaaaaagattcattattg

SEQ ID NO: 216059 - DNA, 25 bp, Artificial
  probe
  misc_feature (1)..(25): SEQ ID NO: 1691; WAN024FPQ_at; Start 478; Stop 502
ggttatacttattctgactgtgttg

SEQ ID NO: 216060 - DNA, 25 bp, Artificial
  probe
  misc_feature (1)..(25): SEQ ID NO: 1691; WAN024FPQ_at; Start 535; Stop 559
gaatattttgatccgatttctttgg

SEQ ID NO: 216061 - DNA, 25 bp, Artificial
  probe
  misc_feature (1)..(25): SEQ ID NO: 1691; WAN024FPQ_at; Start 187; Stop 211
gcttttgtaagcgattatgcaagac

SEQ ID NO: 216062 - DNA, 25 bp, Artificial
  probe
  misc_feature (1)..(25): SEQ ID NO: 1691; WAN024FPQ_at; Start 177; Stop 201
taaagcatgggcttttgtaagcgat

SEQ ID NO: 216063 - DNA, 25 bp, Artificial
  probe
  misc_feature (1)..(25): SEQ ID NO: 1691; WAN024FPQ_at; Start 28; Stop 52
tggttcggtggcaaacctttatcaa

SEQ ID NO: 216064 - DNA, 25 bp, Artificial
  probe
  misc_feature (1)..(25): SEQ ID NO: 1691; WAN024FPQ_at; Start 15; Stop 39
gattcattattgttggttcggtggc

SEQ ID NO: 216065 - DNA, 25 bp, Artificial
  probe
  misc_feature (1)..(25): SEQ ID NO: 1691; WAN024FPQ_at; Start 182; Stop 206
catgggcttttgtaagcgattatgc

SEQ ID NO: 216066 - DNA, 25 bp, Artificial
  probe
  misc_feature (1)..(25): SEQ ID NO: 1691; WAN024FPQ_at; Start 305; Stop 329
ttggagttcatcaagttaatcatct

SEQ ID NO: 216067 - DNA, 25 bp, Artificial
  probe
  misc_feature (1)..(25): SEQ ID NO: 906; WAN024FPR_at; Start 140; Stop 164
cagatttttcaattatcagtgataa

SEQ ID NO: 216068 - DNA, 25 bp, Artificial
  probe
  misc_feature (1)..(25): SEQ ID NO: 906; WAN024FPR_at; Start 249; Stop 273
tgtgaaactgttgaaaaacttcaga

SEQ ID NO: 216069 - DNA, 25 bp, Artificial
  probe
  misc_feature (1)..(25): SEQ ID NO: 906; WAN024FPR_at; Start 397; Stop 421
gaagaggcttatgagaaatggaata

SEQ ID NO: 216070 - DNA, 25 bp, Artificial
  probe
  misc_feature (1)..(25): SEQ ID NO: 906; WAN024FPR_at; Start 72; Stop 96
taagagaacttataagagaatcgtt

SEQ ID NO: 216071 - DNA, 25 bp, Artificial
  probe
  misc_feature (1)..(25): SEQ ID NO: 906; WAN024FPR_at; Start 279; Stop 303
tatggaatatgagctaacttttacc

SEQ ID NO: 216072 - DNA, 25 bp, Artificial
  probe
  misc_feature (1)..(25): SEQ ID NO: 906; WAN024FPR_at; Start 87; Stop 111
gagaatcgtttattctatcactaag

SEQ ID NO: 216073 - DNA, 25 bp, Artificial
  probe
  misc_feature (1)..(25): SEQ ID NO: 906; WAN024FPR_at; Start 541; Stop 565
gctgcattcaattataaagaactag

SEQ ID NO: 216074 - DNA, 25 bp, Artificial
  probe
  misc_feature (1)..(25): SEQ ID NO: 906; WAN024FPR_at; Start 429; Stop 453
gaacaggattaattatgaaaatatc

SEQ ID NO: 216075 - DNA, 25 bp, Artificial
  probe
  misc_feature (1)..(25): SEQ ID NO: 906; WAN024FPR_at; Start 654; Stop 678
ttggctgaatggagagacacaaaca

SEQ ID NO: 216076 - DNA, 25 bp, Artificial
  probe
  misc_feature (1)..(25): SEQ ID NO: 906; WAN024FPR_at; Start 650; Stop 674
taaattggctgaatggagagacaca

SEQ ID NO: 216077 - DNA, 25 bp, Artificial
  probe
  misc_feature (1)..(25): SEQ ID NO: 906; WAN024FPR_at; Start 413; Stop 437
aatggaataaaagaaagaacaggat

SEQ ID NO: 216078 - DNA, 25 bp, Artificial
  probe
  misc_feature (1)..(25): SEQ ID NO: 906; WAN024FPR_at; Start 239; Stop 263
ccgaggattatgtgaaactgttgaa

SEQ ID NO: 216079 - DNA, 25 bp, Artificial
  probe
  misc_feature (1)..(25): SEQ ID NO: 906; WAN024FPR_at; Start 187; Stop 211
gaagaattgggtctgccgtatagaa

SEQ ID NO: 216080 - DNA, 25 bp, Artificial
  probe
  misc_feature (1)..(25): SEQ ID NO: 906; WAN024FPR_at; Start 108; Stop 132
taagtcaaatatgaggaagaggctc

SEQ ID NO: 216081 - DNA, 25 bp, Artificial
  probe
  misc_feature (1)..(25): SEQ ID NO: 906; WAN024FPR_at; Start 302; Stop 326
ccaataattcaaaatggaacacaga

SEQ ID NO: 216082 - DNA, 25 bp, Artificial
  probe
  misc_feature (1)..(25): SEQ ID NO: 906; WAN024FPR_at; Start 196; Stop 220
ggtctgccgtatagaacaccattta

SEQ ID NO: 216083 - DNA, 25 bp, Artificial
  probe
  misc_feature (1)..(25): SEQ ID NO: 906; WAN024FPR_at; Start 479; Stop 503
aatgttctttgaaattgcttaagga

SEQ ID NO: 216084 - DNA, 25 bp, Artificial
  probe
  misc_feature (1)..(25): SEQ ID NO: 906; WAN024FPR_at; Start 367; Stop 391
gaacttcattttttacattatgcta

SEQ ID NO: 216085 - DNA, 25 bp, Artificial
  probe
  misc_feature (1)..(25): SEQ ID NO: 906; WAN024FPR_at; Start 269; Stop 293
tcagaaagtatatggaatatgagct

SEQ ID NO: 216086 - DNA, 25 bp, Artificial
  probe
  misc_feature (1)..(25): SEQ ID NO: 906; WAN024FPR_at; Start 100; Stop 124
tctatcactaagtcaaatatgagga

SEQ ID NO: 216087 - DNA, 25 bp, Artificial
  probe
  misc_feature (1)..(25): SEQ ID NO: 906; WAN024FPR_at; Start 122; Stop 146
ggaagaggctcaaaaatacagattt

SEQ ID NO: 216088 - DNA, 25 bp, Artificial
  probe
  misc_feature (1)..(25): SEQ ID NO: 906; WAN024FPR_at; Start 335; Stop 359
gggagtatcctataggcatacttaa

SEQ ID NO: 216089 - DNA, 25 bp, Artificial
  probe
  misc_feature (1)..(25): SEQ ID NO: 906; WAN024FPR_at; Start 610; Stop 634
ggtacagacttattttattatgatc

SEQ ID NO: 216090 - DNA, 25 bp, Artificial
  probe
  misc_feature (1)..(25): SEQ ID NO: 906; WAN024FPR_at; Start 221; Stop 245
taggtctgtatattttttccgagga

SEQ ID NO: 216091 - DNA, 25 bp, Artificial
  probe
  misc_feature (1)..(25): SEQ ID NO: 906; WAN024FPR_at; Start 312; Stop 336
aaaatggaacacagaatatgacggg

SEQ ID NO: 216092 - DNA, 25 bp, Artificial
  probe
  misc_feature (1)..(25): SEQ ID NO: 906; WAN024FPR_at; Start 382; Stop 406
cattatgctaatcaagaagaggctt

SEQ ID NO: 216093 - DNA, 25 bp, Artificial
  probe
  misc_feature (1)..(25): SEQ ID NO: 906; WAN024FPR_at; Start 350; Stop 374
gcatacttaaggatattgaacttca

SEQ ID NO: 216094 - DNA, 25 bp, Artificial
  probe
  misc_feature (1)..(25): SEQ ID NO: 906; WAN024FPR_at; Start 590; Stop 614
ctagagggaatggtaatgtaggtac

SEQ ID NO: 216095 - DNA, 25 bp, Artificial
  probe
  misc_feature (1)..(25): SEQ ID NO: 906; WAN024FPR_at; Start 178; Stop 202
cgggtatatgaagaattgggtctgc

SEQ ID NO: 216096 - DNA, 25 bp, Artificial
  probe
  misc_feature (1)..(25): SEQ ID NO: 906; WAN024FPR_at; Start 11; Stop 35
agagttttcttttgaagatgttaca

SEQ ID NO: 216097 - DNA, 25 bp, Artificial
  probe
  misc_feature (1)..(25): SEQ ID NO: 906; WAN024FPR_at; Start 205; Stop 229
tatagaacaccatttataggtctgt

SEQ ID NO: 216098 - DNA, 25 bp, Artificial
  probe
  misc_feature (1)..(25): SEQ ID NO: 906; WAN024FPR_at; Start 597; Stop 621
gaatggtaatgtaggtacagactta

SEQ ID NO: 216099 - DNA, 25 bp, Artificial
  probe
  misc_feature (1)..(25): SEQ ID NO: 906; WAN024FPR_at; Start 289; Stop 313
gagctaacttttaccaataattcaa

SEQ ID NO: 216100 - DNA, 25 bp, Artificial
  probe
  misc_feature (1)..(25): SEQ ID NO: 906; WAN024FPR_at; Start 495; Stop 519
gcttaaggaatttgatactttagat

SEQ ID NO: 216101 - DNA, 25 bp, Artificial
  probe
  misc_feature (1)..(25): SEQ ID NO: 736; WAN024FPS_at; Start 553; Stop 577
tctgatgagactattgctctaggtc

SEQ ID NO: 216102 - DNA, 25 bp, Artificial
  probe
  misc_feature (1)..(25): SEQ ID NO: 736; WAN024FPS_at; Start 317; Stop 341
gtatcccagttcgaattgcccatag

SEQ ID NO: 216103 - DNA, 25 bp, Artificial
  probe
  misc_feature (1)..(25): SEQ ID NO: 736; WAN024FPS_at; Start 25; Stop 49
ggtggtttattttctgatggtatag

SEQ ID NO: 216104 - DNA, 25 bp, Artificial
  probe
  misc_feature (1)..(25): SEQ ID NO: 736; WAN024FPS_at; Start 284; Stop 308
tgtcaattgaattactgactgctaa

SEQ ID NO: 216105 - DNA, 25 bp, Artificial
  probe
  misc_feature (1)..(25): SEQ ID NO: 736; WAN024FPS_at; Start 827; Stop 851
cactagtatctgttgaatggcaaat

SEQ ID NO: 216106 - DNA, 25 bp, Artificial
  probe
  misc_feature (1)..(25): SEQ ID NO: 736; WAN024FPS_at; Start 254; Stop 278
ttatacatgttcacggaagtagcgc

SEQ ID NO: 216107 - DNA, 25 bp, Artificial
  probe
  misc_feature (1)..(25): SEQ ID NO: 736; WAN024FPS_at; Start 817; Stop 841
gaagggttaccactagtatctgttg

SEQ ID NO: 216108 - DNA, 25 bp, Artificial
  probe
  misc_feature (1)..(25): SEQ ID NO: 736; WAN024FPS_at; Start 371; Stop 395
tagataaactactacgaccgatatt

SEQ ID NO: 216109 - DNA, 25 bp, Artificial
  probe
  misc_feature (1)..(25): SEQ ID NO: 736; WAN024FPS_at; Start 749; Stop 773
taggtcaatttgatgatatgaaatc

SEQ ID NO: 216110 - DNA, 25 bp, Artificial
  probe
  misc_feature (1)..(25): SEQ ID NO: 736; WAN024FPS_at; Start 697; Stop 721
gaaatcaagaaattagtcattcaga

SEQ ID NO: 216111 - DNA, 25 bp, Artificial
  probe
  misc_feature (1)..(25): SEQ ID NO: 736; WAN024FPS_at; Start 96; Stop 120
tgatgtgacaattttagccactaat

SEQ ID NO: 216112 - DNA, 25 bp, Artificial
  probe
  misc_feature (1)..(25): SEQ ID NO: 736; WAN024FPS_at; Start 474; Stop 498
tatccataacgctagagatgtaaat

SEQ ID NO: 216113 - DNA, 25 bp, Artificial
  probe
  misc_feature (1)..(25): SEQ ID NO: 736; WAN024FPS_at; Start 466; Stop 490
tataagattatccataacgctagag

SEQ ID NO: 216114 - DNA, 25 bp, Artificial
  probe
  misc_feature (1)..(25): SEQ ID NO: 736; WAN024FPS_at; Start 312; Stop 336
tgctggtatcccagttcgaattgcc

SEQ ID NO: 216115 - DNA, 25 bp, Artificial
  probe
  misc_feature (1)..(25): SEQ ID NO: 736; WAN024FPS_at; Start 804; Stop 828
tccaagtttatatgaagggttacca

SEQ ID NO: 216116 - DNA, 25 bp, Artificial
  probe
  misc_feature (1)..(25): SEQ ID NO: 736; WAN024FPS_at; Start 710; Stop 734
tagtcattcagaaaaaactagaaga

SEQ ID NO: 216117 - DNA, 25 bp, Artificial
  probe
  misc_feature (1)..(25): SEQ ID NO: 736; WAN024FPS_at; Start 909; Stop 933
aactgttcaacaattatctatcgat

SEQ ID NO: 216118 - DNA, 25 bp, Artificial
  probe
  misc_feature (1)..(25): SEQ ID NO: 736; WAN024FPS_at; Start 863; Stop 887
aaagtatcctatctgaccgtgttac

SEQ ID NO: 216119 - DNA, 25 bp, Artificial
  probe
  misc_feature (1)..(25): SEQ ID NO: 736; WAN024FPS_at; Start 971; Stop 995
ctacttcagatagagaaagagtgtc

SEQ ID NO: 216120 - DNA, 25 bp, Artificial
  probe
  misc_feature (1)..(25): SEQ ID NO: 736; WAN024FPS_at; Start 80; Stop 104
tggacttaaacaagtatgatgtgac

SEQ ID NO: 216121 - DNA, 25 bp, Artificial
  probe
  misc_feature (1)..(25): SEQ ID NO: 736; WAN024FPS_at; Start 872; Stop 896
tatctgaccgtgttacacaagagtg

SEQ ID NO: 216122 - DNA, 25 bp, Artificial
  probe
  misc_feature (1)..(25): SEQ ID NO: 736; WAN024FPS_at; Start 128; Stop 152
tgaaaagtgataaggaaaaatttga

SEQ ID NO: 216123 - DNA, 25 bp, Artificial
  probe
  misc_feature (1)..(25): SEQ ID NO: 736; WAN024FPS_at; Start 776; Stop 800
ttgtgtcatcaatggatataatgtt

SEQ ID NO: 216124 - DNA, 25 bp, Artificial
  probe
  misc_feature (1)..(25): SEQ ID NO: 736; WAN024FPS_at; Start 401; Stop 425
gagtttatactcaggcatgtgcttg

SEQ ID NO: 216125 - DNA, 25 bp, Artificial
  probe
  misc_feature (1)..(25): SEQ ID NO: 736; WAN024FPS_at; Start 575; Stop 599
gtcatgttggacgttttaatactca

SEQ ID NO: 216126 - DNA, 25 bp, Artificial
  probe
  misc_feature (1)..(25): SEQ ID NO: 736; WAN024FPS_at; Start 392; Stop 416
tattttatcgagtttatactcaggc

SEQ ID NO: 216127 - DNA, 25 bp, Artificial
  probe
  misc_feature (1)..(25): SEQ ID NO: 736; WAN024FPS_at; Start 767; Stop 791
tgaaatcttttgtgtcatcaatgga

SEQ ID NO: 216128 - DNA, 25 bp, Artificial
  probe
  misc_feature (1)..(25): SEQ ID NO: 736; WAN024FPS_at; Start 90; Stop 114
caagtatgatgtgacaattttagcc

SEQ ID NO: 216129 - DNA, 25 bp, Artificial
  probe
  misc_feature (1)..(25): SEQ ID NO: 736; WAN024FPS_at; Start 564; Stop 588
tattgctctaggtcatgttggacgt

SEQ ID NO: 216130 - DNA, 25 bp, Artificial
  probe
  misc_feature (1)..(25): SEQ ID NO: 736; WAN024FPS_at; Start 37; Stop 61
tctgatggtataggaacttttattt

SEQ ID NO: 216131 - DNA, 25 bp, Artificial
  probe
  misc_feature (1)..(25): SEQ ID NO: 736; WAN024FPS_at; Start 989; Stop 1013
gagtgtcattgcaaaatattcagtt

SEQ ID NO: 216132 - DNA, 25 bp, Artificial
  probe
  misc_feature (1)..(25): SEQ ID NO: 736; WAN024FPS_at; Start 379; Stop 403
ctactacgaccgatattttatcgag

SEQ ID NO: 216133 - DNA, 25 bp, Artificial
  probe
  misc_feature (1)..(25): SEQ ID NO: 736; WAN024FPS_at; Start 883; Stop 907
gttacacaagagtgtatctatacag

SEQ ID NO: 216134 - DNA, 25 bp, Artificial
  probe
  misc_feature (1)..(25): SEQ ID NO: 736; WAN024FPS_at; Start 977; Stop 1001
cagatagagaaagagtgtcattgca

SEQ ID NO: 216135 - DNA, 25 bp, Artificial
  probe
  misc_feature (1)..(25): SEQ ID NO: 7437; WAN024FPT_at; Start 40; Stop 64
aactctctgtcacggacaaagagtc

SEQ ID NO: 216136 - DNA, 25 bp, Artificial
  probe
  misc_feature (1)..(25): SEQ ID NO: 7437; WAN024FPT_at; Start 97; Stop 121
gaaatcaaagttacagcaaacaata

SEQ ID NO: 216137 - DNA, 25 bp, Artificial
  probe
  misc_feature (1)..(25): SEQ ID NO: 7437; WAN024FPT_at; Start 125; Stop 149
ttgccataccaagaaaatcaatggg

SEQ ID NO: 216138 - DNA, 25 bp, Artificial
  probe
  misc_feature (1)..(25): SEQ ID NO: 7437; WAN024FPT_at; Start 42; Stop 66
ctctctgtcacggacaaagagtctt

SEQ ID NO: 216139 - DNA, 25 bp, Artificial
  probe
  misc_feature (1)..(25): SEQ ID NO: 7437; WAN024FPT_at; Start 110; Stop 134
cagcaaacaatatcattgccatacc

SEQ ID NO: 216140 - DNA, 25 bp, Artificial
  probe
  misc_feature (1)..(25): SEQ ID NO: 7437; WAN024FPT_at; Start 47; Stop 71
tgtcacggacaaagagtctttttta

SEQ ID NO: 216141 - DNA, 25 bp, Artificial
  probe
  misc_feature (1)..(25): SEQ ID NO: 7437; WAN024FPT_at; Start 45; Stop 69
tctgtcacggacaaagagtcttttt

SEQ ID NO: 216142 - DNA, 25 bp, Artificial
  probe
  misc_feature (1)..(25): SEQ ID NO: 7437; WAN024FPT_at; Start 11; Stop 35
tcttgaaaataattagattaccacg

SEQ ID NO: 216143 - DNA, 25 bp, Artificial
  probe
  misc_feature (1)..(25): SEQ ID NO: 7437; WAN024FPT_at; Start 14; Stop 38
tgaaaataattagattaccacgcaa

SEQ ID NO: 216144 - DNA, 25 bp, Artificial
  probe
  misc_feature (1)..(25): SEQ ID NO: 7437; WAN024FPT_at; Start 32; Stop 56
cacgcaaaaactctctgtcacggac

SEQ ID NO: 216145 - DNA, 25 bp, Artificial
  probe
  misc_feature (1)..(25): SEQ ID NO: 7437; WAN024FPT_at; Start 93; Stop 117
caaagaaatcaaagttacagcaaac

SEQ ID NO: 216146 - DNA, 25 bp, Artificial
  probe
  misc_feature (1)..(25): SEQ ID NO: 7437; WAN024FPT_at; Start 120; Stop 144
tatcattgccataccaagaaaatca

SEQ ID NO: 216147 - DNA, 25 bp, Artificial
  probe
  misc_feature (1)..(25): SEQ ID NO: 7437; WAN024FPT_at; Start 24; Stop 48
tagattaccacgcaaaaactctctg

SEQ ID NO: 216148 - DNA, 25 bp, Artificial
  probe
  misc_feature (1)..(25): SEQ ID NO: 7437; WAN024FPT_at; Start 113; Stop 137
caaacaatatcattgccataccaag

SEQ ID NO: 216149 - DNA, 25 bp, Artificial
  probe
  misc_feature (1)..(25): SEQ ID NO: 7437; WAN024FPT_at; Start 15; Stop 39
gaaaataattagattaccacgcaaa

SEQ ID NO: 216150 - DNA, 25 bp, Artificial
  probe
  misc_feature (1)..(25): SEQ ID NO: 7437; WAN024FPT_at; Start 26; Stop 50
gattaccacgcaaaaactctctgtc

SEQ ID NO: 216151 - DNA, 25 bp, Artificial
  probe
  misc_feature (1)..(25): SEQ ID NO: 7437; WAN024FPT_at; Start 117; Stop 141
caatatcattgccataccaagaaaa

SEQ ID NO: 216152 - DNA, 25 bp, Artificial
  probe
  misc_feature (1)..(25): SEQ ID NO: 7437; WAN024FPT_at; Start 115; Stop 139
aacaatatcattgccataccaagaa

SEQ ID NO: 216153 - DNA, 25 bp, Artificial
  probe
  misc_feature (1)..(25): SEQ ID NO: 7437; WAN024FPT_at; Start 31; Stop 55
ccacgcaaaaactctctgtcacgga

SEQ ID NO: 216154 - DNA, 25 bp, Artificial
  probe
  misc_feature (1)..(25): SEQ ID NO: 7437; WAN024FPT_at; Start 126; Stop 150
tgccataccaagaaaatcaatggga

SEQ ID NO: 216155 - DNA, 25 bp, Artificial
  probe
  misc_feature (1)..(25): SEQ ID NO: 7437; WAN024FPT_at; Start 76; Stop 100
tctaagaataaatctttcaaagaaa

SEQ ID NO: 216156 - DNA, 25 bp, Artificial
  probe
  misc_feature (1)..(25): SEQ ID NO: 7437; WAN024FPT_at; Start 36; Stop 60
caaaaactctctgtcacggacaaag

SEQ ID NO: 216157 - DNA, 25 bp, Artificial
  probe
  misc_feature (1)..(25): SEQ ID NO: 7437; WAN024FPT_at; Start 34; Stop 58
cgcaaaaactctctgtcacggacaa

SEQ ID NO: 216158 - DNA, 25 bp, Artificial
  probe
  misc_feature (1)..(25): SEQ ID NO: 7437; WAN024FPT_at; Start 35; Stop 59
gcaaaaactctctgtcacggacaaa

SEQ ID NO: 216159 - DNA, 25 bp, Artificial
  probe
  misc_feature (1)..(25): SEQ ID NO: 7437; WAN024FPT_at; Start 88; Stop 112
tctttcaaagaaatcaaagttacag

SEQ ID NO: 216160 - DNA, 25 bp, Artificial
  probe
  misc_feature (1)..(25): SEQ ID NO: 7437; WAN024FPT_at; Start 43; Stop 67
tctctgtcacggacaaagagtcttt

SEQ ID NO: 216161 - DNA, 25 bp, Artificial
  probe
  misc_feature (1)..(25): SEQ ID NO: 7437; WAN024FPT_at; Start 104; Stop 128
aagttacagcaaacaatatcattgc

SEQ ID NO: 216162 - DNA, 25 bp, Artificial
  probe
  misc_feature (1)..(25): SEQ ID NO: 7437; WAN024FPT_at; Start 90; Stop 114
tttcaaagaaatcaaagttacagca

SEQ ID NO: 216163 - DNA, 25 bp, Artificial
  probe
  misc_feature (1)..(25): SEQ ID NO: 7437; WAN024FPT_at; Start 38; Stop 62
aaaactctctgtcacggacaaagag

SEQ ID NO: 216164 - DNA, 25 bp, Artificial
  probe
  misc_feature (1)..(25): SEQ ID NO: 7437; WAN024FPT_at; Start 106; Stop 130
gttacagcaaacaatatcattgcca

SEQ ID NO: 216165 - DNA, 25 bp, Artificial
  probe
  misc_feature (1)..(25): SEQ ID NO: 7437; WAN024FPT_at; Start 29; Stop 53
taccacgcaaaaactctctgtcacg

SEQ ID NO: 216166 - DNA, 25 bp, Artificial
  probe
  misc_feature (1)..(25): SEQ ID NO: 7437; WAN024FPT_at; Start 101; Stop 125
tcaaagttacagcaaacaatatcat

SEQ ID NO: 216167 - DNA, 25 bp, Artificial
  probe
  misc_feature (1)..(25): SEQ ID NO: 7437; WAN024FPT_at; Start 33; Stop 57
acgcaaaaactctctgtcacggaca

SEQ ID NO: 216168 - DNA, 25 bp, Artificial
  probe
  misc_feature (1)..(25): SEQ ID NO: 7437; WAN024FPT_at; Start 20; Stop 44
taattagattaccacgcaaaaactc

SEQ ID NO: 216169 - DNA, 25 bp, Artificial
  probe
  misc_feature (1)..(25): SEQ ID NO: 5254; WAN024FPU_at; Start 234; Stop 258
agataagtcccaggtaaccgtattg

SEQ ID NO: 216170 - DNA, 25 bp, Artificial
  probe
  misc_feature (1)..(25): SEQ ID NO: 5254; WAN024FPU_at; Start 241; Stop 265
tcccaggtaaccgtattgtccacag

SEQ ID NO: 216171 - DNA, 25 bp, Artificial
  probe
  misc_feature (1)..(25): SEQ ID NO: 5254; WAN024FPU_at; Start 207; Stop 231
taattcattgaccaagaacttgagc

SEQ ID NO: 216172 - DNA, 25 bp, Artificial
  probe
  misc_feature (1)..(25): SEQ ID NO: 5254; WAN024FPU_at; Start 244; Stop 268
caggtaaccgtattgtccacagtca

SEQ ID NO: 216173 - DNA, 25 bp, Artificial
  probe
  misc_feature (1)..(25): SEQ ID NO: 5254; WAN024FPU_at; Start 114; Stop 138
aacattatttctatctttaccaagg

SEQ ID NO: 216174 - DNA, 25 bp, Artificial
  probe
  misc_feature (1)..(25): SEQ ID NO: 5254; WAN024FPU_at; Start 133; Stop 157
ccaaggaagaatttttcagacttag

SEQ ID NO: 216175 - DNA, 25 bp, Artificial
  probe
  misc_feature (1)..(25): SEQ ID NO: 5254; WAN024FPU_at; Start 93; Stop 117
tacttcttcaaaccacaattcaaca

SEQ ID NO: 216176 - DNA, 25 bp, Artificial
  probe
  misc_feature (1)..(25): SEQ ID NO: 5254; WAN024FPU_at; Start 199; Stop 223
gctatgtctaattcattgaccaaga

SEQ ID NO: 216177 - DNA, 25 bp, Artificial
  probe
  misc_feature (1)..(25): SEQ ID NO: 5254; WAN024FPU_at; Start 15; Stop 39
aatacgcaaaagaggctccgggata

SEQ ID NO: 216178 - DNA, 25 bp, Artificial
  probe
  misc_feature (1)..(25): SEQ ID NO: 5254; WAN024FPU_at; Start 119; Stop 143
tatttctatctttaccaaggaagaa

SEQ ID NO: 216179 - DNA, 25 bp, Artificial
  probe
  misc_feature (1)..(25): SEQ ID NO: 5254; WAN024FPU_at; Start 97; Stop 121
tcttcaaaccacaattcaacattat

SEQ ID NO: 216180 - DNA, 25 bp, Artificial
  probe
  misc_feature (1)..(25): SEQ ID NO: 5254; WAN024FPU_at; Start 148; Stop 172
tcagacttaggaataaaatattcag

SEQ ID NO: 216181 - DNA, 25 bp, Artificial
  probe
  misc_feature (1)..(25): SEQ ID NO: 5254; WAN024FPU_at; Start 179; Stop 203
caaacttctggcgaagacttgctat

SEQ ID NO: 216182 - DNA, 25 bp, Artificial
  probe
  misc_feature (1)..(25): SEQ ID NO: 5254; WAN024FPU_at; Start 175; Stop 199
gactcaaacttctggcgaagacttg

SEQ ID NO: 216183 - DNA, 25 bp, Artificial
  probe
  misc_feature (1)..(25): SEQ ID NO: 5254; WAN024FPU_at; Start 254; Stop 278
tattgtccacagtcaaatcctgccc

SEQ ID NO: 216184 - DNA, 25 bp, Artificial
  probe
  misc_feature (1)..(25): SEQ ID NO: 5254; WAN024FPU_at; Start 166; Stop 190
tattcagtagactcaaacttctggc

SEQ ID NO: 216185 - DNA, 25 bp, Artificial
  probe
  misc_feature (1)..(25): SEQ ID NO: 5254; WAN024FPU_at; Start 185; Stop 209
tctggcgaagacttgctatgtctaa

SEQ ID NO: 216186 - DNA, 25 bp, Artificial
  probe
  misc_feature (1)..(25): SEQ ID NO: 5254; WAN024FPU_at; Start 10; Stop 34
cttaaaatacgcaaaagaggctccg

SEQ ID NO: 216187 - DNA, 25 bp, Artificial
  probe
  misc_feature (1)..(25): SEQ ID NO: 5254; WAN024FPU_at; Start 24; Stop 48
aagaggctccgggataaatccctgc

SEQ ID NO: 216188 - DNA, 25 bp, Artificial
  probe
  misc_feature (1)..(25): SEQ ID NO: 5254; WAN024FPU_at; Start 170; Stop 194
cagtagactcaaacttctggcgaag

SEQ ID NO: 216189 - DNA, 25 bp, Artificial
  probe
  misc_feature (1)..(25): SEQ ID NO: 5254; WAN024FPU_at; Start 34; Stop 58
gggataaatccctgcctcgatttgt

SEQ ID NO: 216190 - DNA, 25 bp, Artificial
  probe
  misc_feature (1)..(25): SEQ ID NO: 5254; WAN024FPU_at; Start 216; Stop 240
gaccaagaacttgagcatagataag

SEQ ID NO: 216191 - DNA, 25 bp, Artificial
  probe
  misc_feature (1)..(25): SEQ ID NO: 5254; WAN024FPU_at; Start 6; Stop 30
tgtccttaaaatacgcaaaagaggc

SEQ ID NO: 216192 - DNA, 25 bp, Artificial
  probe
  misc_feature (1)..(25): SEQ ID NO: 5254; WAN024FPU_at; Start 138; Stop 162
gaagaatttttcagacttaggaata

SEQ ID NO: 216193 - DNA, 25 bp, Artificial
  probe
  misc_feature (1)..(25): SEQ ID NO: 5254; WAN024FPU_at; Start 81; Stop 105
tggtccacttcatacttcttcaaac

SEQ ID NO: 216194 - DNA, 25 bp, Artificial
  probe
  misc_feature (1)..(25): SEQ ID NO: 5254; WAN024FPU_at; Start 248; Stop 272
taaccgtattgtccacagtcaaatc

SEQ ID NO: 216195 - DNA, 25 bp, Artificial
  probe
  misc_feature (1)..(25): SEQ ID NO: 5254; WAN024FPU_at; Start 20; Stop 44
gcaaaagaggctccgggataaatcc

SEQ ID NO: 216196 - DNA, 25 bp, Artificial
  probe
  misc_feature (1)..(25): SEQ ID NO: 5254; WAN024FPU_at; Start 42; Stop 66
tccctgcctcgatttgttcttctat

SEQ ID NO: 216197 - DNA, 25 bp, Artificial
  probe
  misc_feature (1)..(25): SEQ ID NO: 5254; WAN024FPU_at; Start 68; Stop 92
tttttaataatcttggtccacttca

SEQ ID NO: 216198 - DNA, 25 bp, Artificial
  probe
  misc_feature (1)..(25): SEQ ID NO: 5254; WAN024FPU_at; Start 189; Stop 213
gcgaagacttgctatgtctaattca

SEQ ID NO: 216199 - DNA, 25 bp, Artificial
  probe
  misc_feature (1)..(25): SEQ ID NO: 5254; WAN024FPU_at; Start 2; Stop 26
tgattgtccttaaaatacgcaaaag

SEQ ID NO: 216200 - DNA, 25 bp, Artificial
  probe
  misc_feature (1)..(25): SEQ ID NO: 5254; WAN024FPU_at; Start 230; Stop 254
gcatagataagtcccaggtaaccgt

SEQ ID NO: 216201 - DNA, 25 bp, Artificial
  probe
  misc_feature (1)..(25): SEQ ID NO: 5254; WAN024FPU_at; Start 29; Stop 53
gctccgggataaatccctgcctcga

SEQ ID NO: 216202 - DNA, 25 bp, Artificial
  probe
  misc_feature (1)..(25): SEQ ID NO: 5254; WAN024FPU_at; Start 227; Stop 251
tgagcatagataagtcccaggtaac

SEQ ID NO: 216203 - DNA, 25 bp, Artificial
  probe
  misc_feature (1)..(25): SEQ ID NO: 1521; WAN024FPV_at; Start 230; Stop 254
tttttcataggtacgattcgatagg

SEQ ID NO: 216204 - DNA, 25 bp, Artificial
  probe
  misc_feature (1)..(25): SEQ ID NO: 1521; WAN024FPV_at; Start 2; Stop 26
tgagaattccaccagcgattaaaag

SEQ ID NO: 216205 - DNA, 25 bp, Artificial
  probe
  misc_feature (1)..(25): SEQ ID NO: 1521; WAN024FPV_at; Start 6; Stop 30
aattccaccagcgattaaaagacgc

SEQ ID NO: 216206 - DNA, 25 bp, Artificial
  probe
  misc_feature (1)..(25): SEQ ID NO: 1521; WAN024FPV_at; Start 131; Stop 155
tcccttttaaactatttgacatgtc

SEQ ID NO: 216207 - DNA, 25 bp, Artificial
  probe
  misc_feature (1)..(25): SEQ ID NO: 1521; WAN024FPV_at; Start 51; Stop 75
cgaaattccgtgtgccattaggtat

SEQ ID NO: 216208 - DNA, 25 bp, Artificial
  probe
  misc_feature (1)..(25): SEQ ID NO: 1521; WAN024FPV_at; Start 188; Stop 212
cacttgattgcggtctaatatccat

SEQ ID NO: 216209 - DNA, 25 bp, Artificial
  probe
  misc_feature (1)..(25): SEQ ID NO: 1521; WAN024FPV_at; Start 168; Stop 192
tctttgcgaatcaagttcatcactt

SEQ ID NO: 216210 - DNA, 25 bp, Artificial
  probe
  misc_feature (1)..(25): SEQ ID NO: 1521; WAN024FPV_at; Start 209; Stop 233
ccattgagctctctcgtcctttttt

SEQ ID NO: 216211 - DNA, 25 bp, Artificial
  probe
  misc_feature (1)..(25): SEQ ID NO: 1521; WAN024FPV_at; Start 158; Stop 182
tccttactcttctttgcgaatcaag

SEQ ID NO: 216212 - DNA, 25 bp, Artificial
  probe
  misc_feature (1)..(25): SEQ ID NO: 1521; WAN024FPV_at; Start 100; Stop 124
caagcaataccagccacaactgtta

SEQ ID NO: 216213 - DNA, 25 bp, Artificial
  probe
  misc_feature (1)..(25): SEQ ID NO: 1521; WAN024FPV_at; Start 72; Stop 96
gtattggccactcgttcctgacaac

SEQ ID NO: 216214 - DNA, 25 bp, Artificial
  probe
  misc_feature (1)..(25): SEQ ID NO: 1521; WAN024FPV_at; Start 152; Stop 176
tgtctctccttactcttctttgcga

SEQ ID NO: 216215 - DNA, 25 bp, Artificial
  probe
  misc_feature (1)..(25): SEQ ID NO: 1521; WAN024FPV_at; Start 65; Stop 89
ccattaggtattggccactcgttcc

SEQ ID NO: 216216 - DNA, 25 bp, Artificial
  probe
  misc_feature (1)..(25): SEQ ID NO: 1521; WAN024FPV_at; Start 111; Stop 135
agccacaactgttagtaaagtccct

SEQ ID NO: 216217 - DNA, 25 bp, Artificial
  probe
  misc_feature (1)..(25): SEQ ID NO: 1521; WAN024FPV_at; Start 203; Stop 227
taatatccattgagctctctcgtcc

SEQ ID NO: 216218 - DNA, 25 bp, Artificial
  probe
  misc_feature (1)..(25): SEQ ID NO: 1521; WAN024FPV_at; Start 140; Stop 164
aactatttgacatgtctctccttac

SEQ ID NO: 216219 - DNA, 25 bp, Artificial
  probe
  misc_feature (1)..(25): SEQ ID NO: 1521; WAN024FPV_at; Start 61; Stop 85
tgtgccattaggtattggccactcg

SEQ ID NO: 216220 - DNA, 25 bp, Artificial
  probe
  misc_feature (1)..(25): SEQ ID NO: 1521; WAN024FPV_at; Start 165; Stop 189
tcttctttgcgaatcaagttcatca

SEQ ID NO: 216221 - DNA, 25 bp, Artificial
  probe
  misc_feature (1)..(25): SEQ ID NO: 1521; WAN024FPV_at; Start 200; Stop 224
gtctaatatccattgagctctctcg

SEQ ID NO: 216222 - DNA, 25 bp, Artificial
  probe
  misc_feature (1)..(25): SEQ ID NO: 1521; WAN024FPV_at; Start 103; Stop 127
gcaataccagccacaactgttagta

SEQ ID NO: 216223 - DNA, 25 bp, Artificial
  probe
  misc_feature (1)..(25): SEQ ID NO: 1521; WAN024FPV_at; Start 181; Stop 205
agttcatcacttgattgcggtctaa

SEQ ID NO: 216224 - DNA, 25 bp, Artificial
  probe
  misc_feature (1)..(25): SEQ ID NO: 1521; WAN024FPV_at; Start 49; Stop 73
gccgaaattccgtgtgccattaggt

SEQ ID NO: 216225 - DNA, 25 bp, Artificial
  probe
  misc_feature (1)..(25): SEQ ID NO: 1521; WAN024FPV_at; Start 237; Stop 261
taggtacgattcgataggaaaatag

SEQ ID NO: 216226 - DNA, 25 bp, Artificial
  probe
  misc_feature (1)..(25): SEQ ID NO: 1521; WAN024FPV_at; Start 196; Stop 220
tgcggtctaatatccattgagctct

SEQ ID NO: 216227 - DNA, 25 bp, Artificial
  probe
  misc_feature (1)..(25): SEQ ID NO: 1521; WAN024FPV_at; Start 45; Stop 69
cagagccgaaattccgtgtgccatt

SEQ ID NO: 216228 - DNA, 25 bp, Artificial
  probe
  misc_feature (1)..(25): SEQ ID NO: 1521; WAN024FPV_at; Start 107; Stop 131
taccagccacaactgttagtaaagt

SEQ ID NO: 216229 - DNA, 25 bp, Artificial
  probe
  misc_feature (1)..(25): SEQ ID NO: 1521; WAN024FPV_at; Start 193; Stop 217
gattgcggtctaatatccattgagc

SEQ ID NO: 216230 - DNA, 25 bp, Artificial
  probe
  misc_feature (1)..(25): SEQ ID NO: 1521; WAN024FPV_at; Start 11; Stop 35
caccagcgattaaaagacgcaagtt

SEQ ID NO: 216231 - DNA, 25 bp, Artificial
  probe
  misc_feature (1)..(25): SEQ ID NO: 1521; WAN024FPV_at; Start 57; Stop 81
tccgtgtgccattaggtattggcca

SEQ ID NO: 216232 - DNA, 25 bp, Artificial
  probe
  misc_feature (1)..(25): SEQ ID NO: 1521; WAN024FPV_at; Start 69; Stop 93
taggtattggccactcgttcctgac

SEQ ID NO: 216233 - DNA, 25 bp, Artificial
  probe
  misc_feature (1)..(25): SEQ ID NO: 1521; WAN024FPV_at; Start 9; Stop 33
tccaccagcgattaaaagacgcaag

SEQ ID NO: 216234 - DNA, 25 bp, Artificial
  probe
  misc_feature (1)..(25): SEQ ID NO: 1521; WAN024FPV_at; Start 37; Stop 61
gtcaagaccagagccgaaattccgt

SEQ ID NO: 216235 - DNA, 25 bp, Artificial
  probe
  misc_feature (1)..(25): SEQ ID NO: 1521; WAN024FPV_at; Start 40; Stop 64
aagaccagagccgaaattccgtgtg

SEQ ID NO: 216236 - DNA, 25 bp, Artificial
  probe
  misc_feature (1)..(25): SEQ ID NO: 1521; WAN024FPV_at; Start 42; Stop 66
gaccagagccgaaattccgtgtgcc

SEQ ID NO: 216237 - DNA, 25 bp, Artificial
  probe
  misc_feature (1)..(25): SEQ ID NO: 1143; WAN024FPW_at; Start 738; Stop 762
caaggaacgttctttagcatggaat

SEQ ID NO: 216238 - DNA, 25 bp, Artificial
  probe
  misc_feature (1)..(25): SEQ ID NO: 1143; WAN024FPW_at; Start 95; Stop 119
ggacagagttctatttaggccagag

SEQ ID NO: 216239 - DNA, 25 bp, Artificial
  probe
  misc_feature (1)..(25): SEQ ID NO: 1143; WAN024FPW_at; Start 60; Stop 84
cggagcctcttttgcgtattttaag

SEQ ID NO: 216240 - DNA, 25 bp, Artificial
  probe
  misc_feature (1)..(25): SEQ ID NO: 1143; WAN024FPW_at; Start 389; Stop 413
tcaacagacgaagtcagccagcctt

SEQ ID NO: 216241 - DNA, 25 bp, Artificial
  probe
  misc_feature (1)..(25): SEQ ID NO: 1143; WAN024FPW_at; Start 538; Stop 562
gggccagttgagcttgctgttccaa

SEQ ID NO: 216242 - DNA, 25 bp, Artificial
  probe
  misc_feature (1)..(25): SEQ ID NO: 1143; WAN024FPW_at; Start 588; Stop 612
agtgcatgatcccaaggctcgtctc

SEQ ID NO: 216243 - DNA, 25 bp, Artificial
  probe
  misc_feature (1)..(25): SEQ ID NO: 1143; WAN024FPW_at; Start 192; Stop 216
ggttggcacagtttgtaccttcttg

SEQ ID NO: 216244 - DNA, 25 bp, Artificial
  probe
  misc_feature (1)..(25): SEQ ID NO: 1143; WAN024FPW_at; Start 607; Stop 631
cgtctcctgggtagacatgctggga

SEQ ID NO: 216245 - DNA, 25 bp, Artificial
  probe
  misc_feature (1)..(25): SEQ ID NO: 1143; WAN024FPW_at; Start 302; Stop 326
tcttgactcatgcaacagaccttga

SEQ ID NO: 216246 - DNA, 25 bp, Artificial
  probe
  misc_feature (1)..(25): SEQ ID NO: 1143; WAN024FPW_at; Start 816; Stop 840
gaatcgtcagaagcaagaagccact

SEQ ID NO: 216247 - DNA, 25 bp, Artificial
  probe
  misc_feature (1)..(25): SEQ ID NO: 1143; WAN024FPW_at; Start 142; Stop 166
actgaggcaggactagtttatgacc

SEQ ID NO: 216248 - DNA, 25 bp, Artificial
  probe
  misc_feature (1)..(25): SEQ ID NO: 1143; WAN024FPW_at; Start 340; Stop 364
aatcgtgatcttttaacagcccctg

SEQ ID NO: 216249 - DNA, 25 bp, Artificial
  probe
  misc_feature (1)..(25): SEQ ID NO: 1143; WAN024FPW_at; Start 26; Stop 50
aaatagaagaacaaatcgaggcagg

SEQ ID NO: 216250 - DNA, 25 bp, Artificial
  probe
  misc_feature (1)..(25): SEQ ID NO: 1143; WAN024FPW_at; Start 81; Stop 105
taaggacaatcaatggacagagttc

SEQ ID NO: 216251 - DNA, 25 bp, Artificial
  probe
  misc_feature (1)..(25): SEQ ID NO: 1143; WAN024FPW_at; Start 575; Stop 599
tagaggcaggcatagtgcatgatcc

SEQ ID NO: 216252 - DNA, 25 bp, Artificial
  probe
  misc_feature (1)..(25): SEQ ID NO: 1143; WAN024FPW_at; Start 860; Stop 884
cctatgaaaaggacgagagagctca

SEQ ID NO: 216253 - DNA, 25 bp, Artificial
  probe
  misc_feature (1)..(25): SEQ ID NO: 1143; WAN024FPW_at; Start 358; Stop 382
gcccctgaattaaaggaagcgatgt

SEQ ID NO: 216254 - DNA, 25 bp, Artificial
  probe
  misc_feature (1)..(25): SEQ ID NO: 1143; WAN024FPW_at; Start 283; Stop 307
gacatcactattcgccagctcttga

SEQ ID NO: 216255 - DNA, 25 bp, Artificial
  probe
  misc_feature (1)..(25): SEQ ID NO: 1143; WAN024FPW_at; Start 160; Stop 184
tatgacctagctagtgtcagcaagg

SEQ ID NO: 216256 - DNA, 25 bp, Artificial
  probe
  misc_feature (1)..(25): SEQ ID NO: 1143; WAN024FPW_at; Start 760; Stop 784
aatttggaaggagattggctagacc

SEQ ID NO: 216257 - DNA, 25 bp, Artificial
  probe
  misc_feature (1)..(25): SEQ ID NO: 1143; WAN024FPW_at; Start 407; Stop 431
cagcctttctttattcggatgtcca

SEQ ID NO: 216258 - DNA, 25 bp, Artificial
  probe
  misc_feature (1)..(25): SEQ ID NO: 1143; WAN024FPW_at; Start 491; Stop 515
taaaggatcaagtctggaaaccttg

SEQ ID NO: 216259 - DNA, 25 bp, Artificial
  probe
  misc_feature (1)..(25): SEQ ID NO: 1143; WAN024FPW_at; Start 125; Stop 149
cagagcatggcttgcagactgaggc

SEQ ID NO: 216260 - DNA, 25 bp, Artificial
  probe
  misc_feature (1)..(25): SEQ ID NO: 1143; WAN024FPW_at; Start 833; Stop 857
aagccactattttcctatcgaatcg

SEQ ID NO: 216261 - DNA, 25 bp, Artificial
  probe
  misc_feature (1)..(25): SEQ ID NO: 1143; WAN024FPW_at; Start 775; Stop 799
tggctagaccatacgggctatacag

SEQ ID NO: 216262 - DNA, 25 bp, Artificial
  probe
  misc_feature (1)..(25): SEQ ID NO: 1143; WAN024FPW_at; Start 263; Stop 287
tacctgagagtgattatccagacat

SEQ ID NO: 216263 - DNA, 25 bp, Artificial
  probe
  misc_feature (1)..(25): SEQ ID NO: 1143; WAN024FPW_at; Start 848; Stop 872
tatcgaatcgtacctatgaaaagga

SEQ ID NO: 216264 - DNA, 25 bp, Artificial
  probe
  misc_feature (1)..(25): SEQ ID NO: 1143; WAN024FPW_at; Start 558; Stop 582
tccaacagttagaggtgtagaggca

SEQ ID NO: 216265 - DNA, 25 bp, Artificial
  probe
  misc_feature (1)..(25): SEQ ID NO: 1143; WAN024FPW_at; Start 373; Stop 397
gaagcgatgtttcatctcaacagac

SEQ ID NO: 216266 - DNA, 25 bp, Artificial
  probe
  misc_feature (1)..(25): SEQ ID NO: 1143; WAN024FPW_at; Start 801; Stop 825
tacctttatcatgtggaatcgtcag

SEQ ID NO: 216267 - DNA, 25 bp, Artificial
  probe
  misc_feature (1)..(25): SEQ ID NO: 1143; WAN024FPW_at; Start 874; Stop 898
gagagagctcaatggatattagacc

SEQ ID NO: 216268 - DNA, 25 bp, Artificial
  probe
  misc_feature (1)..(25): SEQ ID NO: 1143; WAN024FPW_at; Start 209; Stop 233
ccttcttgtgggaaataggtcaatt

SEQ ID NO: 216269 - DNA, 25 bp, Artificial
  probe
  misc_feature (1)..(25): SEQ ID NO: 1143; WAN024FPW_at; Start 722; Stop 746
tttctcctttggatgacaaggaacg

SEQ ID NO: 216270 - DNA, 25 bp, Artificial
  probe
  misc_feature (1)..(25): SEQ ID NO: 1143; WAN024FPW_at; Start 626; Stop 650
ctgggagtgctggtttattttcgac

SEQ ID NO: 216271 - DNA, 25 bp, Artificial
  probe
  misc_feature (1)..(25): SEQ ID NO: 3940; WAN024FPX_at; Start 495; Stop 519
cgaaagtttcttggaatcatctgaa

SEQ ID NO: 216272 - DNA, 25 bp, Artificial
  probe
  misc_feature (1)..(25): SEQ ID NO: 3940; WAN024FPX_at; Start 90; Stop 114
tattgaaacccttggaatgaaggcc

SEQ ID NO: 216273 - DNA, 25 bp, Artificial
  probe
  misc_feature (1)..(25): SEQ ID NO: 3940; WAN024FPX_at; Start 580; Stop 604
gttacctgggacttatctatgctca

SEQ ID NO: 216274 - DNA, 25 bp, Artificial
  probe
  misc_feature (1)..(25): SEQ ID NO: 3940; WAN024FPX_at; Start 124; Stop 148
gaatcggcctttctgtcactaggtg

SEQ ID NO: 216275 - DNA, 25 bp, Artificial
  probe
  misc_feature (1)..(25): SEQ ID NO: 3940; WAN024FPX_at; Start 612; Stop 636
ggtcaatgaattagacatagcaagt

SEQ ID NO: 216276 - DNA, 25 bp, Artificial
  probe
  misc_feature (1)..(25): SEQ ID NO: 3940; WAN024FPX_at; Start 278; Stop 302
tatctaaaacagattcgattcatcg

SEQ ID NO: 216277 - DNA, 25 bp, Artificial
  probe
  misc_feature (1)..(25): SEQ ID NO: 3940; WAN024FPX_at; Start 322; Stop 346
ggctacgcttttgaaattttctcac

SEQ ID NO: 216278 - DNA, 25 bp, Artificial
  probe
  misc_feature (1)..(25): SEQ ID NO: 3940; WAN024FPX_at; Start 393; Stop 417
tctagtagaagtaggagaaaagcct

SEQ ID NO: 216279 - DNA, 25 bp, Artificial
  probe
  misc_feature (1)..(25): SEQ ID NO: 3940; WAN024FPX_at; Start 554; Stop 578
ggcaggatttgactgtggacaatac

SEQ ID NO: 216280 - DNA, 25 bp, Artificial
  probe
  misc_feature (1)..(25): SEQ ID NO: 3940; WAN024FPX_at; Start 462; Stop 486
gatttctatggaattacatctccca

SEQ ID NO: 216281 - DNA, 25 bp, Artificial
  probe
  misc_feature (1)..(25): SEQ ID NO: 3940; WAN024FPX_at; Start 305; Stop 329
tatataaaggtcaaaatggctacgc

SEQ ID NO: 216282 - DNA, 25 bp, Artificial
  probe
  misc_feature (1)..(25): SEQ ID NO: 3940; WAN024FPX_at; Start 137; Stop 161
tgtcactaggtgaccaaacgggtct

SEQ ID NO: 216283 - DNA, 25 bp, Artificial
  probe
  misc_feature (1)..(25): SEQ ID NO: 3940; WAN024FPX_at; Start 257; Stop 281
ccttagaaattgaaggaatcttatc

SEQ ID NO: 216284 - DNA, 25 bp, Artificial
  probe
  misc_feature (1)..(25): SEQ ID NO: 3940; WAN024FPX_at; Start 360; Stop 384
gattttgattcatgcggaagatgac

SEQ ID NO: 216285 - DNA, 25 bp, Artificial
  probe
  misc_feature (1)..(25): SEQ ID NO: 3940; WAN024FPX_at; Start 524; Stop 548
gggcatcccttgattttattccagc

SEQ ID NO: 216286 - DNA, 25 bp, Artificial
  probe
  misc_feature (1)..(25): SEQ ID NO: 3940; WAN024FPX_at; Start 192; Stop 216
tatgcgtactcgtaaggtagaggga

SEQ ID NO: 216287 - DNA, 25 bp, Artificial
  probe
  misc_feature (1)..(25): SEQ ID NO: 3940; WAN024FPX_at; Start 116; Stop 140
tgttagaagaatcggcctttctgtc

SEQ ID NO: 216288 - DNA, 25 bp, Artificial
  probe
  misc_feature (1)..(25): SEQ ID NO: 3940; WAN024FPX_at; Start 423; Stop 447
tcaaacagatttggcatcaatttct

SEQ ID NO: 216289 - DNA, 25 bp, Artificial
  probe
  misc_feature (1)..(25): SEQ ID NO: 3940; WAN024FPX_at; Start 565; Stop 589
actgtggacaatacggttacctggg

SEQ ID NO: 216290 - DNA, 25 bp, Artificial
  probe
  misc_feature (1)..(25): SEQ ID NO: 3940; WAN024FPX_at; Start 476; Stop 500
tacatctcccaactgatatcgaaag

SEQ ID NO: 216291 - DNA, 25 bp, Artificial
  probe
  misc_feature (1)..(25): SEQ ID NO: 3940; WAN024FPX_at; Start 181; Stop 205
gaagctcccagtatgcgtactcgta

SEQ ID NO: 216292 - DNA, 25 bp, Artificial
  probe
  misc_feature (1)..(25): SEQ ID NO: 3940; WAN024FPX_at; Start 625; Stop 649
gacatagcaagtcttcgccagaagt

SEQ ID NO: 216293 - DNA, 25 bp, Artificial
  probe
  misc_feature (1)..(25): SEQ ID NO: 3940; WAN024FPX_at; Start 640; Stop 664
cgccagaagtttgagtctactgaat

SEQ ID NO: 216294 - DNA, 25 bp, Artificial
  probe
  misc_feature (1)..(25): SEQ ID NO: 3940; WAN024FPX_at; Start 27; Stop 51
tcagattgtacggattattcctact

SEQ ID NO: 216295 - DNA, 25 bp, Artificial
  probe
  misc_feature (1)..(25): SEQ ID NO: 3940; WAN024FPX_at; Start 166; Stop 190
aagctggttttagaagaagctccca

SEQ ID NO: 216296 - DNA, 25 bp, Artificial
  probe
  misc_feature (1)..(25): SEQ ID NO: 3940; WAN024FPX_at; Start 147; Stop 171
tgaccaaacgggtcttgaaaagctg

SEQ ID NO: 216297 - DNA, 25 bp, Artificial
  probe
  misc_feature (1)..(25): SEQ ID NO: 3940; WAN024FPX_at; Start 669; Stop 693
tattcctaagtctgaaaaattcttc

SEQ ID NO: 216298 - DNA, 25 bp, Artificial
  probe
  misc_feature (1)..(25): SEQ ID NO: 3940; WAN024FPX_at; Start 597; Stop 621
tatgctcaagttcttggtcaatgaa

SEQ ID NO: 216299 - DNA, 25 bp, Artificial
  probe
  misc_feature (1)..(25): SEQ ID NO: 3940; WAN024FPX_at; Start 15; Stop 39
tatgaatgtaaatcagattgtacgg

SEQ ID NO: 216300 - DNA, 25 bp, Artificial
  probe
  misc_feature (1)..(25): SEQ ID NO: 3940; WAN024FPX_at; Start 1; Stop 25
gtgacggaggaatttatgaatgtaa

SEQ ID NO: 216301 - DNA, 25 bp, Artificial
  probe
  misc_feature (1)..(25): SEQ ID NO: 3940; WAN024FPX_at; Start 237; Stop 261
gattgtcaaggtggaaaatccctta

SEQ ID NO: 216302 - DNA, 25 bp, Artificial
  probe
  misc_feature (1)..(25): SEQ ID NO: 3940; WAN024FPX_at; Start 293; Stop 317
cgattcatcgattatataaaggtca

SEQ ID NO: 216303 - DNA, 25 bp, Artificial
  probe
  misc_feature (1)..(25): SEQ ID NO: 3940; WAN024FPX_at; Start 222; Stop 246
aaaactagctagattgattgtcaag

SEQ ID NO: 216304 - DNA, 25 bp, Artificial
  probe
  misc_feature (1)..(25): SEQ ID NO: 3940; WAN024FPX_at; Start 407; Stop 431
gagaaaagcctgaatttcaaacaga

SEQ ID NO: 216305 - DNA, 25 bp, Artificial
  probe
  misc_feature (1)..(25): SEQ ID NO: 2344; WAN024FPY_at; Start 481; Stop 505
ttcctgatcgcaacacatgggcagt

SEQ ID NO: 216306 - DNA, 25 bp, Artificial
  probe
  misc_feature (1)..(25): SEQ ID NO: 2344; WAN024FPY_at; Start 771; Stop 795
taaaggagccagtctgataggaccg

SEQ ID NO: 216307 - DNA, 25 bp, Artificial
  probe
  misc_feature (1)..(25): SEQ ID NO: 2344; WAN024FPY_at; Start 341; Stop 365
ttcaggagaccaatgcgggaacagc

SEQ ID NO: 216308 - DNA, 25 bp, Artificial
  probe
  misc_feature (1)..(25): SEQ ID NO: 2344; WAN024FPY_at; Start 428; Stop 452
tggcaccgacactgggagagatagt

SEQ ID NO: 216309 - DNA, 25 bp, Artificial
  probe
  misc_feature (1)..(25): SEQ ID NO: 2344; WAN024FPY_at; Start 755; Stop 779
cctatacagctttccttaaaggagc

SEQ ID NO: 216310 - DNA, 25 bp, Artificial
  probe
  misc_feature (1)..(25): SEQ ID NO: 2344; WAN024FPY_at; Start 37; Stop 61
tcgcaaagaagagtaaggagagaca

SEQ ID NO: 216311 - DNA, 25 bp, Artificial
  probe
  misc_feature (1)..(25): SEQ ID NO: 2344; WAN024FPY_at; Start 372; Stop 396
gcttcagtatgtttgtcctgtcgga

SEQ ID NO: 216312 - DNA, 25 bp, Artificial
  probe
  misc_feature (1)..(25): SEQ ID NO: 2344; WAN024FPY_at; Start 494; Stop 518
cacatgggcagttggaccagttatc

SEQ ID NO: 216313 - DNA, 25 bp, Artificial
  probe
  misc_feature (1)..(25): SEQ ID NO: 2344; WAN024FPY_at; Start 139; Stop 163
tacctaatggcacacggaatttcgg

SEQ ID NO: 216314 - DNA, 25 bp, Artificial
  probe
  misc_feature (1)..(25): SEQ ID NO: 2344; WAN024FPY_at; Start 124; Stop 148
ggaacgagtggccaatacctaatgg

SEQ ID NO: 216315 - DNA, 25 bp, Artificial
  probe
  misc_feature (1)..(25): SEQ ID NO: 2344; WAN024FPY_at; Start 437; Stop 461
cactgggagagatagtttccatcat

SEQ ID NO: 216316 - DNA, 25 bp, Artificial
  probe
  misc_feature (1)..(25): SEQ ID NO: 2344; WAN024FPY_at; Start 732; Stop 756
tatccttatcgggactgtctttgcc

SEQ ID NO: 216317 - DNA, 25 bp, Artificial
  probe
  misc_feature (1)..(25): SEQ ID NO: 2344; WAN024FPY_at; Start 178; Stop 202
aacttgcgtcttttaatcgctggtg

SEQ ID NO: 216318 - DNA, 25 bp, Artificial
  probe
  misc_feature (1)..(25): SEQ ID NO: 2344; WAN024FPY_at; Start 543; Stop 567
gggtctcttttctgccttgacttat

SEQ ID NO: 216319 - DNA, 25 bp, Artificial
  probe
  misc_feature (1)..(25): SEQ ID NO: 2344; WAN024FPY_at; Start 152; Stop 176
acggaatttcggctctggtcttgac

SEQ ID NO: 216320 - DNA, 25 bp, Artificial
  probe
  misc_feature (1)..(25): SEQ ID NO: 2344; WAN024FPY_at; Start 189; Stop 213
tttaatcgctggtggaattctcatg

SEQ ID NO: 216321 - DNA, 25 bp, Artificial
  probe
  misc_feature (1)..(25): SEQ ID NO: 2344; WAN024FPY_at; Start 803; Stop 827
caagcttgttggcttcaattgagcc

SEQ ID NO: 216322 - DNA, 25 bp, Artificial
  probe
  misc_feature (1)..(25): SEQ ID NO: 2344; WAN024FPY_at; Start 704; Stop 728
ttgattttctccttgcgtttgcagg

SEQ ID NO: 216323 - DNA, 25 bp, Artificial
  probe
  misc_feature (1)..(25): SEQ ID NO: 2344; WAN024FPY_at; Start 257; Stop 281
taaaggatagaaagagtttgctgtc

SEQ ID NO: 216324 - DNA, 25 bp, Artificial
  probe
  misc_feature (1)..(25): SEQ ID NO: 2344; WAN024FPY_at; Start 325; Stop 349
gcctatctgtctgctattcaggaga

SEQ ID NO: 216325 - DNA, 25 bp, Artificial
  probe
  misc_feature (1)..(25): SEQ ID NO: 2344; WAN024FPY_at; Start 90; Stop 114
aacagttgtggctggtattgcttgg

SEQ ID NO: 216326 - DNA, 25 bp, Artificial
  probe
  misc_feature (1)..(25): SEQ ID NO: 2344; WAN024FPY_at; Start 466; Stop 490
gccatcggaggaaccttcctgatcg

SEQ ID NO: 216327 - DNA, 25 bp, Artificial
  probe
  misc_feature (1)..(25): SEQ ID NO: 2344; WAN024FPY_at; Start 508; Stop 532
gaccagttatccatgacacctgctg

SEQ ID NO: 216328 - DNA, 25 bp, Artificial
  probe
  misc_feature (1)..(25): SEQ ID NO: 2344; WAN024FPY_at; Start 813; Stop 837
ggcttcaattgagccaatatcggcg

SEQ ID NO: 216329 - DNA, 25 bp, Artificial
  probe
  misc_feature (1)..(25): SEQ ID NO: 2344; WAN024FPY_at; Start 58; Stop 82
gacatgtcaaatagtttaaaaggga

SEQ ID NO: 216330 - DNA, 25 bp, Artificial
  probe
  misc_feature (1)..(25): SEQ ID NO: 2344; WAN024FPY_at; Start 309; Stop 333
ttttctcaaccaattcgcctatctg

SEQ ID NO: 216331 - DNA, 25 bp, Artificial
  probe
  misc_feature (1)..(25): SEQ ID NO: 2344; WAN024FPY_at; Start 786; Stop 810
gataggaccggtcaagtcaagcttg

SEQ ID NO: 216332 - DNA, 25 bp, Artificial
  probe
  misc_feature (1)..(25): SEQ ID NO: 2344; WAN024FPY_at; Start 294; Stop 318
tgctctgattggtctttttctcaac

SEQ ID NO: 216333 - DNA, 25 bp, Artificial
  probe
  misc_feature (1)..(25): SEQ ID NO: 2344; WAN024FPY_at; Start 740; Stop 764
tcgggactgtctttgcctatacagc

SEQ ID NO: 216334 - DNA, 25 bp, Artificial
  probe
  misc_feature (1)..(25): SEQ ID NO: 2344; WAN024FPY_at; Start 584; Stop 608
tacccatagccttgattaaaaagtg

SEQ ID NO: 216335 - DNA, 25 bp, Artificial
  probe
  misc_feature (1)..(25): SEQ ID NO: 2344; WAN024FPY_at; Start 79; Stop 103
gggactttactaacagttgtggctg

SEQ ID NO: 216336 - DNA, 25 bp, Artificial
  probe
  misc_feature (1)..(25): SEQ ID NO: 2344; WAN024FPY_at; Start 412; Stop 436
tgtatcaaggatagggtggcaccga

SEQ ID NO: 216337 - DNA, 25 bp, Artificial
  probe
  misc_feature (1)..(25): SEQ ID NO: 2344; WAN024FPY_at; Start 119; Stop 143
tgtcaggaacgagtggccaatacct

SEQ ID NO: 216338 - DNA, 25 bp, Artificial
  probe
  misc_feature (1)..(25): SEQ ID NO: 2344; WAN024FPY_at; Start 643; Stop 667
atagcaggtttggtcgcccttcctt

SEQ ID NO: 216339 - DNA, 25 bp, Artificial
  probe
  misc_feature (1)..(25): SEQ ID NO: 3869; WAN024FPZ_at; Start 329; Stop 353
ccgtgcgtcatgtaggaaattcagc

SEQ ID NO: 216340 - DNA, 25 bp, Artificial
  probe
  misc_feature (1)..(25): SEQ ID NO: 3869; WAN024FPZ_at; Start 311; Stop 335
tgatccatgatgttgaaaccgtgcg

SEQ ID NO: 216341 - DNA, 25 bp, Artificial
  probe
  misc_feature (1)..(25): SEQ ID NO: 3869; WAN024FPZ_at; Start 172; Stop 196
tatcgggcaaccaagtctgtgtttg

SEQ ID NO: 216342 - DNA, 25 bp, Artificial
  probe
  misc_feature (1)..(25): SEQ ID NO: 3869; WAN024FPZ_at; Start 644; Stop 668
cgggttacgatgaaagtcgtgcatt

SEQ ID NO: 216343 - DNA, 25 bp, Artificial
  probe
  misc_feature (1)..(25): SEQ ID NO: 3869; WAN024FPZ_at; Start 710; Stop 734
tcccagttgctcttcaaggtagttt

SEQ ID NO: 216344 - DNA, 25 bp, Artificial
  probe
  misc_feature (1)..(25): SEQ ID NO: 3869; WAN024FPZ_at; Start 393; Stop 417
gaaggcagctcttacatcagtggat

SEQ ID NO: 216345 - DNA, 25 bp, Artificial
  probe
  misc_feature (1)..(25): SEQ ID NO: 3869; WAN024FPZ_at; Start 895; Stop 919
cagtgtggtatagcggttgcttctc

SEQ ID NO: 216346 - DNA, 25 bp, Artificial
  probe
  misc_feature (1)..(25): SEQ ID NO: 3869; WAN024FPZ_at; Start 604; Stop 628
tataatttgccagaacagccagctt

SEQ ID NO: 216347 - DNA, 25 bp, Artificial
  probe
  misc_feature (1)..(25): SEQ ID NO: 3869; WAN024FPZ_at; Start 694; Stop 718
tttatgccagatgacctcccagttg

SEQ ID NO: 216348 - DNA, 25 bp, Artificial
  probe
  misc_feature (1)..(25): SEQ ID NO: 3869; WAN024FPZ_at; Start 441; Stop 465
catgaaaaatgccttgacaatccaa

SEQ ID NO: 216349 - DNA, 25 bp, Artificial
  probe
  misc_feature (1)..(25): SEQ ID NO: 3869; WAN024FPZ_at; Start 77; Stop 101
tggaagctattctaatctcagaggg

SEQ ID NO: 216350 - DNA, 25 bp, Artificial
  probe
  misc_feature (1)..(25): SEQ ID NO: 3869; WAN024FPZ_at; Start 257; Stop 281
tcatttcgcaactcatcaagcaggc

SEQ ID NO: 216351 - DNA, 25 bp, Artificial
  probe
  misc_feature (1)..(25): SEQ ID NO: 3869; WAN024FPZ_at; Start 349; Stop 373
tcagcagtgaaacttcgtcataaag

SEQ ID NO: 216352 - DNA, 25 bp, Artificial
  probe
  misc_feature (1)..(25): SEQ ID NO: 3869; WAN024FPZ_at; Start 754; Stop 778
gatagttcagaaacttgccaaggtt

SEQ ID NO: 216353 - DNA, 25 bp, Artificial
  probe
  misc_feature (1)..(25): SEQ ID NO: 3869; WAN024FPZ_at; Start 103; Stop 127
tataagggattggaactcaaggttg

SEQ ID NO: 216354 - DNA, 25 bp, Artificial
  probe
  misc_feature (1)..(25): SEQ ID NO: 3869; WAN024FPZ_at; Start 853; Stop 877
gtttggaaagagtctgcccttgcgc

SEQ ID NO: 216355 - DNA, 25 bp, Artificial
  probe
  misc_feature (1)..(25): SEQ ID NO: 3869; WAN024FPZ_at; Start 543; Stop 567
ccaaaaagagggagcgattatcgtc

SEQ ID NO: 216356 - DNA, 25 bp, Artificial
  probe
  misc_feature (1)..(25): SEQ ID NO: 3869; WAN024FPZ_at; Start 665; Stop 689
cattgaaaaacacgacctactttgg

SEQ ID NO: 216357 - DNA, 25 bp, Artificial
  probe
  misc_feature (1)..(25): SEQ ID NO: 3869; WAN024FPZ_at; Start 868; Stop 892
gcccttgcgcattttgtgctagata

SEQ ID NO: 216358 - DNA, 25 bp, Artificial
  probe
  misc_feature (1)..(25): SEQ ID NO: 3869; WAN024FPZ_at; Start 957; Stop 981
tcaagattacatggaactgtcggct

SEQ ID NO: 216359 - DNA, 25 bp, Artificial
  probe
  misc_feature (1)..(25): SEQ ID NO: 3869; WAN024FPZ_at; Start 976; Stop 1000
tcggctaatgccagacaagtaggag

SEQ ID NO: 216360 - DNA, 25 bp, Artificial
  probe
  misc_feature (1)..(25): SEQ ID NO: 3869; WAN024FPZ_at; Start 272; Stop 296
tcaagcaggctcaaaaaagaggagt

SEQ ID NO: 216361 - DNA, 25 bp, Artificial
  probe
  misc_feature (1)..(25): SEQ ID NO: 3869; WAN024FPZ_at; Start 991; Stop 1015
caagtaggagtagcgattcgaagtg

SEQ ID NO: 216362 - DNA, 25 bp, Artificial
  probe
  misc_feature (1)..(25): SEQ ID NO: 3869; WAN024FPZ_at; Start 53; Stop 77
caggaaataaggcacgaaatgacgt

SEQ ID NO: 216363 - DNA, 25 bp, Artificial
  probe
  misc_feature (1)..(25): SEQ ID NO: 3869; WAN024FPZ_at; Start 561; Stop 585
tatcgtcgccggaaatctaattcca

SEQ ID NO: 216364 - DNA, 25 bp, Artificial
  probe
  misc_feature (1)..(25): SEQ ID NO: 3869; WAN024FPZ_at; Start 932; Stop 956
aaaaggcactagacgatttgacaga

SEQ ID NO: 216365 - DNA, 25 bp, Artificial
  probe
  misc_feature (1)..(25): SEQ ID NO: 3869; WAN024FPZ_at; Start 214; Stop 238
gatgaattgctgattcagttcccga

SEQ ID NO: 216366 - DNA, 25 bp, Artificial
  probe
  misc_feature (1)..(25): SEQ ID NO: 3869; WAN024FPZ_at; Start 410; Stop 434
cagtggatggcattatcgttcataa

SEQ ID NO: 216367 - DNA, 25 bp, Artificial
  probe
  misc_feature (1)..(25): SEQ ID NO: 3869; WAN024FPZ_at; Start 794; Stop 818
tacgtattaacaattcgcacaaggc

SEQ ID NO: 216368 - DNA, 25 bp, Artificial
  probe
  misc_feature (1)..(25): SEQ ID NO: 3869; WAN024FPZ_at; Start 909; Stop 933
ggttgcttctctatatgacctccaa

SEQ ID NO: 216369 - DNA, 25 bp, Artificial
  probe
  misc_feature (1)..(25): SEQ ID NO: 3869; WAN024FPZ_at; Start 830; Stop 854
tggcttcgggctttcctctggtggt

SEQ ID NO: 216370 - DNA, 25 bp, Artificial
  probe
  misc_feature (1)..(25): SEQ ID NO: 3869; WAN024FPZ_at; Start 154; Stop 178
aaagctcagcaacacaaatatcggg

SEQ ID NO: 216371 - DNA, 25 bp, Artificial
  probe
  misc_feature (1)..(25): SEQ ID NO: 3869; WAN024FPZ_at; Start 456; Stop 480
gacaatccaaggcataccatcagat

SEQ ID NO: 216372 - DNA, 25 bp, Artificial
  probe
  misc_feature (1)..(25): SEQ ID NO: 3869; WAN024FPZ_at; Start 628; Stop 652
tacaacttgtatggagcgggttacg

SEQ ID NO: 216373 - DNA, 25 bp, Artificial
  probe
  misc_feature (1)..(25): SEQ ID NO: 6581; WAN024FQ2_at; Start 588; Stop 612
caaggatattatcagaaataggttt

SEQ ID NO: 216374 - DNA, 25 bp, Artificial
  probe
  misc_feature (1)..(25): SEQ ID NO: 6581; WAN024FQ2_at; Start 433; Stop 457
ttatacattctatctgtattgctgg

SEQ ID NO: 216375 - DNA, 25 bp, Artificial
  probe
  misc_feature (1)..(25): SEQ ID NO: 6581; WAN024FQ2_at; Start 438; Stop 462
cattctatctgtattgctggttatt

SEQ ID NO: 216376 - DNA, 25 bp, Artificial
  probe
  misc_feature (1)..(25): SEQ ID NO: 6581; WAN024FQ2_at; Start 481; Stop 505
gcgaatattgtatttcaaatgccag

SEQ ID NO: 216377 - DNA, 25 bp, Artificial
  probe
  misc_feature (1)..(25): SEQ ID NO: 6581; WAN024FQ2_at; Start 577; Stop 601
gcgcaatttaacaaggatattatca

SEQ ID NO: 216378 - DNA, 25 bp, Artificial
  probe
  misc_feature (1)..(25): SEQ ID NO: 6581; WAN024FQ2_at; Start 628; Stop 652
gtagctactgtactcttattattaa

SEQ ID NO: 216379 - DNA, 25 bp, Artificial
  probe
  misc_feature (1)..(25): SEQ ID NO: 6581; WAN024FQ2_at; Start 579; Stop 603
gcaatttaacaaggatattatcaga

SEQ ID NO: 216380 - DNA, 25 bp, Artificial
  probe
  misc_feature (1)..(25): SEQ ID NO: 6581; WAN024FQ2_at; Start 621; Stop 645
gatgaaagtagctactgtactctta

SEQ ID NO: 216381 - DNA, 25 bp, Artificial
  probe
  misc_feature (1)..(25): SEQ ID NO: 6581; WAN024FQ2_at; Start 479; Stop 503
tagcgaatattgtatttcaaatgcc

SEQ ID NO: 216382 - DNA, 25 bp, Artificial
  probe
  misc_feature (1)..(25): SEQ ID NO: 6581; WAN024FQ2_at; Start 493; Stop 517
tttcaaatgccagcacaaacatatg

SEQ ID NO: 216383 - DNA, 25 bp, Artificial
  probe
  misc_feature (1)..(25): SEQ ID NO: 6581; WAN024FQ2_at; Start 763; Stop 787
actatattctcacttgcattgaatc

SEQ ID NO: 216384 - DNA, 25 bp, Artificial
  probe
  misc_feature (1)..(25): SEQ ID NO: 6581; WAN024FQ2_at; Start 619; Stop 643
tggatgaaagtagctactgtactct

SEQ ID NO: 216385 - DNA, 25 bp, Artificial
  probe
  misc_feature (1)..(25): SEQ ID NO: 6581; WAN024FQ2_at; Start 617; Stop 641
tatggatgaaagtagctactgtact

SEQ ID NO: 216386 - DNA, 25 bp, Artificial
  probe
  misc_feature (1)..(25): SEQ ID NO: 6581; WAN024FQ2_at; Start 466; Stop 490
ttgatttttgagttagcgaatattg

SEQ ID NO: 216387 - DNA, 25 bp, Artificial
  probe
  misc_feature (1)..(25): SEQ ID NO: 6581; WAN024FQ2_at; Start 500; Stop 524
tgccagcacaaacatatgttataca

SEQ ID NO: 216388 - DNA, 25 bp, Artificial
  probe
  misc_feature (1)..(25): SEQ ID NO: 6581; WAN024FQ2_at; Start 573; Stop 597
tatagcgcaatttaacaaggatatt

SEQ ID NO: 216389 - DNA, 25 bp, Artificial
  probe
  misc_feature (1)..(25): SEQ ID NO: 6581; WAN024FQ2_at; Start 498; Stop 522
aatgccagcacaaacatatgttata

SEQ ID NO: 216390 - DNA, 25 bp, Artificial
  probe
  misc_feature (1)..(25): SEQ ID NO: 6581; WAN024FQ2_at; Start 613; Stop 637
aagatatggatgaaagtagctactg

SEQ ID NO: 216391 - DNA, 25 bp, Artificial
  probe
  misc_feature (1)..(25): SEQ ID NO: 6581; WAN024FQ2_at; Start 486; Stop 510
tattgtatttcaaatgccagcacaa

SEQ ID NO: 216392 - DNA, 25 bp, Artificial
  probe
  misc_feature (1)..(25): SEQ ID NO: 6581; WAN024FQ2_at; Start 384; Stop 408
tatatgtttgcctattttgaaaaat

SEQ ID NO: 216393 - DNA, 25 bp, Artificial
  probe
  misc_feature (1)..(25): SEQ ID NO: 6581; WAN024FQ2_at; Start 773; Stop 797
cacttgcattgaatcaagatatcaa

SEQ ID NO: 216394 - DNA, 25 bp, Artificial
  probe
  misc_feature (1)..(25): SEQ ID NO: 6581; WAN024FQ2_at; Start 636; Stop 660
tgtactcttattattaatttcacca

SEQ ID NO: 216395 - DNA, 25 bp, Artificial
  probe
  misc_feature (1)..(25): SEQ ID NO: 6581; WAN024FQ2_at; Start 570; Stop 594
ttttatagcgcaatttaacaaggat

SEQ ID NO: 216396 - DNA, 25 bp, Artificial
  probe
  misc_feature (1)..(25): SEQ ID NO: 6581; WAN024FQ2_at; Start 785; Stop 809
atcaagatatcaacaaatggattat

SEQ ID NO: 216397 - DNA, 25 bp, Artificial
  probe
  misc_feature (1)..(25): SEQ ID NO: 6581; WAN024FQ2_at; Start 483; Stop 507
gaatattgtatttcaaatgccagca

SEQ ID NO: 216398 - DNA, 25 bp, Artificial
  probe
  misc_feature (1)..(25): SEQ ID NO: 6581; WAN024FQ2_at; Start 782; Stop 806
tgaatcaagatatcaacaaatggat

SEQ ID NO: 216399 - DNA, 25 bp, Artificial
  probe
  misc_feature (1)..(25): SEQ ID NO: 6581; WAN024FQ2_at; Start 767; Stop 791
tattctcacttgcattgaatcaaga

SEQ ID NO: 216400 - DNA, 25 bp, Artificial
  probe
  misc_feature (1)..(25): SEQ ID NO: 6581; WAN024FQ2_at; Start 615; Stop 639
gatatggatgaaagtagctactgta

SEQ ID NO: 216401 - DNA, 25 bp, Artificial
  probe
  misc_feature (1)..(25): SEQ ID NO: 6581; WAN024FQ2_at; Start 585; Stop 609
taacaaggatattatcagaaatagg

SEQ ID NO: 216402 - DNA, 25 bp, Artificial
  probe
  misc_feature (1)..(25): SEQ ID NO: 6581; WAN024FQ2_at; Start 611; Stop 635
ttaagatatggatgaaagtagctac

SEQ ID NO: 216403 - DNA, 25 bp, Artificial
  probe
  misc_feature (1)..(25): SEQ ID NO: 6581; WAN024FQ2_at; Start 489; Stop 513
tgtatttcaaatgccagcacaaaca

SEQ ID NO: 216404 - DNA, 25 bp, Artificial
  probe
  misc_feature (1)..(25): SEQ ID NO: 6581; WAN024FQ2_at; Start 624; Stop 648
gaaagtagctactgtactcttatta

SEQ ID NO: 216405 - DNA, 25 bp, Artificial
  probe
  misc_feature (1)..(25): SEQ ID NO: 6581; WAN024FQ2_at; Start 502; Stop 526
ccagcacaaacatatgttatacaaa

SEQ ID NO: 216406 - DNA, 25 bp, Artificial
  probe
  misc_feature (1)..(25): SEQ ID NO: 6581; WAN024FQ2_at; Start 484; Stop 508
aatattgtatttcaaatgccagcac

SEQ ID NO: 216407 - DNA, 25 bp, Artificial
  probe
  misc_feature (1)..(25): SEQ ID NO: 1901; WAN024FQ3_at; Start 418; Stop 442
tcaaaaagaaaatatgtatacattc

SEQ ID NO: 216408 - DNA, 25 bp, Artificial
  probe
  misc_feature (1)..(25): SEQ ID NO: 1901; WAN024FQ3_at; Start 315; Stop 339
tgtaggctctctgttacaaaaaggg

SEQ ID NO: 216409 - DNA, 25 bp, Artificial
  probe
  misc_feature (1)..(25): SEQ ID NO: 1901; WAN024FQ3_at; Start 200; Stop 224
taacttatccttacatacttcaaaa

SEQ ID NO: 216410 - DNA, 25 bp, Artificial
  probe
  misc_feature (1)..(25): SEQ ID NO: 1901; WAN024FQ3_at; Start 59; Stop 83
tcattttactccatacaacaatggg

SEQ ID NO: 216411 - DNA, 25 bp, Artificial
  probe
  misc_feature (1)..(25): SEQ ID NO: 1901; WAN024FQ3_at; Start 385; Stop 409
ttatgtttgcctgttttgaaaacag

SEQ ID NO: 216412 - DNA, 25 bp, Artificial
  probe
  misc_feature (1)..(25): SEQ ID NO: 1901; WAN024FQ3_at; Start 491; Stop 515
tccttcagatgcctatacaaactca

SEQ ID NO: 216413 - DNA, 25 bp, Artificial
  probe
  misc_feature (1)..(25): SEQ ID NO: 1901; WAN024FQ3_at; Start 782; Stop 806
tgaatgaaaaccgaaacaaatggat

SEQ ID NO: 216414 - DNA, 25 bp, Artificial
  probe
  misc_feature (1)..(25): SEQ ID NO: 1901; WAN024FQ3_at; Start 256; Stop 280
tggaacattatcgtttggcttttta

SEQ ID NO: 216415 - DNA, 25 bp, Artificial
  probe
  misc_feature (1)..(25): SEQ ID NO: 1901; WAN024FQ3_at; Start 245; Stop 269
cagtgtcattatggaacattatcgt

SEQ ID NO: 216416 - DNA, 25 bp, Artificial
  probe
  misc_feature (1)..(25): SEQ ID NO: 1901; WAN024FQ3_at; Start 597; Stop 621
cctcaaatatagatttaaaaattgg

SEQ ID NO: 216417 - DNA, 25 bp, Artificial
  probe
  misc_feature (1)..(25): SEQ ID NO: 1901; WAN024FQ3_at; Start 475; Stop 499
gaattagcaaatattttccttcaga

SEQ ID NO: 216418 - DNA, 25 bp, Artificial
  probe
  misc_feature (1)..(25): SEQ ID NO: 1901; WAN024FQ3_at; Start 279; Stop 303
taaaagagactttgcggttaatcca

SEQ ID NO: 216419 - DNA, 25 bp, Artificial
  probe
  misc_feature (1)..(25): SEQ ID NO: 1901; WAN024FQ3_at; Start 309; Stop 333
aaaaattgtaggctctctgttacaa

SEQ ID NO: 216420 - DNA, 25 bp, Artificial
  probe
  misc_feature (1)..(25): SEQ ID NO: 1901; WAN024FQ3_at; Start 215; Stop 239
tacttcaaaaagtcaaatggattct

SEQ ID NO: 216421 - DNA, 25 bp, Artificial
  probe
  misc_feature (1)..(25): SEQ ID NO: 1901; WAN024FQ3_at; Start 251; Stop 275
cattatggaacattatcgtttggct

SEQ ID NO: 216422 - DNA, 25 bp, Artificial
  probe
  misc_feature (1)..(25): SEQ ID NO: 1901; WAN024FQ3_at; Start 237; Stop 261
tctaataacagtgtcattatggaac

SEQ ID NO: 216423 - DNA, 25 bp, Artificial
  probe
  misc_feature (1)..(25): SEQ ID NO: 1901; WAN024FQ3_at; Start 318; Stop 342
aggctctctgttacaaaaagggtat

SEQ ID NO: 216424 - DNA, 25 bp, Artificial
  probe
  misc_feature (1)..(25): SEQ ID NO: 1901; WAN024FQ3_at; Start 860; Stop 884
tgaaattgtgggaaagaatatttgg

SEQ ID NO: 216425 - DNA, 25 bp, Artificial
  probe
  misc_feature (1)..(25): SEQ ID NO: 1901; WAN024FQ3_at; Start 18; Stop 42
tattagcctagatttattaaaagtg

SEQ ID NO: 216426 - DNA, 25 bp, Artificial
  probe
  misc_feature (1)..(25): SEQ ID NO: 1901; WAN024FQ3_at; Start 785; Stop 809
atgaaaaccgaaacaaatggattgt

SEQ ID NO: 216427 - DNA, 25 bp, Artificial
  probe
  misc_feature (1)..(25): SEQ ID NO: 1901; WAN024FQ3_at; Start 32; Stop 56
tattaaaagtgcttgcgtgtattgg

SEQ ID NO: 216428 - DNA, 25 bp, Artificial
  probe
  misc_feature (1)..(25): SEQ ID NO: 1901; WAN024FQ3_at; Start 363; Stop 387
cggtgccttgatactgatttattta

SEQ ID NO: 216429 - DNA, 25 bp, Artificial
  probe
  misc_feature (1)..(25): SEQ ID NO: 1901; WAN024FQ3_at; Start 565; Stop 589
ggtggttatatagcacaattcaatg

SEQ ID NO: 216430 - DNA, 25 bp, Artificial
  probe
  misc_feature (1)..(25): SEQ ID NO: 1901; WAN024FQ3_at; Start 56; Stop 80
gggtcattttactccatacaacaat

SEQ ID NO: 216431 - DNA, 25 bp, Artificial
  probe
  misc_feature (1)..(25): SEQ ID NO: 1901; WAN024FQ3_at; Start 510; Stop 534
aactcatgttatgcaaacttttaga

SEQ ID NO: 216432 - DNA, 25 bp, Artificial
  probe
  misc_feature (1)..(25): SEQ ID NO: 1901; WAN024FQ3_at; Start 568; Stop 592
ggttatatagcacaattcaatgtag

SEQ ID NO: 216433 - DNA, 25 bp, Artificial
  probe
  misc_feature (1)..(25): SEQ ID NO: 1901; WAN024FQ3_at; Start 449; Stop 473
tattggtggcaattgggtttatagt

SEQ ID NO: 216434 - DNA, 25 bp, Artificial
  probe
  misc_feature (1)..(25): SEQ ID NO: 1901; WAN024FQ3_at; Start 441; Stop 465
tctatctttattggtggcaattggg

SEQ ID NO: 216435 - DNA, 25 bp, Artificial
  probe
  misc_feature (1)..(25): SEQ ID NO: 1901; WAN024FQ3_at; Start 374; Stop 398
tactgatttatttatgtttgcctgt

SEQ ID NO: 216436 - DNA, 25 bp, Artificial
  probe
  misc_feature (1)..(25): SEQ ID NO: 1901; WAN024FQ3_at; Start 355; Stop 379
tggtttttcggtgccttgatactga

SEQ ID NO: 216437 - DNA, 25 bp, Artificial
  probe
  misc_feature (1)..(25): SEQ ID NO: 1901; WAN024FQ3_at; Start 481; Stop 505
gcaaatattttccttcagatgccta

SEQ ID NO: 216438 - DNA, 25 bp, Artificial
  probe
  misc_feature (1)..(25): SEQ ID NO: 1901; WAN024FQ3_at; Start 458; Stop 482
caattgggtttatagttgaattagc

SEQ ID NO: 216439 - DNA, 25 bp, Artificial
  probe
  misc_feature (1)..(25): SEQ ID NO: 1901; WAN024FQ3_at; Start 284; Stop 308
gagactttgcggttaatccaattaa

SEQ ID NO: 216440 - DNA, 25 bp, Artificial
  probe
  misc_feature (1)..(25): SEQ ID NO: 1901; WAN024FQ3_at; Start 498; Stop 522
gatgcctatacaaactcatgttatg

SEQ ID NO: 216441 - DNA, 25 bp, Artificial
  probe
  misc_feature (1)..(25): SEQ ID NO: 1960; WAN024FQ4_at; Start 647; Stop 671
tcttgatttcgcctttaatattatt

SEQ ID NO: 216442 - DNA, 25 bp, Artificial
  probe
  misc_feature (1)..(25): SEQ ID NO: 1960; WAN024FQ4_at; Start 468; Stop 492
gatttttgaactgataaattactca

SEQ ID NO: 216443 - DNA, 25 bp, Artificial
  probe
  misc_feature (1)..(25): SEQ ID NO: 1960; WAN024FQ4_at; Start 382; Stop 406
tatttatgtctacccattttgaaaa

SEQ ID NO: 216444 - DNA, 25 bp, Artificial
  probe
  misc_feature (1)..(25): SEQ ID NO: 1960; WAN024FQ4_at; Start 777; Stop 801
tactttgaatgaaaaacggagcgaa

SEQ ID NO: 216445 - DNA, 25 bp, Artificial
  probe
  misc_feature (1)..(25): SEQ ID NO: 1960; WAN024FQ4_at; Start 635; Stop 659
tagtacttttattcttgatttcgcc

SEQ ID NO: 216446 - DNA, 25 bp, Artificial
  probe
  misc_feature (1)..(25): SEQ ID NO: 1960; WAN024FQ4_at; Start 491; Stop 515
cacttaaaatgccagtgcagtttta

SEQ ID NO: 216447 - DNA, 25 bp, Artificial
  probe
  misc_feature (1)..(25): SEQ ID NO: 1960; WAN024FQ4_at; Start 244; Stop 268
acagtgttgtcatggacccttatcg

SEQ ID NO: 216448 - DNA, 25 bp, Artificial
  probe
  misc_feature (1)..(25): SEQ ID NO: 1960; WAN024FQ4_at; Start 248; Stop 272
tgttgtcatggacccttatcgtttg

SEQ ID NO: 216449 - DNA, 25 bp, Artificial
  probe
  misc_feature (1)..(25): SEQ ID NO: 1960; WAN024FQ4_at; Start 196; Stop 220
gagataacatatccctatatactgc

SEQ ID NO: 216450 - DNA, 25 bp, Artificial
  probe
  misc_feature (1)..(25): SEQ ID NO: 1960; WAN024FQ4_at; Start 219; Stop 243
gcataaagtaaaatggattctaata

SEQ ID NO: 216451 - DNA, 25 bp, Artificial
  probe
  misc_feature (1)..(25): SEQ ID NO: 1960; WAN024FQ4_at; Start 96; Stop 120
gataggttcatggaatcttttgaca

SEQ ID NO: 216452 - DNA, 25 bp, Artificial
  probe
  misc_feature (1)..(25): SEQ ID NO: 1960; WAN024FQ4_at; Start 613; Stop 637
aagagatggatgaaattagttgtag

SEQ ID NO: 216453 - DNA, 25 bp, Artificial
  probe
  misc_feature (1)..(25): SEQ ID NO: 1960; WAN024FQ4_at; Start 10; Stop 34
actcggaatattaatttagaactat

SEQ ID NO: 216454 - DNA, 25 bp, Artificial
  probe
  misc_feature (1)..(25): SEQ ID NO: 1960; WAN024FQ4_at; Start 795; Stop 819
gagcgaatgtattgtttccctttct

SEQ ID NO: 216455 - DNA, 25 bp, Artificial
  probe
  misc_feature (1)..(25): SEQ ID NO: 1960; WAN024FQ4_at; Start 791; Stop 815
aacggagcgaatgtattgtttccct

SEQ ID NO: 216456 - DNA, 25 bp, Artificial
  probe
  misc_feature (1)..(25): SEQ ID NO: 1960; WAN024FQ4_at; Start 617; Stop 641
gatggatgaaattagttgtagtact

SEQ ID NO: 216457 - DNA, 25 bp, Artificial
  probe
  misc_feature (1)..(25): SEQ ID NO: 1960; WAN024FQ4_at; Start 681; Stop 705
gaagactgcataccataatcttttt

SEQ ID NO: 216458 - DNA, 25 bp, Artificial
  probe
  misc_feature (1)..(25): SEQ ID NO: 1960; WAN024FQ4_at; Start 577; Stop 601
gctcactttgatatagatattatca

SEQ ID NO: 216459 - DNA, 25 bp, Artificial
  probe
  misc_feature (1)..(25): SEQ ID NO: 1960; WAN024FQ4_at; Start 374; Stop 398
tacttatttatttatgtctacccat

SEQ ID NO: 216460 - DNA, 25 bp, Artificial
  probe
  misc_feature (1)..(25): SEQ ID NO: 1960; WAN024FQ4_at; Start 501; Stop 525
gccagtgcagttttatattatacaa

SEQ ID NO: 216461 - DNA, 25 bp, Artificial
  probe
  misc_feature (1)..(25): SEQ ID NO: 1960; WAN024FQ4_at; Start 480; Stop 504
gataaattactcacttaaaatgcca

SEQ ID NO: 216462 - DNA, 25 bp, Artificial
  probe
  misc_feature (1)..(25): SEQ ID NO: 1960; WAN024FQ4_at; Start 3; Stop 27
gcataaaactcggaatattaattta

SEQ ID NO: 216463 - DNA, 25 bp, Artificial
  probe
  misc_feature (1)..(25): SEQ ID NO: 1960; WAN024FQ4_at; Start 28; Stop 52
gaactattaaaagtacttgcatgtg

SEQ ID NO: 216464 - DNA, 25 bp, Artificial
  probe
  misc_feature (1)..(25): SEQ ID NO: 1960; WAN024FQ4_at; Start 780; Stop 804
tttgaatgaaaaacggagcgaatgt

SEQ ID NO: 216465 - DNA, 25 bp, Artificial
  probe
  misc_feature (1)..(25): SEQ ID NO: 1960; WAN024FQ4_at; Start 187; Stop 211
ggaaagagagagataacatatccct

SEQ ID NO: 216466 - DNA, 25 bp, Artificial
  probe
  misc_feature (1)..(25): SEQ ID NO: 1960; WAN024FQ4_at; Start 215; Stop 239
tactgcataaagtaaaatggattct

SEQ ID NO: 216467 - DNA, 25 bp, Artificial
  probe
  misc_feature (1)..(25): SEQ ID NO: 1960; WAN024FQ4_at; Start 251; Stop 275
tgtcatggacccttatcgtttggtt

SEQ ID NO: 216468 - DNA, 25 bp, Artificial
  probe
  misc_feature (1)..(25): SEQ ID NO: 1960; WAN024FQ4_at; Start 98; Stop 122
taggttcatggaatcttttgacata

SEQ ID NO: 216469 - DNA, 25 bp, Artificial
  probe
  misc_feature (1)..(25): SEQ ID NO: 1960; WAN024FQ4_at; Start 889; Stop 913
agtttcgtaggatcatatttacttt

SEQ ID NO: 216470 - DNA, 25 bp, Artificial
  probe
  misc_feature (1)..(25): SEQ ID NO: 1960; WAN024FQ4_at; Start 565; Stop 589
ggtggttttatagctcactttgata

SEQ ID NO: 216471 - DNA, 25 bp, Artificial
  probe
  misc_feature (1)..(25): SEQ ID NO: 1960; WAN024FQ4_at; Start 179; Stop 203
tattgttaggaaagagagagataac

SEQ ID NO: 216472 - DNA, 25 bp, Artificial
  probe
  misc_feature (1)..(25): SEQ ID NO: 1960; WAN024FQ4_at; Start 487; Stop 511
tactcacttaaaatgccagtgcagt

SEQ ID NO: 216473 - DNA, 25 bp, Artificial
  probe
  misc_feature (1)..(25): SEQ ID NO: 1960; WAN024FQ4_at; Start 203; Stop 227
catatccctatatactgcataaagt

SEQ ID NO: 216474 - DNA, 25 bp, Artificial
  probe
  misc_feature (1)..(25): SEQ ID NO: 1960; WAN024FQ4_at; Start 441; Stop 465
tctatctttattggtagttattggt

SEQ ID NO: 216475 - DNA, 25 bp, Artificial
  probe
  misc_feature (1)..(25): SEQ ID NO: 1961; WAN024FQ5_at; Start 585; Stop 609
tgataaaaataccatcaaaaatggg

SEQ ID NO: 216476 - DNA, 25 bp, Artificial
  probe
  misc_feature (1)..(25): SEQ ID NO: 1961; WAN024FQ5_at; Start 59; Stop 83
ttgttttactccatacagagatggg

SEQ ID NO: 216477 - DNA, 25 bp, Artificial
  probe
  misc_feature (1)..(25): SEQ ID NO: 1961; WAN024FQ5_at; Start 634; Stop 658
gcagtacttttattattagtttcgc

SEQ ID NO: 216478 - DNA, 25 bp, Artificial
  probe
  misc_feature (1)..(25): SEQ ID NO: 1961; WAN024FQ5_at; Start 58; Stop 82
gttgttttactccatacagagatgg

SEQ ID NO: 216479 - DNA, 25 bp, Artificial
  probe
  misc_feature (1)..(25): SEQ ID NO: 1961; WAN024FQ5_at; Start 384; Stop 408
tatatgtctccccgttttgaaacaa

SEQ ID NO: 216480 - DNA, 25 bp, Artificial
  probe
  misc_feature (1)..(25): SEQ ID NO: 1961; WAN024FQ5_at; Start 573; Stop 597
tatatctcagtttgataaaaatacc

SEQ ID NO: 216481 - DNA, 25 bp, Artificial
  probe
  misc_feature (1)..(25): SEQ ID NO: 1961; WAN024FQ5_at; Start 26; Stop 50
tggatttactaaaagtaattgcatg

SEQ ID NO: 216482 - DNA, 25 bp, Artificial
  probe
  misc_feature (1)..(25): SEQ ID NO: 1961; WAN024FQ5_at; Start 558; Stop 582
tattttagggggctttatatctcag

SEQ ID NO: 216483 - DNA, 25 bp, Artificial
  probe
  misc_feature (1)..(25): SEQ ID NO: 1961; WAN024FQ5_at; Start 619; Stop 643
tggatgaaagtaattgcagtacttt

SEQ ID NO: 216484 - DNA, 25 bp, Artificial
  probe
  misc_feature (1)..(25): SEQ ID NO: 1961; WAN024FQ5_at; Start 65; Stop 89
tactccatacagagatggggggatt

SEQ ID NO: 216485 - DNA, 25 bp, Artificial
  probe
  misc_feature (1)..(25): SEQ ID NO: 1961; WAN024FQ5_at; Start 652; Stop 676
gtttcgccatttatattatttttca

SEQ ID NO: 216486 - DNA, 25 bp, Artificial
  probe
  misc_feature (1)..(25): SEQ ID NO: 1961; WAN024FQ5_at; Start 185; Stop 209
tagggaagaaagagattacctattc

SEQ ID NO: 216487 - DNA, 25 bp, Artificial
  probe
  misc_feature (1)..(25): SEQ ID NO: 1961; WAN024FQ5_at; Start 594; Stop 618
taccatcaaaaatgggtttaagaga

SEQ ID NO: 216488 - DNA, 25 bp, Artificial
  probe
  misc_feature (1)..(25): SEQ ID NO: 1961; WAN024FQ5_at; Start 577; Stop 601
tctcagtttgataaaaataccatca

SEQ ID NO: 216489 - DNA, 25 bp, Artificial
  probe
  misc_feature (1)..(25): SEQ ID NO: 1961; WAN024FQ5_at; Start 24; Stop 48
cttggatttactaaaagtaattgca

SEQ ID NO: 216490 - DNA, 25 bp, Artificial
  probe
  misc_feature (1)..(25): SEQ ID NO: 1961; WAN024FQ5_at; Start 613; Stop 637
aagagatggatgaaagtaattgcag

SEQ ID NO: 216491 - DNA, 25 bp, Artificial
  probe
  misc_feature (1)..(25): SEQ ID NO: 1961; WAN024FQ5_at; Start 69; Stop 93
ccatacagagatggggggatttaaa

SEQ ID NO: 216492 - DNA, 25 bp, Artificial
  probe
  misc_feature (1)..(25): SEQ ID NO: 1961; WAN024FQ5_at; Start 182; Stop 206
tgttagggaagaaagagattaccta

SEQ ID NO: 216493 - DNA, 25 bp, Artificial
  probe
  misc_feature (1)..(25): SEQ ID NO: 1961; WAN024FQ5_at; Start 56; Stop 80
gagttgttttactccatacagagat

SEQ ID NO: 216494 - DNA, 25 bp, Artificial
  probe
  misc_feature (1)..(25): SEQ ID NO: 1961; WAN024FQ5_at; Start 381; Stop 405
ttatatatgtctccccgttttgaaa

SEQ ID NO: 216495 - DNA, 25 bp, Artificial
  probe
  misc_feature (1)..(25): SEQ ID NO: 1961; WAN024FQ5_at; Start 204; Stop 228
ctattcctacatattacagaaagta

SEQ ID NO: 216496 - DNA, 25 bp, Artificial
  probe
  misc_feature (1)..(25): SEQ ID NO: 1961; WAN024FQ5_at; Start 617; Stop 641
gatggatgaaagtaattgcagtact

SEQ ID NO: 216497 - DNA, 25 bp, Artificial
  probe
  misc_feature (1)..(25): SEQ ID NO: 1961; WAN024FQ5_at; Start 439; Stop 463
tttttatctgtattgctagttattg

SEQ ID NO: 216498 - DNA, 25 bp, Artificial
  probe
  misc_feature (1)..(25): SEQ ID NO: 1961; WAN024FQ5_at; Start 378; Stop 402
tatttatatatgtctccccgttttg

SEQ ID NO: 216499 - DNA, 25 bp, Artificial
  probe
  misc_feature (1)..(25): SEQ ID NO: 1961; WAN024FQ5_at; Start 55; Stop 79
ggagttgttttactccatacagaga

SEQ ID NO: 216500 - DNA, 25 bp, Artificial
  probe
  misc_feature (1)..(25): SEQ ID NO: 1961; WAN024FQ5_at; Start 208; Stop 232
tcctacatattacagaaagtaaaat

SEQ ID NO: 216501 - DNA, 25 bp, Artificial
  probe
  misc_feature (1)..(25): SEQ ID NO: 1961; WAN024FQ5_at; Start 615; Stop 639
gagatggatgaaagtaattgcagta

SEQ ID NO: 216502 - DNA, 25 bp, Artificial
  probe
  misc_feature (1)..(25): SEQ ID NO: 1961; WAN024FQ5_at; Start 306; Stop 330
aaaaaaacttataggatcattggtg

SEQ ID NO: 216503 - DNA, 25 bp, Artificial
  probe
  misc_feature (1)..(25): SEQ ID NO: 1961; WAN024FQ5_at; Start 4; Stop 28
cataaatttaaagatattaacttgg

SEQ ID NO: 216504 - DNA, 25 bp, Artificial
  probe
  misc_feature (1)..(25): SEQ ID NO: 1961; WAN024FQ5_at; Start 642; Stop 666
tttattattagtttcgccatttata

SEQ ID NO: 216505 - DNA, 25 bp, Artificial
  probe
  misc_feature (1)..(25): SEQ ID NO: 1961; WAN024FQ5_at; Start 179; Stop 203
tattgttagggaagaaagagattac

SEQ ID NO: 216506 - DNA, 25 bp, Artificial
  probe
  misc_feature (1)..(25): SEQ ID NO: 1961; WAN024FQ5_at; Start 567; Stop 591
gggctttatatctcagtttgataaa

SEQ ID NO: 216507 - DNA, 25 bp, Artificial
  probe
  misc_feature (1)..(25): SEQ ID NO: 1961; WAN024FQ5_at; Start 12; Stop 36
taaagatattaacttggatttacta

SEQ ID NO: 216508 - DNA, 25 bp, Artificial
  probe
  misc_feature (1)..(25): SEQ ID NO: 1961; WAN024FQ5_at; Start 54; Stop 78
tggagttgttttactccatacagag

SEQ ID NO: 216509 - DNA, 25 bp, Artificial
  probe
  misc_feature (1)..(25): SEQ ID NO: 1574; WAN024FQ6_at; Start 83; Stop 107
gagtactggaaacaaaggtgccgct

SEQ ID NO: 216510 - DNA, 25 bp, Artificial
  probe
  misc_feature (1)..(25): SEQ ID NO: 1574; WAN024FQ6_at; Start 164; Stop 188
gggtcatgcgactgaccgcaaactg

SEQ ID NO: 216511 - DNA, 25 bp, Artificial
  probe
  misc_feature (1)..(25): SEQ ID NO: 1574; WAN024FQ6_at; Start 80; Stop 104
ctcgagtactggaaacaaaggtgcc

SEQ ID NO: 216512 - DNA, 25 bp, Artificial
  probe
  misc_feature (1)..(25): SEQ ID NO: 1574; WAN024FQ6_at; Start 139; Stop 163
actaatagagatacggcttggcgga

SEQ ID NO: 216513 - DNA, 25 bp, Artificial
  probe
  misc_feature (1)..(25): SEQ ID NO: 1574; WAN024FQ6_at; Start 111; Stop 135
tacacggcgctctaagacgccttct

SEQ ID NO: 216514 - DNA, 25 bp, Artificial
  probe
  misc_feature (1)..(25): SEQ ID NO: 1574; WAN024FQ6_at; Start 205; Stop 229
tcactgggaagcctctcaccaatag

SEQ ID NO: 216515 - DNA, 25 bp, Artificial
  probe
  misc_feature (1)..(25): SEQ ID NO: 1574; WAN024FQ6_at; Start 78; Stop 102
tactcgagtactggaaacaaaggtg

SEQ ID NO: 216516 - DNA, 25 bp, Artificial
  probe
  misc_feature (1)..(25): SEQ ID NO: 1574; WAN024FQ6_at; Start 195; Stop 219
taaatctctttcactgggaagcctc

SEQ ID NO: 216517 - DNA, 25 bp, Artificial
  probe
  misc_feature (1)..(25): SEQ ID NO: 1574; WAN024FQ6_at; Start 191; Stop 215
cagctaaatctctttcactgggaag

SEQ ID NO: 216518 - DNA, 25 bp, Artificial
  probe
  misc_feature (1)..(25): SEQ ID NO: 1574; WAN024FQ6_at; Start 55; Stop 79
gttgtccctcgcatcttttcttgta

SEQ ID NO: 216519 - DNA, 25 bp, Artificial
  probe
  misc_feature (1)..(25): SEQ ID NO: 1574; WAN024FQ6_at; Start 90; Stop 114
ggaaacaaaggtgccgcttcctaca

SEQ ID NO: 216520 - DNA, 25 bp, Artificial
  probe
  misc_feature (1)..(25): SEQ ID NO: 1574; WAN024FQ6_at; Start 181; Stop 205
gcaaactgctcagctaaatctcttt

SEQ ID NO: 216521 - DNA, 25 bp, Artificial
  probe
  misc_feature (1)..(25): SEQ ID NO: 1574; WAN024FQ6_at; Start 96; Stop 120
aaaggtgccgcttcctacacggcgc

SEQ ID NO: 216522 - DNA, 25 bp, Artificial
  probe
  misc_feature (1)..(25): SEQ ID NO: 1574; WAN024FQ6_at; Start 123; Stop 147
taagacgccttcttcgactaataga

SEQ ID NO: 216523 - DNA, 25 bp, Artificial
  probe
  misc_feature (1)..(25): SEQ ID NO: 1574; WAN024FQ6_at; Start 6; Stop 30
ctggctagagggaactttaccttgg

SEQ ID NO: 216524 - DNA, 25 bp, Artificial
  probe
  misc_feature (1)..(25): SEQ ID NO: 1574; WAN024FQ6_at; Start 64; Stop 88
cgcatcttttcttgtactcgagtac

SEQ ID NO: 216525 - DNA, 25 bp, Artificial
  probe
  misc_feature (1)..(25): SEQ ID NO: 1574; WAN024FQ6_at; Start 43; Stop 67
tcagtaaaactggttgtccctcgca

SEQ ID NO: 216526 - DNA, 25 bp, Artificial
  probe
  misc_feature (1)..(25): SEQ ID NO: 1574; WAN024FQ6_at; Start 201; Stop 225
tctttcactgggaagcctctcacca

SEQ ID NO: 216527 - DNA, 25 bp, Artificial
  probe
  misc_feature (1)..(25): SEQ ID NO: 1574; WAN024FQ6_at; Start 2; Stop 26
tgagctggctagagggaactttacc

SEQ ID NO: 216528 - DNA, 25 bp, Artificial
  probe
  misc_feature (1)..(25): SEQ ID NO: 1574; WAN024FQ6_at; Start 131; Stop 155
cttcttcgactaatagagatacggc

SEQ ID NO: 216529 - DNA, 25 bp, Artificial
  probe
  misc_feature (1)..(25): SEQ ID NO: 1574; WAN024FQ6_at; Start 86; Stop 110
tactggaaacaaaggtgccgcttcc

SEQ ID NO: 216530 - DNA, 25 bp, Artificial
  probe
  misc_feature (1)..(25): SEQ ID NO: 1574; WAN024FQ6_at; Start 170; Stop 194
tgcgactgaccgcaaactgctcagc

SEQ ID NO: 216531 - DNA, 25 bp, Artificial
  probe
  misc_feature (1)..(25): SEQ ID NO: 1574; WAN024FQ6_at; Start 46; Stop 70
gtaaaactggttgtccctcgcatct

SEQ ID NO: 216532 - DNA, 25 bp, Artificial
  probe
  misc_feature (1)..(25): SEQ ID NO: 1574; WAN024FQ6_at; Start 136; Stop 160
tcgactaatagagatacggcttggc

SEQ ID NO: 216533 - DNA, 25 bp, Artificial
  probe
  misc_feature (1)..(25): SEQ ID NO: 1574; WAN024FQ6_at; Start 161; Stop 185
ggagggtcatgcgactgaccgcaaa

SEQ ID NO: 216534 - DNA, 25 bp, Artificial
  probe
  misc_feature (1)..(25): SEQ ID NO: 1574; WAN024FQ6_at; Start 31; Stop 55
gatttgacaatttcagtaaaactgg

SEQ ID NO: 216535 - DNA, 25 bp, Artificial
  probe
  misc_feature (1)..(25): SEQ ID NO: 1574; WAN024FQ6_at; Start 210; Stop 234
gggaagcctctcaccaatagcccaa

SEQ ID NO: 216536 - DNA, 25 bp, Artificial
  probe
  misc_feature (1)..(25): SEQ ID NO: 1574; WAN024FQ6_at; Start 240; Stop 264
ctcgtcaatatccttttttatctga

SEQ ID NO: 216537 - DNA, 25 bp, Artificial
  probe
  misc_feature (1)..(25): SEQ ID NO: 1574; WAN024FQ6_at; Start 126; Stop 150
gacgccttcttcgactaatagagat

SEQ ID NO: 216538 - DNA, 25 bp, Artificial
  probe
  misc_feature (1)..(25): SEQ ID NO: 1574; WAN024FQ6_at; Start 21; Stop 45
tttaccttgggatttgacaatttca

SEQ ID NO: 216539 - DNA, 25 bp, Artificial
  probe
  misc_feature (1)..(25): SEQ ID NO: 1574; WAN024FQ6_at; Start 176; Stop 200
tgaccgcaaactgctcagctaaatc

SEQ ID NO: 216540 - DNA, 25 bp, Artificial
  probe
  misc_feature (1)..(25): SEQ ID NO: 1574; WAN024FQ6_at; Start 50; Stop 74
aactggttgtccctcgcatcttttc

SEQ ID NO: 216541 - DNA, 25 bp, Artificial
  probe
  misc_feature (1)..(25): SEQ ID NO: 1574; WAN024FQ6_at; Start 146; Stop 170
gagatacggcttggcggagggtcat

SEQ ID NO: 216542 - DNA, 25 bp, Artificial
  probe
  misc_feature (1)..(25): SEQ ID NO: 1574; WAN024FQ6_at; Start 25; Stop 49
ccttgggatttgacaatttcagtaa

SEQ ID NO: 216543 - DNA, 25 bp, Artificial
  probe
  misc_feature (1)..(25): SEQ ID NO: 3839; WAN024FQ7_at; Start 631; Stop 655
gaagatggtactgcttttgaatacg

SEQ ID NO: 216544 - DNA, 25 bp, Artificial
  probe
  misc_feature (1)..(25): SEQ ID NO: 3839; WAN024FQ7_at; Start 384; Stop 408
gcgggtccgctatgccgaccaagtt

SEQ ID NO: 216545 - DNA, 25 bp, Artificial
  probe
  misc_feature (1)..(25): SEQ ID NO: 3839; WAN024FQ7_at; Start 103; Stop 127
gatttagctgagcagtttgcggtca

SEQ ID NO: 216546 - DNA, 25 bp, Artificial
  probe
  misc_feature (1)..(25): SEQ ID NO: 3839; WAN024FQ7_at; Start 37; Stop 61
gatcagataaaaaaggatattgacg

SEQ ID NO: 216547 - DNA, 25 bp, Artificial
  probe
  misc_feature (1)..(25): SEQ ID NO: 3839; WAN024FQ7_at; Start 327; Stop 351
tgagcaagaagttgccaagctagga

SEQ ID NO: 216548 - DNA, 25 bp, Artificial
  probe
  misc_feature (1)..(25): SEQ ID NO: 3839; WAN024FQ7_at; Start 432; Stop 456
tattcctgaaaaattcattaaggac

SEQ ID NO: 216549 - DNA, 25 bp, Artificial
  probe
  misc_feature (1)..(25): SEQ ID NO: 3839; WAN024FQ7_at; Start 576; Stop 600
tttggaagttgaaaaaggacatgct

SEQ ID NO: 216550 - DNA, 25 bp, Artificial
  probe
  misc_feature (1)..(25): SEQ ID NO: 3839; WAN024FQ7_at; Start 167; Stop 191
aagaaggcgtcttagagcgccgtgt

SEQ ID NO: 216551 - DNA, 25 bp, Artificial
  probe
  misc_feature (1)..(25): SEQ ID NO: 3839; WAN024FQ7_at; Start 215; Stop 239
gtactcgagtacaagaaaagatgcg

SEQ ID NO: 216552 - DNA, 25 bp, Artificial
  probe
  misc_feature (1)..(25): SEQ ID NO: 3839; WAN024FQ7_at; Start 671; Stop 695
taggcgaacgctttgaattttatct

SEQ ID NO: 216553 - DNA, 25 bp, Artificial
  probe
  misc_feature (1)..(25): SEQ ID NO: 3839; WAN024FQ7_at; Start 620; Stop 644
tttcctacctagaagatggtactgc

SEQ ID NO: 216554 - DNA, 25 bp, Artificial
  probe
  misc_feature (1)..(25): SEQ ID NO: 3839; WAN024FQ7_at; Start 477; Stop 501
cagtcatttcttccaaaccttgcaa

SEQ ID NO: 216555 - DNA, 25 bp, Artificial
  probe
  misc_feature (1)..(25): SEQ ID NO: 3839; WAN024FQ7_at; Start 496; Stop 520
ttgcaaaaacatggctatcgtatcg

SEQ ID NO: 216556 - DNA, 25 bp, Artificial
  probe
  misc_feature (1)..(25): SEQ ID NO: 3839; WAN024FQ7_at; Start 369; Stop 393
tattatccgaatggagcgggtccgc

SEQ ID NO: 216557 - DNA, 25 bp, Artificial
  probe
  misc_feature (1)..(25): SEQ ID NO: 3839; WAN024FQ7_at; Start 222; Stop 246
agtacaagaaaagatgcgagggaca

SEQ ID NO: 216558 - DNA, 25 bp, Artificial
  probe
  misc_feature (1)..(25): SEQ ID NO: 3839; WAN024FQ7_at; Start 656; Stop 680
taaaaagtcaatatgtaggcgaacg

SEQ ID NO: 216559 - DNA, 25 bp, Artificial
  probe
  misc_feature (1)..(25): SEQ ID NO: 3839; WAN024FQ7_at; Start 534; Stop 558
gaccatctatgctcgccttgctaaa

SEQ ID NO: 216560 - DNA, 25 bp, Artificial
  probe
  misc_feature (1)..(25): SEQ ID NO: 3839; WAN024FQ7_at; Start 254; Stop 278
ttactgaaattgtcaaatcccaagg

SEQ ID NO: 216561 - DNA, 25 bp, Artificial
  probe
  misc_feature (1)..(25): SEQ ID NO: 3839; WAN024FQ7_at; Start 69; Stop 93
ttgggctattggtgagaggcttccc

SEQ ID NO: 216562 - DNA, 25 bp, Artificial
  probe
  misc_feature (1)..(25): SEQ ID NO: 3839; WAN024FQ7_at; Start 318; Stop 342
cattcccaatgagcaagaagttgcc

SEQ ID NO: 216563 - DNA, 25 bp, Artificial
  probe
  misc_feature (1)..(25): SEQ ID NO: 3839; WAN024FQ7_at; Start 91; Stop 115
cccagtgaaagagatttagctgagc

SEQ ID NO: 216564 - DNA, 25 bp, Artificial
  probe
  misc_feature (1)..(25): SEQ ID NO: 3839; WAN024FQ7_at; Start 140; Stop 164
tccgccaagccgtatctctattagt

SEQ ID NO: 216565 - DNA, 25 bp, Artificial
  probe
  misc_feature (1)..(25): SEQ ID NO: 3839; WAN024FQ7_at; Start 81; Stop 105
tgagaggcttcccagtgaaagagat

SEQ ID NO: 216566 - DNA, 25 bp, Artificial
  probe
  misc_feature (1)..(25): SEQ ID NO: 3839; WAN024FQ7_at; Start 1; Stop 25
gtgaaaaatatgctacctgcttata

SEQ ID NO: 216567 - DNA, 25 bp, Artificial
  probe
  misc_feature (1)..(25): SEQ ID NO: 3839; WAN024FQ7_at; Start 194; Stop 218
gaagcggcacctttgtttccagtac

SEQ ID NO: 216568 - DNA, 25 bp, Artificial
  probe
  misc_feature (1)..(25): SEQ ID NO: 3839; WAN024FQ7_at; Start 564; Stop 588
gattgcccactatttggaagttgaa

SEQ ID NO: 216569 - DNA, 25 bp, Artificial
  probe
  misc_feature (1)..(25): SEQ ID NO: 3839; WAN024FQ7_at; Start 487; Stop 511
ttccaaaccttgcaaaaacatggct

SEQ ID NO: 216570 - DNA, 25 bp, Artificial
  probe
  misc_feature (1)..(25): SEQ ID NO: 3839; WAN024FQ7_at; Start 118; Stop 142
tttgcggtcagtcgcatgaccctcc

SEQ ID NO: 216571 - DNA, 25 bp, Artificial
  probe
  misc_feature (1)..(25): SEQ ID NO: 3839; WAN024FQ7_at; Start 200; Stop 224
gcacctttgtttccagtactcgagt

SEQ ID NO: 216572 - DNA, 25 bp, Artificial
  probe
  misc_feature (1)..(25): SEQ ID NO: 3839; WAN024FQ7_at; Start 154; Stop 178
tctctattagtcgaagaaggcgtct

SEQ ID NO: 216573 - DNA, 25 bp, Artificial
  probe
  misc_feature (1)..(25): SEQ ID NO: 3839; WAN024FQ7_at; Start 459; Stop 483
taaaaaagaagaaatcaccagtcat

SEQ ID NO: 216574 - DNA, 25 bp, Artificial
  probe
  misc_feature (1)..(25): SEQ ID NO: 3839; WAN024FQ7_at; Start 420; Stop 444
tgaagttgcttctattcctgaaaaa

SEQ ID NO: 216575 - DNA, 25 bp, Artificial
  probe
  misc_feature (1)..(25): SEQ ID NO: 3839; WAN024FQ7_at; Start 334; Stop 358
gaagttgccaagctaggaatttttc

SEQ ID NO: 216576 - DNA, 25 bp, Artificial
  probe
  misc_feature (1)..(25): SEQ ID NO: 3839; WAN024FQ7_at; Start 590; Stop 614
aaggacatgctattcttggattgac

SEQ ID NO: 216577 - DNA, 25 bp, Artificial
  probe
  misc_feature (1)..(25): SEQ ID NO: 6374; WAN024FQ8_at; Start 272; Stop 296
tgtatcatttgttatcaggtgtaga

SEQ ID NO: 216578 - DNA, 25 bp, Artificial
  probe
  misc_feature (1)..(25): SEQ ID NO: 6374; WAN024FQ8_at; Start 886; Stop 910
gagagaaatccgaatctaaaagaag

SEQ ID NO: 216579 - DNA, 25 bp, Artificial
  probe
  misc_feature (1)..(25): SEQ ID NO: 6374; WAN024FQ8_at; Start 751; Stop 775
gattttcaaggtaatcttcgctata

SEQ ID NO: 216580 - DNA, 25 bp, Artificial
  probe
  misc_feature (1)..(25): SEQ ID NO: 6374; WAN024FQ8_at; Start 591; Stop 615
taaggaggcggtagatatactgcta

SEQ ID NO: 216581 - DNA, 25 bp, Artificial
  probe
  misc_feature (1)..(25): SEQ ID NO: 6374; WAN024FQ8_at; Start 769; Stop 793
cgctatattaattggtgggatggaa

SEQ ID NO: 216582 - DNA, 25 bp, Artificial
  probe
  misc_feature (1)..(25): SEQ ID NO: 6374; WAN024FQ8_at; Start 389; Stop 413
ttcgaaataaagtctatgagcgtgt

SEQ ID NO: 216583 - DNA, 25 bp, Artificial
  probe
  misc_feature (1)..(25): SEQ ID NO: 6374; WAN024FQ8_at; Start 245; Stop 269
ccgcaaataaacaagaaaattacag

SEQ ID NO: 216584 - DNA, 25 bp, Artificial
  probe
  misc_feature (1)..(25): SEQ ID NO: 6374; WAN024FQ8_at; Start 177; Stop 201
cacaagggaaataccaatttattgg

SEQ ID NO: 216585 - DNA, 25 bp, Artificial
  probe
  misc_feature (1)..(25): SEQ ID NO: 6374; WAN024FQ8_at; Start 145; Stop 169
actcaaatagtaacgaagtcaggcg

SEQ ID NO: 216586 - DNA, 25 bp, Artificial
  probe
  misc_feature (1)..(25): SEQ ID NO: 6374; WAN024FQ8_at; Start 606; Stop 630
tatactgctagaagaaaagcaattg

SEQ ID NO: 216587 - DNA, 25 bp, Artificial
  probe
  misc_feature (1)..(25): SEQ ID NO: 6374; WAN024FQ8_at; Start 806; Stop 830
ggactgattcttctgatgatattga

SEQ ID NO: 216588 - DNA, 25 bp, Artificial
  probe
  misc_feature (1)..(25): SEQ ID NO: 6374; WAN024FQ8_at; Start 577; Stop 601
tggtgttctcttaataaggaggcgg

SEQ ID NO: 216589 - DNA, 25 bp, Artificial
  probe
  misc_feature (1)..(25): SEQ ID NO: 6374; WAN024FQ8_at; Start 624; Stop 648
gcaattgattgctaccatttttaaa

SEQ ID NO: 216590 - DNA, 25 bp, Artificial
  probe
  misc_feature (1)..(25): SEQ ID NO: 6374; WAN024FQ8_at; Start 738; Stop 762
tgataagcctactgattttcaaggt

SEQ ID NO: 216591 - DNA, 25 bp, Artificial
  probe
  misc_feature (1)..(25): SEQ ID NO: 6374; WAN024FQ8_at; Start 723; Stop 747
gatagaacctacaaatgataagcct

SEQ ID NO: 216592 - DNA, 25 bp, Artificial
  probe
  misc_feature (1)..(25): SEQ ID NO: 6374; WAN024FQ8_at; Start 502; Stop 526
gaagttgaactgcaaagaatattta

SEQ ID NO: 216593 - DNA, 25 bp, Artificial
  probe
  misc_feature (1)..(25): SEQ ID NO: 6374; WAN024FQ8_at; Start 405; Stop 429
tgagcgtgtagcgtttaaaacaatg

SEQ ID NO: 216594 - DNA, 25 bp, Artificial
  probe
  misc_feature (1)..(25): SEQ ID NO: 6374; WAN024FQ8_at; Start 784; Stop 808
tgggatggaagtccatatacatgga

SEQ ID NO: 216595 - DNA, 25 bp, Artificial
  probe
  misc_feature (1)..(25): SEQ ID NO: 6374; WAN024FQ8_at; Start 678; Stop 702
tcctacagttttacagaaacatcag

SEQ ID NO: 216596 - DNA, 25 bp, Artificial
  probe
  misc_feature (1)..(25): SEQ ID NO: 6374; WAN024FQ8_at; Start 100; Stop 124
tttgataaaaaagcaacaattactg

SEQ ID NO: 216597 - DNA, 25 bp, Artificial
  probe
  misc_feature (1)..(25): SEQ ID NO: 6374; WAN024FQ8_at; Start 691; Stop 715
cagaaacatcagctattgaataccg

SEQ ID NO: 216598 - DNA, 25 bp, Artificial
  probe
  misc_feature (1)..(25): SEQ ID NO: 6374; WAN024FQ8_at; Start 797; Stop 821
catatacatggactgattcttctga

SEQ ID NO: 216599 - DNA, 25 bp, Artificial
  probe
  misc_feature (1)..(25): SEQ ID NO: 6374; WAN024FQ8_at; Start 203; Stop 227
gagattattctttagttgaagcaga

SEQ ID NO: 216600 - DNA, 25 bp, Artificial
  probe
  misc_feature (1)..(25): SEQ ID NO: 6374; WAN024FQ8_at; Start 651; Stop 675
taccaaagtaagtgacgaattattc

SEQ ID NO: 216601 - DNA, 25 bp, Artificial
  probe
  misc_feature (1)..(25): SEQ ID NO: 6374; WAN024FQ8_at; Start 160; Stop 184
aagtcaggcgtattcttcacaaggg

SEQ ID NO: 216602 - DNA, 25 bp, Artificial
  probe
  misc_feature (1)..(25): SEQ ID NO: 6374; WAN024FQ8_at; Start 327; Stop 351
taacttttttgatagcagaaaagga

SEQ ID NO: 216603 - DNA, 25 bp, Artificial
  probe
  misc_feature (1)..(25): SEQ ID NO: 6374; WAN024FQ8_at; Start 425; Stop 449
caatgtttcctcatttaacggtaag

SEQ ID NO: 216604 - DNA, 25 bp, Artificial
  probe
  misc_feature (1)..(25): SEQ ID NO: 6374; WAN024FQ8_at; Start 2; Stop 26
tgaaacaagcttatttaatcatagc

SEQ ID NO: 216605 - DNA, 25 bp, Artificial
  probe
  misc_feature (1)..(25): SEQ ID NO: 6374; WAN024FQ8_at; Start 707; Stop 731
tgaataccgtttattcgatagaacc

SEQ ID NO: 216606 - DNA, 25 bp, Artificial
  probe
  misc_feature (1)..(25): SEQ ID NO: 6374; WAN024FQ8_at; Start 293; Stop 317
tagatttaccattagatactgcaga

SEQ ID NO: 216607 - DNA, 25 bp, Artificial
  probe
  misc_feature (1)..(25): SEQ ID NO: 6374; WAN024FQ8_at; Start 217; Stop 241
gttgaagcagaaatagaactttttg

SEQ ID NO: 216608 - DNA, 25 bp, Artificial
  probe
  misc_feature (1)..(25): SEQ ID NO: 6374; WAN024FQ8_at; Start 828; Stop 852
tgatcaattgaaaagaggtaaggtt

SEQ ID NO: 216609 - DNA, 25 bp, Artificial
  probe
  misc_feature (1)..(25): SEQ ID NO: 6374; WAN024FQ8_at; Start 560; Stop 584
tgggatatgcttctaattggtgttc

SEQ ID NO: 216610 - DNA, 25 bp, Artificial
  probe
  misc_feature (1)..(25): SEQ ID NO: 6374; WAN024FQ8_at; Start 490; Stop 514
tatagaaagtttgaagttgaactgc

SEQ ID NO: 216611 - DNA, 25 bp, Artificial
  probe
  misc_feature (1)..(25): SEQ ID NO: 843; WAN024FQ9_at; Start 495; Stop 519
tgtagcatattaccgtaagctagag

SEQ ID NO: 216612 - DNA, 25 bp, Artificial
  probe
  misc_feature (1)..(25): SEQ ID NO: 843; WAN024FQ9_at; Start 782; Stop 806
taagatatatcaattggtgggatgg

SEQ ID NO: 216613 - DNA, 25 bp, Artificial
  probe
  misc_feature (1)..(25): SEQ ID NO: 843; WAN024FQ9_at; Start 598; Stop 622
tctattaatcaggatttagttagaa

SEQ ID NO: 216614 - DNA, 25 bp, Artificial
  probe
  misc_feature (1)..(25): SEQ ID NO: 843; WAN024FQ9_at; Start 692; Stop 716
ttcctacgataatgtataaatacaa

SEQ ID NO: 216615 - DNA, 25 bp, Artificial
  probe
  misc_feature (1)..(25): SEQ ID NO: 843; WAN024FQ9_at; Start 455; Stop 479
tcttagctagaaatattcagaacaa

SEQ ID NO: 216616 - DNA, 25 bp, Artificial
  probe
  misc_feature (1)..(25): SEQ ID NO: 843; WAN024FQ9_at; Start 616; Stop 640
gttagaataatactagaagaagaga

SEQ ID NO: 216617 - DNA, 25 bp, Artificial
  probe
  misc_feature (1)..(25): SEQ ID NO: 843; WAN024FQ9_at; Start 40; Stop 64
gcacataataagtttgaacagttga

SEQ ID NO: 216618 - DNA, 25 bp, Artificial
  probe
  misc_feature (1)..(25): SEQ ID NO: 843; WAN024FQ9_at; Start 477; Stop 501
caaatatgttcgtaaatttgtagca

SEQ ID NO: 216619 - DNA, 25 bp, Artificial
  probe
  misc_feature (1)..(25): SEQ ID NO: 843; WAN024FQ9_at; Start 706; Stop 730
tataaatacaatttgatggaatcgt

SEQ ID NO: 216620 - DNA, 25 bp, Artificial
  probe
  misc_feature (1)..(25): SEQ ID NO: 843; WAN024FQ9_at; Start 131; Stop 155
atgtgggggagtctacaattacttc

SEQ ID NO: 216621 - DNA, 25 bp, Artificial
  probe
  misc_feature (1)..(25): SEQ ID NO: 843; WAN024FQ9_at; Start 460; Stop 484
gctagaaatattcagaacaaatatg

SEQ ID NO: 216622 - DNA, 25 bp, Artificial
  probe
  misc_feature (1)..(25): SEQ ID NO: 843; WAN024FQ9_at; Start 43; Stop 67
cataataagtttgaacagttgaaat

SEQ ID NO: 216623 - DNA, 25 bp, Artificial
  probe
  misc_feature (1)..(25): SEQ ID NO: 843; WAN024FQ9_at; Start 122; Stop 146
gcaaagttaatgtgggggagtctac

SEQ ID NO: 216624 - DNA, 25 bp, Artificial
  probe
  misc_feature (1)..(25): SEQ ID NO: 843; WAN024FQ9_at; Start 768; Stop 792
ttttcaaggaaatctaagatatatc

SEQ ID NO: 216625 - DNA, 25 bp, Artificial
  probe
  misc_feature (1)..(25): SEQ ID NO: 843; WAN024FQ9_at; Start 71; Stop 95
taatttctctgttggattataagga

SEQ ID NO: 216626 - DNA, 25 bp, Artificial
  probe
  misc_feature (1)..(25): SEQ ID NO: 843; WAN024FQ9_at; Start 604; Stop 628
aatcaggatttagttagaataatac

SEQ ID NO: 216627 - DNA, 25 bp, Artificial
  probe
  misc_feature (1)..(25): SEQ ID NO: 843; WAN024FQ9_at; Start 76; Stop 100
tctctgttggattataaggaacatg

SEQ ID NO: 216628 - DNA, 25 bp, Artificial
  probe
  misc_feature (1)..(25): SEQ ID NO: 843; WAN024FQ9_at; Start 490; Stop 514
aaatttgtagcatattaccgtaagc

SEQ ID NO: 216629 - DNA, 25 bp, Artificial
  probe
  misc_feature (1)..(25): SEQ ID NO: 843; WAN024FQ9_at; Start 79; Stop 103
ctgttggattataaggaacatgata

SEQ ID NO: 216630 - DNA, 25 bp, Artificial
  probe
  misc_feature (1)..(25): SEQ ID NO: 843; WAN024FQ9_at; Start 464; Stop 488
gaaatattcagaacaaatatgttcg

SEQ ID NO: 216631 - DNA, 25 bp, Artificial
  probe
  misc_feature (1)..(25): SEQ ID NO: 843; WAN024FQ9_at; Start 448; Stop 472
cctagattcttagctagaaatattc

SEQ ID NO: 216632 - DNA, 25 bp, Artificial
  probe
  misc_feature (1)..(25): SEQ ID NO: 843; WAN024FQ9_at; Start 83; Stop 107
tggattataaggaacatgatatttt

SEQ ID NO: 216633 - DNA, 25 bp, Artificial
  probe
  misc_feature (1)..(25): SEQ ID NO: 843; WAN024FQ9_at; Start 36; Stop 60
aattgcacataataagtttgaacag

SEQ ID NO: 216634 - DNA, 25 bp, Artificial
  probe
  misc_feature (1)..(25): SEQ ID NO: 843; WAN024FQ9_at; Start 497; Stop 521
tagcatattaccgtaagctagagat

SEQ ID NO: 216635 - DNA, 25 bp, Artificial
  probe
  misc_feature (1)..(25): SEQ ID NO: 843; WAN024FQ9_at; Start 830; Stop 854
ctgagcatgatatagaacaattgaa

SEQ ID NO: 216636 - DNA, 25 bp, Artificial
  probe
  misc_feature (1)..(25): SEQ ID NO: 843; WAN024FQ9_at; Start 342; Stop 366
taaattctttgatcagaacaaatca

SEQ ID NO: 216637 - DNA, 25 bp, Artificial
  probe
  misc_feature (1)..(25): SEQ ID NO: 843; WAN024FQ9_at; Start 626; Stop 650
tactagaagaagagaaaaatattga

SEQ ID NO: 216638 - DNA, 25 bp, Artificial
  probe
  misc_feature (1)..(25): SEQ ID NO: 843; WAN024FQ9_at; Start 552; Stop 576
ttttaaaaaatataacatgagattg

SEQ ID NO: 216639 - DNA, 25 bp, Artificial
  probe
  misc_feature (1)..(25): SEQ ID NO: 843; WAN024FQ9_at; Start 829; Stop 853
tctgagcatgatatagaacaattga

SEQ ID NO: 216640 - DNA, 25 bp, Artificial
  probe
  misc_feature (1)..(25): SEQ ID NO: 843; WAN024FQ9_at; Start 505; Stop 529
taccgtaagctagagattaaaattc

SEQ ID NO: 216641 - DNA, 25 bp, Artificial
  probe
  misc_feature (1)..(25): SEQ ID NO: 843; WAN024FQ9_at; Start 724; Stop 748
gaatcgttatattcatcttcaccga

SEQ ID NO: 216642 - DNA, 25 bp, Artificial
  probe
  misc_feature (1)..(25): SEQ ID NO: 843; WAN024FQ9_at; Start 500; Stop 524
catattaccgtaagctagagattaa

SEQ ID NO: 216643 - DNA, 25 bp, Artificial
  probe
  misc_feature (1)..(25): SEQ ID NO: 843; WAN024FQ9_at; Start 507; Stop 531
ccgtaagctagagattaaaattcaa

SEQ ID NO: 216644 - DNA, 25 bp, Artificial
  probe
  misc_feature (1)..(25): SEQ ID NO: 843; WAN024FQ9_at; Start 714; Stop 738
caatttgatggaatcgttatattca

SEQ ID NO: 216645 - DNA, 25 bp, Artificial
  probe
  misc_feature (1)..(25): SEQ ID NO: 3129; WAN024FQA_at; Start 435; Stop 459
gaaggctcttgagctaatgctagac

SEQ ID NO: 216646 - DNA, 25 bp, Artificial
  probe
  misc_feature (1)..(25): SEQ ID NO: 3129; WAN024FQA_at; Start 561; Stop 585
ggtagcggatcaccttgccttagcg

SEQ ID NO: 216647 - DNA, 25 bp, Artificial
  probe
  misc_feature (1)..(25): SEQ ID NO: 3129; WAN024FQA_at; Start 463; Stop 487
aagattgcgacagtttctgcttgtg

SEQ ID NO: 216648 - DNA, 25 bp, Artificial
  probe
  misc_feature (1)..(25): SEQ ID NO: 3129; WAN024FQA_at; Start 605; Stop 629
cacttgaaacatataactattaccg

SEQ ID NO: 216649 - DNA, 25 bp, Artificial
  probe
  misc_feature (1)..(25): SEQ ID NO: 3129; WAN024FQA_at; Start 260; Stop 284
tagatccagatgattatttggaaga

SEQ ID NO: 216650 - DNA, 25 bp, Artificial
  probe
  misc_feature (1)..(25): SEQ ID NO: 3129; WAN024FQA_at; Start 425; Stop 449
ttacaaaagagaaggctcttgagct

SEQ ID NO: 216651 - DNA, 25 bp, Artificial
  probe
  misc_feature (1)..(25): SEQ ID NO: 3129; WAN024FQA_at; Start 437; Stop 461
aggctcttgagctaatgctagacga

SEQ ID NO: 216652 - DNA, 25 bp, Artificial
  probe
  misc_feature (1)..(25): SEQ ID NO: 3129; WAN024FQA_at; Start 271; Stop 295
gattatttggaagattatactctag

SEQ ID NO: 216653 - DNA, 25 bp, Artificial
  probe
  misc_feature (1)..(25): SEQ ID NO: 3129; WAN024FQA_at; Start 550; Stop 574
gacttttatgtggtagcggatcacc

SEQ ID NO: 216654 - DNA, 25 bp, Artificial
  probe
  misc_feature (1)..(25): SEQ ID NO: 3129; WAN024FQA_at; Start 430; Stop 454
aaagagaaggctcttgagctaatgc

SEQ ID NO: 216655 - DNA, 25 bp, Artificial
  probe
  misc_feature (1)..(25): SEQ ID NO: 3129; WAN024FQA_at; Start 755; Stop 779
tgcaagcgaaaaaattacgaggagg

SEQ ID NO: 216656 - DNA, 25 bp, Artificial
  probe
  misc_feature (1)..(25): SEQ ID NO: 3129; WAN024FQA_at; Start 610; Stop 634
gaaacatataactattaccgtagag

SEQ ID NO: 216657 - DNA, 25 bp, Artificial
  probe
  misc_feature (1)..(25): SEQ ID NO: 3129; WAN024FQA_at; Start 547; Stop 571
gaagacttttatgtggtagcggatc

SEQ ID NO: 216658 - DNA, 25 bp, Artificial
  probe
  misc_feature (1)..(25): SEQ ID NO: 3129; WAN024FQA_at; Start 597; Stop 621
gattagtccacttgaaacatataac

SEQ ID NO: 216659 - DNA, 25 bp, Artificial
  probe
  misc_feature (1)..(25): SEQ ID NO: 3129; WAN024FQA_at; Start 465; Stop 489
gattgcgacagtttctgcttgtgct

SEQ ID NO: 216660 - DNA, 25 bp, Artificial
  probe
  misc_feature (1)..(25): SEQ ID NO: 3129; WAN024FQA_at; Start 802; Stop 826
gctgactctggtttaacagattttt

SEQ ID NO: 216661 - DNA, 25 bp, Artificial
  probe
  misc_feature (1)..(25): SEQ ID NO: 3129; WAN024FQA_at; Start 283; Stop 307
gattatactctagaattgatagtga

SEQ ID NO: 216662 - DNA, 25 bp, Artificial
  probe
  misc_feature (1)..(25): SEQ ID NO: 3129; WAN024FQA_at; Start 614; Stop 638
catataactattaccgtagagaagg

SEQ ID NO: 216663 - DNA, 25 bp, Artificial
  probe
  misc_feature (1)..(25): SEQ ID NO: 3129; WAN024FQA_at; Start 50; Stop 74
actttgccatggatagtctgataaa

SEQ ID NO: 216664 - DNA, 25 bp, Artificial
  probe
  misc_feature (1)..(25): SEQ ID NO: 3129; WAN024FQA_at; Start 556; Stop 580
tatgtggtagcggatcaccttgcct

SEQ ID NO: 216665 - DNA, 25 bp, Artificial
  probe
  misc_feature (1)..(25): SEQ ID NO: 3129; WAN024FQA_at; Start 622; Stop 646
tattaccgtagagaaggtagtattg

SEQ ID NO: 216666 - DNA, 25 bp, Artificial
  probe
  misc_feature (1)..(25): SEQ ID NO: 3129; WAN024FQA_at; Start 681; Stop 705
ttttgatgctgtttcgaaaaacgaa

SEQ ID NO: 216667 - DNA, 25 bp, Artificial
  probe
  misc_feature (1)..(25): SEQ ID NO: 3129; WAN024FQA_at; Start 290; Stop 314
ctctagaattgatagtgaaaattca

SEQ ID NO: 216668 - DNA, 25 bp, Artificial
  probe
  misc_feature (1)..(25): SEQ ID NO: 3129; WAN024FQA_at; Start 649; Stop 673
cgttcgacttttactgagaaaagat

SEQ ID NO: 216669 - DNA, 25 bp, Artificial
  probe
  misc_feature (1)..(25): SEQ ID NO: 3129; WAN024FQA_at; Start 805; Stop 829
gactctggtttaacagatttttcga

SEQ ID NO: 216670 - DNA, 25 bp, Artificial
  probe
  misc_feature (1)..(25): SEQ ID NO: 3129; WAN024FQA_at; Start 753; Stop 777
tctgcaagcgaaaaaattacgagga

SEQ ID NO: 216671 - DNA, 25 bp, Artificial
  probe
  misc_feature (1)..(25): SEQ ID NO: 3129; WAN024FQA_at; Start 46; Stop 70
ttacactttgccatggatagtctga

SEQ ID NO: 216672 - DNA, 25 bp, Artificial
  probe
  misc_feature (1)..(25): SEQ ID NO: 3129; WAN024FQA_at; Start 136; Stop 160
cagttatgtgaagagtatgctaagc

SEQ ID NO: 216673 - DNA, 25 bp, Artificial
  probe
  misc_feature (1)..(25): SEQ ID NO: 3129; WAN024FQA_at; Start 278; Stop 302
tggaagattatactctagaattgat

SEQ ID NO: 216674 - DNA, 25 bp, Artificial
  probe
  misc_feature (1)..(25): SEQ ID NO: 3129; WAN024FQA_at; Start 133; Stop 157
cctcagttatgtgaagagtatgcta

SEQ ID NO: 216675 - DNA, 25 bp, Artificial
  probe
  misc_feature (1)..(25): SEQ ID NO: 3129; WAN024FQA_at; Start 544; Stop 568
tatgaagacttttatgtggtagcgg

SEQ ID NO: 216676 - DNA, 25 bp, Artificial
  probe
  misc_feature (1)..(25): SEQ ID NO: 3129; WAN024FQA_at; Start 558; Stop 582
tgtggtagcggatcaccttgcctta

SEQ ID NO: 216677 - DNA, 25 bp, Artificial
  probe
  misc_feature (1)..(25): SEQ ID NO: 3129; WAN024FQA_at; Start 653; Stop 677
cgacttttactgagaaaagatatga

SEQ ID NO: 216678 - DNA, 25 bp, Artificial
  probe
  misc_feature (1)..(25): SEQ ID NO: 3129; WAN024FQA_at; Start 588; Stop 612
taaaattgtgattagtccacttgaa

SEQ ID NO: 216679 - DNA, 25 bp, Artificial
  probe
  misc_feature (1)..(25): SEQ ID NO: 3100; WAN024FQB_at; Start 499; Stop 523
cggaaatgcatcttggaacgcgttc

SEQ ID NO: 216680 - DNA, 25 bp, Artificial
  probe
  misc_feature (1)..(25): SEQ ID NO: 3100; WAN024FQB_at; Start 574; Stop 598
cttgccttagctgaaagaatcgtga

SEQ ID NO: 216681 - DNA, 25 bp, Artificial
  probe
  misc_feature (1)..(25): SEQ ID NO: 3100; WAN024FQB_at; Start 449; Stop 473
taatgttggatgacaaagttgcaac

SEQ ID NO: 216682 - DNA, 25 bp, Artificial
  probe
  misc_feature (1)..(25): SEQ ID NO: 3100; WAN024FQB_at; Start 464; Stop 488
aagttgcaacggtttctgcttgtgc

SEQ ID NO: 216683 - DNA, 25 bp, Artificial
  probe
  misc_feature (1)..(25): SEQ ID NO: 3100; WAN024FQB_at; Start 45; Stop 69
tctgcattatgcgatagaaagctta

SEQ ID NO: 216684 - DNA, 25 bp, Artificial
  probe
  misc_feature (1)..(25): SEQ ID NO: 3100; WAN024FQB_at; Start 340; Stop 364
tcaacaaaggtaaaagctacttcaa

SEQ ID NO: 216685 - DNA, 25 bp, Artificial
  probe
  misc_feature (1)..(25): SEQ ID NO: 3100; WAN024FQB_at; Start 618; Stop 642
caattactatcgtagggaagggagt

SEQ ID NO: 216686 - DNA, 25 bp, Artificial
  probe
  misc_feature (1)..(25): SEQ ID NO: 3100; WAN024FQB_at; Start 312; Stop 336
tcaggaaacacatcaagcagacttg

SEQ ID NO: 216687 - DNA, 25 bp, Artificial
  probe
  misc_feature (1)..(25): SEQ ID NO: 3100; WAN024FQB_at; Start 205; Stop 229
tctgatgcgcgtaactttggagttt

SEQ ID NO: 216688 - DNA, 25 bp, Artificial
  probe
  misc_feature (1)..(25): SEQ ID NO: 3100; WAN024FQB_at; Start 325; Stop 349
caagcagacttgatttcaacaaagg

SEQ ID NO: 216689 - DNA, 25 bp, Artificial
  probe
  misc_feature (1)..(25): SEQ ID NO: 3100; WAN024FQB_at; Start 260; Stop 284
tagatccggatgattatcttgaaga

SEQ ID NO: 216690 - DNA, 25 bp, Artificial
  probe
  misc_feature (1)..(25): SEQ ID NO: 3100; WAN024FQB_at; Start 716; Stop 740
aaagagagtacattcagattccaga

SEQ ID NO: 216691 - DNA, 25 bp, Artificial
  probe
  misc_feature (1)..(25): SEQ ID NO: 3100; WAN024FQB_at; Start 142; Stop 166
tgcgaagattatgcaaagcaatatg

SEQ ID NO: 216692 - DNA, 25 bp, Artificial
  probe
  misc_feature (1)..(25): SEQ ID NO: 3100; WAN024FQB_at; Start 684; Stop 708
tgaagctgttgcaaaaaatgaggaa

SEQ ID NO: 216693 - DNA, 25 bp, Artificial
  probe
  misc_feature (1)..(25): SEQ ID NO: 3100; WAN024FQB_at; Start 220; Stop 244
tttggagtttctaaagcgagttcag

SEQ ID NO: 216694 - DNA, 25 bp, Artificial
  probe
  misc_feature (1)..(25): SEQ ID NO: 3100; WAN024FQB_at; Start 399; Stop 423
ctcagactataaagatttggcttcg

SEQ ID NO: 216695 - DNA, 25 bp, Artificial
  probe
  misc_feature (1)..(25): SEQ ID NO: 3100; WAN024FQB_at; Start 2; Stop 26
tgtttgtcagcatcgttgttccggt

SEQ ID NO: 216696 - DNA, 25 bp, Artificial
  probe
  misc_feature (1)..(25): SEQ ID NO: 3100; WAN024FQB_at; Start 416; Stop 440
tggcttcgattacaaaagaaaaggc

SEQ ID NO: 216697 - DNA, 25 bp, Artificial
  probe
  misc_feature (1)..(25): SEQ ID NO: 3100; WAN024FQB_at; Start 529; Stop 553
ccagtcgggaagatctatgaggatt

SEQ ID NO: 216698 - DNA, 25 bp, Artificial
  probe
  misc_feature (1)..(25): SEQ ID NO: 3100; WAN024FQB_at; Start 802; Stop 826
gctgactcaggcttaaaagattttt

SEQ ID NO: 216699 - DNA, 25 bp, Artificial
  probe
  misc_feature (1)..(25): SEQ ID NO: 3100; WAN024FQB_at; Start 484; Stop 508
tgtgctaagctttatcggaaatgca

SEQ ID NO: 216700 - DNA, 25 bp, Artificial
  probe
  misc_feature (1)..(25): SEQ ID NO: 3100; WAN024FQB_at; Start 842; Stop 866
tgttgagagtcgaaatgagcgagtt

SEQ ID NO: 216701 - DNA, 25 bp, Artificial
  probe
  misc_feature (1)..(25): SEQ ID NO: 3100; WAN024FQB_at; Start 732; Stop 756
gattccagaattaaagcaagctttg

SEQ ID NO: 216702 - DNA, 25 bp, Artificial
  probe
  misc_feature (1)..(25): SEQ ID NO: 3100; WAN024FQB_at; Start 559; Stop 583
gttgtagcagaacatcttgccttag

SEQ ID NO: 216703 - DNA, 25 bp, Artificial
  probe
  misc_feature (1)..(25): SEQ ID NO: 3100; WAN024FQB_at; Start 292; Stop 316
ctagagttaatcgtgaaaattcagg

SEQ ID NO: 216704 - DNA, 25 bp, Artificial
  probe
  misc_feature (1)..(25): SEQ ID NO: 3100; WAN024FQB_at; Start 514; Stop 538
gaacgcgttccatttccagtcggga

SEQ ID NO: 216705 - DNA, 25 bp, Artificial
  probe
  misc_feature (1)..(25): SEQ ID NO: 3100; WAN024FQB_at; Start 124; Stop 148
gatgattctcctctattatgcgaag

SEQ ID NO: 216706 - DNA, 25 bp, Artificial
  probe
  misc_feature (1)..(25): SEQ ID NO: 3100; WAN024FQB_at; Start 72; Stop 96
taaacagacctatcaaaactttgag

SEQ ID NO: 216707 - DNA, 25 bp, Artificial
  probe
  misc_feature (1)..(25): SEQ ID NO: 3100; WAN024FQB_at; Start 111; Stop 135
tgatggttctacagatgattctcct

SEQ ID NO: 216708 - DNA, 25 bp, Artificial
  probe
  misc_feature (1)..(25): SEQ ID NO: 3100; WAN024FQB_at; Start 590; Stop 614
gaatcgtgatcagtccacttgaaac

SEQ ID NO: 216709 - DNA, 25 bp, Artificial
  probe
  misc_feature (1)..(25): SEQ ID NO: 3100; WAN024FQB_at; Start 788; Stop 812
taattggtgcaaaagctgactcagg

SEQ ID NO: 216710 - DNA, 25 bp, Artificial
  probe
  misc_feature (1)..(25): SEQ ID NO: 3100; WAN024FQB_at; Start 633; Stop 657
ggaagggagtattgttcgttcaaca

SEQ ID NO: 216711 - DNA, 25 bp, Artificial
  probe
  misc_feature (1)..(25): SEQ ID NO: 3100; WAN024FQB_at; Start 22; Stop 46
ccggtttataatgttgcagactatc

SEQ ID NO: 216712 - DNA, 25 bp, Artificial
  probe
  misc_feature (1)..(25): SEQ ID NO: 3100; WAN024FQB_at; Start 384; Stop 408
ttatcgattgcaagactcagactat

SEQ ID NO: 216713 - DNA, 25 bp, Artificial
  probe
  misc_feature (1)..(25): SEQ ID NO: 2774; WAN024FQC_at; Start 820; Stop 844
aatatcgaggaagcgagccgattat

SEQ ID NO: 216714 - DNA, 25 bp, Artificial
  probe
  misc_feature (1)..(25): SEQ ID NO: 2774; WAN024FQC_at; Start 298; Stop 322
tggattgatgtaccaagttttgaaa

SEQ ID NO: 216715 - DNA, 25 bp, Artificial
  probe
  misc_feature (1)..(25): SEQ ID NO: 2774; WAN024FQC_at; Start 630; Stop 654
cttaggtagaaaagatcagagtatg

SEQ ID NO: 216716 - DNA, 25 bp, Artificial
  probe
  misc_feature (1)..(25): SEQ ID NO: 2774; WAN024FQC_at; Start 68; Stop 92
tagaatcatttaaacaagtagataa

SEQ ID NO: 216717 - DNA, 25 bp, Artificial
  probe
  misc_feature (1)..(25): SEQ ID NO: 2774; WAN024FQC_at; Start 438; Stop 462
taataaaatatatgagggaatacct

SEQ ID NO: 216718 - DNA, 25 bp, Artificial
  probe
  misc_feature (1)..(25): SEQ ID NO: 2774; WAN024FQC_at; Start 41; Stop 65
atattgaacaatatattactaagtg

SEQ ID NO: 216719 - DNA, 25 bp, Artificial
  probe
  misc_feature (1)..(25): SEQ ID NO: 2774; WAN024FQC_at; Start 97; Stop 121
tattatgcggattttgaagtgattg

SEQ ID NO: 216720 - DNA, 25 bp, Artificial
  probe
  misc_feature (1)..(25): SEQ ID NO: 2774; WAN024FQC_at; Start 226; Stop 250
catgggtcaacgattaatgttggta

SEQ ID NO: 216721 - DNA, 25 bp, Artificial
  probe
  misc_feature (1)..(25): SEQ ID NO: 2774; WAN024FQC_at; Start 185; Stop 209
gttgcctaaatattagagttgttaa

SEQ ID NO: 216722 - DNA, 25 bp, Artificial
  probe
  misc_feature (1)..(25): SEQ ID NO: 2774; WAN024FQC_at; Start 212; Stop 236
aagaaaatggtggacatgggtcaac

SEQ ID NO: 216723 - DNA, 25 bp, Artificial
  probe
  misc_feature (1)..(25): SEQ ID NO: 2774; WAN024FQC_at; Start 117; Stop 141
gattgttgttaatgacggtagtacg

SEQ ID NO: 216724 - DNA, 25 bp, Artificial
  probe
  misc_feature (1)..(25): SEQ ID NO: 2774; WAN024FQC_at; Start 220; Stop 244
ggtggacatgggtcaacgattaatg

SEQ ID NO: 216725 - DNA, 25 bp, Artificial
  probe
  misc_feature (1)..(25): SEQ ID NO: 2774; WAN024FQC_at; Start 965; Stop 989
tcaataagcaacaaaaagaatggag

SEQ ID NO: 216726 - DNA, 25 bp, Artificial
  probe
  misc_feature (1)..(25): SEQ ID NO: 2774; WAN024FQC_at; Start 789; Stop 813
caagcaatgtcagttgtttataatg

SEQ ID NO: 216727 - DNA, 25 bp, Artificial
  probe
  misc_feature (1)..(25): SEQ ID NO: 2774; WAN024FQC_at; Start 646; Stop 670
cagagtatgaatttaaatgtgatga

SEQ ID NO: 216728 - DNA, 25 bp, Artificial
  probe
  misc_feature (1)..(25): SEQ ID NO: 2774; WAN024FQC_at; Start 137; Stop 161
gtacggataactcacttcaagttgt

SEQ ID NO: 216729 - DNA, 25 bp, Artificial
  probe
  misc_feature (1)..(25): SEQ ID NO: 2774; WAN024FQC_at; Start 391; Stop 415
tataatcagactgaaaaagagattg

SEQ ID NO: 216730 - DNA, 25 bp, Artificial
  probe
  misc_feature (1)..(25): SEQ ID NO: 2774; WAN024FQC_at; Start 112; Stop 136
gaagtgattgttgttaatgacggta

SEQ ID NO: 216731 - DNA, 25 bp, Artificial
  probe
  misc_feature (1)..(25): SEQ ID NO: 2774; WAN024FQC_at; Start 824; Stop 848
tcgaggaagcgagccgattatttag

SEQ ID NO: 216732 - DNA, 25 bp, Artificial
  probe
  misc_feature (1)..(25): SEQ ID NO: 2774; WAN024FQC_at; Start 446; Stop 470
tatatgagggaatacctttcaaacg

SEQ ID NO: 216733 - DNA, 25 bp, Artificial
  probe
  misc_feature (1)..(25): SEQ ID NO: 2774; WAN024FQC_at; Start 133; Stop 157
ggtagtacggataactcacttcaag

SEQ ID NO: 216734 - DNA, 25 bp, Artificial
  probe
  misc_feature (1)..(25): SEQ ID NO: 2774; WAN024FQC_at; Start 126; Stop 150
taatgacggtagtacggataactca

SEQ ID NO: 216735 - DNA, 25 bp, Artificial
  probe
  misc_feature (1)..(25): SEQ ID NO: 2774; WAN024FQC_at; Start 766; Stop 790
gacgtattgacatacttaatcaaca

SEQ ID NO: 216736 - DNA, 25 bp, Artificial
  probe
  misc_feature (1)..(25): SEQ ID NO: 2774; WAN024FQC_at; Start 494; Stop 518
acaaaacatctatattgaaagaatc

SEQ ID NO: 216737 - DNA, 25 bp, Artificial
  probe
  misc_feature (1)..(25): SEQ ID NO: 2774; WAN024FQC_at; Start 778; Stop 802
tacttaatcaacaagcaatgtcagt

SEQ ID NO: 216738 - DNA, 25 bp, Artificial
  probe
  misc_feature (1)..(25): SEQ ID NO: 2774; WAN024FQC_at; Start 82; Stop 106
caagtagataaaaaatattatgcgg

SEQ ID NO: 216739 - DNA, 25 bp, Artificial
  probe
  misc_feature (1)..(25): SEQ ID NO: 2774; WAN024FQC_at; Start 130; Stop 154
gacggtagtacggataactcacttc

SEQ ID NO: 216740 - DNA, 25 bp, Artificial
  probe
  misc_feature (1)..(25): SEQ ID NO: 2774; WAN024FQC_at; Start 24; Stop 48
catagtaccaatgtataatattgaa

SEQ ID NO: 216741 - DNA, 25 bp, Artificial
  probe
  misc_feature (1)..(25): SEQ ID NO: 2774; WAN024FQC_at; Start 479; Stop 503
tgcatgctctgacatacaaaacatc

SEQ ID NO: 216742 - DNA, 25 bp, Artificial
  probe
  misc_feature (1)..(25): SEQ ID NO: 2774; WAN024FQC_at; Start 615; Stop 639
tgtttaccagtatttcttaggtaga

SEQ ID NO: 216743 - DNA, 25 bp, Artificial
  probe
  misc_feature (1)..(25): SEQ ID NO: 2774; WAN024FQC_at; Start 827; Stop 851
aggaagcgagccgattatttagtta

SEQ ID NO: 216744 - DNA, 25 bp, Artificial
  probe
  misc_feature (1)..(25): SEQ ID NO: 2774; WAN024FQC_at; Start 659; Stop 683
taaatgtgatgaaacaaaaagcaga

SEQ ID NO: 216745 - DNA, 25 bp, Artificial
  probe
  misc_feature (1)..(25): SEQ ID NO: 2774; WAN024FQC_at; Start 773; Stop 797
tgacatacttaatcaacaagcaatg

SEQ ID NO: 216746 - DNA, 25 bp, Artificial
  probe
  misc_feature (1)..(25): SEQ ID NO: 2774; WAN024FQC_at; Start 484; Stop 508
gctctgacatacaaaacatctatat

SEQ ID NO: 216747 - DNA, 25 bp, Artificial
  probe
  misc_feature (1)..(25): SEQ ID NO: 1920; WAN024FQD_at; Start 232; Stop 256
tcgacaatcaatcgcggtattcaag

SEQ ID NO: 216748 - DNA, 25 bp, Artificial
  probe
  misc_feature (1)..(25): SEQ ID NO: 1920; WAN024FQD_at; Start 223; Stop 247
ggtcatggttcgacaatcaatcgcg

SEQ ID NO: 216749 - DNA, 25 bp, Artificial
  probe
  misc_feature (1)..(25): SEQ ID NO: 1920; WAN024FQD_at; Start 170; Stop 194
tattagccaaagattcgttgctgga

SEQ ID NO: 216750 - DNA, 25 bp, Artificial
  probe
  misc_feature (1)..(25): SEQ ID NO: 1920; WAN024FQD_at; Start 140; Stop 164
cagacgatacggctttagtagcaga

SEQ ID NO: 216751 - DNA, 25 bp, Artificial
  probe
  misc_feature (1)..(25): SEQ ID NO: 1920; WAN024FQD_at; Start 213; Stop 237
agaaaacggcggtcatggttcgaca

SEQ ID NO: 216752 - DNA, 25 bp, Artificial
  probe
  misc_feature (1)..(25): SEQ ID NO: 1920; WAN024FQD_at; Start 177; Stop 201
caaagattcgttgctggatggccgt

SEQ ID NO: 216753 - DNA, 25 bp, Artificial
  probe
  misc_feature (1)..(25): SEQ ID NO: 1920; WAN024FQD_at; Start 126; Stop 150
caatgatagaagtacagacgatacg

SEQ ID NO: 216754 - DNA, 25 bp, Artificial
  probe
  misc_feature (1)..(25): SEQ ID NO: 1920; WAN024FQD_at; Start 157; Stop 181
gtagcagaaaaaatattagccaaag

SEQ ID NO: 216755 - DNA, 25 bp, Artificial
  probe
  misc_feature (1)..(25): SEQ ID NO: 1920; WAN024FQD_at; Start 112; Stop 136
gaagtactggttgtcaatgatagaa

SEQ ID NO: 216756 - DNA, 25 bp, Artificial
  probe
  misc_feature (1)..(25): SEQ ID NO: 1920; WAN024FQD_at; Start 54; Stop 78
tatttccaaaggaatcgagtcattc

SEQ ID NO: 216757 - DNA, 25 bp, Artificial
  probe
  misc_feature (1)..(25): SEQ ID NO: 1920; WAN024FQD_at; Start 48; Stop 72
ggactatatttccaaaggaatcgag

SEQ ID NO: 216758 - DNA, 25 bp, Artificial
  probe
  misc_feature (1)..(25): SEQ ID NO: 1920; WAN024FQD_at; Start 120; Stop 144
ggttgtcaatgatagaagtacagac

SEQ ID NO: 216759 - DNA, 25 bp, Artificial
  probe
  misc_feature (1)..(25): SEQ ID NO: 1920; WAN024FQD_at; Start 144; Stop 168
cgatacggctttagtagcagaaaaa

SEQ ID NO: 216760 - DNA, 25 bp, Artificial
  probe
  misc_feature (1)..(25): SEQ ID NO: 1920; WAN024FQD_at; Start 189; Stop 213
gctggatggccgtgtcattacaaaa

SEQ ID NO: 216761 - DNA, 25 bp, Artificial
  probe
  misc_feature (1)..(25): SEQ ID NO: 1920; WAN024FQD_at; Start 181; Stop 205
gattcgttgctggatggccgtgtca

SEQ ID NO: 216762 - DNA, 25 bp, Artificial
  probe
  misc_feature (1)..(25): SEQ ID NO: 1920; WAN024FQD_at; Start 243; Stop 267
tcgcggtattcaagaagcaaaggga

SEQ ID NO: 216763 - DNA, 25 bp, Artificial
  probe
  misc_feature (1)..(25): SEQ ID NO: 1920; WAN024FQD_at; Start 149; Stop 173
cggctttagtagcagaaaaaatatt

SEQ ID NO: 216764 - DNA, 25 bp, Artificial
  probe
  misc_feature (1)..(25): SEQ ID NO: 1920; WAN024FQD_at; Start 76; Stop 100
ttccagcaagtacacccggattata

SEQ ID NO: 216765 - DNA, 25 bp, Artificial
  probe
  misc_feature (1)..(25): SEQ ID NO: 1920; WAN024FQD_at; Start 184; Stop 208
tcgttgctggatggccgtgtcatta

SEQ ID NO: 216766 - DNA, 25 bp, Artificial
  probe
  misc_feature (1)..(25): SEQ ID NO: 1920; WAN024FQD_at; Start 240; Stop 264
caatcgcggtattcaagaagcaaag

SEQ ID NO: 216767 - DNA, 25 bp, Artificial
  probe
  misc_feature (1)..(25): SEQ ID NO: 1920; WAN024FQD_at; Start 226; Stop 250
catggttcgacaatcaatcgcggta

SEQ ID NO: 216768 - DNA, 25 bp, Artificial
  probe
  misc_feature (1)..(25): SEQ ID NO: 1920; WAN024FQD_at; Start 245; Stop 269
gcggtattcaagaagcaaagggaaa

SEQ ID NO: 216769 - DNA, 25 bp, Artificial
  probe
  misc_feature (1)..(25): SEQ ID NO: 1920; WAN024FQD_at; Start 153; Stop 177
tttagtagcagaaaaaatattagcc

SEQ ID NO: 216770 - DNA, 25 bp, Artificial
  probe
  misc_feature (1)..(25): SEQ ID NO: 1920; WAN024FQD_at; Start 229; Stop 253
ggttcgacaatcaatcgcggtattc

SEQ ID NO: 216771 - DNA, 25 bp, Artificial
  probe
  misc_feature (1)..(25): SEQ ID NO: 1920; WAN024FQD_at; Start 103; Stop 127
aataaatttgaagtactggttgtca

SEQ ID NO: 216772 - DNA, 25 bp, Artificial
  probe
  misc_feature (1)..(25): SEQ ID NO: 1920; WAN024FQD_at; Start 192; Stop 216
ggatggccgtgtcattacaaaagaa

SEQ ID NO: 216773 - DNA, 25 bp, Artificial
  probe
  misc_feature (1)..(25): SEQ ID NO: 1920; WAN024FQD_at; Start 137; Stop 161
gtacagacgatacggctttagtagc

SEQ ID NO: 216774 - DNA, 25 bp, Artificial
  probe
  misc_feature (1)..(25): SEQ ID NO: 1920; WAN024FQD_at; Start 236; Stop 260
caatcaatcgcggtattcaagaagc

SEQ ID NO: 216775 - DNA, 25 bp, Artificial
  probe
  misc_feature (1)..(25): SEQ ID NO: 1920; WAN024FQD_at; Start 219; Stop 243
cggcggtcatggttcgacaatcaat

SEQ ID NO: 216776 - DNA, 25 bp, Artificial
  probe
  misc_feature (1)..(25): SEQ ID NO: 1920; WAN024FQD_at; Start 217; Stop 241
aacggcggtcatggttcgacaatca

SEQ ID NO: 216777 - DNA, 25 bp, Artificial
  probe
  misc_feature (1)..(25): SEQ ID NO: 1920; WAN024FQD_at; Start 78; Stop 102
ccagcaagtacacccggattataaa

SEQ ID NO: 216778 - DNA, 25 bp, Artificial
  probe
  misc_feature (1)..(25): SEQ ID NO: 1920; WAN024FQD_at; Start 134; Stop 158
gaagtacagacgatacggctttagt

SEQ ID NO: 216779 - DNA, 25 bp, Artificial
  probe
  misc_feature (1)..(25): SEQ ID NO: 1920; WAN024FQD_at; Start 142; Stop 166
gacgatacggctttagtagcagaaa

SEQ ID NO: 216780 - DNA, 25 bp, Artificial
  probe
  misc_feature (1)..(25): SEQ ID NO: 1920; WAN024FQD_at; Start 129; Stop 153
tgatagaagtacagacgatacggct

SEQ ID NO: 216781 - DNA, 25 bp, Artificial
  probe
  misc_feature (1)..(25): SEQ ID NO: 1921; WAN024FQE_at; Start 196; Stop 220
ggtcgtattatcacaaaggaaaatg

SEQ ID NO: 216782 - DNA, 25 bp, Artificial
  probe
  misc_feature (1)..(25): SEQ ID NO: 1921; WAN024FQE_at; Start 128; Stop 152
atgatggaagtacggacgacacagc

SEQ ID NO: 216783 - DNA, 25 bp, Artificial
  probe
  misc_feature (1)..(25): SEQ ID NO: 1921; WAN024FQE_at; Start 884; Stop 908
ctacgaaaaaatttgatagattgtc

SEQ ID NO: 216784 - DNA, 25 bp, Artificial
  probe
  misc_feature (1)..(25): SEQ ID NO: 1921; WAN024FQE_at; Start 238; Stop 262
attaatcgtggtatccaggaagcaa

SEQ ID NO: 216785 - DNA, 25 bp, Artificial
  probe
  misc_feature (1)..(25): SEQ ID NO: 1921; WAN024FQE_at; Start 898; Stop 922
gatagattgtcttatttgaactata

SEQ ID NO: 216786 - DNA, 25 bp, Artificial
  probe
  misc_feature (1)..(25): SEQ ID NO: 1921; WAN024FQE_at; Start 619; Stop 643
taccaatactatatcggacgacccg

SEQ ID NO: 216787 - DNA, 25 bp, Artificial
  probe
  misc_feature (1)..(25): SEQ ID NO: 1921; WAN024FQE_at; Start 845; Stop 869
tatacagacaaattgagcagagttc

SEQ ID NO: 216788 - DNA, 25 bp, Artificial
  probe
  misc_feature (1)..(25): SEQ ID NO: 1921; WAN024FQE_at; Start 191; Stop 215
tgaatggtcgtattatcacaaagga

SEQ ID NO: 216789 - DNA, 25 bp, Artificial
  probe
  misc_feature (1)..(25): SEQ ID NO: 1921; WAN024FQE_at; Start 879; Stop 903
tatccctacgaaaaaatttgataga

SEQ ID NO: 216790 - DNA, 25 bp, Artificial
  probe
  misc_feature (1)..(25): SEQ ID NO: 1921; WAN024FQE_at; Start 823; Stop 847
tcaaagacactatcagaagaattat

SEQ ID NO: 216791 - DNA, 25 bp, Artificial
  probe
  misc_feature (1)..(25): SEQ ID NO: 1921; WAN024FQE_at; Start 125; Stop 149
tgaatgatggaagtacggacgacac

SEQ ID NO: 216792 - DNA, 25 bp, Artificial
  probe
  misc_feature (1)..(25): SEQ ID NO: 1921; WAN024FQE_at; Start 864; Stop 888
gagttcttatgagtatatccctacg

SEQ ID NO: 216793 - DNA, 25 bp, Artificial
  probe
  misc_feature (1)..(25): SEQ ID NO: 1921; WAN024FQE_at; Start 853; Stop 877
caaattgagcagagttcttatgagt

SEQ ID NO: 216794 - DNA, 25 bp, Artificial
  probe
  misc_feature (1)..(25): SEQ ID NO: 1921; WAN024FQE_at; Start 123; Stop 147
tgtgaatgatggaagtacggacgac

SEQ ID NO: 216795 - DNA, 25 bp, Artificial
  probe
  misc_feature (1)..(25): SEQ ID NO: 1921; WAN024FQE_at; Start 849; Stop 873
cagacaaattgagcagagttcttat

SEQ ID NO: 216796 - DNA, 25 bp, Artificial
  probe
  misc_feature (1)..(25): SEQ ID NO: 1921; WAN024FQE_at; Start 394; Stop 418
aacaatactactgttcgaaatgatt

SEQ ID NO: 216797 - DNA, 25 bp, Artificial
  probe
  misc_feature (1)..(25): SEQ ID NO: 1921; WAN024FQE_at; Start 200; Stop 224
gtattatcacaaaggaaaatggagg

SEQ ID NO: 216798 - DNA, 25 bp, Artificial
  probe
  misc_feature (1)..(25): SEQ ID NO: 1921; WAN024FQE_at; Start 132; Stop 156
tggaagtacggacgacacagccaaa

SEQ ID NO: 216799 - DNA, 25 bp, Artificial
  probe
  misc_feature (1)..(25): SEQ ID NO: 1921; WAN024FQE_at; Start 861; Stop 885
gcagagttcttatgagtatatccct

SEQ ID NO: 216800 - DNA, 25 bp, Artificial
  probe
  misc_feature (1)..(25): SEQ ID NO: 1921; WAN024FQE_at; Start 628; Stop 652
tatatcggacgacccgagcagagta

SEQ ID NO: 216801 - DNA, 25 bp, Artificial
  probe
  misc_feature (1)..(25): SEQ ID NO: 1921; WAN024FQE_at; Start 138; Stop 162
tacggacgacacagccaaagtagca

SEQ ID NO: 216802 - DNA, 25 bp, Artificial
  probe
  misc_feature (1)..(25): SEQ ID NO: 1921; WAN024FQE_at; Start 117; Stop 141
cttaattgtgaatgatggaagtacg

SEQ ID NO: 216803 - DNA, 25 bp, Artificial
  probe
  misc_feature (1)..(25): SEQ ID NO: 1921; WAN024FQE_at; Start 240; Stop 264
taatcgtggtatccaggaagcaaag

SEQ ID NO: 216804 - DNA, 25 bp, Artificial
  probe
  misc_feature (1)..(25): SEQ ID NO: 1921; WAN024FQE_at; Start 636; Stop 660
acgacccgagcagagtatgaatatt

SEQ ID NO: 216805 - DNA, 25 bp, Artificial
  probe
  misc_feature (1)..(25): SEQ ID NO: 1921; WAN024FQE_at; Start 242; Stop 266
atcgtggtatccaggaagcaaaggg

SEQ ID NO: 216806 - DNA, 25 bp, Artificial
  probe
  misc_feature (1)..(25): SEQ ID NO: 1921; WAN024FQE_at; Start 623; Stop 647
aatactatatcggacgacccgagca

SEQ ID NO: 216807 - DNA, 25 bp, Artificial
  probe
  misc_feature (1)..(25): SEQ ID NO: 1921; WAN024FQE_at; Start 145; Stop 169
gacacagccaaagtagcagaagagg

SEQ ID NO: 216808 - DNA, 25 bp, Artificial
  probe
  misc_feature (1)..(25): SEQ ID NO: 1921; WAN024FQE_at; Start 749; Stop 773
taaagaaagtggttgcagatacttt

SEQ ID NO: 216809 - DNA, 25 bp, Artificial
  probe
  misc_feature (1)..(25): SEQ ID NO: 1921; WAN024FQE_at; Start 142; Stop 166
gacgacacagccaaagtagcagaag

SEQ ID NO: 216810 - DNA, 25 bp, Artificial
  probe
  misc_feature (1)..(25): SEQ ID NO: 1921; WAN024FQE_at; Start 830; Stop 854
cactatcagaagaattatacagaca

SEQ ID NO: 216811 - DNA, 25 bp, Artificial
  probe
  misc_feature (1)..(25): SEQ ID NO: 1921; WAN024FQE_at; Start 838; Stop 862
gaagaattatacagacaaattgagc

SEQ ID NO: 216812 - DNA, 25 bp, Artificial
  probe
  misc_feature (1)..(25): SEQ ID NO: 1921; WAN024FQE_at; Start 625; Stop 649
tactatatcggacgacccgagcaga

SEQ ID NO: 216813 - DNA, 25 bp, Artificial
  probe
  misc_feature (1)..(25): SEQ ID NO: 1921; WAN024FQE_at; Start 633; Stop 657
cggacgacccgagcagagtatgaat

SEQ ID NO: 216814 - DNA, 25 bp, Artificial
  probe
  misc_feature (1)..(25): SEQ ID NO: 1921; WAN024FQE_at; Start 869; Stop 893
cttatgagtatatccctacgaaaaa

SEQ ID NO: 216815 - DNA, 25 bp, Artificial
  probe
  misc_feature (1)..(25): SEQ ID NO: 1472; WAN024FQF_at; Start 415; Stop 439
tctgtactagattatttttcaaaaa

SEQ ID NO: 216816 - DNA, 25 bp, Artificial
  probe
  misc_feature (1)..(25): SEQ ID NO: 1472; WAN024FQF_at; Start 123; Stop 147
tgactttattgacaagtatgaaatt

SEQ ID NO: 216817 - DNA, 25 bp, Artificial
  probe
  misc_feature (1)..(25): SEQ ID NO: 1472; WAN024FQF_at; Start 75; Stop 99
tacagattttacagagcagcatgtc

SEQ ID NO: 216818 - DNA, 25 bp, Artificial
  probe
  misc_feature (1)..(25): SEQ ID NO: 1472; WAN024FQF_at; Start 88; Stop 112
gagcagcatgtcaataacgatacta

SEQ ID NO: 216819 - DNA, 25 bp, Artificial
  probe
  misc_feature (1)..(25): SEQ ID NO: 1472; WAN024FQF_at; Start 49; Stop 73
gaaactgttgatgtggatatggtga

SEQ ID NO: 216820 - DNA, 25 bp, Artificial
  probe
  misc_feature (1)..(25): SEQ ID NO: 1472; WAN024FQF_at; Start 397; Stop 421
catctaaaggtaacgaattctgtac

SEQ ID NO: 216821 - DNA, 25 bp, Artificial
  probe
  misc_feature (1)..(25): SEQ ID NO: 1472; WAN024FQF_at; Start 43; Stop 67
gctcttgaaactgttgatgtggata

SEQ ID NO: 216822 - DNA, 25 bp, Artificial
  probe
  misc_feature (1)..(25): SEQ ID NO: 1472; WAN024FQF_at; Start 469; Stop 493
gtttctgaaaccttagtttatctca

SEQ ID NO: 216823 - DNA, 25 bp, Artificial
  probe
  misc_feature (1)..(25): SEQ ID NO: 1472; WAN024FQF_at; Start 345; Stop 369
tagaccagagcaaagtatgaatatt

SEQ ID NO: 216824 - DNA, 25 bp, Artificial
  probe
  misc_feature (1)..(25): SEQ ID NO: 1472; WAN024FQF_at; Start 405; Stop 429
ggtaacgaattctgtactagattat

SEQ ID NO: 216825 - DNA, 25 bp, Artificial
  probe
  misc_feature (1)..(25): SEQ ID NO: 1472; WAN024FQF_at; Start 84; Stop 108
tacagagcagcatgtcaataacgat

SEQ ID NO: 216826 - DNA, 25 bp, Artificial
  probe
  misc_feature (1)..(25): SEQ ID NO: 1472; WAN024FQF_at; Start 267; Stop 291
tcagtacacactctttcctttggag

SEQ ID NO: 216827 - DNA, 25 bp, Artificial
  probe
  misc_feature (1)..(25): SEQ ID NO: 1472; WAN024FQF_at; Start 96; Stop 120
tgtcaataacgatactacagtacga

SEQ ID NO: 216828 - DNA, 25 bp, Artificial
  probe
  misc_feature (1)..(25): SEQ ID NO: 1472; WAN024FQF_at; Start 341; Stop 365
taggtagaccagagcaaagtatgaa

SEQ ID NO: 216829 - DNA, 25 bp, Artificial
  probe
  misc_feature (1)..(25): SEQ ID NO: 1472; WAN024FQF_at; Start 213; Stop 237
tatcttgtcggcgaataaaattcgt

SEQ ID NO: 216830 - DNA, 25 bp, Artificial
  probe
  misc_feature (1)..(25): SEQ ID NO: 1472; WAN024FQF_at; Start 64; Stop 88
gatatggtgattacagattttacag

SEQ ID NO: 216831 - DNA, 25 bp, Artificial
  probe
  misc_feature (1)..(25): SEQ ID NO: 1472; WAN024FQF_at; Start 387; Stop 411
tgtaagtcatcatctaaaggtaacg

SEQ ID NO: 216832 - DNA, 25 bp, Artificial
  probe
  misc_feature (1)..(25): SEQ ID NO: 1472; WAN024FQF_at; Start 188; Stop 212
tgcattcagttacatataaaacatc

SEQ ID NO: 216833 - DNA, 25 bp, Artificial
  probe
  misc_feature (1)..(25): SEQ ID NO: 1472; WAN024FQF_at; Start 336; Stop 360
ctacataggtagaccagagcaaagt

SEQ ID NO: 216834 - DNA, 25 bp, Artificial
  probe
  misc_feature (1)..(25): SEQ ID NO: 1472; WAN024FQF_at; Start 28; Stop 52
gaaaagttcttagatgctcttgaaa

SEQ ID NO: 216835 - DNA, 25 bp, Artificial
  probe
  misc_feature (1)..(25): SEQ ID NO: 1472; WAN024FQF_at; Start 481; Stop 505
ttagtttatctcatcagtttgcagg

SEQ ID NO: 216836 - DNA, 25 bp, Artificial
  probe
  misc_feature (1)..(25): SEQ ID NO: 1472; WAN024FQF_at; Start 394; Stop 418
catcatctaaaggtaacgaattctg

SEQ ID NO: 216837 - DNA, 25 bp, Artificial
  probe
  misc_feature (1)..(25): SEQ ID NO: 1472; WAN024FQF_at; Start 377; Stop 401
tgaagcgaaatgtaagtcatcatct

SEQ ID NO: 216838 - DNA, 25 bp, Artificial
  probe
  misc_feature (1)..(25): SEQ ID NO: 1472; WAN024FQF_at; Start 486; Stop 510
ttatctcatcagtttgcaggttgtc

SEQ ID NO: 216839 - DNA, 25 bp, Artificial
  probe
  misc_feature (1)..(25): SEQ ID NO: 1472; WAN024FQF_at; Start 13; Stop 37
tccccatcagaaattgaaaagttct

SEQ ID NO: 216840 - DNA, 25 bp, Artificial
  probe
  misc_feature (1)..(25): SEQ ID NO: 1472; WAN024FQF_at; Start 321; Stop 345
tgatatttatcaatactacataggt

SEQ ID NO: 216841 - DNA, 25 bp, Artificial
  probe
  misc_feature (1)..(25): SEQ ID NO: 1472; WAN024FQF_at; Start 183; Stop 207
tcccatgcattcagttacatataaa

SEQ ID NO: 216842 - DNA, 25 bp, Artificial
  probe
  misc_feature (1)..(25): SEQ ID NO: 1472; WAN024FQF_at; Start 205; Stop 229
aaaacatctatcttgtcggcgaata

SEQ ID NO: 216843 - DNA, 25 bp, Artificial
  probe
  misc_feature (1)..(25): SEQ ID NO: 1472; WAN024FQF_at; Start 36; Stop 60
cttagatgctcttgaaactgttgat

SEQ ID NO: 216844 - DNA, 25 bp, Artificial
  probe
  misc_feature (1)..(25): SEQ ID NO: 1472; WAN024FQF_at; Start 331; Stop 355
caatactacataggtagaccagagc

SEQ ID NO: 216845 - DNA, 25 bp, Artificial
  probe
  misc_feature (1)..(25): SEQ ID NO: 1472; WAN024FQF_at; Start 77; Stop 101
cagattttacagagcagcatgtcaa

SEQ ID NO: 216846 - DNA, 25 bp, Artificial
  probe
  misc_feature (1)..(25): SEQ ID NO: 1472; WAN024FQF_at; Start 371; Stop 395
agagtatgaagcgaaatgtaagtca

SEQ ID NO: 216847 - DNA, 25 bp, Artificial
  probe
  misc_feature (1)..(25): SEQ ID NO: 1472; WAN024FQF_at; Start 202; Stop 226
tataaaacatctatcttgtcggcga

SEQ ID NO: 216848 - DNA, 25 bp, Artificial
  probe
  misc_feature (1)..(25): SEQ ID NO: 1472; WAN024FQF_at; Start 275; Stop 299
cactctttcctttggagtatgttca

SEQ ID NO: 216849 - DNA, 25 bp, Artificial
  probe
  misc_feature (1)..(25): SEQ ID NO: 2910; WAN024FQG_at; Start 629; Stop 653
tgggaagagctgatcagagtatgaa

SEQ ID NO: 216850 - DNA, 25 bp, Artificial
  probe
  misc_feature (1)..(25): SEQ ID NO: 2910; WAN024FQG_at; Start 449; Stop 473
gaggtattcctagcaagtggacacc

SEQ ID NO: 216851 - DNA, 25 bp, Artificial
  probe
  misc_feature (1)..(25): SEQ ID NO: 2910; WAN024FQG_at; Start 64; Stop 88
tgcatagaatcatttaaagctgtaa

SEQ ID NO: 216852 - DNA, 25 bp, Artificial
  probe
  misc_feature (1)..(25): SEQ ID NO: 2910; WAN024FQG_at; Start 722; Stop 746
aagagagttatacacaaaagccaga

SEQ ID NO: 216853 - DNA, 25 bp, Artificial
  probe
  misc_feature (1)..(25): SEQ ID NO: 2910; WAN024FQG_at; Start 438; Stop 462
tcaagagacaagaggtattcctagc

SEQ ID NO: 216854 - DNA, 25 bp, Artificial
  probe
  misc_feature (1)..(25): SEQ ID NO: 2910; WAN024FQG_at; Start 766; Stop 790
gactctttgcagtatctggttaata

SEQ ID NO: 216855 - DNA, 25 bp, Artificial
  probe
  misc_feature (1)..(25): SEQ ID NO: 2910; WAN024FQG_at; Start 24; Stop 48
tactgtgccaacctataatattgaa

SEQ ID NO: 216856 - DNA, 25 bp, Artificial
  probe
  misc_feature (1)..(25): SEQ ID NO: 2910; WAN024FQG_at; Start 194; Stop 218
taagaattatcacaaaagaaaatgg

SEQ ID NO: 216857 - DNA, 25 bp, Artificial
  probe
  misc_feature (1)..(25): SEQ ID NO: 2910; WAN024FQG_at; Start 463; Stop 487
aagtggacacctatgcatgccctgg

SEQ ID NO: 216858 - DNA, 25 bp, Artificial
  probe
  misc_feature (1)..(25): SEQ ID NO: 2910; WAN024FQG_at; Start 335; Stop 359
taagagagattaacactgatttagt

SEQ ID NO: 216859 - DNA, 25 bp, Artificial
  probe
  misc_feature (1)..(25): SEQ ID NO: 2910; WAN024FQG_at; Start 223; Stop 247
catggctcaactattaatcgcggga

SEQ ID NO: 216860 - DNA, 25 bp, Artificial
  probe
  misc_feature (1)..(25): SEQ ID NO: 2910; WAN024FQG_at; Start 119; Stop 143
taatcattaatgacggaagtactga

SEQ ID NO: 216861 - DNA, 25 bp, Artificial
  probe
  misc_feature (1)..(25): SEQ ID NO: 2910; WAN024FQG_at; Start 751; Stop 775
gaaaaggttgtcagtgactctttgc

SEQ ID NO: 216862 - DNA, 25 bp, Artificial
  probe
  misc_feature (1)..(25): SEQ ID NO: 2910; WAN024FQG_at; Start 9; Stop 33
taaaatactgacgattactgtgcca

SEQ ID NO: 216863 - DNA, 25 bp, Artificial
  probe
  misc_feature (1)..(25): SEQ ID NO: 2910; WAN024FQG_at; Start 517; Stop 541
gctattacgattagtgaaaatacat

SEQ ID NO: 216864 - DNA, 25 bp, Artificial
  probe
  misc_feature (1)..(25): SEQ ID NO: 2910; WAN024FQG_at; Start 915; Stop 939
tgtcaattataaaacgaagtatctt

SEQ ID NO: 216865 - DNA, 25 bp, Artificial
  probe
  misc_feature (1)..(25): SEQ ID NO: 2910; WAN024FQG_at; Start 803; Stop 827
tgtatgttatgaatgaggaacttga

SEQ ID NO: 216866 - DNA, 25 bp, Artificial
  probe
  misc_feature (1)..(25): SEQ ID NO: 2910; WAN024FQG_at; Start 133; Stop 157
ggaagtactgataattctgtacaag

SEQ ID NO: 216867 - DNA, 25 bp, Artificial
  probe
  misc_feature (1)..(25): SEQ ID NO: 2910; WAN024FQG_at; Start 971; Stop 995
gaaaagcaaacagtctagaaaaaga

SEQ ID NO: 216868 - DNA, 25 bp, Artificial
  probe
  misc_feature (1)..(25): SEQ ID NO: 2910; WAN024FQG_at; Start 175; Stop 199
gaaggtagcactttagatttaagaa

SEQ ID NO: 216869 - DNA, 25 bp, Artificial
  probe
  misc_feature (1)..(25): SEQ ID NO: 2910; WAN024FQG_at; Start 681; Stop 705
tcatcatgagagagtaacgaaacga

SEQ ID NO: 216870 - DNA, 25 bp, Artificial
  probe
  misc_feature (1)..(25): SEQ ID NO: 2910; WAN024FQG_at; Start 161; Stop 185
ttaaggatttaatggaaggtagcac

SEQ ID NO: 216871 - DNA, 25 bp, Artificial
  probe
  misc_feature (1)..(25): SEQ ID NO: 2910; WAN024FQG_at; Start 654; Stop 678
tattgatataatgagaaagagagca

SEQ ID NO: 216872 - DNA, 25 bp, Artificial
  probe
  misc_feature (1)..(25): SEQ ID NO: 2910; WAN024FQG_at; Start 690; Stop 714
gagagtaacgaaacgaatcttagac

SEQ ID NO: 216873 - DNA, 25 bp, Artificial
  probe
  misc_feature (1)..(25): SEQ ID NO: 2910; WAN024FQG_at; Start 501; Stop 525
tatcttgaaggataatgctattacg

SEQ ID NO: 216874 - DNA, 25 bp, Artificial
  probe
  misc_feature (1)..(25): SEQ ID NO: 2910; WAN024FQG_at; Start 359; Stop 383
tgatttctgactatacagagcagca

SEQ ID NO: 216875 - DNA, 25 bp, Artificial
  probe
  misc_feature (1)..(25): SEQ ID NO: 2910; WAN024FQG_at; Start 532; Stop 556
gaaaatacattttatgtcgaccaag

SEQ ID NO: 216876 - DNA, 25 bp, Artificial
  probe
  misc_feature (1)..(25): SEQ ID NO: 2910; WAN024FQG_at; Start 666; Stop 690
gagaaagagagcagatcatcatgag

SEQ ID NO: 216877 - DNA, 25 bp, Artificial
  probe
  misc_feature (1)..(25): SEQ ID NO: 2910; WAN024FQG_at; Start 428; Stop 452
taattccaaatcaagagacaagagg

SEQ ID NO: 216878 - DNA, 25 bp, Artificial
  probe
  misc_feature (1)..(25): SEQ ID NO: 2910; WAN024FQG_at; Start 374; Stop 398
cagagcagcatgtatataataatag

SEQ ID NO: 216879 - DNA, 25 bp, Artificial
  probe
  misc_feature (1)..(25): SEQ ID NO: 2910; WAN024FQG_at; Start 234; Stop 258
tattaatcgcgggattaaagaagct

SEQ ID NO: 216880 - DNA, 25 bp, Artificial
  probe
  misc_feature (1)..(25): SEQ ID NO: 2910; WAN024FQG_at; Start 546; Stop 570
tgtcgaccaagagtatacaatgctc

SEQ ID NO: 216881 - DNA, 25 bp, Artificial
  probe
  misc_feature (1)..(25): SEQ ID NO: 2910; WAN024FQG_at; Start 477; Stop 501
gcatgccctggtctataaaacaagt

SEQ ID NO: 216882 - DNA, 25 bp, Artificial
  probe
  misc_feature (1)..(25): SEQ ID NO: 2910; WAN024FQG_at; Start 46; Stop 70
gaaaactatattggtaaatgcatag

SEQ ID NO: 216883 - DNA, 25 bp, Artificial
  probe
  misc_feature (1)..(25): SEQ ID NO: 6303; WAN024FQH_at; Start 399; Stop 423
tattggaacaaaacttgcagacaag

SEQ ID NO: 216884 - DNA, 25 bp, Artificial
  probe
  misc_feature (1)..(25): SEQ ID NO: 6303; WAN024FQH_at; Start 271; Stop 295
ggaataggaatatcagcaaatatat

SEQ ID NO: 216885 - DNA, 25 bp, Artificial
  probe
  misc_feature (1)..(25): SEQ ID NO: 6303; WAN024FQH_at; Start 1057; Stop 1081
aatcagtggatatatttaatagaag

SEQ ID NO: 216886 - DNA, 25 bp, Artificial
  probe
  misc_feature (1)..(25): SEQ ID NO: 6303; WAN024FQH_at; Start 380; Stop 404
ctcagaaaattcaaagatatattgg

SEQ ID NO: 216887 - DNA, 25 bp, Artificial
  probe
  misc_feature (1)..(25): SEQ ID NO: 6303; WAN024FQH_at; Start 510; Stop 534
gaaagaaaatataccttcagacacg

SEQ ID NO: 216888 - DNA, 25 bp, Artificial
  probe
  misc_feature (1)..(25): SEQ ID NO: 6303; WAN024FQH_at; Start 395; Stop 419
gatatattggaacaaaacttgcaga

SEQ ID NO: 216889 - DNA, 25 bp, Artificial
  probe
  misc_feature (1)..(25): SEQ ID NO: 6303; WAN024FQH_at; Start 613; Stop 637
caagttgcgaaaaaggttttgtctg

SEQ ID NO: 216890 - DNA, 25 bp, Artificial
  probe
  misc_feature (1)..(25): SEQ ID NO: 6303; WAN024FQH_at; Start 647; Stop 671
gctggagttgggaaatctatggatc

SEQ ID NO: 216891 - DNA, 25 bp, Artificial
  probe
  misc_feature (1)..(25): SEQ ID NO: 6303; WAN024FQH_at; Start 434; Stop 458
ttactcaggaagattgtcaaaacta

SEQ ID NO: 216892 - DNA, 25 bp, Artificial
  probe
  misc_feature (1)..(25): SEQ ID NO: 6303; WAN024FQH_at; Start 265; Stop 289
gcctttggaataggaatatcagcaa

SEQ ID NO: 216893 - DNA, 25 bp, Artificial
  probe
  misc_feature (1)..(25): SEQ ID NO: 6303; WAN024FQH_at; Start 809; Stop 833
gctatgagggcttacctttagtcct

SEQ ID NO: 216894 - DNA, 25 bp, Artificial
  probe
  misc_feature (1)..(25): SEQ ID NO: 6303; WAN024FQH_at; Start 429; Stop 453
tacccttactcaggaagattgtcaa

SEQ ID NO: 216895 - DNA, 25 bp, Artificial
  probe
  misc_feature (1)..(25): SEQ ID NO: 6303; WAN024FQH_at; Start 721; Stop 745
gatttgcaagacaggttagtcataa

SEQ ID NO: 216896 - DNA, 25 bp, Artificial
  probe
  misc_feature (1)..(25): SEQ ID NO: 6303; WAN024FQH_at; Start 421; Stop 445
aagattattacccttactcaggaag

SEQ ID NO: 216897 - DNA, 25 bp, Artificial
  probe
  misc_feature (1)..(25): SEQ ID NO: 6303; WAN024FQH_at; Start 418; Stop 442
gacaagattattacccttactcagg

SEQ ID NO: 216898 - DNA, 25 bp, Artificial
  probe
  misc_feature (1)..(25): SEQ ID NO: 6303; WAN024FQH_at; Start 652; Stop 676
agttgggaaatctatggatccggca

SEQ ID NO: 216899 - DNA, 25 bp, Artificial
  probe
  misc_feature (1)..(25): SEQ ID NO: 6303; WAN024FQH_at; Start 514; Stop 538
gaaaatataccttcagacacgttaa

SEQ ID NO: 216900 - DNA, 25 bp, Artificial
  probe
  misc_feature (1)..(25): SEQ ID NO: 6303; WAN024FQH_at; Start 550; Stop 574
gaatcaacgaaaattgttacagtgg

SEQ ID NO: 216901 - DNA, 25 bp, Artificial
  probe
  misc_feature (1)..(25): SEQ ID NO: 6303; WAN024FQH_at; Start 1071; Stop 1095
tttaatagaagaaataggagcggat

SEQ ID NO: 216902 - DNA, 25 bp, Artificial
  probe
  misc_feature (1)..(25): SEQ ID NO: 6303; WAN024FQH_at; Start 403; Stop 427
ggaacaaaacttgcagacaagatta

SEQ ID NO: 216903 - DNA, 25 bp, Artificial
  probe
  misc_feature (1)..(25): SEQ ID NO: 6303; WAN024FQH_at; Start 820; Stop 844
ttacctttagtcctattagaagcac

SEQ ID NO: 216904 - DNA, 25 bp, Artificial
  probe
  misc_feature (1)..(25): SEQ ID NO: 6303; WAN024FQH_at; Start 364; Stop 388
gacaatcgagagttttctcagaaaa

SEQ ID NO: 216905 - DNA, 25 bp, Artificial
  probe
  misc_feature (1)..(25): SEQ ID NO: 6303; WAN024FQH_at; Start 536; Stop 560
taagttataataaagaatcaacgaa

SEQ ID NO: 216906 - DNA, 25 bp, Artificial
  probe
  misc_feature (1)..(25): SEQ ID NO: 6303; WAN024FQH_at; Start 526; Stop 550
tcagacacgttaagttataataaag

SEQ ID NO: 216907 - DNA, 25 bp, Artificial
  probe
  misc_feature (1)..(25): SEQ ID NO: 6303; WAN024FQH_at; Start 463; Stop 487
aaaaaatatggaattgctgaaggaa

SEQ ID NO: 216908 - DNA, 25 bp, Artificial
  probe
  misc_feature (1)..(25): SEQ ID NO: 6303; WAN024FQH_at; Start 469; Stop 493
tatggaattgctgaaggaattatcg

SEQ ID NO: 216909 - DNA, 25 bp, Artificial
  probe
  misc_feature (1)..(25): SEQ ID NO: 6303; WAN024FQH_at; Start 629; Stop 653
ttttgtctgagaagtcaggctggag

SEQ ID NO: 216910 - DNA, 25 bp, Artificial
  probe
  misc_feature (1)..(25): SEQ ID NO: 6303; WAN024FQH_at; Start 903; Stop 927
tgaagatggagtcaatggatttttg

SEQ ID NO: 216911 - DNA, 25 bp, Artificial
  probe
  misc_feature (1)..(25): SEQ ID NO: 6303; WAN024FQH_at; Start 1076; Stop 1100
tagaagaaataggagcggataatcg

SEQ ID NO: 216912 - DNA, 25 bp, Artificial
  probe
  misc_feature (1)..(25): SEQ ID NO: 6303; WAN024FQH_at; Start 912; Stop 936
agtcaatggatttttgattgattgc

SEQ ID NO: 216913 - DNA, 25 bp, Artificial
  probe
  misc_feature (1)..(25): SEQ ID NO: 6303; WAN024FQH_at; Start 439; Stop 463
caggaagattgtcaaaactatataa

SEQ ID NO: 216914 - DNA, 25 bp, Artificial
  probe
  misc_feature (1)..(25): SEQ ID NO: 6303; WAN024FQH_at; Start 640; Stop 664
aagtcaggctggagttgggaaatct

SEQ ID NO: 216915 - DNA, 25 bp, Artificial
  probe
  misc_feature (1)..(25): SEQ ID NO: 6303; WAN024FQH_at; Start 621; Stop 645
gaaaaaggttttgtctgagaagtca

SEQ ID NO: 216916 - DNA, 25 bp, Artificial
  probe
  misc_feature (1)..(25): SEQ ID NO: 6303; WAN024FQH_at; Start 478; Stop 502
gctgaaggaattatcgattatatct

SEQ ID NO: 216917 - DNA, 25 bp, Artificial
  probe
  misc_feature (1)..(25): SEQ ID NO: 6437; WAN024FQI_at; Start 271; Stop 295
ggaatagggataactgctaatatat

SEQ ID NO: 216918 - DNA, 25 bp, Artificial
  probe
  misc_feature (1)..(25): SEQ ID NO: 6437; WAN024FQI_at; Start 390; Stop 414
ccaaagatatgttggagcaaaatgt

SEQ ID NO: 216919 - DNA, 25 bp, Artificial
  probe
  misc_feature (1)..(25): SEQ ID NO: 6437; WAN024FQI_at; Start 512; Stop 536
aagaagatggtctttccaatgtacc

SEQ ID NO: 216920 - DNA, 25 bp, Artificial
  probe
  misc_feature (1)..(25): SEQ ID NO: 6437; WAN024FQI_at; Start 1007; Stop 1031
atcatgccaaggataatatggataa

SEQ ID NO: 216921 - DNA, 25 bp, Artificial
  probe
  misc_feature (1)..(25): SEQ ID NO: 6437; WAN024FQI_at; Start 639; Stop 663
gactggctggacttgggaaatttat

SEQ ID NO: 216922 - DNA, 25 bp, Artificial
  probe
  misc_feature (1)..(25): SEQ ID NO: 6437; WAN024FQI_at; Start 968; Stop 992
aattgatggaagattcgaacttgcg

SEQ ID NO: 216923 - DNA, 25 bp, Artificial
  probe
  misc_feature (1)..(25): SEQ ID NO: 6437; WAN024FQI_at; Start 644; Stop 668
gctggacttgggaaatttatggttc

SEQ ID NO: 216924 - DNA, 25 bp, Artificial
  probe
  misc_feature (1)..(25): SEQ ID NO: 6437; WAN024FQI_at; Start 264; Stop 288
tgcctttggaatagggataactgct

SEQ ID NO: 216925 - DNA, 25 bp, Artificial
  probe
  misc_feature (1)..(25): SEQ ID NO: 6437; WAN024FQI_at; Start 634; Stop 658
gaaaagactggctggacttgggaaa

SEQ ID NO: 216926 - DNA, 25 bp, Artificial
  probe
  misc_feature (1)..(25): SEQ ID NO: 6437; WAN024FQI_at; Start 517; Stop 541
gatggtctttccaatgtaccttata

SEQ ID NO: 216927 - DNA, 25 bp, Artificial
  probe
  misc_feature (1)..(25): SEQ ID NO: 6437; WAN024FQI_at; Start 993; Stop 1017
aacttccttcgccaatcatgccaag

SEQ ID NO: 216928 - DNA, 25 bp, Artificial
  probe
  misc_feature (1)..(25): SEQ ID NO: 6437; WAN024FQI_at; Start 984; Stop 1008
gaacttgcgaacttccttcgccaat

SEQ ID NO: 216929 - DNA, 25 bp, Artificial
  probe
  misc_feature (1)..(25): SEQ ID NO: 6437; WAN024FQI_at; Start 626; Stop 650
tactgaaagaaaagactggctggac

SEQ ID NO: 216930 - DNA, 25 bp, Artificial
  probe
  misc_feature (1)..(25): SEQ ID NO: 6437; WAN024FQI_at; Start 1083; Stop 1107
gactggagggaataattttgaaagc

SEQ ID NO: 216931 - DNA, 25 bp, Artificial
  probe
  misc_feature (1)..(25): SEQ ID NO: 6437; WAN024FQI_at; Start 724; Stop 748
caagataagttagtcattaaaggtc

SEQ ID NO: 216932 - DNA, 25 bp, Artificial
  probe
  misc_feature (1)..(25): SEQ ID NO: 6437; WAN024FQI_at; Start 1068; Stop 1092
tttaattgaggaaatgactggaggg

SEQ ID NO: 216933 - DNA, 25 bp, Artificial
  probe
  misc_feature (1)..(25): SEQ ID NO: 6437; WAN024FQI_at; Start 437; Stop 461
cacaagaagatcgtagaagttatat

SEQ ID NO: 216934 - DNA, 25 bp, Artificial
  probe
  misc_feature (1)..(25): SEQ ID NO: 6437; WAN024FQI_at; Start 604; Stop 628
cttgttcaagttgctaagaaagtac

SEQ ID NO: 216935 - DNA, 25 bp, Artificial
  probe
  misc_feature (1)..(25): SEQ ID NO: 6437; WAN024FQI_at; Start 810; Stop 834
tgaaggattacccttggtattgtta

SEQ ID NO: 216936 - DNA, 25 bp, Artificial
  probe
  misc_feature (1)..(25): SEQ ID NO: 6437; WAN024FQI_at; Start 695; Stop 719
tcaaggatttaatcatcaaaaatga

SEQ ID NO: 216937 - DNA, 25 bp, Artificial
  probe
  misc_feature (1)..(25): SEQ ID NO: 6437; WAN024FQI_at; Start 954; Stop 978
tgagagactacttgaattgatggaa

SEQ ID NO: 216938 - DNA, 25 bp, Artificial
  probe
  misc_feature (1)..(25): SEQ ID NO: 6437; WAN024FQI_at; Start 397; Stop 421
tatgttggagcaaaatgtgcagaca

SEQ ID NO: 216939 - DNA, 25 bp, Artificial
  probe
  misc_feature (1)..(25): SEQ ID NO: 6437; WAN024FQI_at; Start 1038; Stop 1062
taaagataaaataattcaacagtgg

SEQ ID NO: 216940 - DNA, 25 bp, Artificial
  probe
  misc_feature (1)..(25): SEQ ID NO: 6437; WAN024FQI_at; Start 366; Stop 390
caatagagaattttctcagaaagtc

SEQ ID NO: 216941 - DNA, 25 bp, Artificial
  probe
  misc_feature (1)..(25): SEQ ID NO: 6437; WAN024FQI_at; Start 661; Stop 685
tatggttctggtaatcaagatgagg

SEQ ID NO: 216942 - DNA, 25 bp, Artificial
  probe
  misc_feature (1)..(25): SEQ ID NO: 6437; WAN024FQI_at; Start 1054; Stop 1078
caacagtggattgatttaattgagg

SEQ ID NO: 216943 - DNA, 25 bp, Artificial
  probe
  misc_feature (1)..(25): SEQ ID NO: 6437; WAN024FQI_at; Start 544; Stop 568
gatgagtcaatgaaaattgttacag

SEQ ID NO: 216944 - DNA, 25 bp, Artificial
  probe
  misc_feature (1)..(25): SEQ ID NO: 6437; WAN024FQI_at; Start 976; Stop 1000
gaagattcgaacttgcgaacttcct

SEQ ID NO: 216945 - DNA, 25 bp, Artificial
  probe
  misc_feature (1)..(25): SEQ ID NO: 6437; WAN024FQI_at; Start 405; Stop 429
agcaaaatgtgcagacaagattatc

SEQ ID NO: 216946 - DNA, 25 bp, Artificial
  probe
  misc_feature (1)..(25): SEQ ID NO: 6437; WAN024FQI_at; Start 676; Stop 700
caagatgaggtagataaaatcaagg

SEQ ID NO: 216947 - DNA, 25 bp, Artificial
  probe
  misc_feature (1)..(25): SEQ ID NO: 6437; WAN024FQI_at; Start 610; Stop 634
caagttgctaagaaagtactgaaag

SEQ ID NO: 216948 - DNA, 25 bp, Artificial
  probe
  misc_feature (1)..(25): SEQ ID NO: 6437; WAN024FQI_at; Start 945; Stop 969
taagatgagtgagagactacttgaa

SEQ ID NO: 216949 - DNA, 25 bp, Artificial
  probe
  misc_feature (1)..(25): SEQ ID NO: 6437; WAN024FQI_at; Start 428; Stop 452
tcactctcacacaagaagatcgtag

SEQ ID NO: 216950 - DNA, 25 bp, Artificial
  probe
  misc_feature (1)..(25): SEQ ID NO: 6437; WAN024FQI_at; Start 655; Stop 679
gaaatttatggttctggtaatcaag

SEQ ID NO: 216951 - DNA, 25 bp, Artificial
  probe
  misc_feature (1)..(25): SEQ ID NO: 612; WAN024FQJ_at; Start 117; Stop 141
tctattggatgaagatggttttata

SEQ ID NO: 216952 - DNA, 25 bp, Artificial
  probe
  misc_feature (1)..(25): SEQ ID NO: 612; WAN024FQJ_at; Start 385; Stop 409
gaagtgcagagatttgtaggagcta

SEQ ID NO: 216953 - DNA, 25 bp, Artificial
  probe
  misc_feature (1)..(25): SEQ ID NO: 612; WAN024FQJ_at; Start 913; Stop 937
atcaacggatttctgattgattgct

SEQ ID NO: 216954 - DNA, 25 bp, Artificial
  probe
  misc_feature (1)..(25): SEQ ID NO: 612; WAN024FQJ_at; Start 7; Stop 31
aaaatagcaattgttagatataatc

SEQ ID NO: 216955 - DNA, 25 bp, Artificial
  probe
  misc_feature (1)..(25): SEQ ID NO: 612; WAN024FQJ_at; Start 290; Stop 314
caaatactatggttagattagctac

SEQ ID NO: 216956 - DNA, 25 bp, Artificial
  probe
  misc_feature (1)..(25): SEQ ID NO: 612; WAN024FQJ_at; Start 637; Stop 661
caacatccagactggcagtgggata

SEQ ID NO: 216957 - DNA, 25 bp, Artificial
  probe
  misc_feature (1)..(25): SEQ ID NO: 612; WAN024FQJ_at; Start 183; Stop 207
caagggtgatcttagaattagaact

SEQ ID NO: 216958 - DNA, 25 bp, Artificial
  probe
  misc_feature (1)..(25): SEQ ID NO: 612; WAN024FQJ_at; Start 170; Stop 194
taataaattttcacaagggtgatct

SEQ ID NO: 216959 - DNA, 25 bp, Artificial
  probe
  misc_feature (1)..(25): SEQ ID NO: 612; WAN024FQJ_at; Start 189; Stop 213
tgatcttagaattagaactgctaca

SEQ ID NO: 216960 - DNA, 25 bp, Artificial
  probe
  misc_feature (1)..(25): SEQ ID NO: 612; WAN024FQJ_at; Start 760; Stop 784
ggaactgaaaatatttatcccaatc

SEQ ID NO: 216961 - DNA, 25 bp, Artificial
  probe
  misc_feature (1)..(25): SEQ ID NO: 612; WAN024FQJ_at; Start 682; Stop 706
cttattgaacaggagctaaaaagaa

SEQ ID NO: 216962 - DNA, 25 bp, Artificial
  probe
  misc_feature (1)..(25): SEQ ID NO: 612; WAN024FQJ_at; Start 281; Stop 305
ccccattaacaaatactatggttag

SEQ ID NO: 216963 - DNA, 25 bp, Artificial
  probe
  misc_feature (1)..(25): SEQ ID NO: 612; WAN024FQJ_at; Start 401; Stop 425
taggagctaaattttttgacaagat

SEQ ID NO: 216964 - DNA, 25 bp, Artificial
  probe
  misc_feature (1)..(25): SEQ ID NO: 612; WAN024FQJ_at; Start 614; Stop 638
aagtagctataaaagtattatcaca

SEQ ID NO: 216965 - DNA, 25 bp, Artificial
  probe
  misc_feature (1)..(25): SEQ ID NO: 612; WAN024FQJ_at; Start 21; Stop 45
tagatataatctaagtaaaattggt

SEQ ID NO: 216966 - DNA, 25 bp, Artificial
  probe
  misc_feature (1)..(25): SEQ ID NO: 612; WAN024FQJ_at; Start 903; Stop 927
tgaagatagaatcaacggatttctg

SEQ ID NO: 216967 - DNA, 25 bp, Artificial
  probe
  misc_feature (1)..(25): SEQ ID NO: 612; WAN024FQJ_at; Start 202; Stop 226
agaactgctacattaaaattaacgg

SEQ ID NO: 216968 - DNA, 25 bp, Artificial
  probe
  misc_feature (1)..(25): SEQ ID NO: 612; WAN024FQJ_at; Start 79; Stop 103
gaattgtcacaatactatgatgtaa

SEQ ID NO: 216969 - DNA, 25 bp, Artificial
  probe
  misc_feature (1)..(25): SEQ ID NO: 612; WAN024FQJ_at; Start 493; Stop 517
aatgctatttataattggattgatg

SEQ ID NO: 216970 - DNA, 25 bp, Artificial
  probe
  misc_feature (1)..(25): SEQ ID NO: 612; WAN024FQJ_at; Start 325; Stop 349
aatgtgaaaatagttttctgtgatc

SEQ ID NO: 216971 - DNA, 25 bp, Artificial
  probe
  misc_feature (1)..(25): SEQ ID NO: 612; WAN024FQJ_at; Start 293; Stop 317
atactatggttagattagctactct

SEQ ID NO: 216972 - DNA, 25 bp, Artificial
  probe
  misc_feature (1)..(25): SEQ ID NO: 612; WAN024FQJ_at; Start 644; Stop 668
cagactggcagtgggatatatatgg

SEQ ID NO: 216973 - DNA, 25 bp, Artificial
  probe
  misc_feature (1)..(25): SEQ ID NO: 612; WAN024FQJ_at; Start 628; Stop 652
gtattatcacaacatccagactggc

SEQ ID NO: 216974 - DNA, 25 bp, Artificial
  probe
  misc_feature (1)..(25): SEQ ID NO: 612; WAN024FQJ_at; Start 631; Stop 655
ttatcacaacatccagactggcagt

SEQ ID NO: 216975 - DNA, 25 bp, Artificial
  probe
  misc_feature (1)..(25): SEQ ID NO: 612; WAN024FQJ_at; Start 69; Stop 93
tatggctaatgaattgtcacaatac

SEQ ID NO: 216976 - DNA, 25 bp, Artificial
  probe
  misc_feature (1)..(25): SEQ ID NO: 612; WAN024FQJ_at; Start 691; Stop 715
caggagctaaaaagaaaactagaag

SEQ ID NO: 216977 - DNA, 25 bp, Artificial
  probe
  misc_feature (1)..(25): SEQ ID NO: 612; WAN024FQJ_at; Start 179; Stop 203
ttcacaagggtgatcttagaattag

SEQ ID NO: 216978 - DNA, 25 bp, Artificial
  probe
  misc_feature (1)..(25): SEQ ID NO: 612; WAN024FQJ_at; Start 427; Stop 451
gtcactttaacagaagaagatagaa

SEQ ID NO: 216979 - DNA, 25 bp, Artificial
  probe
  misc_feature (1)..(25): SEQ ID NO: 612; WAN024FQJ_at; Start 164; Stop 188
tgacattaataaattttcacaaggg

SEQ ID NO: 216980 - DNA, 25 bp, Artificial
  probe
  misc_feature (1)..(25): SEQ ID NO: 612; WAN024FQJ_at; Start 640; Stop 664
catccagactggcagtgggatatat

SEQ ID NO: 216981 - DNA, 25 bp, Artificial
  probe
  misc_feature (1)..(25): SEQ ID NO: 612; WAN024FQJ_at; Start 634; Stop 658
tcacaacatccagactggcagtggg

SEQ ID NO: 216982 - DNA, 25 bp, Artificial
  probe
  misc_feature (1)..(25): SEQ ID NO: 612; WAN024FQJ_at; Start 766; Stop 790
gaaaatatttatcccaatcatagta

SEQ ID NO: 216983 - DNA, 25 bp, Artificial
  probe
  misc_feature (1)..(25): SEQ ID NO: 612; WAN024FQJ_at; Start 389; Stop 413
tgcagagatttgtaggagctaaatt

SEQ ID NO: 216984 - DNA, 25 bp, Artificial
  probe
  misc_feature (1)..(25): SEQ ID NO: 612; WAN024FQJ_at; Start 687; Stop 711
tgaacaggagctaaaaagaaaacta

SEQ ID NO: 216985 - DNA, 25 bp, Artificial
  probe
  misc_feature (1)..(25): SEQ ID NO: 614; WAN024FQK_at; Start 544; Stop 568
gatgagtctactaaaattgtaactg

SEQ ID NO: 216986 - DNA, 25 bp, Artificial
  probe
  misc_feature (1)..(25): SEQ ID NO: 614; WAN024FQK_at; Start 517; Stop 541
aatcgtctttccaatataccttata

SEQ ID NO: 216987 - DNA, 25 bp, Artificial
  probe
  misc_feature (1)..(25): SEQ ID NO: 614; WAN024FQK_at; Start 631; Stop 655
gctaaaatgcctgactggacttggg

SEQ ID NO: 216988 - DNA, 25 bp, Artificial
  probe
  misc_feature (1)..(25): SEQ ID NO: 614; WAN024FQK_at; Start 305; Stop 329
tgtcgggaataggaatttctactaa

SEQ ID NO: 216989 - DNA, 25 bp, Artificial
  probe
  misc_feature (1)..(25): SEQ ID NO: 614; WAN024FQK_at; Start 623; Stop 647
aagtgttagctaaaatgcctgactg

SEQ ID NO: 216990 - DNA, 25 bp, Artificial
  probe
  misc_feature (1)..(25): SEQ ID NO: 614; WAN024FQK_at; Start 405; Stop 429
gacaaagctagcagacaagattatt

SEQ ID NO: 216991 - DNA, 25 bp, Artificial
  probe
  misc_feature (1)..(25): SEQ ID NO: 614; WAN024FQK_at; Start 439; Stop 463
caagaggatcgtaaaaattatatac

SEQ ID NO: 216992 - DNA, 25 bp, Artificial
  probe
  misc_feature (1)..(25): SEQ ID NO: 614; WAN024FQK_at; Start 478; Stop 502
tctgagaataggattgcttacatct

SEQ ID NO: 216993 - DNA, 25 bp, Artificial
  probe
  misc_feature (1)..(25): SEQ ID NO: 614; WAN024FQK_at; Start 299; Stop 323
tatccttgtcgggaataggaatttc

SEQ ID NO: 216994 - DNA, 25 bp, Artificial
  probe
  misc_feature (1)..(25): SEQ ID NO: 614; WAN024FQK_at; Start 1056; Stop 1080
tcagtggatagagttgattgagaca

SEQ ID NO: 216995 - DNA, 25 bp, Artificial
  probe
  misc_feature (1)..(25): SEQ ID NO: 614; WAN024FQK_at; Start 594; Stop 618
atatgattatcttatccaagtcgcg

SEQ ID NO: 216996 - DNA, 25 bp, Artificial
  probe
  misc_feature (1)..(25): SEQ ID NO: 614; WAN024FQK_at; Start 420; Stop 444
caagattattactcttacgcaagag

SEQ ID NO: 216997 - DNA, 25 bp, Artificial
  probe
  misc_feature (1)..(25): SEQ ID NO: 614; WAN024FQK_at; Start 538; Stop 562
tataatgatgagtctactaaaattg

SEQ ID NO: 216998 - DNA, 25 bp, Artificial
  probe
  misc_feature (1)..(25): SEQ ID NO: 614; WAN024FQK_at; Start 1051; Stop 1075
cttaatcagtggatagagttgattg

SEQ ID NO: 216999 - DNA, 25 bp, Artificial
  probe
  misc_feature (1)..(25): SEQ ID NO: 614; WAN024FQK_at; Start 303; Stop 327
cttgtcgggaataggaatttctact

SEQ ID NO: 217000 - DNA, 25 bp, Artificial
  probe
  misc_feature (1)..(25): SEQ ID NO: 614; WAN024FQK_at; Start 437; Stop 461
cgcaagaggatcgtaaaaattatat

SEQ ID NO: 217001 - DNA, 25 bp, Artificial
  probe
  misc_feature (1)..(25): SEQ ID NO: 614; WAN024FQK_at; Start 459; Stop 483
tatacgaaaatacggcatttctgag

SEQ ID NO: 217002 - DNA, 25 bp, Artificial
  probe
  misc_feature (1)..(25): SEQ ID NO: 614; WAN024FQK_at; Start 621; Stop 645
aaaagtgttagctaaaatgcctgac

SEQ ID NO: 217003 - DNA, 25 bp, Artificial
  probe
  misc_feature (1)..(25): SEQ ID NO: 614; WAN024FQK_at; Start 626; Stop 650
tgttagctaaaatgcctgactggac

SEQ ID NO: 217004 - DNA, 25 bp, Artificial
  probe
  misc_feature (1)..(25): SEQ ID NO: 614; WAN024FQK_at; Start 629; Stop 653
tagctaaaatgcctgactggacttg

SEQ ID NO: 217005 - DNA, 25 bp, Artificial
  probe
  misc_feature (1)..(25): SEQ ID NO: 614; WAN024FQK_at; Start 357; Stop 381
aattacggctaatagagaactttct

SEQ ID NO: 217006 - DNA, 25 bp, Artificial
  probe
  misc_feature (1)..(25): SEQ ID NO: 614; WAN024FQK_at; Start 619; Stop 643
aaaaaagtgttagctaaaatgcctg

SEQ ID NO: 217007 - DNA, 25 bp, Artificial
  probe
  misc_feature (1)..(25): SEQ ID NO: 614; WAN024FQK_at; Start 513; Stop 537
agaaaatcgtctttccaatatacct

SEQ ID NO: 217008 - DNA, 25 bp, Artificial
  probe
  misc_feature (1)..(25): SEQ ID NO: 614; WAN024FQK_at; Start 354; Stop 378
ttcaattacggctaatagagaactt

SEQ ID NO: 217009 - DNA, 25 bp, Artificial
  probe
  misc_feature (1)..(25): SEQ ID NO: 614; WAN024FQK_at; Start 551; Stop 575
ctactaaaattgtaactgttggtcg

SEQ ID NO: 217010 - DNA, 25 bp, Artificial
  probe
  misc_feature (1)..(25): SEQ ID NO: 614; WAN024FQK_at; Start 469; Stop 493
tacggcatttctgagaataggattg

SEQ ID NO: 217011 - DNA, 25 bp, Artificial
  probe
  misc_feature (1)..(25): SEQ ID NO: 614; WAN024FQK_at; Start 464; Stop 488
gaaaatacggcatttctgagaatag

SEQ ID NO: 217012 - DNA, 25 bp, Artificial
  probe
  misc_feature (1)..(25): SEQ ID NO: 614; WAN024FQK_at; Start 457; Stop 481
tatatacgaaaatacggcatttctg

SEQ ID NO: 217013 - DNA, 25 bp, Artificial
  probe
  misc_feature (1)..(25): SEQ ID NO: 614; WAN024FQK_at; Start 486; Stop 510
taggattgcttacatctataattgg

SEQ ID NO: 217014 - DNA, 25 bp, Artificial
  probe
  misc_feature (1)..(25): SEQ ID NO: 614; WAN024FQK_at; Start 425; Stop 449
ttattactcttacgcaagaggatcg

SEQ ID NO: 217015 - DNA, 25 bp, Artificial
  probe
  misc_feature (1)..(25): SEQ ID NO: 614; WAN024FQK_at; Start 474; Stop 498
catttctgagaataggattgcttac

SEQ ID NO: 217016 - DNA, 25 bp, Artificial
  probe
  misc_feature (1)..(25): SEQ ID NO: 614; WAN024FQK_at; Start 429; Stop 453
tactcttacgcaagaggatcgtaaa

SEQ ID NO: 217017 - DNA, 25 bp, Artificial
  probe
  misc_feature (1)..(25): SEQ ID NO: 614; WAN024FQK_at; Start 432; Stop 456
tcttacgcaagaggatcgtaaaaat

SEQ ID NO: 217018 - DNA, 25 bp, Artificial
  probe
  misc_feature (1)..(25): SEQ ID NO: 614; WAN024FQK_at; Start 452; Stop 476
aaaattatatacgaaaatacggcat

SEQ ID NO: 217019 - DNA, 25 bp, Artificial
  probe
  misc_feature (1)..(25): SEQ ID NO: 3894; WAN024FQL_at; Start 965; Stop 989
gaagcgatgtctaatagattattag

SEQ ID NO: 217020 - DNA, 25 bp, Artificial
  probe
  misc_feature (1)..(25): SEQ ID NO: 3894; WAN024FQL_at; Start 987; Stop 1011
tagaactaatgaatgataaggagct

SEQ ID NO: 217021 - DNA, 25 bp, Artificial
  probe
  misc_feature (1)..(25): SEQ ID NO: 3894; WAN024FQL_at; Start 1064; Stop 1088
gaccgaattatacatcagtggatag

SEQ ID NO: 217022 - DNA, 25 bp, Artificial
  probe
  misc_feature (1)..(25): SEQ ID NO: 3894; WAN024FQL_at; Start 508; Stop 532
aagaatttgctacatctataattgg

SEQ ID NO: 217023 - DNA, 25 bp, Artificial
  probe
  misc_feature (1)..(25): SEQ ID NO: 3894; WAN024FQL_at; Start 879; Stop 903
ctatagctagctttagttgtccgac

SEQ ID NO: 217024 - DNA, 25 bp, Artificial
  probe
  misc_feature (1)..(25): SEQ ID NO: 3894; WAN024FQL_at; Start 1060; Stop 1084
taaagaccgaattatacatcagtgg

SEQ ID NO: 217025 - DNA, 25 bp, Artificial
  probe
  misc_feature (1)..(25): SEQ ID NO: 3894; WAN024FQL_at; Start 1079; Stop 1103
cagtggatagatttgatagaagaag

SEQ ID NO: 217026 - DNA, 25 bp, Artificial
  probe
  misc_feature (1)..(25): SEQ ID NO: 3894; WAN024FQL_at; Start 997; Stop 1021
gaatgataaggagctaagaaatcgt

SEQ ID NO: 217027 - DNA, 25 bp, Artificial
  probe
  misc_feature (1)..(25): SEQ ID NO: 3894; WAN024FQL_at; Start 534; Stop 558
aagaggctgctctttcagatgtatc

SEQ ID NO: 217028 - DNA, 25 bp, Artificial
  probe
  misc_feature (1)..(25): SEQ ID NO: 3894; WAN024FQL_at; Start 935; Stop 959
aatggctatctggttgagtgttatg

SEQ ID NO: 217029 - DNA, 25 bp, Artificial
  probe
  misc_feature (1)..(25): SEQ ID NO: 3894; WAN024FQL_at; Start 449; Stop 473
atcactctcactcaagaagaccgtg

SEQ ID NO: 217030 - DNA, 25 bp, Artificial
  probe
  misc_feature (1)..(25): SEQ ID NO: 3894; WAN024FQL_at; Start 820; Stop 844
gacttctcgctatgaaggtctacct

SEQ ID NO: 217031 - DNA, 25 bp, Artificial
  probe
  misc_feature (1)..(25): SEQ ID NO: 3894; WAN024FQL_at; Start 377; Stop 401
tcgattacggataatagagaatttt

SEQ ID NO: 217032 - DNA, 25 bp, Artificial
  probe
  misc_feature (1)..(25): SEQ ID NO: 3894; WAN024FQL_at; Start 896; Stop 920
tgtccgacaggaccgaacgaaattg

SEQ ID NO: 217033 - DNA, 25 bp, Artificial
  probe
  misc_feature (1)..(25): SEQ ID NO: 3894; WAN024FQL_at; Start 1024; Stop 1048
ttcatctcatgcaaaagataacatt

SEQ ID NO: 217034 - DNA, 25 bp, Artificial
  probe
  misc_feature (1)..(25): SEQ ID NO: 3894; WAN024FQL_at; Start 1086; Stop 1110
tagatttgatagaagaagtatctgg

SEQ ID NO: 217035 - DNA, 25 bp, Artificial
  probe
  misc_feature (1)..(25): SEQ ID NO: 3894; WAN024FQL_at; Start 457; Stop 481
cactcaagaagaccgtgaaaattat

SEQ ID NO: 217036 - DNA, 25 bp, Artificial
  probe
  misc_feature (1)..(25): SEQ ID NO: 3894; WAN024FQL_at; Start 499; Stop 523
tcctgaggaaagaatttgctacatc

SEQ ID NO: 217037 - DNA, 25 bp, Artificial
  probe
  misc_feature (1)..(25): SEQ ID NO: 3894; WAN024FQL_at; Start 327; Stop 351
tggcaggaataggaactcaaactaa

SEQ ID NO: 217038 - DNA, 25 bp, Artificial
  probe
  misc_feature (1)..(25): SEQ ID NO: 3894; WAN024FQL_at; Start 846; Stop 870
tagtcctgctggaagcacaacaata

SEQ ID NO: 217039 - DNA, 25 bp, Artificial
  probe
  misc_feature (1)..(25): SEQ ID NO: 3894; WAN024FQL_at; Start 648; Stop 672
tgttagagaaaagggctgactggac

SEQ ID NO: 217040 - DNA, 25 bp, Artificial
  probe
  misc_feature (1)..(25): SEQ ID NO: 3894; WAN024FQL_at; Start 489; Stop 513
aatacggtgttcctgaggaaagaat

SEQ ID NO: 217041 - DNA, 25 bp, Artificial
  probe
  misc_feature (1)..(25): SEQ ID NO: 3894; WAN024FQL_at; Start 616; Stop 640
ctatgattatctcattcaagtcgcg

SEQ ID NO: 217042 - DNA, 25 bp, Artificial
  probe
  misc_feature (1)..(25): SEQ ID NO: 3894; WAN024FQL_at; Start 901; Stop 925
gacaggaccgaacgaaattgttgaa

SEQ ID NO: 217043 - DNA, 25 bp, Artificial
  probe
  misc_feature (1)..(25): SEQ ID NO: 3894; WAN024FQL_at; Start 833; Stop 857
gaaggtctacctttagtcctgctgg

SEQ ID NO: 217044 - DNA, 25 bp, Artificial
  probe
  misc_feature (1)..(25): SEQ ID NO: 3894; WAN024FQL_at; Start 573; Stop 597
caactaaaattgtgactgttggccg

SEQ ID NO: 217045 - DNA, 25 bp, Artificial
  probe
  misc_feature (1)..(25): SEQ ID NO: 3894; WAN024FQL_at; Start 951; Stop 975
agtgttatgatgtagaagcgatgtc

SEQ ID NO: 217046 - DNA, 25 bp, Artificial
  probe
  misc_feature (1)..(25): SEQ ID NO: 3894; WAN024FQL_at; Start 523; Stop 547
ctataattggaaagaggctgctctt

SEQ ID NO: 217047 - DNA, 25 bp, Artificial
  probe
  misc_feature (1)..(25): SEQ ID NO: 3894; WAN024FQL_at; Start 1009; Stop 1033
gctaagaaatcgtttttcatctcat

SEQ ID NO: 217048 - DNA, 25 bp, Artificial
  probe
  misc_feature (1)..(25): SEQ ID NO: 3894; WAN024FQL_at; Start 920; Stop 944
gttgaagatggagttaatggctatc

SEQ ID NO: 217049 - DNA, 25 bp, Artificial
  probe
  misc_feature (1)..(25): SEQ ID NO: 3894; WAN024FQL_at; Start 427; Stop 451
gacaaagttggcagacaagattatc

SEQ ID NO: 217050 - DNA, 25 bp, Artificial
  probe
  misc_feature (1)..(25): SEQ ID NO: 3894; WAN024FQL_at; Start 538; Stop 562
ggctgctctttcagatgtatcttat

SEQ ID NO: 217051 - DNA, 25 bp, Artificial
  probe
  misc_feature (1)..(25): SEQ ID NO: 3894; WAN024FQL_at; Start 886; Stop 910
tagctttagttgtccgacaggaccg

SEQ ID NO: 217052 - DNA, 25 bp, Artificial
  probe
  misc_feature (1)..(25): SEQ ID NO: 3894; WAN024FQL_at; Start 906; Stop 930
gaccgaacgaaattgttgaagatgg

SEQ ID NO: 217053 - DNA, 25 bp, Artificial
  probe
  misc_feature (1)..(25): SEQ ID NO: 2550; WAN024FQM_at; Start 776; Stop 800
gacataagtggaatgttccaaataa

SEQ ID NO: 217054 - DNA, 25 bp, Artificial
  probe
  misc_feature (1)..(25): SEQ ID NO: 2550; WAN024FQM_at; Start 623; Stop 647
tgagacaatttacaagacttacgga

SEQ ID NO: 217055 - DNA, 25 bp, Artificial
  probe
  misc_feature (1)..(25): SEQ ID NO: 2550; WAN024FQM_at; Start 415; Stop 439
gatattttttggcttgaaaatgttc

SEQ ID NO: 217056 - DNA, 25 bp, Artificial
  probe
  misc_feature (1)..(25): SEQ ID NO: 2550; WAN024FQM_at; Start 425; Stop 449
ggcttgaaaatgttcctaattcaaa

SEQ ID NO: 217057 - DNA, 25 bp, Artificial
  probe
  misc_feature (1)..(25): SEQ ID NO: 2550; WAN024FQM_at; Start 388; Stop 412
ggagttgaagaatgtggatttttta

SEQ ID NO: 217058 - DNA, 25 bp, Artificial
  probe
  misc_feature (1)..(25): SEQ ID NO: 2550; WAN024FQM_at; Start 104; Stop 128
taaaaatcatggaagatattgtaac

SEQ ID NO: 217059 - DNA, 25 bp, Artificial
  probe
  misc_feature (1)..(25): SEQ ID NO: 2550; WAN024FQM_at; Start 853; Stop 877
gttgaagatagggaatcacatatca

SEQ ID NO: 217060 - DNA, 25 bp, Artificial
  probe
  misc_feature (1)..(25): SEQ ID NO: 2550; WAN024FQM_at; Start 771; Stop 795
tgaaggacataagtggaatgttcca

SEQ ID NO: 217061 - DNA, 25 bp, Artificial
  probe
  misc_feature (1)..(25): SEQ ID NO: 2550; WAN024FQM_at; Start 770; Stop 794
ttgaaggacataagtggaatgttcc

SEQ ID NO: 217062 - DNA, 25 bp, Artificial
  probe
  misc_feature (1)..(25): SEQ ID NO: 2550; WAN024FQM_at; Start 856; Stop 880
gaagatagggaatcacatatcattt

SEQ ID NO: 217063 - DNA, 25 bp, Artificial
  probe
  misc_feature (1)..(25): SEQ ID NO: 2550; WAN024FQM_at; Start 302; Stop 326
tacataattcacaaacaccaaacta

SEQ ID NO: 217064 - DNA, 25 bp, Artificial
  probe
  misc_feature (1)..(25): SEQ ID NO: 2550; WAN024FQM_at; Start 624; Stop 648
gagacaatttacaagacttacggaa

SEQ ID NO: 217065 - DNA, 25 bp, Artificial
  probe
  misc_feature (1)..(25): SEQ ID NO: 2550; WAN024FQM_at; Start 503; Stop 527
catgtagaaatttttataaaaatcg

SEQ ID NO: 217066 - DNA, 25 bp, Artificial
  probe
  misc_feature (1)..(25): SEQ ID NO: 2550; WAN024FQM_at; Start 772; Stop 796
gaaggacataagtggaatgttccaa

SEQ ID NO: 217067 - DNA, 25 bp, Artificial
  probe
  misc_feature (1)..(25): SEQ ID NO: 2550; WAN024FQM_at; Start 863; Stop 887
gggaatcacatatcattttagaaat

SEQ ID NO: 217068 - DNA, 25 bp, Artificial
  probe
  misc_feature (1)..(25): SEQ ID NO: 2550; WAN024FQM_at; Start 94; Stop 118
gagtatttattaaaaatcatggaag

SEQ ID NO: 217069 - DNA, 25 bp, Artificial
  probe
  misc_feature (1)..(25): SEQ ID NO: 2550; WAN024FQM_at; Start 422; Stop 446
tttggcttgaaaatgttcctaattc

SEQ ID NO: 217070 - DNA, 25 bp, Artificial
  probe
  misc_feature (1)..(25): SEQ ID NO: 2550; WAN024FQM_at; Start 742; Stop 766
gatatgcagttaactaggaaactaa

SEQ ID NO: 217071 - DNA, 25 bp, Artificial
  probe
  misc_feature (1)..(25): SEQ ID NO: 2550; WAN024FQM_at; Start 854; Stop 878
ttgaagatagggaatcacatatcat

SEQ ID NO: 217072 - DNA, 25 bp, Artificial
  probe
  misc_feature (1)..(25): SEQ ID NO: 2550; WAN024FQM_at; Start 773; Stop 797
aaggacataagtggaatgttccaaa

SEQ ID NO: 217073 - DNA, 25 bp, Artificial
  probe
  misc_feature (1)..(25): SEQ ID NO: 2550; WAN024FQM_at; Start 739; Stop 763
gaagatatgcagttaactaggaaac

SEQ ID NO: 217074 - DNA, 25 bp, Artificial
  probe
  misc_feature (1)..(25): SEQ ID NO: 2550; WAN024FQM_at; Start 622; Stop 646
ttgagacaatttacaagacttacgg

SEQ ID NO: 217075 - DNA, 25 bp, Artificial
  probe
  misc_feature (1)..(25): SEQ ID NO: 2550; WAN024FQM_at; Start 298; Stop 322
tggatacataattcacaaacaccaa

SEQ ID NO: 217076 - DNA, 25 bp, Artificial
  probe
  misc_feature (1)..(25): SEQ ID NO: 2550; WAN024FQM_at; Start 426; Stop 450
gcttgaaaatgttcctaattcaaaa

SEQ ID NO: 217077 - DNA, 25 bp, Artificial
  probe
  misc_feature (1)..(25): SEQ ID NO: 2550; WAN024FQM_at; Start 295; Stop 319
tattggatacataattcacaaacac

SEQ ID NO: 217078 - DNA, 25 bp, Artificial
  probe
  misc_feature (1)..(25): SEQ ID NO: 2550; WAN024FQM_at; Start 620; Stop 644
ctttgagacaatttacaagacttac

SEQ ID NO: 217079 - DNA, 25 bp, Artificial
  probe
  misc_feature (1)..(25): SEQ ID NO: 2550; WAN024FQM_at; Start 775; Stop 799
ggacataagtggaatgttccaaata

SEQ ID NO: 217080 - DNA, 25 bp, Artificial
  probe
  misc_feature (1)..(25): SEQ ID NO: 2550; WAN024FQM_at; Start 91; Stop 115
caagagtatttattaaaaatcatgg

SEQ ID NO: 217081 - DNA, 25 bp, Artificial
  probe
  misc_feature (1)..(25): SEQ ID NO: 2550; WAN024FQM_at; Start 107; Stop 131
aaatcatggaagatattgtaacagt

SEQ ID NO: 217082 - DNA, 25 bp, Artificial
  probe
  misc_feature (1)..(25): SEQ ID NO: 2550; WAN024FQM_at; Start 859; Stop 883
gatagggaatcacatatcattttag

SEQ ID NO: 217083 - DNA, 25 bp, Artificial
  probe
  misc_feature (1)..(25): SEQ ID NO: 2550; WAN024FQM_at; Start 305; Stop 329
ataattcacaaacaccaaactatgg

SEQ ID NO: 217084 - DNA, 25 bp, Artificial
  probe
  misc_feature (1)..(25): SEQ ID NO: 2550; WAN024FQM_at; Start 861; Stop 885
tagggaatcacatatcattttagaa

SEQ ID NO: 217085 - DNA, 25 bp, Artificial
  probe
  misc_feature (1)..(25): SEQ ID NO: 2550; WAN024FQM_at; Start 300; Stop 324
gatacataattcacaaacaccaaac

SEQ ID NO: 217086 - DNA, 25 bp, Artificial
  probe
  misc_feature (1)..(25): SEQ ID NO: 2550; WAN024FQM_at; Start 394; Stop 418
gaagaatgtggattttttattgata

SEQ ID NO: 217087 - DNA, 25 bp, Artificial
  probe
  misc_feature (1)..(25): SEQ ID NO: 2731; WAN024FQN_at; Start 204; Stop 228
ccttattcgctatgatagtattttc

SEQ ID NO: 217088 - DNA, 25 bp, Artificial
  probe
  misc_feature (1)..(25): SEQ ID NO: 2731; WAN024FQN_at; Start 1024; Stop 1048
cctatgattgtagtttcaacctaca

SEQ ID NO: 217089 - DNA, 25 bp, Artificial
  probe
  misc_feature (1)..(25): SEQ ID NO: 2731; WAN024FQN_at; Start 1117; Stop 1141
ggtattctttgtctatcctgtgcag

SEQ ID NO: 217090 - DNA, 25 bp, Artificial
  probe
  misc_feature (1)..(25): SEQ ID NO: 2731; WAN024FQN_at; Start 424; Stop 448
tctaaactatcgtatgctacagtat

SEQ ID NO: 217091 - DNA, 25 bp, Artificial
  probe
  misc_feature (1)..(25): SEQ ID NO: 2731; WAN024FQN_at; Start 997; Stop 1021
tatgatagaaatcttttcttgctcc

SEQ ID NO: 217092 - DNA, 25 bp, Artificial
  probe
  misc_feature (1)..(25): SEQ ID NO: 2731; WAN024FQN_at; Start 916; Stop 940
gatgattggcgttttagttttgtta

SEQ ID NO: 217093 - DNA, 25 bp, Artificial
  probe
  misc_feature (1)..(25): SEQ ID NO: 2731; WAN024FQN_at; Start 1017; Stop 1041
gctccttcctatgattgtagtttca

SEQ ID NO: 217094 - DNA, 25 bp, Artificial
  probe
  misc_feature (1)..(25): SEQ ID NO: 2731; WAN024FQN_at; Start 211; Stop 235
cgctatgatagtattttcgaaatgt

SEQ ID NO: 217095 - DNA, 25 bp, Artificial
  probe
  misc_feature (1)..(25): SEQ ID NO: 2731; WAN024FQN_at; Start 479; Stop 503
gatatacaactagtggaatgagatt

SEQ ID NO: 217096 - DNA, 25 bp, Artificial
  probe
  misc_feature (1)..(25): SEQ ID NO: 2731; WAN024FQN_at; Start 176; Stop 200
gcgcttttcattttcgtgcgactac

SEQ ID NO: 217097 - DNA, 25 bp, Artificial
  probe
  misc_feature (1)..(25): SEQ ID NO: 2731; WAN024FQN_at; Start 1012; Stop 1036
ttcttgctccttcctatgattgtag

SEQ ID NO: 217098 - DNA, 25 bp, Artificial
  probe
  misc_feature (1)..(25): SEQ ID NO: 2731; WAN024FQN_at; Start 607; Stop 631
cattcagcggttatttattttattg

SEQ ID NO: 217099 - DNA, 25 bp, Artificial
  probe
  misc_feature (1)..(25): SEQ ID NO: 2731; WAN024FQN_at; Start 507; Stop 531
tatggcagttgccttgatgatgctt

SEQ ID NO: 217100 - DNA, 25 bp, Artificial
  probe
  misc_feature (1)..(25): SEQ ID NO: 2731; WAN024FQN_at; Start 793; Stop 817
gacaattcatcctattcccagtttt

SEQ ID NO: 217101 - DNA, 25 bp, Artificial
  probe
  misc_feature (1)..(25): SEQ ID NO: 2731; WAN024FQN_at; Start 84; Stop 108
tgacaaaaagcgttcaaaaatctat

SEQ ID NO: 217102 - DNA, 25 bp, Artificial
  probe
  misc_feature (1)..(25): SEQ ID NO: 2731; WAN024FQN_at; Start 1083; Stop 1107
tactaatcgtaatattgtttatgga

SEQ ID NO: 217103 - DNA, 25 bp, Artificial
  probe
  misc_feature (1)..(25): SEQ ID NO: 2731; WAN024FQN_at; Start 511; Stop 535
gcagttgccttgatgatgcttttac

SEQ ID NO: 217104 - DNA, 25 bp, Artificial
  probe
  misc_feature (1)..(25): SEQ ID NO: 2731; WAN024FQN_at; Start 171; Stop 195
tgatggcgcttttcattttcgtgcg

SEQ ID NO: 217105 - DNA, 25 bp, Artificial
  probe
  misc_feature (1)..(25): SEQ ID NO: 2731; WAN024FQN_at; Start 52; Stop 76
tcaataagtttaagtgttatagggc

SEQ ID NO: 217106 - DNA, 25 bp, Artificial
  probe
  misc_feature (1)..(25): SEQ ID NO: 2731; WAN024FQN_at; Start 922; Stop 946
tggcgttttagttttgttacaatga

SEQ ID NO: 217107 - DNA, 25 bp, Artificial
  probe
  misc_feature (1)..(25): SEQ ID NO: 2731; WAN024FQN_at; Start 714; Stop 738
caacctagttccatggttagcaaat

SEQ ID NO: 217108 - DNA, 25 bp, Artificial
  probe
  misc_feature (1)..(25): SEQ ID NO: 2731; WAN024FQN_at; Start 599; Stop 623
taggtatccattcagcggttattta

SEQ ID NO: 217109 - DNA, 25 bp, Artificial
  probe
  misc_feature (1)..(25): SEQ ID NO: 2731; WAN024FQN_at; Start 495; Stop 519
aatgagattttgtatggcagttgcc

SEQ ID NO: 217110 - DNA, 25 bp, Artificial
  probe
  misc_feature (1)..(25): SEQ ID NO: 2731; WAN024FQN_at; Start 75; Stop 99
gctagtaaatgacaaaaagcgttca

SEQ ID NO: 217111 - DNA, 25 bp, Artificial
  probe
  misc_feature (1)..(25): SEQ ID NO: 2731; WAN024FQN_at; Start 790; Stop 814
tctgacaattcatcctattcccagt

SEQ ID NO: 217112 - DNA, 25 bp, Artificial
  probe
  misc_feature (1)..(25): SEQ ID NO: 2731; WAN024FQN_at; Start 705; Stop 729
tgttttgttcaacctagttccatgg

SEQ ID NO: 217113 - DNA, 25 bp, Artificial
  probe
  misc_feature (1)..(25): SEQ ID NO: 2731; WAN024FQN_at; Start 538; Stop 562
tatttggagtcaaaaaaaggctata

SEQ ID NO: 217114 - DNA, 25 bp, Artificial
  probe
  misc_feature (1)..(25): SEQ ID NO: 2731; WAN024FQN_at; Start 883; Stop 907
tatttgggaatagtaaattcattga

SEQ ID NO: 217115 - DNA, 25 bp, Artificial
  probe
  misc_feature (1)..(25): SEQ ID NO: 2731; WAN024FQN_at; Start 525; Stop 549
gatgcttttactatatttggagtca

SEQ ID NO: 217116 - DNA, 25 bp, Artificial
  probe
  misc_feature (1)..(25): SEQ ID NO: 2731; WAN024FQN_at; Start 1123; Stop 1147
ctttgtctatcctgtgcagttggtg

SEQ ID NO: 217117 - DNA, 25 bp, Artificial
  probe
  misc_feature (1)..(25): SEQ ID NO: 2731; WAN024FQN_at; Start 66; Stop 90
tgttatagggctagtaaatgacaaa

SEQ ID NO: 217118 - DNA, 25 bp, Artificial
  probe
  misc_feature (1)..(25): SEQ ID NO: 2731; WAN024FQN_at; Start 980; Stop 1004
taccatttcgtaatatttatgatag

SEQ ID NO: 217119 - DNA, 25 bp, Artificial
  probe
  misc_feature (1)..(25): SEQ ID NO: 2731; WAN024FQN_at; Start 328; Stop 352
catcactatagtttactgagtttta

SEQ ID NO: 217120 - DNA, 25 bp, Artificial
  probe
  misc_feature (1)..(25): SEQ ID NO: 2731; WAN024FQN_at; Start 1005; Stop 1029
aaatcttttcttgctccttcctatg

SEQ ID NO: 217121 - DNA, 25 bp, Artificial
  probe
  misc_feature (1)..(25): SEQ ID NO: 1734; WAN024FQO_at; Start 75; Stop 99
tattgctttggttgctatcgtaacg

SEQ ID NO: 217122 - DNA, 25 bp, Artificial
  probe
  misc_feature (1)..(25): SEQ ID NO: 1734; WAN024FQO_at; Start 197; Stop 221
caggtttgacaaatcaggacttgca

SEQ ID NO: 217123 - DNA, 25 bp, Artificial
  probe
  misc_feature (1)..(25): SEQ ID NO: 1734; WAN024FQO_at; Start 214; Stop 238
gacttgcaggcaggttcatatcttg

SEQ ID NO: 217124 - DNA, 25 bp, Artificial
  probe
  misc_feature (1)..(25): SEQ ID NO: 1734; WAN024FQO_at; Start 222; Stop 246
ggcaggttcatatcttgttaaagac

SEQ ID NO: 217125 - DNA, 25 bp, Artificial
  probe
  misc_feature (1)..(25): SEQ ID NO: 1734; WAN024FQO_at; Start 420; Stop 444
taactccttgcgcaagattgcagct

SEQ ID NO: 217126 - DNA, 25 bp, Artificial
  probe
  misc_feature (1)..(25): SEQ ID NO: 1734; WAN024FQO_at; Start 139; Stop 163
ccagagtataccagtacaacgcgta

SEQ ID NO: 217127 - DNA, 25 bp, Artificial
  probe
  misc_feature (1)..(25): SEQ ID NO: 1734; WAN024FQO_at; Start 607; Stop 631
gatgtccgtgtcaaacgaccagagg

SEQ ID NO: 217128 - DNA, 25 bp, Artificial
  probe
  misc_feature (1)..(25): SEQ ID NO: 1734; WAN024FQO_at; Start 309; Stop 333
tatgccgaccaaaaatcttgctagt

SEQ ID NO: 217129 - DNA, 25 bp, Artificial
  probe
  misc_feature (1)..(25): SEQ ID NO: 1734; WAN024FQO_at; Start 163; Stop 187
atttatgtagtcaaccgtaaccaag

SEQ ID NO: 217130 - DNA, 25 bp, Artificial
  probe
  misc_feature (1)..(25): SEQ ID NO: 1734; WAN024FQO_at; Start 250; Stop 274
cgtgagatcattctttcccaagatg

SEQ ID NO: 217131 - DNA, 25 bp, Artificial
  probe
  misc_feature (1)..(25): SEQ ID NO: 1734; WAN024FQO_at; Start 598; Stop 622
gagttgctagatgtccgtgtcaaac

SEQ ID NO: 217132 - DNA, 25 bp, Artificial
  probe
  misc_feature (1)..(25): SEQ ID NO: 1734; WAN024FQO_at; Start 446; Stop 470
aaaaaatcattagcgtaacgcgtgt

SEQ ID NO: 217133 - DNA, 25 bp, Artificial
  probe
  misc_feature (1)..(25): SEQ ID NO: 1734; WAN024FQO_at; Start 3; Stop 27
gatgaaagaacaaaatactatggag

SEQ ID NO: 217134 - DNA, 25 bp, Artificial
  probe
  misc_feature (1)..(25): SEQ ID NO: 1734; WAN024FQO_at; Start 458; Stop 482
gcgtaacgcgtgtgtctgatgtaac

SEQ ID NO: 217135 - DNA, 25 bp, Artificial
  probe
  misc_feature (1)..(25): SEQ ID NO: 1734; WAN024FQO_at; Start 619; Stop 643
aaacgaccagaggatatcgaagacg

SEQ ID NO: 217136 - DNA, 25 bp, Artificial
  probe
  misc_feature (1)..(25): SEQ ID NO: 1734; WAN024FQO_at; Start 645; Stop 669
tatgcaaattccactcttaggagtc

SEQ ID NO: 217137 - DNA, 25 bp, Artificial
  probe
  misc_feature (1)..(25): SEQ ID NO: 1734; WAN024FQO_at; Start 352; Stop 376
ccagttgatacacgtattgtttcta

SEQ ID NO: 217138 - DNA, 25 bp, Artificial
  probe
  misc_feature (1)..(25): SEQ ID NO: 1734; WAN024FQO_at; Start 56; Stop 80
tgtggaaacggaaattgattattgc

SEQ ID NO: 217139 - DNA, 25 bp, Artificial
  probe
  misc_feature (1)..(25): SEQ ID NO: 1734; WAN024FQO_at; Start 39; Stop 63
tcaattgttaaataccttgtggaaa

SEQ ID NO: 217140 - DNA, 25 bp, Artificial
  probe
  misc_feature (1)..(25): SEQ ID NO: 1734; WAN024FQO_at; Start 295; Stop 319
gacttgcaactcgatatgccgacca

SEQ ID NO: 217141 - DNA, 25 bp, Artificial
  probe
  misc_feature (1)..(25): SEQ ID NO: 1734; WAN024FQO_at; Start 514; Stop 538
ccttcatctccaaatatccgtcgga

SEQ ID NO: 217142 - DNA, 25 bp, Artificial
  probe
  misc_feature (1)..(25): SEQ ID NO: 1734; WAN024FQO_at; Start 340; Stop 364
caagtaactgtaccagttgatacac

SEQ ID NO: 217143 - DNA, 25 bp, Artificial
  probe
  misc_feature (1)..(25): SEQ ID NO: 1734; WAN024FQO_at; Start 470; Stop 494
tgtctgatgtaacaacactcgaaga

SEQ ID NO: 217144 - DNA, 25 bp, Artificial
  probe
  misc_feature (1)..(25): SEQ ID NO: 1734; WAN024FQO_at; Start 528; Stop 552
tatccgtcggaatactttgataggt

SEQ ID NO: 217145 - DNA, 25 bp, Artificial
  probe
  misc_feature (1)..(25): SEQ ID NO: 1734; WAN024FQO_at; Start 265; Stop 289
tcccaagatgtattagagaaggttg

SEQ ID NO: 217146 - DNA, 25 bp, Artificial
  probe
  misc_feature (1)..(25): SEQ ID NO: 1734; WAN024FQO_at; Start 659; Stop 683
tcttaggagtcattccaaatttgga

SEQ ID NO: 217147 - DNA, 25 bp, Artificial
  probe
  misc_feature (1)..(25): SEQ ID NO: 1734; WAN024FQO_at; Start 90; Stop 114
tatcgtaacgggagcgattgccttt

SEQ ID NO: 217148 - DNA, 25 bp, Artificial
  probe
  misc_feature (1)..(25): SEQ ID NO: 1734; WAN024FQO_at; Start 570; Stop 594
ggtggtagttatggtcgttctcttg

SEQ ID NO: 217149 - DNA, 25 bp, Artificial
  probe
  misc_feature (1)..(25): SEQ ID NO: 1734; WAN024FQO_at; Start 375; Stop 399
tatttctgtcaaggacaaacagcca

SEQ ID NO: 217150 - DNA, 25 bp, Artificial
  probe
  misc_feature (1)..(25): SEQ ID NO: 1734; WAN024FQO_at; Start 540; Stop 564
tactttgataggttttctcggagga

SEQ ID NO: 217151 - DNA, 25 bp, Artificial
  probe
  misc_feature (1)..(25): SEQ ID NO: 1734; WAN024FQO_at; Start 155; Stop 179
caacgcgtatttatgtagtcaaccg

SEQ ID NO: 217152 - DNA, 25 bp, Artificial
  probe
  misc_feature (1)..(25): SEQ ID NO: 1734; WAN024FQO_at; Start 120; Stop 144
tagtagctttattataaaaccagag

SEQ ID NO: 217153 - DNA, 25 bp, Artificial
  probe
  misc_feature (1)..(25): SEQ ID NO: 1734; WAN024FQO_at; Start 403; Stop 427
gaagcaagtcgtatcgctaactcct

SEQ ID NO: 217154 - DNA, 25 bp, Artificial
  probe
  misc_feature (1)..(25): SEQ ID NO: 1734; WAN024FQO_at; Start 280; Stop 304
gagaaggttgtcacagacttgcaac

SEQ ID NO: 217155 - DNA, 25 bp, Artificial
  probe
  misc_feature (1)..(25): SEQ ID NO: 5101; WAN024FQP_at; Start 165; Stop 189
taccaccgagcatgtccataacttg

SEQ ID NO: 217156 - DNA, 25 bp, Artificial
  probe
  misc_feature (1)..(25): SEQ ID NO: 5101; WAN024FQP_at; Start 131; Stop 155
gcagcgtctgctttgacgatattca

SEQ ID NO: 217157 - DNA, 25 bp, Artificial
  probe
  misc_feature (1)..(25): SEQ ID NO: 5101; WAN024FQP_at; Start 103; Stop 127
gccagcaagtttgtcaaggaaacgt

SEQ ID NO: 217158 - DNA, 25 bp, Artificial
  probe
  misc_feature (1)..(25): SEQ ID NO: 5101; WAN024FQP_at; Start 213; Stop 237
gaccgtggtctacgaagatacagat

SEQ ID NO: 217159 - DNA, 25 bp, Artificial
  probe
  misc_feature (1)..(25): SEQ ID NO: 5101; WAN024FQP_at; Start 160; Stop 184
aaacttaccaccgagcatgtccata

SEQ ID NO: 217160 - DNA, 25 bp, Artificial
  probe
  misc_feature (1)..(25): SEQ ID NO: 5101; WAN024FQP_at; Start 98; Stop 122
gaaacgccagcaagtttgtcaagga

SEQ ID NO: 217161 - DNA, 25 bp, Artificial
  probe
  misc_feature (1)..(25): SEQ ID NO: 5101; WAN024FQP_at; Start 154; Stop 178
caaaccaaacttaccaccgagcatg

SEQ ID NO: 217162 - DNA, 25 bp, Artificial
  probe
  misc_feature (1)..(25): SEQ ID NO: 5101; WAN024FQP_at; Start 261; Stop 285
ggagaagaaccccaacgacagatga

SEQ ID NO: 217163 - DNA, 25 bp, Artificial
  probe
  misc_feature (1)..(25): SEQ ID NO: 5101; WAN024FQP_at; Start 238; Stop 262
caattgatcgccaatcgctttttgg

SEQ ID NO: 217164 - DNA, 25 bp, Artificial
  probe
  misc_feature (1)..(25): SEQ ID NO: 5101; WAN024FQP_at; Start 40; Stop 64
gtcatcgaatacatagacaaactcg

SEQ ID NO: 217165 - DNA, 25 bp, Artificial
  probe
  misc_feature (1)..(25): SEQ ID NO: 5101; WAN024FQP_at; Start 45; Stop 69
cgaatacatagacaaactcgttacc

SEQ ID NO: 217166 - DNA, 25 bp, Artificial
  probe
  misc_feature (1)..(25): SEQ ID NO: 5101; WAN024FQP_at; Start 24; Stop 48
tgagcttgcttgcttcgtcatcgaa

SEQ ID NO: 217167 - DNA, 25 bp, Artificial
  probe
  misc_feature (1)..(25): SEQ ID NO: 5101; WAN024FQP_at; Start 203; Stop 227
ttacgaagaagaccgtggtctacga

SEQ ID NO: 217168 - DNA, 25 bp, Artificial
  probe
  misc_feature (1)..(25): SEQ ID NO: 5101; WAN024FQP_at; Start 3; Stop 27
gagcaaggaatttcacatctttgag

SEQ ID NO: 217169 - DNA, 25 bp, Artificial
  probe
  misc_feature (1)..(25): SEQ ID NO: 5101; WAN024FQP_at; Start 125; Stop 149
cgtttagcagcgtctgctttgacga

SEQ ID NO: 217170 - DNA, 25 bp, Artificial
  probe
  misc_feature (1)..(25): SEQ ID NO: 5101; WAN024FQP_at; Start 243; Stop 267
gatcgccaatcgctttttggagaag

SEQ ID NO: 217171 - DNA, 25 bp, Artificial
  probe
  misc_feature (1)..(25): SEQ ID NO: 5101; WAN024FQP_at; Start 223; Stop 247
tacgaagatacagatcaattgatcg

SEQ ID NO: 217172 - DNA, 25 bp, Artificial
  probe
  misc_feature (1)..(25): SEQ ID NO: 5101; WAN024FQP_at; Start 177; Stop 201
tgtccataacttgatcagcttcgcc

SEQ ID NO: 217173 - DNA, 25 bp, Artificial
  probe
  misc_feature (1)..(25): SEQ ID NO: 5101; WAN024FQP_at; Start 210; Stop 234
gaagaccgtggtctacgaagataca

SEQ ID NO: 217174 - DNA, 25 bp, Artificial
  probe
  misc_feature (1)..(25): SEQ ID NO: 5101; WAN024FQP_at; Start 184; Stop 208
aacttgatcagcttcgcctttacga

SEQ ID NO: 217175 - DNA, 25 bp, Artificial
  probe
  misc_feature (1)..(25): SEQ ID NO: 5101; WAN024FQP_at; Start 16; Stop 40
cacatctttgagcttgcttgcttcg

SEQ ID NO: 217176 - DNA, 25 bp, Artificial
  probe
  misc_feature (1)..(25): SEQ ID NO: 5101; WAN024FQP_at; Start 195; Stop 219
cttcgcctttacgaagaagaccgtg

SEQ ID NO: 217177 - DNA, 25 bp, Artificial
  probe
  misc_feature (1)..(25): SEQ ID NO: 5101; WAN024FQP_at; Start 247; Stop 271
gccaatcgctttttggagaagaacc

SEQ ID NO: 217178 - DNA, 25 bp, Artificial
  probe
  misc_feature (1)..(25): SEQ ID NO: 5101; WAN024FQP_at; Start 30; Stop 54
tgcttgcttcgtcatcgaatacata

SEQ ID NO: 217179 - DNA, 25 bp, Artificial
  probe
  misc_feature (1)..(25): SEQ ID NO: 5101; WAN024FQP_at; Start 170; Stop 194
ccgagcatgtccataacttgatcag

SEQ ID NO: 217180 - DNA, 25 bp, Artificial
  probe
  misc_feature (1)..(25): SEQ ID NO: 5101; WAN024FQP_at; Start 95; Stop 119
tcagaaacgccagcaagtttgtcaa

SEQ ID NO: 217181 - DNA, 25 bp, Artificial
  probe
  misc_feature (1)..(25): SEQ ID NO: 5101; WAN024FQP_at; Start 144; Stop 168
tgacgatattcaaaccaaacttacc

SEQ ID NO: 217182 - DNA, 25 bp, Artificial
  probe
  misc_feature (1)..(25): SEQ ID NO: 5101; WAN024FQP_at; Start 134; Stop 158
gcgtctgctttgacgatattcaaac

SEQ ID NO: 217183 - DNA, 25 bp, Artificial
  probe
  misc_feature (1)..(25): SEQ ID NO: 5101; WAN024FQP_at; Start 117; Stop 141
caaggaaacgtttagcagcgtctgc

SEQ ID NO: 217184 - DNA, 25 bp, Artificial
  probe
  misc_feature (1)..(25): SEQ ID NO: 5101; WAN024FQP_at; Start 216; Stop 240
cgtggtctacgaagatacagatcaa

SEQ ID NO: 217185 - DNA, 25 bp, Artificial
  probe
  misc_feature (1)..(25): SEQ ID NO: 5101; WAN024FQP_at; Start 112; Stop 136
tttgtcaaggaaacgtttagcagcg

SEQ ID NO: 217186 - DNA, 25 bp, Artificial
  probe
  misc_feature (1)..(25): SEQ ID NO: 5101; WAN024FQP_at; Start 189; Stop 213
gatcagcttcgcctttacgaagaag

SEQ ID NO: 217187 - DNA, 25 bp, Artificial
  probe
  misc_feature (1)..(25): SEQ ID NO: 5101; WAN024FQP_at; Start 231; Stop 255
tacagatcaattgatcgccaatcgc

SEQ ID NO: 217188 - DNA, 25 bp, Artificial
  probe
  misc_feature (1)..(25): SEQ ID NO: 5101; WAN024FQP_at; Start 9; Stop 33
ggaatttcacatctttgagcttgct

SEQ ID NO: 217189 - DNA, 25 bp, Artificial
  probe
  misc_feature (1)..(25): SEQ ID NO: 1556; WAN024FQQ_at; Start 1291; Stop 1315
gctaaagctggacttgaccgcgata

SEQ ID NO: 217190 - DNA, 25 bp, Artificial
  probe
  misc_feature (1)..(25): SEQ ID NO: 1556; WAN024FQQ_at; Start 1319; Stop 1343
ggcaatacttcactgttaacacagg

SEQ ID NO: 217191 - DNA, 25 bp, Artificial
  probe
  misc_feature (1)..(25): SEQ ID NO: 1556; WAN024FQQ_at; Start 170; Stop 194
gaattattctatcaggtggtccaaa

SEQ ID NO: 217192 - DNA, 25 bp, Artificial
  probe
  misc_feature (1)..(25): SEQ ID NO: 1556; WAN024FQQ_at; Start 487; Stop 511
tacgcagccatcgaaaacccagata

SEQ ID NO: 217193 - DNA, 25 bp, Artificial
  probe
  misc_feature (1)..(25): SEQ ID NO: 1556; WAN024FQQ_at; Start 1277; Stop 1301
ttcgtgaagaaatcgctaaagctgg

SEQ ID NO: 217194 - DNA, 25 bp, Artificial
  probe
  misc_feature (1)..(25): SEQ ID NO: 1556; WAN024FQQ_at; Start 949; Stop 973
ttcgatgacgaagcaagcaagctca

SEQ ID NO: 217195 - DNA, 25 bp, Artificial
  probe
  misc_feature (1)..(25): SEQ ID NO: 1556; WAN024FQQ_at; Start 1190; Stop 1214
cattcccaggaccaggacttgctat

SEQ ID NO: 217196 - DNA, 25 bp, Artificial
  probe
  misc_feature (1)..(25): SEQ ID NO: 1556; WAN024FQQ_at; Start 1210; Stop 1234
gctatccgtgtcatgggtgaaatca

SEQ ID NO: 217197 - DNA, 25 bp, Artificial
  probe
  misc_feature (1)..(25): SEQ ID NO: 1556; WAN024FQQ_at; Start 1532; Stop 1556
gtaaaccacctgcaacagttgagtg

SEQ ID NO: 217198 - DNA, 25 bp, Artificial
  probe
  misc_feature (1)..(25): SEQ ID NO: 1556; WAN024FQQ_at; Start 1335; Stop 1359
taacacaggcgttcgttcagtcggt

SEQ ID NO: 217199 - DNA, 25 bp, Artificial
  probe
  misc_feature (1)..(25): SEQ ID NO: 1556; WAN024FQQ_at; Start 843; Stop 867
gaatatcgtcaaagcagacgctgct

SEQ ID NO: 217200 - DNA, 25 bp, Artificial
  probe
  misc_feature (1)..(25): SEQ ID NO: 1556; WAN024FQQ_at; Start 727; Stop 751
gttcttctccaaaaagcgattggcg

SEQ ID NO: 217201 - DNA, 25 bp, Artificial
  probe
  misc_feature (1)..(25): SEQ ID NO: 1556; WAN024FQQ_at; Start 1410; Stop 1434
cacttctatcgatggtatgactgct

SEQ ID NO: 217202 - DNA, 25 bp, Artificial
  probe
  misc_feature (1)..(25): SEQ ID NO: 1556; WAN024FQQ_at; Start 660; Stop 684
tgaaaccgtcggtgataaacgtgtc

SEQ ID NO: 217203 - DNA, 25 bp, Artificial
  probe
  misc_feature (1)..(25): SEQ ID NO: 1556; WAN024FQQ_at; Start 520; Stop 544
tacggtatccaattccacccagaag

SEQ ID NO: 217204 - DNA, 25 bp, Artificial
  probe
  misc_feature (1)..(25): SEQ ID NO: 1556; WAN024FQQ_at; Start 57; Stop 81
tggtagccagtacaaccagctgatt

SEQ ID NO: 217205 - DNA, 25 bp, Artificial
  probe
  misc_feature (1)..(25): SEQ ID NO: 1556; WAN024FQQ_at; Start 305; Stop 329
gaaaagttgttcctgcaggtgatgc

SEQ ID NO: 217206 - DNA, 25 bp, Artificial
  probe
  misc_feature (1)..(25): SEQ ID NO: 1556; WAN024FQQ_at; Start 226; Stop 250
gacccagaaatcttcgaactcggaa

SEQ ID NO: 217207 - DNA, 25 bp, Artificial
  probe
  misc_feature (1)..(25): SEQ ID NO: 1556; WAN024FQQ_at; Start 1249; Stop 1273
gaaaccgttcgtgaatcagacgcta

SEQ ID NO: 217208 - DNA, 25 bp, Artificial
  probe
  misc_feature (1)..(25): SEQ ID NO: 1556; WAN024FQQ_at; Start 421; Stop 445
catggtgatgcggttactgagattc

SEQ ID NO: 217209 - DNA, 25 bp, Artificial
  probe
  misc_feature (1)..(25): SEQ ID NO: 1556; WAN024FQQ_at; Start 137; Stop 161
cagctgctgaagttcgtgaagtcaa

SEQ ID NO: 217210 - DNA, 25 bp, Artificial
  probe
  misc_feature (1)..(25): SEQ ID NO: 1556; WAN024FQQ_at; Start 1024; Stop 1048
tctggtacggatacagctcaaacta

SEQ ID NO: 217211 - DNA, 25 bp, Artificial
  probe
  misc_feature (1)..(25): SEQ ID NO: 1556; WAN024FQQ_at; Start 400; Stop 424
gaacagactgttttgatgagccatg

SEQ ID NO: 217212 - DNA, 25 bp, Artificial
  probe
  misc_feature (1)..(25): SEQ ID NO: 1556; WAN024FQQ_at; Start 1149; Stop 1173
tacagagcttggtatgccagaccat

SEQ ID NO: 217213 - DNA, 25 bp, Artificial
  probe
  misc_feature (1)..(25): SEQ ID NO: 1556; WAN024FQQ_at; Start 758; Stop 782
tgatctgtatcttcgtagaccacgg

SEQ ID NO: 217214 - DNA, 25 bp, Artificial
  probe
  misc_feature (1)..(25): SEQ ID NO: 1556; WAN024FQQ_at; Start 808; Stop 832
caagttatggacatgctcggtggta

SEQ ID NO: 217215 - DNA, 25 bp, Artificial
  probe
  misc_feature (1)..(25): SEQ ID NO: 1556; WAN024FQQ_at; Start 441; Stop 465
gattcctgctgactttgttcgtaca

SEQ ID NO: 217216 - DNA, 25 bp, Artificial
  probe
  misc_feature (1)..(25): SEQ ID NO: 1556; WAN024FQQ_at; Start 459; Stop 483
tcgtacaggtacatcagctgactgc

SEQ ID NO: 217217 - DNA, 25 bp, Artificial
  probe
  misc_feature (1)..(25): SEQ ID NO: 1556; WAN024FQQ_at; Start 789; Stop 813
tcgtaaaggcgaagctgatcaagtt

SEQ ID NO: 217218 - DNA, 25 bp, Artificial
  probe
  misc_feature (1)..(25): SEQ ID NO: 1556; WAN024FQQ_at; Start 42; Stop 66
catcgtattggactatggtagccag

SEQ ID NO: 217219 - DNA, 25 bp, Artificial
  probe
  misc_feature (1)..(25): SEQ ID NO: 1556; WAN024FQQ_at; Start 1368; Stop 1392
tgacggtcgtacgtatgactacacg

SEQ ID NO: 217220 - DNA, 25 bp, Artificial
  probe
  misc_feature (1)..(25): SEQ ID NO: 1556; WAN024FQQ_at; Start 1492; Stop 1516
gaagtggatcatgttaaccgtatcg

SEQ ID NO: 217221 - DNA, 25 bp, Artificial
  probe
  misc_feature (1)..(25): SEQ ID NO: 1556; WAN024FQQ_at; Start 385; Stop 409
gaatcaacacctgatgaacagactg

SEQ ID NO: 217222 - DNA, 25 bp, Artificial
  probe
  misc_feature (1)..(25): SEQ ID NO: 1556; WAN024FQQ_at; Start 1129; Stop 1153
gatgaagttcgtgctcttggtacag

SEQ ID NO: 217223 - DNA, 25 bp, Artificial
  probe
  misc_feature (1)..(25): SEQ ID NO: 7040; WAN024FQR_at; Start 133; Stop 157
cgtatcgcagaaattgctaattatt

SEQ ID NO: 217224 - DNA, 25 bp, Artificial
  probe
  misc_feature (1)..(25): SEQ ID NO: 7040; WAN024FQR_at; Start 233; Stop 257
taaacggacaaatcatagacttacg

SEQ ID NO: 217225 - DNA, 25 bp, Artificial
  probe
  misc_feature (1)..(25): SEQ ID NO: 7040; WAN024FQR_at; Start 59; Stop 83
gacaagtagaagaagacttaggtta

SEQ ID NO: 217226 - DNA, 25 bp, Artificial
  probe
  misc_feature (1)..(25): SEQ ID NO: 7040; WAN024FQR_at; Start 193; Stop 217
gataaccctgctatcgctgggagtg

SEQ ID NO: 217227 - DNA, 25 bp, Artificial
  probe
  misc_feature (1)..(25): SEQ ID NO: 7040; WAN024FQR_at; Start 295; Stop 319
ccactaaatgaagatgatatcgact

SEQ ID NO: 217228 - DNA, 25 bp, Artificial
  probe
  misc_feature (1)..(25): SEQ ID NO: 7040; WAN024FQR_at; Start 238; Stop 262
ggacaaatcatagacttacgcaaag

SEQ ID NO: 217229 - DNA, 25 bp, Artificial
  probe
  misc_feature (1)..(25): SEQ ID NO: 7040; WAN024FQR_at; Start 179; Stop 203
tgctcggacgaacagataaccctgc

SEQ ID NO: 217230 - DNA, 25 bp, Artificial
  probe
  misc_feature (1)..(25): SEQ ID NO: 7040; WAN024FQR_at; Start 199; Stop 223
cctgctatcgctgggagtgatgaat

SEQ ID NO: 217231 - DNA, 25 bp, Artificial
  probe
  misc_feature (1)..(25): SEQ ID NO: 7040; WAN024FQR_at; Start 126; Stop 150
cgctgaacgtatcgcagaaattgct

SEQ ID NO: 217232 - DNA, 25 bp, Artificial
  probe
  misc_feature (1)..(25): SEQ ID NO: 7040; WAN024FQR_at; Start 156; Stop 180
tttcaacgtatccaccgactacctg

SEQ ID NO: 217233 - DNA, 25 bp, Artificial
  probe
  misc_feature (1)..(25): SEQ ID NO: 7040; WAN024FQR_at; Start 335; Stop 359
tatccgcccacttcaaaagcaaagg

SEQ ID NO: 217234 - DNA, 25 bp, Artificial
  probe
  misc_feature (1)..(25): SEQ ID NO: 7040; WAN024FQR_at; Start 73; Stop 97
gacttaggttatggtagaaatacac

SEQ ID NO: 217235 - DNA, 25 bp, Artificial
  probe
  misc_feature (1)..(25): SEQ ID NO: 7040; WAN024FQR_at; Start 310; Stop 334
gatatcgacttcattacatccgtcc

SEQ ID NO: 217236 - DNA, 25 bp, Artificial
  probe
  misc_feature (1)..(25): SEQ ID NO: 7040; WAN024FQR_at; Start 258; Stop 282
caaagcagcagccaacaccatgtta

SEQ ID NO: 217237 - DNA, 25 bp, Artificial
  probe
  misc_feature (1)..(25): SEQ ID NO: 7040; WAN024FQR_at; Start 32; Stop 56
tggcaaaaaagcgtggaaaagctct

SEQ ID NO: 217238 - DNA, 25 bp, Artificial
  probe
  misc_feature (1)..(25): SEQ ID NO: 7040; WAN024FQR_at; Start 110; Stop 134
aaaattctacgccaaacgctgaacg

SEQ ID NO: 217239 - DNA, 25 bp, Artificial
  probe
  misc_feature (1)..(25): SEQ ID NO: 7040; WAN024FQR_at; Start 225; Stop 249
tgcccaagtaaacggacaaatcata

SEQ ID NO: 217240 - DNA, 25 bp, Artificial
  probe
  misc_feature (1)..(25): SEQ ID NO: 7040; WAN024FQR_at; Start 273; Stop 297
caccatgttatttgacgggaaacca

SEQ ID NO: 217241 - DNA, 25 bp, Artificial
  probe
  misc_feature (1)..(25): SEQ ID NO: 7040; WAN024FQR_at; Start 204; Stop 228
tatcgctgggagtgatgaatttgcc

SEQ ID NO: 217242 - DNA, 25 bp, Artificial
  probe
  misc_feature (1)..(25): SEQ ID NO: 7040; WAN024FQR_at; Start 248; Stop 272
tagacttacgcaaagcagcagccaa

SEQ ID NO: 217243 - DNA, 25 bp, Artificial
  probe
  misc_feature (1)..(25): SEQ ID NO: 7040; WAN024FQR_at; Start 268; Stop 292
gccaacaccatgttatttgacggga

SEQ ID NO: 217244 - DNA, 25 bp, Artificial
  probe
  misc_feature (1)..(25): SEQ ID NO: 7040; WAN024FQR_at; Start 42; Stop 66
gcgtggaaaagctcttggacaagta

SEQ ID NO: 217245 - DNA, 25 bp, Artificial
  probe
  misc_feature (1)..(25): SEQ ID NO: 7040; WAN024FQR_at; Start 98; Stop 122
tctataagataaaaaattctacgcc

SEQ ID NO: 217246 - DNA, 25 bp, Artificial
  probe
  misc_feature (1)..(25): SEQ ID NO: 7040; WAN024FQR_at; Start 316; Stop 340
gacttcattacatccgtcctatccg

SEQ ID NO: 217247 - DNA, 25 bp, Artificial
  probe
  misc_feature (1)..(25): SEQ ID NO: 7040; WAN024FQR_at; Start 342; Stop 366
ccacttcaaaagcaaaggagaacgc

SEQ ID NO: 217248 - DNA, 25 bp, Artificial
  probe
  misc_feature (1)..(25): SEQ ID NO: 7040; WAN024FQR_at; Start 120; Stop 144
gccaaacgctgaacgtatcgcagaa

SEQ ID NO: 217249 - DNA, 25 bp, Artificial
  probe
  misc_feature (1)..(25): SEQ ID NO: 7040; WAN024FQR_at; Start 285; Stop 309
tgacgggaaaccactaaatgaagat

SEQ ID NO: 217250 - DNA, 25 bp, Artificial
  probe
  misc_feature (1)..(25): SEQ ID NO: 7040; WAN024FQR_at; Start 38; Stop 62
aaaagcgtggaaaagctcttggaca

SEQ ID NO: 217251 - DNA, 25 bp, Artificial
  probe
  misc_feature (1)..(25): SEQ ID NO: 7040; WAN024FQR_at; Start 188; Stop 212
gaacagataaccctgctatcgctgg

SEQ ID NO: 217252 - DNA, 25 bp, Artificial
  probe
  misc_feature (1)..(25): SEQ ID NO: 7040; WAN024FQR_at; Start 171; Stop 195
cgactacctgctcggacgaacagat

SEQ ID NO: 217253 - DNA, 25 bp, Artificial
  probe
  misc_feature (1)..(25): SEQ ID NO: 7040; WAN024FQR_at; Start 217; Stop 241
gatgaatttgcccaagtaaacggac

SEQ ID NO: 217254 - DNA, 25 bp, Artificial
  probe
  misc_feature (1)..(25): SEQ ID NO: 7040; WAN024FQR_at; Start 84; Stop 108
tggtagaaatacactctataagata

SEQ ID NO: 217255 - DNA, 25 bp, Artificial
  probe
  misc_feature (1)..(25): SEQ ID NO: 7040; WAN024FQR_at; Start 148; Stop 172
gctaattatttcaacgtatccaccg

SEQ ID NO: 217256 - DNA, 25 bp, Artificial
  probe
  misc_feature (1)..(25): SEQ ID NO: 7040; WAN024FQR_at; Start 52; Stop 76
gctcttggacaagtagaagaagact

SEQ ID NO: 217257 - DNA, 25 bp, Artificial
  probe
  misc_feature (1)..(25): SEQ ID NO: 1261; WAN024FQS_at; Start 387; Stop 411
tgtaccgcaagctattctaatgaaa

SEQ ID NO: 217258 - DNA, 25 bp, Artificial
  probe
  misc_feature (1)..(25): SEQ ID NO: 1261; WAN024FQS_at; Start 839; Stop 863
taggcgaagtttatcttcagatttc

SEQ ID NO: 217259 - DNA, 25 bp, Artificial
  probe
  misc_feature (1)..(25): SEQ ID NO: 1261; WAN024FQS_at; Start 823; Stop 847
gataatatcagtaagataggcgaag

SEQ ID NO: 217260 - DNA, 25 bp, Artificial
  probe
  misc_feature (1)..(25): SEQ ID NO: 1261; WAN024FQS_at; Start 79; Stop 103
cttgtaacagcaattcttagccgga

SEQ ID NO: 217261 - DNA, 25 bp, Artificial
  probe
  misc_feature (1)..(25): SEQ ID NO: 1261; WAN024FQS_at; Start 692; Stop 716
taattggacgattgattagcccgtc

SEQ ID NO: 217262 - DNA, 25 bp, Artificial
  probe
  misc_feature (1)..(25): SEQ ID NO: 1261; WAN024FQS_at; Start 110; Stop 134
cacctgtagaatatggtatcgtagc

SEQ ID NO: 217263 - DNA, 25 bp, Artificial
  probe
  misc_feature (1)..(25): SEQ ID NO: 1261; WAN024FQS_at; Start 866; Stop 890
gaatattcgtaatagttggcatacc

SEQ ID NO: 217264 - DNA, 25 bp, Artificial
  probe
  misc_feature (1)..(25): SEQ ID NO: 1261; WAN024FQS_at; Start 96; Stop 120
tagccggattctctcacctgtagaa

SEQ ID NO: 217265 - DNA, 25 bp, Artificial
  probe
  misc_feature (1)..(25): SEQ ID NO: 1261; WAN024FQS_at; Start 967; Stop 991
ccggtgtttcaaatattagcagcaa

SEQ ID NO: 217266 - DNA, 25 bp, Artificial
  probe
  misc_feature (1)..(25): SEQ ID NO: 1261; WAN024FQS_at; Start 21; Stop 45
gaaacgtggaattttctatactgca

SEQ ID NO: 217267 - DNA, 25 bp, Artificial
  probe
  misc_feature (1)..(25): SEQ ID NO: 1261; WAN024FQS_at; Start 1144; Stop 1168
gcgtacatgcttttgatttctttca

SEQ ID NO: 217268 - DNA, 25 bp, Artificial
  probe
  misc_feature (1)..(25): SEQ ID NO: 1261; WAN024FQS_at; Start 485; Stop 509
tagcggtatcacattttggtgtcta

SEQ ID NO: 217269 - DNA, 25 bp, Artificial
  probe
  misc_feature (1)..(25): SEQ ID NO: 1261; WAN024FQS_at; Start 1395; Stop 1419
tcgacgagtcttcgcggttataaga

SEQ ID NO: 217270 - DNA, 25 bp, Artificial
  probe
  misc_feature (1)..(25): SEQ ID NO: 1261; WAN024FQS_at; Start 1111; Stop 1135
attggtgtaatgttgcaaagcatcc

SEQ ID NO: 217271 - DNA, 25 bp, Artificial
  probe
  misc_feature (1)..(25): SEQ ID NO: 1261; WAN024FQS_at; Start 123; Stop 147
tggtatcgtagcagtagtaaatgta

SEQ ID NO: 217272 - DNA, 25 bp, Artificial
  probe
  misc_feature (1)..(25): SEQ ID NO: 1261; WAN024FQS_at; Start 958; Stop 982
caaagcgttccggtgtttcaaatat

SEQ ID NO: 217273 - DNA, 25 bp, Artificial
  probe
  misc_feature (1)..(25): SEQ ID NO: 1261; WAN024FQS_at; Start 314; Stop 338
tatacggcgaaactatttatgttag

SEQ ID NO: 217274 - DNA, 25 bp, Artificial
  probe
  misc_feature (1)..(25): SEQ ID NO: 1261; WAN024FQS_at; Start 373; Stop 397
tataccattacaattgtaccgcaag

SEQ ID NO: 217275 - DNA, 25 bp, Artificial
  probe
  misc_feature (1)..(25): SEQ ID NO: 1261; WAN024FQS_at; Start 710; Stop 734
gcccgtcagatcttggttattatga

SEQ ID NO: 217276 - DNA, 25 bp, Artificial
  probe
  misc_feature (1)..(25): SEQ ID NO: 1261; WAN024FQS_at; Start 453; Stop 477
taacattgctagtggcttggtgggc

SEQ ID NO: 217277 - DNA, 25 bp, Artificial
  probe
  misc_feature (1)..(25): SEQ ID NO: 1261; WAN024FQS_at; Start 944; Stop 968
gagataattggtcccaaagcgttcc

SEQ ID NO: 217278 - DNA, 25 bp, Artificial
  probe
  misc_feature (1)..(25): SEQ ID NO: 1261; WAN024FQS_at; Start 179; Stop 203
caggaataggacctgctattgttca

SEQ ID NO: 217279 - DNA, 25 bp, Artificial
  probe
  misc_feature (1)..(25): SEQ ID NO: 1261; WAN024FQS_at; Start 790; Stop 814
ccagcattgcatcctattatgtcca

SEQ ID NO: 217280 - DNA, 25 bp, Artificial
  probe
  misc_feature (1)..(25): SEQ ID NO: 1261; WAN024FQS_at; Start 878; Stop 902
tagttggcatacctatttcggctta

SEQ ID NO: 217281 - DNA, 25 bp, Artificial
  probe
  misc_feature (1)..(25): SEQ ID NO: 1261; WAN024FQS_at; Start 980; Stop 1004
tattagcagcaacaatttggttaca

SEQ ID NO: 217282 - DNA, 25 bp, Artificial
  probe
  misc_feature (1)..(25): SEQ ID NO: 1261; WAN024FQS_at; Start 1367; Stop 1391
gaattgggatgtatattagcggaga

SEQ ID NO: 217283 - DNA, 25 bp, Artificial
  probe
  misc_feature (1)..(25): SEQ ID NO: 1261; WAN024FQS_at; Start 1126; Stop 1150
caaagcatccaatgtgttgcgtaca

SEQ ID NO: 217284 - DNA, 25 bp, Artificial
  probe
  misc_feature (1)..(25): SEQ ID NO: 1261; WAN024FQS_at; Start 1380; Stop 1404
tattagcggagagtatcgacgagtc

SEQ ID NO: 217285 - DNA, 25 bp, Artificial
  probe
  misc_feature (1)..(25): SEQ ID NO: 1261; WAN024FQS_at; Start 775; Stop 799
tcacaggttgtgacaccagcattgc

SEQ ID NO: 217286 - DNA, 25 bp, Artificial
  probe
  misc_feature (1)..(25): SEQ ID NO: 1261; WAN024FQS_at; Start 39; Stop 63
tactgcaatagggaagtattcgaat

SEQ ID NO: 217287 - DNA, 25 bp, Artificial
  probe
  misc_feature (1)..(25): SEQ ID NO: 1261; WAN024FQS_at; Start 284; Stop 308
ttgctttactaggatatcctatggg

SEQ ID NO: 217288 - DNA, 25 bp, Artificial
  probe
  misc_feature (1)..(25): SEQ ID NO: 1261; WAN024FQS_at; Start 256; Stop 280
tatagtggaatcgtactttcttgta

SEQ ID NO: 217289 - DNA, 25 bp, Artificial
  probe
  misc_feature (1)..(25): SEQ ID NO: 1261; WAN024FQS_at; Start 1027; Stop 1051
gcattttaccaagcaactaatcaga

SEQ ID NO: 217290 - DNA, 25 bp, Artificial
  probe
  misc_feature (1)..(25): SEQ ID NO: 1261; WAN024FQS_at; Start 167; Stop 191
tgttagcagattcaggaataggacc

SEQ ID NO: 217291 - DNA, 25 bp, Artificial
  probe
  misc_feature (1)..(25): SEQ ID NO: 7034; WAN024FQT_at; Start 104; Stop 128
tacaatgcctgctttttcaaagtgt

SEQ ID NO: 217292 - DNA, 25 bp, Artificial
  probe
  misc_feature (1)..(25): SEQ ID NO: 7034; WAN024FQT_at; Start 45; Stop 69
taatatcttagagatcggattggga

SEQ ID NO: 217293 - DNA, 25 bp, Artificial
  probe
  misc_feature (1)..(25): SEQ ID NO: 7034; WAN024FQT_at; Start 234; Stop 258
tcaacataatcttttcccatcgtca

SEQ ID NO: 217294 - DNA, 25 bp, Artificial
  probe
  misc_feature (1)..(25): SEQ ID NO: 7034; WAN024FQT_at; Start 139; Stop 163
gagccttgcctatatatgctccaag

SEQ ID NO: 217295 - DNA, 25 bp, Artificial
  probe
  misc_feature (1)..(25): SEQ ID NO: 7034; WAN024FQT_at; Start 6; Stop 30
tatgctatgcataacagttaagcct

SEQ ID NO: 217296 - DNA, 25 bp, Artificial
  probe
  misc_feature (1)..(25): SEQ ID NO: 7034; WAN024FQT_at; Start 158; Stop 182
tccaagaattcctcctaagaaagca

SEQ ID NO: 217297 - DNA, 25 bp, Artificial
  probe
  misc_feature (1)..(25): SEQ ID NO: 7034; WAN024FQT_at; Start 62; Stop 86
gattgggattaaagggagcatttga

SEQ ID NO: 217298 - DNA, 25 bp, Artificial
  probe
  misc_feature (1)..(25): SEQ ID NO: 7034; WAN024FQT_at; Start 133; Stop 157
tcaatagagccttgcctatatatgc

SEQ ID NO: 217299 - DNA, 25 bp, Artificial
  probe
  misc_feature (1)..(25): SEQ ID NO: 7034; WAN024FQT_at; Start 300; Stop 324
tgcattaaagagctacatatccatg

SEQ ID NO: 217300 - DNA, 25 bp, Artificial
  probe
  misc_feature (1)..(25): SEQ ID NO: 7034; WAN024FQT_at; Start 191; Stop 215
tactaaagccatgtgaggataagtt

SEQ ID NO: 217301 - DNA, 25 bp, Artificial
  probe
  misc_feature (1)..(25): SEQ ID NO: 7034; WAN024FQT_at; Start 246; Stop 270
tttcccatcgtcatcaaagaccact

SEQ ID NO: 217302 - DNA, 25 bp, Artificial
  probe
  misc_feature (1)..(25): SEQ ID NO: 7034; WAN024FQT_at; Start 39; Stop 63
tacgactaatatcttagagatcgga

SEQ ID NO: 217303 - DNA, 25 bp, Artificial
  probe
  misc_feature (1)..(25): SEQ ID NO: 7034; WAN024FQT_at; Start 9; Stop 33
gctatgcataacagttaagcctgtg

SEQ ID NO: 217304 - DNA, 25 bp, Artificial
  probe
  misc_feature (1)..(25): SEQ ID NO: 7034; WAN024FQT_at; Start 119; Stop 143
ttcaaagtgttttttcaatagagcc

SEQ ID NO: 217305 - DNA, 25 bp, Artificial
  probe
  misc_feature (1)..(25): SEQ ID NO: 7034; WAN024FQT_at; Start 218; Stop 242
taacttttctaatacatcaacataa

SEQ ID NO: 217306 - DNA, 25 bp, Artificial
  probe
  misc_feature (1)..(25): SEQ ID NO: 7034; WAN024FQT_at; Start 20; Stop 44
cagttaagcctgtgataaatacgac

SEQ ID NO: 217307 - DNA, 25 bp, Artificial
  probe
  misc_feature (1)..(25): SEQ ID NO: 7034; WAN024FQT_at; Start 264; Stop 288
gaccactccatatatttttcttttg

SEQ ID NO: 217308 - DNA, 25 bp, Artificial
  probe
  misc_feature (1)..(25): SEQ ID NO: 7034; WAN024FQT_at; Start 240; Stop 264
taatcttttcccatcgtcatcaaag

SEQ ID NO: 217309 - DNA, 25 bp, Artificial
  probe
  misc_feature (1)..(25): SEQ ID NO: 7034; WAN024FQT_at; Start 306; Stop 330
aaagagctacatatccatgtgctga

SEQ ID NO: 217310 - DNA, 25 bp, Artificial
  probe
  misc_feature (1)..(25): SEQ ID NO: 7034; WAN024FQT_at; Start 91; Stop 115
aaagtaggcattatacaatgcctgc

SEQ ID NO: 217311 - DNA, 25 bp, Artificial
  probe
  misc_feature (1)..(25): SEQ ID NO: 7034; WAN024FQT_at; Start 153; Stop 177
tatgctccaagaattcctcctaaga

SEQ ID NO: 217312 - DNA, 25 bp, Artificial
  probe
  misc_feature (1)..(25): SEQ ID NO: 7034; WAN024FQT_at; Start 197; Stop 221
agccatgtgaggataagttattaac

SEQ ID NO: 217313 - DNA, 25 bp, Artificial
  probe
  misc_feature (1)..(25): SEQ ID NO: 7034; WAN024FQT_at; Start 59; Stop 83
tcggattgggattaaagggagcatt

SEQ ID NO: 217314 - DNA, 25 bp, Artificial
  probe
  misc_feature (1)..(25): SEQ ID NO: 7034; WAN024FQT_at; Start 163; Stop 187
gaattcctcctaagaaagcacctaa

SEQ ID NO: 217315 - DNA, 25 bp, Artificial
  probe
  misc_feature (1)..(25): SEQ ID NO: 7034; WAN024FQT_at; Start 279; Stop 303
ttttcttttgctaaaagcatttgca

SEQ ID NO: 217316 - DNA, 25 bp, Artificial
  probe
  misc_feature (1)..(25): SEQ ID NO: 7034; WAN024FQT_at; Start 288; Stop 312
gctaaaagcatttgcattaaagagc

SEQ ID NO: 217317 - DNA, 25 bp, Artificial
  probe
  misc_feature (1)..(25): SEQ ID NO: 7034; WAN024FQT_at; Start 176; Stop 200
gaaagcacctaaggctactaaagcc

SEQ ID NO: 217318 - DNA, 25 bp, Artificial
  probe
  misc_feature (1)..(25): SEQ ID NO: 7034; WAN024FQT_at; Start 24; Stop 48
taagcctgtgataaatacgactaat

SEQ ID NO: 217319 - DNA, 25 bp, Artificial
  probe
  misc_feature (1)..(25): SEQ ID NO: 7034; WAN024FQT_at; Start 253; Stop 277
tcgtcatcaaagaccactccatata

SEQ ID NO: 217320 - DNA, 25 bp, Artificial
  probe
  misc_feature (1)..(25): SEQ ID NO: 7034; WAN024FQT_at; Start 146; Stop 170
gcctatatatgctccaagaattcct

SEQ ID NO: 217321 - DNA, 25 bp, Artificial
  probe
  misc_feature (1)..(25): SEQ ID NO: 7034; WAN024FQT_at; Start 76; Stop 100
ggagcatttgaagaaaaagtaggca

SEQ ID NO: 217322 - DNA, 25 bp, Artificial
  probe
  misc_feature (1)..(25): SEQ ID NO: 7034; WAN024FQT_at; Start 185; Stop 209
taaggctactaaagccatgtgagga

SEQ ID NO: 217323 - DNA, 25 bp, Artificial
  probe
  misc_feature (1)..(25): SEQ ID NO: 7034; WAN024FQT_at; Start 126; Stop 150
tgttttttcaatagagccttgccta

SEQ ID NO: 217324 - DNA, 25 bp, Artificial
  probe
  misc_feature (1)..(25): SEQ ID NO: 7034; WAN024FQT_at; Start 170; Stop 194
tcctaagaaagcacctaaggctact

SEQ ID NO: 217325 - DNA, 25 bp, Artificial
  probe
  misc_feature (1)..(25): SEQ ID NO: 2799; WAN024FQU_at; Start 300; Stop 324
gcttgctgccataaatggtaaaata

SEQ ID NO: 217326 - DNA, 25 bp, Artificial
  probe
  misc_feature (1)..(25): SEQ ID NO: 2799; WAN024FQU_at; Start 1; Stop 25
atgtatctggtcttggcaattggat

SEQ ID NO: 217327 - DNA, 25 bp, Artificial
  probe
  misc_feature (1)..(25): SEQ ID NO: 2799; WAN024FQU_at; Start 159; Stop 183
cattttgatgtttttcttctcctcc

SEQ ID NO: 217328 - DNA, 25 bp, Artificial
  probe
  misc_feature (1)..(25): SEQ ID NO: 2799; WAN024FQU_at; Start 39; Stop 63
tgtttctgccgcttttgcaatgtca

SEQ ID NO: 217329 - DNA, 25 bp, Artificial
  probe
  misc_feature (1)..(25): SEQ ID NO: 2799; WAN024FQU_at; Start 286; Stop 310
gtctttatcataaagcttgctgcca

SEQ ID NO: 217330 - DNA, 25 bp, Artificial
  probe
  misc_feature (1)..(25): SEQ ID NO: 2799; WAN024FQU_at; Start 212; Stop 236
ccgcaataggtatggatacattctt

SEQ ID NO: 217331 - DNA, 25 bp, Artificial
  probe
  misc_feature (1)..(25): SEQ ID NO: 2799; WAN024FQU_at; Start 251; Stop 275
tatccatcgatgaaattattgcgcc

SEQ ID NO: 217332 - DNA, 25 bp, Artificial
  probe
  misc_feature (1)..(25): SEQ ID NO: 2799; WAN024FQU_at; Start 360; Stop 384
cttaactatagggtttaattcagat

SEQ ID NO: 217333 - DNA, 25 bp, Artificial
  probe
  misc_feature (1)..(25): SEQ ID NO: 2799; WAN024FQU_at; Start 238; Stop 262
gaaatcttaagcttatccatcgatg

SEQ ID NO: 217334 - DNA, 25 bp, Artificial
  probe
  misc_feature (1)..(25): SEQ ID NO: 2799; WAN024FQU_at; Start 172; Stop 196
ttcttctcctccttaaaagatggga

SEQ ID NO: 217335 - DNA, 25 bp, Artificial
  probe
  misc_feature (1)..(25): SEQ ID NO: 2799; WAN024FQU_at; Start 349; Stop 373
ctcaaaaacatcttaactatagggt

SEQ ID NO: 217336 - DNA, 25 bp, Artificial
  probe
  misc_feature (1)..(25): SEQ ID NO: 2799; WAN024FQU_at; Start 263; Stop 287
aaattattgcgcctacatccgaggt

SEQ ID NO: 217337 - DNA, 25 bp, Artificial
  probe
  misc_feature (1)..(25): SEQ ID NO: 2799; WAN024FQU_at; Start 271; Stop 295
gcgcctacatccgaggtctttatca

SEQ ID NO: 217338 - DNA, 25 bp, Artificial
  probe
  misc_feature (1)..(25): SEQ ID NO: 2799; WAN024FQU_at; Start 26; Stop 50
tttctattgcctttgtttctgccgc

SEQ ID NO: 217339 - DNA, 25 bp, Artificial
  probe
  misc_feature (1)..(25): SEQ ID NO: 2799; WAN024FQU_at; Start 341; Stop 365
taggtatactcaaaaacatcttaac

SEQ ID NO: 217340 - DNA, 25 bp, Artificial
  probe
  misc_feature (1)..(25): SEQ ID NO: 2799; WAN024FQU_at; Start 225; Stop 249
ggatacattctttgaaatcttaagc

SEQ ID NO: 217341 - DNA, 25 bp, Artificial
  probe
  misc_feature (1)..(25): SEQ ID NO: 2799; WAN024FQU_at; Start 192; Stop 216
tgggaagaatctaaacataaccgca

SEQ ID NO: 217342 - DNA, 25 bp, Artificial
  probe
  misc_feature (1)..(25): SEQ ID NO: 2799; WAN024FQU_at; Start 198; Stop 222
gaatctaaacataaccgcaataggt

SEQ ID NO: 217343 - DNA, 25 bp, Artificial
  probe
  misc_feature (1)..(25): SEQ ID NO: 2799; WAN024FQU_at; Start 109; Stop 133
tcaagatatttgactgggtttttaa

SEQ ID NO: 217344 - DNA, 25 bp, Artificial
  probe
  misc_feature (1)..(25): SEQ ID NO: 2799; WAN024FQU_at; Start 267; Stop 291
tattgcgcctacatccgaggtcttt

SEQ ID NO: 217345 - DNA, 25 bp, Artificial
  probe
  misc_feature (1)..(25): SEQ ID NO: 2799; WAN024FQU_at; Start 307; Stop 331
gccataaatggtaaaataaacattc

SEQ ID NO: 217346 - DNA, 25 bp, Artificial
  probe
  misc_feature (1)..(25): SEQ ID NO: 2799; WAN024FQU_at; Start 9; Stop 33
ggtcttggcaattggattttctatt

SEQ ID NO: 217347 - DNA, 25 bp, Artificial
  probe
  misc_feature (1)..(25): SEQ ID NO: 2799; WAN024FQU_at; Start 137; Stop 161
ttatccctcttactctcatagccat

SEQ ID NO: 217348 - DNA, 25 bp, Artificial
  probe
  misc_feature (1)..(25): SEQ ID NO: 2799; WAN024FQU_at; Start 255; Stop 279
catcgatgaaattattgcgcctaca

SEQ ID NO: 217349 - DNA, 25 bp, Artificial
  probe
  misc_feature (1)..(25): SEQ ID NO: 2799; WAN024FQU_at; Start 207; Stop 231
cataaccgcaataggtatggataca

SEQ ID NO: 217350 - DNA, 25 bp, Artificial
  probe
  misc_feature (1)..(25): SEQ ID NO: 2799; WAN024FQU_at; Start 73; Stop 97
ttagatgatataatgagtagtggca

SEQ ID NO: 217351 - DNA, 25 bp, Artificial
  probe
  misc_feature (1)..(25): SEQ ID NO: 2799; WAN024FQU_at; Start 294; Stop 318
cataaagcttgctgccataaatggt

SEQ ID NO: 217352 - DNA, 25 bp, Artificial
  probe
  misc_feature (1)..(25): SEQ ID NO: 2799; WAN024FQU_at; Start 327; Stop 351
cattctaataacaataggtatactc

SEQ ID NO: 217353 - DNA, 25 bp, Artificial
  probe
  misc_feature (1)..(25): SEQ ID NO: 2799; WAN024FQU_at; Start 276; Stop 300
tacatccgaggtctttatcataaag

SEQ ID NO: 217354 - DNA, 25 bp, Artificial
  probe
  misc_feature (1)..(25): SEQ ID NO: 2799; WAN024FQU_at; Start 55; Stop 79
gcaatgtcatctgatatattagatg

SEQ ID NO: 217355 - DNA, 25 bp, Artificial
  probe
  misc_feature (1)..(25): SEQ ID NO: 2799; WAN024FQU_at; Start 387; Stop 411
caccataaaattaggcaaggagtaa

SEQ ID NO: 217356 - DNA, 25 bp, Artificial
  probe
  misc_feature (1)..(25): SEQ ID NO: 2799; WAN024FQU_at; Start 178; Stop 202
tcctccttaaaagatgggaagaatc

SEQ ID NO: 217357 - DNA, 25 bp, Artificial
  probe
  misc_feature (1)..(25): SEQ ID NO: 2799; WAN024FQU_at; Start 144; Stop 168
tcttactctcatagccattttgatg

SEQ ID NO: 217358 - DNA, 25 bp, Artificial
  probe
  misc_feature (1)..(25): SEQ ID NO: 2799; WAN024FQU_at; Start 46; Stop 70
gccgcttttgcaatgtcatctgata

SEQ ID NO: 217359 - DNA, 25 bp, Artificial
  probe
  misc_feature (1)..(25): SEQ ID NO: 2317; WAN024FQV_at; Start 107; Stop 131
tattgttcttaatatacccgacagt

SEQ ID NO: 217360 - DNA, 25 bp, Artificial
  probe
  misc_feature (1)..(25): SEQ ID NO: 2317; WAN024FQV_at; Start 149; Stop 173
gaactgttgttatgttatttatggc

SEQ ID NO: 217361 - DNA, 25 bp, Artificial
  probe
  misc_feature (1)..(25): SEQ ID NO: 2317; WAN024FQV_at; Start 465; Stop 489
gttaataacttatcctcacatggct

SEQ ID NO: 217362 - DNA, 25 bp, Artificial
  probe
  misc_feature (1)..(25): SEQ ID NO: 2317; WAN024FQV_at; Start 90; Stop 114
gatgggcttgattccaatattgttc

SEQ ID NO: 217363 - DNA, 25 bp, Artificial
  probe
  misc_feature (1)..(25): SEQ ID NO: 2317; WAN024FQV_at; Start 67; Stop 91
gccttcatgtttggagttggtatga

SEQ ID NO: 217364 - DNA, 25 bp, Artificial
  probe
  misc_feature (1)..(25): SEQ ID NO: 2317; WAN024FQV_at; Start 136; Stop 160
gccatagttgcaggaactgttgtta

SEQ ID NO: 217365 - DNA, 25 bp, Artificial
  probe
  misc_feature (1)..(25): SEQ ID NO: 2317; WAN024FQV_at; Start 611; Stop 635
tatggtgctatctgaatctaactaa

SEQ ID NO: 217366 - DNA, 25 bp, Artificial
  probe
  misc_feature (1)..(25): SEQ ID NO: 2317; WAN024FQV_at; Start 121; Stop 145
tacccgacagtattagccatagttg

SEQ ID NO: 217367 - DNA, 25 bp, Artificial
  probe
  misc_feature (1)..(25): SEQ ID NO: 2317; WAN024FQV_at; Start 164; Stop 188
tatttatggctaaggttcaaaagcc

SEQ ID NO: 217368 - DNA, 25 bp, Artificial
  probe
  misc_feature (1)..(25): SEQ ID NO: 2317; WAN024FQV_at; Start 407; Stop 431
aatatatggagtggtctttgatgac

SEQ ID NO: 217369 - DNA, 25 bp, Artificial
  probe
  misc_feature (1)..(25): SEQ ID NO: 2317; WAN024FQV_at; Start 173; Stop 197
ctaaggttcaaaagccatgggcact

SEQ ID NO: 217370 - DNA, 25 bp, Artificial
  probe
  misc_feature (1)..(25): SEQ ID NO: 2317; WAN024FQV_at; Start 380; Stop 404
taatgcaaatgcttttagcaaaaga

SEQ ID NO: 217371 - DNA, 25 bp, Artificial
  probe
  misc_feature (1)..(25): SEQ ID NO: 2317; WAN024FQV_at; Start 52; Stop 76
ggcgtaatttattttgccttcatgt

SEQ ID NO: 217372 - DNA, 25 bp, Artificial
  probe
  misc_feature (1)..(25): SEQ ID NO: 2317; WAN024FQV_at; Start 483; Stop 507
catggctttagtagccttaggtgct

SEQ ID NO: 217373 - DNA, 25 bp, Artificial
  probe
  misc_feature (1)..(25): SEQ ID NO: 2317; WAN024FQV_at; Start 269; Stop 293
cacttatagtaatgataatagcaga

SEQ ID NO: 217374 - DNA, 25 bp, Artificial
  probe
  misc_feature (1)..(25): SEQ ID NO: 2317; WAN024FQV_at; Start 529; Stop 553
gcatatataggcaaggctctattga

SEQ ID NO: 217375 - DNA, 25 bp, Artificial
  probe
  misc_feature (1)..(25): SEQ ID NO: 2317; WAN024FQV_at; Start 287; Stop 311
tagcagaattaattagaaagattgg

SEQ ID NO: 217376 - DNA, 25 bp, Artificial
  probe
  misc_feature (1)..(25): SEQ ID NO: 2317; WAN024FQV_at; Start 497; Stop 521
ccttaggtgctttcttaggaggaat

SEQ ID NO: 217377 - DNA, 25 bp, Artificial
  probe
  misc_feature (1)..(25): SEQ ID NO: 2317; WAN024FQV_at; Start 362; Stop 386
catggatatgtagctctttaatgca

SEQ ID NO: 217378 - DNA, 25 bp, Artificial
  probe
  misc_feature (1)..(25): SEQ ID NO: 2317; WAN024FQV_at; Start 353; Stop 377
tcttcagcacatggatatgtagctc

SEQ ID NO: 217379 - DNA, 25 bp, Artificial
  probe
  misc_feature (1)..(25): SEQ ID NO: 2317; WAN024FQV_at; Start 128; Stop 152
cagtattagccatagttgcaggaac

SEQ ID NO: 217380 - DNA, 25 bp, Artificial
  probe
  misc_feature (1)..(25): SEQ ID NO: 2317; WAN024FQV_at; Start 474; Stop 498
ttatcctcacatggctttagtagcc

SEQ ID NO: 217381 - DNA, 25 bp, Artificial
  probe
  misc_feature (1)..(25): SEQ ID NO: 2317; WAN024FQV_at; Start 436; Stop 460
ggaaaagattatgttgatgtattag

SEQ ID NO: 217382 - DNA, 25 bp, Artificial
  probe
  misc_feature (1)..(25): SEQ ID NO: 2317; WAN024FQV_at; Start 343; Stop 367
tcttatgcaatcttcagcacatgga

SEQ ID NO: 217383 - DNA, 25 bp, Artificial
  probe
  misc_feature (1)..(25): SEQ ID NO: 2317; WAN024FQV_at; Start 368; Stop 392
tatgtagctctttaatgcaaatgct

SEQ ID NO: 217384 - DNA, 25 bp, Artificial
  probe
  misc_feature (1)..(25): SEQ ID NO: 2317; WAN024FQV_at; Start 184; Stop 208
aagccatgggcactatttatatttg

SEQ ID NO: 217385 - DNA, 25 bp, Artificial
  probe
  misc_feature (1)..(25): SEQ ID NO: 2317; WAN024FQV_at; Start 538; Stop 562
ggcaaggctctattgaaaaaacact

SEQ ID NO: 217386 - DNA, 25 bp, Artificial
  probe
  misc_feature (1)..(25): SEQ ID NO: 2317; WAN024FQV_at; Start 248; Stop 272
cctacgtagttgtggttttatcact

SEQ ID NO: 217387 - DNA, 25 bp, Artificial
  probe
  misc_feature (1)..(25): SEQ ID NO: 2317; WAN024FQV_at; Start 80; Stop 104
gagttggtatgatgggcttgattcc

SEQ ID NO: 217388 - DNA, 25 bp, Artificial
  probe
  misc_feature (1)..(25): SEQ ID NO: 2317; WAN024FQV_at; Start 327; Stop 351
taaatacaatatgctttcttatgca

SEQ ID NO: 217389 - DNA, 25 bp, Artificial
  probe
  misc_feature (1)..(25): SEQ ID NO: 2317; WAN024FQV_at; Start 509; Stop 533
tcttaggaggaattcttggagcata

SEQ ID NO: 217390 - DNA, 25 bp, Artificial
  probe
  misc_feature (1)..(25): SEQ ID NO: 2317; WAN024FQV_at; Start 522; Stop 546
tcttggagcatatataggcaaggct

SEQ ID NO: 217391 - DNA, 25 bp, Artificial
  probe
  misc_feature (1)..(25): SEQ ID NO: 2317; WAN024FQV_at; Start 192; Stop 216
ggcactatttatatttggtatgata

SEQ ID NO: 217392 - DNA, 25 bp, Artificial
  probe
  misc_feature (1)..(25): SEQ ID NO: 2317; WAN024FQV_at; Start 207; Stop 231
tggtatgatatcaccacttgtgatg

SEQ ID NO: 217393 - DNA, 25 bp, Artificial
  probe
  misc_feature (1)..(25): SEQ ID NO: 3124; WAN024FQW_at; Start 581; Stop 605
tagaaaatccaattgccaagaccag

SEQ ID NO: 217394 - DNA, 25 bp, Artificial
  probe
  misc_feature (1)..(25): SEQ ID NO: 3124; WAN024FQW_at; Start 447; Stop 471
caaaatggctatgagagtaagaggg

SEQ ID NO: 217395 - DNA, 25 bp, Artificial
  probe
  misc_feature (1)..(25): SEQ ID NO: 3124; WAN024FQW_at; Start 302; Stop 326
tggcagcaagctttatgataaagac

SEQ ID NO: 217396 - DNA, 25 bp, Artificial
  probe
  misc_feature (1)..(25): SEQ ID NO: 3124; WAN024FQW_at; Start 566; Stop 590
cagaaacaaaggcaatagaaaatcc

SEQ ID NO: 217397 - DNA, 25 bp, Artificial
  probe
  misc_feature (1)..(25): SEQ ID NO: 3124; WAN024FQW_at; Start 288; Stop 312
tattttaccatttatggcagcaagc

SEQ ID NO: 217398 - DNA, 25 bp, Artificial
  probe
  misc_feature (1)..(25): SEQ ID NO: 3124; WAN024FQW_at; Start 643; Stop 667
tatgttttagcggttgctggactta

SEQ ID NO: 217399 - DNA, 25 bp, Artificial
  probe
  misc_feature (1)..(25): SEQ ID NO: 3124; WAN024FQW_at; Start 19; Stop 43
aatgctccctttaatcccaatccga

SEQ ID NO: 217400 - DNA, 25 bp, Artificial
  probe
  misc_feature (1)..(25): SEQ ID NO: 3124; WAN024FQW_at; Start 613; Stop 637
cgcgtaaagatacagctaattgatt

SEQ ID NO: 217401 - DNA, 25 bp, Artificial
  probe
  misc_feature (1)..(25): SEQ ID NO: 3124; WAN024FQW_at; Start 317; Stop 341
tgataaagacctcggatgtaggcgc

SEQ ID NO: 217402 - DNA, 25 bp, Artificial
  probe
  misc_feature (1)..(25): SEQ ID NO: 3124; WAN024FQW_at; Start 245; Stop 269
tagttaagatgtttttgagtatacc

SEQ ID NO: 217403 - DNA, 25 bp, Artificial
  probe
  misc_feature (1)..(25): SEQ ID NO: 3124; WAN024FQW_at; Start 350; Stop 374
catcgatggataagcttaagatttc

SEQ ID NO: 217404 - DNA, 25 bp, Artificial
  probe
  misc_feature (1)..(25): SEQ ID NO: 3124; WAN024FQW_at; Start 231; Stop 255
tgaattaaaccctatagttaagatg

SEQ ID NO: 217405 - DNA, 25 bp, Artificial
  probe
  misc_feature (1)..(25): SEQ ID NO: 3124; WAN024FQW_at; Start 69; Stop 93
cacaggcttaactgttatgcatagc

SEQ ID NO: 217406 - DNA, 25 bp, Artificial
  probe
  misc_feature (1)..(25): SEQ ID NO: 3124; WAN024FQW_at; Start 479; Stop 503
ttaaaaacccagtcaaatatcttga

SEQ ID NO: 217407 - DNA, 25 bp, Artificial
  probe
  misc_feature (1)..(25): SEQ ID NO: 3124; WAN024FQW_at; Start 593; Stop 617
ttgccaagaccagatacattcgcgt

SEQ ID NO: 217408 - DNA, 25 bp, Artificial
  probe
  misc_feature (1)..(25): SEQ ID NO: 3124; WAN024FQW_at; Start 542; Stop 566
tatcagatgacattgcaaaagcggc

SEQ ID NO: 217409 - DNA, 25 bp, Artificial
  probe
  misc_feature (1)..(25): SEQ ID NO: 3124; WAN024FQW_at; Start 378; Stop 402
gaatgtatccatacctattgcggtt

SEQ ID NO: 217410 - DNA, 25 bp, Artificial
  probe
  misc_feature (1)..(25): SEQ ID NO: 3124; WAN024FQW_at; Start 557; Stop 581
caaaagcggcagaaacaaaggcaat

SEQ ID NO: 217411 - DNA, 25 bp, Artificial
  probe
  misc_feature (1)..(25): SEQ ID NO: 3124; WAN024FQW_at; Start 84; Stop 108
tatgcatagcataaacatccgtttt

SEQ ID NO: 217412 - DNA, 25 bp, Artificial
  probe
  misc_feature (1)..(25): SEQ ID NO: 3124; WAN024FQW_at; Start 324; Stop 348
gacctcggatgtaggcgcaataatt

SEQ ID NO: 217413 - DNA, 25 bp, Artificial
  probe
  misc_feature (1)..(25): SEQ ID NO: 3124; WAN024FQW_at; Start 56; Stop 80
tagtcgtatttatcacaggcttaac

SEQ ID NO: 217414 - DNA, 25 bp, Artificial
  probe
  misc_feature (1)..(25): SEQ ID NO: 3124; WAN024FQW_at; Start 109; Stop 133
gagctggcaattgtttgtcttattg

SEQ ID NO: 217415 - DNA, 25 bp, Artificial
  probe
  misc_feature (1)..(25): SEQ ID NO: 3124; WAN024FQW_at; Start 183; Stop 207
tatattgtgtgggatactttactcc

SEQ ID NO: 217416 - DNA, 25 bp, Artificial
  probe
  misc_feature (1)..(25): SEQ ID NO: 3124; WAN024FQW_at; Start 95; Stop 119
taaacatccgttttgagctggcaat

SEQ ID NO: 217417 - DNA, 25 bp, Artificial
  probe
  misc_feature (1)..(25): SEQ ID NO: 3124; WAN024FQW_at; Start 424; Stop 448
tttaaggaggagaagaaaaacatca

SEQ ID NO: 217418 - DNA, 25 bp, Artificial
  probe
  misc_feature (1)..(25): SEQ ID NO: 3124; WAN024FQW_at; Start 432; Stop 456
ggagaagaaaaacatcaaaatggct

SEQ ID NO: 217419 - DNA, 25 bp, Artificial
  probe
  misc_feature (1)..(25): SEQ ID NO: 3124; WAN024FQW_at; Start 605; Stop 629
gatacattcgcgtaaagatacagct

SEQ ID NO: 217420 - DNA, 25 bp, Artificial
  probe
  misc_feature (1)..(25): SEQ ID NO: 3124; WAN024FQW_at; Start 396; Stop 420
tgcggttatgtttagattcttccca

SEQ ID NO: 217421 - DNA, 25 bp, Artificial
  probe
  misc_feature (1)..(25): SEQ ID NO: 3124; WAN024FQW_at; Start 335; Stop 359
taggcgcaataatttcatcgatgga

SEQ ID NO: 217422 - DNA, 25 bp, Artificial
  probe
  misc_feature (1)..(25): SEQ ID NO: 3124; WAN024FQW_at; Start 363; Stop 387
gcttaagatttcaaagaatgtatcc

SEQ ID NO: 217423 - DNA, 25 bp, Artificial
  probe
  misc_feature (1)..(25): SEQ ID NO: 3124; WAN024FQW_at; Start 410; Stop 434
gattcttcccatcttttaaggagga

SEQ ID NO: 217424 - DNA, 25 bp, Artificial
  probe
  misc_feature (1)..(25): SEQ ID NO: 3124; WAN024FQW_at; Start 658; Stop 682
gctggacttattgtgggaggcttaa

SEQ ID NO: 217425 - DNA, 25 bp, Artificial
  probe
  misc_feature (1)..(25): SEQ ID NO: 3124; WAN024FQW_at; Start 673; Stop 697
ggaggcttaatatggttgaaataac

SEQ ID NO: 217426 - DNA, 25 bp, Artificial
  probe
  misc_feature (1)..(25): SEQ ID NO: 3124; WAN024FQW_at; Start 37; Stop 61
aatccgatctctaagatattagtcg

SEQ ID NO: 217427 - DNA, 25 bp, Artificial
  probe
  misc_feature (1)..(25): SEQ ID NO: 2640; WAN024FQX_at; Start 69; Stop 93
caatgccacaacaattaggatagat

SEQ ID NO: 217428 - DNA, 25 bp, Artificial
  probe
  misc_feature (1)..(25): SEQ ID NO: 2640; WAN024FQX_at; Start 60; Stop 84
tatgcacatcaatgccacaacaatt

SEQ ID NO: 217429 - DNA, 25 bp, Artificial
  probe
  misc_feature (1)..(25): SEQ ID NO: 2640; WAN024FQX_at; Start 64; Stop 88
cacatcaatgccacaacaattagga

SEQ ID NO: 217430 - DNA, 25 bp, Artificial
  probe
  misc_feature (1)..(25): SEQ ID NO: 2640; WAN024FQX_at; Start 22; Stop 46
cttgtcggtgatggtaacaaccgct

SEQ ID NO: 217431 - DNA, 25 bp, Artificial
  probe
  misc_feature (1)..(25): SEQ ID NO: 2640; WAN024FQX_at; Start 51; Stop 75
caaaggttttatgcacatcaatgcc

SEQ ID NO: 217432 - DNA, 25 bp, Artificial
  probe
  misc_feature (1)..(25): SEQ ID NO: 2640; WAN024FQX_at; Start 48; Stop 72
caacaaaggttttatgcacatcaat

SEQ ID NO: 217433 - DNA, 25 bp, Artificial
  probe
  misc_feature (1)..(25): SEQ ID NO: 2640; WAN024FQX_at; Start 14; Stop 38
agtccttgcttgtcggtgatggtaa

SEQ ID NO: 217434 - DNA, 25 bp, Artificial
  probe
  misc_feature (1)..(25): SEQ ID NO: 2640; WAN024FQX_at; Start 24; Stop 48
tgtcggtgatggtaacaaccgctac

SEQ ID NO: 217435 - DNA, 25 bp, Artificial
  probe
  misc_feature (1)..(25): SEQ ID NO: 2640; WAN024FQX_at; Start 9; Stop 33
ttgtgagtccttgcttgtcggtgat

SEQ ID NO: 217436 - DNA, 25 bp, Artificial
  probe
  misc_feature (1)..(25): SEQ ID NO: 2640; WAN024FQX_at; Start 17; Stop 41
ccttgcttgtcggtgatggtaacaa

SEQ ID NO: 217437 - DNA, 25 bp, Artificial
  probe
  misc_feature (1)..(25): SEQ ID NO: 2640; WAN024FQX_at; Start 66; Stop 90
catcaatgccacaacaattaggata

SEQ ID NO: 217438 - DNA, 25 bp, Artificial
  probe
  misc_feature (1)..(25): SEQ ID NO: 2640; WAN024FQX_at; Start 57; Stop 81
ttttatgcacatcaatgccacaaca

SEQ ID NO: 217439 - DNA, 25 bp, Artificial
  probe
  misc_feature (1)..(25): SEQ ID NO: 2640; WAN024FQX_at; Start 19; Stop 43
ttgcttgtcggtgatggtaacaacc

SEQ ID NO: 217440 - DNA, 25 bp, Artificial
  probe
  misc_feature (1)..(25): SEQ ID NO: 2640; WAN024FQX_at; Start 15; Stop 39
gtccttgcttgtcggtgatggtaac

SEQ ID NO: 217441 - DNA, 25 bp, Artificial
  probe
  misc_feature (1)..(25): SEQ ID NO: 2640; WAN024FQX_at; Start 55; Stop 79
ggttttatgcacatcaatgccacaa

SEQ ID NO: 217442 - DNA, 25 bp, Artificial
  probe
  misc_feature (1)..(25): SEQ ID NO: 2640; WAN024FQX_at; Start 7; Stop 31
gcttgtgagtccttgcttgtcggtg

SEQ ID NO: 217443 - DNA, 25 bp, Artificial
  probe
  misc_feature (1)..(25): SEQ ID NO: 2640; WAN024FQX_at; Start 30; Stop 54
tgatggtaacaaccgctacaacaaa

SEQ ID NO: 217444 - DNA, 25 bp, Artificial
  probe
  misc_feature (1)..(25): SEQ ID NO: 2640; WAN024FQX_at; Start 72; Stop 96
tgccacaacaattaggatagataat

SEQ ID NO: 217445 - DNA, 25 bp, Artificial
  probe
  misc_feature (1)..(25): SEQ ID NO: 2640; WAN024FQX_at; Start 46; Stop 70
tacaacaaaggttttatgcacatca

SEQ ID NO: 217446 - DNA, 25 bp, Artificial
  probe
  misc_feature (1)..(25): SEQ ID NO: 2640; WAN024FQX_at; Start 5; Stop 29
tagcttgtgagtccttgcttgtcgg

SEQ ID NO: 217447 - DNA, 25 bp, Artificial
  probe
  misc_feature (1)..(25): SEQ ID NO: 2640; WAN024FQX_at; Start 43; Stop 67
cgctacaacaaaggttttatgcaca

SEQ ID NO: 217448 - DNA, 25 bp, Artificial
  probe
  misc_feature (1)..(25): SEQ ID NO: 2640; WAN024FQX_at; Start 21; Stop 45
gcttgtcggtgatggtaacaaccgc

SEQ ID NO: 217449 - DNA, 25 bp, Artificial
  probe
  misc_feature (1)..(25): SEQ ID NO: 2640; WAN024FQX_at; Start 8; Stop 32
cttgtgagtccttgcttgtcggtga

SEQ ID NO: 217450 - DNA, 25 bp, Artificial
  probe
  misc_feature (1)..(25): SEQ ID NO: 2640; WAN024FQX_at; Start 3; Stop 27
ggtagcttgtgagtccttgcttgtc

SEQ ID NO: 217451 - DNA, 25 bp, Artificial
  probe
  misc_feature (1)..(25): SEQ ID NO: 2640; WAN024FQX_at; Start 68; Stop 92
tcaatgccacaacaattaggataga

SEQ ID NO: 217452 - DNA, 25 bp, Artificial
  probe
  misc_feature (1)..(25): SEQ ID NO: 2640; WAN024FQX_at; Start 26; Stop 50
tcggtgatggtaacaaccgctacaa

SEQ ID NO: 217453 - DNA, 25 bp, Artificial
  probe
  misc_feature (1)..(25): SEQ ID NO: 2640; WAN024FQX_at; Start 39; Stop 63
caaccgctacaacaaaggttttatg

SEQ ID NO: 217454 - DNA, 25 bp, Artificial
  probe
  misc_feature (1)..(25): SEQ ID NO: 2640; WAN024FQX_at; Start 74; Stop 98
ccacaacaattaggatagataattt

SEQ ID NO: 217455 - DNA, 25 bp, Artificial
  probe
  misc_feature (1)..(25): SEQ ID NO: 2640; WAN024FQX_at; Start 28; Stop 52
ggtgatggtaacaaccgctacaaca

SEQ ID NO: 217456 - DNA, 25 bp, Artificial
  probe
  misc_feature (1)..(25): SEQ ID NO: 2640; WAN024FQX_at; Start 63; Stop 87
gcacatcaatgccacaacaattagg

SEQ ID NO: 217457 - DNA, 25 bp, Artificial
  probe
  misc_feature (1)..(25): SEQ ID NO: 2640; WAN024FQX_at; Start 1; Stop 25
atggtagcttgtgagtccttgcttg

SEQ ID NO: 217458 - DNA, 25 bp, Artificial
  probe
  misc_feature (1)..(25): SEQ ID NO: 2640; WAN024FQX_at; Start 12; Stop 36
tgagtccttgcttgtcggtgatggt

SEQ ID NO: 217459 - DNA, 25 bp, Artificial
  probe
  misc_feature (1)..(25): SEQ ID NO: 2640; WAN024FQX_at; Start 53; Stop 77
aaggttttatgcacatcaatgccac

SEQ ID NO: 217460 - DNA, 25 bp, Artificial
  probe
  misc_feature (1)..(25): SEQ ID NO: 2640; WAN024FQX_at; Start 41; Stop 65
accgctacaacaaaggttttatgca

SEQ ID NO: 217461 - DNA, 25 bp, Artificial
  probe
  misc_feature (1)..(25): SEQ ID NO: 5784; WAN024FQY_at; Start 26; Stop 50
tctcatctaagatcaatatcggcgc

SEQ ID NO: 217462 - DNA, 25 bp, Artificial
  probe
  misc_feature (1)..(25): SEQ ID NO: 5784; WAN024FQY_at; Start 47; Stop 71
gcgcatcttttaagaaggctctggc

SEQ ID NO: 217463 - DNA, 25 bp, Artificial
  probe
  misc_feature (1)..(25): SEQ ID NO: 5784; WAN024FQY_at; Start 194; Stop 218
taacctcttcgtcacttgcatcttg

SEQ ID NO: 217464 - DNA, 25 bp, Artificial
  probe
  misc_feature (1)..(25): SEQ ID NO: 5784; WAN024FQY_at; Start 91; Stop 115
tctcctcctgatagctcagctccgt

SEQ ID NO: 217465 - DNA, 25 bp, Artificial
  probe
  misc_feature (1)..(25): SEQ ID NO: 5784; WAN024FQY_at; Start 183; Stop 207
tgctgctcttttaacctcttcgtca

SEQ ID NO: 217466 - DNA, 25 bp, Artificial
  probe
  misc_feature (1)..(25): SEQ ID NO: 5784; WAN024FQY_at; Start 174; Stop 198
tgcaagttttgctgctcttttaacc

SEQ ID NO: 217467 - DNA, 25 bp, Artificial
  probe
  misc_feature (1)..(25): SEQ ID NO: 5784; WAN024FQY_at; Start 180; Stop 204
ttttgctgctcttttaacctcttcg

SEQ ID NO: 217468 - DNA, 25 bp, Artificial
  probe
  misc_feature (1)..(25): SEQ ID NO: 5784; WAN024FQY_at; Start 53; Stop 77
cttttaagaaggctctggctattga

SEQ ID NO: 217469 - DNA, 25 bp, Artificial
  probe
  misc_feature (1)..(25): SEQ ID NO: 5784; WAN024FQY_at; Start 187; Stop 211
gctcttttaacctcttcgtcacttg

SEQ ID NO: 217470 - DNA, 25 bp, Artificial
  probe
  misc_feature (1)..(25): SEQ ID NO: 5784; WAN024FQY_at; Start 8; Stop 32
catcaaggcttgctgttatctcatc

SEQ ID NO: 217471 - DNA, 25 bp, Artificial
  probe
  misc_feature (1)..(25): SEQ ID NO: 5784; WAN024FQY_at; Start 76; Stop 100
gataatctttgtctttctcctcctg

SEQ ID NO: 217472 - DNA, 25 bp, Artificial
  probe
  misc_feature (1)..(25): SEQ ID NO: 5784; WAN024FQY_at; Start 49; Stop 73
gcatcttttaagaaggctctggcta

SEQ ID NO: 217473 - DNA, 25 bp, Artificial
  probe
  misc_feature (1)..(25): SEQ ID NO: 5784; WAN024FQY_at; Start 31; Stop 55
tctaagatcaatatcggcgcatctt

SEQ ID NO: 217474 - DNA, 25 bp, Artificial
  probe
  misc_feature (1)..(25): SEQ ID NO: 5784; WAN024FQY_at; Start 228; Stop 252
tctaatattttccataacgctttga

SEQ ID NO: 217475 - DNA, 25 bp, Artificial
  probe
  misc_feature (1)..(25): SEQ ID NO: 5784; WAN024FQY_at; Start 39; Stop 63
caatatcggcgcatcttttaagaag

SEQ ID NO: 217476 - DNA, 25 bp, Artificial
  probe
  misc_feature (1)..(25): SEQ ID NO: 5784; WAN024FQY_at; Start 42; Stop 66
tatcggcgcatcttttaagaaggct

SEQ ID NO: 217477 - DNA, 25 bp, Artificial
  probe
  misc_feature (1)..(25): SEQ ID NO: 5784; WAN024FQY_at; Start 223; Stop 247
ccgattctaatattttccataacgc

SEQ ID NO: 217478 - DNA, 25 bp, Artificial
  probe
  misc_feature (1)..(25): SEQ ID NO: 5784; WAN024FQY_at; Start 167; Stop 191
tgcaatttgcaagttttgctgctct

SEQ ID NO: 217479 - DNA, 25 bp, Artificial
  probe
  misc_feature (1)..(25): SEQ ID NO: 5784; WAN024FQY_at; Start 118; Stop 142
tcaccaataactgtatcgaaacctt

SEQ ID NO: 217480 - DNA, 25 bp, Artificial
  probe
  misc_feature (1)..(25): SEQ ID NO: 5784; WAN024FQY_at; Start 29; Stop 53
catctaagatcaatatcggcgcatc

SEQ ID NO: 217481 - DNA, 25 bp, Artificial
  probe
  misc_feature (1)..(25): SEQ ID NO: 5784; WAN024FQY_at; Start 57; Stop 81
taagaaggctctggctattgataat

SEQ ID NO: 217482 - DNA, 25 bp, Artificial
  probe
  misc_feature (1)..(25): SEQ ID NO: 5784; WAN024FQY_at; Start 1; Stop 25
ttgttaacatcaaggcttgctgtta

SEQ ID NO: 217483 - DNA, 25 bp, Artificial
  probe
  misc_feature (1)..(25): SEQ ID NO: 5784; WAN024FQY_at; Start 87; Stop 111
tctttctcctcctgatagctcagct

SEQ ID NO: 217484 - DNA, 25 bp, Artificial
  probe
  misc_feature (1)..(25): SEQ ID NO: 5784; WAN024FQY_at; Start 164; Stop 188
ctgtgcaatttgcaagttttgctgc

SEQ ID NO: 217485 - DNA, 25 bp, Artificial
  probe
  misc_feature (1)..(25): SEQ ID NO: 5784; WAN024FQY_at; Start 154; Stop 178
tctataaaatctgtgcaatttgcaa

SEQ ID NO: 217486 - DNA, 25 bp, Artificial
  probe
  misc_feature (1)..(25): SEQ ID NO: 5784; WAN024FQY_at; Start 44; Stop 68
tcggcgcatcttttaagaaggctct

SEQ ID NO: 217487 - DNA, 25 bp, Artificial
  probe
  misc_feature (1)..(25): SEQ ID NO: 5784; WAN024FQY_at; Start 14; Stop 38
ggcttgctgttatctcatctaagat

SEQ ID NO: 217488 - DNA, 25 bp, Artificial
  probe
  misc_feature (1)..(25): SEQ ID NO: 5784; WAN024FQY_at; Start 63; Stop 87
ggctctggctattgataatctttgt

SEQ ID NO: 217489 - DNA, 25 bp, Artificial
  probe
  misc_feature (1)..(25): SEQ ID NO: 5784; WAN024FQY_at; Start 11; Stop 35
caaggcttgctgttatctcatctaa

SEQ ID NO: 217490 - DNA, 25 bp, Artificial
  probe
  misc_feature (1)..(25): SEQ ID NO: 5784; WAN024FQY_at; Start 85; Stop 109
tgtctttctcctcctgatagctcag

SEQ ID NO: 217491 - DNA, 25 bp, Artificial
  probe
  misc_feature (1)..(25): SEQ ID NO: 5784; WAN024FQY_at; Start 125; Stop 149
taactgtatcgaaacctttatccat

SEQ ID NO: 217492 - DNA, 25 bp, Artificial
  probe
  misc_feature (1)..(25): SEQ ID NO: 5784; WAN024FQY_at; Start 60; Stop 84
gaaggctctggctattgataatctt

SEQ ID NO: 217493 - DNA, 25 bp, Artificial
  probe
  misc_feature (1)..(25): SEQ ID NO: 5784; WAN024FQY_at; Start 128; Stop 152
ctgtatcgaaacctttatccatttt

SEQ ID NO: 217494 - DNA, 25 bp, Artificial
  probe
  misc_feature (1)..(25): SEQ ID NO: 5784; WAN024FQY_at; Start 197; Stop 221
cctcttcgtcacttgcatcttgctt

SEQ ID NO: 217495 - DNA, 25 bp, Artificial
  probe
  misc_feature (1)..(25): SEQ ID NO: 5704; WAN024FQZ_at; Start 18; Stop 42
tataatttttccactatccatgaca

SEQ ID NO: 217496 - DNA, 25 bp, Artificial
  probe
  misc_feature (1)..(25): SEQ ID NO: 5704; WAN024FQZ_at; Start 66; Stop 90
tgtagatagcctgtgtgcaatcatg

SEQ ID NO: 217497 - DNA, 25 bp, Artificial
  probe
  misc_feature (1)..(25): SEQ ID NO: 5704; WAN024FQZ_at; Start 61; Stop 85
ttaattgtagatagcctgtgtgcaa

SEQ ID NO: 217498 - DNA, 25 bp, Artificial
  probe
  misc_feature (1)..(25): SEQ ID NO: 5704; WAN024FQZ_at; Start 169; Stop 193
gcttcatccataataataattttgg

SEQ ID NO: 217499 - DNA, 25 bp, Artificial
  probe
  misc_feature (1)..(25): SEQ ID NO: 5704; WAN024FQZ_at; Start 68; Stop 92
tagatagcctgtgtgcaatcatgat

SEQ ID NO: 217500 - DNA, 25 bp, Artificial
  probe
  misc_feature (1)..(25): SEQ ID NO: 5704; WAN024FQZ_at; Start 39; Stop 63
gacaataatttcatcaaggtcttta

SEQ ID NO: 217501 - DNA, 25 bp, Artificial
  probe
  misc_feature (1)..(25): SEQ ID NO: 5704; WAN024FQZ_at; Start 101; Stop 125
tatccttcataagatttttaaaagc

SEQ ID NO: 217502 - DNA, 25 bp, Artificial
  probe
  misc_feature (1)..(25): SEQ ID NO: 5704; WAN024FQZ_at; Start 176; Stop 200
ccataataataattttggaatcctt

SEQ ID NO: 217503 - DNA, 25 bp, Artificial
  probe
  misc_feature (1)..(25): SEQ ID NO: 5704; WAN024FQZ_at; Start 59; Stop 83
ctttaattgtagatagcctgtgtgc

SEQ ID NO: 217504 - DNA, 25 bp, Artificial
  probe
  misc_feature (1)..(25): SEQ ID NO: 5704; WAN024FQZ_at; Start 191; Stop 215
tggaatcctttaaaattgctctagc

SEQ ID NO: 217505 - DNA, 25 bp, Artificial
  probe
  misc_feature (1)..(25): SEQ ID NO: 5704; WAN024FQZ_at; Start 160; Stop 184
gatgctgatgcttcatccataataa

SEQ ID NO: 217506 - DNA, 25 bp, Artificial
  probe
  misc_feature (1)..(25): SEQ ID NO: 5704; WAN024FQZ_at; Start 52; Stop 76
tcaaggtctttaattgtagatagcc

SEQ ID NO: 217507 - DNA, 25 bp, Artificial
  probe
  misc_feature (1)..(25): SEQ ID NO: 5704; WAN024FQZ_at; Start 143; Stop 167
cgttatctgggtcaatagatgctga

SEQ ID NO: 217508 - DNA, 25 bp, Artificial
  probe
  misc_feature (1)..(25): SEQ ID NO: 5704; WAN024FQZ_at; Start 36; Stop 60
catgacaataatttcatcaaggtct

SEQ ID NO: 217509 - DNA, 25 bp, Artificial
  probe
  misc_feature (1)..(25): SEQ ID NO: 5704; WAN024FQZ_at; Start 129; Stop 153
ttgcaattcaaactcgttatctggg

SEQ ID NO: 217510 - DNA, 25 bp, Artificial
  probe
  misc_feature (1)..(25): SEQ ID NO: 5704; WAN024FQZ_at; Start 151; Stop 175
gggtcaatagatgctgatgcttcat

SEQ ID NO: 217511 - DNA, 25 bp, Artificial
  probe
  misc_feature (1)..(25): SEQ ID NO: 5704; WAN024FQZ_at; Start 90; Stop 114
gataactgttttatccttcataaga

SEQ ID NO: 217512 - DNA, 25 bp, Artificial
  probe
  misc_feature (1)..(25): SEQ ID NO: 5704; WAN024FQZ_at; Start 120; Stop 144
aaaagctttttgcaattcaaactcg

SEQ ID NO: 217513 - DNA, 25 bp, Artificial
  probe
  misc_feature (1)..(25): SEQ ID NO: 5704; WAN024FQZ_at; Start 77; Stop 101
tgtgtgcaatcatgataactgtttt

SEQ ID NO: 217514 - DNA, 25 bp, Artificial
  probe
  misc_feature (1)..(25): SEQ ID NO: 5704; WAN024FQZ_at; Start 136; Stop 160
tcaaactcgttatctgggtcaatag

SEQ ID NO: 217515 - DNA, 25 bp, Artificial
  probe
  misc_feature (1)..(25): SEQ ID NO: 5704; WAN024FQZ_at; Start 132; Stop 156
caattcaaactcgttatctgggtca

SEQ ID NO: 217516 - DNA, 25 bp, Artificial
  probe
  misc_feature (1)..(25): SEQ ID NO: 5704; WAN024FQZ_at; Start 72; Stop 96
tagcctgtgtgcaatcatgataact

SEQ ID NO: 217517 - DNA, 25 bp, Artificial
  probe
  misc_feature (1)..(25): SEQ ID NO: 5704; WAN024FQZ_at; Start 74; Stop 98
gcctgtgtgcaatcatgataactgt

SEQ ID NO: 217518 - DNA, 25 bp, Artificial
  probe
  misc_feature (1)..(25): SEQ ID NO: 5704; WAN024FQZ_at; Start 193; Stop 217
gaatcctttaaaattgctctagcaa

SEQ ID NO: 217519 - DNA, 25 bp, Artificial
  probe
  misc_feature (1)..(25): SEQ ID NO: 5704; WAN024FQZ_at; Start 148; Stop 172
tctgggtcaatagatgctgatgctt

SEQ ID NO: 217520 - DNA, 25 bp, Artificial
  probe
  misc_feature (1)..(25): SEQ ID NO: 5704; WAN024FQZ_at; Start 219; Stop 243
tgcaattctttgtttttctccaccg

SEQ ID NO: 217521 - DNA, 25 bp, Artificial
  probe
  misc_feature (1)..(25): SEQ ID NO: 5704; WAN024FQZ_at; Start 146; Stop 170
tatctgggtcaatagatgctgatgc

SEQ ID NO: 217522 - DNA, 25 bp, Artificial
  probe
  misc_feature (1)..(25): SEQ ID NO: 5704; WAN024FQZ_at; Start 207; Stop 231
tgctctagcaattgcaattctttgt

SEQ ID NO: 217523 - DNA, 25 bp, Artificial
  probe
  misc_feature (1)..(25): SEQ ID NO: 5704; WAN024FQZ_at; Start 70; Stop 94
gatagcctgtgtgcaatcatgataa

SEQ ID NO: 217524 - DNA, 25 bp, Artificial
  probe
  misc_feature (1)..(25): SEQ ID NO: 5704; WAN024FQZ_at; Start 27; Stop 51
tccactatccatgacaataatttca

SEQ ID NO: 217525 - DNA, 25 bp, Artificial
  probe
  misc_feature (1)..(25): SEQ ID NO: 5704; WAN024FQZ_at; Start 137; Stop 161
caaactcgttatctgggtcaataga

SEQ ID NO: 217526 - DNA, 25 bp, Artificial
  probe
  misc_feature (1)..(25): SEQ ID NO: 5704; WAN024FQZ_at; Start 2; Stop 26
tgtcagaccctctttctataatttt

SEQ ID NO: 217527 - DNA, 25 bp, Artificial
  probe
  misc_feature (1)..(25): SEQ ID NO: 5704; WAN024FQZ_at; Start 155; Stop 179
caatagatgctgatgcttcatccat

SEQ ID NO: 217528 - DNA, 25 bp, Artificial
  probe
  misc_feature (1)..(25): SEQ ID NO: 5704; WAN024FQZ_at; Start 163; Stop 187
gctgatgcttcatccataataataa

SEQ ID NO: 217529 - DNA, 25 bp, Artificial
  probe
  misc_feature (1)..(25): SEQ ID NO: 2111; WAN024FR2_at; Start 192; Stop 216
tgttattacactaacaagtggagcg

SEQ ID NO: 217530 - DNA, 25 bp, Artificial
  probe
  misc_feature (1)..(25): SEQ ID NO: 2111; WAN024FR2_at; Start 161; Stop 185
tatccggtgcagagagtatagcatt

SEQ ID NO: 217531 - DNA, 25 bp, Artificial
  probe
  misc_feature (1)..(25): SEQ ID NO: 2111; WAN024FR2_at; Start 405; Stop 429
gattcccgatagttctcaggcaata

SEQ ID NO: 217532 - DNA, 25 bp, Artificial
  probe
  misc_feature (1)..(25): SEQ ID NO: 2111; WAN024FR2_at; Start 1691; Stop 1715
ggtataagagcctgcaagagatgtt

SEQ ID NO: 217533 - DNA, 25 bp, Artificial
  probe
  misc_feature (1)..(25): SEQ ID NO: 2111; WAN024FR2_at; Start 922; Stop 946
tatgcagtagatactttagaggcgc

SEQ ID NO: 217534 - DNA, 25 bp, Artificial
  probe
  misc_feature (1)..(25): SEQ ID NO: 2111; WAN024FR2_at; Start 1394; Stop 1418
caatcataggctcaaaaggtgttta

SEQ ID NO: 217535 - DNA, 25 bp, Artificial
  probe
  misc_feature (1)..(25): SEQ ID NO: 2111; WAN024FR2_at; Start 800; Stop 824
ctagcttagctagcgcaaaggtgat

SEQ ID NO: 217536 - DNA, 25 bp, Artificial
  probe
  misc_feature (1)..(25): SEQ ID NO: 2111; WAN024FR2_at; Start 378; Stop 402
acaaactcatcaggtggtagcacac

SEQ ID NO: 217537 - DNA, 25 bp, Artificial
  probe
  misc_feature (1)..(25): SEQ ID NO: 2111; WAN024FR2_at; Start 320; Stop 344
ggttctttgacttaaatccatctgg

SEQ ID NO: 217538 - DNA, 25 bp, Artificial
  probe
  misc_feature (1)..(25): SEQ ID NO: 2111; WAN024FR2_at; Start 1336; Stop 1360
gccttaaaattagcaggatgcgatt

SEQ ID NO: 217539 - DNA, 25 bp, Artificial
  probe
  misc_feature (1)..(25): SEQ ID NO: 2111; WAN024FR2_at; Start 1185; Stop 1209
gataggcgggatagcaataagtgaa

SEQ ID NO: 217540 - DNA, 25 bp, Artificial
  probe
  misc_feature (1)..(25): SEQ ID NO: 2111; WAN024FR2_at; Start 421; Stop 445
caggcaataatcacacccgtacttg

SEQ ID NO: 217541 - DNA, 25 bp, Artificial
  probe
  misc_feature (1)..(25): SEQ ID NO: 2111; WAN024FR2_at; Start 1170; Stop 1194
taaaggaagcataaagataggcggg

SEQ ID NO: 217542 - DNA, 25 bp, Artificial
  probe
  misc_feature (1)..(25): SEQ ID NO: 2111; WAN024FR2_at; Start 1452; Stop 1476
tgctagagcaattttaaaggattcc

SEQ ID NO: 217543 - DNA, 25 bp, Artificial
  probe
  misc_feature (1)..(25): SEQ ID NO: 2111; WAN024FR2_at; Start 392; Stop 416
tggtagcacacatgattcccgatag

SEQ ID NO: 217544 - DNA, 25 bp, Artificial
  probe
  misc_feature (1)..(25): SEQ ID NO: 2111; WAN024FR2_at; Start 1495; Stop 1519
gaagcatcagcatctattgacccag

SEQ ID NO: 217545 - DNA, 25 bp, Artificial
  probe
  misc_feature (1)..(25): SEQ ID NO: 2111; WAN024FR2_at; Start 1297; Stop 1321
ttagctaataaagatgcgacgaaag

SEQ ID NO: 217546 - DNA, 25 bp, Artificial
  probe
  misc_feature (1)..(25): SEQ ID NO: 2111; WAN024FR2_at; Start 1509; Stop 1533
tattgacccagataacgagtttgaa

SEQ ID NO: 217547 - DNA, 25 bp, Artificial
  probe
  misc_feature (1)..(25): SEQ ID NO: 2111; WAN024FR2_at; Start 1316; Stop 1340
cgaaagatgacgttatgagagcctt

SEQ ID NO: 217548 - DNA, 25 bp, Artificial
  probe
  misc_feature (1)..(25): SEQ ID NO: 2111; WAN024FR2_at; Start 893; Stop 917
ggtactccatgtatatttctcaagg

SEQ ID NO: 217549 - DNA, 25 bp, Artificial
  probe
  misc_feature (1)..(25): SEQ ID NO: 2111; WAN024FR2_at; Start 1585; Stop 1609
gcacacaggctatctacaattaaag

SEQ ID NO: 217550 - DNA, 25 bp, Artificial
  probe
  misc_feature (1)..(25): SEQ ID NO: 2111; WAN024FR2_at; Start 1425; Stop 1449
cggtggagaaaaacaaagaattgca

SEQ ID NO: 217551 - DNA, 25 bp, Artificial
  probe
  misc_feature (1)..(25): SEQ ID NO: 2111; WAN024FR2_at; Start 568; Stop 592
gaatccctatctaaactaagtgctg

SEQ ID NO: 217552 - DNA, 25 bp, Artificial
  probe
  misc_feature (1)..(25): SEQ ID NO: 2111; WAN024FR2_at; Start 595; Stop 619
actgttgagtacgtgagaggaatgc

SEQ ID NO: 217553 - DNA, 25 bp, Artificial
  probe
  misc_feature (1)..(25): SEQ ID NO: 2111; WAN024FR2_at; Start 530; Stop 554
caatgatgggcgagcaagaatttat

SEQ ID NO: 217554 - DNA, 25 bp, Artificial
  probe
  misc_feature (1)..(25): SEQ ID NO: 2111; WAN024FR2_at; Start 1364; Stop 1388
tattagacaaattcccagaaagaga

SEQ ID NO: 217555 - DNA, 25 bp, Artificial
  probe
  misc_feature (1)..(25): SEQ ID NO: 2111; WAN024FR2_at; Start 1570; Stop 1594
acagttatcatgattgcacacaggc

SEQ ID NO: 217556 - DNA, 25 bp, Artificial
  probe
  misc_feature (1)..(25): SEQ ID NO: 2111; WAN024FR2_at; Start 875; Stop 899
cattcatgagaatgatgtggtactc

SEQ ID NO: 217557 - DNA, 25 bp, Artificial
  probe
  misc_feature (1)..(25): SEQ ID NO: 2111; WAN024FR2_at; Start 938; Stop 962
tagaggcgctttacgaagatatgca

SEQ ID NO: 217558 - DNA, 25 bp, Artificial
  probe
  misc_feature (1)..(25): SEQ ID NO: 2111; WAN024FR2_at; Start 1099; Stop 1123
gcacttgtcggttcatctggatcag

SEQ ID NO: 217559 - DNA, 25 bp, Artificial
  probe
  misc_feature (1)..(25): SEQ ID NO: 2111; WAN024FR2_at; Start 1213; Stop 1237
tctgacgaagccttaattaaagcca

SEQ ID NO: 217560 - DNA, 25 bp, Artificial
  probe
  misc_feature (1)..(25): SEQ ID NO: 2111; WAN024FR2_at; Start 1084; Stop 1108
gaaggaaagtcctacgcacttgtcg

SEQ ID NO: 217561 - DNA, 25 bp, Artificial
  probe
  misc_feature (1)..(25): SEQ ID NO: 2111; WAN024FR2_at; Start 1116; Stop 1140
tggatcaggcaaatcaacagtagca

SEQ ID NO: 217562 - DNA, 25 bp, Artificial
  probe
  misc_feature (1)..(25): SEQ ID NO: 2111; WAN024FR2_at; Start 437; Stop 461
ccgtacttgtacttgcacttggctt

SEQ ID NO: 217563 - DNA, 25 bp, Artificial
  probe
  misc_feature (1)..(25): SEQ ID NO: 4370; WAN024FR3_at; Start 787; Stop 811
gctgttgtgatatttgtcggcgtaa

SEQ ID NO: 217564 - DNA, 25 bp, Artificial
  probe
  misc_feature (1)..(25): SEQ ID NO: 4370; WAN024FR3_at; Start 44; Stop 68
aaagatttgctcttacagatggagg

SEQ ID NO: 217565 - DNA, 25 bp, Artificial
  probe
  misc_feature (1)..(25): SEQ ID NO: 4370; WAN024FR3_at; Start 435; Stop 459
gggcggcatggtactgtttttccca

SEQ ID NO: 217566 - DNA, 25 bp, Artificial
  probe
  misc_feature (1)..(25): SEQ ID NO: 4370; WAN024FR3_at; Start 1441; Stop 1465
caaagattatcaatagccagagcct

SEQ ID NO: 217567 - DNA, 25 bp, Artificial
  probe
  misc_feature (1)..(25): SEQ ID NO: 4370; WAN024FR3_at; Start 1173; Stop 1197
caagggacaaatcttaatcgatggc

SEQ ID NO: 217568 - DNA, 25 bp, Artificial
  probe
  misc_feature (1)..(25): SEQ ID NO: 4370; WAN024FR3_at; Start 1635; Stop 1659
tcaaaacggaagagtagaaagcgaa

SEQ ID NO: 217569 - DNA, 25 bp, Artificial
  probe
  misc_feature (1)..(25): SEQ ID NO: 4370; WAN024FR3_at; Start 1093; Stop 1117
gaggtcactgctttggtaggtgcaa

SEQ ID NO: 217570 - DNA, 25 bp, Artificial
  probe
  misc_feature (1)..(25): SEQ ID NO: 4370; WAN024FR3_at; Start 1492; Stop 1516
ttagatgagataacagcaagccttg

SEQ ID NO: 217571 - DNA, 25 bp, Artificial
  probe
  misc_feature (1)..(25): SEQ ID NO: 4370; WAN024FR3_at; Start 1339; Stop 1363
gcagcaaaacttgcaaattgcacag

SEQ ID NO: 217572 - DNA, 25 bp, Artificial
  probe
  misc_feature (1)..(25): SEQ ID NO: 4370; WAN024FR3_at; Start 1620; Stop 1644
caagatagtagttcttcaaaacgga

SEQ ID NO: 217573 - DNA, 25 bp, Artificial
  probe
  misc_feature (1)..(25): SEQ ID NO: 4370; WAN024FR3_at; Start 418; Stop 442
cactcaataccaaaggtgggcggca

SEQ ID NO: 217574 - DNA, 25 bp, Artificial
  probe
  misc_feature (1)..(25): SEQ ID NO: 4370; WAN024FR3_at; Start 1308; Stop 1332
gcaagatgcaagtgacgaagaggtt

SEQ ID NO: 217575 - DNA, 25 bp, Artificial
  probe
  misc_feature (1)..(25): SEQ ID NO: 4370; WAN024FR3_at; Start 976; Stop 1000
caagaaggcgatgactatagcttaa

SEQ ID NO: 217576 - DNA, 25 bp, Artificial
  probe
  misc_feature (1)..(25): SEQ ID NO: 4370; WAN024FR3_at; Start 399; Stop 423
catagagcatgcaatgagccactca

SEQ ID NO: 217577 - DNA, 25 bp, Artificial
  probe
  misc_feature (1)..(25): SEQ ID NO: 4370; WAN024FR3_at; Start 1507; Stop 1531
gcaagccttgatgttaacaacgaga

SEQ ID NO: 217578 - DNA, 25 bp, Artificial
  probe
  misc_feature (1)..(25): SEQ ID NO: 4370; WAN024FR3_at; Start 1077; Stop 1101
taaagctaagcagggagaggtcact

SEQ ID NO: 217579 - DNA, 25 bp, Artificial
  probe
  misc_feature (1)..(25): SEQ ID NO: 4370; WAN024FR3_at; Start 302; Stop 326
taaggacagcggagaatttatcaaa

SEQ ID NO: 217580 - DNA, 25 bp, Artificial
  probe
  misc_feature (1)..(25): SEQ ID NO: 4370; WAN024FR3_at; Start 1119; Stop 1143
tggctgcggtaaaacaactatcttg

SEQ ID NO: 217581 - DNA, 25 bp, Artificial
  probe
  misc_feature (1)..(25): SEQ ID NO: 4370; WAN024FR3_at; Start 1651; Stop 1675
gaaagcgaaggtaagcatgaagagc

SEQ ID NO: 217582 - DNA, 25 bp, Artificial
  probe
  misc_feature (1)..(25): SEQ ID NO: 4370; WAN024FR3_at; Start 890; Stop 914
tagatgcatctaaagagggcttgat

SEQ ID NO: 217583 - DNA, 25 bp, Artificial
  probe
  misc_feature (1)..(25): SEQ ID NO: 4370; WAN024FR3_at; Start 288; Stop 312
tgcagatttaagaataaggacagcg

SEQ ID NO: 217584 - DNA, 25 bp, Artificial
  probe
  misc_feature (1)..(25): SEQ ID NO: 4370; WAN024FR3_at; Start 1418; Stop 1442
ctgagctatcaggaggagaaagaca

SEQ ID NO: 217585 - DNA, 25 bp, Artificial
  probe
  misc_feature (1)..(25): SEQ ID NO: 4370; WAN024FR3_at; Start 74; Stop 98
gaaatttaagtaaagcaacactggc

SEQ ID NO: 217586 - DNA, 25 bp, Artificial
  probe
  misc_feature (1)..(25): SEQ ID NO: 4370; WAN024FR3_at; Start 478; Stop 502
ctagcgggcaatgtcaagatgggtt

SEQ ID NO: 217587 - DNA, 25 bp, Artificial
  probe
  misc_feature (1)..(25): SEQ ID NO: 4370; WAN024FR3_at; Start 1474; Stop 1498
gatgcgccgatattgatcttagatg

SEQ ID NO: 217588 - DNA, 25 bp, Artificial
  probe
  misc_feature (1)..(25): SEQ ID NO: 4370; WAN024FR3_at; Start 364; Stop 388
gacatttcacaaacaatcatggctg

SEQ ID NO: 217589 - DNA, 25 bp, Artificial
  probe
  misc_feature (1)..(25): SEQ ID NO: 4370; WAN024FR3_at; Start 1323; Stop 1347
cgaagaggttaaaagagcagcaaaa

SEQ ID NO: 217590 - DNA, 25 bp, Artificial
  probe
  misc_feature (1)..(25): SEQ ID NO: 4370; WAN024FR3_at; Start 462; Stop 486
aatatctgtaatgatgctagcgggc

SEQ ID NO: 217591 - DNA, 25 bp, Artificial
  probe
  misc_feature (1)..(25): SEQ ID NO: 4370; WAN024FR3_at; Start 1458; Stop 1482
cagagccttcttaaaagatgcgccg

SEQ ID NO: 217592 - DNA, 25 bp, Artificial
  probe
  misc_feature (1)..(25): SEQ ID NO: 4370; WAN024FR3_at; Start 169; Stop 193
gaaaatatgggcaaaagcaatggct

SEQ ID NO: 217593 - DNA, 25 bp, Artificial
  probe
  misc_feature (1)..(25): SEQ ID NO: 4370; WAN024FR3_at; Start 384; Stop 408
ggctgatattgaaggcatagagcat

SEQ ID NO: 217594 - DNA, 25 bp, Artificial
  probe
  misc_feature (1)..(25): SEQ ID NO: 4370; WAN024FR3_at; Start 1019; Stop 1043
taaaagatgttgagtttgcctacaa

SEQ ID NO: 217595 - DNA, 25 bp, Artificial
  probe
  misc_feature (1)..(25): SEQ ID NO: 4370; WAN024FR3_at; Start 112; Stop 136
tattgtataaacatgcttcctgcca

SEQ ID NO: 217596 - DNA, 25 bp, Artificial
  probe
  misc_feature (1)..(25): SEQ ID NO: 4370; WAN024FR3_at; Start 961; Stop 985
caaaatcaagatttacaagaaggcg

SEQ ID NO: 217597 - DNA, 25 bp, Artificial
  probe
  misc_feature (1)..(25): SEQ ID NO: 3975; WAN024FR4_at; Start 171; Stop 195
tatagaggatcctcaaactactttt

SEQ ID NO: 217598 - DNA, 25 bp, Artificial
  probe
  misc_feature (1)..(25): SEQ ID NO: 3975; WAN024FR4_at; Start 376; Stop 400
gggtcagtaatcgataatgagggaa

SEQ ID NO: 217599 - DNA, 25 bp, Artificial
  probe
  misc_feature (1)..(25): SEQ ID NO: 3975; WAN024FR4_at; Start 283; Stop 307
ggtattattaatccagatatagtca

SEQ ID NO: 217600 - DNA, 25 bp, Artificial
  probe
  misc_feature (1)..(25): SEQ ID NO: 3975; WAN024FR4_at; Start 751; Stop 775
cgagattgggtgaaatttcagtcac

SEQ ID NO: 217601 - DNA, 25 bp, Artificial
  probe
  misc_feature (1)..(25): SEQ ID NO: 3975; WAN024FR4_at; Start 350; Stop 374
aaaatagtgactttgctatggttgg

SEQ ID NO: 217602 - DNA, 25 bp, Artificial
  probe
  misc_feature (1)..(25): SEQ ID NO: 3975; WAN024FR4_at; Start 521; Stop 545
cagcgattgtagattgtgtagcagg

SEQ ID NO: 217603 - DNA, 25 bp, Artificial
  probe
  misc_feature (1)..(25): SEQ ID NO: 3975; WAN024FR4_at; Start 894; Stop 918
gaatctgaaaggaaactctagtgaa

SEQ ID NO: 217604 - DNA, 25 bp, Artificial
  probe
  misc_feature (1)..(25): SEQ ID NO: 3975; WAN024FR4_at; Start 627; Stop 651
cattcttggaatgaaactgagagaa

SEQ ID NO: 217605 - DNA, 25 bp, Artificial
  probe
  misc_feature (1)..(25): SEQ ID NO: 3975; WAN024FR4_at; Start 732; Stop 756
cttgagtaaaaaatgtaaacgagat

SEQ ID NO: 217606 - DNA, 25 bp, Artificial
  probe
  misc_feature (1)..(25): SEQ ID NO: 3975; WAN024FR4_at; Start 849; Stop 873
gtttcaaattatgataggacactta

SEQ ID NO: 217607 - DNA, 25 bp, Artificial
  probe
  misc_feature (1)..(25): SEQ ID NO: 3975; WAN024FR4_at; Start 660; Stop 684
ccaatcaattatattaaccaaacag

SEQ ID NO: 217608 - DNA, 25 bp, Artificial
  probe
  misc_feature (1)..(25): SEQ ID NO: 3975; WAN024FR4_at; Start 363; Stop 387
tgctatggttggtgggtcagtaatc

SEQ ID NO: 217609 - DNA, 25 bp, Artificial
  probe
  misc_feature (1)..(25): SEQ ID NO: 3975; WAN024FR4_at; Start 387; Stop 411
cgataatgagggaaattatagacta

SEQ ID NO: 217610 - DNA, 25 bp, Artificial
  probe
  misc_feature (1)..(25): SEQ ID NO: 3975; WAN024FR4_at; Start 141; Stop 165
tacggacaattcaatagaactactc

SEQ ID NO: 217611 - DNA, 25 bp, Artificial
  probe
  misc_feature (1)..(25): SEQ ID NO: 3975; WAN024FR4_at; Start 506; Stop 530
tgtataatgatgaaacagcgattgt

SEQ ID NO: 217612 - DNA, 25 bp, Artificial
  probe
  misc_feature (1)..(25): SEQ ID NO: 3975; WAN024FR4_at; Start 698; Stop 722
tgcatgattttgaaaaggataaggt

SEQ ID NO: 217613 - DNA, 25 bp, Artificial
  probe
  misc_feature (1)..(25): SEQ ID NO: 3975; WAN024FR4_at; Start 160; Stop 184
ctactcaagaatatagaggatcctc

SEQ ID NO: 217614 - DNA, 25 bp, Artificial
  probe
  misc_feature (1)..(25): SEQ ID NO: 3975; WAN024FR4_at; Start 768; Stop 792
tcagtcacgtaagtattttaccgaa

SEQ ID NO: 217615 - DNA, 25 bp, Artificial
  probe
  misc_feature (1)..(25): SEQ ID NO: 3975; WAN024FR4_at; Start 680; Stop 704
aacagttttactatcatttgcatga

SEQ ID NO: 217616 - DNA, 25 bp, Artificial
  probe
  misc_feature (1)..(25): SEQ ID NO: 3975; WAN024FR4_at; Start 539; Stop 563
tagcaggttgcttttttatgataaa

SEQ ID NO: 217617 - DNA, 25 bp, Artificial
  probe
  misc_feature (1)..(25): SEQ ID NO: 3975; WAN024FR4_at; Start 203; Stop 227
ctgatgagaatagaggatatggagc

SEQ ID NO: 217618 - DNA, 25 bp, Artificial
  probe
  misc_feature (1)..(25): SEQ ID NO: 3975; WAN024FR4_at; Start 611; Stop 635
tatataatgaagagaacattcttgg

SEQ ID NO: 217619 - DNA, 25 bp, Artificial
  probe
  misc_feature (1)..(25): SEQ ID NO: 3975; WAN024FR4_at; Start 474; Stop 498
taatcgacataaagttccatattgt

SEQ ID NO: 217620 - DNA, 25 bp, Artificial
  probe
  misc_feature (1)..(25): SEQ ID NO: 3975; WAN024FR4_at; Start 188; Stop 212
ctacttttttaatttctgatgagaa

SEQ ID NO: 217621 - DNA, 25 bp, Artificial
  probe
  misc_feature (1)..(25): SEQ ID NO: 3975; WAN024FR4_at; Start 234; Stop 258
taatattgggattcactttgcagaa

SEQ ID NO: 217622 - DNA, 25 bp, Artificial
  probe
  misc_feature (1)..(25): SEQ ID NO: 3975; WAN024FR4_at; Start 565; Stop 589
gctgatgtaatgaaggaaatcggtt

SEQ ID NO: 217623 - DNA, 25 bp, Artificial
  probe
  misc_feature (1)..(25): SEQ ID NO: 3975; WAN024FR4_at; Start 85; Stop 109
gaaattctacgttcttttaatatga

SEQ ID NO: 217624 - DNA, 25 bp, Artificial
  probe
  misc_feature (1)..(25): SEQ ID NO: 3975; WAN024FR4_at; Start 310; Stop 334
cccaatcaggaagtgataatttcaa

SEQ ID NO: 217625 - DNA, 25 bp, Artificial
  probe
  misc_feature (1)..(25): SEQ ID NO: 3975; WAN024FR4_at; Start 57; Stop 81
tagtgctaaagatacactacgttgt

SEQ ID NO: 217626 - DNA, 25 bp, Artificial
  probe
  misc_feature (1)..(25): SEQ ID NO: 3975; WAN024FR4_at; Start 717; Stop 741
taaggtagaattatccttgagtaaa

SEQ ID NO: 217627 - DNA, 25 bp, Artificial
  probe
  misc_feature (1)..(25): SEQ ID NO: 3975; WAN024FR4_at; Start 71; Stop 95
cactacgttgtttagaaattctacg

SEQ ID NO: 217628 - DNA, 25 bp, Artificial
  probe
  misc_feature (1)..(25): SEQ ID NO: 3975; WAN024FR4_at; Start 220; Stop 244
tatggagcaggtaataatattggga

SEQ ID NO: 217629 - DNA, 25 bp, Artificial
  probe
  misc_feature (1)..(25): SEQ ID NO: 3975; WAN024FR4_at; Start 125; Stop 149
tagtggataataattctacggacaa

SEQ ID NO: 217630 - DNA, 25 bp, Artificial
  probe
  misc_feature (1)..(25): SEQ ID NO: 3975; WAN024FR4_at; Start 298; Stop 322
gatatagtcattcccaatcaggaag

SEQ ID NO: 217631 - DNA, 25 bp, Artificial
  probe
  misc_feature (1)..(25): SEQ ID NO: 4884; WAN024FR5_at; Start 538; Stop 562
aactctgtagctatggattggtgta

SEQ ID NO: 217632 - DNA, 25 bp, Artificial
  probe
  misc_feature (1)..(25): SEQ ID NO: 4884; WAN024FR5_at; Start 982; Stop 1006
ggagctagtccagaattaataacag

SEQ ID NO: 217633 - DNA, 25 bp, Artificial
  probe
  misc_feature (1)..(25): SEQ ID NO: 4884; WAN024FR5_at; Start 991; Stop 1015
ccagaattaataacagaagaagttg

SEQ ID NO: 217634 - DNA, 25 bp, Artificial
  probe
  misc_feature (1)..(25): SEQ ID NO: 4884; WAN024FR5_at; Start 767; Stop 791
tctatggaagtggaaaatctaagta

SEQ ID NO: 217635 - DNA, 25 bp, Artificial
  probe
  misc_feature (1)..(25): SEQ ID NO: 4884; WAN024FR5_at; Start 88; Stop 112
gagaattatcctgagtatgaactta

SEQ ID NO: 217636 - DNA, 25 bp, Artificial
  probe
  misc_feature (1)..(25): SEQ ID NO: 4884; WAN024FR5_at; Start 750; Stop 774
gcaatatactttgactttctatgga

SEQ ID NO: 217637 - DNA, 25 bp, Artificial
  probe
  misc_feature (1)..(25): SEQ ID NO: 4884; WAN024FR5_at; Start 24; Stop 48
tatgaataatacagatcatggtggg

SEQ ID NO: 217638 - DNA, 25 bp, Artificial
  probe
  misc_feature (1)..(25): SEQ ID NO: 4884; WAN024FR5_at; Start 728; Stop 752
aattaccaaaagaaatacaaatgca

SEQ ID NO: 217639 - DNA, 25 bp, Artificial
  probe
  misc_feature (1)..(25): SEQ ID NO: 4884; WAN024FR5_at; Start 1143; Stop 1167
ccaacatacaagagagattataaat

SEQ ID NO: 217640 - DNA, 25 bp, Artificial
  probe
  misc_feature (1)..(25): SEQ ID NO: 4884; WAN024FR5_at; Start 335; Stop 359
taaatagaatcgatataggagcaat

SEQ ID NO: 217641 - DNA, 25 bp, Artificial
  probe
  misc_feature (1)..(25): SEQ ID NO: 4884; WAN024FR5_at; Start 398; Stop 422
taagagagcatttggatgtatggta

SEQ ID NO: 217642 - DNA, 25 bp, Artificial
  probe
  misc_feature (1)..(25): SEQ ID NO: 4884; WAN024FR5_at; Start 344; Stop 368
tcgatataggagcaatattagccaa

SEQ ID NO: 217643 - DNA, 25 bp, Artificial
  probe
  misc_feature (1)..(25): SEQ ID NO: 4884; WAN024FR5_at; Start 1006; Stop 1030
gaagaagttggatttttaatcgaca

SEQ ID NO: 217644 - DNA, 25 bp, Artificial
  probe
  misc_feature (1)..(25): SEQ ID NO: 4884; WAN024FR5_at; Start 696; Stop 720
aggtcaggagttgtttttaagctat

SEQ ID NO: 217645 - DNA, 25 bp, Artificial
  probe
  misc_feature (1)..(25): SEQ ID NO: 4884; WAN024FR5_at; Start 217; Stop 241
cctgcaatactatggacgattttat

SEQ ID NO: 217646 - DNA, 25 bp, Artificial
  probe
  misc_feature (1)..(25): SEQ ID NO: 4884; WAN024FR5_at; Start 58; Stop 82
gcattattagatttagttactcaga

SEQ ID NO: 217647 - DNA, 25 bp, Artificial
  probe
  misc_feature (1)..(25): SEQ ID NO: 4884; WAN024FR5_at; Start 359; Stop 383
tattagccaaaaagcacagtatacc

SEQ ID NO: 217648 - DNA, 25 bp, Artificial
  probe
  misc_feature (1)..(25): SEQ ID NO: 4884; WAN024FR5_at; Start 936; Stop 960
tgttgaatatttagcgaacggtctt

SEQ ID NO: 217649 - DNA, 25 bp, Artificial
  probe
  misc_feature (1)..(25): SEQ ID NO: 4884; WAN024FR5_at; Start 1078; Stop 1102
gaaaagaataagataagacaaatgg

SEQ ID NO: 217650 - DNA, 25 bp, Artificial
  probe
  misc_feature (1)..(25): SEQ ID NO: 4884; WAN024FR5_at; Start 568; Stop 592
ggactatctcagtcatctattgtta

SEQ ID NO: 217651 - DNA, 25 bp, Artificial
  probe
  misc_feature (1)..(25): SEQ ID NO: 4884; WAN024FR5_at; Start 1022; Stop 1046
taatcgacaaggataatcaggatga

SEQ ID NO: 217652 - DNA, 25 bp, Artificial
  probe
  misc_feature (1)..(25): SEQ ID NO: 4884; WAN024FR5_at; Start 684; Stop 708
cgatattaaaaaaggtcaggagttg

SEQ ID NO: 217653 - DNA, 25 bp, Artificial
  probe
  misc_feature (1)..(25): SEQ ID NO: 4884; WAN024FR5_at; Start 260; Stop 284
tcggaaatcgaatggctctaaaaaa

SEQ ID NO: 217654 - DNA, 25 bp, Artificial
  probe
  misc_feature (1)..(25): SEQ ID NO: 4884; WAN024FR5_at; Start 661; Stop 685
aatattgtatttgttggtggttacg

SEQ ID NO: 217655 - DNA, 25 bp, Artificial
  probe
  misc_feature (1)..(25): SEQ ID NO: 4884; WAN024FR5_at; Start 368; Stop 392
aaaagcacagtataccccatttatg

SEQ ID NO: 217656 - DNA, 25 bp, Artificial
  probe
  misc_feature (1)..(25): SEQ ID NO: 4884; WAN024FR5_at; Start 100; Stop 124
gagtatgaacttattgttgtaacag

SEQ ID NO: 217657 - DNA, 25 bp, Artificial
  probe
  misc_feature (1)..(25): SEQ ID NO: 4884; WAN024FR5_at; Start 498; Stop 522
ttatatgtgttctttttcaacgaaa

SEQ ID NO: 217658 - DNA, 25 bp, Artificial
  probe
  misc_feature (1)..(25): SEQ ID NO: 4884; WAN024FR5_at; Start 245; Stop 269
aaattcgtcattatatcggaaatcg

SEQ ID NO: 217659 - DNA, 25 bp, Artificial
  probe
  misc_feature (1)..(25): SEQ ID NO: 4884; WAN024FR5_at; Start 581; Stop 605
catctattgttaaagtttacgacgg

SEQ ID NO: 217660 - DNA, 25 bp, Artificial
  probe
  misc_feature (1)..(25): SEQ ID NO: 4884; WAN024FR5_at; Start 859; Stop 883
gataatcttacagaattactaccaa

SEQ ID NO: 217661 - DNA, 25 bp, Artificial
  probe
  misc_feature (1)..(25): SEQ ID NO: 4884; WAN024FR5_at; Start 798; Stop 822
gaaattacaaaagatgtctcaacat

SEQ ID NO: 217662 - DNA, 25 bp, Artificial
  probe
  misc_feature (1)..(25): SEQ ID NO: 4884; WAN024FR5_at; Start 553; Stop 577
gattggtgtaaaaaaggactatctc

SEQ ID NO: 217663 - DNA, 25 bp, Artificial
  probe
  misc_feature (1)..(25): SEQ ID NO: 4884; WAN024FR5_at; Start 817; Stop 841
caacatctatgttctgatcaagtta

SEQ ID NO: 217664 - DNA, 25 bp, Artificial
  probe
  misc_feature (1)..(25): SEQ ID NO: 4884; WAN024FR5_at; Start 523; Stop 547
tatattgcaatctctaactctgtag

SEQ ID NO: 217665 - DNA, 25 bp, Artificial
  probe
  misc_feature (1)..(25): SEQ ID NO: 5358; WAN024FR6_at; Start 795; Stop 819
taaggatttgcgtatagttatctat

SEQ ID NO: 217666 - DNA, 25 bp, Artificial
  probe
  misc_feature (1)..(25): SEQ ID NO: 5358; WAN024FR6_at; Start 529; Stop 553
gatgaacgacttttcttggatgaaa

SEQ ID NO: 217667 - DNA, 25 bp, Artificial
  probe
  misc_feature (1)..(25): SEQ ID NO: 5358; WAN024FR6_at; Start 474; Stop 498
cgcaataaatagttgtacagctgtc

SEQ ID NO: 217668 - DNA, 25 bp, Artificial
  probe
  misc_feature (1)..(25): SEQ ID NO: 5358; WAN024FR6_at; Start 689; Stop 713
gaattcgggatttgatagtggctta

SEQ ID NO: 217669 - DNA, 25 bp, Artificial
  probe
  misc_feature (1)..(25): SEQ ID NO: 5358; WAN024FR6_at; Start 18; Stop 42
gcccaatttatatgcagtagtagtt

SEQ ID NO: 217670 - DNA, 25 bp, Artificial
  probe
  misc_feature (1)..(25): SEQ ID NO: 5358; WAN024FR6_at; Start 362; Stop 386
tgcctattattcaagatacccatgg

SEQ ID NO: 217671 - DNA, 25 bp, Artificial
  probe
  misc_feature (1)..(25): SEQ ID NO: 5358; WAN024FR6_at; Start 726; Stop 750
tgggatttttatgggtcttgtagct

SEQ ID NO: 217672 - DNA, 25 bp, Artificial
  probe
  misc_feature (1)..(25): SEQ ID NO: 5358; WAN024FR6_at; Start 704; Stop 728
tagtggcttataaaattagaggtgg

SEQ ID NO: 217673 - DNA, 25 bp, Artificial
  probe
  misc_feature (1)..(25): SEQ ID NO: 5358; WAN024FR6_at; Start 809; Stop 833
tagttatctatagtttcacatctgc

SEQ ID NO: 217674 - DNA, 25 bp, Artificial
  probe
  misc_feature (1)..(25): SEQ ID NO: 5358; WAN024FR6_at; Start 31; Stop 55
gcagtagtagttttatacaatagtt

SEQ ID NO: 217675 - DNA, 25 bp, Artificial
  probe
  misc_feature (1)..(25): SEQ ID NO: 5358; WAN024FR6_at; Start 653; Stop 677
taaattttgatactgcatggagtag

SEQ ID NO: 217676 - DNA, 25 bp, Artificial
  probe
  misc_feature (1)..(25): SEQ ID NO: 5358; WAN024FR6_at; Start 514; Stop 538
gaagaatatagatatgatgaacgac

SEQ ID NO: 217677 - DNA, 25 bp, Artificial
  probe
  misc_feature (1)..(25): SEQ ID NO: 5358; WAN024FR6_at; Start 493; Stop 517
gctgtcaatttagacatttatgaag

SEQ ID NO: 217678 - DNA, 25 bp, Artificial
  probe
  misc_feature (1)..(25): SEQ ID NO: 5358; WAN024FR6_at; Start 223; Stop 247
tctaaagcttataataaagtcctag

SEQ ID NO: 217679 - DNA, 25 bp, Artificial
  probe
  misc_feature (1)..(25): SEQ ID NO: 5358; WAN024FR6_at; Start 2; Stop 26
tgcgaagagttagtgtgcccaattt

SEQ ID NO: 217680 - DNA, 25 bp, Artificial
  probe
  misc_feature (1)..(25): SEQ ID NO: 5358; WAN024FR6_at; Start 782; Stop 806
tatacttgaaaattaaggatttgcg

SEQ ID NO: 217681 - DNA, 25 bp, Artificial
  probe
  misc_feature (1)..(25): SEQ ID NO: 5358; WAN024FR6_at; Start 755; Stop 779
taaaaagtatcctacttggactcca

SEQ ID NO: 217682 - DNA, 25 bp, Artificial
  probe
  misc_feature (1)..(25): SEQ ID NO: 5358; WAN024FR6_at; Start 331; Stop 355
tatgcatcaagaggtaattacgaca

SEQ ID NO: 217683 - DNA, 25 bp, Artificial
  probe
  misc_feature (1)..(25): SEQ ID NO: 5358; WAN024FR6_at; Start 188; Stop 212
taacattggtgaatatgaatggaaa

SEQ ID NO: 217684 - DNA, 25 bp, Artificial
  probe
  misc_feature (1)..(25): SEQ ID NO: 5358; WAN024FR6_at; Start 569; Stop 593
tctatgaccacagaaataaaaattt

SEQ ID NO: 217685 - DNA, 25 bp, Artificial
  probe
  misc_feature (1)..(25): SEQ ID NO: 5358; WAN024FR6_at; Start 341; Stop 365
gaggtaattacgacattattttgcc

SEQ ID NO: 217686 - DNA, 25 bp, Artificial
  probe
  misc_feature (1)..(25): SEQ ID NO: 5358; WAN024FR6_at; Start 263; Stop 287
gaataggttatgtggtttggttaga

SEQ ID NO: 217687 - DNA, 25 bp, Artificial
  probe
  misc_feature (1)..(25): SEQ ID NO: 5358; WAN024FR6_at; Start 320; Stop 344
caaaattattgtatgcatcaagagg

SEQ ID NO: 217688 - DNA, 25 bp, Artificial
  probe
  misc_feature (1)..(25): SEQ ID NO: 5358; WAN024FR6_at; Start 735; Stop 759
tatgggtcttgtagctgttttaaaa

SEQ ID NO: 217689 - DNA, 25 bp, Artificial
  probe
  misc_feature (1)..(25): SEQ ID NO: 5358; WAN024FR6_at; Start 120; Stop 144
tgtagtagacaatagtgataggaaa

SEQ ID NO: 217690 - DNA, 25 bp, Artificial
  probe
  misc_feature (1)..(25): SEQ ID NO: 5358; WAN024FR6_at; Start 483; Stop 507
tagttgtacagctgtcaatttagac

SEQ ID NO: 217691 - DNA, 25 bp, Artificial
  probe
  misc_feature (1)..(25): SEQ ID NO: 5358; WAN024FR6_at; Start 399; Stop 423
tccaaattctcgtggtttactttca

SEQ ID NO: 217692 - DNA, 25 bp, Artificial
  probe
  misc_feature (1)..(25): SEQ ID NO: 5358; WAN024FR6_at; Start 556; Stop 580
gatcattcgtttttctatgaccaca

SEQ ID NO: 217693 - DNA, 25 bp, Artificial
  probe
  misc_feature (1)..(25): SEQ ID NO: 5358; WAN024FR6_at; Start 371; Stop 395
ttcaagatacccatggtaaaattgt

SEQ ID NO: 217694 - DNA, 25 bp, Artificial
  probe
  misc_feature (1)..(25): SEQ ID NO: 5358; WAN024FR6_at; Start 48; Stop 72
caatagtttattatcagaagcaaaa

SEQ ID NO: 217695 - DNA, 25 bp, Artificial
  probe
  misc_feature (1)..(25): SEQ ID NO: 5358; WAN024FR6_at; Start 665; Stop 689
ctgcatggagtagattgaaaattag

SEQ ID NO: 217696 - DNA, 25 bp, Artificial
  probe
  misc_feature (1)..(25): SEQ ID NO: 5358; WAN024FR6_at; Start 132; Stop 156
tagtgataggaaagaaatacagtta

SEQ ID NO: 217697 - DNA, 25 bp, Artificial
  probe
  misc_feature (1)..(25): SEQ ID NO: 5358; WAN024FR6_at; Start 281; Stop 305
ggttagatgatgatactgagattag

SEQ ID NO: 217698 - DNA, 25 bp, Artificial
  probe
  misc_feature (1)..(25): SEQ ID NO: 5358; WAN024FR6_at; Start 172; Stop 196
tccactgaaaataatataacattgg

SEQ ID NO: 217699 - DNA, 25 bp, Artificial
  probe
  misc_feature (1)..(25): SEQ ID NO: 3915; WAN024FR7_at; Start 1086; Stop 1110
tggtttaggagaggcggaaatttca

SEQ ID NO: 217700 - DNA, 25 bp, Artificial
  probe
  misc_feature (1)..(25): SEQ ID NO: 3915; WAN024FR7_at; Start 761; Stop 785
acgtagctgctttgtcagagttaaa

SEQ ID NO: 217701 - DNA, 25 bp, Artificial
  probe
  misc_feature (1)..(25): SEQ ID NO: 3915; WAN024FR7_at; Start 1150; Stop 1174
gaatacacccattactatctgttca

SEQ ID NO: 217702 - DNA, 25 bp, Artificial
  probe
  misc_feature (1)..(25): SEQ ID NO: 3915; WAN024FR7_at; Start 429; Stop 453
tattgcgcttattgtatggtccctc

SEQ ID NO: 217703 - DNA, 25 bp, Artificial
  probe
  misc_feature (1)..(25): SEQ ID NO: 3915; WAN024FR7_at; Start 568; Stop 592
tttacctcgttccaatattttgtgc

SEQ ID NO: 217704 - DNA, 25 bp, Artificial
  probe
  misc_feature (1)..(25): SEQ ID NO: 3915; WAN024FR7_at; Start 1049; Stop 1073
ttttttatggagatgtttggcagac

SEQ ID NO: 217705 - DNA, 25 bp, Artificial
  probe
  misc_feature (1)..(25): SEQ ID NO: 3915; WAN024FR7_at; Start 973; Stop 997
ggctattcaacaggaaactattcaa

SEQ ID NO: 217706 - DNA, 25 bp, Artificial
  probe
  misc_feature (1)..(25): SEQ ID NO: 3915; WAN024FR7_at; Start 1211; Stop 1235
gattgttcctattcatgtttatgcc

SEQ ID NO: 217707 - DNA, 25 bp, Artificial
  probe
  misc_feature (1)..(25): SEQ ID NO: 3915; WAN024FR7_at; Start 1332; Stop 1356
gtataataatacaatgaggtcagag

SEQ ID NO: 217708 - DNA, 25 bp, Artificial
  probe
  misc_feature (1)..(25): SEQ ID NO: 3915; WAN024FR7_at; Start 1250; Stop 1274
taaagatgatttttgagcgagggac

SEQ ID NO: 217709 - DNA, 25 bp, Artificial
  probe
  misc_feature (1)..(25): SEQ ID NO: 3915; WAN024FR7_at; Start 1263; Stop 1287
tgagcgagggacatctaaatatgat

SEQ ID NO: 217710 - DNA, 25 bp, Artificial
  probe
  misc_feature (1)..(25): SEQ ID NO: 3915; WAN024FR7_at; Start 1233; Stop 1257
gccaatttaccttgctttaaagatg

SEQ ID NO: 217711 - DNA, 25 bp, Artificial
  probe
  misc_feature (1)..(25): SEQ ID NO: 3915; WAN024FR7_at; Start 746; Stop 770
tcgtttcaactctatacgtagctgc

SEQ ID NO: 217712 - DNA, 25 bp, Artificial
  probe
  misc_feature (1)..(25): SEQ ID NO: 3915; WAN024FR7_at; Start 638; Stop 662
tgggaatttctaatacctacttgca

SEQ ID NO: 217713 - DNA, 25 bp, Artificial
  probe
  misc_feature (1)..(25): SEQ ID NO: 3915; WAN024FR7_at; Start 522; Stop 546
tctaggtgaatacttaataaagcta

SEQ ID NO: 217714 - DNA, 25 bp, Artificial
  probe
  misc_feature (1)..(25): SEQ ID NO: 3915; WAN024FR7_at; Start 313; Stop 337
aaagattccaaactattacagtggg

SEQ ID NO: 217715 - DNA, 25 bp, Artificial
  probe
  misc_feature (1)..(25): SEQ ID NO: 3915; WAN024FR7_at; Start 443; Stop 467
tatggtccctccgtaattatataag

SEQ ID NO: 217716 - DNA, 25 bp, Artificial
  probe
  misc_feature (1)..(25): SEQ ID NO: 3915; WAN024FR7_at; Start 134; Stop 158
taagtatagctctaacagtattacc

SEQ ID NO: 217717 - DNA, 25 bp, Artificial
  probe
  misc_feature (1)..(25): SEQ ID NO: 3915; WAN024FR7_at; Start 961; Stop 985
gaaaaattatttggctattcaacag

SEQ ID NO: 217718 - DNA, 25 bp, Artificial
  probe
  misc_feature (1)..(25): SEQ ID NO: 3915; WAN024FR7_at; Start 873; Stop 897
tatcacttgcatagtggtggtcgct

SEQ ID NO: 217719 - DNA, 25 bp, Artificial
  probe
  misc_feature (1)..(25): SEQ ID NO: 3915; WAN024FR7_at; Start 119; Stop 143
tttcaatgggagtaataagtatagc

SEQ ID NO: 217720 - DNA, 25 bp, Artificial
  probe
  misc_feature (1)..(25): SEQ ID NO: 3915; WAN024FR7_at; Start 1195; Stop 1219
gagaatggatttataggattgttcc

SEQ ID NO: 217721 - DNA, 25 bp, Artificial
  probe
  misc_feature (1)..(25): SEQ ID NO: 3915; WAN024FR7_at; Start 105; Stop 129
gttgactgcaagtgtttcaatggga

SEQ ID NO: 217722 - DNA, 25 bp, Artificial
  probe
  misc_feature (1)..(25): SEQ ID NO: 3915; WAN024FR7_at; Start 1343; Stop 1367
caatgaggtcagagatatattatct

SEQ ID NO: 217723 - DNA, 25 bp, Artificial
  probe
  misc_feature (1)..(25): SEQ ID NO: 3915; WAN024FR7_at; Start 1060; Stop 1084
gatgtttggcagactttatttggta

SEQ ID NO: 217724 - DNA, 25 bp, Artificial
  probe
  misc_feature (1)..(25): SEQ ID NO: 3915; WAN024FR7_at; Start 994; Stop 1018
tcaactagttctgattttggtcggt

SEQ ID NO: 217725 - DNA, 25 bp, Artificial
  probe
  misc_feature (1)..(25): SEQ ID NO: 3915; WAN024FR7_at; Start 1011; Stop 1035
tggtcggttaagttcaattgttcaa

SEQ ID NO: 217726 - DNA, 25 bp, Artificial
  probe
  misc_feature (1)..(25): SEQ ID NO: 3915; WAN024FR7_at; Start 328; Stop 352
ttacagtgggaattacggaatatta

SEQ ID NO: 217727 - DNA, 25 bp, Artificial
  probe
  misc_feature (1)..(25): SEQ ID NO: 3915; WAN024FR7_at; Start 257; Stop 281
taggaatttcctttatctgtgatat

SEQ ID NO: 217728 - DNA, 25 bp, Artificial
  probe
  misc_feature (1)..(25): SEQ ID NO: 3915; WAN024FR7_at; Start 1392; Stop 1416
agttgcaatcaatagaggaaatggg

SEQ ID NO: 217729 - DNA, 25 bp, Artificial
  probe
  misc_feature (1)..(25): SEQ ID NO: 3915; WAN024FR7_at; Start 598; Stop 622
aaatcaggagattttcttggaggaa

SEQ ID NO: 217730 - DNA, 25 bp, Artificial
  probe
  misc_feature (1)..(25): SEQ ID NO: 3915; WAN024FR7_at; Start 90; Stop 114
gatgtgcgtagtacagttgactgca

SEQ ID NO: 217731 - DNA, 25 bp, Artificial
  probe
  misc_feature (1)..(25): SEQ ID NO: 3915; WAN024FR7_at; Start 1076; Stop 1100
tatttggtattggtttaggagaggc

SEQ ID NO: 217732 - DNA, 25 bp, Artificial
  probe
  misc_feature (1)..(25): SEQ ID NO: 3915; WAN024FR7_at; Start 888; Stop 912
ggtggtcgctttggcaatctcaatt

SEQ ID NO: 217733 - DNA, 25 bp, Artificial
  probe
  misc_feature (1)..(25): SEQ ID NO: 2595; WAN024FR8_at; Start 356; Stop 380
aatctgtacaaattatagctacggc

SEQ ID NO: 217734 - DNA, 25 bp, Artificial
  probe
  misc_feature (1)..(25): SEQ ID NO: 2595; WAN024FR8_at; Start 904; Stop 928
ggaatagtttctattagccctacat

SEQ ID NO: 217735 - DNA, 25 bp, Artificial
  probe
  misc_feature (1)..(25): SEQ ID NO: 2595; WAN024FR8_at; Start 477; Stop 501
tacttttgtcaagtctacagaggac

SEQ ID NO: 217736 - DNA, 25 bp, Artificial
  probe
  misc_feature (1)..(25): SEQ ID NO: 2595; WAN024FR8_at; Start 702; Stop 726
tatttcgacgatatcgcaagcaggc

SEQ ID NO: 217737 - DNA, 25 bp, Artificial
  probe
  misc_feature (1)..(25): SEQ ID NO: 2595; WAN024FR8_at; Start 739; Stop 763
gcggataaggtgattagaattcttc

SEQ ID NO: 217738 - DNA, 25 bp, Artificial
  probe
  misc_feature (1)..(25): SEQ ID NO: 2595; WAN024FR8_at; Start 1156; Stop 1180
tcatctgtaattggagaagcatcta

SEQ ID NO: 217739 - DNA, 25 bp, Artificial
  probe
  misc_feature (1)..(25): SEQ ID NO: 2595; WAN024FR8_at; Start 808; Stop 832
gctcatgcgtataggagtggtgata

SEQ ID NO: 217740 - DNA, 25 bp, Artificial
  probe
  misc_feature (1)..(25): SEQ ID NO: 2595; WAN024FR8_at; Start 219; Stop 243
tagagaaagtattgaggagcgtagt

SEQ ID NO: 217741 - DNA, 25 bp, Artificial
  probe
  misc_feature (1)..(25): SEQ ID NO: 2595; WAN024FR8_at; Start 1334; Stop 1358
caagtattgctatgggtgcagtgac

SEQ ID NO: 217742 - DNA, 25 bp, Artificial
  probe
  misc_feature (1)..(25): SEQ ID NO: 2595; WAN024FR8_at; Start 792; Stop 816
tgtttttcctaaagttgctcatgcg

SEQ ID NO: 217743 - DNA, 25 bp, Artificial
  probe
  misc_feature (1)..(25): SEQ ID NO: 2595; WAN024FR8_at; Start 956; Stop 980
tccaaggaatagataaggttctgtc

SEQ ID NO: 217744 - DNA, 25 bp, Artificial
  probe
  misc_feature (1)..(25): SEQ ID NO: 2595; WAN024FR8_at; Start 512; Stop 536
acatatggataacagtaggctctac

SEQ ID NO: 217745 - DNA, 25 bp, Artificial
  probe
  misc_feature (1)..(25): SEQ ID NO: 2595; WAN024FR8_at; Start 412; Stop 436
gaagattttaaacgtacagtagtga

SEQ ID NO: 217746 - DNA, 25 bp, Artificial
  probe
  misc_feature (1)..(25): SEQ ID NO: 2595; WAN024FR8_at; Start 1230; Stop 1254
tctatatagggatgtaccgaaatac

SEQ ID NO: 217747 - DNA, 25 bp, Artificial
  probe
  misc_feature (1)..(25): SEQ ID NO: 2595; WAN024FR8_at; Start 203; Stop 227
gaaccatagcatatcatagagaaag

SEQ ID NO: 217748 - DNA, 25 bp, Artificial
  probe
  misc_feature (1)..(25): SEQ ID NO: 2595; WAN024FR8_at; Start 755; Stop 779
gaattcttctggctttagtatcatc

SEQ ID NO: 217749 - DNA, 25 bp, Artificial
  probe
  misc_feature (1)..(25): SEQ ID NO: 2595; WAN024FR8_at; Start 1244; Stop 1268
taccgaaatacatgattgctagcgc

SEQ ID NO: 217750 - DNA, 25 bp, Artificial
  probe
  misc_feature (1)..(25): SEQ ID NO: 2595; WAN024FR8_at; Start 490; Stop 514
tctacagaggactttgacaaataca

SEQ ID NO: 217751 - DNA, 25 bp, Artificial
  probe
  misc_feature (1)..(25): SEQ ID NO: 2595; WAN024FR8_at; Start 1067; Stop 1091
taagtatctcggtgttcctaggaat

SEQ ID NO: 217752 - DNA, 25 bp, Artificial
  probe
  misc_feature (1)..(25): SEQ ID NO: 2595; WAN024FR8_at; Start 279; Stop 303
ggtagcaattgttgcctatgtcata

SEQ ID NO: 217753 - DNA, 25 bp, Artificial
  probe
  misc_feature (1)..(25): SEQ ID NO: 2595; WAN024FR8_at; Start 972; Stop 996
ggttctgtctgttctagtattggag

SEQ ID NO: 217754 - DNA, 25 bp, Artificial
  probe
  misc_feature (1)..(25): SEQ ID NO: 2595; WAN024FR8_at; Start 1122; Stop 1146
cattccgatatacggagcgcttgga

SEQ ID NO: 217755 - DNA, 25 bp, Artificial
  probe
  misc_feature (1)..(25): SEQ ID NO: 2595; WAN024FR8_at; Start 262; Stop 286
gtctcaattaagttgctggtagcaa

SEQ ID NO: 217756 - DNA, 25 bp, Artificial
  probe
  misc_feature (1)..(25): SEQ ID NO: 2595; WAN024FR8_at; Start 606; Stop 630
taagttgagtgaacacttagttccc

SEQ ID NO: 217757 - DNA, 25 bp, Artificial
  probe
  misc_feature (1)..(25): SEQ ID NO: 2595; WAN024FR8_at; Start 373; Stop 397
gctacggcatttgatatatcttggc

SEQ ID NO: 217758 - DNA, 25 bp, Artificial
  probe
  misc_feature (1)..(25): SEQ ID NO: 2595; WAN024FR8_at; Start 1033; Stop 1057
caatatctcattgtaacagggcaaa

SEQ ID NO: 217759 - DNA, 25 bp, Artificial
  probe
  misc_feature (1)..(25): SEQ ID NO: 2595; WAN024FR8_at; Start 524; Stop 548
cagtaggctctactttaatgggtaa

SEQ ID NO: 217760 - DNA, 25 bp, Artificial
  probe
  misc_feature (1)..(25): SEQ ID NO: 2595; WAN024FR8_at; Start 1313; Stop 1337
cgccatttgtatctttgctatcaag

SEQ ID NO: 217761 - DNA, 25 bp, Artificial
  probe
  misc_feature (1)..(25): SEQ ID NO: 2595; WAN024FR8_at; Start 998; Stop 1022
taattttcatgggatatacttcggt

SEQ ID NO: 217762 - DNA, 25 bp, Artificial
  probe
  misc_feature (1)..(25): SEQ ID NO: 2595; WAN024FR8_at; Start 1140; Stop 1164
gcttggaagtgcgatttcatctgta

SEQ ID NO: 217763 - DNA, 25 bp, Artificial
  probe
  misc_feature (1)..(25): SEQ ID NO: 2595; WAN024FR8_at; Start 1365; Stop 1389
tactgttgtcttattactatgccca

SEQ ID NO: 217764 - DNA, 25 bp, Artificial
  probe
  misc_feature (1)..(25): SEQ ID NO: 2595; WAN024FR8_at; Start 722; Stop 746
caggctactttgagaatgcggataa

SEQ ID NO: 217765 - DNA, 25 bp, Artificial
  probe
  misc_feature (1)..(25): SEQ ID NO: 2595; WAN024FR8_at; Start 592; Stop 616
ccgataaaaagccttaagttgagtg

SEQ ID NO: 217766 - DNA, 25 bp, Artificial
  probe
  misc_feature (1)..(25): SEQ ID NO: 2595; WAN024FR8_at; Start 1018; Stop 1042
tcggttttaggtagtcaatatctca

SEQ ID NO: 217767 - DNA, 25 bp, Artificial
  probe
  misc_feature (1)..(25): SEQ ID NO: 1513; WAN024FR9_at; Start 532; Stop 556
aatcctatagagaaacgaaacccat

SEQ ID NO: 217768 - DNA, 25 bp, Artificial
  probe
  misc_feature (1)..(25): SEQ ID NO: 1513; WAN024FR9_at; Start 737; Stop 761
tacaaaagatatacaacgatacgtc

SEQ ID NO: 217769 - DNA, 25 bp, Artificial
  probe
  misc_feature (1)..(25): SEQ ID NO: 1513; WAN024FR9_at; Start 660; Stop 684
tatttttggagttcctagtagacca

SEQ ID NO: 217770 - DNA, 25 bp, Artificial
  probe
  misc_feature (1)..(25): SEQ ID NO: 1513; WAN024FR9_at; Start 122; Stop 146
ccaataatgtatggaacagagttac

SEQ ID NO: 217771 - DNA, 25 bp, Artificial
  probe
  misc_feature (1)..(25): SEQ ID NO: 1513; WAN024FR9_at; Start 595; Stop 619
ggaatctcttatgcgatagatgcaa

SEQ ID NO: 217772 - DNA, 25 bp, Artificial
  probe
  misc_feature (1)..(25): SEQ ID NO: 1513; WAN024FR9_at; Start 845; Stop 869
cagcctatagtggtgtatttgaata

SEQ ID NO: 217773 - DNA, 25 bp, Artificial
  probe
  misc_feature (1)..(25): SEQ ID NO: 1513; WAN024FR9_at; Start 286; Stop 310
tttgctactgcggttacaactgcta

SEQ ID NO: 217774 - DNA, 25 bp, Artificial
  probe
  misc_feature (1)..(25): SEQ ID NO: 1513; WAN024FR9_at; Start 355; Stop 379
ctaatccaaggttttgaaacatggc

SEQ ID NO: 217775 - DNA, 25 bp, Artificial
  probe
  misc_feature (1)..(25): SEQ ID NO: 1513; WAN024FR9_at; Start 167; Stop 191
caattgtaggcaatatacgtggcaa

SEQ ID NO: 217776 - DNA, 25 bp, Artificial
  probe
  misc_feature (1)..(25): SEQ ID NO: 1513; WAN024FR9_at; Start 17; Stop 41
gtctacctgagataagcactgttcc

SEQ ID NO: 217777 - DNA, 25 bp, Artificial
  probe
  misc_feature (1)..(25): SEQ ID NO: 1513; WAN024FR9_at; Start 976; Stop 1000
gcaacgcaagcaactaaagatatga

SEQ ID NO: 217778 - DNA, 25 bp, Artificial
  probe
  misc_feature (1)..(25): SEQ ID NO: 1513; WAN024FR9_at; Start 461; Stop 485
tccaatcttatacagagactccagt

SEQ ID NO: 217779 - DNA, 25 bp, Artificial
  probe
  misc_feature (1)..(25): SEQ ID NO: 1513; WAN024FR9_at; Start 3; Stop 27
gagaataactttttgtctacctgag

SEQ ID NO: 217780 - DNA, 25 bp, Artificial
  probe
  misc_feature (1)..(25): SEQ ID NO: 1513; WAN024FR9_at; Start 236; Stop 260
taatgactccttatttagatgggag

SEQ ID NO: 217781 - DNA, 25 bp, Artificial
  probe
  misc_feature (1)..(25): SEQ ID NO: 1513; WAN024FR9_at; Start 709; Stop 733
tatactcaacaagctacacaacagg

SEQ ID NO: 217782 - DNA, 25 bp, Artificial
  probe
  misc_feature (1)..(25): SEQ ID NO: 1513; WAN024FR9_at; Start 772; Stop 796
tgtgcaacaattgatgaaggctttg

SEQ ID NO: 217783 - DNA, 25 bp, Artificial
  probe
  misc_feature (1)..(25): SEQ ID NO: 1513; WAN024FR9_at; Start 868; Stop 892
tatgcaattgatggcgagaatgcac

SEQ ID NO: 217784 - DNA, 25 bp, Artificial
  probe
  misc_feature (1)..(25): SEQ ID NO: 1513; WAN024FR9_at; Start 370; Stop 394
gaaacatggcttcttccagaaagta

SEQ ID NO: 217785 - DNA, 25 bp, Artificial
  probe
  misc_feature (1)..(25): SEQ ID NO: 1513; WAN024FR9_at; Start 958; Stop 982
gatttgcgcttatccatagcaacgc

SEQ ID NO: 217786 - DNA, 25 bp, Artificial
  probe
  misc_feature (1)..(25): SEQ ID NO: 1513; WAN024FR9_at; Start 883; Stop 907
gagaatgcacttttatctccgataa

SEQ ID NO: 217787 - DNA, 25 bp, Artificial
  probe
  misc_feature (1)..(25): SEQ ID NO: 1513; WAN024FR9_at; Start 576; Stop 600
tcatgaaggagagcataaaggaatc

SEQ ID NO: 217788 - DNA, 25 bp, Artificial
  probe
  misc_feature (1)..(25): SEQ ID NO: 1513; WAN024FR9_at; Start 786; Stop 810
tgaaggctttggtttgacaggagca

SEQ ID NO: 217789 - DNA, 25 bp, Artificial
  probe
  misc_feature (1)..(25): SEQ ID NO: 1513; WAN024FR9_at; Start 307; Stop 331
gctaatattgtaaaagaaatgccag

SEQ ID NO: 217790 - DNA, 25 bp, Artificial
  probe
  misc_feature (1)..(25): SEQ ID NO: 1513; WAN024FR9_at; Start 1005; Stop 1029
gagaggatgggagaaaactacttta

SEQ ID NO: 217791 - DNA, 25 bp, Artificial
  probe
  misc_feature (1)..(25): SEQ ID NO: 1513; WAN024FR9_at; Start 88; Stop 112
gaacgaggtcatgagataacccttg

SEQ ID NO: 217792 - DNA, 25 bp, Artificial
  probe
  misc_feature (1)..(25): SEQ ID NO: 1513; WAN024FR9_at; Start 819; Stop 843
ggcttgtggctgtgcgttagtctca

SEQ ID NO: 217793 - DNA, 25 bp, Artificial
  probe
  misc_feature (1)..(25): SEQ ID NO: 1513; WAN024FR9_at; Start 548; Stop 572
gaaacccatttcatctaggtatgtt

SEQ ID NO: 217794 - DNA, 25 bp, Artificial
  probe
  misc_feature (1)..(25): SEQ ID NO: 1513; WAN024FR9_at; Start 251; Stop 275
tagatgggagagattttcctgaagc

SEQ ID NO: 217795 - DNA, 25 bp, Artificial
  probe
  misc_feature (1)..(25): SEQ ID NO: 1513; WAN024FR9_at; Start 798; Stop 822
tttgacaggagcagagagtatggct

SEQ ID NO: 217796 - DNA, 25 bp, Artificial
  probe
  misc_feature (1)..(25): SEQ ID NO: 1513; WAN024FR9_at; Start 481; Stop 505
ccagttttttgtgtatctaatccga

SEQ ID NO: 217797 - DNA, 25 bp, Artificial
  probe
  misc_feature (1)..(25): SEQ ID NO: 1513; WAN024FR9_at; Start 833; Stop 857
cgttagtctcaacagcctatagtgg

SEQ ID NO: 217798 - DNA, 25 bp, Artificial
  probe
  misc_feature (1)..(25): SEQ ID NO: 1513; WAN024FR9_at; Start 439; Stop 463
tctaagtggttatgtgacatagtcc

SEQ ID NO: 217799 - DNA, 25 bp, Artificial
  probe
  misc_feature (1)..(25): SEQ ID NO: 1513; WAN024FR9_at; Start 29; Stop 53
taagcactgttcctacgggaggata

SEQ ID NO: 217800 - DNA, 25 bp, Artificial
  probe
  misc_feature (1)..(25): SEQ ID NO: 1513; WAN024FR9_at; Start 74; Stop 98
caaataggttgtctgaacgaggtca

SEQ ID NO: 217801 - DNA, 25 bp, Artificial
  probe
  misc_feature (1)..(25): SEQ ID NO: 2225; WAN024FRA_at; Start 619; Stop 643
gttatagatacattactcccttatg

SEQ ID NO: 217802 - DNA, 25 bp, Artificial
  probe
  misc_feature (1)..(25): SEQ ID NO: 2225; WAN024FRA_at; Start 109; Stop 133
aaagtttcgaatgtttttatgcaca

SEQ ID NO: 217803 - DNA, 25 bp, Artificial
  probe
  misc_feature (1)..(25): SEQ ID NO: 2225; WAN024FRA_at; Start 594; Stop 618
cgattctgagtttgagggaattcaa

SEQ ID NO: 217804 - DNA, 25 bp, Artificial
  probe
  misc_feature (1)..(25): SEQ ID NO: 2225; WAN024FRA_at; Start 162; Stop 186
cggatttttattccataattggtgg

SEQ ID NO: 217805 - DNA, 25 bp, Artificial
  probe
  misc_feature (1)..(25): SEQ ID NO: 2225; WAN024FRA_at; Start 780; Stop 804
taactatgatttttatcacccaaat

SEQ ID NO: 217806 - DNA, 25 bp, Artificial
  probe
  misc_feature (1)..(25): SEQ ID NO: 2225; WAN024FRA_at; Start 839; Stop 863
aattagatgagtttattcaaaagcc

SEQ ID NO: 217807 - DNA, 25 bp, Artificial
  probe
  misc_feature (1)..(25): SEQ ID NO: 2225; WAN024FRA_at; Start 606; Stop 630
tgagggaattcaagttatagataca

SEQ ID NO: 217808 - DNA, 25 bp, Artificial
  probe
  misc_feature (1)..(25): SEQ ID NO: 2225; WAN024FRA_at; Start 632; Stop 656
tactcccttatgatgaagtcttgga

SEQ ID NO: 217809 - DNA, 25 bp, Artificial
  probe
  misc_feature (1)..(25): SEQ ID NO: 2225; WAN024FRA_at; Start 699; Stop 723
gggacaggatggtctaacccttaga

SEQ ID NO: 217810 - DNA, 25 bp, Artificial
  probe
  misc_feature (1)..(25): SEQ ID NO: 2225; WAN024FRA_at; Start 370; Stop 394
tgctttgataagacatattctgaaa

SEQ ID NO: 217811 - DNA, 25 bp, Artificial
  probe
  misc_feature (1)..(25): SEQ ID NO: 2225; WAN024FRA_at; Start 192; Stop 216
agaatggtctagaaaattaccggat

SEQ ID NO: 217812 - DNA, 25 bp, Artificial
  probe
  misc_feature (1)..(25): SEQ ID NO: 2225; WAN024FRA_at; Start 84; Stop 108
tgtagacatatttacaccgtacaaa

SEQ ID NO: 217813 - DNA, 25 bp, Artificial
  probe
  misc_feature (1)..(25): SEQ ID NO: 2225; WAN024FRA_at; Start 521; Stop 545
gcttagctaagcagatagttttaaa

SEQ ID NO: 217814 - DNA, 25 bp, Artificial
  probe
  misc_feature (1)..(25): SEQ ID NO: 2225; WAN024FRA_at; Start 649; Stop 673
gtcttggataacatactagcttcga

SEQ ID NO: 217815 - DNA, 25 bp, Artificial
  probe
  misc_feature (1)..(25): SEQ ID NO: 2225; WAN024FRA_at; Start 856; Stop 880
caaaagccatatgttcaattagaaa

SEQ ID NO: 217816 - DNA, 25 bp, Artificial
  probe
  misc_feature (1)..(25): SEQ ID NO: 2225; WAN024FRA_at; Start 208; Stop 232
ttaccggattatactaatatagtag

SEQ ID NO: 217817 - DNA, 25 bp, Artificial
  probe
  misc_feature (1)..(25): SEQ ID NO: 2225; WAN024FRA_at; Start 580; Stop 604
aaaaaacagtatttcgattctgagt

SEQ ID NO: 217818 - DNA, 25 bp, Artificial
  probe
  misc_feature (1)..(25): SEQ ID NO: 2225; WAN024FRA_at; Start 713; Stop 737
taacccttagagcaatggaatccat

SEQ ID NO: 217819 - DNA, 25 bp, Artificial
  probe
  misc_feature (1)..(25): SEQ ID NO: 2225; WAN024FRA_at; Start 418; Stop 442
caattctatgtattaggttcgacta

SEQ ID NO: 217820 - DNA, 25 bp, Artificial
  probe
  misc_feature (1)..(25): SEQ ID NO: 2225; WAN024FRA_at; Start 282; Stop 306
taagactcgtagttcaaagttgaaa

SEQ ID NO: 217821 - DNA, 25 bp, Artificial
  probe
  misc_feature (1)..(25): SEQ ID NO: 2225; WAN024FRA_at; Start 317; Stop 341
ggaatgttccgaataagcaagtgaa

SEQ ID NO: 217822 - DNA, 25 bp, Artificial
  probe
  misc_feature (1)..(25): SEQ ID NO: 2225; WAN024FRA_at; Start 272; Stop 296
tagatgcacataagactcgtagttc

SEQ ID NO: 217823 - DNA, 25 bp, Artificial
  probe
  misc_feature (1)..(25): SEQ ID NO: 2225; WAN024FRA_at; Start 814; Stop 838
gtttgggaggaaggaaaagatatca

SEQ ID NO: 217824 - DNA, 25 bp, Artificial
  probe
  misc_feature (1)..(25): SEQ ID NO: 2225; WAN024FRA_at; Start 230; Stop 254
tagtatttgacaatgctatttccct

SEQ ID NO: 217825 - DNA, 25 bp, Artificial
  probe
  misc_feature (1)..(25): SEQ ID NO: 2225; WAN024FRA_at; Start 503; Stop 527
gattgccaaaattaaaaagcttagc

SEQ ID NO: 217826 - DNA, 25 bp, Artificial
  probe
  misc_feature (1)..(25): SEQ ID NO: 2225; WAN024FRA_at; Start 663; Stop 687
actagcttcgaatgttattgttgag

SEQ ID NO: 217827 - DNA, 25 bp, Artificial
  probe
  misc_feature (1)..(25): SEQ ID NO: 2225; WAN024FRA_at; Start 436; Stop 460
tcgactaagaaaagagatatattgg

SEQ ID NO: 217828 - DNA, 25 bp, Artificial
  probe
  misc_feature (1)..(25): SEQ ID NO: 2225; WAN024FRA_at; Start 177; Stop 201
taattggtggttagaagaatggtct

SEQ ID NO: 217829 - DNA, 25 bp, Artificial
  probe
  misc_feature (1)..(25): SEQ ID NO: 2225; WAN024FRA_at; Start 303; Stop 327
gaaattatggttatggaatgttccg

SEQ ID NO: 217830 - DNA, 25 bp, Artificial
  probe
  misc_feature (1)..(25): SEQ ID NO: 2225; WAN024FRA_at; Start 126; Stop 150
tatgcacaattttagagcaattgca

SEQ ID NO: 217831 - DNA, 25 bp, Artificial
  probe
  misc_feature (1)..(25): SEQ ID NO: 2225; WAN024FRA_at; Start 140; Stop 164
gagcaattgcaaaacgattacccgg

SEQ ID NO: 217832 - DNA, 25 bp, Artificial
  probe
  misc_feature (1)..(25): SEQ ID NO: 2225; WAN024FRA_at; Start 485; Stop 509
ttggtgcagataaaggaagattgcc

SEQ ID NO: 217833 - DNA, 25 bp, Artificial
  probe
  misc_feature (1)..(25): SEQ ID NO: 2225; WAN024FRA_at; Start 257; Stop 281
aattattagagtatatagatgcaca

SEQ ID NO: 217834 - DNA, 25 bp, Artificial
  probe
  misc_feature (1)..(25): SEQ ID NO: 2225; WAN024FRA_at; Start 556; Stop 580
tatcgatttgacgtttttagtgtaa

SEQ ID NO: 217835 - DNA, 25 bp, Artificial
  probe
  misc_feature (1)..(25): SEQ ID NO: 5639; WAN024FRB_at; Start 28; Stop 52
ccttgggtgaataaagtttatcttg

SEQ ID NO: 217836 - DNA, 25 bp, Artificial
  probe
  misc_feature (1)..(25): SEQ ID NO: 5639; WAN024FRB_at; Start 3; Stop 27
ggttagagagatagaaaaatttgct

SEQ ID NO: 217837 - DNA, 25 bp, Artificial
  probe
  misc_feature (1)..(25): SEQ ID NO: 5639; WAN024FRB_at; Start 70; Stop 94
ccggtctggttgactattaatagtg

SEQ ID NO: 217838 - DNA, 25 bp, Artificial
  probe
  misc_feature (1)..(25): SEQ ID NO: 5639; WAN024FRB_at; Start 43; Stop 67
gtttatcttgttacagaaaatcaaa

SEQ ID NO: 217839 - DNA, 25 bp, Artificial
  probe
  misc_feature (1)..(25): SEQ ID NO: 5639; WAN024FRB_at; Start 26; Stop 50
ctccttgggtgaataaagtttatct

SEQ ID NO: 217840 - DNA, 25 bp, Artificial
  probe
  misc_feature (1)..(25): SEQ ID NO: 5639; WAN024FRB_at; Start 2; Stop 26
tggttagagagatagaaaaatttgc

SEQ ID NO: 217841 - DNA, 25 bp, Artificial
  probe
  misc_feature (1)..(25): SEQ ID NO: 5639; WAN024FRB_at; Start 9; Stop 33
agagatagaaaaatttgctccttgg

SEQ ID NO: 217842 - DNA, 25 bp, Artificial
  probe
  misc_feature (1)..(25): SEQ ID NO: 5639; WAN024FRB_at; Start 14; Stop 38
tagaaaaatttgctccttgggtgaa

SEQ ID NO: 217843 - DNA, 25 bp, Artificial
  probe
  misc_feature (1)..(25): SEQ ID NO: 5639; WAN024FRB_at; Start 46; Stop 70
tatcttgttacagaaaatcaaaaac

SEQ ID NO: 217844 - DNA, 25 bp, Artificial
  probe
  misc_feature (1)..(25): SEQ ID NO: 5639; WAN024FRB_at; Start 20; Stop 44
aatttgctccttgggtgaataaagt

SEQ ID NO: 217845 - DNA, 25 bp, Artificial
  probe
  misc_feature (1)..(25): SEQ ID NO: 5639; WAN024FRB_at; Start 16; Stop 40
gaaaaatttgctccttgggtgaata

SEQ ID NO: 217846 - DNA, 25 bp, Artificial
  probe
  misc_feature (1)..(25): SEQ ID NO: 5639; WAN024FRB_at; Start 23; Stop 47
ttgctccttgggtgaataaagttta

SEQ ID NO: 217847 - DNA, 25 bp, Artificial
  probe
  misc_feature (1)..(25): SEQ ID NO: 5639; WAN024FRB_at; Start 11; Stop 35
agatagaaaaatttgctccttgggt

SEQ ID NO: 217848 - DNA, 25 bp, Artificial
  probe
  misc_feature (1)..(25): SEQ ID NO: 5639; WAN024FRB_at; Start 41; Stop 65
aagtttatcttgttacagaaaatca

SEQ ID NO: 217849 - DNA, 25 bp, Artificial
  probe
  misc_feature (1)..(25): SEQ ID NO: 5639; WAN024FRB_at; Start 71; Stop 95
cggtctggttgactattaatagtga

SEQ ID NO: 217850 - DNA, 25 bp, Artificial
  probe
  misc_feature (1)..(25): SEQ ID NO: 5639; WAN024FRB_at; Start 13; Stop 37
atagaaaaatttgctccttgggtga

SEQ ID NO: 217851 - DNA, 25 bp, Artificial
  probe
  misc_feature (1)..(25): SEQ ID NO: 5639; WAN024FRB_at; Start 10; Stop 34
gagatagaaaaatttgctccttggg

SEQ ID NO: 217852 - DNA, 25 bp, Artificial
  probe
  misc_feature (1)..(25): SEQ ID NO: 5639; WAN024FRB_at; Start 68; Stop 92
aaccggtctggttgactattaatag

SEQ ID NO: 217853 - DNA, 25 bp, Artificial
  probe
  misc_feature (1)..(25): SEQ ID NO: 5639; WAN024FRB_at; Start 69; Stop 93
accggtctggttgactattaatagt

SEQ ID NO: 217854 - DNA, 25 bp, Artificial
  probe
  misc_feature (1)..(25): SEQ ID NO: 5639; WAN024FRB_at; Start 19; Stop 43
aaatttgctccttgggtgaataaag

SEQ ID NO: 217855 - DNA, 25 bp, Artificial
  probe
  misc_feature (1)..(25): SEQ ID NO: 5639; WAN024FRB_at; Start 74; Stop 98
tctggttgactattaatagtgataa

SEQ ID NO: 217856 - DNA, 25 bp, Artificial
  probe
  misc_feature (1)..(25): SEQ ID NO: 5639; WAN024FRB_at; Start 72; Stop 96
ggtctggttgactattaatagtgat

SEQ ID NO: 217857 - DNA, 25 bp, Artificial
  probe
  misc_feature (1)..(25): SEQ ID NO: 5639; WAN024FRB_at; Start 62; Stop 86
atcaaaaaccggtctggttgactat

SEQ ID NO: 217858 - DNA, 25 bp, Artificial
  probe
  misc_feature (1)..(25): SEQ ID NO: 5639; WAN024FRB_at; Start 24; Stop 48
tgctccttgggtgaataaagtttat

SEQ ID NO: 217859 - DNA, 25 bp, Artificial
  probe
  misc_feature (1)..(25): SEQ ID NO: 5639; WAN024FRB_at; Start 25; Stop 49
gctccttgggtgaataaagtttatc

SEQ ID NO: 217860 - DNA, 25 bp, Artificial
  probe
  misc_feature (1)..(25): SEQ ID NO: 5639; WAN024FRB_at; Start 5; Stop 29
ttagagagatagaaaaatttgctcc

SEQ ID NO: 217861 - DNA, 25 bp, Artificial
  probe
  misc_feature (1)..(25): SEQ ID NO: 5639; WAN024FRB_at; Start 15; Stop 39
agaaaaatttgctccttgggtgaat

SEQ ID NO: 217862 - DNA, 25 bp, Artificial
  probe
  misc_feature (1)..(25): SEQ ID NO: 5639; WAN024FRB_at; Start 81; Stop 105
gactattaatagtgataagttatat

SEQ ID NO: 217863 - DNA, 25 bp, Artificial
  probe
  misc_feature (1)..(25): SEQ ID NO: 5639; WAN024FRB_at; Start 77; Stop 101
ggttgactattaatagtgataagtt

SEQ ID NO: 217864 - DNA, 25 bp, Artificial
  probe
  misc_feature (1)..(25): SEQ ID NO: 5639; WAN024FRB_at; Start 29; Stop 53
cttgggtgaataaagtttatcttgt

SEQ ID NO: 217865 - DNA, 25 bp, Artificial
  probe
  misc_feature (1)..(25): SEQ ID NO: 5639; WAN024FRB_at; Start 36; Stop 60
gaataaagtttatcttgttacagaa

SEQ ID NO: 217866 - DNA, 25 bp, Artificial
  probe
  misc_feature (1)..(25): SEQ ID NO: 5639; WAN024FRB_at; Start 12; Stop 36
gatagaaaaatttgctccttgggtg

SEQ ID NO: 217867 - DNA, 25 bp, Artificial
  probe
  misc_feature (1)..(25): SEQ ID NO: 5639; WAN024FRB_at; Start 8; Stop 32
gagagatagaaaaatttgctccttg

SEQ ID NO: 217868 - DNA, 25 bp, Artificial
  probe
  misc_feature (1)..(25): SEQ ID NO: 5639; WAN024FRB_at; Start 6; Stop 30
tagagagatagaaaaatttgctcct

SEQ ID NO: 217869 - DNA, 25 bp, Artificial
  probe
  misc_feature (1)..(25): SEQ ID NO: 610; WAN024FRC_at; Start 564; Stop 588
tcatttcaaacaactgcaagataag

SEQ ID NO: 217870 - DNA, 25 bp, Artificial
  probe
  misc_feature (1)..(25): SEQ ID NO: 610; WAN024FRC_at; Start 701; Stop 725
tcaatgatgatatagtggttaagcg

SEQ ID NO: 217871 - DNA, 25 bp, Artificial
  probe
  misc_feature (1)..(25): SEQ ID NO: 610; WAN024FRC_at; Start 823; Stop 847
gagaaaatttctaagcaagagctag

SEQ ID NO: 217872 - DNA, 25 bp, Artificial
  probe
  misc_feature (1)..(25): SEQ ID NO: 610; WAN024FRC_at; Start 444; Stop 468
tcatatttttatgtctgggcaaggt

SEQ ID NO: 217873 - DNA, 25 bp, Artificial
  probe
  misc_feature (1)..(25): SEQ ID NO: 610; WAN024FRC_at; Start 346; Stop 370
tatcaatttcttgaagagcatagct

SEQ ID NO: 217874 - DNA, 25 bp, Artificial
  probe
  misc_feature (1)..(25): SEQ ID NO: 610; WAN024FRC_at; Start 110; Stop 134
cggatcaaaaggtggatgaattcgc

SEQ ID NO: 217875 - DNA, 25 bp, Artificial
  probe
  misc_feature (1)..(25): SEQ ID NO: 610; WAN024FRC_at; Start 869; Stop 893
tctattgggaatatgttaaatcaac

SEQ ID NO: 217876 - DNA, 25 bp, Artificial
  probe
  misc_feature (1)..(25): SEQ ID NO: 610; WAN024FRC_at; Start 716; Stop 740
tggttaagcgtcctctatacgcaca

SEQ ID NO: 217877 - DNA, 25 bp, Artificial
  probe
  misc_feature (1)..(25): SEQ ID NO: 610; WAN024FRC_at; Start 648; Stop 672
gaaacgctattatttttggtctgaa

SEQ ID NO: 217878 - DNA, 25 bp, Artificial
  probe
  misc_feature (1)..(25): SEQ ID NO: 610; WAN024FRC_at; Start 604; Stop 628
gatattagtcatttctcatttcggg

SEQ ID NO: 217879 - DNA, 25 bp, Artificial
  probe
  misc_feature (1)..(25): SEQ ID NO: 610; WAN024FRC_at; Start 392; Stop 416
gatatggtctttttggtcatcttca

SEQ ID NO: 217880 - DNA, 25 bp, Artificial
  probe
  misc_feature (1)..(25): SEQ ID NO: 610; WAN024FRC_at; Start 617; Stop 641
tctcatttcgggaatatggcgaaaa

SEQ ID NO: 217881 - DNA, 25 bp, Artificial
  probe
  misc_feature (1)..(25): SEQ ID NO: 610; WAN024FRC_at; Start 743; Stop 767
tccaaaagagaatgattaaatgccc

SEQ ID NO: 217882 - DNA, 25 bp, Artificial
  probe
  misc_feature (1)..(25): SEQ ID NO: 610; WAN024FRC_at; Start 240; Stop 264
taaattttgtgactatagacctgct

SEQ ID NO: 217883 - DNA, 25 bp, Artificial
  probe
  misc_feature (1)..(25): SEQ ID NO: 610; WAN024FRC_at; Start 459; Stop 483
tgggcaaggttcagactatcgatta

SEQ ID NO: 217884 - DNA, 25 bp, Artificial
  probe
  misc_feature (1)..(25): SEQ ID NO: 610; WAN024FRC_at; Start 319; Stop 343
gacacagatgtcttactaggtgata

SEQ ID NO: 217885 - DNA, 25 bp, Artificial
  probe
  misc_feature (1)..(25): SEQ ID NO: 610; WAN024FRC_at; Start 838; Stop 862
caagagctagtagaggtgacaagaa

SEQ ID NO: 217886 - DNA, 25 bp, Artificial
  probe
  misc_feature (1)..(25): SEQ ID NO: 610; WAN024FRC_at; Start 729; Stop 753
tctatacgcacatttccaaaagaga

SEQ ID NO: 217887 - DNA, 25 bp, Artificial
  probe
  misc_feature (1)..(25): SEQ ID NO: 610; WAN024FRC_at; Start 262; Stop 286
gcttatgggcttatctttgaagaag

SEQ ID NO: 217888 - DNA, 25 bp, Artificial
  probe
  misc_feature (1)..(25): SEQ ID NO: 610; WAN024FRC_at; Start 472; Stop 496
gactatcgattagattatcacaatg

SEQ ID NO: 217889 - DNA, 25 bp, Artificial
  probe
  misc_feature (1)..(25): SEQ ID NO: 610; WAN024FRC_at; Start 490; Stop 514
cacaatgtctatactagtgaacaaa

SEQ ID NO: 217890 - DNA, 25 bp, Artificial
  probe
  misc_feature (1)..(25): SEQ ID NO: 610; WAN024FRC_at; Start 759; Stop 783
taaatgccctgactttaaactagtc

SEQ ID NO: 217891 - DNA, 25 bp, Artificial
  probe
  misc_feature (1)..(25): SEQ ID NO: 610; WAN024FRC_at; Start 665; Stop 689
ggtctgaagaaaatggtttggaatc

SEQ ID NO: 217892 - DNA, 25 bp, Artificial
  probe
  misc_feature (1)..(25): SEQ ID NO: 610; WAN024FRC_at; Start 802; Stop 826
ccaaatcaattagttattggagaga

SEQ ID NO: 217893 - DNA, 25 bp, Artificial
  probe
  misc_feature (1)..(25): SEQ ID NO: 610; WAN024FRC_at; Start 309; Stop 333
gggtttttgtgacacagatgtctta

SEQ ID NO: 217894 - DNA, 25 bp, Artificial
  probe
  misc_feature (1)..(25): SEQ ID NO: 610; WAN024FRC_at; Start 250; Stop 274
gactatagacctgcttatgggctta

SEQ ID NO: 217895 - DNA, 25 bp, Artificial
  probe
  misc_feature (1)..(25): SEQ ID NO: 610; WAN024FRC_at; Start 631; Stop 655
tatggcgaaaataaatcgaaacgct

SEQ ID NO: 217896 - DNA, 25 bp, Artificial
  probe
  misc_feature (1)..(25): SEQ ID NO: 610; WAN024FRC_at; Start 361; Stop 385
gagcatagcttttttgagaacgact

SEQ ID NO: 217897 - DNA, 25 bp, Artificial
  probe
  misc_feature (1)..(25): SEQ ID NO: 610; WAN024FRC_at; Start 376; Stop 400
gagaacgactatgctcgatatggtc

SEQ ID NO: 217898 - DNA, 25 bp, Artificial
  probe
  misc_feature (1)..(25): SEQ ID NO: 610; WAN024FRC_at; Start 526; Stop 550
gatgaatcagaaggtatccaaaagc

SEQ ID NO: 217899 - DNA, 25 bp, Artificial
  probe
  misc_feature (1)..(25): SEQ ID NO: 610; WAN024FRC_at; Start 70; Stop 94
actgctaaacgtaatcaaaaaattg

SEQ ID NO: 217900 - DNA, 25 bp, Artificial
  probe
  misc_feature (1)..(25): SEQ ID NO: 610; WAN024FRC_at; Start 180; Stop 204
tgagttaagagaaaaagttcagtct

SEQ ID NO: 217901 - DNA, 25 bp, Artificial
  probe
  misc_feature (1)..(25): SEQ ID NO: 610; WAN024FRC_at; Start 124; Stop 148
gatgaattcgctatgttaaatgcta

SEQ ID NO: 217902 - DNA, 25 bp, Artificial
  probe
  misc_feature (1)..(25): SEQ ID NO: 610; WAN024FRC_at; Start 94; Stop 118
gatttcttagtttatacggatcaaa

SEQ ID NO: 217903 - DNA, 25 bp, Artificial
  probe
  misc_feature (1)..(25): SEQ ID NO: 3133; WAN024FRD_at; Start 203; Stop 227
aacactatttgagtggaaatatccc

SEQ ID NO: 217904 - DNA, 25 bp, Artificial
  probe
  misc_feature (1)..(25): SEQ ID NO: 3133; WAN024FRD_at; Start 240; Stop 264
taaggaatcaaaatatgtcaaagac

SEQ ID NO: 217905 - DNA, 25 bp, Artificial
  probe
  misc_feature (1)..(25): SEQ ID NO: 3133; WAN024FRD_at; Start 476; Stop 500
tctcttcgagaaattacagtggttt

SEQ ID NO: 217906 - DNA, 25 bp, Artificial
  probe
  misc_feature (1)..(25): SEQ ID NO: 3133; WAN024FRD_at; Start 97; Stop 121
tgttgggcaggaaaagtctatcagg

SEQ ID NO: 217907 - DNA, 25 bp, Artificial
  probe
  misc_feature (1)..(25): SEQ ID NO: 3133; WAN024FRD_at; Start 110; Stop 134
aagtctatcaggaattgggcttgcc

SEQ ID NO: 217908 - DNA, 25 bp, Artificial
  probe
  misc_feature (1)..(25): SEQ ID NO: 3133; WAN024FRD_at; Start 322; Stop 346
tatgcagatgaggaagaagcaactc

SEQ ID NO: 217909 - DNA, 25 bp, Artificial
  probe
  misc_feature (1)..(25): SEQ ID NO: 3133; WAN024FRD_at; Start 395; Stop 419
tcaagttcaatgataatgatgcctg

SEQ ID NO: 217910 - DNA, 25 bp, Artificial
  probe
  misc_feature (1)..(25): SEQ ID NO: 3133; WAN024FRD_at; Start 432; Stop 456
gatgaaagagtttgaagaacttccg

SEQ ID NO: 217911 - DNA, 25 bp, Artificial
  probe
  misc_feature (1)..(25): SEQ ID NO: 3133; WAN024FRD_at; Start 523; Stop 547
tcagctgaaaagcaaggacacgttg

SEQ ID NO: 217912 - DNA, 25 bp, Artificial
  probe
  misc_feature (1)..(25): SEQ ID NO: 3133; WAN024FRD_at; Start 310; Stop 334
catttcttacattatgcagatgagg

SEQ ID NO: 217913 - DNA, 25 bp, Artificial
  probe
  misc_feature (1)..(25): SEQ ID NO: 3133; WAN024FRD_at; Start 141; Stop 165
aactccatttgtaggtatgtttgtc

SEQ ID NO: 217914 - DNA, 25 bp, Artificial
  probe
  misc_feature (1)..(25): SEQ ID NO: 3133; WAN024FRD_at; Start 217; Stop 241
ggaaatatccctttgacatttgtta

SEQ ID NO: 217915 - DNA, 25 bp, Artificial
  probe
  misc_feature (1)..(25): SEQ ID NO: 3133; WAN024FRD_at; Start 16; Stop 40
aaaccaatcgtttatccaattatca

SEQ ID NO: 217916 - DNA, 25 bp, Artificial
  probe
  misc_feature (1)..(25): SEQ ID NO: 3133; WAN024FRD_at; Start 45; Stop 69
tatccctagacgaagactcaagaat

SEQ ID NO: 217917 - DNA, 25 bp, Artificial
  probe
  misc_feature (1)..(25): SEQ ID NO: 3133; WAN024FRD_at; Start 538; Stop 562
ggacacgttgggattgatttgaaaa

SEQ ID NO: 217918 - DNA, 25 bp, Artificial
  probe
  misc_feature (1)..(25): SEQ ID NO: 3133; WAN024FRD_at; Start 156; Stop 180
tatgtttgtcttttctcctgactac

SEQ ID NO: 217919 - DNA, 25 bp, Artificial
  probe
  misc_feature (1)..(25): SEQ ID NO: 3133; WAN024FRD_at; Start 506; Stop 530
ccttagttcatttcaaatcagctga

SEQ ID NO: 217920 - DNA, 25 bp, Artificial
  probe
  misc_feature (1)..(25): SEQ ID NO: 3133; WAN024FRD_at; Start 281; Stop 305
ccctggctcttttagacgatatcga

SEQ ID NO: 217921 - DNA, 25 bp, Artificial
  probe
  misc_feature (1)..(25): SEQ ID NO: 3133; WAN024FRD_at; Start 492; Stop 516
cagtggtttaccttccttagttcat

SEQ ID NO: 217922 - DNA, 25 bp, Artificial
  probe
  misc_feature (1)..(25): SEQ ID NO: 3133; WAN024FRD_at; Start 171; Stop 195
tcctgactacatcaaaatgctcaag

SEQ ID NO: 217923 - DNA, 25 bp, Artificial
  probe
  misc_feature (1)..(25): SEQ ID NO: 3133; WAN024FRD_at; Start 295; Stop 319
gacgatatcgaattgcatttcttac

SEQ ID NO: 217924 - DNA, 25 bp, Artificial
  probe
  misc_feature (1)..(25): SEQ ID NO: 3133; WAN024FRD_at; Start 118; Stop 142
caggaattgggcttgccttatcaaa

SEQ ID NO: 217925 - DNA, 25 bp, Artificial
  probe
  misc_feature (1)..(25): SEQ ID NO: 3133; WAN024FRD_at; Start 127; Stop 151
ggcttgccttatcaaactccatttg

SEQ ID NO: 217926 - DNA, 25 bp, Artificial
  probe
  misc_feature (1)..(25): SEQ ID NO: 3133; WAN024FRD_at; Start 553; Stop 577
gatttgaaaacttatcaccgctatt

SEQ ID NO: 217927 - DNA, 25 bp, Artificial
  probe
  misc_feature (1)..(25): SEQ ID NO: 3133; WAN024FRD_at; Start 583; Stop 607
tgtgttacttggttgaataagggtg

SEQ ID NO: 217928 - DNA, 25 bp, Artificial
  probe
  misc_feature (1)..(25): SEQ ID NO: 3133; WAN024FRD_at; Start 84; Stop 108
catttgcgacaattgttgggcagga

SEQ ID NO: 217929 - DNA, 25 bp, Artificial
  probe
  misc_feature (1)..(25): SEQ ID NO: 3133; WAN024FRD_at; Start 70; Stop 94
aaaaattttacaatcatttgcgaca

SEQ ID NO: 217930 - DNA, 25 bp, Artificial
  probe
  misc_feature (1)..(25): SEQ ID NO: 3133; WAN024FRD_at; Start 408; Stop 432
taatgatgcctgtacttatgaattg

SEQ ID NO: 217931 - DNA, 25 bp, Artificial
  probe
  misc_feature (1)..(25): SEQ ID NO: 3133; WAN024FRD_at; Start 183; Stop 207
caaaatgctcaagaatttaaaacac

SEQ ID NO: 217932 - DNA, 25 bp, Artificial
  probe
  misc_feature (1)..(25): SEQ ID NO: 3133; WAN024FRD_at; Start 337; Stop 361
gaagcaactcaaaaatggaaccgtc

SEQ ID NO: 217933 - DNA, 25 bp, Artificial
  probe
  misc_feature (1)..(25): SEQ ID NO: 3133; WAN024FRD_at; Start 440; Stop 464
agtttgaagaacttccgtacaagag

SEQ ID NO: 217934 - DNA, 25 bp, Artificial
  probe
  misc_feature (1)..(25): SEQ ID NO: 3133; WAN024FRD_at; Start 262; Stop 286
gactttgataatgcctatcccctgg

SEQ ID NO: 217935 - DNA, 25 bp, Artificial
  probe
  misc_feature (1)..(25): SEQ ID NO: 3133; WAN024FRD_at; Start 32; Stop 56
caattatcaattttatccctagacg

SEQ ID NO: 217936 - DNA, 25 bp, Artificial
  probe
  misc_feature (1)..(25): SEQ ID NO: 3133; WAN024FRD_at; Start 570; Stop 594
ccgctattttaattgtgttacttgg

SEQ ID NO: 217937 - DNA, 25 bp, Artificial
  probe
  misc_feature (1)..(25): SEQ ID NO: 1169; WAN024FRE_at; Start 447; Stop 471
tatgagagaatttgatcaattaccg

SEQ ID NO: 217938 - DNA, 25 bp, Artificial
  probe
  misc_feature (1)..(25): SEQ ID NO: 1169; WAN024FRE_at; Start 408; Stop 432
ttttaagttcaatgacaatgatgct

SEQ ID NO: 217939 - DNA, 25 bp, Artificial
  probe
  misc_feature (1)..(25): SEQ ID NO: 1169; WAN024FRE_at; Start 198; Stop 222
caagatgctcaagaatttgaaatac

SEQ ID NO: 217940 - DNA, 25 bp, Artificial
  probe
  misc_feature (1)..(25): SEQ ID NO: 1169; WAN024FRE_at; Start 350; Stop 374
aagaggctactcagaaatggcaacg

SEQ ID NO: 217941 - DNA, 25 bp, Artificial
  probe
  misc_feature (1)..(25): SEQ ID NO: 1169; WAN024FRE_at; Start 95; Stop 119
ccattatttgtgataattgttgggc

SEQ ID NO: 217942 - DNA, 25 bp, Artificial
  probe
  misc_feature (1)..(25): SEQ ID NO: 1169; WAN024FRE_at; Start 283; Stop 307
gataatgcttatccaattgcactcc

SEQ ID NO: 217943 - DNA, 25 bp, Artificial
  probe
  misc_feature (1)..(25): SEQ ID NO: 1169; WAN024FRE_at; Start 594; Stop 618
cgatgttgtaaggtggctgaatgaa

SEQ ID NO: 217944 - DNA, 25 bp, Artificial
  probe
  misc_feature (1)..(25): SEQ ID NO: 1169; WAN024FRE_at; Start 239; Stop 263
tctcgttgaaatttgttaaggaatc

SEQ ID NO: 217945 - DNA, 25 bp, Artificial
  probe
  misc_feature (1)..(25): SEQ ID NO: 1169; WAN024FRE_at; Start 223; Stop 247
tatttgagcggaaatatctcgttga

SEQ ID NO: 217946 - DNA, 25 bp, Artificial
  probe
  misc_feature (1)..(25): SEQ ID NO: 1169; WAN024FRE_at; Start 363; Stop 387
gaaatggcaacgtcgtttagaaaga

SEQ ID NO: 217947 - DNA, 25 bp, Artificial
  probe
  misc_feature (1)..(25): SEQ ID NO: 1169; WAN024FRE_at; Start 210; Stop 234
gaatttgaaatactatttgagcgga

SEQ ID NO: 217948 - DNA, 25 bp, Artificial
  probe
  misc_feature (1)..(25): SEQ ID NO: 1169; WAN024FRE_at; Start 607; Stop 631
tggctgaatgaaggcggagtggact

SEQ ID NO: 217949 - DNA, 25 bp, Artificial
  probe
  misc_feature (1)..(25): SEQ ID NO: 1169; WAN024FRE_at; Start 437; Stop 461
cctatgaccttatgagagaatttga

SEQ ID NO: 217950 - DNA, 25 bp, Artificial
  probe
  misc_feature (1)..(25): SEQ ID NO: 1169; WAN024FRE_at; Start 252; Stop 276
tgttaaggaatcaaagcacattgaa

SEQ ID NO: 217951 - DNA, 25 bp, Artificial
  probe
  misc_feature (1)..(25): SEQ ID NO: 1169; WAN024FRE_at; Start 267; Stop 291
gcacattgaaaactttgataatgct

SEQ ID NO: 217952 - DNA, 25 bp, Artificial
  probe
  misc_feature (1)..(25): SEQ ID NO: 1169; WAN024FRE_at; Start 555; Stop 579
tagtgttggaattgatcttaaaatc

SEQ ID NO: 217953 - DNA, 25 bp, Artificial
  probe
  misc_feature (1)..(25): SEQ ID NO: 1169; WAN024FRE_at; Start 186; Stop 210
gcctgattatatcaagatgctcaag

SEQ ID NO: 217954 - DNA, 25 bp, Artificial
  probe
  misc_feature (1)..(25): SEQ ID NO: 1169; WAN024FRE_at; Start 297; Stop 321
aattgcactccttgacgatatcgag

SEQ ID NO: 217955 - DNA, 25 bp, Artificial
  probe
  misc_feature (1)..(25): SEQ ID NO: 1169; WAN024FRE_at; Start 118; Stop 142
gctggaaaagtgtaccaagagttag

SEQ ID NO: 217956 - DNA, 25 bp, Artificial
  probe
  misc_feature (1)..(25): SEQ ID NO: 1169; WAN024FRE_at; Start 540; Stop 564
gaaggaaaaagattgtagtgttgga

SEQ ID NO: 217957 - DNA, 25 bp, Artificial
  probe
  misc_feature (1)..(25): SEQ ID NO: 1169; WAN024FRE_at; Start 310; Stop 334
gacgatatcgagcttcatttcttgc

SEQ ID NO: 217958 - DNA, 25 bp, Artificial
  probe
  misc_feature (1)..(25): SEQ ID NO: 1169; WAN024FRE_at; Start 459; Stop 483
tgatcaattaccgtacaaaagtaaa

SEQ ID NO: 217959 - DNA, 25 bp, Artificial
  probe
  misc_feature (1)..(25): SEQ ID NO: 1169; WAN024FRE_at; Start 51; Stop 75
cattaattttatttctaggagaaga

SEQ ID NO: 217960 - DNA, 25 bp, Artificial
  probe
  misc_feature (1)..(25): SEQ ID NO: 1169; WAN024FRE_at; Start 355; Stop 379
gctactcagaaatggcaacgtcgtt

SEQ ID NO: 217961 - DNA, 25 bp, Artificial
  probe
  misc_feature (1)..(25): SEQ ID NO: 1169; WAN024FRE_at; Start 430; Stop 454
gcttgtacctatgaccttatgagag

SEQ ID NO: 217962 - DNA, 25 bp, Artificial
  probe
  misc_feature (1)..(25): SEQ ID NO: 1169; WAN024FRE_at; Start 168; Stop 192
cgggatgtttgttttttcgcctgat

SEQ ID NO: 217963 - DNA, 25 bp, Artificial
  probe
  misc_feature (1)..(25): SEQ ID NO: 1169; WAN024FRE_at; Start 110; Stop 134
attgttgggctggaaaagtgtacca

SEQ ID NO: 217964 - DNA, 25 bp, Artificial
  probe
  misc_feature (1)..(25): SEQ ID NO: 1169; WAN024FRE_at; Start 319; Stop 343
gagcttcatttcttgcactatgcag

SEQ ID NO: 217965 - DNA, 25 bp, Artificial
  probe
  misc_feature (1)..(25): SEQ ID NO: 1169; WAN024FRE_at; Start 479; Stop 503
gtaaagtcattttttcatctaagaa

SEQ ID NO: 217966 - DNA, 25 bp, Artificial
  probe
  misc_feature (1)..(25): SEQ ID NO: 1169; WAN024FRE_at; Start 421; Stop 445
gacaatgatgcttgtacctatgacc

SEQ ID NO: 217967 - DNA, 25 bp, Artificial
  probe
  misc_feature (1)..(25): SEQ ID NO: 1169; WAN024FRE_at; Start 337; Stop 361
tatgcagatgaaaaagaggctactc

SEQ ID NO: 217968 - DNA, 25 bp, Artificial
  probe
  misc_feature (1)..(25): SEQ ID NO: 1169; WAN024FRE_at; Start 150; Stop 174
ctaccaaacaccctttatcgggatg

SEQ ID NO: 217969 - DNA, 25 bp, Artificial
  probe
  misc_feature (1)..(25): SEQ ID NO: 1169; WAN024FRE_at; Start 586; Stop 610
cgttatttcgatgttgtaaggtggc

SEQ ID NO: 217970 - DNA, 25 bp, Artificial
  probe
  misc_feature (1)..(25): SEQ ID NO: 1169; WAN024FRE_at; Start 128; Stop 152
tgtaccaagagttaggtttgcccta

SEQ ID NO: 217971 - DNA, 25 bp, Artificial
  probe
  misc_feature (1)..(25): SEQ ID NO: 4923; WAN024FRF_at; Start 122; Stop 146
acagtgacctaccttccttgattca

SEQ ID NO: 217972 - DNA, 25 bp, Artificial
  probe
  misc_feature (1)..(25): SEQ ID NO: 4923; WAN024FRF_at; Start 139; Stop 163
ttgattcattttaaatcagccgaga

SEQ ID NO: 217973 - DNA, 25 bp, Artificial
  probe
  misc_feature (1)..(25): SEQ ID NO: 4923; WAN024FRF_at; Start 26; Stop 50
tcaagttcaataataatgatatttg

SEQ ID NO: 217974 - DNA, 25 bp, Artificial
  probe
  misc_feature (1)..(25): SEQ ID NO: 4923; WAN024FRF_at; Start 126; Stop 150
tgacctaccttccttgattcatttt

SEQ ID NO: 217975 - DNA, 25 bp, Artificial
  probe
  misc_feature (1)..(25): SEQ ID NO: 4923; WAN024FRF_at; Start 127; Stop 151
gacctaccttccttgattcatttta

SEQ ID NO: 217976 - DNA, 25 bp, Artificial
  probe
  misc_feature (1)..(25): SEQ ID NO: 4923; WAN024FRF_at; Start 105; Stop 129
cttctcttcaaaaaattacagtgac

SEQ ID NO: 217977 - DNA, 25 bp, Artificial
  probe
  misc_feature (1)..(25): SEQ ID NO: 4923; WAN024FRF_at; Start 136; Stop 160
tccttgattcattttaaatcagccg

SEQ ID NO: 217978 - DNA, 25 bp, Artificial
  probe
  misc_feature (1)..(25): SEQ ID NO: 4923; WAN024FRF_at; Start 137; Stop 161
ccttgattcattttaaatcagccga

SEQ ID NO: 217979 - DNA, 25 bp, Artificial
  probe
  misc_feature (1)..(25): SEQ ID NO: 4923; WAN024FRF_at; Start 121; Stop 145
tacagtgacctaccttccttgattc

SEQ ID NO: 217980 - DNA, 25 bp, Artificial
  probe
  misc_feature (1)..(25): SEQ ID NO: 4923; WAN024FRF_at; Start 6; Stop 30
catttgggatgatttgtatttcaag

SEQ ID NO: 217981 - DNA, 25 bp, Artificial
  probe
  misc_feature (1)..(25): SEQ ID NO: 4923; WAN024FRF_at; Start 141; Stop 165
gattcattttaaatcagccgagaag

SEQ ID NO: 217982 - DNA, 25 bp, Artificial
  probe
  misc_feature (1)..(25): SEQ ID NO: 4923; WAN024FRF_at; Start 5; Stop 29
acatttgggatgatttgtatttcaa

SEQ ID NO: 217983 - DNA, 25 bp, Artificial
  probe
  misc_feature (1)..(25): SEQ ID NO: 4923; WAN024FRF_at; Start 69; Stop 93
agaatttgaagagcttccatacaag

SEQ ID NO: 217984 - DNA, 25 bp, Artificial
  probe
  misc_feature (1)..(25): SEQ ID NO: 4923; WAN024FRF_at; Start 3; Stop 27
gaacatttgggatgatttgtatttc

SEQ ID NO: 217985 - DNA, 25 bp, Artificial
  probe
  misc_feature (1)..(25): SEQ ID NO: 4923; WAN024FRF_at; Start 119; Stop 143
attacagtgacctaccttccttgat

SEQ ID NO: 217986 - DNA, 25 bp, Artificial
  probe
  misc_feature (1)..(25): SEQ ID NO: 4923; WAN024FRF_at; Start 118; Stop 142
aattacagtgacctaccttccttga

SEQ ID NO: 217987 - DNA, 25 bp, Artificial
  probe
  misc_feature (1)..(25): SEQ ID NO: 4923; WAN024FRF_at; Start 125; Stop 149
gtgacctaccttccttgattcattt

SEQ ID NO: 217988 - DNA, 25 bp, Artificial
  probe
  misc_feature (1)..(25): SEQ ID NO: 4923; WAN024FRF_at; Start 109; Stop 133
tcttcaaaaaattacagtgacctac

SEQ ID NO: 217989 - DNA, 25 bp, Artificial
  probe
  misc_feature (1)..(25): SEQ ID NO: 4923; WAN024FRF_at; Start 123; Stop 147
cagtgacctaccttccttgattcat

SEQ ID NO: 217990 - DNA, 25 bp, Artificial
  probe
  misc_feature (1)..(25): SEQ ID NO: 4923; WAN024FRF_at; Start 107; Stop 131
tctcttcaaaaaattacagtgacct

SEQ ID NO: 217991 - DNA, 25 bp, Artificial
  probe
  misc_feature (1)..(25): SEQ ID NO: 4923; WAN024FRF_at; Start 72; Stop 96
atttgaagagcttccatacaagagt

SEQ ID NO: 217992 - DNA, 25 bp, Artificial
  probe
  misc_feature (1)..(25): SEQ ID NO: 4923; WAN024FRF_at; Start 106; Stop 130
ttctcttcaaaaaattacagtgacc

SEQ ID NO: 217993 - DNA, 25 bp, Artificial
  probe
  misc_feature (1)..(25): SEQ ID NO: 4923; WAN024FRF_at; Start 124; Stop 148
agtgacctaccttccttgattcatt

SEQ ID NO: 217994 - DNA, 25 bp, Artificial
  probe
  misc_feature (1)..(25): SEQ ID NO: 4923; WAN024FRF_at; Start 133; Stop 157
ccttccttgattcattttaaatcag

SEQ ID NO: 217995 - DNA, 25 bp, Artificial
  probe
  misc_feature (1)..(25): SEQ ID NO: 4923; WAN024FRF_at; Start 4; Stop 28
aacatttgggatgatttgtatttca

SEQ ID NO: 217996 - DNA, 25 bp, Artificial
  probe
  misc_feature (1)..(25): SEQ ID NO: 4923; WAN024FRF_at; Start 70; Stop 94
gaatttgaagagcttccatacaaga

SEQ ID NO: 217997 - DNA, 25 bp, Artificial
  probe
  misc_feature (1)..(25): SEQ ID NO: 4923; WAN024FRF_at; Start 140; Stop 164
tgattcattttaaatcagccgagaa

SEQ ID NO: 217998 - DNA, 25 bp, Artificial
  probe
  misc_feature (1)..(25): SEQ ID NO: 4923; WAN024FRF_at; Start 117; Stop 141
aaattacagtgacctaccttccttg

SEQ ID NO: 217999 - DNA, 25 bp, Artificial
  probe
  misc_feature (1)..(25): SEQ ID NO: 4923; WAN024FRF_at; Start 120; Stop 144
ttacagtgacctaccttccttgatt

SEQ ID NO: 218000 - DNA, 25 bp, Artificial
  probe
  misc_feature (1)..(25): SEQ ID NO: 4923; WAN024FRF_at; Start 138; Stop 162
cttgattcattttaaatcagccgag

SEQ ID NO: 218001 - DNA, 25 bp, Artificial
  probe
  misc_feature (1)..(25): SEQ ID NO: 4923; WAN024FRF_at; Start 71; Stop 95
aatttgaagagcttccatacaagag

SEQ ID NO: 218002 - DNA, 25 bp, Artificial
  probe
  misc_feature (1)..(25): SEQ ID NO: 4923; WAN024FRF_at; Start 134; Stop 158
cttccttgattcattttaaatcagc

SEQ ID NO: 218003 - DNA, 25 bp, Artificial
  probe
  misc_feature (1)..(25): SEQ ID NO: 4923; WAN024FRF_at; Start 7; Stop 31
atttgggatgatttgtatttcaagt

SEQ ID NO: 218004 - DNA, 25 bp, Artificial
  probe
  misc_feature (1)..(25): SEQ ID NO: 4923; WAN024FRF_at; Start 39; Stop 63
taatgatatttgtacttatgaattg

SEQ ID NO: 218005 - DNA, 25 bp, Artificial
  probe
  misc_feature (1)..(25): SEQ ID NO: 847; WAN024FRG_at; Start 595; Stop 619
gaggatgctctcgtcattggtatgg

SEQ ID NO: 218006 - DNA, 25 bp, Artificial
  probe
  misc_feature (1)..(25): SEQ ID NO: 847; WAN024FRG_at; Start 692; Stop 716
cgaattccgtagcttttctagcggg

SEQ ID NO: 218007 - DNA, 25 bp, Artificial
  probe
  misc_feature (1)..(25): SEQ ID NO: 847; WAN024FRG_at; Start 230; Stop 254
tgaaattttatcgtcgttactccca

SEQ ID NO: 218008 - DNA, 25 bp, Artificial
  probe
  misc_feature (1)..(25): SEQ ID NO: 847; WAN024FRG_at; Start 915; Stop 939
taagccagtagtcggctaccgtcat

SEQ ID NO: 218009 - DNA, 25 bp, Artificial
  probe
  misc_feature (1)..(25): SEQ ID NO: 847; WAN024FRG_at; Start 997; Stop 1021
caatcacaagaactatcggatgcga

SEQ ID NO: 218010 - DNA, 25 bp, Artificial
  probe
  misc_feature (1)..(25): SEQ ID NO: 847; WAN024FRG_at; Start 102; Stop 126
tcatattatcctgcctaatgacggt

SEQ ID NO: 218011 - DNA, 25 bp, Artificial
  probe
  misc_feature (1)..(25): SEQ ID NO: 847; WAN024FRG_at; Start 482; Stop 506
aacagtctccctttatcaaagaggg

SEQ ID NO: 218012 - DNA, 25 bp, Artificial
  probe
  misc_feature (1)..(25): SEQ ID NO: 847; WAN024FRG_at; Start 513; Stop 537
tcaggttatctataacggagtggac

SEQ ID NO: 218013 - DNA, 25 bp, Artificial
  probe
  misc_feature (1)..(25): SEQ ID NO: 847; WAN024FRG_at; Start 652; Stop 676
gattttctagaagctgtgacaccga

SEQ ID NO: 218014 - DNA, 25 bp, Artificial
  probe
  misc_feature (1)..(25): SEQ ID NO: 847; WAN024FRG_at; Start 1019; Stop 1043
cgattttggagttggtttctgatcc

SEQ ID NO: 218015 - DNA, 25 bp, Artificial
  probe
  misc_feature (1)..(25): SEQ ID NO: 847; WAN024FRG_at; Start 347; Stop 371
tgaaacttcccttgatctggcacgt

SEQ ID NO: 218016 - DNA, 25 bp, Artificial
  probe
  misc_feature (1)..(25): SEQ ID NO: 847; WAN024FRG_at; Start 893; Stop 917
tactagaggctatggcttgtggtaa

SEQ ID NO: 218017 - DNA, 25 bp, Artificial
  probe
  misc_feature (1)..(25): SEQ ID NO: 847; WAN024FRG_at; Start 931; Stop 955
taccgtcatggtggtgtctctgaaa

SEQ ID NO: 218018 - DNA, 25 bp, Artificial
  probe
  misc_feature (1)..(25): SEQ ID NO: 847; WAN024FRG_at; Start 948; Stop 972
ctctgaaatggttgttgaaggaacc

SEQ ID NO: 218019 - DNA, 25 bp, Artificial
  probe
  misc_feature (1)..(25): SEQ ID NO: 847; WAN024FRG_at; Start 534; Stop 558
ggacaatgcgatctatcatccgatg

SEQ ID NO: 218020 - DNA, 25 bp, Artificial
  probe
  misc_feature (1)..(25): SEQ ID NO: 847; WAN024FRG_at; Start 983; Stop 1007
tggcaatcccaggacaatcacaaga

SEQ ID NO: 218021 - DNA, 25 bp, Artificial
  probe
  misc_feature (1)..(25): SEQ ID NO: 847; WAN024FRG_at; Start 117; Stop 141
taatgacggtgttttagtcgaagcc

SEQ ID NO: 218022 - DNA, 25 bp, Artificial
  probe
  misc_feature (1)..(25): SEQ ID NO: 847; WAN024FRG_at; Start 331; Stop 355
tatctcaaaagaaaggtgaaacttc

SEQ ID NO: 218023 - DNA, 25 bp, Artificial
  probe
  misc_feature (1)..(25): SEQ ID NO: 847; WAN024FRG_at; Start 569; Stop 593
cagtgcgtgaaaaatttgggatccc

SEQ ID NO: 218024 - DNA, 25 bp, Artificial
  probe
  misc_feature (1)..(25): SEQ ID NO: 847; WAN024FRG_at; Start 740; Stop 764
ggcgagttgaagaattagagtctaa

SEQ ID NO: 218025 - DNA, 25 bp, Artificial
  probe
  misc_feature (1)..(25): SEQ ID NO: 847; WAN024FRG_at; Start 669; Stop 693
gacaccgattttggagcataatccg

SEQ ID NO: 218026 - DNA, 25 bp, Artificial
  probe
  misc_feature (1)..(25): SEQ ID NO: 847; WAN024FRG_at; Start 147; Stop 171
ccaagttggcgctcaggttagcgtg

SEQ ID NO: 218027 - DNA, 25 bp, Artificial
  probe
  misc_feature (1)..(25): SEQ ID NO: 847; WAN024FRG_at; Start 1072; Stop 1096
tcagtaagaagacaaggagaatcgt

SEQ ID NO: 218028 - DNA, 25 bp, Artificial
  probe
  misc_feature (1)..(25): SEQ ID NO: 847; WAN024FRG_at; Start 306; Stop 330
tacaacagctgtcttggaaggaatc

SEQ ID NO: 218029 - DNA, 25 bp, Artificial
  probe
  misc_feature (1)..(25): SEQ ID NO: 847; WAN024FRG_at; Start 1039; Stop 1063
gatccagaaaaacggctccaatttg

SEQ ID NO: 218030 - DNA, 25 bp, Artificial
  probe
  misc_feature (1)..(25): SEQ ID NO: 847; WAN024FRG_at; Start 449; Stop 473
taacagtctctcaagctgtggccag

SEQ ID NO: 218031 - DNA, 25 bp, Artificial
  probe
  misc_feature (1)..(25): SEQ ID NO: 847; WAN024FRG_at; Start 583; Stop 607
tttgggatcccagaggatgctctcg

SEQ ID NO: 218032 - DNA, 25 bp, Artificial
  probe
  misc_feature (1)..(25): SEQ ID NO: 847; WAN024FRG_at; Start 968; Stop 992
gaaccaatggcttactggcaatccc

SEQ ID NO: 218033 - DNA, 25 bp, Artificial
  probe
  misc_feature (1)..(25): SEQ ID NO: 847; WAN024FRG_at; Start 130; Stop 154
ttagtcgaagccctacgccaagttg

SEQ ID NO: 218034 - DNA, 25 bp, Artificial
  probe
  misc_feature (1)..(25): SEQ ID NO: 847; WAN024FRG_at; Start 465; Stop 489
tgtggccagtcatgtcaaacagtct

SEQ ID NO: 218035 - DNA, 25 bp, Artificial
  probe
  misc_feature (1)..(25): SEQ ID NO: 847; WAN024FRG_at; Start 609; Stop 633
cattggtatggttggacgtgtcaac

SEQ ID NO: 218036 - DNA, 25 bp, Artificial
  probe
  misc_feature (1)..(25): SEQ ID NO: 847; WAN024FRG_at; Start 498; Stop 522
caaagagggtcaggttcaggttatc

SEQ ID NO: 218037 - DNA, 25 bp, Artificial
  probe
  misc_feature (1)..(25): SEQ ID NO: 847; WAN024FRG_at; Start 1055; Stop 1079
tccaatttggccaagcatcagtaag

SEQ ID NO: 218038 - DNA, 25 bp, Artificial
  probe
  misc_feature (1)..(25): SEQ ID NO: 847; WAN024FRG_at; Start 550; Stop 574
catccgatgcagtcaagtgcagtgc

SEQ ID NO: 218039 - DNA, 25 bp, Artificial
  probe
  misc_feature (1)..(25): SEQ ID NO: 846; WAN024FRH_at; Start 331; Stop 355
tatctcaagagaaaagtaaaactcc

SEQ ID NO: 218040 - DNA, 25 bp, Artificial
  probe
  misc_feature (1)..(25): SEQ ID NO: 846; WAN024FRH_at; Start 1064; Stop 1088
gaagtgcatctttccaacgtcaaaa

SEQ ID NO: 218041 - DNA, 25 bp, Artificial
  probe
  misc_feature (1)..(25): SEQ ID NO: 846; WAN024FRH_at; Start 131; Stop 155
tagtcaaggccttgcgtcaagttgg

SEQ ID NO: 218042 - DNA, 25 bp, Artificial
  probe
  misc_feature (1)..(25): SEQ ID NO: 846; WAN024FRH_at; Start 238; Stop 262
tatcggcgctactctcaaaaaattt

SEQ ID NO: 218043 - DNA, 25 bp, Artificial
  probe
  misc_feature (1)..(25): SEQ ID NO: 846; WAN024FRH_at; Start 624; Stop 648
ccgcgtcaacgcttggaagggacag

SEQ ID NO: 218044 - DNA, 25 bp, Artificial
  probe
  misc_feature (1)..(25): SEQ ID NO: 846; WAN024FRH_at; Start 915; Stop 939
caaaccagtagttggctatcggcat

SEQ ID NO: 218045 - DNA, 25 bp, Artificial
  probe
  misc_feature (1)..(25): SEQ ID NO: 846; WAN024FRH_at; Start 706; Stop 730
tttctggcaggaagtgcctttgcgg

SEQ ID NO: 218046 - DNA, 25 bp, Artificial
  probe
  misc_feature (1)..(25): SEQ ID NO: 846; WAN024FRH_at; Start 652; Stop 676
gattttctagaagcagtggcgccga

SEQ ID NO: 218047 - DNA, 25 bp, Artificial
  probe
  misc_feature (1)..(25): SEQ ID NO: 846; WAN024FRH_at; Start 452; Stop 476
cagtatctcaagctgtttccagcca

SEQ ID NO: 218048 - DNA, 25 bp, Artificial
  probe
  misc_feature (1)..(25): SEQ ID NO: 846; WAN024FRH_at; Start 748; Stop 772
gaagaactcgaatctacgattgcca

SEQ ID NO: 218049 - DNA, 25 bp, Artificial
  probe
  misc_feature (1)..(25): SEQ ID NO: 846; WAN024FRH_at; Start 931; Stop 955
tatcggcatggtggtgtctgtgaaa

SEQ ID NO: 218050 - DNA, 25 bp, Artificial
  probe
  misc_feature (1)..(25): SEQ ID NO: 846; WAN024FRH_at; Start 294; Stop 318
tgttcataacaatacgacagccgtt

SEQ ID NO: 218051 - DNA, 25 bp, Artificial
  probe
  misc_feature (1)..(25): SEQ ID NO: 846; WAN024FRH_at; Start 893; Stop 917
tactagaggcgatggcatgtggcaa

SEQ ID NO: 218052 - DNA, 25 bp, Artificial
  probe
  misc_feature (1)..(25): SEQ ID NO: 846; WAN024FRH_at; Start 1024; Stop 1048
caagaattggctgacaatatcgaga

SEQ ID NO: 218053 - DNA, 25 bp, Artificial
  probe
  misc_feature (1)..(25): SEQ ID NO: 846; WAN024FRH_at; Start 805; Stop 829
gactattatgagcatacgactgagc

SEQ ID NO: 218054 - DNA, 25 bp, Artificial
  probe
  misc_feature (1)..(25): SEQ ID NO: 846; WAN024FRH_at; Start 947; Stop 971
tctgtgaaatgattaaggagggcaa

SEQ ID NO: 218055 - DNA, 25 bp, Artificial
  probe
  misc_feature (1)..(25): SEQ ID NO: 846; WAN024FRH_at; Start 967; Stop 991
ggcaaaaacggtctcctagccactc

SEQ ID NO: 218056 - DNA, 25 bp, Artificial
  probe
  misc_feature (1)..(25): SEQ ID NO: 846; WAN024FRH_at; Start 346; Stop 370
gtaaaactccccttaatctggcatg

SEQ ID NO: 218057 - DNA, 25 bp, Artificial
  probe
  misc_feature (1)..(25): SEQ ID NO: 846; WAN024FRH_at; Start 534; Stop 558
ggacaatgctgtctatcatcccatg

SEQ ID NO: 218058 - DNA, 25 bp, Artificial
  probe
  misc_feature (1)..(25): SEQ ID NO: 846; WAN024FRH_at; Start 308; Stop 332
cgacagccgttctggaaggaatcta

SEQ ID NO: 218059 - DNA, 25 bp, Artificial
  probe
  misc_feature (1)..(25): SEQ ID NO: 846; WAN024FRH_at; Start 1041; Stop 1065
tatcgagaaaagagaacagttagga

SEQ ID NO: 218060 - DNA, 25 bp, Artificial
  probe
  misc_feature (1)..(25): SEQ ID NO: 846; WAN024FRH_at; Start 97; Stop 121
gaagctcatgtcatcctgccaaatg

SEQ ID NO: 218061 - DNA, 25 bp, Artificial
  probe
  misc_feature (1)..(25): SEQ ID NO: 846; WAN024FRH_at; Start 693; Stop 717
caattctatcgcttttctggcagga

SEQ ID NO: 218062 - DNA, 25 bp, Artificial
  probe
  misc_feature (1)..(25): SEQ ID NO: 846; WAN024FRH_at; Start 497; Stop 521
tcaaagaaggtcaggtacaggttgt

SEQ ID NO: 218063 - DNA, 25 bp, Artificial
  probe
  misc_feature (1)..(25): SEQ ID NO: 846; WAN024FRH_at; Start 116; Stop 140
caaatgatggtgttttagtcaaggc

SEQ ID NO: 218064 - DNA, 25 bp, Artificial
  probe
  misc_feature (1)..(25): SEQ ID NO: 846; WAN024FRH_at; Start 554; Stop 578
ccatgcaagcaagcacagtgcgtga

SEQ ID NO: 218065 - DNA, 25 bp, Artificial
  probe
  misc_feature (1)..(25): SEQ ID NO: 846; WAN024FRH_at; Start 569; Stop 593
cagtgcgtgaacaatttgctattcc

SEQ ID NO: 218066 - DNA, 25 bp, Artificial
  probe
  misc_feature (1)..(25): SEQ ID NO: 846; WAN024FRH_at; Start 223; Stop 247
gaatatctgaaatcctatcggcgct

SEQ ID NO: 218067 - DNA, 25 bp, Artificial
  probe
  misc_feature (1)..(25): SEQ ID NO: 846; WAN024FRH_at; Start 983; Stop 1007
tagccactccaaataagcctgcaga

SEQ ID NO: 218068 - DNA, 25 bp, Artificial
  probe
  misc_feature (1)..(25): SEQ ID NO: 846; WAN024FRH_at; Start 595; Stop 619
gaagaatctcttgtcattggtatgg

SEQ ID NO: 218069 - DNA, 25 bp, Artificial
  probe
  misc_feature (1)..(25): SEQ ID NO: 846; WAN024FRH_at; Start 609; Stop 633
cattggtatggtaggccgcgtcaac

SEQ ID NO: 218070 - DNA, 25 bp, Artificial
  probe
  misc_feature (1)..(25): SEQ ID NO: 846; WAN024FRH_at; Start 665; Stop 689
cagtggcgccgattttggagcagaa

SEQ ID NO: 218071 - DNA, 25 bp, Artificial
  probe
  misc_feature (1)..(25): SEQ ID NO: 846; WAN024FRH_at; Start 513; Stop 537
acaggttgtatataacggagtggac

SEQ ID NO: 218072 - DNA, 25 bp, Artificial
  probe
  misc_feature (1)..(25): SEQ ID NO: 846; WAN024FRH_at; Start 1000; Stop 1024
cctgcagaattgtctaaggctattc

SEQ ID NO: 218073 - DNA, 25 bp, Artificial
  probe
  misc_feature (1)..(25): SEQ ID NO: 3086; WAN024FRI_at; Start 20; Stop 44
aagtgttagaattagagaatgtatt

SEQ ID NO: 218074 - DNA, 25 bp, Artificial
  probe
  misc_feature (1)..(25): SEQ ID NO: 3086; WAN024FRI_at; Start 27; Stop 51
agaattagagaatgtattaatgagt

SEQ ID NO: 218075 - DNA, 25 bp, Artificial
  probe
  misc_feature (1)..(25): SEQ ID NO: 3086; WAN024FRI_at; Start 17; Stop 41
aaaaagtgttagaattagagaatgt

SEQ ID NO: 218076 - DNA, 25 bp, Artificial
  probe
  misc_feature (1)..(25): SEQ ID NO: 3086; WAN024FRI_at; Start 46; Stop 70
atgagtttaggagaaagtatagatg

SEQ ID NO: 218077 - DNA, 25 bp, Artificial
  probe
  misc_feature (1)..(25): SEQ ID NO: 3086; WAN024FRI_at; Start 19; Stop 43
aaagtgttagaattagagaatgtat

SEQ ID NO: 218078 - DNA, 25 bp, Artificial
  probe
  misc_feature (1)..(25): SEQ ID NO: 3086; WAN024FRI_at; Start 48; Stop 72
gagtttaggagaaagtatagatgtc

SEQ ID NO: 218079 - DNA, 25 bp, Artificial
  probe
  misc_feature (1)..(25): SEQ ID NO: 3086; WAN024FRI_at; Start 47; Stop 71
tgagtttaggagaaagtatagatgt

SEQ ID NO: 218080 - DNA, 25 bp, Artificial
  probe
  misc_feature (1)..(25): SEQ ID NO: 3086; WAN024FRI_at; Start 44; Stop 68
taatgagtttaggagaaagtataga

SEQ ID NO: 218081 - DNA, 25 bp, Artificial
  probe
  misc_feature (1)..(25): SEQ ID NO: 3086; WAN024FRI_at; Start 37; Stop 61
aatgtattaatgagtttaggagaaa

SEQ ID NO: 218082 - DNA, 25 bp, Artificial
  probe
  misc_feature (1)..(25): SEQ ID NO: 3086; WAN024FRI_at; Start 23; Stop 47
tgttagaattagagaatgtattaat

SEQ ID NO: 218083 - DNA, 25 bp, Artificial
  probe
  misc_feature (1)..(25): SEQ ID NO: 3086; WAN024FRI_at; Start 50; Stop 74
gtttaggagaaagtatagatgtcaa

SEQ ID NO: 218084 - DNA, 25 bp, Artificial
  probe
  misc_feature (1)..(25): SEQ ID NO: 3086; WAN024FRI_at; Start 28; Stop 52
gaattagagaatgtattaatgagtt

SEQ ID NO: 218085 - DNA, 25 bp, Artificial
  probe
  misc_feature (1)..(25): SEQ ID NO: 3086; WAN024FRI_at; Start 40; Stop 64
gtattaatgagtttaggagaaagta

SEQ ID NO: 218086 - DNA, 25 bp, Artificial
  probe
  misc_feature (1)..(25): SEQ ID NO: 3086; WAN024FRI_at; Start 53; Stop 77
taggagaaagtatagatgtcaatat

SEQ ID NO: 218087 - DNA, 25 bp, Artificial
  probe
  misc_feature (1)..(25): SEQ ID NO: 3086; WAN024FRI_at; Start 22; Stop 46
gtgttagaattagagaatgtattaa

SEQ ID NO: 218088 - DNA, 25 bp, Artificial
  probe
  misc_feature (1)..(25): SEQ ID NO: 3086; WAN024FRI_at; Start 51; Stop 75
tttaggagaaagtatagatgtcaat

SEQ ID NO: 218089 - DNA, 25 bp, Artificial
  probe
  misc_feature (1)..(25): SEQ ID NO: 3086; WAN024FRI_at; Start 42; Stop 66
attaatgagtttaggagaaagtata

SEQ ID NO: 218090 - DNA, 25 bp, Artificial
  probe
  misc_feature (1)..(25): SEQ ID NO: 3086; WAN024FRI_at; Start 24; Stop 48
gttagaattagagaatgtattaatg

SEQ ID NO: 218091 - DNA, 25 bp, Artificial
  probe
  misc_feature (1)..(25): SEQ ID NO: 3086; WAN024FRI_at; Start 26; Stop 50
tagaattagagaatgtattaatgag

SEQ ID NO: 218092 - DNA, 25 bp, Artificial
  probe
  misc_feature (1)..(25): SEQ ID NO: 3086; WAN024FRI_at; Start 38; Stop 62
atgtattaatgagtttaggagaaag

SEQ ID NO: 218093 - DNA, 25 bp, Artificial
  probe
  misc_feature (1)..(25): SEQ ID NO: 3086; WAN024FRI_at; Start 18; Stop 42
aaaagtgttagaattagagaatgta

SEQ ID NO: 218094 - DNA, 25 bp, Artificial
  probe
  misc_feature (1)..(25): SEQ ID NO: 3086; WAN024FRI_at; Start 41; Stop 65
tattaatgagtttaggagaaagtat

SEQ ID NO: 218095 - DNA, 25 bp, Artificial
  probe
  misc_feature (1)..(25): SEQ ID NO: 3086; WAN024FRI_at; Start 31; Stop 55
ttagagaatgtattaatgagtttag

SEQ ID NO: 218096 - DNA, 25 bp, Artificial
  probe
  misc_feature (1)..(25): SEQ ID NO: 3086; WAN024FRI_at; Start 30; Stop 54
attagagaatgtattaatgagttta

SEQ ID NO: 218097 - DNA, 25 bp, Artificial
  probe
  misc_feature (1)..(25): SEQ ID NO: 3086; WAN024FRI_at; Start 43; Stop 67
ttaatgagtttaggagaaagtatag

SEQ ID NO: 218098 - DNA, 25 bp, Artificial
  probe
  misc_feature (1)..(25): SEQ ID NO: 3086; WAN024FRI_at; Start 29; Stop 53
aattagagaatgtattaatgagttt

SEQ ID NO: 218099 - DNA, 25 bp, Artificial
  probe
  misc_feature (1)..(25): SEQ ID NO: 3086; WAN024FRI_at; Start 16; Stop 40
gaaaaagtgttagaattagagaatg

SEQ ID NO: 218100 - DNA, 25 bp, Artificial
  probe
  misc_feature (1)..(25): SEQ ID NO: 3086; WAN024FRI_at; Start 54; Stop 78
aggagaaagtatagatgtcaatata

SEQ ID NO: 218101 - DNA, 25 bp, Artificial
  probe
  misc_feature (1)..(25): SEQ ID NO: 3086; WAN024FRI_at; Start 52; Stop 76
ttaggagaaagtatagatgtcaata

SEQ ID NO: 218102 - DNA, 25 bp, Artificial
  probe
  misc_feature (1)..(25): SEQ ID NO: 3086; WAN024FRI_at; Start 45; Stop 69
aatgagtttaggagaaagtatagat

SEQ ID NO: 218103 - DNA, 25 bp, Artificial
  probe
  misc_feature (1)..(25): SEQ ID NO: 3086; WAN024FRI_at; Start 49; Stop 73
agtttaggagaaagtatagatgtca

SEQ ID NO: 218104 - DNA, 25 bp, Artificial
  probe
  misc_feature (1)..(25): SEQ ID NO: 3086; WAN024FRI_at; Start 39; Stop 63
tgtattaatgagtttaggagaaagt

SEQ ID NO: 218105 - DNA, 25 bp, Artificial
  probe
  misc_feature (1)..(25): SEQ ID NO: 3086; WAN024FRI_at; Start 21; Stop 45
agtgttagaattagagaatgtatta

SEQ ID NO: 218106 - DNA, 25 bp, Artificial
  probe
  misc_feature (1)..(25): SEQ ID NO: 3086; WAN024FRI_at; Start 25; Stop 49
ttagaattagagaatgtattaatga

SEQ ID NO: 218107 - DNA, 25 bp, Artificial
  probe
  misc_feature (1)..(25): SEQ ID NO: 5581; WAN024FRJ_at; Start 101; Stop 125
agtttacggaaccactcaccagcac

SEQ ID NO: 218108 - DNA, 25 bp, Artificial
  probe
  misc_feature (1)..(25): SEQ ID NO: 5581; WAN024FRJ_at; Start 236; Stop 260
gcacggctacgaagaccataggcct

SEQ ID NO: 218109 - DNA, 25 bp, Artificial
  probe
  misc_feature (1)..(25): SEQ ID NO: 5581; WAN024FRJ_at; Start 45; Stop 69
caatcataatcaaggctgggtcaga

SEQ ID NO: 218110 - DNA, 25 bp, Artificial
  probe
  misc_feature (1)..(25): SEQ ID NO: 5581; WAN024FRJ_at; Start 58; Stop 82
ggctgggtcagatacgataactgct

SEQ ID NO: 218111 - DNA, 25 bp, Artificial
  probe
  misc_feature (1)..(25): SEQ ID NO: 5581; WAN024FRJ_at; Start 42; Stop 66
ctgcaatcataatcaaggctgggtc

SEQ ID NO: 218112 - DNA, 25 bp, Artificial
  probe
  misc_feature (1)..(25): SEQ ID NO: 5581; WAN024FRJ_at; Start 16; Stop 40
gatttcaaggcctggtgcttcagtc

SEQ ID NO: 218113 - DNA, 25 bp, Artificial
  probe
  misc_feature (1)..(25): SEQ ID NO: 5581; WAN024FRJ_at; Start 278; Stop 302
gcatctgctccatactgaacagcta

SEQ ID NO: 218114 - DNA, 25 bp, Artificial
  probe
  misc_feature (1)..(25): SEQ ID NO: 5581; WAN024FRJ_at; Start 75; Stop 99
taactgctgcaatcccgatatcacg

SEQ ID NO: 218115 - DNA, 25 bp, Artificial
  probe
  misc_feature (1)..(25): SEQ ID NO: 5581; WAN024FRJ_at; Start 167; Stop 191
tagaccttggcaccatacttggccg

SEQ ID NO: 218116 - DNA, 25 bp, Artificial
  probe
  misc_feature (1)..(25): SEQ ID NO: 5581; WAN024FRJ_at; Start 185; Stop 209
ttggccgcaaactgcacgccttctt

SEQ ID NO: 218117 - DNA, 25 bp, Artificial
  probe
  misc_feature (1)..(25): SEQ ID NO: 5581; WAN024FRJ_at; Start 153; Stop 177
tattagccgctacatagaccttggc

SEQ ID NO: 218118 - DNA, 25 bp, Artificial
  probe
  misc_feature (1)..(25): SEQ ID NO: 5581; WAN024FRJ_at; Start 241; Stop 265
gctacgaagaccataggcctgacca

SEQ ID NO: 218119 - DNA, 25 bp, Artificial
  probe
  misc_feature (1)..(25): SEQ ID NO: 5581; WAN024FRJ_at; Start 161; Stop 185
gctacatagaccttggcaccatact

SEQ ID NO: 218120 - DNA, 25 bp, Artificial
  probe
  misc_feature (1)..(25): SEQ ID NO: 5581; WAN024FRJ_at; Start 68; Stop 92
gatacgataactgctgcaatcccga

SEQ ID NO: 218121 - DNA, 25 bp, Artificial
  probe
  misc_feature (1)..(25): SEQ ID NO: 5581; WAN024FRJ_at; Start 198; Stop 222
gcacgccttcttccatctgttcgaa

SEQ ID NO: 218122 - DNA, 25 bp, Artificial
  probe
  misc_feature (1)..(25): SEQ ID NO: 5581; WAN024FRJ_at; Start 249; Stop 273
gaccataggcctgaccaccgataaa

SEQ ID NO: 218123 - DNA, 25 bp, Artificial
  probe
  misc_feature (1)..(25): SEQ ID NO: 5581; WAN024FRJ_at; Start 137; Stop 161
ccttcgtgcataaccatattagccg

SEQ ID NO: 218124 - DNA, 25 bp, Artificial
  probe
  misc_feature (1)..(25): SEQ ID NO: 5581; WAN024FRJ_at; Start 209; Stop 233
tccatctgttcgaaagtaaagtttc

SEQ ID NO: 218125 - DNA, 25 bp, Artificial
  probe
  misc_feature (1)..(25): SEQ ID NO: 5581; WAN024FRJ_at; Start 128; Stop 152
gcttcatttccttcgtgcataacca

SEQ ID NO: 218126 - DNA, 25 bp, Artificial
  probe
  misc_feature (1)..(25): SEQ ID NO: 5581; WAN024FRJ_at; Start 230; Stop 254
tttcccgcacggctacgaagaccat

SEQ ID NO: 218127 - DNA, 25 bp, Artificial
  probe
  misc_feature (1)..(25): SEQ ID NO: 5581; WAN024FRJ_at; Start 174; Stop 198
tggcaccatacttggccgcaaactg

SEQ ID NO: 218128 - DNA, 25 bp, Artificial
  probe
  misc_feature (1)..(25): SEQ ID NO: 5581; WAN024FRJ_at; Start 6; Stop 30
tagaaaggtggatttcaaggcctgg

SEQ ID NO: 218129 - DNA, 25 bp, Artificial
  probe
  misc_feature (1)..(25): SEQ ID NO: 5581; WAN024FRJ_at; Start 181; Stop 205
atacttggccgcaaactgcacgcct

SEQ ID NO: 218130 - DNA, 25 bp, Artificial
  probe
  misc_feature (1)..(25): SEQ ID NO: 5581; WAN024FRJ_at; Start 84; Stop 108
caatcccgatatcacgcagtttacg

SEQ ID NO: 218131 - DNA, 25 bp, Artificial
  probe
  misc_feature (1)..(25): SEQ ID NO: 5581; WAN024FRJ_at; Start 284; Stop 308
gctccatactgaacagctaccttta

SEQ ID NO: 218132 - DNA, 25 bp, Artificial
  probe
  misc_feature (1)..(25): SEQ ID NO: 5581; WAN024FRJ_at; Start 120; Stop 144
cagcaccagcttcatttccttcgtg

SEQ ID NO: 218133 - DNA, 25 bp, Artificial
  probe
  misc_feature (1)..(25): SEQ ID NO: 5581; WAN024FRJ_at; Start 91; Stop 115
gatatcacgcagtttacggaaccac

SEQ ID NO: 218134 - DNA, 25 bp, Artificial
  probe
  misc_feature (1)..(25): SEQ ID NO: 5581; WAN024FRJ_at; Start 49; Stop 73
cataatcaaggctgggtcagatacg

SEQ ID NO: 218135 - DNA, 25 bp, Artificial
  probe
  misc_feature (1)..(25): SEQ ID NO: 5581; WAN024FRJ_at; Start 12; Stop 36
ggtggatttcaaggcctggtgcttc

SEQ ID NO: 218136 - DNA, 25 bp, Artificial
  probe
  misc_feature (1)..(25): SEQ ID NO: 5581; WAN024FRJ_at; Start 275; Stop 299
acagcatctgctccatactgaacag

SEQ ID NO: 218137 - DNA, 25 bp, Artificial
  probe
  misc_feature (1)..(25): SEQ ID NO: 5581; WAN024FRJ_at; Start 141; Stop 165
cgtgcataaccatattagccgctac

SEQ ID NO: 218138 - DNA, 25 bp, Artificial
  probe
  misc_feature (1)..(25): SEQ ID NO: 5581; WAN024FRJ_at; Start 54; Stop 78
tcaaggctgggtcagatacgataac

SEQ ID NO: 218139 - DNA, 25 bp, Artificial
  probe
  misc_feature (1)..(25): SEQ ID NO: 5581; WAN024FRJ_at; Start 98; Stop 122
cgcagtttacggaaccactcaccag

SEQ ID NO: 218140 - DNA, 25 bp, Artificial
  probe
  misc_feature (1)..(25): SEQ ID NO: 5581; WAN024FRJ_at; Start 62; Stop 86
gggtcagatacgataactgctgcaa

SEQ ID NO: 218141 - DNA, 25 bp, Artificial
  probe
  misc_feature (1)..(25): SEQ ID NO: 1912; WAN024FRK_at; Start 288; Stop 312
gactttcaagataggcatccacagc

SEQ ID NO: 218142 - DNA, 25 bp, Artificial
  probe
  misc_feature (1)..(25): SEQ ID NO: 1912; WAN024FRK_at; Start 2; Stop 26
tgcaaatcttcaatataggtttcaa

SEQ ID NO: 218143 - DNA, 25 bp, Artificial
  probe
  misc_feature (1)..(25): SEQ ID NO: 1912; WAN024FRK_at; Start 53; Stop 77
tcaacttggtccccttcgttaatga

SEQ ID NO: 218144 - DNA, 25 bp, Artificial
  probe
  misc_feature (1)..(25): SEQ ID NO: 1912; WAN024FRK_at; Start 24; Stop 48
caaaatgacggaaacctggaccata

SEQ ID NO: 218145 - DNA, 25 bp, Artificial
  probe
  misc_feature (1)..(25): SEQ ID NO: 1912; WAN024FRK_at; Start 293; Stop 317
tcaagataggcatccacagccgcct

SEQ ID NO: 218146 - DNA, 25 bp, Artificial
  probe
  misc_feature (1)..(25): SEQ ID NO: 1912; WAN024FRK_at; Start 267; Stop 291
tgatagcttcaaacttttcaggact

SEQ ID NO: 218147 - DNA, 25 bp, Artificial
  probe
  misc_feature (1)..(25): SEQ ID NO: 1912; WAN024FRK_at; Start 223; Stop 247
ttcacgttgggcaaccttccacatc

SEQ ID NO: 218148 - DNA, 25 bp, Artificial
  probe
  misc_feature (1)..(25): SEQ ID NO: 1912; WAN024FRK_at; Start 282; Stop 306
tttcaggactttcaagataggcatc

SEQ ID NO: 218149 - DNA, 25 bp, Artificial
  probe
  misc_feature (1)..(25): SEQ ID NO: 1912; WAN024FRK_at; Start 297; Stop 321
gataggcatccacagccgccttgta

SEQ ID NO: 218150 - DNA, 25 bp, Artificial
  probe
  misc_feature (1)..(25): SEQ ID NO: 1912; WAN024FRK_at; Start 291; Stop 315
tttcaagataggcatccacagccgc

SEQ ID NO: 218151 - DNA, 25 bp, Artificial
  probe
  misc_feature (1)..(25): SEQ ID NO: 1912; WAN024FRK_at; Start 22; Stop 46
ttcaaaatgacggaaacctggacca

SEQ ID NO: 218152 - DNA, 25 bp, Artificial
  probe
  misc_feature (1)..(25): SEQ ID NO: 1912; WAN024FRK_at; Start 38; Stop 62
cctggaccataaaactcaacttggt

SEQ ID NO: 218153 - DNA, 25 bp, Artificial
  probe
  misc_feature (1)..(25): SEQ ID NO: 1912; WAN024FRK_at; Start 311; Stop 335
gccgccttgtagcagttggttactg

SEQ ID NO: 218154 - DNA, 25 bp, Artificial
  probe
  misc_feature (1)..(25): SEQ ID NO: 1912; WAN024FRK_at; Start 119; Stop 143
taagaaaccacttcagcgacaaact

SEQ ID NO: 218155 - DNA, 25 bp, Artificial
  probe
  misc_feature (1)..(25): SEQ ID NO: 1912; WAN024FRK_at; Start 244; Stop 268
catctcgtccaccaagtcttgtttg

SEQ ID NO: 218156 - DNA, 25 bp, Artificial
  probe
  misc_feature (1)..(25): SEQ ID NO: 1912; WAN024FRK_at; Start 172; Stop 196
aaacaactgctcattttcagatggt

SEQ ID NO: 218157 - DNA, 25 bp, Artificial
  probe
  misc_feature (1)..(25): SEQ ID NO: 1912; WAN024FRK_at; Start 124; Stop 148
aaccacttcagcgacaaacttgtac

SEQ ID NO: 218158 - DNA, 25 bp, Artificial
  probe
  misc_feature (1)..(25): SEQ ID NO: 1912; WAN024FRK_at; Start 272; Stop 296
gcttcaaacttttcaggactttcaa

SEQ ID NO: 218159 - DNA, 25 bp, Artificial
  probe
  misc_feature (1)..(25): SEQ ID NO: 1912; WAN024FRK_at; Start 228; Stop 252
gttgggcaaccttccacatctcgtc

SEQ ID NO: 218160 - DNA, 25 bp, Artificial
  probe
  misc_feature (1)..(25): SEQ ID NO: 1912; WAN024FRK_at; Start 305; Stop 329
tccacagccgccttgtagcagttgg

SEQ ID NO: 218161 - DNA, 25 bp, Artificial
  probe
  misc_feature (1)..(25): SEQ ID NO: 1912; WAN024FRK_at; Start 122; Stop 146
gaaaccacttcagcgacaaacttgt

SEQ ID NO: 218162 - DNA, 25 bp, Artificial
  probe
  misc_feature (1)..(25): SEQ ID NO: 1912; WAN024FRK_at; Start 167; Stop 191
gcaccaaacaactgctcattttcag

SEQ ID NO: 218163 - DNA, 25 bp, Artificial
  probe
  misc_feature (1)..(25): SEQ ID NO: 1912; WAN024FRK_at; Start 309; Stop 333
cagccgccttgtagcagttggttac

SEQ ID NO: 218164 - DNA, 25 bp, Artificial
  probe
  misc_feature (1)..(25): SEQ ID NO: 1912; WAN024FRK_at; Start 36; Stop 60
aacctggaccataaaactcaacttg

SEQ ID NO: 218165 - DNA, 25 bp, Artificial
  probe
  misc_feature (1)..(25): SEQ ID NO: 1912; WAN024FRK_at; Start 279; Stop 303
acttttcaggactttcaagataggc

SEQ ID NO: 218166 - DNA, 25 bp, Artificial
  probe
  misc_feature (1)..(25): SEQ ID NO: 1912; WAN024FRK_at; Start 129; Stop 153
cttcagcgacaaacttgtactcagg

SEQ ID NO: 218167 - DNA, 25 bp, Artificial
  probe
  misc_feature (1)..(25): SEQ ID NO: 1912; WAN024FRK_at; Start 285; Stop 309
caggactttcaagataggcatccac

SEQ ID NO: 218168 - DNA, 25 bp, Artificial
  probe
  misc_feature (1)..(25): SEQ ID NO: 1912; WAN024FRK_at; Start 313; Stop 337
cgccttgtagcagttggttactgtt

SEQ ID NO: 218169 - DNA, 25 bp, Artificial
  probe
  misc_feature (1)..(25): SEQ ID NO: 1912; WAN024FRK_at; Start 110; Stop 134
gcatcatcataagaaaccacttcag

SEQ ID NO: 218170 - DNA, 25 bp, Artificial
  probe
  misc_feature (1)..(25): SEQ ID NO: 1912; WAN024FRK_at; Start 253; Stop 277
caccaagtcttgtttgatagcttca

SEQ ID NO: 218171 - DNA, 25 bp, Artificial
  probe
  misc_feature (1)..(25): SEQ ID NO: 1912; WAN024FRK_at; Start 114; Stop 138
catcataagaaaccacttcagcgac

SEQ ID NO: 218172 - DNA, 25 bp, Artificial
  probe
  misc_feature (1)..(25): SEQ ID NO: 1912; WAN024FRK_at; Start 307; Stop 331
cacagccgccttgtagcagttggtt

SEQ ID NO: 218173 - DNA, 25 bp, Artificial
  probe
  misc_feature (1)..(25): SEQ ID NO: 1912; WAN024FRK_at; Start 12; Stop 36
caatataggtttcaaaatgacggaa

SEQ ID NO: 218174 - DNA, 25 bp, Artificial
  probe
  misc_feature (1)..(25): SEQ ID NO: 1912; WAN024FRK_at; Start 255; Stop 279
ccaagtcttgtttgatagcttcaaa

SEQ ID NO: 218175 - DNA, 25 bp, Artificial
  probe
  misc_feature (1)..(25): SEQ ID NO: 5289; WAN024FRL_at; Start 187; Stop 211
cagtttgcggccaagtatggtgcca

SEQ ID NO: 218176 - DNA, 25 bp, Artificial
  probe
  misc_feature (1)..(25): SEQ ID NO: 5289; WAN024FRL_at; Start 403; Stop 427
gaaacccttgagttctggaaagagc

SEQ ID NO: 218177 - DNA, 25 bp, Artificial
  probe
  misc_feature (1)..(25): SEQ ID NO: 5289; WAN024FRL_at; Start 34; Stop 58
aaacgtcctgaggttttatcacctg

SEQ ID NO: 218178 - DNA, 25 bp, Artificial
  probe
  misc_feature (1)..(25): SEQ ID NO: 5289; WAN024FRL_at; Start 663; Stop 687
taagagtttgcagggtgagattcca

SEQ ID NO: 218179 - DNA, 25 bp, Artificial
  probe
  misc_feature (1)..(25): SEQ ID NO: 5289; WAN024FRL_at; Start 114; Stop 138
tatcggtggtcaggcctatggtctt

SEQ ID NO: 218180 - DNA, 25 bp, Artificial
  probe
  misc_feature (1)..(25): SEQ ID NO: 5289; WAN024FRL_at; Start 876; Stop 900
caaacaagacttggtggacgagatg

SEQ ID NO: 218181 - DNA, 25 bp, Artificial
  probe
  misc_feature (1)..(25): SEQ ID NO: 5289; WAN024FRL_at; Start 575; Stop 599
tgagtatgcgtgatgccaaccgtgg

SEQ ID NO: 218182 - DNA, 25 bp, Artificial
  probe
  misc_feature (1)..(25): SEQ ID NO: 5289; WAN024FRL_at; Start 163; Stop 187
ttcgaacagatggaagaaggcgtgc

SEQ ID NO: 218183 - DNA, 25 bp, Artificial
  probe
  misc_feature (1)..(25): SEQ ID NO: 5289; WAN024FRL_at; Start 1272; Stop 1296
ggaagatggaaccagcgtcacagtt

SEQ ID NO: 218184 - DNA, 25 bp, Artificial
  probe
  misc_feature (1)..(25): SEQ ID NO: 5289; WAN024FRL_at; Start 829; Stop 853
gcggctgtggatgcctatcttgaaa

SEQ ID NO: 218185 - DNA, 25 bp, Artificial
  probe
  misc_feature (1)..(25): SEQ ID NO: 5289; WAN024FRL_at; Start 389; Stop 413
gtgccactaactatgaaacccttga

SEQ ID NO: 218186 - DNA, 25 bp, Artificial
  probe
  misc_feature (1)..(25): SEQ ID NO: 5289; WAN024FRL_at; Start 346; Stop 370
actgaagcaccaggccttgaaatcc

SEQ ID NO: 218187 - DNA, 25 bp, Artificial
  probe
  misc_feature (1)..(25): SEQ ID NO: 5289; WAN024FRL_at; Start 52; Stop 76
tcacctgcagggactttagagaagc

SEQ ID NO: 218188 - DNA, 25 bp, Artificial
  probe
  misc_feature (1)..(25): SEQ ID NO: 5289; WAN024FRL_at; Start 434; Stop 458
tgactcgtgtcgttttagcgcgtga

SEQ ID NO: 218189 - DNA, 25 bp, Artificial
  probe
  misc_feature (1)..(25): SEQ ID NO: 5289; WAN024FRL_at; Start 319; Stop 343
gacccagccttgattatgattgcag

SEQ ID NO: 218190 - DNA, 25 bp, Artificial
  probe
  misc_feature (1)..(25): SEQ ID NO: 5289; WAN024FRL_at; Start 628; Stop 652
tacgacctttacgatatgccatttg

SEQ ID NO: 218191 - DNA, 25 bp, Artificial
  probe
  misc_feature (1)..(25): SEQ ID NO: 5289; WAN024FRL_at; Start 261; Stop 285
tgctggtgagtggttccgtaaactg

SEQ ID NO: 218192 - DNA, 25 bp, Artificial
  probe
  misc_feature (1)..(25): SEQ ID NO: 5289; WAN024FRL_at; Start 644; Stop 668
tgccatttgggaaagaacgtaagag

SEQ ID NO: 218193 - DNA, 25 bp, Artificial
  probe
  misc_feature (1)..(25): SEQ ID NO: 5289; WAN024FRL_at; Start 756; Stop 780
tgtggacagtctaaaaatcgaagga

SEQ ID NO: 218194 - DNA, 25 bp, Artificial
  probe
  misc_feature (1)..(25): SEQ ID NO: 5289; WAN024FRL_at; Start 550; Stop 574
ggacgttgtactctttcaaaccaca

SEQ ID NO: 218195 - DNA, 25 bp, Artificial
  probe
  misc_feature (1)..(25): SEQ ID NO: 5289; WAN024FRL_at; Start 83; Stop 107
tagctgttcagtatggagcagatgc

SEQ ID NO: 218196 - DNA, 25 bp, Artificial
  probe
  misc_feature (1)..(25): SEQ ID NO: 5289; WAN024FRL_at; Start 449; Stop 473
tagcgcgtgaggtttcaatggaaga

SEQ ID NO: 218197 - DNA, 25 bp, Artificial
  probe
  misc_feature (1)..(25): SEQ ID NO: 5289; WAN024FRL_at; Start 304; Stop 328
gcagttatcgtatctgacccagcct

SEQ ID NO: 218198 - DNA, 25 bp, Artificial
  probe
  misc_feature (1)..(25): SEQ ID NO: 5289; WAN024FRL_at; Start 892; Stop 916
gacgagatgtggaaggttgcccaac

SEQ ID NO: 218199 - DNA, 25 bp, Artificial
  probe
  misc_feature (1)..(25): SEQ ID NO: 5289; WAN024FRL_at; Start 812; Stop 836
taaccaactgctacaaggcggctgt

SEQ ID NO: 218200 - DNA, 25 bp, Artificial
  probe
  misc_feature (1)..(25): SEQ ID NO: 5289; WAN024FRL_at; Start 506; Stop 530
aaattgaagcctttgtccatggagc

SEQ ID NO: 218201 - DNA, 25 bp, Artificial
  probe
  misc_feature (1)..(25): SEQ ID NO: 5289; WAN024FRL_at; Start 416; Stop 440
tctggaaagagctaggcttgactcg

SEQ ID NO: 218202 - DNA, 25 bp, Artificial
  probe
  misc_feature (1)..(25): SEQ ID NO: 5289; WAN024FRL_at; Start 1083; Stop 1107
ccaagttgagttttatggtccaggt

SEQ ID NO: 218203 - DNA, 25 bp, Artificial
  probe
  misc_feature (1)..(25): SEQ ID NO: 5289; WAN024FRL_at; Start 236; Stop 260
ttatgcacgaaggaaatgaagctgg

SEQ ID NO: 218204 - DNA, 25 bp, Artificial
  probe
  misc_feature (1)..(25): SEQ ID NO: 5289; WAN024FRL_at; Start 202; Stop 226
tatggtgccaaggtctatgtagcgg

SEQ ID NO: 218205 - DNA, 25 bp, Artificial
  probe
  misc_feature (1)..(25): SEQ ID NO: 5289; WAN024FRL_at; Start 1098; Stop 1122
tggtccaggtttccgtcattttgaa

SEQ ID NO: 218206 - DNA, 25 bp, Artificial
  probe
  misc_feature (1)..(25): SEQ ID NO: 5289; WAN024FRL_at; Start 999; Stop 1023
caagtttgtcgctgaagtggtttct

SEQ ID NO: 218207 - DNA, 25 bp, Artificial
  probe
  misc_feature (1)..(25): SEQ ID NO: 5289; WAN024FRL_at; Start 1163; Stop 1187
tcgaccgcgctccaaatccaatgga

SEQ ID NO: 218208 - DNA, 25 bp, Artificial
  probe
  misc_feature (1)..(25): SEQ ID NO: 5289; WAN024FRL_at; Start 279; Stop 303
taaactgcgtgatatcgggattgca

SEQ ID NO: 218209 - DNA, 25 bp, Artificial
  probe
  misc_feature (1)..(25): SEQ ID NO: 1517; WAN024FRM_at; Start 48; Stop 72
tgtaagtaagcattatggtcattca

SEQ ID NO: 218210 - DNA, 25 bp, Artificial
  probe
  misc_feature (1)..(25): SEQ ID NO: 1517; WAN024FRM_at; Start 833; Stop 857
ctaaaaaagagacgcttaaagatat

SEQ ID NO: 218211 - DNA, 25 bp, Artificial
  probe
  misc_feature (1)..(25): SEQ ID NO: 1517; WAN024FRM_at; Start 538; Stop 562
gtgggaattttaatatcgagtcata

SEQ ID NO: 218212 - DNA, 25 bp, Artificial
  probe
  misc_feature (1)..(25): SEQ ID NO: 1517; WAN024FRM_at; Start 290; Stop 314
caaatttatatggtgttgactacaa

SEQ ID NO: 218213 - DNA, 25 bp, Artificial
  probe
  misc_feature (1)..(25): SEQ ID NO: 1517; WAN024FRM_at; Start 643; Stop 667
gatagtcataatttcttgtttgaga

SEQ ID NO: 218214 - DNA, 25 bp, Artificial
  probe
  misc_feature (1)..(25): SEQ ID NO: 1517; WAN024FRM_at; Start 453; Stop 477
tttagatgaaccgactaatggttta

SEQ ID NO: 218215 - DNA, 25 bp, Artificial
  probe
  misc_feature (1)..(25): SEQ ID NO: 1517; WAN024FRM_at; Start 398; Stop 422
caaaacaaaaattagctttgcttct

SEQ ID NO: 218216 - DNA, 25 bp, Artificial
  probe
  misc_feature (1)..(25): SEQ ID NO: 1517; WAN024FRM_at; Start 649; Stop 673
cataatttcttgtttgagatagctt

SEQ ID NO: 218217 - DNA, 25 bp, Artificial
  probe
  misc_feature (1)..(25): SEQ ID NO: 1517; WAN024FRM_at; Start 751; Stop 775
attactatgtctgggaatattcaaa

SEQ ID NO: 218218 - DNA, 25 bp, Artificial
  probe
  misc_feature (1)..(25): SEQ ID NO: 1517; WAN024FRM_at; Start 664; Stop 688
gagatagctttttcatcagctacag

SEQ ID NO: 218219 - DNA, 25 bp, Artificial
  probe
  misc_feature (1)..(25): SEQ ID NO: 1517; WAN024FRM_at; Start 352; Stop 376
ttgactcagtctattaataaaaaag

SEQ ID NO: 218220 - DNA, 25 bp, Artificial
  probe
  misc_feature (1)..(25): SEQ ID NO: 1517; WAN024FRM_at; Start 696; Stop 720
cattttcattaccaaacaagaattt

SEQ ID NO: 218221 - DNA, 25 bp, Artificial
  probe
  misc_feature (1)..(25): SEQ ID NO: 1517; WAN024FRM_at; Start 692; Stop 716
gagacattttcattaccaaacaaga

SEQ ID NO: 218222 - DNA, 25 bp, Artificial
  probe
  misc_feature (1)..(25): SEQ ID NO: 1517; WAN024FRM_at; Start 548; Stop 572
taatatcgagtcataaattagaaga

SEQ ID NO: 218223 - DNA, 25 bp, Artificial
  probe
  misc_feature (1)..(25): SEQ ID NO: 1517; WAN024FRM_at; Start 469; Stop 493
aatggtttagatattgaatcatcac

SEQ ID NO: 218224 - DNA, 25 bp, Artificial
  probe
  misc_feature (1)..(25): SEQ ID NO: 1517; WAN024FRM_at; Start 298; Stop 322
tatggtgttgactacaatcaagaaa

SEQ ID NO: 218225 - DNA, 25 bp, Artificial
  probe
  misc_feature (1)..(25): SEQ ID NO: 1517; WAN024FRM_at; Start 480; Stop 504
tattgaatcatcacaaatagtttta

SEQ ID NO: 218226 - DNA, 25 bp, Artificial
  probe
  misc_feature (1)..(25): SEQ ID NO: 1517; WAN024FRM_at; Start 145; Stop 169
ggtaagagtacgttgatgaaaattc

SEQ ID NO: 218227 - DNA, 25 bp, Artificial
  probe
  misc_feature (1)..(25): SEQ ID NO: 1517; WAN024FRM_at; Start 152; Stop 176
gtacgttgatgaaaattcttgttca

SEQ ID NO: 218228 - DNA, 25 bp, Artificial
  probe
  misc_feature (1)..(25): SEQ ID NO: 1517; WAN024FRM_at; Start 178; Stop 202
aataatcaaccgacttcaggtaata

SEQ ID NO: 218229 - DNA, 25 bp, Artificial
  probe
  misc_feature (1)..(25): SEQ ID NO: 1517; WAN024FRM_at; Start 133; Stop 157
agaaatggagttggtaagagtacgt

SEQ ID NO: 218230 - DNA, 25 bp, Artificial
  probe
  misc_feature (1)..(25): SEQ ID NO: 1517; WAN024FRM_at; Start 411; Stop 435
agctttgcttctaactctcgttacg

SEQ ID NO: 218231 - DNA, 25 bp, Artificial
  probe
  misc_feature (1)..(25): SEQ ID NO: 1517; WAN024FRM_at; Start 58; Stop 82
cattatggtcattcaatcattctca

SEQ ID NO: 218232 - DNA, 25 bp, Artificial
  probe
  misc_feature (1)..(25): SEQ ID NO: 1517; WAN024FRM_at; Start 184; Stop 208
caaccgacttcaggtaatattataa

SEQ ID NO: 218233 - DNA, 25 bp, Artificial
  probe
  misc_feature (1)..(25): SEQ ID NO: 1517; WAN024FRM_at; Start 332; Stop 356
gtttgatccaagagttagatttgac

SEQ ID NO: 218234 - DNA, 25 bp, Artificial
  probe
  misc_feature (1)..(25): SEQ ID NO: 1517; WAN024FRM_at; Start 441; Stop 465
tgatatattgattttagatgaaccg

SEQ ID NO: 218235 - DNA, 25 bp, Artificial
  probe
  misc_feature (1)..(25): SEQ ID NO: 1517; WAN024FRM_at; Start 801; Stop 825
cgaaaactctattaaagtagttgat

SEQ ID NO: 218236 - DNA, 25 bp, Artificial
  probe
  misc_feature (1)..(25): SEQ ID NO: 1517; WAN024FRM_at; Start 672; Stop 696
tttttcatcagctacagatagagac

SEQ ID NO: 218237 - DNA, 25 bp, Artificial
  probe
  misc_feature (1)..(25): SEQ ID NO: 1517; WAN024FRM_at; Start 627; Stop 651
tcaaaaagtaggaaaagatagtcat

SEQ ID NO: 218238 - DNA, 25 bp, Artificial
  probe
  misc_feature (1)..(25): SEQ ID NO: 1517; WAN024FRM_at; Start 338; Stop 362
tccaagagttagatttgactcagtc

SEQ ID NO: 218239 - DNA, 25 bp, Artificial
  probe
  misc_feature (1)..(25): SEQ ID NO: 1517; WAN024FRM_at; Start 406; Stop 430
aaattagctttgcttctaactctcg

SEQ ID NO: 218240 - DNA, 25 bp, Artificial
  probe
  misc_feature (1)..(25): SEQ ID NO: 1517; WAN024FRM_at; Start 679; Stop 703
tcagctacagatagagacattttca

SEQ ID NO: 218241 - DNA, 25 bp, Artificial
  probe
  misc_feature (1)..(25): SEQ ID NO: 1517; WAN024FRM_at; Start 686; Stop 710
cagatagagacattttcattaccaa

SEQ ID NO: 218242 - DNA, 25 bp, Artificial
  probe
  misc_feature (1)..(25): SEQ ID NO: 1517; WAN024FRM_at; Start 615; Stop 639
gcttttgacatttcaaaaagtagga

SEQ ID NO: 218243 - DNA, 25 bp, Artificial
  probe
  misc_feature (1)..(25): SEQ ID NO: 688; WAN024FRN_at; Start 34; Stop 58
gacgaaagagaagaacaactgttca

SEQ ID NO: 218244 - DNA, 25 bp, Artificial
  probe
  misc_feature (1)..(25): SEQ ID NO: 688; WAN024FRN_at; Start 52; Stop 76
ctgttcaataaagcgggctctgaaa

SEQ ID NO: 218245 - DNA, 25 bp, Artificial
  probe
  misc_feature (1)..(25): SEQ ID NO: 688; WAN024FRN_at; Start 29; Stop 53
tactagacgaaagagaagaacaact

SEQ ID NO: 218246 - DNA, 25 bp, Artificial
  probe
  misc_feature (1)..(25): SEQ ID NO: 688; WAN024FRN_at; Start 417; Stop 441
tcttaagagctatggcgaatgggct

SEQ ID NO: 218247 - DNA, 25 bp, Artificial
  probe
  misc_feature (1)..(25): SEQ ID NO: 688; WAN024FRN_at; Start 353; Stop 377
acctgtctgcttgggtcattactta

SEQ ID NO: 218248 - DNA, 25 bp, Artificial
  probe
  misc_feature (1)..(25): SEQ ID NO: 688; WAN024FRN_at; Start 194; Stop 218
tcaatcgtgcccgttatctgggagt

SEQ ID NO: 218249 - DNA, 25 bp, Artificial
  probe
  misc_feature (1)..(25): SEQ ID NO: 688; WAN024FRN_at; Start 457; Stop 481
caagatatggatgaattggagagtg

SEQ ID NO: 218250 - DNA, 25 bp, Artificial
  probe
  misc_feature (1)..(25): SEQ ID NO: 688; WAN024FRN_at; Start 269; Stop 293
ccttggctattacggctcttttgat

SEQ ID NO: 218251 - DNA, 25 bp, Artificial
  probe
  misc_feature (1)..(25): SEQ ID NO: 688; WAN024FRN_at; Start 279; Stop 303
tacggctcttttgatgttgcagaat

SEQ ID NO: 218252 - DNA, 25 bp, Artificial
  probe
  misc_feature (1)..(25): SEQ ID NO: 688; WAN024FRN_at; Start 402; Stop 426
tattggcaatcttggtcttaagagc

SEQ ID NO: 218253 - DNA, 25 bp, Artificial
  probe
  misc_feature (1)..(25): SEQ ID NO: 688; WAN024FRN_at; Start 409; Stop 433
aatcttggtcttaagagctatggcg

SEQ ID NO: 218254 - DNA, 25 bp, Artificial
  probe
  misc_feature (1)..(25): SEQ ID NO: 688; WAN024FRN_at; Start 182; Stop 206
cattttactttttcaatcgtgcccg

SEQ ID NO: 218255 - DNA, 25 bp, Artificial
  probe
  misc_feature (1)..(25): SEQ ID NO: 688; WAN024FRN_at; Start 342; Stop 366
gaattttaaatacctgtctgcttgg

SEQ ID NO: 218256 - DNA, 25 bp, Artificial
  probe
  misc_feature (1)..(25): SEQ ID NO: 688; WAN024FRN_at; Start 25; Stop 49
caattactagacgaaagagaagaac

SEQ ID NO: 218257 - DNA, 25 bp, Artificial
  probe
  misc_feature (1)..(25): SEQ ID NO: 688; WAN024FRN_at; Start 49; Stop 73
caactgttcaataaagcgggctctg

SEQ ID NO: 218258 - DNA, 25 bp, Artificial
  probe
  misc_feature (1)..(25): SEQ ID NO: 688; WAN024FRN_at; Start 436; Stop 460
tgggctcagaaaaaatttgaacaag

SEQ ID NO: 218259 - DNA, 25 bp, Artificial
  probe
  misc_feature (1)..(25): SEQ ID NO: 688; WAN024FRN_at; Start 142; Stop 166
tttaattctaatatgctgctaatcg

SEQ ID NO: 218260 - DNA, 25 bp, Artificial
  probe
  misc_feature (1)..(25): SEQ ID NO: 688; WAN024FRN_at; Start 291; Stop 315
gatgttgcagaattatcaattcaac

SEQ ID NO: 218261 - DNA, 25 bp, Artificial
  probe
  misc_feature (1)..(25): SEQ ID NO: 688; WAN024FRN_at; Start 122; Stop 146
cagtattagcaccaagcctttttaa

SEQ ID NO: 218262 - DNA, 25 bp, Artificial
  probe
  misc_feature (1)..(25): SEQ ID NO: 688; WAN024FRN_at; Start 451; Stop 475
tttgaacaagatatggatgaattgg

SEQ ID NO: 218263 - DNA, 25 bp, Artificial
  probe
  misc_feature (1)..(25): SEQ ID NO: 688; WAN024FRN_at; Start 46; Stop 70
gaacaactgttcaataaagcgggct

SEQ ID NO: 218264 - DNA, 25 bp, Artificial
  probe
  misc_feature (1)..(25): SEQ ID NO: 688; WAN024FRN_at; Start 429; Stop 453
tggcgaatgggctcagaaaaaattt

SEQ ID NO: 218265 - DNA, 25 bp, Artificial
  probe
  misc_feature (1)..(25): SEQ ID NO: 688; WAN024FRN_at; Start 263; Stop 287
tcctaaccttggctattacggctct

SEQ ID NO: 218266 - DNA, 25 bp, Artificial
  probe
  misc_feature (1)..(25): SEQ ID NO: 688; WAN024FRN_at; Start 165; Stop 189
cgttatcatcatagggacattttac

SEQ ID NO: 218267 - DNA, 25 bp, Artificial
  probe
  misc_feature (1)..(25): SEQ ID NO: 688; WAN024FRN_at; Start 425; Stop 449
gctatggcgaatgggctcagaaaaa

SEQ ID NO: 218268 - DNA, 25 bp, Artificial
  probe
  misc_feature (1)..(25): SEQ ID NO: 688; WAN024FRN_at; Start 156; Stop 180
gctgctaatcgttatcatcataggg

SEQ ID NO: 218269 - DNA, 25 bp, Artificial
  probe
  misc_feature (1)..(25): SEQ ID NO: 688; WAN024FRN_at; Start 307; Stop 331
caattcaacatagaaatttatcagc

SEQ ID NO: 218270 - DNA, 25 bp, Artificial
  probe
  misc_feature (1)..(25): SEQ ID NO: 688; WAN024FRN_at; Start 204; Stop 228
ccgttatctgggagtgacctactat

SEQ ID NO: 218271 - DNA, 25 bp, Artificial
  probe
  misc_feature (1)..(25): SEQ ID NO: 688; WAN024FRN_at; Start 94; Stop 118
gctttgtcgctcctatcttatatca

SEQ ID NO: 218272 - DNA, 25 bp, Artificial
  probe
  misc_feature (1)..(25): SEQ ID NO: 688; WAN024FRN_at; Start 346; Stop 370
tttaaatacctgtctgcttgggtca

SEQ ID NO: 218273 - DNA, 25 bp, Artificial
  probe
  misc_feature (1)..(25): SEQ ID NO: 688; WAN024FRN_at; Start 114; Stop 138
tatcatttcagtattagcaccaagc

SEQ ID NO: 218274 - DNA, 25 bp, Artificial
  probe
  misc_feature (1)..(25): SEQ ID NO: 688; WAN024FRN_at; Start 328; Stop 352
cagcacaatcctttgaattttaaat

SEQ ID NO: 218275 - DNA, 25 bp, Artificial
  probe
  misc_feature (1)..(25): SEQ ID NO: 688; WAN024FRN_at; Start 319; Stop 343
gaaatttatcagcacaatcctttga

SEQ ID NO: 218276 - DNA, 25 bp, Artificial
  probe
  misc_feature (1)..(25): SEQ ID NO: 688; WAN024FRN_at; Start 130; Stop 154
gcaccaagcctttttaattctaata

SEQ ID NO: 218277 - DNA, 25 bp, Artificial
  probe
  misc_feature (1)..(25): SEQ ID NO: 1398; WAN024FRO_at; Start 73; Stop 97
ttgataaagatattggtccaaccag

SEQ ID NO: 218278 - DNA, 25 bp, Artificial
  probe
  misc_feature (1)..(25): SEQ ID NO: 1398; WAN024FRO_at; Start 166; Stop 190
acagcgatgacacgaccaccatttt

SEQ ID NO: 218279 - DNA, 25 bp, Artificial
  probe
  misc_feature (1)..(25): SEQ ID NO: 1398; WAN024FRO_at; Start 58; Stop 82
cactcatacccaggtttgataaaga

SEQ ID NO: 218280 - DNA, 25 bp, Artificial
  probe
  misc_feature (1)..(25): SEQ ID NO: 1398; WAN024FRO_at; Start 26; Stop 50
ggaagttggttgagaaggcatccac

SEQ ID NO: 218281 - DNA, 25 bp, Artificial
  probe
  misc_feature (1)..(25): SEQ ID NO: 1398; WAN024FRO_at; Start 95; Stop 119
cagaatctgcttggatttgcccatc

SEQ ID NO: 218282 - DNA, 25 bp, Artificial
  probe
  misc_feature (1)..(25): SEQ ID NO: 1398; WAN024FRO_at; Start 81; Stop 105
gatattggtccaaccagaatctgct

SEQ ID NO: 218283 - DNA, 25 bp, Artificial
  probe
  misc_feature (1)..(25): SEQ ID NO: 1398; WAN024FRO_at; Start 83; Stop 107
tattggtccaaccagaatctgcttg

SEQ ID NO: 218284 - DNA, 25 bp, Artificial
  probe
  misc_feature (1)..(25): SEQ ID NO: 1398; WAN024FRO_at; Start 91; Stop 115
caaccagaatctgcttggatttgcc

SEQ ID NO: 218285 - DNA, 25 bp, Artificial
  probe
  misc_feature (1)..(25): SEQ ID NO: 1398; WAN024FRO_at; Start 100; Stop 124
tctgcttggatttgcccatcaaact

SEQ ID NO: 218286 - DNA, 25 bp, Artificial
  probe
  misc_feature (1)..(25): SEQ ID NO: 1398; WAN024FRO_at; Start 114; Stop 138
cccatcaaacttggaaccaatagtt

SEQ ID NO: 218287 - DNA, 25 bp, Artificial
  probe
  misc_feature (1)..(25): SEQ ID NO: 1398; WAN024FRO_at; Start 159; Stop 183
ggttccgacagcgatgacacgacca

SEQ ID NO: 218288 - DNA, 25 bp, Artificial
  probe
  misc_feature (1)..(25): SEQ ID NO: 1398; WAN024FRO_at; Start 106; Stop 130
tggatttgcccatcaaacttggaac

SEQ ID NO: 218289 - DNA, 25 bp, Artificial
  probe
  misc_feature (1)..(25): SEQ ID NO: 1398; WAN024FRO_at; Start 93; Stop 117
accagaatctgcttggatttgccca

SEQ ID NO: 218290 - DNA, 25 bp, Artificial
  probe
  misc_feature (1)..(25): SEQ ID NO: 1398; WAN024FRO_at; Start 108; Stop 132
gatttgcccatcaaacttggaacca

SEQ ID NO: 218291 - DNA, 25 bp, Artificial
  probe
  misc_feature (1)..(25): SEQ ID NO: 1398; WAN024FRO_at; Start 118; Stop 142
tcaaacttggaaccaatagtttcca

SEQ ID NO: 218292 - DNA, 25 bp, Artificial
  probe
  misc_feature (1)..(25): SEQ ID NO: 1398; WAN024FRO_at; Start 34; Stop 58
gttgagaaggcatccacgaccttcc

SEQ ID NO: 218293 - DNA, 25 bp, Artificial
  probe
  misc_feature (1)..(25): SEQ ID NO: 1398; WAN024FRO_at; Start 86; Stop 110
tggtccaaccagaatctgcttggat

SEQ ID NO: 218294 - DNA, 25 bp, Artificial
  probe
  misc_feature (1)..(25): SEQ ID NO: 1398; WAN024FRO_at; Start 27; Stop 51
gaagttggttgagaaggcatccacg

SEQ ID NO: 218295 - DNA, 25 bp, Artificial
  probe
  misc_feature (1)..(25): SEQ ID NO: 1398; WAN024FRO_at; Start 2; Stop 26
tgaccagagttgattttggcaggtg

SEQ ID NO: 218296 - DNA, 25 bp, Artificial
  probe
  misc_feature (1)..(25): SEQ ID NO: 1398; WAN024FRO_at; Start 30; Stop 54
gttggttgagaaggcatccacgacc

SEQ ID NO: 218297 - DNA, 25 bp, Artificial
  probe
  misc_feature (1)..(25): SEQ ID NO: 1398; WAN024FRO_at; Start 104; Stop 128
cttggatttgcccatcaaacttgga

SEQ ID NO: 218298 - DNA, 25 bp, Artificial
  probe
  misc_feature (1)..(25): SEQ ID NO: 1398; WAN024FRO_at; Start 75; Stop 99
gataaagatattggtccaaccagaa

SEQ ID NO: 218299 - DNA, 25 bp, Artificial
  probe
  misc_feature (1)..(25): SEQ ID NO: 1398; WAN024FRO_at; Start 11; Stop 35
ttgattttggcaggtggaagttggt

SEQ ID NO: 218300 - DNA, 25 bp, Artificial
  probe
  misc_feature (1)..(25): SEQ ID NO: 1398; WAN024FRO_at; Start 32; Stop 56
tggttgagaaggcatccacgacctt

SEQ ID NO: 218301 - DNA, 25 bp, Artificial
  probe
  misc_feature (1)..(25): SEQ ID NO: 1398; WAN024FRO_at; Start 77; Stop 101
taaagatattggtccaaccagaatc

SEQ ID NO: 218302 - DNA, 25 bp, Artificial
  probe
  misc_feature (1)..(25): SEQ ID NO: 1398; WAN024FRO_at; Start 51; Stop 75
gaccttccactcatacccaggtttg

SEQ ID NO: 218303 - DNA, 25 bp, Artificial
  probe
  misc_feature (1)..(25): SEQ ID NO: 1398; WAN024FRO_at; Start 5; Stop 29
ccagagttgattttggcaggtggaa

SEQ ID NO: 218304 - DNA, 25 bp, Artificial
  probe
  misc_feature (1)..(25): SEQ ID NO: 1398; WAN024FRO_at; Start 112; Stop 136
tgcccatcaaacttggaaccaatag

SEQ ID NO: 218305 - DNA, 25 bp, Artificial
  probe
  misc_feature (1)..(25): SEQ ID NO: 1398; WAN024FRO_at; Start 53; Stop 77
ccttccactcatacccaggtttgat

SEQ ID NO: 218306 - DNA, 25 bp, Artificial
  probe
  misc_feature (1)..(25): SEQ ID NO: 1398; WAN024FRO_at; Start 165; Stop 189
gacagcgatgacacgaccaccattt

SEQ ID NO: 218307 - DNA, 25 bp, Artificial
  probe
  misc_feature (1)..(25): SEQ ID NO: 1398; WAN024FRO_at; Start 97; Stop 121
gaatctgcttggatttgcccatcaa

SEQ ID NO: 218308 - DNA, 25 bp, Artificial
  probe
  misc_feature (1)..(25): SEQ ID NO: 1398; WAN024FRO_at; Start 28; Stop 52
aagttggttgagaaggcatccacga

SEQ ID NO: 218309 - DNA, 25 bp, Artificial
  probe
  misc_feature (1)..(25): SEQ ID NO: 1398; WAN024FRO_at; Start 37; Stop 61
gagaaggcatccacgaccttccact

SEQ ID NO: 218310 - DNA, 25 bp, Artificial
  probe
  misc_feature (1)..(25): SEQ ID NO: 1398; WAN024FRO_at; Start 62; Stop 86
catacccaggtttgataaagatatt

SEQ ID NO: 218311 - DNA, 25 bp, Artificial
  probe
  misc_feature (1)..(25): SEQ ID NO: 5609; WAN024FRP_at; Start 96; Stop 120
ccttgaggcgtttggcaggtttagc

SEQ ID NO: 218312 - DNA, 25 bp, Artificial
  probe
  misc_feature (1)..(25): SEQ ID NO: 5609; WAN024FRP_at; Start 132; Stop 156
actcgtctccactagtgttcttaag

SEQ ID NO: 218313 - DNA, 25 bp, Artificial
  probe
  misc_feature (1)..(25): SEQ ID NO: 5609; WAN024FRP_at; Start 181; Stop 205
tgtctccactttttgaccatagagg

SEQ ID NO: 218314 - DNA, 25 bp, Artificial
  probe
  misc_feature (1)..(25): SEQ ID NO: 5609; WAN024FRP_at; Start 255; Stop 279
ccagcatatcaataatagagtggaa

SEQ ID NO: 218315 - DNA, 25 bp, Artificial
  probe
  misc_feature (1)..(25): SEQ ID NO: 5609; WAN024FRP_at; Start 232; Stop 256
catgacaagggcatcaccaggttcc

SEQ ID NO: 218316 - DNA, 25 bp, Artificial
  probe
  misc_feature (1)..(25): SEQ ID NO: 5609; WAN024FRP_at; Start 5; Stop 29
tattcaaagcggacaatgcgtcccc

SEQ ID NO: 218317 - DNA, 25 bp, Artificial
  probe
  misc_feature (1)..(25): SEQ ID NO: 5609; WAN024FRP_at; Start 381; Stop 405
ggaaatcaaaatcagctgtattcat

SEQ ID NO: 218318 - DNA, 25 bp, Artificial
  probe
  misc_feature (1)..(25): SEQ ID NO: 5609; WAN024FRP_at; Start 152; Stop 176
ttaaggaggagaagttccacatgac

SEQ ID NO: 218319 - DNA, 25 bp, Artificial
  probe
  misc_feature (1)..(25): SEQ ID NO: 5609; WAN024FRP_at; Start 349; Stop 373
gggcgtttgggcaatcaattcctct

SEQ ID NO: 218320 - DNA, 25 bp, Artificial
  probe
  misc_feature (1)..(25): SEQ ID NO: 5609; WAN024FRP_at; Start 189; Stop 213
ctttttgaccatagaggcgggcagg

SEQ ID NO: 218321 - DNA, 25 bp, Artificial
  probe
  misc_feature (1)..(25): SEQ ID NO: 5609; WAN024FRP_at; Start 1; Stop 25
ttggtattcaaagcggacaatgcgt

SEQ ID NO: 218322 - DNA, 25 bp, Artificial
  probe
  misc_feature (1)..(25): SEQ ID NO: 5609; WAN024FRP_at; Start 326; Stop 350
ttggaggcatcacgtttttcaaggg

SEQ ID NO: 218323 - DNA, 25 bp, Artificial
  probe
  misc_feature (1)..(25): SEQ ID NO: 5609; WAN024FRP_at; Start 48; Stop 72
taacgacagcgctgaggcggccatc

SEQ ID NO: 218324 - DNA, 25 bp, Artificial
  probe
  misc_feature (1)..(25): SEQ ID NO: 5609; WAN024FRP_at; Start 358; Stop 382
ggcaatcaattcctctggcaagtgg

SEQ ID NO: 218325 - DNA, 25 bp, Artificial
  probe
  misc_feature (1)..(25): SEQ ID NO: 5609; WAN024FRP_at; Start 187; Stop 211
cactttttgaccatagaggcgggca

SEQ ID NO: 218326 - DNA, 25 bp, Artificial
  probe
  misc_feature (1)..(25): SEQ ID NO: 5609; WAN024FRP_at; Start 28; Stop 52
cccgtgggtcaattcttctgtaacg

SEQ ID NO: 218327 - DNA, 25 bp, Artificial
  probe
  misc_feature (1)..(25): SEQ ID NO: 5609; WAN024FRP_at; Start 299; Stop 323
cctgtctcacggttgacgatgagga

SEQ ID NO: 218328 - DNA, 25 bp, Artificial
  probe
  misc_feature (1)..(25): SEQ ID NO: 5609; WAN024FRP_at; Start 285; Stop 309
tatcttgcatttctcctgtctcacg

SEQ ID NO: 218329 - DNA, 25 bp, Artificial
  probe
  misc_feature (1)..(25): SEQ ID NO: 5609; WAN024FRP_at; Start 240; Stop 264
gggcatcaccaggttccagcatatc

SEQ ID NO: 218330 - DNA, 25 bp, Artificial
  probe
  misc_feature (1)..(25): SEQ ID NO: 5609; WAN024FRP_at; Start 110; Stop 134
gcaggtttagccagaacttcccact

SEQ ID NO: 218331 - DNA, 25 bp, Artificial
  probe
  misc_feature (1)..(25): SEQ ID NO: 5609; WAN024FRP_at; Start 248; Stop 272
ccaggttccagcatatcaataatag

SEQ ID NO: 218332 - DNA, 25 bp, Artificial
  probe
  misc_feature (1)..(25): SEQ ID NO: 5609; WAN024FRP_at; Start 140; Stop 164
ccactagtgttcttaaggaggagaa

SEQ ID NO: 218333 - DNA, 25 bp, Artificial
  probe
  misc_feature (1)..(25): SEQ ID NO: 5609; WAN024FRP_at; Start 214; Stop 238
gagaactcgggtgtcgttcatgaca

SEQ ID NO: 218334 - DNA, 25 bp, Artificial
  probe
  misc_feature (1)..(25): SEQ ID NO: 5609; WAN024FRP_at; Start 71; Stop 95
tcaccaaagctgatacgagtaccga

SEQ ID NO: 218335 - DNA, 25 bp, Artificial
  probe
  misc_feature (1)..(25): SEQ ID NO: 5609; WAN024FRP_at; Start 227; Stop 251
tcgttcatgacaagggcatcaccag

SEQ ID NO: 218336 - DNA, 25 bp, Artificial
  probe
  misc_feature (1)..(25): SEQ ID NO: 5609; WAN024FRP_at; Start 61; Stop 85
gaggcggccatcaccaaagctgata

SEQ ID NO: 218337 - DNA, 25 bp, Artificial
  probe
  misc_feature (1)..(25): SEQ ID NO: 5609; WAN024FRP_at; Start 375; Stop 399
gcaagtggaaatcaaaatcagctgt

SEQ ID NO: 218338 - DNA, 25 bp, Artificial
  probe
  misc_feature (1)..(25): SEQ ID NO: 5609; WAN024FRP_at; Start 314; Stop 338
acgatgaggagtttggaggcatcac

SEQ ID NO: 218339 - DNA, 25 bp, Artificial
  probe
  misc_feature (1)..(25): SEQ ID NO: 5609; WAN024FRP_at; Start 292; Stop 316
catttctcctgtctcacggttgacg

SEQ ID NO: 218340 - DNA, 25 bp, Artificial
  probe
  misc_feature (1)..(25): SEQ ID NO: 5609; WAN024FRP_at; Start 90; Stop 114
taccgaccttgaggcgtttggcagg

SEQ ID NO: 218341 - DNA, 25 bp, Artificial
  probe
  misc_feature (1)..(25): SEQ ID NO: 5609; WAN024FRP_at; Start 41; Stop 65
tcttctgtaacgacagcgctgaggc

SEQ ID NO: 218342 - DNA, 25 bp, Artificial
  probe
  misc_feature (1)..(25): SEQ ID NO: 5609; WAN024FRP_at; Start 115; Stop 139
tttagccagaacttcccactcgtct

SEQ ID NO: 218343 - DNA, 25 bp, Artificial
  probe
  misc_feature (1)..(25): SEQ ID NO: 5609; WAN024FRP_at; Start 369; Stop 393
cctctggcaagtggaaatcaaaatc

SEQ ID NO: 218344 - DNA, 25 bp, Artificial
  probe
  misc_feature (1)..(25): SEQ ID NO: 5609; WAN024FRP_at; Start 82; Stop 106
gatacgagtaccgaccttgaggcgt

SEQ ID NO: 218345 - DNA, 25 bp, Artificial
  probe
  misc_feature (1)..(25): SEQ ID NO: 1021; WAN024FRQ_at; Start 608; Stop 632
tagtctatctgactctccatgtcgg

SEQ ID NO: 218346 - DNA, 25 bp, Artificial
  probe
  misc_feature (1)..(25): SEQ ID NO: 1021; WAN024FRQ_at; Start 260; Stop 284
tccttaagaacactagtggagacga

SEQ ID NO: 218347 - DNA, 25 bp, Artificial
  probe
  misc_feature (1)..(25): SEQ ID NO: 1021; WAN024FRQ_at; Start 559; Stop 583
cacttcaccaaagaactgctggcag

SEQ ID NO: 218348 - DNA, 25 bp, Artificial
  probe
  misc_feature (1)..(25): SEQ ID NO: 1021; WAN024FRQ_at; Start 624; Stop 648
ccatgtcggactcggaacctttaga

SEQ ID NO: 218349 - DNA, 25 bp, Artificial
  probe
  misc_feature (1)..(25): SEQ ID NO: 1021; WAN024FRQ_at; Start 576; Stop 600
gctggcagaaatccaagctaagggt

SEQ ID NO: 218350 - DNA, 25 bp, Artificial
  probe
  misc_feature (1)..(25): SEQ ID NO: 1021; WAN024FRQ_at; Start 1003; Stop 1027
cgcttcttcagttttggtgacgcca

SEQ ID NO: 218351 - DNA, 25 bp, Artificial
  probe
  misc_feature (1)..(25): SEQ ID NO: 1021; WAN024FRQ_at; Start 921; Stop 945
aactctggtcatgttggtttctgcc

SEQ ID NO: 218352 - DNA, 25 bp, Artificial
  probe
  misc_feature (1)..(25): SEQ ID NO: 1021; WAN024FRQ_at; Start 758; Stop 782
tcatcgctgtcggaaccacttctat

SEQ ID NO: 218353 - DNA, 25 bp, Artificial
  probe
  misc_feature (1)..(25): SEQ ID NO: 1021; WAN024FRQ_at; Start 25; Stop 49
gattttgatttccacttgccagagg

SEQ ID NO: 218354 - DNA, 25 bp, Artificial
  probe
  misc_feature (1)..(25): SEQ ID NO: 1021; WAN024FRQ_at; Start 333; Stop 357
tatcagctttggtgatggccgcctc

SEQ ID NO: 218355 - DNA, 25 bp, Artificial
  probe
  misc_feature (1)..(25): SEQ ID NO: 1021; WAN024FRQ_at; Start 168; Stop 192
tggtgatgcccttgtcatgaacgac

SEQ ID NO: 218356 - DNA, 25 bp, Artificial
  probe
  misc_feature (1)..(25): SEQ ID NO: 1021; WAN024FRQ_at; Start 826; Stop 850
caagcagattctggttggaccaata

SEQ ID NO: 218357 - DNA, 25 bp, Artificial
  probe
  misc_feature (1)..(25): SEQ ID NO: 1021; WAN024FRQ_at; Start 104; Stop 128
tcaaccgtgagacaggagaaatgca

SEQ ID NO: 218358 - DNA, 25 bp, Artificial
  probe
  misc_feature (1)..(25): SEQ ID NO: 1021; WAN024FRQ_at; Start 655; Stop 679
tctgtggataatctggacgaacacg

SEQ ID NO: 218359 - DNA, 25 bp, Artificial
  probe
  misc_feature (1)..(25): SEQ ID NO: 1021; WAN024FRQ_at; Start 502; Stop 526
tatcaaaccgtctacgccaaggaaa

SEQ ID NO: 218360 - DNA, 25 bp, Artificial
  probe
  misc_feature (1)..(25): SEQ ID NO: 1021; WAN024FRQ_at; Start 936; Stop 960
ggtttctgcctttgcaggccgtgaa

SEQ ID NO: 218361 - DNA, 25 bp, Artificial
  probe
  misc_feature (1)..(25): SEQ ID NO: 1021; WAN024FRQ_at; Start 858; Stop 882
caaacctgggtatgagtggaaggtc

SEQ ID NO: 218362 - DNA, 25 bp, Artificial
  probe
  misc_feature (1)..(25): SEQ ID NO: 1021; WAN024FRQ_at; Start 306; Stop 330
tgccaaacgcctcaaggtcggtact

SEQ ID NO: 218363 - DNA, 25 bp, Artificial
  probe
  misc_feature (1)..(25): SEQ ID NO: 1021; WAN024FRQ_at; Start 154; Stop 178
gatatgctggaacctggtgatgccc

SEQ ID NO: 218364 - DNA, 25 bp, Artificial
  probe
  misc_feature (1)..(25): SEQ ID NO: 1021; WAN024FRQ_at; Start 879; Stop 903
ggtcgtggatgccttctcaaccaac

SEQ ID NO: 218365 - DNA, 25 bp, Artificial
  probe
  misc_feature (1)..(25): SEQ ID NO: 1021; WAN024FRQ_at; Start 287; Stop 311
gggaagttctggctaaacctgccaa

SEQ ID NO: 218366 - DNA, 25 bp, Artificial
  probe
  misc_feature (1)..(25): SEQ ID NO: 1021; WAN024FRQ_at; Start 425; Stop 449
tcctagaagtcttggaaagtctggg

SEQ ID NO: 218367 - DNA, 25 bp, Artificial
  probe
  misc_feature (1)..(25): SEQ ID NO: 1021; WAN024FRQ_at; Start 440; Stop 464
aaagtctgggagaaatgcctctgcc

SEQ ID NO: 218368 - DNA, 25 bp, Artificial
  probe
  misc_feature (1)..(25): SEQ ID NO: 1021; WAN024FRQ_at; Start 638; Stop 662
gaacctttagacctgtttctgtgga

SEQ ID NO: 218369 - DNA, 25 bp, Artificial
  probe
  misc_feature (1)..(25): SEQ ID NO: 1021; WAN024FRQ_at; Start 695; Stop 719
tctatcaactttctgaggaagctgc

SEQ ID NO: 218370 - DNA, 25 bp, Artificial
  probe
  misc_feature (1)..(25): SEQ ID NO: 1021; WAN024FRQ_at; Start 958; Stop 982
gaattagtcttagatgcctaccacc

SEQ ID NO: 218371 - DNA, 25 bp, Artificial
  probe
  misc_feature (1)..(25): SEQ ID NO: 1021; WAN024FRQ_at; Start 353; Stop 377
gcctcagcgctgtcgttacagaaga

SEQ ID NO: 218372 - DNA, 25 bp, Artificial
  probe
  misc_feature (1)..(25): SEQ ID NO: 1021; WAN024FRQ_at; Start 366; Stop 390
cgttacagaagaattgacccacggg

SEQ ID NO: 218373 - DNA, 25 bp, Artificial
  probe
  misc_feature (1)..(25): SEQ ID NO: 1021; WAN024FRQ_at; Start 46; Stop 70
gaggaattgattgcccaaacgcccc

SEQ ID NO: 218374 - DNA, 25 bp, Artificial
  probe
  misc_feature (1)..(25): SEQ ID NO: 1021; WAN024FRQ_at; Start 207; Stop 231
tgcccgcctctatggtcaaaaagtg

SEQ ID NO: 218375 - DNA, 25 bp, Artificial
  probe
  misc_feature (1)..(25): SEQ ID NO: 1021; WAN024FRQ_at; Start 487; Stop 511
gatgaccgtgaacgttatcaaaccg

SEQ ID NO: 218376 - DNA, 25 bp, Artificial
  probe
  misc_feature (1)..(25): SEQ ID NO: 1021; WAN024FRQ_at; Start 66; Stop 90
gccccttgaaaaacgtgatgcctcc

SEQ ID NO: 218377 - DNA, 25 bp, Artificial
  probe
  misc_feature (1)..(25): SEQ ID NO: 1021; WAN024FRQ_at; Start 805; Stop 829
tccaagtttgatgggcaaatccaag

SEQ ID NO: 218378 - DNA, 25 bp, Artificial
  probe
  misc_feature (1)..(25): SEQ ID NO: 1021; WAN024FRQ_at; Start 670; Stop 694
gacgaacacgaaatgcactcagagt

SEQ ID NO: 218379 - DNA, 25 bp, Artificial
  probe
  misc_feature (1)..(25): SEQ ID NO: 2053; WAN024FRR_at; Start 108; Stop 132
tgtagcgttcaacttcagcttcagc

SEQ ID NO: 218380 - DNA, 25 bp, Artificial
  probe
  misc_feature (1)..(25): SEQ ID NO: 2053; WAN024FRR_at; Start 134; Stop 158
ttgtccttaacaccacgaggcaaga

SEQ ID NO: 218381 - DNA, 25 bp, Artificial
  probe
  misc_feature (1)..(25): SEQ ID NO: 2053; WAN024FRR_at; Start 33; Stop 57
cattaaagccgatatgcccattgcg

SEQ ID NO: 218382 - DNA, 25 bp, Artificial
  probe
  misc_feature (1)..(25): SEQ ID NO: 2053; WAN024FRR_at; Start 243; Stop 267
catactcatcaaggttgacactggt

SEQ ID NO: 218383 - DNA, 25 bp, Artificial
  probe
  misc_feature (1)..(25): SEQ ID NO: 2053; WAN024FRR_at; Start 65; Stop 89
cccaagatttggaggtcaactggat

SEQ ID NO: 218384 - DNA, 25 bp, Artificial
  probe
  misc_feature (1)..(25): SEQ ID NO: 2053; WAN024FRR_at; Start 78; Stop 102
ggtcaactggatggtcagccaaaat

SEQ ID NO: 218385 - DNA, 25 bp, Artificial
  probe
  misc_feature (1)..(25): SEQ ID NO: 2053; WAN024FRR_at; Start 36; Stop 60
taaagccgatatgcccattgcgacc

SEQ ID NO: 218386 - DNA, 25 bp, Artificial
  probe
  misc_feature (1)..(25): SEQ ID NO: 2053; WAN024FRR_at; Start 83; Stop 107
actggatggtcagccaaaatttggt

SEQ ID NO: 218387 - DNA, 25 bp, Artificial
  probe
  misc_feature (1)..(25): SEQ ID NO: 2053; WAN024FRR_at; Start 142; Stop 166
aacaccacgaggcaagaaactttct

SEQ ID NO: 218388 - DNA, 25 bp, Artificial
  probe
  misc_feature (1)..(25): SEQ ID NO: 2053; WAN024FRR_at; Start 209; Stop 233
cgataagactgtggattgtccccat

SEQ ID NO: 218389 - DNA, 25 bp, Artificial
  probe
  misc_feature (1)..(25): SEQ ID NO: 2053; WAN024FRR_at; Start 40; Stop 64
gccgatatgcccattgcgaccgatt

SEQ ID NO: 218390 - DNA, 25 bp, Artificial
  probe
  misc_feature (1)..(25): SEQ ID NO: 2053; WAN024FRR_at; Start 149; Stop 173
cgaggcaagaaactttctttaaatg

SEQ ID NO: 218391 - DNA, 25 bp, Artificial
  probe
  misc_feature (1)..(25): SEQ ID NO: 2053; WAN024FRR_at; Start 112; Stop 136
gcgttcaacttcagcttcagcattg

SEQ ID NO: 218392 - DNA, 25 bp, Artificial
  probe
  misc_feature (1)..(25): SEQ ID NO: 2053; WAN024FRR_at; Start 179; Stop 203
tggttgaacaagttttcttgcatga

SEQ ID NO: 218393 - DNA, 25 bp, Artificial
  probe
  misc_feature (1)..(25): SEQ ID NO: 2053; WAN024FRR_at; Start 206; Stop 230
taacgataagactgtggattgtccc

SEQ ID NO: 218394 - DNA, 25 bp, Artificial
  probe
  misc_feature (1)..(25): SEQ ID NO: 2053; WAN024FRR_at; Start 213; Stop 237
aagactgtggattgtccccatcaag

SEQ ID NO: 218395 - DNA, 25 bp, Artificial
  probe
  misc_feature (1)..(25): SEQ ID NO: 2053; WAN024FRR_at; Start 246; Stop 270
actcatcaaggttgacactggttag

SEQ ID NO: 218396 - DNA, 25 bp, Artificial
  probe
  misc_feature (1)..(25): SEQ ID NO: 2053; WAN024FRR_at; Start 53; Stop 77
ttgcgaccgattcccaagatttgga

SEQ ID NO: 218397 - DNA, 25 bp, Artificial
  probe
  misc_feature (1)..(25): SEQ ID NO: 2053; WAN024FRR_at; Start 216; Stop 240
actgtggattgtccccatcaaggcc

SEQ ID NO: 218398 - DNA, 25 bp, Artificial
  probe
  misc_feature (1)..(25): SEQ ID NO: 2053; WAN024FRR_at; Start 95; Stop 119
gccaaaatttggttgtagcgttcaa

SEQ ID NO: 218399 - DNA, 25 bp, Artificial
  probe
  misc_feature (1)..(25): SEQ ID NO: 2053; WAN024FRR_at; Start 138; Stop 162
ccttaacaccacgaggcaagaaact

SEQ ID NO: 218400 - DNA, 25 bp, Artificial
  probe
  misc_feature (1)..(25): SEQ ID NO: 2053; WAN024FRR_at; Start 222; Stop 246
gattgtccccatcaaggcccacata

SEQ ID NO: 218401 - DNA, 25 bp, Artificial
  probe
  misc_feature (1)..(25): SEQ ID NO: 2053; WAN024FRR_at; Start 237; Stop 261
ggcccacatactcatcaaggttgac

SEQ ID NO: 218402 - DNA, 25 bp, Artificial
  probe
  misc_feature (1)..(25): SEQ ID NO: 2053; WAN024FRR_at; Start 187; Stop 211
caagttttcttgcatgaagtaacga

SEQ ID NO: 218403 - DNA, 25 bp, Artificial
  probe
  misc_feature (1)..(25): SEQ ID NO: 2053; WAN024FRR_at; Start 116; Stop 140
tcaacttcagcttcagcattgtcct

SEQ ID NO: 218404 - DNA, 25 bp, Artificial
  probe
  misc_feature (1)..(25): SEQ ID NO: 2053; WAN024FRR_at; Start 59; Stop 83
ccgattcccaagatttggaggtcaa

SEQ ID NO: 218405 - DNA, 25 bp, Artificial
  probe
  misc_feature (1)..(25): SEQ ID NO: 2053; WAN024FRR_at; Start 102; Stop 126
tttggttgtagcgttcaacttcagc

SEQ ID NO: 218406 - DNA, 25 bp, Artificial
  probe
  misc_feature (1)..(25): SEQ ID NO: 2053; WAN024FRR_at; Start 76; Stop 100
gaggtcaactggatggtcagccaaa

SEQ ID NO: 218407 - DNA, 25 bp, Artificial
  probe
  misc_feature (1)..(25): SEQ ID NO: 2053; WAN024FRR_at; Start 197; Stop 221
tgcatgaagtaacgataagactgtg

SEQ ID NO: 218408 - DNA, 25 bp, Artificial
  probe
  misc_feature (1)..(25): SEQ ID NO: 2053; WAN024FRR_at; Start 46; Stop 70
atgcccattgcgaccgattcccaag

SEQ ID NO: 218409 - DNA, 25 bp, Artificial
  probe
  misc_feature (1)..(25): SEQ ID NO: 2053; WAN024FRR_at; Start 129; Stop 153
cagcattgtccttaacaccacgagg

SEQ ID NO: 218410 - DNA, 25 bp, Artificial
  probe
  misc_feature (1)..(25): SEQ ID NO: 2053; WAN024FRR_at; Start 233; Stop 257
tcaaggcccacatactcatcaaggt

SEQ ID NO: 218411 - DNA, 25 bp, Artificial
  probe
  misc_feature (1)..(25): SEQ ID NO: 2053; WAN024FRR_at; Start 73; Stop 97
ttggaggtcaactggatggtcagcc

SEQ ID NO: 218412 - DNA, 25 bp, Artificial
  probe
  misc_feature (1)..(25): SEQ ID NO: 2053; WAN024FRR_at; Start 26; Stop 50
ccaggctcattaaagccgatatgcc

SEQ ID NO: 218413 - DNA, 25 bp, Artificial
  probe
  misc_feature (1)..(25): SEQ ID NO: 2287; WAN024FRS_at; Start 40; Stop 64
caagttcaaggtggaaaagttgctt

SEQ ID NO: 218414 - DNA, 25 bp, Artificial
  probe
  misc_feature (1)..(25): SEQ ID NO: 2287; WAN024FRS_at; Start 625; Stop 649
ggcccagtgactgagaacctacctg

SEQ ID NO: 218415 - DNA, 25 bp, Artificial
  probe
  misc_feature (1)..(25): SEQ ID NO: 2287; WAN024FRS_at; Start 673; Stop 697
gatgtaaccatcatcgcagatgctg

SEQ ID NO: 218416 - DNA, 25 bp, Artificial
  probe
  misc_feature (1)..(25): SEQ ID NO: 2287; WAN024FRS_at; Start 447; Stop 471
gcatctagtagaacttgaccagtct

SEQ ID NO: 218417 - DNA, 25 bp, Artificial
  probe
  misc_feature (1)..(25): SEQ ID NO: 2287; WAN024FRS_at; Start 283; Stop 307
aaagaaagtttcttgcctcgtggtg

SEQ ID NO: 218418 - DNA, 25 bp, Artificial
  probe
  misc_feature (1)..(25): SEQ ID NO: 2287; WAN024FRS_at; Start 332; Stop 356
ttgaacgctacaaccaaattttggc

SEQ ID NO: 218419 - DNA, 25 bp, Artificial
  probe
  misc_feature (1)..(25): SEQ ID NO: 2287; WAN024FRS_at; Start 586; Stop 610
ggtgagtcgaaagcagaagccattg

SEQ ID NO: 218420 - DNA, 25 bp, Artificial
  probe
  misc_feature (1)..(25): SEQ ID NO: 2287; WAN024FRS_at; Start 195; Stop 219
ccttgatgagtatgtgggccttgat

SEQ ID NO: 218421 - DNA, 25 bp, Artificial
  probe
  misc_feature (1)..(25): SEQ ID NO: 2287; WAN024FRS_at; Start 348; Stop 372
aattttggctgaccatccagttgac

SEQ ID NO: 218422 - DNA, 25 bp, Artificial
  probe
  misc_feature (1)..(25): SEQ ID NO: 2287; WAN024FRS_at; Start 598; Stop 622
gcagaagccattgccggaacagtat

SEQ ID NO: 218423 - DNA, 25 bp, Artificial
  probe
  misc_feature (1)..(25): SEQ ID NO: 2287; WAN024FRS_at; Start 463; Stop 487
gaccagtctactatcgaagccaatg

SEQ ID NO: 218424 - DNA, 25 bp, Artificial
  probe
  misc_feature (1)..(25): SEQ ID NO: 2287; WAN024FRS_at; Start 374; Stop 398
tccaaatcttgggaatcggtcgcaa

SEQ ID NO: 218425 - DNA, 25 bp, Artificial
  probe
  misc_feature (1)..(25): SEQ ID NO: 2287; WAN024FRS_at; Start 433; Stop 457
tttgacagtcaaacgcatctagtag

SEQ ID NO: 218426 - DNA, 25 bp, Artificial
  probe
  misc_feature (1)..(25): SEQ ID NO: 2287; WAN024FRS_at; Start 684; Stop 708
catcgcagatgctgaagcgcttagc

SEQ ID NO: 218427 - DNA, 25 bp, Artificial
  probe
  misc_feature (1)..(25): SEQ ID NO: 2287; WAN024FRS_at; Start 543; Stop 567
taaaaacattttggatgccaagtct

SEQ ID NO: 218428 - DNA, 25 bp, Artificial
  probe
  misc_feature (1)..(25): SEQ ID NO: 2287; WAN024FRS_at; Start 652; Stop 676
agtagcctccaaaatcaccctgatg

SEQ ID NO: 218429 - DNA, 25 bp, Artificial
  probe
  misc_feature (1)..(25): SEQ ID NO: 2287; WAN024FRS_at; Start 112; Stop 136
cttgcgacaggaagtagcccacttg

SEQ ID NO: 218430 - DNA, 25 bp, Artificial
  probe
  misc_feature (1)..(25): SEQ ID NO: 2287; WAN024FRS_at; Start 511; Stop 535
gacgtcccaacccaagctatttcaa

SEQ ID NO: 218431 - DNA, 25 bp, Artificial
  probe
  misc_feature (1)..(25): SEQ ID NO: 2287; WAN024FRS_at; Start 639; Stop 663
gaacctacctgcaagtagcctccaa

SEQ ID NO: 218432 - DNA, 25 bp, Artificial
  probe
  misc_feature (1)..(25): SEQ ID NO: 2287; WAN024FRS_at; Start 240; Stop 264
tcgttacttcatgcaagaaaacttg

SEQ ID NO: 218433 - DNA, 25 bp, Artificial
  probe
  misc_feature (1)..(25): SEQ ID NO: 2287; WAN024FRS_at; Start 100; Stop 124
caaactctaggacttgcgacaggaa

SEQ ID NO: 218434 - DNA, 25 bp, Artificial
  probe
  misc_feature (1)..(25): SEQ ID NO: 2287; WAN024FRS_at; Start 169; Stop 193
gatttttcaaatctaaccagtgtca

SEQ ID NO: 218435 - DNA, 25 bp, Artificial
  probe
  misc_feature (1)..(25): SEQ ID NO: 2287; WAN024FRS_at; Start 74; Stop 98
tgaaggaaaaattggctaatggagc

SEQ ID NO: 218436 - DNA, 25 bp, Artificial
  probe
  misc_feature (1)..(25): SEQ ID NO: 2287; WAN024FRS_at; Start 387; Stop 411
aatcggtcgcaatgggcatatcggc

SEQ ID NO: 218437 - DNA, 25 bp, Artificial
  probe
  misc_feature (1)..(25): SEQ ID NO: 2287; WAN024FRS_at; Start 315; Stop 339
caatgctgaagctgaagttgaacgc

SEQ ID NO: 218438 - DNA, 25 bp, Artificial
  probe
  misc_feature (1)..(25): SEQ ID NO: 2287; WAN024FRS_at; Start 496; Stop 520
tttgccaagattgaagacgtcccaa

SEQ ID NO: 218439 - DNA, 25 bp, Artificial
  probe
  misc_feature (1)..(25): SEQ ID NO: 2287; WAN024FRS_at; Start 610; Stop 634
gccggaacagtatctggcccagtga

SEQ ID NO: 218440 - DNA, 25 bp, Artificial
  probe
  misc_feature (1)..(25): SEQ ID NO: 2287; WAN024FRS_at; Start 88; Stop 112
gctaatggagctcaaactctaggac

SEQ ID NO: 218441 - DNA, 25 bp, Artificial
  probe
  misc_feature (1)..(25): SEQ ID NO: 2287; WAN024FRS_at; Start 298; Stop 322
cctcgtggtgttaaggacaatgctg

SEQ ID NO: 218442 - DNA, 25 bp, Artificial
  probe
  misc_feature (1)..(25): SEQ ID NO: 2287; WAN024FRS_at; Start 180; Stop 204
tctaaccagtgtcaaccttgatgag

SEQ ID NO: 218443 - DNA, 25 bp, Artificial
  probe
  misc_feature (1)..(25): SEQ ID NO: 2287; WAN024FRS_at; Start 401; Stop 425
ggcatatcggctttaatgagcctgg

SEQ ID NO: 218444 - DNA, 25 bp, Artificial
  probe
  misc_feature (1)..(25): SEQ ID NO: 2287; WAN024FRS_at; Start 221; Stop 245
gggacaatccacagtcttatcgtta

SEQ ID NO: 218445 - DNA, 25 bp, Artificial
  probe
  misc_feature (1)..(25): SEQ ID NO: 2287; WAN024FRS_at; Start 363; Stop 387
tccagttgacctccaaatcttggga

SEQ ID NO: 218446 - DNA, 25 bp, Artificial
  probe
  misc_feature (1)..(25): SEQ ID NO: 2287; WAN024FRS_at; Start 126; Stop 150
tagcccacttgaattttacaaggaa

SEQ ID NO: 218447 - DNA, 25 bp, Artificial
  probe
  misc_feature (1)..(25): SEQ ID NO: 7548; WAN024FRT_at; Start 193; Stop 217
tccaagacgatcaaaggtcttatgc

SEQ ID NO: 218448 - DNA, 25 bp, Artificial
  probe
  misc_feature (1)..(25): SEQ ID NO: 7548; WAN024FRT_at; Start 144; Stop 168
gaatacgaggaatggctacgccaga

SEQ ID NO: 218449 - DNA, 25 bp, Artificial
  probe
  misc_feature (1)..(25): SEQ ID NO: 7548; WAN024FRT_at; Start 126; Stop 150
ctgttttaactggaatacgaatacg

SEQ ID NO: 218450 - DNA, 25 bp, Artificial
  probe
  misc_feature (1)..(25): SEQ ID NO: 7548; WAN024FRT_at; Start 115; Stop 139
gatattacgacctgttttaactgga

SEQ ID NO: 218451 - DNA, 25 bp, Artificial
  probe
  misc_feature (1)..(25): SEQ ID NO: 7548; WAN024FRT_at; Start 203; Stop 227
tcaaaggtcttatgcgtatcgtaat

SEQ ID NO: 218452 - DNA, 25 bp, Artificial
  probe
  misc_feature (1)..(25): SEQ ID NO: 7548; WAN024FRT_at; Start 28; Stop 52
tgtcagtcgttcgtcgaacaaacgg

SEQ ID NO: 218453 - DNA, 25 bp, Artificial
  probe
  misc_feature (1)..(25): SEQ ID NO: 7548; WAN024FRT_at; Start 2; Stop 26
tgcacctcatttcgagcgatgagac

SEQ ID NO: 218454 - DNA, 25 bp, Artificial
  probe
  misc_feature (1)..(25): SEQ ID NO: 7548; WAN024FRT_at; Start 230; Stop 254
tccaaatagacagcaagctgaacct

SEQ ID NO: 218455 - DNA, 25 bp, Artificial
  probe
  misc_feature (1)..(25): SEQ ID NO: 7548; WAN024FRT_at; Start 34; Stop 58
tcgttcgtcgaacaaacgggtcgca

SEQ ID NO: 218456 - DNA, 25 bp, Artificial
  probe
  misc_feature (1)..(25): SEQ ID NO: 7548; WAN024FRT_at; Start 60; Stop 84
caaagcccatttccttggcacgata

SEQ ID NO: 218457 - DNA, 25 bp, Artificial
  probe
  misc_feature (1)..(25): SEQ ID NO: 7548; WAN024FRT_at; Start 78; Stop 102
cacgataattcatggcagctgcctc

SEQ ID NO: 218458 - DNA, 25 bp, Artificial
  probe
  misc_feature (1)..(25): SEQ ID NO: 7548; WAN024FRT_at; Start 141; Stop 165
tacgaatacgaggaatggctacgcc

SEQ ID NO: 218459 - DNA, 25 bp, Artificial
  probe
  misc_feature (1)..(25): SEQ ID NO: 7548; WAN024FRT_at; Start 81; Stop 105
gataattcatggcagctgcctcaat

SEQ ID NO: 218460 - DNA, 25 bp, Artificial
  probe
  misc_feature (1)..(25): SEQ ID NO: 7548; WAN024FRT_at; Start 22; Stop 46
gagacttgtcagtcgttcgtcgaac

SEQ ID NO: 218461 - DNA, 25 bp, Artificial
  probe
  misc_feature (1)..(25): SEQ ID NO: 7548; WAN024FRT_at; Start 105; Stop 129
tcacaacagagatattacgacctgt

SEQ ID NO: 218462 - DNA, 25 bp, Artificial
  probe
  misc_feature (1)..(25): SEQ ID NO: 7548; WAN024FRT_at; Start 198; Stop 222
gacgatcaaaggtcttatgcgtatc

SEQ ID NO: 218463 - DNA, 25 bp, Artificial
  probe
  misc_feature (1)..(25): SEQ ID NO: 7548; WAN024FRT_at; Start 9; Stop 33
catttcgagcgatgagacttgtcag

SEQ ID NO: 218464 - DNA, 25 bp, Artificial
  probe
  misc_feature (1)..(25): SEQ ID NO: 7548; WAN024FRT_at; Start 12; Stop 36
ttcgagcgatgagacttgtcagtcg

SEQ ID NO: 218465 - DNA, 25 bp, Artificial
  probe
  misc_feature (1)..(25): SEQ ID NO: 7548; WAN024FRT_at; Start 149; Stop 173
cgaggaatggctacgccagaaactt

SEQ ID NO: 218466 - DNA, 25 bp, Artificial
  probe
  misc_feature (1)..(25): SEQ ID NO: 7548; WAN024FRT_at; Start 48; Stop 72
aacgggtcgcatcaaagcccatttc

SEQ ID NO: 218467 - DNA, 25 bp, Artificial
  probe
  misc_feature (1)..(25): SEQ ID NO: 7548; WAN024FRT_at; Start 91; Stop 115
ggcagctgcctcaatcacaacagag

SEQ ID NO: 218468 - DNA, 25 bp, Artificial
  probe
  misc_feature (1)..(25): SEQ ID NO: 7548; WAN024FRT_at; Start 43; Stop 67
gaacaaacgggtcgcatcaaagccc

SEQ ID NO: 218469 - DNA, 25 bp, Artificial
  probe
  misc_feature (1)..(25): SEQ ID NO: 7548; WAN024FRT_at; Start 167; Stop 191
gaaacttcaagttcctctgcattgt

SEQ ID NO: 218470 - DNA, 25 bp, Artificial
  probe
  misc_feature (1)..(25): SEQ ID NO: 7548; WAN024FRT_at; Start 132; Stop 156
taactggaatacgaatacgaggaat

SEQ ID NO: 218471 - DNA, 25 bp, Artificial
  probe
  misc_feature (1)..(25): SEQ ID NO: 7548; WAN024FRT_at; Start 37; Stop 61
ttcgtcgaacaaacgggtcgcatca

SEQ ID NO: 218472 - DNA, 25 bp, Artificial
  probe
  misc_feature (1)..(25): SEQ ID NO: 7548; WAN024FRT_at; Start 95; Stop 119
gctgcctcaatcacaacagagatat

SEQ ID NO: 218473 - DNA, 25 bp, Artificial
  probe
  misc_feature (1)..(25): SEQ ID NO: 7548; WAN024FRT_at; Start 156; Stop 180
tggctacgccagaaacttcaagttc

SEQ ID NO: 218474 - DNA, 25 bp, Artificial
  probe
  misc_feature (1)..(25): SEQ ID NO: 7548; WAN024FRT_at; Start 210; Stop 234
tcttatgcgtatcgtaattttccaa

SEQ ID NO: 218475 - DNA, 25 bp, Artificial
  probe
  misc_feature (1)..(25): SEQ ID NO: 7548; WAN024FRT_at; Start 225; Stop 249
aattttccaaatagacagcaagctg

SEQ ID NO: 218476 - DNA, 25 bp, Artificial
  probe
  misc_feature (1)..(25): SEQ ID NO: 7548; WAN024FRT_at; Start 74; Stop 98
ttggcacgataattcatggcagctg

SEQ ID NO: 218477 - DNA, 25 bp, Artificial
  probe
  misc_feature (1)..(25): SEQ ID NO: 7548; WAN024FRT_at; Start 234; Stop 258
aatagacagcaagctgaacctgtga

SEQ ID NO: 218478 - DNA, 25 bp, Artificial
  probe
  misc_feature (1)..(25): SEQ ID NO: 7548; WAN024FRT_at; Start 185; Stop 209
gcattgtttccaagacgatcaaagg

SEQ ID NO: 218479 - DNA, 25 bp, Artificial
  probe
  misc_feature (1)..(25): SEQ ID NO: 7548; WAN024FRT_at; Start 71; Stop 95
tccttggcacgataattcatggcag

SEQ ID NO: 218480 - DNA, 25 bp, Artificial
  probe
  misc_feature (1)..(25): SEQ ID NO: 7548; WAN024FRT_at; Start 174; Stop 198
caagttcctctgcattgtttccaag

SEQ ID NO: 218481 - DNA, 25 bp, Artificial
  probe
  misc_feature (1)..(25): SEQ ID NO: 4320; WAN024FRU_at; Start 48; Stop 72
tggcaaagatatcgacacggtcatc

SEQ ID NO: 218482 - DNA, 25 bp, Artificial
  probe
  misc_feature (1)..(25): SEQ ID NO: 4320; WAN024FRU_at; Start 162; Stop 186
cataaatatccatcaagacaccgtg

SEQ ID NO: 218483 - DNA, 25 bp, Artificial
  probe
  misc_feature (1)..(25): SEQ ID NO: 4320; WAN024FRU_at; Start 93; Stop 117
gtttgacaagctcaagacctgtctc

SEQ ID NO: 218484 - DNA, 25 bp, Artificial
  probe
  misc_feature (1)..(25): SEQ ID NO: 4320; WAN024FRU_at; Start 31; Stop 55
gagagtaatctcatccttggcaaag

SEQ ID NO: 218485 - DNA, 25 bp, Artificial
  probe
  misc_feature (1)..(25): SEQ ID NO: 4320; WAN024FRU_at; Start 186; Stop 210
gcacactggtacgttctgccaaacg

SEQ ID NO: 218486 - DNA, 25 bp, Artificial
  probe
  misc_feature (1)..(25): SEQ ID NO: 4320; WAN024FRU_at; Start 200; Stop 224
tctgccaaacgagaatccagatagc

SEQ ID NO: 218487 - DNA, 25 bp, Artificial
  probe
  misc_feature (1)..(25): SEQ ID NO: 4320; WAN024FRU_at; Start 207; Stop 231
aacgagaatccagatagctagataa

SEQ ID NO: 218488 - DNA, 25 bp, Artificial
  probe
  misc_feature (1)..(25): SEQ ID NO: 4320; WAN024FRU_at; Start 86; Stop 110
tgaccacgtttgacaagctcaagac

SEQ ID NO: 218489 - DNA, 25 bp, Artificial
  probe
  misc_feature (1)..(25): SEQ ID NO: 4320; WAN024FRU_at; Start 12; Stop 36
tttcagctggttcaccccagagagt

SEQ ID NO: 218490 - DNA, 25 bp, Artificial
  probe
  misc_feature (1)..(25): SEQ ID NO: 4320; WAN024FRU_at; Start 55; Stop 79
gatatcgacacggtcatcggctacc

SEQ ID NO: 218491 - DNA, 25 bp, Artificial
  probe
  misc_feature (1)..(25): SEQ ID NO: 4320; WAN024FRU_at; Start 64; Stop 88
acggtcatcggctaccaaacggtga

SEQ ID NO: 218492 - DNA, 25 bp, Artificial
  probe
  misc_feature (1)..(25): SEQ ID NO: 4320; WAN024FRU_at; Start 178; Stop 202
gacaccgtgcacactggtacgttct

SEQ ID NO: 218493 - DNA, 25 bp, Artificial
  probe
  misc_feature (1)..(25): SEQ ID NO: 4320; WAN024FRU_at; Start 183; Stop 207
cgtgcacactggtacgttctgccaa

SEQ ID NO: 218494 - DNA, 25 bp, Artificial
  probe
  misc_feature (1)..(25): SEQ ID NO: 4320; WAN024FRU_at; Start 42; Stop 66
catccttggcaaagatatcgacacg

SEQ ID NO: 218495 - DNA, 25 bp, Artificial
  probe
  misc_feature (1)..(25): SEQ ID NO: 4320; WAN024FRU_at; Start 175; Stop 199
caagacaccgtgcacactggtacgt

SEQ ID NO: 218496 - DNA, 25 bp, Artificial
  probe
  misc_feature (1)..(25): SEQ ID NO: 4320; WAN024FRU_at; Start 45; Stop 69
ccttggcaaagatatcgacacggtc

SEQ ID NO: 218497 - DNA, 25 bp, Artificial
  probe
  misc_feature (1)..(25): SEQ ID NO: 4320; WAN024FRU_at; Start 70; Stop 94
atcggctaccaaacggtgaccacgt

SEQ ID NO: 218498 - DNA, 25 bp, Artificial
  probe
  misc_feature (1)..(25): SEQ ID NO: 4320; WAN024FRU_at; Start 14; Stop 38
tcagctggttcaccccagagagtaa

SEQ ID NO: 218499 - DNA, 25 bp, Artificial
  probe
  misc_feature (1)..(25): SEQ ID NO: 4320; WAN024FRU_at; Start 203; Stop 227
gccaaacgagaatccagatagctag

SEQ ID NO: 218500 - DNA, 25 bp, Artificial
  probe
  misc_feature (1)..(25): SEQ ID NO: 4320; WAN024FRU_at; Start 147; Stop 171
tcaagacgcccatcccataaatatc

SEQ ID NO: 218501 - DNA, 25 bp, Artificial
  probe
  misc_feature (1)..(25): SEQ ID NO: 4320; WAN024FRU_at; Start 172; Stop 196
catcaagacaccgtgcacactggta

SEQ ID NO: 218502 - DNA, 25 bp, Artificial
  probe
  misc_feature (1)..(25): SEQ ID NO: 4320; WAN024FRU_at; Start 135; Stop 159
tatctccctgaatcaagacgcccat

SEQ ID NO: 218503 - DNA, 25 bp, Artificial
  probe
  misc_feature (1)..(25): SEQ ID NO: 4320; WAN024FRU_at; Start 68; Stop 92
tcatcggctaccaaacggtgaccac

SEQ ID NO: 218504 - DNA, 25 bp, Artificial
  probe
  misc_feature (1)..(25): SEQ ID NO: 4320; WAN024FRU_at; Start 90; Stop 114
cacgtttgacaagctcaagacctgt

SEQ ID NO: 218505 - DNA, 25 bp, Artificial
  probe
  misc_feature (1)..(25): SEQ ID NO: 4320; WAN024FRU_at; Start 189; Stop 213
cactggtacgttctgccaaacgaga

SEQ ID NO: 218506 - DNA, 25 bp, Artificial
  probe
  misc_feature (1)..(25): SEQ ID NO: 4320; WAN024FRU_at; Start 84; Stop 108
ggtgaccacgtttgacaagctcaag

SEQ ID NO: 218507 - DNA, 25 bp, Artificial
  probe
  misc_feature (1)..(25): SEQ ID NO: 4320; WAN024FRU_at; Start 51; Stop 75
caaagatatcgacacggtcatcggc

SEQ ID NO: 218508 - DNA, 25 bp, Artificial
  probe
  misc_feature (1)..(25): SEQ ID NO: 4320; WAN024FRU_at; Start 130; Stop 154
tccactatctccctgaatcaagacg

SEQ ID NO: 218509 - DNA, 25 bp, Artificial
  probe
  misc_feature (1)..(25): SEQ ID NO: 4320; WAN024FRU_at; Start 165; Stop 189
aaatatccatcaagacaccgtgcac

SEQ ID NO: 218510 - DNA, 25 bp, Artificial
  probe
  misc_feature (1)..(25): SEQ ID NO: 4320; WAN024FRU_at; Start 195; Stop 219
tacgttctgccaaacgagaatccag

SEQ ID NO: 218511 - DNA, 25 bp, Artificial
  probe
  misc_feature (1)..(25): SEQ ID NO: 4320; WAN024FRU_at; Start 19; Stop 43
tggttcaccccagagagtaatctca

SEQ ID NO: 218512 - DNA, 25 bp, Artificial
  probe
  misc_feature (1)..(25): SEQ ID NO: 4320; WAN024FRU_at; Start 81; Stop 105
aacggtgaccacgtttgacaagctc

SEQ ID NO: 218513 - DNA, 25 bp, Artificial
  probe
  misc_feature (1)..(25): SEQ ID NO: 4320; WAN024FRU_at; Start 122; Stop 146
ttaccaattccactatctccctgaa

SEQ ID NO: 218514 - DNA, 25 bp, Artificial
  probe
  misc_feature (1)..(25): SEQ ID NO: 4320; WAN024FRU_at; Start 57; Stop 81
tatcgacacggtcatcggctaccaa

SEQ ID NO: 218515 - DNA, 25 bp, Artificial
  probe
  misc_feature (1)..(25): SEQ ID NO: 4962; WAN024FRV_at; Start 158; Stop 182
caccagagcggattcaacttttggg

SEQ ID NO: 218516 - DNA, 25 bp, Artificial
  probe
  misc_feature (1)..(25): SEQ ID NO: 4962; WAN024FRV_at; Start 442; Stop 466
gatatttatgggatgggcgtcttga

SEQ ID NO: 218517 - DNA, 25 bp, Artificial
  probe
  misc_feature (1)..(25): SEQ ID NO: 4962; WAN024FRV_at; Start 388; Stop 412
agctatctggattctcgtttggcag

SEQ ID NO: 218518 - DNA, 25 bp, Artificial
  probe
  misc_feature (1)..(25): SEQ ID NO: 4962; WAN024FRV_at; Start 107; Stop 131
cggatattacgcgacctggtcttga

SEQ ID NO: 218519 - DNA, 25 bp, Artificial
  probe
  misc_feature (1)..(25): SEQ ID NO: 4962; WAN024FRV_at; Start 311; Stop 335
taaaggctgctagagaatgtaagat

SEQ ID NO: 218520 - DNA, 25 bp, Artificial
  probe
  misc_feature (1)..(25): SEQ ID NO: 4962; WAN024FRV_at; Start 896; Stop 920
tgttcgacgaacgactgacaagtct

SEQ ID NO: 218521 - DNA, 25 bp, Artificial
  probe
  misc_feature (1)..(25): SEQ ID NO: 4962; WAN024FRV_at; Start 606; Stop 630
gaaacacttgattgaaattcgtggg

SEQ ID NO: 218522 - DNA, 25 bp, Artificial
  probe
  misc_feature (1)..(25): SEQ ID NO: 4962; WAN024FRV_at; Start 827; Stop 851
tctctgttgtgattgaggcagctgc

SEQ ID NO: 218523 - DNA, 25 bp, Artificial
  probe
  misc_feature (1)..(25): SEQ ID NO: 4962; WAN024FRV_at; Start 417; Stop 441
taccagtgtgcacggtgtcttgatg

SEQ ID NO: 218524 - DNA, 25 bp, Artificial
  probe
  misc_feature (1)..(25): SEQ ID NO: 4962; WAN024FRV_at; Start 209; Stop 233
gcatgccttccaacagccgttatga

SEQ ID NO: 218525 - DNA, 25 bp, Artificial
  probe
  misc_feature (1)..(25): SEQ ID NO: 4962; WAN024FRV_at; Start 678; Stop 702
ggattcttcacaggttcagcttgct

SEQ ID NO: 218526 - DNA, 25 bp, Artificial
  probe
  misc_feature (1)..(25): SEQ ID NO: 4962; WAN024FRV_at; Start 459; Stop 483
cgtcttgattcagggagatagtgga

SEQ ID NO: 218527 - DNA, 25 bp, Artificial
  probe
  misc_feature (1)..(25): SEQ ID NO: 4962; WAN024FRV_at; Start 588; Stop 612
tgaaccagctgaaattttgaaacac

SEQ ID NO: 218528 - DNA, 25 bp, Artificial
  probe
  misc_feature (1)..(25): SEQ ID NO: 4962; WAN024FRV_at; Start 403; Stop 427
cgtttggcagaacgtaccagtgtgc

SEQ ID NO: 218529 - DNA, 25 bp, Artificial
  probe
  misc_feature (1)..(25): SEQ ID NO: 4962; WAN024FRV_at; Start 503; Stop 527
gtcttgagcttgtcaaacgtggtca

SEQ ID NO: 218530 - DNA, 25 bp, Artificial
  probe
  misc_feature (1)..(25): SEQ ID NO: 4962; WAN024FRV_at; Start 278; Stop 302
ttgcccgtggtttggtggttccaga

SEQ ID NO: 218531 - DNA, 25 bp, Artificial
  probe
  misc_feature (1)..(25): SEQ ID NO: 4962; WAN024FRV_at; Start 763; Stop 787
gaacttgaagtttctggcgtagcca

SEQ ID NO: 218532 - DNA, 25 bp, Artificial
  probe
  misc_feature (1)..(25): SEQ ID NO: 4962; WAN024FRV_at; Start 543; Stop 567
tgaccgtgtcgatatctttgccaag

SEQ ID NO: 218533 - DNA, 25 bp, Artificial
  probe
  misc_feature (1)..(25): SEQ ID NO: 4962; WAN024FRV_at; Start 841; Stop 865
gaggcagctgccatgaattatcgtg

SEQ ID NO: 218534 - DNA, 25 bp, Artificial
  probe
  misc_feature (1)..(25): SEQ ID NO: 4962; WAN024FRV_at; Start 263; Stop 287
caccagcagtcattgttgcccgtgg

SEQ ID NO: 218535 - DNA, 25 bp, Artificial
  probe
  misc_feature (1)..(25): SEQ ID NO: 4962; WAN024FRV_at; Start 727; Stop 751
cataagacctttgatcgtcttggaa

SEQ ID NO: 218536 - DNA, 25 bp, Artificial
  probe
  misc_feature (1)..(25): SEQ ID NO: 4962; WAN024FRV_at; Start 248; Stop 272
tgtttctacctgagacaccagcagt

SEQ ID NO: 218537 - DNA, 25 bp, Artificial
  probe
  misc_feature (1)..(25): SEQ ID NO: 4962; WAN024FRV_at; Start 350; Stop 374
gccgtgcagctaccagtcgtttatc

SEQ ID NO: 218538 - DNA, 25 bp, Artificial
  probe
  misc_feature (1)..(25): SEQ ID NO: 4962; WAN024FRV_at; Start 187; Stop 211
aaggagtggtcttatctgatcagca

SEQ ID NO: 218539 - DNA, 25 bp, Artificial
  probe
  misc_feature (1)..(25): SEQ ID NO: 4962; WAN024FRV_at; Start 660; Stop 684
cggtgcgagtgctgtcaaggattct

SEQ ID NO: 218540 - DNA, 25 bp, Artificial
  probe
  misc_feature (1)..(25): SEQ ID NO: 4962; WAN024FRV_at; Start 70; Stop 94
ggtgaaccagaattgcttgaaaagg

SEQ ID NO: 218541 - DNA, 25 bp, Artificial
  probe
  misc_feature (1)..(25): SEQ ID NO: 4962; WAN024FRV_at; Start 859; Stop 883
tatcgtgccaaggaaatgggctttg

SEQ ID NO: 218542 - DNA, 25 bp, Artificial
  probe
  misc_feature (1)..(25): SEQ ID NO: 4962; WAN024FRV_at; Start 558; Stop 582
ctttgccaaggatgagattactctc

SEQ ID NO: 218543 - DNA, 25 bp, Artificial
  probe
  misc_feature (1)..(25): SEQ ID NO: 4962; WAN024FRV_at; Start 693; Stop 717
tcagcttgctgtctatttggaaaat

SEQ ID NO: 218544 - DNA, 25 bp, Artificial
  probe
  misc_feature (1)..(25): SEQ ID NO: 4962; WAN024FRV_at; Start 145; Stop 169
tttgactactatacaccagagcgga

SEQ ID NO: 218545 - DNA, 25 bp, Artificial
  probe
  misc_feature (1)..(25): SEQ ID NO: 4962; WAN024FRV_at; Start 130; Stop 154
gaaatgacaggctattttgactact

SEQ ID NO: 218546 - DNA, 25 bp, Artificial
  probe
  misc_feature (1)..(25): SEQ ID NO: 4962; WAN024FRV_at; Start 333; Stop 357
gattgctattttaaccagccgtgca

SEQ ID NO: 218547 - DNA, 25 bp, Artificial
  probe
  misc_feature (1)..(25): SEQ ID NO: 4962; WAN024FRV_at; Start 296; Stop 320
ttccagaggagatgttaaaggctgc

SEQ ID NO: 218548 - DNA, 25 bp, Artificial
  probe
  misc_feature (1)..(25): SEQ ID NO: 4962; WAN024FRV_at; Start 778; Stop 802
ggcgtagccattcctcgtattcgta

SEQ ID NO: 218549 - DNA, 25 bp, Artificial
  probe
  misc_feature (1)..(25): SEQ ID NO: 5396; WAN024FRW_at; Start 570; Stop 594
gattctgatttttagacggaaatgg

SEQ ID NO: 218550 - DNA, 25 bp, Artificial
  probe
  misc_feature (1)..(25): SEQ ID NO: 5396; WAN024FRW_at; Start 81; Stop 105
tattgtgacaggcttgattcttgcg

SEQ ID NO: 218551 - DNA, 25 bp, Artificial
  probe
  misc_feature (1)..(25): SEQ ID NO: 5396; WAN024FRW_at; Start 774; Stop 798
gaaggccccttactatattacagag

SEQ ID NO: 218552 - DNA, 25 bp, Artificial
  probe
  misc_feature (1)..(25): SEQ ID NO: 5396; WAN024FRW_at; Start 485; Stop 509
tccgtgaccagatgtatattgaggg

SEQ ID NO: 218553 - DNA, 25 bp, Artificial
  probe
  misc_feature (1)..(25): SEQ ID NO: 5396; WAN024FRW_at; Start 244; Stop 268
cagaatttaggagagatttttgcca

SEQ ID NO: 218554 - DNA, 25 bp, Artificial
  probe
  misc_feature (1)..(25): SEQ ID NO: 5396; WAN024FRW_at; Start 288; Stop 312
catttacggtggtttgataactggg

SEQ ID NO: 218555 - DNA, 25 bp, Artificial
  probe
  misc_feature (1)..(25): SEQ ID NO: 5396; WAN024FRW_at; Start 126; Stop 150
agcacctagaaagaagatcatacca

SEQ ID NO: 218556 - DNA, 25 bp, Artificial
  probe
  misc_feature (1)..(25): SEQ ID NO: 5396; WAN024FRW_at; Start 361; Stop 385
gattttctagatattgcggcgccta

SEQ ID NO: 218557 - DNA, 25 bp, Artificial
  probe
  misc_feature (1)..(25): SEQ ID NO: 5396; WAN024FRW_at; Start 701; Stop 725
ttcgagtgtcccaatggctgtcagt

SEQ ID NO: 218558 - DNA, 25 bp, Artificial
  probe
  misc_feature (1)..(25): SEQ ID NO: 5396; WAN024FRW_at; Start 615; Stop 639
tatcacggccttttacttgatttgg

SEQ ID NO: 218559 - DNA, 25 bp, Artificial
  probe
  misc_feature (1)..(25): SEQ ID NO: 5396; WAN024FRW_at; Start 15; Stop 39
gtgcaaaatgcttgatccaattgct

SEQ ID NO: 218560 - DNA, 25 bp, Artificial
  probe
  misc_feature (1)..(25): SEQ ID NO: 5396; WAN024FRW_at; Start 457; Stop 481
gataatctggattatctacctggct

SEQ ID NO: 218561 - DNA, 25 bp, Artificial
  probe
  misc_feature (1)..(25): SEQ ID NO: 5396; WAN024FRW_at; Start 199; Stop 223
ggagctcgtctctactatgttattt

SEQ ID NO: 218562 - DNA, 25 bp, Artificial
  probe
  misc_feature (1)..(25): SEQ ID NO: 5396; WAN024FRW_at; Start 184; Stop 208
cccttggctattttaggagctcgtc

SEQ ID NO: 218563 - DNA, 25 bp, Artificial
  probe
  misc_feature (1)..(25): SEQ ID NO: 5396; WAN024FRW_at; Start 732; Stop 756
tatcggtctcggtataatgatcgtt

SEQ ID NO: 218564 - DNA, 25 bp, Artificial
  probe
  misc_feature (1)..(25): SEQ ID NO: 5396; WAN024FRW_at; Start 584; Stop 608
gacggaaatggaagagtctcagacg

SEQ ID NO: 218565 - DNA, 25 bp, Artificial
  probe
  misc_feature (1)..(25): SEQ ID NO: 5396; WAN024FRW_at; Start 469; Stop 493
tatctacctggctttatccgtgacc

SEQ ID NO: 218566 - DNA, 25 bp, Artificial
  probe
  misc_feature (1)..(25): SEQ ID NO: 5396; WAN024FRW_at; Start 168; Stop 192
tatcttagtagcctttcccttggct

SEQ ID NO: 218567 - DNA, 25 bp, Artificial
  probe
  misc_feature (1)..(25): SEQ ID NO: 5396; WAN024FRW_at; Start 49; Stop 73
ggacccctagccattcgttggtatg

SEQ ID NO: 218568 - DNA, 25 bp, Artificial
  probe
  misc_feature (1)..(25): SEQ ID NO: 5396; WAN024FRW_at; Start 111; Stop 135
tttgaccatgaaagaagcacctaga

SEQ ID NO: 218569 - DNA, 25 bp, Artificial
  probe
  misc_feature (1)..(25): SEQ ID NO: 5396; WAN024FRW_at; Start 378; Stop 402
ggcgcctagcgttatgattgctcaa

SEQ ID NO: 218570 - DNA, 25 bp, Artificial
  probe
  misc_feature (1)..(25): SEQ ID NO: 5396; WAN024FRW_at; Start 629; Stop 653
acttgatttggtatggtttcggtcg

SEQ ID NO: 218571 - DNA, 25 bp, Artificial
  probe
  misc_feature (1)..(25): SEQ ID NO: 5396; WAN024FRW_at; Start 442; Stop 466
tatggtgcaacagtggataatctgg

SEQ ID NO: 218572 - DNA, 25 bp, Artificial
  probe
  misc_feature (1)..(25): SEQ ID NO: 5396; WAN024FRW_at; Start 265; Stop 289
gccatttggaatggtggtttggcca

SEQ ID NO: 218573 - DNA, 25 bp, Artificial
  probe
  misc_feature (1)..(25): SEQ ID NO: 5396; WAN024FRW_at; Start 64; Stop 88
cgttggtatgccttatgtattgtga

SEQ ID NO: 218574 - DNA, 25 bp, Artificial
  probe
  misc_feature (1)..(25): SEQ ID NO: 5396; WAN024FRW_at; Start 756; Stop 780
tatttatcaaaatcgaaagaaggcc

SEQ ID NO: 218575 - DNA, 25 bp, Artificial
  probe
  misc_feature (1)..(25): SEQ ID NO: 5396; WAN024FRW_at; Start 674; Stop 698
gaacagatagtctcatgttcttcgg

SEQ ID NO: 218576 - DNA, 25 bp, Artificial
  probe
  misc_feature (1)..(25): SEQ ID NO: 5396; WAN024FRW_at; Start 32; Stop 56
caattgctattcaactaggacccct

SEQ ID NO: 218577 - DNA, 25 bp, Artificial
  probe
  misc_feature (1)..(25): SEQ ID NO: 5396; WAN024FRW_at; Start 663; Stop 687
cgaaggtatgcgaacagatagtctc

SEQ ID NO: 218578 - DNA, 25 bp, Artificial
  probe
  misc_feature (1)..(25): SEQ ID NO: 5396; WAN024FRW_at; Start 325; Stop 349
tatatctttgctgaccgtaaactca

SEQ ID NO: 218579 - DNA, 25 bp, Artificial
  probe
  misc_feature (1)..(25): SEQ ID NO: 5396; WAN024FRW_at; Start 311; Stop 335
gggctcttgtgctctatatctttgc

SEQ ID NO: 218580 - DNA, 25 bp, Artificial
  probe
  misc_feature (1)..(25): SEQ ID NO: 5396; WAN024FRW_at; Start 96; Stop 120
gattcttgcggtttatttgaccatg

SEQ ID NO: 218581 - DNA, 25 bp, Artificial
  probe
  misc_feature (1)..(25): SEQ ID NO: 5396; WAN024FRW_at; Start 600; Stop 624
tctcagacgaggtcatatcacggcc

SEQ ID NO: 218582 - DNA, 25 bp, Artificial
  probe
  misc_feature (1)..(25): SEQ ID NO: 5396; WAN024FRW_at; Start 337; Stop 361
gaccgtaaactcatcaatacttggg

SEQ ID NO: 218583 - DNA, 25 bp, Artificial
  probe
  misc_feature (1)..(25): SEQ ID NO: 5348; WAN024FRX_at; Start 133; Stop 157
gacagacttgcaccagtcttgagtg

SEQ ID NO: 218584 - DNA, 25 bp, Artificial
  probe
  misc_feature (1)..(25): SEQ ID NO: 5348; WAN024FRX_at; Start 1; Stop 25
ttgcccttatcacttgttaaaaaca

SEQ ID NO: 218585 - DNA, 25 bp, Artificial
  probe
  misc_feature (1)..(25): SEQ ID NO: 5348; WAN024FRX_at; Start 263; Stop 287
tcgtagccaccttgacattgatatc

SEQ ID NO: 218586 - DNA, 25 bp, Artificial
  probe
  misc_feature (1)..(25): SEQ ID NO: 5348; WAN024FRX_at; Start 245; Stop 269
cactgaagagtggatcaatcgtagc

SEQ ID NO: 218587 - DNA, 25 bp, Artificial
  probe
  misc_feature (1)..(25): SEQ ID NO: 5348; WAN024FRX_at; Start 175; Stop 199
gaagctttcttgctcaagacacgcg

SEQ ID NO: 218588 - DNA, 25 bp, Artificial
  probe
  misc_feature (1)..(25): SEQ ID NO: 5348; WAN024FRX_at; Start 302; Stop 326
tgaccttagccaacaactcattggt

SEQ ID NO: 218589 - DNA, 25 bp, Artificial
  probe
  misc_feature (1)..(25): SEQ ID NO: 5348; WAN024FRX_at; Start 111; Stop 135
tttacttgcaagacgaagagctgac

SEQ ID NO: 218590 - DNA, 25 bp, Artificial
  probe
  misc_feature (1)..(25): SEQ ID NO: 5348; WAN024FRX_at; Start 249; Stop 273
gaagagtggatcaatcgtagccacc

SEQ ID NO: 218591 - DNA, 25 bp, Artificial
  probe
  misc_feature (1)..(25): SEQ ID NO: 5348; WAN024FRX_at; Start 125; Stop 149
gaagagctgacagacttgcaccagt

SEQ ID NO: 218592 - DNA, 25 bp, Artificial
  probe
  misc_feature (1)..(25): SEQ ID NO: 5348; WAN024FRX_at; Start 306; Stop 330
cttagccaacaactcattggtgtga

SEQ ID NO: 218593 - DNA, 25 bp, Artificial
  probe
  misc_feature (1)..(25): SEQ ID NO: 5348; WAN024FRX_at; Start 163; Stop 187
gaaccagctgatgaagctttcttgc

SEQ ID NO: 218594 - DNA, 25 bp, Artificial
  probe
  misc_feature (1)..(25): SEQ ID NO: 5348; WAN024FRX_at; Start 235; Stop 259
tctgcaacagcactgaagagtggat

SEQ ID NO: 218595 - DNA, 25 bp, Artificial
  probe
  misc_feature (1)..(25): SEQ ID NO: 5348; WAN024FRX_at; Start 202; Stop 226
tggtcattgaggtctgaaacagata

SEQ ID NO: 218596 - DNA, 25 bp, Artificial
  probe
  misc_feature (1)..(25): SEQ ID NO: 5348; WAN024FRX_at; Start 182; Stop 206
tcttgctcaagacacgcgcatggtc

SEQ ID NO: 218597 - DNA, 25 bp, Artificial
  probe
  misc_feature (1)..(25): SEQ ID NO: 5348; WAN024FRX_at; Start 225; Stop 249
tagagataaatctgcaacagcactg

SEQ ID NO: 218598 - DNA, 25 bp, Artificial
  probe
  misc_feature (1)..(25): SEQ ID NO: 5348; WAN024FRX_at; Start 104; Stop 128
tgaaaaatttacttgcaagacgaag

SEQ ID NO: 218599 - DNA, 25 bp, Artificial
  probe
  misc_feature (1)..(25): SEQ ID NO: 5348; WAN024FRX_at; Start 292; Stop 316
gccaagacattgaccttagccaaca

SEQ ID NO: 218600 - DNA, 25 bp, Artificial
  probe
  misc_feature (1)..(25): SEQ ID NO: 5348; WAN024FRX_at; Start 18; Stop 42
taaaaacaaggcaagagctgcacct

SEQ ID NO: 218601 - DNA, 25 bp, Artificial
  probe
  misc_feature (1)..(25): SEQ ID NO: 5348; WAN024FRX_at; Start 23; Stop 47
acaaggcaagagctgcacctgaaac

SEQ ID NO: 218602 - DNA, 25 bp, Artificial
  probe
  misc_feature (1)..(25): SEQ ID NO: 5348; WAN024FRX_at; Start 15; Stop 39
tgttaaaaacaaggcaagagctgca

SEQ ID NO: 218603 - DNA, 25 bp, Artificial
  probe
  misc_feature (1)..(25): SEQ ID NO: 5348; WAN024FRX_at; Start 256; Stop 280
ggatcaatcgtagccaccttgacat

SEQ ID NO: 218604 - DNA, 25 bp, Artificial
  probe
  misc_feature (1)..(25): SEQ ID NO: 5348; WAN024FRX_at; Start 210; Stop 234
gaggtctgaaacagatagagataaa

SEQ ID NO: 218605 - DNA, 25 bp, Artificial
  probe
  misc_feature (1)..(25): SEQ ID NO: 5348; WAN024FRX_at; Start 56; Stop 80
aaaggattgaggataatttacccat

SEQ ID NO: 218606 - DNA, 25 bp, Artificial
  probe
  misc_feature (1)..(25): SEQ ID NO: 5348; WAN024FRX_at; Start 144; Stop 168
accagtcttgagtgtttttgaacca

SEQ ID NO: 218607 - DNA, 25 bp, Artificial
  probe
  misc_feature (1)..(25): SEQ ID NO: 5348; WAN024FRX_at; Start 198; Stop 222
cgcatggtcattgaggtctgaaaca

SEQ ID NO: 218608 - DNA, 25 bp, Artificial
  probe
  misc_feature (1)..(25): SEQ ID NO: 5348; WAN024FRX_at; Start 276; Stop 300
gacattgatatcatctgccaagaca

SEQ ID NO: 218609 - DNA, 25 bp, Artificial
  probe
  misc_feature (1)..(25): SEQ ID NO: 5348; WAN024FRX_at; Start 116; Stop 140
ttgcaagacgaagagctgacagact

SEQ ID NO: 218610 - DNA, 25 bp, Artificial
  probe
  misc_feature (1)..(25): SEQ ID NO: 5348; WAN024FRX_at; Start 194; Stop 218
cacgcgcatggtcattgaggtctga

SEQ ID NO: 218611 - DNA, 25 bp, Artificial
  probe
  misc_feature (1)..(25): SEQ ID NO: 5348; WAN024FRX_at; Start 155; Stop 179
gtgtttttgaaccagctgatgaagc

SEQ ID NO: 218612 - DNA, 25 bp, Artificial
  probe
  misc_feature (1)..(25): SEQ ID NO: 5348; WAN024FRX_at; Start 67; Stop 91
gataatttacccataaggattctcc

SEQ ID NO: 218613 - DNA, 25 bp, Artificial
  probe
  misc_feature (1)..(25): SEQ ID NO: 5348; WAN024FRX_at; Start 229; Stop 253
gataaatctgcaacagcactgaaga

SEQ ID NO: 218614 - DNA, 25 bp, Artificial
  probe
  misc_feature (1)..(25): SEQ ID NO: 5348; WAN024FRX_at; Start 122; Stop 146
gacgaagagctgacagacttgcacc

SEQ ID NO: 218615 - DNA, 25 bp, Artificial
  probe
  misc_feature (1)..(25): SEQ ID NO: 5348; WAN024FRX_at; Start 286; Stop 310
tcatctgccaagacattgaccttag

SEQ ID NO: 218616 - DNA, 25 bp, Artificial
  probe
  misc_feature (1)..(25): SEQ ID NO: 5348; WAN024FRX_at; Start 189; Stop 213
caagacacgcgcatggtcattgagg

SEQ ID NO: 218617 - DNA, 25 bp, Artificial
  probe
  misc_feature (1)..(25): SEQ ID NO: 3006; WAN024FRY_at; Start 128; Stop 152
cagatgtggatgtgaccttgcatca

SEQ ID NO: 218618 - DNA, 25 bp, Artificial
  probe
  misc_feature (1)..(25): SEQ ID NO: 3006; WAN024FRY_at; Start 210; Stop 234
ggctacgattgatccactcttcagt

SEQ ID NO: 218619 - DNA, 25 bp, Artificial
  probe
  misc_feature (1)..(25): SEQ ID NO: 3006; WAN024FRY_at; Start 141; Stop 165
gaccttgcatcacaccaatgagttg

SEQ ID NO: 218620 - DNA, 25 bp, Artificial
  probe
  misc_feature (1)..(25): SEQ ID NO: 3006; WAN024FRY_at; Start 12; Stop 36
tgcatatattcttgttgccctagct

SEQ ID NO: 218621 - DNA, 25 bp, Artificial
  probe
  misc_feature (1)..(25): SEQ ID NO: 3006; WAN024FRY_at; Start 352; Stop 376
cttcgtcttgcaagtaaatttttca

SEQ ID NO: 218622 - DNA, 25 bp, Artificial
  probe
  misc_feature (1)..(25): SEQ ID NO: 3006; WAN024FRY_at; Start 120; Stop 144
cttgacttcagatgtggatgtgacc

SEQ ID NO: 218623 - DNA, 25 bp, Artificial
  probe
  misc_feature (1)..(25): SEQ ID NO: 3006; WAN024FRY_at; Start 244; Stop 268
gatttatctctatctgtttcagacc

SEQ ID NO: 218624 - DNA, 25 bp, Artificial
  probe
  misc_feature (1)..(25): SEQ ID NO: 3006; WAN024FRY_at; Start 51; Stop 75
ggtctatctgatcattactgtacaa

SEQ ID NO: 218625 - DNA, 25 bp, Artificial
  probe
  misc_feature (1)..(25): SEQ ID NO: 3006; WAN024FRY_at; Start 274; Stop 298
gaccatgcgcgtgtcttgagcaaga

SEQ ID NO: 218626 - DNA, 25 bp, Artificial
  probe
  misc_feature (1)..(25): SEQ ID NO: 3006; WAN024FRY_at; Start 290; Stop 314
tgagcaagaaagcttcatcagctgg

SEQ ID NO: 218627 - DNA, 25 bp, Artificial
  probe
  misc_feature (1)..(25): SEQ ID NO: 3006; WAN024FRY_at; Start 258; Stop 282
tgtttcagacctcaatgaccatgcg

SEQ ID NO: 218628 - DNA, 25 bp, Artificial
  probe
  misc_feature (1)..(25): SEQ ID NO: 3006; WAN024FRY_at; Start 71; Stop 95
tacaaaagcttggtcgtgtcatcga

SEQ ID NO: 218629 - DNA, 25 bp, Artificial
  probe
  misc_feature (1)..(25): SEQ ID NO: 3006; WAN024FRY_at; Start 326; Stop 350
tcaagactggtgcaagtctgtcagc

SEQ ID NO: 218630 - DNA, 25 bp, Artificial
  probe
  misc_feature (1)..(25): SEQ ID NO: 3006; WAN024FRY_at; Start 285; Stop 309
tgtcttgagcaagaaagcttcatca

SEQ ID NO: 218631 - DNA, 25 bp, Artificial
  probe
  misc_feature (1)..(25): SEQ ID NO: 3006; WAN024FRY_at; Start 333; Stop 357
tggtgcaagtctgtcagctcttcgt

SEQ ID NO: 218632 - DNA, 25 bp, Artificial
  probe
  misc_feature (1)..(25): SEQ ID NO: 3006; WAN024FRY_at; Start 7; Stop 31
gaagttgcatatattcttgttgccc

SEQ ID NO: 218633 - DNA, 25 bp, Artificial
  probe
  misc_feature (1)..(25): SEQ ID NO: 3006; WAN024FRY_at; Start 39; Stop 63
gattgtctttttggtctatctgatc

SEQ ID NO: 218634 - DNA, 25 bp, Artificial
  probe
  misc_feature (1)..(25): SEQ ID NO: 3006; WAN024FRY_at; Start 220; Stop 244
gatccactcttcagtgctgttgcag

SEQ ID NO: 218635 - DNA, 25 bp, Artificial
  probe
  misc_feature (1)..(25): SEQ ID NO: 3006; WAN024FRY_at; Start 188; Stop 212
cagatgatatcaatgtcaaggtggc

SEQ ID NO: 218636 - DNA, 25 bp, Artificial
  probe
  misc_feature (1)..(25): SEQ ID NO: 3006; WAN024FRY_at; Start 193; Stop 217
gatatcaatgtcaaggtggctacga

SEQ ID NO: 218637 - DNA, 25 bp, Artificial
  probe
  misc_feature (1)..(25): SEQ ID NO: 3006; WAN024FRY_at; Start 93; Stop 117
cgatgaaacagaaaagacgattaaa

SEQ ID NO: 218638 - DNA, 25 bp, Artificial
  probe
  misc_feature (1)..(25): SEQ ID NO: 3006; WAN024FRY_at; Start 262; Stop 286
tcagacctcaatgaccatgcgcgtg

SEQ ID NO: 218639 - DNA, 25 bp, Artificial
  probe
  misc_feature (1)..(25): SEQ ID NO: 3006; WAN024FRY_at; Start 169; Stop 193
gctaaggtcaatgtcttggcagatg

SEQ ID NO: 218640 - DNA, 25 bp, Artificial
  probe
  misc_feature (1)..(25): SEQ ID NO: 3006; WAN024FRY_at; Start 87; Stop 111
tgtcatcgatgaaacagaaaagacg

SEQ ID NO: 218641 - DNA, 25 bp, Artificial
  probe
  misc_feature (1)..(25): SEQ ID NO: 3006; WAN024FRY_at; Start 203; Stop 227
tcaaggtggctacgattgatccact

SEQ ID NO: 218642 - DNA, 25 bp, Artificial
  probe
  misc_feature (1)..(25): SEQ ID NO: 3006; WAN024FRY_at; Start 62; Stop 86
tcattactgtacaaaagcttggtcg

SEQ ID NO: 218643 - DNA, 25 bp, Artificial
  probe
  misc_feature (1)..(25): SEQ ID NO: 3006; WAN024FRY_at; Start 155; Stop 179
ccaatgagttgttggctaaggtcaa

SEQ ID NO: 218644 - DNA, 25 bp, Artificial
  probe
  misc_feature (1)..(25): SEQ ID NO: 3006; WAN024FRY_at; Start 301; Stop 325
gcttcatcagctggttcaaaaacac

SEQ ID NO: 218645 - DNA, 25 bp, Artificial
  probe
  misc_feature (1)..(25): SEQ ID NO: 3006; WAN024FRY_at; Start 231; Stop 255
cagtgctgttgcagatttatctcta

SEQ ID NO: 218646 - DNA, 25 bp, Artificial
  probe
  misc_feature (1)..(25): SEQ ID NO: 3006; WAN024FRY_at; Start 176; Stop 200
tcaatgtcttggcagatgatatcaa

SEQ ID NO: 218647 - DNA, 25 bp, Artificial
  probe
  misc_feature (1)..(25): SEQ ID NO: 3006; WAN024FRY_at; Start 312; Stop 336
tggttcaaaaacactcaagactggt

SEQ ID NO: 218648 - DNA, 25 bp, Artificial
  probe
  misc_feature (1)..(25): SEQ ID NO: 3006; WAN024FRY_at; Start 345; Stop 369
gtcagctcttcgtcttgcaagtaaa

SEQ ID NO: 218649 - DNA, 25 bp, Artificial
  probe
  misc_feature (1)..(25): SEQ ID NO: 3006; WAN024FRY_at; Start 107; Stop 131
agacgattaaaaccttgacttcaga

SEQ ID NO: 218650 - DNA, 25 bp, Artificial
  probe
  misc_feature (1)..(25): SEQ ID NO: 3006; WAN024FRY_at; Start 78; Stop 102
gcttggtcgtgtcatcgatgaaaca

SEQ ID NO: 218651 - DNA, 25 bp, Artificial
  probe
  misc_feature (1)..(25): SEQ ID NO: 2601; WAN024FRZ_at; Start 56; Stop 80
tgtttttaacaagtgataagggcaa

SEQ ID NO: 218652 - DNA, 25 bp, Artificial
  probe
  misc_feature (1)..(25): SEQ ID NO: 2601; WAN024FRZ_at; Start 337; Stop 361
gccgaagctcttgatgactcagaag

SEQ ID NO: 218653 - DNA, 25 bp, Artificial
  probe
  misc_feature (1)..(25): SEQ ID NO: 2601; WAN024FRZ_at; Start 144; Stop 168
ggagcaagtctgtgaaaaactgaca

SEQ ID NO: 218654 - DNA, 25 bp, Artificial
  probe
  misc_feature (1)..(25): SEQ ID NO: 2601; WAN024FRZ_at; Start 219; Stop 243
tgagtcaggtgaaatcactgtggac

SEQ ID NO: 218655 - DNA, 25 bp, Artificial
  probe
  misc_feature (1)..(25): SEQ ID NO: 2601; WAN024FRZ_at; Start 271; Stop 295
gcttttcaagcgacagaagcatcaa

SEQ ID NO: 218656 - DNA, 25 bp, Artificial
  probe
  misc_feature (1)..(25): SEQ ID NO: 2601; WAN024FRZ_at; Start 164; Stop 188
tgacagaagttaaggagcaggctac

SEQ ID NO: 218657 - DNA, 25 bp, Artificial
  probe
  misc_feature (1)..(25): SEQ ID NO: 2601; WAN024FRZ_at; Start 89; Stop 113
gcagtcaggctcaagattttctaga

SEQ ID NO: 218658 - DNA, 25 bp, Artificial
  probe
  misc_feature (1)..(25): SEQ ID NO: 2601; WAN024FRZ_at; Start 183; Stop 207
ggctacagattttgttctgaaaaca

SEQ ID NO: 218659 - DNA, 25 bp, Artificial
  probe
  misc_feature (1)..(25): SEQ ID NO: 2601; WAN024FRZ_at; Start 62; Stop 86
taacaagtgataagggcaaacaagt

SEQ ID NO: 218660 - DNA, 25 bp, Artificial
  probe
  misc_feature (1)..(25): SEQ ID NO: 2601; WAN024FRZ_at; Start 108; Stop 132
tctagatgatttgagagaagatccg

SEQ ID NO: 218661 - DNA, 25 bp, Artificial
  probe
  misc_feature (1)..(25): SEQ ID NO: 2601; WAN024FRZ_at; Start 234; Stop 258
cactgtggacagtatacttgctcaa

SEQ ID NO: 218662 - DNA, 25 bp, Artificial
  probe
  misc_feature (1)..(25): SEQ ID NO: 2601; WAN024FRZ_at; Start 261; Stop 285
taaatcctatgcttttcaagcgaca

SEQ ID NO: 218663 - DNA, 25 bp, Artificial
  probe
  misc_feature (1)..(25): SEQ ID NO: 2601; WAN024FRZ_at; Start 224; Stop 248
caggtgaaatcactgtggacagtat

SEQ ID NO: 218664 - DNA, 25 bp, Artificial
  probe
  misc_feature (1)..(25): SEQ ID NO: 2601; WAN024FRZ_at; Start 331; Stop 355
gaaaaagccgaagctcttgatgact

SEQ ID NO: 218665 - DNA, 25 bp, Artificial
  probe
  misc_feature (1)..(25): SEQ ID NO: 2601; WAN024FRZ_at; Start 136; Stop 160
tatgccaaggagcaagtctgtgaaa

SEQ ID NO: 218666 - DNA, 25 bp, Artificial
  probe
  misc_feature (1)..(25): SEQ ID NO: 2601; WAN024FRZ_at; Start 117; Stop 141
tttgagagaagatccggagtatgcc

SEQ ID NO: 218667 - DNA, 25 bp, Artificial
  probe
  misc_feature (1)..(25): SEQ ID NO: 2601; WAN024FRZ_at; Start 206; Stop 230
caaaagaacaggttgagtcaggtga

SEQ ID NO: 218668 - DNA, 25 bp, Artificial
  probe
  misc_feature (1)..(25): SEQ ID NO: 2601; WAN024FRZ_at; Start 212; Stop 236
aacaggttgagtcaggtgaaatcac

SEQ ID NO: 218669 - DNA, 25 bp, Artificial
  probe
  misc_feature (1)..(25): SEQ ID NO: 2601; WAN024FRZ_at; Start 94; Stop 118
caggctcaagattttctagatgatt

SEQ ID NO: 218670 - DNA, 25 bp, Artificial
  probe
  misc_feature (1)..(25): SEQ ID NO: 2601; WAN024FRZ_at; Start 43; Stop 67
gcagctcttgccttgtttttaacaa

SEQ ID NO: 218671 - DNA, 25 bp, Artificial
  probe
  misc_feature (1)..(25): SEQ ID NO: 2601; WAN024FRZ_at; Start 346; Stop 370
cttgatgactcagaagagattgtga

SEQ ID NO: 218672 - DNA, 25 bp, Artificial
  probe
  misc_feature (1)..(25): SEQ ID NO: 2601; WAN024FRZ_at; Start 34; Stop 58
gtttcaggtgcagctcttgccttgt

SEQ ID NO: 218673 - DNA, 25 bp, Artificial
  probe
  misc_feature (1)..(25): SEQ ID NO: 2601; WAN024FRZ_at; Start 78; Stop 102
caaacaagtttgcagtcaggctcaa

SEQ ID NO: 218674 - DNA, 25 bp, Artificial
  probe
  misc_feature (1)..(25): SEQ ID NO: 2601; WAN024FRZ_at; Start 167; Stop 191
cagaagttaaggagcaggctacaga

SEQ ID NO: 218675 - DNA, 25 bp, Artificial
  probe
  misc_feature (1)..(25): SEQ ID NO: 2601; WAN024FRZ_at; Start 1; Stop 25
atgggtaaattatcctcaatccttt

SEQ ID NO: 218676 - DNA, 25 bp, Artificial
  probe
  misc_feature (1)..(25): SEQ ID NO: 2601; WAN024FRZ_at; Start 124; Stop 148
gaagatccggagtatgccaaggagc

SEQ ID NO: 218677 - DNA, 25 bp, Artificial
  probe
  misc_feature (1)..(25): SEQ ID NO: 2601; WAN024FRZ_at; Start 280; Stop 304
gcgacagaagcatcaaaaaatcaat

SEQ ID NO: 218678 - DNA, 25 bp, Artificial
  probe
  misc_feature (1)..(25): SEQ ID NO: 2601; WAN024FRZ_at; Start 175; Stop 199
aaggagcaggctacagattttgttc

SEQ ID NO: 218679 - DNA, 25 bp, Artificial
  probe
  misc_feature (1)..(25): SEQ ID NO: 2601; WAN024FRZ_at; Start 140; Stop 164
ccaaggagcaagtctgtgaaaaact

SEQ ID NO: 218680 - DNA, 25 bp, Artificial
  probe
  misc_feature (1)..(25): SEQ ID NO: 2601; WAN024FRZ_at; Start 295; Stop 319
aaaaatcaattaaataatctcaagg

SEQ ID NO: 218681 - DNA, 25 bp, Artificial
  probe
  misc_feature (1)..(25): SEQ ID NO: 2601; WAN024FRZ_at; Start 322; Stop 346
caatggcaagaaaaagccgaagctc

SEQ ID NO: 218682 - DNA, 25 bp, Artificial
  probe
  misc_feature (1)..(25): SEQ ID NO: 2601; WAN024FRZ_at; Start 6; Stop 30
taaattatcctcaatccttttagga

SEQ ID NO: 218683 - DNA, 25 bp, Artificial
  probe
  misc_feature (1)..(25): SEQ ID NO: 2601; WAN024FRZ_at; Start 157; Stop 181
gaaaaactgacagaagttaaggagc

SEQ ID NO: 218684 - DNA, 25 bp, Artificial
  probe
  misc_feature (1)..(25): SEQ ID NO: 2601; WAN024FRZ_at; Start 198; Stop 222
tctgaaaacaaaagaacaggttgag

SEQ ID NO: 218685 - DNA, 25 bp, Artificial
  probe
  misc_feature (1)..(25): SEQ ID NO: 1723; WAN024FS2_at; Start 168; Stop 192
atcgcgccatggaaaccccggattt

SEQ ID NO: 218686 - DNA, 25 bp, Artificial
  probe
  misc_feature (1)..(25): SEQ ID NO: 1723; WAN024FS2_at; Start 266; Stop 290
ttgccttcctcaaccgcactgagat

SEQ ID NO: 218687 - DNA, 25 bp, Artificial
  probe
  misc_feature (1)..(25): SEQ ID NO: 1723; WAN024FS2_at; Start 47; Stop 71
aagagacctctctttgtcatgcgaa

SEQ ID NO: 218688 - DNA, 25 bp, Artificial
  probe
  misc_feature (1)..(25): SEQ ID NO: 1723; WAN024FS2_at; Start 434; Stop 458
tcataatgctcaaaacccgctcgct

SEQ ID NO: 218689 - DNA, 25 bp, Artificial
  probe
  misc_feature (1)..(25): SEQ ID NO: 1723; WAN024FS2_at; Start 84; Stop 108
caatctgcatgaggccttgttgaac

SEQ ID NO: 218690 - DNA, 25 bp, Artificial
  probe
  misc_feature (1)..(25): SEQ ID NO: 1723; WAN024FS2_at; Start 282; Stop 306
cactgagataatgacgaatgggacc

SEQ ID NO: 218691 - DNA, 25 bp, Artificial
  probe
  misc_feature (1)..(25): SEQ ID NO: 1723; WAN024FS2_at; Start 57; Stop 81
tctttgtcatgcgaacgtggtcacc

SEQ ID NO: 218692 - DNA, 25 bp, Artificial
  probe
  misc_feature (1)..(25): SEQ ID NO: 1723; WAN024FS2_at; Start 97; Stop 121
gccttgttgaaccaaatctctgaca

SEQ ID NO: 218693 - DNA, 25 bp, Artificial
  probe
  misc_feature (1)..(25): SEQ ID NO: 1723; WAN024FS2_at; Start 70; Stop 94
aacgtggtcaccctcaatctgcatg

SEQ ID NO: 218694 - DNA, 25 bp, Artificial
  probe
  misc_feature (1)..(25): SEQ ID NO: 1723; WAN024FS2_at; Start 31; Stop 55
tacagtatctcccaaaaagagacct

SEQ ID NO: 218695 - DNA, 25 bp, Artificial
  probe
  misc_feature (1)..(25): SEQ ID NO: 1723; WAN024FS2_at; Start 341; Stop 365
gatgcccctgcaccaataccatagt

SEQ ID NO: 218696 - DNA, 25 bp, Artificial
  probe
  misc_feature (1)..(25): SEQ ID NO: 1723; WAN024FS2_at; Start 118; Stop 142
gacaatttctccataaagtccagca

SEQ ID NO: 218697 - DNA, 25 bp, Artificial
  probe
  misc_feature (1)..(25): SEQ ID NO: 1723; WAN024FS2_at; Start 131; Stop 155
taaagtccagcaaaagactgtccaa

SEQ ID NO: 218698 - DNA, 25 bp, Artificial
  probe
  misc_feature (1)..(25): SEQ ID NO: 1723; WAN024FS2_at; Start 237; Stop 261
gactcaggtgatcttctgtaataca

SEQ ID NO: 218699 - DNA, 25 bp, Artificial
  probe
  misc_feature (1)..(25): SEQ ID NO: 1723; WAN024FS2_at; Start 303; Stop 327
gaccatgatttttatagcgtactcc

SEQ ID NO: 218700 - DNA, 25 bp, Artificial
  probe
  misc_feature (1)..(25): SEQ ID NO: 1723; WAN024FS2_at; Start 428; Stop 452
gaaatctcataatgctcaaaacccg

SEQ ID NO: 218701 - DNA, 25 bp, Artificial
  probe
  misc_feature (1)..(25): SEQ ID NO: 1723; WAN024FS2_at; Start 375; Stop 399
tgtcccagtacatgagattatgacg

SEQ ID NO: 218702 - DNA, 25 bp, Artificial
  probe
  misc_feature (1)..(25): SEQ ID NO: 1723; WAN024FS2_at; Start 3; Stop 27
gatcctactccaaaataaatcgttc

SEQ ID NO: 218703 - DNA, 25 bp, Artificial
  probe
  misc_feature (1)..(25): SEQ ID NO: 1723; WAN024FS2_at; Start 297; Stop 321
gaatgggaccatgatttttatagcg

SEQ ID NO: 218704 - DNA, 25 bp, Artificial
  probe
  misc_feature (1)..(25): SEQ ID NO: 1723; WAN024FS2_at; Start 474; Stop 498
tgtactcaaacatctccgcttctag

SEQ ID NO: 218705 - DNA, 25 bp, Artificial
  probe
  misc_feature (1)..(25): SEQ ID NO: 1723; WAN024FS2_at; Start 208; Stop 232
gaacatttcttcttccatttgctcc

SEQ ID NO: 218706 - DNA, 25 bp, Artificial
  probe
  misc_feature (1)..(25): SEQ ID NO: 1723; WAN024FS2_at; Start 317; Stop 341
tagcgtactccattgacataaccag

SEQ ID NO: 218707 - DNA, 25 bp, Artificial
  probe
  misc_feature (1)..(25): SEQ ID NO: 1723; WAN024FS2_at; Start 251; Stop 275
tctgtaatacaagcattgccttcct

SEQ ID NO: 218708 - DNA, 25 bp, Artificial
  probe
  misc_feature (1)..(25): SEQ ID NO: 1723; WAN024FS2_at; Start 223; Stop 247
catttgctccttttgactcaggtga

SEQ ID NO: 218709 - DNA, 25 bp, Artificial
  probe
  misc_feature (1)..(25): SEQ ID NO: 1723; WAN024FS2_at; Start 194; Stop 218
ttgcggagtcccaagaacatttctt

SEQ ID NO: 218710 - DNA, 25 bp, Artificial
  probe
  misc_feature (1)..(25): SEQ ID NO: 1723; WAN024FS2_at; Start 184; Stop 208
cccggatttcttgcggagtcccaag

SEQ ID NO: 218711 - DNA, 25 bp, Artificial
  probe
  misc_feature (1)..(25): SEQ ID NO: 1723; WAN024FS2_at; Start 327; Stop 351
cattgacataaccagatgcccctgc

SEQ ID NO: 218712 - DNA, 25 bp, Artificial
  probe
  misc_feature (1)..(25): SEQ ID NO: 1723; WAN024FS2_at; Start 451; Stop 475
cgctcgctccagctctgcaatgatg

SEQ ID NO: 218713 - DNA, 25 bp, Artificial
  probe
  misc_feature (1)..(25): SEQ ID NO: 1723; WAN024FS2_at; Start 18; Stop 42
taaatcgttctgctacagtatctcc

SEQ ID NO: 218714 - DNA, 25 bp, Artificial
  probe
  misc_feature (1)..(25): SEQ ID NO: 1723; WAN024FS2_at; Start 155; Stop 179
aatttttcctcaaatcgcgccatgg

SEQ ID NO: 218715 - DNA, 25 bp, Artificial
  probe
  misc_feature (1)..(25): SEQ ID NO: 1723; WAN024FS2_at; Start 360; Stop 384
catagtattcagcattgtcccagta

SEQ ID NO: 218716 - DNA, 25 bp, Artificial
  probe
  misc_feature (1)..(25): SEQ ID NO: 1723; WAN024FS2_at; Start 412; Stop 436
gggtttggagaaattagaaatctca

SEQ ID NO: 218717 - DNA, 25 bp, Artificial
  probe
  misc_feature (1)..(25): SEQ ID NO: 1723; WAN024FS2_at; Start 459; Stop 483
ccagctctgcaatgatgtactcaaa

SEQ ID NO: 218718 - DNA, 25 bp, Artificial
  probe
  misc_feature (1)..(25): SEQ ID NO: 1723; WAN024FS2_at; Start 389; Stop 413
agattatgacgactttcaaaaccgg

SEQ ID NO: 218719 - DNA, 25 bp, Artificial
  probe
  misc_feature (1)..(25): SEQ ID NO: 3407; WAN024FS3_at; Start 425; Stop 449
ggcgcagtcatttggagaaggatat

SEQ ID NO: 218720 - DNA, 25 bp, Artificial
  probe
  misc_feature (1)..(25): SEQ ID NO: 3407; WAN024FS3_at; Start 963; Stop 987
cttgggactccgcaagaaatccggg

SEQ ID NO: 218721 - DNA, 25 bp, Artificial
  probe
  misc_feature (1)..(25): SEQ ID NO: 3407; WAN024FS3_at; Start 715; Stop 739
cgagcgggttttgagcattatgaga

SEQ ID NO: 218722 - DNA, 25 bp, Artificial
  probe
  misc_feature (1)..(25): SEQ ID NO: 3407; WAN024FS3_at; Start 358; Stop 382
aattcggctgtcaatcgtgtttcgc

SEQ ID NO: 218723 - DNA, 25 bp, Artificial
  probe
  misc_feature (1)..(25): SEQ ID NO: 3407; WAN024FS3_at; Start 865; Stop 889
ggtcccattcgtcattatctcagtg

SEQ ID NO: 218724 - DNA, 25 bp, Artificial
  probe
  misc_feature (1)..(25): SEQ ID NO: 3407; WAN024FS3_at; Start 696; Stop 720
catcattgcagagctggagcgagcg

SEQ ID NO: 218725 - DNA, 25 bp, Artificial
  probe
  misc_feature (1)..(25): SEQ ID NO: 3407; WAN024FS3_at; Start 657; Stop 681
tctgcctaaggaggaactagaagcg

SEQ ID NO: 218726 - DNA, 25 bp, Artificial
  probe
  misc_feature (1)..(25): SEQ ID NO: 3407; WAN024FS3_at; Start 320; Stop 344
caggcgatttggatgcggataagat

SEQ ID NO: 218727 - DNA, 25 bp, Artificial
  probe
  misc_feature (1)..(25): SEQ ID NO: 3407; WAN024FS3_at; Start 48; Stop 72
aacgtcagcctatgtgcacatccca

SEQ ID NO: 218728 - DNA, 25 bp, Artificial
  probe
  misc_feature (1)..(25): SEQ ID NO: 3407; WAN024FS3_at; Start 924; Stop 948
tcacctgagtcaaaaggagcaaatg

SEQ ID NO: 218729 - DNA, 25 bp, Artificial
  probe
  misc_feature (1)..(25): SEQ ID NO: 3407; WAN024FS3_at; Start 33; Stop 57
tatgcagaaaaaaccaacgtcagcc

SEQ ID NO: 218730 - DNA, 25 bp, Artificial
  probe
  misc_feature (1)..(25): SEQ ID NO: 3407; WAN024FS3_at; Start 301; Stop 325
ttgaccattgaagccaatccaggcg

SEQ ID NO: 218731 - DNA, 25 bp, Artificial
  probe
  misc_feature (1)..(25): SEQ ID NO: 3407; WAN024FS3_at; Start 257; Stop 281
tgaatggcttgactaaaaacttgga

SEQ ID NO: 218732 - DNA, 25 bp, Artificial
  probe
  misc_feature (1)..(25): SEQ ID NO: 3407; WAN024FS3_at; Start 1095; Stop 1119
ccacgttcgcatgacaaagagaggt

SEQ ID NO: 218733 - DNA, 25 bp, Artificial
  probe
  misc_feature (1)..(25): SEQ ID NO: 3407; WAN024FS3_at; Start 991; Stop 1015
tccatggcgcgatttgaggaaaaat

SEQ ID NO: 218734 - DNA, 25 bp, Artificial
  probe
  misc_feature (1)..(25): SEQ ID NO: 3407; WAN024FS3_at; Start 572; Stop 596
tggatattccccacatgagtttgta

SEQ ID NO: 218735 - DNA, 25 bp, Artificial
  probe
  misc_feature (1)..(25): SEQ ID NO: 3407; WAN024FS3_at; Start 507; Stop 531
gatttatgctctgcctggtcagacc

SEQ ID NO: 218736 - DNA, 25 bp, Artificial
  probe
  misc_feature (1)..(25): SEQ ID NO: 3407; WAN024FS3_at; Start 387; Stop 411
tgtccagacctttgatgataagatg

SEQ ID NO: 218737 - DNA, 25 bp, Artificial
  probe
  misc_feature (1)..(25): SEQ ID NO: 3407; WAN024FS3_at; Start 1076; Stop 1100
tcatgcagattgagggtgaccacgt

SEQ ID NO: 218738 - DNA, 25 bp, Artificial
  probe
  misc_feature (1)..(25): SEQ ID NO: 3407; WAN024FS3_at; Start 787; Stop 811
tactgggacaatgctgaatactatg

SEQ ID NO: 218739 - DNA, 25 bp, Artificial
  probe
  misc_feature (1)..(25): SEQ ID NO: 3407; WAN024FS3_at; Start 625; Stop 649
tttatgaaccggatgcgacgtggga

SEQ ID NO: 218740 - DNA, 25 bp, Artificial
  probe
  misc_feature (1)..(25): SEQ ID NO: 3407; WAN024FS3_at; Start 522; Stop 546
tggtcagaccatggagcaagtaaag

SEQ ID NO: 218741 - DNA, 25 bp, Artificial
  probe
  misc_feature (1)..(25): SEQ ID NO: 3407; WAN024FS3_at; Start 829; Stop 853
tctggttatgtcaatggagtacgct

SEQ ID NO: 218742 - DNA, 25 bp, Artificial
  probe
  misc_feature (1)..(25): SEQ ID NO: 3407; WAN024FS3_at; Start 146; Stop 170
tagagcatctgctggaagagtttcg

SEQ ID NO: 218743 - DNA, 25 bp, Artificial
  probe
  misc_feature (1)..(25): SEQ ID NO: 3407; WAN024FS3_at; Start 1059; Stop 1083
tttggttcaacaaggcctcatgcag

SEQ ID NO: 218744 - DNA, 25 bp, Artificial
  probe
  misc_feature (1)..(25): SEQ ID NO: 3407; WAN024FS3_at; Start 907; Stop 931
gcttgtattacagaagatcacctga

SEQ ID NO: 218745 - DNA, 25 bp, Artificial
  probe
  misc_feature (1)..(25): SEQ ID NO: 3407; WAN024FS3_at; Start 111; Stop 135
ggtcttcatcaaaaatcagccagtc

SEQ ID NO: 218746 - DNA, 25 bp, Artificial
  probe
  misc_feature (1)..(25): SEQ ID NO: 3407; WAN024FS3_at; Start 241; Stop 265
caactggaggtgttactgaatggct

SEQ ID NO: 218747 - DNA, 25 bp, Artificial
  probe
  misc_feature (1)..(25): SEQ ID NO: 3407; WAN024FS3_at; Start 641; Stop 665
gacgtgggaaattgcctctgcctaa

SEQ ID NO: 218748 - DNA, 25 bp, Artificial
  probe
  misc_feature (1)..(25): SEQ ID NO: 3407; WAN024FS3_at; Start 847; Stop 871
gtacgctataaaaatcatggtccca

SEQ ID NO: 218749 - DNA, 25 bp, Artificial
  probe
  misc_feature (1)..(25): SEQ ID NO: 3407; WAN024FS3_at; Start 880; Stop 904
tatctcagtgcggttgaggaaggca

SEQ ID NO: 218750 - DNA, 25 bp, Artificial
  probe
  misc_feature (1)..(25): SEQ ID NO: 3407; WAN024FS3_at; Start 405; Stop 429
taagatgttgaaaaagattgggcgc

SEQ ID NO: 218751 - DNA, 25 bp, Artificial
  probe
  misc_feature (1)..(25): SEQ ID NO: 3407; WAN024FS3_at; Start 204; Stop 228
tatcggtggtggaacaccgacagcc

SEQ ID NO: 218752 - DNA, 25 bp, Artificial
  probe
  misc_feature (1)..(25): SEQ ID NO: 3407; WAN024FS3_at; Start 126; Stop 150
tcagccagtcgacagctatttagag

SEQ ID NO: 218753 - DNA, 25 bp, Artificial
  probe
  misc_feature (1)..(25): SEQ ID NO: 3814; WAN024FS4_at; Start 17; Stop 41
agatcaagaatttcgatgaagttgt

SEQ ID NO: 218754 - DNA, 25 bp, Artificial
  probe
  misc_feature (1)..(25): SEQ ID NO: 3814; WAN024FS4_at; Start 8; Stop 32
gacgaagcgagatcaagaatttcga

SEQ ID NO: 218755 - DNA, 25 bp, Artificial
  probe
  misc_feature (1)..(25): SEQ ID NO: 3814; WAN024FS4_at; Start 10; Stop 34
cgaagcgagatcaagaatttcgatg

SEQ ID NO: 218756 - DNA, 25 bp, Artificial
  probe
  misc_feature (1)..(25): SEQ ID NO: 3814; WAN024FS4_at; Start 57; Stop 81
ctatattaatggttggacaatctgg

SEQ ID NO: 218757 - DNA, 25 bp, Artificial
  probe
  misc_feature (1)..(25): SEQ ID NO: 3814; WAN024FS4_at; Start 13; Stop 37
agcgagatcaagaatttcgatgaag

SEQ ID NO: 218758 - DNA, 25 bp, Artificial
  probe
  misc_feature (1)..(25): SEQ ID NO: 3814; WAN024FS4_at; Start 55; Stop 79
gcctatattaatggttggacaatct

SEQ ID NO: 218759 - DNA, 25 bp, Artificial
  probe
  misc_feature (1)..(25): SEQ ID NO: 3814; WAN024FS4_at; Start 22; Stop 46
aagaatttcgatgaagttgtcaaat

SEQ ID NO: 218760 - DNA, 25 bp, Artificial
  probe
  misc_feature (1)..(25): SEQ ID NO: 3814; WAN024FS4_at; Start 5; Stop 29
gcggacgaagcgagatcaagaattt

SEQ ID NO: 218761 - DNA, 25 bp, Artificial
  probe
  misc_feature (1)..(25): SEQ ID NO: 3814; WAN024FS4_at; Start 18; Stop 42
gatcaagaatttcgatgaagttgtc

SEQ ID NO: 218762 - DNA, 25 bp, Artificial
  probe
  misc_feature (1)..(25): SEQ ID NO: 3814; WAN024FS4_at; Start 4; Stop 28
agcggacgaagcgagatcaagaatt

SEQ ID NO: 218763 - DNA, 25 bp, Artificial
  probe
  misc_feature (1)..(25): SEQ ID NO: 3814; WAN024FS4_at; Start 59; Stop 83
atattaatggttggacaatctggaa

SEQ ID NO: 218764 - DNA, 25 bp, Artificial
  probe
  misc_feature (1)..(25): SEQ ID NO: 3814; WAN024FS4_at; Start 12; Stop 36
aagcgagatcaagaatttcgatgaa

SEQ ID NO: 218765 - DNA, 25 bp, Artificial
  probe
  misc_feature (1)..(25): SEQ ID NO: 3814; WAN024FS4_at; Start 24; Stop 48
gaatttcgatgaagttgtcaaatta

SEQ ID NO: 218766 - DNA, 25 bp, Artificial
  probe
  misc_feature (1)..(25): SEQ ID NO: 3814; WAN024FS4_at; Start 9; Stop 33
acgaagcgagatcaagaatttcgat

SEQ ID NO: 218767 - DNA, 25 bp, Artificial
  probe
  misc_feature (1)..(25): SEQ ID NO: 3814; WAN024FS4_at; Start 54; Stop 78
ggcctatattaatggttggacaatc

SEQ ID NO: 218768 - DNA, 25 bp, Artificial
  probe
  misc_feature (1)..(25): SEQ ID NO: 3814; WAN024FS4_at; Start 56; Stop 80
cctatattaatggttggacaatctg

SEQ ID NO: 218769 - DNA, 25 bp, Artificial
  probe
  misc_feature (1)..(25): SEQ ID NO: 3814; WAN024FS4_at; Start 58; Stop 82
tatattaatggttggacaatctgga

SEQ ID NO: 218770 - DNA, 25 bp, Artificial
  probe
  misc_feature (1)..(25): SEQ ID NO: 3814; WAN024FS4_at; Start 7; Stop 31
ggacgaagcgagatcaagaatttcg

SEQ ID NO: 218771 - DNA, 25 bp, Artificial
  probe
  misc_feature (1)..(25): SEQ ID NO: 3814; WAN024FS4_at; Start 16; Stop 40
gagatcaagaatttcgatgaagttg

SEQ ID NO: 218772 - DNA, 25 bp, Artificial
  probe
  misc_feature (1)..(25): SEQ ID NO: 3814; WAN024FS4_at; Start 21; Stop 45
caagaatttcgatgaagttgtcaaa

SEQ ID NO: 218773 - DNA, 25 bp, Artificial
  probe
  misc_feature (1)..(25): SEQ ID NO: 3814; WAN024FS4_at; Start 23; Stop 47
agaatttcgatgaagttgtcaaatt

SEQ ID NO: 218774 - DNA, 25 bp, Artificial
  probe
  misc_feature (1)..(25): SEQ ID NO: 3814; WAN024FS4_at; Start 15; Stop 39
cgagatcaagaatttcgatgaagtt

SEQ ID NO: 218775 - DNA, 25 bp, Artificial
  probe
  misc_feature (1)..(25): SEQ ID NO: 3814; WAN024FS4_at; Start 11; Stop 35
gaagcgagatcaagaatttcgatga

SEQ ID NO: 218776 - DNA, 25 bp, Artificial
  probe
  misc_feature (1)..(25): SEQ ID NO: 3814; WAN024FS4_at; Start 2; Stop 26
tcagcggacgaagcgagatcaagaa

SEQ ID NO: 218777 - DNA, 25 bp, Artificial
  probe
  misc_feature (1)..(25): SEQ ID NO: 3814; WAN024FS4_at; Start 3; Stop 27
cagcggacgaagcgagatcaagaat

SEQ ID NO: 218778 - DNA, 25 bp, Artificial
  probe
  misc_feature (1)..(25): SEQ ID NO: 3814; WAN024FS4_at; Start 1; Stop 25
gtcagcggacgaagcgagatcaaga

SEQ ID NO: 218779 - DNA, 25 bp, Artificial
  probe
  misc_feature (1)..(25): SEQ ID NO: 3814; WAN024FS4_at; Start 14; Stop 38
gcgagatcaagaatttcgatgaagt

SEQ ID NO: 218780 - DNA, 25 bp, Artificial
  probe
  misc_feature (1)..(25): SEQ ID NO: 3814; WAN024FS4_at; Start 6; Stop 30
cggacgaagcgagatcaagaatttc

SEQ ID NO: 218781 - DNA, 25 bp, Artificial
  probe
  misc_feature (1)..(25): SEQ ID NO: 5329; WAN024FS5_at; Start 99; Stop 123
cacctggtcgaacttccttgacata

SEQ ID NO: 218782 - DNA, 25 bp, Artificial
  probe
  misc_feature (1)..(25): SEQ ID NO: 5329; WAN024FS5_at; Start 281; Stop 305
tcatacttcggtccacggataagtt

SEQ ID NO: 218783 - DNA, 25 bp, Artificial
  probe
  misc_feature (1)..(25): SEQ ID NO: 5329; WAN024FS5_at; Start 366; Stop 390
gactgtcgcggtccatgagaacaaa

SEQ ID NO: 218784 - DNA, 25 bp, Artificial
  probe
  misc_feature (1)..(25): SEQ ID NO: 5329; WAN024FS5_at; Start 512; Stop 536
ggcaaacgaaccacctcaatatcat

SEQ ID NO: 218785 - DNA, 25 bp, Artificial
  probe
  misc_feature (1)..(25): SEQ ID NO: 5329; WAN024FS5_at; Start 211; Stop 235
gacatgaccattcatatccaagtcg

SEQ ID NO: 218786 - DNA, 25 bp, Artificial
  probe
  misc_feature (1)..(25): SEQ ID NO: 5329; WAN024FS5_at; Start 147; Stop 171
tatagtgggtcaaaaaatccgctcc

SEQ ID NO: 218787 - DNA, 25 bp, Artificial
  probe
  misc_feature (1)..(25): SEQ ID NO: 5329; WAN024FS5_at; Start 569; Stop 593
tccaaaatggccttatcactaactc

SEQ ID NO: 218788 - DNA, 25 bp, Artificial
  probe
  misc_feature (1)..(25): SEQ ID NO: 5329; WAN024FS5_at; Start 110; Stop 134
acttccttgacatacttgaggttga

SEQ ID NO: 218789 - DNA, 25 bp, Artificial
  probe
  misc_feature (1)..(25): SEQ ID NO: 5329; WAN024FS5_at; Start 312; Stop 336
caaaatcagactggtaaggagccac

SEQ ID NO: 218790 - DNA, 25 bp, Artificial
  probe
  misc_feature (1)..(25): SEQ ID NO: 5329; WAN024FS5_at; Start 160; Stop 184
aaaatccgctcccatgacctcaaaa

SEQ ID NO: 218791 - DNA, 25 bp, Artificial
  probe
  misc_feature (1)..(25): SEQ ID NO: 5329; WAN024FS5_at; Start 243; Stop 267
gaacatggtaatccttgctgatcgg

SEQ ID NO: 218792 - DNA, 25 bp, Artificial
  probe
  misc_feature (1)..(25): SEQ ID NO: 5329; WAN024FS5_at; Start 581; Stop 605
ttatcactaactcccagttcaatcg

SEQ ID NO: 218793 - DNA, 25 bp, Artificial
  probe
  misc_feature (1)..(25): SEQ ID NO: 5329; WAN024FS5_at; Start 5; Stop 29
caagtaatgattgcttgggcattga

SEQ ID NO: 218794 - DNA, 25 bp, Artificial
  probe
  misc_feature (1)..(25): SEQ ID NO: 5329; WAN024FS5_at; Start 500; Stop 524
tccgcaaaacgaggcaaacgaacca

SEQ ID NO: 218795 - DNA, 25 bp, Artificial
  probe
  misc_feature (1)..(25): SEQ ID NO: 5329; WAN024FS5_at; Start 443; Stop 467
cgacggtagcaaaaaagtcgattgt

SEQ ID NO: 218796 - DNA, 25 bp, Artificial
  probe
  misc_feature (1)..(25): SEQ ID NO: 5329; WAN024FS5_at; Start 122; Stop 146
tacttgaggttgattttcttgggaa

SEQ ID NO: 218797 - DNA, 25 bp, Artificial
  probe
  misc_feature (1)..(25): SEQ ID NO: 5329; WAN024FS5_at; Start 65; Stop 89
agtccagtccgttcaacagccgatg

SEQ ID NO: 218798 - DNA, 25 bp, Artificial
  probe
  misc_feature (1)..(25): SEQ ID NO: 5329; WAN024FS5_at; Start 51; Stop 75
catgcttgctttccagtccagtccg

SEQ ID NO: 218799 - DNA, 25 bp, Artificial
  probe
  misc_feature (1)..(25): SEQ ID NO: 5329; WAN024FS5_at; Start 354; Stop 378
catggacttttcgactgtcgcggtc

SEQ ID NO: 218800 - DNA, 25 bp, Artificial
  probe
  misc_feature (1)..(25): SEQ ID NO: 5329; WAN024FS5_at; Start 236; Stop 260
taaaaacgaacatggtaatccttgc

SEQ ID NO: 218801 - DNA, 25 bp, Artificial
  probe
  misc_feature (1)..(25): SEQ ID NO: 5329; WAN024FS5_at; Start 377; Stop 401
tccatgagaacaaaggtcgccatca

SEQ ID NO: 218802 - DNA, 25 bp, Artificial
  probe
  misc_feature (1)..(25): SEQ ID NO: 5329; WAN024FS5_at; Start 35; Stop 59
ccatcacttgtaatttcatgcttgc

SEQ ID NO: 218803 - DNA, 25 bp, Artificial
  probe
  misc_feature (1)..(25): SEQ ID NO: 5329; WAN024FS5_at; Start 75; Stop 99
gttcaacagccgatgtaatcacccc

SEQ ID NO: 218804 - DNA, 25 bp, Artificial
  probe
  misc_feature (1)..(25): SEQ ID NO: 5329; WAN024FS5_at; Start 88; Stop 112
tgtaatcaccccacctggtcgaact

SEQ ID NO: 218805 - DNA, 25 bp, Artificial
  probe
  misc_feature (1)..(25): SEQ ID NO: 5329; WAN024FS5_at; Start 135; Stop 159
ttttcttgggaatatagtgggtcaa

SEQ ID NO: 218806 - DNA, 25 bp, Artificial
  probe
  misc_feature (1)..(25): SEQ ID NO: 5329; WAN024FS5_at; Start 428; Stop 452
ttataaatagtaaagcgacggtagc

SEQ ID NO: 218807 - DNA, 25 bp, Artificial
  probe
  misc_feature (1)..(25): SEQ ID NO: 5329; WAN024FS5_at; Start 458; Stop 482
agtcgattgtagctcaaggcttccg

SEQ ID NO: 218808 - DNA, 25 bp, Artificial
  probe
  misc_feature (1)..(25): SEQ ID NO: 5329; WAN024FS5_at; Start 225; Stop 249
tatccaagtcgtaaaaacgaacatg

SEQ ID NO: 218809 - DNA, 25 bp, Artificial
  probe
  misc_feature (1)..(25): SEQ ID NO: 5329; WAN024FS5_at; Start 196; Stop 220
gtatttactgttattgacatgacca

SEQ ID NO: 218810 - DNA, 25 bp, Artificial
  probe
  misc_feature (1)..(25): SEQ ID NO: 5329; WAN024FS5_at; Start 486; Stop 510
cgatggtaatttcttccgcaaaacg

SEQ ID NO: 218811 - DNA, 25 bp, Artificial
  probe
  misc_feature (1)..(25): SEQ ID NO: 5329; WAN024FS5_at; Start 326; Stop 350
taaggagccacaatctcaggttcaa

SEQ ID NO: 218812 - DNA, 25 bp, Artificial
  probe
  misc_feature (1)..(25): SEQ ID NO: 5329; WAN024FS5_at; Start 175; Stop 199
gacctcaaaaatccagtccaagtat

SEQ ID NO: 218813 - DNA, 25 bp, Artificial
  probe
  misc_feature (1)..(25): SEQ ID NO: 5329; WAN024FS5_at; Start 471; Stop 495
tcaaggcttccgtttcgatggtaat

SEQ ID NO: 218814 - DNA, 25 bp, Artificial
  probe
  misc_feature (1)..(25): SEQ ID NO: 5329; WAN024FS5_at; Start 20; Stop 44
tgggcattgataaccccatcacttg

SEQ ID NO: 218815 - DNA, 25 bp, Artificial
  probe
  misc_feature (1)..(25): SEQ ID NO: 2579; WAN024FS6_at; Start 700; Stop 724
caagcaatcattacttggcaagaaa

SEQ ID NO: 218816 - DNA, 25 bp, Artificial
  probe
  misc_feature (1)..(25): SEQ ID NO: 2579; WAN024FS6_at; Start 120; Stop 144
tgaactgggagttagtgataaggcc

SEQ ID NO: 218817 - DNA, 25 bp, Artificial
  probe
  misc_feature (1)..(25): SEQ ID NO: 2579; WAN024FS6_at; Start 321; Stop 345
gatggcgacctttgttctcatggac

SEQ ID NO: 218818 - DNA, 25 bp, Artificial
  probe
  misc_feature (1)..(25): SEQ ID NO: 2579; WAN024FS6_at; Start 227; Stop 251
ttaccatcgaaacggaagccttgag

SEQ ID NO: 218819 - DNA, 25 bp, Artificial
  probe
  misc_feature (1)..(25): SEQ ID NO: 2579; WAN024FS6_at; Start 3; Stop 27
gggcttaacttatcaaatgaaaatg

SEQ ID NO: 218820 - DNA, 25 bp, Artificial
  probe
  misc_feature (1)..(25): SEQ ID NO: 2579; WAN024FS6_at; Start 333; Stop 357
tgttctcatggaccgcgacagtcga

SEQ ID NO: 218821 - DNA, 25 bp, Artificial
  probe
  misc_feature (1)..(25): SEQ ID NO: 2579; WAN024FS6_at; Start 639; Stop 663
tgttgaacggactggactggaaagc

SEQ ID NO: 218822 - DNA, 25 bp, Artificial
  probe
  misc_feature (1)..(25): SEQ ID NO: 2579; WAN024FS6_at; Start 594; Stop 618
caagtatgtcaaggaagttcgacca

SEQ ID NO: 218823 - DNA, 25 bp, Artificial
  probe
  misc_feature (1)..(25): SEQ ID NO: 2579; WAN024FS6_at; Start 211; Stop 235
cgttttgcggaagaaattaccatcg

SEQ ID NO: 218824 - DNA, 25 bp, Artificial
  probe
  misc_feature (1)..(25): SEQ ID NO: 2579; WAN024FS6_at; Start 550; Stop 574
ggagcggattttttgacccactata

SEQ ID NO: 218825 - DNA, 25 bp, Artificial
  probe
  misc_feature (1)..(25): SEQ ID NO: 2579; WAN024FS6_at; Start 73; Stop 97
ccagatgtgattttgctgtcactgc

SEQ ID NO: 218826 - DNA, 25 bp, Artificial
  probe
  misc_feature (1)..(25): SEQ ID NO: 2579; WAN024FS6_at; Start 688; Stop 712
gttatcaatgcccaagcaatcatta

SEQ ID NO: 218827 - DNA, 25 bp, Artificial
  probe
  misc_feature (1)..(25): SEQ ID NO: 2579; WAN024FS6_at; Start 343; Stop 367
gaccgcgacagtcgaaaagtccatg

SEQ ID NO: 218828 - DNA, 25 bp, Artificial
  probe
  misc_feature (1)..(25): SEQ ID NO: 2579; WAN024FS6_at; Start 648; Stop 672
gactggactggaaagcaagcatgaa

SEQ ID NO: 218829 - DNA, 25 bp, Artificial
  probe
  misc_feature (1)..(25): SEQ ID NO: 2579; WAN024FS6_at; Start 478; Stop 502
cgtttttacgacttggatatgaatg

SEQ ID NO: 218830 - DNA, 25 bp, Artificial
  probe
  misc_feature (1)..(25): SEQ ID NO: 2579; WAN024FS6_at; Start 39; Stop 63
tgatatggctgatatgaacggtcat

SEQ ID NO: 218831 - DNA, 25 bp, Artificial
  probe
  misc_feature (1)..(25): SEQ ID NO: 2579; WAN024FS6_at; Start 523; Stop 547
tacttggactggatttttgaggtca

SEQ ID NO: 218832 - DNA, 25 bp, Artificial
  probe
  misc_feature (1)..(25): SEQ ID NO: 2579; WAN024FS6_at; Start 416; Stop 440
aacttatccgtggaccgaagtatga

SEQ ID NO: 218833 - DNA, 25 bp, Artificial
  probe
  misc_feature (1)..(25): SEQ ID NO: 2579; WAN024FS6_at; Start 27; Stop 51
gaaaattccttttgatatggctgat

SEQ ID NO: 218834 - DNA, 25 bp, Artificial
  probe
  misc_feature (1)..(25): SEQ ID NO: 2579; WAN024FS6_at; Start 239; Stop 263
cggaagccttgagctacaatcgact

SEQ ID NO: 218835 - DNA, 25 bp, Artificial
  probe
  misc_feature (1)..(25): SEQ ID NO: 2579; WAN024FS6_at; Start 510; Stop 534
caataacagtaaatacttggactgg

SEQ ID NO: 218836 - DNA, 25 bp, Artificial
  probe
  misc_feature (1)..(25): SEQ ID NO: 2579; WAN024FS6_at; Start 536; Stop 560
tttttgaggtcatgggagcggattt

SEQ ID NO: 218837 - DNA, 25 bp, Artificial
  probe
  misc_feature (1)..(25): SEQ ID NO: 2579; WAN024FS6_at; Start 381; Stop 405
gattgtggctccttaccagtctgat

SEQ ID NO: 218838 - DNA, 25 bp, Artificial
  probe
  misc_feature (1)..(25): SEQ ID NO: 2579; WAN024FS6_at; Start 495; Stop 519
tatgaatggtcatgtcaataacagt

SEQ ID NO: 218839 - DNA, 25 bp, Artificial
  probe
  misc_feature (1)..(25): SEQ ID NO: 2579; WAN024FS6_at; Start 251; Stop 275
gctacaatcgacttttttgctaccg

SEQ ID NO: 218840 - DNA, 25 bp, Artificial
  probe
  misc_feature (1)..(25): SEQ ID NO: 2579; WAN024FS6_at; Start 369; Stop 393
tgttgaacctgagattgtggctcct

SEQ ID NO: 218841 - DNA, 25 bp, Artificial
  probe
  misc_feature (1)..(25): SEQ ID NO: 2579; WAN024FS6_at; Start 578; Stop 602
ccaagaaaatcaacctcaagtatgt

SEQ ID NO: 218842 - DNA, 25 bp, Artificial
  probe
  misc_feature (1)..(25): SEQ ID NO: 2579; WAN024FS6_at; Start 88; Stop 112
ctgtcactgcaagtttcagggatgc

SEQ ID NO: 218843 - DNA, 25 bp, Artificial
  probe
  misc_feature (1)..(25): SEQ ID NO: 2579; WAN024FS6_at; Start 57; Stop 81
cggtcatatcaaacttccagatgtg

SEQ ID NO: 218844 - DNA, 25 bp, Artificial
  probe
  misc_feature (1)..(25): SEQ ID NO: 2579; WAN024FS6_at; Start 627; Stop 651
gattacatcggctgttgaacggact

SEQ ID NO: 218845 - DNA, 25 bp, Artificial
  probe
  misc_feature (1)..(25): SEQ ID NO: 2579; WAN024FS6_at; Start 201; Stop 225
tcgtttgcctcgttttgcggaagaa

SEQ ID NO: 218846 - DNA, 25 bp, Artificial
  probe
  misc_feature (1)..(25): SEQ ID NO: 2579; WAN024FS6_at; Start 563; Stop 587
tgacccactatattcccaagaaaat

SEQ ID NO: 218847 - DNA, 25 bp, Artificial
  probe
  misc_feature (1)..(25): SEQ ID NO: 2579; WAN024FS6_at; Start 663; Stop 687
caagcatgaaattacaagtgatggg

SEQ ID NO: 218848 - DNA, 25 bp, Artificial
  probe
  misc_feature (1)..(25): SEQ ID NO: 2579; WAN024FS6_at; Start 456; Stop 480
gatcagcaaggattaccatgttcgt

SEQ ID NO: 218849 - DNA, 25 bp, Artificial
  probe
  misc_feature (1)..(25): SEQ ID NO: 2569; WAN024FS7_at; Start 201; Stop 225
ccaaagtcgctgtgtagacagtcga

SEQ ID NO: 218850 - DNA, 25 bp, Artificial
  probe
  misc_feature (1)..(25): SEQ ID NO: 2569; WAN024FS7_at; Start 186; Stop 210
tatagtcgatggttgccaaagtcgc

SEQ ID NO: 218851 - DNA, 25 bp, Artificial
  probe
  misc_feature (1)..(25): SEQ ID NO: 2569; WAN024FS7_at; Start 47; Stop 71
tagtcgacttgccaatccagaccaa

SEQ ID NO: 218852 - DNA, 25 bp, Artificial
  probe
  misc_feature (1)..(25): SEQ ID NO: 2569; WAN024FS7_at; Start 188; Stop 212
tagtcgatggttgccaaagtcgctg

SEQ ID NO: 218853 - DNA, 25 bp, Artificial
  probe
  misc_feature (1)..(25): SEQ ID NO: 2569; WAN024FS7_at; Start 50; Stop 74
tcgacttgccaatccagaccaacta

SEQ ID NO: 218854 - DNA, 25 bp, Artificial
  probe
  misc_feature (1)..(25): SEQ ID NO: 2569; WAN024FS7_at; Start 42; Stop 66
tttcatagtcgacttgccaatccag

SEQ ID NO: 218855 - DNA, 25 bp, Artificial
  probe
  misc_feature (1)..(25): SEQ ID NO: 2569; WAN024FS7_at; Start 107; Stop 131
taaccagccgccttgatggcttcct

SEQ ID NO: 218856 - DNA, 25 bp, Artificial
  probe
  misc_feature (1)..(25): SEQ ID NO: 2569; WAN024FS7_at; Start 116; Stop 140
gccttgatggcttccttgagtcctg

SEQ ID NO: 218857 - DNA, 25 bp, Artificial
  probe
  misc_feature (1)..(25): SEQ ID NO: 2569; WAN024FS7_at; Start 143; Stop 167
tctccgacgacatagacggtctttt

SEQ ID NO: 218858 - DNA, 25 bp, Artificial
  probe
  misc_feature (1)..(25): SEQ ID NO: 2569; WAN024FS7_at; Start 124; Stop 148
ggcttccttgagtcctgcttctccg

SEQ ID NO: 218859 - DNA, 25 bp, Artificial
  probe
  misc_feature (1)..(25): SEQ ID NO: 2569; WAN024FS7_at; Start 63; Stop 87
ccagaccaactaccacgtaggcagg

SEQ ID NO: 218860 - DNA, 25 bp, Artificial
  probe
  misc_feature (1)..(25): SEQ ID NO: 2569; WAN024FS7_at; Start 90; Stop 114
tttccttgtcttccacataaccagc

SEQ ID NO: 218861 - DNA, 25 bp, Artificial
  probe
  misc_feature (1)..(25): SEQ ID NO: 2569; WAN024FS7_at; Start 193; Stop 217
gatggttgccaaagtcgctgtgtag

SEQ ID NO: 218862 - DNA, 25 bp, Artificial
  probe
  misc_feature (1)..(25): SEQ ID NO: 2569; WAN024FS7_at; Start 139; Stop 163
tgcttctccgacgacatagacggtc

SEQ ID NO: 218863 - DNA, 25 bp, Artificial
  probe
  misc_feature (1)..(25): SEQ ID NO: 2569; WAN024FS7_at; Start 130; Stop 154
cttgagtcctgcttctccgacgaca

SEQ ID NO: 218864 - DNA, 25 bp, Artificial
  probe
  misc_feature (1)..(25): SEQ ID NO: 2569; WAN024FS7_at; Start 9; Stop 33
ccttttgaatagcaagagttgctgt

SEQ ID NO: 218865 - DNA, 25 bp, Artificial
  probe
  misc_feature (1)..(25): SEQ ID NO: 2569; WAN024FS7_at; Start 18; Stop 42
tagcaagagttgctgtggcaaattt

SEQ ID NO: 218866 - DNA, 25 bp, Artificial
  probe
  misc_feature (1)..(25): SEQ ID NO: 2569; WAN024FS7_at; Start 120; Stop 144
tgatggcttccttgagtcctgcttc

SEQ ID NO: 218867 - DNA, 25 bp, Artificial
  probe
  misc_feature (1)..(25): SEQ ID NO: 2569; WAN024FS7_at; Start 21; Stop 45
caagagttgctgtggcaaatttttc

SEQ ID NO: 218868 - DNA, 25 bp, Artificial
  probe
  misc_feature (1)..(25): SEQ ID NO: 2569; WAN024FS7_at; Start 204; Stop 228
aagtcgctgtgtagacagtcgatag

SEQ ID NO: 218869 - DNA, 25 bp, Artificial
  probe
  misc_feature (1)..(25): SEQ ID NO: 2569; WAN024FS7_at; Start 196; Stop 220
ggttgccaaagtcgctgtgtagaca

SEQ ID NO: 218870 - DNA, 25 bp, Artificial
  probe
  misc_feature (1)..(25): SEQ ID NO: 2569; WAN024FS7_at; Start 2; Stop 26
tgggcacccttttgaatagcaagag

SEQ ID NO: 218871 - DNA, 25 bp, Artificial
  probe
  misc_feature (1)..(25): SEQ ID NO: 2569; WAN024FS7_at; Start 157; Stop 181
gacggtcttttcaagccccaaatca

SEQ ID NO: 218872 - DNA, 25 bp, Artificial
  probe
  misc_feature (1)..(25): SEQ ID NO: 2569; WAN024FS7_at; Start 184; Stop 208
catatagtcgatggttgccaaagtc

SEQ ID NO: 218873 - DNA, 25 bp, Artificial
  probe
  misc_feature (1)..(25): SEQ ID NO: 2569; WAN024FS7_at; Start 111; Stop 135
cagccgccttgatggcttccttgag

SEQ ID NO: 218874 - DNA, 25 bp, Artificial
  probe
  misc_feature (1)..(25): SEQ ID NO: 2569; WAN024FS7_at; Start 173; Stop 197
cccaaatcattcatatagtcgatgg

SEQ ID NO: 218875 - DNA, 25 bp, Artificial
  probe
  misc_feature (1)..(25): SEQ ID NO: 2569; WAN024FS7_at; Start 180; Stop 204
cattcatatagtcgatggttgccaa

SEQ ID NO: 218876 - DNA, 25 bp, Artificial
  probe
  misc_feature (1)..(25): SEQ ID NO: 2569; WAN024FS7_at; Start 6; Stop 30
cacccttttgaatagcaagagttgc

SEQ ID NO: 218877 - DNA, 25 bp, Artificial
  probe
  misc_feature (1)..(25): SEQ ID NO: 2569; WAN024FS7_at; Start 30; Stop 54
ctgtggcaaatttttcatagtcgac

SEQ ID NO: 218878 - DNA, 25 bp, Artificial
  probe
  misc_feature (1)..(25): SEQ ID NO: 2569; WAN024FS7_at; Start 59; Stop 83
caatccagaccaactaccacgtagg

SEQ ID NO: 218879 - DNA, 25 bp, Artificial
  probe
  misc_feature (1)..(25): SEQ ID NO: 2569; WAN024FS7_at; Start 151; Stop 175
gacatagacggtcttttcaagcccc

SEQ ID NO: 218880 - DNA, 25 bp, Artificial
  probe
  misc_feature (1)..(25): SEQ ID NO: 2569; WAN024FS7_at; Start 36; Stop 60
caaatttttcatagtcgacttgcca

SEQ ID NO: 218881 - DNA, 25 bp, Artificial
  probe
  misc_feature (1)..(25): SEQ ID NO: 2569; WAN024FS7_at; Start 153; Stop 177
catagacggtcttttcaagccccaa

SEQ ID NO: 218882 - DNA, 25 bp, Artificial
  probe
  misc_feature (1)..(25): SEQ ID NO: 2569; WAN024FS7_at; Start 133; Stop 157
gagtcctgcttctccgacgacatag

SEQ ID NO: 218883 - DNA, 25 bp, Artificial
  probe
  misc_feature (1)..(25): SEQ ID NO: 2654; WAN024FS8_at; Start 92; Stop 116
gaaaccacatgtgtcggtgcgattg

SEQ ID NO: 218884 - DNA, 25 bp, Artificial
  probe
  misc_feature (1)..(25): SEQ ID NO: 2654; WAN024FS8_at; Start 24; Stop 48
gaggagaaagagcatagagccccaa

SEQ ID NO: 218885 - DNA, 25 bp, Artificial
  probe
  misc_feature (1)..(25): SEQ ID NO: 2654; WAN024FS8_at; Start 81; Stop 105
ccgcaaggctagaaaccacatgtgt

SEQ ID NO: 218886 - DNA, 25 bp, Artificial
  probe
  misc_feature (1)..(25): SEQ ID NO: 2654; WAN024FS8_at; Start 117; Stop 141
gcaggccagctacttcttctgcctt

SEQ ID NO: 218887 - DNA, 25 bp, Artificial
  probe
  misc_feature (1)..(25): SEQ ID NO: 2654; WAN024FS8_at; Start 80; Stop 104
tccgcaaggctagaaaccacatgtg

SEQ ID NO: 218888 - DNA, 25 bp, Artificial
  probe
  misc_feature (1)..(25): SEQ ID NO: 2654; WAN024FS8_at; Start 77; Stop 101
cactccgcaaggctagaaaccacat

SEQ ID NO: 218889 - DNA, 25 bp, Artificial
  probe
  misc_feature (1)..(25): SEQ ID NO: 2654; WAN024FS8_at; Start 96; Stop 120
ccacatgtgtcggtgcgattggcag

SEQ ID NO: 218890 - DNA, 25 bp, Artificial
  probe
  misc_feature (1)..(25): SEQ ID NO: 2654; WAN024FS8_at; Start 107; Stop 131
ggtgcgattggcaggccagctactt

SEQ ID NO: 218891 - DNA, 25 bp, Artificial
  probe
  misc_feature (1)..(25): SEQ ID NO: 2654; WAN024FS8_at; Start 83; Stop 107
gcaaggctagaaaccacatgtgtcg

SEQ ID NO: 218892 - DNA, 25 bp, Artificial
  probe
  misc_feature (1)..(25): SEQ ID NO: 2654; WAN024FS8_at; Start 86; Stop 110
aggctagaaaccacatgtgtcggtg

SEQ ID NO: 218893 - DNA, 25 bp, Artificial
  probe
  misc_feature (1)..(25): SEQ ID NO: 2654; WAN024FS8_at; Start 207; Stop 231
aataattgtccccaaccatgattaa

SEQ ID NO: 218894 - DNA, 25 bp, Artificial
  probe
  misc_feature (1)..(25): SEQ ID NO: 2654; WAN024FS8_at; Start 27; Stop 51
gagaaagagcatagagccccaaaag

SEQ ID NO: 218895 - DNA, 25 bp, Artificial
  probe
  misc_feature (1)..(25): SEQ ID NO: 2654; WAN024FS8_at; Start 84; Stop 108
caaggctagaaaccacatgtgtcgg

SEQ ID NO: 218896 - DNA, 25 bp, Artificial
  probe
  misc_feature (1)..(25): SEQ ID NO: 2654; WAN024FS8_at; Start 167; Stop 191
gttggaatgccattgtcaatcccag

SEQ ID NO: 218897 - DNA, 25 bp, Artificial
  probe
  misc_feature (1)..(25): SEQ ID NO: 2654; WAN024FS8_at; Start 88; Stop 112
gctagaaaccacatgtgtcggtgcg

SEQ ID NO: 218898 - DNA, 25 bp, Artificial
  probe
  misc_feature (1)..(25): SEQ ID NO: 2654; WAN024FS8_at; Start 202; Stop 226
agtcaaataattgtccccaaccatg

SEQ ID NO: 218899 - DNA, 25 bp, Artificial
  probe
  misc_feature (1)..(25): SEQ ID NO: 2654; WAN024FS8_at; Start 171; Stop 195
gaatgccattgtcaatcccagcccg

SEQ ID NO: 218900 - DNA, 25 bp, Artificial
  probe
  misc_feature (1)..(25): SEQ ID NO: 2654; WAN024FS8_at; Start 26; Stop 50
ggagaaagagcatagagccccaaaa

SEQ ID NO: 218901 - DNA, 25 bp, Artificial
  probe
  misc_feature (1)..(25): SEQ ID NO: 2654; WAN024FS8_at; Start 63; Stop 87
tttcatcaaaatcccactccgcaag

SEQ ID NO: 218902 - DNA, 25 bp, Artificial
  probe
  misc_feature (1)..(25): SEQ ID NO: 2654; WAN024FS8_at; Start 114; Stop 138
ttggcaggccagctacttcttctgc

SEQ ID NO: 218903 - DNA, 25 bp, Artificial
  probe
  misc_feature (1)..(25): SEQ ID NO: 2654; WAN024FS8_at; Start 59; Stop 83
tagttttcatcaaaatcccactccg

SEQ ID NO: 218904 - DNA, 25 bp, Artificial
  probe
  misc_feature (1)..(25): SEQ ID NO: 2654; WAN024FS8_at; Start 108; Stop 132
gtgcgattggcaggccagctacttc

SEQ ID NO: 218905 - DNA, 25 bp, Artificial
  probe
  misc_feature (1)..(25): SEQ ID NO: 2654; WAN024FS8_at; Start 198; Stop 222
tatcagtcaaataattgtccccaac

SEQ ID NO: 218906 - DNA, 25 bp, Artificial
  probe
  misc_feature (1)..(25): SEQ ID NO: 2654; WAN024FS8_at; Start 22; Stop 46
gagaggagaaagagcatagagcccc

SEQ ID NO: 218907 - DNA, 25 bp, Artificial
  probe
  misc_feature (1)..(25): SEQ ID NO: 2654; WAN024FS8_at; Start 90; Stop 114
tagaaaccacatgtgtcggtgcgat

SEQ ID NO: 218908 - DNA, 25 bp, Artificial
  probe
  misc_feature (1)..(25): SEQ ID NO: 2654; WAN024FS8_at; Start 61; Stop 85
gttttcatcaaaatcccactccgca

SEQ ID NO: 218909 - DNA, 25 bp, Artificial
  probe
  misc_feature (1)..(25): SEQ ID NO: 2654; WAN024FS8_at; Start 54; Stop 78
caatttagttttcatcaaaatccca

SEQ ID NO: 218910 - DNA, 25 bp, Artificial
  probe
  misc_feature (1)..(25): SEQ ID NO: 2654; WAN024FS8_at; Start 67; Stop 91
atcaaaatcccactccgcaaggcta

SEQ ID NO: 218911 - DNA, 25 bp, Artificial
  probe
  misc_feature (1)..(25): SEQ ID NO: 2654; WAN024FS8_at; Start 169; Stop 193
tggaatgccattgtcaatcccagcc

SEQ ID NO: 218912 - DNA, 25 bp, Artificial
  probe
  misc_feature (1)..(25): SEQ ID NO: 2654; WAN024FS8_at; Start 204; Stop 228
tcaaataattgtccccaaccatgat

SEQ ID NO: 218913 - DNA, 25 bp, Artificial
  probe
  misc_feature (1)..(25): SEQ ID NO: 2654; WAN024FS8_at; Start 112; Stop 136
gattggcaggccagctacttcttct

SEQ ID NO: 218914 - DNA, 25 bp, Artificial
  probe
  misc_feature (1)..(25): SEQ ID NO: 2654; WAN024FS8_at; Start 72; Stop 96
aatcccactccgcaaggctagaaac

SEQ ID NO: 218915 - DNA, 25 bp, Artificial
  probe
  misc_feature (1)..(25): SEQ ID NO: 2654; WAN024FS8_at; Start 69; Stop 93
caaaatcccactccgcaaggctaga

SEQ ID NO: 218916 - DNA, 25 bp, Artificial
  probe
  misc_feature (1)..(25): SEQ ID NO: 2654; WAN024FS8_at; Start 94; Stop 118
aaccacatgtgtcggtgcgattggc

SEQ ID NO: 218917 - DNA, 25 bp, Artificial
  probe
  misc_feature (1)..(25): SEQ ID NO: 5021; WAN024FS9_at; Start 7; Stop 31
caattggatttggttaattcactct

SEQ ID NO: 218918 - DNA, 25 bp, Artificial
  probe
  misc_feature (1)..(25): SEQ ID NO: 5021; WAN024FS9_at; Start 208; Stop 232
ggctggatcaaaaagccaggtatca

SEQ ID NO: 218919 - DNA, 25 bp, Artificial
  probe
  misc_feature (1)..(25): SEQ ID NO: 5021; WAN024FS9_at; Start 172; Stop 196
gaaggtctctggcaaaatcataata

SEQ ID NO: 218920 - DNA, 25 bp, Artificial
  probe
  misc_feature (1)..(25): SEQ ID NO: 5021; WAN024FS9_at; Start 294; Stop 318
ccccaagtccaatcatcacaggtaa

SEQ ID NO: 218921 - DNA, 25 bp, Artificial
  probe
  misc_feature (1)..(25): SEQ ID NO: 5021; WAN024FS9_at; Start 3; Stop 27
gacacaattggatttggttaattca

SEQ ID NO: 218922 - DNA, 25 bp, Artificial
  probe
  misc_feature (1)..(25): SEQ ID NO: 5021; WAN024FS9_at; Start 157; Stop 181
gaaggcatgaagaaagaaggtctct

SEQ ID NO: 218923 - DNA, 25 bp, Artificial
  probe
  misc_feature (1)..(25): SEQ ID NO: 5021; WAN024FS9_at; Start 217; Stop 241
aaaaagccaggtatcatctcccaca

SEQ ID NO: 218924 - DNA, 25 bp, Artificial
  probe
  misc_feature (1)..(25): SEQ ID NO: 5021; WAN024FS9_at; Start 231; Stop 255
catctcccacaaagagaatttgatg

SEQ ID NO: 218925 - DNA, 25 bp, Artificial
  probe
  misc_feature (1)..(25): SEQ ID NO: 5021; WAN024FS9_at; Start 224; Stop 248
caggtatcatctcccacaaagagaa

SEQ ID NO: 218926 - DNA, 25 bp, Artificial
  probe
  misc_feature (1)..(25): SEQ ID NO: 5021; WAN024FS9_at; Start 192; Stop 216
taataacaggatccttggctggatc

SEQ ID NO: 218927 - DNA, 25 bp, Artificial
  probe
  misc_feature (1)..(25): SEQ ID NO: 5021; WAN024FS9_at; Start 181; Stop 205
tggcaaaatcataataacaggatcc

SEQ ID NO: 218928 - DNA, 25 bp, Artificial
  probe
  misc_feature (1)..(25): SEQ ID NO: 5021; WAN024FS9_at; Start 177; Stop 201
tctctggcaaaatcataataacagg

SEQ ID NO: 218929 - DNA, 25 bp, Artificial
  probe
  misc_feature (1)..(25): SEQ ID NO: 5021; WAN024FS9_at; Start 135; Stop 159
catagagggcaaaaaagaggaggaa

SEQ ID NO: 218930 - DNA, 25 bp, Artificial
  probe
  misc_feature (1)..(25): SEQ ID NO: 5021; WAN024FS9_at; Start 204; Stop 228
ccttggctggatcaaaaagccaggt

SEQ ID NO: 218931 - DNA, 25 bp, Artificial
  probe
  misc_feature (1)..(25): SEQ ID NO: 5021; WAN024FS9_at; Start 195; Stop 219
taacaggatccttggctggatcaaa

SEQ ID NO: 218932 - DNA, 25 bp, Artificial
  probe
  misc_feature (1)..(25): SEQ ID NO: 5021; WAN024FS9_at; Start 32; Stop 56
taacgatggttttaaacgatatata

SEQ ID NO: 218933 - DNA, 25 bp, Artificial
  probe
  misc_feature (1)..(25): SEQ ID NO: 5021; WAN024FS9_at; Start 190; Stop 214
cataataacaggatccttggctgga

SEQ ID NO: 218934 - DNA, 25 bp, Artificial
  probe
  misc_feature (1)..(25): SEQ ID NO: 5021; WAN024FS9_at; Start 160; Stop 184
ggcatgaagaaagaaggtctctggc

SEQ ID NO: 218935 - DNA, 25 bp, Artificial
  probe
  misc_feature (1)..(25): SEQ ID NO: 5021; WAN024FS9_at; Start 21; Stop 45
taattcactcttaacgatggtttta

SEQ ID NO: 218936 - DNA, 25 bp, Artificial
  probe
  misc_feature (1)..(25): SEQ ID NO: 5021; WAN024FS9_at; Start 144; Stop 168
caaaaaagaggaggaaggcatgaag

SEQ ID NO: 218937 - DNA, 25 bp, Artificial
  probe
  misc_feature (1)..(25): SEQ ID NO: 5021; WAN024FS9_at; Start 235; Stop 259
tcccacaaagagaatttgatggaaa

SEQ ID NO: 218938 - DNA, 25 bp, Artificial
  probe
  misc_feature (1)..(25): SEQ ID NO: 5021; WAN024FS9_at; Start 213; Stop 237
gatcaaaaagccaggtatcatctcc

SEQ ID NO: 218939 - DNA, 25 bp, Artificial
  probe
  misc_feature (1)..(25): SEQ ID NO: 5021; WAN024FS9_at; Start 201; Stop 225
gatccttggctggatcaaaaagcca

SEQ ID NO: 218940 - DNA, 25 bp, Artificial
  probe
  misc_feature (1)..(25): SEQ ID NO: 5021; WAN024FS9_at; Start 17; Stop 41
tggttaattcactcttaacgatggt

SEQ ID NO: 218941 - DNA, 25 bp, Artificial
  probe
  misc_feature (1)..(25): SEQ ID NO: 5021; WAN024FS9_at; Start 252; Stop 276
gatggaaaagagtaaagaattggtc

SEQ ID NO: 218942 - DNA, 25 bp, Artificial
  probe
  misc_feature (1)..(25): SEQ ID NO: 5021; WAN024FS9_at; Start 13; Stop 37
gatttggttaattcactcttaacga

SEQ ID NO: 218943 - DNA, 25 bp, Artificial
  probe
  misc_feature (1)..(25): SEQ ID NO: 5021; WAN024FS9_at; Start 228; Stop 252
tatcatctcccacaaagagaatttg

SEQ ID NO: 218944 - DNA, 25 bp, Artificial
  probe
  misc_feature (1)..(25): SEQ ID NO: 5021; WAN024FS9_at; Start 147; Stop 171
aaaagaggaggaaggcatgaagaaa

SEQ ID NO: 218945 - DNA, 25 bp, Artificial
  probe
  misc_feature (1)..(25): SEQ ID NO: 5021; WAN024FS9_at; Start 222; Stop 246
gccaggtatcatctcccacaaagag

SEQ ID NO: 218946 - DNA, 25 bp, Artificial
  probe
  misc_feature (1)..(25): SEQ ID NO: 5021; WAN024FS9_at; Start 189; Stop 213
tcataataacaggatccttggctgg

SEQ ID NO: 218947 - DNA, 25 bp, Artificial
  probe
  misc_feature (1)..(25): SEQ ID NO: 5021; WAN024FS9_at; Start 263; Stop 287
gtaaagaattggtcaaaaccaatca

SEQ ID NO: 218948 - DNA, 25 bp, Artificial
  probe
  misc_feature (1)..(25): SEQ ID NO: 5021; WAN024FS9_at; Start 133; Stop 157
ttcatagagggcaaaaaagaggagg

SEQ ID NO: 218949 - DNA, 25 bp, Artificial
  probe
  misc_feature (1)..(25): SEQ ID NO: 5021; WAN024FS9_at; Start 220; Stop 244
aagccaggtatcatctcccacaaag

SEQ ID NO: 218950 - DNA, 25 bp, Artificial
  probe
  misc_feature (1)..(25): SEQ ID NO: 5021; WAN024FS9_at; Start 175; Stop 199
ggtctctggcaaaatcataataaca

SEQ ID NO: 218951 - DNA, 25 bp, Artificial
  probe
  misc_feature (1)..(25): SEQ ID NO: 942; WAN024FSA_at; Start 87; Stop 111
tgaattgcaaaagcgggacattccc

SEQ ID NO: 218952 - DNA, 25 bp, Artificial
  probe
  misc_feature (1)..(25): SEQ ID NO: 942; WAN024FSA_at; Start 513; Stop 537
gacacgagtgaagccggtttatatc

SEQ ID NO: 218953 - DNA, 25 bp, Artificial
  probe
  misc_feature (1)..(25): SEQ ID NO: 942; WAN024FSA_at; Start 81; Stop 105
tgttcatgaattgcaaaagcgggac

SEQ ID NO: 218954 - DNA, 25 bp, Artificial
  probe
  misc_feature (1)..(25): SEQ ID NO: 942; WAN024FSA_at; Start 139; Stop 163
cgcactccagagagtgttaaggaga

SEQ ID NO: 218955 - DNA, 25 bp, Artificial
  probe
  misc_feature (1)..(25): SEQ ID NO: 942; WAN024FSA_at; Start 382; Stop 406
aaatttgccacagcaactcttgcta

SEQ ID NO: 218956 - DNA, 25 bp, Artificial
  probe
  misc_feature (1)..(25): SEQ ID NO: 942; WAN024FSA_at; Start 370; Stop 394
gtcgactatgaaaaatttgccacag

SEQ ID NO: 218957 - DNA, 25 bp, Artificial
  probe
  misc_feature (1)..(25): SEQ ID NO: 942; WAN024FSA_at; Start 498; Stop 522
gctgcttgaagtagcgacacgagtg

SEQ ID NO: 218958 - DNA, 25 bp, Artificial
  probe
  misc_feature (1)..(25): SEQ ID NO: 942; WAN024FSA_at; Start 50; Stop 74
ggaaagaccgaatccctgctggaga

SEQ ID NO: 218959 - DNA, 25 bp, Artificial
  probe
  misc_feature (1)..(25): SEQ ID NO: 942; WAN024FSA_at; Start 130; Stop 154
aatacaacccgcactccagagagtg

SEQ ID NO: 218960 - DNA, 25 bp, Artificial
  probe
  misc_feature (1)..(25): SEQ ID NO: 942; WAN024FSA_at; Start 398; Stop 422
ctcttgctattcaaaagggtgccca

SEQ ID NO: 218961 - DNA, 25 bp, Artificial
  probe
  misc_feature (1)..(25): SEQ ID NO: 942; WAN024FSA_at; Start 691; Stop 715
aaggcagaagaagtagctggcctgc

SEQ ID NO: 218962 - DNA, 25 bp, Artificial
  probe
  misc_feature (1)..(25): SEQ ID NO: 942; WAN024FSA_at; Start 640; Stop 664
gctgggattgacaatggcattccaa

SEQ ID NO: 218963 - DNA, 25 bp, Artificial
  probe
  misc_feature (1)..(25): SEQ ID NO: 942; WAN024FSA_at; Start 285; Stop 309
aggactcaaggaagccatcaaggcg

SEQ ID NO: 218964 - DNA, 25 bp, Artificial
  probe
  misc_feature (1)..(25): SEQ ID NO: 942; WAN024FSA_at; Start 153; Stop 177
tgttaaggagatgttggctcagaat

SEQ ID NO: 218965 - DNA, 25 bp, Artificial
  probe
  misc_feature (1)..(25): SEQ ID NO: 942; WAN024FSA_at; Start 357; Stop 381
tctggattggcaagtcgactatgaa

SEQ ID NO: 218966 - DNA, 25 bp, Artificial
  probe
  misc_feature (1)..(25): SEQ ID NO: 942; WAN024FSA_at; Start 415; Stop 439
ggtgcccattttatcggaaccaatc

SEQ ID NO: 218967 - DNA, 25 bp, Artificial
  probe
  misc_feature (1)..(25): SEQ ID NO: 942; WAN024FSA_at; Start 469; Stop 493
cttttgccaggtgctggctcactga

SEQ ID NO: 218968 - DNA, 25 bp, Artificial
  probe
  misc_feature (1)..(25): SEQ ID NO: 942; WAN024FSA_at; Start 197; Stop 221
tatcgactgtctacacagcgacttt

SEQ ID NO: 218969 - DNA, 25 bp, Artificial
  probe
  misc_feature (1)..(25): SEQ ID NO: 942; WAN024FSA_at; Start 227; Stop 251
ccatcgactatatgaatgatttggg

SEQ ID NO: 218970 - DNA, 25 bp, Artificial
  probe
  misc_feature (1)..(25): SEQ ID NO: 942; WAN024FSA_at; Start 428; Stop 452
tcggaaccaatcctgacctcaacat

SEQ ID NO: 218971 - DNA, 25 bp, Artificial
  probe
  misc_feature (1)..(25): SEQ ID NO: 942; WAN024FSA_at; Start 700; Stop 724
gaagtagctggcctgccaatcgcac

SEQ ID NO: 218972 - DNA, 25 bp, Artificial
  probe
  misc_feature (1)..(25): SEQ ID NO: 942; WAN024FSA_at; Start 261; Stop 285
gaccgtctatgtcgtcggagaagca

SEQ ID NO: 218973 - DNA, 25 bp, Artificial
  probe
  misc_feature (1)..(25): SEQ ID NO: 942; WAN024FSA_at; Start 714; Stop 738
gccaatcgcaccgacacatgtggtt

SEQ ID NO: 218974 - DNA, 25 bp, Artificial
  probe
  misc_feature (1)..(25): SEQ ID NO: 942; WAN024FSA_at; Start 168; Stop 192
ggctcagaattttaatatcgatacg

SEQ ID NO: 218975 - DNA, 25 bp, Artificial
  probe
  misc_feature (1)..(25): SEQ ID NO: 942; WAN024FSA_at; Start 310; Stop 334
gctggttatgtggaagacaaggaaa

SEQ ID NO: 218976 - DNA, 25 bp, Artificial
  probe
  misc_feature (1)..(25): SEQ ID NO: 942; WAN024FSA_at; Start 739; Stop 763
tctagccttgcggagtgggattttg

SEQ ID NO: 218977 - DNA, 25 bp, Artificial
  probe
  misc_feature (1)..(25): SEQ ID NO: 942; WAN024FSA_at; Start 250; Stop 274
gggcttgaaaagaccgtctatgtcg

SEQ ID NO: 218978 - DNA, 25 bp, Artificial
  probe
  misc_feature (1)..(25): SEQ ID NO: 942; WAN024FSA_at; Start 728; Stop 752
cacatgtggtttctagccttgcgga

SEQ ID NO: 218979 - DNA, 25 bp, Artificial
  probe
  misc_feature (1)..(25): SEQ ID NO: 942; WAN024FSA_at; Start 747; Stop 771
tgcggagtgggattttgatgaaaac

SEQ ID NO: 218980 - DNA, 25 bp, Artificial
  probe
  misc_feature (1)..(25): SEQ ID NO: 942; WAN024FSA_at; Start 62; Stop 86
tccctgctggagagacttttgttca

SEQ ID NO: 218981 - DNA, 25 bp, Artificial
  probe
  misc_feature (1)..(25): SEQ ID NO: 942; WAN024FSA_at; Start 341; Stop 365
cctacgtggtagttggtctggattg

SEQ ID NO: 218982 - DNA, 25 bp, Artificial
  probe
  misc_feature (1)..(25): SEQ ID NO: 942; WAN024FSA_at; Start 120; Stop 144
tgtaaccaacaatacaacccgcact

SEQ ID NO: 218983 - DNA, 25 bp, Artificial
  probe
  misc_feature (1)..(25): SEQ ID NO: 942; WAN024FSA_at; Start 270; Stop 294
tgtcgtcggagaagcaggactcaag

SEQ ID NO: 218984 - DNA, 25 bp, Artificial
  probe
  misc_feature (1)..(25): SEQ ID NO: 942; WAN024FSA_at; Start 101; Stop 125
gggacattccctatctctttgtaac

SEQ ID NO: 218985 - DNA, 25 bp, Artificial
  probe
  misc_feature (1)..(25): SEQ ID NO: 710; WAN024FSB_at; Start 433; Stop 457
gaccaattctttactcttttccatc

SEQ ID NO: 218986 - DNA, 25 bp, Artificial
  probe
  misc_feature (1)..(25): SEQ ID NO: 710; WAN024FSB_at; Start 106; Stop 130
tggctaaacttaacgaatcgagtct

SEQ ID NO: 218987 - DNA, 25 bp, Artificial
  probe
  misc_feature (1)..(25): SEQ ID NO: 710; WAN024FSB_at; Start 191; Stop 215
cttttagtcaggtcttacagatgcc

SEQ ID NO: 218988 - DNA, 25 bp, Artificial
  probe
  misc_feature (1)..(25): SEQ ID NO: 710; WAN024FSB_at; Start 271; Stop 295
tttcatttggttcagctagtagctc

SEQ ID NO: 218989 - DNA, 25 bp, Artificial
  probe
  misc_feature (1)..(25): SEQ ID NO: 710; WAN024FSB_at; Start 478; Stop 502
gatacctggctttttgatccagcca

SEQ ID NO: 218990 - DNA, 25 bp, Artificial
  probe
  misc_feature (1)..(25): SEQ ID NO: 710; WAN024FSB_at; Start 132; Stop 156
tctaaaaccagaaaccattcaatac

SEQ ID NO: 218991 - DNA, 25 bp, Artificial
  probe
  misc_feature (1)..(25): SEQ ID NO: 710; WAN024FSB_at; Start 354; Stop 378
gtctctttatcgaaaaagtctcctg

SEQ ID NO: 218992 - DNA, 25 bp, Artificial
  probe
  misc_feature (1)..(25): SEQ ID NO: 710; WAN024FSB_at; Start 296; Stop 320
tagtgacactgccaagtttctatgt

SEQ ID NO: 218993 - DNA, 25 bp, Artificial
  probe
  misc_feature (1)..(25): SEQ ID NO: 710; WAN024FSB_at; Start 306; Stop 330
gccaagtttctatgtctttgtcaat

SEQ ID NO: 218994 - DNA, 25 bp, Artificial
  probe
  misc_feature (1)..(25): SEQ ID NO: 710; WAN024FSB_at; Start 206; Stop 230
tacagatgcctgattttcgttcgtc

SEQ ID NO: 218995 - DNA, 25 bp, Artificial
  probe
  misc_feature (1)..(25): SEQ ID NO: 710; WAN024FSB_at; Start 262; Stop 286
aagaatctctttcatttggttcagc

SEQ ID NO: 218996 - DNA, 25 bp, Artificial
  probe
  misc_feature (1)..(25): SEQ ID NO: 710; WAN024FSB_at; Start 224; Stop 248
gttcgtcagcagctggtctgcacca

SEQ ID NO: 218997 - DNA, 25 bp, Artificial
  probe
  misc_feature (1)..(25): SEQ ID NO: 710; WAN024FSB_at; Start 235; Stop 259
gctggtctgcaccatttcgcagtgg

SEQ ID NO: 218998 - DNA, 25 bp, Artificial
  probe
  misc_feature (1)..(25): SEQ ID NO: 710; WAN024FSB_at; Start 57; Stop 81
ccttctgaccatttatctggcttgg

SEQ ID NO: 218999 - DNA, 25 bp, Artificial
  probe
  misc_feature (1)..(25): SEQ ID NO: 710; WAN024FSB_at; Start 485; Stop 509
ggctttttgatccagccaaggatcc

SEQ ID NO: 219000 - DNA, 25 bp, Artificial
  probe
  misc_feature (1)..(25): SEQ ID NO: 710; WAN024FSB_at; Start 242; Stop 266
tgcaccatttcgcagtggtcaagaa

SEQ ID NO: 219001 - DNA, 25 bp, Artificial
  probe
  misc_feature (1)..(25): SEQ ID NO: 710; WAN024FSB_at; Start 250; Stop 274
ttcgcagtggtcaagaatctctttc

SEQ ID NO: 219002 - DNA, 25 bp, Artificial
  probe
  misc_feature (1)..(25): SEQ ID NO: 710; WAN024FSB_at; Start 326; Stop 350
tcaataggattgtgaaaaaggactt

SEQ ID NO: 219003 - DNA, 25 bp, Artificial
  probe
  misc_feature (1)..(25): SEQ ID NO: 710; WAN024FSB_at; Start 120; Stop 144
gaatcgagtctatctaaaaccagaa

SEQ ID NO: 219004 - DNA, 25 bp, Artificial
  probe
  misc_feature (1)..(25): SEQ ID NO: 710; WAN024FSB_at; Start 217; Stop 241
gattttcgttcgtcagcagctggtc

SEQ ID NO: 219005 - DNA, 25 bp, Artificial
  probe
  misc_feature (1)..(25): SEQ ID NO: 710; WAN024FSB_at; Start 452; Stop 476
tccatcaaattctctttgtgggaga

SEQ ID NO: 219006 - DNA, 25 bp, Artificial
  probe
  misc_feature (1)..(25): SEQ ID NO: 710; WAN024FSB_at; Start 287; Stop 311
tagtagctctagtgacactgccaag

SEQ ID NO: 219007 - DNA, 25 bp, Artificial
  probe
  misc_feature (1)..(25): SEQ ID NO: 710; WAN024FSB_at; Start 464; Stop 488
tctttgtgggagatgatacctggct

SEQ ID NO: 219008 - DNA, 25 bp, Artificial
  probe
  misc_feature (1)..(25): SEQ ID NO: 710; WAN024FSB_at; Start 552; Stop 576
cctcctcttttttgccctctatgaa

SEQ ID NO: 219009 - DNA, 25 bp, Artificial
  probe
  misc_feature (1)..(25): SEQ ID NO: 710; WAN024FSB_at; Start 510; Stop 534
tgttattatgattttgccagagacc

SEQ ID NO: 219010 - DNA, 25 bp, Artificial
  probe
  misc_feature (1)..(25): SEQ ID NO: 710; WAN024FSB_at; Start 163; Stop 187
catatcttgatgaattatctgacca

SEQ ID NO: 219011 - DNA, 25 bp, Artificial
  probe
  misc_feature (1)..(25): SEQ ID NO: 710; WAN024FSB_at; Start 529; Stop 553
gagaccttctttcttcatgccttcc

SEQ ID NO: 219012 - DNA, 25 bp, Artificial
  probe
  misc_feature (1)..(25): SEQ ID NO: 710; WAN024FSB_at; Start 90; Stop 114
tcctatggagattcagtggctaaac

SEQ ID NO: 219013 - DNA, 25 bp, Artificial
  probe
  misc_feature (1)..(25): SEQ ID NO: 710; WAN024FSB_at; Start 76; Stop 100
gcttggattttctatcctatggaga

SEQ ID NO: 219014 - DNA, 25 bp, Artificial
  probe
  misc_feature (1)..(25): SEQ ID NO: 710; WAN024FSB_at; Start 178; Stop 202
tatctgaccaatccttttagtcagg

SEQ ID NO: 219015 - DNA, 25 bp, Artificial
  probe
  misc_feature (1)..(25): SEQ ID NO: 710; WAN024FSB_at; Start 65; Stop 89
ccatttatctggcttggattttcta

SEQ ID NO: 219016 - DNA, 25 bp, Artificial
  probe
  misc_feature (1)..(25): SEQ ID NO: 710; WAN024FSB_at; Start 518; Stop 542
tgattttgccagagaccttctttct

SEQ ID NO: 219017 - DNA, 25 bp, Artificial
  probe
  misc_feature (1)..(25): SEQ ID NO: 710; WAN024FSB_at; Start 496; Stop 520
ccagccaaggatcctgttattatga

SEQ ID NO: 219018 - DNA, 25 bp, Artificial
  probe
  misc_feature (1)..(25): SEQ ID NO: 710; WAN024FSB_at; Start 97; Stop 121
gagattcagtggctaaacttaacga

SEQ ID NO: 219019 - DNA, 25 bp, Artificial
  probe
  misc_feature (1)..(25): SEQ ID NO: 1762; WAN024FSC_at; Start 1; Stop 25
atgatgtcatcagtaccattttcgg

SEQ ID NO: 219020 - DNA, 25 bp, Artificial
  probe
  misc_feature (1)..(25): SEQ ID NO: 1762; WAN024FSC_at; Start 115; Stop 139
caggccttagccttacgacatgatg

SEQ ID NO: 219021 - DNA, 25 bp, Artificial
  probe
  misc_feature (1)..(25): SEQ ID NO: 1762; WAN024FSC_at; Start 128; Stop 152
tacgacatgatgtacagctcggtga

SEQ ID NO: 219022 - DNA, 25 bp, Artificial
  probe
  misc_feature (1)..(25): SEQ ID NO: 1762; WAN024FSC_at; Start 168; Stop 192
catgcttttctcttcttatctatac

SEQ ID NO: 219023 - DNA, 25 bp, Artificial
  probe
  misc_feature (1)..(25): SEQ ID NO: 1762; WAN024FSC_at; Start 27; Stop 51
caaggaaaggatgtgttgcaattct

SEQ ID NO: 219024 - DNA, 25 bp, Artificial
  probe
  misc_feature (1)..(25): SEQ ID NO: 1762; WAN024FSC_at; Start 124; Stop 148
gccttacgacatgatgtacagctcg

SEQ ID NO: 219025 - DNA, 25 bp, Artificial
  probe
  misc_feature (1)..(25): SEQ ID NO: 1762; WAN024FSC_at; Start 188; Stop 212
tatactttgctacttctattataca

SEQ ID NO: 219026 - DNA, 25 bp, Artificial
  probe
  misc_feature (1)..(25): SEQ ID NO: 1762; WAN024FSC_at; Start 80; Stop 104
tgtgttccacaaagggaaccttatg

SEQ ID NO: 219027 - DNA, 25 bp, Artificial
  probe
  misc_feature (1)..(25): SEQ ID NO: 1762; WAN024FSC_at; Start 72; Stop 96
cataatattgtgttccacaaaggga

SEQ ID NO: 219028 - DNA, 25 bp, Artificial
  probe
  misc_feature (1)..(25): SEQ ID NO: 1762; WAN024FSC_at; Start 62; Stop 86
aaggactggtcataatattgtgttc

SEQ ID NO: 219029 - DNA, 25 bp, Artificial
  probe
  misc_feature (1)..(25): SEQ ID NO: 1762; WAN024FSC_at; Start 31; Stop 55
gaaaggatgtgttgcaattcttttc

SEQ ID NO: 219030 - DNA, 25 bp, Artificial
  probe
  misc_feature (1)..(25): SEQ ID NO: 1762; WAN024FSC_at; Start 11; Stop 35
cagtaccattttcggtcaaggaaag

SEQ ID NO: 219031 - DNA, 25 bp, Artificial
  probe
  misc_feature (1)..(25): SEQ ID NO: 1762; WAN024FSC_at; Start 8; Stop 32
catcagtaccattttcggtcaagga

SEQ ID NO: 219032 - DNA, 25 bp, Artificial
  probe
  misc_feature (1)..(25): SEQ ID NO: 1762; WAN024FSC_at; Start 74; Stop 98
taatattgtgttccacaaagggaac

SEQ ID NO: 219033 - DNA, 25 bp, Artificial
  probe
  misc_feature (1)..(25): SEQ ID NO: 1762; WAN024FSC_at; Start 181; Stop 205
tcttatctatactttgctacttcta

SEQ ID NO: 219034 - DNA, 25 bp, Artificial
  probe
  misc_feature (1)..(25): SEQ ID NO: 1762; WAN024FSC_at; Start 111; Stop 135
taaccaggccttagccttacgacat

SEQ ID NO: 219035 - DNA, 25 bp, Artificial
  probe
  misc_feature (1)..(25): SEQ ID NO: 1762; WAN024FSC_at; Start 120; Stop 144
cttagccttacgacatgatgtacag

SEQ ID NO: 219036 - DNA, 25 bp, Artificial
  probe
  misc_feature (1)..(25): SEQ ID NO: 1762; WAN024FSC_at; Start 159; Stop 183
tagtgtaatcatgcttttctcttct

SEQ ID NO: 219037 - DNA, 25 bp, Artificial
  probe
  misc_feature (1)..(25): SEQ ID NO: 1762; WAN024FSC_at; Start 131; Stop 155
gacatgatgtacagctcggtgatag

SEQ ID NO: 219038 - DNA, 25 bp, Artificial
  probe
  misc_feature (1)..(25): SEQ ID NO: 1762; WAN024FSC_at; Start 49; Stop 73
tcttttcttgttaaaggactggtca

SEQ ID NO: 219039 - DNA, 25 bp, Artificial
  probe
  misc_feature (1)..(25): SEQ ID NO: 1762; WAN024FSC_at; Start 142; Stop 166
cagctcggtgatagaaatagtgtaa

SEQ ID NO: 219040 - DNA, 25 bp, Artificial
  probe
  misc_feature (1)..(25): SEQ ID NO: 1762; WAN024FSC_at; Start 23; Stop 47
cggtcaaggaaaggatgtgttgcaa

SEQ ID NO: 219041 - DNA, 25 bp, Artificial
  probe
  misc_feature (1)..(25): SEQ ID NO: 1762; WAN024FSC_at; Start 117; Stop 141
ggccttagccttacgacatgatgta

SEQ ID NO: 219042 - DNA, 25 bp, Artificial
  probe
  misc_feature (1)..(25): SEQ ID NO: 1762; WAN024FSC_at; Start 43; Stop 67
tgcaattcttttcttgttaaaggac

SEQ ID NO: 219043 - DNA, 25 bp, Artificial
  probe
  misc_feature (1)..(25): SEQ ID NO: 1762; WAN024FSC_at; Start 16; Stop 40
ccattttcggtcaaggaaaggatgt

SEQ ID NO: 219044 - DNA, 25 bp, Artificial
  probe
  misc_feature (1)..(25): SEQ ID NO: 1762; WAN024FSC_at; Start 54; Stop 78
tcttgttaaaggactggtcataata

SEQ ID NO: 219045 - DNA, 25 bp, Artificial
  probe
  misc_feature (1)..(25): SEQ ID NO: 1762; WAN024FSC_at; Start 3; Stop 27
gatgtcatcagtaccattttcggtc

SEQ ID NO: 219046 - DNA, 25 bp, Artificial
  probe
  misc_feature (1)..(25): SEQ ID NO: 1762; WAN024FSC_at; Start 144; Stop 168
gctcggtgatagaaatagtgtaatc

SEQ ID NO: 219047 - DNA, 25 bp, Artificial
  probe
  misc_feature (1)..(25): SEQ ID NO: 1762; WAN024FSC_at; Start 21; Stop 45
ttcggtcaaggaaaggatgtgttgc

SEQ ID NO: 219048 - DNA, 25 bp, Artificial
  probe
  misc_feature (1)..(25): SEQ ID NO: 1762; WAN024FSC_at; Start 101; Stop 125
tatgtttttctaaccaggccttagc

SEQ ID NO: 219049 - DNA, 25 bp, Artificial
  probe
  misc_feature (1)..(25): SEQ ID NO: 1762; WAN024FSC_at; Start 138; Stop 162
tgtacagctcggtgatagaaatagt

SEQ ID NO: 219050 - DNA, 25 bp, Artificial
  probe
  misc_feature (1)..(25): SEQ ID NO: 1762; WAN024FSC_at; Start 151; Stop 175
gatagaaatagtgtaatcatgcttt

SEQ ID NO: 219051 - DNA, 25 bp, Artificial
  probe
  misc_feature (1)..(25): SEQ ID NO: 1762; WAN024FSC_at; Start 133; Stop 157
catgatgtacagctcggtgatagaa

SEQ ID NO: 219052 - DNA, 25 bp, Artificial
  probe
  misc_feature (1)..(25): SEQ ID NO: 1762; WAN024FSC_at; Start 65; Stop 89
gactggtcataatattgtgttccac

SEQ ID NO: 219053 - DNA, 25 bp, Artificial
  probe
  misc_feature (1)..(25): SEQ ID NO: 1794; WAN024FSD_at; Start 271; Stop 295
cgtcgtccaattattattgatgcca

SEQ ID NO: 219054 - DNA, 25 bp, Artificial
  probe
  misc_feature (1)..(25): SEQ ID NO: 1794; WAN024FSD_at; Start 126; Stop 150
gcaacacatcctttccttgaccgaa

SEQ ID NO: 219055 - DNA, 25 bp, Artificial
  probe
  misc_feature (1)..(25): SEQ ID NO: 1794; WAN024FSD_at; Start 292; Stop 316
gccaagcgtatgcaaatcggtttta

SEQ ID NO: 219056 - DNA, 25 bp, Artificial
  probe
  misc_feature (1)..(25): SEQ ID NO: 1794; WAN024FSD_at; Start 85; Stop 109
gaacacaatattatgaccagtcctt

SEQ ID NO: 219057 - DNA, 25 bp, Artificial
  probe
  misc_feature (1)..(25): SEQ ID NO: 1794; WAN024FSD_at; Start 376; Stop 400
gcaagaatgagagctggtattagtt

SEQ ID NO: 219058 - DNA, 25 bp, Artificial
  probe
  misc_feature (1)..(25): SEQ ID NO: 1794; WAN024FSD_at; Start 81; Stop 105
tgtggaacacaatattatgaccagt

SEQ ID NO: 219059 - DNA, 25 bp, Artificial
  probe
  misc_feature (1)..(25): SEQ ID NO: 1794; WAN024FSD_at; Start 342; Stop 366
ccctcgtagttatcgtaagcaagaa

SEQ ID NO: 219060 - DNA, 25 bp, Artificial
  probe
  misc_feature (1)..(25): SEQ ID NO: 1794; WAN024FSD_at; Start 312; Stop 336
ttttaatgaagatgagattcgtgct

SEQ ID NO: 219061 - DNA, 25 bp, Artificial
  probe
  misc_feature (1)..(25): SEQ ID NO: 1794; WAN024FSD_at; Start 67; Stop 91
cataaggttccctttgtggaacaca

SEQ ID NO: 219062 - DNA, 25 bp, Artificial
  probe
  misc_feature (1)..(25): SEQ ID NO: 1794; WAN024FSD_at; Start 98; Stop 122
tgaccagtcctttaacaagaaaaga

SEQ ID NO: 219063 - DNA, 25 bp, Artificial
  probe
  misc_feature (1)..(25): SEQ ID NO: 1794; WAN024FSD_at; Start 208; Stop 232
gatgtagagagtatttcggtatcgg

SEQ ID NO: 219064 - DNA, 25 bp, Artificial
  probe
  misc_feature (1)..(25): SEQ ID NO: 1794; WAN024FSD_at; Start 17; Stop 41
tatcaccgagctgtacatcatgtcg

SEQ ID NO: 219065 - DNA, 25 bp, Artificial
  probe
  misc_feature (1)..(25): SEQ ID NO: 1794; WAN024FSD_at; Start 193; Stop 217
caaaaattgaatattgatgtagaga

SEQ ID NO: 219066 - DNA, 25 bp, Artificial
  probe
  misc_feature (1)..(25): SEQ ID NO: 1794; WAN024FSD_at; Start 327; Stop 351
gattcgtgcttttctccctcgtagt

SEQ ID NO: 219067 - DNA, 25 bp, Artificial
  probe
  misc_feature (1)..(25): SEQ ID NO: 1794; WAN024FSD_at; Start 146; Stop 170
ccgaaaatggtactgatgacatcat

SEQ ID NO: 219068 - DNA, 25 bp, Artificial
  probe
  misc_feature (1)..(25): SEQ ID NO: 1794; WAN024FSD_at; Start 160; Stop 184
gatgacatcatttcaactcgttcaa

SEQ ID NO: 219069 - DNA, 25 bp, Artificial
  probe
  misc_feature (1)..(25): SEQ ID NO: 1794; WAN024FSD_at; Start 8; Stop 32
cactatttctatcaccgagctgtac

SEQ ID NO: 219070 - DNA, 25 bp, Artificial
  probe
  misc_feature (1)..(25): SEQ ID NO: 1794; WAN024FSD_at; Start 3; Stop 27
gattacactatttctatcaccgagc

SEQ ID NO: 219071 - DNA, 25 bp, Artificial
  probe
  misc_feature (1)..(25): SEQ ID NO: 1794; WAN024FSD_at; Start 297; Stop 321
gcgtatgcaaatcggttttaatgaa

SEQ ID NO: 219072 - DNA, 25 bp, Artificial
  probe
  misc_feature (1)..(25): SEQ ID NO: 1794; WAN024FSD_at; Start 218; Stop 242
gtatttcggtatcggaattgcttca

SEQ ID NO: 219073 - DNA, 25 bp, Artificial
  probe
  misc_feature (1)..(25): SEQ ID NO: 1794; WAN024FSD_at; Start 30; Stop 54
tacatcatgtcgtaaggctaaggcc

SEQ ID NO: 219074 - DNA, 25 bp, Artificial
  probe
  misc_feature (1)..(25): SEQ ID NO: 1794; WAN024FSD_at; Start 241; Stop 265
catttgattgagcagtatcctagtc

SEQ ID NO: 219075 - DNA, 25 bp, Artificial
  probe
  misc_feature (1)..(25): SEQ ID NO: 1794; WAN024FSD_at; Start 383; Stop 407
tgagagctggtattagttaactaat

SEQ ID NO: 219076 - DNA, 25 bp, Artificial
  probe
  misc_feature (1)..(25): SEQ ID NO: 1794; WAN024FSD_at; Start 360; Stop 384
gcaagaactaaaagaagcaagaatg

SEQ ID NO: 219077 - DNA, 25 bp, Artificial
  probe
  misc_feature (1)..(25): SEQ ID NO: 1794; WAN024FSD_at; Start 256; Stop 280
tatcctagtcttttgcgtcgtccaa

SEQ ID NO: 219078 - DNA, 25 bp, Artificial
  probe
  misc_feature (1)..(25): SEQ ID NO: 1794; WAN024FSD_at; Start 121; Stop 145
gaattgcaacacatcctttccttga

SEQ ID NO: 219079 - DNA, 25 bp, Artificial
  probe
  misc_feature (1)..(25): SEQ ID NO: 1794; WAN024FSD_at; Start 139; Stop 163
tccttgaccgaaaatggtactgatg

SEQ ID NO: 219080 - DNA, 25 bp, Artificial
  probe
  misc_feature (1)..(25): SEQ ID NO: 1794; WAN024FSD_at; Start 354; Stop 378
tcgtaagcaagaactaaaagaagca

SEQ ID NO: 219081 - DNA, 25 bp, Artificial
  probe
  misc_feature (1)..(25): SEQ ID NO: 1794; WAN024FSD_at; Start 46; Stop 70
gctaaggcctggttagaaaaacata

SEQ ID NO: 219082 - DNA, 25 bp, Artificial
  probe
  misc_feature (1)..(25): SEQ ID NO: 1794; WAN024FSD_at; Start 35; Stop 59
catgtcgtaaggctaaggcctggtt

SEQ ID NO: 219083 - DNA, 25 bp, Artificial
  probe
  misc_feature (1)..(25): SEQ ID NO: 1794; WAN024FSD_at; Start 229; Stop 253
tcggaattgcttcatttgattgagc

SEQ ID NO: 219084 - DNA, 25 bp, Artificial
  probe
  misc_feature (1)..(25): SEQ ID NO: 1794; WAN024FSD_at; Start 113; Stop 137
caagaaaagaattgcaacacatcct

SEQ ID NO: 219085 - DNA, 25 bp, Artificial
  probe
  misc_feature (1)..(25): SEQ ID NO: 1794; WAN024FSD_at; Start 288; Stop 312
tgatgccaagcgtatgcaaatcggt

SEQ ID NO: 219086 - DNA, 25 bp, Artificial
  probe
  misc_feature (1)..(25): SEQ ID NO: 1794; WAN024FSD_at; Start 282; Stop 306
tattattgatgccaagcgtatgcaa

SEQ ID NO: 219087 - DNA, 25 bp, Artificial
  probe
  misc_feature (1)..(25): SEQ ID NO: 7128; WAN024FSE_at; Start 28; Stop 52
tttcgtaaatataggactgaatttc

SEQ ID NO: 219088 - DNA, 25 bp, Artificial
  probe
  misc_feature (1)..(25): SEQ ID NO: 7128; WAN024FSE_at; Start 25; Stop 49
tcctttcgtaaatataggactgaat

SEQ ID NO: 219089 - DNA, 25 bp, Artificial
  probe
  misc_feature (1)..(25): SEQ ID NO: 7128; WAN024FSE_at; Start 2; Stop 26
tggaaattgcatttaagttcttttc

SEQ ID NO: 219090 - DNA, 25 bp, Artificial
  probe
  misc_feature (1)..(25): SEQ ID NO: 7128; WAN024FSE_at; Start 47; Stop 71
aatttcctcctgcatctcaagaggc

SEQ ID NO: 219091 - DNA, 25 bp, Artificial
  probe
  misc_feature (1)..(25): SEQ ID NO: 7128; WAN024FSE_at; Start 1; Stop 25
ctggaaattgcatttaagttctttt

SEQ ID NO: 219092 - DNA, 25 bp, Artificial
  probe
  misc_feature (1)..(25): SEQ ID NO: 7128; WAN024FSE_at; Start 29; Stop 53
ttcgtaaatataggactgaatttcc

SEQ ID NO: 219093 - DNA, 25 bp, Artificial
  probe
  misc_feature (1)..(25): SEQ ID NO: 7128; WAN024FSE_at; Start 38; Stop 62
ataggactgaatttcctcctgcatc

SEQ ID NO: 219094 - DNA, 25 bp, Artificial
  probe
  misc_feature (1)..(25): SEQ ID NO: 7128; WAN024FSE_at; Start 53; Stop 77
ctcctgcatctcaagaggcaccatc

SEQ ID NO: 219095 - DNA, 25 bp, Artificial
  probe
  misc_feature (1)..(25): SEQ ID NO: 7128; WAN024FSE_at; Start 43; Stop 67
actgaatttcctcctgcatctcaag

SEQ ID NO: 219096 - DNA, 25 bp, Artificial
  probe
  misc_feature (1)..(25): SEQ ID NO: 7128; WAN024FSE_at; Start 49; Stop 73
tttcctcctgcatctcaagaggcac

SEQ ID NO: 219097 - DNA, 25 bp, Artificial
  probe
  misc_feature (1)..(25): SEQ ID NO: 7128; WAN024FSE_at; Start 23; Stop 47
tttcctttcgtaaatataggactga

SEQ ID NO: 219098 - DNA, 25 bp, Artificial
  probe
  misc_feature (1)..(25): SEQ ID NO: 7128; WAN024FSE_at; Start 30; Stop 54
tcgtaaatataggactgaatttcct

SEQ ID NO: 219099 - DNA, 25 bp, Artificial
  probe
  misc_feature (1)..(25): SEQ ID NO: 7128; WAN024FSE_at; Start 24; Stop 48
ttcctttcgtaaatataggactgaa

SEQ ID NO: 219100 - DNA, 25 bp, Artificial
  probe
  misc_feature (1)..(25): SEQ ID NO: 7128; WAN024FSE_at; Start 51; Stop 75
tcctcctgcatctcaagaggcacca

SEQ ID NO: 219101 - DNA, 25 bp, Artificial
  probe
  misc_feature (1)..(25): SEQ ID NO: 7128; WAN024FSE_at; Start 32; Stop 56
gtaaatataggactgaatttcctcc

SEQ ID NO: 219102 - DNA, 25 bp, Artificial
  probe
  misc_feature (1)..(25): SEQ ID NO: 7128; WAN024FSE_at; Start 26; Stop 50
cctttcgtaaatataggactgaatt

SEQ ID NO: 219103 - DNA, 25 bp, Artificial
  probe
  misc_feature (1)..(25): SEQ ID NO: 7128; WAN024FSE_at; Start 36; Stop 60
atataggactgaatttcctcctgca

SEQ ID NO: 219104 - DNA, 25 bp, Artificial
  probe
  misc_feature (1)..(25): SEQ ID NO: 7128; WAN024FSE_at; Start 46; Stop 70
gaatttcctcctgcatctcaagagg

SEQ ID NO: 219105 - DNA, 25 bp, Artificial
  probe
  misc_feature (1)..(25): SEQ ID NO: 7128; WAN024FSE_at; Start 52; Stop 76
cctcctgcatctcaagaggcaccat

SEQ ID NO: 219106 - DNA, 25 bp, Artificial
  probe
  misc_feature (1)..(25): SEQ ID NO: 7128; WAN024FSE_at; Start 54; Stop 78
tcctgcatctcaagaggcaccatca

SEQ ID NO: 219107 - DNA, 25 bp, Artificial
  probe
  misc_feature (1)..(25): SEQ ID NO: 7128; WAN024FSE_at; Start 31; Stop 55
cgtaaatataggactgaatttcctc

SEQ ID NO: 219108 - DNA, 25 bp, Artificial
  probe
  misc_feature (1)..(25): SEQ ID NO: 7128; WAN024FSE_at; Start 37; Stop 61
tataggactgaatttcctcctgcat

SEQ ID NO: 219109 - DNA, 25 bp, Artificial
  probe
  misc_feature (1)..(25): SEQ ID NO: 7128; WAN024FSE_at; Start 39; Stop 63
taggactgaatttcctcctgcatct

SEQ ID NO: 219110 - DNA, 25 bp, Artificial
  probe
  misc_feature (1)..(25): SEQ ID NO: 7128; WAN024FSE_at; Start 27; Stop 51
ctttcgtaaatataggactgaattt

SEQ ID NO: 219111 - DNA, 25 bp, Artificial
  probe
  misc_feature (1)..(25): SEQ ID NO: 7128; WAN024FSE_at; Start 33; Stop 57
taaatataggactgaatttcctcct

SEQ ID NO: 219112 - DNA, 25 bp, Artificial
  probe
  misc_feature (1)..(25): SEQ ID NO: 7128; WAN024FSE_at; Start 41; Stop 65
ggactgaatttcctcctgcatctca

SEQ ID NO: 219113 - DNA, 25 bp, Artificial
  probe
  misc_feature (1)..(25): SEQ ID NO: 7128; WAN024FSE_at; Start 40; Stop 64
aggactgaatttcctcctgcatctc

SEQ ID NO: 219114 - DNA, 25 bp, Artificial
  probe
  misc_feature (1)..(25): SEQ ID NO: 7128; WAN024FSE_at; Start 48; Stop 72
atttcctcctgcatctcaagaggca

SEQ ID NO: 219115 - DNA, 25 bp, Artificial
  probe
  misc_feature (1)..(25): SEQ ID NO: 7128; WAN024FSE_at; Start 42; Stop 66
gactgaatttcctcctgcatctcaa

SEQ ID NO: 219116 - DNA, 25 bp, Artificial
  probe
  misc_feature (1)..(25): SEQ ID NO: 7128; WAN024FSE_at; Start 44; Stop 68
ctgaatttcctcctgcatctcaaga

SEQ ID NO: 219117 - DNA, 25 bp, Artificial
  probe
  misc_feature (1)..(25): SEQ ID NO: 7128; WAN024FSE_at; Start 35; Stop 59
aatataggactgaatttcctcctgc

SEQ ID NO: 219118 - DNA, 25 bp, Artificial
  probe
  misc_feature (1)..(25): SEQ ID NO: 7128; WAN024FSE_at; Start 34; Stop 58
aaatataggactgaatttcctcctg

SEQ ID NO: 219119 - DNA, 25 bp, Artificial
  probe
  misc_feature (1)..(25): SEQ ID NO: 7128; WAN024FSE_at; Start 50; Stop 74
ttcctcctgcatctcaagaggcacc

SEQ ID NO: 219120 - DNA, 25 bp, Artificial
  probe
  misc_feature (1)..(25): SEQ ID NO: 7128; WAN024FSE_at; Start 45; Stop 69
tgaatttcctcctgcatctcaagag

SEQ ID NO: 219121 - DNA, 25 bp, Artificial
  probe
  misc_feature (1)..(25): SEQ ID NO: 4201; WAN024FSF_at; Start 390; Stop 414
tcccctttttctttggcagcctgaa

SEQ ID NO: 219122 - DNA, 25 bp, Artificial
  probe
  misc_feature (1)..(25): SEQ ID NO: 4201; WAN024FSF_at; Start 125; Stop 149
ggatcaatgacccaaaccttgccct

SEQ ID NO: 219123 - DNA, 25 bp, Artificial
  probe
  misc_feature (1)..(25): SEQ ID NO: 4201; WAN024FSF_at; Start 354; Stop 378
caaattcaaatttactttccaagag

SEQ ID NO: 219124 - DNA, 25 bp, Artificial
  probe
  misc_feature (1)..(25): SEQ ID NO: 4201; WAN024FSF_at; Start 339; Stop 363
taacaagctctttagcaaattcaaa

SEQ ID NO: 219125 - DNA, 25 bp, Artificial
  probe
  misc_feature (1)..(25): SEQ ID NO: 4201; WAN024FSF_at; Start 237; Stop 261
gaacttctttgtccagtctggtcac

SEQ ID NO: 219126 - DNA, 25 bp, Artificial
  probe
  misc_feature (1)..(25): SEQ ID NO: 4201; WAN024FSF_at; Start 14; Stop 38
cctttgaccacatcataaatcagac

SEQ ID NO: 219127 - DNA, 25 bp, Artificial
  probe
  misc_feature (1)..(25): SEQ ID NO: 4201; WAN024FSF_at; Start 417; Stop 441
gctcggtaaagtgaatagccactaa

SEQ ID NO: 219128 - DNA, 25 bp, Artificial
  probe
  misc_feature (1)..(25): SEQ ID NO: 4201; WAN024FSF_at; Start 213; Stop 237
aaatctcaccaaccaagagttcctg

SEQ ID NO: 219129 - DNA, 25 bp, Artificial
  probe
  misc_feature (1)..(25): SEQ ID NO: 4201; WAN024FSF_at; Start 58; Stop 82
ttcaaaataagccatcataacagca

SEQ ID NO: 219130 - DNA, 25 bp, Artificial
  probe
  misc_feature (1)..(25): SEQ ID NO: 4201; WAN024FSF_at; Start 178; Stop 202
ttcagcacaaatcttatcctcagga

SEQ ID NO: 219131 - DNA, 25 bp, Artificial
  probe
  misc_feature (1)..(25): SEQ ID NO: 4201; WAN024FSF_at; Start 228; Stop 252
agagttcctgaacttctttgtccag

SEQ ID NO: 219132 - DNA, 25 bp, Artificial
  probe
  misc_feature (1)..(25): SEQ ID NO: 4201; WAN024FSF_at; Start 3; Stop 27
ggtaacaatcccctttgaccacatc

SEQ ID NO: 219133 - DNA, 25 bp, Artificial
  probe
  misc_feature (1)..(25): SEQ ID NO: 4201; WAN024FSF_at; Start 274; Stop 298
agaggacttggtttcaacacgcaag

SEQ ID NO: 219134 - DNA, 25 bp, Artificial
  probe
  misc_feature (1)..(25): SEQ ID NO: 4201; WAN024FSF_at; Start 89; Stop 113
tcctgctgggctacaaaattattgg

SEQ ID NO: 219135 - DNA, 25 bp, Artificial
  probe
  misc_feature (1)..(25): SEQ ID NO: 4201; WAN024FSF_at; Start 207; Stop 231
gggacaaaatctcaccaaccaagag

SEQ ID NO: 219136 - DNA, 25 bp, Artificial
  probe
  misc_feature (1)..(25): SEQ ID NO: 4201; WAN024FSF_at; Start 283; Stop 307
ggtttcaacacgcaagtcttcctgc

SEQ ID NO: 219137 - DNA, 25 bp, Artificial
  probe
  misc_feature (1)..(25): SEQ ID NO: 4201; WAN024FSF_at; Start 158; Stop 182
gaggctcgcagacaaccttcttcag

SEQ ID NO: 219138 - DNA, 25 bp, Artificial
  probe
  misc_feature (1)..(25): SEQ ID NO: 4201; WAN024FSF_at; Start 408; Stop 432
gcctgaactgctcggtaaagtgaat

SEQ ID NO: 219139 - DNA, 25 bp, Artificial
  probe
  misc_feature (1)..(25): SEQ ID NO: 4201; WAN024FSF_at; Start 321; Stop 345
tgtactgacctgctttcttaacaag

SEQ ID NO: 219140 - DNA, 25 bp, Artificial
  probe
  misc_feature (1)..(25): SEQ ID NO: 4201; WAN024FSF_at; Start 29; Stop 53
taaatcagaccaaactgtccctgac

SEQ ID NO: 219141 - DNA, 25 bp, Artificial
  probe
  misc_feature (1)..(25): SEQ ID NO: 4201; WAN024FSF_at; Start 68; Stop 92
gccatcataacagcaaaatcttcct

SEQ ID NO: 219142 - DNA, 25 bp, Artificial
  probe
  misc_feature (1)..(25): SEQ ID NO: 4201; WAN024FSF_at; Start 44; Stop 68
tgtccctgaccattttcaaaataag

SEQ ID NO: 219143 - DNA, 25 bp, Artificial
  probe
  misc_feature (1)..(25): SEQ ID NO: 4201; WAN024FSF_at; Start 102; Stop 126
caaaattattggtaccatcaatggg

SEQ ID NO: 219144 - DNA, 25 bp, Artificial
  probe
  misc_feature (1)..(25): SEQ ID NO: 4201; WAN024FSF_at; Start 248; Stop 272
tccagtctggtcaccaaatctgttg

SEQ ID NO: 219145 - DNA, 25 bp, Artificial
  probe
  misc_feature (1)..(25): SEQ ID NO: 4201; WAN024FSF_at; Start 80; Stop 104
gcaaaatcttcctgctgggctacaa

SEQ ID NO: 219146 - DNA, 25 bp, Artificial
  probe
  misc_feature (1)..(25): SEQ ID NO: 4201; WAN024FSF_at; Start 192; Stop 216
tatcctcaggataacgggacaaaat

SEQ ID NO: 219147 - DNA, 25 bp, Artificial
  probe
  misc_feature (1)..(25): SEQ ID NO: 4201; WAN024FSF_at; Start 198; Stop 222
caggataacgggacaaaatctcacc

SEQ ID NO: 219148 - DNA, 25 bp, Artificial
  probe
  misc_feature (1)..(25): SEQ ID NO: 4201; WAN024FSF_at; Start 294; Stop 318
gcaagtcttcctgcatatggtcaag

SEQ ID NO: 219149 - DNA, 25 bp, Artificial
  probe
  misc_feature (1)..(25): SEQ ID NO: 4201; WAN024FSF_at; Start 309; Stop 333
tatggtcaagaatgtactgacctgc

SEQ ID NO: 219150 - DNA, 25 bp, Artificial
  probe
  misc_feature (1)..(25): SEQ ID NO: 4201; WAN024FSF_at; Start 165; Stop 189
gcagacaaccttcttcagcacaaat

SEQ ID NO: 219151 - DNA, 25 bp, Artificial
  probe
  misc_feature (1)..(25): SEQ ID NO: 4201; WAN024FSF_at; Start 137; Stop 161
caaaccttgccctcttgaaccgagg

SEQ ID NO: 219152 - DNA, 25 bp, Artificial
  probe
  misc_feature (1)..(25): SEQ ID NO: 4201; WAN024FSF_at; Start 399; Stop 423
tctttggcagcctgaactgctcggt

SEQ ID NO: 219153 - DNA, 25 bp, Artificial
  probe
  misc_feature (1)..(25): SEQ ID NO: 4201; WAN024FSF_at; Start 152; Stop 176
tgaaccgaggctcgcagacaacctt

SEQ ID NO: 219154 - DNA, 25 bp, Artificial
  probe
  misc_feature (1)..(25): SEQ ID NO: 4201; WAN024FSF_at; Start 114; Stop 138
taccatcaatgggatcaatgaccca

SEQ ID NO: 219155 - DNA, 25 bp, Artificial
  probe
  misc_feature (1)..(25): SEQ ID NO: 1001; WAN024FSG_at; Start 70; Stop 94
ttttttaatgatgttgaagctgcct

SEQ ID NO: 219156 - DNA, 25 bp, Artificial
  probe
  misc_feature (1)..(25): SEQ ID NO: 1001; WAN024FSG_at; Start 32; Stop 56
tgtcgtggagcactgaagaacttgc

SEQ ID NO: 219157 - DNA, 25 bp, Artificial
  probe
  misc_feature (1)..(25): SEQ ID NO: 1001; WAN024FSG_at; Start 133; Stop 157
tataagggattcaaagcggtcgtgc

SEQ ID NO: 219158 - DNA, 25 bp, Artificial
  probe
  misc_feature (1)..(25): SEQ ID NO: 1001; WAN024FSG_at; Start 208; Stop 232
ggctattcactttaccgagcagttc

SEQ ID NO: 219159 - DNA, 25 bp, Artificial
  probe
  misc_feature (1)..(25): SEQ ID NO: 1001; WAN024FSG_at; Start 228; Stop 252
agttcaggctgccaaagaaaaaggg

SEQ ID NO: 219160 - DNA, 25 bp, Artificial
  probe
  misc_feature (1)..(25): SEQ ID NO: 1001; WAN024FSG_at; Start 140; Stop 164
gattcaaagcggtcgtgccaagcaa

SEQ ID NO: 219161 - DNA, 25 bp, Artificial
  probe
  misc_feature (1)..(25): SEQ ID NO: 1001; WAN024FSG_at; Start 92; Stop 116
cctatgaaggcaaagtagaggctaa

SEQ ID NO: 219162 - DNA, 25 bp, Artificial
  probe
  misc_feature (1)..(25): SEQ ID NO: 1001; WAN024FSG_at; Start 3; Stop 27
gaacaaacagtatagttacccacta

SEQ ID NO: 219163 - DNA, 25 bp, Artificial
  probe
  misc_feature (1)..(25): SEQ ID NO: 1001; WAN024FSG_at; Start 23; Stop 47
cactagatttgtcgtggagcactga

SEQ ID NO: 219164 - DNA, 25 bp, Artificial
  probe
  misc_feature (1)..(25): SEQ ID NO: 1001; WAN024FSG_at; Start 130; Stop 154
tcctataagggattcaaagcggtcg

SEQ ID NO: 219165 - DNA, 25 bp, Artificial
  probe
  misc_feature (1)..(25): SEQ ID NO: 1001; WAN024FSG_at; Start 118; Stop 142
aagttactggactcctataagggat

SEQ ID NO: 219166 - DNA, 25 bp, Artificial
  probe
  misc_feature (1)..(25): SEQ ID NO: 1001; WAN024FSG_at; Start 149; Stop 173
cggtcgtgccaagcaagagcgaaga

SEQ ID NO: 219167 - DNA, 25 bp, Artificial
  probe
  misc_feature (1)..(25): SEQ ID NO: 1001; WAN024FSG_at; Start 78; Stop 102
tgatgttgaagctgcctatgaaggc

SEQ ID NO: 219168 - DNA, 25 bp, Artificial
  probe
  misc_feature (1)..(25): SEQ ID NO: 1001; WAN024FSG_at; Start 162; Stop 186
caagagcgaagagaaacgtttggga

SEQ ID NO: 219169 - DNA, 25 bp, Artificial
  probe
  misc_feature (1)..(25): SEQ ID NO: 1001; WAN024FSG_at; Start 19; Stop 43
tacccactagatttgtcgtggagca

SEQ ID NO: 219170 - DNA, 25 bp, Artificial
  probe
  misc_feature (1)..(25): SEQ ID NO: 1001; WAN024FSG_at; Start 143; Stop 167
tcaaagcggtcgtgccaagcaagag

SEQ ID NO: 219171 - DNA, 25 bp, Artificial
  probe
  misc_feature (1)..(25): SEQ ID NO: 1001; WAN024FSG_at; Start 112; Stop 136
gctaaaaagttactggactcctata

SEQ ID NO: 219172 - DNA, 25 bp, Artificial
  probe
  misc_feature (1)..(25): SEQ ID NO: 1001; WAN024FSG_at; Start 107; Stop 131
tagaggctaaaaagttactggactc

SEQ ID NO: 219173 - DNA, 25 bp, Artificial
  probe
  misc_feature (1)..(25): SEQ ID NO: 1001; WAN024FSG_at; Start 214; Stop 238
tcactttaccgagcagttcaggctg

SEQ ID NO: 219174 - DNA, 25 bp, Artificial
  probe
  misc_feature (1)..(25): SEQ ID NO: 1001; WAN024FSG_at; Start 81; Stop 105
tgttgaagctgcctatgaaggcaaa

SEQ ID NO: 219175 - DNA, 25 bp, Artificial
  probe
  misc_feature (1)..(25): SEQ ID NO: 1001; WAN024FSG_at; Start 12; Stop 36
gtatagttacccactagatttgtcg

SEQ ID NO: 219176 - DNA, 25 bp, Artificial
  probe
  misc_feature (1)..(25): SEQ ID NO: 1001; WAN024FSG_at; Start 26; Stop 50
tagatttgtcgtggagcactgaaga

SEQ ID NO: 219177 - DNA, 25 bp, Artificial
  probe
  misc_feature (1)..(25): SEQ ID NO: 1001; WAN024FSG_at; Start 155; Stop 179
tgccaagcaagagcgaagagaaacg

SEQ ID NO: 219178 - DNA, 25 bp, Artificial
  probe
  misc_feature (1)..(25): SEQ ID NO: 1001; WAN024FSG_at; Start 96; Stop 120
tgaaggcaaagtagaggctaaaaag

SEQ ID NO: 219179 - DNA, 25 bp, Artificial
  probe
  misc_feature (1)..(25): SEQ ID NO: 1001; WAN024FSG_at; Start 35; Stop 59
cgtggagcactgaagaacttgcttc

SEQ ID NO: 219180 - DNA, 25 bp, Artificial
  probe
  misc_feature (1)..(25): SEQ ID NO: 1001; WAN024FSG_at; Start 204; Stop 228
tagtggctattcactttaccgagca

SEQ ID NO: 219181 - DNA, 25 bp, Artificial
  probe
  misc_feature (1)..(25): SEQ ID NO: 1001; WAN024FSG_at; Start 158; Stop 182
caagcaagagcgaagagaaacgttt

SEQ ID NO: 219182 - DNA, 25 bp, Artificial
  probe
  misc_feature (1)..(25): SEQ ID NO: 1001; WAN024FSG_at; Start 193; Stop 217
tttgaaacggttagtggctattcac

SEQ ID NO: 219183 - DNA, 25 bp, Artificial
  probe
  misc_feature (1)..(25): SEQ ID NO: 1001; WAN024FSG_at; Start 46; Stop 70
gaagaacttgcttcagtgctttctt

SEQ ID NO: 219184 - DNA, 25 bp, Artificial
  probe
  misc_feature (1)..(25): SEQ ID NO: 1001; WAN024FSG_at; Start 135; Stop 159
taagggattcaaagcggtcgtgcca

SEQ ID NO: 219185 - DNA, 25 bp, Artificial
  probe
  misc_feature (1)..(25): SEQ ID NO: 1001; WAN024FSG_at; Start 122; Stop 146
tactggactcctataagggattcaa

SEQ ID NO: 219186 - DNA, 25 bp, Artificial
  probe
  misc_feature (1)..(25): SEQ ID NO: 1001; WAN024FSG_at; Start 224; Stop 248
gagcagttcaggctgccaaagaaaa

SEQ ID NO: 219187 - DNA, 25 bp, Artificial
  probe
  misc_feature (1)..(25): SEQ ID NO: 1001; WAN024FSG_at; Start 187; Stop 211
cgagaatttgaaacggttagtggct

SEQ ID NO: 219188 - DNA, 25 bp, Artificial
  probe
  misc_feature (1)..(25): SEQ ID NO: 1001; WAN024FSG_at; Start 220; Stop 244
taccgagcagttcaggctgccaaag

SEQ ID NO: 219189 - DNA, 25 bp, Artificial
  probe
  misc_feature (1)..(25): SEQ ID NO: 5434; WAN024FSH_at; Start 598; Stop 622
tatctgcaaccatgggattatgccg

SEQ ID NO: 219190 - DNA, 25 bp, Artificial
  probe
  misc_feature (1)..(25): SEQ ID NO: 5434; WAN024FSH_at; Start 738; Stop 762
aattcagtcctatatttacgaaagg

SEQ ID NO: 219191 - DNA, 25 bp, Artificial
  probe
  misc_feature (1)..(25): SEQ ID NO: 5434; WAN024FSH_at; Start 469; Stop 493
ggtatgctggaaaccaatgaatggg

SEQ ID NO: 219192 - DNA, 25 bp, Artificial
  probe
  misc_feature (1)..(25): SEQ ID NO: 5434; WAN024FSH_at; Start 437; Stop 461
cacttggagattttctcattgcagg

SEQ ID NO: 219193 - DNA, 25 bp, Artificial
  probe
  misc_feature (1)..(25): SEQ ID NO: 5434; WAN024FSH_at; Start 263; Stop 287
ccaataattttgtagcccagcagga

SEQ ID NO: 219194 - DNA, 25 bp, Artificial
  probe
  misc_feature (1)..(25): SEQ ID NO: 5434; WAN024FSH_at; Start 273; Stop 297
tgtagcccagcaggaagattttgct

SEQ ID NO: 219195 - DNA, 25 bp, Artificial
  probe
  misc_feature (1)..(25): SEQ ID NO: 5434; WAN024FSH_at; Start 708; Stop 732
catgatggtgcctcttgagatgcag

SEQ ID NO: 219196 - DNA, 25 bp, Artificial
  probe
  misc_feature (1)..(25): SEQ ID NO: 5434; WAN024FSH_at; Start 22; Stop 46
gctaaagagcttgttaagaaagcag

SEQ ID NO: 219197 - DNA, 25 bp, Artificial
  probe
  misc_feature (1)..(25): SEQ ID NO: 5434; WAN024FSH_at; Start 339; Stop 363
tctgatttatgatgtggtcaaaggg

SEQ ID NO: 219198 - DNA, 25 bp, Artificial
  probe
  misc_feature (1)..(25): SEQ ID NO: 5434; WAN024FSH_at; Start 49; Stop 73
cagtacattcttgaccatatgcagg

SEQ ID NO: 219199 - DNA, 25 bp, Artificial
  probe
  misc_feature (1)..(25): SEQ ID NO: 5434; WAN024FSH_at; Start 242; Stop 266
tcattgatcccattgatggtaccaa

SEQ ID NO: 219200 - DNA, 25 bp, Artificial
  probe
  misc_feature (1)..(25): SEQ ID NO: 5434; WAN024FSH_at; Start 195; Stop 219
tgaagaaggttgtctgcgagcctcg

SEQ ID NO: 219201 - DNA, 25 bp, Artificial
  probe
  misc_feature (1)..(25): SEQ ID NO: 5434; WAN024FSH_at; Start 174; Stop 198
tcctgaggataagatttgtgctgaa

SEQ ID NO: 219202 - DNA, 25 bp, Artificial
  probe
  misc_feature (1)..(25): SEQ ID NO: 5434; WAN024FSH_at; Start 229; Stop 253
ggcaaggtttgggtcattgatccca

SEQ ID NO: 219203 - DNA, 25 bp, Artificial
  probe
  misc_feature (1)..(25): SEQ ID NO: 5434; WAN024FSH_at; Start 607; Stop 631
ccatgggattatgccgcagctagta

SEQ ID NO: 219204 - DNA, 25 bp, Artificial
  probe
  misc_feature (1)..(25): SEQ ID NO: 5434; WAN024FSH_at; Start 134; Stop 158
aagttcaggaactcttggttggtga

SEQ ID NO: 219205 - DNA, 25 bp, Artificial
  probe
  misc_feature (1)..(25): SEQ ID NO: 5434; WAN024FSH_at; Start 308; Stop 332
cttattttgaaaatggtcagggaca

SEQ ID NO: 219206 - DNA, 25 bp, Artificial
  probe
  misc_feature (1)..(25): SEQ ID NO: 5434; WAN024FSH_at; Start 104; Stop 128
caacagatttggtgaccagactgga

SEQ ID NO: 219207 - DNA, 25 bp, Artificial
  probe
  misc_feature (1)..(25): SEQ ID NO: 5434; WAN024FSH_at; Start 78; Stop 102
cttgcgtgttgaaaccaagtcctct

SEQ ID NO: 219208 - DNA, 25 bp, Artificial
  probe
  misc_feature (1)..(25): SEQ ID NO: 5434; WAN024FSH_at; Start 646; Stop 670
ctgggctatcgggttgtgacccttt

SEQ ID NO: 219209 - DNA, 25 bp, Artificial
  probe
  misc_feature (1)..(25): SEQ ID NO: 5434; WAN024FSH_at; Start 145; Stop 169
ctcttggttggtgagattttgtccc

SEQ ID NO: 219210 - DNA, 25 bp, Artificial
  probe
  misc_feature (1)..(25): SEQ ID NO: 5434; WAN024FSH_at; Start 325; Stop 349
cagggacagtttggtctgatttatg

SEQ ID NO: 219211 - DNA, 25 bp, Artificial
  probe
  misc_feature (1)..(25): SEQ ID NO: 5434; WAN024FSH_at; Start 539; Stop 563
gaagtgcggccattagttttgccaa

SEQ ID NO: 219212 - DNA, 25 bp, Artificial
  probe
  misc_feature (1)..(25): SEQ ID NO: 5434; WAN024FSH_at; Start 552; Stop 576
tagttttgccaagattttgtcaggg

SEQ ID NO: 219213 - DNA, 25 bp, Artificial
  probe
  misc_feature (1)..(25): SEQ ID NO: 5434; WAN024FSH_at; Start 158; Stop 182
agattttgtcccgttatcctgagga

SEQ ID NO: 219214 - DNA, 25 bp, Artificial
  probe
  misc_feature (1)..(25): SEQ ID NO: 5434; WAN024FSH_at; Start 525; Stop 549
tgttcgtgtctatggaagtgcggcc

SEQ ID NO: 219215 - DNA, 25 bp, Artificial
  probe
  misc_feature (1)..(25): SEQ ID NO: 5434; WAN024FSH_at; Start 662; Stop 686
tgaccctttttggtgaagctcctga

SEQ ID NO: 219216 - DNA, 25 bp, Artificial
  probe
  misc_feature (1)..(25): SEQ ID NO: 5434; WAN024FSH_at; Start 452; Stop 476
tcattgcagggaatagtggtatgct

SEQ ID NO: 219217 - DNA, 25 bp, Artificial
  probe
  misc_feature (1)..(25): SEQ ID NO: 5434; WAN024FSH_at; Start 119; Stop 143
ccagactggacaaagaagttcagga

SEQ ID NO: 219218 - DNA, 25 bp, Artificial
  probe
  misc_feature (1)..(25): SEQ ID NO: 5434; WAN024FSH_at; Start 61; Stop 85
gaccatatgcaggaagacttgcgtg

SEQ ID NO: 219219 - DNA, 25 bp, Artificial
  probe
  misc_feature (1)..(25): SEQ ID NO: 5434; WAN024FSH_at; Start 676; Stop 700
gaagctcctgattttcaaaccagac

SEQ ID NO: 219220 - DNA, 25 bp, Artificial
  probe
  misc_feature (1)..(25): SEQ ID NO: 5434; WAN024FSH_at; Start 723; Stop 747
tgagatgcaggaggaaattcagtcc

SEQ ID NO: 219221 - DNA, 25 bp, Artificial
  probe
  misc_feature (1)..(25): SEQ ID NO: 5434; WAN024FSH_at; Start 383; Stop 407
gggaatttccagtttgtctaaatga

SEQ ID NO: 219222 - DNA, 25 bp, Artificial
  probe
  misc_feature (1)..(25): SEQ ID NO: 5434; WAN024FSH_at; Start 209; Stop 233
tgcgagcctcggttcaagagggcaa

SEQ ID NO: 219223 - DNA, 25 bp, Artificial
  probe
  misc_feature (1)..(25): SEQ ID NO: 7448; WAN024FSI_at; Start 78; Stop 102
aacagccgttatggattctccacga

SEQ ID NO: 219224 - DNA, 25 bp, Artificial
  probe
  misc_feature (1)..(25): SEQ ID NO: 7448; WAN024FSI_at; Start 63; Stop 87
caaggcagttgagccaacagccgtt

SEQ ID NO: 219225 - DNA, 25 bp, Artificial
  probe
  misc_feature (1)..(25): SEQ ID NO: 7448; WAN024FSI_at; Start 60; Stop 84
ttgcaaggcagttgagccaacagcc

SEQ ID NO: 219226 - DNA, 25 bp, Artificial
  probe
  misc_feature (1)..(25): SEQ ID NO: 7448; WAN024FSI_at; Start 75; Stop 99
gccaacagccgttatggattctcca

SEQ ID NO: 219227 - DNA, 25 bp, Artificial
  probe
  misc_feature (1)..(25): SEQ ID NO: 7448; WAN024FSI_at; Start 130; Stop 154
caagccgtcagccaaaaagcgataa

SEQ ID NO: 219228 - DNA, 25 bp, Artificial
  probe
  misc_feature (1)..(25): SEQ ID NO: 7448; WAN024FSI_at; Start 182; Stop 206
tcactgtttttctcctcgaaaataa

SEQ ID NO: 219229 - DNA, 25 bp, Artificial
  probe
  misc_feature (1)..(25): SEQ ID NO: 7448; WAN024FSI_at; Start 100; Stop 124
cgatcaatccagctagcacagccta

SEQ ID NO: 219230 - DNA, 25 bp, Artificial
  probe
  misc_feature (1)..(25): SEQ ID NO: 7448; WAN024FSI_at; Start 27; Stop 51
gccaaattcatctgccgctacttca

SEQ ID NO: 219231 - DNA, 25 bp, Artificial
  probe
  misc_feature (1)..(25): SEQ ID NO: 7448; WAN024FSI_at; Start 82; Stop 106
gccgttatggattctccacgatcaa

SEQ ID NO: 219232 - DNA, 25 bp, Artificial
  probe
  misc_feature (1)..(25): SEQ ID NO: 7448; WAN024FSI_at; Start 37; Stop 61
tctgccgctacttcaaccaagggtt

SEQ ID NO: 219233 - DNA, 25 bp, Artificial
  probe
  misc_feature (1)..(25): SEQ ID NO: 7448; WAN024FSI_at; Start 126; Stop 150
taaacaagccgtcagccaaaaagcg

SEQ ID NO: 219234 - DNA, 25 bp, Artificial
  probe
  misc_feature (1)..(25): SEQ ID NO: 7448; WAN024FSI_at; Start 17; Stop 41
catggatcgtgccaaattcatctgc

SEQ ID NO: 219235 - DNA, 25 bp, Artificial
  probe
  misc_feature (1)..(25): SEQ ID NO: 7448; WAN024FSI_at; Start 40; Stop 64
gccgctacttcaaccaagggttgca

SEQ ID NO: 219236 - DNA, 25 bp, Artificial
  probe
  misc_feature (1)..(25): SEQ ID NO: 7448; WAN024FSI_at; Start 194; Stop 218
tcctcgaaaataattatgaatactg

SEQ ID NO: 219237 - DNA, 25 bp, Artificial
  probe
  misc_feature (1)..(25): SEQ ID NO: 7448; WAN024FSI_at; Start 49; Stop 73
tcaaccaagggttgcaaggcagttg

SEQ ID NO: 219238 - DNA, 25 bp, Artificial
  probe
  misc_feature (1)..(25): SEQ ID NO: 7448; WAN024FSI_at; Start 113; Stop 137
tagcacagcctactaaacaagccgt

SEQ ID NO: 219239 - DNA, 25 bp, Artificial
  probe
  misc_feature (1)..(25): SEQ ID NO: 7448; WAN024FSI_at; Start 45; Stop 69
tacttcaaccaagggttgcaaggca

SEQ ID NO: 219240 - DNA, 25 bp, Artificial
  probe
  misc_feature (1)..(25): SEQ ID NO: 7448; WAN024FSI_at; Start 91; Stop 115
gattctccacgatcaatccagctag

SEQ ID NO: 219241 - DNA, 25 bp, Artificial
  probe
  misc_feature (1)..(25): SEQ ID NO: 7448; WAN024FSI_at; Start 34; Stop 58
tcatctgccgctacttcaaccaagg

SEQ ID NO: 219242 - DNA, 25 bp, Artificial
  probe
  misc_feature (1)..(25): SEQ ID NO: 7448; WAN024FSI_at; Start 155; Stop 179
gagacagagcaagcttttttctttt

SEQ ID NO: 219243 - DNA, 25 bp, Artificial
  probe
  misc_feature (1)..(25): SEQ ID NO: 7448; WAN024FSI_at; Start 68; Stop 92
cagttgagccaacagccgttatgga

SEQ ID NO: 219244 - DNA, 25 bp, Artificial
  probe
  misc_feature (1)..(25): SEQ ID NO: 7448; WAN024FSI_at; Start 54; Stop 78
caagggttgcaaggcagttgagcca

SEQ ID NO: 219245 - DNA, 25 bp, Artificial
  probe
  misc_feature (1)..(25): SEQ ID NO: 7448; WAN024FSI_at; Start 104; Stop 128
caatccagctagcacagcctactaa

SEQ ID NO: 219246 - DNA, 25 bp, Artificial
  probe
  misc_feature (1)..(25): SEQ ID NO: 7448; WAN024FSI_at; Start 6; Stop 30
cgtttttccaacatggatcgtgcca

SEQ ID NO: 219247 - DNA, 25 bp, Artificial
  probe
  misc_feature (1)..(25): SEQ ID NO: 7448; WAN024FSI_at; Start 116; Stop 140
cacagcctactaaacaagccgtcag

SEQ ID NO: 219248 - DNA, 25 bp, Artificial
  probe
  misc_feature (1)..(25): SEQ ID NO: 7448; WAN024FSI_at; Start 1; Stop 25
ttgaccgtttttccaacatggatcg

SEQ ID NO: 219249 - DNA, 25 bp, Artificial
  probe
  misc_feature (1)..(25): SEQ ID NO: 7448; WAN024FSI_at; Start 120; Stop 144
gcctactaaacaagccgtcagccaa

SEQ ID NO: 219250 - DNA, 25 bp, Artificial
  probe
  misc_feature (1)..(25): SEQ ID NO: 7448; WAN024FSI_at; Start 198; Stop 222
cgaaaataattatgaatactgtgaa

SEQ ID NO: 219251 - DNA, 25 bp, Artificial
  probe
  misc_feature (1)..(25): SEQ ID NO: 7448; WAN024FSI_at; Start 144; Stop 168
aaaagcgataagagacagagcaagc

SEQ ID NO: 219252 - DNA, 25 bp, Artificial
  probe
  misc_feature (1)..(25): SEQ ID NO: 7448; WAN024FSI_at; Start 12; Stop 36
tccaacatggatcgtgccaaattca

SEQ ID NO: 219253 - DNA, 25 bp, Artificial
  probe
  misc_feature (1)..(25): SEQ ID NO: 7448; WAN024FSI_at; Start 149; Stop 173
cgataagagacagagcaagcttttt

SEQ ID NO: 219254 - DNA, 25 bp, Artificial
  probe
  misc_feature (1)..(25): SEQ ID NO: 7448; WAN024FSI_at; Start 133; Stop 157
gccgtcagccaaaaagcgataagag

SEQ ID NO: 219255 - DNA, 25 bp, Artificial
  probe
  misc_feature (1)..(25): SEQ ID NO: 7448; WAN024FSI_at; Start 96; Stop 120
tccacgatcaatccagctagcacag

SEQ ID NO: 219256 - DNA, 25 bp, Artificial
  probe
  misc_feature (1)..(25): SEQ ID NO: 7448; WAN024FSI_at; Start 21; Stop 45
gatcgtgccaaattcatctgccgct

SEQ ID NO: 219257 - DNA, 25 bp, Artificial
  probe
  misc_feature (1)..(25): SEQ ID NO: 3831; WAN024FSJ_at; Start 563; Stop 587
caatcgtatcaaaaagtccaggagc

SEQ ID NO: 219258 - DNA, 25 bp, Artificial
  probe
  misc_feature (1)..(25): SEQ ID NO: 3831; WAN024FSJ_at; Start 616; Stop 640
gatgattcggtcaaaagcatgaagt

SEQ ID NO: 219259 - DNA, 25 bp, Artificial
  probe
  misc_feature (1)..(25): SEQ ID NO: 3831; WAN024FSJ_at; Start 685; Stop 709
tggcccttgtggtcttatgagcata

SEQ ID NO: 219260 - DNA, 25 bp, Artificial
  probe
  misc_feature (1)..(25): SEQ ID NO: 3831; WAN024FSJ_at; Start 531; Stop 555
tcaggagcaggattcaaatggagcg

SEQ ID NO: 219261 - DNA, 25 bp, Artificial
  probe
  misc_feature (1)..(25): SEQ ID NO: 3831; WAN024FSJ_at; Start 387; Stop 411
tcaaatcttcataggtgaggtaacc

SEQ ID NO: 219262 - DNA, 25 bp, Artificial
  probe
  misc_feature (1)..(25): SEQ ID NO: 3831; WAN024FSJ_at; Start 140; Stop 164
tagcggcagatgaatttggcacgat

SEQ ID NO: 219263 - DNA, 25 bp, Artificial
  probe
  misc_feature (1)..(25): SEQ ID NO: 3831; WAN024FSJ_at; Start 30; Stop 54
tcttatcgctttttggctgacggct

SEQ ID NO: 219264 - DNA, 25 bp, Artificial
  probe
  misc_feature (1)..(25): SEQ ID NO: 3831; WAN024FSJ_at; Start 478; Stop 502
tctcgtgctacctttgatactgtca

SEQ ID NO: 219265 - DNA, 25 bp, Artificial
  probe
  misc_feature (1)..(25): SEQ ID NO: 3831; WAN024FSJ_at; Start 446; Stop 470
tctctgttatcaatcgggcagccgg

SEQ ID NO: 219266 - DNA, 25 bp, Artificial
  probe
  misc_feature (1)..(25): SEQ ID NO: 3831; WAN024FSJ_at; Start 320; Stop 344
tagctggcttggctctgattgtcaa

SEQ ID NO: 219267 - DNA, 25 bp, Artificial
  probe
  misc_feature (1)..(25): SEQ ID NO: 3831; WAN024FSJ_at; Start 838; Stop 862
gatgctgccggaactgtgacagtgt

SEQ ID NO: 219268 - DNA, 25 bp, Artificial
  probe
  misc_feature (1)..(25): SEQ ID NO: 3831; WAN024FSJ_at; Start 430; Stop 454
ggtaaggacttacccatctctgtta

SEQ ID NO: 219269 - DNA, 25 bp, Artificial
  probe
  misc_feature (1)..(25): SEQ ID NO: 3831; WAN024FSJ_at; Start 824; Stop 848
tgaaggttgaaaaagatgctgccgg

SEQ ID NO: 219270 - DNA, 25 bp, Artificial
  probe
  misc_feature (1)..(25): SEQ ID NO: 3831; WAN024FSJ_at; Start 205; Stop 229
ggtacaggcttgtcccaggttcagt

SEQ ID NO: 219271 - DNA, 25 bp, Artificial
  probe
  misc_feature (1)..(25): SEQ ID NO: 3831; WAN024FSJ_at; Start 545; Stop 569
caaatggagcggtaaaatcaatcgt

SEQ ID NO: 219272 - DNA, 25 bp, Artificial
  probe
  misc_feature (1)..(25): SEQ ID NO: 3831; WAN024FSJ_at; Start 47; Stop 71
tgacggcttgtttagtaggctgtgc

SEQ ID NO: 219273 - DNA, 25 bp, Artificial
  probe
  misc_feature (1)..(25): SEQ ID NO: 3831; WAN024FSJ_at; Start 260; Stop 284
tatttgctgaggaaaaagacggaat

SEQ ID NO: 219274 - DNA, 25 bp, Artificial
  probe
  misc_feature (1)..(25): SEQ ID NO: 3831; WAN024FSJ_at; Start 62; Stop 86
taggctgtgctagctggattgatcg

SEQ ID NO: 219275 - DNA, 25 bp, Artificial
  probe
  misc_feature (1)..(25): SEQ ID NO: 3831; WAN024FSJ_at; Start 81; Stop 105
tgatcgtggagaatccataacggct

SEQ ID NO: 219276 - DNA, 25 bp, Artificial
  probe
  misc_feature (1)..(25): SEQ ID NO: 3831; WAN024FSJ_at; Start 776; Stop 800
cccaagaagggattgtcaaaggatt

SEQ ID NO: 219277 - DNA, 25 bp, Artificial
  probe
  misc_feature (1)..(25): SEQ ID NO: 3831; WAN024FSJ_at; Start 166; Stop 190
catgttggaaaaacggtcaatgtcc

SEQ ID NO: 219278 - DNA, 25 bp, Artificial
  probe
  misc_feature (1)..(25): SEQ ID NO: 3831; WAN024FSJ_at; Start 762; Stop 786
tctctcggatgagacccaagaaggg

SEQ ID NO: 219279 - DNA, 25 bp, Artificial
  probe
  misc_feature (1)..(25): SEQ ID NO: 3831; WAN024FSJ_at; Start 856; Stop 880
acagtgttggaagggagacaataac

SEQ ID NO: 219280 - DNA, 25 bp, Artificial
  probe
  misc_feature (1)..(25): SEQ ID NO: 3831; WAN024FSJ_at; Start 498; Stop 522
tgtcattatggaaggtcagtctgcc

SEQ ID NO: 219281 - DNA, 25 bp, Artificial
  probe
  misc_feature (1)..(25): SEQ ID NO: 3831; WAN024FSJ_at; Start 109; Stop 133
ggctcaactgccttgcaacccttgg

SEQ ID NO: 219282 - DNA, 25 bp, Artificial
  probe
  misc_feature (1)..(25): SEQ ID NO: 3831; WAN024FSJ_at; Start 124; Stop 148
caacccttggttgaagtagcggcag

SEQ ID NO: 219283 - DNA, 25 bp, Artificial
  probe
  misc_feature (1)..(25): SEQ ID NO: 3831; WAN024FSJ_at; Start 728; Stop 752
ccaatgagttggctgcagaatttct

SEQ ID NO: 219284 - DNA, 25 bp, Artificial
  probe
  misc_feature (1)..(25): SEQ ID NO: 3831; WAN024FSJ_at; Start 300; Stop 324
tgttgaccacaaggtcgcggtagct

SEQ ID NO: 219285 - DNA, 25 bp, Artificial
  probe
  misc_feature (1)..(25): SEQ ID NO: 3831; WAN024FSJ_at; Start 286; Stop 310
gatgcttctgctcttgttgaccaca

SEQ ID NO: 219286 - DNA, 25 bp, Artificial
  probe
  misc_feature (1)..(25): SEQ ID NO: 3831; WAN024FSJ_at; Start 642; Stop 666
gaatggctatgacttaagtccagaa

SEQ ID NO: 219287 - DNA, 25 bp, Artificial
  probe
  misc_feature (1)..(25): SEQ ID NO: 3831; WAN024FSJ_at; Start 513; Stop 537
tcagtctgccatgcaaagtcaggag

SEQ ID NO: 219288 - DNA, 25 bp, Artificial
  probe
  misc_feature (1)..(25): SEQ ID NO: 3831; WAN024FSJ_at; Start 96; Stop 120
cataacggctgttggctcaactgcc

SEQ ID NO: 219289 - DNA, 25 bp, Artificial
  probe
  misc_feature (1)..(25): SEQ ID NO: 3831; WAN024FSJ_at; Start 14; Stop 38
aaaagcttgctctgtctcttatcgc

SEQ ID NO: 219290 - DNA, 25 bp, Artificial
  probe
  misc_feature (1)..(25): SEQ ID NO: 3831; WAN024FSJ_at; Start 355; Stop 379
gatgttgataacctaacgacagagc

SEQ ID NO: 219291 - DNA, 25 bp, Artificial
  probe
  misc_feature (1)..(25): SEQ ID NO: 1380; WAN024FSK_at; Start 56; Stop 80
tggtcaaggaagttgggataacagc

SEQ ID NO: 219292 - DNA, 25 bp, Artificial
  probe
  misc_feature (1)..(25): SEQ ID NO: 1380; WAN024FSK_at; Start 82; Stop 106
gagtttccgacaaccatctggatag

SEQ ID NO: 219293 - DNA, 25 bp, Artificial
  probe
  misc_feature (1)..(25): SEQ ID NO: 1380; WAN024FSK_at; Start 131; Stop 155
ccatcccaaagaccactgcagtgaa

SEQ ID NO: 219294 - DNA, 25 bp, Artificial
  probe
  misc_feature (1)..(25): SEQ ID NO: 1380; WAN024FSK_at; Start 79; Stop 103
gctgagtttccgacaaccatctgga

SEQ ID NO: 219295 - DNA, 25 bp, Artificial
  probe
  misc_feature (1)..(25): SEQ ID NO: 1380; WAN024FSK_at; Start 210; Stop 234
ggctcccatagcgaaactggcttca

SEQ ID NO: 219296 - DNA, 25 bp, Artificial
  probe
  misc_feature (1)..(25): SEQ ID NO: 1380; WAN024FSK_at; Start 207; Stop 231
agtggctcccatagcgaaactggct

SEQ ID NO: 219297 - DNA, 25 bp, Artificial
  probe
  misc_feature (1)..(25): SEQ ID NO: 1380; WAN024FSK_at; Start 183; Stop 207
cacacgccagatagtctgccagcga

SEQ ID NO: 219298 - DNA, 25 bp, Artificial
  probe
  misc_feature (1)..(25): SEQ ID NO: 1380; WAN024FSK_at; Start 74; Stop 98
taacagctgagtttccgacaaccat

SEQ ID NO: 219299 - DNA, 25 bp, Artificial
  probe
  misc_feature (1)..(25): SEQ ID NO: 1380; WAN024FSK_at; Start 216; Stop 240
catagcgaaactggcttcacgataa

SEQ ID NO: 219300 - DNA, 25 bp, Artificial
  probe
  misc_feature (1)..(25): SEQ ID NO: 1380; WAN024FSK_at; Start 194; Stop 218
tagtctgccagcgagtggctcccat

SEQ ID NO: 219301 - DNA, 25 bp, Artificial
  probe
  misc_feature (1)..(25): SEQ ID NO: 1380; WAN024FSK_at; Start 60; Stop 84
caaggaagttgggataacagctgag

SEQ ID NO: 219302 - DNA, 25 bp, Artificial
  probe
  misc_feature (1)..(25): SEQ ID NO: 1380; WAN024FSK_at; Start 72; Stop 96
gataacagctgagtttccgacaacc

SEQ ID NO: 219303 - DNA, 25 bp, Artificial
  probe
  misc_feature (1)..(25): SEQ ID NO: 1380; WAN024FSK_at; Start 13; Stop 37
ccaattcccatagttaatatagaag

SEQ ID NO: 219304 - DNA, 25 bp, Artificial
  probe
  misc_feature (1)..(25): SEQ ID NO: 1380; WAN024FSK_at; Start 213; Stop 237
tcccatagcgaaactggcttcacga

SEQ ID NO: 219305 - DNA, 25 bp, Artificial
  probe
  misc_feature (1)..(25): SEQ ID NO: 1380; WAN024FSK_at; Start 5; Stop 29
cagtgttcccaattcccatagttaa

SEQ ID NO: 219306 - DNA, 25 bp, Artificial
  probe
  misc_feature (1)..(25): SEQ ID NO: 1380; WAN024FSK_at; Start 204; Stop 228
gcgagtggctcccatagcgaaactg

SEQ ID NO: 219307 - DNA, 25 bp, Artificial
  probe
  misc_feature (1)..(25): SEQ ID NO: 1380; WAN024FSK_at; Start 192; Stop 216
gatagtctgccagcgagtggctccc

SEQ ID NO: 219308 - DNA, 25 bp, Artificial
  probe
  misc_feature (1)..(25): SEQ ID NO: 1380; WAN024FSK_at; Start 149; Stop 173
cagtgaaaataccagaacgggccgc

SEQ ID NO: 219309 - DNA, 25 bp, Artificial
  probe
  misc_feature (1)..(25): SEQ ID NO: 1380; WAN024FSK_at; Start 162; Stop 186
agaacgggccgccttcaagatcaca

SEQ ID NO: 219310 - DNA, 25 bp, Artificial
  probe
  misc_feature (1)..(25): SEQ ID NO: 1380; WAN024FSK_at; Start 134; Stop 158
tcccaaagaccactgcagtgaaaat

SEQ ID NO: 219311 - DNA, 25 bp, Artificial
  probe
  misc_feature (1)..(25): SEQ ID NO: 1380; WAN024FSK_at; Start 39; Stop 63
taaagttgcagctggtgtggtcaag

SEQ ID NO: 219312 - DNA, 25 bp, Artificial
  probe
  misc_feature (1)..(25): SEQ ID NO: 1380; WAN024FSK_at; Start 111; Stop 135
agcctcaccaaaggcacgcgccatc

SEQ ID NO: 219313 - DNA, 25 bp, Artificial
  probe
  misc_feature (1)..(25): SEQ ID NO: 1380; WAN024FSK_at; Start 141; Stop 165
gaccactgcagtgaaaataccagaa

SEQ ID NO: 219314 - DNA, 25 bp, Artificial
  probe
  misc_feature (1)..(25): SEQ ID NO: 1380; WAN024FSK_at; Start 172; Stop 196
gccttcaagatcacacgccagatag

SEQ ID NO: 219315 - DNA, 25 bp, Artificial
  probe
  misc_feature (1)..(25): SEQ ID NO: 1380; WAN024FSK_at; Start 30; Stop 54
tatagaagttaaagttgcagctggt

SEQ ID NO: 219316 - DNA, 25 bp, Artificial
  probe
  misc_feature (1)..(25): SEQ ID NO: 1380; WAN024FSK_at; Start 64; Stop 88
gaagttgggataacagctgagtttc

SEQ ID NO: 219317 - DNA, 25 bp, Artificial
  probe
  misc_feature (1)..(25): SEQ ID NO: 1380; WAN024FSK_at; Start 2; Stop 26
tgacagtgttcccaattcccatagt

SEQ ID NO: 219318 - DNA, 25 bp, Artificial
  probe
  misc_feature (1)..(25): SEQ ID NO: 1380; WAN024FSK_at; Start 68; Stop 92
ttgggataacagctgagtttccgac

SEQ ID NO: 219319 - DNA, 25 bp, Artificial
  probe
  misc_feature (1)..(25): SEQ ID NO: 1380; WAN024FSK_at; Start 180; Stop 204
gatcacacgccagatagtctgccag

SEQ ID NO: 219320 - DNA, 25 bp, Artificial
  probe
  misc_feature (1)..(25): SEQ ID NO: 1380; WAN024FSK_at; Start 85; Stop 109
tttccgacaaccatctggatagcta

SEQ ID NO: 219321 - DNA, 25 bp, Artificial
  probe
  misc_feature (1)..(25): SEQ ID NO: 1380; WAN024FSK_at; Start 147; Stop 171
tgcagtgaaaataccagaacgggcc

SEQ ID NO: 219322 - DNA, 25 bp, Artificial
  probe
  misc_feature (1)..(25): SEQ ID NO: 1380; WAN024FSK_at; Start 196; Stop 220
gtctgccagcgagtggctcccatag

SEQ ID NO: 219323 - DNA, 25 bp, Artificial
  probe
  misc_feature (1)..(25): SEQ ID NO: 1380; WAN024FSK_at; Start 175; Stop 199
ttcaagatcacacgccagatagtct

SEQ ID NO: 219324 - DNA, 25 bp, Artificial
  probe
  misc_feature (1)..(25): SEQ ID NO: 1380; WAN024FSK_at; Start 187; Stop 211
cgccagatagtctgccagcgagtgg

SEQ ID NO: 219325 - DNA, 25 bp, Artificial
  probe
  misc_feature (1)..(25): SEQ ID NO: 1318; WAN024FSL_at; Start 82; Stop 106
tgcaagccaataaatccgtacacta

SEQ ID NO: 219326 - DNA, 25 bp, Artificial
  probe
  misc_feature (1)..(25): SEQ ID NO: 1318; WAN024FSL_at; Start 182; Stop 206
aaactgctgcaccaatagcaaaggg

SEQ ID NO: 219327 - DNA, 25 bp, Artificial
  probe
  misc_feature (1)..(25): SEQ ID NO: 1318; WAN024FSL_at; Start 56; Stop 80
cactgcgaacaaagggaacgacgac

SEQ ID NO: 219328 - DNA, 25 bp, Artificial
  probe
  misc_feature (1)..(25): SEQ ID NO: 1318; WAN024FSL_at; Start 248; Stop 272
ccaaaatcataggaagggcaccaaa

SEQ ID NO: 219329 - DNA, 25 bp, Artificial
  probe
  misc_feature (1)..(25): SEQ ID NO: 1318; WAN024FSL_at; Start 358; Stop 382
tgcgctacgaaaaccaaaatcatgg

SEQ ID NO: 219330 - DNA, 25 bp, Artificial
  probe
  misc_feature (1)..(25): SEQ ID NO: 1318; WAN024FSL_at; Start 331; Stop 355
ttgacaaagaaggtcgacaagcctt

SEQ ID NO: 219331 - DNA, 25 bp, Artificial
  probe
  misc_feature (1)..(25): SEQ ID NO: 1318; WAN024FSL_at; Start 457; Stop 481
gatggaagcaacattttcttagcta

SEQ ID NO: 219332 - DNA, 25 bp, Artificial
  probe
  misc_feature (1)..(25): SEQ ID NO: 1318; WAN024FSL_at; Start 318; Stop 342
gatattcacaccattgacaaagaag

SEQ ID NO: 219333 - DNA, 25 bp, Artificial
  probe
  misc_feature (1)..(25): SEQ ID NO: 1318; WAN024FSL_at; Start 281; Stop 305
tagaaggattccaagttcctcccaa

SEQ ID NO: 219334 - DNA, 25 bp, Artificial
  probe
  misc_feature (1)..(25): SEQ ID NO: 1318; WAN024FSL_at; Start 134; Stop 158
tagctggttgcaaaatcttcgcccc

SEQ ID NO: 219335 - DNA, 25 bp, Artificial
  probe
  misc_feature (1)..(25): SEQ ID NO: 1318; WAN024FSL_at; Start 396; Stop 420
tatcaaagaaagacaggcaaaggtc

SEQ ID NO: 219336 - DNA, 25 bp, Artificial
  probe
  misc_feature (1)..(25): SEQ ID NO: 1318; WAN024FSL_at; Start 441; Stop 465
cagacgagaattctttgatggaagc

SEQ ID NO: 219337 - DNA, 25 bp, Artificial
  probe
  misc_feature (1)..(25): SEQ ID NO: 1318; WAN024FSL_at; Start 2; Stop 26
tgacaaagaggacggaaatccctga

SEQ ID NO: 219338 - DNA, 25 bp, Artificial
  probe
  misc_feature (1)..(25): SEQ ID NO: 1318; WAN024FSL_at; Start 24; Stop 48
tgacaaaatcccaaaaccagtccca

SEQ ID NO: 219339 - DNA, 25 bp, Artificial
  probe
  misc_feature (1)..(25): SEQ ID NO: 1318; WAN024FSL_at; Start 260; Stop 284
gaagggcaccaaattctttactaga

SEQ ID NO: 219340 - DNA, 25 bp, Artificial
  probe
  misc_feature (1)..(25): SEQ ID NO: 1318; WAN024FSL_at; Start 109; Stop 133
gaaggaatcccaaccaggagttcaa

SEQ ID NO: 219341 - DNA, 25 bp, Artificial
  probe
  misc_feature (1)..(25): SEQ ID NO: 1318; WAN024FSL_at; Start 12; Stop 36
gacggaaatccctgacaaaatccca

SEQ ID NO: 219342 - DNA, 25 bp, Artificial
  probe
  misc_feature (1)..(25): SEQ ID NO: 1318; WAN024FSL_at; Start 123; Stop 147
caggagttcaatagctggttgcaaa

SEQ ID NO: 219343 - DNA, 25 bp, Artificial
  probe
  misc_feature (1)..(25): SEQ ID NO: 1318; WAN024FSL_at; Start 191; Stop 215
caccaatagcaaagggtgttgcgat

SEQ ID NO: 219344 - DNA, 25 bp, Artificial
  probe
  misc_feature (1)..(25): SEQ ID NO: 1318; WAN024FSL_at; Start 154; Stop 178
gccccttttggtgatacttcggtca

SEQ ID NO: 219345 - DNA, 25 bp, Artificial
  probe
  misc_feature (1)..(25): SEQ ID NO: 1318; WAN024FSL_at; Start 212; Stop 236
cgataagggctgagagaatggtaac

SEQ ID NO: 219346 - DNA, 25 bp, Artificial
  probe
  misc_feature (1)..(25): SEQ ID NO: 1318; WAN024FSL_at; Start 223; Stop 247
gagagaatggtaacgataaaggaac

SEQ ID NO: 219347 - DNA, 25 bp, Artificial
  probe
  misc_feature (1)..(25): SEQ ID NO: 1318; WAN024FSL_at; Start 372; Stop 396
caaaatcatggccacaaggatgact

SEQ ID NO: 219348 - DNA, 25 bp, Artificial
  probe
  misc_feature (1)..(25): SEQ ID NO: 1318; WAN024FSL_at; Start 381; Stop 405
ggccacaaggatgactatcaaagaa

SEQ ID NO: 219349 - DNA, 25 bp, Artificial
  probe
  misc_feature (1)..(25): SEQ ID NO: 1318; WAN024FSL_at; Start 168; Stop 192
tacttcggtcataaaaactgctgca

SEQ ID NO: 219350 - DNA, 25 bp, Artificial
  probe
  misc_feature (1)..(25): SEQ ID NO: 1318; WAN024FSL_at; Start 346; Stop 370
gacaagcctttttgcgctacgaaaa

SEQ ID NO: 219351 - DNA, 25 bp, Artificial
  probe
  misc_feature (1)..(25): SEQ ID NO: 1318; WAN024FSL_at; Start 237; Stop 261
gataaaggaacccaaaatcatagga

SEQ ID NO: 219352 - DNA, 25 bp, Artificial
  probe
  misc_feature (1)..(25): SEQ ID NO: 1318; WAN024FSL_at; Start 69; Stop 93
gggaacgacgacttgcaagccaata

SEQ ID NO: 219353 - DNA, 25 bp, Artificial
  probe
  misc_feature (1)..(25): SEQ ID NO: 1318; WAN024FSL_at; Start 424; Stop 448
ccttttcctaatttctccagacgag

SEQ ID NO: 219354 - DNA, 25 bp, Artificial
  probe
  misc_feature (1)..(25): SEQ ID NO: 1318; WAN024FSL_at; Start 274; Stop 298
tctttactagaaggattccaagttc

SEQ ID NO: 219355 - DNA, 25 bp, Artificial
  probe
  misc_feature (1)..(25): SEQ ID NO: 1318; WAN024FSL_at; Start 402; Stop 426
agaaagacaggcaaaggtcaaacct

SEQ ID NO: 219356 - DNA, 25 bp, Artificial
  probe
  misc_feature (1)..(25): SEQ ID NO: 1318; WAN024FSL_at; Start 47; Stop 71
caccaaagacactgcgaacaaaggg

SEQ ID NO: 219357 - DNA, 25 bp, Artificial
  probe
  misc_feature (1)..(25): SEQ ID NO: 1318; WAN024FSL_at; Start 297; Stop 321
tcctcccaaaagaaagtcaaagata

SEQ ID NO: 219358 - DNA, 25 bp, Artificial
  probe
  misc_feature (1)..(25): SEQ ID NO: 1318; WAN024FSL_at; Start 97; Stop 121
ccgtacactactgaaggaatcccaa

SEQ ID NO: 219359 - DNA, 25 bp, Artificial
  probe
  misc_feature (1)..(25): SEQ ID NO: 1224; WAN024FSM_at; Start 304; Stop 328
ggtgcagcagtttttatgaccgaag

SEQ ID NO: 219360 - DNA, 25 bp, Artificial
  probe
  misc_feature (1)..(25): SEQ ID NO: 1224; WAN024FSM_at; Start 782; Stop 806
ggaacactgtcatgggaactgtaaa

SEQ ID NO: 219361 - DNA, 25 bp, Artificial
  probe
  misc_feature (1)..(25): SEQ ID NO: 1224; WAN024FSM_at; Start 288; Stop 312
aacaccctttgctattggtgcagca

SEQ ID NO: 219362 - DNA, 25 bp, Artificial
  probe
  misc_feature (1)..(25): SEQ ID NO: 1224; WAN024FSM_at; Start 318; Stop 342
tatgaccgaagtatcaccaaaaggg

SEQ ID NO: 219363 - DNA, 25 bp, Artificial
  probe
  misc_feature (1)..(25): SEQ ID NO: 1224; WAN024FSM_at; Start 219; Stop 243
taaagaatttggtgcccttcctatg

SEQ ID NO: 219364 - DNA, 25 bp, Artificial
  probe
  misc_feature (1)..(25): SEQ ID NO: 1224; WAN024FSM_at; Start 475; Stop 499
gggatttccgtcctctttgtcatga

SEQ ID NO: 219365 - DNA, 25 bp, Artificial
  probe
  misc_feature (1)..(25): SEQ ID NO: 1224; WAN024FSM_at; Start 492; Stop 516
tgtcatgattttgccgaccgtaacc

SEQ ID NO: 219366 - DNA, 25 bp, Artificial
  probe
  misc_feature (1)..(25): SEQ ID NO: 1224; WAN024FSM_at; Start 570; Stop 594
tttcgctatgggagccactcgctgg

SEQ ID NO: 219367 - DNA, 25 bp, Artificial
  probe
  misc_feature (1)..(25): SEQ ID NO: 1224; WAN024FSM_at; Start 131; Stop 155
tcgtagcgcaaaaaggcttgtcgac

SEQ ID NO: 219368 - DNA, 25 bp, Artificial
  probe
  misc_feature (1)..(25): SEQ ID NO: 1224; WAN024FSM_at; Start 767; Stop 791
taactatgggaattgggaacactgt

SEQ ID NO: 219369 - DNA, 25 bp, Artificial
  probe
  misc_feature (1)..(25): SEQ ID NO: 1224; WAN024FSM_at; Start 585; Stop 609
cactcgctggcagactatctggcgt

SEQ ID NO: 219370 - DNA, 25 bp, Artificial
  probe
  misc_feature (1)..(25): SEQ ID NO: 1224; WAN024FSM_at; Start 641; Stop 665
tcactgcagtggtctttgggatggc

SEQ ID NO: 219371 - DNA, 25 bp, Artificial
  probe
  misc_feature (1)..(25): SEQ ID NO: 1224; WAN024FSM_at; Start 342; Stop 366
ggcgaagattttgcaaccagctatt

SEQ ID NO: 219372 - DNA, 25 bp, Artificial
  probe
  misc_feature (1)..(25): SEQ ID NO: 1224; WAN024FSM_at; Start 33; Stop 57
gcttccatcaaagaattctcgtctg

SEQ ID NO: 219373 - DNA, 25 bp, Artificial
  probe
  misc_feature (1)..(25): SEQ ID NO: 1224; WAN024FSM_at; Start 258; Stop 282
tatcgttaccattctctcagccctt

SEQ ID NO: 219374 - DNA, 25 bp, Artificial
  probe
  misc_feature (1)..(25): SEQ ID NO: 1224; WAN024FSM_at; Start 624; Stop 648
ggcccgttctggtattttcactgca

SEQ ID NO: 219375 - DNA, 25 bp, Artificial
  probe
  misc_feature (1)..(25): SEQ ID NO: 1224; WAN024FSM_at; Start 536; Stop 560
tgcgtgcggttcctcgttattatcg

SEQ ID NO: 219376 - DNA, 25 bp, Artificial
  probe
  misc_feature (1)..(25): SEQ ID NO: 1224; WAN024FSM_at; Start 734; Stop 758
tgaccacaccagctgcaactttaac

SEQ ID NO: 219377 - DNA, 25 bp, Artificial
  probe
  misc_feature (1)..(25): SEQ ID NO: 1224; WAN024FSM_at; Start 177; Stop 201
tatctttgactttcttttgggagga

SEQ ID NO: 219378 - DNA, 25 bp, Artificial
  probe
  misc_feature (1)..(25): SEQ ID NO: 1224; WAN024FSM_at; Start 49; Stop 73
tctcgtctggagaaattaggaaaag

SEQ ID NO: 219379 - DNA, 25 bp, Artificial
  probe
  misc_feature (1)..(25): SEQ ID NO: 1224; WAN024FSM_at; Start 824; Stop 848
cactggccttggtactgctcttgat

SEQ ID NO: 219380 - DNA, 25 bp, Artificial
  probe
  misc_feature (1)..(25): SEQ ID NO: 1224; WAN024FSM_at; Start 692; Stop 716
tccagatggttgtcggaaactcagc

SEQ ID NO: 219381 - DNA, 25 bp, Artificial
  probe
  misc_feature (1)..(25): SEQ ID NO: 1224; WAN024FSM_at; Start 94; Stop 118
tctttgatagtcatccttgtggcca

SEQ ID NO: 219382 - DNA, 25 bp, Artificial
  probe
  misc_feature (1)..(25): SEQ ID NO: 1224; WAN024FSM_at; Start 896; Stop 920
gaaagaaaaattatgcgcgctaact

SEQ ID NO: 219383 - DNA, 25 bp, Artificial
  probe
  misc_feature (1)..(25): SEQ ID NO: 1224; WAN024FSM_at; Start 152; Stop 176
cgaccttctttgtcaatggtgtgaa

SEQ ID NO: 219384 - DNA, 25 bp, Artificial
  probe
  misc_feature (1)..(25): SEQ ID NO: 1224; WAN024FSM_at; Start 200; Stop 224
gaacttggaatccttctagtaaaga

SEQ ID NO: 219385 - DNA, 25 bp, Artificial
  probe
  misc_feature (1)..(25): SEQ ID NO: 1224; WAN024FSM_at; Start 405; Stop 429
tattggcttgcaagtcgtcgttccc

SEQ ID NO: 219386 - DNA, 25 bp, Artificial
  probe
  misc_feature (1)..(25): SEQ ID NO: 1224; WAN024FSM_at; Start 608; Stop 632
gtgtgatcttgaaggcggcccgttc

SEQ ID NO: 219387 - DNA, 25 bp, Artificial
  probe
  misc_feature (1)..(25): SEQ ID NO: 1224; WAN024FSM_at; Start 707; Stop 731
gaaactcagctgttatcccaacttc

SEQ ID NO: 219388 - DNA, 25 bp, Artificial
  probe
  misc_feature (1)..(25): SEQ ID NO: 1224; WAN024FSM_at; Start 519; Stop 543
tatgacaacggatagcttgcgtgcg

SEQ ID NO: 219389 - DNA, 25 bp, Artificial
  probe
  misc_feature (1)..(25): SEQ ID NO: 1224; WAN024FSM_at; Start 367; Stop 391
gaactcctggttgggattccttcag

SEQ ID NO: 219390 - DNA, 25 bp, Artificial
  probe
  misc_feature (1)..(25): SEQ ID NO: 1224; WAN024FSM_at; Start 116; Stop 140
ccatgattttggttttcgtagcgca

SEQ ID NO: 219391 - DNA, 25 bp, Artificial
  probe
  misc_feature (1)..(25): SEQ ID NO: 1224; WAN024FSM_at; Start 420; Stop 444
cgtcgttccctttgttcgcagtgtc

SEQ ID NO: 219392 - DNA, 25 bp, Artificial
  probe
  misc_feature (1)..(25): SEQ ID NO: 1224; WAN024FSM_at; Start 807; Stop 831
taataatgttctctggtcactggcc

SEQ ID NO: 219393 - DNA, 25 bp, Artificial
  probe
  misc_feature (1)..(25): SEQ ID NO: 937; WAN024FSN_at; Start 163; Stop 187
caaatcagaaaaagtgtcgaaaaca

SEQ ID NO: 219394 - DNA, 25 bp, Artificial
  probe
  misc_feature (1)..(25): SEQ ID NO: 937; WAN024FSN_at; Start 1837; Stop 1861
ggtgtcaatttcctatttattccag

SEQ ID NO: 219395 - DNA, 25 bp, Artificial
  probe
  misc_feature (1)..(25): SEQ ID NO: 937; WAN024FSN_at; Start 66; Stop 90
tgtgcataggaattgtcatcctgag

SEQ ID NO: 219396 - DNA, 25 bp, Artificial
  probe
  misc_feature (1)..(25): SEQ ID NO: 937; WAN024FSN_at; Start 1443; Stop 1467
tatttttgtagcagatcatggtcca

SEQ ID NO: 219397 - DNA, 25 bp, Artificial
  probe
  misc_feature (1)..(25): SEQ ID NO: 937; WAN024FSN_at; Start 808; Stop 832
caaatagcactcttttgctcaagag

SEQ ID NO: 219398 - DNA, 25 bp, Artificial
  probe
  misc_feature (1)..(25): SEQ ID NO: 937; WAN024FSN_at; Start 186; Stop 210
caataaaaagttaggcactgaagaa

SEQ ID NO: 219399 - DNA, 25 bp, Artificial
  probe
  misc_feature (1)..(25): SEQ ID NO: 937; WAN024FSN_at; Start 100; Stop 124
tatcagtgggctaaggaaatggctt

SEQ ID NO: 219400 - DNA, 25 bp, Artificial
  probe
  misc_feature (1)..(25): SEQ ID NO: 937; WAN024FSN_at; Start 223; Stop 247
gaccttttgtctggaatatataatg

SEQ ID NO: 219401 - DNA, 25 bp, Artificial
  probe
  misc_feature (1)..(25): SEQ ID NO: 937; WAN024FSN_at; Start 1100; Stop 1124
cagtagacgatcatttattagagaa

SEQ ID NO: 219402 - DNA, 25 bp, Artificial
  probe
  misc_feature (1)..(25): SEQ ID NO: 937; WAN024FSN_at; Start 1283; Stop 1307
ctcttccagacaagagaatagtagg

SEQ ID NO: 219403 - DNA, 25 bp, Artificial
  probe
  misc_feature (1)..(25): SEQ ID NO: 937; WAN024FSN_at; Start 1506; Stop 1530
tattgacgatgataagaaacatgtg

SEQ ID NO: 219404 - DNA, 25 bp, Artificial
  probe
  misc_feature (1)..(25): SEQ ID NO: 937; WAN024FSN_at; Start 1795; Stop 1819
agcgatttactttgggttgatttcg

SEQ ID NO: 219405 - DNA, 25 bp, Artificial
  probe
  misc_feature (1)..(25): SEQ ID NO: 937; WAN024FSN_at; Start 1552; Stop 1576
gattatcaagaagagttagtattag

SEQ ID NO: 219406 - DNA, 25 bp, Artificial
  probe
  misc_feature (1)..(25): SEQ ID NO: 937; WAN024FSN_at; Start 275; Stop 299
cgaaagaagagtttattcatagagc

SEQ ID NO: 219407 - DNA, 25 bp, Artificial
  probe
  misc_feature (1)..(25): SEQ ID NO: 937; WAN024FSN_at; Start 201; Stop 225
cactgaagaaatgtgttatctagac

SEQ ID NO: 219408 - DNA, 25 bp, Artificial
  probe
  misc_feature (1)..(25): SEQ ID NO: 937; WAN024FSN_at; Start 292; Stop 316
catagagctaaaattctagagttga

SEQ ID NO: 219409 - DNA, 25 bp, Artificial
  probe
  misc_feature (1)..(25): SEQ ID NO: 937; WAN024FSN_at; Start 1492; Stop 1516
gatattatccccattattgacgatg

SEQ ID NO: 219410 - DNA, 25 bp, Artificial
  probe
  misc_feature (1)..(25): SEQ ID NO: 937; WAN024FSN_at; Start 1479; Stop 1503
taaaaaagagagtgatattatcccc

SEQ ID NO: 219411 - DNA, 25 bp, Artificial
  probe
  misc_feature (1)..(25): SEQ ID NO: 937; WAN024FSN_at; Start 479; Stop 503
ctatctatatttcgagtgagaaagg

SEQ ID NO: 219412 - DNA, 25 bp, Artificial
  probe
  misc_feature (1)..(25): SEQ ID NO: 937; WAN024FSN_at; Start 918; Stop 942
tgtttctagacgatcgacattatat

SEQ ID NO: 219413 - DNA, 25 bp, Artificial
  probe
  misc_feature (1)..(25): SEQ ID NO: 937; WAN024FSN_at; Start 1583; Stop 1607
cagaaattttggaagcttataagaa

SEQ ID NO: 219414 - DNA, 25 bp, Artificial
  probe
  misc_feature (1)..(25): SEQ ID NO: 937; WAN024FSN_at; Start 505; Stop 529
tgccgtaaatccacaggaaatttat

SEQ ID NO: 219415 - DNA, 25 bp, Artificial
  probe
  misc_feature (1)..(25): SEQ ID NO: 937; WAN024FSN_at; Start 116; Stop 140
aaatggctttggaggtgaatttcaa

SEQ ID NO: 219416 - DNA, 25 bp, Artificial
  probe
  misc_feature (1)..(25): SEQ ID NO: 937; WAN024FSN_at; Start 1272; Stop 1296
tatcaaaaaggctcttccagacaag

SEQ ID NO: 219417 - DNA, 25 bp, Artificial
  probe
  misc_feature (1)..(25): SEQ ID NO: 937; WAN024FSN_at; Start 79; Stop 103
tgtcatcctgagcaaattttgtatc

SEQ ID NO: 219418 - DNA, 25 bp, Artificial
  probe
  misc_feature (1)..(25): SEQ ID NO: 937; WAN024FSN_at; Start 821; Stop 845
tttgctcaagagaaggacagttatt

SEQ ID NO: 219419 - DNA, 25 bp, Artificial
  probe
  misc_feature (1)..(25): SEQ ID NO: 937; WAN024FSN_at; Start 1818; Stop 1842
cgtttatagattgtttggtggtgtc

SEQ ID NO: 219420 - DNA, 25 bp, Artificial
  probe
  misc_feature (1)..(25): SEQ ID NO: 937; WAN024FSN_at; Start 1737; Stop 1761
tgagatagtaactcttaagactacg

SEQ ID NO: 219421 - DNA, 25 bp, Artificial
  probe
  misc_feature (1)..(25): SEQ ID NO: 937; WAN024FSN_at; Start 616; Stop 640
cgttctctaggattaaatgctattt

SEQ ID NO: 219422 - DNA, 25 bp, Artificial
  probe
  misc_feature (1)..(25): SEQ ID NO: 937; WAN024FSN_at; Start 1088; Stop 1112
catatgtattaacagtagacgatca

SEQ ID NO: 219423 - DNA, 25 bp, Artificial
  probe
  misc_feature (1)..(25): SEQ ID NO: 937; WAN024FSN_at; Start 1521; Stop 1545
gaaacatgtgagtatttatcaggca

SEQ ID NO: 219424 - DNA, 25 bp, Artificial
  probe
  misc_feature (1)..(25): SEQ ID NO: 937; WAN024FSN_at; Start 1454; Stop 1478
cagatcatggtccagttttgaaata

SEQ ID NO: 219425 - DNA, 25 bp, Artificial
  probe
  misc_feature (1)..(25): SEQ ID NO: 937; WAN024FSN_at; Start 328; Stop 352
caacatatttatttggattcggaaa

SEQ ID NO: 219426 - DNA, 25 bp, Artificial
  probe
  misc_feature (1)..(25): SEQ ID NO: 937; WAN024FSN_at; Start 1537; Stop 1561
tatcaggcagttaaagattatcaag

SEQ ID NO: 219427 - DNA, 25 bp, Artificial
  probe
  misc_feature (1)..(25): SEQ ID NO: 2311; WAN024FSO_at; Start 334; Stop 358
tccttcgttgcctttgttagtccag

SEQ ID NO: 219428 - DNA, 25 bp, Artificial
  probe
  misc_feature (1)..(25): SEQ ID NO: 2311; WAN024FSO_at; Start 875; Stop 899
cctatccatttattttcataagcga

SEQ ID NO: 219429 - DNA, 25 bp, Artificial
  probe
  misc_feature (1)..(25): SEQ ID NO: 2311; WAN024FSO_at; Start 498; Stop 522
gggagcatgtttgatgttcaaaacc

SEQ ID NO: 219430 - DNA, 25 bp, Artificial
  probe
  misc_feature (1)..(25): SEQ ID NO: 2311; WAN024FSO_at; Start 216; Stop 240
caatattggaataaagtatgctgag

SEQ ID NO: 219431 - DNA, 25 bp, Artificial
  probe
  misc_feature (1)..(25): SEQ ID NO: 2311; WAN024FSO_at; Start 458; Stop 482
gagacaaacttccttctaaaatcga

SEQ ID NO: 219432 - DNA, 25 bp, Artificial
  probe
  misc_feature (1)..(25): SEQ ID NO: 2311; WAN024FSO_at; Start 202; Stop 226
tatgcgaatggaaacaatattggaa

SEQ ID NO: 219433 - DNA, 25 bp, Artificial
  probe
  misc_feature (1)..(25): SEQ ID NO: 2311; WAN024FSO_at; Start 610; Stop 634
ggctataagaatatatgccttactc

SEQ ID NO: 219434 - DNA, 25 bp, Artificial
  probe
  misc_feature (1)..(25): SEQ ID NO: 2311; WAN024FSO_at; Start 269; Stop 293
taaacaacgatacattaattgaggt

SEQ ID NO: 219435 - DNA, 25 bp, Artificial
  probe
  misc_feature (1)..(25): SEQ ID NO: 2311; WAN024FSO_at; Start 445; Stop 469
catggtgctcagagagacaaacttc

SEQ ID NO: 219436 - DNA, 25 bp, Artificial
  probe
  misc_feature (1)..(25): SEQ ID NO: 2311; WAN024FSO_at; Start 135; Stop 159
tagtgtcaaagagttatccaaggcg

SEQ ID NO: 219437 - DNA, 25 bp, Artificial
  probe
  misc_feature (1)..(25): SEQ ID NO: 2311; WAN024FSO_at; Start 88; Stop 112
tcaaatgagtatgacatcgtgattg

SEQ ID NO: 219438 - DNA, 25 bp, Artificial
  probe
  misc_feature (1)..(25): SEQ ID NO: 2311; WAN024FSO_at; Start 376; Stop 400
gataataacttggtacaatctacag

SEQ ID NO: 219439 - DNA, 25 bp, Artificial
  probe
  misc_feature (1)..(25): SEQ ID NO: 2311; WAN024FSO_at; Start 192; Stop 216
aaatagaggatatgcgaatggaaac

SEQ ID NO: 219440 - DNA, 25 bp, Artificial
  probe
  misc_feature (1)..(25): SEQ ID NO: 2311; WAN024FSO_at; Start 235; Stop 259
gctgaggataatggatatgattaca

SEQ ID NO: 219441 - DNA, 25 bp, Artificial
  probe
  misc_feature (1)..(25): SEQ ID NO: 2311; WAN024FSO_at; Start 776; Stop 800
tattcatgcaacaactttatcattg

SEQ ID NO: 219442 - DNA, 25 bp, Artificial
  probe
  misc_feature (1)..(25): SEQ ID NO: 2311; WAN024FSO_at; Start 518; Stop 542
aaacctctatcttgaaaattattgg

SEQ ID NO: 219443 - DNA, 25 bp, Artificial
  probe
  misc_feature (1)..(25): SEQ ID NO: 2311; WAN024FSO_at; Start 696; Stop 720
tttaatggcaagaaatagagttgta

SEQ ID NO: 219444 - DNA, 25 bp, Artificial
  probe
  misc_feature (1)..(25): SEQ ID NO: 2311; WAN024FSO_at; Start 151; Stop 175
tccaaggcgttatcccctattaaga

SEQ ID NO: 219445 - DNA, 25 bp, Artificial
  probe
  misc_feature (1)..(25): SEQ ID NO: 2311; WAN024FSO_at; Start 566; Stop 590
tattttatgaagaaactgaatggtg

SEQ ID NO: 219446 - DNA, 25 bp, Artificial
  probe
  misc_feature (1)..(25): SEQ ID NO: 2311; WAN024FSO_at; Start 301; Stop 325
ttggaatcgtgtaaacgagaactag

SEQ ID NO: 219447 - DNA, 25 bp, Artificial
  probe
  misc_feature (1)..(25): SEQ ID NO: 2311; WAN024FSO_at; Start 537; Stop 561
tattggatatatacctgaaagttac

SEQ ID NO: 219448 - DNA, 25 bp, Artificial
  probe
  misc_feature (1)..(25): SEQ ID NO: 2311; WAN024FSO_at; Start 384; Stop 408
cttggtacaatctacaggtggtgat

SEQ ID NO: 219449 - DNA, 25 bp, Artificial
  probe
  misc_feature (1)..(25): SEQ ID NO: 2311; WAN024FSO_at; Start 316; Stop 340
cgagaactagaaaataattccttcg

SEQ ID NO: 219450 - DNA, 25 bp, Artificial
  probe
  misc_feature (1)..(25): SEQ ID NO: 2311; WAN024FSO_at; Start 72; Stop 96
gagaagtactataaaatcaaatgag

SEQ ID NO: 219451 - DNA, 25 bp, Artificial
  probe
  misc_feature (1)..(25): SEQ ID NO: 2311; WAN024FSO_at; Start 668; Stop 692
taaaagcggtcaatggacttcaaga

SEQ ID NO: 219452 - DNA, 25 bp, Artificial
  probe
  misc_feature (1)..(25): SEQ ID NO: 2311; WAN024FSO_at; Start 474; Stop 498
taaaatcgaaagtgactatattggg

SEQ ID NO: 219453 - DNA, 25 bp, Artificial
  probe
  misc_feature (1)..(25): SEQ ID NO: 2311; WAN024FSO_at; Start 655; Stop 679
ggttcggtctctataaaagcggtca

SEQ ID NO: 219454 - DNA, 25 bp, Artificial
  probe
  misc_feature (1)..(25): SEQ ID NO: 2311; WAN024FSO_at; Start 682; Stop 706
ggacttcaagaatatttaatggcaa

SEQ ID NO: 219455 - DNA, 25 bp, Artificial
  probe
  misc_feature (1)..(25): SEQ ID NO: 2311; WAN024FSO_at; Start 430; Stop 454
gtaactttaaaaaatcatggtgctc

SEQ ID NO: 219456 - DNA, 25 bp, Artificial
  probe
  misc_feature (1)..(25): SEQ ID NO: 2311; WAN024FSO_at; Start 858; Stop 882
taatagaattgatccatcctatcca

SEQ ID NO: 219457 - DNA, 25 bp, Artificial
  probe
  misc_feature (1)..(25): SEQ ID NO: 2311; WAN024FSO_at; Start 344; Stop 368
cctttgttagtccagtgttagttga

SEQ ID NO: 219458 - DNA, 25 bp, Artificial
  probe
  misc_feature (1)..(25): SEQ ID NO: 2311; WAN024FSO_at; Start 580; Stop 604
actgaatggtgttatagggctaaaa

SEQ ID NO: 219459 - DNA, 25 bp, Artificial
  probe
  misc_feature (1)..(25): SEQ ID NO: 2311; WAN024FSO_at; Start 105; Stop 129
cgtgattgtagataataattcggtg

SEQ ID NO: 219460 - DNA, 25 bp, Artificial
  probe
  misc_feature (1)..(25): SEQ ID NO: 2311; WAN024FSO_at; Start 120; Stop 144
taattcggtgaatgatagtgtcaaa

SEQ ID NO: 219461 - DNA, 25 bp, Artificial
  probe
  misc_feature (1)..(25): SEQ ID NO: 1086; WAN024FSP_at; Start 475; Stop 499
gaattcggagatttgtggtatcgaa

SEQ ID NO: 219462 - DNA, 25 bp, Artificial
  probe
  misc_feature (1)..(25): SEQ ID NO: 1086; WAN024FSP_at; Start 460; Stop 484
ccatctattttaagagaattcggag

SEQ ID NO: 219463 - DNA, 25 bp, Artificial
  probe
  misc_feature (1)..(25): SEQ ID NO: 1086; WAN024FSP_at; Start 946; Stop 970
ccaagtgctgttaagatgtatctag

SEQ ID NO: 219464 - DNA, 25 bp, Artificial
  probe
  misc_feature (1)..(25): SEQ ID NO: 1086; WAN024FSP_at; Start 804; Stop 828
tgctggaacatttgatctgggatta

SEQ ID NO: 219465 - DNA, 25 bp, Artificial
  probe
  misc_feature (1)..(25): SEQ ID NO: 1086; WAN024FSP_at; Start 1154; Stop 1178
tctttggagcgcagagaagtttctc

SEQ ID NO: 219466 - DNA, 25 bp, Artificial
  probe
  misc_feature (1)..(25): SEQ ID NO: 1086; WAN024FSP_at; Start 629; Stop 653
catttgtaaatcagacaagagtgct

SEQ ID NO: 219467 - DNA, 25 bp, Artificial
  probe
  misc_feature (1)..(25): SEQ ID NO: 1086; WAN024FSP_at; Start 701; Stop 725
gaagaacttctagattgctcacctc

SEQ ID NO: 219468 - DNA, 25 bp, Artificial
  probe
  misc_feature (1)..(25): SEQ ID NO: 1086; WAN024FSP_at; Start 747; Stop 771
tatagcattcgtttatggaggtgga

SEQ ID NO: 219469 - DNA, 25 bp, Artificial
  probe
  misc_feature (1)..(25): SEQ ID NO: 1086; WAN024FSP_at; Start 819; Stop 843
tctgggattaggatttagatactgg

SEQ ID NO: 219470 - DNA, 25 bp, Artificial
  probe
  misc_feature (1)..(25): SEQ ID NO: 1086; WAN024FSP_at; Start 64; Stop 88
ggaatgtttcttatgtttaccctca

SEQ ID NO: 219471 - DNA, 25 bp, Artificial
  probe
  misc_feature (1)..(25): SEQ ID NO: 1086; WAN024FSP_at; Start 788; Stop 812
catatttaaatatagatgctggaac

SEQ ID NO: 219472 - DNA, 25 bp, Artificial
  probe
  misc_feature (1)..(25): SEQ ID NO: 1086; WAN024FSP_at; Start 838; Stop 862
tactgggagttgaaatactatctgg

SEQ ID NO: 219473 - DNA, 25 bp, Artificial
  probe
  misc_feature (1)..(25): SEQ ID NO: 1086; WAN024FSP_at; Start 1167; Stop 1191
gagaagtttctcattggcaattgtt

SEQ ID NO: 219474 - DNA, 25 bp, Artificial
  probe
  misc_feature (1)..(25): SEQ ID NO: 1086; WAN024FSP_at; Start 92; Stop 116
tatattggcacagaaacttattaac

SEQ ID NO: 219475 - DNA, 25 bp, Artificial
  probe
  misc_feature (1)..(25): SEQ ID NO: 1086; WAN024FSP_at; Start 6; Stop 30
gagacagaagtttgaatttatagag

SEQ ID NO: 219476 - DNA, 25 bp, Artificial
  probe
  misc_feature (1)..(25): SEQ ID NO: 1086; WAN024FSP_at; Start 1143; Stop 1167
ttctttaaatatctttggagcgcag

SEQ ID NO: 219477 - DNA, 25 bp, Artificial
  probe
  misc_feature (1)..(25): SEQ ID NO: 1086; WAN024FSP_at; Start 232; Stop 256
gagatattaagagctaaaacactgt

SEQ ID NO: 219478 - DNA, 25 bp, Artificial
  probe
  misc_feature (1)..(25): SEQ ID NO: 1086; WAN024FSP_at; Start 146; Stop 170
tgcttcctatactgattgttaatgc

SEQ ID NO: 219479 - DNA, 25 bp, Artificial
  probe
  misc_feature (1)..(25): SEQ ID NO: 1086; WAN024FSP_at; Start 895; Stop 919
gttggaattctaacatcaagtaata

SEQ ID NO: 219480 - DNA, 25 bp, Artificial
  probe
  misc_feature (1)..(25): SEQ ID NO: 1086; WAN024FSP_at; Start 28; Stop 52
gagattctatactattttacagtga

SEQ ID NO: 219481 - DNA, 25 bp, Artificial
  probe
  misc_feature (1)..(25): SEQ ID NO: 1086; WAN024FSP_at; Start 508; Stop 532
tcagtacgaatagatggaacaccat

SEQ ID NO: 219482 - DNA, 25 bp, Artificial
  probe
  misc_feature (1)..(25): SEQ ID NO: 1086; WAN024FSP_at; Start 716; Stop 740
tgctcacctctttaagttttgtaac

SEQ ID NO: 219483 - DNA, 25 bp, Artificial
  probe
  misc_feature (1)..(25): SEQ ID NO: 1086; WAN024FSP_at; Start 1202; Stop 1226
tattctactatgactataggctgaa

SEQ ID NO: 219484 - DNA, 25 bp, Artificial
  probe
  misc_feature (1)..(25): SEQ ID NO: 1086; WAN024FSP_at; Start 45; Stop 69
tacagtgatgttatcagtgggaatg

SEQ ID NO: 219485 - DNA, 25 bp, Artificial
  probe
  misc_feature (1)..(25): SEQ ID NO: 1086; WAN024FSP_at; Start 642; Stop 666
gacaagagtgctactggtttctgtt

SEQ ID NO: 219486 - DNA, 25 bp, Artificial
  probe
  misc_feature (1)..(25): SEQ ID NO: 1086; WAN024FSP_at; Start 1089; Stop 1113
agttgaccgcgccttttttattgca

SEQ ID NO: 219487 - DNA, 25 bp, Artificial
  probe
  misc_feature (1)..(25): SEQ ID NO: 1086; WAN024FSP_at; Start 764; Stop 788
gaggtggattggattatattaaagc

SEQ ID NO: 219488 - DNA, 25 bp, Artificial
  probe
  misc_feature (1)..(25): SEQ ID NO: 1086; WAN024FSP_at; Start 992; Stop 1016
tattcgttcaatttggtgtagccgc

SEQ ID NO: 219489 - DNA, 25 bp, Artificial
  probe
  misc_feature (1)..(25): SEQ ID NO: 1086; WAN024FSP_at; Start 924; Stop 948
tagtaattttattttggctgggcca

SEQ ID NO: 219490 - DNA, 25 bp, Artificial
  probe
  misc_feature (1)..(25): SEQ ID NO: 1086; WAN024FSP_at; Start 182; Stop 206
ctaaatctgcttttatctatggtac

SEQ ID NO: 219491 - DNA, 25 bp, Artificial
  probe
  misc_feature (1)..(25): SEQ ID NO: 1086; WAN024FSP_at; Start 937; Stop 961
ttggctgggccaagtgctgttaaga

SEQ ID NO: 219492 - DNA, 25 bp, Artificial
  probe
  misc_feature (1)..(25): SEQ ID NO: 1086; WAN024FSP_at; Start 1077; Stop 1101
tgataaatatagagttgaccgcgcc

SEQ ID NO: 219493 - DNA, 25 bp, Artificial
  probe
  misc_feature (1)..(25): SEQ ID NO: 1086; WAN024FSP_at; Start 282; Stop 306
tttggcctctagacaatatatatgg

SEQ ID NO: 219494 - DNA, 25 bp, Artificial
  probe
  misc_feature (1)..(25): SEQ ID NO: 1086; WAN024FSP_at; Start 1006; Stop 1030
ggtgtagccgcaatttttatgtatg

SEQ ID NO: 219495 - DNA, 25 bp, Artificial
  probe
  misc_feature (1)..(25): SEQ ID NO: 1728; WAN024FSQ_at; Start 997; Stop 1021
tatgacagtatagctagagaagatt

SEQ ID NO: 219496 - DNA, 25 bp, Artificial
  probe
  misc_feature (1)..(25): SEQ ID NO: 1728; WAN024FSQ_at; Start 612; Stop 636
tggaactatcagtcattggtttgac

SEQ ID NO: 219497 - DNA, 25 bp, Artificial
  probe
  misc_feature (1)..(25): SEQ ID NO: 1728; WAN024FSQ_at; Start 833; Stop 857
cagtggatccagtcaagttgtatga

SEQ ID NO: 219498 - DNA, 25 bp, Artificial
  probe
  misc_feature (1)..(25): SEQ ID NO: 1728; WAN024FSQ_at; Start 704; Stop 728
gcaaagctgatattcctgaacatga

SEQ ID NO: 219499 - DNA, 25 bp, Artificial
  probe
  misc_feature (1)..(25): SEQ ID NO: 1728; WAN024FSQ_at; Start 502; Stop 526
gaagagcaggttaataaaatagtgg

SEQ ID NO: 219500 - DNA, 25 bp, Artificial
  probe
  misc_feature (1)..(25): SEQ ID NO: 1728; WAN024FSQ_at; Start 772; Stop 796
cagtatattgagaatgcagatgttc

SEQ ID NO: 219501 - DNA, 25 bp, Artificial
  probe
  misc_feature (1)..(25): SEQ ID NO: 1728; WAN024FSQ_at; Start 441; Stop 465
taatttaatcttggtttcgagtgag

SEQ ID NO: 219502 - DNA, 25 bp, Artificial
  probe
  misc_feature (1)..(25): SEQ ID NO: 1728; WAN024FSQ_at; Start 788; Stop 812
cagatgttctgattatgccgtttca

SEQ ID NO: 219503 - DNA, 25 bp, Artificial
  probe
  misc_feature (1)..(25): SEQ ID NO: 1728; WAN024FSQ_at; Start 1045; Stop 1069
aaaagagcggagctgattcatcagc

SEQ ID NO: 219504 - DNA, 25 bp, Artificial
  probe
  misc_feature (1)..(25): SEQ ID NO: 1728; WAN024FSQ_at; Start 487; Stop 511
tctgattataacttggaagagcagg

SEQ ID NO: 219505 - DNA, 25 bp, Artificial
  probe
  misc_feature (1)..(25): SEQ ID NO: 1728; WAN024FSQ_at; Start 121; Stop 145
tacaatagaaaaggattgactgagg

SEQ ID NO: 219506 - DNA, 25 bp, Artificial
  probe
  misc_feature (1)..(25): SEQ ID NO: 1728; WAN024FSQ_at; Start 52; Stop 76
caacgtccacaatttattgcagaaa

SEQ ID NO: 219507 - DNA, 25 bp, Artificial
  probe
  misc_feature (1)..(25): SEQ ID NO: 1728; WAN024FSQ_at; Start 233; Stop 257
aaattgttgcttggaatattcgaag

SEQ ID NO: 219508 - DNA, 25 bp, Artificial
  probe
  misc_feature (1)..(25): SEQ ID NO: 1728; WAN024FSQ_at; Start 37; Stop 61
tggaattggataaaacaacgtccac

SEQ ID NO: 219509 - DNA, 25 bp, Artificial
  probe
  misc_feature (1)..(25): SEQ ID NO: 1728; WAN024FSQ_at; Start 566; Stop 590
ctactcggcataaaaagaataacca

SEQ ID NO: 219510 - DNA, 25 bp, Artificial
  probe
  misc_feature (1)..(25): SEQ ID NO: 1728; WAN024FSQ_at; Start 593; Stop 617
agcttgtacttgcatatgttggaac

SEQ ID NO: 219511 - DNA, 25 bp, Artificial
  probe
  misc_feature (1)..(25): SEQ ID NO: 1728; WAN024FSQ_at; Start 1037; Stop 1061
cttgggaaaaaagagcggagctgat

SEQ ID NO: 219512 - DNA, 25 bp, Artificial
  probe
  misc_feature (1)..(25): SEQ ID NO: 1728; WAN024FSQ_at; Start 183; Stop 207
tgccctaccttttgttaataggtca

SEQ ID NO: 219513 - DNA, 25 bp, Artificial
  probe
  misc_feature (1)..(25): SEQ ID NO: 1728; WAN024FSQ_at; Start 751; Stop 775
gtaccacacgagaagatttatcagt

SEQ ID NO: 219514 - DNA, 25 bp, Artificial
  probe
  misc_feature (1)..(25): SEQ ID NO: 1728; WAN024FSQ_at; Start 822; Stop 846
tattgttgaagcagtggatccagtc

SEQ ID NO: 219515 - DNA, 25 bp, Artificial
  probe
  misc_feature (1)..(25): SEQ ID NO: 1728; WAN024FSQ_at; Start 551; Stop 575
aaatcttaagcattcctactcggca

SEQ ID NO: 219516 - DNA, 25 bp, Artificial
  probe
  misc_feature (1)..(25): SEQ ID NO: 1728; WAN024FSQ_at; Start 736; Stop 760
cattatttaggaagtgtaccacacg

SEQ ID NO: 219517 - DNA, 25 bp, Artificial
  probe
  misc_feature (1)..(25): SEQ ID NO: 1728; WAN024FSQ_at; Start 289; Stop 313
tatttgacaaatccaatgcagtttg

SEQ ID NO: 219518 - DNA, 25 bp, Artificial
  probe
  misc_feature (1)..(25): SEQ ID NO: 1728; WAN024FSQ_at; Start 201; Stop 225
taggtcaccgaaactaaagcaactg

SEQ ID NO: 219519 - DNA, 25 bp, Artificial
  probe
  misc_feature (1)..(25): SEQ ID NO: 1728; WAN024FSQ_at; Start 99; Stop 123
gctagttctgtatcgctattggtac

SEQ ID NO: 219520 - DNA, 25 bp, Artificial
  probe
  misc_feature (1)..(25): SEQ ID NO: 1728; WAN024FSQ_at; Start 1062; Stop 1086
tcatcagctgattaaccaattgtaa

SEQ ID NO: 219521 - DNA, 25 bp, Artificial
  probe
  misc_feature (1)..(25): SEQ ID NO: 1728; WAN024FSQ_at; Start 906; Stop 930
tctgagatttgaaccatttgtatac

SEQ ID NO: 219522 - DNA, 25 bp, Artificial
  probe
  misc_feature (1)..(25): SEQ ID NO: 1728; WAN024FSQ_at; Start 168; Stop 192
tatatcacgtatttatgccctacct

SEQ ID NO: 219523 - DNA, 25 bp, Artificial
  probe
  misc_feature (1)..(25): SEQ ID NO: 1728; WAN024FSQ_at; Start 690; Stop 714
gattggtccgattagcaaagctgat

SEQ ID NO: 219524 - DNA, 25 bp, Artificial
  probe
  misc_feature (1)..(25): SEQ ID NO: 1728; WAN024FSQ_at; Start 305; Stop 329
tgcagtttgcatctcttgtagacaa

SEQ ID NO: 219525 - DNA, 25 bp, Artificial
  probe
  misc_feature (1)..(25): SEQ ID NO: 1728; WAN024FSQ_at; Start 136; Stop 160
ttgactgaggatagaaatactaaca

SEQ ID NO: 219526 - DNA, 25 bp, Artificial
  probe
  misc_feature (1)..(25): SEQ ID NO: 1728; WAN024FSQ_at; Start 457; Stop 481
tcgagtgagaaactaagagaaaata

SEQ ID NO: 219527 - DNA, 25 bp, Artificial
  probe
  misc_feature (1)..(25): SEQ ID NO: 1728; WAN024FSQ_at; Start 418; Stop 442
gaagagaaactggtcaatagagcta

SEQ ID NO: 219528 - DNA, 25 bp, Artificial
  probe
  misc_feature (1)..(25): SEQ ID NO: 1728; WAN024FSQ_at; Start 360; Stop 384
ggattatcatgtggcttttatagaa

SEQ ID NO: 219529 - DNA, 25 bp, Artificial
  probe
  misc_feature (1)..(25): SEQ ID NO: 2253; WAN024FSR_at; Start 74; Stop 98
cagtcaagagctggcgccgattgcc

SEQ ID NO: 219530 - DNA, 25 bp, Artificial
  probe
  misc_feature (1)..(25): SEQ ID NO: 2253; WAN024FSR_at; Start 245; Stop 269
cgttgggtatggtgaacgtgtttca

SEQ ID NO: 219531 - DNA, 25 bp, Artificial
  probe
  misc_feature (1)..(25): SEQ ID NO: 2253; WAN024FSR_at; Start 230; Stop 254
gccagaccagcctcacgttgggtat

SEQ ID NO: 219532 - DNA, 25 bp, Artificial
  probe
  misc_feature (1)..(25): SEQ ID NO: 2253; WAN024FSR_at; Start 133; Stop 157
gatacgaccagatgccaagacgaca

SEQ ID NO: 219533 - DNA, 25 bp, Artificial
  probe
  misc_feature (1)..(25): SEQ ID NO: 2253; WAN024FSR_at; Start 92; Stop 116
gattgccctgctgtatagatcagag

SEQ ID NO: 219534 - DNA, 25 bp, Artificial
  probe
  misc_feature (1)..(25): SEQ ID NO: 2253; WAN024FSR_at; Start 307; Stop 331
aaagactgtcaaggccaaggcacct

SEQ ID NO: 219535 - DNA, 25 bp, Artificial
  probe
  misc_feature (1)..(25): SEQ ID NO: 2253; WAN024FSR_at; Start 292; Stop 316
catctgaggcaagttaaagactgtc

SEQ ID NO: 219536 - DNA, 25 bp, Artificial
  probe
  misc_feature (1)..(25): SEQ ID NO: 2253; WAN024FSR_at; Start 305; Stop 329
ttaaagactgtcaaggccaaggcac

SEQ ID NO: 219537 - DNA, 25 bp, Artificial
  probe
  misc_feature (1)..(25): SEQ ID NO: 2253; WAN024FSR_at; Start 159; Stop 183
ccgttacaatacctggaagcgcttc

SEQ ID NO: 219538 - DNA, 25 bp, Artificial
  probe
  misc_feature (1)..(25): SEQ ID NO: 2253; WAN024FSR_at; Start 197; Stop 221
tgaaccactgtctcccagcgagaaa

SEQ ID NO: 219539 - DNA, 25 bp, Artificial
  probe
  misc_feature (1)..(25): SEQ ID NO: 2253; WAN024FSR_at; Start 280; Stop 304
tacattacgcgtcatctgaggcaag

SEQ ID NO: 219540 - DNA, 25 bp, Artificial
  probe
  misc_feature (1)..(25): SEQ ID NO: 2253; WAN024FSR_at; Start 213; Stop 237
agcgagaaatcccaagagccagacc

SEQ ID NO: 219541 - DNA, 25 bp, Artificial
  probe
  misc_feature (1)..(25): SEQ ID NO: 2253; WAN024FSR_at; Start 122; Stop 146
gcttcgccaaagatacgaccagatg

SEQ ID NO: 219542 - DNA, 25 bp, Artificial
  probe
  misc_feature (1)..(25): SEQ ID NO: 2253; WAN024FSR_at; Start 127; Stop 151
gccaaagatacgaccagatgccaag

SEQ ID NO: 219543 - DNA, 25 bp, Artificial
  probe
  misc_feature (1)..(25): SEQ ID NO: 2253; WAN024FSR_at; Start 237; Stop 261
cagcctcacgttgggtatggtgaac

SEQ ID NO: 219544 - DNA, 25 bp, Artificial
  probe
  misc_feature (1)..(25): SEQ ID NO: 2253; WAN024FSR_at; Start 151; Stop 175
gacgacacccgttacaatacctgga

SEQ ID NO: 219545 - DNA, 25 bp, Artificial
  probe
  misc_feature (1)..(25): SEQ ID NO: 2253; WAN024FSR_at; Start 287; Stop 311
cgcgtcatctgaggcaagttaaaga

SEQ ID NO: 219546 - DNA, 25 bp, Artificial
  probe
  misc_feature (1)..(25): SEQ ID NO: 2253; WAN024FSR_at; Start 58; Stop 82
gatattccagttagaccagtcaaga

SEQ ID NO: 219547 - DNA, 25 bp, Artificial
  probe
  misc_feature (1)..(25): SEQ ID NO: 2253; WAN024FSR_at; Start 41; Stop 65
gggctagtcacactgaggatattcc

SEQ ID NO: 219548 - DNA, 25 bp, Artificial
  probe
  misc_feature (1)..(25): SEQ ID NO: 2253; WAN024FSR_at; Start 114; Stop 138
gagctgcagcttcgccaaagatacg

SEQ ID NO: 219549 - DNA, 25 bp, Artificial
  probe
  misc_feature (1)..(25): SEQ ID NO: 2253; WAN024FSR_at; Start 185; Stop 209
ggaataacaacatgaaccactgtct

SEQ ID NO: 219550 - DNA, 25 bp, Artificial
  probe
  misc_feature (1)..(25): SEQ ID NO: 2253; WAN024FSR_at; Start 105; Stop 129
tatagatcagagctgcagcttcgcc

SEQ ID NO: 219551 - DNA, 25 bp, Artificial
  probe
  misc_feature (1)..(25): SEQ ID NO: 2253; WAN024FSR_at; Start 255; Stop 279
ggtgaacgtgtttcaaactatcctc

SEQ ID NO: 219552 - DNA, 25 bp, Artificial
  probe
  misc_feature (1)..(25): SEQ ID NO: 2253; WAN024FSR_at; Start 2; Stop 26
tggacagccaaggtttctgcttgac

SEQ ID NO: 219553 - DNA, 25 bp, Artificial
  probe
  misc_feature (1)..(25): SEQ ID NO: 2253; WAN024FSR_at; Start 8; Stop 32
gccaaggtttctgcttgacggaaga

SEQ ID NO: 219554 - DNA, 25 bp, Artificial
  probe
  misc_feature (1)..(25): SEQ ID NO: 2253; WAN024FSR_at; Start 87; Stop 111
gcgccgattgccctgctgtatagat

SEQ ID NO: 219555 - DNA, 25 bp, Artificial
  probe
  misc_feature (1)..(25): SEQ ID NO: 2253; WAN024FSR_at; Start 205; Stop 229
tgtctcccagcgagaaatcccaaga

SEQ ID NO: 219556 - DNA, 25 bp, Artificial
  probe
  misc_feature (1)..(25): SEQ ID NO: 2253; WAN024FSR_at; Start 143; Stop 167
gatgccaagacgacacccgttacaa

SEQ ID NO: 219557 - DNA, 25 bp, Artificial
  probe
  misc_feature (1)..(25): SEQ ID NO: 2253; WAN024FSR_at; Start 97; Stop 121
ccctgctgtatagatcagagctgca

SEQ ID NO: 219558 - DNA, 25 bp, Artificial
  probe
  misc_feature (1)..(25): SEQ ID NO: 2253; WAN024FSR_at; Start 68; Stop 92
ttagaccagtcaagagctggcgccg

SEQ ID NO: 219559 - DNA, 25 bp, Artificial
  probe
  misc_feature (1)..(25): SEQ ID NO: 2253; WAN024FSR_at; Start 109; Stop 133
gatcagagctgcagcttcgccaaag

SEQ ID NO: 219560 - DNA, 25 bp, Artificial
  probe
  misc_feature (1)..(25): SEQ ID NO: 2253; WAN024FSR_at; Start 54; Stop 78
tgaggatattccagttagaccagtc

SEQ ID NO: 219561 - DNA, 25 bp, Artificial
  probe
  misc_feature (1)..(25): SEQ ID NO: 2253; WAN024FSR_at; Start 267; Stop 291
tcaaactatcctctacattacgcgt

SEQ ID NO: 219562 - DNA, 25 bp, Artificial
  probe
  misc_feature (1)..(25): SEQ ID NO: 2253; WAN024FSR_at; Start 17; Stop 41
tctgcttgacggaagatagagatgg

SEQ ID NO: 219563 - DNA, 25 bp, Artificial
  probe
  misc_feature (1)..(25): SEQ ID NO: 2037; WAN024FSS_at; Start 501; Stop 525
tctggctcttgggatttctcgctgg

SEQ ID NO: 219564 - DNA, 25 bp, Artificial
  probe
  misc_feature (1)..(25): SEQ ID NO: 2037; WAN024FSS_at; Start 166; Stop 190
ggtgggattggcattcagctttaca

SEQ ID NO: 219565 - DNA, 25 bp, Artificial
  probe
  misc_feature (1)..(25): SEQ ID NO: 2037; WAN024FSS_at; Start 585; Stop 609
cttggcatctggtcgtatctttggc

SEQ ID NO: 219566 - DNA, 25 bp, Artificial
  probe
  misc_feature (1)..(25): SEQ ID NO: 2037; WAN024FSS_at; Start 517; Stop 541
tctcgctgggagacagtggttcatg

SEQ ID NO: 219567 - DNA, 25 bp, Artificial
  probe
  misc_feature (1)..(25): SEQ ID NO: 2037; WAN024FSS_at; Start 782; Stop 806
tatcagcaggttctgccgctgtgct

SEQ ID NO: 219568 - DNA, 25 bp, Artificial
  probe
  misc_feature (1)..(25): SEQ ID NO: 2037; WAN024FSS_at; Start 122; Stop 146
cttggtctttcttgactggaaggtc

SEQ ID NO: 219569 - DNA, 25 bp, Artificial
  probe
  misc_feature (1)..(25): SEQ ID NO: 2037; WAN024FSS_at; Start 718; Stop 742
gaaaccttggctgtccatatctgga

SEQ ID NO: 219570 - DNA, 25 bp, Artificial
  probe
  misc_feature (1)..(25): SEQ ID NO: 2037; WAN024FSS_at; Start 767; Stop 791
cagatggaaccattgtatcagcagg

SEQ ID NO: 219571 - DNA, 25 bp, Artificial
  probe
  misc_feature (1)..(25): SEQ ID NO: 2037; WAN024FSS_at; Start 624; Stop 648
gatctatacagcagggcaatcggcg

SEQ ID NO: 219572 - DNA, 25 bp, Artificial
  probe
  misc_feature (1)..(25): SEQ ID NO: 2037; WAN024FSS_at; Start 553; Stop 577
gaagcgcttccaggtattgtaacgg

SEQ ID NO: 219573 - DNA, 25 bp, Artificial
  probe
  misc_feature (1)..(25): SEQ ID NO: 2037; WAN024FSS_at; Start 737; Stop 761
tctggaaagtcaatagtgaaggcac

SEQ ID NO: 219574 - DNA, 25 bp, Artificial
  probe
  misc_feature (1)..(25): SEQ ID NO: 2037; WAN024FSS_at; Start 244; Stop 268
ggagctgggatttacttggctgaat

SEQ ID NO: 219575 - DNA, 25 bp, Artificial
  probe
  misc_feature (1)..(25): SEQ ID NO: 2037; WAN024FSS_at; Start 467; Stop 491
tgaaacacgttcaccatacccaacg

SEQ ID NO: 219576 - DNA, 25 bp, Artificial
  probe
  misc_feature (1)..(25): SEQ ID NO: 2037; WAN024FSS_at; Start 567; Stop 591
tattgtaacgggtgtcgtcttggca

SEQ ID NO: 219577 - DNA, 25 bp, Artificial
  probe
  misc_feature (1)..(25): SEQ ID NO: 2037; WAN024FSS_at; Start 229; Stop 253
gtacctctttctatgggagctggga

SEQ ID NO: 219578 - DNA, 25 bp, Artificial
  probe
  misc_feature (1)..(25): SEQ ID NO: 2037; WAN024FSS_at; Start 28; Stop 52
gcaacagctgtcctctatacgattg

SEQ ID NO: 219579 - DNA, 25 bp, Artificial
  probe
  misc_feature (1)..(25): SEQ ID NO: 2037; WAN024FSS_at; Start 425; Stop 449
tctttaacttgcctcagatgacgcg

SEQ ID NO: 219580 - DNA, 25 bp, Artificial
  probe
  misc_feature (1)..(25): SEQ ID NO: 2037; WAN024FSS_at; Start 658; Stop 682
gactggtctaactggaatatcctca

SEQ ID NO: 219581 - DNA, 25 bp, Artificial
  probe
  misc_feature (1)..(25): SEQ ID NO: 2037; WAN024FSS_at; Start 600; Stop 624
tatctttggcgaagctgcagctctg

SEQ ID NO: 219582 - DNA, 25 bp, Artificial
  probe
  misc_feature (1)..(25): SEQ ID NO: 2037; WAN024FSS_at; Start 262; Stop 286
gctgaatatgctaaaaaaggtcctg

SEQ ID NO: 219583 - DNA, 25 bp, Artificial
  probe
  misc_feature (1)..(25): SEQ ID NO: 2037; WAN024FSS_at; Start 138; Stop 162
tggaaggtcttctgcttttcaagca

SEQ ID NO: 219584 - DNA, 25 bp, Artificial
  probe
  misc_feature (1)..(25): SEQ ID NO: 2037; WAN024FSS_at; Start 752; Stop 776
gtgaaggcactattccagatggaac

SEQ ID NO: 219585 - DNA, 25 bp, Artificial
  probe
  misc_feature (1)..(25): SEQ ID NO: 2037; WAN024FSS_at; Start 799; Stop 823
gctgtgctcctgatctttatcctga

SEQ ID NO: 219586 - DNA, 25 bp, Artificial
  probe
  misc_feature (1)..(25): SEQ ID NO: 2037; WAN024FSS_at; Start 843; Stop 867
taagttcggaagctatctacacaag

SEQ ID NO: 219587 - DNA, 25 bp, Artificial
  probe
  misc_feature (1)..(25): SEQ ID NO: 2037; WAN024FSS_at; Start 329; Stop 353
taccatcagtggtggtgggtctctt

SEQ ID NO: 219588 - DNA, 25 bp, Artificial
  probe
  misc_feature (1)..(25): SEQ ID NO: 2037; WAN024FSS_at; Start 105; Stop 129
gggcttgccccatatctcttggtct

SEQ ID NO: 219589 - DNA, 25 bp, Artificial
  probe
  misc_feature (1)..(25): SEQ ID NO: 2037; WAN024FSS_at; Start 673; Stop 697
aatatcctcagtgtgactagcccca

SEQ ID NO: 219590 - DNA, 25 bp, Artificial
  probe
  misc_feature (1)..(25): SEQ ID NO: 2037; WAN024FSS_at; Start 641; Stop 665
aatcggcgccagctcttgactggtc

SEQ ID NO: 219591 - DNA, 25 bp, Artificial
  probe
  misc_feature (1)..(25): SEQ ID NO: 2037; WAN024FSS_at; Start 278; Stop 302
aaggtcctgttaccaactttgtgcg

SEQ ID NO: 219592 - DNA, 25 bp, Artificial
  probe
  misc_feature (1)..(25): SEQ ID NO: 2037; WAN024FSS_at; Start 483; Stop 507
tacccaacgtgaggctggtctggct

SEQ ID NO: 219593 - DNA, 25 bp, Artificial
  probe
  misc_feature (1)..(25): SEQ ID NO: 2037; WAN024FSS_at; Start 858; Stop 882
tctacacaagaaattaaccgctgcc

SEQ ID NO: 219594 - DNA, 25 bp, Artificial
  probe
  misc_feature (1)..(25): SEQ ID NO: 2037; WAN024FSS_at; Start 45; Stop 69
tacgattgctagcatcattgtgaca

SEQ ID NO: 219595 - DNA, 25 bp, Artificial
  probe
  misc_feature (1)..(25): SEQ ID NO: 2037; WAN024FSS_at; Start 828; Stop 852
taactttggagctcgtaagttcgga

SEQ ID NO: 219596 - DNA, 25 bp, Artificial
  probe
  misc_feature (1)..(25): SEQ ID NO: 2037; WAN024FSS_at; Start 704; Stop 728
tcttccgtcaagcagaaaccttggc

SEQ ID NO: 219597 - DNA, 25 bp, Artificial
  probe
  misc_feature (1)..(25): SEQ ID NO: 3865; WAN024FST_at; Start 209; Stop 233
caaatgtggtatacttaggagtaag

SEQ ID NO: 219598 - DNA, 25 bp, Artificial
  probe
  misc_feature (1)..(25): SEQ ID NO: 3865; WAN024FST_at; Start 122; Stop 146
ccagacctcccttgattttgttaca

SEQ ID NO: 219599 - DNA, 25 bp, Artificial
  probe
  misc_feature (1)..(25): SEQ ID NO: 3865; WAN024FST_at; Start 32; Stop 56
ggcaggcgactacccgtcggaaatc

SEQ ID NO: 219600 - DNA, 25 bp, Artificial
  probe
  misc_feature (1)..(25): SEQ ID NO: 3865; WAN024FST_at; Start 131; Stop 155
ccttgattttgttacattgtaccct

SEQ ID NO: 219601 - DNA, 25 bp, Artificial
  probe
  misc_feature (1)..(25): SEQ ID NO: 3865; WAN024FST_at; Start 222; Stop 246
cttaggagtaagatttatagaataa

SEQ ID NO: 219602 - DNA, 25 bp, Artificial
  probe
  misc_feature (1)..(25): SEQ ID NO: 3865; WAN024FST_at; Start 67; Stop 91
gataccatttttcagataggaaacg

SEQ ID NO: 219603 - DNA, 25 bp, Artificial
  probe
  misc_feature (1)..(25): SEQ ID NO: 3865; WAN024FST_at; Start 27; Stop 51
tagaaggcaggcgactacccgtcgg

SEQ ID NO: 219604 - DNA, 25 bp, Artificial
  probe
  misc_feature (1)..(25): SEQ ID NO: 3865; WAN024FST_at; Start 125; Stop 149
gacctcccttgattttgttacattg

SEQ ID NO: 219605 - DNA, 25 bp, Artificial
  probe
  misc_feature (1)..(25): SEQ ID NO: 3865; WAN024FST_at; Start 160; Stop 184
tttccttcttggcaatgtctagagc

SEQ ID NO: 219606 - DNA, 25 bp, Artificial
  probe
  misc_feature (1)..(25): SEQ ID NO: 3865; WAN024FST_at; Start 183; Stop 207
gcgtttctctcgttcacatctaggg

SEQ ID NO: 219607 - DNA, 25 bp, Artificial
  probe
  misc_feature (1)..(25): SEQ ID NO: 3865; WAN024FST_at; Start 24; Stop 48
ggatagaaggcaggcgactacccgt

SEQ ID NO: 219608 - DNA, 25 bp, Artificial
  probe
  misc_feature (1)..(25): SEQ ID NO: 3865; WAN024FST_at; Start 88; Stop 112
aacgacctctttgtacttgctttgt

SEQ ID NO: 219609 - DNA, 25 bp, Artificial
  probe
  misc_feature (1)..(25): SEQ ID NO: 3865; WAN024FST_at; Start 14; Stop 38
ctcagttgacggatagaaggcaggc

SEQ ID NO: 219610 - DNA, 25 bp, Artificial
  probe
  misc_feature (1)..(25): SEQ ID NO: 3865; WAN024FST_at; Start 76; Stop 100
tttcagataggaaacgacctctttg

SEQ ID NO: 219611 - DNA, 25 bp, Artificial
  probe
  misc_feature (1)..(25): SEQ ID NO: 3865; WAN024FST_at; Start 101; Stop 125
tacttgctttgtttcttcattccag

SEQ ID NO: 219612 - DNA, 25 bp, Artificial
  probe
  misc_feature (1)..(25): SEQ ID NO: 3865; WAN024FST_at; Start 190; Stop 214
tctcgttcacatctaggggcaaatg

SEQ ID NO: 219613 - DNA, 25 bp, Artificial
  probe
  misc_feature (1)..(25): SEQ ID NO: 3865; WAN024FST_at; Start 79; Stop 103
cagataggaaacgacctctttgtac

SEQ ID NO: 219614 - DNA, 25 bp, Artificial
  probe
  misc_feature (1)..(25): SEQ ID NO: 3865; WAN024FST_at; Start 181; Stop 205
gagcgtttctctcgttcacatctag

SEQ ID NO: 219615 - DNA, 25 bp, Artificial
  probe
  misc_feature (1)..(25): SEQ ID NO: 3865; WAN024FST_at; Start 20; Stop 44
tgacggatagaaggcaggcgactac

SEQ ID NO: 219616 - DNA, 25 bp, Artificial
  probe
  misc_feature (1)..(25): SEQ ID NO: 3865; WAN024FST_at; Start 167; Stop 191
cttggcaatgtctagagcgtttctc

SEQ ID NO: 219617 - DNA, 25 bp, Artificial
  probe
  misc_feature (1)..(25): SEQ ID NO: 3865; WAN024FST_at; Start 62; Stop 86
gactcgataccatttttcagatagg

SEQ ID NO: 219618 - DNA, 25 bp, Artificial
  probe
  misc_feature (1)..(25): SEQ ID NO: 3865; WAN024FST_at; Start 60; Stop 84
cagactcgataccatttttcagata

SEQ ID NO: 219619 - DNA, 25 bp, Artificial
  probe
  misc_feature (1)..(25): SEQ ID NO: 3865; WAN024FST_at; Start 118; Stop 142
cattccagacctcccttgattttgt

SEQ ID NO: 219620 - DNA, 25 bp, Artificial
  probe
  misc_feature (1)..(25): SEQ ID NO: 3865; WAN024FST_at; Start 72; Stop 96
catttttcagataggaaacgacctc

SEQ ID NO: 219621 - DNA, 25 bp, Artificial
  probe
  misc_feature (1)..(25): SEQ ID NO: 3865; WAN024FST_at; Start 10; Stop 34
aaggctcagttgacggatagaaggc

SEQ ID NO: 219622 - DNA, 25 bp, Artificial
  probe
  misc_feature (1)..(25): SEQ ID NO: 3865; WAN024FST_at; Start 171; Stop 195
gcaatgtctagagcgtttctctcgt

SEQ ID NO: 219623 - DNA, 25 bp, Artificial
  probe
  misc_feature (1)..(25): SEQ ID NO: 3865; WAN024FST_at; Start 8; Stop 32
tcaaggctcagttgacggatagaag

SEQ ID NO: 219624 - DNA, 25 bp, Artificial
  probe
  misc_feature (1)..(25): SEQ ID NO: 3865; WAN024FST_at; Start 83; Stop 107
taggaaacgacctctttgtacttgc

SEQ ID NO: 219625 - DNA, 25 bp, Artificial
  probe
  misc_feature (1)..(25): SEQ ID NO: 3865; WAN024FST_at; Start 2; Stop 26
tgaaagtcaaggctcagttgacgga

SEQ ID NO: 219626 - DNA, 25 bp, Artificial
  probe
  misc_feature (1)..(25): SEQ ID NO: 3865; WAN024FST_at; Start 163; Stop 187
ccttcttggcaatgtctagagcgtt

SEQ ID NO: 219627 - DNA, 25 bp, Artificial
  probe
  misc_feature (1)..(25): SEQ ID NO: 3865; WAN024FST_at; Start 176; Stop 200
gtctagagcgtttctctcgttcaca

SEQ ID NO: 219628 - DNA, 25 bp, Artificial
  probe
  misc_feature (1)..(25): SEQ ID NO: 3865; WAN024FST_at; Start 106; Stop 130
gctttgtttcttcattccagacctc

SEQ ID NO: 219629 - DNA, 25 bp, Artificial
  probe
  misc_feature (1)..(25): SEQ ID NO: 3865; WAN024FST_at; Start 206; Stop 230
gggcaaatgtggtatacttaggagt

SEQ ID NO: 219630 - DNA, 25 bp, Artificial
  probe
  misc_feature (1)..(25): SEQ ID NO: 3865; WAN024FST_at; Start 111; Stop 135
gtttcttcattccagacctcccttg

SEQ ID NO: 219631 - DNA, 25 bp, Artificial
  probe
  misc_feature (1)..(25): SEQ ID NO: 2888; WAN024FSU_at; Start 212; Stop 236
tgagagaggataaacaaggcttgtt

SEQ ID NO: 219632 - DNA, 25 bp, Artificial
  probe
  misc_feature (1)..(25): SEQ ID NO: 2888; WAN024FSU_at; Start 147; Stop 171
gattcatccgatggtaggttggctg

SEQ ID NO: 219633 - DNA, 25 bp, Artificial
  probe
  misc_feature (1)..(25): SEQ ID NO: 2888; WAN024FSU_at; Start 197; Stop 221
ctaggaaaggatatttgagagagga

SEQ ID NO: 219634 - DNA, 25 bp, Artificial
  probe
  misc_feature (1)..(25): SEQ ID NO: 2888; WAN024FSU_at; Start 57; Stop 81
ttttgaagtggccttccagctcctc

SEQ ID NO: 219635 - DNA, 25 bp, Artificial
  probe
  misc_feature (1)..(25): SEQ ID NO: 2888; WAN024FSU_at; Start 82; Stop 106
caagtcaatcccatcaatgcctcgt

SEQ ID NO: 219636 - DNA, 25 bp, Artificial
  probe
  misc_feature (1)..(25): SEQ ID NO: 2888; WAN024FSU_at; Start 108; Stop 132
caatcgtttgatagtccagcccctg

SEQ ID NO: 219637 - DNA, 25 bp, Artificial
  probe
  misc_feature (1)..(25): SEQ ID NO: 2888; WAN024FSU_at; Start 222; Stop 246
taaacaaggcttgttgggttccaga

SEQ ID NO: 219638 - DNA, 25 bp, Artificial
  probe
  misc_feature (1)..(25): SEQ ID NO: 2888; WAN024FSU_at; Start 90; Stop 114
tcccatcaatgcctcgttcaatcgt

SEQ ID NO: 219639 - DNA, 25 bp, Artificial
  probe
  misc_feature (1)..(25): SEQ ID NO: 2888; WAN024FSU_at; Start 119; Stop 143
tagtccagcccctgtgcaatcaaga

SEQ ID NO: 219640 - DNA, 25 bp, Artificial
  probe
  misc_feature (1)..(25): SEQ ID NO: 2888; WAN024FSU_at; Start 163; Stop 187
ggttggctgttccaccaagatttcc

SEQ ID NO: 219641 - DNA, 25 bp, Artificial
  probe
  misc_feature (1)..(25): SEQ ID NO: 2888; WAN024FSU_at; Start 231; Stop 255
cttgttgggttccagaagtcagtac

SEQ ID NO: 219642 - DNA, 25 bp, Artificial
  probe
  misc_feature (1)..(25): SEQ ID NO: 2888; WAN024FSU_at; Start 62; Stop 86
aagtggccttccagctcctccaagt

SEQ ID NO: 219643 - DNA, 25 bp, Artificial
  probe
  misc_feature (1)..(25): SEQ ID NO: 2888; WAN024FSU_at; Start 234; Stop 258
gttgggttccagaagtcagtactag

SEQ ID NO: 219644 - DNA, 25 bp, Artificial
  probe
  misc_feature (1)..(25): SEQ ID NO: 2888; WAN024FSU_at; Start 190; Stop 214
ggcttgtctaggaaaggatatttga

SEQ ID NO: 219645 - DNA, 25 bp, Artificial
  probe
  misc_feature (1)..(25): SEQ ID NO: 2888; WAN024FSU_at; Start 139; Stop 163
caagaggcgattcatccgatggtag

SEQ ID NO: 219646 - DNA, 25 bp, Artificial
  probe
  misc_feature (1)..(25): SEQ ID NO: 2888; WAN024FSU_at; Start 224; Stop 248
aacaaggcttgttgggttccagaag

SEQ ID NO: 219647 - DNA, 25 bp, Artificial
  probe
  misc_feature (1)..(25): SEQ ID NO: 2888; WAN024FSU_at; Start 151; Stop 175
catccgatggtaggttggctgttcc

SEQ ID NO: 219648 - DNA, 25 bp, Artificial
  probe
  misc_feature (1)..(25): SEQ ID NO: 2888; WAN024FSU_at; Start 135; Stop 159
caatcaagaggcgattcatccgatg

SEQ ID NO: 219649 - DNA, 25 bp, Artificial
  probe
  misc_feature (1)..(25): SEQ ID NO: 2888; WAN024FSU_at; Start 124; Stop 148
cagcccctgtgcaatcaagaggcga

SEQ ID NO: 219650 - DNA, 25 bp, Artificial
  probe
  misc_feature (1)..(25): SEQ ID NO: 2888; WAN024FSU_at; Start 208; Stop 232
tatttgagagaggataaacaaggct

SEQ ID NO: 219651 - DNA, 25 bp, Artificial
  probe
  misc_feature (1)..(25): SEQ ID NO: 2888; WAN024FSU_at; Start 186; Stop 210
ccttggcttgtctaggaaaggatat

SEQ ID NO: 219652 - DNA, 25 bp, Artificial
  probe
  misc_feature (1)..(25): SEQ ID NO: 2888; WAN024FSU_at; Start 96; Stop 120
caatgcctcgttcaatcgtttgata

SEQ ID NO: 219653 - DNA, 25 bp, Artificial
  probe
  misc_feature (1)..(25): SEQ ID NO: 2888; WAN024FSU_at; Start 104; Stop 128
cgttcaatcgtttgatagtccagcc

SEQ ID NO: 219654 - DNA, 25 bp, Artificial
  probe
  misc_feature (1)..(25): SEQ ID NO: 2888; WAN024FSU_at; Start 154; Stop 178
ccgatggtaggttggctgttccacc

SEQ ID NO: 219655 - DNA, 25 bp, Artificial
  probe
  misc_feature (1)..(25): SEQ ID NO: 2888; WAN024FSU_at; Start 167; Stop 191
ggctgttccaccaagatttccttgg

SEQ ID NO: 219656 - DNA, 25 bp, Artificial
  probe
  misc_feature (1)..(25): SEQ ID NO: 2888; WAN024FSU_at; Start 50; Stop 74
tttcctgttttgaagtggccttcca

SEQ ID NO: 219657 - DNA, 25 bp, Artificial
  probe
  misc_feature (1)..(25): SEQ ID NO: 2888; WAN024FSU_at; Start 121; Stop 145
gtccagcccctgtgcaatcaagagg

SEQ ID NO: 219658 - DNA, 25 bp, Artificial
  probe
  misc_feature (1)..(25): SEQ ID NO: 2888; WAN024FSU_at; Start 131; Stop 155
tgtgcaatcaagaggcgattcatcc

SEQ ID NO: 219659 - DNA, 25 bp, Artificial
  probe
  misc_feature (1)..(25): SEQ ID NO: 2888; WAN024FSU_at; Start 159; Stop 183
ggtaggttggctgttccaccaagat

SEQ ID NO: 219660 - DNA, 25 bp, Artificial
  probe
  misc_feature (1)..(25): SEQ ID NO: 2888; WAN024FSU_at; Start 110; Stop 134
atcgtttgatagtccagcccctgtg

SEQ ID NO: 219661 - DNA, 25 bp, Artificial
  probe
  misc_feature (1)..(25): SEQ ID NO: 2888; WAN024FSU_at; Start 178; Stop 202
caagatttccttggcttgtctagga

SEQ ID NO: 219662 - DNA, 25 bp, Artificial
  probe
  misc_feature (1)..(25): SEQ ID NO: 2888; WAN024FSU_at; Start 128; Stop 152
ccctgtgcaatcaagaggcgattca

SEQ ID NO: 219663 - DNA, 25 bp, Artificial
  probe
  misc_feature (1)..(25): SEQ ID NO: 2888; WAN024FSU_at; Start 113; Stop 137
gtttgatagtccagcccctgtgcaa

SEQ ID NO: 219664 - DNA, 25 bp, Artificial
  probe
  misc_feature (1)..(25): SEQ ID NO: 2888; WAN024FSU_at; Start 227; Stop 251
aaggcttgttgggttccagaagtca

SEQ ID NO: 219665 - DNA, 25 bp, Artificial
  probe
  misc_feature (1)..(25): SEQ ID NO: 1069; WAN024FSV_at; Start 217; Stop 241
gggcaacatcaagacctagaaatcg

SEQ ID NO: 219666 - DNA, 25 bp, Artificial
  probe
  misc_feature (1)..(25): SEQ ID NO: 1069; WAN024FSV_at; Start 943; Stop 967
ctcattatgcaaaaggccctgtcac

SEQ ID NO: 219667 - DNA, 25 bp, Artificial
  probe
  misc_feature (1)..(25): SEQ ID NO: 1069; WAN024FSV_at; Start 390; Stop 414
tgagcaagctctctactgcaaggct

SEQ ID NO: 219668 - DNA, 25 bp, Artificial
  probe
  misc_feature (1)..(25): SEQ ID NO: 1069; WAN024FSV_at; Start 21; Stop 45
caaagaggtcgtttcctatctgaaa

SEQ ID NO: 219669 - DNA, 25 bp, Artificial
  probe
  misc_feature (1)..(25): SEQ ID NO: 1069; WAN024FSV_at; Start 153; Stop 177
ggaattacggcacgaacaatacctc

SEQ ID NO: 219670 - DNA, 25 bp, Artificial
  probe
  misc_feature (1)..(25): SEQ ID NO: 1069; WAN024FSV_at; Start 6; Stop 30
gaaacaaagcaagtacaaagaggtc

SEQ ID NO: 219671 - DNA, 25 bp, Artificial
  probe
  misc_feature (1)..(25): SEQ ID NO: 1069; WAN024FSV_at; Start 751; Stop 775
gattatctgggtgatttggactcca

SEQ ID NO: 219672 - DNA, 25 bp, Artificial
  probe
  misc_feature (1)..(25): SEQ ID NO: 1069; WAN024FSV_at; Start 258; Stop 282
tgccagtgcctatgacgatttccga

SEQ ID NO: 219673 - DNA, 25 bp, Artificial
  probe
  misc_feature (1)..(25): SEQ ID NO: 1069; WAN024FSV_at; Start 425; Stop 449
tactgacttctggaacccaacaagc

SEQ ID NO: 219674 - DNA, 25 bp, Artificial
  probe
  misc_feature (1)..(25): SEQ ID NO: 1069; WAN024FSV_at; Start 489; Stop 513
caaggaaatcttggtggaacagcca

SEQ ID NO: 219675 - DNA, 25 bp, Artificial
  probe
  misc_feature (1)..(25): SEQ ID NO: 1069; WAN024FSV_at; Start 893; Stop 917
tcaaagaagcatttgtggcctacaa

SEQ ID NO: 219676 - DNA, 25 bp, Artificial
  probe
  misc_feature (1)..(25): SEQ ID NO: 1069; WAN024FSV_at; Start 241; Stop 265
gaggttaccgacgaacatgccagtg

SEQ ID NO: 219677 - DNA, 25 bp, Artificial
  probe
  misc_feature (1)..(25): SEQ ID NO: 1069; WAN024FSV_at; Start 823; Stop 847
tatatcaagtccttctcgaccagcc

SEQ ID NO: 219678 - DNA, 25 bp, Artificial
  probe
  misc_feature (1)..(25): SEQ ID NO: 1069; WAN024FSV_at; Start 65; Stop 89
gatttccgacgggtagtcgcctgcc

SEQ ID NO: 219679 - DNA, 25 bp, Artificial
  probe
  misc_feature (1)..(25): SEQ ID NO: 1069; WAN024FSV_at; Start 138; Stop 162
tcaacgagccctgctggaattacgg

SEQ ID NO: 219680 - DNA, 25 bp, Artificial
  probe
  misc_feature (1)..(25): SEQ ID NO: 1069; WAN024FSV_at; Start 1203; Stop 1227
tcaatttgccaaggtgtccctagac

SEQ ID NO: 219681 - DNA, 25 bp, Artificial
  probe
  misc_feature (1)..(25): SEQ ID NO: 1069; WAN024FSV_at; Start 1172; Stop 1196
ttgaagaggcctatttaagcacctg

SEQ ID NO: 219682 - DNA, 25 bp, Artificial
  probe
  misc_feature (1)..(25): SEQ ID NO: 1069; WAN024FSV_at; Start 104; Stop 128
tgagccttgactttcactgcagcaa

SEQ ID NO: 219683 - DNA, 25 bp, Artificial
  probe
  misc_feature (1)..(25): SEQ ID NO: 1069; WAN024FSV_at; Start 727; Stop 751
tatgatgtctatatcgtagaggacg

SEQ ID NO: 219684 - DNA, 25 bp, Artificial
  probe
  misc_feature (1)..(25): SEQ ID NO: 1069; WAN024FSV_at; Start 995; Stop 1019
aaaatcgtttggctcgcttgaccaa

SEQ ID NO: 219685 - DNA, 25 bp, Artificial
  probe
  misc_feature (1)..(25): SEQ ID NO: 1069; WAN024FSV_at; Start 1128; Stop 1152
taaaatcgccagtctcaaacacagt

SEQ ID NO: 219686 - DNA, 25 bp, Artificial
  probe
  misc_feature (1)..(25): SEQ ID NO: 1069; WAN024FSV_at; Start 199; Stop 223
tactatgtattagaacaagggcaac

SEQ ID NO: 219687 - DNA, 25 bp, Artificial
  probe
  misc_feature (1)..(25): SEQ ID NO: 1069; WAN024FSV_at; Start 178; Stop 202
tatgccaagcctcagagtggctact

SEQ ID NO: 219688 - DNA, 25 bp, Artificial
  probe
  misc_feature (1)..(25): SEQ ID NO: 1069; WAN024FSV_at; Start 565; Stop 589
acgattgaacgaggcattgatggga

SEQ ID NO: 219689 - DNA, 25 bp, Artificial
  probe
  misc_feature (1)..(25): SEQ ID NO: 1069; WAN024FSV_at; Start 550; Stop 574
gggctggactatcaaacgattgaac

SEQ ID NO: 219690 - DNA, 25 bp, Artificial
  probe
  misc_feature (1)..(25): SEQ ID NO: 1069; WAN024FSV_at; Start 594; Stop 618
cttggaggagctggaaggccacttc

SEQ ID NO: 219691 - DNA, 25 bp, Artificial
  probe
  misc_feature (1)..(25): SEQ ID NO: 1069; WAN024FSV_at; Start 921; Stop 945
tatcctagactacgacagcaacctc

SEQ ID NO: 219692 - DNA, 25 bp, Artificial
  probe
  misc_feature (1)..(25): SEQ ID NO: 1069; WAN024FSV_at; Start 83; Stop 107
gcctgccttctatccgtcaactgag

SEQ ID NO: 219693 - DNA, 25 bp, Artificial
  probe
  misc_feature (1)..(25): SEQ ID NO: 1069; WAN024FSV_at; Start 406; Stop 430
tgcaaggctaaccaactagtactga

SEQ ID NO: 219694 - DNA, 25 bp, Artificial
  probe
  misc_feature (1)..(25): SEQ ID NO: 1069; WAN024FSV_at; Start 121; Stop 145
tgcagcaaggacaccattcaacgag

SEQ ID NO: 219695 - DNA, 25 bp, Artificial
  probe
  misc_feature (1)..(25): SEQ ID NO: 1069; WAN024FSV_at; Start 504; Stop 528
ggaacagccaacctaccatcggatg

SEQ ID NO: 219696 - DNA, 25 bp, Artificial
  probe
  misc_feature (1)..(25): SEQ ID NO: 1069; WAN024FSV_at; Start 517; Stop 541
taccatcggatgaatcgcctcttga

SEQ ID NO: 219697 - DNA, 25 bp, Artificial
  probe
  misc_feature (1)..(25): SEQ ID NO: 1069; WAN024FSV_at; Start 1153; Stop 1177
caactgggcttggacttctttgaag

SEQ ID NO: 219698 - DNA, 25 bp, Artificial
  probe
  misc_feature (1)..(25): SEQ ID NO: 1069; WAN024FSV_at; Start 1113; Stop 1137
cctgagacagtatcctaaaatcgcc

SEQ ID NO: 219699 - DNA, 25 bp, Artificial
  probe
  misc_feature (1)..(25): SEQ ID NO: 6421; WAN024FSW_at; Start 1039; Stop 1063
ttttttgaggacagtggcttcacct

SEQ ID NO: 219700 - DNA, 25 bp, Artificial
  probe
  misc_feature (1)..(25): SEQ ID NO: 6421; WAN024FSW_at; Start 165; Stop 189
tggtctacaaaaagctttgcatggg

SEQ ID NO: 219701 - DNA, 25 bp, Artificial
  probe
  misc_feature (1)..(25): SEQ ID NO: 6421; WAN024FSW_at; Start 73; Stop 97
tacctatcggataaagaactacaag

SEQ ID NO: 219702 - DNA, 25 bp, Artificial
  probe
  misc_feature (1)..(25): SEQ ID NO: 6421; WAN024FSW_at; Start 1066; Stop 1090
gattcaggaaccattttagataaaa

SEQ ID NO: 219703 - DNA, 25 bp, Artificial
  probe
  misc_feature (1)..(25): SEQ ID NO: 6421; WAN024FSW_at; Start 59; Stop 83
taatcaatagaagatacctatcgga

SEQ ID NO: 219704 - DNA, 25 bp, Artificial
  probe
  misc_feature (1)..(25): SEQ ID NO: 6421; WAN024FSW_at; Start 435; Stop 459
tgctggtacagaaacgaaacttgaa

SEQ ID NO: 219705 - DNA, 25 bp, Artificial
  probe
  misc_feature (1)..(25): SEQ ID NO: 6421; WAN024FSW_at; Start 503; Stop 527
cacgcttaattttgataaatcgccc

SEQ ID NO: 219706 - DNA, 25 bp, Artificial
  probe
  misc_feature (1)..(25): SEQ ID NO: 6421; WAN024FSW_at; Start 420; Stop 444
ggattacacatgttatgctggtaca

SEQ ID NO: 219707 - DNA, 25 bp, Artificial
  probe
  misc_feature (1)..(25): SEQ ID NO: 6421; WAN024FSW_at; Start 229; Stop 253
ctttctgaacaaaaagcagttggga

SEQ ID NO: 219708 - DNA, 25 bp, Artificial
  probe
  misc_feature (1)..(25): SEQ ID NO: 6421; WAN024FSW_at; Start 775; Stop 799
tctttgaaagaacaaataagaacgc

SEQ ID NO: 219709 - DNA, 25 bp, Artificial
  probe
  misc_feature (1)..(25): SEQ ID NO: 6421; WAN024FSW_at; Start 131; Stop 155
ccaaggtctttgaaatgaaactatc

SEQ ID NO: 219710 - DNA, 25 bp, Artificial
  probe
  misc_feature (1)..(25): SEQ ID NO: 6421; WAN024FSW_at; Start 671; Stop 695
cacgagctaggctagatttagcaaa

SEQ ID NO: 219711 - DNA, 25 bp, Artificial
  probe
  misc_feature (1)..(25): SEQ ID NO: 6421; WAN024FSW_at; Start 405; Stop 429
tactgatactaaactggattacaca

SEQ ID NO: 219712 - DNA, 25 bp, Artificial
  probe
  misc_feature (1)..(25): SEQ ID NO: 6421; WAN024FSW_at; Start 570; Stop 594
gccaggtgaatattatacaaaagaa

SEQ ID NO: 219713 - DNA, 25 bp, Artificial
  probe
  misc_feature (1)..(25): SEQ ID NO: 6421; WAN024FSW_at; Start 1208; Stop 1232
gatattataaaatgggacgacagta

SEQ ID NO: 219714 - DNA, 25 bp, Artificial
  probe
  misc_feature (1)..(25): SEQ ID NO: 6421; WAN024FSW_at; Start 1146; Stop 1170
tagactgaatcacattaaagaagga

SEQ ID NO: 219715 - DNA, 25 bp, Artificial
  probe
  misc_feature (1)..(25): SEQ ID NO: 6421; WAN024FSW_at; Start 791; Stop 815
taagaacgctattatcagctacaac

SEQ ID NO: 219716 - DNA, 25 bp, Artificial
  probe
  misc_feature (1)..(25): SEQ ID NO: 6421; WAN024FSW_at; Start 808; Stop 832
gctacaacaatagtattaactagcg

SEQ ID NO: 219717 - DNA, 25 bp, Artificial
  probe
  misc_feature (1)..(25): SEQ ID NO: 6421; WAN024FSW_at; Start 518; Stop 542
taaatcgcccaactcaattctcaga

SEQ ID NO: 219718 - DNA, 25 bp, Artificial
  probe
  misc_feature (1)..(25): SEQ ID NO: 6421; WAN024FSW_at; Start 255; Stop 279
gagaaatcgagtctatggatcttac

SEQ ID NO: 219719 - DNA, 25 bp, Artificial
  probe
  misc_feature (1)..(25): SEQ ID NO: 6421; WAN024FSW_at; Start 328; Stop 352
ctaaactatttcataaatcagtggg

SEQ ID NO: 219720 - DNA, 25 bp, Artificial
  probe
  misc_feature (1)..(25): SEQ ID NO: 6421; WAN024FSW_at; Start 1050; Stop 1074
cagtggcttcacctatgattcagga

SEQ ID NO: 219721 - DNA, 25 bp, Artificial
  probe
  misc_feature (1)..(25): SEQ ID NO: 6421; WAN024FSW_at; Start 930; Stop 954
taaaatctcagaagctagtgtgagc

SEQ ID NO: 219722 - DNA, 25 bp, Artificial
  probe
  misc_feature (1)..(25): SEQ ID NO: 6421; WAN024FSW_at; Start 532; Stop 556
caattctcagagataattatacctg

SEQ ID NO: 219723 - DNA, 25 bp, Artificial
  probe
  misc_feature (1)..(25): SEQ ID NO: 6421; WAN024FSW_at; Start 708; Stop 732
cggtgagaatggtattgaaaaggtc

SEQ ID NO: 219724 - DNA, 25 bp, Artificial
  probe
  misc_feature (1)..(25): SEQ ID NO: 6421; WAN024FSW_at; Start 189; Stop 213
gaaaggtggtgttgtagattcaaag

SEQ ID NO: 219725 - DNA, 25 bp, Artificial
  probe
  misc_feature (1)..(25): SEQ ID NO: 6421; WAN024FSW_at; Start 824; Stop 848
taactagcggttcgttggctcataa

SEQ ID NO: 219726 - DNA, 25 bp, Artificial
  probe
  misc_feature (1)..(25): SEQ ID NO: 6421; WAN024FSW_at; Start 483; Stop 507
actcctcggtatagataaatcacgc

SEQ ID NO: 219727 - DNA, 25 bp, Artificial
  probe
  misc_feature (1)..(25): SEQ ID NO: 6421; WAN024FSW_at; Start 118; Stop 142
acagtgttacctcccaaggtctttg

SEQ ID NO: 219728 - DNA, 25 bp, Artificial
  probe
  misc_feature (1)..(25): SEQ ID NO: 6421; WAN024FSW_at; Start 742; Stop 766
aacggttatactccagtttatatgg

SEQ ID NO: 219729 - DNA, 25 bp, Artificial
  probe
  misc_feature (1)..(25): SEQ ID NO: 6421; WAN024FSW_at; Start 555; Stop 579
tgaaagttcaattctgccaggtgaa

SEQ ID NO: 219730 - DNA, 25 bp, Artificial
  probe
  misc_feature (1)..(25): SEQ ID NO: 6421; WAN024FSW_at; Start 658; Stop 682
aaaatttattgttcacgagctaggc

SEQ ID NO: 219731 - DNA, 25 bp, Artificial
  probe
  misc_feature (1)..(25): SEQ ID NO: 6421; WAN024FSW_at; Start 689; Stop 713
tagcaaaaggtaaagagttcggtga

SEQ ID NO: 219732 - DNA, 25 bp, Artificial
  probe
  misc_feature (1)..(25): SEQ ID NO: 6421; WAN024FSW_at; Start 957; Stop 981
tgtggatatttatcgttccccgtta

SEQ ID NO: 219733 - DNA, 25 bp, Artificial
  probe
  misc_feature (1)..(25): SEQ ID NO: 1010; WAN024FSX_at; Start 830; Stop 854
cgagtggttcgttagcacataatct

SEQ ID NO: 219734 - DNA, 25 bp, Artificial
  probe
  misc_feature (1)..(25): SEQ ID NO: 1010; WAN024FSX_at; Start 170; Stop 194
tacaaaaatctttgcatggaaaggg

SEQ ID NO: 219735 - DNA, 25 bp, Artificial
  probe
  misc_feature (1)..(25): SEQ ID NO: 1010; WAN024FSX_at; Start 816; Stop 840
gacaatagtattaacgagtggttcg

SEQ ID NO: 219736 - DNA, 25 bp, Artificial
  probe
  misc_feature (1)..(25): SEQ ID NO: 1010; WAN024FSX_at; Start 541; Stop 565
gaagtcattattcctgaaagctcca

SEQ ID NO: 219737 - DNA, 25 bp, Artificial
  probe
  misc_feature (1)..(25): SEQ ID NO: 1010; WAN024FSX_at; Start 230; Stop 254
tatctgcacaaaaagcagtcgggat

SEQ ID NO: 219738 - DNA, 25 bp, Artificial
  probe
  misc_feature (1)..(25): SEQ ID NO: 1010; WAN024FSX_at; Start 419; Stop 443
tagtctatacctgctatgctggaac

SEQ ID NO: 219739 - DNA, 25 bp, Artificial
  probe
  misc_feature (1)..(25): SEQ ID NO: 1010; WAN024FSX_at; Start 188; Stop 212
gaaagggtggagttgtagactcaaa

SEQ ID NO: 219740 - DNA, 25 bp, Artificial
  probe
  misc_feature (1)..(25): SEQ ID NO: 1010; WAN024FSX_at; Start 508; Stop 532
ttaatcatgataaactgtcccactc

SEQ ID NO: 219741 - DNA, 25 bp, Artificial
  probe
  misc_feature (1)..(25): SEQ ID NO: 1010; WAN024FSX_at; Start 636; Stop 660
ggacaagtatgatgtgaatgctaaa

SEQ ID NO: 219742 - DNA, 25 bp, Artificial
  probe
  misc_feature (1)..(25): SEQ ID NO: 1010; WAN024FSX_at; Start 119; Stop 143
tagtcttaccaccaaaggcatttga

SEQ ID NO: 219743 - DNA, 25 bp, Artificial
  probe
  misc_feature (1)..(25): SEQ ID NO: 1010; WAN024FSX_at; Start 472; Stop 496
gagtttttgaagcttctcggcatag

SEQ ID NO: 219744 - DNA, 25 bp, Artificial
  probe
  misc_feature (1)..(25): SEQ ID NO: 1010; WAN024FSX_at; Start 705; Stop 729
agaatttggcgaagacggtattgag

SEQ ID NO: 219745 - DNA, 25 bp, Artificial
  probe
  misc_feature (1)..(25): SEQ ID NO: 1010; WAN024FSX_at; Start 328; Stop 352
ttgaactatttcatcaaacaatggg

SEQ ID NO: 219746 - DNA, 25 bp, Artificial
  probe
  misc_feature (1)..(25): SEQ ID NO: 1010; WAN024FSX_at; Start 773; Stop 797
caatgtctttggaagagcaaataaa

SEQ ID NO: 219747 - DNA, 25 bp, Artificial
  probe
  misc_feature (1)..(25): SEQ ID NO: 1010; WAN024FSX_at; Start 667; Stop 691
tattgttcgaggtctaaattaggga

SEQ ID NO: 219748 - DNA, 25 bp, Artificial
  probe
  misc_feature (1)..(25): SEQ ID NO: 1010; WAN024FSX_at; Start 601; Stop 625
caactattcagttcggtagtagaaa

SEQ ID NO: 219749 - DNA, 25 bp, Artificial
  probe
  misc_feature (1)..(25): SEQ ID NO: 1010; WAN024FSX_at; Start 964; Stop 988
gatatctatcgatcacctttaccga

SEQ ID NO: 219750 - DNA, 25 bp, Artificial
  probe
  misc_feature (1)..(25): SEQ ID NO: 1010; WAN024FSX_at; Start 895; Stop 919
aaaacctatagagtaaatctccatc

SEQ ID NO: 219751 - DNA, 25 bp, Artificial
  probe
  misc_feature (1)..(25): SEQ ID NO: 1010; WAN024FSX_at; Start 523; Stop 547
tgtcccactcagttctcagaagtca

SEQ ID NO: 219752 - DNA, 25 bp, Artificial
  probe
  misc_feature (1)..(25): SEQ ID NO: 1010; WAN024FSX_at; Start 486; Stop 510
tctcggcatagatcaatcacgttta

SEQ ID NO: 219753 - DNA, 25 bp, Artificial
  probe
  misc_feature (1)..(25): SEQ ID NO: 1010; WAN024FSX_at; Start 73; Stop 97
tacttatcagataaagaacttcaag

SEQ ID NO: 219754 - DNA, 25 bp, Artificial
  probe
  misc_feature (1)..(25): SEQ ID NO: 1010; WAN024FSX_at; Start 449; Stop 473
caaagattgagggaaactatttaga

SEQ ID NO: 219755 - DNA, 25 bp, Artificial
  probe
  misc_feature (1)..(25): SEQ ID NO: 1010; WAN024FSX_at; Start 257; Stop 281
gaaatagagtctatggtccgtataa

SEQ ID NO: 219756 - DNA, 25 bp, Artificial
  probe
  misc_feature (1)..(25): SEQ ID NO: 1010; WAN024FSX_at; Start 380; Stop 404
ggttatggtatccattgctgcagga

SEQ ID NO: 219757 - DNA, 25 bp, Artificial
  probe
  misc_feature (1)..(25): SEQ ID NO: 1010; WAN024FSX_at; Start 362; Stop 386
tactggatgttgttggaaggttatg

SEQ ID NO: 219758 - DNA, 25 bp, Artificial
  probe
  misc_feature (1)..(25): SEQ ID NO: 1010; WAN024FSX_at; Start 435; Stop 459
tgctggaacagaaacaaagattgag

SEQ ID NO: 219759 - DNA, 25 bp, Artificial
  probe
  misc_feature (1)..(25): SEQ ID NO: 1010; WAN024FSX_at; Start 690; Stop 714
gattgctaaaagtaaagaatttggc

SEQ ID NO: 219760 - DNA, 25 bp, Artificial
  probe
  misc_feature (1)..(25): SEQ ID NO: 1010; WAN024FSX_at; Start 549; Stop 573
tattcctgaaagctccattttaccg

SEQ ID NO: 219761 - DNA, 25 bp, Artificial
  probe
  misc_feature (1)..(25): SEQ ID NO: 1010; WAN024FSX_at; Start 983; Stop 1007
taccgattttatacggatatggacc

SEQ ID NO: 219762 - DNA, 25 bp, Artificial
  probe
  misc_feature (1)..(25): SEQ ID NO: 1010; WAN024FSX_at; Start 933; Stop 957
cgagatctcagatgctacagtaaga

SEQ ID NO: 219763 - DNA, 25 bp, Artificial
  probe
  misc_feature (1)..(25): SEQ ID NO: 1010; WAN024FSX_at; Start 109; Stop 133
aaagctgggatagtcttaccaccaa

SEQ ID NO: 219764 - DNA, 25 bp, Artificial
  probe
  misc_feature (1)..(25): SEQ ID NO: 1010; WAN024FSX_at; Start 1206; Stop 1230
taggagatactataaaacaggacga

SEQ ID NO: 219765 - DNA, 25 bp, Artificial
  probe
  misc_feature (1)..(25): SEQ ID NO: 1010; WAN024FSX_at; Start 800; Stop 824
ccttattatcggctaagacaatagt

SEQ ID NO: 219766 - DNA, 25 bp, Artificial
  probe
  misc_feature (1)..(25): SEQ ID NO: 1010; WAN024FSX_at; Start 215; Stop 239
gaaattacattgaactatctgcaca

SEQ ID NO: 219767 - DNA, 25 bp, Artificial
  probe
  misc_feature (1)..(25): SEQ ID NO: 6308; WAN024FSY_at; Start 699; Stop 723
tattcttgatcactatagtgggaac

SEQ ID NO: 219768 - DNA, 25 bp, Artificial
  probe
  misc_feature (1)..(25): SEQ ID NO: 6308; WAN024FSY_at; Start 401; Stop 425
atccggcatcaagcgttaaggttta

SEQ ID NO: 219769 - DNA, 25 bp, Artificial
  probe
  misc_feature (1)..(25): SEQ ID NO: 6308; WAN024FSY_at; Start 10; Stop 34
gtaagtattattctacctgtctaca

SEQ ID NO: 219770 - DNA, 25 bp, Artificial
  probe
  misc_feature (1)..(25): SEQ ID NO: 6308; WAN024FSY_at; Start 726; Stop 750
tagagtttataaagcggcagtttcc

SEQ ID NO: 219771 - DNA, 25 bp, Artificial
  probe
  misc_feature (1)..(25): SEQ ID NO: 6308; WAN024FSY_at; Start 654; Stop 678
gaagttttcagataaagatttagat

SEQ ID NO: 219772 - DNA, 25 bp, Artificial
  probe
  misc_feature (1)..(25): SEQ ID NO: 6308; WAN024FSY_at; Start 641; Stop 665
gtattacaacaaagaagttttcaga

SEQ ID NO: 219773 - DNA, 25 bp, Artificial
  probe
  misc_feature (1)..(25): SEQ ID NO: 6308; WAN024FSY_at; Start 21; Stop 45
tctacctgtctacaatgttgaacag

SEQ ID NO: 219774 - DNA, 25 bp, Artificial
  probe
  misc_feature (1)..(25): SEQ ID NO: 6308; WAN024FSY_at; Start 842; Stop 866
tacgaaattggagaaatatgttatt

SEQ ID NO: 219775 - DNA, 25 bp, Artificial
  probe
  misc_feature (1)..(25): SEQ ID NO: 6308; WAN024FSY_at; Start 749; Stop 773
cctataaagtttcggcatgttttag

SEQ ID NO: 219776 - DNA, 25 bp, Artificial
  probe
  misc_feature (1)..(25): SEQ ID NO: 6308; WAN024FSY_at; Start 391; Stop 415
aatattttttatccggcatcaagcg

SEQ ID NO: 219777 - DNA, 25 bp, Artificial
  probe
  misc_feature (1)..(25): SEQ ID NO: 6308; WAN024FSY_at; Start 773; Stop 797
gaattttgttgaactcatcttcaga

SEQ ID NO: 219778 - DNA, 25 bp, Artificial
  probe
  misc_feature (1)..(25): SEQ ID NO: 6308; WAN024FSY_at; Start 683; Stop 707
tagacatttcaaatactattcttga

SEQ ID NO: 219779 - DNA, 25 bp, Artificial
  probe
  misc_feature (1)..(25): SEQ ID NO: 6308; WAN024FSY_at; Start 619; Stop 643
gcctatgtgcatagagacaatagta

SEQ ID NO: 219780 - DNA, 25 bp, Artificial
  probe
  misc_feature (1)..(25): SEQ ID NO: 6308; WAN024FSY_at; Start 709; Stop 733
cactatagtgggaactttagagttt

SEQ ID NO: 219781 - DNA, 25 bp, Artificial
  probe
  misc_feature (1)..(25): SEQ ID NO: 6308; WAN024FSY_at; Start 867; Stop 891
tgataaaaatgtccgattaaagaac

SEQ ID NO: 219782 - DNA, 25 bp, Artificial
  probe
  misc_feature (1)..(25): SEQ ID NO: 6308; WAN024FSY_at; Start 355; Stop 379
gctcattattatagtgaccgtcaaa

SEQ ID NO: 219783 - DNA, 25 bp, Artificial
  probe
  misc_feature (1)..(25): SEQ ID NO: 6308; WAN024FSY_at; Start 397; Stop 421
ttttatccggcatcaagcgttaagg

SEQ ID NO: 219784 - DNA, 25 bp, Artificial
  probe
  misc_feature (1)..(25): SEQ ID NO: 6308; WAN024FSY_at; Start 670; Stop 694
gatttagatattttagacatttcaa

SEQ ID NO: 219785 - DNA, 25 bp, Artificial
  probe
  misc_feature (1)..(25): SEQ ID NO: 6308; WAN024FSY_at; Start 547; Stop 571
gaagatagtgctgttatgtatctgc

SEQ ID NO: 219786 - DNA, 25 bp, Artificial
  probe
  misc_feature (1)..(25): SEQ ID NO: 6308; WAN024FSY_at; Start 528; Stop 552
ccctgttgggaagttatttgaagat

SEQ ID NO: 219787 - DNA, 25 bp, Artificial
  probe
  misc_feature (1)..(25): SEQ ID NO: 6308; WAN024FSY_at; Start 514; Stop 538
gatgatatcagattccctgttggga

SEQ ID NO: 219788 - DNA, 25 bp, Artificial
  probe
  misc_feature (1)..(25): SEQ ID NO: 6308; WAN024FSY_at; Start 604; Stop 628
aatgcgaaattatatgcctatgtgc

SEQ ID NO: 219789 - DNA, 25 bp, Artificial
  probe
  misc_feature (1)..(25): SEQ ID NO: 6308; WAN024FSY_at; Start 831; Stop 855
gacatatattttacgaaattggaga

SEQ ID NO: 219790 - DNA, 25 bp, Artificial
  probe
  misc_feature (1)..(25): SEQ ID NO: 6308; WAN024FSY_at; Start 586; Stop 610
gaaaagatagtatattctaatgcga

SEQ ID NO: 219791 - DNA, 25 bp, Artificial
  probe
  misc_feature (1)..(25): SEQ ID NO: 6308; WAN024FSY_at; Start 741; Stop 765
ggcagtttcctataaagtttcggca

SEQ ID NO: 219792 - DNA, 25 bp, Artificial
  probe
  misc_feature (1)..(25): SEQ ID NO: 6308; WAN024FSY_at; Start 873; Stop 897
aaatgtccgattaaagaacaagctt

SEQ ID NO: 219793 - DNA, 25 bp, Artificial
  probe
  misc_feature (1)..(25): SEQ ID NO: 6308; WAN024FSY_at; Start 484; Stop 508
tgggctaagatatataaaaaggaac

SEQ ID NO: 219794 - DNA, 25 bp, Artificial
  probe
  misc_feature (1)..(25): SEQ ID NO: 6308; WAN024FSY_at; Start 466; Stop 490
tcttttttggtatctgcttgggcta

SEQ ID NO: 219795 - DNA, 25 bp, Artificial
  probe
  misc_feature (1)..(25): SEQ ID NO: 6308; WAN024FSY_at; Start 761; Stop 785
cggcatgttttagaattttgttgaa

SEQ ID NO: 219796 - DNA, 25 bp, Artificial
  probe
  misc_feature (1)..(25): SEQ ID NO: 6308; WAN024FSY_at; Start 500; Stop 524
aaaaggaactatttgatgatatcag

SEQ ID NO: 219797 - DNA, 25 bp, Artificial
  probe
  misc_feature (1)..(25): SEQ ID NO: 6308; WAN024FSY_at; Start 349; Stop 373
gatcctgctcattattatagtgacc

SEQ ID NO: 219798 - DNA, 25 bp, Artificial
  probe
  misc_feature (1)..(25): SEQ ID NO: 6308; WAN024FSY_at; Start 556; Stop 580
gctgttatgtatctgctttttgaaa

SEQ ID NO: 219799 - DNA, 25 bp, Artificial
  probe
  misc_feature (1)..(25): SEQ ID NO: 6308; WAN024FSY_at; Start 627; Stop 651
gcatagagacaatagtattacaaca

SEQ ID NO: 219800 - DNA, 25 bp, Artificial
  probe
  misc_feature (1)..(25): SEQ ID NO: 6308; WAN024FSY_at; Start 478; Stop 502
tctgcttgggctaagatatataaaa

SEQ ID NO: 219801 - DNA, 25 bp, Artificial
  probe
  misc_feature (1)..(25): SEQ ID NO: 2136; WAN024FSZ_at; Start 657; Stop 681
gaaattttcggatagagacttagat

SEQ ID NO: 219802 - DNA, 25 bp, Artificial
  probe
  misc_feature (1)..(25): SEQ ID NO: 2136; WAN024FSZ_at; Start 470; Stop 494
cttttttggtgtctgcctgggccaa

SEQ ID NO: 219803 - DNA, 25 bp, Artificial
  probe
  misc_feature (1)..(25): SEQ ID NO: 2136; WAN024FSZ_at; Start 504; Stop 528
aagagagttgtttgatgatataaga

SEQ ID NO: 219804 - DNA, 25 bp, Artificial
  probe
  misc_feature (1)..(25): SEQ ID NO: 2136; WAN024FSZ_at; Start 527; Stop 551
gatttcctgtaggtaagctatttga

SEQ ID NO: 219805 - DNA, 25 bp, Artificial
  probe
  misc_feature (1)..(25): SEQ ID NO: 2136; WAN024FSZ_at; Start 876; Stop 900
taatgttcgattgaagaacaagctt

SEQ ID NO: 219806 - DNA, 25 bp, Artificial
  probe
  misc_feature (1)..(25): SEQ ID NO: 2136; WAN024FSZ_at; Start 759; Stop 783
ggtatctgcatgtttcagaattcta

SEQ ID NO: 219807 - DNA, 25 bp, Artificial
  probe
  misc_feature (1)..(25): SEQ ID NO: 2136; WAN024FSZ_at; Start 552; Stop 576
agatagtgcgattatgtatttgctc

SEQ ID NO: 219808 - DNA, 25 bp, Artificial
  probe
  misc_feature (1)..(25): SEQ ID NO: 2136; WAN024FSZ_at; Start 723; Stop 747
taatttacgcgtgtatactgcagcg

SEQ ID NO: 219809 - DNA, 25 bp, Artificial
  probe
  misc_feature (1)..(25): SEQ ID NO: 2136; WAN024FSZ_at; Start 588; Stop 612
tgaaacaattgcatactctgatgcg

SEQ ID NO: 219810 - DNA, 25 bp, Artificial
  probe
  misc_feature (1)..(25): SEQ ID NO: 2136; WAN024FSZ_at; Start 12; Stop 36
agttagtattattctgcccgtctac

SEQ ID NO: 219811 - DNA, 25 bp, Artificial
  probe
  misc_feature (1)..(25): SEQ ID NO: 2136; WAN024FSZ_at; Start 677; Stop 701
tagatattttggagattacgaacac

SEQ ID NO: 219812 - DNA, 25 bp, Artificial
  probe
  misc_feature (1)..(25): SEQ ID NO: 2136; WAN024FSZ_at; Start 754; Stop 778
tataaggtatctgcatgtttcagaa

SEQ ID NO: 219813 - DNA, 25 bp, Artificial
  probe
  misc_feature (1)..(25): SEQ ID NO: 2136; WAN024FSZ_at; Start 833; Stop 857
tgagttatattttacaaaattggag

SEQ ID NO: 219814 - DNA, 25 bp, Artificial
  probe
  misc_feature (1)..(25): SEQ ID NO: 2136; WAN024FSZ_at; Start 709; Stop 733
aatcactatggtgataatttacgcg

SEQ ID NO: 219815 - DNA, 25 bp, Artificial
  probe
  misc_feature (1)..(25): SEQ ID NO: 2136; WAN024FSZ_at; Start 665; Stop 689
cggatagagacttagatattttgga

SEQ ID NO: 219816 - DNA, 25 bp, Artificial
  probe
  misc_feature (1)..(25): SEQ ID NO: 2136; WAN024FSZ_at; Start 736; Stop 760
tatactgcagcggtgtcttataagg

SEQ ID NO: 219817 - DNA, 25 bp, Artificial
  probe
  misc_feature (1)..(25): SEQ ID NO: 2136; WAN024FSZ_at; Start 27; Stop 51
gcccgtctacaatgtcgaacagtat

SEQ ID NO: 219818 - DNA, 25 bp, Artificial
  probe
  misc_feature (1)..(25): SEQ ID NO: 2136; WAN024FSZ_at; Start 516; Stop 540
tgatgatataagatttcctgtaggt

SEQ ID NO: 219819 - DNA, 25 bp, Artificial
  probe
  misc_feature (1)..(25): SEQ ID NO: 2136; WAN024FSZ_at; Start 845; Stop 869
tacaaaattggagaaacatattatt

SEQ ID NO: 219820 - DNA, 25 bp, Artificial
  probe
  misc_feature (1)..(25): SEQ ID NO: 2136; WAN024FSZ_at; Start 586; Stop 610
tgtgaaacaattgcatactctgatg

SEQ ID NO: 219821 - DNA, 25 bp, Artificial
  probe
  misc_feature (1)..(25): SEQ ID NO: 2136; WAN024FSZ_at; Start 743; Stop 767
cagcggtgtcttataaggtatctgc

SEQ ID NO: 219822 - DNA, 25 bp, Artificial
  probe
  misc_feature (1)..(25): SEQ ID NO: 2136; WAN024FSZ_at; Start 24; Stop 48
tctgcccgtctacaatgtcgaacag

SEQ ID NO: 219823 - DNA, 25 bp, Artificial
  probe
  misc_feature (1)..(25): SEQ ID NO: 2136; WAN024FSZ_at; Start 746; Stop 770
cggtgtcttataaggtatctgcatg

SEQ ID NO: 219824 - DNA, 25 bp, Artificial
  probe
  misc_feature (1)..(25): SEQ ID NO: 2136; WAN024FSZ_at; Start 21; Stop 45
tattctgcccgtctacaatgtcgaa

SEQ ID NO: 219825 - DNA, 25 bp, Artificial
  probe
  misc_feature (1)..(25): SEQ ID NO: 2136; WAN024FSZ_at; Start 647; Stop 671
tcacaacaaagaaattttcggatag

SEQ ID NO: 219826 - DNA, 25 bp, Artificial
  probe
  misc_feature (1)..(25): SEQ ID NO: 2136; WAN024FSZ_at; Start 731; Stop 755
gcgtgtatactgcagcggtgtctta

SEQ ID NO: 219827 - DNA, 25 bp, Artificial
  probe
  misc_feature (1)..(25): SEQ ID NO: 2136; WAN024FSZ_at; Start 728; Stop 752
tacgcgtgtatactgcagcggtgtc

SEQ ID NO: 219828 - DNA, 25 bp, Artificial
  probe
  misc_feature (1)..(25): SEQ ID NO: 2136; WAN024FSZ_at; Start 468; Stop 492
atcttttttggtgtctgcctgggcc

SEQ ID NO: 219829 - DNA, 25 bp, Artificial
  probe
  misc_feature (1)..(25): SEQ ID NO: 2136; WAN024FSZ_at; Start 532; Stop 556
cctgtaggtaagctatttgaagata

SEQ ID NO: 219830 - DNA, 25 bp, Artificial
  probe
  misc_feature (1)..(25): SEQ ID NO: 2136; WAN024FSZ_at; Start 520; Stop 544
gatataagatttcctgtaggtaagc

SEQ ID NO: 219831 - DNA, 25 bp, Artificial
  probe
  misc_feature (1)..(25): SEQ ID NO: 2136; WAN024FSZ_at; Start 7; Stop 31
aaattagttagtattattctgcccg

SEQ ID NO: 219832 - DNA, 25 bp, Artificial
  probe
  misc_feature (1)..(25): SEQ ID NO: 2136; WAN024FSZ_at; Start 773; Stop 797
tcagaattctattaaactcaccttc

SEQ ID NO: 219833 - DNA, 25 bp, Artificial
  probe
  misc_feature (1)..(25): SEQ ID NO: 2136; WAN024FSZ_at; Start 870; Stop 894
taataataatgttcgattgaagaac

SEQ ID NO: 219834 - DNA, 25 bp, Artificial
  probe
  misc_feature (1)..(25): SEQ ID NO: 2136; WAN024FSZ_at; Start 740; Stop 764
ctgcagcggtgtcttataaggtatc

SEQ ID NO: 219835 - DNA, 25 bp, Artificial
  probe
  misc_feature (1)..(25): SEQ ID NO: 6555; WAN024FT2_at; Start 590; Stop 614
tacttttagtatctaacacacggac

SEQ ID NO: 219836 - DNA, 25 bp, Artificial
  probe
  misc_feature (1)..(25): SEQ ID NO: 6555; WAN024FT2_at; Start 294; Stop 318
tagtctatcgactttaccgattaaa

SEQ ID NO: 219837 - DNA, 25 bp, Artificial
  probe
  misc_feature (1)..(25): SEQ ID NO: 6555; WAN024FT2_at; Start 779; Stop 803
ctcatcgtgttttgggtattgttaa

SEQ ID NO: 219838 - DNA, 25 bp, Artificial
  probe
  misc_feature (1)..(25): SEQ ID NO: 6555; WAN024FT2_at; Start 73; Stop 97
gtaatagtgaatctgggtttgtcca

SEQ ID NO: 219839 - DNA, 25 bp, Artificial
  probe
  misc_feature (1)..(25): SEQ ID NO: 6555; WAN024FT2_at; Start 157; Stop 181
aaaaatagtccggatgtaatcgcta

SEQ ID NO: 219840 - DNA, 25 bp, Artificial
  probe
  misc_feature (1)..(25): SEQ ID NO: 6555; WAN024FT2_at; Start 436; Stop 460
gggattggttttgcatatggattta

SEQ ID NO: 219841 - DNA, 25 bp, Artificial
  probe
  misc_feature (1)..(25): SEQ ID NO: 6555; WAN024FT2_at; Start 281; Stop 305
tgcttattatttctagtctatcgac

SEQ ID NO: 219842 - DNA, 25 bp, Artificial
  probe
  misc_feature (1)..(25): SEQ ID NO: 6555; WAN024FT2_at; Start 370; Stop 394
ggcatcctattatcaacatttttag

SEQ ID NO: 219843 - DNA, 25 bp, Artificial
  probe
  misc_feature (1)..(25): SEQ ID NO: 6555; WAN024FT2_at; Start 464; Stop 488
gtgggttgacgcataagaattttta

SEQ ID NO: 219844 - DNA, 25 bp, Artificial
  probe
  misc_feature (1)..(25): SEQ ID NO: 6555; WAN024FT2_at; Start 839; Stop 863
tattttttggtgatgctgagttagc

SEQ ID NO: 219845 - DNA, 25 bp, Artificial
  probe
  misc_feature (1)..(25): SEQ ID NO: 6555; WAN024FT2_at; Start 167; Stop 191
cggatgtaatcgctaatagaattgc

SEQ ID NO: 219846 - DNA, 25 bp, Artificial
  probe
  misc_feature (1)..(25): SEQ ID NO: 6555; WAN024FT2_at; Start 636; Stop 660
tttttggatcgttgttcatagcgga

SEQ ID NO: 219847 - DNA, 25 bp, Artificial
  probe
  misc_feature (1)..(25): SEQ ID NO: 6555; WAN024FT2_at; Start 1072; Stop 1096
cctctacttctatcagcaatggttg

SEQ ID NO: 219848 - DNA, 25 bp, Artificial
  probe
  misc_feature (1)..(25): SEQ ID NO: 6555; WAN024FT2_at; Start 601; Stop 625
tctaacacacggacaatatatataa

SEQ ID NO: 219849 - DNA, 25 bp, Artificial
  probe
  misc_feature (1)..(25): SEQ ID NO: 6555; WAN024FT2_at; Start 856; Stop 880
gagttagcctttggtgatatgacga

SEQ ID NO: 219850 - DNA, 25 bp, Artificial
  probe
  misc_feature (1)..(25): SEQ ID NO: 6555; WAN024FT2_at; Start 87; Stop 111
gggtttgtccagtatagttcagtat

SEQ ID NO: 219851 - DNA, 25 bp, Artificial
  probe
  misc_feature (1)..(25): SEQ ID NO: 6555; WAN024FT2_at; Start 1010; Stop 1034
tatcctctgtattatctatggaaga

SEQ ID NO: 219852 - DNA, 25 bp, Artificial
  probe
  misc_feature (1)..(25): SEQ ID NO: 6555; WAN024FT2_at; Start 765; Stop 789
tagtgaatcctatactcatcgtgtt

SEQ ID NO: 219853 - DNA, 25 bp, Artificial
  probe
  misc_feature (1)..(25): SEQ ID NO: 6555; WAN024FT2_at; Start 814; Stop 838
tactacgaatctagcaaatttcatt

SEQ ID NO: 219854 - DNA, 25 bp, Artificial
  probe
  misc_feature (1)..(25): SEQ ID NO: 6555; WAN024FT2_at; Start 960; Stop 984
aaatggttatgtcggcttaataggg

SEQ ID NO: 219855 - DNA, 25 bp, Artificial
  probe
  misc_feature (1)..(25): SEQ ID NO: 6555; WAN024FT2_at; Start 541; Stop 565
ggtacgaagtaccaagttgatagct

SEQ ID NO: 219856 - DNA, 25 bp, Artificial
  probe
  misc_feature (1)..(25): SEQ ID NO: 6555; WAN024FT2_at; Start 972; Stop 996
cggcttaatagggtatggagtagtc

SEQ ID NO: 219857 - DNA, 25 bp, Artificial
  probe
  misc_feature (1)..(25): SEQ ID NO: 6555; WAN024FT2_at; Start 699; Stop 723
tataacgacatggttagtaatttct

SEQ ID NO: 219858 - DNA, 25 bp, Artificial
  probe
  misc_feature (1)..(25): SEQ ID NO: 6555; WAN024FT2_at; Start 919; Stop 943
gatggaactgtggaaatgccgttgc

SEQ ID NO: 219859 - DNA, 25 bp, Artificial
  probe
  misc_feature (1)..(25): SEQ ID NO: 6555; WAN024FT2_at; Start 883; Stop 907
ggttatactcacaatataagaagtg

SEQ ID NO: 219860 - DNA, 25 bp, Artificial
  probe
  misc_feature (1)..(25): SEQ ID NO: 6555; WAN024FT2_at; Start 684; Stop 708
tcacagaccagtaattataacgaca

SEQ ID NO: 219861 - DNA, 25 bp, Artificial
  probe
  misc_feature (1)..(25): SEQ ID NO: 6555; WAN024FT2_at; Start 451; Stop 475
tatggatttaatggtgggttgacgc

SEQ ID NO: 219862 - DNA, 25 bp, Artificial
  probe
  misc_feature (1)..(25): SEQ ID NO: 6555; WAN024FT2_at; Start 871; Stop 895
gatatgacgaaaggttatactcaca

SEQ ID NO: 219863 - DNA, 25 bp, Artificial
  probe
  misc_feature (1)..(25): SEQ ID NO: 6555; WAN024FT2_at; Start 238; Stop 262
caaaatcttcctttctcaacaaaga

SEQ ID NO: 219864 - DNA, 25 bp, Artificial
  probe
  misc_feature (1)..(25): SEQ ID NO: 6555; WAN024FT2_at; Start 413; Stop 437
cattagtaactgttgctgttgaggg

SEQ ID NO: 219865 - DNA, 25 bp, Artificial
  probe
  misc_feature (1)..(25): SEQ ID NO: 6555; WAN024FT2_at; Start 931; Stop 955
gaaatgccgttgctaagtgttatga

SEQ ID NO: 219866 - DNA, 25 bp, Artificial
  probe
  misc_feature (1)..(25): SEQ ID NO: 6555; WAN024FT2_at; Start 528; Stop 552
tagtagaaaacatggtacgaagtac

SEQ ID NO: 219867 - DNA, 25 bp, Artificial
  probe
  misc_feature (1)..(25): SEQ ID NO: 6555; WAN024FT2_at; Start 1054; Stop 1078
ggcttatccattctaatacctctac

SEQ ID NO: 219868 - DNA, 25 bp, Artificial
  probe
  misc_feature (1)..(25): SEQ ID NO: 6555; WAN024FT2_at; Start 1131; Stop 1155
gccggtctgtttttgtattttatgc

SEQ ID NO: 219869 - DNA, 25 bp, Artificial
  probe
  misc_feature (1)..(25): SEQ ID NO: 3943; WAN024FT3_at; Start 590; Stop 614
tacttttaatatctaatacgcgaac

SEQ ID NO: 219870 - DNA, 25 bp, Artificial
  probe
  misc_feature (1)..(25): SEQ ID NO: 3943; WAN024FT3_at; Start 869; Stop 893
gaaatacgacgaagggttatggaca

SEQ ID NO: 219871 - DNA, 25 bp, Artificial
  probe
  misc_feature (1)..(25): SEQ ID NO: 3943; WAN024FT3_at; Start 509; Stop 533
cctatattctactatatgtcagcag

SEQ ID NO: 219872 - DNA, 25 bp, Artificial
  probe
  misc_feature (1)..(25): SEQ ID NO: 3943; WAN024FT3_at; Start 521; Stop 545
tatatgtcagcagaaaatatgacgc

SEQ ID NO: 219873 - DNA, 25 bp, Artificial
  probe
  misc_feature (1)..(25): SEQ ID NO: 3943; WAN024FT3_at; Start 973; Stop 997
gggttagttggttacattatagtgc

SEQ ID NO: 219874 - DNA, 25 bp, Artificial
  probe
  misc_feature (1)..(25): SEQ ID NO: 3943; WAN024FT3_at; Start 1016; Stop 1040
caataatctcagttaaaaatagcac

SEQ ID NO: 219875 - DNA, 25 bp, Artificial
  probe
  misc_feature (1)..(25): SEQ ID NO: 3943; WAN024FT3_at; Start 330; Stop 354
tctcagtgatttaagaaggatatca

SEQ ID NO: 219876 - DNA, 25 bp, Artificial
  probe
  misc_feature (1)..(25): SEQ ID NO: 3943; WAN024FT3_at; Start 931; Stop 955
gagatgcctttactcagtgtaatga

SEQ ID NO: 219877 - DNA, 25 bp, Artificial
  probe
  misc_feature (1)..(25): SEQ ID NO: 3943; WAN024FT3_at; Start 856; Stop 880
gaattagcctttggaaatacgacga

SEQ ID NO: 219878 - DNA, 25 bp, Artificial
  probe
  misc_feature (1)..(25): SEQ ID NO: 3943; WAN024FT3_at; Start 1073; Stop 1097
cgttacttctatctgcaacagttga

SEQ ID NO: 219879 - DNA, 25 bp, Artificial
  probe
  misc_feature (1)..(25): SEQ ID NO: 3943; WAN024FT3_at; Start 714; Stop 738
agtcatctctttactggcgttaaca

SEQ ID NO: 219880 - DNA, 25 bp, Artificial
  probe
  misc_feature (1)..(25): SEQ ID NO: 3943; WAN024FT3_at; Start 765; Stop 789
tagtgaatcatatagccatcgagtg

SEQ ID NO: 219881 - DNA, 25 bp, Artificial
  probe
  misc_feature (1)..(25): SEQ ID NO: 3943; WAN024FT3_at; Start 530; Stop 554
gcagaaaatatgacgctaaacatca

SEQ ID NO: 219882 - DNA, 25 bp, Artificial
  probe
  misc_feature (1)..(25): SEQ ID NO: 3943; WAN024FT3_at; Start 406; Stop 430
aaaatatctttagtaacagttgctg

SEQ ID NO: 219883 - DNA, 25 bp, Artificial
  probe
  misc_feature (1)..(25): SEQ ID NO: 3943; WAN024FT3_at; Start 87; Stop 111
gggattgtctagtattattcagtac

SEQ ID NO: 219884 - DNA, 25 bp, Artificial
  probe
  misc_feature (1)..(25): SEQ ID NO: 3943; WAN024FT3_at; Start 433; Stop 457
gagggaattggcttttcatatggtt

SEQ ID NO: 219885 - DNA, 25 bp, Artificial
  probe
  misc_feature (1)..(25): SEQ ID NO: 3943; WAN024FT3_at; Start 301; Stop 325
tccaccttaccgataaagctaataa

SEQ ID NO: 219886 - DNA, 25 bp, Artificial
  probe
  misc_feature (1)..(25): SEQ ID NO: 3943; WAN024FT3_at; Start 156; Stop 180
taagaatactctcaacgtgtttgca

SEQ ID NO: 219887 - DNA, 25 bp, Artificial
  probe
  misc_feature (1)..(25): SEQ ID NO: 3943; WAN024FT3_at; Start 606; Stop 630
tacgcgaacagtttatataatacta

SEQ ID NO: 219888 - DNA, 25 bp, Artificial
  probe
  misc_feature (1)..(25): SEQ ID NO: 3943; WAN024FT3_at; Start 779; Stop 803
gccatcgagtgttaggtgttgtgaa

SEQ ID NO: 219889 - DNA, 25 bp, Artificial
  probe
  misc_feature (1)..(25): SEQ ID NO: 3943; WAN024FT3_at; Start 288; Stop 312
tatttctagcttatccaccttaccg

SEQ ID NO: 219890 - DNA, 25 bp, Artificial
  probe
  misc_feature (1)..(25): SEQ ID NO: 3943; WAN024FT3_at; Start 314; Stop 338
taaagctaataaataatctcagtga

SEQ ID NO: 219891 - DNA, 25 bp, Artificial
  probe
  misc_feature (1)..(25): SEQ ID NO: 3943; WAN024FT3_at; Start 348; Stop 372
gatatcatattacttattgcacagc

SEQ ID NO: 219892 - DNA, 25 bp, Artificial
  probe
  misc_feature (1)..(25): SEQ ID NO: 3943; WAN024FT3_at; Start 919; Stop 943
gatggaacggtagagatgcctttac

SEQ ID NO: 219893 - DNA, 25 bp, Artificial
  probe
  misc_feature (1)..(25): SEQ ID NO: 3943; WAN024FT3_at; Start 848; Stop 872
gggatgctgaattagcctttggaaa

SEQ ID NO: 219894 - DNA, 25 bp, Artificial
  probe
  misc_feature (1)..(25): SEQ ID NO: 3943; WAN024FT3_at; Start 238; Stop 262
caaaatcttccattatcaagaaaga

SEQ ID NO: 219895 - DNA, 25 bp, Artificial
  probe
  misc_feature (1)..(25): SEQ ID NO: 3943; WAN024FT3_at; Start 708; Stop 732
gacaatagtcatctctttactggcg

SEQ ID NO: 219896 - DNA, 25 bp, Artificial
  probe
  misc_feature (1)..(25): SEQ ID NO: 3943; WAN024FT3_at; Start 692; Stop 716
tggtagtgacagcaacgacaatagt

SEQ ID NO: 219897 - DNA, 25 bp, Artificial
  probe
  misc_feature (1)..(25): SEQ ID NO: 3943; WAN024FT3_at; Start 1131; Stop 1155
gcctgtctgcttttgtattttatgt

SEQ ID NO: 219898 - DNA, 25 bp, Artificial
  probe
  misc_feature (1)..(25): SEQ ID NO: 3943; WAN024FT3_at; Start 1054; Stop 1078
ggattatcaatctttattccgttac

SEQ ID NO: 219899 - DNA, 25 bp, Artificial
  probe
  misc_feature (1)..(25): SEQ ID NO: 3943; WAN024FT3_at; Start 420; Stop 444
aacagttgctgtagagggaattggc

SEQ ID NO: 219900 - DNA, 25 bp, Artificial
  probe
  misc_feature (1)..(25): SEQ ID NO: 3943; WAN024FT3_at; Start 168; Stop 192
caacgtgtttgcaaatagaatcata

SEQ ID NO: 219901 - DNA, 25 bp, Artificial
  probe
  misc_feature (1)..(25): SEQ ID NO: 3943; WAN024FT3_at; Start 451; Stop 475
tatggttttaatggaggtttgactc

SEQ ID NO: 219902 - DNA, 25 bp, Artificial
  probe
  misc_feature (1)..(25): SEQ ID NO: 3943; WAN024FT3_at; Start 68; Stop 92
cacaagtgatagtgaacttgggatt

SEQ ID NO: 219903 - DNA, 25 bp, Artificial
  probe
  misc_feature (1)..(25): SEQ ID NO: 5864; WAN024FT4_at; Start 155; Stop 179
tggtgccagatcaaagaaggcatgc

SEQ ID NO: 219904 - DNA, 25 bp, Artificial
  probe
  misc_feature (1)..(25): SEQ ID NO: 5864; WAN024FT4_at; Start 85; Stop 109
gaacgagctccagtgctagaatcac

SEQ ID NO: 219905 - DNA, 25 bp, Artificial
  probe
  misc_feature (1)..(25): SEQ ID NO: 5864; WAN024FT4_at; Start 122; Stop 146
tggatttgtcaaccagcctacttgg

SEQ ID NO: 219906 - DNA, 25 bp, Artificial
  probe
  misc_feature (1)..(25): SEQ ID NO: 5864; WAN024FT4_at; Start 248; Stop 272
aagtaattggaaaccaagcgccaag

SEQ ID NO: 219907 - DNA, 25 bp, Artificial
  probe
  misc_feature (1)..(25): SEQ ID NO: 5864; WAN024FT4_at; Start 288; Stop 312
agcaaataaatctgccagaccgaaa

SEQ ID NO: 219908 - DNA, 25 bp, Artificial
  probe
  misc_feature (1)..(25): SEQ ID NO: 5864; WAN024FT4_at; Start 214; Stop 238
tctggcgaacagcttggtaaaccca

SEQ ID NO: 219909 - DNA, 25 bp, Artificial
  probe
  misc_feature (1)..(25): SEQ ID NO: 5864; WAN024FT4_at; Start 253; Stop 277
attggaaaccaagcgccaagattcg

SEQ ID NO: 219910 - DNA, 25 bp, Artificial
  probe
  misc_feature (1)..(25): SEQ ID NO: 5864; WAN024FT4_at; Start 332; Stop 356
catattttcagacagtaattgcata

SEQ ID NO: 219911 - DNA, 25 bp, Artificial
  probe
  misc_feature (1)..(25): SEQ ID NO: 5864; WAN024FT4_at; Start 101; Stop 125
tagaatcacttcaaccaagactgga

SEQ ID NO: 219912 - DNA, 25 bp, Artificial
  probe
  misc_feature (1)..(25): SEQ ID NO: 5864; WAN024FT4_at; Start 74; Stop 98
ataggcgaccagaacgagctccagt

SEQ ID NO: 219913 - DNA, 25 bp, Artificial
  probe
  misc_feature (1)..(25): SEQ ID NO: 5864; WAN024FT4_at; Start 160; Stop 184
ccagatcaaagaaggcatgcaagcc

SEQ ID NO: 219914 - DNA, 25 bp, Artificial
  probe
  misc_feature (1)..(25): SEQ ID NO: 5864; WAN024FT4_at; Start 272; Stop 296
gattcgctcaaaaccaagcaaataa

SEQ ID NO: 219915 - DNA, 25 bp, Artificial
  probe
  misc_feature (1)..(25): SEQ ID NO: 5864; WAN024FT4_at; Start 322; Stop 346
tggtttttaacatattttcagacag

SEQ ID NO: 219916 - DNA, 25 bp, Artificial
  probe
  misc_feature (1)..(25): SEQ ID NO: 5864; WAN024FT4_at; Start 208; Stop 232
atttcttctggcgaacagcttggta

SEQ ID NO: 219917 - DNA, 25 bp, Artificial
  probe
  misc_feature (1)..(25): SEQ ID NO: 5864; WAN024FT4_at; Start 202; Stop 226
aaatccatttcttctggcgaacagc

SEQ ID NO: 219918 - DNA, 25 bp, Artificial
  probe
  misc_feature (1)..(25): SEQ ID NO: 5864; WAN024FT4_at; Start 257; Stop 281
gaaaccaagcgccaagattcgctca

SEQ ID NO: 219919 - DNA, 25 bp, Artificial
  probe
  misc_feature (1)..(25): SEQ ID NO: 5864; WAN024FT4_at; Start 199; Stop 223
gataaatccatttcttctggcgaac

SEQ ID NO: 219920 - DNA, 25 bp, Artificial
  probe
  misc_feature (1)..(25): SEQ ID NO: 5864; WAN024FT4_at; Start 64; Stop 88
ccttggttccataggcgaccagaac

SEQ ID NO: 219921 - DNA, 25 bp, Artificial
  probe
  misc_feature (1)..(25): SEQ ID NO: 5864; WAN024FT4_at; Start 267; Stop 291
gccaagattcgctcaaaaccaagca

SEQ ID NO: 219922 - DNA, 25 bp, Artificial
  probe
  misc_feature (1)..(25): SEQ ID NO: 5864; WAN024FT4_at; Start 219; Stop 243
cgaacagcttggtaaacccaaactg

SEQ ID NO: 219923 - DNA, 25 bp, Artificial
  probe
  misc_feature (1)..(25): SEQ ID NO: 5864; WAN024FT4_at; Start 286; Stop 310
caagcaaataaatctgccagaccga

SEQ ID NO: 219924 - DNA, 25 bp, Artificial
  probe
  misc_feature (1)..(25): SEQ ID NO: 5864; WAN024FT4_at; Start 192; Stop 216
gctaggagataaatccatttcttct

SEQ ID NO: 219925 - DNA, 25 bp, Artificial
  probe
  misc_feature (1)..(25): SEQ ID NO: 5864; WAN024FT4_at; Start 223; Stop 247
cagcttggtaaacccaaactgtcaa

SEQ ID NO: 219926 - DNA, 25 bp, Artificial
  probe
  misc_feature (1)..(25): SEQ ID NO: 5864; WAN024FT4_at; Start 112; Stop 136
caaccaagactggatttgtcaacca

SEQ ID NO: 219927 - DNA, 25 bp, Artificial
  probe
  misc_feature (1)..(25): SEQ ID NO: 5864; WAN024FT4_at; Start 80; Stop 104
gaccagaacgagctccagtgctaga

SEQ ID NO: 219928 - DNA, 25 bp, Artificial
  probe
  misc_feature (1)..(25): SEQ ID NO: 5864; WAN024FT4_at; Start 151; Stop 175
gagatggtgccagatcaaagaaggc

SEQ ID NO: 219929 - DNA, 25 bp, Artificial
  probe
  misc_feature (1)..(25): SEQ ID NO: 5864; WAN024FT4_at; Start 89; Stop 113
gagctccagtgctagaatcacttca

SEQ ID NO: 219930 - DNA, 25 bp, Artificial
  probe
  misc_feature (1)..(25): SEQ ID NO: 5864; WAN024FT4_at; Start 166; Stop 190
caaagaaggcatgcaagccataggc

SEQ ID NO: 219931 - DNA, 25 bp, Artificial
  probe
  misc_feature (1)..(25): SEQ ID NO: 5864; WAN024FT4_at; Start 242; Stop 266
tgtcaaaagtaattggaaaccaagc

SEQ ID NO: 219932 - DNA, 25 bp, Artificial
  probe
  misc_feature (1)..(25): SEQ ID NO: 5864; WAN024FT4_at; Start 54; Stop 78
caaaagatttccttggttccatagg

SEQ ID NO: 219933 - DNA, 25 bp, Artificial
  probe
  misc_feature (1)..(25): SEQ ID NO: 5864; WAN024FT4_at; Start 70; Stop 94
ttccataggcgaccagaacgagctc

SEQ ID NO: 219934 - DNA, 25 bp, Artificial
  probe
  misc_feature (1)..(25): SEQ ID NO: 5864; WAN024FT4_at; Start 107; Stop 131
cacttcaaccaagactggatttgtc

SEQ ID NO: 219935 - DNA, 25 bp, Artificial
  probe
  misc_feature (1)..(25): SEQ ID NO: 5864; WAN024FT4_at; Start 59; Stop 83
gatttccttggttccataggcgacc

SEQ ID NO: 219936 - DNA, 25 bp, Artificial
  probe
  misc_feature (1)..(25): SEQ ID NO: 5864; WAN024FT4_at; Start 8; Stop 32
gattttgcataagaaaaagaggttc

SEQ ID NO: 219937 - DNA, 25 bp, Artificial
  probe
  misc_feature (1)..(25): SEQ ID NO: 1403; WAN024FT5_at; Start 547; Stop 571
ttgacagtttgggtttaccaagctg

SEQ ID NO: 219938 - DNA, 25 bp, Artificial
  probe
  misc_feature (1)..(25): SEQ ID NO: 1403; WAN024FT5_at; Start 267; Stop 291
ggctcgtcttgttttcttcaaatgg

SEQ ID NO: 219939 - DNA, 25 bp, Artificial
  probe
  misc_feature (1)..(25): SEQ ID NO: 1403; WAN024FT5_at; Start 285; Stop 309
caaatggttggagaaaaagagaagt

SEQ ID NO: 219940 - DNA, 25 bp, Artificial
  probe
  misc_feature (1)..(25): SEQ ID NO: 1403; WAN024FT5_at; Start 30; Stop 54
gctgttgctagcttttctgatagga

SEQ ID NO: 219941 - DNA, 25 bp, Artificial
  probe
  misc_feature (1)..(25): SEQ ID NO: 1403; WAN024FT5_at; Start 605; Stop 629
cctatggcttgcatgccttctttga

SEQ ID NO: 219942 - DNA, 25 bp, Artificial
  probe
  misc_feature (1)..(25): SEQ ID NO: 1403; WAN024FT5_at; Start 528; Stop 552
gcttggtttccaattacttttgaca

SEQ ID NO: 219943 - DNA, 25 bp, Artificial
  probe
  misc_feature (1)..(25): SEQ ID NO: 1403; WAN024FT5_at; Start 61; Stop 85
tggtttgccaaaaagaaataccaga

SEQ ID NO: 219944 - DNA, 25 bp, Artificial
  probe
  misc_feature (1)..(25): SEQ ID NO: 1403; WAN024FT5_at; Start 504; Stop 528
gcttggttttgagcgaatcttggcg

SEQ ID NO: 219945 - DNA, 25 bp, Artificial
  probe
  misc_feature (1)..(25): SEQ ID NO: 1403; WAN024FT5_at; Start 448; Stop 472
ctgtctgaaaatatgttaaaaacca

SEQ ID NO: 219946 - DNA, 25 bp, Artificial
  probe
  misc_feature (1)..(25): SEQ ID NO: 1403; WAN024FT5_at; Start 433; Stop 457
caggttatgcaattactgtctgaaa

SEQ ID NO: 219947 - DNA, 25 bp, Artificial
  probe
  misc_feature (1)..(25): SEQ ID NO: 1403; WAN024FT5_at; Start 81; Stop 105
ccagattaatctagctgtcttgggc

SEQ ID NO: 219948 - DNA, 25 bp, Artificial
  probe
  misc_feature (1)..(25): SEQ ID NO: 1403; WAN024FT5_at; Start 346; Stop 370
catggtggcttggagttgatttttc

SEQ ID NO: 219949 - DNA, 25 bp, Artificial
  probe
  misc_feature (1)..(25): SEQ ID NO: 1403; WAN024FT5_at; Start 648; Stop 672
ccaagtaggctggttgacaaatcca

SEQ ID NO: 219950 - DNA, 25 bp, Artificial
  probe
  misc_feature (1)..(25): SEQ ID NO: 1403; WAN024FT5_at; Start 575; Stop 599
gccagaagaaatggatttatctcct

SEQ ID NO: 219951 - DNA, 25 bp, Artificial
  probe
  misc_feature (1)..(25): SEQ ID NO: 1403; WAN024FT5_at; Start 251; Stop 275
cattttttgaggaaacggctcgtct

SEQ ID NO: 219952 - DNA, 25 bp, Artificial
  probe
  misc_feature (1)..(25): SEQ ID NO: 1403; WAN024FT5_at; Start 716; Stop 740
cctatggaaccaaggaaatcttttg

SEQ ID NO: 219953 - DNA, 25 bp, Artificial
  probe
  misc_feature (1)..(25): SEQ ID NO: 1403; WAN024FT5_at; Start 45; Stop 69
tctgataggaagcatttggtttgcc

SEQ ID NO: 219954 - DNA, 25 bp, Artificial
  probe
  misc_feature (1)..(25): SEQ ID NO: 1403; WAN024FT5_at; Start 517; Stop 541
cgaatcttggcgcttggtttccaat

SEQ ID NO: 219955 - DNA, 25 bp, Artificial
  probe
  misc_feature (1)..(25): SEQ ID NO: 1403; WAN024FT5_at; Start 114; Stop 138
agtcgctttctttgtctcttcgcag

SEQ ID NO: 219956 - DNA, 25 bp, Artificial
  probe
  misc_feature (1)..(25): SEQ ID NO: 1403; WAN024FT5_at; Start 245; Stop 269
tggcagcattttttgaggaaacggc

SEQ ID NO: 219957 - DNA, 25 bp, Artificial
  probe
  misc_feature (1)..(25): SEQ ID NO: 1403; WAN024FT5_at; Start 130; Stop 154
tcttcgcagattttggaaaaactgg

SEQ ID NO: 219958 - DNA, 25 bp, Artificial
  probe
  misc_feature (1)..(25): SEQ ID NO: 1403; WAN024FT5_at; Start 485; Stop 509
cggtctggcagatttatttgcttgg

SEQ ID NO: 219959 - DNA, 25 bp, Artificial
  probe
  misc_feature (1)..(25): SEQ ID NO: 1403; WAN024FT5_at; Start 562; Stop 586
taccaagctgttcgccagaagaaat

SEQ ID NO: 219960 - DNA, 25 bp, Artificial
  probe
  misc_feature (1)..(25): SEQ ID NO: 1403; WAN024FT5_at; Start 700; Stop 724
gagctcgttctggtcgcctatggaa

SEQ ID NO: 219961 - DNA, 25 bp, Artificial
  probe
  misc_feature (1)..(25): SEQ ID NO: 1403; WAN024FT5_at; Start 682; Stop 706
gaagtgattctagcactggagctcg

SEQ ID NO: 219962 - DNA, 25 bp, Artificial
  probe
  misc_feature (1)..(25): SEQ ID NO: 1403; WAN024FT5_at; Start 403; Stop 427
gttctttcggcagttcaaactcaga

SEQ ID NO: 219963 - DNA, 25 bp, Artificial
  probe
  misc_feature (1)..(25): SEQ ID NO: 1403; WAN024FT5_at; Start 663; Stop 687
gacaaatccagtcttggttgaagtg

SEQ ID NO: 219964 - DNA, 25 bp, Artificial
  probe
  misc_feature (1)..(25): SEQ ID NO: 1403; WAN024FT5_at; Start 188; Stop 212
gtagtattgccctcttgcaagatca

SEQ ID NO: 219965 - DNA, 25 bp, Artificial
  probe
  misc_feature (1)..(25): SEQ ID NO: 1403; WAN024FT5_at; Start 177; Stop 201
tcaaaaagacggtagtattgccctc

SEQ ID NO: 219966 - DNA, 25 bp, Artificial
  probe
  misc_feature (1)..(25): SEQ ID NO: 1403; WAN024FT5_at; Start 98; Stop 122
tcttgggcttgggtgcagtcgcttt

SEQ ID NO: 219967 - DNA, 25 bp, Artificial
  probe
  misc_feature (1)..(25): SEQ ID NO: 1403; WAN024FT5_at; Start 144; Stop 168
ggaaaaactggtgcatatcttgatt

SEQ ID NO: 219968 - DNA, 25 bp, Artificial
  probe
  misc_feature (1)..(25): SEQ ID NO: 1403; WAN024FT5_at; Start 471; Stop 495
cattcagtcactttcggtctggcag

SEQ ID NO: 219969 - DNA, 25 bp, Artificial
  probe
  misc_feature (1)..(25): SEQ ID NO: 1403; WAN024FT5_at; Start 418; Stop 442
caaactcagaatccacaggttatgc

SEQ ID NO: 219970 - DNA, 25 bp, Artificial
  probe
  misc_feature (1)..(25): SEQ ID NO: 1403; WAN024FT5_at; Start 15; Stop 39
cattattaccatgttgctgttgcta

SEQ ID NO: 219971 - DNA, 25 bp, Artificial
  probe
  misc_feature (1)..(25): SEQ ID NO: 1425; WAN024FT6_at; Start 145; Stop 169
tgcattgccaagaaccatccaaggg

SEQ ID NO: 219972 - DNA, 25 bp, Artificial
  probe
  misc_feature (1)..(25): SEQ ID NO: 1425; WAN024FT6_at; Start 74; Stop 98
gaaacgttattgagcttgtcacaca

SEQ ID NO: 219973 - DNA, 25 bp, Artificial
  probe
  misc_feature (1)..(25): SEQ ID NO: 1425; WAN024FT6_at; Start 225; Stop 249
gaaagaccaaataatcagcctctcc

SEQ ID NO: 219974 - DNA, 25 bp, Artificial
  probe
  misc_feature (1)..(25): SEQ ID NO: 1425; WAN024FT6_at; Start 176; Stop 200
tcttggttggcaaatttcacaacgc

SEQ ID NO: 219975 - DNA, 25 bp, Artificial
  probe
  misc_feature (1)..(25): SEQ ID NO: 1425; WAN024FT6_at; Start 123; Stop 147
catcacgaacgatgatattgcttgc

SEQ ID NO: 219976 - DNA, 25 bp, Artificial
  probe
  misc_feature (1)..(25): SEQ ID NO: 1425; WAN024FT6_at; Start 263; Stop 287
taactatagctatgcaagggttcct

SEQ ID NO: 219977 - DNA, 25 bp, Artificial
  probe
  misc_feature (1)..(25): SEQ ID NO: 1425; WAN024FT6_at; Start 69; Stop 93
caacagaaacgttattgagcttgtc

SEQ ID NO: 219978 - DNA, 25 bp, Artificial
  probe
  misc_feature (1)..(25): SEQ ID NO: 1425; WAN024FT6_at; Start 209; Stop 233
tcaaaacgatttcgtggaaagacca

SEQ ID NO: 219979 - DNA, 25 bp, Artificial
  probe
  misc_feature (1)..(25): SEQ ID NO: 1425; WAN024FT6_at; Start 22; Stop 46
tgtttcaatcaagttagccccagct

SEQ ID NO: 219980 - DNA, 25 bp, Artificial
  probe
  misc_feature (1)..(25): SEQ ID NO: 1425; WAN024FT6_at; Start 288; Stop 312
taaaacggatatcaattccttctaa

SEQ ID NO: 219981 - DNA, 25 bp, Artificial
  probe
  misc_feature (1)..(25): SEQ ID NO: 1425; WAN024FT6_at; Start 31; Stop 55
caagttagccccagcttctgcttca

SEQ ID NO: 219982 - DNA, 25 bp, Artificial
  probe
  misc_feature (1)..(25): SEQ ID NO: 1425; WAN024FT6_at; Start 220; Stop 244
tcgtggaaagaccaaataatcagcc

SEQ ID NO: 219983 - DNA, 25 bp, Artificial
  probe
  misc_feature (1)..(25): SEQ ID NO: 1425; WAN024FT6_at; Start 81; Stop 105
tattgagcttgtcacacaagatgac

SEQ ID NO: 219984 - DNA, 25 bp, Artificial
  probe
  misc_feature (1)..(25): SEQ ID NO: 1425; WAN024FT6_at; Start 270; Stop 294
agctatgcaagggttccttaaaacg

SEQ ID NO: 219985 - DNA, 25 bp, Artificial
  probe
  misc_feature (1)..(25): SEQ ID NO: 1425; WAN024FT6_at; Start 9; Stop 33
gggcaatgcgagttgtttcaatcaa

SEQ ID NO: 219986 - DNA, 25 bp, Artificial
  probe
  misc_feature (1)..(25): SEQ ID NO: 1425; WAN024FT6_at; Start 4; Stop 28
acggagggcaatgcgagttgtttca

SEQ ID NO: 219987 - DNA, 25 bp, Artificial
  probe
  misc_feature (1)..(25): SEQ ID NO: 1425; WAN024FT6_at; Start 18; Stop 42
gagttgtttcaatcaagttagcccc

SEQ ID NO: 219988 - DNA, 25 bp, Artificial
  probe
  misc_feature (1)..(25): SEQ ID NO: 1425; WAN024FT6_at; Start 42; Stop 66
cagcttctgcttcaatggtatagcc

SEQ ID NO: 219989 - DNA, 25 bp, Artificial
  probe
  misc_feature (1)..(25): SEQ ID NO: 1425; WAN024FT6_at; Start 248; Stop 272
ccacctacttttgtataactatagc

SEQ ID NO: 219990 - DNA, 25 bp, Artificial
  probe
  misc_feature (1)..(25): SEQ ID NO: 1425; WAN024FT6_at; Start 185; Stop 209
gcaaatttcacaacgcgagccaact

SEQ ID NO: 219991 - DNA, 25 bp, Artificial
  probe
  misc_feature (1)..(25): SEQ ID NO: 1425; WAN024FT6_at; Start 100; Stop 124
gatgacaaatccacgaatcccacca

SEQ ID NO: 219992 - DNA, 25 bp, Artificial
  probe
  misc_feature (1)..(25): SEQ ID NO: 1425; WAN024FT6_at; Start 90; Stop 114
tgtcacacaagatgacaaatccacg

SEQ ID NO: 219993 - DNA, 25 bp, Artificial
  probe
  misc_feature (1)..(25): SEQ ID NO: 1425; WAN024FT6_at; Start 164; Stop 188
caagggatattttcttggttggcaa

SEQ ID NO: 219994 - DNA, 25 bp, Artificial
  probe
  misc_feature (1)..(25): SEQ ID NO: 1425; WAN024FT6_at; Start 201; Stop 225
gagccaactcaaaacgatttcgtgg

SEQ ID NO: 219995 - DNA, 25 bp, Artificial
  probe
  misc_feature (1)..(25): SEQ ID NO: 1425; WAN024FT6_at; Start 133; Stop 157
gatgatattgcttgcattgccaaga

SEQ ID NO: 219996 - DNA, 25 bp, Artificial
  probe
  misc_feature (1)..(25): SEQ ID NO: 1425; WAN024FT6_at; Start 57; Stop 81
tggtatagccatcaacagaaacgtt

SEQ ID NO: 219997 - DNA, 25 bp, Artificial
  probe
  misc_feature (1)..(25): SEQ ID NO: 1425; WAN024FT6_at; Start 193; Stop 217
cacaacgcgagccaactcaaaacga

SEQ ID NO: 219998 - DNA, 25 bp, Artificial
  probe
  misc_feature (1)..(25): SEQ ID NO: 1425; WAN024FT6_at; Start 181; Stop 205
gttggcaaatttcacaacgcgagcc

SEQ ID NO: 219999 - DNA, 25 bp, Artificial
  probe
  misc_feature (1)..(25): SEQ ID NO: 1425; WAN024FT6_at; Start 236; Stop 260
taatcagcctctccacctacttttg

SEQ ID NO: 220000 - DNA, 25 bp, Artificial
  probe
  misc_feature (1)..(25): SEQ ID NO: 1425; WAN024FT6_at; Start 129; Stop 153
gaacgatgatattgcttgcattgcc

SEQ ID NO: 220001 - DNA, 25 bp, Artificial
  probe
  misc_feature (1)..(25): SEQ ID NO: 1425; WAN024FT6_at; Start 97; Stop 121
caagatgacaaatccacgaatccca

SEQ ID NO: 220002 - DNA, 25 bp, Artificial
  probe
  misc_feature (1)..(25): SEQ ID NO: 1425; WAN024FT6_at; Start 36; Stop 60
tagccccagcttctgcttcaatggt

SEQ ID NO: 220003 - DNA, 25 bp, Artificial
  probe
  misc_feature (1)..(25): SEQ ID NO: 1425; WAN024FT6_at; Start 114; Stop 138
gaatcccaccatcacgaacgatgat

SEQ ID NO: 220004 - DNA, 25 bp, Artificial
  probe
  misc_feature (1)..(25): SEQ ID NO: 1425; WAN024FT6_at; Start 149; Stop 173
ttgccaagaaccatccaagggatat

SEQ ID NO: 220005 - DNA, 25 bp, Artificial
  probe
  misc_feature (1)..(25): SEQ ID NO: 2937; WAN024FT7_at; Start 206; Stop 230
tcatcgttcgtgatggtgggattcg

SEQ ID NO: 220006 - DNA, 25 bp, Artificial
  probe
  misc_feature (1)..(25): SEQ ID NO: 2937; WAN024FT7_at; Start 279; Stop 303
ctataccattgaagcagaagctggg

SEQ ID NO: 220007 - DNA, 25 bp, Artificial
  probe
  misc_feature (1)..(25): SEQ ID NO: 2937; WAN024FT7_at; Start 79; Stop 103
tatacaaaagtaggtggagaggctg

SEQ ID NO: 220008 - DNA, 25 bp, Artificial
  probe
  misc_feature (1)..(25): SEQ ID NO: 2937; WAN024FT7_at; Start 849; Stop 873
ggaacactcaggtattacgcttgaa

SEQ ID NO: 220009 - DNA, 25 bp, Artificial
  probe
  misc_feature (1)..(25): SEQ ID NO: 2937; WAN024FT7_at; Start 380; Stop 404
gaagcgttggcggtgctgtctttat

SEQ ID NO: 220010 - DNA, 25 bp, Artificial
  probe
  misc_feature (1)..(25): SEQ ID NO: 2937; WAN024FT7_at; Start 433; Stop 457
gctcacatcttgcagtcttgtaagg

SEQ ID NO: 220011 - DNA, 25 bp, Artificial
  probe
  misc_feature (1)..(25): SEQ ID NO: 2937; WAN024FT7_at; Start 795; Stop 819
tggaacggccaaagactacgaggac

SEQ ID NO: 220012 - DNA, 25 bp, Artificial
  probe
  misc_feature (1)..(25): SEQ ID NO: 2937; WAN024FT7_at; Start 641; Stop 665
aacctttggaatacccatcttgtgg

SEQ ID NO: 220013 - DNA, 25 bp, Artificial
  probe
  misc_feature (1)..(25): SEQ ID NO: 2937; WAN024FT7_at; Start 475; Stop 499
gaaatcgaaaccctgtctgctaaag

SEQ ID NO: 220014 - DNA, 25 bp, Artificial
  probe
  misc_feature (1)..(25): SEQ ID NO: 2937; WAN024FT7_at; Start 751; Stop 775
gaagtgtcagaaaagcatgcaggat

SEQ ID NO: 220015 - DNA, 25 bp, Artificial
  probe
  misc_feature (1)..(25): SEQ ID NO: 2937; WAN024FT7_at; Start 523; Stop 547
tcagctattcaggagtctggtgcag

SEQ ID NO: 220016 - DNA, 25 bp, Artificial
  probe
  misc_feature (1)..(25): SEQ ID NO: 2937; WAN024FT7_at; Start 864; Stop 888
tacgcttgaaagagaagtccggatc

SEQ ID NO: 220017 - DNA, 25 bp, Artificial
  probe
  misc_feature (1)..(25): SEQ ID NO: 2937; WAN024FT7_at; Start 415; Stop 439
gcctatggtggcgagattgctcaca

SEQ ID NO: 220018 - DNA, 25 bp, Artificial
  probe
  misc_feature (1)..(25): SEQ ID NO: 2937; WAN024FT7_at; Start 311; Stop 335
tgattgaaacaactcgcattgccct

SEQ ID NO: 220019 - DNA, 25 bp, Artificial
  probe
  misc_feature (1)..(25): SEQ ID NO: 2937; WAN024FT7_at; Start 357; Stop 381
tgagtttgcttgtggtattccagga

SEQ ID NO: 220020 - DNA, 25 bp, Artificial
  probe
  misc_feature (1)..(25): SEQ ID NO: 2937; WAN024FT7_at; Start 561; Stop 585
taaatttgccctagctccaggaacc

SEQ ID NO: 220021 - DNA, 25 bp, Artificial
  probe
  misc_feature (1)..(25): SEQ ID NO: 2937; WAN024FT7_at; Start 780; Stop 804
gatcaatgtcgcagatggaacggcc

SEQ ID NO: 220022 - DNA, 25 bp, Artificial
  probe
  misc_feature (1)..(25): SEQ ID NO: 2937; WAN024FT7_at; Start 395; Stop 419
ctgtctttatgaatgcgggtgccta

SEQ ID NO: 220023 - DNA, 25 bp, Artificial
  probe
  misc_feature (1)..(25): SEQ ID NO: 2937; WAN024FT7_at; Start 247; Stop 271
tgtgacaagctcaataacgtttctg

SEQ ID NO: 220024 - DNA, 25 bp, Artificial
  probe
  misc_feature (1)..(25): SEQ ID NO: 2937; WAN024FT7_at; Start 191; Stop 215
gcaatgcaagcaatatcatcgttcg

SEQ ID NO: 220025 - DNA, 25 bp, Artificial
  probe
  misc_feature (1)..(25): SEQ ID NO: 2937; WAN024FT7_at; Start 458; Stop 482
tcttgaccaaggatggagaaatcga

SEQ ID NO: 220026 - DNA, 25 bp, Artificial
  probe
  misc_feature (1)..(25): SEQ ID NO: 2937; WAN024FT7_at; Start 738; Stop 762
tatcggtggcgtagaagtgtcagaa

SEQ ID NO: 220027 - DNA, 25 bp, Artificial
  probe
  misc_feature (1)..(25): SEQ ID NO: 2937; WAN024FT7_at; Start 814; Stop 838
gaggacttgatccaatcggttatcg

SEQ ID NO: 220028 - DNA, 25 bp, Artificial
  probe
  misc_feature (1)..(25): SEQ ID NO: 2937; WAN024FT7_at; Start 326; Stop 350
gcattgccctccgtcatagtttaac

SEQ ID NO: 220029 - DNA, 25 bp, Artificial
  probe
  misc_feature (1)..(25): SEQ ID NO: 2937; WAN024FT7_at; Start 174; Stop 198
cccttggatggttcttggcaatgca

SEQ ID NO: 220030 - DNA, 25 bp, Artificial
  probe
  misc_feature (1)..(25): SEQ ID NO: 2937; WAN024FT7_at; Start 674; Stop 698
ttaagcgtccagtcgggcattttgc

SEQ ID NO: 220031 - DNA, 25 bp, Artificial
  probe
  misc_feature (1)..(25): SEQ ID NO: 2937; WAN024FT7_at; Start 836; Stop 860
tcgaaaaagtcaaggaacactcagg

SEQ ID NO: 220032 - DNA, 25 bp, Artificial
  probe
  misc_feature (1)..(25): SEQ ID NO: 2937; WAN024FT7_at; Start 584; Stop 608
cccatcaggttatcaagcaggaaat

SEQ ID NO: 220033 - DNA, 25 bp, Artificial
  probe
  misc_feature (1)..(25): SEQ ID NO: 2937; WAN024FT7_at; Start 600; Stop 624
gcaggaaatggaccgcttgacgcac

SEQ ID NO: 220034 - DNA, 25 bp, Artificial
  probe
  misc_feature (1)..(25): SEQ ID NO: 2937; WAN024FT7_at; Start 262; Stop 286
aacgtttctgttgatggctatacca

SEQ ID NO: 220035 - DNA, 25 bp, Artificial
  probe
  misc_feature (1)..(25): SEQ ID NO: 2937; WAN024FT7_at; Start 97; Stop 121
gaggctgattatttggtctttccac

SEQ ID NO: 220036 - DNA, 25 bp, Artificial
  probe
  misc_feature (1)..(25): SEQ ID NO: 2937; WAN024FT7_at; Start 924; Stop 948
aggtggttttactccctgcaagagg

SEQ ID NO: 220037 - DNA, 25 bp, Artificial
  probe
  misc_feature (1)..(25): SEQ ID NO: 2937; WAN024FT7_at; Start 723; Stop 747
cttgaaaggctatcgtatcggtggc

SEQ ID NO: 220038 - DNA, 25 bp, Artificial
  probe
  misc_feature (1)..(25): SEQ ID NO: 2937; WAN024FT7_at; Start 618; Stop 642
gacgcacctacgtgaactcaagcaa

SEQ ID NO: 220039 - DNA, 25 bp, Artificial
  probe
  misc_feature (1)..(25): SEQ ID NO: 663; WAN024FT8_at; Start 22; Stop 46
tatctgggactggtctttctggtcc

SEQ ID NO: 220040 - DNA, 25 bp, Artificial
  probe
  misc_feature (1)..(25): SEQ ID NO: 663; WAN024FT8_at; Start 341; Stop 365
tgattctctttacccaactcaagtt

SEQ ID NO: 220041 - DNA, 25 bp, Artificial
  probe
  misc_feature (1)..(25): SEQ ID NO: 663; WAN024FT8_at; Start 324; Stop 348
gattggtgctagcttcttgattctc

SEQ ID NO: 220042 - DNA, 25 bp, Artificial
  probe
  misc_feature (1)..(25): SEQ ID NO: 663; WAN024FT8_at; Start 250; Stop 274
taccagtctcgtaagaaataccaag

SEQ ID NO: 220043 - DNA, 25 bp, Artificial
  probe
  misc_feature (1)..(25): SEQ ID NO: 663; WAN024FT8_at; Start 622; Stop 646
ggcttttcaaccctatcagtcgaga

SEQ ID NO: 220044 - DNA, 25 bp, Artificial
  probe
  misc_feature (1)..(25): SEQ ID NO: 663; WAN024FT8_at; Start 209; Stop 233
tgatagcgaccattatcgggacttt

SEQ ID NO: 220045 - DNA, 25 bp, Artificial
  probe
  misc_feature (1)..(25): SEQ ID NO: 663; WAN024FT8_at; Start 400; Stop 424
gtggccttctccattcctatcgtgg

SEQ ID NO: 220046 - DNA, 25 bp, Artificial
  probe
  misc_feature (1)..(25): SEQ ID NO: 663; WAN024FT8_at; Start 368; Stop 392
cacttggctttttgaccgttctatc

SEQ ID NO: 220047 - DNA, 25 bp, Artificial
  probe
  misc_feature (1)..(25): SEQ ID NO: 663; WAN024FT8_at; Start 472; Stop 496
catgcggcctatgacttgggagcta

SEQ ID NO: 220048 - DNA, 25 bp, Artificial
  probe
  misc_feature (1)..(25): SEQ ID NO: 663; WAN024FT8_at; Start 456; Stop 480
gaatggcgacatgattcatgcggcc

SEQ ID NO: 220049 - DNA, 25 bp, Artificial
  probe
  misc_feature (1)..(25): SEQ ID NO: 663; WAN024FT8_at; Start 644; Stop 668
agatttactctcgtgctcgcaaggg

SEQ ID NO: 220050 - DNA, 25 bp, Artificial
  probe
  misc_feature (1)..(25): SEQ ID NO: 663; WAN024FT8_at; Start 79; Stop 103
gcctttaatgctggtgatgatatga

SEQ ID NO: 220051 - DNA, 25 bp, Artificial
  probe
  misc_feature (1)..(25): SEQ ID NO: 663; WAN024FT8_at; Start 93; Stop 117
tgatgatatgaatagctttacaggt

SEQ ID NO: 220052 - DNA, 25 bp, Artificial
  probe
  misc_feature (1)..(25): SEQ ID NO: 663; WAN024FT8_at; Start 120; Stop 144
tagctggactcactttgaaaccatg

SEQ ID NO: 220053 - DNA, 25 bp, Artificial
  probe
  misc_feature (1)..(25): SEQ ID NO: 663; WAN024FT8_at; Start 295; Stop 319
aatatcctcatggttgcgcctgacg

SEQ ID NO: 220054 - DNA, 25 bp, Artificial
  probe
  misc_feature (1)..(25): SEQ ID NO: 663; WAN024FT8_at; Start 516; Stop 540
ggaaatcatgcttccttacctgact

SEQ ID NO: 220055 - DNA, 25 bp, Artificial
  probe
  misc_feature (1)..(25): SEQ ID NO: 663; WAN024FT8_at; Start 432; Stop 456
ggtcttgcctcgactcaaggaaatg

SEQ ID NO: 220056 - DNA, 25 bp, Artificial
  probe
  misc_feature (1)..(25): SEQ ID NO: 663; WAN024FT8_at; Start 136; Stop 160
gaaaccatgtttggagatgggagac

SEQ ID NO: 220057 - DNA, 25 bp, Artificial
  probe
  misc_feature (1)..(25): SEQ ID NO: 663; WAN024FT8_at; Start 149; Stop 173
gagatgggagactcatgctgatttt

SEQ ID NO: 220058 - DNA, 25 bp, Artificial
  probe
  misc_feature (1)..(25): SEQ ID NO: 663; WAN024FT8_at; Start 629; Stop 653
caaccctatcagtcgagatttactc

SEQ ID NO: 220059 - DNA, 25 bp, Artificial
  probe
  misc_feature (1)..(25): SEQ ID NO: 663; WAN024FT8_at; Start 222; Stop 246
tatcgggacttttggtgccatttac

SEQ ID NO: 220060 - DNA, 25 bp, Artificial
  probe
  misc_feature (1)..(25): SEQ ID NO: 663; WAN024FT8_at; Start 486; Stop 510
cttgggagctagtcaatttcagatg

SEQ ID NO: 220061 - DNA, 25 bp, Artificial
  probe
  misc_feature (1)..(25): SEQ ID NO: 663; WAN024FT8_at; Start 107; Stop 131
gctttacaggttttagctggactca

SEQ ID NO: 220062 - DNA, 25 bp, Artificial
  probe
  misc_feature (1)..(25): SEQ ID NO: 663; WAN024FT8_at; Start 609; Stop 633
tgtaacaggaaatggcttttcaacc

SEQ ID NO: 220063 - DNA, 25 bp, Artificial
  probe
  misc_feature (1)..(25): SEQ ID NO: 663; WAN024FT8_at; Start 10; Stop 34
tttgccaacctttatctgggactgg

SEQ ID NO: 220064 - DNA, 25 bp, Artificial
  probe
  misc_feature (1)..(25): SEQ ID NO: 663; WAN024FT8_at; Start 747; Stop 771
ctctcgtgagaaggaggagcaagca

SEQ ID NO: 220065 - DNA, 25 bp, Artificial
  probe
  misc_feature (1)..(25): SEQ ID NO: 663; WAN024FT8_at; Start 310; Stop 334
gcgcctgacgttatgattggtgcta

SEQ ID NO: 220066 - DNA, 25 bp, Artificial
  probe
  misc_feature (1)..(25): SEQ ID NO: 663; WAN024FT8_at; Start 733; Stop 757
ggttattactttatctctcgtgaga

SEQ ID NO: 220067 - DNA, 25 bp, Artificial
  probe
  misc_feature (1)..(25): SEQ ID NO: 663; WAN024FT8_at; Start 710; Stop 734
tctttagtattatcctagttgtagg

SEQ ID NO: 220068 - DNA, 25 bp, Artificial
  probe
  misc_feature (1)..(25): SEQ ID NO: 663; WAN024FT8_at; Start 442; Stop 466
cgactcaaggaaatgaatggcgaca

SEQ ID NO: 220069 - DNA, 25 bp, Artificial
  probe
  misc_feature (1)..(25): SEQ ID NO: 663; WAN024FT8_at; Start 32; Stop 56
tggtctttctggtcctctacctgcc

SEQ ID NO: 220070 - DNA, 25 bp, Artificial
  probe
  misc_feature (1)..(25): SEQ ID NO: 663; WAN024FT8_at; Start 236; Stop 260
gtgccatttacatctaccagtctcg

SEQ ID NO: 220071 - DNA, 25 bp, Artificial
  probe
  misc_feature (1)..(25): SEQ ID NO: 663; WAN024FT8_at; Start 256; Stop 280
tctcgtaagaaataccaagaagcct

SEQ ID NO: 220072 - DNA, 25 bp, Artificial
  probe
  misc_feature (1)..(25): SEQ ID NO: 663; WAN024FT8_at; Start 271; Stop 295
caagaagcctttctatcactcaata

SEQ ID NO: 220073 - DNA, 25 bp, Artificial
  probe
  misc_feature (1)..(25): SEQ ID NO: 5278; WAN024FT9_at; Start 475; Stop 499
tgtggaaatgctggaaagccaatca

SEQ ID NO: 220074 - DNA, 25 bp, Artificial
  probe
  misc_feature (1)..(25): SEQ ID NO: 5278; WAN024FT9_at; Start 444; Stop 468
tagtcatttccctctgtgtcgcgat

SEQ ID NO: 220075 - DNA, 25 bp, Artificial
  probe
  misc_feature (1)..(25): SEQ ID NO: 5278; WAN024FT9_at; Start 192; Stop 216
tcttgaccttgcttcctcgttttga

SEQ ID NO: 220076 - DNA, 25 bp, Artificial
  probe
  misc_feature (1)..(25): SEQ ID NO: 5278; WAN024FT9_at; Start 456; Stop 480
tctgtgtcgcgattgactatgtgga

SEQ ID NO: 220077 - DNA, 25 bp, Artificial
  probe
  misc_feature (1)..(25): SEQ ID NO: 5278; WAN024FT9_at; Start 462; Stop 486
tcgcgattgactatgtggaaatgct

SEQ ID NO: 220078 - DNA, 25 bp, Artificial
  probe
  misc_feature (1)..(25): SEQ ID NO: 5278; WAN024FT9_at; Start 307; Stop 331
tatcgagggcaatatctgggatttg

SEQ ID NO: 220079 - DNA, 25 bp, Artificial
  probe
  misc_feature (1)..(25): SEQ ID NO: 5278; WAN024FT9_at; Start 256; Stop 280
gaagttgaccttctggcgagataag

SEQ ID NO: 220080 - DNA, 25 bp, Artificial
  probe
  misc_feature (1)..(25): SEQ ID NO: 5278; WAN024FT9_at; Start 470; Stop 494
gactatgtggaaatgctggaaagcc

SEQ ID NO: 220081 - DNA, 25 bp, Artificial
  probe
  misc_feature (1)..(25): SEQ ID NO: 5278; WAN024FT9_at; Start 262; Stop 286
gaccttctggcgagataagtatgag

SEQ ID NO: 220082 - DNA, 25 bp, Artificial
  probe
  misc_feature (1)..(25): SEQ ID NO: 5278; WAN024FT9_at; Start 297; Stop 321
taggtcttcgtatcgagggcaatat

SEQ ID NO: 220083 - DNA, 25 bp, Artificial
  probe
  misc_feature (1)..(25): SEQ ID NO: 5278; WAN024FT9_at; Start 227; Stop 251
cgggatggctcgagttttgtcattc

SEQ ID NO: 220084 - DNA, 25 bp, Artificial
  probe
  misc_feature (1)..(25): SEQ ID NO: 5278; WAN024FT9_at; Start 428; Stop 452
gacgcttatgcagacctagtcattt

SEQ ID NO: 220085 - DNA, 25 bp, Artificial
  probe
  misc_feature (1)..(25): SEQ ID NO: 5278; WAN024FT9_at; Start 437; Stop 461
gcagacctagtcatttccctctgtg

SEQ ID NO: 220086 - DNA, 25 bp, Artificial
  probe
  misc_feature (1)..(25): SEQ ID NO: 5278; WAN024FT9_at; Start 267; Stop 291
tctggcgagataagtatgagtttga

SEQ ID NO: 220087 - DNA, 25 bp, Artificial
  probe
  misc_feature (1)..(25): SEQ ID NO: 5278; WAN024FT9_at; Start 234; Stop 258
gctcgagttttgtcattcgtaagaa

SEQ ID NO: 220088 - DNA, 25 bp, Artificial
  probe
  misc_feature (1)..(25): SEQ ID NO: 5278; WAN024FT9_at; Start 13; Stop 37
ggtgttgatgaaaacatttcttgtc

SEQ ID NO: 220089 - DNA, 25 bp, Artificial
  probe
  misc_feature (1)..(25): SEQ ID NO: 5278; WAN024FT9_at; Start 55; Stop 79
tggaggcgaacgcttcgctatcaag

SEQ ID NO: 220090 - DNA, 25 bp, Artificial
  probe
  misc_feature (1)..(25): SEQ ID NO: 5278; WAN024FT9_at; Start 247; Stop 271
cattcgtaagaagttgaccttctgg

SEQ ID NO: 220091 - DNA, 25 bp, Artificial
  probe
  misc_feature (1)..(25): SEQ ID NO: 5278; WAN024FT9_at; Start 337; Stop 361
caaattgctggatgatcgcgatcag

SEQ ID NO: 220092 - DNA, 25 bp, Artificial
  probe
  misc_feature (1)..(25): SEQ ID NO: 5278; WAN024FT9_at; Start 316; Stop 340
caatatctgggatttgaatttcaaa

SEQ ID NO: 220093 - DNA, 25 bp, Artificial
  probe
  misc_feature (1)..(25): SEQ ID NO: 5278; WAN024FT9_at; Start 147; Stop 171
tctatgatgcggctggtgaacaagt

SEQ ID NO: 220094 - DNA, 25 bp, Artificial
  probe
  misc_feature (1)..(25): SEQ ID NO: 5278; WAN024FT9_at; Start 331; Stop 355
gaatttcaaattgctggatgatcgc

SEQ ID NO: 220095 - DNA, 25 bp, Artificial
  probe
  misc_feature (1)..(25): SEQ ID NO: 5278; WAN024FT9_at; Start 151; Stop 175
tgatgcggctggtgaacaagtcagt

SEQ ID NO: 220096 - DNA, 25 bp, Artificial
  probe
  misc_feature (1)..(25): SEQ ID NO: 5278; WAN024FT9_at; Start 3; Stop 27
gatttttggaggtgttgatgaaaac

SEQ ID NO: 220097 - DNA, 25 bp, Artificial
  probe
  misc_feature (1)..(25): SEQ ID NO: 5278; WAN024FT9_at; Start 484; Stop 508
gctggaaagccaatcacattaacta

SEQ ID NO: 220098 - DNA, 25 bp, Artificial
  probe
  misc_feature (1)..(25): SEQ ID NO: 5278; WAN024FT9_at; Start 183; Stop 207
gtaaagaaatcttgaccttgcttcc

SEQ ID NO: 220099 - DNA, 25 bp, Artificial
  probe
  misc_feature (1)..(25): SEQ ID NO: 5278; WAN024FT9_at; Start 47; Stop 71
tttcgtcttggaggcgaacgcttcg

SEQ ID NO: 220100 - DNA, 25 bp, Artificial
  probe
  misc_feature (1)..(25): SEQ ID NO: 5278; WAN024FT9_at; Start 301; Stop 325
tcttcgtatcgagggcaatatctgg

SEQ ID NO: 220101 - DNA, 25 bp, Artificial
  probe
  misc_feature (1)..(25): SEQ ID NO: 5278; WAN024FT9_at; Start 448; Stop 472
catttccctctgtgtcgcgattgac

SEQ ID NO: 220102 - DNA, 25 bp, Artificial
  probe
  misc_feature (1)..(25): SEQ ID NO: 5278; WAN024FT9_at; Start 188; Stop 212
gaaatcttgaccttgcttcctcgtt

SEQ ID NO: 220103 - DNA, 25 bp, Artificial
  probe
  misc_feature (1)..(25): SEQ ID NO: 5278; WAN024FT9_at; Start 34; Stop 58
tgtcaaacaaaagtttcgtcttgga

SEQ ID NO: 220104 - DNA, 25 bp, Artificial
  probe
  misc_feature (1)..(25): SEQ ID NO: 5278; WAN024FT9_at; Start 27; Stop 51
catttcttgtcaaacaaaagtttcg

SEQ ID NO: 220105 - DNA, 25 bp, Artificial
  probe
  misc_feature (1)..(25): SEQ ID NO: 5278; WAN024FT9_at; Start 218; Stop 242
attcagcttcgggatggctcgagtt

SEQ ID NO: 220106 - DNA, 25 bp, Artificial
  probe
  misc_feature (1)..(25): SEQ ID NO: 5278; WAN024FT9_at; Start 90; Stop 114
gagaaattgcctatcaggtggaggg

SEQ ID NO: 220107 - DNA, 25 bp, Artificial
  probe
  misc_feature (1)..(25): SEQ ID NO: 720; WAN024FTA_at; Start 147; Stop 171
acagatggaaaaatggttcaacctt

SEQ ID NO: 220108 - DNA, 25 bp, Artificial
  probe
  misc_feature (1)..(25): SEQ ID NO: 720; WAN024FTA_at; Start 63; Stop 87
aatactagatttaatgagagagaaa

SEQ ID NO: 220109 - DNA, 25 bp, Artificial
  probe
  misc_feature (1)..(25): SEQ ID NO: 720; WAN024FTA_at; Start 271; Stop 295
ttgttaacttgtattcaggaattaa

SEQ ID NO: 220110 - DNA, 25 bp, Artificial
  probe
  misc_feature (1)..(25): SEQ ID NO: 720; WAN024FTA_at; Start 31; Stop 55
caatttcgcttaacagaaacggaag

SEQ ID NO: 220111 - DNA, 25 bp, Artificial
  probe
  misc_feature (1)..(25): SEQ ID NO: 720; WAN024FTA_at; Start 280; Stop 304
tgtattcaggaattaattaaagagg

SEQ ID NO: 220112 - DNA, 25 bp, Artificial
  probe
  misc_feature (1)..(25): SEQ ID NO: 720; WAN024FTA_at; Start 267; Stop 291
tattttgttaacttgtattcaggaa

SEQ ID NO: 220113 - DNA, 25 bp, Artificial
  probe
  misc_feature (1)..(25): SEQ ID NO: 720; WAN024FTA_at; Start 11; Stop 35
atatacgtagtattcggaaacaatt

SEQ ID NO: 220114 - DNA, 25 bp, Artificial
  probe
  misc_feature (1)..(25): SEQ ID NO: 720; WAN024FTA_at; Start 138; Stop 162
tggacaaaaacagatggaaaaatgg

SEQ ID NO: 220115 - DNA, 25 bp, Artificial
  probe
  misc_feature (1)..(25): SEQ ID NO: 720; WAN024FTA_at; Start 61; Stop 85
caaatactagatttaatgagagaga

SEQ ID NO: 220116 - DNA, 25 bp, Artificial
  probe
  misc_feature (1)..(25): SEQ ID NO: 720; WAN024FTA_at; Start 285; Stop 309
tcaggaattaattaaagaggtagaa

SEQ ID NO: 220117 - DNA, 25 bp, Artificial
  probe
  misc_feature (1)..(25): SEQ ID NO: 720; WAN024FTA_at; Start 149; Stop 173
agatggaaaaatggttcaacctttg

SEQ ID NO: 220118 - DNA, 25 bp, Artificial
  probe
  misc_feature (1)..(25): SEQ ID NO: 720; WAN024FTA_at; Start 146; Stop 170
aacagatggaaaaatggttcaacct

SEQ ID NO: 220119 - DNA, 25 bp, Artificial
  probe
  misc_feature (1)..(25): SEQ ID NO: 720; WAN024FTA_at; Start 66; Stop 90
actagatttaatgagagagaaagga

SEQ ID NO: 220120 - DNA, 25 bp, Artificial
  probe
  misc_feature (1)..(25): SEQ ID NO: 720; WAN024FTA_at; Start 133; Stop 157
tctgatggacaaaaacagatggaaa

SEQ ID NO: 220121 - DNA, 25 bp, Artificial
  probe
  misc_feature (1)..(25): SEQ ID NO: 720; WAN024FTA_at; Start 270; Stop 294
tttgttaacttgtattcaggaatta

SEQ ID NO: 220122 - DNA, 25 bp, Artificial
  probe
  misc_feature (1)..(25): SEQ ID NO: 720; WAN024FTA_at; Start 282; Stop 306
tattcaggaattaattaaagaggta

SEQ ID NO: 220123 - DNA, 25 bp, Artificial
  probe
  misc_feature (1)..(25): SEQ ID NO: 720; WAN024FTA_at; Start 59; Stop 83
aacaaatactagatttaatgagaga

SEQ ID NO: 220124 - DNA, 25 bp, Artificial
  probe
  misc_feature (1)..(25): SEQ ID NO: 720; WAN024FTA_at; Start 58; Stop 82
aaacaaatactagatttaatgagag

SEQ ID NO: 220125 - DNA, 25 bp, Artificial
  probe
  misc_feature (1)..(25): SEQ ID NO: 720; WAN024FTA_at; Start 135; Stop 159
tgatggacaaaaacagatggaaaaa

SEQ ID NO: 220126 - DNA, 25 bp, Artificial
  probe
  misc_feature (1)..(25): SEQ ID NO: 720; WAN024FTA_at; Start 67; Stop 91
ctagatttaatgagagagaaaggag

SEQ ID NO: 220127 - DNA, 25 bp, Artificial
  probe
  misc_feature (1)..(25): SEQ ID NO: 720; WAN024FTA_at; Start 148; Stop 172
cagatggaaaaatggttcaaccttt

SEQ ID NO: 220128 - DNA, 25 bp, Artificial
  probe
  misc_feature (1)..(25): SEQ ID NO: 720; WAN024FTA_at; Start 136; Stop 160
gatggacaaaaacagatggaaaaat

SEQ ID NO: 220129 - DNA, 25 bp, Artificial
  probe
  misc_feature (1)..(25): SEQ ID NO: 720; WAN024FTA_at; Start 68; Stop 92
tagatttaatgagagagaaaggaga

SEQ ID NO: 220130 - DNA, 25 bp, Artificial
  probe
  misc_feature (1)..(25): SEQ ID NO: 720; WAN024FTA_at; Start 284; Stop 308
ttcaggaattaattaaagaggtaga

SEQ ID NO: 220131 - DNA, 25 bp, Artificial
  probe
  misc_feature (1)..(25): SEQ ID NO: 720; WAN024FTA_at; Start 265; Stop 289
tctattttgttaacttgtattcagg

SEQ ID NO: 220132 - DNA, 25 bp, Artificial
  probe
  misc_feature (1)..(25): SEQ ID NO: 720; WAN024FTA_at; Start 64; Stop 88
atactagatttaatgagagagaaag

SEQ ID NO: 220133 - DNA, 25 bp, Artificial
  probe
  misc_feature (1)..(25): SEQ ID NO: 720; WAN024FTA_at; Start 266; Stop 290
ctattttgttaacttgtattcagga

SEQ ID NO: 220134 - DNA, 25 bp, Artificial
  probe
  misc_feature (1)..(25): SEQ ID NO: 720; WAN024FTA_at; Start 65; Stop 89
tactagatttaatgagagagaaagg

SEQ ID NO: 220135 - DNA, 25 bp, Artificial
  probe
  misc_feature (1)..(25): SEQ ID NO: 720; WAN024FTA_at; Start 62; Stop 86
aaatactagatttaatgagagagaa

SEQ ID NO: 220136 - DNA, 25 bp, Artificial
  probe
  misc_feature (1)..(25): SEQ ID NO: 720; WAN024FTA_at; Start 134; Stop 158
ctgatggacaaaaacagatggaaaa

SEQ ID NO: 220137 - DNA, 25 bp, Artificial
  probe
  misc_feature (1)..(25): SEQ ID NO: 720; WAN024FTA_at; Start 142; Stop 166
caaaaacagatggaaaaatggttca

SEQ ID NO: 220138 - DNA, 25 bp, Artificial
  probe
  misc_feature (1)..(25): SEQ ID NO: 720; WAN024FTA_at; Start 272; Stop 296
tgttaacttgtattcaggaattaat

SEQ ID NO: 220139 - DNA, 25 bp, Artificial
  probe
  misc_feature (1)..(25): SEQ ID NO: 720; WAN024FTA_at; Start 283; Stop 307
attcaggaattaattaaagaggtag

SEQ ID NO: 220140 - DNA, 25 bp, Artificial
  probe
  misc_feature (1)..(25): SEQ ID NO: 720; WAN024FTA_at; Start 60; Stop 84
acaaatactagatttaatgagagag

SEQ ID NO: 220141 - DNA, 25 bp, Artificial
  probe
  misc_feature (1)..(25): SEQ ID NO: 3981; WAN024FTB_at; Start 27; Stop 51
gatggcaacttataatggagctaaa

SEQ ID NO: 220142 - DNA, 25 bp, Artificial
  probe
  misc_feature (1)..(25): SEQ ID NO: 3981; WAN024FTB_at; Start 218; Stop 242
ggagctcagagaaaaattttgcagc

SEQ ID NO: 220143 - DNA, 25 bp, Artificial
  probe
  misc_feature (1)..(25): SEQ ID NO: 3981; WAN024FTB_at; Start 448; Stop 472
cgtgccttagatgtagatgtgacag

SEQ ID NO: 220144 - DNA, 25 bp, Artificial
  probe
  misc_feature (1)..(25): SEQ ID NO: 3981; WAN024FTB_at; Start 875; Stop 899
gcactgttataaaaggaggctatct

SEQ ID NO: 220145 - DNA, 25 bp, Artificial
  probe
  misc_feature (1)..(25): SEQ ID NO: 3981; WAN024FTB_at; Start 846; Stop 870
tccacataagcataaattggcgaga

SEQ ID NO: 220146 - DNA, 25 bp, Artificial
  probe
  misc_feature (1)..(25): SEQ ID NO: 3981; WAN024FTB_at; Start 463; Stop 487
gatgtgacagaattgaatcgtatac

SEQ ID NO: 220147 - DNA, 25 bp, Artificial
  probe
  misc_feature (1)..(25): SEQ ID NO: 3981; WAN024FTB_at; Start 324; Stop 348
gattgagcgctcactttataaaatg

SEQ ID NO: 220148 - DNA, 25 bp, Artificial
  probe
  misc_feature (1)..(25): SEQ ID NO: 3981; WAN024FTB_at; Start 133; Stop 157
gatgctacttttcaaatccttcagc

SEQ ID NO: 220149 - DNA, 25 bp, Artificial
  probe
  misc_feature (1)..(25): SEQ ID NO: 3981; WAN024FTB_at; Start 566; Stop 590
cagtagctatgcatgattggtggat

SEQ ID NO: 220150 - DNA, 25 bp, Artificial
  probe
  misc_feature (1)..(25): SEQ ID NO: 3981; WAN024FTB_at; Start 9; Stop 33
caagcaaattgcgattatgatggca

SEQ ID NO: 220151 - DNA, 25 bp, Artificial
  probe
  misc_feature (1)..(25): SEQ ID NO: 3981; WAN024FTB_at; Start 237; Stop 261
tgcagctattcaaaaatgggtgacg

SEQ ID NO: 220152 - DNA, 25 bp, Artificial
  probe
  misc_feature (1)..(25): SEQ ID NO: 3981; WAN024FTB_at; Start 184; Stop 208
attaaggttatcacagattcctctg

SEQ ID NO: 220153 - DNA, 25 bp, Artificial
  probe
  misc_feature (1)..(25): SEQ ID NO: 3981; WAN024FTB_at; Start 890; Stop 914
gaggctatctaaagcaaagtgtggt

SEQ ID NO: 220154 - DNA, 25 bp, Artificial
  probe
  misc_feature (1)..(25): SEQ ID NO: 3981; WAN024FTB_at; Start 604; Stop 628
gctagctttgggaaaattgtttgcc

SEQ ID NO: 220155 - DNA, 25 bp, Artificial
  probe
  misc_feature (1)..(25): SEQ ID NO: 3981; WAN024FTB_at; Start 501; Stop 525
cattacgggttgtacaatgttatgg

SEQ ID NO: 220156 - DNA, 25 bp, Artificial
  probe
  misc_feature (1)..(25): SEQ ID NO: 3981; WAN024FTB_at; Start 586; Stop 610
tggataagtttagttgctgctagct

SEQ ID NO: 220157 - DNA, 25 bp, Artificial
  probe
  misc_feature (1)..(25): SEQ ID NO: 3981; WAN024FTB_at; Start 113; Stop 137
tccatgacgattgttcaaatgatgc

SEQ ID NO: 220158 - DNA, 25 bp, Artificial
  probe
  misc_feature (1)..(25): SEQ ID NO: 3981; WAN024FTB_at; Start 710; Stop 734
tcaagaggttgttaggaaattctca

SEQ ID NO: 220159 - DNA, 25 bp, Artificial
  probe
  misc_feature (1)..(25): SEQ ID NO: 3981; WAN024FTB_at; Start 749; Stop 773
tgaagctatcatttgaacaagcaga

SEQ ID NO: 220160 - DNA, 25 bp, Artificial
  probe
  misc_feature (1)..(25): SEQ ID NO: 3981; WAN024FTB_at; Start 311; Stop 335
ggtttccaaataagattgagcgctc

SEQ ID NO: 220161 - DNA, 25 bp, Artificial
  probe
  misc_feature (1)..(25): SEQ ID NO: 3981; WAN024FTB_at; Start 153; Stop 177
tcagcaataccaagaaaaataccct

SEQ ID NO: 220162 - DNA, 25 bp, Artificial
  probe
  misc_feature (1)..(25): SEQ ID NO: 3981; WAN024FTB_at; Start 905; Stop 929
aaagtgtggtgcaagtaatcggtga

SEQ ID NO: 220163 - DNA, 25 bp, Artificial
  probe
  misc_feature (1)..(25): SEQ ID NO: 3981; WAN024FTB_at; Start 832; Stop 856
gaatttatcagcattccacataagc

SEQ ID NO: 220164 - DNA, 25 bp, Artificial
  probe
  misc_feature (1)..(25): SEQ ID NO: 3981; WAN024FTB_at; Start 677; Stop 701
gggcgacacaagtcaatactttagg

SEQ ID NO: 220165 - DNA, 25 bp, Artificial
  probe
  misc_feature (1)..(25): SEQ ID NO: 3981; WAN024FTB_at; Start 433; Stop 457
tctttcttcgaatatcgtgccttag

SEQ ID NO: 220166 - DNA, 25 bp, Artificial
  probe
  misc_feature (1)..(25): SEQ ID NO: 3981; WAN024FTB_at; Start 810; Stop 834
tgaggagacagatattattcgtgaa

SEQ ID NO: 220167 - DNA, 25 bp, Artificial
  probe
  misc_feature (1)..(25): SEQ ID NO: 3981; WAN024FTB_at; Start 792; Stop 816
tcagaattctctaagtaatgaggag

SEQ ID NO: 220168 - DNA, 25 bp, Artificial
  probe
  misc_feature (1)..(25): SEQ ID NO: 3981; WAN024FTB_at; Start 66; Stop 90
gatagactctattcttaggcaaact

SEQ ID NO: 220169 - DNA, 25 bp, Artificial
  probe
  misc_feature (1)..(25): SEQ ID NO: 3981; WAN024FTB_at; Start 642; Stop 666
aattaaatatcgtcaacacggtggg

SEQ ID NO: 220170 - DNA, 25 bp, Artificial
  probe
  misc_feature (1)..(25): SEQ ID NO: 3981; WAN024FTB_at; Start 48; Stop 72
taaatacattggagaacagatagac

SEQ ID NO: 220171 - DNA, 25 bp, Artificial
  probe
  misc_feature (1)..(25): SEQ ID NO: 3981; WAN024FTB_at; Start 858; Stop 882
taaattggcgagaataagcactgtt

SEQ ID NO: 220172 - DNA, 25 bp, Artificial
  probe
  misc_feature (1)..(25): SEQ ID NO: 3981; WAN024FTB_at; Start 550; Stop 574
gatttgaatagtaatgcagtagcta

SEQ ID NO: 220173 - DNA, 25 bp, Artificial
  probe
  misc_feature (1)..(25): SEQ ID NO: 3981; WAN024FTB_at; Start 730; Stop 754
tctcatgtcaaggaaactttgaagc

SEQ ID NO: 220174 - DNA, 25 bp, Artificial
  probe
  misc_feature (1)..(25): SEQ ID NO: 3981; WAN024FTB_at; Start 81; Stop 105
taggcaaacttatcaagattggaaa

SEQ ID NO: 220175 - DNA, 25 bp, Artificial
  probe
  misc_feature (1)..(25): SEQ ID NO: 7323; WAN024FTC_at; Start 2; Stop 26
tggttgtcgacaaaagtcacagcct

SEQ ID NO: 220176 - DNA, 25 bp, Artificial
  probe
  misc_feature (1)..(25): SEQ ID NO: 7323; WAN024FTC_at; Start 66; Stop 90
cacgaaggtcatagtttgcgccagc

SEQ ID NO: 220177 - DNA, 25 bp, Artificial
  probe
  misc_feature (1)..(25): SEQ ID NO: 7323; WAN024FTC_at; Start 342; Stop 366
catagatgttttggatgacttcagg

SEQ ID NO: 220178 - DNA, 25 bp, Artificial
  probe
  misc_feature (1)..(25): SEQ ID NO: 7323; WAN024FTC_at; Start 317; Stop 341
gtttccatgaaccaatcagcccagt

SEQ ID NO: 220179 - DNA, 25 bp, Artificial
  probe
  misc_feature (1)..(25): SEQ ID NO: 7323; WAN024FTC_at; Start 51; Stop 75
tatctgtgaaaatgccacgaaggtc

SEQ ID NO: 220180 - DNA, 25 bp, Artificial
  probe
  misc_feature (1)..(25): SEQ ID NO: 7323; WAN024FTC_at; Start 93; Stop 117
gactggcttcaaagagattctggtg

SEQ ID NO: 220181 - DNA, 25 bp, Artificial
  probe
  misc_feature (1)..(25): SEQ ID NO: 7323; WAN024FTC_at; Start 223; Stop 247
accgtatttttccttcatatcgcgg

SEQ ID NO: 220182 - DNA, 25 bp, Artificial
  probe
  misc_feature (1)..(25): SEQ ID NO: 7323; WAN024FTC_at; Start 182; Stop 206
ttgtctgggttccaaaattcaccaa

SEQ ID NO: 220183 - DNA, 25 bp, Artificial
  probe
  misc_feature (1)..(25): SEQ ID NO: 7323; WAN024FTC_at; Start 294; Stop 318
aacggaaaccagctacaccagtcgt

SEQ ID NO: 220184 - DNA, 25 bp, Artificial
  probe
  misc_feature (1)..(25): SEQ ID NO: 7323; WAN024FTC_at; Start 237; Stop 261
tcatatcgcggatgaagttgcgcat

SEQ ID NO: 220185 - DNA, 25 bp, Artificial
  probe
  misc_feature (1)..(25): SEQ ID NO: 7323; WAN024FTC_at; Start 357; Stop 381
tgacttcaggatgtttaaagtctag

SEQ ID NO: 220186 - DNA, 25 bp, Artificial
  probe
  misc_feature (1)..(25): SEQ ID NO: 7323; WAN024FTC_at; Start 115; Stop 139
gtggagacgaacatcgacaaggtca

SEQ ID NO: 220187 - DNA, 25 bp, Artificial
  probe
  misc_feature (1)..(25): SEQ ID NO: 7323; WAN024FTC_at; Start 128; Stop 152
tcgacaaggtcaaagtgttcttccg

SEQ ID NO: 220188 - DNA, 25 bp, Artificial
  probe
  misc_feature (1)..(25): SEQ ID NO: 7323; WAN024FTC_at; Start 332; Stop 356
tcagcccagtcatagatgttttgga

SEQ ID NO: 220189 - DNA, 25 bp, Artificial
  probe
  misc_feature (1)..(25): SEQ ID NO: 7323; WAN024FTC_at; Start 10; Stop 34
gacaaaagtcacagccttgtcaggc

SEQ ID NO: 220190 - DNA, 25 bp, Artificial
  probe
  misc_feature (1)..(25): SEQ ID NO: 7323; WAN024FTC_at; Start 108; Stop 132
gattctggtggagacgaacatcgac

SEQ ID NO: 220191 - DNA, 25 bp, Artificial
  probe
  misc_feature (1)..(25): SEQ ID NO: 7323; WAN024FTC_at; Start 282; Stop 306
taacggcatccaaacggaaaccagc

SEQ ID NO: 220192 - DNA, 25 bp, Artificial
  probe
  misc_feature (1)..(25): SEQ ID NO: 7323; WAN024FTC_at; Start 162; Stop 186
gatagtccagattggcttccttgtc

SEQ ID NO: 220193 - DNA, 25 bp, Artificial
  probe
  misc_feature (1)..(25): SEQ ID NO: 7323; WAN024FTC_at; Start 33; Stop 57
gcttgagttcaaccaggctatctgt

SEQ ID NO: 220194 - DNA, 25 bp, Artificial
  probe
  misc_feature (1)..(25): SEQ ID NO: 7323; WAN024FTC_at; Start 41; Stop 65
tcaaccaggctatctgtgaaaatgc

SEQ ID NO: 220195 - DNA, 25 bp, Artificial
  probe
  misc_feature (1)..(25): SEQ ID NO: 7323; WAN024FTC_at; Start 61; Stop 85
aatgccacgaaggtcatagtttgcg

SEQ ID NO: 220196 - DNA, 25 bp, Artificial
  probe
  misc_feature (1)..(25): SEQ ID NO: 7323; WAN024FTC_at; Start 204; Stop 228
caaaaacatagaaatcgtcaccgta

SEQ ID NO: 220197 - DNA, 25 bp, Artificial
  probe
  misc_feature (1)..(25): SEQ ID NO: 7323; WAN024FTC_at; Start 303; Stop 327
cagctacaccagtcgtttccatgaa

SEQ ID NO: 220198 - DNA, 25 bp, Artificial
  probe
  misc_feature (1)..(25): SEQ ID NO: 7323; WAN024FTC_at; Start 250; Stop 274
gaagttgcgcataaagaaagagtca

SEQ ID NO: 220199 - DNA, 25 bp, Artificial
  probe
  misc_feature (1)..(25): SEQ ID NO: 7323; WAN024FTC_at; Start 171; Stop 195
gattggcttccttgtctgggttcca

SEQ ID NO: 220200 - DNA, 25 bp, Artificial
  probe
  misc_feature (1)..(25): SEQ ID NO: 7323; WAN024FTC_at; Start 153; Stop 177
ttttttcgagatagtccagattggc

SEQ ID NO: 220201 - DNA, 25 bp, Artificial
  probe
  misc_feature (1)..(25): SEQ ID NO: 7323; WAN024FTC_at; Start 102; Stop 126
caaagagattctggtggagacgaac

SEQ ID NO: 220202 - DNA, 25 bp, Artificial
  probe
  misc_feature (1)..(25): SEQ ID NO: 7323; WAN024FTC_at; Start 75; Stop 99
catagtttgcgccagcttgactggc

SEQ ID NO: 220203 - DNA, 25 bp, Artificial
  probe
  misc_feature (1)..(25): SEQ ID NO: 7323; WAN024FTC_at; Start 23; Stop 47
gccttgtcaggcttgagttcaacca

SEQ ID NO: 220204 - DNA, 25 bp, Artificial
  probe
  misc_feature (1)..(25): SEQ ID NO: 7323; WAN024FTC_at; Start 191; Stop 215
ttccaaaattcaccaaaaacataga

SEQ ID NO: 220205 - DNA, 25 bp, Artificial
  probe
  misc_feature (1)..(25): SEQ ID NO: 7323; WAN024FTC_at; Start 265; Stop 289
gaaagagtcaatatgcttaacggca

SEQ ID NO: 220206 - DNA, 25 bp, Artificial
  probe
  misc_feature (1)..(25): SEQ ID NO: 7323; WAN024FTC_at; Start 147; Stop 171
cttccgttttttcgagatagtccag

SEQ ID NO: 220207 - DNA, 25 bp, Artificial
  probe
  misc_feature (1)..(25): SEQ ID NO: 7323; WAN024FTC_at; Start 276; Stop 300
tatgcttaacggcatccaaacggaa

SEQ ID NO: 220208 - DNA, 25 bp, Artificial
  probe
  misc_feature (1)..(25): SEQ ID NO: 7323; WAN024FTC_at; Start 87; Stop 111
cagcttgactggcttcaaagagatt

SEQ ID NO: 220209 - DNA, 25 bp, Artificial
  probe
  misc_feature (1)..(25): SEQ ID NO: 5494; WAN024FTD_at; Start 27; Stop 51
tgcgtttggcatcgtagtctgtacc

SEQ ID NO: 220210 - DNA, 25 bp, Artificial
  probe
  misc_feature (1)..(25): SEQ ID NO: 5494; WAN024FTD_at; Start 260; Stop 284
gctttaagggcttgaatggcttgaa

SEQ ID NO: 220211 - DNA, 25 bp, Artificial
  probe
  misc_feature (1)..(25): SEQ ID NO: 5494; WAN024FTD_at; Start 300; Stop 324
aaccatacttggtgcggacagtccc

SEQ ID NO: 220212 - DNA, 25 bp, Artificial
  probe
  misc_feature (1)..(25): SEQ ID NO: 5494; WAN024FTD_at; Start 232; Stop 256
tacatcggccataggttgaattccc

SEQ ID NO: 220213 - DNA, 25 bp, Artificial
  probe
  misc_feature (1)..(25): SEQ ID NO: 5494; WAN024FTD_at; Start 157; Stop 181
tgtacggtctacaggatcaacttcg

SEQ ID NO: 220214 - DNA, 25 bp, Artificial
  probe
  misc_feature (1)..(25): SEQ ID NO: 5494; WAN024FTD_at; Start 109; Stop 133
ggtaaaactagtccagccattgatg

SEQ ID NO: 220215 - DNA, 25 bp, Artificial
  probe
  misc_feature (1)..(25): SEQ ID NO: 5494; WAN024FTD_at; Start 92; Stop 116
tcttggcgaccatcgaaggtaaaac

SEQ ID NO: 220216 - DNA, 25 bp, Artificial
  probe
  misc_feature (1)..(25): SEQ ID NO: 5494; WAN024FTD_at; Start 222; Stop 246
ggttgagaactacatcggccatagg

SEQ ID NO: 220217 - DNA, 25 bp, Artificial
  probe
  misc_feature (1)..(25): SEQ ID NO: 5494; WAN024FTD_at; Start 54; Stop 78
tgaagtggtaccaatgccagtggaa

SEQ ID NO: 220218 - DNA, 25 bp, Artificial
  probe
  misc_feature (1)..(25): SEQ ID NO: 5494; WAN024FTD_at; Start 312; Stop 336
tgcggacagtccctttttggttgaa

SEQ ID NO: 220219 - DNA, 25 bp, Artificial
  probe
  misc_feature (1)..(25): SEQ ID NO: 5494; WAN024FTD_at; Start 249; Stop 273
gaattccctgtgctttaagggcttg

SEQ ID NO: 220220 - DNA, 25 bp, Artificial
  probe
  misc_feature (1)..(25): SEQ ID NO: 5494; WAN024FTD_at; Start 145; Stop 169
tccaagttcaactgtacggtctaca

SEQ ID NO: 220221 - DNA, 25 bp, Artificial
  probe
  misc_feature (1)..(25): SEQ ID NO: 5494; WAN024FTD_at; Start 13; Stop 37
aatcccagatttactgcgtttggca

SEQ ID NO: 220222 - DNA, 25 bp, Artificial
  probe
  misc_feature (1)..(25): SEQ ID NO: 5494; WAN024FTD_at; Start 207; Stop 231
cggcagcagccttgtggttgagaac

SEQ ID NO: 220223 - DNA, 25 bp, Artificial
  probe
  misc_feature (1)..(25): SEQ ID NO: 5494; WAN024FTD_at; Start 270; Stop 294
cttgaatggcttgaagatagtcttc

SEQ ID NO: 220224 - DNA, 25 bp, Artificial
  probe
  misc_feature (1)..(25): SEQ ID NO: 5494; WAN024FTD_at; Start 124; Stop 148
gccattgatggtgaagggttctcca

SEQ ID NO: 220225 - DNA, 25 bp, Artificial
  probe
  misc_feature (1)..(25): SEQ ID NO: 5494; WAN024FTD_at; Start 199; Stop 223
cctgtgatcggcagcagccttgtgg

SEQ ID NO: 220226 - DNA, 25 bp, Artificial
  probe
  misc_feature (1)..(25): SEQ ID NO: 5494; WAN024FTD_at; Start 136; Stop 160
gaagggttctccaagttcaactgta

SEQ ID NO: 220227 - DNA, 25 bp, Artificial
  probe
  misc_feature (1)..(25): SEQ ID NO: 5494; WAN024FTD_at; Start 189; Stop 213
gaaaggcttccctgtgatcggcagc

SEQ ID NO: 220228 - DNA, 25 bp, Artificial
  probe
  misc_feature (1)..(25): SEQ ID NO: 5494; WAN024FTD_at; Start 60; Stop 84
ggtaccaatgccagtggaagccatt

SEQ ID NO: 220229 - DNA, 25 bp, Artificial
  probe
  misc_feature (1)..(25): SEQ ID NO: 5494; WAN024FTD_at; Start 294; Stop 318
ctttgaaaccatacttggtgcggac

SEQ ID NO: 220230 - DNA, 25 bp, Artificial
  probe
  misc_feature (1)..(25): SEQ ID NO: 5494; WAN024FTD_at; Start 238; Stop 262
ggccataggttgaattccctgtgct

SEQ ID NO: 220231 - DNA, 25 bp, Artificial
  probe
  misc_feature (1)..(25): SEQ ID NO: 5494; WAN024FTD_at; Start 102; Stop 126
catcgaaggtaaaactagtccagcc

SEQ ID NO: 220232 - DNA, 25 bp, Artificial
  probe
  misc_feature (1)..(25): SEQ ID NO: 5494; WAN024FTD_at; Start 48; Stop 72
taccggtgaagtggtaccaatgcca

SEQ ID NO: 220233 - DNA, 25 bp, Artificial
  probe
  misc_feature (1)..(25): SEQ ID NO: 5494; WAN024FTD_at; Start 282; Stop 306
gaagatagtcttctttgaaaccata

SEQ ID NO: 220234 - DNA, 25 bp, Artificial
  probe
  misc_feature (1)..(25): SEQ ID NO: 5494; WAN024FTD_at; Start 80; Stop 104
ccattataggtatcttggcgaccat

SEQ ID NO: 220235 - DNA, 25 bp, Artificial
  probe
  misc_feature (1)..(25): SEQ ID NO: 5494; WAN024FTD_at; Start 18; Stop 42
cagatttactgcgtttggcatcgta

SEQ ID NO: 220236 - DNA, 25 bp, Artificial
  probe
  misc_feature (1)..(25): SEQ ID NO: 5494; WAN024FTD_at; Start 181; Stop 205
gataacctgaaaggcttccctgtga

SEQ ID NO: 220237 - DNA, 25 bp, Artificial
  probe
  misc_feature (1)..(25): SEQ ID NO: 5494; WAN024FTD_at; Start 161; Stop 185
cggtctacaggatcaacttcgataa

SEQ ID NO: 220238 - DNA, 25 bp, Artificial
  probe
  misc_feature (1)..(25): SEQ ID NO: 5494; WAN024FTD_at; Start 1; Stop 25
ttggatcagataaatcccagattta

SEQ ID NO: 220239 - DNA, 25 bp, Artificial
  probe
  misc_feature (1)..(25): SEQ ID NO: 5494; WAN024FTD_at; Start 84; Stop 108
tataggtatcttggcgaccatcgaa

SEQ ID NO: 220240 - DNA, 25 bp, Artificial
  probe
  misc_feature (1)..(25): SEQ ID NO: 5494; WAN024FTD_at; Start 170; Stop 194
ggatcaacttcgataacctgaaagg

SEQ ID NO: 220241 - DNA, 25 bp, Artificial
  probe
  misc_feature (1)..(25): SEQ ID NO: 5494; WAN024FTD_at; Start 65; Stop 89
caatgccagtggaagccattatagg

SEQ ID NO: 220242 - DNA, 25 bp, Artificial
  probe
  misc_feature (1)..(25): SEQ ID NO: 5494; WAN024FTD_at; Start 35; Stop 59
gcatcgtagtctgtaccggtgaagt

SEQ ID NO: 220243 - DNA, 25 bp, Artificial
  probe
  misc_feature (1)..(25): SEQ ID NO: 1908; WAN024FTE_at; Start 105; Stop 129
gatcagtcacgtctggatgccacca

SEQ ID NO: 220244 - DNA, 25 bp, Artificial
  probe
  misc_feature (1)..(25): SEQ ID NO: 1908; WAN024FTE_at; Start 666; Stop 690
catggaaacgactggtgtagctggt

SEQ ID NO: 220245 - DNA, 25 bp, Artificial
  probe
  misc_feature (1)..(25): SEQ ID NO: 1908; WAN024FTE_at; Start 1185; Stop 1209
ggcctatggagaacaaaatgactac

SEQ ID NO: 220246 - DNA, 25 bp, Artificial
  probe
  misc_feature (1)..(25): SEQ ID NO: 1908; WAN024FTE_at; Start 1227; Stop 1251
tatcggttgggtacgttcaggtgct

SEQ ID NO: 220247 - DNA, 25 bp, Artificial
  probe
  misc_feature (1)..(25): SEQ ID NO: 1908; WAN024FTE_at; Start 277; Stop 301
ggaattcaacctatggccgatgtag

SEQ ID NO: 220248 - DNA, 25 bp, Artificial
  probe
  misc_feature (1)..(25): SEQ ID NO: 1908; WAN024FTE_at; Start 944; Stop 968
tggttgaactcaagcctgacaaggc

SEQ ID NO: 220249 - DNA, 25 bp, Artificial
  probe
  misc_feature (1)..(25): SEQ ID NO: 1908; WAN024FTE_at; Start 29; Stop 53
ttgaatggtatctgccccacgacgg

SEQ ID NO: 220250 - DNA, 25 bp, Artificial
  probe
  misc_feature (1)..(25): SEQ ID NO: 1908; WAN024FTE_at; Start 414; Stop 438
tagttttaccttcgatggtcgccaa

SEQ ID NO: 220251 - DNA, 25 bp, Artificial
  probe
  misc_feature (1)..(25): SEQ ID NO: 1908; WAN024FTE_at; Start 139; Stop 163
gcaaccaacgaaaaagatgtcggct

SEQ ID NO: 220252 - DNA, 25 bp, Artificial
  probe
  misc_feature (1)..(25): SEQ ID NO: 1908; WAN024FTE_at; Start 841; Stop 865
gaagaacactttgaccttgtcgatg

SEQ ID NO: 220253 - DNA, 25 bp, Artificial
  probe
  misc_feature (1)..(25): SEQ ID NO: 1908; WAN024FTE_at; Start 1398; Stop 1422
tggacaattccctgtctcagctaga

SEQ ID NO: 220254 - DNA, 25 bp, Artificial
  probe
  misc_feature (1)..(25): SEQ ID NO: 1908; WAN024FTE_at; Start 1143; Stop 1167
caaagaaatccttgaccgcctccta

SEQ ID NO: 220255 - DNA, 25 bp, Artificial
  probe
  misc_feature (1)..(25): SEQ ID NO: 1908; WAN024FTE_at; Start 904; Stop 928
ggcgcaaactatgaccttcgtggca

SEQ ID NO: 220256 - DNA, 25 bp, Artificial
  probe
  misc_feature (1)..(25): SEQ ID NO: 1908; WAN024FTE_at; Start 1064; Stop 1088
tgttacgccaagacggccttccatg

SEQ ID NO: 220257 - DNA, 25 bp, Artificial
  probe
  misc_feature (1)..(25): SEQ ID NO: 1908; WAN024FTE_at; Start 399; Stop 423
catcaatggctggactagttttacc

SEQ ID NO: 220258 - DNA, 25 bp, Artificial
  probe
  misc_feature (1)..(25): SEQ ID NO: 1908; WAN024FTE_at; Start 51; Stop 75
cggtcaacactggacgcgtctggct

SEQ ID NO: 220259 - DNA, 25 bp, Artificial
  probe
  misc_feature (1)..(25): SEQ ID NO: 1908; WAN024FTE_at; Start 1027; Stop 1051
gaagaatggttcaagccagcagcct

SEQ ID NO: 220260 - DNA, 25 bp, Artificial
  probe
  misc_feature (1)..(25): SEQ ID NO: 1908; WAN024FTE_at; Start 65; Stop 89
cgcgtctggctgaaaatgctccaca

SEQ ID NO: 220261 - DNA, 25 bp, Artificial
  probe
  misc_feature (1)..(25): SEQ ID NO: 1908; WAN024FTE_at; Start 1004; Stop 1028
gacaagcccttgagtctaccgttga

SEQ ID NO: 220262 - DNA, 25 bp, Artificial
  probe
  misc_feature (1)..(25): SEQ ID NO: 1908; WAN024FTE_at; Start 819; Stop 843
tctggactatctcgaaaaaacggaa

SEQ ID NO: 220263 - DNA, 25 bp, Artificial
  probe
  misc_feature (1)..(25): SEQ ID NO: 1908; WAN024FTE_at; Start 1421; Stop 1445
gatccgtaagtgtctgggcagtcaa

SEQ ID NO: 220264 - DNA, 25 bp, Artificial
  probe
  misc_feature (1)..(25): SEQ ID NO: 1908; WAN024FTE_at; Start 858; Stop 882
tgtcgatgttcgtctccaccagaat

SEQ ID NO: 220265 - DNA, 25 bp, Artificial
  probe
  misc_feature (1)..(25): SEQ ID NO: 1908; WAN024FTE_at; Start 384; Stop 408
tggagaacccttcaccatcaatggc

SEQ ID NO: 220266 - DNA, 25 bp, Artificial
  probe
  misc_feature (1)..(25): SEQ ID NO: 1908; WAN024FTE_at; Start 926; Stop 950
gcattttcacagatagcctggttga

SEQ ID NO: 220267 - DNA, 25 bp, Artificial
  probe
  misc_feature (1)..(25): SEQ ID NO: 1908; WAN024FTE_at; Start 210; Stop 234
gactgtccgcaccaagtatggtttc

SEQ ID NO: 220268 - DNA, 25 bp, Artificial
  probe
  misc_feature (1)..(25): SEQ ID NO: 1908; WAN024FTE_at; Start 1096; Stop 1120
tacggagactactatgggatttcag

SEQ ID NO: 220269 - DNA, 25 bp, Artificial
  probe
  misc_feature (1)..(25): SEQ ID NO: 1908; WAN024FTE_at; Start 196; Stop 220
ttcaaccaaaaagggactgtccgca

SEQ ID NO: 220270 - DNA, 25 bp, Artificial
  probe
  misc_feature (1)..(25): SEQ ID NO: 1908; WAN024FTE_at; Start 1212; Stop 1236
tgaccatgctaactgtatcggttgg

SEQ ID NO: 220271 - DNA, 25 bp, Artificial
  probe
  misc_feature (1)..(25): SEQ ID NO: 1908; WAN024FTE_at; Start 879; Stop 903
gaatctctttgaagccagtcaagct

SEQ ID NO: 220272 - DNA, 25 bp, Artificial
  probe
  misc_feature (1)..(25): SEQ ID NO: 1908; WAN024FTE_at; Start 1301; Stop 1325
gcaagtcaatgtttgtcggtcaaga

SEQ ID NO: 220273 - DNA, 25 bp, Artificial
  probe
  misc_feature (1)..(25): SEQ ID NO: 1908; WAN024FTE_at; Start 597; Stop 621
catgtatgccgacctagactttaaa

SEQ ID NO: 220274 - DNA, 25 bp, Artificial
  probe
  misc_feature (1)..(25): SEQ ID NO: 1908; WAN024FTE_at; Start 636; Stop 660
ccaaaacatctatgactgggctgat

SEQ ID NO: 220275 - DNA, 25 bp, Artificial
  probe
  misc_feature (1)..(25): SEQ ID NO: 1908; WAN024FTE_at; Start 1246; Stop 1270
ggtgctgaaaatcaatccccaatcg

SEQ ID NO: 220276 - DNA, 25 bp, Artificial
  probe
  misc_feature (1)..(25): SEQ ID NO: 1908; WAN024FTE_at; Start 363; Stop 387
tgtagaccgtacagttgaacttgga

SEQ ID NO: 220277 - DNA, 25 bp, Artificial
  probe
  misc_feature (1)..(25): SEQ ID NO: 4951; WAN024FTF_at; Start 1039; Stop 1063
gaatattcgtgggacacagttgcca

SEQ ID NO: 220278 - DNA, 25 bp, Artificial
  probe
  misc_feature (1)..(25): SEQ ID NO: 4951; WAN024FTF_at; Start 705; Stop 729
tgttccgatggaatttaacaatccg

SEQ ID NO: 220279 - DNA, 25 bp, Artificial
  probe
  misc_feature (1)..(25): SEQ ID NO: 4951; WAN024FTF_at; Start 467; Stop 491
ggttttcagattacttgatagctca

SEQ ID NO: 220280 - DNA, 25 bp, Artificial
  probe
  misc_feature (1)..(25): SEQ ID NO: 4951; WAN024FTF_at; Start 1027; Stop 1051
tattataaagcagaatattcgtggg

SEQ ID NO: 220281 - DNA, 25 bp, Artificial
  probe
  misc_feature (1)..(25): SEQ ID NO: 4951; WAN024FTF_at; Start 483; Stop 507
gatagctcaacaaggacttccagtt

SEQ ID NO: 220282 - DNA, 25 bp, Artificial
  probe
  misc_feature (1)..(25): SEQ ID NO: 4951; WAN024FTF_at; Start 148; Stop 172
cacaaagtgcttgttcgtttaggta

SEQ ID NO: 220283 - DNA, 25 bp, Artificial
  probe
  misc_feature (1)..(25): SEQ ID NO: 4951; WAN024FTF_at; Start 669; Stop 693
gccggaggcagagttgtacattata

SEQ ID NO: 220284 - DNA, 25 bp, Artificial
  probe
  misc_feature (1)..(25): SEQ ID NO: 4951; WAN024FTF_at; Start 40; Stop 64
caactgacctgggattggtccggga

SEQ ID NO: 220285 - DNA, 25 bp, Artificial
  probe
  misc_feature (1)..(25): SEQ ID NO: 4951; WAN024FTF_at; Start 217; Stop 241
aatcaagttcatctatcgccagagg

SEQ ID NO: 220286 - DNA, 25 bp, Artificial
  probe
  misc_feature (1)..(25): SEQ ID NO: 4951; WAN024FTF_at; Start 232; Stop 256
tcgccagaggatgtttgtctcacgt

SEQ ID NO: 220287 - DNA, 25 bp, Artificial
  probe
  misc_feature (1)..(25): SEQ ID NO: 4951; WAN024FTF_at; Start 174; Stop 198
taaaaaatctgatatgagcatgacg

SEQ ID NO: 220288 - DNA, 25 bp, Artificial
  probe
  misc_feature (1)..(25): SEQ ID NO: 4951; WAN024FTF_at; Start 690; Stop 714
tataggtccttcagatgttccgatg

SEQ ID NO: 220289 - DNA, 25 bp, Artificial
  probe
  misc_feature (1)..(25): SEQ ID NO: 4951; WAN024FTF_at; Start 840; Stop 864
tgaagctctttgctatggtttacca

SEQ ID NO: 220290 - DNA, 25 bp, Artificial
  probe
  misc_feature (1)..(25): SEQ ID NO: 4951; WAN024FTF_at; Start 654; Stop 678
gcaaaataatctcatgccggaggca

SEQ ID NO: 220291 - DNA, 25 bp, Artificial
  probe
  misc_feature (1)..(25): SEQ ID NO: 4951; WAN024FTF_at; Start 55; Stop 79
tggtccgggacaataactaatataa

SEQ ID NO: 220292 - DNA, 25 bp, Artificial
  probe
  misc_feature (1)..(25): SEQ ID NO: 4951; WAN024FTF_at; Start 558; Stop 582
tgaccactctcataaggaacgtaat

SEQ ID NO: 220293 - DNA, 25 bp, Artificial
  probe
  misc_feature (1)..(25): SEQ ID NO: 4951; WAN024FTF_at; Start 1053; Stop 1077
cacagttgccaaaagaatgatttca

SEQ ID NO: 220294 - DNA, 25 bp, Artificial
  probe
  misc_feature (1)..(25): SEQ ID NO: 4951; WAN024FTF_at; Start 869; Stop 893
tcggtcgtgatttaatggaaatgcc

SEQ ID NO: 220295 - DNA, 25 bp, Artificial
  probe
  misc_feature (1)..(25): SEQ ID NO: 4951; WAN024FTF_at; Start 916; Stop 940
actggattattattacctactgaag

SEQ ID NO: 220296 - DNA, 25 bp, Artificial
  probe
  misc_feature (1)..(25): SEQ ID NO: 4951; WAN024FTF_at; Start 853; Stop 877
tatggtttaccatgtatcggtcgtg

SEQ ID NO: 220297 - DNA, 25 bp, Artificial
  probe
  misc_feature (1)..(25): SEQ ID NO: 4951; WAN024FTF_at; Start 378; Stop 402
aaacgtcccggctgatattctagat

SEQ ID NO: 220298 - DNA, 25 bp, Artificial
  probe
  misc_feature (1)..(25): SEQ ID NO: 4951; WAN024FTF_at; Start 133; Stop 157
tttagaatgaatgtgcacaaagtgc

SEQ ID NO: 220299 - DNA, 25 bp, Artificial
  probe
  misc_feature (1)..(25): SEQ ID NO: 4951; WAN024FTF_at; Start 93; Stop 117
gaaatacgagattgttgaggaacag

SEQ ID NO: 220300 - DNA, 25 bp, Artificial
  probe
  misc_feature (1)..(25): SEQ ID NO: 4951; WAN024FTF_at; Start 398; Stop 422
tagatagacgaatgagaaaacagga

SEQ ID NO: 220301 - DNA, 25 bp, Artificial
  probe
  misc_feature (1)..(25): SEQ ID NO: 4951; WAN024FTF_at; Start 435; Stop 459
tcaagctactggaatatttactatg

SEQ ID NO: 220302 - DNA, 25 bp, Artificial
  probe
  misc_feature (1)..(25): SEQ ID NO: 4951; WAN024FTF_at; Start 28; Stop 52
cataacaaagaacaactgacctggg

SEQ ID NO: 220303 - DNA, 25 bp, Artificial
  probe
  misc_feature (1)..(25): SEQ ID NO: 4951; WAN024FTF_at; Start 884; Stop 908
tggaaatgccaaacctaattcaaaa

SEQ ID NO: 220304 - DNA, 25 bp, Artificial
  probe
  misc_feature (1)..(25): SEQ ID NO: 4951; WAN024FTF_at; Start 789; Stop 813
tgatgtatttgttttaccttcccga

SEQ ID NO: 220305 - DNA, 25 bp, Artificial
  probe
  misc_feature (1)..(25): SEQ ID NO: 4951; WAN024FTF_at; Start 543; Stop 567
gaataatctatttcttgaccactct

SEQ ID NO: 220306 - DNA, 25 bp, Artificial
  probe
  misc_feature (1)..(25): SEQ ID NO: 4951; WAN024FTF_at; Start 946; Stop 970
aatccacaggttttagctgacgtaa

SEQ ID NO: 220307 - DNA, 25 bp, Artificial
  probe
  misc_feature (1)..(25): SEQ ID NO: 4951; WAN024FTF_at; Start 803; Stop 827
taccttcccgatttgaggcatttgg

SEQ ID NO: 220308 - DNA, 25 bp, Artificial
  probe
  misc_feature (1)..(25): SEQ ID NO: 4951; WAN024FTF_at; Start 931; Stop 955
cctactgaagaggaaaatccacagg

SEQ ID NO: 220309 - DNA, 25 bp, Artificial
  probe
  misc_feature (1)..(25): SEQ ID NO: 4951; WAN024FTF_at; Start 333; Stop 357
gagttctcaaaacaatagtcaatcg

SEQ ID NO: 220310 - DNA, 25 bp, Artificial
  probe
  misc_feature (1)..(25): SEQ ID NO: 4951; WAN024FTF_at; Start 348; Stop 372
tagtcaatcgttcaaatatagtggt

SEQ ID NO: 220311 - DNA, 25 bp, Artificial
  probe
  misc_feature (1)..(25): SEQ ID NO: 1564; WAN024FTG_at; Start 284; Stop 308
tgtctattatagtgacgttcttcct

SEQ ID NO: 220312 - DNA, 25 bp, Artificial
  probe
  misc_feature (1)..(25): SEQ ID NO: 1564; WAN024FTG_at; Start 1068; Stop 1092
tgagaaatattttatgagagcagtt

SEQ ID NO: 220313 - DNA, 25 bp, Artificial
  probe
  misc_feature (1)..(25): SEQ ID NO: 1564; WAN024FTG_at; Start 317; Stop 341
tgagtttccgattagagcagttaag

SEQ ID NO: 220314 - DNA, 25 bp, Artificial
  probe
  misc_feature (1)..(25): SEQ ID NO: 1564; WAN024FTG_at; Start 714; Stop 738
tattaatggaaatgatgcggtaggt

SEQ ID NO: 220315 - DNA, 25 bp, Artificial
  probe
  misc_feature (1)..(25): SEQ ID NO: 1564; WAN024FTG_at; Start 192; Stop 216
aacttatgggattcgggtgattgca

SEQ ID NO: 220316 - DNA, 25 bp, Artificial
  probe
  misc_feature (1)..(25): SEQ ID NO: 1564; WAN024FTG_at; Start 1053; Stop 1077
gatccctactggtaatgagaaatat

SEQ ID NO: 220317 - DNA, 25 bp, Artificial
  probe
  misc_feature (1)..(25): SEQ ID NO: 1564; WAN024FTG_at; Start 1265; Stop 1289
tagcctattcatcaatttttgcggg

SEQ ID NO: 220318 - DNA, 25 bp, Artificial
  probe
  misc_feature (1)..(25): SEQ ID NO: 1564; WAN024FTG_at; Start 1115; Stop 1139
tatgtttaaatttgttgcttatgcc

SEQ ID NO: 220319 - DNA, 25 bp, Artificial
  probe
  misc_feature (1)..(25): SEQ ID NO: 1564; WAN024FTG_at; Start 953; Stop 977
taggtggagagcagtatattcaggc

SEQ ID NO: 220320 - DNA, 25 bp, Artificial
  probe
  misc_feature (1)..(25): SEQ ID NO: 1564; WAN024FTG_at; Start 1039; Stop 1063
ggtaatcagatattgatccctactg

SEQ ID NO: 220321 - DNA, 25 bp, Artificial
  probe
  misc_feature (1)..(25): SEQ ID NO: 1564; WAN024FTG_at; Start 411; Stop 435
ttatagtggaatagaagagtattca

SEQ ID NO: 220322 - DNA, 25 bp, Artificial
  probe
  misc_feature (1)..(25): SEQ ID NO: 1564; WAN024FTG_at; Start 730; Stop 754
gcggtaggtatttactcaatcgcat

SEQ ID NO: 220323 - DNA, 25 bp, Artificial
  probe
  misc_feature (1)..(25): SEQ ID NO: 1564; WAN024FTG_at; Start 942; Stop 966
tatattattgttaggtggagagcag

SEQ ID NO: 220324 - DNA, 25 bp, Artificial
  probe
  misc_feature (1)..(25): SEQ ID NO: 1564; WAN024FTG_at; Start 572; Stop 596
ttttggagagtagaaaatacatcaa

SEQ ID NO: 220325 - DNA, 25 bp, Artificial
  probe
  misc_feature (1)..(25): SEQ ID NO: 1564; WAN024FTG_at; Start 296; Stop 320
tgacgttcttccttgttttaatgag

SEQ ID NO: 220326 - DNA, 25 bp, Artificial
  probe
  misc_feature (1)..(25): SEQ ID NO: 1564; WAN024FTG_at; Start 745; Stop 769
tcaatcgcatcaaaagtaaaatgga

SEQ ID NO: 220327 - DNA, 25 bp, Artificial
  probe
  misc_feature (1)..(25): SEQ ID NO: 1564; WAN024FTG_at; Start 100; Stop 124
tctagaattctgaatccgtcaggaa

SEQ ID NO: 220328 - DNA, 25 bp, Artificial
  probe
  misc_feature (1)..(25): SEQ ID NO: 1564; WAN024FTG_at; Start 967; Stop 991
tatattcaggcagttttagcaatgc

SEQ ID NO: 220329 - DNA, 25 bp, Artificial
  probe
  misc_feature (1)..(25): SEQ ID NO: 1564; WAN024FTG_at; Start 329; Stop 353
tagagcagttaagttcagaaaaagg

SEQ ID NO: 220330 - DNA, 25 bp, Artificial
  probe
  misc_feature (1)..(25): SEQ ID NO: 1564; WAN024FTG_at; Start 368; Stop 392
catgtattactattttgtcctctcc

SEQ ID NO: 220331 - DNA, 25 bp, Artificial
  probe
  misc_feature (1)..(25): SEQ ID NO: 1564; WAN024FTG_at; Start 923; Stop 947
tgataaaagcgaaagagagtatatt

SEQ ID NO: 220332 - DNA, 25 bp, Artificial
  probe
  misc_feature (1)..(25): SEQ ID NO: 1564; WAN024FTG_at; Start 809; Stop 833
tacccagattatcattttatagcaa

SEQ ID NO: 220333 - DNA, 25 bp, Artificial
  probe
  misc_feature (1)..(25): SEQ ID NO: 1564; WAN024FTG_at; Start 1277; Stop 1301
caatttttgcgggtatactgttaat

SEQ ID NO: 220334 - DNA, 25 bp, Artificial
  probe
  misc_feature (1)..(25): SEQ ID NO: 1564; WAN024FTG_at; Start 983; Stop 1007
tagcaatgcaaatattaatgccgat

SEQ ID NO: 220335 - DNA, 25 bp, Artificial
  probe
  misc_feature (1)..(25): SEQ ID NO: 1564; WAN024FTG_at; Start 427; Stop 451
gagtattcatatataacaaaacgtt

SEQ ID NO: 220336 - DNA, 25 bp, Artificial
  probe
  misc_feature (1)..(25): SEQ ID NO: 1564; WAN024FTG_at; Start 383; Stop 407
tgtcctctccttttaatttgaattg

SEQ ID NO: 220337 - DNA, 25 bp, Artificial
  probe
  misc_feature (1)..(25): SEQ ID NO: 1564; WAN024FTG_at; Start 687; Stop 711
aaatttggattctgtgatgttagga

SEQ ID NO: 220338 - DNA, 25 bp, Artificial
  probe
  misc_feature (1)..(25): SEQ ID NO: 1564; WAN024FTG_at; Start 1328; Stop 1352
ttaatagcttcttaaatttagctgc

SEQ ID NO: 220339 - DNA, 25 bp, Artificial
  probe
  misc_feature (1)..(25): SEQ ID NO: 1564; WAN024FTG_at; Start 859; Stop 883
aatattttgagaaagtcatctacaa

SEQ ID NO: 220340 - DNA, 25 bp, Artificial
  probe
  misc_feature (1)..(25): SEQ ID NO: 1564; WAN024FTG_at; Start 653; Stop 677
tatttgcttcgttacttgcagttaa

SEQ ID NO: 220341 - DNA, 25 bp, Artificial
  probe
  misc_feature (1)..(25): SEQ ID NO: 1564; WAN024FTG_at; Start 624; Stop 648
tagatatcatctaaaaccaatgtgg

SEQ ID NO: 220342 - DNA, 25 bp, Artificial
  probe
  misc_feature (1)..(25): SEQ ID NO: 1564; WAN024FTG_at; Start 178; Stop 202
tcgcttggaatttcaacttatggga

SEQ ID NO: 220343 - DNA, 25 bp, Artificial
  probe
  misc_feature (1)..(25): SEQ ID NO: 1564; WAN024FTG_at; Start 235; Stop 259
gataagataactaaaatattccaag

SEQ ID NO: 220344 - DNA, 25 bp, Artificial
  probe
  misc_feature (1)..(25): SEQ ID NO: 1564; WAN024FTG_at; Start 773; Stop 797
tattatcagtcgttacttcagtgag

SEQ ID NO: 220345 - DNA, 25 bp, Artificial
  probe
  misc_feature (1)..(25): SEQ ID NO: 2587; WAN024FTH_at; Start 724; Stop 748
gctgtgggatactattctgtggcat

SEQ ID NO: 220346 - DNA, 25 bp, Artificial
  probe
  misc_feature (1)..(25): SEQ ID NO: 2587; WAN024FTH_at; Start 198; Stop 222
caaagcagtagcaagtgttagagat

SEQ ID NO: 220347 - DNA, 25 bp, Artificial
  probe
  misc_feature (1)..(25): SEQ ID NO: 2587; WAN024FTH_at; Start 360; Stop 384
cacatgtgggactattttatcttct

SEQ ID NO: 220348 - DNA, 25 bp, Artificial
  probe
  misc_feature (1)..(25): SEQ ID NO: 2587; WAN024FTH_at; Start 1301; Stop 1325
tgaatcagctgataacgataactat

SEQ ID NO: 220349 - DNA, 25 bp, Artificial
  probe
  misc_feature (1)..(25): SEQ ID NO: 2587; WAN024FTH_at; Start 1162; Stop 1186
gcaactctttttgcggaattgtcgc

SEQ ID NO: 220350 - DNA, 25 bp, Artificial
  probe
  misc_feature (1)..(25): SEQ ID NO: 2587; WAN024FTH_at; Start 1119; Stop 1143
tctactgttaatgcctaagtttgga

SEQ ID NO: 220351 - DNA, 25 bp, Artificial
  probe
  misc_feature (1)..(25): SEQ ID NO: 2587; WAN024FTH_at; Start 28; Stop 52
gcattattaaatattgtcctgacgc

SEQ ID NO: 220352 - DNA, 25 bp, Artificial
  probe
  misc_feature (1)..(25): SEQ ID NO: 2587; WAN024FTH_at; Start 1175; Stop 1199
cggaattgtcgcagatgacggtaca

SEQ ID NO: 220353 - DNA, 25 bp, Artificial
  probe
  misc_feature (1)..(25): SEQ ID NO: 2587; WAN024FTH_at; Start 1391; Stop 1415
tattaaaggaggaagtgacgattca

SEQ ID NO: 220354 - DNA, 25 bp, Artificial
  probe
  misc_feature (1)..(25): SEQ ID NO: 2587; WAN024FTH_at; Start 347; Stop 371
cactcctattgatcacatgtgggac

SEQ ID NO: 220355 - DNA, 25 bp, Artificial
  probe
  misc_feature (1)..(25): SEQ ID NO: 2587; WAN024FTH_at; Start 692; Stop 716
cagtgatgctcggttttattaatgg

SEQ ID NO: 220356 - DNA, 25 bp, Artificial
  probe
  misc_feature (1)..(25): SEQ ID NO: 2587; WAN024FTH_at; Start 944; Stop 968
tactaggaggaagtcagtatcttcc

SEQ ID NO: 220357 - DNA, 25 bp, Artificial
  probe
  misc_feature (1)..(25): SEQ ID NO: 2587; WAN024FTH_at; Start 108; Stop 132
tccaaatggtataggtttaacttca

SEQ ID NO: 220358 - DNA, 25 bp, Artificial
  probe
  misc_feature (1)..(25): SEQ ID NO: 2587; WAN024FTH_at; Start 961; Stop 985
tatcttcctgcgactttagcgatgc

SEQ ID NO: 220359 - DNA, 25 bp, Artificial
  probe
  misc_feature (1)..(25): SEQ ID NO: 2587; WAN024FTH_at; Start 483; Stop 507
tctacttgtgaaaaggccagaggat

SEQ ID NO: 220360 - DNA, 25 bp, Artificial
  probe
  misc_feature (1)..(25): SEQ ID NO: 2587; WAN024FTH_at; Start 424; Stop 448
tatacgtatattactactaggtcag

SEQ ID NO: 220361 - DNA, 25 bp, Artificial
  probe
  misc_feature (1)..(25): SEQ ID NO: 2587; WAN024FTH_at; Start 1142; Stop 1166
gaattattggtgcttctgtcgcaac

SEQ ID NO: 220362 - DNA, 25 bp, Artificial
  probe
  misc_feature (1)..(25): SEQ ID NO: 2587; WAN024FTH_at; Start 820; Stop 844
tatattagtaaaaatgacacctcga

SEQ ID NO: 220363 - DNA, 25 bp, Artificial
  probe
  misc_feature (1)..(25): SEQ ID NO: 2587; WAN024FTH_at; Start 1074; Stop 1098
tatggttgcagtaacgattggtgct

SEQ ID NO: 220364 - DNA, 25 bp, Artificial
  probe
  misc_feature (1)..(25): SEQ ID NO: 2587; WAN024FTH_at; Start 569; Stop 593
ggcatagccgacatttcattaatat

SEQ ID NO: 220365 - DNA, 25 bp, Artificial
  probe
  misc_feature (1)..(25): SEQ ID NO: 2587; WAN024FTH_at; Start 711; Stop 735
taatggtaatgaggctgtgggatac

SEQ ID NO: 220366 - DNA, 25 bp, Artificial
  probe
  misc_feature (1)..(25): SEQ ID NO: 2587; WAN024FTH_at; Start 1012; Stop 1036
tctggtttctcgaatattacaggaa

SEQ ID NO: 220367 - DNA, 25 bp, Artificial
  probe
  misc_feature (1)..(25): SEQ ID NO: 2587; WAN024FTH_at; Start 231; Stop 255
taagttgtcaaaagtagtacaggag

SEQ ID NO: 220368 - DNA, 25 bp, Artificial
  probe
  misc_feature (1)..(25): SEQ ID NO: 2587; WAN024FTH_at; Start 853; Stop 877
aaaatgttaaaggagtcatctgcgg

SEQ ID NO: 220369 - DNA, 25 bp, Artificial
  probe
  misc_feature (1)..(25): SEQ ID NO: 2587; WAN024FTH_at; Start 42; Stop 66
tgtcctgacgctatcaaatatcatt

SEQ ID NO: 220370 - DNA, 25 bp, Artificial
  probe
  misc_feature (1)..(25): SEQ ID NO: 2587; WAN024FTH_at; Start 390; Stop 414
cgccttaaattggttgtatagtgga

SEQ ID NO: 220371 - DNA, 25 bp, Artificial
  probe
  misc_feature (1)..(25): SEQ ID NO: 2587; WAN024FTH_at; Start 977; Stop 1001
tagcgatgcaaatacttatgccaat

SEQ ID NO: 220372 - DNA, 25 bp, Artificial
  probe
  misc_feature (1)..(25): SEQ ID NO: 2587; WAN024FTH_at; Start 915; Stop 939
tattgtagaggcgaaagatagtatc

SEQ ID NO: 220373 - DNA, 25 bp, Artificial
  probe
  misc_feature (1)..(25): SEQ ID NO: 2587; WAN024FTH_at; Start 1328; Stop 1352
cattttattctctaatgctagcagg

SEQ ID NO: 220374 - DNA, 25 bp, Artificial
  probe
  misc_feature (1)..(25): SEQ ID NO: 2587; WAN024FTH_at; Start 157; Stop 181
ggtattttacttgcttctctgggaa

SEQ ID NO: 220375 - DNA, 25 bp, Artificial
  probe
  misc_feature (1)..(25): SEQ ID NO: 2587; WAN024FTH_at; Start 739; Stop 763
tctgtggcatcaaaggttaagtgga

SEQ ID NO: 220376 - DNA, 25 bp, Artificial
  probe
  misc_feature (1)..(25): SEQ ID NO: 2587; WAN024FTH_at; Start 557; Stop 581
tcttaaatctatggcatagccgaca

SEQ ID NO: 220377 - DNA, 25 bp, Artificial
  probe
  misc_feature (1)..(25): SEQ ID NO: 2587; WAN024FTH_at; Start 781; Stop 805
acatctattagtgcagttttgctac

SEQ ID NO: 220378 - DNA, 25 bp, Artificial
  probe
  misc_feature (1)..(25): SEQ ID NO: 2587; WAN024FTH_at; Start 680; Stop 704
ctaatttagatacagtgatgctcgg

SEQ ID NO: 220379 - DNA, 25 bp, Artificial
  probe
  misc_feature (1)..(25): SEQ ID NO: 1786; WAN024FTI_at; Start 15; Stop 39
taatcaaaaatatatagggaggaat

SEQ ID NO: 220380 - DNA, 25 bp, Artificial
  probe
  misc_feature (1)..(25): SEQ ID NO: 1786; WAN024FTI_at; Start 16; Stop 40
aatcaaaaatatatagggaggaatg

SEQ ID NO: 220381 - DNA, 25 bp, Artificial
  probe
  misc_feature (1)..(25): SEQ ID NO: 1786; WAN024FTI_at; Start 33; Stop 57
gaggaatgttttgaataagaaatat

SEQ ID NO: 220382 - DNA, 25 bp, Artificial
  probe
  misc_feature (1)..(25): SEQ ID NO: 1786; WAN024FTI_at; Start 29; Stop 53
tagggaggaatgttttgaataagaa

SEQ ID NO: 220383 - DNA, 25 bp, Artificial
  probe
  misc_feature (1)..(25): SEQ ID NO: 1786; WAN024FTI_at; Start 158; Stop 182
tagaacatatatttagagttcgaaa

SEQ ID NO: 220384 - DNA, 25 bp, Artificial
  probe
  misc_feature (1)..(25): SEQ ID NO: 1786; WAN024FTI_at; Start 19; Stop 43
caaaaatatatagggaggaatgttt

SEQ ID NO: 220385 - DNA, 25 bp, Artificial
  probe
  misc_feature (1)..(25): SEQ ID NO: 1786; WAN024FTI_at; Start 113; Stop 137
caaaaacgttaattcctataatgtg

SEQ ID NO: 220386 - DNA, 25 bp, Artificial
  probe
  misc_feature (1)..(25): SEQ ID NO: 1786; WAN024FTI_at; Start 22; Stop 46
aaatatatagggaggaatgttttga

SEQ ID NO: 220387 - DNA, 25 bp, Artificial
  probe
  misc_feature (1)..(25): SEQ ID NO: 1786; WAN024FTI_at; Start 155; Stop 179
tgatagaacatatatttagagttcg

SEQ ID NO: 220388 - DNA, 25 bp, Artificial
  probe
  misc_feature (1)..(25): SEQ ID NO: 1786; WAN024FTI_at; Start 160; Stop 184
gaacatatatttagagttcgaaata

SEQ ID NO: 220389 - DNA, 25 bp, Artificial
  probe
  misc_feature (1)..(25): SEQ ID NO: 1786; WAN024FTI_at; Start 18; Stop 42
tcaaaaatatatagggaggaatgtt

SEQ ID NO: 220390 - DNA, 25 bp, Artificial
  probe
  misc_feature (1)..(25): SEQ ID NO: 1786; WAN024FTI_at; Start 25; Stop 49
tatatagggaggaatgttttgaata

SEQ ID NO: 220391 - DNA, 25 bp, Artificial
  probe
  misc_feature (1)..(25): SEQ ID NO: 1786; WAN024FTI_at; Start 27; Stop 51
tatagggaggaatgttttgaataag

SEQ ID NO: 220392 - DNA, 25 bp, Artificial
  probe
  misc_feature (1)..(25): SEQ ID NO: 1786; WAN024FTI_at; Start 115; Stop 139
aaaacgttaattcctataatgtgtg

SEQ ID NO: 220393 - DNA, 25 bp, Artificial
  probe
  misc_feature (1)..(25): SEQ ID NO: 1786; WAN024FTI_at; Start 237; Stop 261
tattgatagtatattgagtttgtaa

SEQ ID NO: 220394 - DNA, 25 bp, Artificial
  probe
  misc_feature (1)..(25): SEQ ID NO: 1786; WAN024FTI_at; Start 117; Stop 141
aacgttaattcctataatgtgtgtg

SEQ ID NO: 220395 - DNA, 25 bp, Artificial
  probe
  misc_feature (1)..(25): SEQ ID NO: 1786; WAN024FTI_at; Start 161; Stop 185
aacatatatttagagttcgaaatag

SEQ ID NO: 220396 - DNA, 25 bp, Artificial
  probe
  misc_feature (1)..(25): SEQ ID NO: 1786; WAN024FTI_at; Start 32; Stop 56
ggaggaatgttttgaataagaaata

SEQ ID NO: 220397 - DNA, 25 bp, Artificial
  probe
  misc_feature (1)..(25): SEQ ID NO: 1786; WAN024FTI_at; Start 116; Stop 140
aaacgttaattcctataatgtgtgt

SEQ ID NO: 220398 - DNA, 25 bp, Artificial
  probe
  misc_feature (1)..(25): SEQ ID NO: 1786; WAN024FTI_at; Start 169; Stop 193
tttagagttcgaaatagaatgatgc

SEQ ID NO: 220399 - DNA, 25 bp, Artificial
  probe
  misc_feature (1)..(25): SEQ ID NO: 1786; WAN024FTI_at; Start 11; Stop 35
ttggtaatcaaaaatatatagggag

SEQ ID NO: 220400 - DNA, 25 bp, Artificial
  probe
  misc_feature (1)..(25): SEQ ID NO: 1786; WAN024FTI_at; Start 23; Stop 47
aatatatagggaggaatgttttgaa

SEQ ID NO: 220401 - DNA, 25 bp, Artificial
  probe
  misc_feature (1)..(25): SEQ ID NO: 1786; WAN024FTI_at; Start 12; Stop 36
tggtaatcaaaaatatatagggagg

SEQ ID NO: 220402 - DNA, 25 bp, Artificial
  probe
  misc_feature (1)..(25): SEQ ID NO: 1786; WAN024FTI_at; Start 145; Stop 169
caagtatttttgatagaacatatat

SEQ ID NO: 220403 - DNA, 25 bp, Artificial
  probe
  misc_feature (1)..(25): SEQ ID NO: 1786; WAN024FTI_at; Start 14; Stop 38
gtaatcaaaaatatatagggaggaa

SEQ ID NO: 220404 - DNA, 25 bp, Artificial
  probe
  misc_feature (1)..(25): SEQ ID NO: 1786; WAN024FTI_at; Start 144; Stop 168
ccaagtatttttgatagaacatata

SEQ ID NO: 220405 - DNA, 25 bp, Artificial
  probe
  misc_feature (1)..(25): SEQ ID NO: 1786; WAN024FTI_at; Start 35; Stop 59
ggaatgttttgaataagaaatataa

SEQ ID NO: 220406 - DNA, 25 bp, Artificial
  probe
  misc_feature (1)..(25): SEQ ID NO: 1786; WAN024FTI_at; Start 165; Stop 189
tatatttagagttcgaaatagaatg

SEQ ID NO: 220407 - DNA, 25 bp, Artificial
  probe
  misc_feature (1)..(25): SEQ ID NO: 1786; WAN024FTI_at; Start 170; Stop 194
ttagagttcgaaatagaatgatgca

SEQ ID NO: 220408 - DNA, 25 bp, Artificial
  probe
  misc_feature (1)..(25): SEQ ID NO: 1786; WAN024FTI_at; Start 156; Stop 180
gatagaacatatatttagagttcga

SEQ ID NO: 220409 - DNA, 25 bp, Artificial
  probe
  misc_feature (1)..(25): SEQ ID NO: 1786; WAN024FTI_at; Start 17; Stop 41
atcaaaaatatatagggaggaatgt

SEQ ID NO: 220410 - DNA, 25 bp, Artificial
  probe
  misc_feature (1)..(25): SEQ ID NO: 1786; WAN024FTI_at; Start 143; Stop 167
tccaagtatttttgatagaacatat

SEQ ID NO: 220411 - DNA, 25 bp, Artificial
  probe
  misc_feature (1)..(25): SEQ ID NO: 1786; WAN024FTI_at; Start 163; Stop 187
catatatttagagttcgaaatagaa

SEQ ID NO: 220412 - DNA, 25 bp, Artificial
  probe
  misc_feature (1)..(25): SEQ ID NO: 1786; WAN024FTI_at; Start 9; Stop 33
gattggtaatcaaaaatatataggg

SEQ ID NO: 220413 - DNA, 25 bp, Artificial
  probe
  misc_feature (1)..(25): SEQ ID NO: 7511; WAN024FTJ_at; Start 106; Stop 130
caccttgtctttgctgataaaccag

SEQ ID NO: 220414 - DNA, 25 bp, Artificial
  probe
  misc_feature (1)..(25): SEQ ID NO: 7511; WAN024FTJ_at; Start 2; Stop 26
tgattaaagagacgaaaggcagttg

SEQ ID NO: 220415 - DNA, 25 bp, Artificial
  probe
  misc_feature (1)..(25): SEQ ID NO: 7511; WAN024FTJ_at; Start 203; Stop 227
tcctgatccttaagattgacattct

SEQ ID NO: 220416 - DNA, 25 bp, Artificial
  probe
  misc_feature (1)..(25): SEQ ID NO: 7511; WAN024FTJ_at; Start 138; Stop 162
ccttgttttgctgagaaaggtaggc

SEQ ID NO: 220417 - DNA, 25 bp, Artificial
  probe
  misc_feature (1)..(25): SEQ ID NO: 7511; WAN024FTJ_at; Start 111; Stop 135
tgtctttgctgataaaccagcccaa

SEQ ID NO: 220418 - DNA, 25 bp, Artificial
  probe
  misc_feature (1)..(25): SEQ ID NO: 7511; WAN024FTJ_at; Start 117; Stop 141
tgctgataaaccagcccaagccctt

SEQ ID NO: 220419 - DNA, 25 bp, Artificial
  probe
  misc_feature (1)..(25): SEQ ID NO: 7511; WAN024FTJ_at; Start 100; Stop 124
gaaggccaccttgtctttgctgata

SEQ ID NO: 220420 - DNA, 25 bp, Artificial
  probe
  misc_feature (1)..(25): SEQ ID NO: 7511; WAN024FTJ_at; Start 133; Stop 157
caagcccttgttttgctgagaaagg

SEQ ID NO: 220421 - DNA, 25 bp, Artificial
  probe
  misc_feature (1)..(25): SEQ ID NO: 7511; WAN024FTJ_at; Start 222; Stop 246
cattctcaagatcactggcttctag

SEQ ID NO: 220422 - DNA, 25 bp, Artificial
  probe
  misc_feature (1)..(25): SEQ ID NO: 7511; WAN024FTJ_at; Start 144; Stop 168
tttgctgagaaaggtaggcagtccc

SEQ ID NO: 220423 - DNA, 25 bp, Artificial
  probe
  misc_feature (1)..(25): SEQ ID NO: 7511; WAN024FTJ_at; Start 151; Stop 175
agaaaggtaggcagtcccaagaaag

SEQ ID NO: 220424 - DNA, 25 bp, Artificial
  probe
  misc_feature (1)..(25): SEQ ID NO: 7511; WAN024FTJ_at; Start 15; Stop 39
gaaaggcagttgtcaaatcatcttg

SEQ ID NO: 220425 - DNA, 25 bp, Artificial
  probe
  misc_feature (1)..(25): SEQ ID NO: 7511; WAN024FTJ_at; Start 192; Stop 216
gcacctctacttcctgatccttaag

SEQ ID NO: 220426 - DNA, 25 bp, Artificial
  probe
  misc_feature (1)..(25): SEQ ID NO: 7511; WAN024FTJ_at; Start 103; Stop 127
ggccaccttgtctttgctgataaac

SEQ ID NO: 220427 - DNA, 25 bp, Artificial
  probe
  misc_feature (1)..(25): SEQ ID NO: 7511; WAN024FTJ_at; Start 162; Stop 186
cagtcccaagaaagtttccttcctg

SEQ ID NO: 220428 - DNA, 25 bp, Artificial
  probe
  misc_feature (1)..(25): SEQ ID NO: 7511; WAN024FTJ_at; Start 219; Stop 243
tgacattctcaagatcactggcttc

SEQ ID NO: 220429 - DNA, 25 bp, Artificial
  probe
  misc_feature (1)..(25): SEQ ID NO: 7511; WAN024FTJ_at; Start 148; Stop 172
ctgagaaaggtaggcagtcccaaga

SEQ ID NO: 220430 - DNA, 25 bp, Artificial
  probe
  misc_feature (1)..(25): SEQ ID NO: 7511; WAN024FTJ_at; Start 25; Stop 49
tgtcaaatcatcttgatagtaggcg

SEQ ID NO: 220431 - DNA, 25 bp, Artificial
  probe
  misc_feature (1)..(25): SEQ ID NO: 7511; WAN024FTJ_at; Start 168; Stop 192
caagaaagtttccttcctgaccctg

SEQ ID NO: 220432 - DNA, 25 bp, Artificial
  probe
  misc_feature (1)..(25): SEQ ID NO: 7511; WAN024FTJ_at; Start 199; Stop 223
tacttcctgatccttaagattgaca

SEQ ID NO: 220433 - DNA, 25 bp, Artificial
  probe
  misc_feature (1)..(25): SEQ ID NO: 7511; WAN024FTJ_at; Start 12; Stop 36
gacgaaaggcagttgtcaaatcatc

SEQ ID NO: 220434 - DNA, 25 bp, Artificial
  probe
  misc_feature (1)..(25): SEQ ID NO: 7511; WAN024FTJ_at; Start 95; Stop 119
tgattgaaggccaccttgtctttgc

SEQ ID NO: 220435 - DNA, 25 bp, Artificial
  probe
  misc_feature (1)..(25): SEQ ID NO: 7511; WAN024FTJ_at; Start 91; Stop 115
agcttgattgaaggccaccttgtct

SEQ ID NO: 220436 - DNA, 25 bp, Artificial
  probe
  misc_feature (1)..(25): SEQ ID NO: 7511; WAN024FTJ_at; Start 207; Stop 231
gatccttaagattgacattctcaag

SEQ ID NO: 220437 - DNA, 25 bp, Artificial
  probe
  misc_feature (1)..(25): SEQ ID NO: 7511; WAN024FTJ_at; Start 6; Stop 30
taaagagacgaaaggcagttgtcaa

SEQ ID NO: 220438 - DNA, 25 bp, Artificial
  probe
  misc_feature (1)..(25): SEQ ID NO: 7511; WAN024FTJ_at; Start 88; Stop 112
gaaagcttgattgaaggccaccttg

SEQ ID NO: 220439 - DNA, 25 bp, Artificial
  probe
  misc_feature (1)..(25): SEQ ID NO: 7511; WAN024FTJ_at; Start 84; Stop 108
caaagaaagcttgattgaaggccac

SEQ ID NO: 220440 - DNA, 25 bp, Artificial
  probe
  misc_feature (1)..(25): SEQ ID NO: 7511; WAN024FTJ_at; Start 32; Stop 56
tcatcttgatagtaggcgtttctct

SEQ ID NO: 220441 - DNA, 25 bp, Artificial
  probe
  misc_feature (1)..(25): SEQ ID NO: 7511; WAN024FTJ_at; Start 171; Stop 195
gaaagtttccttcctgaccctgcac

SEQ ID NO: 220442 - DNA, 25 bp, Artificial
  probe
  misc_feature (1)..(25): SEQ ID NO: 7511; WAN024FTJ_at; Start 76; Stop 100
caacgtttcaaagaaagcttgattg

SEQ ID NO: 220443 - DNA, 25 bp, Artificial
  probe
  misc_feature (1)..(25): SEQ ID NO: 7511; WAN024FTJ_at; Start 130; Stop 154
gcccaagcccttgttttgctgagaa

SEQ ID NO: 220444 - DNA, 25 bp, Artificial
  probe
  misc_feature (1)..(25): SEQ ID NO: 7511; WAN024FTJ_at; Start 216; Stop 240
gattgacattctcaagatcactggc

SEQ ID NO: 220445 - DNA, 25 bp, Artificial
  probe
  misc_feature (1)..(25): SEQ ID NO: 7511; WAN024FTJ_at; Start 38; Stop 62
tgatagtaggcgtttctcttttctt

SEQ ID NO: 220446 - DNA, 25 bp, Artificial
  probe
  misc_feature (1)..(25): SEQ ID NO: 7511; WAN024FTJ_at; Start 146; Stop 170
tgctgagaaaggtaggcagtcccaa

SEQ ID NO: 220447 - DNA, 25 bp, Artificial
  probe
  misc_feature (1)..(25): SEQ ID NO: 2643; WAN024FTK_at; Start 881; Stop 905
tagatccgcctagctttgctcggaa

SEQ ID NO: 220448 - DNA, 25 bp, Artificial
  probe
  misc_feature (1)..(25): SEQ ID NO: 2643; WAN024FTK_at; Start 911; Stop 935
aacaaactttctctgtggccaagga

SEQ ID NO: 220449 - DNA, 25 bp, Artificial
  probe
  misc_feature (1)..(25): SEQ ID NO: 2643; WAN024FTK_at; Start 305; Stop 329
tctttaatcaagagggagatggctt

SEQ ID NO: 220450 - DNA, 25 bp, Artificial
  probe
  misc_feature (1)..(25): SEQ ID NO: 2643; WAN024FTK_at; Start 771; Stop 795
ttttcaggcaaatgggctcagcaca

SEQ ID NO: 220451 - DNA, 25 bp, Artificial
  probe
  misc_feature (1)..(25): SEQ ID NO: 2643; WAN024FTK_at; Start 926; Stop 950
tggccaaggattatcacaagttgat

SEQ ID NO: 220452 - DNA, 25 bp, Artificial
  probe
  misc_feature (1)..(25): SEQ ID NO: 2643; WAN024FTK_at; Start 122; Stop 146
tgcagggtcaggaaggaaactttct

SEQ ID NO: 220453 - DNA, 25 bp, Artificial
  probe
  misc_feature (1)..(25): SEQ ID NO: 2643; WAN024FTK_at; Start 673; Stop 697
tacacagcggctttttcagtagctg

SEQ ID NO: 220454 - DNA, 25 bp, Artificial
  probe
  misc_feature (1)..(25): SEQ ID NO: 2643; WAN024FTK_at; Start 754; Stop 778
gaattgtctcaagcgcattttcagg

SEQ ID NO: 220455 - DNA, 25 bp, Artificial
  probe
  misc_feature (1)..(25): SEQ ID NO: 2643; WAN024FTK_at; Start 987; Stop 1011
tatcattgccagtaccaatgctgcc

SEQ ID NO: 220456 - DNA, 25 bp, Artificial
  probe
  misc_feature (1)..(25): SEQ ID NO: 2643; WAN024FTK_at; Start 333; Stop 357
gggtctgacagtggacctttatggc

SEQ ID NO: 220457 - DNA, 25 bp, Artificial
  probe
  misc_feature (1)..(25): SEQ ID NO: 2643; WAN024FTK_at; Start 147; Stop 171
tgggactgcctacctttctcagcaa

SEQ ID NO: 220458 - DNA, 25 bp, Artificial
  probe
  misc_feature (1)..(25): SEQ ID NO: 2643; WAN024FTK_at; Start 68; Stop 92
tactagaagccagtgatcttgagaa

SEQ ID NO: 220459 - DNA, 25 bp, Artificial
  probe
  misc_feature (1)..(25): SEQ ID NO: 2643; WAN024FTK_at; Start 737; Stop 761
tagccaaacgttcacgagaattgtc

SEQ ID NO: 220460 - DNA, 25 bp, Artificial
  probe
  misc_feature (1)..(25): SEQ ID NO: 2643; WAN024FTK_at; Start 1126; Stop 1150
gaaagtagtaattacctcaaggtga

SEQ ID NO: 220461 - DNA, 25 bp, Artificial
  probe
  misc_feature (1)..(25): SEQ ID NO: 2643; WAN024FTK_at; Start 162; Stop 186
ttctcagcaaaacaagggcttgggc

SEQ ID NO: 220462 - DNA, 25 bp, Artificial
  probe
  misc_feature (1)..(25): SEQ ID NO: 2643; WAN024FTK_at; Start 722; Stop 746
caacttctgttgatctagccaaacg

SEQ ID NO: 220463 - DNA, 25 bp, Artificial
  probe
  misc_feature (1)..(25): SEQ ID NO: 2643; WAN024FTK_at; Start 865; Stop 889
tacgatgtgattgtcctagatccgc

SEQ ID NO: 220464 - DNA, 25 bp, Artificial
  probe
  misc_feature (1)..(25): SEQ ID NO: 2643; WAN024FTK_at; Start 399; Stop 423
gattcgtcagactatatcagaagcc

SEQ ID NO: 220465 - DNA, 25 bp, Artificial
  probe
  misc_feature (1)..(25): SEQ ID NO: 2643; WAN024FTK_at; Start 1054; Stop 1078
tttgcaggaagaagttaccagattt

SEQ ID NO: 220466 - DNA, 25 bp, Artificial
  probe
  misc_feature (1)..(25): SEQ ID NO: 2643; WAN024FTK_at; Start 194; Stop 218
tcagcaaagacaaggtggccttcaa

SEQ ID NO: 220467 - DNA, 25 bp, Artificial
  probe
  misc_feature (1)..(25): SEQ ID NO: 2643; WAN024FTK_at; Start 972; Stop 996
aaatccgggagggattatcattgcc

SEQ ID NO: 220468 - DNA, 25 bp, Artificial
  probe
  misc_feature (1)..(25): SEQ ID NO: 2643; WAN024FTK_at; Start 596; Stop 620
tcctagaccagcatgaggttcgcgg

SEQ ID NO: 220469 - DNA, 25 bp, Artificial
  probe
  misc_feature (1)..(25): SEQ ID NO: 2643; WAN024FTK_at; Start 415; Stop 439
tcagaagcctttagacaggttttcc

SEQ ID NO: 220470 - DNA, 25 bp, Artificial
  probe
  misc_feature (1)..(25): SEQ ID NO: 2643; WAN024FTK_at; Start 15; Stop 39
tagaataagagtcagcaaaagggtt

SEQ ID NO: 220471 - DNA, 25 bp, Artificial
  probe
  misc_feature (1)..(25): SEQ ID NO: 2643; WAN024FTK_at; Start 1002; Stop 1026
caatgctgccaatgtttcccgtcag

SEQ ID NO: 220472 - DNA, 25 bp, Artificial
  probe
  misc_feature (1)..(25): SEQ ID NO: 2643; WAN024FTK_at; Start 541; Stop 565
gaaaatggtgtcctgtatcaagtct

SEQ ID NO: 220473 - DNA, 25 bp, Artificial
  probe
  misc_feature (1)..(25): SEQ ID NO: 2643; WAN024FTK_at; Start 685; Stop 709
ttttcagtagctgcggccatgggag

SEQ ID NO: 220474 - DNA, 25 bp, Artificial
  probe
  misc_feature (1)..(25): SEQ ID NO: 2643; WAN024FTK_at; Start 615; Stop 639
tcgcggtagtttagttgacggcttg

SEQ ID NO: 220475 - DNA, 25 bp, Artificial
  probe
  misc_feature (1)..(25): SEQ ID NO: 2643; WAN024FTK_at; Start 88; Stop 112
gagaatgtcaatcttaaggatcagg

SEQ ID NO: 220476 - DNA, 25 bp, Artificial
  probe
  misc_feature (1)..(25): SEQ ID NO: 2643; WAN024FTK_at; Start 943; Stop 967
aagttgatttcccagagtcttgaga

SEQ ID NO: 220477 - DNA, 25 bp, Artificial
  probe
  misc_feature (1)..(25): SEQ ID NO: 2643; WAN024FTK_at; Start 1079; Stop 1103
taaacaaatatggtcttccagcaga

SEQ ID NO: 220478 - DNA, 25 bp, Artificial
  probe
  misc_feature (1)..(25): SEQ ID NO: 2643; WAN024FTK_at; Start 501; Stop 525
tgtttatggtcaagaagcacctgac

SEQ ID NO: 220479 - DNA, 25 bp, Artificial
  probe
  misc_feature (1)..(25): SEQ ID NO: 2643; WAN024FTK_at; Start 101; Stop 125
ttaaggatcaggaagtagaggtgca

SEQ ID NO: 220480 - DNA, 25 bp, Artificial
  probe
  misc_feature (1)..(25): SEQ ID NO: 2643; WAN024FTK_at; Start 30; Stop 54
caaaagggttgaaaagaagcttgct

SEQ ID NO: 220481 - DNA, 25 bp, Artificial
  probe
  misc_feature (1)..(25): SEQ ID NO: 7243; WAN024FTL_at; Start 888; Stop 912
taaattgaaagtgcaatatacgtta

SEQ ID NO: 220482 - DNA, 25 bp, Artificial
  probe
  misc_feature (1)..(25): SEQ ID NO: 7243; WAN024FTL_at; Start 813; Stop 837
ggagtccttactctcaattaggaga

SEQ ID NO: 220483 - DNA, 25 bp, Artificial
  probe
  misc_feature (1)..(25): SEQ ID NO: 7243; WAN024FTL_at; Start 618; Stop 642
caattactattgtcgaccaggaagt

SEQ ID NO: 220484 - DNA, 25 bp, Artificial
  probe
  misc_feature (1)..(25): SEQ ID NO: 7243; WAN024FTL_at; Start 922; Stop 946
tttcctaagcaatatttcaaattga

SEQ ID NO: 220485 - DNA, 25 bp, Artificial
  probe
  misc_feature (1)..(25): SEQ ID NO: 7243; WAN024FTL_at; Start 436; Stop 460
gaagcacttgagctaatgctccaag

SEQ ID NO: 220486 - DNA, 25 bp, Artificial
  probe
  misc_feature (1)..(25): SEQ ID NO: 7243; WAN024FTL_at; Start 647; Stop 671
ttcgatctaagtttactgtaaagag

SEQ ID NO: 220487 - DNA, 25 bp, Artificial
  probe
  misc_feature (1)..(25): SEQ ID NO: 7243; WAN024FTL_at; Start 625; Stop 649
tattgtcgaccaggaagtattgttc

SEQ ID NO: 220488 - DNA, 25 bp, Artificial
  probe
  misc_feature (1)..(25): SEQ ID NO: 7243; WAN024FTL_at; Start 556; Stop 580
tatgttgtcgctgaacatttagcac

SEQ ID NO: 220489 - DNA, 25 bp, Artificial
  probe
  misc_feature (1)..(25): SEQ ID NO: 7243; WAN024FTL_at; Start 527; Stop 551
tccctattggaaaaatttatgagga

SEQ ID NO: 220490 - DNA, 25 bp, Artificial
  probe
  misc_feature (1)..(25): SEQ ID NO: 7243; WAN024FTL_at; Start 430; Stop 454
aaagaagaagcacttgagctaatgc

SEQ ID NO: 220491 - DNA, 25 bp, Artificial
  probe
  misc_feature (1)..(25): SEQ ID NO: 7243; WAN024FTL_at; Start 718; Stop 742
gaacattacaattcaaaagaacttg

SEQ ID NO: 220492 - DNA, 25 bp, Artificial
  probe
  misc_feature (1)..(25): SEQ ID NO: 7243; WAN024FTL_at; Start 703; Stop 727
cgtagtattattaaagaacattaca

SEQ ID NO: 220493 - DNA, 25 bp, Artificial
  probe
  misc_feature (1)..(25): SEQ ID NO: 7243; WAN024FTL_at; Start 447; Stop 471
gctaatgctccaagataaagttgca

SEQ ID NO: 220494 - DNA, 25 bp, Artificial
  probe
  misc_feature (1)..(25): SEQ ID NO: 7243; WAN024FTL_at; Start 465; Stop 489
agttgcaacagtatcagcttgcgca

SEQ ID NO: 220495 - DNA, 25 bp, Artificial
  probe
  misc_feature (1)..(25): SEQ ID NO: 7243; WAN024FTL_at; Start 285; Stop 309
catagagccttttacatttgaatta

SEQ ID NO: 220496 - DNA, 25 bp, Artificial
  probe
  misc_feature (1)..(25): SEQ ID NO: 7243; WAN024FTL_at; Start 768; Stop 792
tcaaggttccttttcaatttcttca

SEQ ID NO: 220497 - DNA, 25 bp, Artificial
  probe
  misc_feature (1)..(25): SEQ ID NO: 7243; WAN024FTL_at; Start 632; Stop 656
gaccaggaagtattgttcgatctaa

SEQ ID NO: 220498 - DNA, 25 bp, Artificial
  probe
  misc_feature (1)..(25): SEQ ID NO: 7243; WAN024FTL_at; Start 824; Stop 848
tctcaattaggagaaaattgagctc

SEQ ID NO: 220499 - DNA, 25 bp, Artificial
  probe
  misc_feature (1)..(25): SEQ ID NO: 7243; WAN024FTL_at; Start 594; Stop 618
tgtgattagtccttataaaacttac

SEQ ID NO: 220500 - DNA, 25 bp, Artificial
  probe
  misc_feature (1)..(25): SEQ ID NO: 7243; WAN024FTL_at; Start 736; Stop 760
gaacttgaagaacttttgaatatca

SEQ ID NO: 220501 - DNA, 25 bp, Artificial
  probe
  misc_feature (1)..(25): SEQ ID NO: 7243; WAN024FTL_at; Start 219; Stop 243
tgcgcgtaattatggagtgctaaaa

SEQ ID NO: 220502 - DNA, 25 bp, Artificial
  probe
  misc_feature (1)..(25): SEQ ID NO: 7243; WAN024FTL_at; Start 564; Stop 588
cgctgaacatttagcactagcaaat

SEQ ID NO: 220503 - DNA, 25 bp, Artificial
  probe
  misc_feature (1)..(25): SEQ ID NO: 7243; WAN024FTL_at; Start 878; Stop 902
aagcttcttttaaattgaaagtgca

SEQ ID NO: 220504 - DNA, 25 bp, Artificial
  probe
  misc_feature (1)..(25): SEQ ID NO: 7243; WAN024FTL_at; Start 128; Stop 152
caactgataactcaggaaaattatg

SEQ ID NO: 220505 - DNA, 25 bp, Artificial
  probe
  misc_feature (1)..(25): SEQ ID NO: 7243; WAN024FTL_at; Start 270; Stop 294
ggatccggatgattacatagagcct

SEQ ID NO: 220506 - DNA, 25 bp, Artificial
  probe
  misc_feature (1)..(25): SEQ ID NO: 7243; WAN024FTL_at; Start 838; Stop 862
aaattgagctcattttattggagtg

SEQ ID NO: 220507 - DNA, 25 bp, Artificial
  probe
  misc_feature (1)..(25): SEQ ID NO: 7243; WAN024FTL_at; Start 479; Stop 503
cagcttgcgcaaaactatatcataa

SEQ ID NO: 220508 - DNA, 25 bp, Artificial
  probe
  misc_feature (1)..(25): SEQ ID NO: 7243; WAN024FTL_at; Start 276; Stop 300
ggatgattacatagagccttttaca

SEQ ID NO: 220509 - DNA, 25 bp, Artificial
  probe
  misc_feature (1)..(25): SEQ ID NO: 7243; WAN024FTL_at; Start 802; Stop 826
gaatcagatgtggagtccttactct

SEQ ID NO: 220510 - DNA, 25 bp, Artificial
  probe
  misc_feature (1)..(25): SEQ ID NO: 7243; WAN024FTL_at; Start 304; Stop 328
gaattattgtctcttattcaagaga

SEQ ID NO: 220511 - DNA, 25 bp, Artificial
  probe
  misc_feature (1)..(25): SEQ ID NO: 7243; WAN024FTL_at; Start 233; Stop 257
gagtgctaaaagcaactaatgagtg

SEQ ID NO: 220512 - DNA, 25 bp, Artificial
  probe
  misc_feature (1)..(25): SEQ ID NO: 7243; WAN024FTL_at; Start 753; Stop 777
gaatatcaaaatagttcaaggttcc

SEQ ID NO: 220513 - DNA, 25 bp, Artificial
  probe
  misc_feature (1)..(25): SEQ ID NO: 7243; WAN024FTL_at; Start 470; Stop 494
caacagtatcagcttgcgcaaaact

SEQ ID NO: 220514 - DNA, 25 bp, Artificial
  probe
  misc_feature (1)..(25): SEQ ID NO: 7243; WAN024FTL_at; Start 123; Stop 147
tggttcaactgataactcaggaaaa

SEQ ID NO: 220515 - DNA, 25 bp, Artificial
  probe
  misc_feature (1)..(25): SEQ ID NO: 6497; WAN024FTM_at; Start 624; Stop 648
tcctggtagtatcgtacaatctcag

SEQ ID NO: 220516 - DNA, 25 bp, Artificial
  probe
  misc_feature (1)..(25): SEQ ID NO: 6497; WAN024FTM_at; Start 296; Stop 320
aattattgagtctaattcaagagaa

SEQ ID NO: 220517 - DNA, 25 bp, Artificial
  probe
  misc_feature (1)..(25): SEQ ID NO: 6497; WAN024FTM_at; Start 440; Stop 464
taatgttggaagataaagttgctac

SEQ ID NO: 220518 - DNA, 25 bp, Artificial
  probe
  misc_feature (1)..(25): SEQ ID NO: 6497; WAN024FTM_at; Start 618; Stop 642
tcgtcgtcctggtagtatcgtacaa

SEQ ID NO: 220519 - DNA, 25 bp, Artificial
  probe
  misc_feature (1)..(25): SEQ ID NO: 6497; WAN024FTM_at; Start 593; Stop 617
cacctgttattacgtatcattacta

SEQ ID NO: 220520 - DNA, 25 bp, Artificial
  probe
  misc_feature (1)..(25): SEQ ID NO: 6497; WAN024FTM_at; Start 720; Stop 744
tggtaatagcgtagaaaaggcgtta

SEQ ID NO: 220521 - DNA, 25 bp, Artificial
  probe
  misc_feature (1)..(25): SEQ ID NO: 6497; WAN024FTM_at; Start 223; Stop 247
ggtgtattaagagcaactaatgagt

SEQ ID NO: 220522 - DNA, 25 bp, Artificial
  probe
  misc_feature (1)..(25): SEQ ID NO: 6497; WAN024FTM_at; Start 538; Stop 562
gaagacttttttgttgtagctgaac

SEQ ID NO: 220523 - DNA, 25 bp, Artificial
  probe
  misc_feature (1)..(25): SEQ ID NO: 6497; WAN024FTM_at; Start 574; Stop 598
gctgaacaaatagttatttcacctg

SEQ ID NO: 220524 - DNA, 25 bp, Artificial
  probe
  misc_feature (1)..(25): SEQ ID NO: 6497; WAN024FTM_at; Start 115; Stop 139
ggttctactgataattcaggaaatt

SEQ ID NO: 220525 - DNA, 25 bp, Artificial
  probe
  misc_feature (1)..(25): SEQ ID NO: 6497; WAN024FTM_at; Start 451; Stop 475
gataaagttgctacggtatctgcat

SEQ ID NO: 220526 - DNA, 25 bp, Artificial
  probe
  misc_feature (1)..(25): SEQ ID NO: 6497; WAN024FTM_at; Start 908; Stop 932
tacttactcccaatttatactgccg

SEQ ID NO: 220527 - DNA, 25 bp, Artificial
  probe
  misc_feature (1)..(25): SEQ ID NO: 6497; WAN024FTM_at; Start 424; Stop 448
gaagaagcactagaattaatgttgg

SEQ ID NO: 220528 - DNA, 25 bp, Artificial
  probe
  misc_feature (1)..(25): SEQ ID NO: 6497; WAN024FTM_at; Start 493; Stop 517
aaacaaattttagaaatgagaccat

SEQ ID NO: 220529 - DNA, 25 bp, Artificial
  probe
  misc_feature (1)..(25): SEQ ID NO: 6497; WAN024FTM_at; Start 829; Stop 853
aaaataagttcattatactggagta

SEQ ID NO: 220530 - DNA, 25 bp, Artificial
  probe
  misc_feature (1)..(25): SEQ ID NO: 6497; WAN024FTM_at; Start 760; Stop 784
caaggttctttttctatatctgaag

SEQ ID NO: 220531 - DNA, 25 bp, Artificial
  probe
  misc_feature (1)..(25): SEQ ID NO: 6497; WAN024FTM_at; Start 459; Stop 483
tgctacggtatctgcatgtgcaaaa

SEQ ID NO: 220532 - DNA, 25 bp, Artificial
  probe
  misc_feature (1)..(25): SEQ ID NO: 6497; WAN024FTM_at; Start 844; Stop 868
tactggagtataatctttaattcta

SEQ ID NO: 220533 - DNA, 25 bp, Artificial
  probe
  misc_feature (1)..(25): SEQ ID NO: 6497; WAN024FTM_at; Start 706; Stop 730
aaacaattttatgatggtaatagcg

SEQ ID NO: 220534 - DNA, 25 bp, Artificial
  probe
  misc_feature (1)..(25): SEQ ID NO: 6497; WAN024FTM_at; Start 676; Stop 700
gatgcaggtgagtataacagaagtc

SEQ ID NO: 220535 - DNA, 25 bp, Artificial
  probe
  misc_feature (1)..(25): SEQ ID NO: 6497; WAN024FTM_at; Start 685; Stop 709
gagtataacagaagtcaaataaaac

SEQ ID NO: 220536 - DNA, 25 bp, Artificial
  probe
  misc_feature (1)..(25): SEQ ID NO: 6497; WAN024FTM_at; Start 799; Stop 823
gacacaaaggctttaagaaatattg

SEQ ID NO: 220537 - DNA, 25 bp, Artificial
  probe
  misc_feature (1)..(25): SEQ ID NO: 6497; WAN024FTM_at; Start 212; Stop 236
cgcgtaattatggtgtattaagagc

SEQ ID NO: 220538 - DNA, 25 bp, Artificial
  probe
  misc_feature (1)..(25): SEQ ID NO: 6497; WAN024FTM_at; Start 506; Stop 530
aaatgagaccatttcctgtaggaaa

SEQ ID NO: 220539 - DNA, 25 bp, Artificial
  probe
  misc_feature (1)..(25): SEQ ID NO: 6497; WAN024FTM_at; Start 556; Stop 580
gctgaacatttaagattagctgaac

SEQ ID NO: 220540 - DNA, 25 bp, Artificial
  probe
  misc_feature (1)..(25): SEQ ID NO: 6497; WAN024FTM_at; Start 790; Stop 814
gctcttacggacacaaaggctttaa

SEQ ID NO: 220541 - DNA, 25 bp, Artificial
  probe
  misc_feature (1)..(25): SEQ ID NO: 6497; WAN024FTM_at; Start 781; Stop 805
gaagctgcagctcttacggacacaa

SEQ ID NO: 220542 - DNA, 25 bp, Artificial
  probe
  misc_feature (1)..(25): SEQ ID NO: 6497; WAN024FTM_at; Start 605; Stop 629
cgtatcattactatcgtcgtcctgg

SEQ ID NO: 220543 - DNA, 25 bp, Artificial
  probe
  misc_feature (1)..(25): SEQ ID NO: 6497; WAN024FTM_at; Start 520; Stop 544
cctgtaggaaaaatctacgaagact

SEQ ID NO: 220544 - DNA, 25 bp, Artificial
  probe
  misc_feature (1)..(25): SEQ ID NO: 6497; WAN024FTM_at; Start 769; Stop 793
ttttctatatctgaagctgcagctc

SEQ ID NO: 220545 - DNA, 25 bp, Artificial
  probe
  misc_feature (1)..(25): SEQ ID NO: 6497; WAN024FTM_at; Start 262; Stop 286
gatccggatgattatatagagtact

SEQ ID NO: 220546 - DNA, 25 bp, Artificial
  probe
  misc_feature (1)..(25): SEQ ID NO: 6497; WAN024FTM_at; Start 638; Stop 662
tacaatctcagtttacagataagcg

SEQ ID NO: 220547 - DNA, 25 bp, Artificial
  probe
  misc_feature (1)..(25): SEQ ID NO: 6497; WAN024FTM_at; Start 646; Stop 670
cagtttacagataagcgatttgatt

SEQ ID NO: 220548 - DNA, 25 bp, Artificial
  probe
  misc_feature (1)..(25): SEQ ID NO: 6497; WAN024FTM_at; Start 464; Stop 488
cggtatctgcatgtgcaaaacttta

SEQ ID NO: 220549 - DNA, 25 bp, Artificial
  probe
  misc_feature (1)..(25): SEQ ID NO: 3893; WAN024FTN_at; Start 175; Stop 199
gagtatgcccagaagtatcatttta

SEQ ID NO: 220550 - DNA, 25 bp, Artificial
  probe
  misc_feature (1)..(25): SEQ ID NO: 3893; WAN024FTN_at; Start 384; Stop 408
gtttcattctgaaagagaagagttg

SEQ ID NO: 220551 - DNA, 25 bp, Artificial
  probe
  misc_feature (1)..(25): SEQ ID NO: 3893; WAN024FTN_at; Start 230; Stop 254
tatcagagactcgtaatacaggtct

SEQ ID NO: 220552 - DNA, 25 bp, Artificial
  probe
  misc_feature (1)..(25): SEQ ID NO: 3893; WAN024FTN_at; Start 400; Stop 424
gaagagttgaaaaatgtacaatgca

SEQ ID NO: 220553 - DNA, 25 bp, Artificial
  probe
  misc_feature (1)..(25): SEQ ID NO: 3893; WAN024FTN_at; Start 863; Stop 887
aactggatgcaaacatagttcctat

SEQ ID NO: 220554 - DNA, 25 bp, Artificial
  probe
  misc_feature (1)..(25): SEQ ID NO: 3893; WAN024FTN_at; Start 825; Stop 849
tcaggaagacactcaactttttagg

SEQ ID NO: 220555 - DNA, 25 bp, Artificial
  probe
  misc_feature (1)..(25): SEQ ID NO: 3893; WAN024FTN_at; Start 640; Stop 664
tattttattgggaatgatgcggcta

SEQ ID NO: 220556 - DNA, 25 bp, Artificial
  probe
  misc_feature (1)..(25): SEQ ID NO: 3893; WAN024FTN_at; Start 848; Stop 872
ggttgatacttgcagaactggatgc

SEQ ID NO: 220557 - DNA, 25 bp, Artificial
  probe
  misc_feature (1)..(25): SEQ ID NO: 3893; WAN024FTN_at; Start 547; Stop 571
cctataggatatttttacgaagatt

SEQ ID NO: 220558 - DNA, 25 bp, Artificial
  probe
  misc_feature (1)..(25): SEQ ID NO: 3893; WAN024FTN_at; Start 87; Stop 111
tgatagcgtcatttctcaggaatgg

SEQ ID NO: 220559 - DNA, 25 bp, Artificial
  probe
  misc_feature (1)..(25): SEQ ID NO: 3893; WAN024FTN_at; Start 257; Stop 281
ctcatgcgaatggaaaatacgtatt

SEQ ID NO: 220560 - DNA, 25 bp, Artificial
  probe
  misc_feature (1)..(25): SEQ ID NO: 3893; WAN024FTN_at; Start 202; Stop 226
tctgttattcataaggaaaatggtg

SEQ ID NO: 220561 - DNA, 25 bp, Artificial
  probe
  misc_feature (1)..(25): SEQ ID NO: 3893; WAN024FTN_at; Start 751; Stop 775
gatgacatcttcctgtctaaatcct

SEQ ID NO: 220562 - DNA, 25 bp, Artificial
  probe
  misc_feature (1)..(25): SEQ ID NO: 3893; WAN024FTN_at; Start 100; Stop 124
tctcaggaatgggataaatatgaag

SEQ ID NO: 220563 - DNA, 25 bp, Artificial
  probe
  misc_feature (1)..(25): SEQ ID NO: 3893; WAN024FTN_at; Start 217; Stop 241
gaaaatggtggactatcagagactc

SEQ ID NO: 220564 - DNA, 25 bp, Artificial
  probe
  misc_feature (1)..(25): SEQ ID NO: 3893; WAN024FTN_at; Start 515; Stop 539
gagaattgtttgagaagaacggaat

SEQ ID NO: 220565 - DNA, 25 bp, Artificial
  probe
  misc_feature (1)..(25): SEQ ID NO: 3893; WAN024FTN_at; Start 285; Stop 309
tcttgattctgatgattggattaca

SEQ ID NO: 220566 - DNA, 25 bp, Artificial
  probe
  misc_feature (1)..(25): SEQ ID NO: 3893; WAN024FTN_at; Start 660; Stop 684
ggctattaccaaacagtggtctgaa

SEQ ID NO: 220567 - DNA, 25 bp, Artificial
  probe
  misc_feature (1)..(25): SEQ ID NO: 3893; WAN024FTN_at; Start 366; Stop 390
gcaattcggaatgcaaatgtttcat

SEQ ID NO: 220568 - DNA, 25 bp, Artificial
  probe
  misc_feature (1)..(25): SEQ ID NO: 3893; WAN024FTN_at; Start 736; Stop 760
tctcttatggtttcagatgacatct

SEQ ID NO: 220569 - DNA, 25 bp, Artificial
  probe
  misc_feature (1)..(25): SEQ ID NO: 3893; WAN024FTN_at; Start 146; Stop 170
gtacagatgcttcacccaatatttg

SEQ ID NO: 220570 - DNA, 25 bp, Artificial
  probe
  misc_feature (1)..(25): SEQ ID NO: 3893; WAN024FTN_at; Start 654; Stop 678
tgatgcggctattaccaaacagtgg

SEQ ID NO: 220571 - DNA, 25 bp, Artificial
  probe
  misc_feature (1)..(25): SEQ ID NO: 3893; WAN024FTN_at; Start 462; Stop 486
catgttaagtgttgaagggattaca

SEQ ID NO: 220572 - DNA, 25 bp, Artificial
  probe
  misc_feature (1)..(25): SEQ ID NO: 3893; WAN024FTN_at; Start 876; Stop 900
catagttcctataaaatatttgcga

SEQ ID NO: 220573 - DNA, 25 bp, Artificial
  probe
  misc_feature (1)..(25): SEQ ID NO: 3893; WAN024FTN_at; Start 246; Stop 270
tacaggtctttctcatgcgaatgga

SEQ ID NO: 220574 - DNA, 25 bp, Artificial
  probe
  misc_feature (1)..(25): SEQ ID NO: 3893; WAN024FTN_at; Start 139; Stop 163
gatggcagtacagatgcttcaccca

SEQ ID NO: 220575 - DNA, 25 bp, Artificial
  probe
  misc_feature (1)..(25): SEQ ID NO: 3893; WAN024FTN_at; Start 301; Stop 325
tggattacaaaagatatgtttcgaa

SEQ ID NO: 220576 - DNA, 25 bp, Artificial
  probe
  misc_feature (1)..(25): SEQ ID NO: 3893; WAN024FTN_at; Start 814; Stop 838
tatgaagaaaatcaggaagacactc

SEQ ID NO: 220577 - DNA, 25 bp, Artificial
  probe
  misc_feature (1)..(25): SEQ ID NO: 3893; WAN024FTN_at; Start 918; Stop 942
gaaatatgtattttatcgcattcga

SEQ ID NO: 220578 - DNA, 25 bp, Artificial
  probe
  misc_feature (1)..(25): SEQ ID NO: 3893; WAN024FTN_at; Start 29; Stop 53
tattgctaacaattgtaataccagt

SEQ ID NO: 220579 - DNA, 25 bp, Artificial
  probe
  misc_feature (1)..(25): SEQ ID NO: 3893; WAN024FTN_at; Start 161; Stop 185
ccaatatttgtgaagagtatgccca

SEQ ID NO: 220580 - DNA, 25 bp, Artificial
  probe
  misc_feature (1)..(25): SEQ ID NO: 3893; WAN024FTN_at; Start 531; Stop 555
gaacggaatagagtttcctatagga

SEQ ID NO: 220581 - DNA, 25 bp, Artificial
  probe
  misc_feature (1)..(25): SEQ ID NO: 3893; WAN024FTN_at; Start 478; Stop 502
gggattacaagttttgctacagaca

SEQ ID NO: 220582 - DNA, 25 bp, Artificial
  probe
  misc_feature (1)..(25): SEQ ID NO: 3893; WAN024FTN_at; Start 72; Stop 96
tttgaaacgttgtattgatagcgtc

SEQ ID NO: 220583 - DNA, 25 bp, Artificial
  probe
  misc_feature (1)..(25): SEQ ID NO: 1866; WAN024FTO_at; Start 558; Stop 582
tgttggtgaacatttggcattagca

SEQ ID NO: 220584 - DNA, 25 bp, Artificial
  probe
  misc_feature (1)..(25): SEQ ID NO: 1866; WAN024FTO_at; Start 414; Stop 438
tgaagtactttcaaaagaggaagca

SEQ ID NO: 220585 - DNA, 25 bp, Artificial
  probe
  misc_feature (1)..(25): SEQ ID NO: 1866; WAN024FTO_at; Start 33; Stop 57
gaaagactatctacattatgcaatg

SEQ ID NO: 220586 - DNA, 25 bp, Artificial
  probe
  misc_feature (1)..(25): SEQ ID NO: 1866; WAN024FTO_at; Start 425; Stop 449
caaaagaggaagcattagaactgat

SEQ ID NO: 220587 - DNA, 25 bp, Artificial
  probe
  misc_feature (1)..(25): SEQ ID NO: 1866; WAN024FTO_at; Start 750; Stop 774
aaatatcaaaatagtgcagggttcc

SEQ ID NO: 220588 - DNA, 25 bp, Artificial
  probe
  misc_feature (1)..(25): SEQ ID NO: 1866; WAN024FTO_at; Start 394; Stop 418
gaatctgtttatagtaatcttgaag

SEQ ID NO: 220589 - DNA, 25 bp, Artificial
  probe
  misc_feature (1)..(25): SEQ ID NO: 1866; WAN024FTO_at; Start 208; Stop 232
gctagaaattttggtgtcacgaagg

SEQ ID NO: 220590 - DNA, 25 bp, Artificial
  probe
  misc_feature (1)..(25): SEQ ID NO: 1866; WAN024FTO_at; Start 306; Stop 330
gattcagcaaagatatgacgcagat

SEQ ID NO: 220591 - DNA, 25 bp, Artificial
  probe
  misc_feature (1)..(25): SEQ ID NO: 1866; WAN024FTO_at; Start 842; Stop 866
cctcattgtattggagtgttttcac

SEQ ID NO: 220592 - DNA, 25 bp, Artificial
  probe
  misc_feature (1)..(25): SEQ ID NO: 1866; WAN024FTO_at; Start 799; Stop 823
gaatcagatgtagaatccttactag

SEQ ID NO: 220593 - DNA, 25 bp, Artificial
  probe
  misc_feature (1)..(25): SEQ ID NO: 1866; WAN024FTO_at; Start 19; Stop 43
ccagtatataatgtgaaagactatc

SEQ ID NO: 220594 - DNA, 25 bp, Artificial
  probe
  misc_feature (1)..(25): SEQ ID NO: 1866; WAN024FTO_at; Start 259; Stop 283
gatccagatgactattttgaagtag

SEQ ID NO: 220595 - DNA, 25 bp, Artificial
  probe
  misc_feature (1)..(25): SEQ ID NO: 1866; WAN024FTO_at; Start 869; Stop 893
caccaaaagcttcttatagactaaa

SEQ ID NO: 220596 - DNA, 25 bp, Artificial
  probe
  misc_feature (1)..(25): SEQ ID NO: 1866; WAN024FTO_at; Start 225; Stop 249
cacgaaggcttcttcggattggata

SEQ ID NO: 220597 - DNA, 25 bp, Artificial
  probe
  misc_feature (1)..(25): SEQ ID NO: 1866; WAN024FTO_at; Start 277; Stop 301
gaagtagatgctttagaactattag

SEQ ID NO: 220598 - DNA, 25 bp, Artificial
  probe
  misc_feature (1)..(25): SEQ ID NO: 1866; WAN024FTO_at; Start 462; Stop 486
agttgcaacagtatcggcctgtgct

SEQ ID NO: 220599 - DNA, 25 bp, Artificial
  probe
  misc_feature (1)..(25): SEQ ID NO: 1866; WAN024FTO_at; Start 292; Stop 316
gaactattagttaagattcagcaaa

SEQ ID NO: 220600 - DNA, 25 bp, Artificial
  probe
  misc_feature (1)..(25): SEQ ID NO: 1866; WAN024FTO_at; Start 498; Stop 522
taagagtattttagaaagagctccc

SEQ ID NO: 220601 - DNA, 25 bp, Artificial
  probe
  misc_feature (1)..(25): SEQ ID NO: 1866; WAN024FTO_at; Start 127; Stop 151
tctggtgaattatgtaatcggtacg

SEQ ID NO: 220602 - DNA, 25 bp, Artificial
  probe
  misc_feature (1)..(25): SEQ ID NO: 1866; WAN024FTO_at; Start 444; Stop 468
actgatgcttcaagataaagttgca

SEQ ID NO: 220603 - DNA, 25 bp, Artificial
  probe
  misc_feature (1)..(25): SEQ ID NO: 1866; WAN024FTO_at; Start 360; Stop 384
gacatatgaagattataattctgac

SEQ ID NO: 220604 - DNA, 25 bp, Artificial
  probe
  misc_feature (1)..(25): SEQ ID NO: 1866; WAN024FTO_at; Start 510; Stop 534
agaaagagctcccttccctattgga

SEQ ID NO: 220605 - DNA, 25 bp, Artificial
  probe
  misc_feature (1)..(25): SEQ ID NO: 1866; WAN024FTO_at; Start 818; Stop 842
tactagcaattaggaagaaactgtc

SEQ ID NO: 220606 - DNA, 25 bp, Artificial
  probe
  misc_feature (1)..(25): SEQ ID NO: 1866; WAN024FTO_at; Start 477; Stop 501
ggcctgtgctaaactatatcataag

SEQ ID NO: 220607 - DNA, 25 bp, Artificial
  probe
  misc_feature (1)..(25): SEQ ID NO: 1866; WAN024FTO_at; Start 765; Stop 789
gcagggttccttttctattgcttca

SEQ ID NO: 220608 - DNA, 25 bp, Artificial
  probe
  misc_feature (1)..(25): SEQ ID NO: 1866; WAN024FTO_at; Start 380; Stop 404
ctgactatatgggagaatctgttta

SEQ ID NO: 220609 - DNA, 25 bp, Artificial
  probe
  misc_feature (1)..(25): SEQ ID NO: 1866; WAN024FTO_at; Start 831; Stop 855
gaagaaactgtcctcattgtattgg

SEQ ID NO: 220610 - DNA, 25 bp, Artificial
  probe
  misc_feature (1)..(25): SEQ ID NO: 1866; WAN024FTO_at; Start 141; Stop 165
taatcggtacgctgaaaatcatgag

SEQ ID NO: 220611 - DNA, 25 bp, Artificial
  probe
  misc_feature (1)..(25): SEQ ID NO: 1866; WAN024FTO_at; Start 65; Stop 89
tatttagacaaacatacacagactt

SEQ ID NO: 220612 - DNA, 25 bp, Artificial
  probe
  misc_feature (1)..(25): SEQ ID NO: 1866; WAN024FTO_at; Start 346; Stop 370
gtaaaatctacttcgacatatgaag

SEQ ID NO: 220613 - DNA, 25 bp, Artificial
  probe
  misc_feature (1)..(25): SEQ ID NO: 1866; WAN024FTO_at; Start 525; Stop 549
ccctattggaaaagtctatgaagat

SEQ ID NO: 220614 - DNA, 25 bp, Artificial
  probe
  misc_feature (1)..(25): SEQ ID NO: 1866; WAN024FTO_at; Start 854; Stop 878
ggagtgttttcacatcaccaaaagc

SEQ ID NO: 220615 - DNA, 25 bp, Artificial
  probe
  misc_feature (1)..(25): SEQ ID NO: 1866; WAN024FTO_at; Start 322; Stop 346
gacgcagatttgatatcaactaaag

SEQ ID NO: 220616 - DNA, 25 bp, Artificial
  probe
  misc_feature (1)..(25): SEQ ID NO: 1866; WAN024FTO_at; Start 111; Stop 135
tggttcaacagatagttctggtgaa

SEQ ID NO: 220617 - DNA, 25 bp, Artificial
  probe
  misc_feature (1)..(25): SEQ ID NO: 3883; WAN024FTP_at; Start 216; Stop 240
gaagaatggcggactttcggatgct

SEQ ID NO: 220618 - DNA, 25 bp, Artificial
  probe
  misc_feature (1)..(25): SEQ ID NO: 3883; WAN024FTP_at; Start 796; Stop 820
ggctcctttattttgagtaatagcg

SEQ ID NO: 220619 - DNA, 25 bp, Artificial
  probe
  misc_feature (1)..(25): SEQ ID NO: 3883; WAN024FTP_at; Start 906; Stop 930
tccaatgaaaaggaaagttcaatgt

SEQ ID NO: 220620 - DNA, 25 bp, Artificial
  probe
  misc_feature (1)..(25): SEQ ID NO: 3883; WAN024FTP_at; Start 293; Stop 317
cagatgattattttgaaccgtatgc

SEQ ID NO: 220621 - DNA, 25 bp, Artificial
  probe
  misc_feature (1)..(25): SEQ ID NO: 3883; WAN024FTP_at; Start 45; Stop 69
tgttccagtatacaatgtcgcggat

SEQ ID NO: 220622 - DNA, 25 bp, Artificial
  probe
  misc_feature (1)..(25): SEQ ID NO: 3883; WAN024FTP_at; Start 568; Stop 592
gaggatttgtatgttgttgcagagc

SEQ ID NO: 220623 - DNA, 25 bp, Artificial
  probe
  misc_feature (1)..(25): SEQ ID NO: 3883; WAN024FTP_at; Start 669; Stop 693
taattcaacattttcggatagacag

SEQ ID NO: 220624 - DNA, 25 bp, Artificial
  probe
  misc_feature (1)..(25): SEQ ID NO: 3883; WAN024FTP_at; Start 925; Stop 949
caatgtgttttgtttctgctttccc

SEQ ID NO: 220625 - DNA, 25 bp, Artificial
  probe
  misc_feature (1)..(25): SEQ ID NO: 3883; WAN024FTP_at; Start 2; Stop 26
tgaactgtagcataaagagagggaa

SEQ ID NO: 220626 - DNA, 25 bp, Artificial
  probe
  misc_feature (1)..(25): SEQ ID NO: 3883; WAN024FTP_at; Start 202; Stop 226
catgttttccataagaagaatggcg

SEQ ID NO: 220627 - DNA, 25 bp, Artificial
  probe
  misc_feature (1)..(25): SEQ ID NO: 3883; WAN024FTP_at; Start 608; Stop 632
aaacagttgctcataccgatttgcc

SEQ ID NO: 220628 - DNA, 25 bp, Artificial
  probe
  misc_feature (1)..(25): SEQ ID NO: 3883; WAN024FTP_at; Start 706; Stop 730
gatgcgattgatcataatgaagcca

SEQ ID NO: 220629 - DNA, 25 bp, Artificial
  probe
  misc_feature (1)..(25): SEQ ID NO: 3883; WAN024FTP_at; Start 941; Stop 965
tgctttccccaaattactactataa

SEQ ID NO: 220630 - DNA, 25 bp, Artificial
  probe
  misc_feature (1)..(25): SEQ ID NO: 3883; WAN024FTP_at; Start 586; Stop 610
gcagagcgtttgttgaatattaaaa

SEQ ID NO: 220631 - DNA, 25 bp, Artificial
  probe
  misc_feature (1)..(25): SEQ ID NO: 3883; WAN024FTP_at; Start 307; Stop 331
gaaccgtatgcattagaattgttaa

SEQ ID NO: 220632 - DNA, 25 bp, Artificial
  probe
  misc_feature (1)..(25): SEQ ID NO: 3883; WAN024FTP_at; Start 167; Stop 191
tatgtgatgaatatgggaaactgta

SEQ ID NO: 220633 - DNA, 25 bp, Artificial
  probe
  misc_feature (1)..(25): SEQ ID NO: 3883; WAN024FTP_at; Start 244; Stop 268
aattttggtttggagaagagtcgag

SEQ ID NO: 220634 - DNA, 25 bp, Artificial
  probe
  misc_feature (1)..(25): SEQ ID NO: 3883; WAN024FTP_at; Start 100; Stop 124
gaacagacgtataaagattttgagg

SEQ ID NO: 220635 - DNA, 25 bp, Artificial
  probe
  misc_feature (1)..(25): SEQ ID NO: 3883; WAN024FTP_at; Start 637; Stop 661
tatcattattatcagagacagggaa

SEQ ID NO: 220636 - DNA, 25 bp, Artificial
  probe
  misc_feature (1)..(25): SEQ ID NO: 3883; WAN024FTP_at; Start 138; Stop 162
tgatggatccactgataattctggg

SEQ ID NO: 220637 - DNA, 25 bp, Artificial
  probe
  misc_feature (1)..(25): SEQ ID NO: 3883; WAN024FTP_at; Start 468; Stop 492
ggcagctgtatattataacgatgaa

SEQ ID NO: 220638 - DNA, 25 bp, Artificial
  probe
  misc_feature (1)..(25): SEQ ID NO: 3883; WAN024FTP_at; Start 781; Stop 805
gctaaaagagtaattggctccttta

SEQ ID NO: 220639 - DNA, 25 bp, Artificial
  probe
  misc_feature (1)..(25): SEQ ID NO: 3883; WAN024FTP_at; Start 70; Stop 94
tatctgcgctttgcgttggatagtc

SEQ ID NO: 220640 - DNA, 25 bp, Artificial
  probe
  misc_feature (1)..(25): SEQ ID NO: 3883; WAN024FTP_at; Start 452; Stop 476
caaataaagaatttttggcagctgt

SEQ ID NO: 220641 - DNA, 25 bp, Artificial
  probe
  misc_feature (1)..(25): SEQ ID NO: 3883; WAN024FTP_at; Start 258; Stop 282
gaagagtcgaggagagtttataact

SEQ ID NO: 220642 - DNA, 25 bp, Artificial
  probe
  misc_feature (1)..(25): SEQ ID NO: 3883; WAN024FTP_at; Start 483; Stop 507
taacgatgaaatgacggtatctgct

SEQ ID NO: 220643 - DNA, 25 bp, Artificial
  probe
  misc_feature (1)..(25): SEQ ID NO: 3883; WAN024FTP_at; Start 978; Stop 1002
gatgttacagagaggcaggatatag

SEQ ID NO: 220644 - DNA, 25 bp, Artificial
  probe
  misc_feature (1)..(25): SEQ ID NO: 3883; WAN024FTP_at; Start 83; Stop 107
cgttggatagtcttttggaacagac

SEQ ID NO: 220645 - DNA, 25 bp, Artificial
  probe
  misc_feature (1)..(25): SEQ ID NO: 3883; WAN024FTP_at; Start 550; Stop 574
ccaaaaggaaagatctacgaggatt

SEQ ID NO: 220646 - DNA, 25 bp, Artificial
  probe
  misc_feature (1)..(25): SEQ ID NO: 3883; WAN024FTP_at; Start 55; Stop 79
tacaatgtcgcggattatctgcgct

SEQ ID NO: 220647 - DNA, 25 bp, Artificial
  probe
  misc_feature (1)..(25): SEQ ID NO: 3883; WAN024FTP_at; Start 408; Stop 432
caaaaaactgatggctgaggactac

SEQ ID NO: 220648 - DNA, 25 bp, Artificial
  probe
  misc_feature (1)..(25): SEQ ID NO: 3883; WAN024FTP_at; Start 653; Stop 677
gacagggaagtattgttaattcaac

SEQ ID NO: 220649 - DNA, 25 bp, Artificial
  probe
  misc_feature (1)..(25): SEQ ID NO: 3883; WAN024FTP_at; Start 769; Stop 793
gcagccttaaatgctaaaagagtaa

SEQ ID NO: 220650 - DNA, 25 bp, Artificial
  probe
  misc_feature (1)..(25): SEQ ID NO: 3883; WAN024FTP_at; Start 421; Stop 445
gctgaggactacctaactgtaaaaa

SEQ ID NO: 220651 - DNA, 25 bp, Artificial
  probe
  misc_feature (1)..(25): SEQ ID NO: 1493; WAN024FTQ_at; Start 213; Stop 237
taactttaaagaggtatcgcacaag

SEQ ID NO: 220652 - DNA, 25 bp, Artificial
  probe
  misc_feature (1)..(25): SEQ ID NO: 1493; WAN024FTQ_at; Start 491; Stop 515
gaggagtgtggttagattcgactat

SEQ ID NO: 220653 - DNA, 25 bp, Artificial
  probe
  misc_feature (1)..(25): SEQ ID NO: 1493; WAN024FTQ_at; Start 517; Stop 541
tatgttgattcttcacgagaactga

SEQ ID NO: 220654 - DNA, 25 bp, Artificial
  probe
  misc_feature (1)..(25): SEQ ID NO: 1493; WAN024FTQ_at; Start 562; Stop 586
tatactattcgagcaaagacacatg

SEQ ID NO: 220655 - DNA, 25 bp, Artificial
  probe
  misc_feature (1)..(25): SEQ ID NO: 1493; WAN024FTQ_at; Start 254; Stop 278
aaatcttctctatgtggatacaagg

SEQ ID NO: 220656 - DNA, 25 bp, Artificial
  probe
  misc_feature (1)..(25): SEQ ID NO: 1493; WAN024FTQ_at; Start 826; Stop 850
gcagacaatttttctaaccagtatg

SEQ ID NO: 220657 - DNA, 25 bp, Artificial
  probe
  misc_feature (1)..(25): SEQ ID NO: 1493; WAN024FTQ_at; Start 942; Stop 966
tgatagattgatgaagggtgaactg

SEQ ID NO: 220658 - DNA, 25 bp, Artificial
  probe
  misc_feature (1)..(25): SEQ ID NO: 1493; WAN024FTQ_at; Start 913; Stop 937
ccgataaatgaagcgacaggaacct

SEQ ID NO: 220659 - DNA, 25 bp, Artificial
  probe
  misc_feature (1)..(25): SEQ ID NO: 1493; WAN024FTQ_at; Start 268; Stop 292
tggatacaaggatacgaaagtgctc

SEQ ID NO: 220660 - DNA, 25 bp, Artificial
  probe
  misc_feature (1)..(25): SEQ ID NO: 1493; WAN024FTQ_at; Start 843; Stop 867
ccagtatgatgaaaaagagtgggca

SEQ ID NO: 220661 - DNA, 25 bp, Artificial
  probe
  misc_feature (1)..(25): SEQ ID NO: 1493; WAN024FTQ_at; Start 58; Stop 82
cctgctattgctcggaataaattat

SEQ ID NO: 220662 - DNA, 25 bp, Artificial
  probe
  misc_feature (1)..(25): SEQ ID NO: 1493; WAN024FTQ_at; Start 696; Stop 720
tatgaaatacgatatagtgctagat

SEQ ID NO: 220663 - DNA, 25 bp, Artificial
  probe
  misc_feature (1)..(25): SEQ ID NO: 1493; WAN024FTQ_at; Start 745; Stop 769
gaattaggttataggacaaatgact

SEQ ID NO: 220664 - DNA, 25 bp, Artificial
  probe
  misc_feature (1)..(25): SEQ ID NO: 1493; WAN024FTQ_at; Start 601; Stop 625
tatatcgcaaatggtaggtggtctg

SEQ ID NO: 220665 - DNA, 25 bp, Artificial
  probe
  misc_feature (1)..(25): SEQ ID NO: 1493; WAN024FTQ_at; Start 894; Stop 918
taagtgtagttataagtgtccgata

SEQ ID NO: 220666 - DNA, 25 bp, Artificial
  probe
  misc_feature (1)..(25): SEQ ID NO: 1493; WAN024FTQ_at; Start 758; Stop 782
ggacaaatgacttgattagaaacta

SEQ ID NO: 220667 - DNA, 25 bp, Artificial
  probe
  misc_feature (1)..(25): SEQ ID NO: 1493; WAN024FTQ_at; Start 575; Stop 599
caaagacacatgagagagtgcccaa

SEQ ID NO: 220668 - DNA, 25 bp, Artificial
  probe
  misc_feature (1)..(25): SEQ ID NO: 1493; WAN024FTQ_at; Start 586; Stop 610
gagagagtgcccaaatatatcgcaa

SEQ ID NO: 220669 - DNA, 25 bp, Artificial
  probe
  misc_feature (1)..(25): SEQ ID NO: 1493; WAN024FTQ_at; Start 878; Stop 902
caacaactgcattgtttaagtgtag

SEQ ID NO: 220670 - DNA, 25 bp, Artificial
  probe
  misc_feature (1)..(25): SEQ ID NO: 1493; WAN024FTQ_at; Start 808; Stop 832
caggagttgttctttttggcagaca

SEQ ID NO: 220671 - DNA, 25 bp, Artificial
  probe
  misc_feature (1)..(25): SEQ ID NO: 1493; WAN024FTQ_at; Start 289; Stop 313
gctcctaagttggttcagaagacga

SEQ ID NO: 220672 - DNA, 25 bp, Artificial
  probe
  misc_feature (1)..(25): SEQ ID NO: 1493; WAN024FTQ_at; Start 858; Stop 882
agagtgggcaggagttttatcaaca

SEQ ID NO: 220673 - DNA, 25 bp, Artificial
  probe
  misc_feature (1)..(25): SEQ ID NO: 1493; WAN024FTQ_at; Start 476; Stop 500
tgctttcaaaatatggaggagtgtg

SEQ ID NO: 220674 - DNA, 25 bp, Artificial
  probe
  misc_feature (1)..(25): SEQ ID NO: 1493; WAN024FTQ_at; Start 378; Stop 402
tatccgtgaatatgtgacacttcca

SEQ ID NO: 220675 - DNA, 25 bp, Artificial
  probe
  misc_feature (1)..(25): SEQ ID NO: 1493; WAN024FTQ_at; Start 316; Stop 340
gatagccaaaggaaatatgcagaaa

SEQ ID NO: 220676 - DNA, 25 bp, Artificial
  probe
  misc_feature (1)..(25): SEQ ID NO: 1493; WAN024FTQ_at; Start 925; Stop 949
gcgacaggaacctattttgatagat

SEQ ID NO: 220677 - DNA, 25 bp, Artificial
  probe
  misc_feature (1)..(25): SEQ ID NO: 1493; WAN024FTQ_at; Start 278; Stop 302
gatacgaaagtgctcctaagttggt

SEQ ID NO: 220678 - DNA, 25 bp, Artificial
  probe
  misc_feature (1)..(25): SEQ ID NO: 1493; WAN024FTQ_at; Start 303; Stop 327
tcagaagacgattgatagccaaagg

SEQ ID NO: 220679 - DNA, 25 bp, Artificial
  probe
  misc_feature (1)..(25): SEQ ID NO: 1493; WAN024FTQ_at; Start 789; Stop 813
taaagtcgaagaaaataatcaggag

SEQ ID NO: 220680 - DNA, 25 bp, Artificial
  probe
  misc_feature (1)..(25): SEQ ID NO: 1493; WAN024FTQ_at; Start 615; Stop 639
taggtggtctgcattttgtttgtca

SEQ ID NO: 220681 - DNA, 25 bp, Artificial
  probe
  misc_feature (1)..(25): SEQ ID NO: 1493; WAN024FTQ_at; Start 362; Stop 386
ttttggatgaaaacaatatccgtga

SEQ ID NO: 220682 - DNA, 25 bp, Artificial
  probe
  misc_feature (1)..(25): SEQ ID NO: 1493; WAN024FTQ_at; Start 227; Stop 251
tatcgcacaaggagatagaacaaag

SEQ ID NO: 220683 - DNA, 25 bp, Artificial
  probe
  misc_feature (1)..(25): SEQ ID NO: 1493; WAN024FTQ_at; Start 44; Stop 68
gaaaatcatttactcctgctattgc

SEQ ID NO: 220684 - DNA, 25 bp, Artificial
  probe
  misc_feature (1)..(25): SEQ ID NO: 1493; WAN024FTQ_at; Start 393; Stop 417
gacacttccatcagagatagtagaa

SEQ ID NO: 220685 - DNA, 25 bp, Artificial
  probe
  misc_feature (1)..(25): SEQ ID NO: 2526; WAN024FTR_at; Start 901; Stop 925
agcttcttgaaaaattctacgggct

SEQ ID NO: 220686 - DNA, 25 bp, Artificial
  probe
  misc_feature (1)..(25): SEQ ID NO: 2526; WAN024FTR_at; Start 35; Stop 59
catacaatgcggaaaaatatttacc

SEQ ID NO: 220687 - DNA, 25 bp, Artificial
  probe
  misc_feature (1)..(25): SEQ ID NO: 2526; WAN024FTR_at; Start 146; Stop 170
gggaaatcgctgaagaattcgagcg

SEQ ID NO: 220688 - DNA, 25 bp, Artificial
  probe
  misc_feature (1)..(25): SEQ ID NO: 2526; WAN024FTR_at; Start 349; Stop 373
gaaattctttcaccgtattatcgag

SEQ ID NO: 220689 - DNA, 25 bp, Artificial
  probe
  misc_feature (1)..(25): SEQ ID NO: 2526; WAN024FTR_at; Start 9; Stop 33
gaaattattaacaatagcagtgcca

SEQ ID NO: 220690 - DNA, 25 bp, Artificial
  probe
  misc_feature (1)..(25): SEQ ID NO: 2526; WAN024FTR_at; Start 381; Stop 405
taatcaagctggagatgtagtatct

SEQ ID NO: 220691 - DNA, 25 bp, Artificial
  probe
  misc_feature (1)..(25): SEQ ID NO: 2526; WAN024FTR_at; Start 236; Stop 260
caggtataaaaaatgcttatggaac

SEQ ID NO: 220692 - DNA, 25 bp, Artificial
  probe
  misc_feature (1)..(25): SEQ ID NO: 2526; WAN024FTR_at; Start 652; Stop 676
ggaacatctacgcaaagtattagta

SEQ ID NO: 220693 - DNA, 25 bp, Artificial
  probe
  misc_feature (1)..(25): SEQ ID NO: 2526; WAN024FTR_at; Start 325; Stop 349
tatttaaaagaaacagatgtggatg

SEQ ID NO: 220694 - DNA, 25 bp, Artificial
  probe
  misc_feature (1)..(25): SEQ ID NO: 2526; WAN024FTR_at; Start 641; Stop 665
aataccgtttaggaacatctacgca

SEQ ID NO: 220695 - DNA, 25 bp, Artificial
  probe
  misc_feature (1)..(25): SEQ ID NO: 2526; WAN024FTR_at; Start 501; Stop 525
cactatgacattaaaaaccaagctg

SEQ ID NO: 220696 - DNA, 25 bp, Artificial
  probe
  misc_feature (1)..(25): SEQ ID NO: 2526; WAN024FTR_at; Start 201; Stop 225
taaaccaaatggtgggcatggatca

SEQ ID NO: 220697 - DNA, 25 bp, Artificial
  probe
  misc_feature (1)..(25): SEQ ID NO: 2526; WAN024FTR_at; Start 370; Stop 394
cgagtttatgttaatcaagctggag

SEQ ID NO: 220698 - DNA, 25 bp, Artificial
  probe
  misc_feature (1)..(25): SEQ ID NO: 2526; WAN024FTR_at; Start 467; Stop 491
tctatgaacaaataggtagaaccgt

SEQ ID NO: 220699 - DNA, 25 bp, Artificial
  probe
  misc_feature (1)..(25): SEQ ID NO: 2526; WAN024FTR_at; Start 217; Stop 241
catggatcagctgtaaatgcaggta

SEQ ID NO: 220700 - DNA, 25 bp, Artificial
  probe
  misc_feature (1)..(25): SEQ ID NO: 2526; WAN024FTR_at; Start 916; Stop 940
tctacgggcttaaagatgaattttg

SEQ ID NO: 220701 - DNA, 25 bp, Artificial
  probe
  misc_feature (1)..(25): SEQ ID NO: 2526; WAN024FTR_at; Start 589; Stop 613
tatgttctaccatatatagaaacgg

SEQ ID NO: 220702 - DNA, 25 bp, Artificial
  probe
  misc_feature (1)..(25): SEQ ID NO: 2526; WAN024FTR_at; Start 757; Stop 781
ggatttggtcgctccaaagcagtaa

SEQ ID NO: 220703 - DNA, 25 bp, Artificial
  probe
  misc_feature (1)..(25): SEQ ID NO: 2526; WAN024FTR_at; Start 66; Stop 90
tataccaacaatattatctgcaaag

SEQ ID NO: 220704 - DNA, 25 bp, Artificial
  probe
  misc_feature (1)..(25): SEQ ID NO: 2526; WAN024FTR_at; Start 417; Stop 441
taacgaattttcgatgattcagaca

SEQ ID NO: 220705 - DNA, 25 bp, Artificial
  probe
  misc_feature (1)..(25): SEQ ID NO: 2526; WAN024FTR_at; Start 170; Stop 194
gaaattaccctgatattattcgtgt

SEQ ID NO: 220706 - DNA, 25 bp, Artificial
  probe
  misc_feature (1)..(25): SEQ ID NO: 2526; WAN024FTR_at; Start 483; Stop 507
tagaaccgtaggaatgcacactatg

SEQ ID NO: 220707 - DNA, 25 bp, Artificial
  probe
  misc_feature (1)..(25): SEQ ID NO: 2526; WAN024FTR_at; Start 280; Stop 304
gcagatgattgggttgatacagaaa

SEQ ID NO: 220708 - DNA, 25 bp, Artificial
  probe
  misc_feature (1)..(25): SEQ ID NO: 2526; WAN024FTR_at; Start 518; Stop 542
ccaagctgttaaaagaaaatcaagt

SEQ ID NO: 220709 - DNA, 25 bp, Artificial
  probe
  misc_feature (1)..(25): SEQ ID NO: 2526; WAN024FTR_at; Start 50; Stop 74
aatatttaccagatactataccaac

SEQ ID NO: 220710 - DNA, 25 bp, Artificial
  probe
  misc_feature (1)..(25): SEQ ID NO: 2526; WAN024FTR_at; Start 744; Stop 768
tcaaacgaaacttggatttggtcgc

SEQ ID NO: 220711 - DNA, 25 bp, Artificial
  probe
  misc_feature (1)..(25): SEQ ID NO: 2526; WAN024FTR_at; Start 23; Stop 47
tagcagtgccatcatacaatgcgga

SEQ ID NO: 220712 - DNA, 25 bp, Artificial
  probe
  misc_feature (1)..(25): SEQ ID NO: 2526; WAN024FTR_at; Start 792; Stop 816
aataaatcttataaatcagcagtgg

SEQ ID NO: 220713 - DNA, 25 bp, Artificial
  probe
  misc_feature (1)..(25): SEQ ID NO: 2526; WAN024FTR_at; Start 160; Stop 184
gaattcgagcgaaattaccctgata

SEQ ID NO: 220714 - DNA, 25 bp, Artificial
  probe
  misc_feature (1)..(25): SEQ ID NO: 2526; WAN024FTR_at; Start 939; Stop 963
tgtcagaaaaagtcgttaccattta

SEQ ID NO: 220715 - DNA, 25 bp, Artificial
  probe
  misc_feature (1)..(25): SEQ ID NO: 2526; WAN024FTR_at; Start 119; Stop 143
taaatgatggttcgagtgatggtac

SEQ ID NO: 220716 - DNA, 25 bp, Artificial
  probe
  misc_feature (1)..(25): SEQ ID NO: 2526; WAN024FTR_at; Start 432; Stop 456
gattcagacagataaagtgtaccag

SEQ ID NO: 220717 - DNA, 25 bp, Artificial
  probe
  misc_feature (1)..(25): SEQ ID NO: 2526; WAN024FTR_at; Start 807; Stop 831
tcagcagtggaatatctatttcaat

SEQ ID NO: 220718 - DNA, 25 bp, Artificial
  probe
  misc_feature (1)..(25): SEQ ID NO: 2526; WAN024FTR_at; Start 576; Stop 600
ggaatatatcacctatgttctacca

SEQ ID NO: 220719 - DNA, 25 bp, Artificial
  probe
  misc_feature (1)..(25): SEQ ID NO: 5046; WAN024FTS_at; Start 665; Stop 689
taggaacagagacacaaagcattag

SEQ ID NO: 220720 - DNA, 25 bp, Artificial
  probe
  misc_feature (1)..(25): SEQ ID NO: 5046; WAN024FTS_at; Start 66; Stop 90
ttatttacaagagacgatgccgacg

SEQ ID NO: 220721 - DNA, 25 bp, Artificial
  probe
  misc_feature (1)..(25): SEQ ID NO: 5046; WAN024FTS_at; Start 149; Stop 173
cagacagaaccgaagaaatagcaag

SEQ ID NO: 220722 - DNA, 25 bp, Artificial
  probe
  misc_feature (1)..(25): SEQ ID NO: 5046; WAN024FTS_at; Start 210; Stop 234
tataagtaaggaaaactgtggtcac

SEQ ID NO: 220723 - DNA, 25 bp, Artificial
  probe
  misc_feature (1)..(25): SEQ ID NO: 5046; WAN024FTS_at; Start 495; Stop 519
taaacaaacggtaggaatgcattcc

SEQ ID NO: 220724 - DNA, 25 bp, Artificial
  probe
  misc_feature (1)..(25): SEQ ID NO: 5046; WAN024FTS_at; Start 754; Stop 778
tataatcaaatgagatctagcgctg

SEQ ID NO: 220725 - DNA, 25 bp, Artificial
  probe
  misc_feature (1)..(25): SEQ ID NO: 5046; WAN024FTS_at; Start 396; Stop 420
gaattatcgaggtgatatagagcgt

SEQ ID NO: 220726 - DNA, 25 bp, Artificial
  probe
  misc_feature (1)..(25): SEQ ID NO: 5046; WAN024FTS_at; Start 469; Stop 493
tctgcagaagaattctatacacgaa

SEQ ID NO: 220727 - DNA, 25 bp, Artificial
  probe
  misc_feature (1)..(25): SEQ ID NO: 5046; WAN024FTS_at; Start 528; Stop 552
gaaaacgagtcttttgcaagagaac

SEQ ID NO: 220728 - DNA, 25 bp, Artificial
  probe
  misc_feature (1)..(25): SEQ ID NO: 5046; WAN024FTS_at; Start 711; Stop 735
tcgtgatatgcataaacaagtgatc

SEQ ID NO: 220729 - DNA, 25 bp, Artificial
  probe
  misc_feature (1)..(25): SEQ ID NO: 5046; WAN024FTS_at; Start 255; Stop 279
gattgagaatgctgttggtaattac

SEQ ID NO: 220730 - DNA, 25 bp, Artificial
  probe
  misc_feature (1)..(25): SEQ ID NO: 5046; WAN024FTS_at; Start 359; Stop 383
tggatcaagttttatcaccatatga

SEQ ID NO: 220731 - DNA, 25 bp, Artificial
  probe
  misc_feature (1)..(25): SEQ ID NO: 5046; WAN024FTS_at; Start 164; Stop 188
aaatagcaagacaattcgagagaga

SEQ ID NO: 220732 - DNA, 25 bp, Artificial
  probe
  misc_feature (1)..(25): SEQ ID NO: 5046; WAN024FTS_at; Start 279; Stop 303
ctttaaagtggtagatgcagatgat

SEQ ID NO: 220733 - DNA, 25 bp, Artificial
  probe
  misc_feature (1)..(25): SEQ ID NO: 5046; WAN024FTS_at; Start 226; Stop 250
tgtggtcacggttcggcagtaaatg

SEQ ID NO: 220734 - DNA, 25 bp, Artificial
  probe
  misc_feature (1)..(25): SEQ ID NO: 5046; WAN024FTS_at; Start 770; Stop 794
ctagcgctgttttaaggagaataac

SEQ ID NO: 220735 - DNA, 25 bp, Artificial
  probe
  misc_feature (1)..(25): SEQ ID NO: 5046; WAN024FTS_at; Start 295; Stop 319
gcagatgattgggtgaacaccaata

SEQ ID NO: 220736 - DNA, 25 bp, Artificial
  probe
  misc_feature (1)..(25): SEQ ID NO: 5046; WAN024FTS_at; Start 559; Stop 583
cggctgtctgaaaaaatgttctatg

SEQ ID NO: 220737 - DNA, 25 bp, Artificial
  probe
  misc_feature (1)..(25): SEQ ID NO: 5046; WAN024FTS_at; Start 453; Stop 477
gaacgaggtgatctattctgcagaa

SEQ ID NO: 220738 - DNA, 25 bp, Artificial
  probe
  misc_feature (1)..(25): SEQ ID NO: 5046; WAN024FTS_at; Start 606; Stop 630
tatgcttccatatgtaaaaaaggtt

SEQ ID NO: 220739 - DNA, 25 bp, Artificial
  probe
  misc_feature (1)..(25): SEQ ID NO: 5046; WAN024FTS_at; Start 650; Stop 674
tctatagatatcgtctaggaacaga

SEQ ID NO: 220740 - DNA, 25 bp, Artificial
  probe
  misc_feature (1)..(25): SEQ ID NO: 5046; WAN024FTS_at; Start 544; Stop 568
caagagaacaatattcggctgtctg

SEQ ID NO: 220741 - DNA, 25 bp, Artificial
  probe
  misc_feature (1)..(25): SEQ ID NO: 5046; WAN024FTS_at; Start 677; Stop 701
cacaaagcattagtatggcgagtta

SEQ ID NO: 220742 - DNA, 25 bp, Artificial
  probe
  misc_feature (1)..(25): SEQ ID NO: 5046; WAN024FTS_at; Start 81; Stop 105
gatgccgacgatactttctgctaag

SEQ ID NO: 220743 - DNA, 25 bp, Artificial
  probe
  misc_feature (1)..(25): SEQ ID NO: 5046; WAN024FTS_at; Start 895; Stop 919
tggctaataaaagaaggacggataa

SEQ ID NO: 220744 - DNA, 25 bp, Artificial
  probe
  misc_feature (1)..(25): SEQ ID NO: 5046; WAN024FTS_at; Start 342; Stop 366
tctatctgaggtggatgtggatcaa

SEQ ID NO: 220745 - DNA, 25 bp, Artificial
  probe
  misc_feature (1)..(25): SEQ ID NO: 5046; WAN024FTS_at; Start 38; Stop 62
tagttgtaccatcatataatgcaga

SEQ ID NO: 220746 - DNA, 25 bp, Artificial
  probe
  misc_feature (1)..(25): SEQ ID NO: 5046; WAN024FTS_at; Start 513; Stop 537
gcattccattactgtgaaaacgagt

SEQ ID NO: 220747 - DNA, 25 bp, Artificial
  probe
  misc_feature (1)..(25): SEQ ID NO: 5046; WAN024FTS_at; Start 869; Stop 893
acagcgagtgttttgaatttgataa

SEQ ID NO: 220748 - DNA, 25 bp, Artificial
  probe
  misc_feature (1)..(25): SEQ ID NO: 5046; WAN024FTS_at; Start 132; Stop 156
tgtaaacgatggttctacagacaga

SEQ ID NO: 220749 - DNA, 25 bp, Artificial
  probe
  misc_feature (1)..(25): SEQ ID NO: 5046; WAN024FTS_at; Start 809; Stop 833
taaatttaataagacagcaatggat

SEQ ID NO: 220750 - DNA, 25 bp, Artificial
  probe
  misc_feature (1)..(25): SEQ ID NO: 5046; WAN024FTS_at; Start 94; Stop 118
ctttctgctaagaatatagagaggg

SEQ ID NO: 220751 - DNA, 25 bp, Artificial
  probe
  misc_feature (1)..(25): SEQ ID NO: 5046; WAN024FTS_at; Start 411; Stop 435
tatagagcgtgaagaagagtgcaac

SEQ ID NO: 220752 - DNA, 25 bp, Artificial
  probe
  misc_feature (1)..(25): SEQ ID NO: 5046; WAN024FTS_at; Start 179; Stop 203
tcgagagagaatatgagggaattgt

SEQ ID NO: 220753 - DNA, 25 bp, Artificial
  probe
  misc_feature (1)..(25): SEQ ID NO: 6516; WAN024FTT_at; Start 388; Stop 412
tatgcacacacgctagatgctagcc

SEQ ID NO: 220754 - DNA, 25 bp, Artificial
  probe
  misc_feature (1)..(25): SEQ ID NO: 6516; WAN024FTT_at; Start 233; Stop 257
gccgatatttcacgaagaaaactca

SEQ ID NO: 220755 - DNA, 25 bp, Artificial
  probe
  misc_feature (1)..(25): SEQ ID NO: 6516; WAN024FTT_at; Start 43; Stop 67
gagatgccgcaaaataaagaattgt

SEQ ID NO: 220756 - DNA, 25 bp, Artificial
  probe
  misc_feature (1)..(25): SEQ ID NO: 6516; WAN024FTT_at; Start 480; Stop 504
tatgaaacaacgtagtggctatatg

SEQ ID NO: 220757 - DNA, 25 bp, Artificial
  probe
  misc_feature (1)..(25): SEQ ID NO: 6516; WAN024FTT_at; Start 170; Stop 194
taacaggtttatattgggcatggaa

SEQ ID NO: 220758 - DNA, 25 bp, Artificial
  probe
  misc_feature (1)..(25): SEQ ID NO: 6516; WAN024FTT_at; Start 583; Stop 607
gatcagattaatctttcagagttaa

SEQ ID NO: 220759 - DNA, 25 bp, Artificial
  probe
  misc_feature (1)..(25): SEQ ID NO: 6516; WAN024FTT_at; Start 186; Stop 210
ggcatggaagaatctagattgcgat

SEQ ID NO: 220760 - DNA, 25 bp, Artificial
  probe
  misc_feature (1)..(25): SEQ ID NO: 6516; WAN024FTT_at; Start 540; Stop 564
taattattttgaatggctgtttccg

SEQ ID NO: 220761 - DNA, 25 bp, Artificial
  probe
  misc_feature (1)..(25): SEQ ID NO: 6516; WAN024FTT_at; Start 454; Stop 478
gaataccttgattcatttgataaag

SEQ ID NO: 220762 - DNA, 25 bp, Artificial
  probe
  misc_feature (1)..(25): SEQ ID NO: 6516; WAN024FTT_at; Start 107; Stop 131
tgggatatcaaggagataatactgg

SEQ ID NO: 220763 - DNA, 25 bp, Artificial
  probe
  misc_feature (1)..(25): SEQ ID NO: 6516; WAN024FTT_at; Start 624; Stop 648
tctttttggtcgtgtaagtgaacta

SEQ ID NO: 220764 - DNA, 25 bp, Artificial
  probe
  misc_feature (1)..(25): SEQ ID NO: 6516; WAN024FTT_at; Start 375; Stop 399
tctatgttctcattatgcacacacg

SEQ ID NO: 220765 - DNA, 25 bp, Artificial
  probe
  misc_feature (1)..(25): SEQ ID NO: 6516; WAN024FTT_at; Start 474; Stop 498
taaagttatgaaacaacgtagtggc

SEQ ID NO: 220766 - DNA, 25 bp, Artificial
  probe
  misc_feature (1)..(25): SEQ ID NO: 6516; WAN024FTT_at; Start 643; Stop 667
gaactattattcaacgtatggctag

SEQ ID NO: 220767 - DNA, 25 bp, Artificial
  probe
  misc_feature (1)..(25): SEQ ID NO: 6516; WAN024FTT_at; Start 14; Stop 38
aaattatagttgcaactcataagag

SEQ ID NO: 220768 - DNA, 25 bp, Artificial
  probe
  misc_feature (1)..(25): SEQ ID NO: 6516; WAN024FTT_at; Start 196; Stop 220
aatctagattgcgattatcttggac

SEQ ID NO: 220769 - DNA, 25 bp, Artificial
  probe
  misc_feature (1)..(25): SEQ ID NO: 6516; WAN024FTT_at; Start 91; Stop 115
gaaggaaaagatgatttgggatatc

SEQ ID NO: 220770 - DNA, 25 bp, Artificial
  probe
  misc_feature (1)..(25): SEQ ID NO: 6516; WAN024FTT_at; Start 323; Stop 347
tgagaaaaggagatataatagttcc

SEQ ID NO: 220771 - DNA, 25 bp, Artificial
  probe
  misc_feature (1)..(25): SEQ ID NO: 6516; WAN024FTT_at; Start 428; Stop 452
gaaaagtcattgagaagcaacaacc

SEQ ID NO: 220772 - DNA, 25 bp, Artificial
  probe
  misc_feature (1)..(25): SEQ ID NO: 6516; WAN024FTT_at; Start 30; Stop 54
tcataagagttttgagatgccgcaa

SEQ ID NO: 220773 - DNA, 25 bp, Artificial
  probe
  misc_feature (1)..(25): SEQ ID NO: 6516; WAN024FTT_at; Start 682; Stop 706
tctctagtagaagttccatttatgt

SEQ ID NO: 220774 - DNA, 25 bp, Artificial
  probe
  misc_feature (1)..(25): SEQ ID NO: 6516; WAN024FTT_at; Start 58; Stop 82
aaagaattgtatttcccagtccatg

SEQ ID NO: 220775 - DNA, 25 bp, Artificial
  probe
  misc_feature (1)..(25): SEQ ID NO: 6516; WAN024FTT_at; Start 657; Stop 681
cgtatggctagagaagaatttgtat

SEQ ID NO: 220776 - DNA, 25 bp, Artificial
  probe
  misc_feature (1)..(25): SEQ ID NO: 6516; WAN024FTT_at; Start 611; Stop 635
catttgaggcacgtctttttggtcg

SEQ ID NO: 220777 - DNA, 25 bp, Artificial
  probe
  misc_feature (1)..(25): SEQ ID NO: 6516; WAN024FTT_at; Start 401; Stop 425
tagatgctagccatctagatttggc

SEQ ID NO: 220778 - DNA, 25 bp, Artificial
  probe
  misc_feature (1)..(25): SEQ ID NO: 6516; WAN024FTT_at; Start 554; Stop 578
ggctgtttccgattttagattgtat

SEQ ID NO: 220779 - DNA, 25 bp, Artificial
  probe
  misc_feature (1)..(25): SEQ ID NO: 6516; WAN024FTT_at; Start 418; Stop 442
gatttggctagaaaagtcattgaga

SEQ ID NO: 220780 - DNA, 25 bp, Artificial
  probe
  misc_feature (1)..(25): SEQ ID NO: 6516; WAN024FTT_at; Start 598; Stop 622
tcagagttaactgcatttgaggcac

SEQ ID NO: 220781 - DNA, 25 bp, Artificial
  probe
  misc_feature (1)..(25): SEQ ID NO: 6516; WAN024FTT_at; Start 211; Stop 235
tatcttggactagttcattaccgcc

SEQ ID NO: 220782 - DNA, 25 bp, Artificial
  probe
  misc_feature (1)..(25): SEQ ID NO: 6516; WAN024FTT_at; Start 145; Stop 169
cagttaaacccttattactgtgaat

SEQ ID NO: 220783 - DNA, 25 bp, Artificial
  probe
  misc_feature (1)..(25): SEQ ID NO: 6516; WAN024FTT_at; Start 307; Stop 331
gaaattgaattgcttttgagaaaag

SEQ ID NO: 220784 - DNA, 25 bp, Artificial
  probe
  misc_feature (1)..(25): SEQ ID NO: 6516; WAN024FTT_at; Start 225; Stop 249
tcattaccgccgatatttcacgaag

SEQ ID NO: 220785 - DNA, 25 bp, Artificial
  probe
  misc_feature (1)..(25): SEQ ID NO: 6516; WAN024FTT_at; Start 283; Stop 307
gatgaagtaattttaaatcaggaag

SEQ ID NO: 220786 - DNA, 25 bp, Artificial
  probe
  misc_feature (1)..(25): SEQ ID NO: 6516; WAN024FTT_at; Start 439; Stop 463
gagaagcaacaacctgaataccttg

SEQ ID NO: 220787 - DNA, 25 bp, Artificial
  probe
  misc_feature (1)..(25): SEQ ID NO: 6902; WAN024FTU_at; Start 744; Stop 768
taaagcacttactgtacgttatgtc

SEQ ID NO: 220788 - DNA, 25 bp, Artificial
  probe
  misc_feature (1)..(25): SEQ ID NO: 6902; WAN024FTU_at; Start 274; Stop 298
gattactatgatcgtagaactgttg

SEQ ID NO: 220789 - DNA, 25 bp, Artificial
  probe
  misc_feature (1)..(25): SEQ ID NO: 6902; WAN024FTU_at; Start 552; Stop 576
ggctgtctcttttgagcatatcgga

SEQ ID NO: 220790 - DNA, 25 bp, Artificial
  probe
  misc_feature (1)..(25): SEQ ID NO: 6902; WAN024FTU_at; Start 137; Stop 161
gaagaatatgtgataagtatgccca

SEQ ID NO: 220791 - DNA, 25 bp, Artificial
  probe
  misc_feature (1)..(25): SEQ ID NO: 6902; WAN024FTU_at; Start 427; Stop 451
cgctatacagctttgaaggagatgt

SEQ ID NO: 220792 - DNA, 25 bp, Artificial
  probe
  misc_feature (1)..(25): SEQ ID NO: 6902; WAN024FTU_at; Start 115; Stop 139
gatggctctactgatgattctggaa

SEQ ID NO: 220793 - DNA, 25 bp, Artificial
  probe
  misc_feature (1)..(25): SEQ ID NO: 6902; WAN024FTU_at; Start 509; Stop 533
tgatgaagtttccttttccagaggg

SEQ ID NO: 220794 - DNA, 25 bp, Artificial
  probe
  misc_feature (1)..(25): SEQ ID NO: 6902; WAN024FTU_at; Start 68; Stop 92
gcttaattaatcaatcgtacaagga

SEQ ID NO: 220795 - DNA, 25 bp, Artificial
  probe
  misc_feature (1)..(25): SEQ ID NO: 6902; WAN024FTU_at; Start 801; Stop 825
tagttcagagatgtattcggatgtc

SEQ ID NO: 220796 - DNA, 25 bp, Artificial
  probe
  misc_feature (1)..(25): SEQ ID NO: 6902; WAN024FTU_at; Start 166; Stop 190
gatgaccgtattagagtcttgcata

SEQ ID NO: 220797 - DNA, 25 bp, Artificial
  probe
  misc_feature (1)..(25): SEQ ID NO: 6902; WAN024FTU_at; Start 785; Stop 809
tagtacatgctatgcttagttcaga

SEQ ID NO: 220798 - DNA, 25 bp, Artificial
  probe
  misc_feature (1)..(25): SEQ ID NO: 6902; WAN024FTU_at; Start 626; Stop 650
gaagacctggaagtattgtcaattc

SEQ ID NO: 220799 - DNA, 25 bp, Artificial
  probe
  misc_feature (1)..(25): SEQ ID NO: 6902; WAN024FTU_at; Start 841; Stop 865
gaatacactagatacttcaacgata

SEQ ID NO: 220800 - DNA, 25 bp, Artificial
  probe
  misc_feature (1)..(25): SEQ ID NO: 6902; WAN024FTU_at; Start 297; Stop 321
tgagtatttagtgcaacttcaaaag

SEQ ID NO: 220801 - DNA, 25 bp, Artificial
  probe
  misc_feature (1)..(25): SEQ ID NO: 6902; WAN024FTU_at; Start 230; Stop 254
taaagtttgcttctgctgagtggat

SEQ ID NO: 220802 - DNA, 25 bp, Artificial
  probe
  misc_feature (1)..(25): SEQ ID NO: 6902; WAN024FTU_at; Start 6; Stop 30
gaaagtttcgattgttgttccagta

SEQ ID NO: 220803 - DNA, 25 bp, Artificial
  probe
  misc_feature (1)..(25): SEQ ID NO: 6902; WAN024FTU_at; Start 21; Stop 45
tgttccagtatacaacgttgaagat

SEQ ID NO: 220804 - DNA, 25 bp, Artificial
  probe
  misc_feature (1)..(25): SEQ ID NO: 6902; WAN024FTU_at; Start 907; Stop 931
tacctgatgcttttggtttctccaa

SEQ ID NO: 220805 - DNA, 25 bp, Artificial
  probe
  misc_feature (1)..(25): SEQ ID NO: 6902; WAN024FTU_at; Start 182; Stop 206
tcttgcatattgagaatggaggcct

SEQ ID NO: 220806 - DNA, 25 bp, Artificial
  probe
  misc_feature (1)..(25): SEQ ID NO: 6902; WAN024FTU_at; Start 195; Stop 219
gaatggaggcctttctaatgctcga

SEQ ID NO: 220807 - DNA, 25 bp, Artificial
  probe
  misc_feature (1)..(25): SEQ ID NO: 6902; WAN024FTU_at; Start 413; Stop 437
ctttgaaattagatcgctatacagc

SEQ ID NO: 220808 - DNA, 25 bp, Artificial
  probe
  misc_feature (1)..(25): SEQ ID NO: 6902; WAN024FTU_at; Start 536; Stop 560
tgctctatgaagatttggctgtctc

SEQ ID NO: 220809 - DNA, 25 bp, Artificial
  probe
  misc_feature (1)..(25): SEQ ID NO: 6902; WAN024FTU_at; Start 570; Stop 594
tatcggagcatgcaatgaaattgcc

SEQ ID NO: 220810 - DNA, 25 bp, Artificial
  probe
  misc_feature (1)..(25): SEQ ID NO: 6902; WAN024FTU_at; Start 591; Stop 615
tgccgtaggatgtatcaatttatac

SEQ ID NO: 220811 - DNA, 25 bp, Artificial
  probe
  misc_feature (1)..(25): SEQ ID NO: 6902; WAN024FTU_at; Start 321; Stop 345
gaagtatgctgttgatcttgtggca

SEQ ID NO: 220812 - DNA, 25 bp, Artificial
  probe
  misc_feature (1)..(25): SEQ ID NO: 6902; WAN024FTU_at; Start 521; Stop 545
cttttccagagggtatgctctatga

SEQ ID NO: 220813 - DNA, 25 bp, Artificial
  probe
  misc_feature (1)..(25): SEQ ID NO: 6902; WAN024FTU_at; Start 867; Stop 891
tattcctaatccaaatataacaggg

SEQ ID NO: 220814 - DNA, 25 bp, Artificial
  probe
  misc_feature (1)..(25): SEQ ID NO: 6902; WAN024FTU_at; Start 611; Stop 635
tatacaaatattatcgaagacctgg

SEQ ID NO: 220815 - DNA, 25 bp, Artificial
  probe
  misc_feature (1)..(25): SEQ ID NO: 6902; WAN024FTU_at; Start 458; Stop 482
gaaatatagttggaactcatccagg

SEQ ID NO: 220816 - DNA, 25 bp, Artificial
  probe
  misc_feature (1)..(25): SEQ ID NO: 6902; WAN024FTU_at; Start 350; Stop 374
ccgtcatcgaagttagggacttcca

SEQ ID NO: 220817 - DNA, 25 bp, Artificial
  probe
  misc_feature (1)..(25): SEQ ID NO: 6902; WAN024FTU_at; Start 701; Stop 725
gagaatttgttcagagagattatcc

SEQ ID NO: 220818 - DNA, 25 bp, Artificial
  probe
  misc_feature (1)..(25): SEQ ID NO: 6902; WAN024FTU_at; Start 336; Stop 360
tcttgtggcaacttccgtcatcgaa

SEQ ID NO: 220819 - DNA, 25 bp, Artificial
  probe
  misc_feature (1)..(25): SEQ ID NO: 6902; WAN024FTU_at; Start 210; Stop 234
taatgctcgaaatacgggtgtaaag

SEQ ID NO: 220820 - DNA, 25 bp, Artificial
  probe
  misc_feature (1)..(25): SEQ ID NO: 6902; WAN024FTU_at; Start 150; Stop 174
taagtatgcccaagaagatgaccgt

SEQ ID NO: 220821 - DNA, 25 bp, Artificial
  probe
  misc_feature (1)..(25): SEQ ID NO: 6827; WAN024FTV_at; Start 485; Stop 509
tcgataaggtcatgaagcaacgtag

SEQ ID NO: 220822 - DNA, 25 bp, Artificial
  probe
  misc_feature (1)..(25): SEQ ID NO: 6827; WAN024FTV_at; Start 433; Stop 457
gatgttgctcgtgatgtaattaaac

SEQ ID NO: 220823 - DNA, 25 bp, Artificial
  probe
  misc_feature (1)..(25): SEQ ID NO: 6827; WAN024FTV_at; Start 705; Stop 729
agagctaccatttatgtatatggaa

SEQ ID NO: 220824 - DNA, 25 bp, Artificial
  probe
  misc_feature (1)..(25): SEQ ID NO: 6827; WAN024FTV_at; Start 534; Stop 558
tatgaaaaaagatttggcaaatcag

SEQ ID NO: 220825 - DNA, 25 bp, Artificial
  probe
  misc_feature (1)..(25): SEQ ID NO: 6827; WAN024FTV_at; Start 422; Stop 446
gaagtcatcttgatgttgctcgtga

SEQ ID NO: 220826 - DNA, 25 bp, Artificial
  probe
  misc_feature (1)..(25): SEQ ID NO: 6827; WAN024FTV_at; Start 280; Stop 304
tcagattatatcagtatggatgaag

SEQ ID NO: 220827 - DNA, 25 bp, Artificial
  probe
  misc_feature (1)..(25): SEQ ID NO: 6827; WAN024FTV_at; Start 549; Stop 573
ggcaaatcagtatttttcttggtta

SEQ ID NO: 220828 - DNA, 25 bp, Artificial
  probe
  misc_feature (1)..(25): SEQ ID NO: 6827; WAN024FTV_at; Start 411; Stop 435
tactttggatggaagtcatcttgat

SEQ ID NO: 220829 - DNA, 25 bp, Artificial
  probe
  misc_feature (1)..(25): SEQ ID NO: 6827; WAN024FTV_at; Start 354; Stop 378
tttagttcctaagaagaggcgatac

SEQ ID NO: 220830 - DNA, 25 bp, Artificial
  probe
  misc_feature (1)..(25): SEQ ID NO: 6827; WAN024FTV_at; Start 313; Stop 337
tctcgaggtgatttagataatcttc

SEQ ID NO: 220831 - DNA, 25 bp, Artificial
  probe
  misc_feature (1)..(25): SEQ ID NO: 6827; WAN024FTV_at; Start 685; Stop 709
cataaggacattaaaccaaaagagc

SEQ ID NO: 220832 - DNA, 25 bp, Artificial
  probe
  misc_feature (1)..(25): SEQ ID NO: 6827; WAN024FTV_at; Start 774; Stop 798
attcttcgggaaaaaatatggacag

SEQ ID NO: 220833 - DNA, 25 bp, Artificial
  probe
  misc_feature (1)..(25): SEQ ID NO: 6827; WAN024FTV_at; Start 489; Stop 513
taaggtcatgaagcaacgtagtggt

SEQ ID NO: 220834 - DNA, 25 bp, Artificial
  probe
  misc_feature (1)..(25): SEQ ID NO: 6827; WAN024FTV_at; Start 463; Stop 487
agttcagaatatttaacgaccttcg

SEQ ID NO: 220835 - DNA, 25 bp, Artificial
  probe
  misc_feature (1)..(25): SEQ ID NO: 6827; WAN024FTV_at; Start 761; Stop 785
tcttaatggccaaattcttcgggaa

SEQ ID NO: 220836 - DNA, 25 bp, Artificial
  probe
  misc_feature (1)..(25): SEQ ID NO: 6827; WAN024FTV_at; Start 623; Stop 647
caccctttgaagctagactattcgg

SEQ ID NO: 220837 - DNA, 25 bp, Artificial
  probe
  misc_feature (1)..(25): SEQ ID NO: 6827; WAN024FTV_at; Start 669; Stop 693
taatgtgtggttaaaacataaggac

SEQ ID NO: 220838 - DNA, 25 bp, Artificial
  probe
  misc_feature (1)..(25): SEQ ID NO: 6827; WAN024FTV_at; Start 385; Stop 409
gaaacgctctattcacactacgctc

SEQ ID NO: 220839 - DNA, 25 bp, Artificial
  probe
  misc_feature (1)..(25): SEQ ID NO: 6827; WAN024FTV_at; Start 298; Stop 322
gatgaagttgttttatctcgaggtg

SEQ ID NO: 220840 - DNA, 25 bp, Artificial
  probe
  misc_feature (1)..(25): SEQ ID NO: 6827; WAN024FTV_at; Start 439; Stop 463
gctcgtgatgtaattaaacagttaa

SEQ ID NO: 220841 - DNA, 25 bp, Artificial
  probe
  misc_feature (1)..(25): SEQ ID NO: 6827; WAN024FTV_at; Start 577; Stop 601
cctattttagacaagatgtatgagc

SEQ ID NO: 220842 - DNA, 25 bp, Artificial
  probe
  misc_feature (1)..(25): SEQ ID NO: 6827; WAN024FTV_at; Start 607; Stop 631
gatgtatcccagttaacaccctttg

SEQ ID NO: 220843 - DNA, 25 bp, Artificial
  probe
  misc_feature (1)..(25): SEQ ID NO: 6827; WAN024FTV_at; Start 616; Stop 640
cagttaacaccctttgaagctagac

SEQ ID NO: 220844 - DNA, 25 bp, Artificial
  probe
  misc_feature (1)..(25): SEQ ID NO: 6827; WAN024FTV_at; Start 631; Stop 655
gaagctagactattcggtcgtgtta

SEQ ID NO: 220845 - DNA, 25 bp, Artificial
  probe
  misc_feature (1)..(25): SEQ ID NO: 6827; WAN024FTV_at; Start 474; Stop 498
tttaacgaccttcgataaggtcatg

SEQ ID NO: 220846 - DNA, 25 bp, Artificial
  probe
  misc_feature (1)..(25): SEQ ID NO: 6827; WAN024FTV_at; Start 366; Stop 390
gaagaggcgatactatattgaaacg

SEQ ID NO: 220847 - DNA, 25 bp, Artificial
  probe
  misc_feature (1)..(25): SEQ ID NO: 6827; WAN024FTV_at; Start 644; Stop 668
tcggtcgtgttagtgaattattatt

SEQ ID NO: 220848 - DNA, 25 bp, Artificial
  probe
  misc_feature (1)..(25): SEQ ID NO: 6827; WAN024FTV_at; Start 498; Stop 522
gaagcaacgtagtggttacatgttc

SEQ ID NO: 220849 - DNA, 25 bp, Artificial
  probe
  misc_feature (1)..(25): SEQ ID NO: 6827; WAN024FTV_at; Start 568; Stop 592
tggttatttcctattttagacaaga

SEQ ID NO: 220850 - DNA, 25 bp, Artificial
  probe
  misc_feature (1)..(25): SEQ ID NO: 6827; WAN024FTV_at; Start 328; Stop 352
gataatcttctttcccaaaatgacg

SEQ ID NO: 220851 - DNA, 25 bp, Artificial
  probe
  misc_feature (1)..(25): SEQ ID NO: 6827; WAN024FTV_at; Start 372; Stop 396
gcgatactatattgaaacgctctat

SEQ ID NO: 220852 - DNA, 25 bp, Artificial
  probe
  misc_feature (1)..(25): SEQ ID NO: 6827; WAN024FTV_at; Start 400; Stop 424
cactacgctcatactttggatggaa

SEQ ID NO: 220853 - DNA, 25 bp, Artificial
  probe
  misc_feature (1)..(25): SEQ ID NO: 6827; WAN024FTV_at; Start 690; Stop 714
ggacattaaaccaaaagagctacca

SEQ ID NO: 220854 - DNA, 25 bp, Artificial
  probe
  misc_feature (1)..(25): SEQ ID NO: 6827; WAN024FTV_at; Start 594; Stop 618
gtatgagcaaatagatgtatcccag

SEQ ID NO: 220855 - DNA, 25 bp, Artificial
  probe
  misc_feature (1)..(25): SEQ ID NO: 690; WAN024FTW_at; Start 439; Stop 463
gaaatgaagaatccagaatatctct

SEQ ID NO: 220856 - DNA, 25 bp, Artificial
  probe
  misc_feature (1)..(25): SEQ ID NO: 690; WAN024FTW_at; Start 638; Stop 662
taagtgagttgttatttaacgtatg

SEQ ID NO: 220857 - DNA, 25 bp, Artificial
  probe
  misc_feature (1)..(25): SEQ ID NO: 690; WAN024FTW_at; Start 479; Stop 503
taatggaacaaagaagcgggtacat

SEQ ID NO: 220858 - DNA, 25 bp, Artificial
  probe
  misc_feature (1)..(25): SEQ ID NO: 690; WAN024FTW_at; Start 444; Stop 468
gaagaatccagaatatctctctagt

SEQ ID NO: 220859 - DNA, 25 bp, Artificial
  probe
  misc_feature (1)..(25): SEQ ID NO: 690; WAN024FTW_at; Start 614; Stop 638
ttgaagctagattatttggaagagt

SEQ ID NO: 220860 - DNA, 25 bp, Artificial
  probe
  misc_feature (1)..(25): SEQ ID NO: 690; WAN024FTW_at; Start 599; Stop 623
cagggttaactgattttgaagctag

SEQ ID NO: 220861 - DNA, 25 bp, Artificial
  probe
  misc_feature (1)..(25): SEQ ID NO: 690; WAN024FTW_at; Start 626; Stop 650
tatttggaagagtaagtgagttgtt

SEQ ID NO: 220862 - DNA, 25 bp, Artificial
  probe
  misc_feature (1)..(25): SEQ ID NO: 690; WAN024FTW_at; Start 550; Stop 574
tcttggctgtttcctatcttggata

SEQ ID NO: 220863 - DNA, 25 bp, Artificial
  probe
  misc_feature (1)..(25): SEQ ID NO: 690; WAN024FTW_at; Start 379; Stop 403
tattctcattacgaccatacttttg

SEQ ID NO: 220864 - DNA, 25 bp, Artificial
  probe
  misc_feature (1)..(25): SEQ ID NO: 690; WAN024FTW_at; Start 501; Stop 525
catgtttaacatgttcattatgaaa

SEQ ID NO: 220865 - DNA, 25 bp, Artificial
  probe
  misc_feature (1)..(25): SEQ ID NO: 690; WAN024FTW_at; Start 681; Stop 705
aactccaaaggaagtgccgtttatg

SEQ ID NO: 220866 - DNA, 25 bp, Artificial
  probe
  misc_feature (1)..(25): SEQ ID NO: 690; WAN024FTW_at; Start 687; Stop 711
aaaggaagtgccgtttatgtatatg

SEQ ID NO: 220867 - DNA, 25 bp, Artificial
  probe
  misc_feature (1)..(25): SEQ ID NO: 690; WAN024FTW_at; Start 653; Stop 677
ttaacgtatggttggtgaagagcaa

SEQ ID NO: 220868 - DNA, 25 bp, Artificial
  probe
  misc_feature (1)..(25): SEQ ID NO: 690; WAN024FTW_at; Start 741; Stop 765
ttcatttttgatggcgaaatttttc

SEQ ID NO: 220869 - DNA, 25 bp, Artificial
  probe
  misc_feature (1)..(25): SEQ ID NO: 690; WAN024FTW_at; Start 733; Stop 757
aaagggatttcatttttgatggcga

SEQ ID NO: 220870 - DNA, 25 bp, Artificial
  probe
  misc_feature (1)..(25): SEQ ID NO: 690; WAN024FTW_at; Start 541; Stop 565
gattatttttcttggctgtttccta

SEQ ID NO: 220871 - DNA, 25 bp, Artificial
  probe
  misc_feature (1)..(25): SEQ ID NO: 690; WAN024FTW_at; Start 323; Stop 347
tagagaactcagatatcattgttcc

SEQ ID NO: 220872 - DNA, 25 bp, Artificial
  probe
  misc_feature (1)..(25): SEQ ID NO: 690; WAN024FTW_at; Start 675; Stop 699
caatttaactccaaaggaagtgccg

SEQ ID NO: 220873 - DNA, 25 bp, Artificial
  probe
  misc_feature (1)..(25): SEQ ID NO: 690; WAN024FTW_at; Start 388; Stop 412
tacgaccatacttttgatggttctc

SEQ ID NO: 220874 - DNA, 25 bp, Artificial
  probe
  misc_feature (1)..(25): SEQ ID NO: 690; WAN024FTW_at; Start 409; Stop 433
tctcatttagatctagctagaaaaa

SEQ ID NO: 220875 - DNA, 25 bp, Artificial
  probe
  misc_feature (1)..(25): SEQ ID NO: 690; WAN024FTW_at; Start 567; Stop 591
cttggatagtatgtatgaaagtatg

SEQ ID NO: 220876 - DNA, 25 bp, Artificial
  probe
  misc_feature (1)..(25): SEQ ID NO: 690; WAN024FTW_at; Start 562; Stop 586
cctatcttggatagtatgtatgaaa

SEQ ID NO: 220877 - DNA, 25 bp, Artificial
  probe
  misc_feature (1)..(25): SEQ ID NO: 690; WAN024FTW_at; Start 334; Stop 358
gatatcattgttcctaaaagaagaa

SEQ ID NO: 220878 - DNA, 25 bp, Artificial
  probe
  misc_feature (1)..(25): SEQ ID NO: 690; WAN024FTW_at; Start 403; Stop 427
gatggttctcatttagatctagcta

SEQ ID NO: 220879 - DNA, 25 bp, Artificial
  probe
  misc_feature (1)..(25): SEQ ID NO: 690; WAN024FTW_at; Start 211; Stop 235
tatctgggtttagtacattatcgtc

SEQ ID NO: 220880 - DNA, 25 bp, Artificial
  probe
  misc_feature (1)..(25): SEQ ID NO: 690; WAN024FTW_at; Start 195; Stop 219
aaacttagattgtgattatctgggt

SEQ ID NO: 220881 - DNA, 25 bp, Artificial
  probe
  misc_feature (1)..(25): SEQ ID NO: 690; WAN024FTW_at; Start 487; Stop 511
caaagaagcgggtacatgtttaaca

SEQ ID NO: 220882 - DNA, 25 bp, Artificial
  probe
  misc_feature (1)..(25): SEQ ID NO: 690; WAN024FTW_at; Start 471; Stop 495
tgataaggtaatggaacaaagaagc

SEQ ID NO: 220883 - DNA, 25 bp, Artificial
  probe
  misc_feature (1)..(25): SEQ ID NO: 690; WAN024FTW_at; Start 428; Stop 452
gaaaaatgattgaaatgaagaatcc

SEQ ID NO: 220884 - DNA, 25 bp, Artificial
  probe
  misc_feature (1)..(25): SEQ ID NO: 690; WAN024FTW_at; Start 583; Stop 607
gaaagtatggatttatcagggttaa

SEQ ID NO: 220885 - DNA, 25 bp, Artificial
  probe
  misc_feature (1)..(25): SEQ ID NO: 690; WAN024FTW_at; Start 215; Stop 239
tgggtttagtacattatcgtcgtta

SEQ ID NO: 220886 - DNA, 25 bp, Artificial
  probe
  misc_feature (1)..(25): SEQ ID NO: 690; WAN024FTW_at; Start 455; Stop 479
aatatctctctagttttgataaggt

SEQ ID NO: 220887 - DNA, 25 bp, Artificial
  probe
  misc_feature (1)..(25): SEQ ID NO: 690; WAN024FTW_at; Start 370; Stop 394
gaaactctttattctcattacgacc

SEQ ID NO: 220888 - DNA, 25 bp, Artificial
  probe
  misc_feature (1)..(25): SEQ ID NO: 690; WAN024FTW_at; Start 662; Stop 686
ggttggtgaagagcaatttaactcc

SEQ ID NO: 220889 - DNA, 25 bp, Artificial
  probe
  misc_feature (1)..(25): SEQ ID NO: 689; WAN024FTX_at; Start 232; Stop 256
cgtagatattttacttcaagacgtc

SEQ ID NO: 220890 - DNA, 25 bp, Artificial
  probe
  misc_feature (1)..(25): SEQ ID NO: 689; WAN024FTX_at; Start 291; Stop 315
cattttatctaaatcagaggttgaa

SEQ ID NO: 220891 - DNA, 25 bp, Artificial
  probe
  misc_feature (1)..(25): SEQ ID NO: 689; WAN024FTX_at; Start 264; Stop 288
tcgtgaagatctcaacatggatagt

SEQ ID NO: 220892 - DNA, 25 bp, Artificial
  probe
  misc_feature (1)..(25): SEQ ID NO: 689; WAN024FTX_at; Start 660; Stop 684
ttggttagctaagcaaaatttgcgc

SEQ ID NO: 220893 - DNA, 25 bp, Artificial
  probe
  misc_feature (1)..(25): SEQ ID NO: 689; WAN024FTX_at; Start 334; Stop 358
gatgttgttgttccacgtaaaagaa

SEQ ID NO: 220894 - DNA, 25 bp, Artificial
  probe
  misc_feature (1)..(25): SEQ ID NO: 689; WAN024FTX_at; Start 430; Stop 454
caaatcattagtgagttaaatccgg

SEQ ID NO: 220895 - DNA, 25 bp, Artificial
  probe
  misc_feature (1)..(25): SEQ ID NO: 689; WAN024FTX_at; Start 706; Stop 730
tatatggagaaaatcaacttacttg

SEQ ID NO: 220896 - DNA, 25 bp, Artificial
  probe
  misc_feature (1)..(25): SEQ ID NO: 689; WAN024FTX_at; Start 540; Stop 564
tgcatattgtgagtggttattccca

SEQ ID NO: 220897 - DNA, 25 bp, Artificial
  probe
  misc_feature (1)..(25): SEQ ID NO: 689; WAN024FTX_at; Start 208; Stop 232
gattatcttggattagtacactatc

SEQ ID NO: 220898 - DNA, 25 bp, Artificial
  probe
  misc_feature (1)..(25): SEQ ID NO: 689; WAN024FTX_at; Start 459; Stop 483
tattgatacgtttgataaagtgatg

SEQ ID NO: 220899 - DNA, 25 bp, Artificial
  probe
  misc_feature (1)..(25): SEQ ID NO: 689; WAN024FTX_at; Start 616; Stop 640
gatgcgagattgtttggacgtgtca

SEQ ID NO: 220900 - DNA, 25 bp, Artificial
  probe
  misc_feature (1)..(25): SEQ ID NO: 689; WAN024FTX_at; Start 217; Stop 241
ggattagtacactatcgtagatatt

SEQ ID NO: 220901 - DNA, 25 bp, Artificial
  probe
  misc_feature (1)..(25): SEQ ID NO: 689; WAN024FTX_at; Start 634; Stop 658
cgtgtcagtgaacgcttatttaatg

SEQ ID NO: 220902 - DNA, 25 bp, Artificial
  probe
  misc_feature (1)..(25): SEQ ID NO: 689; WAN024FTX_at; Start 689; Stop 713
aagagacgccttttatttatatgga

SEQ ID NO: 220903 - DNA, 25 bp, Artificial
  probe
  misc_feature (1)..(25): SEQ ID NO: 689; WAN024FTX_at; Start 587; Stop 611
ggttggatattacaggctattcggc

SEQ ID NO: 220904 - DNA, 25 bp, Artificial
  probe
  misc_feature (1)..(25): SEQ ID NO: 689; WAN024FTX_at; Start 474; Stop 498
taaagtgatgaatcgtcgtagcggc

SEQ ID NO: 220905 - DNA, 25 bp, Artificial
  probe
  misc_feature (1)..(25): SEQ ID NO: 689; WAN024FTX_at; Start 42; Stop 66
taaaatacccagtgatacaagtttg

SEQ ID NO: 220906 - DNA, 25 bp, Artificial
  probe
  misc_feature (1)..(25): SEQ ID NO: 689; WAN024FTX_at; Start 674; Stop 698
aaaatttgcgcataaaagagacgcc

SEQ ID NO: 220907 - DNA, 25 bp, Artificial
  probe
  misc_feature (1)..(25): SEQ ID NO: 689; WAN024FTX_at; Start 418; Stop 442
gatgttactcgccaaatcattagtg

SEQ ID NO: 220908 - DNA, 25 bp, Artificial
  probe
  misc_feature (1)..(25): SEQ ID NO: 689; WAN024FTX_at; Start 248; Stop 272
caagacgtcaatcttatcgtgaaga

SEQ ID NO: 220909 - DNA, 25 bp, Artificial
  probe
  misc_feature (1)..(25): SEQ ID NO: 689; WAN024FTX_at; Start 329; Stop 353
actatgatgttgttgttccacgtaa

SEQ ID NO: 220910 - DNA, 25 bp, Artificial
  probe
  misc_feature (1)..(25): SEQ ID NO: 689; WAN024FTX_at; Start 391; Stop 415
gcacatactcatgatcgaagtcatt

SEQ ID NO: 220911 - DNA, 25 bp, Artificial
  probe
  misc_feature (1)..(25): SEQ ID NO: 689; WAN024FTX_at; Start 518; Stop 542
tcatgtcaaaagataatgtgaatgc

SEQ ID NO: 220912 - DNA, 25 bp, Artificial
  probe
  misc_feature (1)..(25): SEQ ID NO: 689; WAN024FTX_at; Start 306; Stop 330
agaggttgaaaaaatgatgctggac

SEQ ID NO: 220913 - DNA, 25 bp, Artificial
  probe
  misc_feature (1)..(25): SEQ ID NO: 689; WAN024FTX_at; Start 407; Stop 431
gaagtcatttagatgttactcgcca

SEQ ID NO: 220914 - DNA, 25 bp, Artificial
  probe
  misc_feature (1)..(25): SEQ ID NO: 689; WAN024FTX_at; Start 552; Stop 576
gtggttattcccaattattaatgag

SEQ ID NO: 220915 - DNA, 25 bp, Artificial
  probe
  misc_feature (1)..(25): SEQ ID NO: 689; WAN024FTX_at; Start 489; Stop 513
tcgtagcggctatatgtttaacatg

SEQ ID NO: 220916 - DNA, 25 bp, Artificial
  probe
  misc_feature (1)..(25): SEQ ID NO: 689; WAN024FTX_at; Start 599; Stop 623
caggctattcggcttttgatgcgag

SEQ ID NO: 220917 - DNA, 25 bp, Artificial
  probe
  misc_feature (1)..(25): SEQ ID NO: 689; WAN024FTX_at; Start 626; Stop 650
tgtttggacgtgtcagtgaacgctt

SEQ ID NO: 220918 - DNA, 25 bp, Artificial
  probe
  misc_feature (1)..(25): SEQ ID NO: 689; WAN024FTX_at; Start 445; Stop 469
ttaaatccggattatattgatacgt

SEQ ID NO: 220919 - DNA, 25 bp, Artificial
  probe
  misc_feature (1)..(25): SEQ ID NO: 689; WAN024FTX_at; Start 271; Stop 295
gatctcaacatggatagtatcattt

SEQ ID NO: 220920 - DNA, 25 bp, Artificial
  probe
  misc_feature (1)..(25): SEQ ID NO: 689; WAN024FTX_at; Start 313; Stop 337
gaaaaaatgatgctggactatgatg

SEQ ID NO: 220921 - DNA, 25 bp, Artificial
  probe
  misc_feature (1)..(25): SEQ ID NO: 689; WAN024FTX_at; Start 580; Stop 604
tataaacggttggatattacaggct

SEQ ID NO: 220922 - DNA, 25 bp, Artificial
  probe
  misc_feature (1)..(25): SEQ ID NO: 689; WAN024FTX_at; Start 743; Stop 767
ccttccttcaagcaaaattctttgg

SEQ ID NO: 220923 - DNA, 25 bp, Artificial
  probe
  misc_feature (1)..(25): SEQ ID NO: 1078; WAN024FTY_at; Start 356; Stop 380
gaaagtactatatagaaaccctcta

SEQ ID NO: 220924 - DNA, 25 bp, Artificial
  probe
  misc_feature (1)..(25): SEQ ID NO: 1078; WAN024FTY_at; Start 406; Stop 430
gctagccacttagacctagctagaa

SEQ ID NO: 220925 - DNA, 25 bp, Artificial
  probe
  misc_feature (1)..(25): SEQ ID NO: 1078; WAN024FTY_at; Start 388; Stop 412
tatgctcataccttggatgctagcc

SEQ ID NO: 220926 - DNA, 25 bp, Artificial
  probe
  misc_feature (1)..(25): SEQ ID NO: 1078; WAN024FTY_at; Start 398; Stop 422
ccttggatgctagccacttagacct

SEQ ID NO: 220927 - DNA, 25 bp, Artificial
  probe
  misc_feature (1)..(25): SEQ ID NO: 1078; WAN024FTY_at; Start 403; Stop 427
gatgctagccacttagacctagcta

SEQ ID NO: 220928 - DNA, 25 bp, Artificial
  probe
  misc_feature (1)..(25): SEQ ID NO: 1078; WAN024FTY_at; Start 327; Stop 351
gaactcagaagtcatcgttcctaaa

SEQ ID NO: 220929 - DNA, 25 bp, Artificial
  probe
  misc_feature (1)..(25): SEQ ID NO: 1078; WAN024FTY_at; Start 394; Stop 418
cataccttggatgctagccacttag

SEQ ID NO: 220930 - DNA, 25 bp, Artificial
  probe
  misc_feature (1)..(25): SEQ ID NO: 1078; WAN024FTY_at; Start 400; Stop 424
ttggatgctagccacttagacctag

SEQ ID NO: 220931 - DNA, 25 bp, Artificial
  probe
  misc_feature (1)..(25): SEQ ID NO: 1078; WAN024FTY_at; Start 199; Stop 223
ttagagtgcgactatttaggtttgg

SEQ ID NO: 220932 - DNA, 25 bp, Artificial
  probe
  misc_feature (1)..(25): SEQ ID NO: 1078; WAN024FTY_at; Start 178; Stop 202
ctctattgggcatggaaaaatttag

SEQ ID NO: 220933 - DNA, 25 bp, Artificial
  probe
  misc_feature (1)..(25): SEQ ID NO: 1078; WAN024FTY_at; Start 411; Stop 435
ccacttagacctagctagaaaaatg

SEQ ID NO: 220934 - DNA, 25 bp, Artificial
  probe
  misc_feature (1)..(25): SEQ ID NO: 1078; WAN024FTY_at; Start 408; Stop 432
tagccacttagacctagctagaaaa

SEQ ID NO: 220935 - DNA, 25 bp, Artificial
  probe
  misc_feature (1)..(25): SEQ ID NO: 1078; WAN024FTY_at; Start 206; Stop 230
gcgactatttaggtttggtacacta

SEQ ID NO: 220936 - DNA, 25 bp, Artificial
  probe
  misc_feature (1)..(25): SEQ ID NO: 1078; WAN024FTY_at; Start 180; Stop 204
ctattgggcatggaaaaatttagag

SEQ ID NO: 220937 - DNA, 25 bp, Artificial
  probe
  misc_feature (1)..(25): SEQ ID NO: 1078; WAN024FTY_at; Start 456; Stop 480
atatctagcaagttttgataaggta

SEQ ID NO: 220938 - DNA, 25 bp, Artificial
  probe
  misc_feature (1)..(25): SEQ ID NO: 1078; WAN024FTY_at; Start 325; Stop 349
gagaactcagaagtcatcgttccta

SEQ ID NO: 220939 - DNA, 25 bp, Artificial
  probe
  misc_feature (1)..(25): SEQ ID NO: 1078; WAN024FTY_at; Start 202; Stop 226
gagtgcgactatttaggtttggtac

SEQ ID NO: 220940 - DNA, 25 bp, Artificial
  probe
  misc_feature (1)..(25): SEQ ID NO: 1078; WAN024FTY_at; Start 215; Stop 239
taggtttggtacactatcgtcgtta

SEQ ID NO: 220941 - DNA, 25 bp, Artificial
  probe
  misc_feature (1)..(25): SEQ ID NO: 1078; WAN024FTY_at; Start 211; Stop 235
tatttaggtttggtacactatcgtc

SEQ ID NO: 220942 - DNA, 25 bp, Artificial
  probe
  misc_feature (1)..(25): SEQ ID NO: 1078; WAN024FTY_at; Start 330; Stop 354
ctcagaagtcatcgttcctaaaaaa

SEQ ID NO: 220943 - DNA, 25 bp, Artificial
  probe
  misc_feature (1)..(25): SEQ ID NO: 1078; WAN024FTY_at; Start 190; Stop 214
tggaaaaatttagagtgcgactatt

SEQ ID NO: 220944 - DNA, 25 bp, Artificial
  probe
  misc_feature (1)..(25): SEQ ID NO: 1078; WAN024FTY_at; Start 188; Stop 212
catggaaaaatttagagtgcgacta

SEQ ID NO: 220945 - DNA, 25 bp, Artificial
  probe
  misc_feature (1)..(25): SEQ ID NO: 1078; WAN024FTY_at; Start 391; Stop 415
gctcataccttggatgctagccact

SEQ ID NO: 220946 - DNA, 25 bp, Artificial
  probe
  misc_feature (1)..(25): SEQ ID NO: 1078; WAN024FTY_at; Start 360; Stop 384
gtactatatagaaaccctctattct

SEQ ID NO: 220947 - DNA, 25 bp, Artificial
  probe
  misc_feature (1)..(25): SEQ ID NO: 1078; WAN024FTY_at; Start 379; Stop 403
tattctcactatgctcataccttgg

SEQ ID NO: 220948 - DNA, 25 bp, Artificial
  probe
  misc_feature (1)..(25): SEQ ID NO: 1078; WAN024FTY_at; Start 323; Stop 347
tagagaactcagaagtcatcgttcc

SEQ ID NO: 220949 - DNA, 25 bp, Artificial
  probe
  misc_feature (1)..(25): SEQ ID NO: 1078; WAN024FTY_at; Start 216; Stop 240
aggtttggtacactatcgtcgttat

SEQ ID NO: 220950 - DNA, 25 bp, Artificial
  probe
  misc_feature (1)..(25): SEQ ID NO: 1078; WAN024FTY_at; Start 452; Stop 476
ctgaatatctagcaagttttgataa

SEQ ID NO: 220951 - DNA, 25 bp, Artificial
  probe
  misc_feature (1)..(25): SEQ ID NO: 1078; WAN024FTY_at; Start 396; Stop 420
taccttggatgctagccacttagac

SEQ ID NO: 220952 - DNA, 25 bp, Artificial
  probe
  misc_feature (1)..(25): SEQ ID NO: 1078; WAN024FTY_at; Start 184; Stop 208
tgggcatggaaaaatttagagtgcg

SEQ ID NO: 220953 - DNA, 25 bp, Artificial
  probe
  misc_feature (1)..(25): SEQ ID NO: 1078; WAN024FTY_at; Start 385; Stop 409
cactatgctcataccttggatgcta

SEQ ID NO: 220954 - DNA, 25 bp, Artificial
  probe
  misc_feature (1)..(25): SEQ ID NO: 1078; WAN024FTY_at; Start 194; Stop 218
aaaatttagagtgcgactatttagg

SEQ ID NO: 220955 - DNA, 25 bp, Artificial
  probe
  misc_feature (1)..(25): SEQ ID NO: 1078; WAN024FTY_at; Start 321; Stop 345
gttagagaactcagaagtcatcgtt

SEQ ID NO: 220956 - DNA, 25 bp, Artificial
  probe
  misc_feature (1)..(25): SEQ ID NO: 1078; WAN024FTY_at; Start 382; Stop 406
tctcactatgctcataccttggatg

SEQ ID NO: 220957 - DNA, 25 bp, Artificial
  probe
  misc_feature (1)..(25): SEQ ID NO: 5431; WAN024FTZ_at; Start 762; Stop 786
cgacttagttaatgatgaggttgaa

SEQ ID NO: 220958 - DNA, 25 bp, Artificial
  probe
  misc_feature (1)..(25): SEQ ID NO: 5431; WAN024FTZ_at; Start 913; Stop 937
aaaatgcgacaagaatttcgtgaac

SEQ ID NO: 220959 - DNA, 25 bp, Artificial
  probe
  misc_feature (1)..(25): SEQ ID NO: 5431; WAN024FTZ_at; Start 242; Stop 266
aaaaccaaggtgtgtcagtcgcaag

SEQ ID NO: 220960 - DNA, 25 bp, Artificial
  probe
  misc_feature (1)..(25): SEQ ID NO: 5431; WAN024FTZ_at; Start 556; Stop 580
tgggcaaaaatttatcgtaatgagt

SEQ ID NO: 220961 - DNA, 25 bp, Artificial
  probe
  misc_feature (1)..(25): SEQ ID NO: 5431; WAN024FTZ_at; Start 689; Stop 713
agccgatttactattatagaaagag

SEQ ID NO: 220962 - DNA, 25 bp, Artificial
  probe
  misc_feature (1)..(25): SEQ ID NO: 5431; WAN024FTZ_at; Start 69; Stop 93
tccaacctataagatatcagaatct

SEQ ID NO: 220963 - DNA, 25 bp, Artificial
  probe
  misc_feature (1)..(25): SEQ ID NO: 5431; WAN024FTZ_at; Start 899; Stop 923
caagcgagaaaaagaaaatgcgaca

SEQ ID NO: 220964 - DNA, 25 bp, Artificial
  probe
  misc_feature (1)..(25): SEQ ID NO: 5431; WAN024FTZ_at; Start 80; Stop 104
agatatcagaatctaatctacgcca

SEQ ID NO: 220965 - DNA, 25 bp, Artificial
  probe
  misc_feature (1)..(25): SEQ ID NO: 5431; WAN024FTZ_at; Start 718; Stop 742
gatagtgtaactaataagaaaaatg

SEQ ID NO: 220966 - DNA, 25 bp, Artificial
  probe
  misc_feature (1)..(25): SEQ ID NO: 5431; WAN024FTZ_at; Start 757; Stop 781
tatttcgacttagttaatgatgagg

SEQ ID NO: 220967 - DNA, 25 bp, Artificial
  probe
  misc_feature (1)..(25): SEQ ID NO: 5431; WAN024FTZ_at; Start 894; Stop 918
tacttcaagcgagaaaaagaaaatg

SEQ ID NO: 220968 - DNA, 25 bp, Artificial
  probe
  misc_feature (1)..(25): SEQ ID NO: 5431; WAN024FTZ_at; Start 565; Stop 589
atttatcgtaatgagtttgtgcgag

SEQ ID NO: 220969 - DNA, 25 bp, Artificial
  probe
  misc_feature (1)..(25): SEQ ID NO: 5431; WAN024FTZ_at; Start 66; Stop 90
tgttccaacctataagatatcagaa

SEQ ID NO: 220970 - DNA, 25 bp, Artificial
  probe
  misc_feature (1)..(25): SEQ ID NO: 5431; WAN024FTZ_at; Start 687; Stop 711
tgagccgatttactattatagaaag

SEQ ID NO: 220971 - DNA, 25 bp, Artificial
  probe
  misc_feature (1)..(25): SEQ ID NO: 5431; WAN024FTZ_at; Start 563; Stop 587
aaatttatcgtaatgagtttgtgcg

SEQ ID NO: 220972 - DNA, 25 bp, Artificial
  probe
  misc_feature (1)..(25): SEQ ID NO: 5431; WAN024FTZ_at; Start 765; Stop 789
cttagttaatgatgaggttgaaaaa

SEQ ID NO: 220973 - DNA, 25 bp, Artificial
  probe
  misc_feature (1)..(25): SEQ ID NO: 5431; WAN024FTZ_at; Start 920; Stop 944
gacaagaatttcgtgaacttttaga

SEQ ID NO: 220974 - DNA, 25 bp, Artificial
  probe
  misc_feature (1)..(25): SEQ ID NO: 5431; WAN024FTZ_at; Start 858; Stop 882
caattcgtattataagttgtatttt

SEQ ID NO: 220975 - DNA, 25 bp, Artificial
  probe
  misc_feature (1)..(25): SEQ ID NO: 5431; WAN024FTZ_at; Start 57; Stop 81
tagtgttattgttccaacctataag

SEQ ID NO: 220976 - DNA, 25 bp, Artificial
  probe
  misc_feature (1)..(25): SEQ ID NO: 5431; WAN024FTZ_at; Start 249; Stop 273
aggtgtgtcagtcgcaagaaatgct

SEQ ID NO: 220977 - DNA, 25 bp, Artificial
  probe
  misc_feature (1)..(25): SEQ ID NO: 5431; WAN024FTZ_at; Start 910; Stop 934
aagaaaatgcgacaagaatttcgtg

SEQ ID NO: 220978 - DNA, 25 bp, Artificial
  probe
  misc_feature (1)..(25): SEQ ID NO: 5431; WAN024FTZ_at; Start 902; Stop 926
gcgagaaaaagaaaatgcgacaaga

SEQ ID NO: 220979 - DNA, 25 bp, Artificial
  probe
  misc_feature (1)..(25): SEQ ID NO: 5431; WAN024FTZ_at; Start 390; Stop 414
gattatattagctgctattgtagac

SEQ ID NO: 220980 - DNA, 25 bp, Artificial
  probe
  misc_feature (1)..(25): SEQ ID NO: 5431; WAN024FTZ_at; Start 896; Stop 920
cttcaagcgagaaaaagaaaatgcg

SEQ ID NO: 220981 - DNA, 25 bp, Artificial
  probe
  misc_feature (1)..(25): SEQ ID NO: 5431; WAN024FTZ_at; Start 48; Stop 72
tccactttttagtgttattgttcca

SEQ ID NO: 220982 - DNA, 25 bp, Artificial
  probe
  misc_feature (1)..(25): SEQ ID NO: 5431; WAN024FTZ_at; Start 322; Stop 346
gattgggttgctgaaaatttttata

SEQ ID NO: 220983 - DNA, 25 bp, Artificial
  probe
  misc_feature (1)..(25): SEQ ID NO: 5431; WAN024FTZ_at; Start 241; Stop 265
gaaaaccaaggtgtgtcagtcgcaa

SEQ ID NO: 220984 - DNA, 25 bp, Artificial
  probe
  misc_feature (1)..(25): SEQ ID NO: 5431; WAN024FTZ_at; Start 196; Stop 220
gacgaatatgctgaaaaatataata

SEQ ID NO: 220985 - DNA, 25 bp, Artificial
  probe
  misc_feature (1)..(25): SEQ ID NO: 5431; WAN024FTZ_at; Start 246; Stop 270
ccaaggtgtgtcagtcgcaagaaat

SEQ ID NO: 220986 - DNA, 25 bp, Artificial
  probe
  misc_feature (1)..(25): SEQ ID NO: 5431; WAN024FTZ_at; Start 248; Stop 272
aaggtgtgtcagtcgcaagaaatgc

SEQ ID NO: 220987 - DNA, 25 bp, Artificial
  probe
  misc_feature (1)..(25): SEQ ID NO: 5431; WAN024FTZ_at; Start 244; Stop 268
aaccaaggtgtgtcagtcgcaagaa

SEQ ID NO: 220988 - DNA, 25 bp, Artificial
  probe
  misc_feature (1)..(25): SEQ ID NO: 5431; WAN024FTZ_at; Start 243; Stop 267
aaaccaaggtgtgtcagtcgcaaga

SEQ ID NO: 220989 - DNA, 25 bp, Artificial
  probe
  misc_feature (1)..(25): SEQ ID NO: 5431; WAN024FTZ_at; Start 917; Stop 941
tgcgacaagaatttcgtgaactttt

SEQ ID NO: 220990 - DNA, 25 bp, Artificial
  probe
  misc_feature (1)..(25): SEQ ID NO: 5431; WAN024FTZ_at; Start 772; Stop 796
aatgatgaggttgaaaaatttattc

SEQ ID NO: 220991 - DNA, 25 bp, Artificial
  probe
  misc_feature (1)..(25): SEQ ID NO: 2283; WAN024FU2_at; Start 427; Stop 451
catctggatcttgctaggaaaatta

SEQ ID NO: 220992 - DNA, 25 bp, Artificial
  probe
  misc_feature (1)..(25): SEQ ID NO: 2283; WAN024FU2_at; Start 459; Stop 483
aaatagttcagagtatctttcatcc

SEQ ID NO: 220993 - DNA, 25 bp, Artificial
  probe
  misc_feature (1)..(25): SEQ ID NO: 2283; WAN024FU2_at; Start 264; Stop 288
taaatctcaagggtataatgaaaat

SEQ ID NO: 220994 - DNA, 25 bp, Artificial
  probe
  misc_feature (1)..(25): SEQ ID NO: 2283; WAN024FU2_at; Start 590; Stop 614
ctatgtacgaacagatggacttgac

SEQ ID NO: 220995 - DNA, 25 bp, Artificial
  probe
  misc_feature (1)..(25): SEQ ID NO: 2283; WAN024FU2_at; Start 327; Stop 351
tgaaatattattagagaaatctgac

SEQ ID NO: 220996 - DNA, 25 bp, Artificial
  probe
  misc_feature (1)..(25): SEQ ID NO: 2283; WAN024FU2_at; Start 469; Stop 493
gagtatctttcatcctttgataaag

SEQ ID NO: 220997 - DNA, 25 bp, Artificial
  probe
  misc_feature (1)..(25): SEQ ID NO: 2283; WAN024FU2_at; Start 474; Stop 498
tctttcatcctttgataaagtgatg

SEQ ID NO: 220998 - DNA, 25 bp, Artificial
  probe
  misc_feature (1)..(25): SEQ ID NO: 2283; WAN024FU2_at; Start 583; Stop 607
ctggatactatgtacgaacagatgg

SEQ ID NO: 220999 - DNA, 25 bp, Artificial
  probe
  misc_feature (1)..(25): SEQ ID NO: 2283; WAN024FU2_at; Start 696; Stop 720
aacgcctaaagaggtaccatttatg

SEQ ID NO: 221000 - DNA, 25 bp, Artificial
  probe
  misc_feature (1)..(25): SEQ ID NO: 2283; WAN024FU2_at; Start 586; Stop 610
gatactatgtacgaacagatggact

SEQ ID NO: 221001 - DNA, 25 bp, Artificial
  probe
  misc_feature (1)..(25): SEQ ID NO: 2283; WAN024FU2_at; Start 360; Stop 384
tccaaagaagcgaaagtattatatt

SEQ ID NO: 221002 - DNA, 25 bp, Artificial
  probe
  misc_feature (1)..(25): SEQ ID NO: 2283; WAN024FU2_at; Start 588; Stop 612
tactatgtacgaacagatggacttg

SEQ ID NO: 221003 - DNA, 25 bp, Artificial
  probe
  misc_feature (1)..(25): SEQ ID NO: 2283; WAN024FU2_at; Start 424; Stop 448
gaacatctggatcttgctaggaaaa

SEQ ID NO: 221004 - DNA, 25 bp, Artificial
  probe
  misc_feature (1)..(25): SEQ ID NO: 2283; WAN024FU2_at; Start 258; Stop 282
tacaaataaatctcaagggtataat

SEQ ID NO: 221005 - DNA, 25 bp, Artificial
  probe
  misc_feature (1)..(25): SEQ ID NO: 2283; WAN024FU2_at; Start 566; Stop 590
cgtggcttttttctattctggatac

SEQ ID NO: 221006 - DNA, 25 bp, Artificial
  probe
  misc_feature (1)..(25): SEQ ID NO: 2283; WAN024FU2_at; Start 547; Stop 571
ctattagatgattatttaccgtggc

SEQ ID NO: 221007 - DNA, 25 bp, Artificial
  probe
  misc_feature (1)..(25): SEQ ID NO: 2283; WAN024FU2_at; Start 363; Stop 387
aaagaagcgaaagtattatattgaa

SEQ ID NO: 221008 - DNA, 25 bp, Artificial
  probe
  misc_feature (1)..(25): SEQ ID NO: 2283; WAN024FU2_at; Start 356; Stop 380
tagttccaaagaagcgaaagtatta

SEQ ID NO: 221009 - DNA, 25 bp, Artificial
  probe
  misc_feature (1)..(25): SEQ ID NO: 2283; WAN024FU2_at; Start 447; Stop 471
aattattgagcaaaatagttcagag

SEQ ID NO: 221010 - DNA, 25 bp, Artificial
  probe
  misc_feature (1)..(25): SEQ ID NO: 2283; WAN024FU2_at; Start 706; Stop 730
gaggtaccatttatgtacatggaga

SEQ ID NO: 221011 - DNA, 25 bp, Artificial
  probe
  misc_feature (1)..(25): SEQ ID NO: 2283; WAN024FU2_at; Start 390; Stop 414
tctttattcacattatgcccatacc

SEQ ID NO: 221012 - DNA, 25 bp, Artificial
  probe
  misc_feature (1)..(25): SEQ ID NO: 2283; WAN024FU2_at; Start 453; Stop 477
tgagcaaaatagttcagagtatctt

SEQ ID NO: 221013 - DNA, 25 bp, Artificial
  probe
  misc_feature (1)..(25): SEQ ID NO: 2283; WAN024FU2_at; Start 432; Stop 456
ggatcttgctaggaaaattattgag

SEQ ID NO: 221014 - DNA, 25 bp, Artificial
  probe
  misc_feature (1)..(25): SEQ ID NO: 2283; WAN024FU2_at; Start 463; Stop 487
agttcagagtatctttcatcctttg

SEQ ID NO: 221015 - DNA, 25 bp, Artificial
  probe
  misc_feature (1)..(25): SEQ ID NO: 2283; WAN024FU2_at; Start 700; Stop 724
cctaaagaggtaccatttatgtaca

SEQ ID NO: 221016 - DNA, 25 bp, Artificial
  probe
  misc_feature (1)..(25): SEQ ID NO: 2283; WAN024FU2_at; Start 711; Stop 735
accatttatgtacatggagagagtg

SEQ ID NO: 221017 - DNA, 25 bp, Artificial
  probe
  misc_feature (1)..(25): SEQ ID NO: 2283; WAN024FU2_at; Start 353; Stop 377
taatagttccaaagaagcgaaagta

SEQ ID NO: 221018 - DNA, 25 bp, Artificial
  probe
  misc_feature (1)..(25): SEQ ID NO: 2283; WAN024FU2_at; Start 579; Stop 603
tattctggatactatgtacgaacag

SEQ ID NO: 221019 - DNA, 25 bp, Artificial
  probe
  misc_feature (1)..(25): SEQ ID NO: 2283; WAN024FU2_at; Start 648; Stop 672
gcgagttagtgagttgttgtttaat

SEQ ID NO: 221020 - DNA, 25 bp, Artificial
  probe
  misc_feature (1)..(25): SEQ ID NO: 2283; WAN024FU2_at; Start 551; Stop 575
tagatgattatttaccgtggctttt

SEQ ID NO: 221021 - DNA, 25 bp, Artificial
  probe
  misc_feature (1)..(25): SEQ ID NO: 2283; WAN024FU2_at; Start 394; Stop 418
tattcacattatgcccataccctta

SEQ ID NO: 221022 - DNA, 25 bp, Artificial
  probe
  misc_feature (1)..(25): SEQ ID NO: 2283; WAN024FU2_at; Start 385; Stop 409
gaaactctttattcacattatgccc

SEQ ID NO: 221023 - DNA, 25 bp, Artificial
  probe
  misc_feature (1)..(25): SEQ ID NO: 2283; WAN024FU2_at; Start 563; Stop 587
taccgtggcttttttctattctgga

SEQ ID NO: 221024 - DNA, 25 bp, Artificial
  probe
  misc_feature (1)..(25): SEQ ID NO: 2283; WAN024FU2_at; Start 577; Stop 601
tctattctggatactatgtacgaac

SEQ ID NO: 221025 - DNA, 25 bp, Artificial
  probe
  misc_feature (1)..(25): SEQ ID NO: 1601; WAN024FU3_at; Start 1; Stop 25
atgagtaagagcctgataaagcttg

SEQ ID NO: 221026 - DNA, 25 bp, Artificial
  probe
  misc_feature (1)..(25): SEQ ID NO: 1601; WAN024FU3_at; Start 191; Stop 215
gcagtcgcttcgatggcatggccaa

SEQ ID NO: 221027 - DNA, 25 bp, Artificial
  probe
  misc_feature (1)..(25): SEQ ID NO: 1601; WAN024FU3_at; Start 450; Stop 474
gaacaagtggatcaatcagaacccc

SEQ ID NO: 221028 - DNA, 25 bp, Artificial
  probe
  misc_feature (1)..(25): SEQ ID NO: 1601; WAN024FU3_at; Start 219; Stop 243
tgtggccaaaattgaggtaaagacg

SEQ ID NO: 221029 - DNA, 25 bp, Artificial
  probe
  misc_feature (1)..(25): SEQ ID NO: 1601; WAN024FU3_at; Start 97; Stop 121
gccagctggcatgaggcctttttcc

SEQ ID NO: 221030 - DNA, 25 bp, Artificial
  probe
  misc_feature (1)..(25): SEQ ID NO: 1601; WAN024FU3_at; Start 279; Stop 303
tgcgcttcacctgacaagaatgttc

SEQ ID NO: 221031 - DNA, 25 bp, Artificial
  probe
  misc_feature (1)..(25): SEQ ID NO: 1601; WAN024FU3_at; Start 491; Stop 515
gtccccaccatatttttagcaaatg

SEQ ID NO: 221032 - DNA, 25 bp, Artificial
  probe
  misc_feature (1)..(25): SEQ ID NO: 1601; WAN024FU3_at; Start 436; Stop 460
tccgagggtttcaagaacaagtgga

SEQ ID NO: 221033 - DNA, 25 bp, Artificial
  probe
  misc_feature (1)..(25): SEQ ID NO: 1601; WAN024FU3_at; Start 183; Stop 207
cataaccggcagtcgcttcgatggc

SEQ ID NO: 221034 - DNA, 25 bp, Artificial
  probe
  misc_feature (1)..(25): SEQ ID NO: 1601; WAN024FU3_at; Start 306; Stop 330
tcaaggtctctgcatgttccaaaat

SEQ ID NO: 221035 - DNA, 25 bp, Artificial
  probe
  misc_feature (1)..(25): SEQ ID NO: 1601; WAN024FU3_at; Start 82; Stop 106
gatagattgggtaatgccagctggc

SEQ ID NO: 221036 - DNA, 25 bp, Artificial
  probe
  misc_feature (1)..(25): SEQ ID NO: 1601; WAN024FU3_at; Start 153; Stop 177
tggcaacagcctctccatgcatgac

SEQ ID NO: 221037 - DNA, 25 bp, Artificial
  probe
  misc_feature (1)..(25): SEQ ID NO: 1601; WAN024FU3_at; Start 32; Stop 56
tcccaattttcatagtcaacaggca

SEQ ID NO: 221038 - DNA, 25 bp, Artificial
  probe
  misc_feature (1)..(25): SEQ ID NO: 1601; WAN024FU3_at; Start 672; Stop 696
tacgagtcagaccttgcttgactag

SEQ ID NO: 221039 - DNA, 25 bp, Artificial
  probe
  misc_feature (1)..(25): SEQ ID NO: 1601; WAN024FU3_at; Start 204; Stop 228
tggcatggccaatagtgtggccaaa

SEQ ID NO: 221040 - DNA, 25 bp, Artificial
  probe
  misc_feature (1)..(25): SEQ ID NO: 1601; WAN024FU3_at; Start 596; Stop 620
ccccgcatataggtagaggctacaa

SEQ ID NO: 221041 - DNA, 25 bp, Artificial
  probe
  misc_feature (1)..(25): SEQ ID NO: 1601; WAN024FU3_at; Start 579; Stop 603
tctgaacaaagtgaataccccgcat

SEQ ID NO: 221042 - DNA, 25 bp, Artificial
  probe
  misc_feature (1)..(25): SEQ ID NO: 1601; WAN024FU3_at; Start 552; Stop 576
caacctgagctgtcaaactagtcgg

SEQ ID NO: 221043 - DNA, 25 bp, Artificial
  probe
  misc_feature (1)..(25): SEQ ID NO: 1601; WAN024FU3_at; Start 420; Stop 444
caatcaactctctttttccgagggt

SEQ ID NO: 221044 - DNA, 25 bp, Artificial
  probe
  misc_feature (1)..(25): SEQ ID NO: 1601; WAN024FU3_at; Start 133; Stop 157
ggaaatctgtaccattcccatggca

SEQ ID NO: 221045 - DNA, 25 bp, Artificial
  probe
  misc_feature (1)..(25): SEQ ID NO: 1601; WAN024FU3_at; Start 465; Stop 489
tcagaaccccatctggttgggcaaa

SEQ ID NO: 221046 - DNA, 25 bp, Artificial
  probe
  misc_feature (1)..(25): SEQ ID NO: 1601; WAN024FU3_at; Start 522; Stop 546
taacgcctgtctttccaccgataga

SEQ ID NO: 221047 - DNA, 25 bp, Artificial
  probe
  misc_feature (1)..(25): SEQ ID NO: 1601; WAN024FU3_at; Start 168; Stop 192
catgcatgaccttgccataaccggc

SEQ ID NO: 221048 - DNA, 25 bp, Artificial
  probe
  misc_feature (1)..(25): SEQ ID NO: 1601; WAN024FU3_at; Start 640; Stop 664
aacgccaccaccaagagcaacgatt

SEQ ID NO: 221049 - DNA, 25 bp, Artificial
  probe
  misc_feature (1)..(25): SEQ ID NO: 1601; WAN024FU3_at; Start 357; Stop 381
tcaagagagcccacagttctggatc

SEQ ID NO: 221050 - DNA, 25 bp, Artificial
  probe
  misc_feature (1)..(25): SEQ ID NO: 1601; WAN024FU3_at; Start 389; Stop 413
aagccatacttgataacttcaccca

SEQ ID NO: 221051 - DNA, 25 bp, Artificial
  probe
  misc_feature (1)..(25): SEQ ID NO: 1601; WAN024FU3_at; Start 291; Stop 315
gacaagaatgttcaatcaaggtctc

SEQ ID NO: 221052 - DNA, 25 bp, Artificial
  probe
  misc_feature (1)..(25): SEQ ID NO: 1601; WAN024FU3_at; Start 537; Stop 561
caccgatagaagaatcaacctgagc

SEQ ID NO: 221053 - DNA, 25 bp, Artificial
  probe
  misc_feature (1)..(25): SEQ ID NO: 1601; WAN024FU3_at; Start 565; Stop 589
caaactagtcggaatctgaacaaag

SEQ ID NO: 221054 - DNA, 25 bp, Artificial
  probe
  misc_feature (1)..(25): SEQ ID NO: 1601; WAN024FU3_at; Start 476; Stop 500
tctggttgggcaaaggtccccacca

SEQ ID NO: 221055 - DNA, 25 bp, Artificial
  probe
  misc_feature (1)..(25): SEQ ID NO: 1601; WAN024FU3_at; Start 236; Stop 260
taaagacgaataccattgtccaact

SEQ ID NO: 221056 - DNA, 25 bp, Artificial
  probe
  misc_feature (1)..(25): SEQ ID NO: 1601; WAN024FU3_at; Start 68; Stop 92
tgacacatctctgtgatagattggg

SEQ ID NO: 221057 - DNA, 25 bp, Artificial
  probe
  misc_feature (1)..(25): SEQ ID NO: 1601; WAN024FU3_at; Start 376; Stop 400
tggatcctcaatcaagccatacttg

SEQ ID NO: 221058 - DNA, 25 bp, Artificial
  probe
  misc_feature (1)..(25): SEQ ID NO: 1601; WAN024FU3_at; Start 657; Stop 681
caacgattccatcgctacgagtcag

SEQ ID NO: 221059 - DNA, 25 bp, Artificial
  probe
  misc_feature (1)..(25): SEQ ID NO: 1414; WAN024FU4_at; Start 181; Stop 205
cttcatacgaccaccacgaccgtag

SEQ ID NO: 221060 - DNA, 25 bp, Artificial
  probe
  misc_feature (1)..(25): SEQ ID NO: 1414; WAN024FU4_at; Start 160; Stop 184
gacaacctggtcattctcaatcttc

SEQ ID NO: 221061 - DNA, 25 bp, Artificial
  probe
  misc_feature (1)..(25): SEQ ID NO: 1414; WAN024FU4_at; Start 99; Stop 123
tgatgacatccatagtaataggcgc

SEQ ID NO: 221062 - DNA, 25 bp, Artificial
  probe
  misc_feature (1)..(25): SEQ ID NO: 1414; WAN024FU4_at; Start 263; Stop 287
gctggaattccctcaataatagctg

SEQ ID NO: 221063 - DNA, 25 bp, Artificial
  probe
  misc_feature (1)..(25): SEQ ID NO: 1414; WAN024FU4_at; Start 203; Stop 227
tagccaccctgacggcgtctaaggt

SEQ ID NO: 221064 - DNA, 25 bp, Artificial
  probe
  misc_feature (1)..(25): SEQ ID NO: 1414; WAN024FU4_at; Start 38; Stop 62
ttaaggcggtcttcaatgtcctccg

SEQ ID NO: 221065 - DNA, 25 bp, Artificial
  probe
  misc_feature (1)..(25): SEQ ID NO: 1414; WAN024FU4_at; Start 70; Stop 94
gatgtccagccatttctggtggtcc

SEQ ID NO: 221066 - DNA, 25 bp, Artificial
  probe
  misc_feature (1)..(25): SEQ ID NO: 1414; WAN024FU4_at; Start 148; Stop 172
gcccgaagtaaagacaacctggtca

SEQ ID NO: 221067 - DNA, 25 bp, Artificial
  probe
  misc_feature (1)..(25): SEQ ID NO: 1414; WAN024FU4_at; Start 107; Stop 131
tccatagtaataggcgcccctgtcg

SEQ ID NO: 221068 - DNA, 25 bp, Artificial
  probe
  misc_feature (1)..(25): SEQ ID NO: 1414; WAN024FU4_at; Start 15; Stop 39
gatgagtaattttccgcttgctttt

SEQ ID NO: 221069 - DNA, 25 bp, Artificial
  probe
  misc_feature (1)..(25): SEQ ID NO: 1414; WAN024FU4_at; Start 167; Stop 191
tggtcattctcaatcttcatacgac

SEQ ID NO: 221070 - DNA, 25 bp, Artificial
  probe
  misc_feature (1)..(25): SEQ ID NO: 1414; WAN024FU4_at; Start 234; Stop 258
tgatatcctcagctgtcaatggaag

SEQ ID NO: 221071 - DNA, 25 bp, Artificial
  probe
  misc_feature (1)..(25): SEQ ID NO: 1414; WAN024FU4_at; Start 103; Stop 127
gacatccatagtaataggcgcccct

SEQ ID NO: 221072 - DNA, 25 bp, Artificial
  probe
  misc_feature (1)..(25): SEQ ID NO: 1414; WAN024FU4_at; Start 239; Stop 263
tcctcagctgtcaatggaagtccag

SEQ ID NO: 221073 - DNA, 25 bp, Artificial
  probe
  misc_feature (1)..(25): SEQ ID NO: 1414; WAN024FU4_at; Start 245; Stop 269
gctgtcaatggaagtccagctggaa

SEQ ID NO: 221074 - DNA, 25 bp, Artificial
  probe
  misc_feature (1)..(25): SEQ ID NO: 1414; WAN024FU4_at; Start 222; Stop 246
taaggtcctcattgatatcctcagc

SEQ ID NO: 221075 - DNA, 25 bp, Artificial
  probe
  misc_feature (1)..(25): SEQ ID NO: 1414; WAN024FU4_at; Start 76; Stop 100
cagccatttctggtggtccttattg

SEQ ID NO: 221076 - DNA, 25 bp, Artificial
  probe
  misc_feature (1)..(25): SEQ ID NO: 1414; WAN024FU4_at; Start 172; Stop 196
attctcaatcttcatacgaccacca

SEQ ID NO: 221077 - DNA, 25 bp, Artificial
  probe
  misc_feature (1)..(25): SEQ ID NO: 1414; WAN024FU4_at; Start 209; Stop 233
ccctgacggcgtctaaggtcctcat

SEQ ID NO: 221078 - DNA, 25 bp, Artificial
  probe
  misc_feature (1)..(25): SEQ ID NO: 1414; WAN024FU4_at; Start 4; Stop 28
acctgggcgaggatgagtaattttc

SEQ ID NO: 221079 - DNA, 25 bp, Artificial
  probe
  misc_feature (1)..(25): SEQ ID NO: 1414; WAN024FU4_at; Start 250; Stop 274
caatggaagtccagctggaattccc

SEQ ID NO: 221080 - DNA, 25 bp, Artificial
  probe
  misc_feature (1)..(25): SEQ ID NO: 1414; WAN024FU4_at; Start 84; Stop 108
tctggtggtccttattgatgacatc

SEQ ID NO: 221081 - DNA, 25 bp, Artificial
  probe
  misc_feature (1)..(25): SEQ ID NO: 1414; WAN024FU4_at; Start 44; Stop 68
cggtcttcaatgtcctccgcagaca

SEQ ID NO: 221082 - DNA, 25 bp, Artificial
  probe
  misc_feature (1)..(25): SEQ ID NO: 1414; WAN024FU4_at; Start 29; Stop 53
cgcttgcttttaaggcggtcttcaa

SEQ ID NO: 221083 - DNA, 25 bp, Artificial
  probe
  misc_feature (1)..(25): SEQ ID NO: 1414; WAN024FU4_at; Start 225; Stop 249
ggtcctcattgatatcctcagctgt

SEQ ID NO: 221084 - DNA, 25 bp, Artificial
  probe
  misc_feature (1)..(25): SEQ ID NO: 1414; WAN024FU4_at; Start 54; Stop 78
tgtcctccgcagacatgatgtccag

SEQ ID NO: 221085 - DNA, 25 bp, Artificial
  probe
  misc_feature (1)..(25): SEQ ID NO: 1414; WAN024FU4_at; Start 152; Stop 176
gaagtaaagacaacctggtcattct

SEQ ID NO: 221086 - DNA, 25 bp, Artificial
  probe
  misc_feature (1)..(25): SEQ ID NO: 1414; WAN024FU4_at; Start 122; Stop 146
gcccctgtcgtcttcccgtggcgaa

SEQ ID NO: 221087 - DNA, 25 bp, Artificial
  probe
  misc_feature (1)..(25): SEQ ID NO: 1414; WAN024FU4_at; Start 140; Stop 164
tggcgaacgcccgaagtaaagacaa

SEQ ID NO: 221088 - DNA, 25 bp, Artificial
  probe
  misc_feature (1)..(25): SEQ ID NO: 1414; WAN024FU4_at; Start 267; Stop 291
gaattccctcaataatagctgttag

SEQ ID NO: 221089 - DNA, 25 bp, Artificial
  probe
  misc_feature (1)..(25): SEQ ID NO: 1414; WAN024FU4_at; Start 11; Stop 35
cgaggatgagtaattttccgcttgc

SEQ ID NO: 221090 - DNA, 25 bp, Artificial
  probe
  misc_feature (1)..(25): SEQ ID NO: 1414; WAN024FU4_at; Start 255; Stop 279
gaagtccagctggaattccctcaat

SEQ ID NO: 221091 - DNA, 25 bp, Artificial
  probe
  misc_feature (1)..(25): SEQ ID NO: 1414; WAN024FU4_at; Start 62; Stop 86
gcagacatgatgtccagccatttct

SEQ ID NO: 221092 - DNA, 25 bp, Artificial
  probe
  misc_feature (1)..(25): SEQ ID NO: 1414; WAN024FU4_at; Start 213; Stop 237
gacggcgtctaaggtcctcattgat

SEQ ID NO: 221093 - DNA, 25 bp, Artificial
  probe
  misc_feature (1)..(25): SEQ ID NO: 5543; WAN024FU5_at; Start 396; Stop 420
cccgcatggtggtttcacgagctga

SEQ ID NO: 221094 - DNA, 25 bp, Artificial
  probe
  misc_feature (1)..(25): SEQ ID NO: 5543; WAN024FU5_at; Start 279; Stop 303
cagcgactgtcagattttcaggaac

SEQ ID NO: 221095 - DNA, 25 bp, Artificial
  probe
  misc_feature (1)..(25): SEQ ID NO: 5543; WAN024FU5_at; Start 289; Stop 313
cagattttcaggaacatcgatttcc

SEQ ID NO: 221096 - DNA, 25 bp, Artificial
  probe
  misc_feature (1)..(25): SEQ ID NO: 5543; WAN024FU5_at; Start 175; Stop 199
ggtatcaccatcacgtttgatttgg

SEQ ID NO: 221097 - DNA, 25 bp, Artificial
  probe
  misc_feature (1)..(25): SEQ ID NO: 5543; WAN024FU5_at; Start 77; Stop 101
gcttgagccaatcttgcatccaatt

SEQ ID NO: 221098 - DNA, 25 bp, Artificial
  probe
  misc_feature (1)..(25): SEQ ID NO: 5543; WAN024FU5_at; Start 260; Stop 284
gcagctctttgcttaatttcagcga

SEQ ID NO: 221099 - DNA, 25 bp, Artificial
  probe
  misc_feature (1)..(25): SEQ ID NO: 5543; WAN024FU5_at; Start 188; Stop 212
cgtttgatttggtcaatatagtcct

SEQ ID NO: 221100 - DNA, 25 bp, Artificial
  probe
  misc_feature (1)..(25): SEQ ID NO: 5543; WAN024FU5_at; Start 440; Stop 464
cgcaaatcatcaaaacggtacttaa

SEQ ID NO: 221101 - DNA, 25 bp, Artificial
  probe
  misc_feature (1)..(25): SEQ ID NO: 5543; WAN024FU5_at; Start 317; Stop 341
ccaccaaagaccacgacatggttgg

SEQ ID NO: 221102 - DNA, 25 bp, Artificial
  probe
  misc_feature (1)..(25): SEQ ID NO: 5543; WAN024FU5_at; Start 204; Stop 228
tatagtccttgatttcctgttctcg

SEQ ID NO: 221103 - DNA, 25 bp, Artificial
  probe
  misc_feature (1)..(25): SEQ ID NO: 5543; WAN024FU5_at; Start 218; Stop 242
tcctgttctcgttcttggttgacaa

SEQ ID NO: 221104 - DNA, 25 bp, Artificial
  probe
  misc_feature (1)..(25): SEQ ID NO: 5543; WAN024FU5_at; Start 407; Stop 431
gtttcacgagctgatgaacgctcca

SEQ ID NO: 221105 - DNA, 25 bp, Artificial
  probe
  misc_feature (1)..(25): SEQ ID NO: 5543; WAN024FU5_at; Start 91; Stop 115
tgcatccaattttctatcccattgg

SEQ ID NO: 221106 - DNA, 25 bp, Artificial
  probe
  misc_feature (1)..(25): SEQ ID NO: 5543; WAN024FU5_at; Start 15; Stop 39
gataaccagcctcaaagccaagacc

SEQ ID NO: 221107 - DNA, 25 bp, Artificial
  probe
  misc_feature (1)..(25): SEQ ID NO: 5543; WAN024FU5_at; Start 243; Stop 267
tagaaacttcagactgggcagctct

SEQ ID NO: 221108 - DNA, 25 bp, Artificial
  probe
  misc_feature (1)..(25): SEQ ID NO: 5543; WAN024FU5_at; Start 119; Stop 143
taggaaccaagaccaactggaacgc

SEQ ID NO: 221109 - DNA, 25 bp, Artificial
  probe
  misc_feature (1)..(25): SEQ ID NO: 5543; WAN024FU5_at; Start 48; Stop 72
cccctttaaaggcattgatagagac

SEQ ID NO: 221110 - DNA, 25 bp, Artificial
  probe
  misc_feature (1)..(25): SEQ ID NO: 5543; WAN024FU5_at; Start 230; Stop 254
tcttggttgacaatagaaacttcag

SEQ ID NO: 221111 - DNA, 25 bp, Artificial
  probe
  misc_feature (1)..(25): SEQ ID NO: 5543; WAN024FU5_at; Start 364; Stop 388
caagaggcgtttggctactgcacca

SEQ ID NO: 221112 - DNA, 25 bp, Artificial
  probe
  misc_feature (1)..(25): SEQ ID NO: 5543; WAN024FU5_at; Start 434; Stop 458
gaatttcgcaaatcatcaaaacggt

SEQ ID NO: 221113 - DNA, 25 bp, Artificial
  probe
  misc_feature (1)..(25): SEQ ID NO: 5543; WAN024FU5_at; Start 269; Stop 293
tgcttaatttcagcgactgtcagat

SEQ ID NO: 221114 - DNA, 25 bp, Artificial
  probe
  misc_feature (1)..(25): SEQ ID NO: 5543; WAN024FU5_at; Start 419; Stop 443
gatgaacgctccaaagaatttcgca

SEQ ID NO: 221115 - DNA, 25 bp, Artificial
  probe
  misc_feature (1)..(25): SEQ ID NO: 5543; WAN024FU5_at; Start 388; Stop 412
aactgccacccgcatggtggtttca

SEQ ID NO: 221116 - DNA, 25 bp, Artificial
  probe
  misc_feature (1)..(25): SEQ ID NO: 5543; WAN024FU5_at; Start 349; Stop 373
catatccagctcagccaagaggcgt

SEQ ID NO: 221117 - DNA, 25 bp, Artificial
  probe
  misc_feature (1)..(25): SEQ ID NO: 5543; WAN024FU5_at; Start 105; Stop 129
tatcccattggacataggaaccaag

SEQ ID NO: 221118 - DNA, 25 bp, Artificial
  probe
  misc_feature (1)..(25): SEQ ID NO: 5543; WAN024FU5_at; Start 23; Stop 47
gcctcaaagccaagaccaaattcca

SEQ ID NO: 221119 - DNA, 25 bp, Artificial
  probe
  misc_feature (1)..(25): SEQ ID NO: 5543; WAN024FU5_at; Start 252; Stop 276
cagactgggcagctctttgcttaat

SEQ ID NO: 221120 - DNA, 25 bp, Artificial
  probe
  misc_feature (1)..(25): SEQ ID NO: 5543; WAN024FU5_at; Start 134; Stop 158
actggaacgcctccgacgactgtct

SEQ ID NO: 221121 - DNA, 25 bp, Artificial
  probe
  misc_feature (1)..(25): SEQ ID NO: 5543; WAN024FU5_at; Start 1; Stop 25
ttggctgcctttacgataaccagcc

SEQ ID NO: 221122 - DNA, 25 bp, Artificial
  probe
  misc_feature (1)..(25): SEQ ID NO: 5543; WAN024FU5_at; Start 68; Stop 92
gagacaacagcttgagccaatcttg

SEQ ID NO: 221123 - DNA, 25 bp, Artificial
  probe
  misc_feature (1)..(25): SEQ ID NO: 5543; WAN024FU5_at; Start 335; Stop 359
tggttggcaatctccatatccagct

SEQ ID NO: 221124 - DNA, 25 bp, Artificial
  probe
  misc_feature (1)..(25): SEQ ID NO: 5543; WAN024FU5_at; Start 326; Stop 350
accacgacatggttggcaatctcca

SEQ ID NO: 221125 - DNA, 25 bp, Artificial
  probe
  misc_feature (1)..(25): SEQ ID NO: 5543; WAN024FU5_at; Start 372; Stop 396
gtttggctactgcaccaactgccac

SEQ ID NO: 221126 - DNA, 25 bp, Artificial
  probe
  misc_feature (1)..(25): SEQ ID NO: 5543; WAN024FU5_at; Start 60; Stop 84
cattgatagagacaacagcttgagc

SEQ ID NO: 221127 - DNA, 25 bp, Artificial
  probe
  misc_feature (1)..(25): SEQ ID NO: 1546; WAN024FU6_at; Start 898; Stop 922
aatgggcaacccatcgttgttcgtg

SEQ ID NO: 221128 - DNA, 25 bp, Artificial
  probe
  misc_feature (1)..(25): SEQ ID NO: 1546; WAN024FU6_at; Start 1043; Stop 1067
tggtcatggaagcagttgtagcaac

SEQ ID NO: 221129 - DNA, 25 bp, Artificial
  probe
  misc_feature (1)..(25): SEQ ID NO: 1546; WAN024FU6_at; Start 801; Stop 825
taaaggcagccaagttatggatgaa

SEQ ID NO: 221130 - DNA, 25 bp, Artificial
  probe
  misc_feature (1)..(25): SEQ ID NO: 1546; WAN024FU6_at; Start 271; Stop 295
gaggacattgaagaccgccttaaaa

SEQ ID NO: 221131 - DNA, 25 bp, Artificial
  probe
  misc_feature (1)..(25): SEQ ID NO: 1546; WAN024FU6_at; Start 1081; Stop 1105
gaaatcctcgaaaaattctcatcag

SEQ ID NO: 221132 - DNA, 25 bp, Artificial
  probe
  misc_feature (1)..(25): SEQ ID NO: 1546; WAN024FU6_at; Start 374; Stop 398
gaaattctttggagcgttcatcagc

SEQ ID NO: 221133 - DNA, 25 bp, Artificial
  probe
  misc_feature (1)..(25): SEQ ID NO: 1546; WAN024FU6_at; Start 722; Stop 746
caagattggctcaagctgttgtctc

SEQ ID NO: 221134 - DNA, 25 bp, Artificial
  probe
  misc_feature (1)..(25): SEQ ID NO: 1546; WAN024FU6_at; Start 615; Stop 639
ccaaatcaaacgtgatggtgatacc

SEQ ID NO: 221135 - DNA, 25 bp, Artificial
  probe
  misc_feature (1)..(25): SEQ ID NO: 1546; WAN024FU6_at; Start 514; Stop 538
cctgaaaatctgacagtcgctgaaa

SEQ ID NO: 221136 - DNA, 25 bp, Artificial
  probe
  misc_feature (1)..(25): SEQ ID NO: 1546; WAN024FU6_at; Start 958; Stop 982
cttatgagtgtggatatcgaaaccc

SEQ ID NO: 221137 - DNA, 25 bp, Artificial
  probe
  misc_feature (1)..(25): SEQ ID NO: 1546; WAN024FU6_at; Start 836; Stop 860
ctaaagaagacggttatactcgccg

SEQ ID NO: 221138 - DNA, 25 bp, Artificial
  probe
  misc_feature (1)..(25): SEQ ID NO: 1546; WAN024FU6_at; Start 988; Stop 1012
ccttacaaggcaaccgtggagagaa

SEQ ID NO: 221139 - DNA, 25 bp, Artificial
  probe
  misc_feature (1)..(25): SEQ ID NO: 1546; WAN024FU6_at; Start 7; Stop 31
tatttaactgcaggagaatcacacg

SEQ ID NO: 221140 - DNA, 25 bp, Artificial
  probe
  misc_feature (1)..(25): SEQ ID NO: 1546; WAN024FU6_at; Start 451; Stop 475
gctgagctggatatggagattgcca

SEQ ID NO: 221141 - DNA, 25 bp, Artificial
  probe
  misc_feature (1)..(25): SEQ ID NO: 1546; WAN024FU6_at; Start 395; Stop 419
cagctcgtgaaaccaccatgcgggt

SEQ ID NO: 221142 - DNA, 25 bp, Artificial
  probe
  misc_feature (1)..(25): SEQ ID NO: 1546; WAN024FU6_at; Start 769; Stop 793
gaatttggtcttggctttgaggctg

SEQ ID NO: 221143 - DNA, 25 bp, Artificial
  probe
  misc_feature (1)..(25): SEQ ID NO: 1546; WAN024FU6_at; Start 532; Stop 556
gctgaaattaagcaaagagctgccc

SEQ ID NO: 221144 - DNA, 25 bp, Artificial
  probe
  misc_feature (1)..(25): SEQ ID NO: 1546; WAN024FU6_at; Start 1015; Stop 1039
gatccgactgctcttccagctgcag

SEQ ID NO: 221145 - DNA, 25 bp, Artificial
  probe
  misc_feature (1)..(25): SEQ ID NO: 1546; WAN024FU6_at; Start 786; Stop 810
tgaggctggttatcgtaaaggcagc

SEQ ID NO: 221146 - DNA, 25 bp, Artificial
  probe
  misc_feature (1)..(25): SEQ ID NO: 1546; WAN024FU6_at; Start 1030; Stop 1054
ccagctgcaggaatggtcatggaag

SEQ ID NO: 221147 - DNA, 25 bp, Artificial
  probe
  misc_feature (1)..(25): SEQ ID NO: 1546; WAN024FU6_at; Start 852; Stop 876
tactcgccgtaccaataatctaggt

SEQ ID NO: 221148 - DNA, 25 bp, Artificial
  probe
  misc_feature (1)..(25): SEQ ID NO: 1546; WAN024FU6_at; Start 710; Stop 734
gaaaattggatgcaagattggctca

SEQ ID NO: 221149 - DNA, 25 bp, Artificial
  probe
  misc_feature (1)..(25): SEQ ID NO: 1546; WAN024FU6_at; Start 1113; Stop 1137
tgaggaactaaaagaagcggtagcc

SEQ ID NO: 221150 - DNA, 25 bp, Artificial
  probe
  misc_feature (1)..(25): SEQ ID NO: 1546; WAN024FU6_at; Start 583; Stop 607
gaacgagaacaggaaatcaaggact

SEQ ID NO: 221151 - DNA, 25 bp, Artificial
  probe
  misc_feature (1)..(25): SEQ ID NO: 1546; WAN024FU6_at; Start 883; Stop 907
gaaggtggtatgactaatgggcaac

SEQ ID NO: 221152 - DNA, 25 bp, Artificial
  probe
  misc_feature (1)..(25): SEQ ID NO: 1546; WAN024FU6_at; Start 818; Stop 842
tggatgaaattctctggtctaaaga

SEQ ID NO: 221153 - DNA, 25 bp, Artificial
  probe
  misc_feature (1)..(25): SEQ ID NO: 1546; WAN024FU6_at; Start 687; Stop 711
tggttcctatgtccaatgggataga

SEQ ID NO: 221154 - DNA, 25 bp, Artificial
  probe
  misc_feature (1)..(25): SEQ ID NO: 1546; WAN024FU6_at; Start 741; Stop 765
tgtctctatcaatgcctttaaaggg

SEQ ID NO: 221155 - DNA, 25 bp, Artificial
  probe
  misc_feature (1)..(25): SEQ ID NO: 1546; WAN024FU6_at; Start 352; Stop 376
aagtaccgttttgatgatttgcgaa

SEQ ID NO: 221156 - DNA, 25 bp, Artificial
  probe
  misc_feature (1)..(25): SEQ ID NO: 1546; WAN024FU6_at; Start 1055; Stop 1079
cagttgtagcaacggttctggcgca

SEQ ID NO: 221157 - DNA, 25 bp, Artificial
  probe
  misc_feature (1)..(25): SEQ ID NO: 1546; WAN024FU6_at; Start 418; Stop 442
gtggcagttggtgcagtagccaaac

SEQ ID NO: 221158 - DNA, 25 bp, Artificial
  probe
  misc_feature (1)..(25): SEQ ID NO: 1546; WAN024FU6_at; Start 1068; Stop 1092
ggttctggcgcaagaaatcctcgaa

SEQ ID NO: 221159 - DNA, 25 bp, Artificial
  probe
  misc_feature (1)..(25): SEQ ID NO: 1546; WAN024FU6_at; Start 548; Stop 572
gagctgcccagtctgaagtttctat

SEQ ID NO: 221160 - DNA, 25 bp, Artificial
  probe
  misc_feature (1)..(25): SEQ ID NO: 1546; WAN024FU6_at; Start 464; Stop 488
tggagattgccaaccatgtcgtggt

SEQ ID NO: 221161 - DNA, 25 bp, Artificial
  probe
  misc_feature (1)..(25): SEQ ID NO: 668; WAN024FU7_at; Start 53; Stop 77
tgcaaaatattcaaggtggggagat

SEQ ID NO: 221162 - DNA, 25 bp, Artificial
  probe
  misc_feature (1)..(25): SEQ ID NO: 668; WAN024FU7_at; Start 51; Stop 75
cttgcaaaatattcaaggtggggag

SEQ ID NO: 221163 - DNA, 25 bp, Artificial
  probe
  misc_feature (1)..(25): SEQ ID NO: 668; WAN024FU7_at; Start 76; Stop 100
atgaggaaaatgaatgaaaagtcct

SEQ ID NO: 221164 - DNA, 25 bp, Artificial
  probe
  misc_feature (1)..(25): SEQ ID NO: 668; WAN024FU7_at; Start 83; Stop 107
aaatgaatgaaaagtcctttaatat

SEQ ID NO: 221165 - DNA, 25 bp, Artificial
  probe
  misc_feature (1)..(25): SEQ ID NO: 668; WAN024FU7_at; Start 71; Stop 95
gggagatgaggaaaatgaatgaaaa

SEQ ID NO: 221166 - DNA, 25 bp, Artificial
  probe
  misc_feature (1)..(25): SEQ ID NO: 668; WAN024FU7_at; Start 86; Stop 110
tgaatgaaaagtcctttaatatctt

SEQ ID NO: 221167 - DNA, 25 bp, Artificial
  probe
  misc_feature (1)..(25): SEQ ID NO: 668; WAN024FU7_at; Start 75; Stop 99
gatgaggaaaatgaatgaaaagtcc

SEQ ID NO: 221168 - DNA, 25 bp, Artificial
  probe
  misc_feature (1)..(25): SEQ ID NO: 668; WAN024FU7_at; Start 52; Stop 76
ttgcaaaatattcaaggtggggaga

SEQ ID NO: 221169 - DNA, 25 bp, Artificial
  probe
  misc_feature (1)..(25): SEQ ID NO: 668; WAN024FU7_at; Start 74; Stop 98
agatgaggaaaatgaatgaaaagtc

SEQ ID NO: 221170 - DNA, 25 bp, Artificial
  probe
  misc_feature (1)..(25): SEQ ID NO: 668; WAN024FU7_at; Start 70; Stop 94
ggggagatgaggaaaatgaatgaaa

SEQ ID NO: 221171 - DNA, 25 bp, Artificial
  probe
  misc_feature (1)..(25): SEQ ID NO: 668; WAN024FU7_at; Start 73; Stop 97
gagatgaggaaaatgaatgaaaagt

SEQ ID NO: 221172 - DNA, 25 bp, Artificial
  probe
  misc_feature (1)..(25): SEQ ID NO: 668; WAN024FU7_at; Start 68; Stop 92
gtggggagatgaggaaaatgaatga

SEQ ID NO: 221173 - DNA, 25 bp, Artificial
  probe
  misc_feature (1)..(25): SEQ ID NO: 668; WAN024FU7_at; Start 72; Stop 96
ggagatgaggaaaatgaatgaaaag

SEQ ID NO: 221174 - DNA, 25 bp, Artificial
  probe
  misc_feature (1)..(25): SEQ ID NO: 668; WAN024FU7_at; Start 77; Stop 101
tgaggaaaatgaatgaaaagtcctt

SEQ ID NO: 221175 - DNA, 25 bp, Artificial
  probe
  misc_feature (1)..(25): SEQ ID NO: 668; WAN024FU7_at; Start 54; Stop 78
gcaaaatattcaaggtggggagatg

SEQ ID NO: 221176 - DNA, 25 bp, Artificial
  probe
  misc_feature (1)..(25): SEQ ID NO: 668; WAN024FU7_at; Start 69; Stop 93
tggggagatgaggaaaatgaatgaa

SEQ ID NO: 221177 - DNA, 25 bp, Artificial
  probe
  misc_feature (1)..(25): SEQ ID NO: 668; WAN024FU7_at; Start 84; Stop 108
aatgaatgaaaagtcctttaatatc

SEQ ID NO: 221178 - DNA, 25 bp, Artificial
  probe
  misc_feature (1)..(25): SEQ ID NO: 668; WAN024FU7_at; Start 85; Stop 109
atgaatgaaaagtcctttaatatct

SEQ ID NO: 221179 - DNA, 25 bp, Artificial
  probe
  misc_feature (1)..(25): SEQ ID NO: 2213; WAN024FU8_at; Start 211; Stop 235
tcggatgctcgaaattttggaatag

SEQ ID NO: 221180 - DNA, 25 bp, Artificial
  probe
  misc_feature (1)..(25): SEQ ID NO: 2213; WAN024FU8_at; Start 226; Stop 250
tttggaatagagcatatgaaaggcc

SEQ ID NO: 221181 - DNA, 25 bp, Artificial
  probe
  misc_feature (1)..(25): SEQ ID NO: 2213; WAN024FU8_at; Start 93; Stop 117
taaccttgaggttctattagtcgat

SEQ ID NO: 221182 - DNA, 25 bp, Artificial
  probe
  misc_feature (1)..(25): SEQ ID NO: 2213; WAN024FU8_at; Start 440; Stop 464
tagaaaaagcgttaacagcagatgg

SEQ ID NO: 221183 - DNA, 25 bp, Artificial
  probe
  misc_feature (1)..(25): SEQ ID NO: 2213; WAN024FU8_at; Start 410; Stop 434
gggaagtatccttgtctggtcaaca

SEQ ID NO: 221184 - DNA, 25 bp, Artificial
  probe
  misc_feature (1)..(25): SEQ ID NO: 2213; WAN024FU8_at; Start 255; Stop 279
tgtatcgtttattgatggcgatgat

SEQ ID NO: 221185 - DNA, 25 bp, Artificial
  probe
  misc_feature (1)..(25): SEQ ID NO: 2213; WAN024FU8_at; Start 752; Stop 776
cgtgtcaacagtattgtaactggat

SEQ ID NO: 221186 - DNA, 25 bp, Artificial
  probe
  misc_feature (1)..(25): SEQ ID NO: 2213; WAN024FU8_at; Start 680; Stop 704
tgaaggataaaatgcatacatcgcg

SEQ ID NO: 221187 - DNA, 25 bp, Artificial
  probe
  misc_feature (1)..(25): SEQ ID NO: 2213; WAN024FU8_at; Start 7; Stop 31
gatttagtaagcattgtcgttccgg

SEQ ID NO: 221188 - DNA, 25 bp, Artificial
  probe
  misc_feature (1)..(25): SEQ ID NO: 2213; WAN024FU8_at; Start 169; Stop 193
gattcaagaataagagtgtttcata

SEQ ID NO: 221189 - DNA, 25 bp, Artificial
  probe
  misc_feature (1)..(25): SEQ ID NO: 2213; WAN024FU8_at; Start 268; Stop 292
gatggcgatgattatatatctaagg

SEQ ID NO: 221190 - DNA, 25 bp, Artificial
  probe
  misc_feature (1)..(25): SEQ ID NO: 2213; WAN024FU8_at; Start 692; Stop 716
tgcatacatcgcgtattgaatttta

SEQ ID NO: 221191 - DNA, 25 bp, Artificial
  probe
  misc_feature (1)..(25): SEQ ID NO: 2213; WAN024FU8_at; Start 833; Stop 857
tgcaacatcaatttagaagaattgt

SEQ ID NO: 221192 - DNA, 25 bp, Artificial
  probe
  misc_feature (1)..(25): SEQ ID NO: 2213; WAN024FU8_at; Start 106; Stop 130
ctattagtcgatgatggcagtacag

SEQ ID NO: 221193 - DNA, 25 bp, Artificial
  probe
  misc_feature (1)..(25): SEQ ID NO: 2213; WAN024FU8_at; Start 907; Stop 931
ggctatataaatattcgtttagcag

SEQ ID NO: 221194 - DNA, 25 bp, Artificial
  probe
  misc_feature (1)..(25): SEQ ID NO: 2213; WAN024FU8_at; Start 387; Stop 411
aaaagatgagctactagattctggg

SEQ ID NO: 221195 - DNA, 25 bp, Artificial
  probe
  misc_feature (1)..(25): SEQ ID NO: 2213; WAN024FU8_at; Start 63; Stop 87
aatagaaagtattttgaatcaaacg

SEQ ID NO: 221196 - DNA, 25 bp, Artificial
  probe
  misc_feature (1)..(25): SEQ ID NO: 2213; WAN024FU8_at; Start 140; Stop 164
gggaaatttgcgattcatttattaa

SEQ ID NO: 221197 - DNA, 25 bp, Artificial
  probe
  misc_feature (1)..(25): SEQ ID NO: 2213; WAN024FU8_at; Start 295; Stop 319
tatgtgtggaagttgtatcattctc

SEQ ID NO: 221198 - DNA, 25 bp, Artificial
  probe
  misc_feature (1)..(25): SEQ ID NO: 2213; WAN024FU8_at; Start 240; Stop 264
tatgaaaggccaatatgtatcgttt

SEQ ID NO: 221199 - DNA, 25 bp, Artificial
  probe
  misc_feature (1)..(25): SEQ ID NO: 2213; WAN024FU8_at; Start 864; Stop 888
tacacaaaacgatgataagaaactg

SEQ ID NO: 221200 - DNA, 25 bp, Artificial
  probe
  misc_feature (1)..(25): SEQ ID NO: 2213; WAN024FU8_at; Start 320; Stop 344
taaaaaacaataattcagaggtgtc

SEQ ID NO: 221201 - DNA, 25 bp, Artificial
  probe
  misc_feature (1)..(25): SEQ ID NO: 2213; WAN024FU8_at; Start 817; Stop 841
gcctttttaaaatatttgcaacatc

SEQ ID NO: 221202 - DNA, 25 bp, Artificial
  probe
  misc_feature (1)..(25): SEQ ID NO: 2213; WAN024FU8_at; Start 21; Stop 45
tgtcgttccggtctataatgtagaa

SEQ ID NO: 221203 - DNA, 25 bp, Artificial
  probe
  misc_feature (1)..(25): SEQ ID NO: 2213; WAN024FU8_at; Start 198; Stop 222
aaacggtggtttatcggatgctcga

SEQ ID NO: 221204 - DNA, 25 bp, Artificial
  probe
  misc_feature (1)..(25): SEQ ID NO: 2213; WAN024FU8_at; Start 796; Stop 820
cattacaatgttttgaatgtagcct

SEQ ID NO: 221205 - DNA, 25 bp, Artificial
  probe
  misc_feature (1)..(25): SEQ ID NO: 2213; WAN024FU8_at; Start 374; Stop 398
cgggtgaaaagataaaagatgagct

SEQ ID NO: 221206 - DNA, 25 bp, Artificial
  probe
  misc_feature (1)..(25): SEQ ID NO: 2213; WAN024FU8_at; Start 82; Stop 106
caaacgtatgataaccttgaggttc

SEQ ID NO: 221207 - DNA, 25 bp, Artificial
  probe
  misc_feature (1)..(25): SEQ ID NO: 2213; WAN024FU8_at; Start 773; Stop 797
ggattgttacaataactgttagtca

SEQ ID NO: 221208 - DNA, 25 bp, Artificial
  probe
  misc_feature (1)..(25): SEQ ID NO: 2213; WAN024FU8_at; Start 885; Stop 909
actgattatacagaatattttaggc

SEQ ID NO: 221209 - DNA, 25 bp, Artificial
  probe
  misc_feature (1)..(25): SEQ ID NO: 2213; WAN024FU8_at; Start 740; Stop 764
tacaccaacgttcgtgtcaacagta

SEQ ID NO: 221210 - DNA, 25 bp, Artificial
  probe
  misc_feature (1)..(25): SEQ ID NO: 2213; WAN024FU8_at; Start 359; Stop 383
cattggttgatgaaacgggtgaaaa

SEQ ID NO: 221211 - DNA, 25 bp, Artificial
  probe
  misc_feature (1)..(25): SEQ ID NO: 2213; WAN024FU8_at; Start 455; Stop 479
cagcagatggttatcgctatgttgt

SEQ ID NO: 221212 - DNA, 25 bp, Artificial
  probe
  misc_feature (1)..(25): SEQ ID NO: 2213; WAN024FU8_at; Start 335; Stop 359
cagaggtgtctatatgttctttttc

SEQ ID NO: 221213 - DNA, 25 bp, Artificial
  probe
  misc_feature (1)..(25): SEQ ID NO: 2214; WAN024FU9_at; Start 410; Stop 434
gaaaaatatgcttgactggtcaaca

SEQ ID NO: 221214 - DNA, 25 bp, Artificial
  probe
  misc_feature (1)..(25): SEQ ID NO: 2214; WAN024FU9_at; Start 862; Stop 886
tatacacgaaacaatgatattagac

SEQ ID NO: 221215 - DNA, 25 bp, Artificial
  probe
  misc_feature (1)..(25): SEQ ID NO: 2214; WAN024FU9_at; Start 98; Stop 122
tcgagattttattggttgatgacgg

SEQ ID NO: 221216 - DNA, 25 bp, Artificial
  probe
  misc_feature (1)..(25): SEQ ID NO: 2214; WAN024FU9_at; Start 688; Stop 712
gagatgcatacttcacgcattgagt

SEQ ID NO: 221217 - DNA, 25 bp, Artificial
  probe
  misc_feature (1)..(25): SEQ ID NO: 2214; WAN024FU9_at; Start 255; Stop 279
tgtagcgtttattgatagcgatgac

SEQ ID NO: 221218 - DNA, 25 bp, Artificial
  probe
  misc_feature (1)..(25): SEQ ID NO: 2214; WAN024FU9_at; Start 126; Stop 150
cacagatagtagtgggaaaatttgt

SEQ ID NO: 221219 - DNA, 25 bp, Artificial
  probe
  misc_feature (1)..(25): SEQ ID NO: 2214; WAN024FU9_at; Start 681; Stop 705
gaaggatgagatgcatacttcacgc

SEQ ID NO: 221220 - DNA, 25 bp, Artificial
  probe
  misc_feature (1)..(25): SEQ ID NO: 2214; WAN024FU9_at; Start 401; Stop 425
tagattcgggaaaaatatgcttgac

SEQ ID NO: 221221 - DNA, 25 bp, Artificial
  probe
  misc_feature (1)..(25): SEQ ID NO: 2214; WAN024FU9_at; Start 227; Stop 251
ttggaattgagcaaatgaaaggtca

SEQ ID NO: 221222 - DNA, 25 bp, Artificial
  probe
  misc_feature (1)..(25): SEQ ID NO: 2214; WAN024FU9_at; Start 320; Stop 344
taaaaaataatgattccgaggtgtc

SEQ ID NO: 221223 - DNA, 25 bp, Artificial
  probe
  misc_feature (1)..(25): SEQ ID NO: 2214; WAN024FU9_at; Start 444; Stop 468
aaaagtattaacagccgacggctat

SEQ ID NO: 221224 - DNA, 25 bp, Artificial
  probe
  misc_feature (1)..(25): SEQ ID NO: 2214; WAN024FU9_at; Start 907; Stop 931
ggatttatagatattcgtttagcag

SEQ ID NO: 221225 - DNA, 25 bp, Artificial
  probe
  misc_feature (1)..(25): SEQ ID NO: 2214; WAN024FU9_at; Start 28; Stop 52
ccagtctataacgtggaaaaatatt

SEQ ID NO: 221226 - DNA, 25 bp, Artificial
  probe
  misc_feature (1)..(25): SEQ ID NO: 2214; WAN024FU9_at; Start 270; Stop 294
tagcgatgactacatatctaaggat

SEQ ID NO: 221227 - DNA, 25 bp, Artificial
  probe
  misc_feature (1)..(25): SEQ ID NO: 2214; WAN024FU9_at; Start 833; Stop 857
tacaacgacagtttagaaagttcgc

SEQ ID NO: 221228 - DNA, 25 bp, Artificial
  probe
  misc_feature (1)..(25): SEQ ID NO: 2214; WAN024FU9_at; Start 453; Stop 477
aacagccgacggctatcgctatgtt

SEQ ID NO: 221229 - DNA, 25 bp, Artificial
  probe
  misc_feature (1)..(25): SEQ ID NO: 2214; WAN024FU9_at; Start 387; Stop 411
aaaagatgagctattagattcggga

SEQ ID NO: 221230 - DNA, 25 bp, Artificial
  probe
  misc_feature (1)..(25): SEQ ID NO: 2214; WAN024FU9_at; Start 238; Stop 262
caaatgaaaggtcaatatgtagcgt

SEQ ID NO: 221231 - DNA, 25 bp, Artificial
  probe
  misc_feature (1)..(25): SEQ ID NO: 2214; WAN024FU9_at; Start 295; Stop 319
tatgtctggaagttgtattcttcta

SEQ ID NO: 221232 - DNA, 25 bp, Artificial
  probe
  misc_feature (1)..(25): SEQ ID NO: 2214; WAN024FU9_at; Start 7; Stop 31
gatttgataagcattgttgttccag

SEQ ID NO: 221233 - DNA, 25 bp, Artificial
  probe
  misc_feature (1)..(25): SEQ ID NO: 2214; WAN024FU9_at; Start 212; Stop 236
cagatgctcggaattttggaattga

SEQ ID NO: 221234 - DNA, 25 bp, Artificial
  probe
  misc_feature (1)..(25): SEQ ID NO: 2214; WAN024FU9_at; Start 169; Stop 193
gatcctaggataagagtatttcata

SEQ ID NO: 221235 - DNA, 25 bp, Artificial
  probe
  misc_feature (1)..(25): SEQ ID NO: 2214; WAN024FU9_at; Start 701; Stop 725
cacgcattgagttttattcagaaaa

SEQ ID NO: 221236 - DNA, 25 bp, Artificial
  probe
  misc_feature (1)..(25): SEQ ID NO: 2214; WAN024FU9_at; Start 780; Stop 804
tacagcgactaccaatcatagtaag

SEQ ID NO: 221237 - DNA, 25 bp, Artificial
  probe
  misc_feature (1)..(25): SEQ ID NO: 2214; WAN024FU9_at; Start 744; Stop 768
cgaaaaagcgtgtcaacagtactgc

SEQ ID NO: 221238 - DNA, 25 bp, Artificial
  probe
  misc_feature (1)..(25): SEQ ID NO: 2214; WAN024FU9_at; Start 111; Stop 135
ggttgatgacggaagcacagatagt

SEQ ID NO: 221239 - DNA, 25 bp, Artificial
  probe
  misc_feature (1)..(25): SEQ ID NO: 2214; WAN024FU9_at; Start 754; Stop 778
tgtcaacagtactgcaattggattg

SEQ ID NO: 221240 - DNA, 25 bp, Artificial
  probe
  misc_feature (1)..(25): SEQ ID NO: 2214; WAN024FU9_at; Start 78; Stop 102
gaatcagacttatcaaaatatcgag

SEQ ID NO: 221241 - DNA, 25 bp, Artificial
  probe
  misc_feature (1)..(25): SEQ ID NO: 2214; WAN024FU9_at; Start 331; Stop 355
gattccgaggtgtcgatttgttctt

SEQ ID NO: 221242 - DNA, 25 bp, Artificial
  probe
  misc_feature (1)..(25): SEQ ID NO: 2214; WAN024FU9_at; Start 768; Stop 792
caattggattgttacagcgactacc

SEQ ID NO: 221243 - DNA, 25 bp, Artificial
  probe
  misc_feature (1)..(25): SEQ ID NO: 2214; WAN024FU9_at; Start 16; Stop 40
agcattgttgttccagtctataacg

SEQ ID NO: 221244 - DNA, 25 bp, Artificial
  probe
  misc_feature (1)..(25): SEQ ID NO: 2214; WAN024FU9_at; Start 198; Stop 222
aaatggtggtttatcagatgctcgg

SEQ ID NO: 221245 - DNA, 25 bp, Artificial
  probe
  misc_feature (1)..(25): SEQ ID NO: 2214; WAN024FU9_at; Start 846; Stop 870
tagaaagttcgctaaatatacacga

SEQ ID NO: 221246 - DNA, 25 bp, Artificial
  probe
  misc_feature (1)..(25): SEQ ID NO: 2214; WAN024FU9_at; Start 729; Stop 753
gcattcttttttgcacgaaaaagcg

SEQ ID NO: 221247 - DNA, 25 bp, Artificial
  probe
  misc_feature (1)..(25): SEQ ID NO: 2368; WAN024FUA_at; Start 4; Stop 28
gatttccatggtctggcgttgttca

SEQ ID NO: 221248 - DNA, 25 bp, Artificial
  probe
  misc_feature (1)..(25): SEQ ID NO: 2368; WAN024FUA_at; Start 109; Stop 133
gaaatcctcaattctatccagaatg

SEQ ID NO: 221249 - DNA, 25 bp, Artificial
  probe
  misc_feature (1)..(25): SEQ ID NO: 2368; WAN024FUA_at; Start 333; Stop 357
tggcatcaatctcgataaaacgagc

SEQ ID NO: 221250 - DNA, 25 bp, Artificial
  probe
  misc_feature (1)..(25): SEQ ID NO: 2368; WAN024FUA_at; Start 158; Stop 182
gaggtccacattcctggctcgcttt

SEQ ID NO: 221251 - DNA, 25 bp, Artificial
  probe
  misc_feature (1)..(25): SEQ ID NO: 2368; WAN024FUA_at; Start 135; Stop 159
tctcgctattggacaagagaatgga

SEQ ID NO: 221252 - DNA, 25 bp, Artificial
  probe
  misc_feature (1)..(25): SEQ ID NO: 2368; WAN024FUA_at; Start 240; Stop 264
gctcttgagcatagaccgcagtctg

SEQ ID NO: 221253 - DNA, 25 bp, Artificial
  probe
  misc_feature (1)..(25): SEQ ID NO: 2368; WAN024FUA_at; Start 301; Stop 325
gctaatctgagaagtgacacgatca

SEQ ID NO: 221254 - DNA, 25 bp, Artificial
  probe
  misc_feature (1)..(25): SEQ ID NO: 2368; WAN024FUA_at; Start 194; Stop 218
gtcatatctcgaaaaccacctgccg

SEQ ID NO: 221255 - DNA, 25 bp, Artificial
  probe
  misc_feature (1)..(25): SEQ ID NO: 2368; WAN024FUA_at; Start 169; Stop 193
tcctggctcgctttccgcaattcgg

SEQ ID NO: 221256 - DNA, 25 bp, Artificial
  probe
  misc_feature (1)..(25): SEQ ID NO: 2368; WAN024FUA_at; Start 251; Stop 275
tagaccgcagtctgctccatgagac

SEQ ID NO: 221257 - DNA, 25 bp, Artificial
  probe
  misc_feature (1)..(25): SEQ ID NO: 2368; WAN024FUA_at; Start 87; Stop 111
caatcgcttccaaacgttccttgaa

SEQ ID NO: 221258 - DNA, 25 bp, Artificial
  probe
  misc_feature (1)..(25): SEQ ID NO: 2368; WAN024FUA_at; Start 154; Stop 178
aatggaggtccacattcctggctcg

SEQ ID NO: 221259 - DNA, 25 bp, Artificial
  probe
  misc_feature (1)..(25): SEQ ID NO: 2368; WAN024FUA_at; Start 42; Stop 66
aaaagttccaaatttgctcttcatc

SEQ ID NO: 221260 - DNA, 25 bp, Artificial
  probe
  misc_feature (1)..(25): SEQ ID NO: 2368; WAN024FUA_at; Start 9; Stop 33
ccatggtctggcgttgttcacgcgc

SEQ ID NO: 221261 - DNA, 25 bp, Artificial
  probe
  misc_feature (1)..(25): SEQ ID NO: 2368; WAN024FUA_at; Start 65; Stop 89
tctcccttactaatggcctgaccaa

SEQ ID NO: 221262 - DNA, 25 bp, Artificial
  probe
  misc_feature (1)..(25): SEQ ID NO: 2368; WAN024FUA_at; Start 95; Stop 119
tccaaacgttccttgaaatcctcaa

SEQ ID NO: 221263 - DNA, 25 bp, Artificial
  probe
  misc_feature (1)..(25): SEQ ID NO: 2368; WAN024FUA_at; Start 199; Stop 223
atctcgaaaaccacctgccgcaaag

SEQ ID NO: 221264 - DNA, 25 bp, Artificial
  probe
  misc_feature (1)..(25): SEQ ID NO: 2368; WAN024FUA_at; Start 186; Stop 210
caattcgggtcatatctcgaaaacc

SEQ ID NO: 221265 - DNA, 25 bp, Artificial
  probe
  misc_feature (1)..(25): SEQ ID NO: 2368; WAN024FUA_at; Start 283; Stop 307
caaaatatgaggaaaatggctaatc

SEQ ID NO: 221266 - DNA, 25 bp, Artificial
  probe
  misc_feature (1)..(25): SEQ ID NO: 2368; WAN024FUA_at; Start 225; Stop 249
gccttgccatctcatgctcttgagc

SEQ ID NO: 221267 - DNA, 25 bp, Artificial
  probe
  misc_feature (1)..(25): SEQ ID NO: 2368; WAN024FUA_at; Start 261; Stop 285
tctgctccatgagactagaagccaa

SEQ ID NO: 221268 - DNA, 25 bp, Artificial
  probe
  misc_feature (1)..(25): SEQ ID NO: 2368; WAN024FUA_at; Start 174; Stop 198
gctcgctttccgcaattcgggtcat

SEQ ID NO: 221269 - DNA, 25 bp, Artificial
  probe
  misc_feature (1)..(25): SEQ ID NO: 2368; WAN024FUA_at; Start 17; Stop 41
tggcgttgttcacgcgcttggttaa

SEQ ID NO: 221270 - DNA, 25 bp, Artificial
  probe
  misc_feature (1)..(25): SEQ ID NO: 2368; WAN024FUA_at; Start 271; Stop 295
gagactagaagccaaaatatgagga

SEQ ID NO: 221271 - DNA, 25 bp, Artificial
  probe
  misc_feature (1)..(25): SEQ ID NO: 2368; WAN024FUA_at; Start 311; Stop 335
gaagtgacacgatcatgctccttgg

SEQ ID NO: 221272 - DNA, 25 bp, Artificial
  probe
  misc_feature (1)..(25): SEQ ID NO: 2368; WAN024FUA_at; Start 56; Stop 80
tgctcttcatctcccttactaatgg

SEQ ID NO: 221273 - DNA, 25 bp, Artificial
  probe
  misc_feature (1)..(25): SEQ ID NO: 2368; WAN024FUA_at; Start 326; Stop 350
tgctccttggcatcaatctcgataa

SEQ ID NO: 221274 - DNA, 25 bp, Artificial
  probe
  misc_feature (1)..(25): SEQ ID NO: 2368; WAN024FUA_at; Start 220; Stop 244
aaagcgccttgccatctcatgctct

SEQ ID NO: 221275 - DNA, 25 bp, Artificial
  probe
  misc_feature (1)..(25): SEQ ID NO: 2368; WAN024FUA_at; Start 140; Stop 164
ctattggacaagagaatggaggtcc

SEQ ID NO: 221276 - DNA, 25 bp, Artificial
  probe
  misc_feature (1)..(25): SEQ ID NO: 2368; WAN024FUA_at; Start 344; Stop 368
tcgataaaacgagcatgaagacctg

SEQ ID NO: 221277 - DNA, 25 bp, Artificial
  probe
  misc_feature (1)..(25): SEQ ID NO: 2368; WAN024FUA_at; Start 293; Stop 317
ggaaaatggctaatctgagaagtga

SEQ ID NO: 221278 - DNA, 25 bp, Artificial
  probe
  misc_feature (1)..(25): SEQ ID NO: 2368; WAN024FUA_at; Start 316; Stop 340
gacacgatcatgctccttggcatca

SEQ ID NO: 221279 - DNA, 25 bp, Artificial
  probe
  misc_feature (1)..(25): SEQ ID NO: 2368; WAN024FUA_at; Start 79; Stop 103
ggcctgaccaatcgcttccaaacgt

SEQ ID NO: 221280 - DNA, 25 bp, Artificial
  probe
  misc_feature (1)..(25): SEQ ID NO: 2368; WAN024FUA_at; Start 72; Stop 96
tactaatggcctgaccaatcgcttc

SEQ ID NO: 221281 - DNA, 25 bp, Artificial
  probe
  misc_feature (1)..(25): SEQ ID NO: 2560; WAN024FUB_at; Start 66; Stop 90
ggttgacttggtcgaaccagcatct

SEQ ID NO: 221282 - DNA, 25 bp, Artificial
  probe
  misc_feature (1)..(25): SEQ ID NO: 2560; WAN024FUB_at; Start 176; Stop 200
tgacatctgccaaaggagcaaaact

SEQ ID NO: 221283 - DNA, 25 bp, Artificial
  probe
  misc_feature (1)..(25): SEQ ID NO: 2560; WAN024FUB_at; Start 9; Stop 33
ggccccgacaaagcgaacagacttg

SEQ ID NO: 221284 - DNA, 25 bp, Artificial
  probe
  misc_feature (1)..(25): SEQ ID NO: 2560; WAN024FUB_at; Start 95; Stop 119
taataacgccttctcgcaaatccaa

SEQ ID NO: 221285 - DNA, 25 bp, Artificial
  probe
  misc_feature (1)..(25): SEQ ID NO: 2560; WAN024FUB_at; Start 82; Stop 106
ccagcatctgaaataataacgcctt

SEQ ID NO: 221286 - DNA, 25 bp, Artificial
  probe
  misc_feature (1)..(25): SEQ ID NO: 2560; WAN024FUB_at; Start 191; Stop 215
gagcaaaactagcaaaatcatccgt

SEQ ID NO: 221287 - DNA, 25 bp, Artificial
  probe
  misc_feature (1)..(25): SEQ ID NO: 2560; WAN024FUB_at; Start 155; Stop 179
tgattggcaagctgaggataatgac

SEQ ID NO: 221288 - DNA, 25 bp, Artificial
  probe
  misc_feature (1)..(25): SEQ ID NO: 2560; WAN024FUB_at; Start 181; Stop 205
tctgccaaaggagcaaaactagcaa

SEQ ID NO: 221289 - DNA, 25 bp, Artificial
  probe
  misc_feature (1)..(25): SEQ ID NO: 2560; WAN024FUB_at; Start 129; Stop 153
ctccttaatgaaagcaatagtttgt

SEQ ID NO: 221290 - DNA, 25 bp, Artificial
  probe
  misc_feature (1)..(25): SEQ ID NO: 2560; WAN024FUB_at; Start 52; Stop 76
gccgcatccacaatggttgacttgg

SEQ ID NO: 221291 - DNA, 25 bp, Artificial
  probe
  misc_feature (1)..(25): SEQ ID NO: 2560; WAN024FUB_at; Start 235; Stop 259
tctttcaaggcgatatctctcgaag

SEQ ID NO: 221292 - DNA, 25 bp, Artificial
  probe
  misc_feature (1)..(25): SEQ ID NO: 2560; WAN024FUB_at; Start 47; Stop 71
gctccgccgcatccacaatggttga

SEQ ID NO: 221293 - DNA, 25 bp, Artificial
  probe
  misc_feature (1)..(25): SEQ ID NO: 2560; WAN024FUB_at; Start 162; Stop 186
caagctgaggataatgacatctgcc

SEQ ID NO: 221294 - DNA, 25 bp, Artificial
  probe
  misc_feature (1)..(25): SEQ ID NO: 2560; WAN024FUB_at; Start 59; Stop 83
ccacaatggttgacttggtcgaacc

SEQ ID NO: 221295 - DNA, 25 bp, Artificial
  probe
  misc_feature (1)..(25): SEQ ID NO: 2560; WAN024FUB_at; Start 21; Stop 45
gcgaacagacttgccagccaaatac

SEQ ID NO: 221296 - DNA, 25 bp, Artificial
  probe
  misc_feature (1)..(25): SEQ ID NO: 2560; WAN024FUB_at; Start 56; Stop 80
catccacaatggttgacttggtcga

SEQ ID NO: 221297 - DNA, 25 bp, Artificial
  probe
  misc_feature (1)..(25): SEQ ID NO: 2560; WAN024FUB_at; Start 15; Stop 39
gacaaagcgaacagacttgccagcc

SEQ ID NO: 221298 - DNA, 25 bp, Artificial
  probe
  misc_feature (1)..(25): SEQ ID NO: 2560; WAN024FUB_at; Start 119; Stop 143
aattggccaactccttaatgaaagc

SEQ ID NO: 221299 - DNA, 25 bp, Artificial
  probe
  misc_feature (1)..(25): SEQ ID NO: 2560; WAN024FUB_at; Start 170; Stop 194
ggataatgacatctgccaaaggagc

SEQ ID NO: 221300 - DNA, 25 bp, Artificial
  probe
  misc_feature (1)..(25): SEQ ID NO: 2560; WAN024FUB_at; Start 4; Stop 28
ggatgggccccgacaaagcgaacag

SEQ ID NO: 221301 - DNA, 25 bp, Artificial
  probe
  misc_feature (1)..(25): SEQ ID NO: 2560; WAN024FUB_at; Start 100; Stop 124
acgccttctcgcaaatccaaattgg

SEQ ID NO: 221302 - DNA, 25 bp, Artificial
  probe
  misc_feature (1)..(25): SEQ ID NO: 2560; WAN024FUB_at; Start 70; Stop 94
gacttggtcgaaccagcatctgaaa

SEQ ID NO: 221303 - DNA, 25 bp, Artificial
  probe
  misc_feature (1)..(25): SEQ ID NO: 2560; WAN024FUB_at; Start 165; Stop 189
gctgaggataatgacatctgccaaa

SEQ ID NO: 221304 - DNA, 25 bp, Artificial
  probe
  misc_feature (1)..(25): SEQ ID NO: 2560; WAN024FUB_at; Start 200; Stop 224
tagcaaaatcatccgttgcacggtc

SEQ ID NO: 221305 - DNA, 25 bp, Artificial
  probe
  misc_feature (1)..(25): SEQ ID NO: 2560; WAN024FUB_at; Start 223; Stop 247
tcaatcataccttctttcaaggcga

SEQ ID NO: 221306 - DNA, 25 bp, Artificial
  probe
  misc_feature (1)..(25): SEQ ID NO: 2560; WAN024FUB_at; Start 213; Stop 237
cgttgcacggtcaatcataccttct

SEQ ID NO: 221307 - DNA, 25 bp, Artificial
  probe
  misc_feature (1)..(25): SEQ ID NO: 2560; WAN024FUB_at; Start 142; Stop 166
gcaatagtttgtttgattggcaagc

SEQ ID NO: 221308 - DNA, 25 bp, Artificial
  probe
  misc_feature (1)..(25): SEQ ID NO: 2560; WAN024FUB_at; Start 28; Stop 52
gacttgccagccaaatactgctccg

SEQ ID NO: 221309 - DNA, 25 bp, Artificial
  probe
  misc_feature (1)..(25): SEQ ID NO: 2560; WAN024FUB_at; Start 74; Stop 98
tggtcgaaccagcatctgaaataat

SEQ ID NO: 221310 - DNA, 25 bp, Artificial
  probe
  misc_feature (1)..(25): SEQ ID NO: 2560; WAN024FUB_at; Start 123; Stop 147
ggccaactccttaatgaaagcaata

SEQ ID NO: 221311 - DNA, 25 bp, Artificial
  probe
  misc_feature (1)..(25): SEQ ID NO: 2560; WAN024FUB_at; Start 106; Stop 130
tctcgcaaatccaaattggccaact

SEQ ID NO: 221312 - DNA, 25 bp, Artificial
  probe
  misc_feature (1)..(25): SEQ ID NO: 2560; WAN024FUB_at; Start 240; Stop 264
caaggcgatatctctcgaagcttga

SEQ ID NO: 221313 - DNA, 25 bp, Artificial
  probe
  misc_feature (1)..(25): SEQ ID NO: 2560; WAN024FUB_at; Start 88; Stop 112
tctgaaataataacgccttctcgca

SEQ ID NO: 221314 - DNA, 25 bp, Artificial
  probe
  misc_feature (1)..(25): SEQ ID NO: 2560; WAN024FUB_at; Start 205; Stop 229
aaatcatccgttgcacggtcaatca

SEQ ID NO: 221315 - DNA, 25 bp, Artificial
  probe
  misc_feature (1)..(25): SEQ ID NO: 3343; WAN024FUC_at; Start 92; Stop 116
cagaatacaaggctgttaaagcagc

SEQ ID NO: 221316 - DNA, 25 bp, Artificial
  probe
  misc_feature (1)..(25): SEQ ID NO: 3343; WAN024FUC_at; Start 139; Stop 163
gctgaggcaagcaaaatctttacag

SEQ ID NO: 221317 - DNA, 25 bp, Artificial
  probe
  misc_feature (1)..(25): SEQ ID NO: 3343; WAN024FUC_at; Start 61; Stop 85
aacgaactcagtcgcggtctacgcg

SEQ ID NO: 221318 - DNA, 25 bp, Artificial
  probe
  misc_feature (1)..(25): SEQ ID NO: 3343; WAN024FUC_at; Start 206; Stop 230
caggtcaaatgccagatgcgtcctt

SEQ ID NO: 221319 - DNA, 25 bp, Artificial
  probe
  misc_feature (1)..(25): SEQ ID NO: 3343; WAN024FUC_at; Start 36; Stop 60
catgtcaaatatttacgatagtgca

SEQ ID NO: 221320 - DNA, 25 bp, Artificial
  probe
  misc_feature (1)..(25): SEQ ID NO: 3343; WAN024FUC_at; Start 244; Stop 268
gaaggctttggtaaacagattcaag

SEQ ID NO: 221321 - DNA, 25 bp, Artificial
  probe
  misc_feature (1)..(25): SEQ ID NO: 3343; WAN024FUC_at; Start 112; Stop 136
gcagctaaagatgcgattgcagcag

SEQ ID NO: 221322 - DNA, 25 bp, Artificial
  probe
  misc_feature (1)..(25): SEQ ID NO: 3343; WAN024FUC_at; Start 20; Stop 44
caaataaggagaagaacatgtcaaa

SEQ ID NO: 221323 - DNA, 25 bp, Artificial
  probe
  misc_feature (1)..(25): SEQ ID NO: 3343; WAN024FUC_at; Start 107; Stop 131
ttaaagcagctaaagatgcgattgc

SEQ ID NO: 221324 - DNA, 25 bp, Artificial
  probe
  misc_feature (1)..(25): SEQ ID NO: 3343; WAN024FUC_at; Start 230; Stop 254
tccaagctaagatggaaggctttgg

SEQ ID NO: 221325 - DNA, 25 bp, Artificial
  probe
  misc_feature (1)..(25): SEQ ID NO: 3343; WAN024FUC_at; Start 66; Stop 90
actcagtcgcggtctacgcggatta

SEQ ID NO: 221326 - DNA, 25 bp, Artificial
  probe
  misc_feature (1)..(25): SEQ ID NO: 3343; WAN024FUC_at; Start 290; Stop 314
tctttaccaagcaacaacaattggc

SEQ ID NO: 221327 - DNA, 25 bp, Artificial
  probe
  misc_feature (1)..(25): SEQ ID NO: 3343; WAN024FUC_at; Start 17; Stop 41
catcaaataaggagaagaacatgtc

SEQ ID NO: 221328 - DNA, 25 bp, Artificial
  probe
  misc_feature (1)..(25): SEQ ID NO: 3343; WAN024FUC_at; Start 261; Stop 285
gattcaaggaaatagcctcttgtca

SEQ ID NO: 221329 - DNA, 25 bp, Artificial
  probe
  misc_feature (1)..(25): SEQ ID NO: 3343; WAN024FUC_at; Start 255; Stop 279
taaacagattcaaggaaatagcctc

SEQ ID NO: 221330 - DNA, 25 bp, Artificial
  probe
  misc_feature (1)..(25): SEQ ID NO: 3343; WAN024FUC_at; Start 210; Stop 234
tcaaatgccagatgcgtccttccaa

SEQ ID NO: 221331 - DNA, 25 bp, Artificial
  probe
  misc_feature (1)..(25): SEQ ID NO: 3343; WAN024FUC_at; Start 126; Stop 150
gattgcagcagatgctgaggcaagc

SEQ ID NO: 221332 - DNA, 25 bp, Artificial
  probe
  misc_feature (1)..(25): SEQ ID NO: 3343; WAN024FUC_at; Start 220; Stop 244
gatgcgtccttccaagctaagatgg

SEQ ID NO: 221333 - DNA, 25 bp, Artificial
  probe
  misc_feature (1)..(25): SEQ ID NO: 3343; WAN024FUC_at; Start 349; Stop 373
gaaccagtttcagaattgctgaaat

SEQ ID NO: 221334 - DNA, 25 bp, Artificial
  probe
  misc_feature (1)..(25): SEQ ID NO: 3343; WAN024FUC_at; Start 281; Stop 305
tgtcagaattctttaccaagcaaca

SEQ ID NO: 221335 - DNA, 25 bp, Artificial
  probe
  misc_feature (1)..(25): SEQ ID NO: 3343; WAN024FUC_at; Start 130; Stop 154
gcagcagatgctgaggcaagcaaaa

SEQ ID NO: 221336 - DNA, 25 bp, Artificial
  probe
  misc_feature (1)..(25): SEQ ID NO: 3343; WAN024FUC_at; Start 97; Stop 121
tacaaggctgttaaagcagctaaag

SEQ ID NO: 221337 - DNA, 25 bp, Artificial
  probe
  misc_feature (1)..(25): SEQ ID NO: 3343; WAN024FUC_at; Start 52; Stop 76
gatagtgcaaacgaactcagtcgcg

SEQ ID NO: 221338 - DNA, 25 bp, Artificial
  probe
  misc_feature (1)..(25): SEQ ID NO: 3343; WAN024FUC_at; Start 178; Stop 202
caagaggaaattcaaaaactagcac

SEQ ID NO: 221339 - DNA, 25 bp, Artificial
  probe
  misc_feature (1)..(25): SEQ ID NO: 3343; WAN024FUC_at; Start 237; Stop 261
taagatggaaggctttggtaaacag

SEQ ID NO: 221340 - DNA, 25 bp, Artificial
  probe
  misc_feature (1)..(25): SEQ ID NO: 3343; WAN024FUC_at; Start 45; Stop 69
tatttacgatagtgcaaacgaactc

SEQ ID NO: 221341 - DNA, 25 bp, Artificial
  probe
  misc_feature (1)..(25): SEQ ID NO: 3343; WAN024FUC_at; Start 297; Stop 321
caagcaacaacaattggccatttac

SEQ ID NO: 221342 - DNA, 25 bp, Artificial
  probe
  misc_feature (1)..(25): SEQ ID NO: 3343; WAN024FUC_at; Start 268; Stop 292
ggaaatagcctcttgtcagaattct

SEQ ID NO: 221343 - DNA, 25 bp, Artificial
  probe
  misc_feature (1)..(25): SEQ ID NO: 3343; WAN024FUC_at; Start 305; Stop 329
aacaattggccatttacctttctga

SEQ ID NO: 221344 - DNA, 25 bp, Artificial
  probe
  misc_feature (1)..(25): SEQ ID NO: 3343; WAN024FUC_at; Start 216; Stop 240
gccagatgcgtccttccaagctaag

SEQ ID NO: 221345 - DNA, 25 bp, Artificial
  probe
  misc_feature (1)..(25): SEQ ID NO: 3343; WAN024FUC_at; Start 166; Stop 190
tatcttgcctttcaagaggaaattc

SEQ ID NO: 221346 - DNA, 25 bp, Artificial
  probe
  misc_feature (1)..(25): SEQ ID NO: 3343; WAN024FUC_at; Start 6; Stop 30
tatacagtcgtcatcaaataaggag

SEQ ID NO: 221347 - DNA, 25 bp, Artificial
  probe
  misc_feature (1)..(25): SEQ ID NO: 3343; WAN024FUC_at; Start 10; Stop 34
cagtcgtcatcaaataaggagaaga

SEQ ID NO: 221348 - DNA, 25 bp, Artificial
  probe
  misc_feature (1)..(25): SEQ ID NO: 3343; WAN024FUC_at; Start 56; Stop 80
gtgcaaacgaactcagtcgcggtct

SEQ ID NO: 221349 - DNA, 25 bp, Artificial
  probe
  misc_feature (1)..(25): SEQ ID NO: 2376; WAN024FUD_at; Start 618; Stop 642
tcaagagcatgagatggcaaggcgc

SEQ ID NO: 221350 - DNA, 25 bp, Artificial
  probe
  misc_feature (1)..(25): SEQ ID NO: 2376; WAN024FUD_at; Start 825; Stop 849
taaccaagcgcgtgaacaacgccag

SEQ ID NO: 221351 - DNA, 25 bp, Artificial
  probe
  misc_feature (1)..(25): SEQ ID NO: 2376; WAN024FUD_at; Start 276; Stop 300
tatttcagatgctggttcgaccaag

SEQ ID NO: 221352 - DNA, 25 bp, Artificial
  probe
  misc_feature (1)..(25): SEQ ID NO: 2376; WAN024FUD_at; Start 328; Stop 352
tatttggctggcaagtctgttcgct

SEQ ID NO: 221353 - DNA, 25 bp, Artificial
  probe
  misc_feature (1)..(25): SEQ ID NO: 2376; WAN024FUD_at; Start 366; Stop 390
tcccatggctggtagtcacaagaca

SEQ ID NO: 221354 - DNA, 25 bp, Artificial
  probe
  misc_feature (1)..(25): SEQ ID NO: 2376; WAN024FUD_at; Start 976; Stop 1000
cacatcaacgaggaaaatcgtgagg

SEQ ID NO: 221355 - DNA, 25 bp, Artificial
  probe
  misc_feature (1)..(25): SEQ ID NO: 2376; WAN024FUD_at; Start 225; Stop 249
tattgctttcattaaggagttggcc

SEQ ID NO: 221356 - DNA, 25 bp, Artificial
  probe
  misc_feature (1)..(25): SEQ ID NO: 2376; WAN024FUD_at; Start 852; Stop 876
catggaaatccataagcgtggtggt

SEQ ID NO: 221357 - DNA, 25 bp, Artificial
  probe
  misc_feature (1)..(25): SEQ ID NO: 2376; WAN024FUD_at; Start 683; Stop 707
aaagcgagccaggaatgtggacctc

SEQ ID NO: 221358 - DNA, 25 bp, Artificial
  probe
  misc_feature (1)..(25): SEQ ID NO: 2376; WAN024FUD_at; Start 470; Stop 494
cgcttaaggaaatgaaggatctgct

SEQ ID NO: 221359 - DNA, 25 bp, Artificial
  probe
  misc_feature (1)..(25): SEQ ID NO: 2376; WAN024FUD_at; Start 46; Stop 70
tctatggcacttggtatcaaacgcg

SEQ ID NO: 221360 - DNA, 25 bp, Artificial
  probe
  misc_feature (1)..(25): SEQ ID NO: 2376; WAN024FUD_at; Start 148; Stop 172
gaccgtgcaacggatgattttgcta

SEQ ID NO: 221361 - DNA, 25 bp, Artificial
  probe
  misc_feature (1)..(25): SEQ ID NO: 2376; WAN024FUD_at; Start 541; Stop 565
gatcgtgtcacttctcagattagcc

SEQ ID NO: 221362 - DNA, 25 bp, Artificial
  probe
  misc_feature (1)..(25): SEQ ID NO: 2376; WAN024FUD_at; Start 875; Stop 899
gtgtggatagctcttacgacctcta

SEQ ID NO: 221363 - DNA, 25 bp, Artificial
  probe
  misc_feature (1)..(25): SEQ ID NO: 2376; WAN024FUD_at; Start 601; Stop 625
cagactgcggtctatgctcaagagc

SEQ ID NO: 221364 - DNA, 25 bp, Artificial
  probe
  misc_feature (1)..(25): SEQ ID NO: 2376; WAN024FUD_at; Start 528; Stop 552
tgccaaggagcatgatcgtgtcact

SEQ ID NO: 221365 - DNA, 25 bp, Artificial
  probe
  misc_feature (1)..(25): SEQ ID NO: 2376; WAN024FUD_at; Start 4; Stop 28
gcaaaaacaatctatatcgcaggtc

SEQ ID NO: 221366 - DNA, 25 bp, Artificial
  probe
  misc_feature (1)..(25): SEQ ID NO: 2376; WAN024FUD_at; Start 892; Stop 916
gacctctatgttgacgttcctgatg

SEQ ID NO: 221367 - DNA, 25 bp, Artificial
  probe
  misc_feature (1)..(25): SEQ ID NO: 2376; WAN024FUD_at; Start 649; Stop 673
gcaggtggttttcgagatatgaccc

SEQ ID NO: 221368 - DNA, 25 bp, Artificial
  probe
  misc_feature (1)..(25): SEQ ID NO: 2376; WAN024FUD_at; Start 586; Stop 610
tctagtctcatggagcagactgcgg

SEQ ID NO: 221369 - DNA, 25 bp, Artificial
  probe
  misc_feature (1)..(25): SEQ ID NO: 2376; WAN024FUD_at; Start 785; Stop 809
ccattagtaagggagatgaagagca

SEQ ID NO: 221370 - DNA, 25 bp, Artificial
  probe
  misc_feature (1)..(25): SEQ ID NO: 2376; WAN024FUD_at; Start 97; Stop 121
tataatcgtagtcaagcttcgagag

SEQ ID NO: 221371 - DNA, 25 bp, Artificial
  probe
  misc_feature (1)..(25): SEQ ID NO: 2376; WAN024FUD_at; Start 248; Stop 272
ccaatttggatttgcgagaaggcgt

SEQ ID NO: 221372 - DNA, 25 bp, Artificial
  probe
  misc_feature (1)..(25): SEQ ID NO: 2376; WAN024FUD_at; Start 497; Stop 521
caggtcttcatgctcgttttatcga

SEQ ID NO: 221373 - DNA, 25 bp, Artificial
  probe
  misc_feature (1)..(25): SEQ ID NO: 2376; WAN024FUD_at; Start 23; Stop 47
caggtcttgggttgattggagcctc

SEQ ID NO: 221374 - DNA, 25 bp, Artificial
  probe
  misc_feature (1)..(25): SEQ ID NO: 2376; WAN024FUD_at; Start 178; Stop 202
gctcctttggcagatgtcattatcc

SEQ ID NO: 221375 - DNA, 25 bp, Artificial
  probe
  misc_feature (1)..(25): SEQ ID NO: 2376; WAN024FUD_at; Start 392; Stop 416
gggctgcttcggcagatgtcaatct

SEQ ID NO: 221376 - DNA, 25 bp, Artificial
  probe
  misc_feature (1)..(25): SEQ ID NO: 2376; WAN024FUD_at; Start 666; Stop 690
tatgacccgaattgcggaaagcgag

SEQ ID NO: 221377 - DNA, 25 bp, Artificial
  probe
  misc_feature (1)..(25): SEQ ID NO: 2376; WAN024FUD_at; Start 515; Stop 539
ttatcgagattgatgccaaggagca

SEQ ID NO: 221378 - DNA, 25 bp, Artificial
  probe
  misc_feature (1)..(25): SEQ ID NO: 2376; WAN024FUD_at; Start 1025; Stop 1049
catttaaaaatgctcaagacttgga

SEQ ID NO: 221379 - DNA, 25 bp, Artificial
  probe
  misc_feature (1)..(25): SEQ ID NO: 2376; WAN024FUD_at; Start 58; Stop 82
ggtatcaaacgcgatcatccagatt

SEQ ID NO: 221380 - DNA, 25 bp, Artificial
  probe
  misc_feature (1)..(25): SEQ ID NO: 2376; WAN024FUD_at; Start 455; Stop 479
tgacaagtcaggacacgcttaagga

SEQ ID NO: 221381 - DNA, 25 bp, Artificial
  probe
  misc_feature (1)..(25): SEQ ID NO: 2376; WAN024FUD_at; Start 930; Stop 954
cctgcggattttggaactgctacgt

SEQ ID NO: 221382 - DNA, 25 bp, Artificial
  probe
  misc_feature (1)..(25): SEQ ID NO: 2376; WAN024FUD_at; Start 301; Stop 325
tcaaccattgtggatgcggcggagc

SEQ ID NO: 221383 - DNA, 25 bp, Artificial
  probe
  misc_feature (1)..(25): SEQ ID NO: 778; WAN024FUE_at; Start 790; Stop 814
tctagatcgggtagcaatgcgacac

SEQ ID NO: 221384 - DNA, 25 bp, Artificial
  probe
  misc_feature (1)..(25): SEQ ID NO: 778; WAN024FUE_at; Start 1024; Stop 1048
tctgagagactaagaagtattggct

SEQ ID NO: 221385 - DNA, 25 bp, Artificial
  probe
  misc_feature (1)..(25): SEQ ID NO: 778; WAN024FUE_at; Start 657; Stop 681
tatagcatttgcagtagtcaatgag

SEQ ID NO: 221386 - DNA, 25 bp, Artificial
  probe
  misc_feature (1)..(25): SEQ ID NO: 778; WAN024FUE_at; Start 597; Stop 621
tcttctagaggttttggtactaagc

SEQ ID NO: 221387 - DNA, 25 bp, Artificial
  probe
  misc_feature (1)..(25): SEQ ID NO: 778; WAN024FUE_at; Start 612; Stop 636
ggtactaagcaaatctagaatagcg

SEQ ID NO: 221388 - DNA, 25 bp, Artificial
  probe
  misc_feature (1)..(25): SEQ ID NO: 778; WAN024FUE_at; Start 404; Stop 428
gaggctccaatgtaattttgtttgg

SEQ ID NO: 221389 - DNA, 25 bp, Artificial
  probe
  misc_feature (1)..(25): SEQ ID NO: 778; WAN024FUE_at; Start 698; Stop 722
aatggcttattggaattttctgtcc

SEQ ID NO: 221390 - DNA, 25 bp, Artificial
  probe
  misc_feature (1)..(25): SEQ ID NO: 778; WAN024FUE_at; Start 866; Stop 890
tacttggcgcaggtgtcagaattcc

SEQ ID NO: 221391 - DNA, 25 bp, Artificial
  probe
  misc_feature (1)..(25): SEQ ID NO: 778; WAN024FUE_at; Start 814; Stop 838
cgctttagagtgtatgaggaatccc

SEQ ID NO: 221392 - DNA, 25 bp, Artificial
  probe
  misc_feature (1)..(25): SEQ ID NO: 778; WAN024FUE_at; Start 498; Stop 522
agaatacgcaactttaaatggtcag

SEQ ID NO: 221393 - DNA, 25 bp, Artificial
  probe
  misc_feature (1)..(25): SEQ ID NO: 778; WAN024FUE_at; Start 265; Stop 289
aaagcatttaattggctaatagcag

SEQ ID NO: 221394 - DNA, 25 bp, Artificial
  probe
  misc_feature (1)..(25): SEQ ID NO: 778; WAN024FUE_at; Start 327; Stop 351
tattgacaggataaagagatatatg

SEQ ID NO: 221395 - DNA, 25 bp, Artificial
  probe
  misc_feature (1)..(25): SEQ ID NO: 778; WAN024FUE_at; Start 801; Stop 825
tagcaatgcgacacgctttagagtg

SEQ ID NO: 221396 - DNA, 25 bp, Artificial
  probe
  misc_feature (1)..(25): SEQ ID NO: 778; WAN024FUE_at; Start 837; Stop 861
cctaaaagctattaatggaatggaa

SEQ ID NO: 221397 - DNA, 25 bp, Artificial
  probe
  misc_feature (1)..(25): SEQ ID NO: 778; WAN024FUE_at; Start 217; Stop 241
tctctgattgatggattggctgttc

SEQ ID NO: 221398 - DNA, 25 bp, Artificial
  probe
  misc_feature (1)..(25): SEQ ID NO: 778; WAN024FUE_at; Start 465; Stop 489
tactagttatggtgtaagatataca

SEQ ID NO: 221399 - DNA, 25 bp, Artificial
  probe
  misc_feature (1)..(25): SEQ ID NO: 778; WAN024FUE_at; Start 778; Stop 802
caaatgtttagttctagatcgggta

SEQ ID NO: 221400 - DNA, 25 bp, Artificial
  probe
  misc_feature (1)..(25): SEQ ID NO: 778; WAN024FUE_at; Start 679; Stop 703
gagattaattcaaacaataaatggc

SEQ ID NO: 221401 - DNA, 25 bp, Artificial
  probe
  misc_feature (1)..(25): SEQ ID NO: 778; WAN024FUE_at; Start 54; Stop 78
tatcctacttccaaaacagtttatg

SEQ ID NO: 221402 - DNA, 25 bp, Artificial
  probe
  misc_feature (1)..(25): SEQ ID NO: 778; WAN024FUE_at; Start 389; Stop 413
tattctatatacaaagaggctccaa

SEQ ID NO: 221403 - DNA, 25 bp, Artificial
  probe
  misc_feature (1)..(25): SEQ ID NO: 778; WAN024FUE_at; Start 234; Stop 258
ggctgttcaagtgttattttcagat

SEQ ID NO: 221404 - DNA, 25 bp, Artificial
  probe
  misc_feature (1)..(25): SEQ ID NO: 778; WAN024FUE_at; Start 1010; Stop 1034
taaaatgtgattcatctgagagact

SEQ ID NO: 221405 - DNA, 25 bp, Artificial
  probe
  misc_feature (1)..(25): SEQ ID NO: 778; WAN024FUE_at; Start 854; Stop 878
gaatggaaatgttacttggcgcagg

SEQ ID NO: 221406 - DNA, 25 bp, Artificial
  probe
  misc_feature (1)..(25): SEQ ID NO: 778; WAN024FUE_at; Start 877; Stop 901
ggtgtcagaattccctctacagtag

SEQ ID NO: 221407 - DNA, 25 bp, Artificial
  probe
  misc_feature (1)..(25): SEQ ID NO: 778; WAN024FUE_at; Start 440; Stop 464
tagactgggacggatttacattagc

SEQ ID NO: 221408 - DNA, 25 bp, Artificial
  probe
  misc_feature (1)..(25): SEQ ID NO: 778; WAN024FUE_at; Start 160; Stop 184
ccgtctttttgtatggtgctatgga

SEQ ID NO: 221409 - DNA, 25 bp, Artificial
  probe
  misc_feature (1)..(25): SEQ ID NO: 778; WAN024FUE_at; Start 829; Stop 853
gaggaatccctaaaagctattaatg

SEQ ID NO: 221410 - DNA, 25 bp, Artificial
  probe
  misc_feature (1)..(25): SEQ ID NO: 778; WAN024FUE_at; Start 312; Stop 336
gaaaatgccaatcaatattgacagg

SEQ ID NO: 221411 - DNA, 25 bp, Artificial
  probe
  misc_feature (1)..(25): SEQ ID NO: 778; WAN024FUE_at; Start 1051; Stop 1075
attctagctttgtcagtattttggc

SEQ ID NO: 221412 - DNA, 25 bp, Artificial
  probe
  misc_feature (1)..(25): SEQ ID NO: 778; WAN024FUE_at; Start 426; Stop 450
tggaagaagtttgttagactgggac

SEQ ID NO: 221413 - DNA, 25 bp, Artificial
  probe
  misc_feature (1)..(25): SEQ ID NO: 778; WAN024FUE_at; Start 890; Stop 914
cctctacagtagatatattattggg

SEQ ID NO: 221414 - DNA, 25 bp, Artificial
  probe
  misc_feature (1)..(25): SEQ ID NO: 778; WAN024FUE_at; Start 625; Stop 649
tctagaatagcgattgttgcaatgc

SEQ ID NO: 221415 - DNA, 25 bp, Artificial
  probe
  misc_feature (1)..(25): SEQ ID NO: 778; WAN024FUE_at; Start 482; Stop 506
gatatacaggttttttagaatacgc

SEQ ID NO: 221416 - DNA, 25 bp, Artificial
  probe
  misc_feature (1)..(25): SEQ ID NO: 778; WAN024FUE_at; Start 446; Stop 470
gggacggatttacattagctactag

SEQ ID NO: 221417 - DNA, 25 bp, Artificial
  probe
  misc_feature (1)..(25): SEQ ID NO: 779; WAN024FUF_at; Start 1024; Stop 1048
tctggaaagttaatcagtataggct

SEQ ID NO: 221418 - DNA, 25 bp, Artificial
  probe
  misc_feature (1)..(25): SEQ ID NO: 779; WAN024FUF_at; Start 678; Stop 702
tcagattacttcaattaataagcgg

SEQ ID NO: 221419 - DNA, 25 bp, Artificial
  probe
  misc_feature (1)..(25): SEQ ID NO: 779; WAN024FUF_at; Start 1014; Stop 1038
aagtgccccatctggaaagttaatc

SEQ ID NO: 221420 - DNA, 25 bp, Artificial
  probe
  misc_feature (1)..(25): SEQ ID NO: 779; WAN024FUF_at; Start 54; Stop 78
catactgctcccaaaacagtttatg

SEQ ID NO: 221421 - DNA, 25 bp, Artificial
  probe
  misc_feature (1)..(25): SEQ ID NO: 779; WAN024FUF_at; Start 777; Stop 801
tcaaatgtttaattcaagaacaggt

SEQ ID NO: 221422 - DNA, 25 bp, Artificial
  probe
  misc_feature (1)..(25): SEQ ID NO: 779; WAN024FUF_at; Start 866; Stop 890
tacttggagcaggaatcagaacaca

SEQ ID NO: 221423 - DNA, 25 bp, Artificial
  probe
  misc_feature (1)..(25): SEQ ID NO: 779; WAN024FUF_at; Start 625; Stop 649
tctagaatagctattattgctctga

SEQ ID NO: 221424 - DNA, 25 bp, Artificial
  probe
  misc_feature (1)..(25): SEQ ID NO: 779; WAN024FUF_at; Start 708; Stop 732
tgtagcgttttatccaactatacct

SEQ ID NO: 221425 - DNA, 25 bp, Artificial
  probe
  misc_feature (1)..(25): SEQ ID NO: 779; WAN024FUF_at; Start 499; Stop 523
gaatattcaacattaaatgggcagt

SEQ ID NO: 221426 - DNA, 25 bp, Artificial
  probe
  misc_feature (1)..(25): SEQ ID NO: 779; WAN024FUF_at; Start 837; Stop 861
tcttaaagctattaatgggctggga

SEQ ID NO: 221427 - DNA, 25 bp, Artificial
  probe
  misc_feature (1)..(25): SEQ ID NO: 779; WAN024FUF_at; Start 411; Stop 435
taatgtagtattgtttggaagaagc

SEQ ID NO: 221428 - DNA, 25 bp, Artificial
  probe
  misc_feature (1)..(25): SEQ ID NO: 779; WAN024FUF_at; Start 140; Stop 164
aaatttccaaaatagatgcaccgtc

SEQ ID NO: 221429 - DNA, 25 bp, Artificial
  probe
  misc_feature (1)..(25): SEQ ID NO: 779; WAN024FUF_at; Start 600; Stop 624
gctacaggttttagtattgagtaaa

SEQ ID NO: 221430 - DNA, 25 bp, Artificial
  probe
  misc_feature (1)..(25): SEQ ID NO: 779; WAN024FUF_at; Start 399; Stop 423
tcaaagaggcgctaatgtagtattg

SEQ ID NO: 221431 - DNA, 25 bp, Artificial
  probe
  misc_feature (1)..(25): SEQ ID NO: 779; WAN024FUF_at; Start 103; Stop 127
gtcttaattctattaccggtctata

SEQ ID NO: 221432 - DNA, 25 bp, Artificial
  probe
  misc_feature (1)..(25): SEQ ID NO: 779; WAN024FUF_at; Start 311; Stop 335
tgaaaaatcccattaacgttgacaa

SEQ ID NO: 221433 - DNA, 25 bp, Artificial
  probe
  misc_feature (1)..(25): SEQ ID NO: 779; WAN024FUF_at; Start 896; Stop 920
cagtaggtatattattaggatcaca

SEQ ID NO: 221434 - DNA, 25 bp, Artificial
  probe
  misc_feature (1)..(25): SEQ ID NO: 779; WAN024FUF_at; Start 852; Stop 876
tgggctgggaattttacttggagca

SEQ ID NO: 221435 - DNA, 25 bp, Artificial
  probe
  misc_feature (1)..(25): SEQ ID NO: 779; WAN024FUF_at; Start 693; Stop 717
taataagcggatgattgtagcgttt

SEQ ID NO: 221436 - DNA, 25 bp, Artificial
  probe
  misc_feature (1)..(25): SEQ ID NO: 779; WAN024FUF_at; Start 444; Stop 468
ttgggacggattcgtatcagctacc

SEQ ID NO: 221437 - DNA, 25 bp, Artificial
  probe
  misc_feature (1)..(25): SEQ ID NO: 779; WAN024FUF_at; Start 821; Stop 845
tagtgtacgaagaatctcttaaagc

SEQ ID NO: 221438 - DNA, 25 bp, Artificial
  probe
  misc_feature (1)..(25): SEQ ID NO: 779; WAN024FUF_at; Start 472; Stop 496
tacggagtaagatatgcaggatttt

SEQ ID NO: 221439 - DNA, 25 bp, Artificial
  probe
  misc_feature (1)..(25): SEQ ID NO: 779; WAN024FUF_at; Start 267; Stop 291
ggcattcaattggatattagcagta

SEQ ID NO: 221440 - DNA, 25 bp, Artificial
  probe
  misc_feature (1)..(25): SEQ ID NO: 779; WAN024FUF_at; Start 810; Stop 834
gacacgttttatagtgtacgaagaa

SEQ ID NO: 221441 - DNA, 25 bp, Artificial
  probe
  misc_feature (1)..(25): SEQ ID NO: 779; WAN024FUF_at; Start 583; Stop 607
actattcttgcttttttgctacagg

SEQ ID NO: 221442 - DNA, 25 bp, Artificial
  probe
  misc_feature (1)..(25): SEQ ID NO: 779; WAN024FUF_at; Start 878; Stop 902
gaatcagaacacaatctacagtagg

SEQ ID NO: 221443 - DNA, 25 bp, Artificial
  probe
  misc_feature (1)..(25): SEQ ID NO: 779; WAN024FUF_at; Start 225; Stop 249
tagtggcttacctattcaagtgttg

SEQ ID NO: 221444 - DNA, 25 bp, Artificial
  probe
  misc_feature (1)..(25): SEQ ID NO: 779; WAN024FUF_at; Start 40; Stop 64
tacctttggcttatcatactgctcc

SEQ ID NO: 221445 - DNA, 25 bp, Artificial
  probe
  misc_feature (1)..(25): SEQ ID NO: 779; WAN024FUF_at; Start 154; Stop 178
gatgcaccgtctttttatatagttc

SEQ ID NO: 221446 - DNA, 25 bp, Artificial
  probe
  misc_feature (1)..(25): SEQ ID NO: 779; WAN024FUF_at; Start 173; Stop 197
tagttctatgggtcatgatgtattc

SEQ ID NO: 221447 - DNA, 25 bp, Artificial
  probe
  misc_feature (1)..(25): SEQ ID NO: 779; WAN024FUF_at; Start 791; Stop 815
caagaacaggtagtaatgtgacacg

SEQ ID NO: 221448 - DNA, 25 bp, Artificial
  probe
  misc_feature (1)..(25): SEQ ID NO: 779; WAN024FUF_at; Start 426; Stop 450
tggaagaagcttattaggttgggac

SEQ ID NO: 221449 - DNA, 25 bp, Artificial
  probe
  misc_feature (1)..(25): SEQ ID NO: 779; WAN024FUF_at; Start 386; Stop 410
ctttattctatgttcaaagaggcgc

SEQ ID NO: 221450 - DNA, 25 bp, Artificial
  probe
  misc_feature (1)..(25): SEQ ID NO: 779; WAN024FUF_at; Start 458; Stop 482
tatcagctaccagttacggagtaag

SEQ ID NO: 221451 - DNA, 25 bp, Artificial
  probe
  misc_feature (1)..(25): SEQ ID NO: 6694; WAN024FUG_at; Start 413; Stop 437
ctataaatagtaataataaggagtt

SEQ ID NO: 221452 - DNA, 25 bp, Artificial
  probe
  misc_feature (1)..(25): SEQ ID NO: 6694; WAN024FUG_at; Start 326; Stop 350
ataaagtaaagcagacttacccaat

SEQ ID NO: 221453 - DNA, 25 bp, Artificial
  probe
  misc_feature (1)..(25): SEQ ID NO: 6694; WAN024FUG_at; Start 305; Stop 329
accatcagttagaattctgtaataa

SEQ ID NO: 221454 - DNA, 25 bp, Artificial
  probe
  misc_feature (1)..(25): SEQ ID NO: 6694; WAN024FUG_at; Start 314; Stop 338
tagaattctgtaataaagtaaagca

SEQ ID NO: 221455 - DNA, 25 bp, Artificial
  probe
  misc_feature (1)..(25): SEQ ID NO: 6694; WAN024FUG_at; Start 420; Stop 444
tagtaataataaggagttttgtaga

SEQ ID NO: 221456 - DNA, 25 bp, Artificial
  probe
  misc_feature (1)..(25): SEQ ID NO: 6694; WAN024FUG_at; Start 317; Stop 341
aattctgtaataaagtaaagcagac

SEQ ID NO: 221457 - DNA, 25 bp, Artificial
  probe
  misc_feature (1)..(25): SEQ ID NO: 6694; WAN024FUG_at; Start 324; Stop 348
taataaagtaaagcagacttaccca

SEQ ID NO: 221458 - DNA, 25 bp, Artificial
  probe
  misc_feature (1)..(25): SEQ ID NO: 6694; WAN024FUG_at; Start 345; Stop 369
cccaattattgtaattaatgatata

SEQ ID NO: 221459 - DNA, 25 bp, Artificial
  probe
  misc_feature (1)..(25): SEQ ID NO: 6694; WAN024FUG_at; Start 183; Stop 207
gattgagaaatcagatattgtcatt

SEQ ID NO: 221460 - DNA, 25 bp, Artificial
  probe
  misc_feature (1)..(25): SEQ ID NO: 6694; WAN024FUG_at; Start 110; Stop 134
caggatattccaaatatattccgaa

SEQ ID NO: 221461 - DNA, 25 bp, Artificial
  probe
  misc_feature (1)..(25): SEQ ID NO: 6694; WAN024FUG_at; Start 329; Stop 353
aagtaaagcagacttacccaattat

SEQ ID NO: 221462 - DNA, 25 bp, Artificial
  probe
  misc_feature (1)..(25): SEQ ID NO: 6694; WAN024FUG_at; Start 306; Stop 330
ccatcagttagaattctgtaataaa

SEQ ID NO: 221463 - DNA, 25 bp, Artificial
  probe
  misc_feature (1)..(25): SEQ ID NO: 6694; WAN024FUG_at; Start 310; Stop 334
cagttagaattctgtaataaagtaa

SEQ ID NO: 221464 - DNA, 25 bp, Artificial
  probe
  misc_feature (1)..(25): SEQ ID NO: 6694; WAN024FUG_at; Start 320; Stop 344
tctgtaataaagtaaagcagactta

SEQ ID NO: 221465 - DNA, 25 bp, Artificial
  probe
  misc_feature (1)..(25): SEQ ID NO: 6694; WAN024FUG_at; Start 335; Stop 359
agcagacttacccaattattgtaat

SEQ ID NO: 221466 - DNA, 25 bp, Artificial
  probe
  misc_feature (1)..(25): SEQ ID NO: 6694; WAN024FUG_at; Start 333; Stop 357
aaagcagacttacccaattattgta

SEQ ID NO: 221467 - DNA, 25 bp, Artificial
  probe
  misc_feature (1)..(25): SEQ ID NO: 6694; WAN024FUG_at; Start 321; Stop 345
ctgtaataaagtaaagcagacttac

SEQ ID NO: 221468 - DNA, 25 bp, Artificial
  probe
  misc_feature (1)..(25): SEQ ID NO: 6694; WAN024FUG_at; Start 336; Stop 360
gcagacttacccaattattgtaatt

SEQ ID NO: 221469 - DNA, 25 bp, Artificial
  probe
  misc_feature (1)..(25): SEQ ID NO: 6694; WAN024FUG_at; Start 447; Stop 471
attggaagaaagaataggtagtttg

SEQ ID NO: 221470 - DNA, 25 bp, Artificial
  probe
  misc_feature (1)..(25): SEQ ID NO: 6694; WAN024FUG_at; Start 109; Stop 133
acaggatattccaaatatattccga

SEQ ID NO: 221471 - DNA, 25 bp, Artificial
  probe
  misc_feature (1)..(25): SEQ ID NO: 6694; WAN024FUG_at; Start 398; Stop 422
ataaatcaaaggaaactataaatag

SEQ ID NO: 221472 - DNA, 25 bp, Artificial
  probe
  misc_feature (1)..(25): SEQ ID NO: 6694; WAN024FUG_at; Start 337; Stop 361
cagacttacccaattattgtaatta

SEQ ID NO: 221473 - DNA, 25 bp, Artificial
  probe
  misc_feature (1)..(25): SEQ ID NO: 6694; WAN024FUG_at; Start 316; Stop 340
gaattctgtaataaagtaaagcaga

SEQ ID NO: 221474 - DNA, 25 bp, Artificial
  probe
  misc_feature (1)..(25): SEQ ID NO: 6694; WAN024FUG_at; Start 322; Stop 346
tgtaataaagtaaagcagacttacc

SEQ ID NO: 221475 - DNA, 25 bp, Artificial
  probe
  misc_feature (1)..(25): SEQ ID NO: 6694; WAN024FUG_at; Start 332; Stop 356
taaagcagacttacccaattattgt

SEQ ID NO: 221476 - DNA, 25 bp, Artificial
  probe
  misc_feature (1)..(25): SEQ ID NO: 6694; WAN024FUG_at; Start 319; Stop 343
ttctgtaataaagtaaagcagactt

SEQ ID NO: 221477 - DNA, 25 bp, Artificial
  probe
  misc_feature (1)..(25): SEQ ID NO: 6694; WAN024FUG_at; Start 307; Stop 331
catcagttagaattctgtaataaag

SEQ ID NO: 221478 - DNA, 25 bp, Artificial
  probe
  misc_feature (1)..(25): SEQ ID NO: 6694; WAN024FUG_at; Start 331; Stop 355
gtaaagcagacttacccaattattg

SEQ ID NO: 221479 - DNA, 25 bp, Artificial
  probe
  misc_feature (1)..(25): SEQ ID NO: 6694; WAN024FUG_at; Start 439; Stop 463
tgtagaaaattggaagaaagaatag

SEQ ID NO: 221480 - DNA, 25 bp, Artificial
  probe
  misc_feature (1)..(25): SEQ ID NO: 6694; WAN024FUG_at; Start 313; Stop 337
ttagaattctgtaataaagtaaagc

SEQ ID NO: 221481 - DNA, 25 bp, Artificial
  probe
  misc_feature (1)..(25): SEQ ID NO: 6694; WAN024FUG_at; Start 108; Stop 132
aacaggatattccaaatatattccg

SEQ ID NO: 221482 - DNA, 25 bp, Artificial
  probe
  misc_feature (1)..(25): SEQ ID NO: 6694; WAN024FUG_at; Start 272; Stop 296
ctagacaaaaaaaatttgaagagca

SEQ ID NO: 221483 - DNA, 25 bp, Artificial
  probe
  misc_feature (1)..(25): SEQ ID NO: 6694; WAN024FUG_at; Start 106; Stop 130
caaacaggatattccaaatatattc

SEQ ID NO: 221484 - DNA, 25 bp, Artificial
  probe
  misc_feature (1)..(25): SEQ ID NO: 6694; WAN024FUG_at; Start 341; Stop 365
cttacccaattattgtaattaatga

SEQ ID NO: 221485 - DNA, 25 bp, Artificial
  probe
  misc_feature (1)..(25): SEQ ID NO: 1885; WAN024FUH_at; Start 255; Stop 279
aaatccaataattgttccgcggcta

SEQ ID NO: 221486 - DNA, 25 bp, Artificial
  probe
  misc_feature (1)..(25): SEQ ID NO: 1885; WAN024FUH_at; Start 295; Stop 319
catgtaaatgatcaccagatgcaat

SEQ ID NO: 221487 - DNA, 25 bp, Artificial
  probe
  misc_feature (1)..(25): SEQ ID NO: 1885; WAN024FUH_at; Start 301; Stop 325
aatgatcaccagatgcaatttgtaa

SEQ ID NO: 221488 - DNA, 25 bp, Artificial
  probe
  misc_feature (1)..(25): SEQ ID NO: 1885; WAN024FUH_at; Start 371; Stop 395
cagacttacatttaattcttcataa

SEQ ID NO: 221489 - DNA, 25 bp, Artificial
  probe
  misc_feature (1)..(25): SEQ ID NO: 1885; WAN024FUH_at; Start 426; Stop 450
gaataacgagagatttaatgtacgt

SEQ ID NO: 221490 - DNA, 25 bp, Artificial
  probe
  misc_feature (1)..(25): SEQ ID NO: 1885; WAN024FUH_at; Start 257; Stop 281
atccaataattgttccgcggctaaa

SEQ ID NO: 221491 - DNA, 25 bp, Artificial
  probe
  misc_feature (1)..(25): SEQ ID NO: 1885; WAN024FUH_at; Start 303; Stop 327
tgatcaccagatgcaatttgtaaaa

SEQ ID NO: 221492 - DNA, 25 bp, Artificial
  probe
  misc_feature (1)..(25): SEQ ID NO: 1885; WAN024FUH_at; Start 403; Stop 427
gacaaacattttgaaacttatttga

SEQ ID NO: 221493 - DNA, 25 bp, Artificial
  probe
  misc_feature (1)..(25): SEQ ID NO: 1885; WAN024FUH_at; Start 453; Stop 477
caatgtggaaatcagtaaccttttt

SEQ ID NO: 221494 - DNA, 25 bp, Artificial
  probe
  misc_feature (1)..(25): SEQ ID NO: 1885; WAN024FUH_at; Start 451; Stop 475
ttcaatgtggaaatcagtaaccttt

SEQ ID NO: 221495 - DNA, 25 bp, Artificial
  probe
  misc_feature (1)..(25): SEQ ID NO: 1885; WAN024FUH_at; Start 382; Stop 406
ttaattcttcataattttaaggaca

SEQ ID NO: 221496 - DNA, 25 bp, Artificial
  probe
  misc_feature (1)..(25): SEQ ID NO: 1885; WAN024FUH_at; Start 299; Stop 323
taaatgatcaccagatgcaatttgt

SEQ ID NO: 221497 - DNA, 25 bp, Artificial
  probe
  misc_feature (1)..(25): SEQ ID NO: 1885; WAN024FUH_at; Start 306; Stop 330
tcaccagatgcaatttgtaaaaata

SEQ ID NO: 221498 - DNA, 25 bp, Artificial
  probe
  misc_feature (1)..(25): SEQ ID NO: 1885; WAN024FUH_at; Start 294; Stop 318
gcatgtaaatgatcaccagatgcaa

SEQ ID NO: 221499 - DNA, 25 bp, Artificial
  probe
  misc_feature (1)..(25): SEQ ID NO: 1885; WAN024FUH_at; Start 351; Stop 375
aatagttatagatgatatttcagac

SEQ ID NO: 221500 - DNA, 25 bp, Artificial
  probe
  misc_feature (1)..(25): SEQ ID NO: 1885; WAN024FUH_at; Start 292; Stop 316
gagcatgtaaatgatcaccagatgc

SEQ ID NO: 221501 - DNA, 25 bp, Artificial
  probe
  misc_feature (1)..(25): SEQ ID NO: 1885; WAN024FUH_at; Start 414; Stop 438
tgaaacttatttgaataacgagaga

SEQ ID NO: 221502 - DNA, 25 bp, Artificial
  probe
  misc_feature (1)..(25): SEQ ID NO: 1885; WAN024FUH_at; Start 364; Stop 388
gatatttcagacttacatttaattc

SEQ ID NO: 221503 - DNA, 25 bp, Artificial
  probe
  misc_feature (1)..(25): SEQ ID NO: 1885; WAN024FUH_at; Start 258; Stop 282
tccaataattgttccgcggctaaaa

SEQ ID NO: 221504 - DNA, 25 bp, Artificial
  probe
  misc_feature (1)..(25): SEQ ID NO: 1885; WAN024FUH_at; Start 297; Stop 321
tgtaaatgatcaccagatgcaattt

SEQ ID NO: 221505 - DNA, 25 bp, Artificial
  probe
  misc_feature (1)..(25): SEQ ID NO: 1885; WAN024FUH_at; Start 437; Stop 461
gatttaatgtacgtttcaatgtgga

SEQ ID NO: 221506 - DNA, 25 bp, Artificial
  probe
  misc_feature (1)..(25): SEQ ID NO: 1885; WAN024FUH_at; Start 448; Stop 472
cgtttcaatgtggaaatcagtaacc

SEQ ID NO: 221507 - DNA, 25 bp, Artificial
  probe
  misc_feature (1)..(25): SEQ ID NO: 1885; WAN024FUH_at; Start 256; Stop 280
aatccaataattgttccgcggctaa

SEQ ID NO: 221508 - DNA, 25 bp, Artificial
  probe
  misc_feature (1)..(25): SEQ ID NO: 1885; WAN024FUH_at; Start 304; Stop 328
gatcaccagatgcaatttgtaaaaa

SEQ ID NO: 221509 - DNA, 25 bp, Artificial
  probe
  misc_feature (1)..(25): SEQ ID NO: 1885; WAN024FUH_at; Start 429; Stop 453
taacgagagatttaatgtacgtttc

SEQ ID NO: 221510 - DNA, 25 bp, Artificial
  probe
  misc_feature (1)..(25): SEQ ID NO: 1885; WAN024FUH_at; Start 452; Stop 476
tcaatgtggaaatcagtaacctttt

SEQ ID NO: 221511 - DNA, 25 bp, Artificial
  probe
  misc_feature (1)..(25): SEQ ID NO: 1885; WAN024FUH_at; Start 357; Stop 381
tatagatgatatttcagacttacat

SEQ ID NO: 221512 - DNA, 25 bp, Artificial
  probe
  misc_feature (1)..(25): SEQ ID NO: 1885; WAN024FUH_at; Start 432; Stop 456
cgagagatttaatgtacgtttcaat

SEQ ID NO: 221513 - DNA, 25 bp, Artificial
  probe
  misc_feature (1)..(25): SEQ ID NO: 1885; WAN024FUH_at; Start 441; Stop 465
taatgtacgtttcaatgtggaaatc

SEQ ID NO: 221514 - DNA, 25 bp, Artificial
  probe
  misc_feature (1)..(25): SEQ ID NO: 1885; WAN024FUH_at; Start 425; Stop 449
tgaataacgagagatttaatgtacg

SEQ ID NO: 221515 - DNA, 25 bp, Artificial
  probe
  misc_feature (1)..(25): SEQ ID NO: 1885; WAN024FUH_at; Start 449; Stop 473
gtttcaatgtggaaatcagtaacct

SEQ ID NO: 221516 - DNA, 25 bp, Artificial
  probe
  misc_feature (1)..(25): SEQ ID NO: 1885; WAN024FUH_at; Start 433; Stop 457
gagagatttaatgtacgtttcaatg

SEQ ID NO: 221517 - DNA, 25 bp, Artificial
  probe
  misc_feature (1)..(25): SEQ ID NO: 1885; WAN024FUH_at; Start 444; Stop 468
tgtacgtttcaatgtggaaatcagt

SEQ ID NO: 221518 - DNA, 25 bp, Artificial
  probe
  misc_feature (1)..(25): SEQ ID NO: 1885; WAN024FUH_at; Start 254; Stop 278
aaaatccaataattgttccgcggct

SEQ ID NO: 221519 - DNA, 25 bp, Artificial
  probe
  misc_feature (1)..(25): SEQ ID NO: 1886; WAN024FUI_at; Start 351; Stop 375
tatagtcatagatgatatttccgac

SEQ ID NO: 221520 - DNA, 25 bp, Artificial
  probe
  misc_feature (1)..(25): SEQ ID NO: 1886; WAN024FUI_at; Start 409; Stop 433
tattttggaatttgtttgaacaatg

SEQ ID NO: 221521 - DNA, 25 bp, Artificial
  probe
  misc_feature (1)..(25): SEQ ID NO: 1886; WAN024FUI_at; Start 477; Stop 501
tgaaggaaataaagtagatgaaaat

SEQ ID NO: 221522 - DNA, 25 bp, Artificial
  probe
  misc_feature (1)..(25): SEQ ID NO: 1886; WAN024FUI_at; Start 304; Stop 328
gaccatcagcttcaattcgtaaaac

SEQ ID NO: 221523 - DNA, 25 bp, Artificial
  probe
  misc_feature (1)..(25): SEQ ID NO: 1886; WAN024FUI_at; Start 307; Stop 331
catcagcttcaattcgtaaaactga

SEQ ID NO: 221524 - DNA, 25 bp, Artificial
  probe
  misc_feature (1)..(25): SEQ ID NO: 1886; WAN024FUI_at; Start 456; Stop 480
tgcggaaattaataaactatttgaa

SEQ ID NO: 221525 - DNA, 25 bp, Artificial
  probe
  misc_feature (1)..(25): SEQ ID NO: 1886; WAN024FUI_at; Start 306; Stop 330
ccatcagcttcaattcgtaaaactg

SEQ ID NO: 221526 - DNA, 25 bp, Artificial
  probe
  misc_feature (1)..(25): SEQ ID NO: 1886; WAN024FUI_at; Start 437; Stop 461
gatttaatctacattttaatgcgga

SEQ ID NO: 221527 - DNA, 25 bp, Artificial
  probe
  misc_feature (1)..(25): SEQ ID NO: 1886; WAN024FUI_at; Start 320; Stop 344
tcgtaaaactgacgaaagaaatata

SEQ ID NO: 221528 - DNA, 25 bp, Artificial
  probe
  misc_feature (1)..(25): SEQ ID NO: 1886; WAN024FUI_at; Start 100; Stop 124
tttattcaaataggatattccagtt

SEQ ID NO: 221529 - DNA, 25 bp, Artificial
  probe
  misc_feature (1)..(25): SEQ ID NO: 1886; WAN024FUI_at; Start 371; Stop 395
ccgacttatatttaagtatacgtga

SEQ ID NO: 221530 - DNA, 25 bp, Artificial
  probe
  misc_feature (1)..(25): SEQ ID NO: 1886; WAN024FUI_at; Start 357; Stop 381
catagatgatatttccgacttatat

SEQ ID NO: 221531 - DNA, 25 bp, Artificial
  probe
  misc_feature (1)..(25): SEQ ID NO: 1886; WAN024FUI_at; Start 312; Stop 336
gcttcaattcgtaaaactgacgaaa

SEQ ID NO: 221532 - DNA, 25 bp, Artificial
  probe
  misc_feature (1)..(25): SEQ ID NO: 1886; WAN024FUI_at; Start 391; Stop 415
cgtgattttaaggataaatattttg

SEQ ID NO: 221533 - DNA, 25 bp, Artificial
  probe
  misc_feature (1)..(25): SEQ ID NO: 1886; WAN024FUI_at; Start 421; Stop 445
tgtttgaacaatgaaagatttaatc

SEQ ID NO: 221534 - DNA, 25 bp, Artificial
  probe
  misc_feature (1)..(25): SEQ ID NO: 1886; WAN024FUI_at; Start 301; Stop 325
aatgaccatcagcttcaattcgtaa

SEQ ID NO: 221535 - DNA, 25 bp, Artificial
  probe
  misc_feature (1)..(25): SEQ ID NO: 1886; WAN024FUI_at; Start 383; Stop 407
taagtatacgtgattttaaggataa

SEQ ID NO: 221536 - DNA, 25 bp, Artificial
  probe
  misc_feature (1)..(25): SEQ ID NO: 1886; WAN024FUI_at; Start 313; Stop 337
cttcaattcgtaaaactgacgaaag

SEQ ID NO: 221537 - DNA, 25 bp, Artificial
  probe
  misc_feature (1)..(25): SEQ ID NO: 1886; WAN024FUI_at; Start 355; Stop 379
gtcatagatgatatttccgacttat

SEQ ID NO: 221538 - DNA, 25 bp, Artificial
  probe
  misc_feature (1)..(25): SEQ ID NO: 1886; WAN024FUI_at; Start 424; Stop 448
ttgaacaatgaaagatttaatctac

SEQ ID NO: 221539 - DNA, 25 bp, Artificial
  probe
  misc_feature (1)..(25): SEQ ID NO: 1886; WAN024FUI_at; Start 300; Stop 324
gaatgaccatcagcttcaattcgta

SEQ ID NO: 221540 - DNA, 25 bp, Artificial
  probe
  misc_feature (1)..(25): SEQ ID NO: 1886; WAN024FUI_at; Start 414; Stop 438
tggaatttgtttgaacaatgaaaga

SEQ ID NO: 221541 - DNA, 25 bp, Artificial
  probe
  misc_feature (1)..(25): SEQ ID NO: 1886; WAN024FUI_at; Start 303; Stop 327
tgaccatcagcttcaattcgtaaaa

SEQ ID NO: 221542 - DNA, 25 bp, Artificial
  probe
  misc_feature (1)..(25): SEQ ID NO: 1886; WAN024FUI_at; Start 110; Stop 134
taggatattccagttatattccgaa

SEQ ID NO: 221543 - DNA, 25 bp, Artificial
  probe
  misc_feature (1)..(25): SEQ ID NO: 1886; WAN024FUI_at; Start 444; Stop 468
tctacattttaatgcggaaattaat

SEQ ID NO: 221544 - DNA, 25 bp, Artificial
  probe
  misc_feature (1)..(25): SEQ ID NO: 1886; WAN024FUI_at; Start 299; Stop 323
tgaatgaccatcagcttcaattcgt

SEQ ID NO: 221545 - DNA, 25 bp, Artificial
  probe
  misc_feature (1)..(25): SEQ ID NO: 1886; WAN024FUI_at; Start 441; Stop 465
taatctacattttaatgcggaaatt

SEQ ID NO: 221546 - DNA, 25 bp, Artificial
  probe
  misc_feature (1)..(25): SEQ ID NO: 1886; WAN024FUI_at; Start 364; Stop 388
gatatttccgacttatatttaagta

SEQ ID NO: 221547 - DNA, 25 bp, Artificial
  probe
  misc_feature (1)..(25): SEQ ID NO: 1886; WAN024FUI_at; Start 298; Stop 322
gtgaatgaccatcagcttcaattcg

SEQ ID NO: 221548 - DNA, 25 bp, Artificial
  probe
  misc_feature (1)..(25): SEQ ID NO: 1886; WAN024FUI_at; Start 108; Stop 132
aataggatattccagttatattccg

SEQ ID NO: 221549 - DNA, 25 bp, Artificial
  probe
  misc_feature (1)..(25): SEQ ID NO: 1886; WAN024FUI_at; Start 315; Stop 339
tcaattcgtaaaactgacgaaagaa

SEQ ID NO: 221550 - DNA, 25 bp, Artificial
  probe
  misc_feature (1)..(25): SEQ ID NO: 1886; WAN024FUI_at; Start 309; Stop 333
tcagcttcaattcgtaaaactgacg

SEQ ID NO: 221551 - DNA, 25 bp, Artificial
  probe
  misc_feature (1)..(25): SEQ ID NO: 1886; WAN024FUI_at; Start 454; Stop 478
aatgcggaaattaataaactatttg

SEQ ID NO: 221552 - DNA, 25 bp, Artificial
  probe
  misc_feature (1)..(25): SEQ ID NO: 1886; WAN024FUI_at; Start 310; Stop 334
cagcttcaattcgtaaaactgacga

SEQ ID NO: 221553 - DNA, 25 bp, Artificial
  probe
  misc_feature (1)..(25): SEQ ID NO: 1883; WAN024FUJ_at; Start 139; Stop 163
tgtcaatggaagaatctgatttctt

SEQ ID NO: 221554 - DNA, 25 bp, Artificial
  probe
  misc_feature (1)..(25): SEQ ID NO: 1883; WAN024FUJ_at; Start 177; Stop 201
tcgctatatagatgaagcaaatatt

SEQ ID NO: 221555 - DNA, 25 bp, Artificial
  probe
  misc_feature (1)..(25): SEQ ID NO: 1883; WAN024FUJ_at; Start 130; Stop 154
ccagtgtattgtcaatggaagaatc

SEQ ID NO: 221556 - DNA, 25 bp, Artificial
  probe
  misc_feature (1)..(25): SEQ ID NO: 1883; WAN024FUJ_at; Start 174; Stop 198
gaatcgctatatagatgaagcaaat

SEQ ID NO: 221557 - DNA, 25 bp, Artificial
  probe
  misc_feature (1)..(25): SEQ ID NO: 1883; WAN024FUJ_at; Start 330; Stop 354
aatactatccgaagggtatgaatta

SEQ ID NO: 221558 - DNA, 25 bp, Artificial
  probe
  misc_feature (1)..(25): SEQ ID NO: 1883; WAN024FUJ_at; Start 119; Stop 143
cagattatgaaccagtgtattgtca

SEQ ID NO: 221559 - DNA, 25 bp, Artificial
  probe
  misc_feature (1)..(25): SEQ ID NO: 1883; WAN024FUJ_at; Start 416; Stop 440
tttactctaataatacatgttttct

SEQ ID NO: 221560 - DNA, 25 bp, Artificial
  probe
  misc_feature (1)..(25): SEQ ID NO: 1883; WAN024FUJ_at; Start 193; Stop 217
gcaaatattatcattacacatggcg

SEQ ID NO: 221561 - DNA, 25 bp, Artificial
  probe
  misc_feature (1)..(25): SEQ ID NO: 1883; WAN024FUJ_at; Start 138; Stop 162
ttgtcaatggaagaatctgatttct

SEQ ID NO: 221562 - DNA, 25 bp, Artificial
  probe
  misc_feature (1)..(25): SEQ ID NO: 1883; WAN024FUJ_at; Start 423; Stop 447
taataatacatgttttcttaagaaa

SEQ ID NO: 221563 - DNA, 25 bp, Artificial
  probe
  misc_feature (1)..(25): SEQ ID NO: 1883; WAN024FUJ_at; Start 178; Stop 202
cgctatatagatgaagcaaatatta

SEQ ID NO: 221564 - DNA, 25 bp, Artificial
  probe
  misc_feature (1)..(25): SEQ ID NO: 1883; WAN024FUJ_at; Start 126; Stop 150
tgaaccagtgtattgtcaatggaag

SEQ ID NO: 221565 - DNA, 25 bp, Artificial
  probe
  misc_feature (1)..(25): SEQ ID NO: 1883; WAN024FUJ_at; Start 310; Stop 334
cagatggaattttgttctaaaatac

SEQ ID NO: 221566 - DNA, 25 bp, Artificial
  probe
  misc_feature (1)..(25): SEQ ID NO: 1883; WAN024FUJ_at; Start 169; Stop 193
gagatgaatcgctatatagatgaag

SEQ ID NO: 221567 - DNA, 25 bp, Artificial
  probe
  misc_feature (1)..(25): SEQ ID NO: 1883; WAN024FUJ_at; Start 431; Stop 455
catgttttcttaagaaattatcaaa

SEQ ID NO: 221568 - DNA, 25 bp, Artificial
  probe
  misc_feature (1)..(25): SEQ ID NO: 1883; WAN024FUJ_at; Start 128; Stop 152
aaccagtgtattgtcaatggaagaa

SEQ ID NO: 221569 - DNA, 25 bp, Artificial
  probe
  misc_feature (1)..(25): SEQ ID NO: 1883; WAN024FUJ_at; Start 439; Stop 463
cttaagaaattatcaaaaacaattg

SEQ ID NO: 221570 - DNA, 25 bp, Artificial
  probe
  misc_feature (1)..(25): SEQ ID NO: 1883; WAN024FUJ_at; Start 131; Stop 155
cagtgtattgtcaatggaagaatct

SEQ ID NO: 221571 - DNA, 25 bp, Artificial
  probe
  misc_feature (1)..(25): SEQ ID NO: 1883; WAN024FUJ_at; Start 123; Stop 147
ttatgaaccagtgtattgtcaatgg

SEQ ID NO: 221572 - DNA, 25 bp, Artificial
  probe
  misc_feature (1)..(25): SEQ ID NO: 1883; WAN024FUJ_at; Start 121; Stop 145
gattatgaaccagtgtattgtcaat

SEQ ID NO: 221573 - DNA, 25 bp, Artificial
  probe
  misc_feature (1)..(25): SEQ ID NO: 1883; WAN024FUJ_at; Start 165; Stop 189
tgatgagatgaatcgctatatagat

SEQ ID NO: 221574 - DNA, 25 bp, Artificial
  probe
  misc_feature (1)..(25): SEQ ID NO: 1883; WAN024FUJ_at; Start 173; Stop 197
tgaatcgctatatagatgaagcaaa

SEQ ID NO: 221575 - DNA, 25 bp, Artificial
  probe
  misc_feature (1)..(25): SEQ ID NO: 1883; WAN024FUJ_at; Start 134; Stop 158
tgtattgtcaatggaagaatctgat

SEQ ID NO: 221576 - DNA, 25 bp, Artificial
  probe
  misc_feature (1)..(25): SEQ ID NO: 1883; WAN024FUJ_at; Start 127; Stop 151
gaaccagtgtattgtcaatggaaga

SEQ ID NO: 221577 - DNA, 25 bp, Artificial
  probe
  misc_feature (1)..(25): SEQ ID NO: 1883; WAN024FUJ_at; Start 171; Stop 195
gatgaatcgctatatagatgaagca

SEQ ID NO: 221578 - DNA, 25 bp, Artificial
  probe
  misc_feature (1)..(25): SEQ ID NO: 1883; WAN024FUJ_at; Start 124; Stop 148
tatgaaccagtgtattgtcaatgga

SEQ ID NO: 221579 - DNA, 25 bp, Artificial
  probe
  misc_feature (1)..(25): SEQ ID NO: 1883; WAN024FUJ_at; Start 325; Stop 349
tctaaaatactatccgaagggtatg

SEQ ID NO: 221580 - DNA, 25 bp, Artificial
  probe
  misc_feature (1)..(25): SEQ ID NO: 1883; WAN024FUJ_at; Start 326; Stop 350
ctaaaatactatccgaagggtatga

SEQ ID NO: 221581 - DNA, 25 bp, Artificial
  probe
  misc_feature (1)..(25): SEQ ID NO: 1883; WAN024FUJ_at; Start 136; Stop 160
tattgtcaatggaagaatctgattt

SEQ ID NO: 221582 - DNA, 25 bp, Artificial
  probe
  misc_feature (1)..(25): SEQ ID NO: 1883; WAN024FUJ_at; Start 328; Stop 352
aaaatactatccgaagggtatgaat

SEQ ID NO: 221583 - DNA, 25 bp, Artificial
  probe
  misc_feature (1)..(25): SEQ ID NO: 1883; WAN024FUJ_at; Start 114; Stop 138
tttttcagattatgaaccagtgtat

SEQ ID NO: 221584 - DNA, 25 bp, Artificial
  probe
  misc_feature (1)..(25): SEQ ID NO: 1883; WAN024FUJ_at; Start 118; Stop 142
tcagattatgaaccagtgtattgtc

SEQ ID NO: 221585 - DNA, 25 bp, Artificial
  probe
  misc_feature (1)..(25): SEQ ID NO: 1883; WAN024FUJ_at; Start 145; Stop 169
tggaagaatctgatttcttatgatg

SEQ ID NO: 221586 - DNA, 25 bp, Artificial
  probe
  misc_feature (1)..(25): SEQ ID NO: 1883; WAN024FUJ_at; Start 166; Stop 190
gatgagatgaatcgctatatagatg

SEQ ID NO: 221587 - DNA, 25 bp, Artificial
  probe
  misc_feature (1)..(25): SEQ ID NO: 1884; WAN024FUK_at; Start 471; Stop 495
tcagttgatggagacaggtgacatc

SEQ ID NO: 221588 - DNA, 25 bp, Artificial
  probe
  misc_feature (1)..(25): SEQ ID NO: 1884; WAN024FUK_at; Start 351; Stop 375
gacagtcatcactaacataagtgat

SEQ ID NO: 221589 - DNA, 25 bp, Artificial
  probe
  misc_feature (1)..(25): SEQ ID NO: 1884; WAN024FUK_at; Start 349; Stop 373
ttgacagtcatcactaacataagtg

SEQ ID NO: 221590 - DNA, 25 bp, Artificial
  probe
  misc_feature (1)..(25): SEQ ID NO: 1884; WAN024FUK_at; Start 426; Stop 450
gagcaaaaataatctatttatggag

SEQ ID NO: 221591 - DNA, 25 bp, Artificial
  probe
  misc_feature (1)..(25): SEQ ID NO: 1884; WAN024FUK_at; Start 290; Stop 314
gtgagcatgtgaacgaccatcaact

SEQ ID NO: 221592 - DNA, 25 bp, Artificial
  probe
  misc_feature (1)..(25): SEQ ID NO: 1884; WAN024FUK_at; Start 472; Stop 496
cagttgatggagacaggtgacatca

SEQ ID NO: 221593 - DNA, 25 bp, Artificial
  probe
  misc_feature (1)..(25): SEQ ID NO: 1884; WAN024FUK_at; Start 299; Stop 323
tgaacgaccatcaacttgaatttgt

SEQ ID NO: 221594 - DNA, 25 bp, Artificial
  probe
  misc_feature (1)..(25): SEQ ID NO: 1884; WAN024FUK_at; Start 182; Stop 206
ttattgaggaagctgatacaatcat

SEQ ID NO: 221595 - DNA, 25 bp, Artificial
  probe
  misc_feature (1)..(25): SEQ ID NO: 1884; WAN024FUK_at; Start 256; Stop 280
agtccgataattgttccgagattaa

SEQ ID NO: 221596 - DNA, 25 bp, Artificial
  probe
  misc_feature (1)..(25): SEQ ID NO: 1884; WAN024FUK_at; Start 252; Stop 276
gaaaagtccgataattgttccgaga

SEQ ID NO: 221597 - DNA, 25 bp, Artificial
  probe
  misc_feature (1)..(25): SEQ ID NO: 1884; WAN024FUK_at; Start 292; Stop 316
gagcatgtgaacgaccatcaacttg

SEQ ID NO: 221598 - DNA, 25 bp, Artificial
  probe
  misc_feature (1)..(25): SEQ ID NO: 1884; WAN024FUK_at; Start 468; Stop 492
taatcagttgatggagacaggtgac

SEQ ID NO: 221599 - DNA, 25 bp, Artificial
  probe
  misc_feature (1)..(25): SEQ ID NO: 1884; WAN024FUK_at; Start 477; Stop 501
gatggagacaggtgacatcaagtat

SEQ ID NO: 221600 - DNA, 25 bp, Artificial
  probe
  misc_feature (1)..(25): SEQ ID NO: 1884; WAN024FUK_at; Start 343; Stop 367
tataatttgacagtcatcactaaca

SEQ ID NO: 221601 - DNA, 25 bp, Artificial
  probe
  misc_feature (1)..(25): SEQ ID NO: 1884; WAN024FUK_at; Start 190; Stop 214
gaagctgatacaatcattacccatg

SEQ ID NO: 221602 - DNA, 25 bp, Artificial
  probe
  misc_feature (1)..(25): SEQ ID NO: 1884; WAN024FUK_at; Start 294; Stop 318
gcatgtgaacgaccatcaacttgaa

SEQ ID NO: 221603 - DNA, 25 bp, Artificial
  probe
  misc_feature (1)..(25): SEQ ID NO: 1884; WAN024FUK_at; Start 303; Stop 327
cgaccatcaacttgaatttgttgag

SEQ ID NO: 221604 - DNA, 25 bp, Artificial
  probe
  misc_feature (1)..(25): SEQ ID NO: 1884; WAN024FUK_at; Start 368; Stop 392
taagtgatcttaattcctatatttc

SEQ ID NO: 221605 - DNA, 25 bp, Artificial
  probe
  misc_feature (1)..(25): SEQ ID NO: 1884; WAN024FUK_at; Start 297; Stop 321
tgtgaacgaccatcaacttgaattt

SEQ ID NO: 221606 - DNA, 25 bp, Artificial
  probe
  misc_feature (1)..(25): SEQ ID NO: 1884; WAN024FUK_at; Start 321; Stop 345
tgttgagaaagtgttaaatgtctat

SEQ ID NO: 221607 - DNA, 25 bp, Artificial
  probe
  misc_feature (1)..(25): SEQ ID NO: 1884; WAN024FUK_at; Start 436; Stop 460
aatctatttatggagaaatttatag

SEQ ID NO: 221608 - DNA, 25 bp, Artificial
  probe
  misc_feature (1)..(25): SEQ ID NO: 1884; WAN024FUK_at; Start 387; Stop 411
tatttctaattttgatgagcgaaaa

SEQ ID NO: 221609 - DNA, 25 bp, Artificial
  probe
  misc_feature (1)..(25): SEQ ID NO: 1884; WAN024FUK_at; Start 383; Stop 407
cctatatttctaattttgatgagcg

SEQ ID NO: 221610 - DNA, 25 bp, Artificial
  probe
  misc_feature (1)..(25): SEQ ID NO: 1884; WAN024FUK_at; Start 462; Stop 486
tatgattaatcagttgatggagaca

SEQ ID NO: 221611 - DNA, 25 bp, Artificial
  probe
  misc_feature (1)..(25): SEQ ID NO: 1884; WAN024FUK_at; Start 310; Stop 334
caacttgaatttgttgagaaagtgt

SEQ ID NO: 221612 - DNA, 25 bp, Artificial
  probe
  misc_feature (1)..(25): SEQ ID NO: 1884; WAN024FUK_at; Start 478; Stop 502
atggagacaggtgacatcaagtatg

SEQ ID NO: 221613 - DNA, 25 bp, Artificial
  probe
  misc_feature (1)..(25): SEQ ID NO: 1884; WAN024FUK_at; Start 288; Stop 312
tggtgagcatgtgaacgaccatcaa

SEQ ID NO: 221614 - DNA, 25 bp, Artificial
  probe
  misc_feature (1)..(25): SEQ ID NO: 1884; WAN024FUK_at; Start 399; Stop 423
tgatgagcgaaaaaaatcagatttg

SEQ ID NO: 221615 - DNA, 25 bp, Artificial
  probe
  misc_feature (1)..(25): SEQ ID NO: 1884; WAN024FUK_at; Start 415; Stop 439
tcagatttgaagagcaaaaataatc

SEQ ID NO: 221616 - DNA, 25 bp, Artificial
  probe
  misc_feature (1)..(25): SEQ ID NO: 1884; WAN024FUK_at; Start 186; Stop 210
tgaggaagctgatacaatcattacc

SEQ ID NO: 221617 - DNA, 25 bp, Artificial
  probe
  misc_feature (1)..(25): SEQ ID NO: 1884; WAN024FUK_at; Start 336; Stop 360
aaatgtctataatttgacagtcatc

SEQ ID NO: 221618 - DNA, 25 bp, Artificial
  probe
  misc_feature (1)..(25): SEQ ID NO: 1884; WAN024FUK_at; Start 360; Stop 384
cactaacataagtgatcttaattcc

SEQ ID NO: 221619 - DNA, 25 bp, Artificial
  probe
  misc_feature (1)..(25): SEQ ID NO: 1884; WAN024FUK_at; Start 192; Stop 216
agctgatacaatcattacccatggc

SEQ ID NO: 221620 - DNA, 25 bp, Artificial
  probe
  misc_feature (1)..(25): SEQ ID NO: 1884; WAN024FUK_at; Start 450; Stop 474
gaaatttatagatatgattaatcag

SEQ ID NO: 221621 - DNA, 25 bp, Artificial
  probe
  misc_feature (1)..(25): SEQ ID NO: 5730; WAN024FUL_at; Start 265; Stop 289
ggagcagcggttgcaataccgttct

SEQ ID NO: 221622 - DNA, 25 bp, Artificial
  probe
  misc_feature (1)..(25): SEQ ID NO: 5730; WAN024FUL_at; Start 335; Stop 359
tatttgatcgtgtagacgctccaac

SEQ ID NO: 221623 - DNA, 25 bp, Artificial
  probe
  misc_feature (1)..(25): SEQ ID NO: 5730; WAN024FUL_at; Start 152; Stop 176
aatgtcattattgctattatccgac

SEQ ID NO: 221624 - DNA, 25 bp, Artificial
  probe
  misc_feature (1)..(25): SEQ ID NO: 5730; WAN024FUL_at; Start 345; Stop 369
tgtagacgctccaacaatgactggc

SEQ ID NO: 221625 - DNA, 25 bp, Artificial
  probe
  misc_feature (1)..(25): SEQ ID NO: 5730; WAN024FUL_at; Start 249; Stop 273
tgttatcatttcatccggagcagcg

SEQ ID NO: 221626 - DNA, 25 bp, Artificial
  probe
  misc_feature (1)..(25): SEQ ID NO: 5730; WAN024FUL_at; Start 163; Stop 187
tgctattatccgactaatcgtaata

SEQ ID NO: 221627 - DNA, 25 bp, Artificial
  probe
  misc_feature (1)..(25): SEQ ID NO: 5730; WAN024FUL_at; Start 313; Stop 337
gctaaaactgtttatatagaagtat

SEQ ID NO: 221628 - DNA, 25 bp, Artificial
  probe
  misc_feature (1)..(25): SEQ ID NO: 5730; WAN024FUL_at; Start 359; Stop 383
caatgactggcaaaatagtataccc

SEQ ID NO: 221629 - DNA, 25 bp, Artificial
  probe
  misc_feature (1)..(25): SEQ ID NO: 5730; WAN024FUL_at; Start 339; Stop 363
tgatcgtgtagacgctccaacaatg

SEQ ID NO: 221630 - DNA, 25 bp, Artificial
  probe
  misc_feature (1)..(25): SEQ ID NO: 5730; WAN024FUL_at; Start 259; Stop 283
tcatccggagcagcggttgcaatac

SEQ ID NO: 221631 - DNA, 25 bp, Artificial
  probe
  misc_feature (1)..(25): SEQ ID NO: 5730; WAN024FUL_at; Start 41; Stop 65
gcggtgggcatttaaatcatctcta

SEQ ID NO: 221632 - DNA, 25 bp, Artificial
  probe
  misc_feature (1)..(25): SEQ ID NO: 5730; WAN024FUL_at; Start 64; Stop 88
tatctattgaaaccattttggcagg

SEQ ID NO: 221633 - DNA, 25 bp, Artificial
  probe
  misc_feature (1)..(25): SEQ ID NO: 5730; WAN024FUL_at; Start 379; Stop 403
taccctgttacagatagattcattg

SEQ ID NO: 221634 - DNA, 25 bp, Artificial
  probe
  misc_feature (1)..(25): SEQ ID NO: 5730; WAN024FUL_at; Start 303; Stop 327
aatatttggtgctaaaactgtttat

SEQ ID NO: 221635 - DNA, 25 bp, Artificial
  probe
  misc_feature (1)..(25): SEQ ID NO: 5730; WAN024FUL_at; Start 121; Stop 145
gaagatgctcgaagtattttatcaa

SEQ ID NO: 221636 - DNA, 25 bp, Artificial
  probe
  misc_feature (1)..(25): SEQ ID NO: 5730; WAN024FUL_at; Start 127; Stop 151
gctcgaagtattttatcaaatgaaa

SEQ ID NO: 221637 - DNA, 25 bp, Artificial
  probe
  misc_feature (1)..(25): SEQ ID NO: 5730; WAN024FUL_at; Start 32; Stop 56
taggatctagcggtgggcatttaaa

SEQ ID NO: 221638 - DNA, 25 bp, Artificial
  probe
  misc_feature (1)..(25): SEQ ID NO: 5730; WAN024FUL_at; Start 387; Stop 411
tacagatagattcattgtccaatgg

SEQ ID NO: 221639 - DNA, 25 bp, Artificial
  probe
  misc_feature (1)..(25): SEQ ID NO: 5730; WAN024FUL_at; Start 367; Stop 391
ggcaaaatagtataccctgttacag

SEQ ID NO: 221640 - DNA, 25 bp, Artificial
  probe
  misc_feature (1)..(25): SEQ ID NO: 5730; WAN024FUL_at; Start 27; Stop 51
tctagtaggatctagcggtgggcat

SEQ ID NO: 221641 - DNA, 25 bp, Artificial
  probe
  misc_feature (1)..(25): SEQ ID NO: 5730; WAN024FUL_at; Start 438; Stop 462
ggcaatcaatttgggaggaattttc

SEQ ID NO: 221642 - DNA, 25 bp, Artificial
  probe
  misc_feature (1)..(25): SEQ ID NO: 5730; WAN024FUL_at; Start 269; Stop 293
cagcggttgcaataccgttctttta

SEQ ID NO: 221643 - DNA, 25 bp, Artificial
  probe
  misc_feature (1)..(25): SEQ ID NO: 5730; WAN024FUL_at; Start 76; Stop 100
ccattttggcaggataaagatagac

SEQ ID NO: 221644 - DNA, 25 bp, Artificial
  probe
  misc_feature (1)..(25): SEQ ID NO: 5730; WAN024FUL_at; Start 227; Stop 251
tattatataaagaaaggccagatgt

SEQ ID NO: 221645 - DNA, 25 bp, Artificial
  probe
  misc_feature (1)..(25): SEQ ID NO: 5730; WAN024FUL_at; Start 395; Stop 419
gattcattgtccaatgggaagaaat

SEQ ID NO: 221646 - DNA, 25 bp, Artificial
  probe
  misc_feature (1)..(25): SEQ ID NO: 5730; WAN024FUL_at; Start 97; Stop 121
agactatggattacttttgataaag

SEQ ID NO: 221647 - DNA, 25 bp, Artificial
  probe
  misc_feature (1)..(25): SEQ ID NO: 5730; WAN024FUL_at; Start 349; Stop 373
gacgctccaacaatgactggcaaaa

SEQ ID NO: 221648 - DNA, 25 bp, Artificial
  probe
  misc_feature (1)..(25): SEQ ID NO: 5730; WAN024FUL_at; Start 234; Stop 258
taaagaaaggccagatgttatcatt

SEQ ID NO: 221649 - DNA, 25 bp, Artificial
  probe
  misc_feature (1)..(25): SEQ ID NO: 5730; WAN024FUL_at; Start 255; Stop 279
catttcatccggagcagcggttgca

SEQ ID NO: 221650 - DNA, 25 bp, Artificial
  probe
  misc_feature (1)..(25): SEQ ID NO: 5730; WAN024FUL_at; Start 83; Stop 107
ggcaggataaagatagactatggat

SEQ ID NO: 221651 - DNA, 25 bp, Artificial
  probe
  misc_feature (1)..(25): SEQ ID NO: 5730; WAN024FUL_at; Start 53; Stop 77
taaatcatctctatctattgaaacc

SEQ ID NO: 221652 - DNA, 25 bp, Artificial
  probe
  misc_feature (1)..(25): SEQ ID NO: 5730; WAN024FUL_at; Start 423; Stop 447
aaaaatctatcccaaggcaatcaat

SEQ ID NO: 221653 - DNA, 25 bp, Artificial
  probe
  misc_feature (1)..(25): SEQ ID NO: 5730; WAN024FUL_at; Start 329; Stop 353
tagaagtatttgatcgtgtagacgc

SEQ ID NO: 221654 - DNA, 25 bp, Artificial
  probe
  misc_feature (1)..(25): SEQ ID NO: 5730; WAN024FUL_at; Start 15; Stop 39
gataaaactttgtctagtaggatct

SEQ ID NO: 221655 - DNA, 25 bp, Artificial
  probe
  misc_feature (1)..(25): SEQ ID NO: 742; WAN024FUM_at; Start 142; Stop 166
tatccttgtcattatcctactaatc

SEQ ID NO: 221656 - DNA, 25 bp, Artificial
  probe
  misc_feature (1)..(25): SEQ ID NO: 742; WAN024FUM_at; Start 232; Stop 256
gatgttatcatctcatcaggggctg

SEQ ID NO: 221657 - DNA, 25 bp, Artificial
  probe
  misc_feature (1)..(25): SEQ ID NO: 742; WAN024FUM_at; Start 238; Stop 262
atcatctcatcaggggctgctgtag

SEQ ID NO: 221658 - DNA, 25 bp, Artificial
  probe
  misc_feature (1)..(25): SEQ ID NO: 742; WAN024FUM_at; Start 34; Stop 58
catctgactcatttatatctattaa

SEQ ID NO: 221659 - DNA, 25 bp, Artificial
  probe
  misc_feature (1)..(25): SEQ ID NO: 742; WAN024FUM_at; Start 228; Stop 252
ccctgatgttatcatctcatcaggg

SEQ ID NO: 221660 - DNA, 25 bp, Artificial
  probe
  misc_feature (1)..(25): SEQ ID NO: 742; WAN024FUM_at; Start 226; Stop 250
cgccctgatgttatcatctcatcag

SEQ ID NO: 221661 - DNA, 25 bp, Artificial
  probe
  misc_feature (1)..(25): SEQ ID NO: 742; WAN024FUM_at; Start 137; Stop 161
cattttatccttgtcattatcctac

SEQ ID NO: 221662 - DNA, 25 bp, Artificial
  probe
  misc_feature (1)..(25): SEQ ID NO: 742; WAN024FUM_at; Start 218; Stop 242
gaaaggaacgccctgatgttatcat

SEQ ID NO: 221663 - DNA, 25 bp, Artificial
  probe
  misc_feature (1)..(25): SEQ ID NO: 742; WAN024FUM_at; Start 221; Stop 245
aggaacgccctgatgttatcatctc

SEQ ID NO: 221664 - DNA, 25 bp, Artificial
  probe
  misc_feature (1)..(25): SEQ ID NO: 742; WAN024FUM_at; Start 39; Stop 63
gactcatttatatctattaaaacct

SEQ ID NO: 221665 - DNA, 25 bp, Artificial
  probe
  misc_feature (1)..(25): SEQ ID NO: 742; WAN024FUM_at; Start 241; Stop 265
atctcatcaggggctgctgtagcag

SEQ ID NO: 221666 - DNA, 25 bp, Artificial
  probe
  misc_feature (1)..(25): SEQ ID NO: 742; WAN024FUM_at; Start 220; Stop 244
aaggaacgccctgatgttatcatct

SEQ ID NO: 221667 - DNA, 25 bp, Artificial
  probe
  misc_feature (1)..(25): SEQ ID NO: 742; WAN024FUM_at; Start 23; Stop 47
ctagtggaggtcatctgactcattt

SEQ ID NO: 221668 - DNA, 25 bp, Artificial
  probe
  misc_feature (1)..(25): SEQ ID NO: 742; WAN024FUM_at; Start 28; Stop 52
ggaggtcatctgactcatttatatc

SEQ ID NO: 221669 - DNA, 25 bp, Artificial
  probe
  misc_feature (1)..(25): SEQ ID NO: 742; WAN024FUM_at; Start 373; Stop 397
acagataagttcatagttcagtggg

SEQ ID NO: 221670 - DNA, 25 bp, Artificial
  probe
  misc_feature (1)..(25): SEQ ID NO: 742; WAN024FUM_at; Start 26; Stop 50
gtggaggtcatctgactcatttata

SEQ ID NO: 221671 - DNA, 25 bp, Artificial
  probe
  misc_feature (1)..(25): SEQ ID NO: 742; WAN024FUM_at; Start 22; Stop 46
tctagtggaggtcatctgactcatt

SEQ ID NO: 221672 - DNA, 25 bp, Artificial
  probe
  misc_feature (1)..(25): SEQ ID NO: 742; WAN024FUM_at; Start 227; Stop 251
gccctgatgttatcatctcatcagg

SEQ ID NO: 221673 - DNA, 25 bp, Artificial
  probe
  misc_feature (1)..(25): SEQ ID NO: 742; WAN024FUM_at; Start 237; Stop 261
tatcatctcatcaggggctgctgta

SEQ ID NO: 221674 - DNA, 25 bp, Artificial
  probe
  misc_feature (1)..(25): SEQ ID NO: 742; WAN024FUM_at; Start 27; Stop 51
tggaggtcatctgactcatttatat

SEQ ID NO: 221675 - DNA, 25 bp, Artificial
  probe
  misc_feature (1)..(25): SEQ ID NO: 742; WAN024FUM_at; Start 234; Stop 258
tgttatcatctcatcaggggctgct

SEQ ID NO: 221676 - DNA, 25 bp, Artificial
  probe
  misc_feature (1)..(25): SEQ ID NO: 742; WAN024FUM_at; Start 29; Stop 53
gaggtcatctgactcatttatatct

SEQ ID NO: 221677 - DNA, 25 bp, Artificial
  probe
  misc_feature (1)..(25): SEQ ID NO: 742; WAN024FUM_at; Start 25; Stop 49
agtggaggtcatctgactcatttat

SEQ ID NO: 221678 - DNA, 25 bp, Artificial
  probe
  misc_feature (1)..(25): SEQ ID NO: 742; WAN024FUM_at; Start 223; Stop 247
gaacgccctgatgttatcatctcat

SEQ ID NO: 221679 - DNA, 25 bp, Artificial
  probe
  misc_feature (1)..(25): SEQ ID NO: 742; WAN024FUM_at; Start 219; Stop 243
aaaggaacgccctgatgttatcatc

SEQ ID NO: 221680 - DNA, 25 bp, Artificial
  probe
  misc_feature (1)..(25): SEQ ID NO: 742; WAN024FUM_at; Start 222; Stop 246
ggaacgccctgatgttatcatctca

SEQ ID NO: 221681 - DNA, 25 bp, Artificial
  probe
  misc_feature (1)..(25): SEQ ID NO: 742; WAN024FUM_at; Start 235; Stop 259
gttatcatctcatcaggggctgctg

SEQ ID NO: 221682 - DNA, 25 bp, Artificial
  probe
  misc_feature (1)..(25): SEQ ID NO: 742; WAN024FUM_at; Start 31; Stop 55
ggtcatctgactcatttatatctat

SEQ ID NO: 221683 - DNA, 25 bp, Artificial
  probe
  misc_feature (1)..(25): SEQ ID NO: 742; WAN024FUM_at; Start 224; Stop 248
aacgccctgatgttatcatctcatc

SEQ ID NO: 221684 - DNA, 25 bp, Artificial
  probe
  misc_feature (1)..(25): SEQ ID NO: 742; WAN024FUM_at; Start 140; Stop 164
tttatccttgtcattatcctactaa

SEQ ID NO: 221685 - DNA, 25 bp, Artificial
  probe
  misc_feature (1)..(25): SEQ ID NO: 742; WAN024FUM_at; Start 24; Stop 48
tagtggaggtcatctgactcattta

SEQ ID NO: 221686 - DNA, 25 bp, Artificial
  probe
  misc_feature (1)..(25): SEQ ID NO: 742; WAN024FUM_at; Start 225; Stop 249
acgccctgatgttatcatctcatca

SEQ ID NO: 221687 - DNA, 25 bp, Artificial
  probe
  misc_feature (1)..(25): SEQ ID NO: 742; WAN024FUM_at; Start 374; Stop 398
cagataagttcatagttcagtggga

SEQ ID NO: 221688 - DNA, 25 bp, Artificial
  probe
  misc_feature (1)..(25): SEQ ID NO: 742; WAN024FUM_at; Start 30; Stop 54
aggtcatctgactcatttatatcta

SEQ ID NO: 221689 - DNA, 25 bp, Artificial
  probe
  misc_feature (1)..(25): SEQ ID NO: 936; WAN024FUN_at; Start 247; Stop 271
tctggtgccgctatcgctgttcctt

SEQ ID NO: 221690 - DNA, 25 bp, Artificial
  probe
  misc_feature (1)..(25): SEQ ID NO: 936; WAN024FUN_at; Start 256; Stop 280
gctatcgctgttcctttcttttata

SEQ ID NO: 221691 - DNA, 25 bp, Artificial
  probe
  misc_feature (1)..(25): SEQ ID NO: 936; WAN024FUN_at; Start 117; Stop 141
gagtgtactctctgaggaagttgta

SEQ ID NO: 221692 - DNA, 25 bp, Artificial
  probe
  misc_feature (1)..(25): SEQ ID NO: 936; WAN024FUN_at; Start 105; Stop 129
ggcggacgctcggagtgtactctct

SEQ ID NO: 221693 - DNA, 25 bp, Artificial
  probe
  misc_feature (1)..(25): SEQ ID NO: 936; WAN024FUN_at; Start 290; Stop 314
tatttggatcaaagacagtgtatat

SEQ ID NO: 221694 - DNA, 25 bp, Artificial
  probe
  misc_feature (1)..(25): SEQ ID NO: 936; WAN024FUN_at; Start 236; Stop 260
tgattatttcttctggtgccgctat

SEQ ID NO: 221695 - DNA, 25 bp, Artificial
  probe
  misc_feature (1)..(25): SEQ ID NO: 936; WAN024FUN_at; Start 277; Stop 301
tatattgggaagttatttggatcaa

SEQ ID NO: 221696 - DNA, 25 bp, Artificial
  probe
  misc_feature (1)..(25): SEQ ID NO: 936; WAN024FUN_at; Start 344; Stop 368
cactgacaggaaaacttgtttatcc

SEQ ID NO: 221697 - DNA, 25 bp, Artificial
  probe
  misc_feature (1)..(25): SEQ ID NO: 936; WAN024FUN_at; Start 239; Stop 263
ttatttcttctggtgccgctatcgc

SEQ ID NO: 221698 - DNA, 25 bp, Artificial
  probe
  misc_feature (1)..(25): SEQ ID NO: 936; WAN024FUN_at; Start 93; Stop 117
tacttttgataaggcggacgctcgg

SEQ ID NO: 221699 - DNA, 25 bp, Artificial
  probe
  misc_feature (1)..(25): SEQ ID NO: 936; WAN024FUN_at; Start 249; Stop 273
tggtgccgctatcgctgttcctttc

SEQ ID NO: 221700 - DNA, 25 bp, Artificial
  probe
  misc_feature (1)..(25): SEQ ID NO: 936; WAN024FUN_at; Start 340; Stop 364
tcaacactgacaggaaaacttgttt

SEQ ID NO: 221701 - DNA, 25 bp, Artificial
  probe
  misc_feature (1)..(25): SEQ ID NO: 936; WAN024FUN_at; Start 125; Stop 149
tctctgaggaagttgtatatccctg

SEQ ID NO: 221702 - DNA, 25 bp, Artificial
  probe
  misc_feature (1)..(25): SEQ ID NO: 936; WAN024FUN_at; Start 149; Stop 173
gttattatccaaccaatcgtaatat

SEQ ID NO: 221703 - DNA, 25 bp, Artificial
  probe
  misc_feature (1)..(25): SEQ ID NO: 936; WAN024FUN_at; Start 241; Stop 265
atttcttctggtgccgctatcgctg

SEQ ID NO: 221704 - DNA, 25 bp, Artificial
  probe
  misc_feature (1)..(25): SEQ ID NO: 936; WAN024FUN_at; Start 133; Stop 157
gaagttgtatatccctgttattatc

SEQ ID NO: 221705 - DNA, 25 bp, Artificial
  probe
  misc_feature (1)..(25): SEQ ID NO: 936; WAN024FUN_at; Start 92; Stop 116
ttacttttgataaggcggacgctcg

SEQ ID NO: 221706 - DNA, 25 bp, Artificial
  probe
  misc_feature (1)..(25): SEQ ID NO: 936; WAN024FUN_at; Start 253; Stop 277
gccgctatcgctgttcctttctttt

SEQ ID NO: 221707 - DNA, 25 bp, Artificial
  probe
  misc_feature (1)..(25): SEQ ID NO: 936; WAN024FUN_at; Start 285; Stop 309
gaagttatttggatcaaagacagtg

SEQ ID NO: 221708 - DNA, 25 bp, Artificial
  probe
  misc_feature (1)..(25): SEQ ID NO: 936; WAN024FUN_at; Start 217; Stop 241
aaaaaagagagaccagatttgatta

SEQ ID NO: 221709 - DNA, 25 bp, Artificial
  probe
  misc_feature (1)..(25): SEQ ID NO: 936; WAN024FUN_at; Start 108; Stop 132
ggacgctcggagtgtactctctgag

SEQ ID NO: 221710 - DNA, 25 bp, Artificial
  probe
  misc_feature (1)..(25): SEQ ID NO: 936; WAN024FUN_at; Start 146; Stop 170
cctgttattatccaaccaatcgtaa

SEQ ID NO: 221711 - DNA, 25 bp, Artificial
  probe
  misc_feature (1)..(25): SEQ ID NO: 936; WAN024FUN_at; Start 329; Stop 353
gaattgatgcttcaacactgacagg

SEQ ID NO: 221712 - DNA, 25 bp, Artificial
  probe
  misc_feature (1)..(25): SEQ ID NO: 936; WAN024FUN_at; Start 296; Stop 320
gatcaaagacagtgtatatagaagt

SEQ ID NO: 221713 - DNA, 25 bp, Artificial
  probe
  misc_feature (1)..(25): SEQ ID NO: 936; WAN024FUN_at; Start 333; Stop 357
tgatgcttcaacactgacaggaaaa

SEQ ID NO: 221714 - DNA, 25 bp, Artificial
  probe
  misc_feature (1)..(25): SEQ ID NO: 936; WAN024FUN_at; Start 325; Stop 349
gatagaattgatgcttcaacactga

SEQ ID NO: 221715 - DNA, 25 bp, Artificial
  probe
  misc_feature (1)..(25): SEQ ID NO: 936; WAN024FUN_at; Start 337; Stop 361
gcttcaacactgacaggaaaacttg

SEQ ID NO: 221716 - DNA, 25 bp, Artificial
  probe
  misc_feature (1)..(25): SEQ ID NO: 936; WAN024FUN_at; Start 114; Stop 138
tcggagtgtactctctgaggaagtt

SEQ ID NO: 221717 - DNA, 25 bp, Artificial
  probe
  misc_feature (1)..(25): SEQ ID NO: 936; WAN024FUN_at; Start 232; Stop 256
gatttgattatttcttctggtgccg

SEQ ID NO: 221718 - DNA, 25 bp, Artificial
  probe
  misc_feature (1)..(25): SEQ ID NO: 936; WAN024FUN_at; Start 102; Stop 126
taaggcggacgctcggagtgtactc

SEQ ID NO: 221719 - DNA, 25 bp, Artificial
  probe
  misc_feature (1)..(25): SEQ ID NO: 936; WAN024FUN_at; Start 139; Stop 163
gtatatccctgttattatccaacca

SEQ ID NO: 221720 - DNA, 25 bp, Artificial
  probe
  misc_feature (1)..(25): SEQ ID NO: 936; WAN024FUN_at; Start 128; Stop 152
ctgaggaagttgtatatccctgtta

SEQ ID NO: 221721 - DNA, 25 bp, Artificial
  probe
  misc_feature (1)..(25): SEQ ID NO: 936; WAN024FUN_at; Start 122; Stop 146
tactctctgaggaagttgtatatcc

SEQ ID NO: 221722 - DNA, 25 bp, Artificial
  probe
  misc_feature (1)..(25): SEQ ID NO: 936; WAN024FUN_at; Start 111; Stop 135
cgctcggagtgtactctctgaggaa

SEQ ID NO: 221723 - DNA, 25 bp, Artificial
  probe
  misc_feature (1)..(25): SEQ ID NO: 923; WAN024FUO_at; Start 34; Stop 58
catttaactcatttgtatttattaa

SEQ ID NO: 221724 - DNA, 25 bp, Artificial
  probe
  misc_feature (1)..(25): SEQ ID NO: 923; WAN024FUO_at; Start 300; Stop 324
taagacagtctatatagaagtattt

SEQ ID NO: 221725 - DNA, 25 bp, Artificial
  probe
  misc_feature (1)..(25): SEQ ID NO: 923; WAN024FUO_at; Start 292; Stop 316
tttggtgctaagacagtctatatag

SEQ ID NO: 221726 - DNA, 25 bp, Artificial
  probe
  misc_feature (1)..(25): SEQ ID NO: 923; WAN024FUO_at; Start 299; Stop 323
ctaagacagtctatatagaagtatt

SEQ ID NO: 221727 - DNA, 25 bp, Artificial
  probe
  misc_feature (1)..(25): SEQ ID NO: 923; WAN024FUO_at; Start 289; Stop 313
atatttggtgctaagacagtctata

SEQ ID NO: 221728 - DNA, 25 bp, Artificial
  probe
  misc_feature (1)..(25): SEQ ID NO: 923; WAN024FUO_at; Start 296; Stop 320
gtgctaagacagtctatatagaagt

SEQ ID NO: 221729 - DNA, 25 bp, Artificial
  probe
  misc_feature (1)..(25): SEQ ID NO: 923; WAN024FUO_at; Start 291; Stop 315
atttggtgctaagacagtctatata

SEQ ID NO: 221730 - DNA, 25 bp, Artificial
  probe
  misc_feature (1)..(25): SEQ ID NO: 923; WAN024FUO_at; Start 294; Stop 318
tggtgctaagacagtctatatagaa

SEQ ID NO: 221731 - DNA, 25 bp, Artificial
  probe
  misc_feature (1)..(25): SEQ ID NO: 923; WAN024FUO_at; Start 298; Stop 322
gctaagacagtctatatagaagtat

SEQ ID NO: 221732 - DNA, 25 bp, Artificial
  probe
  misc_feature (1)..(25): SEQ ID NO: 923; WAN024FUO_at; Start 288; Stop 312
aatatttggtgctaagacagtctat

SEQ ID NO: 221733 - DNA, 25 bp, Artificial
  probe
  misc_feature (1)..(25): SEQ ID NO: 923; WAN024FUO_at; Start 326; Stop 350
atagaattgatgctccgacaatgac

SEQ ID NO: 221734 - DNA, 25 bp, Artificial
  probe
  misc_feature (1)..(25): SEQ ID NO: 923; WAN024FUO_at; Start 295; Stop 319
ggtgctaagacagtctatatagaag

SEQ ID NO: 221735 - DNA, 25 bp, Artificial
  probe
  misc_feature (1)..(25): SEQ ID NO: 923; WAN024FUO_at; Start 297; Stop 321
tgctaagacagtctatatagaagta

SEQ ID NO: 221736 - DNA, 25 bp, Artificial
  probe
  misc_feature (1)..(25): SEQ ID NO: 923; WAN024FUO_at; Start 325; Stop 349
gatagaattgatgctccgacaatga

SEQ ID NO: 221737 - DNA, 25 bp, Artificial
  probe
  misc_feature (1)..(25): SEQ ID NO: 923; WAN024FUO_at; Start 293; Stop 317
ttggtgctaagacagtctatataga

SEQ ID NO: 221738 - DNA, 25 bp, Artificial
  probe
  misc_feature (1)..(25): SEQ ID NO: 5045; WAN024FUP_at; Start 86; Stop 110
tcaatcgtggaatcaaagcgccacc

SEQ ID NO: 221739 - DNA, 25 bp, Artificial
  probe
  misc_feature (1)..(25): SEQ ID NO: 5045; WAN024FUP_at; Start 27; Stop 51
gataactgttacaccttgggcttgg

SEQ ID NO: 221740 - DNA, 25 bp, Artificial
  probe
  misc_feature (1)..(25): SEQ ID NO: 5045; WAN024FUP_at; Start 341; Stop 365
tctgtcctgtcaatttttgtggccc

SEQ ID NO: 221741 - DNA, 25 bp, Artificial
  probe
  misc_feature (1)..(25): SEQ ID NO: 5045; WAN024FUP_at; Start 32; Stop 56
ctgttacaccttgggcttgggtcgc

SEQ ID NO: 221742 - DNA, 25 bp, Artificial
  probe
  misc_feature (1)..(25): SEQ ID NO: 5045; WAN024FUP_at; Start 310; Stop 334
gcactggaaatatctcctggtacga

SEQ ID NO: 221743 - DNA, 25 bp, Artificial
  probe
  misc_feature (1)..(25): SEQ ID NO: 5045; WAN024FUP_at; Start 346; Stop 370
cctgtcaatttttgtggcccctgga

SEQ ID NO: 221744 - DNA, 25 bp, Artificial
  probe
  misc_feature (1)..(25): SEQ ID NO: 5045; WAN024FUP_at; Start 64; Stop 88
gcaataatgggcaattcatcaatca

SEQ ID NO: 221745 - DNA, 25 bp, Artificial
  probe
  misc_feature (1)..(25): SEQ ID NO: 5045; WAN024FUP_at; Start 294; Stop 318
gactaaccaaaaggctgcactggaa

SEQ ID NO: 221746 - DNA, 25 bp, Artificial
  probe
  misc_feature (1)..(25): SEQ ID NO: 5045; WAN024FUP_at; Start 197; Stop 221
cacccatggcacgaatgacatcaat

SEQ ID NO: 221747 - DNA, 25 bp, Artificial
  probe
  misc_feature (1)..(25): SEQ ID NO: 5045; WAN024FUP_at; Start 291; Stop 315
tgcgactaaccaaaaggctgcactg

SEQ ID NO: 221748 - DNA, 25 bp, Artificial
  probe
  misc_feature (1)..(25): SEQ ID NO: 5045; WAN024FUP_at; Start 315; Stop 339
ggaaatatctcctggtacgaccacc

SEQ ID NO: 221749 - DNA, 25 bp, Artificial
  probe
  misc_feature (1)..(25): SEQ ID NO: 5045; WAN024FUP_at; Start 83; Stop 107
caatcaatcgtggaatcaaagcgcc

SEQ ID NO: 221750 - DNA, 25 bp, Artificial
  probe
  misc_feature (1)..(25): SEQ ID NO: 5045; WAN024FUP_at; Start 301; Stop 325
caaaaggctgcactggaaatatctc

SEQ ID NO: 221751 - DNA, 25 bp, Artificial
  probe
  misc_feature (1)..(25): SEQ ID NO: 5045; WAN024FUP_at; Start 269; Stop 293
gagaatttggagcaatcaaacctgc

SEQ ID NO: 221752 - DNA, 25 bp, Artificial
  probe
  misc_feature (1)..(25): SEQ ID NO: 5045; WAN024FUP_at; Start 320; Stop 344
tatctcctggtacgaccaccttctg

SEQ ID NO: 221753 - DNA, 25 bp, Artificial
  probe
  misc_feature (1)..(25): SEQ ID NO: 5045; WAN024FUP_at; Start 203; Stop 227
tggcacgaatgacatcaataatacc

SEQ ID NO: 221754 - DNA, 25 bp, Artificial
  probe
  misc_feature (1)..(25): SEQ ID NO: 5045; WAN024FUP_at; Start 120; Stop 144
tcctttcaagtcagaagactcaaca

SEQ ID NO: 221755 - DNA, 25 bp, Artificial
  probe
  misc_feature (1)..(25): SEQ ID NO: 5045; WAN024FUP_at; Start 8; Stop 32
tgagctcctcagcatccttgataac

SEQ ID NO: 221756 - DNA, 25 bp, Artificial
  probe
  misc_feature (1)..(25): SEQ ID NO: 5045; WAN024FUP_at; Start 1; Stop 25
ttgaccttgagctcctcagcatcct

SEQ ID NO: 221757 - DNA, 25 bp, Artificial
  probe
  misc_feature (1)..(25): SEQ ID NO: 5045; WAN024FUP_at; Start 71; Stop 95
tgggcaattcatcaatcaatcgtgg

SEQ ID NO: 221758 - DNA, 25 bp, Artificial
  probe
  misc_feature (1)..(25): SEQ ID NO: 5045; WAN024FUP_at; Start 17; Stop 41
cagcatccttgataactgttacacc

SEQ ID NO: 221759 - DNA, 25 bp, Artificial
  probe
  misc_feature (1)..(25): SEQ ID NO: 5045; WAN024FUP_at; Start 284; Stop 308
tcaaacctgcgactaaccaaaaggc

SEQ ID NO: 221760 - DNA, 25 bp, Artificial
  probe
  misc_feature (1)..(25): SEQ ID NO: 5045; WAN024FUP_at; Start 361; Stop 385
ggcccctggactgtgattttcttac

SEQ ID NO: 221761 - DNA, 25 bp, Artificial
  probe
  misc_feature (1)..(25): SEQ ID NO: 5045; WAN024FUP_at; Start 157; Stop 181
gatttagcgactggatcgatttcag

SEQ ID NO: 221762 - DNA, 25 bp, Artificial
  probe
  misc_feature (1)..(25): SEQ ID NO: 5045; WAN024FUP_at; Start 354; Stop 378
tttttgtggcccctggactgtgatt

SEQ ID NO: 221763 - DNA, 25 bp, Artificial
  probe
  misc_feature (1)..(25): SEQ ID NO: 5045; WAN024FUP_at; Start 190; Stop 214
aattttccacccatggcacgaatga

SEQ ID NO: 221764 - DNA, 25 bp, Artificial
  probe
  misc_feature (1)..(25): SEQ ID NO: 5045; WAN024FUP_at; Start 368; Stop 392
ggactgtgattttcttaccatccac

SEQ ID NO: 221765 - DNA, 25 bp, Artificial
  probe
  misc_feature (1)..(25): SEQ ID NO: 5045; WAN024FUP_at; Start 276; Stop 300
tggagcaatcaaacctgcgactaac

SEQ ID NO: 221766 - DNA, 25 bp, Artificial
  probe
  misc_feature (1)..(25): SEQ ID NO: 5045; WAN024FUP_at; Start 328; Stop 352
ggtacgaccaccttctgtcctgtca

SEQ ID NO: 221767 - DNA, 25 bp, Artificial
  probe
  misc_feature (1)..(25): SEQ ID NO: 5045; WAN024FUP_at; Start 89; Stop 113
atcgtggaatcaaagcgccaccaat

SEQ ID NO: 221768 - DNA, 25 bp, Artificial
  probe
  misc_feature (1)..(25): SEQ ID NO: 5045; WAN024FUP_at; Start 375; Stop 399
gattttcttaccatccacacttaaa

SEQ ID NO: 221769 - DNA, 25 bp, Artificial
  probe
  misc_feature (1)..(25): SEQ ID NO: 5045; WAN024FUP_at; Start 306; Stop 330
ggctgcactggaaatatctcctggt

SEQ ID NO: 221770 - DNA, 25 bp, Artificial
  probe
  misc_feature (1)..(25): SEQ ID NO: 5045; WAN024FUP_at; Start 116; Stop 140
ctgttcctttcaagtcagaagactc

SEQ ID NO: 221771 - DNA, 25 bp, Artificial
  probe
  misc_feature (1)..(25): SEQ ID NO: 5045; WAN024FUP_at; Start 272; Stop 296
aatttggagcaatcaaacctgcgac

SEQ ID NO: 221772 - DNA, 25 bp, Artificial
  probe
  misc_feature (1)..(25): SEQ ID NO: 3423; WAN024FUQ_at; Start 1018; Stop 1042
caagcccaaggtgtaacagttatca

SEQ ID NO: 221773 - DNA, 25 bp, Artificial
  probe
  misc_feature (1)..(25): SEQ ID NO: 3423; WAN024FUQ_at; Start 41; Stop 65
tgaggtccagtatgaaactaaaaac

SEQ ID NO: 221774 - DNA, 25 bp, Artificial
  probe
  misc_feature (1)..(25): SEQ ID NO: 3423; WAN024FUQ_at; Start 558; Stop 582
caagtcagccttgatgtttgcagcc

SEQ ID NO: 221775 - DNA, 25 bp, Artificial
  probe
  misc_feature (1)..(25): SEQ ID NO: 3423; WAN024FUQ_at; Start 161; Stop 185
ccaaggtttatgatattctgcgagg

SEQ ID NO: 221776 - DNA, 25 bp, Artificial
  probe
  misc_feature (1)..(25): SEQ ID NO: 3423; WAN024FUQ_at; Start 1063; Stop 1087
gtcaaggaaacagaccgtattcagg

SEQ ID NO: 221777 - DNA, 25 bp, Artificial
  probe
  misc_feature (1)..(25): SEQ ID NO: 3423; WAN024FUQ_at; Start 1115; Stop 1139
gagcagatattactcctacggcaga

SEQ ID NO: 221778 - DNA, 25 bp, Artificial
  probe
  misc_feature (1)..(25): SEQ ID NO: 3423; WAN024FUQ_at; Start 703; Stop 727
gggccacaaaaattgacaggacaga

SEQ ID NO: 221779 - DNA, 25 bp, Artificial
  probe
  misc_feature (1)..(25): SEQ ID NO: 3423; WAN024FUQ_at; Start 572; Stop 596
tgtttgcagccttacaagctaaggg

SEQ ID NO: 221780 - DNA, 25 bp, Artificial
  probe
  misc_feature (1)..(25): SEQ ID NO: 3423; WAN024FUQ_at; Start 888; Stop 912
tgaaatcgatccagtcgctaaatct

SEQ ID NO: 221781 - DNA, 25 bp, Artificial
  probe
  misc_feature (1)..(25): SEQ ID NO: 3423; WAN024FUQ_at; Start 849; Stop 873
tgatgtcattcgtgccatgggtgga

SEQ ID NO: 221782 - DNA, 25 bp, Artificial
  probe
  misc_feature (1)..(25): SEQ ID NO: 3423; WAN024FUQ_at; Start 342; Stop 366
gatttcaggtgtccttgctggtgca

SEQ ID NO: 221783 - DNA, 25 bp, Artificial
  probe
  misc_feature (1)..(25): SEQ ID NO: 3423; WAN024FUQ_at; Start 26; Stop 50
aaagtattgcaagtatgaggtccag

SEQ ID NO: 221784 - DNA, 25 bp, Artificial
  probe
  misc_feature (1)..(25): SEQ ID NO: 3423; WAN024FUQ_at; Start 1260; Stop 1284
gcttgaccgtgcagaagccatcaat

SEQ ID NO: 221785 - DNA, 25 bp, Artificial
  probe
  misc_feature (1)..(25): SEQ ID NO: 3423; WAN024FUQ_at; Start 532; Stop 556
gagttgccaattgcctctgcccaag

SEQ ID NO: 221786 - DNA, 25 bp, Artificial
  probe
  misc_feature (1)..(25): SEQ ID NO: 3423; WAN024FUQ_at; Start 1094; Stop 1118
cagacgccttaaatagtatgggagc

SEQ ID NO: 221787 - DNA, 25 bp, Artificial
  probe
  misc_feature (1)..(25): SEQ ID NO: 3423; WAN024FUQ_at; Start 116; Stop 140
tcagccaccgttccattatctttgg

SEQ ID NO: 221788 - DNA, 25 bp, Artificial
  probe
  misc_feature (1)..(25): SEQ ID NO: 3423; WAN024FUQ_at; Start 717; Stop 741
gacaggacagaaggtggtcgtacca

SEQ ID NO: 221789 - DNA, 25 bp, Artificial
  probe
  misc_feature (1)..(25): SEQ ID NO: 3423; WAN024FUQ_at; Start 1211; Stop 1235
gcatgatgacagctatcgcagccct

SEQ ID NO: 221790 - DNA, 25 bp, Artificial
  probe
  misc_feature (1)..(25): SEQ ID NO: 3423; WAN024FUQ_at; Start 96; Stop 120
cgtcccaggtgacaagtctatcagc

SEQ ID NO: 221791 - DNA, 25 bp, Artificial
  probe
  misc_feature (1)..(25): SEQ ID NO: 3423; WAN024FUQ_at; Start 753; Stop 777
cagtgcagccttttggttagtcgca

SEQ ID NO: 221792 - DNA, 25 bp, Artificial
  probe
  misc_feature (1)..(25): SEQ ID NO: 3423; WAN024FUQ_at; Start 1195; Stop 1219
ggtgaccaccgtatcggcatgatga

SEQ ID NO: 221793 - DNA, 25 bp, Artificial
  probe
  misc_feature (1)..(25): SEQ ID NO: 3423; WAN024FUQ_at; Start 1167; Stop 1191
tcttcacggtgctagagtcaatacg

SEQ ID NO: 221794 - DNA, 25 bp, Artificial
  probe
  misc_feature (1)..(25): SEQ ID NO: 3423; WAN024FUQ_at; Start 737; Stop 761
taccaggagatatttccagtgcagc

SEQ ID NO: 221795 - DNA, 25 bp, Artificial
  probe
  misc_feature (1)..(25): SEQ ID NO: 3423; WAN024FUQ_at; Start 1129; Stop 1153
cctacggcagatgggatgattatca

SEQ ID NO: 221796 - DNA, 25 bp, Artificial
  probe
  misc_feature (1)..(25): SEQ ID NO: 3423; WAN024FUQ_at; Start 467; Stop 491
aaactgaacgagacttgcctcccct

SEQ ID NO: 221797 - DNA, 25 bp, Artificial
  probe
  misc_feature (1)..(25): SEQ ID NO: 3423; WAN024FUQ_at; Start 418; Stop 442
gaccgtgtgacccttccactgaaaa

SEQ ID NO: 221798 - DNA, 25 bp, Artificial
  probe
  misc_feature (1)..(25): SEQ ID NO: 3423; WAN024FUQ_at; Start 1181; Stop 1205
gagtcaatacgtttggtgaccaccg

SEQ ID NO: 221799 - DNA, 25 bp, Artificial
  probe
  misc_feature (1)..(25): SEQ ID NO: 3423; WAN024FUQ_at; Start 309; Stop 333
taatatgggaaattctggcacctcg

SEQ ID NO: 221800 - DNA, 25 bp, Artificial
  probe
  misc_feature (1)..(25): SEQ ID NO: 3423; WAN024FUQ_at; Start 358; Stop 382
gctggtgcagatttcgaagtagaga

SEQ ID NO: 221801 - DNA, 25 bp, Artificial
  probe
  misc_feature (1)..(25): SEQ ID NO: 3423; WAN024FUQ_at; Start 200; Stop 224
cgaccatgcaggtttttcgtgacct

SEQ ID NO: 221802 - DNA, 25 bp, Artificial
  probe
  misc_feature (1)..(25): SEQ ID NO: 3423; WAN024FUQ_at; Start 265; Stop 289
caaggtgtaggcatggctggcttaa

SEQ ID NO: 221803 - DNA, 25 bp, Artificial
  probe
  misc_feature (1)..(25): SEQ ID NO: 3423; WAN024FUQ_at; Start 1078; Stop 1102
cgtattcaggttgtggcagacgcct

SEQ ID NO: 221804 - DNA, 25 bp, Artificial
  probe
  misc_feature (1)..(25): SEQ ID NO: 3423; WAN024FUQ_at; Start 325; Stop 349
ggcacctcgattcgcctgatttcag

SEQ ID NO: 221805 - DNA, 25 bp, Artificial
  probe
  misc_feature (1)..(25): SEQ ID NO: 3423; WAN024FUQ_at; Start 928; Stop 952
gagtcttctgacttgaaaggaacag

SEQ ID NO: 221806 - DNA, 25 bp, Artificial
  probe
  misc_feature (1)..(25): SEQ ID NO: 5268; WAN024FUR_at; Start 199; Stop 223
tatagggtacgttggttgaggtcat

SEQ ID NO: 221807 - DNA, 25 bp, Artificial
  probe
  misc_feature (1)..(25): SEQ ID NO: 5268; WAN024FUR_at; Start 92; Stop 116
ataaacatcataggcatctacccag

SEQ ID NO: 221808 - DNA, 25 bp, Artificial
  probe
  misc_feature (1)..(25): SEQ ID NO: 5268; WAN024FUR_at; Start 40; Stop 64
gagcgagcttggtttgatatttgtt

SEQ ID NO: 221809 - DNA, 25 bp, Artificial
  probe
  misc_feature (1)..(25): SEQ ID NO: 5268; WAN024FUR_at; Start 108; Stop 132
tctacccagtcacccagttctggaa

SEQ ID NO: 221810 - DNA, 25 bp, Artificial
  probe
  misc_feature (1)..(25): SEQ ID NO: 5268; WAN024FUR_at; Start 126; Stop 150
tctggaatcgtcaatttttcaatac

SEQ ID NO: 221811 - DNA, 25 bp, Artificial
  probe
  misc_feature (1)..(25): SEQ ID NO: 5268; WAN024FUR_at; Start 96; Stop 120
acatcataggcatctacccagtcac

SEQ ID NO: 221812 - DNA, 25 bp, Artificial
  probe
  misc_feature (1)..(25): SEQ ID NO: 5268; WAN024FUR_at; Start 145; Stop 169
caataccattttttgctccatccaa

SEQ ID NO: 221813 - DNA, 25 bp, Artificial
  probe
  misc_feature (1)..(25): SEQ ID NO: 5268; WAN024FUR_at; Start 163; Stop 187
catccaaaacagataaaccgtttgt

SEQ ID NO: 221814 - DNA, 25 bp, Artificial
  probe
  misc_feature (1)..(25): SEQ ID NO: 5268; WAN024FUR_at; Start 129; Stop 153
ggaatcgtcaatttttcaataccat

SEQ ID NO: 221815 - DNA, 25 bp, Artificial
  probe
  misc_feature (1)..(25): SEQ ID NO: 5268; WAN024FUR_at; Start 30; Stop 54
aagcccatttgagcgagcttggttt

SEQ ID NO: 221816 - DNA, 25 bp, Artificial
  probe
  misc_feature (1)..(25): SEQ ID NO: 5268; WAN024FUR_at; Start 151; Stop 175
cattttttgctccatccaaaacaga

SEQ ID NO: 221817 - DNA, 25 bp, Artificial
  probe
  misc_feature (1)..(25): SEQ ID NO: 5268; WAN024FUR_at; Start 120; Stop 144
cccagttctggaatcgtcaattttt

SEQ ID NO: 221818 - DNA, 25 bp, Artificial
  probe
  misc_feature (1)..(25): SEQ ID NO: 5268; WAN024FUR_at; Start 158; Stop 182
tgctccatccaaaacagataaaccg

SEQ ID NO: 221819 - DNA, 25 bp, Artificial
  probe
  misc_feature (1)..(25): SEQ ID NO: 5268; WAN024FUR_at; Start 159; Stop 183
gctccatccaaaacagataaaccgt

SEQ ID NO: 221820 - DNA, 25 bp, Artificial
  probe
  misc_feature (1)..(25): SEQ ID NO: 5268; WAN024FUR_at; Start 32; Stop 56
gcccatttgagcgagcttggtttga

SEQ ID NO: 221821 - DNA, 25 bp, Artificial
  probe
  misc_feature (1)..(25): SEQ ID NO: 5268; WAN024FUR_at; Start 110; Stop 134
tacccagtcacccagttctggaatc

SEQ ID NO: 221822 - DNA, 25 bp, Artificial
  probe
  misc_feature (1)..(25): SEQ ID NO: 5268; WAN024FUR_at; Start 114; Stop 138
cagtcacccagttctggaatcgtca

SEQ ID NO: 221823 - DNA, 25 bp, Artificial
  probe
  misc_feature (1)..(25): SEQ ID NO: 5268; WAN024FUR_at; Start 34; Stop 58
ccatttgagcgagcttggtttgata

SEQ ID NO: 221824 - DNA, 25 bp, Artificial
  probe
  misc_feature (1)..(25): SEQ ID NO: 5268; WAN024FUR_at; Start 35; Stop 59
catttgagcgagcttggtttgatat

SEQ ID NO: 221825 - DNA, 25 bp, Artificial
  probe
  misc_feature (1)..(25): SEQ ID NO: 5268; WAN024FUR_at; Start 200; Stop 224
atagggtacgttggttgaggtcata

SEQ ID NO: 221826 - DNA, 25 bp, Artificial
  probe
  misc_feature (1)..(25): SEQ ID NO: 5268; WAN024FUR_at; Start 122; Stop 146
cagttctggaatcgtcaatttttca

SEQ ID NO: 221827 - DNA, 25 bp, Artificial
  probe
  misc_feature (1)..(25): SEQ ID NO: 5268; WAN024FUR_at; Start 54; Stop 78
tgatatttgttttgatcaaccagca

SEQ ID NO: 221828 - DNA, 25 bp, Artificial
  probe
  misc_feature (1)..(25): SEQ ID NO: 5268; WAN024FUR_at; Start 162; Stop 186
ccatccaaaacagataaaccgtttg

SEQ ID NO: 221829 - DNA, 25 bp, Artificial
  probe
  misc_feature (1)..(25): SEQ ID NO: 5268; WAN024FUR_at; Start 102; Stop 126
taggcatctacccagtcacccagtt

SEQ ID NO: 221830 - DNA, 25 bp, Artificial
  probe
  misc_feature (1)..(25): SEQ ID NO: 5268; WAN024FUR_at; Start 118; Stop 142
cacccagttctggaatcgtcaattt

SEQ ID NO: 221831 - DNA, 25 bp, Artificial
  probe
  misc_feature (1)..(25): SEQ ID NO: 5268; WAN024FUR_at; Start 38; Stop 62
ttgagcgagcttggtttgatatttg

SEQ ID NO: 221832 - DNA, 25 bp, Artificial
  probe
  misc_feature (1)..(25): SEQ ID NO: 5268; WAN024FUR_at; Start 94; Stop 118
aaacatcataggcatctacccagtc

SEQ ID NO: 221833 - DNA, 25 bp, Artificial
  probe
  misc_feature (1)..(25): SEQ ID NO: 5268; WAN024FUR_at; Start 154; Stop 178
tttttgctccatccaaaacagataa

SEQ ID NO: 221834 - DNA, 25 bp, Artificial
  probe
  misc_feature (1)..(25): SEQ ID NO: 5268; WAN024FUR_at; Start 116; Stop 140
gtcacccagttctggaatcgtcaat

SEQ ID NO: 221835 - DNA, 25 bp, Artificial
  probe
  misc_feature (1)..(25): SEQ ID NO: 5268; WAN024FUR_at; Start 90; Stop 114
ccataaacatcataggcatctaccc

SEQ ID NO: 221836 - DNA, 25 bp, Artificial
  probe
  misc_feature (1)..(25): SEQ ID NO: 5268; WAN024FUR_at; Start 44; Stop 68
gagcttggtttgatatttgttttga

SEQ ID NO: 221837 - DNA, 25 bp, Artificial
  probe
  misc_feature (1)..(25): SEQ ID NO: 5268; WAN024FUR_at; Start 111; Stop 135
acccagtcacccagttctggaatcg

SEQ ID NO: 221838 - DNA, 25 bp, Artificial
  probe
  misc_feature (1)..(25): SEQ ID NO: 5268; WAN024FUR_at; Start 130; Stop 154
gaatcgtcaatttttcaataccatt

SEQ ID NO: 221839 - DNA, 25 bp, Artificial
  probe
  misc_feature (1)..(25): SEQ ID NO: 5268; WAN024FUR_at; Start 95; Stop 119
aacatcataggcatctacccagtca

SEQ ID NO: 221840 - DNA, 25 bp, Artificial
  probe
  misc_feature (1)..(25): SEQ ID NO: 1597; WAN024FUS_at; Start 721; Stop 745
tactacgccttggttgatttccagg

SEQ ID NO: 221841 - DNA, 25 bp, Artificial
  probe
  misc_feature (1)..(25): SEQ ID NO: 1597; WAN024FUS_at; Start 395; Stop 419
tagaagtctttaatggtcaggacac

SEQ ID NO: 221842 - DNA, 25 bp, Artificial
  probe
  misc_feature (1)..(25): SEQ ID NO: 1597; WAN024FUS_at; Start 802; Stop 826
ttttcaacattgaatgggcgtcccc

SEQ ID NO: 221843 - DNA, 25 bp, Artificial
  probe
  misc_feature (1)..(25): SEQ ID NO: 1597; WAN024FUS_at; Start 759; Stop 783
gattgacacgcttttccctgatggg

SEQ ID NO: 221844 - DNA, 25 bp, Artificial
  probe
  misc_feature (1)..(25): SEQ ID NO: 1597; WAN024FUS_at; Start 1242; Stop 1266
tcaaaccaagctcgctcaaatgggc

SEQ ID NO: 221845 - DNA, 25 bp, Artificial
  probe
  misc_feature (1)..(25): SEQ ID NO: 1597; WAN024FUS_at; Start 1153; Stop 1177
gaaaaattgacgattccagaactgg

SEQ ID NO: 221846 - DNA, 25 bp, Artificial
  probe
  misc_feature (1)..(25): SEQ ID NO: 1597; WAN024FUS_at; Start 938; Stop 962
ctcgtttccgtgatgatgatgaggc

SEQ ID NO: 221847 - DNA, 25 bp, Artificial
  probe
  misc_feature (1)..(25): SEQ ID NO: 1597; WAN024FUS_at; Start 736; Stop 760
gatttccaggcctttgccacagcga

SEQ ID NO: 221848 - DNA, 25 bp, Artificial
  probe
  misc_feature (1)..(25): SEQ ID NO: 1597; WAN024FUS_at; Start 134; Stop 158
gaaatagtagctctagcttggaaca

SEQ ID NO: 221849 - DNA, 25 bp, Artificial
  probe
  misc_feature (1)..(25): SEQ ID NO: 1597; WAN024FUS_at; Start 195; Stop 219
gaaccggagtcgctcacaatccaaa

SEQ ID NO: 221850 - DNA, 25 bp, Artificial
  probe
  misc_feature (1)..(25): SEQ ID NO: 1597; WAN024FUS_at; Start 537; Stop 561
gaagctagtcagtttcatgcgtgat

SEQ ID NO: 221851 - DNA, 25 bp, Artificial
  probe
  misc_feature (1)..(25): SEQ ID NO: 1597; WAN024FUS_at; Start 459; Stop 483
tcgaatcggccagaacagtgttgag

SEQ ID NO: 221852 - DNA, 25 bp, Artificial
  probe
  misc_feature (1)..(25): SEQ ID NO: 1597; WAN024FUS_at; Start 1172; Stop 1196
aactgggtgactgggtagatgccta

SEQ ID NO: 221853 - DNA, 25 bp, Artificial
  probe
  misc_feature (1)..(25): SEQ ID NO: 1597; WAN024FUS_at; Start 818; Stop 842
ggcgtcccctaacagaagctacagt

SEQ ID NO: 221854 - DNA, 25 bp, Artificial
  probe
  misc_feature (1)..(25): SEQ ID NO: 1597; WAN024FUS_at; Start 887; Stop 911
ccattaaagtcggaaaacagcagat

SEQ ID NO: 221855 - DNA, 25 bp, Artificial
  probe
  misc_feature (1)..(25): SEQ ID NO: 1597; WAN024FUS_at; Start 297; Stop 321
acttttggtctgtgtggctttggcc

SEQ ID NO: 221856 - DNA, 25 bp, Artificial
  probe
  misc_feature (1)..(25): SEQ ID NO: 1597; WAN024FUS_at; Start 630; Stop 654
cgtagcctacgagttaggagaacaa

SEQ ID NO: 221857 - DNA, 25 bp, Artificial
  probe
  misc_feature (1)..(25): SEQ ID NO: 1597; WAN024FUS_at; Start 901; Stop 925
aaacagcagatgaatggctcgaccc

SEQ ID NO: 221858 - DNA, 25 bp, Artificial
  probe
  misc_feature (1)..(25): SEQ ID NO: 1597; WAN024FUS_at; Start 481; Stop 505
gagacacgaactgactctattatgg

SEQ ID NO: 221859 - DNA, 25 bp, Artificial
  probe
  misc_feature (1)..(25): SEQ ID NO: 1597; WAN024FUS_at; Start 668; Stop 692
gggcagaaatggttcgccaagtctt

SEQ ID NO: 221860 - DNA, 25 bp, Artificial
  probe
  misc_feature (1)..(25): SEQ ID NO: 1597; WAN024FUS_at; Start 964; Stop 988
gattacggccgtacaaaaagacagc

SEQ ID NO: 221861 - DNA, 25 bp, Artificial
  probe
  misc_feature (1)..(25): SEQ ID NO: 1597; WAN024FUS_at; Start 362; Stop 386
caaagaaaactgctgatgcccgggc

SEQ ID NO: 221862 - DNA, 25 bp, Artificial
  probe
  misc_feature (1)..(25): SEQ ID NO: 1597; WAN024FUS_at; Start 854; Stop 878
tatacgctaccgagactgagtctcc

SEQ ID NO: 221863 - DNA, 25 bp, Artificial
  probe
  misc_feature (1)..(25): SEQ ID NO: 1597; WAN024FUS_at; Start 839; Stop 863
cagtcggagatgatttatacgctac

SEQ ID NO: 221864 - DNA, 25 bp, Artificial
  probe
  misc_feature (1)..(25): SEQ ID NO: 1597; WAN024FUS_at; Start 379; Stop 403
gcccgggcagctcaagtagaagtct

SEQ ID NO: 221865 - DNA, 25 bp, Artificial
  probe
  misc_feature (1)..(25): SEQ ID NO: 1597; WAN024FUS_at; Start 1061; Stop 1085
gaaaggtttttgctatgacctcaac

SEQ ID NO: 221866 - DNA, 25 bp, Artificial
  probe
  misc_feature (1)..(25): SEQ ID NO: 1597; WAN024FUS_at; Start 1041; Stop 1065
cactggttctgaagctcttggaaag

SEQ ID NO: 221867 - DNA, 25 bp, Artificial
  probe
  misc_feature (1)..(25): SEQ ID NO: 1597; WAN024FUS_at; Start 340; Stop 364
cgtggttaccaagatgctagcgcaa

SEQ ID NO: 221868 - DNA, 25 bp, Artificial
  probe
  misc_feature (1)..(25): SEQ ID NO: 1597; WAN024FUS_at; Start 444; Stop 468
catgggtactgatggtcgaatcggc

SEQ ID NO: 221869 - DNA, 25 bp, Artificial
  probe
  misc_feature (1)..(25): SEQ ID NO: 1597; WAN024FUS_at; Start 10; Stop 34
gaaaatcccttaagtcatcatgagc

SEQ ID NO: 221870 - DNA, 25 bp, Artificial
  probe
  misc_feature (1)..(25): SEQ ID NO: 1597; WAN024FUS_at; Start 166; Stop 190
gaagagcaggttgacttaccaagct

SEQ ID NO: 221871 - DNA, 25 bp, Artificial
  probe
  misc_feature (1)..(25): SEQ ID NO: 1597; WAN024FUS_at; Start 706; Stop 730
gacttggacattaagtactacgcct

SEQ ID NO: 221872 - DNA, 25 bp, Artificial
  probe
  misc_feature (1)..(25): SEQ ID NO: 1597; WAN024FUS_at; Start 915; Stop 939
tggctcgaccctgctcaattatgct

SEQ ID NO: 221873 - DNA, 25 bp, Artificial
  probe
  misc_feature (1)..(25): SEQ ID NO: 1597; WAN024FUS_at; Start 181; Stop 205
ttaccaagctatgcgaaccggagtc

SEQ ID NO: 221874 - DNA, 25 bp, Artificial
  probe
  misc_feature (1)..(25): SEQ ID NO: 5427; WAN024FUT_at; Start 93; Stop 117
ggaacagattcatatcccttgtcaa

SEQ ID NO: 221875 - DNA, 25 bp, Artificial
  probe
  misc_feature (1)..(25): SEQ ID NO: 5427; WAN024FUT_at; Start 344; Stop 368
tataatccccaaaagcagttctgag

SEQ ID NO: 221876 - DNA, 25 bp, Artificial
  probe
  misc_feature (1)..(25): SEQ ID NO: 5427; WAN024FUT_at; Start 38; Stop 62
taaccatctggtttggcgataatct

SEQ ID NO: 221877 - DNA, 25 bp, Artificial
  probe
  misc_feature (1)..(25): SEQ ID NO: 5427; WAN024FUT_at; Start 115; Stop 139
caaagtgctccatttcaagaatatc

SEQ ID NO: 221878 - DNA, 25 bp, Artificial
  probe
  misc_feature (1)..(25): SEQ ID NO: 5427; WAN024FUT_at; Start 80; Stop 104
gcgtacatgctttggaacagattca

SEQ ID NO: 221879 - DNA, 25 bp, Artificial
  probe
  misc_feature (1)..(25): SEQ ID NO: 5427; WAN024FUT_at; Start 139; Stop 163
caatatcatacttttctggatccag

SEQ ID NO: 221880 - DNA, 25 bp, Artificial
  probe
  misc_feature (1)..(25): SEQ ID NO: 5427; WAN024FUT_at; Start 192; Stop 216
tctgcaccacctccaagagaaaaag

SEQ ID NO: 221881 - DNA, 25 bp, Artificial
  probe
  misc_feature (1)..(25): SEQ ID NO: 5427; WAN024FUT_at; Start 256; Stop 280
tctcccttgtattctgtataagact

SEQ ID NO: 221882 - DNA, 25 bp, Artificial
  probe
  misc_feature (1)..(25): SEQ ID NO: 5427; WAN024FUT_at; Start 365; Stop 389
tgagatagacatcatagccgattgg

SEQ ID NO: 221883 - DNA, 25 bp, Artificial
  probe
  misc_feature (1)..(25): SEQ ID NO: 5427; WAN024FUT_at; Start 392; Stop 416
taggcatctctgttccttcaaatgg

SEQ ID NO: 221884 - DNA, 25 bp, Artificial
  probe
  misc_feature (1)..(25): SEQ ID NO: 5427; WAN024FUT_at; Start 315; Stop 339
tacctgcttgtctgctggtggaggc

SEQ ID NO: 221885 - DNA, 25 bp, Artificial
  probe
  misc_feature (1)..(25): SEQ ID NO: 5427; WAN024FUT_at; Start 353; Stop 377
caaaagcagttctgagatagacatc

SEQ ID NO: 221886 - DNA, 25 bp, Artificial
  probe
  misc_feature (1)..(25): SEQ ID NO: 5427; WAN024FUT_at; Start 305; Stop 329
catgatgcggtacctgcttgtctgc

SEQ ID NO: 221887 - DNA, 25 bp, Artificial
  probe
  misc_feature (1)..(25): SEQ ID NO: 5427; WAN024FUT_at; Start 241; Stop 265
tcttagccaccatattctcccttgt

SEQ ID NO: 221888 - DNA, 25 bp, Artificial
  probe
  misc_feature (1)..(25): SEQ ID NO: 5427; WAN024FUT_at; Start 60; Stop 84
tcttgaagggattttaaaatgcgta

SEQ ID NO: 221889 - DNA, 25 bp, Artificial
  probe
  misc_feature (1)..(25): SEQ ID NO: 5427; WAN024FUT_at; Start 201; Stop 225
cctccaagagaaaaagaccacataa

SEQ ID NO: 221890 - DNA, 25 bp, Artificial
  probe
  misc_feature (1)..(25): SEQ ID NO: 5427; WAN024FUT_at; Start 3; Stop 27
ggaaaataaattctcattctccaca

SEQ ID NO: 221891 - DNA, 25 bp, Artificial
  probe
  misc_feature (1)..(25): SEQ ID NO: 5427; WAN024FUT_at; Start 168; Stop 192
gaaacaatggttgatagaatcttct

SEQ ID NO: 221892 - DNA, 25 bp, Artificial
  probe
  misc_feature (1)..(25): SEQ ID NO: 5427; WAN024FUT_at; Start 45; Stop 69
ctggtttggcgataatcttgaaggg

SEQ ID NO: 221893 - DNA, 25 bp, Artificial
  probe
  misc_feature (1)..(25): SEQ ID NO: 5427; WAN024FUT_at; Start 452; Stop 476
acttgtttctcatgtagccaggacc

SEQ ID NO: 221894 - DNA, 25 bp, Artificial
  probe
  misc_feature (1)..(25): SEQ ID NO: 5427; WAN024FUT_at; Start 323; Stop 347
tgtctgctggtggaggcgtcatata

SEQ ID NO: 221895 - DNA, 25 bp, Artificial
  probe
  misc_feature (1)..(25): SEQ ID NO: 5427; WAN024FUT_at; Start 425; Stop 449
gattgtcttcaaaagatgtgattgg

SEQ ID NO: 221896 - DNA, 25 bp, Artificial
  probe
  misc_feature (1)..(25): SEQ ID NO: 5427; WAN024FUT_at; Start 379; Stop 403
tagccgattggaataggcatctctg

SEQ ID NO: 221897 - DNA, 25 bp, Artificial
  probe
  misc_feature (1)..(25): SEQ ID NO: 5427; WAN024FUT_at; Start 455; Stop 479
tgtttctcatgtagccaggacctga

SEQ ID NO: 221898 - DNA, 25 bp, Artificial
  probe
  misc_feature (1)..(25): SEQ ID NO: 5427; WAN024FUT_at; Start 180; Stop 204
gatagaatcttctctgcaccacctc

SEQ ID NO: 221899 - DNA, 25 bp, Artificial
  probe
  misc_feature (1)..(25): SEQ ID NO: 5427; WAN024FUT_at; Start 153; Stop 177
tctggatccagatttgaaacaatgg

SEQ ID NO: 221900 - DNA, 25 bp, Artificial
  probe
  misc_feature (1)..(25): SEQ ID NO: 5427; WAN024FUT_at; Start 439; Stop 463
gatgtgattgggtacttgtttctca

SEQ ID NO: 221901 - DNA, 25 bp, Artificial
  probe
  misc_feature (1)..(25): SEQ ID NO: 5427; WAN024FUT_at; Start 401; Stop 425
ctgttccttcaaatggcaagaaaag

SEQ ID NO: 221902 - DNA, 25 bp, Artificial
  probe
  misc_feature (1)..(25): SEQ ID NO: 5427; WAN024FUT_at; Start 331; Stop 355
ggtggaggcgtcatataatccccaa

SEQ ID NO: 221903 - DNA, 25 bp, Artificial
  probe
  misc_feature (1)..(25): SEQ ID NO: 5427; WAN024FUT_at; Start 102; Stop 126
tcatatcccttgtcaaagtgctcca

SEQ ID NO: 221904 - DNA, 25 bp, Artificial
  probe
  misc_feature (1)..(25): SEQ ID NO: 5427; WAN024FUT_at; Start 26; Stop 50
caaaaaagctcgtaaccatctggtt

SEQ ID NO: 221905 - DNA, 25 bp, Artificial
  probe
  misc_feature (1)..(25): SEQ ID NO: 5427; WAN024FUT_at; Start 75; Stop 99
aaaatgcgtacatgctttggaacag

SEQ ID NO: 221906 - DNA, 25 bp, Artificial
  probe
  misc_feature (1)..(25): SEQ ID NO: 5427; WAN024FUT_at; Start 269; Stop 293
ctgtataagacttatccatatcagc

SEQ ID NO: 221907 - DNA, 25 bp, Artificial
  probe
  misc_feature (1)..(25): SEQ ID NO: 5427; WAN024FUT_at; Start 14; Stop 38
tctcattctccacaaaaaagctcgt

SEQ ID NO: 221908 - DNA, 25 bp, Artificial
  probe
  misc_feature (1)..(25): SEQ ID NO: 1014; WAN024FUU_at; Start 85; Stop 109
gatttgctctgttatctctgtggcg

SEQ ID NO: 221909 - DNA, 25 bp, Artificial
  probe
  misc_feature (1)..(25): SEQ ID NO: 1014; WAN024FUU_at; Start 337; Stop 361
gatttgccacatggtctggccttgg

SEQ ID NO: 221910 - DNA, 25 bp, Artificial
  probe
  misc_feature (1)..(25): SEQ ID NO: 1014; WAN024FUU_at; Start 356; Stop 380
ccttggatgttttgcctttggatta

SEQ ID NO: 221911 - DNA, 25 bp, Artificial
  probe
  misc_feature (1)..(25): SEQ ID NO: 1014; WAN024FUU_at; Start 686; Stop 710
cagagatgcctattccaatcggcta

SEQ ID NO: 221912 - DNA, 25 bp, Artificial
  probe
  misc_feature (1)..(25): SEQ ID NO: 1014; WAN024FUU_at; Start 445; Stop 469
tgtgcgcaaactattccagaaaagc

SEQ ID NO: 221913 - DNA, 25 bp, Artificial
  probe
  misc_feature (1)..(25): SEQ ID NO: 1014; WAN024FUU_at; Start 394; Stop 418
ccagctgagcggaaaaaacaggttc

SEQ ID NO: 221914 - DNA, 25 bp, Artificial
  probe
  misc_feature (1)..(25): SEQ ID NO: 1014; WAN024FUU_at; Start 673; Stop 697
ccatttgaaggaacagagatgccta

SEQ ID NO: 221915 - DNA, 25 bp, Artificial
  probe
  misc_feature (1)..(25): SEQ ID NO: 1014; WAN024FUU_at; Start 714; Stop 738
tgtctatctcagaactgcttttggg

SEQ ID NO: 221916 - DNA, 25 bp, Artificial
  probe
  misc_feature (1)..(25): SEQ ID NO: 1014; WAN024FUU_at; Start 235; Stop 259
tatttcttgtcaaagagtcacaagg

SEQ ID NO: 221917 - DNA, 25 bp, Artificial
  probe
  misc_feature (1)..(25): SEQ ID NO: 1014; WAN024FUU_at; Start 429; Stop 453
gatttattcactcttttgtgcgcaa

SEQ ID NO: 221918 - DNA, 25 bp, Artificial
  probe
  misc_feature (1)..(25): SEQ ID NO: 1014; WAN024FUU_at; Start 44; Stop 68
tggagatggctgaatattttgtggc

SEQ ID NO: 221919 - DNA, 25 bp, Artificial
  probe
  misc_feature (1)..(25): SEQ ID NO: 1014; WAN024FUU_at; Start 253; Stop 277
cacaaggattttgttgatcgtaatc

SEQ ID NO: 221920 - DNA, 25 bp, Artificial
  probe
  misc_feature (1)..(25): SEQ ID NO: 1014; WAN024FUU_at; Start 379; Stop 403
tattatccgaaaaatccagctgagc

SEQ ID NO: 221921 - DNA, 25 bp, Artificial
  probe
  misc_feature (1)..(25): SEQ ID NO: 1014; WAN024FUU_at; Start 302; Stop 326
aaaccacctgtatcaagccttatca

SEQ ID NO: 221922 - DNA, 25 bp, Artificial
  probe
  misc_feature (1)..(25): SEQ ID NO: 1014; WAN024FUU_at; Start 160; Stop 184
gacctagacttttttatgcctcgta

SEQ ID NO: 221923 - DNA, 25 bp, Artificial
  probe
  misc_feature (1)..(25): SEQ ID NO: 1014; WAN024FUU_at; Start 597; Stop 621
tacagaattatgctcaggtcctggc

SEQ ID NO: 221924 - DNA, 25 bp, Artificial
  probe
  misc_feature (1)..(25): SEQ ID NO: 1014; WAN024FUU_at; Start 414; Stop 438
ggttcgttgggccttgatttattca

SEQ ID NO: 221925 - DNA, 25 bp, Artificial
  probe
  misc_feature (1)..(25): SEQ ID NO: 1014; WAN024FUU_at; Start 503; Stop 527
tactgggtttgactccaaaatctct

SEQ ID NO: 221926 - DNA, 25 bp, Artificial
  probe
  misc_feature (1)..(25): SEQ ID NO: 1014; WAN024FUU_at; Start 209; Stop 233
tatggcctcgttatgcagatgaacg

SEQ ID NO: 221927 - DNA, 25 bp, Artificial
  probe
  misc_feature (1)..(25): SEQ ID NO: 1014; WAN024FUU_at; Start 490; Stop 514
ggaagtcgcattttactgggtttga

SEQ ID NO: 221928 - DNA, 25 bp, Artificial
  probe
  misc_feature (1)..(25): SEQ ID NO: 1014; WAN024FUU_at; Start 94; Stop 118
tgttatctctgtggcggaggcgcta

SEQ ID NO: 221929 - DNA, 25 bp, Artificial
  probe
  misc_feature (1)..(25): SEQ ID NO: 1014; WAN024FUU_at; Start 531; Stop 555
ttatcgcatctggaaaaaagctgag

SEQ ID NO: 221930 - DNA, 25 bp, Artificial
  probe
  misc_feature (1)..(25): SEQ ID NO: 1014; WAN024FUU_at; Start 144; Stop 168
tattccttgggacgacgacctagac

SEQ ID NO: 221931 - DNA, 25 bp, Artificial
  probe
  misc_feature (1)..(25): SEQ ID NO: 1014; WAN024FUU_at; Start 571; Stop 595
tatgatttggctgattgtgatggca

SEQ ID NO: 221932 - DNA, 25 bp, Artificial
  probe
  misc_feature (1)..(25): SEQ ID NO: 1014; WAN024FUU_at; Start 322; Stop 346
tatcagcaggatttggatttgccac

SEQ ID NO: 221933 - DNA, 25 bp, Artificial
  probe
  misc_feature (1)..(25): SEQ ID NO: 1014; WAN024FUU_at; Start 195; Stop 219
gaaattagcagaattatggcctcgt

SEQ ID NO: 221934 - DNA, 25 bp, Artificial
  probe
  misc_feature (1)..(25): SEQ ID NO: 1014; WAN024FUU_at; Start 611; Stop 635
caggtcctggctacatgagaaacaa

SEQ ID NO: 221935 - DNA, 25 bp, Artificial
  probe
  misc_feature (1)..(25): SEQ ID NO: 1014; WAN024FUU_at; Start 29; Stop 53
ttcaggctcgtagtctggagatggc

SEQ ID NO: 221936 - DNA, 25 bp, Artificial
  probe
  misc_feature (1)..(25): SEQ ID NO: 1014; WAN024FUU_at; Start 701; Stop 725
caatcggctatgatgtctatctcag

SEQ ID NO: 221937 - DNA, 25 bp, Artificial
  probe
  misc_feature (1)..(25): SEQ ID NO: 1014; WAN024FUU_at; Start 763; Stop 787
gacaagcaggtaccgcatcatgatg

SEQ ID NO: 221938 - DNA, 25 bp, Artificial
  probe
  misc_feature (1)..(25): SEQ ID NO: 1014; WAN024FUU_at; Start 15; Stop 39
tgatttaaaagcaattcaggctcgt

SEQ ID NO: 221939 - DNA, 25 bp, Artificial
  probe
  misc_feature (1)..(25): SEQ ID NO: 1014; WAN024FUU_at; Start 63; Stop 87
tgtggccttttgtaaagaacatgat

SEQ ID NO: 221940 - DNA, 25 bp, Artificial
  probe
  misc_feature (1)..(25): SEQ ID NO: 1014; WAN024FUU_at; Start 737; Stop 761
gggattatatgacgcctccaccagc

SEQ ID NO: 221941 - DNA, 25 bp, Artificial
  probe
  misc_feature (1)..(25): SEQ ID NO: 1014; WAN024FUU_at; Start 626; Stop 650
tgagaaacaagtacccaatcacatc

SEQ ID NO: 221942 - DNA, 25 bp, Artificial
  probe
  misc_feature (1)..(25): SEQ ID NO: 2680; WAN024FUV_at; Start 670; Stop 694
caccaagagggaaaaaactatcatc

SEQ ID NO: 221943 - DNA, 25 bp, Artificial
  probe
  misc_feature (1)..(25): SEQ ID NO: 2680; WAN024FUV_at; Start 54; Stop 78
tggtgcagagaagattctatcaacc

SEQ ID NO: 221944 - DNA, 25 bp, Artificial
  probe
  misc_feature (1)..(25): SEQ ID NO: 2680; WAN024FUV_at; Start 418; Stop 442
catagaagccagttggatgctgcga

SEQ ID NO: 221945 - DNA, 25 bp, Artificial
  probe
  misc_feature (1)..(25): SEQ ID NO: 2680; WAN024FUV_at; Start 882; Stop 906
tctgggactcccttttatctctacg

SEQ ID NO: 221946 - DNA, 25 bp, Artificial
  probe
  misc_feature (1)..(25): SEQ ID NO: 2680; WAN024FUV_at; Start 190; Stop 214
caagattatcgccaaaccagatggt

SEQ ID NO: 221947 - DNA, 25 bp, Artificial
  probe
  misc_feature (1)..(25): SEQ ID NO: 2680; WAN024FUV_at; Start 382; Stop 406
gaagaacttcttaaggatagctcta

SEQ ID NO: 221948 - DNA, 25 bp, Artificial
  probe
  misc_feature (1)..(25): SEQ ID NO: 2680; WAN024FUV_at; Start 919; Stop 943
gctgaggaattatcccaagaaggac

SEQ ID NO: 221949 - DNA, 25 bp, Artificial
  probe
  misc_feature (1)..(25): SEQ ID NO: 2680; WAN024FUV_at; Start 117; Stop 141
tattcttgaaatggagcactttgac

SEQ ID NO: 221950 - DNA, 25 bp, Artificial
  probe
  misc_feature (1)..(25): SEQ ID NO: 2680; WAN024FUV_at; Start 207; Stop 231
cagatggttacgagcttttttgtgg

SEQ ID NO: 221951 - DNA, 25 bp, Artificial
  probe
  misc_feature (1)..(25): SEQ ID NO: 2680; WAN024FUV_at; Start 971; Stop 995
aagaggcagctcaggcgattactaa

SEQ ID NO: 221952 - DNA, 25 bp, Artificial
  probe
  misc_feature (1)..(25): SEQ ID NO: 2680; WAN024FUV_at; Start 1016; Stop 1040
actttgatgtcgatgaggctagcca

SEQ ID NO: 221953 - DNA, 25 bp, Artificial
  probe
  misc_feature (1)..(25): SEQ ID NO: 2680; WAN024FUV_at; Start 656; Stop 680
tgatacgattattacaccaagaggg

SEQ ID NO: 221954 - DNA, 25 bp, Artificial
  probe
  misc_feature (1)..(25): SEQ ID NO: 2680; WAN024FUV_at; Start 852; Stop 876
ttttcctggagtgtatgtggaggcc

SEQ ID NO: 221955 - DNA, 25 bp, Artificial
  probe
  misc_feature (1)..(25): SEQ ID NO: 2680; WAN024FUV_at; Start 515; Stop 539
tacagacaatctacaatggatatga

SEQ ID NO: 221956 - DNA, 25 bp, Artificial
  probe
  misc_feature (1)..(25): SEQ ID NO: 2680; WAN024FUV_at; Start 319; Stop 343
ccaccactgttgttctctaaaagaa

SEQ ID NO: 221957 - DNA, 25 bp, Artificial
  probe
  misc_feature (1)..(25): SEQ ID NO: 2680; WAN024FUV_at; Start 306; Stop 330
taccattatgaatccaccactgttg

SEQ ID NO: 221958 - DNA, 25 bp, Artificial
  probe
  misc_feature (1)..(25): SEQ ID NO: 2680; WAN024FUV_at; Start 717; Stop 741
tatggaagaggaactgaaaaaacga

SEQ ID NO: 221959 - DNA, 25 bp, Artificial
  probe
  misc_feature (1)..(25): SEQ ID NO: 2680; WAN024FUV_at; Start 151; Stop 175
gaatctgttccaaagcatgtacgca

SEQ ID NO: 221960 - DNA, 25 bp, Artificial
  probe
  misc_feature (1)..(25): SEQ ID NO: 2680; WAN024FUV_at; Start 560; Stop 584
aatctcaagagaagatcgatatcga

SEQ ID NO: 221961 - DNA, 25 bp, Artificial
  probe
  misc_feature (1)..(25): SEQ ID NO: 2680; WAN024FUV_at; Start 957; Stop 981
cattgagagcaatcaagaggcagct

SEQ ID NO: 221962 - DNA, 25 bp, Artificial
  probe
  misc_feature (1)..(25): SEQ ID NO: 2680; WAN024FUV_at; Start 987; Stop 1011
gattactaattacatgacttctgcc

SEQ ID NO: 221963 - DNA, 25 bp, Artificial
  probe
  misc_feature (1)..(25): SEQ ID NO: 2680; WAN024FUV_at; Start 78; Stop 102
cattgtttcaaatctggatccagaa

SEQ ID NO: 221964 - DNA, 25 bp, Artificial
  probe
  misc_feature (1)..(25): SEQ ID NO: 2680; WAN024FUV_at; Start 869; Stop 893
tggaggccttgagtctgggactccc

SEQ ID NO: 221965 - DNA, 25 bp, Artificial
  probe
  misc_feature (1)..(25): SEQ ID NO: 2680; WAN024FUV_at; Start 38; Stop 62
ctttttctcttggaggtggtgcaga

SEQ ID NO: 221966 - DNA, 25 bp, Artificial
  probe
  misc_feature (1)..(25): SEQ ID NO: 2680; WAN024FUV_at; Start 637; Stop 661
tctgaccgtgtagtggaagtgatac

SEQ ID NO: 221967 - DNA, 25 bp, Artificial
  probe
  misc_feature (1)..(25): SEQ ID NO: 2680; WAN024FUV_at; Start 595; Stop 619
caaagtatctgtactatcggacgga

SEQ ID NO: 221968 - DNA, 25 bp, Artificial
  probe
  misc_feature (1)..(25): SEQ ID NO: 2680; WAN024FUV_at; Start 575; Stop 599
tcgatatcgagattgctcctcaaag

SEQ ID NO: 221969 - DNA, 25 bp, Artificial
  probe
  misc_feature (1)..(25): SEQ ID NO: 2680; WAN024FUV_at; Start 132; Stop 156
gcactttgacaagggatatgaatct

SEQ ID NO: 221970 - DNA, 25 bp, Artificial
  probe
  misc_feature (1)..(25): SEQ ID NO: 2680; WAN024FUV_at; Start 466; Stop 490
aagaccagcaattctatcaaggaag

SEQ ID NO: 221971 - DNA, 25 bp, Artificial
  probe
  misc_feature (1)..(25): SEQ ID NO: 2680; WAN024FUV_at; Start 1001; Stop 1025
tgacttctgcctcaaactttgatgt

SEQ ID NO: 221972 - DNA, 25 bp, Artificial
  probe
  misc_feature (1)..(25): SEQ ID NO: 2680; WAN024FUV_at; Start 934; Stop 958
caagaaggacgatttggacaaatca

SEQ ID NO: 221973 - DNA, 25 bp, Artificial
  probe
  misc_feature (1)..(25): SEQ ID NO: 2680; WAN024FUV_at; Start 405; Stop 429
taaaagagaatcacatagaagccag

SEQ ID NO: 221974 - DNA, 25 bp, Artificial
  probe
  misc_feature (1)..(25): SEQ ID NO: 2680; WAN024FUV_at; Start 1030; Stop 1054
gaggctagccaattcattcaacaat

SEQ ID NO: 221975 - DNA, 25 bp, Artificial
  probe
  misc_feature (1)..(25): SEQ ID NO: 2680; WAN024FUV_at; Start 431; Stop 455
tggatgctgcgaatacaattgtagg

SEQ ID NO: 221976 - DNA, 25 bp, Artificial
  probe
  misc_feature (1)..(25): SEQ ID NO: 2007; WAN024FUW_at; Start 419; Stop 443
gagaaattcttattaatatccgaag

SEQ ID NO: 221977 - DNA, 25 bp, Artificial
  probe
  misc_feature (1)..(25): SEQ ID NO: 2007; WAN024FUW_at; Start 1048; Stop 1072
tatgcggtaacagaaactgatttaa

SEQ ID NO: 221978 - DNA, 25 bp, Artificial
  probe
  misc_feature (1)..(25): SEQ ID NO: 2007; WAN024FUW_at; Start 3; Stop 27
gccgtatctaaataatgtaccgcaa

SEQ ID NO: 221979 - DNA, 25 bp, Artificial
  probe
  misc_feature (1)..(25): SEQ ID NO: 2007; WAN024FUW_at; Start 974; Stop 998
tatcagtcttatttgtaaaactaca

SEQ ID NO: 221980 - DNA, 25 bp, Artificial
  probe
  misc_feature (1)..(25): SEQ ID NO: 2007; WAN024FUW_at; Start 1071; Stop 1095
aatatttccaagttatggattccag

SEQ ID NO: 221981 - DNA, 25 bp, Artificial
  probe
  misc_feature (1)..(25): SEQ ID NO: 2007; WAN024FUW_at; Start 263; Stop 287
tgcaaaattatgtttactttacgag

SEQ ID NO: 221982 - DNA, 25 bp, Artificial
  probe
  misc_feature (1)..(25): SEQ ID NO: 2007; WAN024FUW_at; Start 617; Stop 641
gaacagctctactagtatctatagt

SEQ ID NO: 221983 - DNA, 25 bp, Artificial
  probe
  misc_feature (1)..(25): SEQ ID NO: 2007; WAN024FUW_at; Start 810; Stop 834
taaattagctgcatacgcaagaacc

SEQ ID NO: 221984 - DNA, 25 bp, Artificial
  probe
  misc_feature (1)..(25): SEQ ID NO: 2007; WAN024FUW_at; Start 734; Stop 758
gagttttggcatttcaattttatcc

SEQ ID NO: 221985 - DNA, 25 bp, Artificial
  probe
  misc_feature (1)..(25): SEQ ID NO: 2007; WAN024FUW_at; Start 682; Stop 706
cttgaacttagatggataggatact

SEQ ID NO: 221986 - DNA, 25 bp, Artificial
  probe
  misc_feature (1)..(25): SEQ ID NO: 2007; WAN024FUW_at; Start 783; Stop 807
tattgataatatcctgactggacgt

SEQ ID NO: 221987 - DNA, 25 bp, Artificial
  probe
  misc_feature (1)..(25): SEQ ID NO: 2007; WAN024FUW_at; Start 692; Stop 716
gatggataggatactcattcttttg

SEQ ID NO: 221988 - DNA, 25 bp, Artificial
  probe
  misc_feature (1)..(25): SEQ ID NO: 2007; WAN024FUW_at; Start 795; Stop 819
cctgactggacgtattaaattagct

SEQ ID NO: 221989 - DNA, 25 bp, Artificial
  probe
  misc_feature (1)..(25): SEQ ID NO: 2007; WAN024FUW_at; Start 919; Stop 943
gattcgttttattccttcttgatga

SEQ ID NO: 221990 - DNA, 25 bp, Artificial
  probe
  misc_feature (1)..(25): SEQ ID NO: 2007; WAN024FUW_at; Start 668; Stop 692
tgtttgttgaaaatcttgaacttag

SEQ ID NO: 221991 - DNA, 25 bp, Artificial
  probe
  misc_feature (1)..(25): SEQ ID NO: 2007; WAN024FUW_at; Start 957; Stop 981
catatggctacttatcttatcagtc

SEQ ID NO: 221992 - DNA, 25 bp, Artificial
  probe
  misc_feature (1)..(25): SEQ ID NO: 2007; WAN024FUW_at; Start 435; Stop 459
tatccgaagaaacgaaactgtcaga

SEQ ID NO: 221993 - DNA, 25 bp, Artificial
  probe
  misc_feature (1)..(25): SEQ ID NO: 2007; WAN024FUW_at; Start 101; Stop 125
cagtttttgactttgtgtttcctca

SEQ ID NO: 221994 - DNA, 25 bp, Artificial
  probe
  misc_feature (1)..(25): SEQ ID NO: 2007; WAN024FUW_at; Start 602; Stop 626
ttttcacgcagactagaacagctct

SEQ ID NO: 221995 - DNA, 25 bp, Artificial
  probe
  misc_feature (1)..(25): SEQ ID NO: 2007; WAN024FUW_at; Start 1034; Stop 1058
tagcttggtctatgtatgcggtaac

SEQ ID NO: 221996 - DNA, 25 bp, Artificial
  probe
  misc_feature (1)..(25): SEQ ID NO: 2007; WAN024FUW_at; Start 944; Stop 968
gtaatgctggcatcatatggctact

SEQ ID NO: 221997 - DNA, 25 bp, Artificial
  probe
  misc_feature (1)..(25): SEQ ID NO: 2007; WAN024FUW_at; Start 931; Stop 955
tccttcttgatgagtaatgctggca

SEQ ID NO: 221998 - DNA, 25 bp, Artificial
  probe
  misc_feature (1)..(25): SEQ ID NO: 2007; WAN024FUW_at; Start 868; Stop 892
gataaagaaattgtttgggatccta

SEQ ID NO: 221999 - DNA, 25 bp, Artificial
  probe
  misc_feature (1)..(25): SEQ ID NO: 2007; WAN024FUW_at; Start 79; Stop 103
aagatgttagtttcttcgattccag

SEQ ID NO: 222000 - DNA, 25 bp, Artificial
  probe
  misc_feature (1)..(25): SEQ ID NO: 2007; WAN024FUW_at; Start 594; Stop 618
cttttattttttcacgcagactaga

SEQ ID NO: 222001 - DNA, 25 bp, Artificial
  probe
  misc_feature (1)..(25): SEQ ID NO: 2007; WAN024FUW_at; Start 284; Stop 308
cgagttggtttatgttgattggtac

SEQ ID NO: 222002 - DNA, 25 bp, Artificial
  probe
  misc_feature (1)..(25): SEQ ID NO: 2007; WAN024FUW_at; Start 181; Stop 205
tttgagaaaagaaagtacacattac

SEQ ID NO: 222003 - DNA, 25 bp, Artificial
  probe
  misc_feature (1)..(25): SEQ ID NO: 2007; WAN024FUW_at; Start 819; Stop 843
tgcatacgcaagaaccttttttggt

SEQ ID NO: 222004 - DNA, 25 bp, Artificial
  probe
  misc_feature (1)..(25): SEQ ID NO: 2007; WAN024FUW_at; Start 1125; Stop 1149
tactagtacatgttctacaataatg

SEQ ID NO: 222005 - DNA, 25 bp, Artificial
  probe
  misc_feature (1)..(25): SEQ ID NO: 2007; WAN024FUW_at; Start 528; Stop 552
tatttggttaatcaaagatcgtttg

SEQ ID NO: 222006 - DNA, 25 bp, Artificial
  probe
  misc_feature (1)..(25): SEQ ID NO: 2007; WAN024FUW_at; Start 300; Stop 324
gattggtacgattcattatgattta

SEQ ID NO: 222007 - DNA, 25 bp, Artificial
  probe
  misc_feature (1)..(25): SEQ ID NO: 2007; WAN024FUW_at; Start 236; Stop 260
cattactgctttatactagtataca

SEQ ID NO: 222008 - DNA, 25 bp, Artificial
  probe
  misc_feature (1)..(25): SEQ ID NO: 2007; WAN024FUW_at; Start 463; Stop 487
tttacatttggttttatacatccca

SEQ ID NO: 222009 - DNA, 25 bp, Artificial
  probe
  misc_feature (1)..(25): SEQ ID NO: 2007; WAN024FUW_at; Start 448; Stop 472
gaaactgtcagagcatttacatttg

SEQ ID NO: 222010 - DNA, 25 bp, Artificial
  probe
  misc_feature (1)..(25): SEQ ID NO: 1822; WAN024FUX_at; Start 529; Stop 553
tacttttgtggttatgatcaggagg

SEQ ID NO: 222011 - DNA, 25 bp, Artificial
  probe
  misc_feature (1)..(25): SEQ ID NO: 1822; WAN024FUX_at; Start 229; Stop 253
ggtgggatctattttgatacggatg

SEQ ID NO: 222012 - DNA, 25 bp, Artificial
  probe
  misc_feature (1)..(25): SEQ ID NO: 1822; WAN024FUX_at; Start 350; Stop 374
cttgtatgccagatgataagatagc

SEQ ID NO: 222013 - DNA, 25 bp, Artificial
  probe
  misc_feature (1)..(25): SEQ ID NO: 1822; WAN024FUX_at; Start 625; Stop 649
ttaaaaagaaaagtacagatgattg

SEQ ID NO: 222014 - DNA, 25 bp, Artificial
  probe
  misc_feature (1)..(25): SEQ ID NO: 1822; WAN024FUX_at; Start 30; Stop 54
gttcggtggaagtgagaaaccagat

SEQ ID NO: 222015 - DNA, 25 bp, Artificial
  probe
  misc_feature (1)..(25): SEQ ID NO: 1822; WAN024FUX_at; Start 364; Stop 388
gataagatagcaaaatatatggtgc

SEQ ID NO: 222016 - DNA, 25 bp, Artificial
  probe
  misc_feature (1)..(25): SEQ ID NO: 1822; WAN024FUX_at; Start 161; Stop 185
ctgcatatgaatctaggaaatgggc

SEQ ID NO: 222017 - DNA, 25 bp, Artificial
  probe
  misc_feature (1)..(25): SEQ ID NO: 1822; WAN024FUX_at; Start 701; Stop 725
ggaaaataaccaatgccgtatctaa

SEQ ID NO: 222018 - DNA, 25 bp, Artificial
  probe
  misc_feature (1)..(25): SEQ ID NO: 1822; WAN024FUX_at; Start 244; Stop 268
gatacggatgttgagttgttaaaaa

SEQ ID NO: 222019 - DNA, 25 bp, Artificial
  probe
  misc_feature (1)..(25): SEQ ID NO: 1822; WAN024FUX_at; Start 397; Stop 421
gagcaagcaagttttgatatcaatc

SEQ ID NO: 222020 - DNA, 25 bp, Artificial
  probe
  misc_feature (1)..(25): SEQ ID NO: 1822; WAN024FUX_at; Start 133; Stop 157
gatttatcagattcacaatttgcga

SEQ ID NO: 222021 - DNA, 25 bp, Artificial
  probe
  misc_feature (1)..(25): SEQ ID NO: 1822; WAN024FUX_at; Start 284; Stop 308
tattagctcattcatcttttacagg

SEQ ID NO: 222022 - DNA, 25 bp, Artificial
  probe
  misc_feature (1)..(25): SEQ ID NO: 1822; WAN024FUX_at; Start 592; Stop 616
catcattatagtgctacttggaaaa

SEQ ID NO: 222023 - DNA, 25 bp, Artificial
  probe
  misc_feature (1)..(25): SEQ ID NO: 1822; WAN024FUX_at; Start 483; Stop 507
taatcagttccaaataattgatgga

SEQ ID NO: 222024 - DNA, 25 bp, Artificial
  probe
  misc_feature (1)..(25): SEQ ID NO: 1822; WAN024FUX_at; Start 603; Stop 627
tgctacttggaaaacaagaacttta

SEQ ID NO: 222025 - DNA, 25 bp, Artificial
  probe
  misc_feature (1)..(25): SEQ ID NO: 1822; WAN024FUX_at; Start 146; Stop 170
cacaatttgcgaagtctgcatatga

SEQ ID NO: 222026 - DNA, 25 bp, Artificial
  probe
  misc_feature (1)..(25): SEQ ID NO: 1822; WAN024FUX_at; Start 417; Stop 441
caatcatttggtaactgtcaataca

SEQ ID NO: 222027 - DNA, 25 bp, Artificial
  probe
  misc_feature (1)..(25): SEQ ID NO: 1822; WAN024FUX_at; Start 13; Stop 37
aaaatccactatatttggttcggtg

SEQ ID NO: 222028 - DNA, 25 bp, Artificial
  probe
  misc_feature (1)..(25): SEQ ID NO: 1822; WAN024FUX_at; Start 541; Stop 565
tatgatcaggaggtcaaggaggtta

SEQ ID NO: 222029 - DNA, 25 bp, Artificial
  probe
  misc_feature (1)..(25): SEQ ID NO: 1822; WAN024FUX_at; Start 381; Stop 405
tatggtgcaatattatgagcaagca

SEQ ID NO: 222030 - DNA, 25 bp, Artificial
  probe
  misc_feature (1)..(25): SEQ ID NO: 1822; WAN024FUX_at; Start 213; Stop 237
aattttatctaagtatggtgggatc

SEQ ID NO: 222031 - DNA, 25 bp, Artificial
  probe
  misc_feature (1)..(25): SEQ ID NO: 1822; WAN024FUX_at; Start 95; Stop 119
cagactatgagattgttgaatggaa

SEQ ID NO: 222032 - DNA, 25 bp, Artificial
  probe
  misc_feature (1)..(25): SEQ ID NO: 1822; WAN024FUX_at; Start 37; Stop 61
ggaagtgagaaaccagatgttgtct

SEQ ID NO: 222033 - DNA, 25 bp, Artificial
  probe
  misc_feature (1)..(25): SEQ ID NO: 1822; WAN024FUX_at; Start 662; Stop 686
taggagctgagaattataggaaatt

SEQ ID NO: 222034 - DNA, 25 bp, Artificial
  probe
  misc_feature (1)..(25): SEQ ID NO: 1822; WAN024FUX_at; Start 338; Stop 362
gacttgtatatgcttgtatgccaga

SEQ ID NO: 222035 - DNA, 25 bp, Artificial
  probe
  misc_feature (1)..(25): SEQ ID NO: 1822; WAN024FUX_at; Start 176; Stop 200
ggaaatgggcatttgcatcggatta

SEQ ID NO: 222036 - DNA, 25 bp, Artificial
  probe
  misc_feature (1)..(25): SEQ ID NO: 1822; WAN024FUX_at; Start 329; Stop 353
taaatccaggacttgtatatgcttg

SEQ ID NO: 222037 - DNA, 25 bp, Artificial
  probe
  misc_feature (1)..(25): SEQ ID NO: 1822; WAN024FUX_at; Start 648; Stop 672
tgttaaaacaattataggagctgag

SEQ ID NO: 222038 - DNA, 25 bp, Artificial
  probe
  misc_feature (1)..(25): SEQ ID NO: 1822; WAN024FUX_at; Start 570; Stop 594
tacggaacggacgattagtattcat

SEQ ID NO: 222039 - DNA, 25 bp, Artificial
  probe
  misc_feature (1)..(25): SEQ ID NO: 1822; WAN024FUX_at; Start 694; Stop 718
tgtaagaggaaaataaccaatgccg

SEQ ID NO: 222040 - DNA, 25 bp, Artificial
  probe
  misc_feature (1)..(25): SEQ ID NO: 1822; WAN024FUX_at; Start 316; Stop 340
tatattggtgaagtaaatccaggac

SEQ ID NO: 222041 - DNA, 25 bp, Artificial
  probe
  misc_feature (1)..(25): SEQ ID NO: 1822; WAN024FUX_at; Start 81; Stop 105
gaaaaaatatatgccagactatgag

SEQ ID NO: 222042 - DNA, 25 bp, Artificial
  probe
  misc_feature (1)..(25): SEQ ID NO: 1822; WAN024FUX_at; Start 191; Stop 215
catcggattatgctcgttttaaaat

SEQ ID NO: 222043 - DNA, 25 bp, Artificial
  probe
  misc_feature (1)..(25): SEQ ID NO: 1822; WAN024FUX_at; Start 506; Stop 530
gattagcaatttatccagatgatta

SEQ ID NO: 222044 - DNA, 25 bp, Artificial
  probe
  misc_feature (1)..(25): SEQ ID NO: 1432; WAN024FUY_at; Start 1168; Stop 1192
tctataggagaagctgttatggtat

SEQ ID NO: 222045 - DNA, 25 bp, Artificial
  probe
  misc_feature (1)..(25): SEQ ID NO: 1432; WAN024FUY_at; Start 528; Stop 552
tacagttttagctagtcatggttct

SEQ ID NO: 222046 - DNA, 25 bp, Artificial
  probe
  misc_feature (1)..(25): SEQ ID NO: 1432; WAN024FUY_at; Start 785; Stop 809
ctttagggacagttgtactacctcg

SEQ ID NO: 222047 - DNA, 25 bp, Artificial
  probe
  misc_feature (1)..(25): SEQ ID NO: 1432; WAN024FUY_at; Start 502; Stop 526
gatgactatatggtatatgcggcaa

SEQ ID NO: 222048 - DNA, 25 bp, Artificial
  probe
  misc_feature (1)..(25): SEQ ID NO: 1432; WAN024FUY_at; Start 188; Stop 212
tatatggtgttaaagtctgtgcagg

SEQ ID NO: 222049 - DNA, 25 bp, Artificial
  probe
  misc_feature (1)..(25): SEQ ID NO: 1432; WAN024FUY_at; Start 120; Stop 144
gggacgagtaacgttcgcttcttca

SEQ ID NO: 222050 - DNA, 25 bp, Artificial
  probe
  misc_feature (1)..(25): SEQ ID NO: 1432; WAN024FUY_at; Start 328; Stop 352
cgttttagacaggaatggcagctta

SEQ ID NO: 222051 - DNA, 25 bp, Artificial
  probe
  misc_feature (1)..(25): SEQ ID NO: 1432; WAN024FUY_at; Start 305; Stop 329
caactatggtaataataattcctcg

SEQ ID NO: 222052 - DNA, 25 bp, Artificial
  probe
  misc_feature (1)..(25): SEQ ID NO: 1432; WAN024FUY_at; Start 225; Stop 249
taaggagaagctaagtcagactgtc

SEQ ID NO: 222053 - DNA, 25 bp, Artificial
  probe
  misc_feature (1)..(25): SEQ ID NO: 1432; WAN024FUY_at; Start 404; Stop 428
tatacaaagcattggaagactattc

SEQ ID NO: 222054 - DNA, 25 bp, Artificial
  probe
  misc_feature (1)..(25): SEQ ID NO: 1432; WAN024FUY_at; Start 344; Stop 368
ggcagcttattattatcacgtcatc

SEQ ID NO: 222055 - DNA, 25 bp, Artificial
  probe
  misc_feature (1)..(25): SEQ ID NO: 1432; WAN024FUY_at; Start 722; Stop 746
cagaaattggttactattcaacagc

SEQ ID NO: 222056 - DNA, 25 bp, Artificial
  probe
  misc_feature (1)..(25): SEQ ID NO: 1432; WAN024FUY_at; Start 1063; Stop 1087
gaaaatgtaaccattcaggcaagta

SEQ ID NO: 222057 - DNA, 25 bp, Artificial
  probe
  misc_feature (1)..(25): SEQ ID NO: 1432; WAN024FUY_at; Start 1016; Stop 1040
gctactctattatgtatggaaccaa

SEQ ID NO: 222058 - DNA, 25 bp, Artificial
  probe
  misc_feature (1)..(25): SEQ ID NO: 1432; WAN024FUY_at; Start 483; Stop 507
tttagtcgtccgaacaaaagatgac

SEQ ID NO: 222059 - DNA, 25 bp, Artificial
  probe
  misc_feature (1)..(25): SEQ ID NO: 1432; WAN024FUY_at; Start 90; Stop 114
tgtttcaagggttctgatggcagat

SEQ ID NO: 222060 - DNA, 25 bp, Artificial
  probe
  misc_feature (1)..(25): SEQ ID NO: 1432; WAN024FUY_at; Start 1128; Stop 1152
gatacccaaatttgctgcactaggg

SEQ ID NO: 222061 - DNA, 25 bp, Artificial
  probe
  misc_feature (1)..(25): SEQ ID NO: 1432; WAN024FUY_at; Start 770; Stop 794
tcagtgtagtaacttctttagggac

SEQ ID NO: 222062 - DNA, 25 bp, Artificial
  probe
  misc_feature (1)..(25): SEQ ID NO: 1432; WAN024FUY_at; Start 749; Stop 773
taaaaattcgttctatagtgctcag

SEQ ID NO: 222063 - DNA, 25 bp, Artificial
  probe
  misc_feature (1)..(25): SEQ ID NO: 1432; WAN024FUY_at; Start 389; Stop 413
taggaatagagtggttatacaaagc

SEQ ID NO: 222064 - DNA, 25 bp, Artificial
  probe
  misc_feature (1)..(25): SEQ ID NO: 1432; WAN024FUY_at; Start 968; Stop 992
gggctatcccgacacttcaagtatc

SEQ ID NO: 222065 - DNA, 25 bp, Artificial
  probe
  misc_feature (1)..(25): SEQ ID NO: 1432; WAN024FUY_at; Start 291; Stop 315
gatgcttcttttagcaactatggta

SEQ ID NO: 222066 - DNA, 25 bp, Artificial
  probe
  misc_feature (1)..(25): SEQ ID NO: 1432; WAN024FUY_at; Start 1033; Stop 1057
ggaaccaatatcctagtatctatag

SEQ ID NO: 222067 - DNA, 25 bp, Artificial
  probe
  misc_feature (1)..(25): SEQ ID NO: 1432; WAN024FUY_at; Start 150; Stop 174
tgattatgccctaacatttgcaatg

SEQ ID NO: 222068 - DNA, 25 bp, Artificial
  probe
  misc_feature (1)..(25): SEQ ID NO: 1432; WAN024FUY_at; Start 241; Stop 265
cagactgtcagagaattgttagtca

SEQ ID NO: 222069 - DNA, 25 bp, Artificial
  probe
  misc_feature (1)..(25): SEQ ID NO: 1432; WAN024FUY_at; Start 164; Stop 188
catttgcaatgttagggatgccatt

SEQ ID NO: 222070 - DNA, 25 bp, Artificial
  probe
  misc_feature (1)..(25): SEQ ID NO: 1432; WAN024FUY_at; Start 1397; Stop 1421
gagaaaatttgctttcaagttggaa

SEQ ID NO: 222071 - DNA, 25 bp, Artificial
  probe
  misc_feature (1)..(25): SEQ ID NO: 1432; WAN024FUY_at; Start 699; Stop 723
gatgggatttctaactagtgataca

SEQ ID NO: 222072 - DNA, 25 bp, Artificial
  probe
  misc_feature (1)..(25): SEQ ID NO: 1432; WAN024FUY_at; Start 908; Stop 932
gctatattgtaattaatgccagaga

SEQ ID NO: 222073 - DNA, 25 bp, Artificial
  probe
  misc_feature (1)..(25): SEQ ID NO: 1432; WAN024FUY_at; Start 681; Stop 705
gaatacagatgtcgttatgatggga

SEQ ID NO: 222074 - DNA, 25 bp, Artificial
  probe
  misc_feature (1)..(25): SEQ ID NO: 1432; WAN024FUY_at; Start 515; Stop 539
tatatgcggcaattacagttttagc

SEQ ID NO: 222075 - DNA, 25 bp, Artificial
  probe
  misc_feature (1)..(25): SEQ ID NO: 1432; WAN024FUY_at; Start 1153; Stop 1177
gcaggtattgcaacttctataggag

SEQ ID NO: 222076 - DNA, 25 bp, Artificial
  probe
  misc_feature (1)..(25): SEQ ID NO: 1432; WAN024FUY_at; Start 1417; Stop 1441
tggaaaatatcaatactaaatcggt

SEQ ID NO: 222077 - DNA, 25 bp, Artificial
  probe
  misc_feature (1)..(25): SEQ ID NO: 1432; WAN024FUY_at; Start 75; Stop 99
catcagtttcccatatgtttcaagg

SEQ ID NO: 222078 - DNA, 25 bp, Artificial
  probe
  misc_feature (1)..(25): SEQ ID NO: 1313; WAN024FUZ_at; Start 925; Stop 949
ttagaagcaagttacaatcccgatg

SEQ ID NO: 222079 - DNA, 25 bp, Artificial
  probe
  misc_feature (1)..(25): SEQ ID NO: 1313; WAN024FUZ_at; Start 217; Stop 241
catattcacactgctacaagaggga

SEQ ID NO: 222080 - DNA, 25 bp, Artificial
  probe
  misc_feature (1)..(25): SEQ ID NO: 1313; WAN024FUZ_at; Start 623; Stop 647
tgacaatggctggagatggagaact

SEQ ID NO: 222081 - DNA, 25 bp, Artificial
  probe
  misc_feature (1)..(25): SEQ ID NO: 1313; WAN024FUZ_at; Start 940; Stop 964
aatcccgatgttgtaagtttaatgg

SEQ ID NO: 222082 - DNA, 25 bp, Artificial
  probe
  misc_feature (1)..(25): SEQ ID NO: 1313; WAN024FUZ_at; Start 149; Stop 173
cacggttaacctattctagttatgc

SEQ ID NO: 222083 - DNA, 25 bp, Artificial
  probe
  misc_feature (1)..(25): SEQ ID NO: 1313; WAN024FUZ_at; Start 786; Stop 810
cccgatggcaatattggaagctatg

SEQ ID NO: 222084 - DNA, 25 bp, Artificial
  probe
  misc_feature (1)..(25): SEQ ID NO: 1313; WAN024FUZ_at; Start 758; Stop 782
tgatattgccttcttataatgaggg

SEQ ID NO: 222085 - DNA, 25 bp, Artificial
  probe
  misc_feature (1)..(25): SEQ ID NO: 1313; WAN024FUZ_at; Start 817; Stop 841
ggattagcaatcatatcaacgcctg

SEQ ID NO: 222086 - DNA, 25 bp, Artificial
  probe
  misc_feature (1)..(25): SEQ ID NO: 1313; WAN024FUZ_at; Start 847; Stop 871
ggcatacctgaaattatacacgagg

SEQ ID NO: 222087 - DNA, 25 bp, Artificial
  probe
  misc_feature (1)..(25): SEQ ID NO: 1313; WAN024FUZ_at; Start 832; Stop 856
tcaacgcctgtaggtggcatacctg

SEQ ID NO: 222088 - DNA, 25 bp, Artificial
  probe
  misc_feature (1)..(25): SEQ ID NO: 1313; WAN024FUZ_at; Start 396; Stop 420
tgtgattgtactttcccaaacttgg

SEQ ID NO: 222089 - DNA, 25 bp, Artificial
  probe
  misc_feature (1)..(25): SEQ ID NO: 1313; WAN024FUZ_at; Start 965; Stop 989
ggagcaataatcataagttggttga

SEQ ID NO: 222090 - DNA, 25 bp, Artificial
  probe
  misc_feature (1)..(25): SEQ ID NO: 1313; WAN024FUZ_at; Start 53; Stop 77
tgagcgctgttattagagatttgac

SEQ ID NO: 222091 - DNA, 25 bp, Artificial
  probe
  misc_feature (1)..(25): SEQ ID NO: 1313; WAN024FUZ_at; Start 610; Stop 634
cctaatttgcatttgacaatggctg

SEQ ID NO: 222092 - DNA, 25 bp, Artificial
  probe
  misc_feature (1)..(25): SEQ ID NO: 1313; WAN024FUZ_at; Start 545; Stop 569
ggatgggcaaaagaaaaggagccta

SEQ ID NO: 222093 - DNA, 25 bp, Artificial
  probe
  misc_feature (1)..(25): SEQ ID NO: 1313; WAN024FUZ_at; Start 129; Stop 153
tattgatggctctcttgtaacacgg

SEQ ID NO: 222094 - DNA, 25 bp, Artificial
  probe
  misc_feature (1)..(25): SEQ ID NO: 1313; WAN024FUZ_at; Start 77; Stop 101
catatagcccgttattgtcaggtga

SEQ ID NO: 222095 - DNA, 25 bp, Artificial
  probe
  misc_feature (1)..(25): SEQ ID NO: 1313; WAN024FUZ_at; Start 225; Stop 249
cactgctacaagagggagttgttgg

SEQ ID NO: 222096 - DNA, 25 bp, Artificial
  probe
  misc_feature (1)..(25): SEQ ID NO: 1313; WAN024FUZ_at; Start 889; Stop 913
caaccgggtgatatttctcagttat

SEQ ID NO: 222097 - DNA, 25 bp, Artificial
  probe
  misc_feature (1)..(25): SEQ ID NO: 1313; WAN024FUZ_at; Start 578; Stop 602
tagatgccatgaatcaagcagtggc

SEQ ID NO: 222098 - DNA, 25 bp, Artificial
  probe
  misc_feature (1)..(25): SEQ ID NO: 1313; WAN024FUZ_at; Start 743; Stop 767
aagctaatcagactttgatattgcc

SEQ ID NO: 222099 - DNA, 25 bp, Artificial
  probe
  misc_feature (1)..(25): SEQ ID NO: 1313; WAN024FUZ_at; Start 637; Stop 661
gatggagaacttgaagacatacgtc

SEQ ID NO: 222100 - DNA, 25 bp, Artificial
  probe
  misc_feature (1)..(25): SEQ ID NO: 1313; WAN024FUZ_at; Start 592; Stop 616
caagcagtggctataaatcctaatt

SEQ ID NO: 222101 - DNA, 25 bp, Artificial
  probe
  misc_feature (1)..(25): SEQ ID NO: 1313; WAN024FUZ_at; Start 63; Stop 87
tattagagatttgacatatagcccg

SEQ ID NO: 222102 - DNA, 25 bp, Artificial
  probe
  misc_feature (1)..(25): SEQ ID NO: 1313; WAN024FUZ_at; Start 562; Stop 586
ggagcctatgatttaatagatgcca

SEQ ID NO: 222103 - DNA, 25 bp, Artificial
  probe
  misc_feature (1)..(25): SEQ ID NO: 1313; WAN024FUZ_at; Start 861; Stop 885
tatacacgaggataatggctggtta

SEQ ID NO: 222104 - DNA, 25 bp, Artificial
  probe
  misc_feature (1)..(25): SEQ ID NO: 1313; WAN024FUZ_at; Start 654; Stop 678
catacgtcaaaagatatcaaatctg

SEQ ID NO: 222105 - DNA, 25 bp, Artificial
  probe
  misc_feature (1)..(25): SEQ ID NO: 1313; WAN024FUZ_at; Start 802; Stop 826
gaagctatggcttctggattagcaa

SEQ ID NO: 222106 - DNA, 25 bp, Artificial
  probe
  misc_feature (1)..(25): SEQ ID NO: 1313; WAN024FUZ_at; Start 327; Stop 351
aatattttatgactcacttcctgag

SEQ ID NO: 222107 - DNA, 25 bp, Artificial
  probe
  misc_feature (1)..(25): SEQ ID NO: 1313; WAN024FUZ_at; Start 874; Stop 898
aatggctggttaattcaaccgggtg

SEQ ID NO: 222108 - DNA, 25 bp, Artificial
  probe
  misc_feature (1)..(25): SEQ ID NO: 1313; WAN024FUZ_at; Start 5; Stop 29
caaaagttttgcaaattgggcctag

SEQ ID NO: 222109 - DNA, 25 bp, Artificial
  probe
  misc_feature (1)..(25): SEQ ID NO: 1313; WAN024FUZ_at; Start 295; Stop 319
gctattttgcatattcatggagcag

SEQ ID NO: 222110 - DNA, 25 bp, Artificial
  probe
  misc_feature (1)..(25): SEQ ID NO: 1313; WAN024FUZ_at; Start 38; Stop 62
tatctaaaggtggtatgagcgctgt

SEQ ID NO: 222111 - DNA, 25 bp, Artificial
  probe
  misc_feature (1)..(25): SEQ ID NO: 1313; WAN024FUZ_at; Start 464; Stop 488
tagttgaaaatggtgtagacacttc

SEQ ID NO: 222112 - DNA, 25 bp, Artificial
  probe
  misc_feature (1)..(25): SEQ ID NO: 4038; WAN024FV2_at; Start 455; Stop 479
tacgacaatacatagatagtctttg

SEQ ID NO: 222113 - DNA, 25 bp, Artificial
  probe
  misc_feature (1)..(25): SEQ ID NO: 4038; WAN024FV2_at; Start 108; Stop 132
gattggagcttctgattataaacct

SEQ ID NO: 222114 - DNA, 25 bp, Artificial
  probe
  misc_feature (1)..(25): SEQ ID NO: 4038; WAN024FV2_at; Start 297; Stop 321
tgtggataatcaccaattacaaatc

SEQ ID NO: 222115 - DNA, 25 bp, Artificial
  probe
  misc_feature (1)..(25): SEQ ID NO: 4038; WAN024FV2_at; Start 265; Stop 289
gcggttccacgattagagcagtttg

SEQ ID NO: 222116 - DNA, 25 bp, Artificial
  probe
  misc_feature (1)..(25): SEQ ID NO: 4038; WAN024FV2_at; Start 360; Stop 384
ctttgatatagagcagttaggaact

SEQ ID NO: 222117 - DNA, 25 bp, Artificial
  probe
  misc_feature (1)..(25): SEQ ID NO: 4038; WAN024FV2_at; Start 86; Stop 110
taaaggaagaggtgtttgctcagat

SEQ ID NO: 222118 - DNA, 25 bp, Artificial
  probe
  misc_feature (1)..(25): SEQ ID NO: 4038; WAN024FV2_at; Start 289; Stop 313
ggagaacatgtggataatcaccaat

SEQ ID NO: 222119 - DNA, 25 bp, Artificial
  probe
  misc_feature (1)..(25): SEQ ID NO: 4038; WAN024FV2_at; Start 283; Stop 307
cagtttggagaacatgtggataatc

SEQ ID NO: 222120 - DNA, 25 bp, Artificial
  probe
  misc_feature (1)..(25): SEQ ID NO: 4038; WAN024FV2_at; Start 76; Stop 100
ttagaagtgataaaggaagaggtgt

SEQ ID NO: 222121 - DNA, 25 bp, Artificial
  probe
  misc_feature (1)..(25): SEQ ID NO: 4038; WAN024FV2_at; Start 9; Stop 33
tataactgtagggactcaaaaacac

SEQ ID NO: 222122 - DNA, 25 bp, Artificial
  probe
  misc_feature (1)..(25): SEQ ID NO: 4038; WAN024FV2_at; Start 410; Stop 434
caacaaagccatatatttctaatag

SEQ ID NO: 222123 - DNA, 25 bp, Artificial
  probe
  misc_feature (1)..(25): SEQ ID NO: 4038; WAN024FV2_at; Start 159; Stop 183
gagttcaattgatatgaatgagaag

SEQ ID NO: 222124 - DNA, 25 bp, Artificial
  probe
  misc_feature (1)..(25): SEQ ID NO: 4038; WAN024FV2_at; Start 324; Stop 348
cacagttcttggtgaggaaggttat

SEQ ID NO: 222125 - DNA, 25 bp, Artificial
  probe
  misc_feature (1)..(25): SEQ ID NO: 4038; WAN024FV2_at; Start 429; Stop 453
taatagttatgcacttttagaagat

SEQ ID NO: 222126 - DNA, 25 bp, Artificial
  probe
  misc_feature (1)..(25): SEQ ID NO: 4038; WAN024FV2_at; Start 316; Stop 340
caaatcatcacagttcttggtgagg

SEQ ID NO: 222127 - DNA, 25 bp, Artificial
  probe
  misc_feature (1)..(25): SEQ ID NO: 4038; WAN024FV2_at; Start 95; Stop 119
aggtgtttgctcagattggagcttc

SEQ ID NO: 222128 - DNA, 25 bp, Artificial
  probe
  misc_feature (1)..(25): SEQ ID NO: 4038; WAN024FV2_at; Start 3; Stop 27
gatttttataactgtagggactcaa

SEQ ID NO: 222129 - DNA, 25 bp, Artificial
  probe
  misc_feature (1)..(25): SEQ ID NO: 4038; WAN024FV2_at; Start 440; Stop 464
cacttttagaagatatacgacaata

SEQ ID NO: 222130 - DNA, 25 bp, Artificial
  probe
  misc_feature (1)..(25): SEQ ID NO: 4038; WAN024FV2_at; Start 382; Stop 406
actgtttatcaaaaagctcagactt

SEQ ID NO: 222131 - DNA, 25 bp, Artificial
  probe
  misc_feature (1)..(25): SEQ ID NO: 4038; WAN024FV2_at; Start 354; Stop 378
gccatgctttgatatagagcagtta

SEQ ID NO: 222132 - DNA, 25 bp, Artificial
  probe
  misc_feature (1)..(25): SEQ ID NO: 4038; WAN024FV2_at; Start 397; Stop 421
gctcagacttttacaacaaagccat

SEQ ID NO: 222133 - DNA, 25 bp, Artificial
  probe
  misc_feature (1)..(25): SEQ ID NO: 4038; WAN024FV2_at; Start 370; Stop 394
gagcagttaggaactgtttatcaaa

SEQ ID NO: 222134 - DNA, 25 bp, Artificial
  probe
  misc_feature (1)..(25): SEQ ID NO: 4038; WAN024FV2_at; Start 261; Stop 285
tatagcggttccacgattagagcag

SEQ ID NO: 222135 - DNA, 25 bp, Artificial
  probe
  misc_feature (1)..(25): SEQ ID NO: 4038; WAN024FV2_at; Start 348; Stop 372
tattttgccatgctttgatatagag

SEQ ID NO: 222136 - DNA, 25 bp, Artificial
  probe
  misc_feature (1)..(25): SEQ ID NO: 4038; WAN024FV2_at; Start 216; Stop 240
tgggactgctagtattgttaaagct

SEQ ID NO: 222137 - DNA, 25 bp, Artificial
  probe
  misc_feature (1)..(25): SEQ ID NO: 4038; WAN024FV2_at; Start 211; Stop 235
catggtgggactgctagtattgtta

SEQ ID NO: 222138 - DNA, 25 bp, Artificial
  probe
  misc_feature (1)..(25): SEQ ID NO: 4038; WAN024FV2_at; Start 61; Stop 85
gatcaacttattgaattagaagtga

SEQ ID NO: 222139 - DNA, 25 bp, Artificial
  probe
  misc_feature (1)..(25): SEQ ID NO: 4038; WAN024FV2_at; Start 223; Stop 247
gctagtattgttaaagctttgaaat

SEQ ID NO: 222140 - DNA, 25 bp, Artificial
  probe
  misc_feature (1)..(25): SEQ ID NO: 4038; WAN024FV2_at; Start 256; Stop 280
aaaattatagcggttccacgattag

SEQ ID NO: 222141 - DNA, 25 bp, Artificial
  probe
  misc_feature (1)..(25): SEQ ID NO: 4038; WAN024FV2_at; Start 311; Stop 335
aattacaaatcatcacagttcttgg

SEQ ID NO: 222142 - DNA, 25 bp, Artificial
  probe
  misc_feature (1)..(25): SEQ ID NO: 4038; WAN024FV2_at; Start 336; Stop 360
tgaggaaggttatattttgccatgc

SEQ ID NO: 222143 - DNA, 25 bp, Artificial
  probe
  misc_feature (1)..(25): SEQ ID NO: 4038; WAN024FV2_at; Start 436; Stop 460
tatgcacttttagaagatatacgac

SEQ ID NO: 222144 - DNA, 25 bp, Artificial
  probe
  misc_feature (1)..(25): SEQ ID NO: 4038; WAN024FV2_at; Start 115; Stop 139
gcttctgattataaacctaaatact

SEQ ID NO: 222145 - DNA, 25 bp, Artificial
  probe
  misc_feature (1)..(25): SEQ ID NO: 4038; WAN024FV2_at; Start 272; Stop 296
cacgattagagcagtttggagaaca

SEQ ID NO: 222146 - DNA, 25 bp, Artificial
  probe
  misc_feature (1)..(25): SEQ ID NO: 2282; WAN024FV3_at; Start 401; Stop 425
gtagaatactataccgttacgcaga

SEQ ID NO: 222147 - DNA, 25 bp, Artificial
  probe
  misc_feature (1)..(25): SEQ ID NO: 2282; WAN024FV3_at; Start 377; Stop 401
aagtgaccactcctactttaacagg

SEQ ID NO: 222148 - DNA, 25 bp, Artificial
  probe
  misc_feature (1)..(25): SEQ ID NO: 2282; WAN024FV3_at; Start 219; Stop 243
gatcgttaaattgatttggatttcc

SEQ ID NO: 222149 - DNA, 25 bp, Artificial
  probe
  misc_feature (1)..(25): SEQ ID NO: 2282; WAN024FV3_at; Start 424; Stop 448
gatagattctatgtgcaatgggaga

SEQ ID NO: 222150 - DNA, 25 bp, Artificial
  probe
  misc_feature (1)..(25): SEQ ID NO: 2282; WAN024FV3_at; Start 36; Stop 60
agtatgtttttgtgcttcgtcaggg

SEQ ID NO: 222151 - DNA, 25 bp, Artificial
  probe
  misc_feature (1)..(25): SEQ ID NO: 2282; WAN024FV3_at; Start 241; Stop 265
tccttgaaatcactttatatactgt

SEQ ID NO: 222152 - DNA, 25 bp, Artificial
  probe
  misc_feature (1)..(25): SEQ ID NO: 2282; WAN024FV3_at; Start 360; Stop 384
tattgaatcttttgcaaaagtgacc

SEQ ID NO: 222153 - DNA, 25 bp, Artificial
  probe
  misc_feature (1)..(25): SEQ ID NO: 2282; WAN024FV3_at; Start 269; Stop 293
gaatacgcccaaaagtagttatctg

SEQ ID NO: 222154 - DNA, 25 bp, Artificial
  probe
  misc_feature (1)..(25): SEQ ID NO: 2282; WAN024FV3_at; Start 412; Stop 436
taccgttacgcagatagattctatg

SEQ ID NO: 222155 - DNA, 25 bp, Artificial
  probe
  misc_feature (1)..(25): SEQ ID NO: 2282; WAN024FV3_at; Start 170; Stop 194
taaacaaggtgttttatcttttgca

SEQ ID NO: 222156 - DNA, 25 bp, Artificial
  probe
  misc_feature (1)..(25): SEQ ID NO: 2282; WAN024FV3_at; Start 60; Stop 84
gggacattatgagcaactaatgaag

SEQ ID NO: 222157 - DNA, 25 bp, Artificial
  probe
  misc_feature (1)..(25): SEQ ID NO: 2282; WAN024FV3_at; Start 87; Stop 111
tgaaccgattatgagacaacaagac

SEQ ID NO: 222158 - DNA, 25 bp, Artificial
  probe
  misc_feature (1)..(25): SEQ ID NO: 2282; WAN024FV3_at; Start 256; Stop 280
tatatactgttaagaatacgcccaa

SEQ ID NO: 222159 - DNA, 25 bp, Artificial
  probe
  misc_feature (1)..(25): SEQ ID NO: 2282; WAN024FV3_at; Start 144; Stop 168
caaaggagagtctgagaagaaagat

SEQ ID NO: 222160 - DNA, 25 bp, Artificial
  probe
  misc_feature (1)..(25): SEQ ID NO: 2282; WAN024FV3_at; Start 81; Stop 105
gaagcttgaaccgattatgagacaa

SEQ ID NO: 222161 - DNA, 25 bp, Artificial
  probe
  misc_feature (1)..(25): SEQ ID NO: 2282; WAN024FV3_at; Start 461; Stop 485
tctacccaaatgctgtttataaagg

SEQ ID NO: 222162 - DNA, 25 bp, Artificial
  probe
  misc_feature (1)..(25): SEQ ID NO: 2282; WAN024FV3_at; Start 103; Stop 127
caacaagacagctatttaatcacag

SEQ ID NO: 222163 - DNA, 25 bp, Artificial
  probe
  misc_feature (1)..(25): SEQ ID NO: 2282; WAN024FV3_at; Start 392; Stop 416
ctttaacaggtagaatactataccg

SEQ ID NO: 222164 - DNA, 25 bp, Artificial
  probe
  misc_feature (1)..(25): SEQ ID NO: 2282; WAN024FV3_at; Start 311; Stop 335
tgataccgttttgtttgctttcaaa

SEQ ID NO: 222165 - DNA, 25 bp, Artificial
  probe
  misc_feature (1)..(25): SEQ ID NO: 2282; WAN024FV3_at; Start 453; Stop 477
gctagatatctacccaaatgctgtt

SEQ ID NO: 222166 - DNA, 25 bp, Artificial
  probe
  misc_feature (1)..(25): SEQ ID NO: 2282; WAN024FV3_at; Start 431; Stop 455
tctatgtgcaatgggagagtatgct

SEQ ID NO: 222167 - DNA, 25 bp, Artificial
  probe
  misc_feature (1)..(25): SEQ ID NO: 2282; WAN024FV3_at; Start 72; Stop 96
gcaactaatgaagcttgaaccgatt

SEQ ID NO: 222168 - DNA, 25 bp, Artificial
  probe
  misc_feature (1)..(25): SEQ ID NO: 2282; WAN024FV3_at; Start 275; Stop 299
gcccaaaagtagttatctgtacagg

SEQ ID NO: 222169 - DNA, 25 bp, Artificial
  probe
  misc_feature (1)..(25): SEQ ID NO: 2282; WAN024FV3_at; Start 294; Stop 318
tacaggtgttcttgcaatgataccg

SEQ ID NO: 222170 - DNA, 25 bp, Artificial
  probe
  misc_feature (1)..(25): SEQ ID NO: 2282; WAN024FV3_at; Start 367; Stop 391
tcttttgcaaaagtgaccactccta

SEQ ID NO: 222171 - DNA, 25 bp, Artificial
  probe
  misc_feature (1)..(25): SEQ ID NO: 2282; WAN024FV3_at; Start 439; Stop 463
caatgggagagtatgctagatatct

SEQ ID NO: 222172 - DNA, 25 bp, Artificial
  probe
  misc_feature (1)..(25): SEQ ID NO: 2282; WAN024FV3_at; Start 93; Stop 117
gattatgagacaacaagacagctat

SEQ ID NO: 222173 - DNA, 25 bp, Artificial
  probe
  misc_feature (1)..(25): SEQ ID NO: 2282; WAN024FV3_at; Start 132; Stop 156
tactgattataacaaaggagagtct

SEQ ID NO: 222174 - DNA, 25 bp, Artificial
  probe
  misc_feature (1)..(25): SEQ ID NO: 2282; WAN024FV3_at; Start 186; Stop 210
tcttttgcaaattaatcgtttggaa

SEQ ID NO: 222175 - DNA, 25 bp, Artificial
  probe
  misc_feature (1)..(25): SEQ ID NO: 2282; WAN024FV3_at; Start 285; Stop 309
agttatctgtacaggtgttcttgca

SEQ ID NO: 222176 - DNA, 25 bp, Artificial
  probe
  misc_feature (1)..(25): SEQ ID NO: 2282; WAN024FV3_at; Start 156; Stop 180
tgagaagaaagatataaacaaggtg

SEQ ID NO: 222177 - DNA, 25 bp, Artificial
  probe
  misc_feature (1)..(25): SEQ ID NO: 2282; WAN024FV3_at; Start 113; Stop 137
gctatttaatcacagaatatactga

SEQ ID NO: 222178 - DNA, 25 bp, Artificial
  probe
  misc_feature (1)..(25): SEQ ID NO: 2282; WAN024FV3_at; Start 2; Stop 26
tggagcgaagtaaaggaatgaaaaa

SEQ ID NO: 222179 - DNA, 25 bp, Artificial
  probe
  misc_feature (1)..(25): SEQ ID NO: 2282; WAN024FV3_at; Start 300; Stop 324
tgttcttgcaatgataccgttttgt

SEQ ID NO: 222180 - DNA, 25 bp, Artificial
  probe
  misc_feature (1)..(25): SEQ ID NO: 721; WAN024FV4_at; Start 57; Stop 81
tcttttgaaacgtgctaaacagcta

SEQ ID NO: 222181 - DNA, 25 bp, Artificial
  probe
  misc_feature (1)..(25): SEQ ID NO: 721; WAN024FV4_at; Start 347; Stop 371
caaaggaaatatcaaccacaaagat

SEQ ID NO: 222182 - DNA, 25 bp, Artificial
  probe
  misc_feature (1)..(25): SEQ ID NO: 721; WAN024FV4_at; Start 272; Stop 296
taatgggtgatgattggaaaggtaa

SEQ ID NO: 222183 - DNA, 25 bp, Artificial
  probe
  misc_feature (1)..(25): SEQ ID NO: 721; WAN024FV4_at; Start 287; Stop 311
ggaaaggtaaatttgattatcttga

SEQ ID NO: 222184 - DNA, 25 bp, Artificial
  probe
  misc_feature (1)..(25): SEQ ID NO: 721; WAN024FV4_at; Start 221; Stop 245
gttgggaacagaaaaagtcagatgt

SEQ ID NO: 222185 - DNA, 25 bp, Artificial
  probe
  misc_feature (1)..(25): SEQ ID NO: 721; WAN024FV4_at; Start 60; Stop 84
tttgaaacgtgctaaacagctaggt

SEQ ID NO: 222186 - DNA, 25 bp, Artificial
  probe
  misc_feature (1)..(25): SEQ ID NO: 721; WAN024FV4_at; Start 163; Stop 187
cacagaaaaaatttagtagaagcta

SEQ ID NO: 222187 - DNA, 25 bp, Artificial
  probe
  misc_feature (1)..(25): SEQ ID NO: 721; WAN024FV4_at; Start 317; Stop 341
aaggtgttgaagtagtctatttgcc

SEQ ID NO: 222188 - DNA, 25 bp, Artificial
  probe
  misc_feature (1)..(25): SEQ ID NO: 721; WAN024FV4_at; Start 70; Stop 94
gctaaacagctaggtgattatttga

SEQ ID NO: 222189 - DNA, 25 bp, Artificial
  probe
  misc_feature (1)..(25): SEQ ID NO: 721; WAN024FV4_at; Start 203; Stop 227
tagtaatccctgaaactagttggga

SEQ ID NO: 222190 - DNA, 25 bp, Artificial
  probe
  misc_feature (1)..(25): SEQ ID NO: 721; WAN024FV4_at; Start 226; Stop 250
gaacagaaaaagtcagatgttaaag

SEQ ID NO: 222191 - DNA, 25 bp, Artificial
  probe
  misc_feature (1)..(25): SEQ ID NO: 721; WAN024FV4_at; Start 181; Stop 205
gaagctattcgatatgtcgatttag

SEQ ID NO: 222192 - DNA, 25 bp, Artificial
  probe
  misc_feature (1)..(25): SEQ ID NO: 721; WAN024FV4_at; Start 191; Stop 215
gatatgtcgatttagtaatccctga

SEQ ID NO: 222193 - DNA, 25 bp, Artificial
  probe
  misc_feature (1)..(25): SEQ ID NO: 721; WAN024FV4_at; Start 258; Stop 282
tattgacacttttgtaatgggtgat

SEQ ID NO: 222194 - DNA, 25 bp, Artificial
  probe
  misc_feature (1)..(25): SEQ ID NO: 721; WAN024FV4_at; Start 339; Stop 363
gcctagaacaaaggaaatatcaacc

SEQ ID NO: 222195 - DNA, 25 bp, Artificial
  probe
  misc_feature (1)..(25): SEQ ID NO: 721; WAN024FV4_at; Start 301; Stop 325
gattatcttgaagaagaaggtgttg

SEQ ID NO: 222196 - DNA, 25 bp, Artificial
  probe
  misc_feature (1)..(25): SEQ ID NO: 721; WAN024FV4_at; Start 358; Stop 382
tcaaccacaaagataaaagaagatt

SEQ ID NO: 222197 - DNA, 25 bp, Artificial
  probe
  misc_feature (1)..(25): SEQ ID NO: 721; WAN024FV4_at; Start 264; Stop 288
cacttttgtaatgggtgatgattgg

SEQ ID NO: 222198 - DNA, 25 bp, Artificial
  probe
  misc_feature (1)..(25): SEQ ID NO: 721; WAN024FV4_at; Start 67; Stop 91
cgtgctaaacagctaggtgattatt

SEQ ID NO: 222199 - DNA, 25 bp, Artificial
  probe
  misc_feature (1)..(25): SEQ ID NO: 721; WAN024FV4_at; Start 209; Stop 233
tccctgaaactagttgggaacagaa

SEQ ID NO: 222200 - DNA, 25 bp, Artificial
  probe
  misc_feature (1)..(25): SEQ ID NO: 721; WAN024FV4_at; Start 22; Stop 46
ggtacatttgatttattgcattatg

SEQ ID NO: 222201 - DNA, 25 bp, Artificial
  probe
  misc_feature (1)..(25): SEQ ID NO: 721; WAN024FV4_at; Start 145; Stop 169
tgttactttaactacgaacacagaa

SEQ ID NO: 222202 - DNA, 25 bp, Artificial
  probe
  misc_feature (1)..(25): SEQ ID NO: 721; WAN024FV4_at; Start 369; Stop 393
gataaaagaagatttatcggaatga

SEQ ID NO: 222203 - DNA, 25 bp, Artificial
  probe
  misc_feature (1)..(25): SEQ ID NO: 721; WAN024FV4_at; Start 85; Stop 109
gattatttgattgtagttgtttcaa

SEQ ID NO: 222204 - DNA, 25 bp, Artificial
  probe
  misc_feature (1)..(25): SEQ ID NO: 721; WAN024FV4_at; Start 309; Stop 333
tgaagaagaaggtgttgaagtagtc

SEQ ID NO: 222205 - DNA, 25 bp, Artificial
  probe
  misc_feature (1)..(25): SEQ ID NO: 721; WAN024FV4_at; Start 106; Stop 130
tcaagtgatgagtttaatttaaaag

SEQ ID NO: 222206 - DNA, 25 bp, Artificial
  probe
  misc_feature (1)..(25): SEQ ID NO: 721; WAN024FV4_at; Start 31; Stop 55
gatttattgcattatggtcatatca

SEQ ID NO: 222207 - DNA, 25 bp, Artificial
  probe
  misc_feature (1)..(25): SEQ ID NO: 721; WAN024FV4_at; Start 176; Stop 200
tagtagaagctattcgatatgtcga

SEQ ID NO: 222208 - DNA, 25 bp, Artificial
  probe
  misc_feature (1)..(25): SEQ ID NO: 721; WAN024FV4_at; Start 218; Stop 242
ctagttgggaacagaaaaagtcaga

SEQ ID NO: 222209 - DNA, 25 bp, Artificial
  probe
  misc_feature (1)..(25): SEQ ID NO: 721; WAN024FV4_at; Start 143; Stop 167
tatgttactttaactacgaacacag

SEQ ID NO: 222210 - DNA, 25 bp, Artificial
  probe
  misc_feature (1)..(25): SEQ ID NO: 721; WAN024FV4_at; Start 76; Stop 100
cagctaggtgattatttgattgtag

SEQ ID NO: 222211 - DNA, 25 bp, Artificial
  probe
  misc_feature (1)..(25): SEQ ID NO: 721; WAN024FV4_at; Start 329; Stop 353
tagtctatttgcctagaacaaagga

SEQ ID NO: 222212 - DNA, 25 bp, Artificial
  probe
  misc_feature (1)..(25): SEQ ID NO: 721; WAN024FV4_at; Start 324; Stop 348
tgaagtagtctatttgcctagaaca

SEQ ID NO: 222213 - DNA, 25 bp, Artificial
  probe
  misc_feature (1)..(25): SEQ ID NO: 721; WAN024FV4_at; Start 63; Stop 87
gaaacgtgctaaacagctaggtgat

SEQ ID NO: 222214 - DNA, 25 bp, Artificial
  probe
  misc_feature (1)..(25): SEQ ID NO: 990; WAN024FV5_at; Start 253; Stop 277
gaatggttaacagctagagtttggg

SEQ ID NO: 222215 - DNA, 25 bp, Artificial
  probe
  misc_feature (1)..(25): SEQ ID NO: 990; WAN024FV5_at; Start 927; Stop 951
tcaaagttatgtgaatgatagacca

SEQ ID NO: 222216 - DNA, 25 bp, Artificial
  probe
  misc_feature (1)..(25): SEQ ID NO: 990; WAN024FV5_at; Start 1057; Stop 1081
cgtctgtatgaattagaggatgttc

SEQ ID NO: 222217 - DNA, 25 bp, Artificial
  probe
  misc_feature (1)..(25): SEQ ID NO: 990; WAN024FV5_at; Start 629; Stop 653
tgtatatgccgacgttcagagatga

SEQ ID NO: 222218 - DNA, 25 bp, Artificial
  probe
  misc_feature (1)..(25): SEQ ID NO: 990; WAN024FV5_at; Start 333; Stop 357
tcaaacttggcatggttcagatggg

SEQ ID NO: 222219 - DNA, 25 bp, Artificial
  probe
  misc_feature (1)..(25): SEQ ID NO: 990; WAN024FV5_at; Start 981; Stop 1005
tccaagagcatatcataacaatgag

SEQ ID NO: 222220 - DNA, 25 bp, Artificial
  probe
  misc_feature (1)..(25): SEQ ID NO: 990; WAN024FV5_at; Start 967; Stop 991
gataaattgccatttccaagagcat

SEQ ID NO: 222221 - DNA, 25 bp, Artificial
  probe
  misc_feature (1)..(25): SEQ ID NO: 990; WAN024FV5_at; Start 291; Stop 315
taattctgatcgaccttggaagcga

SEQ ID NO: 222222 - DNA, 25 bp, Artificial
  probe
  misc_feature (1)..(25): SEQ ID NO: 990; WAN024FV5_at; Start 364; Stop 388
ttaattgaaaaaagtgttgcaggga

SEQ ID NO: 222223 - DNA, 25 bp, Artificial
  probe
  misc_feature (1)..(25): SEQ ID NO: 990; WAN024FV5_at; Start 30; Stop 54
aaaagtctttacattaccgttgcat

SEQ ID NO: 222224 - DNA, 25 bp, Artificial
  probe
  misc_feature (1)..(25): SEQ ID NO: 990; WAN024FV5_at; Start 216; Stop 240
tcgagtagtaaaatacggcagttac

SEQ ID NO: 222225 - DNA, 25 bp, Artificial
  probe
  misc_feature (1)..(25): SEQ ID NO: 990; WAN024FV5_at; Start 113; Stop 137
gggacaatcctaagtatatacttga

SEQ ID NO: 222226 - DNA, 25 bp, Artificial
  probe
  misc_feature (1)..(25): SEQ ID NO: 990; WAN024FV5_at; Start 424; Stop 448
gatggaaagattacagacggtatcg

SEQ ID NO: 222227 - DNA, 25 bp, Artificial
  probe
  misc_feature (1)..(25): SEQ ID NO: 990; WAN024FV5_at; Start 947; Stop 971
gaccattggatgataactttgataa

SEQ ID NO: 222228 - DNA, 25 bp, Artificial
  probe
  misc_feature (1)..(25): SEQ ID NO: 990; WAN024FV5_at; Start 601; Stop 625
gatatcgatttagacgaactggtag

SEQ ID NO: 222229 - DNA, 25 bp, Artificial
  probe
  misc_feature (1)..(25): SEQ ID NO: 990; WAN024FV5_at; Start 437; Stop 461
cagacggtatcgtatcaagtcggca

SEQ ID NO: 222230 - DNA, 25 bp, Artificial
  probe
  misc_feature (1)..(25): SEQ ID NO: 990; WAN024FV5_at; Start 1038; Stop 1062
taaatatgatgaaaaagttcgtctg

SEQ ID NO: 222231 - DNA, 25 bp, Artificial
  probe
  misc_feature (1)..(25): SEQ ID NO: 990; WAN024FV5_at; Start 786; Stop 810
tacagactgtataaatgtgtcgacc

SEQ ID NO: 222232 - DNA, 25 bp, Artificial
  probe
  misc_feature (1)..(25): SEQ ID NO: 990; WAN024FV5_at; Start 801; Stop 825
tgtgtcgacctattcaaatcctcag

SEQ ID NO: 222233 - DNA, 25 bp, Artificial
  probe
  misc_feature (1)..(25): SEQ ID NO: 990; WAN024FV5_at; Start 1089; Stop 1113
tagaggaaaagcatcagtacagtgt

SEQ ID NO: 222234 - DNA, 25 bp, Artificial
  probe
  misc_feature (1)..(25): SEQ ID NO: 990; WAN024FV5_at; Start 234; Stop 258
cagttaccgttctttttatgaatgg

SEQ ID NO: 222235 - DNA, 25 bp, Artificial
  probe
  misc_feature (1)..(25): SEQ ID NO: 990; WAN024FV5_at; Start 408; Stop 432
tagaatggcgaagtatgatggaaag

SEQ ID NO: 222236 - DNA, 25 bp, Artificial
  probe
  misc_feature (1)..(25): SEQ ID NO: 990; WAN024FV5_at; Start 1103; Stop 1127
cagtacagtgtgctaattggattga

SEQ ID NO: 222237 - DNA, 25 bp, Artificial
  probe
  misc_feature (1)..(25): SEQ ID NO: 990; WAN024FV5_at; Start 203; Stop 227
tccctgaaggcgttcgagtagtaaa

SEQ ID NO: 222238 - DNA, 25 bp, Artificial
  probe
  misc_feature (1)..(25): SEQ ID NO: 990; WAN024FV5_at; Start 131; Stop 155
tacttgaagaacttgtctctcgaga

SEQ ID NO: 222239 - DNA, 25 bp, Artificial
  probe
  misc_feature (1)..(25): SEQ ID NO: 990; WAN024FV5_at; Start 770; Stop 794
ttataaatttacaggatacagactg

SEQ ID NO: 222240 - DNA, 25 bp, Artificial
  probe
  misc_feature (1)..(25): SEQ ID NO: 990; WAN024FV5_at; Start 645; Stop 669
cagagatgatggatcgttgaatgcc

SEQ ID NO: 222241 - DNA, 25 bp, Artificial
  probe
  misc_feature (1)..(25): SEQ ID NO: 990; WAN024FV5_at; Start 512; Stop 536
aatttctggaatttggattacctcg

SEQ ID NO: 222242 - DNA, 25 bp, Artificial
  probe
  misc_feature (1)..(25): SEQ ID NO: 990; WAN024FV5_at; Start 169; Stop 193
cttgtgtgggtaacaaaagatagag

SEQ ID NO: 222243 - DNA, 25 bp, Artificial
  probe
  misc_feature (1)..(25): SEQ ID NO: 990; WAN024FV5_at; Start 190; Stop 214
agagaaatttctatccctgaaggcg

SEQ ID NO: 222244 - DNA, 25 bp, Artificial
  probe
  misc_feature (1)..(25): SEQ ID NO: 990; WAN024FV5_at; Start 852; Stop 876
gattacggattattcatcggcttct

SEQ ID NO: 222245 - DNA, 25 bp, Artificial
  probe
  misc_feature (1)..(25): SEQ ID NO: 990; WAN024FV5_at; Start 815; Stop 839
caaatcctcaggatctgatgatgag

SEQ ID NO: 222246 - DNA, 25 bp, Artificial
  probe
  misc_feature (1)..(25): SEQ ID NO: 990; WAN024FV5_at; Start 898; Stop 922
cgtccagtatttctgtatttaccag

SEQ ID NO: 222247 - DNA, 25 bp, Artificial
  probe
  misc_feature (1)..(25): SEQ ID NO: 990; WAN024FV5_at; Start 616; Stop 640
gaactggtagttttgtatatgccga

SEQ ID NO: 222248 - DNA, 25 bp, Artificial
  probe
  misc_feature (1)..(25): SEQ ID NO: 1084; WAN024FV6_at; Start 784; Stop 808
gattttgctgtcaatattgctaaaa

SEQ ID NO: 222249 - DNA, 25 bp, Artificial
  probe
  misc_feature (1)..(25): SEQ ID NO: 1084; WAN024FV6_at; Start 268; Stop 292
gatgtttttcttcaattaacacaag

SEQ ID NO: 222250 - DNA, 25 bp, Artificial
  probe
  misc_feature (1)..(25): SEQ ID NO: 1084; WAN024FV6_at; Start 718; Stop 742
agttcggtgataatatcttgtatgc

SEQ ID NO: 222251 - DNA, 25 bp, Artificial
  probe
  misc_feature (1)..(25): SEQ ID NO: 1084; WAN024FV6_at; Start 815; Stop 839
cgacgtttatttatattagtcatca

SEQ ID NO: 222252 - DNA, 25 bp, Artificial
  probe
  misc_feature (1)..(25): SEQ ID NO: 1084; WAN024FV6_at; Start 391; Stop 415
ccactatggttcttatatgcattac

SEQ ID NO: 222253 - DNA, 25 bp, Artificial
  probe
  misc_feature (1)..(25): SEQ ID NO: 1084; WAN024FV6_at; Start 579; Stop 603
gatgtattttgctcaaattcagaga

SEQ ID NO: 222254 - DNA, 25 bp, Artificial
  probe
  misc_feature (1)..(25): SEQ ID NO: 1084; WAN024FV6_at; Start 20; Stop 44
ctaaaaagagagagaatgaaacgtt

SEQ ID NO: 222255 - DNA, 25 bp, Artificial
  probe
  misc_feature (1)..(25): SEQ ID NO: 1084; WAN024FV6_at; Start 503; Stop 527
taatcgagttaaaagcaaatagtgc

SEQ ID NO: 222256 - DNA, 25 bp, Artificial
  probe
  misc_feature (1)..(25): SEQ ID NO: 1084; WAN024FV6_at; Start 756; Stop 780
gattaaatatcctcaactctggacg

SEQ ID NO: 222257 - DNA, 25 bp, Artificial
  probe
  misc_feature (1)..(25): SEQ ID NO: 1084; WAN024FV6_at; Start 225; Stop 249
gagtttattgataatttccagtaca

SEQ ID NO: 222258 - DNA, 25 bp, Artificial
  probe
  misc_feature (1)..(25): SEQ ID NO: 1084; WAN024FV6_at; Start 646; Stop 670
ggaattatgatttcaggatttctaa

SEQ ID NO: 222259 - DNA, 25 bp, Artificial
  probe
  misc_feature (1)..(25): SEQ ID NO: 1084; WAN024FV6_at; Start 346; Stop 370
ttggtattcaatcaaatttctgctc

SEQ ID NO: 222260 - DNA, 25 bp, Artificial
  probe
  misc_feature (1)..(25): SEQ ID NO: 1084; WAN024FV6_at; Start 876; Stop 900
tggaattgcttataaaattggaact

SEQ ID NO: 222261 - DNA, 25 bp, Artificial
  probe
  misc_feature (1)..(25): SEQ ID NO: 1084; WAN024FV6_at; Start 369; Stop 393
tctaattggctcgttagcaacacca

SEQ ID NO: 222262 - DNA, 25 bp, Artificial
  probe
  misc_feature (1)..(25): SEQ ID NO: 1084; WAN024FV6_at; Start 485; Stop 509
tactctgttgttcatttataatcga

SEQ ID NO: 222263 - DNA, 25 bp, Artificial
  probe
  misc_feature (1)..(25): SEQ ID NO: 1084; WAN024FV6_at; Start 125; Stop 149
aagtattagctcgatttgctgtacc

SEQ ID NO: 222264 - DNA, 25 bp, Artificial
  probe
  misc_feature (1)..(25): SEQ ID NO: 1084; WAN024FV6_at; Start 659; Stop 683
caggatttctaactctgattgaata

SEQ ID NO: 222265 - DNA, 25 bp, Artificial
  probe
  misc_feature (1)..(25): SEQ ID NO: 1084; WAN024FV6_at; Start 158; Stop 182
tcatgatttcaggattttattcgtt

SEQ ID NO: 222266 - DNA, 25 bp, Artificial
  probe
  misc_feature (1)..(25): SEQ ID NO: 1084; WAN024FV6_at; Start 474; Stop 498
gactgtgatcatactctgttgttca

SEQ ID NO: 222267 - DNA, 25 bp, Artificial
  probe
  misc_feature (1)..(25): SEQ ID NO: 1084; WAN024FV6_at; Start 376; Stop 400
ggctcgttagcaacaccactatggt

SEQ ID NO: 222268 - DNA, 25 bp, Artificial
  probe
  misc_feature (1)..(25): SEQ ID NO: 1084; WAN024FV6_at; Start 357; Stop 381
tcaaatttctgctctaattggctcg

SEQ ID NO: 222269 - DNA, 25 bp, Artificial
  probe
  misc_feature (1)..(25): SEQ ID NO: 1084; WAN024FV6_at; Start 675; Stop 699
gattgaatatacctttttaggagca

SEQ ID NO: 222270 - DNA, 25 bp, Artificial
  probe
  misc_feature (1)..(25): SEQ ID NO: 1084; WAN024FV6_at; Start 733; Stop 757
tcttgtatgcttatggtcttttcga

SEQ ID NO: 222271 - DNA, 25 bp, Artificial
  probe
  misc_feature (1)..(25): SEQ ID NO: 1084; WAN024FV6_at; Start 896; Stop 920
gaactttcttgatatttttagcatg

SEQ ID NO: 222272 - DNA, 25 bp, Artificial
  probe
  misc_feature (1)..(25): SEQ ID NO: 1084; WAN024FV6_at; Start 2; Stop 26
tgaagacagatgctaggactaaaaa

SEQ ID NO: 222273 - DNA, 25 bp, Artificial
  probe
  misc_feature (1)..(25): SEQ ID NO: 1084; WAN024FV6_at; Start 101; Stop 125
tgggccaaattggagtgttttacaa

SEQ ID NO: 222274 - DNA, 25 bp, Artificial
  probe
  misc_feature (1)..(25): SEQ ID NO: 1084; WAN024FV6_at; Start 113; Stop 137
gagtgttttacaaagtattagctcg

SEQ ID NO: 222275 - DNA, 25 bp, Artificial
  probe
  misc_feature (1)..(25): SEQ ID NO: 1084; WAN024FV6_at; Start 283; Stop 307
ttaacacaaggaaatctaagagttg

SEQ ID NO: 222276 - DNA, 25 bp, Artificial
  probe
  misc_feature (1)..(25): SEQ ID NO: 1084; WAN024FV6_at; Start 81; Stop 105
tgctatacattttggttttttgggc

SEQ ID NO: 222277 - DNA, 25 bp, Artificial
  probe
  misc_feature (1)..(25): SEQ ID NO: 1084; WAN024FV6_at; Start 55; Stop 79
aaagtttgggcaacatttagtgtga

SEQ ID NO: 222278 - DNA, 25 bp, Artificial
  probe
  misc_feature (1)..(25): SEQ ID NO: 1084; WAN024FV6_at; Start 65; Stop 89
caacatttagtgtgattgctataca

SEQ ID NO: 222279 - DNA, 25 bp, Artificial
  probe
  misc_feature (1)..(25): SEQ ID NO: 1084; WAN024FV6_at; Start 44; Stop 68
tatatattctaaaagtttgggcaac

SEQ ID NO: 222280 - DNA, 25 bp, Artificial
  probe
  misc_feature (1)..(25): SEQ ID NO: 1084; WAN024FV6_at; Start 611; Stop 635
taaattataagcacttcaaagaact

SEQ ID NO: 222281 - DNA, 25 bp, Artificial
  probe
  misc_feature (1)..(25): SEQ ID NO: 1084; WAN024FV6_at; Start 133; Stop 157
gctcgatttgctgtacctttatttt

SEQ ID NO: 222282 - DNA, 25 bp, Artificial
  probe
  misc_feature (1)..(25): SEQ ID NO: 3982; WAN024FV7_at; Start 279; Stop 303
gtttcaaggcttagatactgcccct

SEQ ID NO: 222283 - DNA, 25 bp, Artificial
  probe
  misc_feature (1)..(25): SEQ ID NO: 3982; WAN024FV7_at; Start 856; Stop 880
tatggttatattctcgaacagacac

SEQ ID NO: 222284 - DNA, 25 bp, Artificial
  probe
  misc_feature (1)..(25): SEQ ID NO: 3982; WAN024FV7_at; Start 83; Stop 107
cgatagctattttacctctggttgg

SEQ ID NO: 222285 - DNA, 25 bp, Artificial
  probe
  misc_feature (1)..(25): SEQ ID NO: 3982; WAN024FV7_at; Start 312; Stop 336
tcaggagtgtatcgcttcggtaaaa

SEQ ID NO: 222286 - DNA, 25 bp, Artificial
  probe
  misc_feature (1)..(25): SEQ ID NO: 3982; WAN024FV7_at; Start 906; Stop 930
tgaagaagaaaagtcgagaataccg

SEQ ID NO: 222287 - DNA, 25 bp, Artificial
  probe
  misc_feature (1)..(25): SEQ ID NO: 3982; WAN024FV7_at; Start 220; Stop 244
tattcacttagctataatcagcgac

SEQ ID NO: 222288 - DNA, 25 bp, Artificial
  probe
  misc_feature (1)..(25): SEQ ID NO: 3982; WAN024FV7_at; Start 31; Stop 55
aagggcgcagagatttttaaagact

SEQ ID NO: 222289 - DNA, 25 bp, Artificial
  probe
  misc_feature (1)..(25): SEQ ID NO: 3982; WAN024FV7_at; Start 871; Stop 895
gaacagacaccattccataagctaa

SEQ ID NO: 222290 - DNA, 25 bp, Artificial
  probe
  misc_feature (1)..(25): SEQ ID NO: 3982; WAN024FV7_at; Start 445; Stop 469
aaagcgcactttgcagatttattgc

SEQ ID NO: 222291 - DNA, 25 bp, Artificial
  probe
  misc_feature (1)..(25): SEQ ID NO: 3982; WAN024FV7_at; Start 340; Stop 364
cacctagcagacagagaagtggttg

SEQ ID NO: 222292 - DNA, 25 bp, Artificial
  probe
  misc_feature (1)..(25): SEQ ID NO: 3982; WAN024FV7_at; Start 430; Stop 454
cagggttttatttcaaaagcgcact

SEQ ID NO: 222293 - DNA, 25 bp, Artificial
  probe
  misc_feature (1)..(25): SEQ ID NO: 3982; WAN024FV7_at; Start 807; Stop 831
tcctcatattttgcagttacgctta

SEQ ID NO: 222294 - DNA, 25 bp, Artificial
  probe
  misc_feature (1)..(25): SEQ ID NO: 3982; WAN024FV7_at; Start 163; Stop 187
tcaaaattgagaaggaagtataagc

SEQ ID NO: 222295 - DNA, 25 bp, Artificial
  probe
  misc_feature (1)..(25): SEQ ID NO: 3982; WAN024FV7_at; Start 181; Stop 205
tataagcagactattaaaaacttgg

SEQ ID NO: 222296 - DNA, 25 bp, Artificial
  probe
  misc_feature (1)..(25): SEQ ID NO: 3982; WAN024FV7_at; Start 528; Stop 552
gagttcagatattcctgcctatatg

SEQ ID NO: 222297 - DNA, 25 bp, Artificial
  probe
  misc_feature (1)..(25): SEQ ID NO: 3982; WAN024FV7_at; Start 115; Stop 139
aaaaaatcattagagatagtccgtc

SEQ ID NO: 222298 - DNA, 25 bp, Artificial
  probe
  misc_feature (1)..(25): SEQ ID NO: 3982; WAN024FV7_at; Start 294; Stop 318
tactgcccctcatgtggttcaggag

SEQ ID NO: 222299 - DNA, 25 bp, Artificial
  probe
  misc_feature (1)..(25): SEQ ID NO: 3982; WAN024FV7_at; Start 479; Stop 503
tactgaccgagtatggtggtacgtg

SEQ ID NO: 222300 - DNA, 25 bp, Artificial
  probe
  misc_feature (1)..(25): SEQ ID NO: 3982; WAN024FV7_at; Start 648; Stop 672
taaccatcctcttttaaatatgacg

SEQ ID NO: 222301 - DNA, 25 bp, Artificial
  probe
  misc_feature (1)..(25): SEQ ID NO: 3982; WAN024FV7_at; Start 234; Stop 258
taatcagcgacataaagatgcatca

SEQ ID NO: 222302 - DNA, 25 bp, Artificial
  probe
  misc_feature (1)..(25): SEQ ID NO: 3982; WAN024FV7_at; Start 409; Stop 433
tatatcaaagaaaaagcaacccagg

SEQ ID NO: 222303 - DNA, 25 bp, Artificial
  probe
  misc_feature (1)..(25): SEQ ID NO: 3982; WAN024FV7_at; Start 597; Stop 621
tgatggacaggcattggcaatttct

SEQ ID NO: 222304 - DNA, 25 bp, Artificial
  probe
  misc_feature (1)..(25): SEQ ID NO: 3982; WAN024FV7_at; Start 200; Stop 224
acttggatagagagaaacagtattc

SEQ ID NO: 222305 - DNA, 25 bp, Artificial
  probe
  misc_feature (1)..(25): SEQ ID NO: 3982; WAN024FV7_at; Start 584; Stop 608
taaaaccaggtcttgatggacaggc

SEQ ID NO: 222306 - DNA, 25 bp, Artificial
  probe
  misc_feature (1)..(25): SEQ ID NO: 3982; WAN024FV7_at; Start 826; Stop 850
cgcttatttgaagagtttgacgaag

SEQ ID NO: 222307 - DNA, 25 bp, Artificial
  probe
  misc_feature (1)..(25): SEQ ID NO: 3982; WAN024FV7_at; Start 65; Stop 89
caagagtgctttttagaacgatagc

SEQ ID NO: 222308 - DNA, 25 bp, Artificial
  probe
  misc_feature (1)..(25): SEQ ID NO: 3982; WAN024FV7_at; Start 384; Stop 408
ccatcagtatgtgacttttccagac

SEQ ID NO: 222309 - DNA, 25 bp, Artificial
  probe
  misc_feature (1)..(25): SEQ ID NO: 3982; WAN024FV7_at; Start 772; Stop 796
tactggagtaaggtagttcctttca

SEQ ID NO: 222310 - DNA, 25 bp, Artificial
  probe
  misc_feature (1)..(25): SEQ ID NO: 3982; WAN024FV7_at; Start 48; Stop 72
taaagacttaattcagtcaagagtg

SEQ ID NO: 222311 - DNA, 25 bp, Artificial
  probe
  misc_feature (1)..(25): SEQ ID NO: 3982; WAN024FV7_at; Start 756; Stop 780
cgaagaatttcctgaatactggagt

SEQ ID NO: 222312 - DNA, 25 bp, Artificial
  probe
  misc_feature (1)..(25): SEQ ID NO: 3982; WAN024FV7_at; Start 512; Stop 536
ggacgatattttgttcgagttcaga

SEQ ID NO: 222313 - DNA, 25 bp, Artificial
  probe
  misc_feature (1)..(25): SEQ ID NO: 3982; WAN024FV7_at; Start 626; Stop 650
ggttcattactgctagctactctaa

SEQ ID NO: 222314 - DNA, 25 bp, Artificial
  probe
  misc_feature (1)..(25): SEQ ID NO: 3982; WAN024FV7_at; Start 127; Stop 151
gagatagtccgtctaaataatagta

SEQ ID NO: 222315 - DNA, 25 bp, Artificial
  probe
  misc_feature (1)..(25): SEQ ID NO: 3982; WAN024FV7_at; Start 464; Stop 488
tattgcgcttggaattactgaccga

SEQ ID NO: 222316 - DNA, 25 bp, Artificial
  probe
  misc_feature (1)..(25): SEQ ID NO: 2590; WAN024FV8_at; Start 638; Stop 662
tgcaatcttattggtcaaaagaagt

SEQ ID NO: 222317 - DNA, 25 bp, Artificial
  probe
  misc_feature (1)..(25): SEQ ID NO: 2590; WAN024FV8_at; Start 732; Stop 756
gcagcttgtacccacctatacgaac

SEQ ID NO: 222318 - DNA, 25 bp, Artificial
  probe
  misc_feature (1)..(25): SEQ ID NO: 2590; WAN024FV8_at; Start 245; Stop 269
ttcaaggtatggagaatgctccaga

SEQ ID NO: 222319 - DNA, 25 bp, Artificial
  probe
  misc_feature (1)..(25): SEQ ID NO: 2590; WAN024FV8_at; Start 571; Stop 595
tcctcttccaactggatgattgctt

SEQ ID NO: 222320 - DNA, 25 bp, Artificial
  probe
  misc_feature (1)..(25): SEQ ID NO: 2590; WAN024FV8_at; Start 479; Stop 503
cagtgtattgtacaggaattactac

SEQ ID NO: 222321 - DNA, 25 bp, Artificial
  probe
  misc_feature (1)..(25): SEQ ID NO: 2590; WAN024FV8_at; Start 574; Stop 598
tcttccaactggatgattgcttctg

SEQ ID NO: 222322 - DNA, 25 bp, Artificial
  probe
  misc_feature (1)..(25): SEQ ID NO: 2590; WAN024FV8_at; Start 644; Stop 668
cttattggtcaaaagaagttatagc

SEQ ID NO: 222323 - DNA, 25 bp, Artificial
  probe
  misc_feature (1)..(25): SEQ ID NO: 2590; WAN024FV8_at; Start 310; Stop 334
cctgaatatgtcattacggttattt

SEQ ID NO: 222324 - DNA, 25 bp, Artificial
  probe
  misc_feature (1)..(25): SEQ ID NO: 2590; WAN024FV8_at; Start 822; Stop 846
gtgtcaaatttcagattttcataaa

SEQ ID NO: 222325 - DNA, 25 bp, Artificial
  probe
  misc_feature (1)..(25): SEQ ID NO: 2590; WAN024FV8_at; Start 578; Stop 602
ccaactggatgattgcttctgttcc

SEQ ID NO: 222326 - DNA, 25 bp, Artificial
  probe
  misc_feature (1)..(25): SEQ ID NO: 2590; WAN024FV8_at; Start 414; Stop 438
tcatttttctgatatccttcgggta

SEQ ID NO: 222327 - DNA, 25 bp, Artificial
  probe
  misc_feature (1)..(25): SEQ ID NO: 2590; WAN024FV8_at; Start 483; Stop 507
gtattgtacaggaattactaccata

SEQ ID NO: 222328 - DNA, 25 bp, Artificial
  probe
  misc_feature (1)..(25): SEQ ID NO: 2590; WAN024FV8_at; Start 412; Stop 436
gctcatttttctgatatccttcggg

SEQ ID NO: 222329 - DNA, 25 bp, Artificial
  probe
  misc_feature (1)..(25): SEQ ID NO: 2590; WAN024FV8_at; Start 658; Stop 682
gaagttatagcaattcattattatc

SEQ ID NO: 222330 - DNA, 25 bp, Artificial
  probe
  misc_feature (1)..(25): SEQ ID NO: 2590; WAN024FV8_at; Start 679; Stop 703
tatctatttcatattctttttacga

SEQ ID NO: 222331 - DNA, 25 bp, Artificial
  probe
  misc_feature (1)..(25): SEQ ID NO: 2590; WAN024FV8_at; Start 132; Stop 156
tgaagatagggcctacagaatacta

SEQ ID NO: 222332 - DNA, 25 bp, Artificial
  probe
  misc_feature (1)..(25): SEQ ID NO: 2590; WAN024FV8_at; Start 726; Stop 750
gttgtggcagcttgtacccacctat

SEQ ID NO: 222333 - DNA, 25 bp, Artificial
  probe
  misc_feature (1)..(25): SEQ ID NO: 2590; WAN024FV8_at; Start 724; Stop 748
gagttgtggcagcttgtacccacct

SEQ ID NO: 222334 - DNA, 25 bp, Artificial
  probe
  misc_feature (1)..(25): SEQ ID NO: 2590; WAN024FV8_at; Start 870; Stop 894
tgataaatcagagagtttgtacagt

SEQ ID NO: 222335 - DNA, 25 bp, Artificial
  probe
  misc_feature (1)..(25): SEQ ID NO: 2590; WAN024FV8_at; Start 127; Stop 151
caacttgaagatagggcctacagaa

SEQ ID NO: 222336 - DNA, 25 bp, Artificial
  probe
  misc_feature (1)..(25): SEQ ID NO: 2590; WAN024FV8_at; Start 867; Stop 891
caatgataaatcagagagtttgtac

SEQ ID NO: 222337 - DNA, 25 bp, Artificial
  probe
  misc_feature (1)..(25): SEQ ID NO: 2590; WAN024FV8_at; Start 814; Stop 838
cagcaattgtgtcaaatttcagatt

SEQ ID NO: 222338 - DNA, 25 bp, Artificial
  probe
  misc_feature (1)..(25): SEQ ID NO: 2590; WAN024FV8_at; Start 272; Stop 296
tggtgaaatcatgttatagatcact

SEQ ID NO: 222339 - DNA, 25 bp, Artificial
  probe
  misc_feature (1)..(25): SEQ ID NO: 2590; WAN024FV8_at; Start 817; Stop 841
caattgtgtcaaatttcagattttc

SEQ ID NO: 222340 - DNA, 25 bp, Artificial
  probe
  misc_feature (1)..(25): SEQ ID NO: 2590; WAN024FV8_at; Start 481; Stop 505
gtgtattgtacaggaattactacca

SEQ ID NO: 222341 - DNA, 25 bp, Artificial
  probe
  misc_feature (1)..(25): SEQ ID NO: 2590; WAN024FV8_at; Start 728; Stop 752
tgtggcagcttgtacccacctatac

SEQ ID NO: 222342 - DNA, 25 bp, Artificial
  probe
  misc_feature (1)..(25): SEQ ID NO: 2590; WAN024FV8_at; Start 215; Stop 239
aagttcccaagcaaatctggatttg

SEQ ID NO: 222343 - DNA, 25 bp, Artificial
  probe
  misc_feature (1)..(25): SEQ ID NO: 2590; WAN024FV8_at; Start 317; Stop 341
atgtcattacggttatttcttcaga

SEQ ID NO: 222344 - DNA, 25 bp, Artificial
  probe
  misc_feature (1)..(25): SEQ ID NO: 2590; WAN024FV8_at; Start 722; Stop 746
ctgagttgtggcagcttgtacccac

SEQ ID NO: 222345 - DNA, 25 bp, Artificial
  probe
  misc_feature (1)..(25): SEQ ID NO: 2590; WAN024FV8_at; Start 304; Stop 328
caatttcctgaatatgtcattacgg

SEQ ID NO: 222346 - DNA, 25 bp, Artificial
  probe
  misc_feature (1)..(25): SEQ ID NO: 2590; WAN024FV8_at; Start 735; Stop 759
gcttgtacccacctatacgaacgca

SEQ ID NO: 222347 - DNA, 25 bp, Artificial
  probe
  misc_feature (1)..(25): SEQ ID NO: 2590; WAN024FV8_at; Start 134; Stop 158
aagatagggcctacagaatactaaa

SEQ ID NO: 222348 - DNA, 25 bp, Artificial
  probe
  misc_feature (1)..(25): SEQ ID NO: 2590; WAN024FV8_at; Start 136; Stop 160
gatagggcctacagaatactaaaaa

SEQ ID NO: 222349 - DNA, 25 bp, Artificial
  probe
  misc_feature (1)..(25): SEQ ID NO: 2590; WAN024FV8_at; Start 730; Stop 754
tggcagcttgtacccacctatacga

SEQ ID NO: 222350 - DNA, 25 bp, Artificial
  probe
  misc_feature (1)..(25): SEQ ID NO: 6728; WAN024FV9_at; Start 224; Stop 248
caggtattgaaaactgtacaggaga

SEQ ID NO: 222351 - DNA, 25 bp, Artificial
  probe
  misc_feature (1)..(25): SEQ ID NO: 6728; WAN024FV9_at; Start 979; Stop 1003
gctaagtataatatgccgttgatgc

SEQ ID NO: 222352 - DNA, 25 bp, Artificial
  probe
  misc_feature (1)..(25): SEQ ID NO: 6728; WAN024FV9_at; Start 441; Stop 465
cacagaacttttaccagatgtaata

SEQ ID NO: 222353 - DNA, 25 bp, Artificial
  probe
  misc_feature (1)..(25): SEQ ID NO: 6728; WAN024FV9_at; Start 949; Stop 973
cctttttctaaacgcttgatctgcg

SEQ ID NO: 222354 - DNA, 25 bp, Artificial
  probe
  misc_feature (1)..(25): SEQ ID NO: 6728; WAN024FV9_at; Start 250; Stop 274
tatattgtctttgttgattcggatg

SEQ ID NO: 222355 - DNA, 25 bp, Artificial
  probe
  misc_feature (1)..(25): SEQ ID NO: 6728; WAN024FV9_at; Start 96; Stop 120
tgaacttatcttggtaaatgatggt

SEQ ID NO: 222356 - DNA, 25 bp, Artificial
  probe
  misc_feature (1)..(25): SEQ ID NO: 6728; WAN024FV9_at; Start 18; Stop 42
agttgttccagtttataatgtagag

SEQ ID NO: 222357 - DNA, 25 bp, Artificial
  probe
  misc_feature (1)..(25): SEQ ID NO: 6728; WAN024FV9_at; Start 269; Stop 293
cggatgattatgtctcatatgagat

SEQ ID NO: 222358 - DNA, 25 bp, Artificial
  probe
  misc_feature (1)..(25): SEQ ID NO: 6728; WAN024FV9_at; Start 376; Stop 400
ggaaatattatagaaccacttgatc

SEQ ID NO: 222359 - DNA, 25 bp, Artificial
  probe
  misc_feature (1)..(25): SEQ ID NO: 6728; WAN024FV9_at; Start 199; Stop 223
gaaggtcttggttttgcacgtaaca

SEQ ID NO: 222360 - DNA, 25 bp, Artificial
  probe
  misc_feature (1)..(25): SEQ ID NO: 6728; WAN024FV9_at; Start 185; Stop 209
tacataaaaccaatgaaggtcttgg

SEQ ID NO: 222361 - DNA, 25 bp, Artificial
  probe
  misc_feature (1)..(25): SEQ ID NO: 6728; WAN024FV9_at; Start 328; Stop 352
aatgcagacgtgatttatagtgaaa

SEQ ID NO: 222362 - DNA, 25 bp, Artificial
  probe
  misc_feature (1)..(25): SEQ ID NO: 6728; WAN024FV9_at; Start 457; Stop 481
gatgtaatatcttcaccaccagaat

SEQ ID NO: 222363 - DNA, 25 bp, Artificial
  probe
  misc_feature (1)..(25): SEQ ID NO: 6728; WAN024FV9_at; Start 397; Stop 421
gatcagagcctagattccatttttt

SEQ ID NO: 222364 - DNA, 25 bp, Artificial
  probe
  misc_feature (1)..(25): SEQ ID NO: 6728; WAN024FV9_at; Start 494; Stop 518
gaaagataggtgtttcagtgtggaa

SEQ ID NO: 222365 - DNA, 25 bp, Artificial
  probe
  misc_feature (1)..(25): SEQ ID NO: 6728; WAN024FV9_at; Start 703; Stop 727
gaagatcggtttgagttgaataaaa

SEQ ID NO: 222366 - DNA, 25 bp, Artificial
  probe
  misc_feature (1)..(25): SEQ ID NO: 6728; WAN024FV9_at; Start 166; Stop 190
gatcatcggataaaagtaatacata

SEQ ID NO: 222367 - DNA, 25 bp, Artificial
  probe
  misc_feature (1)..(25): SEQ ID NO: 6728; WAN024FV9_at; Start 4; Stop 28
cctacatttagtgtagttgttccag

SEQ ID NO: 222368 - DNA, 25 bp, Artificial
  probe
  misc_feature (1)..(25): SEQ ID NO: 6728; WAN024FV9_at; Start 49; Stop 73
ttatcgcaatgtttaaatgctcttg

SEQ ID NO: 222369 - DNA, 25 bp, Artificial
  probe
  misc_feature (1)..(25): SEQ ID NO: 6728; WAN024FV9_at; Start 854; Stop 878
attctagaattcataaacgtttgca

SEQ ID NO: 222370 - DNA, 25 bp, Artificial
  probe
  misc_feature (1)..(25): SEQ ID NO: 6728; WAN024FV9_at; Start 824; Stop 848
tatgtatctttcaggaatccttata

SEQ ID NO: 222371 - DNA, 25 bp, Artificial
  probe
  misc_feature (1)..(25): SEQ ID NO: 6728; WAN024FV9_at; Start 895; Stop 919
tgtaaggacccaatatcaaaatcag

SEQ ID NO: 222372 - DNA, 25 bp, Artificial
  probe
  misc_feature (1)..(25): SEQ ID NO: 6728; WAN024FV9_at; Start 288; Stop 312
tgagatgcttgaaatttatgataca

SEQ ID NO: 222373 - DNA, 25 bp, Artificial
  probe
  misc_feature (1)..(25): SEQ ID NO: 6728; WAN024FV9_at; Start 386; Stop 410
tagaaccacttgatcagagcctaga

SEQ ID NO: 222374 - DNA, 25 bp, Artificial
  probe
  misc_feature (1)..(25): SEQ ID NO: 6728; WAN024FV9_at; Start 313; Stop 337
tacttacaacgttttaatgcagacg

SEQ ID NO: 222375 - DNA, 25 bp, Artificial
  probe
  misc_feature (1)..(25): SEQ ID NO: 6728; WAN024FV9_at; Start 473; Stop 497
caccagaatttattggagatggaaa

SEQ ID NO: 222376 - DNA, 25 bp, Artificial
  probe
  misc_feature (1)..(25): SEQ ID NO: 6728; WAN024FV9_at; Start 208; Stop 232
ggttttgcacgtaacacaggtattg

SEQ ID NO: 222377 - DNA, 25 bp, Artificial
  probe
  misc_feature (1)..(25): SEQ ID NO: 6728; WAN024FV9_at; Start 992; Stop 1016
tgccgttgatgcttttagttttaac

SEQ ID NO: 222378 - DNA, 25 bp, Artificial
  probe
  misc_feature (1)..(25): SEQ ID NO: 6728; WAN024FV9_at; Start 133; Stop 157
tctggaagtctttgtgaagaatggg

SEQ ID NO: 222379 - DNA, 25 bp, Artificial
  probe
  misc_feature (1)..(25): SEQ ID NO: 6728; WAN024FV9_at; Start 117; Stop 141
tggttctactgacacatctggaagt

SEQ ID NO: 222380 - DNA, 25 bp, Artificial
  probe
  misc_feature (1)..(25): SEQ ID NO: 6728; WAN024FV9_at; Start 553; Stop 577
gggctattatttcattcagaaagag

SEQ ID NO: 222381 - DNA, 25 bp, Artificial
  probe
  misc_feature (1)..(25): SEQ ID NO: 6728; WAN024FV9_at; Start 62; Stop 86
taaatgctcttgtaaatcagtcttt

SEQ ID NO: 222382 - DNA, 25 bp, Artificial
  probe
  misc_feature (1)..(25): SEQ ID NO: 6728; WAN024FV9_at; Start 920; Stop 944
tattacgtcattatccaatccgtcg

SEQ ID NO: 222383 - DNA, 25 bp, Artificial
  probe
  misc_feature (1)..(25): SEQ ID NO: 6728; WAN024FV9_at; Start 36; Stop 60
tgtagagaattatttatcgcaatgt

SEQ ID NO: 222384 - DNA, 25 bp, Artificial
  probe
  misc_feature (1)..(25): SEQ ID NO: 1699; WAN024FVA_at; Start 232; Stop 256
tatgcaagcggagagtatgtgttct

SEQ ID NO: 222385 - DNA, 25 bp, Artificial
  probe
  misc_feature (1)..(25): SEQ ID NO: 1699; WAN024FVA_at; Start 145; Stop 169
cttgaacagtatggtgataatcccc

SEQ ID NO: 222386 - DNA, 25 bp, Artificial
  probe
  misc_feature (1)..(25): SEQ ID NO: 1699; WAN024FVA_at; Start 374; Stop 398
acggtggtaatgataatagttcagc

SEQ ID NO: 222387 - DNA, 25 bp, Artificial
  probe
  misc_feature (1)..(25): SEQ ID NO: 1699; WAN024FVA_at; Start 219; Stop 243
cgtaggattatcgtatgcaagcgga

SEQ ID NO: 222388 - DNA, 25 bp, Artificial
  probe
  misc_feature (1)..(25): SEQ ID NO: 1699; WAN024FVA_at; Start 191; Stop 215
tgaacatgggagtatctgctgccag

SEQ ID NO: 222389 - DNA, 25 bp, Artificial
  probe
  misc_feature (1)..(25): SEQ ID NO: 1699; WAN024FVA_at; Start 609; Stop 633
tactattcagaatgttaatccacag

SEQ ID NO: 222390 - DNA, 25 bp, Artificial
  probe
  misc_feature (1)..(25): SEQ ID NO: 1699; WAN024FVA_at; Start 649; Stop 673
tatgtaagtaatatcgaaaactccc

SEQ ID NO: 222391 - DNA, 25 bp, Artificial
  probe
  misc_feature (1)..(25): SEQ ID NO: 1699; WAN024FVA_at; Start 342; Stop 366
ttgttggcataaagagcctagtaca

SEQ ID NO: 222392 - DNA, 25 bp, Artificial
  probe
  misc_feature (1)..(25): SEQ ID NO: 1699; WAN024FVA_at; Start 357; Stop 381
gcctagtacaacacaatacggtggt

SEQ ID NO: 222393 - DNA, 25 bp, Artificial
  probe
  misc_feature (1)..(25): SEQ ID NO: 1699; WAN024FVA_at; Start 118; Stop 142
gggtctaacgattctacatcaaaaa

SEQ ID NO: 222394 - DNA, 25 bp, Artificial
  probe
  misc_feature (1)..(25): SEQ ID NO: 1699; WAN024FVA_at; Start 104; Stop 128
ttttggtgaatgatgggtctaacga

SEQ ID NO: 222395 - DNA, 25 bp, Artificial
  probe
  misc_feature (1)..(25): SEQ ID NO: 1699; WAN024FVA_at; Start 176; Stop 200
tgattttccatcaagtgaacatggg

SEQ ID NO: 222396 - DNA, 25 bp, Artificial
  probe
  misc_feature (1)..(25): SEQ ID NO: 1699; WAN024FVA_at; Start 18; Stop 42
cataattccaatatacaatgctgaa

SEQ ID NO: 222397 - DNA, 25 bp, Artificial
  probe
  misc_feature (1)..(25): SEQ ID NO: 1699; WAN024FVA_at; Start 199; Stop 223
ggagtatctgctgccagaaacgtag

SEQ ID NO: 222398 - DNA, 25 bp, Artificial
  probe
  misc_feature (1)..(25): SEQ ID NO: 1699; WAN024FVA_at; Start 826; Stop 850
gaaaaatgggataatattgcacaac

SEQ ID NO: 222399 - DNA, 25 bp, Artificial
  probe
  misc_feature (1)..(25): SEQ ID NO: 1699; WAN024FVA_at; Start 624; Stop 648
taatccacagtcattatctaagcga

SEQ ID NO: 222400 - DNA, 25 bp, Artificial
  probe
  misc_feature (1)..(25): SEQ ID NO: 1699; WAN024FVA_at; Start 388; Stop 412
aatagttcagcttcatttattgcac

SEQ ID NO: 222401 - DNA, 25 bp, Artificial
  probe
  misc_feature (1)..(25): SEQ ID NO: 1699; WAN024FVA_at; Start 868; Stop 892
ccatttttagatgagaaagtgagca

SEQ ID NO: 222402 - DNA, 25 bp, Artificial
  probe
  misc_feature (1)..(25): SEQ ID NO: 1699; WAN024FVA_at; Start 160; Stop 184
gataatccccaagtgatgattttcc

SEQ ID NO: 222403 - DNA, 25 bp, Artificial
  probe
  misc_feature (1)..(25): SEQ ID NO: 1699; WAN024FVA_at; Start 408; Stop 432
tgcacgaacaaaagaggaaatagga

SEQ ID NO: 222404 - DNA, 25 bp, Artificial
  probe
  misc_feature (1)..(25): SEQ ID NO: 1699; WAN024FVA_at; Start 283; Stop 307
gaaggtatgctatctaaaatgtatc

SEQ ID NO: 222405 - DNA, 25 bp, Artificial
  probe
  misc_feature (1)..(25): SEQ ID NO: 1699; WAN024FVA_at; Start 480; Stop 504
tcttcgtagaagaattgaggaaaac

SEQ ID NO: 222406 - DNA, 25 bp, Artificial
  probe
  misc_feature (1)..(25): SEQ ID NO: 1699; WAN024FVA_at; Start 882; Stop 906
gaaagtgagcaaagaaaagaagcct

SEQ ID NO: 222407 - DNA, 25 bp, Artificial
  probe
  misc_feature (1)..(25): SEQ ID NO: 1699; WAN024FVA_at; Start 78; Stop 102
gcaaaatttagaatctcttgaagtg

SEQ ID NO: 222408 - DNA, 25 bp, Artificial
  probe
  misc_feature (1)..(25): SEQ ID NO: 1699; WAN024FVA_at; Start 677; Stop 701
taatgcagaatcagttatgggatca

SEQ ID NO: 222409 - DNA, 25 bp, Artificial
  probe
  misc_feature (1)..(25): SEQ ID NO: 1699; WAN024FVA_at; Start 536; Stop 560
gagaagatatgtcattcgtttgcca

SEQ ID NO: 222410 - DNA, 25 bp, Artificial
  probe
  misc_feature (1)..(25): SEQ ID NO: 1699; WAN024FVA_at; Start 984; Stop 1008
taaagaatggtggaagaaaaagcga

SEQ ID NO: 222411 - DNA, 25 bp, Artificial
  probe
  misc_feature (1)..(25): SEQ ID NO: 1699; WAN024FVA_at; Start 55; Stop 79
aattgtgttgatagtgccttaaagc

SEQ ID NO: 222412 - DNA, 25 bp, Artificial
  probe
  misc_feature (1)..(25): SEQ ID NO: 1699; WAN024FVA_at; Start 463; Stop 487
gcttgtgctaagttatttcttcgta

SEQ ID NO: 222413 - DNA, 25 bp, Artificial
  probe
  misc_feature (1)..(25): SEQ ID NO: 1699; WAN024FVA_at; Start 904; Stop 928
cctaaaaatatgaatgagatggtca

SEQ ID NO: 222414 - DNA, 25 bp, Artificial
  probe
  misc_feature (1)..(25): SEQ ID NO: 1699; WAN024FVA_at; Start 567; Stop 591
gatggtctcaaggagtattgcagta

SEQ ID NO: 222415 - DNA, 25 bp, Artificial
  probe
  misc_feature (1)..(25): SEQ ID NO: 1699; WAN024FVA_at; Start 552; Stop 576
cgtttgccaatacttgatggtctca

SEQ ID NO: 222416 - DNA, 25 bp, Artificial
  probe
  misc_feature (1)..(25): SEQ ID NO: 1699; WAN024FVA_at; Start 502; Stop 526
aacaatattgctttttcgactgaaa

SEQ ID NO: 222417 - DNA, 25 bp, Artificial
  probe
  misc_feature (1)..(25): SEQ ID NO: 1699; WAN024FVA_at; Start 662; Stop 686
tcgaaaactccctattaatgcagaa

SEQ ID NO: 222418 - DNA, 25 bp, Artificial
  probe
  misc_feature (1)..(25): SEQ ID NO: 1779; WAN024FVB_at; Start 307; Stop 331
gatatgctgcaaactctatataatg

SEQ ID NO: 222419 - DNA, 25 bp, Artificial
  probe
  misc_feature (1)..(25): SEQ ID NO: 1779; WAN024FVB_at; Start 295; Stop 319
tatgtttctctagatatgctgcaaa

SEQ ID NO: 222420 - DNA, 25 bp, Artificial
  probe
  misc_feature (1)..(25): SEQ ID NO: 1779; WAN024FVB_at; Start 86; Stop 110
cattgataaatcaaacttataggga

SEQ ID NO: 222421 - DNA, 25 bp, Artificial
  probe
  misc_feature (1)..(25): SEQ ID NO: 1779; WAN024FVB_at; Start 499; Stop 523
tatccgaatgatgggaaagttggag

SEQ ID NO: 222422 - DNA, 25 bp, Artificial
  probe
  misc_feature (1)..(25): SEQ ID NO: 1779; WAN024FVB_at; Start 38; Stop 62
ttgtaccagtttataatgtggaacg

SEQ ID NO: 222423 - DNA, 25 bp, Artificial
  probe
  misc_feature (1)..(25): SEQ ID NO: 1779; WAN024FVB_at; Start 507; Stop 531
tgatgggaaagttggagtgtcggca

SEQ ID NO: 222424 - DNA, 25 bp, Artificial
  probe
  misc_feature (1)..(25): SEQ ID NO: 1779; WAN024FVB_at; Start 172; Stop 196
tgggcaaaaaaagatgaaagaattc

SEQ ID NO: 222425 - DNA, 25 bp, Artificial
  probe
  misc_feature (1)..(25): SEQ ID NO: 1779; WAN024FVB_at; Start 120; Stop 144
aattttagtaaacgatggatcaacg

SEQ ID NO: 222426 - DNA, 25 bp, Artificial
  probe
  misc_feature (1)..(25): SEQ ID NO: 1779; WAN024FVB_at; Start 330; Stop 354
tgctgttcaagaatatgatgtcgaa

SEQ ID NO: 222427 - DNA, 25 bp, Artificial
  probe
  misc_feature (1)..(25): SEQ ID NO: 1779; WAN024FVB_at; Start 43; Stop 67
ccagtttataatgtggaacgatatt

SEQ ID NO: 222428 - DNA, 25 bp, Artificial
  probe
  misc_feature (1)..(25): SEQ ID NO: 1779; WAN024FVB_at; Start 128; Stop 152
taaacgatggatcaacggattcttc

SEQ ID NO: 222429 - DNA, 25 bp, Artificial
  probe
  misc_feature (1)..(25): SEQ ID NO: 1779; WAN024FVB_at; Start 196; Stop 220
catgtagttcacaaaaaaaatgagg

SEQ ID NO: 222430 - DNA, 25 bp, Artificial
  probe
  misc_feature (1)..(25): SEQ ID NO: 1779; WAN024FVB_at; Start 286; Stop 310
tcagatgactatgtttctctagata

SEQ ID NO: 222431 - DNA, 25 bp, Artificial
  probe
  misc_feature (1)..(25): SEQ ID NO: 1779; WAN024FVB_at; Start 359; Stop 383
tatacagtgcgggatattatcgttc

SEQ ID NO: 222432 - DNA, 25 bp, Artificial
  probe
  misc_feature (1)..(25): SEQ ID NO: 1779; WAN024FVB_at; Start 521; Stop 545
gagtgtcggcatggaaggttctcta

SEQ ID NO: 222433 - DNA, 25 bp, Artificial
  probe
  misc_feature (1)..(25): SEQ ID NO: 1779; WAN024FVB_at; Start 253; Stop 277
cacgcaaaggggaaatacataacct

SEQ ID NO: 222434 - DNA, 25 bp, Artificial
  probe
  misc_feature (1)..(25): SEQ ID NO: 1779; WAN024FVB_at; Start 2; Stop 26
tgattaaagatatgtcctgtccaga

SEQ ID NO: 222435 - DNA, 25 bp, Artificial
  probe
  misc_feature (1)..(25): SEQ ID NO: 1779; WAN024FVB_at; Start 73; Stop 97
cagtgtatggattcattgataaatc

SEQ ID NO: 222436 - DNA, 25 bp, Artificial
  probe
  misc_feature (1)..(25): SEQ ID NO: 1779; WAN024FVB_at; Start 10; Stop 34
gatatgtcctgtccagaaattagcg

SEQ ID NO: 222437 - DNA, 25 bp, Artificial
  probe
  misc_feature (1)..(25): SEQ ID NO: 1779; WAN024FVB_at; Start 345; Stop 369
tgatgtcgaagttgtatacagtgcg

SEQ ID NO: 222438 - DNA, 25 bp, Artificial
  probe
  misc_feature (1)..(25): SEQ ID NO: 1779; WAN024FVB_at; Start 131; Stop 155
acgatggatcaacggattcttctgg

SEQ ID NO: 222439 - DNA, 25 bp, Artificial
  probe
  misc_feature (1)..(25): SEQ ID NO: 1779; WAN024FVB_at; Start 270; Stop 294
cataacctttgtagattcagatgac

SEQ ID NO: 222440 - DNA, 25 bp, Artificial
  probe
  misc_feature (1)..(25): SEQ ID NO: 1779; WAN024FVB_at; Start 367; Stop 391
gcgggatattatcgttcctttagta

SEQ ID NO: 222441 - DNA, 25 bp, Artificial
  probe
  misc_feature (1)..(25): SEQ ID NO: 1779; WAN024FVB_at; Start 351; Stop 375
cgaagttgtatacagtgcgggatat

SEQ ID NO: 222442 - DNA, 25 bp, Artificial
  probe
  misc_feature (1)..(25): SEQ ID NO: 1779; WAN024FVB_at; Start 316; Stop 340
caaactctatataatgctgttcaag

SEQ ID NO: 222443 - DNA, 25 bp, Artificial
  probe
  misc_feature (1)..(25): SEQ ID NO: 1779; WAN024FVB_at; Start 222; Stop 246
gcttggcttcgctcgtaatacaggg

SEQ ID NO: 222444 - DNA, 25 bp, Artificial
  probe
  misc_feature (1)..(25): SEQ ID NO: 1779; WAN024FVB_at; Start 435; Stop 459
acttttcgaaggaggagatgttgcc

SEQ ID NO: 222445 - DNA, 25 bp, Artificial
  probe
  misc_feature (1)..(25): SEQ ID NO: 1779; WAN024FVB_at; Start 14; Stop 38
tgtcctgtccagaaattagcgtaat

SEQ ID NO: 222446 - DNA, 25 bp, Artificial
  probe
  misc_feature (1)..(25): SEQ ID NO: 1779; WAN024FVB_at; Start 187; Stop 211
gaaagaattcatgtagttcacaaaa

SEQ ID NO: 222447 - DNA, 25 bp, Artificial
  probe
  misc_feature (1)..(25): SEQ ID NO: 1779; WAN024FVB_at; Start 22; Stop 46
ccagaaattagcgtaattgtaccag

SEQ ID NO: 222448 - DNA, 25 bp, Artificial
  probe
  misc_feature (1)..(25): SEQ ID NO: 1779; WAN024FVB_at; Start 438; Stop 462
tttcgaaggaggagatgttgcctct

SEQ ID NO: 222449 - DNA, 25 bp, Artificial
  probe
  misc_feature (1)..(25): SEQ ID NO: 1779; WAN024FVB_at; Start 238; Stop 262
aatacaggggttgaacacgcaaagg

SEQ ID NO: 222450 - DNA, 25 bp, Artificial
  probe
  misc_feature (1)..(25): SEQ ID NO: 1779; WAN024FVB_at; Start 430; Stop 454
cctcaacttttcgaaggaggagatg

SEQ ID NO: 222451 - DNA, 25 bp, Artificial
  probe
  misc_feature (1)..(25): SEQ ID NO: 1779; WAN024FVB_at; Start 371; Stop 395
gatattatcgttcctttagtaatgg

SEQ ID NO: 222452 - DNA, 25 bp, Artificial
  probe
  misc_feature (1)..(25): SEQ ID NO: 2361; WAN024FVC_at; Start 367; Stop 391
gctacaactcaatacggtggaaatg

SEQ ID NO: 222453 - DNA, 25 bp, Artificial
  probe
  misc_feature (1)..(25): SEQ ID NO: 2361; WAN024FVC_at; Start 646; Stop 670
tctaagcgctatgtgcagaatattg

SEQ ID NO: 222454 - DNA, 25 bp, Artificial
  probe
  misc_feature (1)..(25): SEQ ID NO: 2361; WAN024FVC_at; Start 630; Stop 654
aaatccacagtcgttatctaagcgc

SEQ ID NO: 222455 - DNA, 25 bp, Artificial
  probe
  misc_feature (1)..(25): SEQ ID NO: 2361; WAN024FVC_at; Start 766; Stop 790
agattttaccttgctaacttgtatg

SEQ ID NO: 222456 - DNA, 25 bp, Artificial
  probe
  misc_feature (1)..(25): SEQ ID NO: 2361; WAN024FVC_at; Start 406; Stop 430
tcatttattgcacgtacaagagaag

SEQ ID NO: 222457 - DNA, 25 bp, Artificial
  probe
  misc_feature (1)..(25): SEQ ID NO: 2361; WAN024FVC_at; Start 774; Stop 798
ccttgctaacttgtatgtaaataat

SEQ ID NO: 222458 - DNA, 25 bp, Artificial
  probe
  misc_feature (1)..(25): SEQ ID NO: 2361; WAN024FVC_at; Start 581; Stop 605
ctaaaagtattggagttattgacgg

SEQ ID NO: 222459 - DNA, 25 bp, Artificial
  probe
  misc_feature (1)..(25): SEQ ID NO: 2361; WAN024FVC_at; Start 510; Stop 534
taatattactttttcgactgagatg

SEQ ID NO: 222460 - DNA, 25 bp, Artificial
  probe
  misc_feature (1)..(25): SEQ ID NO: 2361; WAN024FVC_at; Start 482; Stop 506
tgttttttcgcaaaataattgaaga

SEQ ID NO: 222461 - DNA, 25 bp, Artificial
  probe
  misc_feature (1)..(25): SEQ ID NO: 2361; WAN024FVC_at; Start 687; Stop 711
tcagaaccagttatggaatcaactg

SEQ ID NO: 222462 - DNA, 25 bp, Artificial
  probe
  misc_feature (1)..(25): SEQ ID NO: 2361; WAN024FVC_at; Start 655; Stop 679
tatgtgcagaatattgaaaattccc

SEQ ID NO: 222463 - DNA, 25 bp, Artificial
  probe
  misc_feature (1)..(25): SEQ ID NO: 2361; WAN024FVC_at; Start 639; Stop 663
gtcgttatctaagcgctatgtgcag

SEQ ID NO: 222464 - DNA, 25 bp, Artificial
  probe
  misc_feature (1)..(25): SEQ ID NO: 2361; WAN024FVC_at; Start 850; Stop 874
gctcaacaattaaaaaagtatagat

SEQ ID NO: 222465 - DNA, 25 bp, Artificial
  probe
  misc_feature (1)..(25): SEQ ID NO: 2361; WAN024FVC_at; Start 439; Stop 463
gctcattttgttgatatctttccga

SEQ ID NO: 222466 - DNA, 25 bp, Artificial
  probe
  misc_feature (1)..(25): SEQ ID NO: 2361; WAN024FVC_at; Start 348; Stop 372
ttgttggcataaagaacctgctaca

SEQ ID NO: 222467 - DNA, 25 bp, Artificial
  probe
  misc_feature (1)..(25): SEQ ID NO: 2361; WAN024FVC_at; Start 875; Stop 899
tatttttagatgaaaaagtcagcaa

SEQ ID NO: 222468 - DNA, 25 bp, Artificial
  probe
  misc_feature (1)..(25): SEQ ID NO: 2361; WAN024FVC_at; Start 823; Stop 847
tcatcaaaagaaaaactagaccaaa

SEQ ID NO: 222469 - DNA, 25 bp, Artificial
  probe
  misc_feature (1)..(25): SEQ ID NO: 2361; WAN024FVC_at; Start 994; Stop 1018
gagtggtggaagagaagaaaaatta

SEQ ID NO: 222470 - DNA, 25 bp, Artificial
  probe
  misc_feature (1)..(25): SEQ ID NO: 2361; WAN024FVC_at; Start 289; Stop 313
gatggtatgctttctaaaatgtacc

SEQ ID NO: 222471 - DNA, 25 bp, Artificial
  probe
  misc_feature (1)..(25): SEQ ID NO: 2361; WAN024FVC_at; Start 954; Stop 978
gaaaattccagtgttgatttattct

SEQ ID NO: 222472 - DNA, 25 bp, Artificial
  probe
  misc_feature (1)..(25): SEQ ID NO: 2361; WAN024FVC_at; Start 381; Stop 405
cggtggaaatgagaataagtcaact

SEQ ID NO: 222473 - DNA, 25 bp, Artificial
  probe
  misc_feature (1)..(25): SEQ ID NO: 2361; WAN024FVC_at; Start 888; Stop 912
aaaagtcagcaaagaaaagatgcct

SEQ ID NO: 222474 - DNA, 25 bp, Artificial
  probe
  misc_feature (1)..(25): SEQ ID NO: 2361; WAN024FVC_at; Start 318; Stop 342
tgtaaaaaataataaagttgatctc

SEQ ID NO: 222475 - DNA, 25 bp, Artificial
  probe
  misc_feature (1)..(25): SEQ ID NO: 2361; WAN024FVC_at; Start 558; Stop 582
tgtgtatcaatacttaatggtttct

SEQ ID NO: 222476 - DNA, 25 bp, Artificial
  probe
  misc_feature (1)..(25): SEQ ID NO: 2361; WAN024FVC_at; Start 982; Stop 1006
tattcgtttaaagagtggtggaaga

SEQ ID NO: 222477 - DNA, 25 bp, Artificial
  probe
  misc_feature (1)..(25): SEQ ID NO: 2361; WAN024FVC_at; Start 418; Stop 442
cgtacaagagaagaaataggtgctc

SEQ ID NO: 222478 - DNA, 25 bp, Artificial
  probe
  misc_feature (1)..(25): SEQ ID NO: 2361; WAN024FVC_at; Start 537; Stop 561
actaggtgaagatatgtcatttgtg

SEQ ID NO: 222479 - DNA, 25 bp, Artificial
  probe
  misc_feature (1)..(25): SEQ ID NO: 2361; WAN024FVC_at; Start 462; Stop 486
gagaagtgcttgtgccaaattgttt

SEQ ID NO: 222480 - DNA, 25 bp, Artificial
  probe
  misc_feature (1)..(25): SEQ ID NO: 2361; WAN024FVC_at; Start 469; Stop 493
gcttgtgccaaattgttttttcgca

SEQ ID NO: 222481 - DNA, 25 bp, Artificial
  probe
  misc_feature (1)..(25): SEQ ID NO: 2361; WAN024FVC_at; Start 430; Stop 454
gaaataggtgctcattttgttgata

SEQ ID NO: 222482 - DNA, 25 bp, Artificial
  probe
  misc_feature (1)..(25): SEQ ID NO: 2361; WAN024FVC_at; Start 359; Stop 383
aagaacctgctacaactcaatacgg

SEQ ID NO: 222483 - DNA, 25 bp, Artificial
  probe
  misc_feature (1)..(25): SEQ ID NO: 2361; WAN024FVC_at; Start 832; Stop 856
gaaaaactagaccaaattgctcaac

SEQ ID NO: 222484 - DNA, 25 bp, Artificial
  probe
  misc_feature (1)..(25): SEQ ID NO: 2361; WAN024FVC_at; Start 618; Stop 642
tattcaaaatgtaaatccacagtcg

SEQ ID NO: 222485 - DNA, 25 bp, Artificial
  probe
  misc_feature (1)..(25): SEQ ID NO: 2361; WAN024FVC_at; Start 702; Stop 726
gaatcaactgttggaagtttatcct

SEQ ID NO: 222486 - DNA, 25 bp, Artificial
  probe
  misc_feature (1)..(25): SEQ ID NO: 4026; WAN024FVD_at; Start 27; Stop 51
tagtttgaccatagtcagttatgcc

SEQ ID NO: 222487 - DNA, 25 bp, Artificial
  probe
  misc_feature (1)..(25): SEQ ID NO: 4026; WAN024FVD_at; Start 812; Stop 836
tcatgttagcgatgggagtactcaa

SEQ ID NO: 222488 - DNA, 25 bp, Artificial
  probe
  misc_feature (1)..(25): SEQ ID NO: 4026; WAN024FVD_at; Start 570; Stop 594
tacctttacggtctatgcaatgtgt

SEQ ID NO: 222489 - DNA, 25 bp, Artificial
  probe
  misc_feature (1)..(25): SEQ ID NO: 4026; WAN024FVD_at; Start 668; Stop 692
ttcatttggcaattgggacacgaaa

SEQ ID NO: 222490 - DNA, 25 bp, Artificial
  probe
  misc_feature (1)..(25): SEQ ID NO: 4026; WAN024FVD_at; Start 1185; Stop 1209
taccgactatggtatgattggagtc

SEQ ID NO: 222491 - DNA, 25 bp, Artificial
  probe
  misc_feature (1)..(25): SEQ ID NO: 4026; WAN024FVD_at; Start 618; Stop 642
gaaattgcaggccacagcagtgctt

SEQ ID NO: 222492 - DNA, 25 bp, Artificial
  probe
  misc_feature (1)..(25): SEQ ID NO: 4026; WAN024FVD_at; Start 723; Stop 747
tgtttattactttatgcgggagcaa

SEQ ID NO: 222493 - DNA, 25 bp, Artificial
  probe
  misc_feature (1)..(25): SEQ ID NO: 4026; WAN024FVD_at; Start 482; Stop 506
aacggctcttgtatcgtttgcagac

SEQ ID NO: 222494 - DNA, 25 bp, Artificial
  probe
  misc_feature (1)..(25): SEQ ID NO: 4026; WAN024FVD_at; Start 399; Stop 423
agaggtttatatcaagcggttacgc

SEQ ID NO: 222495 - DNA, 25 bp, Artificial
  probe
  misc_feature (1)..(25): SEQ ID NO: 4026; WAN024FVD_at; Start 1319; Stop 1343
tctttatgccaagaagcagcttttc

SEQ ID NO: 222496 - DNA, 25 bp, Artificial
  probe
  misc_feature (1)..(25): SEQ ID NO: 4026; WAN024FVD_at; Start 1086; Stop 1110
tgatagtaatagttatgcccacaat

SEQ ID NO: 222497 - DNA, 25 bp, Artificial
  probe
  misc_feature (1)..(25): SEQ ID NO: 4026; WAN024FVD_at; Start 927; Stop 951
tctggctcgaggttttctatttaac

SEQ ID NO: 222498 - DNA, 25 bp, Artificial
  probe
  misc_feature (1)..(25): SEQ ID NO: 4026; WAN024FVD_at; Start 497; Stop 521
gtttgcagacttcctactatgccta

SEQ ID NO: 222499 - DNA, 25 bp, Artificial
  probe
  misc_feature (1)..(25): SEQ ID NO: 4026; WAN024FVD_at; Start 1212; Stop 1236
tctgcttagtttcttactcggcgta

SEQ ID NO: 222500 - DNA, 25 bp, Artificial
  probe
  misc_feature (1)..(25): SEQ ID NO: 4026; WAN024FVD_at; Start 46; Stop 70
tatgccttgacgctagtaagtggaa

SEQ ID NO: 222501 - DNA, 25 bp, Artificial
  probe
  misc_feature (1)..(25): SEQ ID NO: 4026; WAN024FVD_at; Start 1059; Stop 1083
tacaaccaatagtgtggaactagct

SEQ ID NO: 222502 - DNA, 25 bp, Artificial
  probe
  misc_feature (1)..(25): SEQ ID NO: 4026; WAN024FVD_at; Start 338; Stop 362
tggctcgttacttcatagctaggaa

SEQ ID NO: 222503 - DNA, 25 bp, Artificial
  probe
  misc_feature (1)..(25): SEQ ID NO: 4026; WAN024FVD_at; Start 525; Stop 549
tgcaaattttgaaagtaaactgcct

SEQ ID NO: 222504 - DNA, 25 bp, Artificial
  probe
  misc_feature (1)..(25): SEQ ID NO: 4026; WAN024FVD_at; Start 1025; Stop 1049
tgggagccattttcggaggaaaagc

SEQ ID NO: 222505 - DNA, 25 bp, Artificial
  probe
  misc_feature (1)..(25): SEQ ID NO: 4026; WAN024FVD_at; Start 242; Stop 266
gggatggtgctttggatacctatca

SEQ ID NO: 222506 - DNA, 25 bp, Artificial
  probe
  misc_feature (1)..(25): SEQ ID NO: 4026; WAN024FVD_at; Start 204; Stop 228
tgtatttctggtatcaagaccgacc

SEQ ID NO: 222507 - DNA, 25 bp, Artificial
  probe
  misc_feature (1)..(25): SEQ ID NO: 4026; WAN024FVD_at; Start 221; Stop 245
gaccgaccattgattattttaggga

SEQ ID NO: 222508 - DNA, 25 bp, Artificial
  probe
  misc_feature (1)..(25): SEQ ID NO: 4026; WAN024FVD_at; Start 1042; Stop 1066
ggaaaagcctttgaacatacaacca

SEQ ID NO: 222509 - DNA, 25 bp, Artificial
  probe
  misc_feature (1)..(25): SEQ ID NO: 4026; WAN024FVD_at; Start 468; Stop 492
cattcggttatttgaacggctcttg

SEQ ID NO: 222510 - DNA, 25 bp, Artificial
  probe
  misc_feature (1)..(25): SEQ ID NO: 4026; WAN024FVD_at; Start 1168; Stop 1192
tatatcatggagttgtataccgact

SEQ ID NO: 222511 - DNA, 25 bp, Artificial
  probe
  misc_feature (1)..(25): SEQ ID NO: 4026; WAN024FVD_at; Start 414; Stop 438
gcggttacgctttgtatcactagga

SEQ ID NO: 222512 - DNA, 25 bp, Artificial
  probe
  misc_feature (1)..(25): SEQ ID NO: 4026; WAN024FVD_at; Start 1238; Stop 1262
tatttatagccatgctgcaagtagc

SEQ ID NO: 222513 - DNA, 25 bp, Artificial
  probe
  misc_feature (1)..(25): SEQ ID NO: 4026; WAN024FVD_at; Start 1150; Stop 1174
catggtatcggaagtagttatatca

SEQ ID NO: 222514 - DNA, 25 bp, Artificial
  probe
  misc_feature (1)..(25): SEQ ID NO: 4026; WAN024FVD_at; Start 1254; Stop 1278
gcaagtagcctatcgctcaaggaca

SEQ ID NO: 222515 - DNA, 25 bp, Artificial
  probe
  misc_feature (1)..(25): SEQ ID NO: 4026; WAN024FVD_at; Start 948; Stop 972
taacagtagcctcccttaccgagat

SEQ ID NO: 222516 - DNA, 25 bp, Artificial
  probe
  misc_feature (1)..(25): SEQ ID NO: 4026; WAN024FVD_at; Start 912; Stop 936
gactagttttggtgttctggctcga

SEQ ID NO: 222517 - DNA, 25 bp, Artificial
  probe
  misc_feature (1)..(25): SEQ ID NO: 4026; WAN024FVD_at; Start 634; Stop 658
gcagtgcttgtctcctttattgcag

SEQ ID NO: 222518 - DNA, 25 bp, Artificial
  probe
  misc_feature (1)..(25): SEQ ID NO: 4026; WAN024FVD_at; Start 586; Stop 610
gcaatgtgtatgtatctggcaacca

SEQ ID NO: 222519 - DNA, 25 bp, Artificial
  probe
  misc_feature (1)..(25): SEQ ID NO: 4026; WAN024FVD_at; Start 797; Stop 821
taggttctcctattctcatgttagc

SEQ ID NO: 222520 - DNA, 25 bp, Artificial
  probe
  misc_feature (1)..(25): SEQ ID NO: 7269; WAN024FVE_at; Start 20; Stop 44
cactaatttgtttcattttcattgc

SEQ ID NO: 222521 - DNA, 25 bp, Artificial
  probe
  misc_feature (1)..(25): SEQ ID NO: 7269; WAN024FVE_at; Start 9; Stop 33
taaagttgtatcactaatttgtttc

SEQ ID NO: 222522 - DNA, 25 bp, Artificial
  probe
  misc_feature (1)..(25): SEQ ID NO: 7269; WAN024FVE_at; Start 149; Stop 173
tagccgactttgaagaccttataca

SEQ ID NO: 222523 - DNA, 25 bp, Artificial
  probe
  misc_feature (1)..(25): SEQ ID NO: 7269; WAN024FVE_at; Start 172; Stop 196
catcagaatacttataatttaaagg

SEQ ID NO: 222524 - DNA, 25 bp, Artificial
  probe
  misc_feature (1)..(25): SEQ ID NO: 7269; WAN024FVE_at; Start 199; Stop 223
gctacaccgaggatagaacgattta

SEQ ID NO: 222525 - DNA, 25 bp, Artificial
  probe
  misc_feature (1)..(25): SEQ ID NO: 7269; WAN024FVE_at; Start 210; Stop 234
gatagaacgatttaagtttctgaga

SEQ ID NO: 222526 - DNA, 25 bp, Artificial
  probe
  misc_feature (1)..(25): SEQ ID NO: 7269; WAN024FVE_at; Start 163; Stop 187
gaccttatacatcagaatacttata

SEQ ID NO: 222527 - DNA, 25 bp, Artificial
  probe
  misc_feature (1)..(25): SEQ ID NO: 7269; WAN024FVE_at; Start 206; Stop 230
cgaggatagaacgatttaagtttct

SEQ ID NO: 222528 - DNA, 25 bp, Artificial
  probe
  misc_feature (1)..(25): SEQ ID NO: 7269; WAN024FVE_at; Start 197; Stop 221
ttgctacaccgaggatagaacgatt

SEQ ID NO: 222529 - DNA, 25 bp, Artificial
  probe
  misc_feature (1)..(25): SEQ ID NO: 7269; WAN024FVE_at; Start 146; Stop 170
tcttagccgactttgaagaccttat

SEQ ID NO: 222530 - DNA, 25 bp, Artificial
  probe
  misc_feature (1)..(25): SEQ ID NO: 7269; WAN024FVE_at; Start 111; Stop 135
tctgcagacagatagaaaaagcctt

SEQ ID NO: 222531 - DNA, 25 bp, Artificial
  probe
  misc_feature (1)..(25): SEQ ID NO: 7269; WAN024FVE_at; Start 195; Stop 219
ggttgctacaccgaggatagaacga

SEQ ID NO: 222532 - DNA, 25 bp, Artificial
  probe
  misc_feature (1)..(25): SEQ ID NO: 7269; WAN024FVE_at; Start 191; Stop 215
taaaggttgctacaccgaggataga

SEQ ID NO: 222533 - DNA, 25 bp, Artificial
  probe
  misc_feature (1)..(25): SEQ ID NO: 7269; WAN024FVE_at; Start 188; Stop 212
atttaaaggttgctacaccgaggat

SEQ ID NO: 222534 - DNA, 25 bp, Artificial
  probe
  misc_feature (1)..(25): SEQ ID NO: 7269; WAN024FVE_at; Start 99; Stop 123
caaaagaaaatttctgcagacagat

SEQ ID NO: 222535 - DNA, 25 bp, Artificial
  probe
  misc_feature (1)..(25): SEQ ID NO: 7269; WAN024FVE_at; Start 43; Stop 67
gctagtaacctcatactttcagttc

SEQ ID NO: 222536 - DNA, 25 bp, Artificial
  probe
  misc_feature (1)..(25): SEQ ID NO: 7269; WAN024FVE_at; Start 33; Stop 57
cattttcattgctagtaacctcata

SEQ ID NO: 222537 - DNA, 25 bp, Artificial
  probe
  misc_feature (1)..(25): SEQ ID NO: 7269; WAN024FVE_at; Start 143; Stop 167
ggctcttagccgactttgaagacct

SEQ ID NO: 222538 - DNA, 25 bp, Artificial
  probe
  misc_feature (1)..(25): SEQ ID NO: 7269; WAN024FVE_at; Start 201; Stop 225
tacaccgaggatagaacgatttaag

SEQ ID NO: 222539 - DNA, 25 bp, Artificial
  probe
  misc_feature (1)..(25): SEQ ID NO: 7269; WAN024FVE_at; Start 123; Stop 147
tagaaaaagccttcaaaatcggctc

SEQ ID NO: 222540 - DNA, 25 bp, Artificial
  probe
  misc_feature (1)..(25): SEQ ID NO: 7269; WAN024FVE_at; Start 58; Stop 82
ctttcagttctatctattatactag

SEQ ID NO: 222541 - DNA, 25 bp, Artificial
  probe
  misc_feature (1)..(25): SEQ ID NO: 7269; WAN024FVE_at; Start 130; Stop 154
agccttcaaaatcggctcttagccg

SEQ ID NO: 222542 - DNA, 25 bp, Artificial
  probe
  misc_feature (1)..(25): SEQ ID NO: 7269; WAN024FVE_at; Start 91; Stop 115
gattttatcaaaagaaaatttctgc

SEQ ID NO: 222543 - DNA, 25 bp, Artificial
  probe
  misc_feature (1)..(25): SEQ ID NO: 7269; WAN024FVE_at; Start 121; Stop 145
gatagaaaaagccttcaaaatcggc

SEQ ID NO: 222544 - DNA, 25 bp, Artificial
  probe
  misc_feature (1)..(25): SEQ ID NO: 7269; WAN024FVE_at; Start 154; Stop 178
gactttgaagaccttatacatcaga

SEQ ID NO: 222545 - DNA, 25 bp, Artificial
  probe
  misc_feature (1)..(25): SEQ ID NO: 7269; WAN024FVE_at; Start 114; Stop 138
gcagacagatagaaaaagccttcaa

SEQ ID NO: 222546 - DNA, 25 bp, Artificial
  probe
  misc_feature (1)..(25): SEQ ID NO: 7269; WAN024FVE_at; Start 203; Stop 227
caccgaggatagaacgatttaagtt

SEQ ID NO: 222547 - DNA, 25 bp, Artificial
  probe
  misc_feature (1)..(25): SEQ ID NO: 7269; WAN024FVE_at; Start 39; Stop 63
cattgctagtaacctcatactttca

SEQ ID NO: 222548 - DNA, 25 bp, Artificial
  probe
  misc_feature (1)..(25): SEQ ID NO: 7269; WAN024FVE_at; Start 139; Stop 163
aatcggctcttagccgactttgaag

SEQ ID NO: 222549 - DNA, 25 bp, Artificial
  probe
  misc_feature (1)..(25): SEQ ID NO: 7269; WAN024FVE_at; Start 215; Stop 239
aacgatttaagtttctgagaatttg

SEQ ID NO: 222550 - DNA, 25 bp, Artificial
  probe
  misc_feature (1)..(25): SEQ ID NO: 7269; WAN024FVE_at; Start 184; Stop 208
tataatttaaaggttgctacaccga

SEQ ID NO: 222551 - DNA, 25 bp, Artificial
  probe
  misc_feature (1)..(25): SEQ ID NO: 7269; WAN024FVE_at; Start 77; Stop 101
tactagatttttacgattttatcaa

SEQ ID NO: 222552 - DNA, 25 bp, Artificial
  probe
  misc_feature (1)..(25): SEQ ID NO: 7269; WAN024FVE_at; Start 47; Stop 71
gtaacctcatactttcagttctatc

SEQ ID NO: 222553 - DNA, 25 bp, Artificial
  probe
  misc_feature (1)..(25): SEQ ID NO: 7269; WAN024FVE_at; Start 159; Stop 183
tgaagaccttatacatcagaatact

SEQ ID NO: 222554 - DNA, 25 bp, Artificial
  probe
  misc_feature (1)..(25): SEQ ID NO: 3377; WAN024FVF_at; Start 9; Stop 33
gaaggctttttctatctgtctgcag

SEQ ID NO: 222555 - DNA, 25 bp, Artificial
  probe
  misc_feature (1)..(25): SEQ ID NO: 3377; WAN024FVF_at; Start 10; Stop 34
aaggctttttctatctgtctgcaga

SEQ ID NO: 222556 - DNA, 25 bp, Artificial
  probe
  misc_feature (1)..(25): SEQ ID NO: 3377; WAN024FVF_at; Start 30; Stop 54
gcagaaattttcttttggagtctcc

SEQ ID NO: 222557 - DNA, 25 bp, Artificial
  probe
  misc_feature (1)..(25): SEQ ID NO: 3377; WAN024FVF_at; Start 76; Stop 100
atctatccgtatagaggagccttct

SEQ ID NO: 222558 - DNA, 25 bp, Artificial
  probe
  misc_feature (1)..(25): SEQ ID NO: 3377; WAN024FVF_at; Start 48; Stop 72
agtctcctatagaaagaccctaggg

SEQ ID NO: 222559 - DNA, 25 bp, Artificial
  probe
  misc_feature (1)..(25): SEQ ID NO: 3377; WAN024FVF_at; Start 13; Stop 37
gctttttctatctgtctgcagaaat

SEQ ID NO: 222560 - DNA, 25 bp, Artificial
  probe
  misc_feature (1)..(25): SEQ ID NO: 3377; WAN024FVF_at; Start 74; Stop 98
aaatctatccgtatagaggagcctt

SEQ ID NO: 222561 - DNA, 25 bp, Artificial
  probe
  misc_feature (1)..(25): SEQ ID NO: 3377; WAN024FVF_at; Start 75; Stop 99
aatctatccgtatagaggagccttc

SEQ ID NO: 222562 - DNA, 25 bp, Artificial
  probe
  misc_feature (1)..(25): SEQ ID NO: 3377; WAN024FVF_at; Start 23; Stop 47
tctgtctgcagaaattttcttttgg

SEQ ID NO: 222563 - DNA, 25 bp, Artificial
  probe
  misc_feature (1)..(25): SEQ ID NO: 3377; WAN024FVF_at; Start 45; Stop 69
tggagtctcctatagaaagacccta

SEQ ID NO: 222564 - DNA, 25 bp, Artificial
  probe
  misc_feature (1)..(25): SEQ ID NO: 3377; WAN024FVF_at; Start 73; Stop 97
aaaatctatccgtatagaggagcct

SEQ ID NO: 222565 - DNA, 25 bp, Artificial
  probe
  misc_feature (1)..(25): SEQ ID NO: 3377; WAN024FVF_at; Start 11; Stop 35
aggctttttctatctgtctgcagaa

SEQ ID NO: 222566 - DNA, 25 bp, Artificial
  probe
  misc_feature (1)..(25): SEQ ID NO: 3377; WAN024FVF_at; Start 35; Stop 59
aattttcttttggagtctcctatag

SEQ ID NO: 222567 - DNA, 25 bp, Artificial
  probe
  misc_feature (1)..(25): SEQ ID NO: 3377; WAN024FVF_at; Start 70; Stop 94
gggaaaatctatccgtatagaggag

SEQ ID NO: 222568 - DNA, 25 bp, Artificial
  probe
  misc_feature (1)..(25): SEQ ID NO: 3377; WAN024FVF_at; Start 49; Stop 73
gtctcctatagaaagaccctaggga

SEQ ID NO: 222569 - DNA, 25 bp, Artificial
  probe
  misc_feature (1)..(25): SEQ ID NO: 3377; WAN024FVF_at; Start 46; Stop 70
ggagtctcctatagaaagaccctag

SEQ ID NO: 222570 - DNA, 25 bp, Artificial
  probe
  misc_feature (1)..(25): SEQ ID NO: 3377; WAN024FVF_at; Start 31; Stop 55
cagaaattttcttttggagtctcct

SEQ ID NO: 222571 - DNA, 25 bp, Artificial
  probe
  misc_feature (1)..(25): SEQ ID NO: 3377; WAN024FVF_at; Start 43; Stop 67
tttggagtctcctatagaaagaccc

SEQ ID NO: 222572 - DNA, 25 bp, Artificial
  probe
  misc_feature (1)..(25): SEQ ID NO: 3377; WAN024FVF_at; Start 65; Stop 89
ccctagggaaaatctatccgtatag

SEQ ID NO: 222573 - DNA, 25 bp, Artificial
  probe
  misc_feature (1)..(25): SEQ ID NO: 3377; WAN024FVF_at; Start 42; Stop 66
ttttggagtctcctatagaaagacc

SEQ ID NO: 222574 - DNA, 25 bp, Artificial
  probe
  misc_feature (1)..(25): SEQ ID NO: 3377; WAN024FVF_at; Start 44; Stop 68
ttggagtctcctatagaaagaccct

SEQ ID NO: 222575 - DNA, 25 bp, Artificial
  probe
  misc_feature (1)..(25): SEQ ID NO: 3377; WAN024FVF_at; Start 2; Stop 26
tgattttgaaggctttttctatctg

SEQ ID NO: 222576 - DNA, 25 bp, Artificial
  probe
  misc_feature (1)..(25): SEQ ID NO: 3377; WAN024FVF_at; Start 72; Stop 96
gaaaatctatccgtatagaggagcc

SEQ ID NO: 222577 - DNA, 25 bp, Artificial
  probe
  misc_feature (1)..(25): SEQ ID NO: 3377; WAN024FVF_at; Start 18; Stop 42
ttctatctgtctgcagaaattttct

SEQ ID NO: 222578 - DNA, 25 bp, Artificial
  probe
  misc_feature (1)..(25): SEQ ID NO: 3377; WAN024FVF_at; Start 7; Stop 31
ttgaaggctttttctatctgtctgc

SEQ ID NO: 222579 - DNA, 25 bp, Artificial
  probe
  misc_feature (1)..(25): SEQ ID NO: 3377; WAN024FVF_at; Start 12; Stop 36
ggctttttctatctgtctgcagaaa

SEQ ID NO: 222580 - DNA, 25 bp, Artificial
  probe
  misc_feature (1)..(25): SEQ ID NO: 3377; WAN024FVF_at; Start 8; Stop 32
tgaaggctttttctatctgtctgca

SEQ ID NO: 222581 - DNA, 25 bp, Artificial
  probe
  misc_feature (1)..(25): SEQ ID NO: 3377; WAN024FVF_at; Start 78; Stop 102
ctatccgtatagaggagccttcttt

SEQ ID NO: 222582 - DNA, 25 bp, Artificial
  probe
  misc_feature (1)..(25): SEQ ID NO: 3377; WAN024FVF_at; Start 77; Stop 101
tctatccgtatagaggagccttctt

SEQ ID NO: 222583 - DNA, 25 bp, Artificial
  probe
  misc_feature (1)..(25): SEQ ID NO: 3377; WAN024FVF_at; Start 66; Stop 90
cctagggaaaatctatccgtataga

SEQ ID NO: 222584 - DNA, 25 bp, Artificial
  probe
  misc_feature (1)..(25): SEQ ID NO: 3377; WAN024FVF_at; Start 20; Stop 44
ctatctgtctgcagaaattttcttt

SEQ ID NO: 222585 - DNA, 25 bp, Artificial
  probe
  misc_feature (1)..(25): SEQ ID NO: 3377; WAN024FVF_at; Start 50; Stop 74
tctcctatagaaagaccctagggaa

SEQ ID NO: 222586 - DNA, 25 bp, Artificial
  probe
  misc_feature (1)..(25): SEQ ID NO: 3377; WAN024FVF_at; Start 47; Stop 71
gagtctcctatagaaagaccctagg

SEQ ID NO: 222587 - DNA, 25 bp, Artificial
  probe
  misc_feature (1)..(25): SEQ ID NO: 3377; WAN024FVF_at; Start 68; Stop 92
tagggaaaatctatccgtatagagg

SEQ ID NO: 222588 - DNA, 25 bp, Artificial
  probe
  misc_feature (1)..(25): SEQ ID NO: 3087; WAN024FVG_at; Start 88; Stop 112
gctctcattgctgtaccatttacaa

SEQ ID NO: 222589 - DNA, 25 bp, Artificial
  probe
  misc_feature (1)..(25): SEQ ID NO: 3087; WAN024FVG_at; Start 852; Stop 876
tcaagaagctttaaaaggaatgcat

SEQ ID NO: 222590 - DNA, 25 bp, Artificial
  probe
  misc_feature (1)..(25): SEQ ID NO: 3087; WAN024FVG_at; Start 56; Stop 80
aagcaaatattttagctctcatcgc

SEQ ID NO: 222591 - DNA, 25 bp, Artificial
  probe
  misc_feature (1)..(25): SEQ ID NO: 3087; WAN024FVG_at; Start 517; Stop 541
gcaaatgtgaaaattgaaaaactgg

SEQ ID NO: 222592 - DNA, 25 bp, Artificial
  probe
  misc_feature (1)..(25): SEQ ID NO: 3087; WAN024FVG_at; Start 778; Stop 802
tcatacaaaaatactggacaggaat

SEQ ID NO: 222593 - DNA, 25 bp, Artificial
  probe
  misc_feature (1)..(25): SEQ ID NO: 3087; WAN024FVG_at; Start 567; Stop 591
cgcaaatggtgaaacagcgcttggc

SEQ ID NO: 222594 - DNA, 25 bp, Artificial
  probe
  misc_feature (1)..(25): SEQ ID NO: 3087; WAN024FVG_at; Start 967; Stop 991
gagcaaagtcttcaaattctcagaa

SEQ ID NO: 222595 - DNA, 25 bp, Artificial
  probe
  misc_feature (1)..(25): SEQ ID NO: 3087; WAN024FVG_at; Start 277; Stop 301
ggagcttatcttttcaatgatgtag

SEQ ID NO: 222596 - DNA, 25 bp, Artificial
  probe
  misc_feature (1)..(25): SEQ ID NO: 3087; WAN024FVG_at; Start 942; Stop 966
cggagtgactcgttataagaaattt

SEQ ID NO: 222597 - DNA, 25 bp, Artificial
  probe
  misc_feature (1)..(25): SEQ ID NO: 3087; WAN024FVG_at; Start 553; Stop 577
tctaaagaattgaacgcaaatggtg

SEQ ID NO: 222598 - DNA, 25 bp, Artificial
  probe
  misc_feature (1)..(25): SEQ ID NO: 3087; WAN024FVG_at; Start 291; Stop 315
caatgatgtagaacccagtgagttg

SEQ ID NO: 222599 - DNA, 25 bp, Artificial
  probe
  misc_feature (1)..(25): SEQ ID NO: 3087; WAN024FVG_at; Start 581; Stop 605
cagcgcttggcttaaatgtgaaaaa

SEQ ID NO: 222600 - DNA, 25 bp, Artificial
  probe
  misc_feature (1)..(25): SEQ ID NO: 3087; WAN024FVG_at; Start 437; Stop 461
ttttgacatcaagtaaagatgccaa

SEQ ID NO: 222601 - DNA, 25 bp, Artificial
  probe
  misc_feature (1)..(25): SEQ ID NO: 3087; WAN024FVG_at; Start 360; Stop 384
aaattcaacgaatgactattggtgg

SEQ ID NO: 222602 - DNA, 25 bp, Artificial
  probe
  misc_feature (1)..(25): SEQ ID NO: 3087; WAN024FVG_at; Start 837; Stop 861
taaattgaaacagagtcaagaagct

SEQ ID NO: 222603 - DNA, 25 bp, Artificial
  probe
  misc_feature (1)..(25): SEQ ID NO: 3087; WAN024FVG_at; Start 262; Stop 286
gatggtaatttgaatggagcttatc

SEQ ID NO: 222604 - DNA, 25 bp, Artificial
  probe
  misc_feature (1)..(25): SEQ ID NO: 3087; WAN024FVG_at; Start 398; Stop 422
tctactatatgattgacgatgcagg

SEQ ID NO: 222605 - DNA, 25 bp, Artificial
  probe
  misc_feature (1)..(25): SEQ ID NO: 3087; WAN024FVG_at; Start 657; Stop 681
gatgggaaatgtgttagtttatctc

SEQ ID NO: 222606 - DNA, 25 bp, Artificial
  probe
  misc_feature (1)..(25): SEQ ID NO: 3087; WAN024FVG_at; Start 70; Stop 94
gctctcatcgctttatttgctctca

SEQ ID NO: 222607 - DNA, 25 bp, Artificial
  probe
  misc_feature (1)..(25): SEQ ID NO: 3087; WAN024FVG_at; Start 2; Stop 26
tgtttgaacattattcagtagctga

SEQ ID NO: 222608 - DNA, 25 bp, Artificial
  probe
  misc_feature (1)..(25): SEQ ID NO: 3087; WAN024FVG_at; Start 536; Stop 560
aactggaaaccatcaactctaaaga

SEQ ID NO: 222609 - DNA, 25 bp, Artificial
  probe
  misc_feature (1)..(25): SEQ ID NO: 3087; WAN024FVG_at; Start 914; Stop 938
gagatacagtccttcttgttgaaga

SEQ ID NO: 222610 - DNA, 25 bp, Artificial
  probe
  misc_feature (1)..(25): SEQ ID NO: 3087; WAN024FVG_at; Start 135; Stop 159
cactgtcaaagatacaacaagttat

SEQ ID NO: 222611 - DNA, 25 bp, Artificial
  probe
  misc_feature (1)..(25): SEQ ID NO: 3087; WAN024FVG_at; Start 762; Stop 786
cctagcagatgttttgtcatacaaa

SEQ ID NO: 222612 - DNA, 25 bp, Artificial
  probe
  misc_feature (1)..(25): SEQ ID NO: 3087; WAN024FVG_at; Start 742; Stop 766
gagattacaacaattgctaacctag

SEQ ID NO: 222613 - DNA, 25 bp, Artificial
  probe
  misc_feature (1)..(25): SEQ ID NO: 3087; WAN024FVG_at; Start 118; Stop 142
gcagttaggaataaaaacactgtca

SEQ ID NO: 222614 - DNA, 25 bp, Artificial
  probe
  misc_feature (1)..(25): SEQ ID NO: 3087; WAN024FVG_at; Start 684; Stop 708
taatccaacaatcaatagagtaggt

SEQ ID NO: 222615 - DNA, 25 bp, Artificial
  probe
  misc_feature (1)..(25): SEQ ID NO: 3087; WAN024FVG_at; Start 103; Stop 127
ccatttacaattaaagcagttagga

SEQ ID NO: 222616 - DNA, 25 bp, Artificial
  probe
  misc_feature (1)..(25): SEQ ID NO: 3087; WAN024FVG_at; Start 803; Stop 827
tgaccatcgttagctcaaataaagc

SEQ ID NO: 222617 - DNA, 25 bp, Artificial
  probe
  misc_feature (1)..(25): SEQ ID NO: 3087; WAN024FVG_at; Start 372; Stop 396
tgactattggtggaaaaaattgacc

SEQ ID NO: 222618 - DNA, 25 bp, Artificial
  probe
  misc_feature (1)..(25): SEQ ID NO: 3087; WAN024FVG_at; Start 793; Stop 817
ggacaggaattgaccatcgttagct

SEQ ID NO: 222619 - DNA, 25 bp, Artificial
  probe
  misc_feature (1)..(25): SEQ ID NO: 3087; WAN024FVG_at; Start 168; Stop 192
tcttatctataaaatcactcctcca

SEQ ID NO: 222620 - DNA, 25 bp, Artificial
  probe
  misc_feature (1)..(25): SEQ ID NO: 3087; WAN024FVG_at; Start 927; Stop 951
tcttgttgaagagtacggagtgact

SEQ ID NO: 222621 - DNA, 25 bp, Artificial
  probe
  misc_feature (1)..(25): SEQ ID NO: 3087; WAN024FVG_at; Start 320; Stop 344
aaattgccagtgaattagacacgac

SEQ ID NO: 222622 - DNA, 25 bp, Artificial
  probe
  misc_feature (1)..(25): SEQ ID NO: 1589; WAN024FVH_at; Start 714; Stop 738
gagtcacgatgcagtgctcaatctg

SEQ ID NO: 222623 - DNA, 25 bp, Artificial
  probe
  misc_feature (1)..(25): SEQ ID NO: 1589; WAN024FVH_at; Start 483; Stop 507
cctttcttttgctaagttggctgac

SEQ ID NO: 222624 - DNA, 25 bp, Artificial
  probe
  misc_feature (1)..(25): SEQ ID NO: 1589; WAN024FVH_at; Start 304; Stop 328
gaattggctcaaatgtctccagatg

SEQ ID NO: 222625 - DNA, 25 bp, Artificial
  probe
  misc_feature (1)..(25): SEQ ID NO: 1589; WAN024FVH_at; Start 414; Stop 438
caaggaagaagagcaagagcaggct

SEQ ID NO: 222626 - DNA, 25 bp, Artificial
  probe
  misc_feature (1)..(25): SEQ ID NO: 1589; WAN024FVH_at; Start 442; Stop 466
caagaagctgagagtaagaaagaac

SEQ ID NO: 222627 - DNA, 25 bp, Artificial
  probe
  misc_feature (1)..(25): SEQ ID NO: 1589; WAN024FVH_at; Start 620; Stop 644
catatccagcttggctgttggcccg

SEQ ID NO: 222628 - DNA, 25 bp, Artificial
  probe
  misc_feature (1)..(25): SEQ ID NO: 1589; WAN024FVH_at; Start 538; Stop 562
gaaatggaaacttctgaactctaca

SEQ ID NO: 222629 - DNA, 25 bp, Artificial
  probe
  misc_feature (1)..(25): SEQ ID NO: 1589; WAN024FVH_at; Start 108; Stop 132
cgttcctcaagaaaaaacagaagag

SEQ ID NO: 222630 - DNA, 25 bp, Artificial
  probe
  misc_feature (1)..(25): SEQ ID NO: 1589; WAN024FVH_at; Start 729; Stop 753
gctcaatctgcaaaaaatcggctaa

SEQ ID NO: 222631 - DNA, 25 bp, Artificial
  probe
  misc_feature (1)..(25): SEQ ID NO: 1589; WAN024FVH_at; Start 427; Stop 451
caagagcaggctgaacaagaagctg

SEQ ID NO: 222632 - DNA, 25 bp, Artificial
  probe
  misc_feature (1)..(25): SEQ ID NO: 1589; WAN024FVH_at; Start 79; Stop 103
gatcgtggaatggagattgctgact

SEQ ID NO: 222633 - DNA, 25 bp, Artificial
  probe
  misc_feature (1)..(25): SEQ ID NO: 1589; WAN024FVH_at; Start 130; Stop 154
gagttcttttatgctatcttggatg

SEQ ID NO: 222634 - DNA, 25 bp, Artificial
  probe
  misc_feature (1)..(25): SEQ ID NO: 1589; WAN024FVH_at; Start 682; Stop 706
tcagtcttacaagagtatggtcaag

SEQ ID NO: 222635 - DNA, 25 bp, Artificial
  probe
  misc_feature (1)..(25): SEQ ID NO: 1589; WAN024FVH_at; Start 557; Stop 581
tctacaaaatgaacgagcgctatta

SEQ ID NO: 222636 - DNA, 25 bp, Artificial
  probe
  misc_feature (1)..(25): SEQ ID NO: 1589; WAN024FVH_at; Start 520; Stop 544
gccaagacagtgacttttgaaatgg

SEQ ID NO: 222637 - DNA, 25 bp, Artificial
  probe
  misc_feature (1)..(25): SEQ ID NO: 1589; WAN024FVH_at; Start 649; Stop 673
cgcgagtttgcagacgatagtgata

SEQ ID NO: 222638 - DNA, 25 bp, Artificial
  probe
  misc_feature (1)..(25): SEQ ID NO: 1589; WAN024FVH_at; Start 162; Stop 186
gatgcctgatagctttctggataca

SEQ ID NO: 222639 - DNA, 25 bp, Artificial
  probe
  misc_feature (1)..(25): SEQ ID NO: 1589; WAN024FVH_at; Start 2; Stop 26
tgaggttactagcaatgaaaatgaa

SEQ ID NO: 222640 - DNA, 25 bp, Artificial
  probe
  misc_feature (1)..(25): SEQ ID NO: 1589; WAN024FVH_at; Start 61; Stop 85
tctttagaggatttgatggatcgtg

SEQ ID NO: 222641 - DNA, 25 bp, Artificial
  probe
  misc_feature (1)..(25): SEQ ID NO: 1589; WAN024FVH_at; Start 598; Stop 622
gatattgaaaatcatccaagcccat

SEQ ID NO: 222642 - DNA, 25 bp, Artificial
  probe
  misc_feature (1)..(25): SEQ ID NO: 1589; WAN024FVH_at; Start 274; Stop 298
gaagacttatcggatttgccagata

SEQ ID NO: 222643 - DNA, 25 bp, Artificial
  probe
  misc_feature (1)..(25): SEQ ID NO: 1589; WAN024FVH_at; Start 93; Stop 117
gattgctgactttctcgttcctcaa

SEQ ID NO: 222644 - DNA, 25 bp, Artificial
  probe
  misc_feature (1)..(25): SEQ ID NO: 1589; WAN024FVH_at; Start 192; Stop 216
gttgagcttccgtgtgactccaaaa

SEQ ID NO: 222645 - DNA, 25 bp, Artificial
  probe
  misc_feature (1)..(25): SEQ ID NO: 1589; WAN024FVH_at; Start 336; Stop 360
caaaaccctggaaaaaagcatcgca

SEQ ID NO: 222646 - DNA, 25 bp, Artificial
  probe
  misc_feature (1)..(25): SEQ ID NO: 1589; WAN024FVH_at; Start 177; Stop 201
tctggatacaggcatgttgagcttc

SEQ ID NO: 222647 - DNA, 25 bp, Artificial
  probe
  misc_feature (1)..(25): SEQ ID NO: 1589; WAN024FVH_at; Start 350; Stop 374
aaagcatcgcagacaaaaccaagga

SEQ ID NO: 222648 - DNA, 25 bp, Artificial
  probe
  misc_feature (1)..(25): SEQ ID NO: 1589; WAN024FVH_at; Start 292; Stop 316
ccagatatggaagaattggctcaaa

SEQ ID NO: 222649 - DNA, 25 bp, Artificial
  probe
  misc_feature (1)..(25): SEQ ID NO: 1589; WAN024FVH_at; Start 670; Stop 694
gatatcagtcgctcagtcttacaag

SEQ ID NO: 222650 - DNA, 25 bp, Artificial
  probe
  misc_feature (1)..(25): SEQ ID NO: 1589; WAN024FVH_at; Start 363; Stop 387
caaaaccaaggatgatatcgaagcc

SEQ ID NO: 222651 - DNA, 25 bp, Artificial
  probe
  misc_feature (1)..(25): SEQ ID NO: 1589; WAN024FVH_at; Start 321; Stop 345
tccagatgaatttatcaaaaccctg

SEQ ID NO: 222652 - DNA, 25 bp, Artificial
  probe
  misc_feature (1)..(25): SEQ ID NO: 1589; WAN024FVH_at; Start 567; Stop 591
gaacgagcgctattatttgaccatt

SEQ ID NO: 222653 - DNA, 25 bp, Artificial
  probe
  misc_feature (1)..(25): SEQ ID NO: 1589; WAN024FVH_at; Start 635; Stop 659
tgttggcccgtatgcgcgagtttgc

SEQ ID NO: 222654 - DNA, 25 bp, Artificial
  probe
  misc_feature (1)..(25): SEQ ID NO: 1589; WAN024FVH_at; Start 382; Stop 406
gaagccattcaatctcttgagcaag

SEQ ID NO: 222655 - DNA, 25 bp, Artificial
  probe
  misc_feature (1)..(25): SEQ ID NO: 1589; WAN024FVH_at; Start 703; Stop 727
caagtcttgatgagtcacgatgcag

SEQ ID NO: 222656 - DNA, 25 bp, Artificial
  probe
  misc_feature (1)..(25): SEQ ID NO: 5301; WAN024FVI_at; Start 78; Stop 102
ggtgttcaatcagccactcatctcg

SEQ ID NO: 222657 - DNA, 25 bp, Artificial
  probe
  misc_feature (1)..(25): SEQ ID NO: 5301; WAN024FVI_at; Start 181; Stop 205
ggttgcaggtacaataatcttcatc

SEQ ID NO: 222658 - DNA, 25 bp, Artificial
  probe
  misc_feature (1)..(25): SEQ ID NO: 5301; WAN024FVI_at; Start 128; Stop 152
tacttggttacagctacaccgaccg

SEQ ID NO: 222659 - DNA, 25 bp, Artificial
  probe
  misc_feature (1)..(25): SEQ ID NO: 5301; WAN024FVI_at; Start 122; Stop 146
tgaagatacttggttacagctacac

SEQ ID NO: 222660 - DNA, 25 bp, Artificial
  probe
  misc_feature (1)..(25): SEQ ID NO: 5301; WAN024FVI_at; Start 161; Stop 185
cctggcccgatattggcactggttg

SEQ ID NO: 222661 - DNA, 25 bp, Artificial
  probe
  misc_feature (1)..(25): SEQ ID NO: 5301; WAN024FVI_at; Start 50; Stop 74
tcgtcatgtggaatccatttgccaa

SEQ ID NO: 222662 - DNA, 25 bp, Artificial
  probe
  misc_feature (1)..(25): SEQ ID NO: 5301; WAN024FVI_at; Start 173; Stop 197
ttggcactggttgcaggtacaataa

SEQ ID NO: 222663 - DNA, 25 bp, Artificial
  probe
  misc_feature (1)..(25): SEQ ID NO: 5301; WAN024FVI_at; Start 149; Stop 173
accgagtcaaaacctggcccgatat

SEQ ID NO: 222664 - DNA, 25 bp, Artificial
  probe
  misc_feature (1)..(25): SEQ ID NO: 5301; WAN024FVI_at; Start 201; Stop 225
tcatcttattctcctagcaccttga

SEQ ID NO: 222665 - DNA, 25 bp, Artificial
  probe
  misc_feature (1)..(25): SEQ ID NO: 5301; WAN024FVI_at; Start 95; Stop 119
tcatctcgttcttcgcagacctcaa

SEQ ID NO: 222666 - DNA, 25 bp, Artificial
  probe
  misc_feature (1)..(25): SEQ ID NO: 5301; WAN024FVI_at; Start 45; Stop 69
tacgctcgtcatgtggaatccattt

SEQ ID NO: 222667 - DNA, 25 bp, Artificial
  probe
  misc_feature (1)..(25): SEQ ID NO: 5301; WAN024FVI_at; Start 166; Stop 190
cccgatattggcactggttgcaggt

SEQ ID NO: 222668 - DNA, 25 bp, Artificial
  probe
  misc_feature (1)..(25): SEQ ID NO: 5301; WAN024FVI_at; Start 73; Stop 97
aatctggtgttcaatcagccactca

SEQ ID NO: 222669 - DNA, 25 bp, Artificial
  probe
  misc_feature (1)..(25): SEQ ID NO: 5301; WAN024FVI_at; Start 4; Stop 28
caagtctggtacaatttgcaaagcg

SEQ ID NO: 222670 - DNA, 25 bp, Artificial
  probe
  misc_feature (1)..(25): SEQ ID NO: 5301; WAN024FVI_at; Start 89; Stop 113
agccactcatctcgttcttcgcaga

SEQ ID NO: 222671 - DNA, 25 bp, Artificial
  probe
  misc_feature (1)..(25): SEQ ID NO: 5301; WAN024FVI_at; Start 169; Stop 193
gatattggcactggttgcaggtaca

SEQ ID NO: 222672 - DNA, 25 bp, Artificial
  probe
  misc_feature (1)..(25): SEQ ID NO: 5301; WAN024FVI_at; Start 20; Stop 44
tgcaaagcgattttgagcaagagat

SEQ ID NO: 222673 - DNA, 25 bp, Artificial
  probe
  misc_feature (1)..(25): SEQ ID NO: 5301; WAN024FVI_at; Start 177; Stop 201
cactggttgcaggtacaataatctt

SEQ ID NO: 222674 - DNA, 25 bp, Artificial
  probe
  misc_feature (1)..(25): SEQ ID NO: 5301; WAN024FVI_at; Start 42; Stop 66
gattacgctcgtcatgtggaatcca

SEQ ID NO: 222675 - DNA, 25 bp, Artificial
  probe
  misc_feature (1)..(25): SEQ ID NO: 5301; WAN024FVI_at; Start 56; Stop 80
tgtggaatccatttgccaatctggt

SEQ ID NO: 222676 - DNA, 25 bp, Artificial
  probe
  misc_feature (1)..(25): SEQ ID NO: 5301; WAN024FVI_at; Start 133; Stop 157
ggttacagctacaccgaccgagtca

SEQ ID NO: 222677 - DNA, 25 bp, Artificial
  probe
  misc_feature (1)..(25): SEQ ID NO: 5301; WAN024FVI_at; Start 136; Stop 160
tacagctacaccgaccgagtcaaaa

SEQ ID NO: 222678 - DNA, 25 bp, Artificial
  probe
  misc_feature (1)..(25): SEQ ID NO: 5301; WAN024FVI_at; Start 37; Stop 61
caagagattacgctcgtcatgtgga

SEQ ID NO: 222679 - DNA, 25 bp, Artificial
  probe
  misc_feature (1)..(25): SEQ ID NO: 5301; WAN024FVI_at; Start 69; Stop 93
tgccaatctggtgttcaatcagcca

SEQ ID NO: 222680 - DNA, 25 bp, Artificial
  probe
  misc_feature (1)..(25): SEQ ID NO: 5301; WAN024FVI_at; Start 13; Stop 37
tacaatttgcaaagcgattttgagc

SEQ ID NO: 222681 - DNA, 25 bp, Artificial
  probe
  misc_feature (1)..(25): SEQ ID NO: 5301; WAN024FVI_at; Start 195; Stop 219
taatcttcatcttattctcctagca

SEQ ID NO: 222682 - DNA, 25 bp, Artificial
  probe
  misc_feature (1)..(25): SEQ ID NO: 5301; WAN024FVI_at; Start 8; Stop 32
tctggtacaatttgcaaagcgattt

SEQ ID NO: 222683 - DNA, 25 bp, Artificial
  probe
  misc_feature (1)..(25): SEQ ID NO: 5301; WAN024FVI_at; Start 141; Stop 165
ctacaccgaccgagtcaaaacctgg

SEQ ID NO: 222684 - DNA, 25 bp, Artificial
  probe
  misc_feature (1)..(25): SEQ ID NO: 5301; WAN024FVI_at; Start 110; Stop 134
cagacctcaatttgaagatacttgg

SEQ ID NO: 222685 - DNA, 25 bp, Artificial
  probe
  misc_feature (1)..(25): SEQ ID NO: 5301; WAN024FVI_at; Start 158; Stop 182
aaacctggcccgatattggcactgg

SEQ ID NO: 222686 - DNA, 25 bp, Artificial
  probe
  misc_feature (1)..(25): SEQ ID NO: 5301; WAN024FVI_at; Start 28; Stop 52
gattttgagcaagagattacgctcg

SEQ ID NO: 222687 - DNA, 25 bp, Artificial
  probe
  misc_feature (1)..(25): SEQ ID NO: 5301; WAN024FVI_at; Start 60; Stop 84
gaatccatttgccaatctggtgttc

SEQ ID NO: 222688 - DNA, 25 bp, Artificial
  probe
  misc_feature (1)..(25): SEQ ID NO: 5301; WAN024FVI_at; Start 152; Stop 176
gagtcaaaacctggcccgatattgg

SEQ ID NO: 222689 - DNA, 25 bp, Artificial
  probe
  misc_feature (1)..(25): SEQ ID NO: 5301; WAN024FVI_at; Start 117; Stop 141
caatttgaagatacttggttacagc

SEQ ID NO: 222690 - DNA, 25 bp, Artificial
  probe
  misc_feature (1)..(25): SEQ ID NO: 5798; WAN024FVJ_at; Start 123; Stop 147
cacattggttacaaagttaaagtca

SEQ ID NO: 222691 - DNA, 25 bp, Artificial
  probe
  misc_feature (1)..(25): SEQ ID NO: 5798; WAN024FVJ_at; Start 15; Stop 39
aacgtgttttccagcttccaaggca

SEQ ID NO: 222692 - DNA, 25 bp, Artificial
  probe
  misc_feature (1)..(25): SEQ ID NO: 5798; WAN024FVJ_at; Start 207; Stop 231
tttgatatctgaatgtgctgattga

SEQ ID NO: 222693 - DNA, 25 bp, Artificial
  probe
  misc_feature (1)..(25): SEQ ID NO: 5798; WAN024FVJ_at; Start 182; Stop 206
catccttgaccaataccttagcaac

SEQ ID NO: 222694 - DNA, 25 bp, Artificial
  probe
  misc_feature (1)..(25): SEQ ID NO: 5798; WAN024FVJ_at; Start 145; Stop 169
tcattccctgctgcaagcaagcgat

SEQ ID NO: 222695 - DNA, 25 bp, Artificial
  probe
  misc_feature (1)..(25): SEQ ID NO: 5798; WAN024FVJ_at; Start 21; Stop 45
ttttccagcttccaaggcacgagtg

SEQ ID NO: 222696 - DNA, 25 bp, Artificial
  probe
  misc_feature (1)..(25): SEQ ID NO: 5798; WAN024FVJ_at; Start 51; Stop 75
ggttttagcaggctcaatacgcccc

SEQ ID NO: 222697 - DNA, 25 bp, Artificial
  probe
  misc_feature (1)..(25): SEQ ID NO: 5798; WAN024FVJ_at; Start 2; Stop 26
tgttagcagtaacaacgtgttttcc

SEQ ID NO: 222698 - DNA, 25 bp, Artificial
  probe
  misc_feature (1)..(25): SEQ ID NO: 5798; WAN024FVJ_at; Start 189; Stop 213
gaccaataccttagcaactttgata

SEQ ID NO: 222699 - DNA, 25 bp, Artificial
  probe
  misc_feature (1)..(25): SEQ ID NO: 5798; WAN024FVJ_at; Start 98; Stop 122
tatcctggtctgataaaatatcatc

SEQ ID NO: 222700 - DNA, 25 bp, Artificial
  probe
  misc_feature (1)..(25): SEQ ID NO: 5798; WAN024FVJ_at; Start 203; Stop 227
caactttgatatctgaatgtgctga

SEQ ID NO: 222701 - DNA, 25 bp, Artificial
  probe
  misc_feature (1)..(25): SEQ ID NO: 5798; WAN024FVJ_at; Start 170; Stop 194
ttttttcatcttcatccttgaccaa

SEQ ID NO: 222702 - DNA, 25 bp, Artificial
  probe
  misc_feature (1)..(25): SEQ ID NO: 5798; WAN024FVJ_at; Start 19; Stop 43
tgttttccagcttccaaggcacgag

SEQ ID NO: 222703 - DNA, 25 bp, Artificial
  probe
  misc_feature (1)..(25): SEQ ID NO: 5798; WAN024FVJ_at; Start 32; Stop 56
ccaaggcacgagtgataaaggtttt

SEQ ID NO: 222704 - DNA, 25 bp, Artificial
  probe
  misc_feature (1)..(25): SEQ ID NO: 5798; WAN024FVJ_at; Start 37; Stop 61
gcacgagtgataaaggttttagcag

SEQ ID NO: 222705 - DNA, 25 bp, Artificial
  probe
  misc_feature (1)..(25): SEQ ID NO: 5798; WAN024FVJ_at; Start 108; Stop 132
tgataaaatatcatccacattggtt

SEQ ID NO: 222706 - DNA, 25 bp, Artificial
  probe
  misc_feature (1)..(25): SEQ ID NO: 5798; WAN024FVJ_at; Start 71; Stop 95
gccccatcaattccactacgatagt

SEQ ID NO: 222707 - DNA, 25 bp, Artificial
  probe
  misc_feature (1)..(25): SEQ ID NO: 5798; WAN024FVJ_at; Start 28; Stop 52
gcttccaaggcacgagtgataaagg

SEQ ID NO: 222708 - DNA, 25 bp, Artificial
  probe
  misc_feature (1)..(25): SEQ ID NO: 5798; WAN024FVJ_at; Start 58; Stop 82
gcaggctcaatacgccccatcaatt

SEQ ID NO: 222709 - DNA, 25 bp, Artificial
  probe
  misc_feature (1)..(25): SEQ ID NO: 5798; WAN024FVJ_at; Start 137; Stop 161
agttaaagtcattccctgctgcaag

SEQ ID NO: 222710 - DNA, 25 bp, Artificial
  probe
  misc_feature (1)..(25): SEQ ID NO: 5798; WAN024FVJ_at; Start 116; Stop 140
tatcatccacattggttacaaagtt

SEQ ID NO: 222711 - DNA, 25 bp, Artificial
  probe
  misc_feature (1)..(25): SEQ ID NO: 5798; WAN024FVJ_at; Start 82; Stop 106
tccactacgatagtaatatcctggt

SEQ ID NO: 222712 - DNA, 25 bp, Artificial
  probe
  misc_feature (1)..(25): SEQ ID NO: 5798; WAN024FVJ_at; Start 195; Stop 219
taccttagcaactttgatatctgaa

SEQ ID NO: 222713 - DNA, 25 bp, Artificial
  probe
  misc_feature (1)..(25): SEQ ID NO: 5798; WAN024FVJ_at; Start 178; Stop 202
tcttcatccttgaccaataccttag

SEQ ID NO: 222714 - DNA, 25 bp, Artificial
  probe
  misc_feature (1)..(25): SEQ ID NO: 5798; WAN024FVJ_at; Start 89; Stop 113
cgatagtaatatcctggtctgataa

SEQ ID NO: 222715 - DNA, 25 bp, Artificial
  probe
  misc_feature (1)..(25): SEQ ID NO: 5798; WAN024FVJ_at; Start 140; Stop 164
taaagtcattccctgctgcaagcaa

SEQ ID NO: 222716 - DNA, 25 bp, Artificial
  probe
  misc_feature (1)..(25): SEQ ID NO: 5798; WAN024FVJ_at; Start 11; Stop 35
taacaacgtgttttccagcttccaa

SEQ ID NO: 222717 - DNA, 25 bp, Artificial
  probe
  misc_feature (1)..(25): SEQ ID NO: 5798; WAN024FVJ_at; Start 5; Stop 29
tagcagtaacaacgtgttttccagc

SEQ ID NO: 222718 - DNA, 25 bp, Artificial
  probe
  misc_feature (1)..(25): SEQ ID NO: 5798; WAN024FVJ_at; Start 47; Stop 71
taaaggttttagcaggctcaatacg

SEQ ID NO: 222719 - DNA, 25 bp, Artificial
  probe
  misc_feature (1)..(25): SEQ ID NO: 5798; WAN024FVJ_at; Start 134; Stop 158
caaagttaaagtcattccctgctgc

SEQ ID NO: 222720 - DNA, 25 bp, Artificial
  probe
  misc_feature (1)..(25): SEQ ID NO: 5798; WAN024FVJ_at; Start 150; Stop 174
ccctgctgcaagcaagcgatttttt

SEQ ID NO: 222721 - DNA, 25 bp, Artificial
  probe
  misc_feature (1)..(25): SEQ ID NO: 5798; WAN024FVJ_at; Start 54; Stop 78
tttagcaggctcaatacgccccatc

SEQ ID NO: 222722 - DNA, 25 bp, Artificial
  probe
  misc_feature (1)..(25): SEQ ID NO: 5798; WAN024FVJ_at; Start 43; Stop 67
gtgataaaggttttagcaggctcaa

SEQ ID NO: 222723 - DNA, 25 bp, Artificial
  probe
  misc_feature (1)..(25): SEQ ID NO: 5798; WAN024FVJ_at; Start 24; Stop 48
tccagcttccaaggcacgagtgata

SEQ ID NO: 222724 - DNA, 25 bp, Artificial
  probe
  misc_feature (1)..(25): SEQ ID NO: 1032; WAN024FVK_at; Start 72; Stop 96
gggtatcaactctcaagtcatgcag

SEQ ID NO: 222725 - DNA, 25 bp, Artificial
  probe
  misc_feature (1)..(25): SEQ ID NO: 1032; WAN024FVK_at; Start 201; Stop 225
cataggccccattttctttggtcac

SEQ ID NO: 222726 - DNA, 25 bp, Artificial
  probe
  misc_feature (1)..(25): SEQ ID NO: 1032; WAN024FVK_at; Start 240; Stop 264
caaattctcttaccaagtcctgacg

SEQ ID NO: 222727 - DNA, 25 bp, Artificial
  probe
  misc_feature (1)..(25): SEQ ID NO: 1032; WAN024FVK_at; Start 348; Stop 372
tggcgatagaacttgcagcaacagc

SEQ ID NO: 222728 - DNA, 25 bp, Artificial
  probe
  misc_feature (1)..(25): SEQ ID NO: 1032; WAN024FVK_at; Start 160; Stop 184
cagaaccataactgtcggcccagca

SEQ ID NO: 222729 - DNA, 25 bp, Artificial
  probe
  misc_feature (1)..(25): SEQ ID NO: 1032; WAN024FVK_at; Start 90; Stop 114
catgcagttttcctttgaaaggttg

SEQ ID NO: 222730 - DNA, 25 bp, Artificial
  probe
  misc_feature (1)..(25): SEQ ID NO: 1032; WAN024FVK_at; Start 331; Stop 355
ggcagcaaccgctacattggcgata

SEQ ID NO: 222731 - DNA, 25 bp, Artificial
  probe
  misc_feature (1)..(25): SEQ ID NO: 1032; WAN024FVK_at; Start 106; Stop 130
gaaaggttgcttttccaattctgcc

SEQ ID NO: 222732 - DNA, 25 bp, Artificial
  probe
  misc_feature (1)..(25): SEQ ID NO: 1032; WAN024FVK_at; Start 192; Stop 216
ggtaggttgcataggccccattttc

SEQ ID NO: 222733 - DNA, 25 bp, Artificial
  probe
  misc_feature (1)..(25): SEQ ID NO: 1032; WAN024FVK_at; Start 186; Stop 210
cagaaaggtaggttgcataggcccc

SEQ ID NO: 222734 - DNA, 25 bp, Artificial
  probe
  misc_feature (1)..(25): SEQ ID NO: 1032; WAN024FVK_at; Start 2; Stop 26
tgaacccctctggtcaagagtttcc

SEQ ID NO: 222735 - DNA, 25 bp, Artificial
  probe
  misc_feature (1)..(25): SEQ ID NO: 1032; WAN024FVK_at; Start 53; Stop 77
gcttctacacggacaccttgggtat

SEQ ID NO: 222736 - DNA, 25 bp, Artificial
  probe
  misc_feature (1)..(25): SEQ ID NO: 1032; WAN024FVK_at; Start 217; Stop 241
tttggtcacttgcttaatcatcgca

SEQ ID NO: 222737 - DNA, 25 bp, Artificial
  probe
  misc_feature (1)..(25): SEQ ID NO: 1032; WAN024FVK_at; Start 385; Stop 409
caattttttaggcaagacactacgg

SEQ ID NO: 222738 - DNA, 25 bp, Artificial
  probe
  misc_feature (1)..(25): SEQ ID NO: 1032; WAN024FVK_at; Start 279; Stop 303
agaggtctccctcgattgcttgccc

SEQ ID NO: 222739 - DNA, 25 bp, Artificial
  probe
  misc_feature (1)..(25): SEQ ID NO: 1032; WAN024FVK_at; Start 308; Stop 332
gtcaccatgtctcctgccaacaagg

SEQ ID NO: 222740 - DNA, 25 bp, Artificial
  probe
  misc_feature (1)..(25): SEQ ID NO: 1032; WAN024FVK_at; Start 62; Stop 86
cggacaccttgggtatcaactctca

SEQ ID NO: 222741 - DNA, 25 bp, Artificial
  probe
  misc_feature (1)..(25): SEQ ID NO: 1032; WAN024FVK_at; Start 341; Stop 365
gctacattggcgatagaacttgcag

SEQ ID NO: 222742 - DNA, 25 bp, Artificial
  probe
  misc_feature (1)..(25): SEQ ID NO: 1032; WAN024FVK_at; Start 85; Stop 109
caagtcatgcagttttcctttgaaa

SEQ ID NO: 222743 - DNA, 25 bp, Artificial
  probe
  misc_feature (1)..(25): SEQ ID NO: 1032; WAN024FVK_at; Start 232; Stop 256
aatcatcgcaaattctcttaccaag

SEQ ID NO: 222744 - DNA, 25 bp, Artificial
  probe
  misc_feature (1)..(25): SEQ ID NO: 1032; WAN024FVK_at; Start 293; Stop 317
attgcttgcccagcggtcaccatgt

SEQ ID NO: 222745 - DNA, 25 bp, Artificial
  probe
  misc_feature (1)..(25): SEQ ID NO: 1032; WAN024FVK_at; Start 393; Stop 417
taggcaagacactacggctgtcgcg

SEQ ID NO: 222746 - DNA, 25 bp, Artificial
  probe
  misc_feature (1)..(25): SEQ ID NO: 1032; WAN024FVK_at; Start 174; Stop 198
tcggcccagcaccagaaaggtaggt

SEQ ID NO: 222747 - DNA, 25 bp, Artificial
  probe
  misc_feature (1)..(25): SEQ ID NO: 1032; WAN024FVK_at; Start 402; Stop 426
cactacggctgtcgcgagtacgtaa

SEQ ID NO: 222748 - DNA, 25 bp, Artificial
  probe
  misc_feature (1)..(25): SEQ ID NO: 1032; WAN024FVK_at; Start 144; Stop 168
tcttgtcatgagaagccagaaccat

SEQ ID NO: 222749 - DNA, 25 bp, Artificial
  probe
  misc_feature (1)..(25): SEQ ID NO: 1032; WAN024FVK_at; Start 325; Stop 349
caacaaggcagcaaccgctacattg

SEQ ID NO: 222750 - DNA, 25 bp, Artificial
  probe
  misc_feature (1)..(25): SEQ ID NO: 1032; WAN024FVK_at; Start 136; Stop 160
tgttggcatcttgtcatgagaagcc

SEQ ID NO: 222751 - DNA, 25 bp, Artificial
  probe
  misc_feature (1)..(25): SEQ ID NO: 1032; WAN024FVK_at; Start 121; Stop 145
caattctgccttaattgttggcatc

SEQ ID NO: 222752 - DNA, 25 bp, Artificial
  probe
  misc_feature (1)..(25): SEQ ID NO: 1032; WAN024FVK_at; Start 45; Stop 69
tttattttgcttctacacggacacc

SEQ ID NO: 222753 - DNA, 25 bp, Artificial
  probe
  misc_feature (1)..(25): SEQ ID NO: 1032; WAN024FVK_at; Start 153; Stop 177
gagaagccagaaccataactgtcgg

SEQ ID NO: 222754 - DNA, 25 bp, Artificial
  probe
  misc_feature (1)..(25): SEQ ID NO: 1032; WAN024FVK_at; Start 10; Stop 34
tctggtcaagagtttccccatccta

SEQ ID NO: 222755 - DNA, 25 bp, Artificial
  probe
  misc_feature (1)..(25): SEQ ID NO: 1032; WAN024FVK_at; Start 253; Stop 277
caagtcctgacgatagcgctcatgg

SEQ ID NO: 222756 - DNA, 25 bp, Artificial
  probe
  misc_feature (1)..(25): SEQ ID NO: 1032; WAN024FVK_at; Start 362; Stop 386
gcagcaacagcttccttataagaca

SEQ ID NO: 222757 - DNA, 25 bp, Artificial
  probe
  misc_feature (1)..(25): SEQ ID NO: 1032; WAN024FVK_at; Start 266; Stop 290
tagcgctcatggaagaggtctccct

SEQ ID NO: 222758 - DNA, 25 bp, Artificial
  probe
  misc_feature (1)..(25): SEQ ID NO: 2495; WAN024FVL_at; Start 1173; Stop 1197
ccttcaagatggcaaagagggtgac

SEQ ID NO: 222759 - DNA, 25 bp, Artificial
  probe
  misc_feature (1)..(25): SEQ ID NO: 2495; WAN024FVL_at; Start 424; Stop 448
gcagcagttgctggtgggattccaa

SEQ ID NO: 222760 - DNA, 25 bp, Artificial
  probe
  misc_feature (1)..(25): SEQ ID NO: 2495; WAN024FVL_at; Start 312; Stop 336
tgccttggaagctggaaaacacgtt

SEQ ID NO: 222761 - DNA, 25 bp, Artificial
  probe
  misc_feature (1)..(25): SEQ ID NO: 2495; WAN024FVL_at; Start 557; Stop 581
ggtcttacgatgatgctcttgcgga

SEQ ID NO: 222762 - DNA, 25 bp, Artificial
  probe
  misc_feature (1)..(25): SEQ ID NO: 2495; WAN024FVL_at; Start 917; Stop 941
ctatgtactacggaccaggtgcggg

SEQ ID NO: 222763 - DNA, 25 bp, Artificial
  probe
  misc_feature (1)..(25): SEQ ID NO: 2495; WAN024FVL_at; Start 352; Stop 376
gaccttttagctgtccatggcgcag

SEQ ID NO: 222764 - DNA, 25 bp, Artificial
  probe
  misc_feature (1)..(25): SEQ ID NO: 2495; WAN024FVL_at; Start 573; Stop 597
tcttgcggaagcacaacgtctagga

SEQ ID NO: 222765 - DNA, 25 bp, Artificial
  probe
  misc_feature (1)..(25): SEQ ID NO: 2495; WAN024FVL_at; Start 1021; Stop 1045
gacttcaacgaatatagccgtgact

SEQ ID NO: 222766 - DNA, 25 bp, Artificial
  probe
  misc_feature (1)..(25): SEQ ID NO: 2495; WAN024FVL_at; Start 684; Stop 708
gaagattgcctttgatgatgtagcc

SEQ ID NO: 222767 - DNA, 25 bp, Artificial
  probe
  misc_feature (1)..(25): SEQ ID NO: 2495; WAN024FVL_at; Start 53; Stop 77
tactaggatttggtaccgttgcaag

SEQ ID NO: 222768 - DNA, 25 bp, Artificial
  probe
  misc_feature (1)..(25): SEQ ID NO: 2495; WAN024FVL_at; Start 409; Stop 433
gcactttactacgaagcagcagttg

SEQ ID NO: 222769 - DNA, 25 bp, Artificial
  probe
  misc_feature (1)..(25): SEQ ID NO: 2495; WAN024FVL_at; Start 810; Stop 834
tattgctgcagaagtgactccaacc

SEQ ID NO: 222770 - DNA, 25 bp, Artificial
  probe
  misc_feature (1)..(25): SEQ ID NO: 2495; WAN024FVL_at; Start 489; Stop 513
tacgcgcgtgcttggagtagtcaac

SEQ ID NO: 222771 - DNA, 25 bp, Artificial
  probe
  misc_feature (1)..(25): SEQ ID NO: 2495; WAN024FVL_at; Start 515; Stop 539
gaacttccaacttcatggtgaccaa

SEQ ID NO: 222772 - DNA, 25 bp, Artificial
  probe
  misc_feature (1)..(25): SEQ ID NO: 2495; WAN024FVL_at; Start 700; Stop 724
gatgtagcccacaagggaatccgca

SEQ ID NO: 222773 - DNA, 25 bp, Artificial
  probe
  misc_feature (1)..(25): SEQ ID NO: 2495; WAN024FVL_at; Start 1109; Stop 1133
caaaaggtcaggtcttgaagttggc

SEQ ID NO: 222774 - DNA, 25 bp, Artificial
  probe
  misc_feature (1)..(25): SEQ ID NO: 2495; WAN024FVL_at; Start 1253; Stop 1277
tctcagctgaattgaagaaggtttc

SEQ ID NO: 222775 - DNA, 25 bp, Artificial
  probe
  misc_feature (1)..(25): SEQ ID NO: 2495; WAN024FVL_at; Start 177; Stop 201
aaaaaatcgcttgcttgcagcaggg

SEQ ID NO: 222776 - DNA, 25 bp, Artificial
  probe
  misc_feature (1)..(25): SEQ ID NO: 2495; WAN024FVL_at; Start 369; Stop 393
tggcgcagaattgctagaaatcgct

SEQ ID NO: 222777 - DNA, 25 bp, Artificial
  probe
  misc_feature (1)..(25): SEQ ID NO: 2495; WAN024FVL_at; Start 613; Stop 637
ccgacgaatgacgtagatgggattg

SEQ ID NO: 222778 - DNA, 25 bp, Artificial
  probe
  misc_feature (1)..(25): SEQ ID NO: 2495; WAN024FVL_at; Start 74; Stop 98
caagtggtgtgcctttcctcctaaa

SEQ ID NO: 222779 - DNA, 25 bp, Artificial
  probe
  misc_feature (1)..(25): SEQ ID NO: 2495; WAN024FVL_at; Start 731; Stop 755
caccagaagacgtagctgtagctca

SEQ ID NO: 222780 - DNA, 25 bp, Artificial
  probe
  misc_feature (1)..(25): SEQ ID NO: 2495; WAN024FVL_at; Start 715; Stop 739
ggaatccgcaatatcacaccagaag

SEQ ID NO: 222781 - DNA, 25 bp, Artificial
  probe
  misc_feature (1)..(25): SEQ ID NO: 2495; WAN024FVL_at; Start 596; Stop 620
gatttgcagaaagcgatccgacgaa

SEQ ID NO: 222782 - DNA, 25 bp, Artificial
  probe
  misc_feature (1)..(25): SEQ ID NO: 2495; WAN024FVL_at; Start 932; Stop 956
caggtgcgggtcaaaaaccaactgc

SEQ ID NO: 222783 - DNA, 25 bp, Artificial
  probe
  misc_feature (1)..(25): SEQ ID NO: 2495; WAN024FVL_at; Start 843; Stop 867
taaagcgcacccacttgctagtgtg

SEQ ID NO: 222784 - DNA, 25 bp, Artificial
  probe
  misc_feature (1)..(25): SEQ ID NO: 2495; WAN024FVL_at; Start 474; Stop 498
ggcttctgataaaattacgcgcgtg

SEQ ID NO: 222785 - DNA, 25 bp, Artificial
  probe
  misc_feature (1)..(25): SEQ ID NO: 2495; WAN024FVL_at; Start 1234; Stop 1258
aaagcccagcttgaaaatgtctcag

SEQ ID NO: 222786 - DNA, 25 bp, Artificial
  probe
  misc_feature (1)..(25): SEQ ID NO: 2495; WAN024FVL_at; Start 1197; Stop 1221
caaggcgcgtgtcgttatcatcaca

SEQ ID NO: 222787 - DNA, 25 bp, Artificial
  probe
  misc_feature (1)..(25): SEQ ID NO: 2495; WAN024FVL_at; Start 1298; Stop 1322
ccttcaaggtgctaggagaataact

SEQ ID NO: 222788 - DNA, 25 bp, Artificial
  probe
  misc_feature (1)..(25): SEQ ID NO: 2495; WAN024FVL_at; Start 959; Stop 983
caagtgttgtagctgatattgtccg

SEQ ID NO: 222789 - DNA, 25 bp, Artificial
  probe
  misc_feature (1)..(25): SEQ ID NO: 2495; WAN024FVL_at; Start 385; Stop 409
gaaatcgctcaagctaacaaggtag

SEQ ID NO: 222790 - DNA, 25 bp, Artificial
  probe
  misc_feature (1)..(25): SEQ ID NO: 2495; WAN024FVL_at; Start 628; Stop 652
gatgggattgatgcagcctacaaga

SEQ ID NO: 222791 - DNA, 25 bp, Artificial
  probe
  misc_feature (1)..(25): SEQ ID NO: 2495; WAN024FVL_at; Start 1041; Stop 1065
tgacttggtcttggcaaatcctgaa

SEQ ID NO: 222792 - DNA, 25 bp, Artificial
  probe
  misc_feature (1)..(25): SEQ ID NO: 1098; WAN024FVM_at; Start 282; Stop 306
gattgaactagccaaccaactgggt

SEQ ID NO: 222793 - DNA, 25 bp, Artificial
  probe
  misc_feature (1)..(25): SEQ ID NO: 1098; WAN024FVM_at; Start 18; Stop 42
tgcaaccagtgccaatatcgggcca

SEQ ID NO: 222794 - DNA, 25 bp, Artificial
  probe
  misc_feature (1)..(25): SEQ ID NO: 1098; WAN024FVM_at; Start 544; Stop 568
gctgttgctgcaagttctatcgcca

SEQ ID NO: 222795 - DNA, 25 bp, Artificial
  probe
  misc_feature (1)..(25): SEQ ID NO: 1098; WAN024FVM_at; Start 783; Stop 807
taaggcagaattggaaaagcaacct

SEQ ID NO: 222796 - DNA, 25 bp, Artificial
  probe
  misc_feature (1)..(25): SEQ ID NO: 1098; WAN024FVM_at; Start 484; Stop 508
tatgaattacgtactcgcgacagcc

SEQ ID NO: 222797 - DNA, 25 bp, Artificial
  probe
  misc_feature (1)..(25): SEQ ID NO: 1098; WAN024FVM_at; Start 561; Stop 585
tatcgccaatgtagcggttgctgcc

SEQ ID NO: 222798 - DNA, 25 bp, Artificial
  probe
  misc_feature (1)..(25): SEQ ID NO: 1098; WAN024FVM_at; Start 297; Stop 321
ccaactgggtcaactcaacttatca

SEQ ID NO: 222799 - DNA, 25 bp, Artificial
  probe
  misc_feature (1)..(25): SEQ ID NO: 1098; WAN024FVM_at; Start 654; Stop 678
tcaggacttggtaagagaatttgcg

SEQ ID NO: 222800 - DNA, 25 bp, Artificial
  probe
  misc_feature (1)..(25): SEQ ID NO: 1098; WAN024FVM_at; Start 451; Stop 475
ccagagtgtgattttctagcttaca

SEQ ID NO: 222801 - DNA, 25 bp, Artificial
  probe
  misc_feature (1)..(25): SEQ ID NO: 1098; WAN024FVM_at; Start 810; Stop 834
caaaggaaaactgcatgacttgaga

SEQ ID NO: 222802 - DNA, 25 bp, Artificial
  probe
  misc_feature (1)..(25): SEQ ID NO: 1098; WAN024FVM_at; Start 707; Stop 731
gggcctatgcaacctacctttctgg

SEQ ID NO: 222803 - DNA, 25 bp, Artificial
  probe
  misc_feature (1)..(25): SEQ ID NO: 1098; WAN024FVM_at; Start 189; Stop 213
tgtaccagacttgcaaccaagacgc

SEQ ID NO: 222804 - DNA, 25 bp, Artificial
  probe
  misc_feature (1)..(25): SEQ ID NO: 1098; WAN024FVM_at; Start 420; Stop 444
agggcaagtctctgctatcgtagca

SEQ ID NO: 222805 - DNA, 25 bp, Artificial
  probe
  misc_feature (1)..(25): SEQ ID NO: 1098; WAN024FVM_at; Start 238; Stop 262
ttggcgcgcggtttgggttcttcca

SEQ ID NO: 222806 - DNA, 25 bp, Artificial
  probe
  misc_feature (1)..(25): SEQ ID NO: 1098; WAN024FVM_at; Start 221; Stop 245
tgaccagtgatgtccctttggcgcg

SEQ ID NO: 222807 - DNA, 25 bp, Artificial
  probe
  misc_feature (1)..(25): SEQ ID NO: 1098; WAN024FVM_at; Start 407; Stop 431
caagttctgttgaagggcaagtctc

SEQ ID NO: 222808 - DNA, 25 bp, Artificial
  probe
  misc_feature (1)..(25): SEQ ID NO: 1098; WAN024FVM_at; Start 205; Stop 229
ccaagacgcttgaaaatgaccagtg

SEQ ID NO: 222809 - DNA, 25 bp, Artificial
  probe
  misc_feature (1)..(25): SEQ ID NO: 1098; WAN024FVM_at; Start 756; Stop 780
ggcttctcatgacaagatgccaaca

SEQ ID NO: 222810 - DNA, 25 bp, Artificial
  probe
  misc_feature (1)..(25): SEQ ID NO: 1098; WAN024FVM_at; Start 435; Stop 459
tatcgtagcagactttccagagtgt

SEQ ID NO: 222811 - DNA, 25 bp, Artificial
  probe
  misc_feature (1)..(25): SEQ ID NO: 1098; WAN024FVM_at; Start 3; Stop 27
gaagattattgtacctgcaaccagt

SEQ ID NO: 222812 - DNA, 25 bp, Artificial
  probe
  misc_feature (1)..(25): SEQ ID NO: 1098; WAN024FVM_at; Start 33; Stop 57
tatcgggccaggttttgactcggtc

SEQ ID NO: 222813 - DNA, 25 bp, Artificial
  probe
  misc_feature (1)..(25): SEQ ID NO: 1098; WAN024FVM_at; Start 740; Stop 764
cgacagttatggttctggcttctca

SEQ ID NO: 222814 - DNA, 25 bp, Artificial
  probe
  misc_feature (1)..(25): SEQ ID NO: 1098; WAN024FVM_at; Start 504; Stop 528
cagccgtagtgtcttgcctaaaaaa

SEQ ID NO: 222815 - DNA, 25 bp, Artificial
  probe
  misc_feature (1)..(25): SEQ ID NO: 1098; WAN024FVM_at; Start 325; Stop 349
catgaaaaattgcagttagcgacca

SEQ ID NO: 222816 - DNA, 25 bp, Artificial
  probe
  misc_feature (1)..(25): SEQ ID NO: 1098; WAN024FVM_at; Start 830; Stop 854
tgagagttgatacccaaggtgtccg

SEQ ID NO: 222817 - DNA, 25 bp, Artificial
  probe
  misc_feature (1)..(25): SEQ ID NO: 1098; WAN024FVM_at; Start 49; Stop 73
gactcggtcggtgtagctgtaacca

SEQ ID NO: 222818 - DNA, 25 bp, Artificial
  probe
  misc_feature (1)..(25): SEQ ID NO: 1098; WAN024FVM_at; Start 356; Stop 380
aagggcatcctgacaatgtggctcc

SEQ ID NO: 222819 - DNA, 25 bp, Artificial
  probe
  misc_feature (1)..(25): SEQ ID NO: 1098; WAN024FVM_at; Start 113; Stop 137
ggctgattgaacaccagattggcaa

SEQ ID NO: 222820 - DNA, 25 bp, Artificial
  probe
  misc_feature (1)..(25): SEQ ID NO: 1098; WAN024FVM_at; Start 843; Stop 867
ccaaggtgtccgtgtagaagcaaaa

SEQ ID NO: 222821 - DNA, 25 bp, Artificial
  probe
  misc_feature (1)..(25): SEQ ID NO: 1098; WAN024FVM_at; Start 611; Stop 635
ctgggcaagcaatcgagggagacct

SEQ ID NO: 222822 - DNA, 25 bp, Artificial
  probe
  misc_feature (1)..(25): SEQ ID NO: 1098; WAN024FVM_at; Start 684; Stop 708
taagcaagtgaccaaagaaaatggg

SEQ ID NO: 222823 - DNA, 25 bp, Artificial
  probe
  misc_feature (1)..(25): SEQ ID NO: 1098; WAN024FVM_at; Start 341; Stop 365
tagcgaccaagattgaagggcatcc

SEQ ID NO: 222824 - DNA, 25 bp, Artificial
  probe
  misc_feature (1)..(25): SEQ ID NO: 1098; WAN024FVM_at; Start 585; Stop 609
cttgttggcaggagacatggtgacc

SEQ ID NO: 222825 - DNA, 25 bp, Artificial
  probe
  misc_feature (1)..(25): SEQ ID NO: 1098; WAN024FVM_at; Start 721; Stop 745
tacctttctggtgctgggccgacag

SEQ ID NO: 222826 - DNA, 25 bp, Artificial
  probe
  misc_feature (1)..(25): SEQ ID NO: 7334; WAN024FVN_at; Start 103; Stop 127
tcttgtcctcggcaggatatttatg

SEQ ID NO: 222827 - DNA, 25 bp, Artificial
  probe
  misc_feature (1)..(25): SEQ ID NO: 7334; WAN024FVN_at; Start 120; Stop 144
tatttatgagtcgagctcccctact

SEQ ID NO: 222828 - DNA, 25 bp, Artificial
  probe
  misc_feature (1)..(25): SEQ ID NO: 7334; WAN024FVN_at; Start 125; Stop 149
atgagtcgagctcccctactgtctt

SEQ ID NO: 222829 - DNA, 25 bp, Artificial
  probe
  misc_feature (1)..(25): SEQ ID NO: 7334; WAN024FVN_at; Start 94; Stop 118
catgatacgtcttgtcctcggcagg

SEQ ID NO: 222830 - DNA, 25 bp, Artificial
  probe
  misc_feature (1)..(25): SEQ ID NO: 7334; WAN024FVN_at; Start 56; Stop 80
ccaaacctagacacgaaagtacaat

SEQ ID NO: 222831 - DNA, 25 bp, Artificial
  probe
  misc_feature (1)..(25): SEQ ID NO: 7334; WAN024FVN_at; Start 162; Stop 186
taaaccgtatataagtatagcatag

SEQ ID NO: 222832 - DNA, 25 bp, Artificial
  probe
  misc_feature (1)..(25): SEQ ID NO: 7334; WAN024FVN_at; Start 65; Stop 89
gacacgaaagtacaatacgcttctt

SEQ ID NO: 222833 - DNA, 25 bp, Artificial
  probe
  misc_feature (1)..(25): SEQ ID NO: 7334; WAN024FVN_at; Start 86; Stop 110
tctttttacatgatacgtcttgtcc

SEQ ID NO: 222834 - DNA, 25 bp, Artificial
  probe
  misc_feature (1)..(25): SEQ ID NO: 7334; WAN024FVN_at; Start 128; Stop 152
agtcgagctcccctactgtcttagg

SEQ ID NO: 222835 - DNA, 25 bp, Artificial
  probe
  misc_feature (1)..(25): SEQ ID NO: 7334; WAN024FVN_at; Start 99; Stop 123
tacgtcttgtcctcggcaggatatt

SEQ ID NO: 222836 - DNA, 25 bp, Artificial
  probe
  misc_feature (1)..(25): SEQ ID NO: 7334; WAN024FVN_at; Start 115; Stop 139
caggatatttatgagtcgagctccc

SEQ ID NO: 222837 - DNA, 25 bp, Artificial
  probe
  misc_feature (1)..(25): SEQ ID NO: 7334; WAN024FVN_at; Start 117; Stop 141
ggatatttatgagtcgagctcccct

SEQ ID NO: 222838 - DNA, 25 bp, Artificial
  probe
  misc_feature (1)..(25): SEQ ID NO: 7334; WAN024FVN_at; Start 92; Stop 116
tacatgatacgtcttgtcctcggca

SEQ ID NO: 222839 - DNA, 25 bp, Artificial
  probe
  misc_feature (1)..(25): SEQ ID NO: 7334; WAN024FVN_at; Start 118; Stop 142
gatatttatgagtcgagctccccta

SEQ ID NO: 222840 - DNA, 25 bp, Artificial
  probe
  misc_feature (1)..(25): SEQ ID NO: 7334; WAN024FVN_at; Start 63; Stop 87
tagacacgaaagtacaatacgcttc

SEQ ID NO: 222841 - DNA, 25 bp, Artificial
  probe
  misc_feature (1)..(25): SEQ ID NO: 7334; WAN024FVN_at; Start 122; Stop 146
tttatgagtcgagctcccctactgt

SEQ ID NO: 222842 - DNA, 25 bp, Artificial
  probe
  misc_feature (1)..(25): SEQ ID NO: 7334; WAN024FVN_at; Start 90; Stop 114
tttacatgatacgtcttgtcctcgg

SEQ ID NO: 222843 - DNA, 25 bp, Artificial
  probe
  misc_feature (1)..(25): SEQ ID NO: 7334; WAN024FVN_at; Start 95; Stop 119
atgatacgtcttgtcctcggcagga

SEQ ID NO: 222844 - DNA, 25 bp, Artificial
  probe
  misc_feature (1)..(25): SEQ ID NO: 7334; WAN024FVN_at; Start 67; Stop 91
cacgaaagtacaatacgcttctttt

SEQ ID NO: 222845 - DNA, 25 bp, Artificial
  probe
  misc_feature (1)..(25): SEQ ID NO: 7334; WAN024FVN_at; Start 1; Stop 25
gtgttcacctccgtaattattttgc

SEQ ID NO: 222846 - DNA, 25 bp, Artificial
  probe
  misc_feature (1)..(25): SEQ ID NO: 7334; WAN024FVN_at; Start 132; Stop 156
gagctcccctactgtcttaggcagt

SEQ ID NO: 222847 - DNA, 25 bp, Artificial
  probe
  misc_feature (1)..(25): SEQ ID NO: 7334; WAN024FVN_at; Start 5; Stop 29
tcacctccgtaattattttgcttgg

SEQ ID NO: 222848 - DNA, 25 bp, Artificial
  probe
  misc_feature (1)..(25): SEQ ID NO: 7334; WAN024FVN_at; Start 54; Stop 78
gcccaaacctagacacgaaagtaca

SEQ ID NO: 222849 - DNA, 25 bp, Artificial
  probe
  misc_feature (1)..(25): SEQ ID NO: 7334; WAN024FVN_at; Start 52; Stop 76
gcgcccaaacctagacacgaaagta

SEQ ID NO: 222850 - DNA, 25 bp, Artificial
  probe
  misc_feature (1)..(25): SEQ ID NO: 7334; WAN024FVN_at; Start 159; Stop 183
ttttaaaccgtatataagtatagca

SEQ ID NO: 222851 - DNA, 25 bp, Artificial
  probe
  misc_feature (1)..(25): SEQ ID NO: 7334; WAN024FVN_at; Start 50; Stop 74
acgcgcccaaacctagacacgaaag

SEQ ID NO: 222852 - DNA, 25 bp, Artificial
  probe
  misc_feature (1)..(25): SEQ ID NO: 7334; WAN024FVN_at; Start 134; Stop 158
gctcccctactgtcttaggcagttt

SEQ ID NO: 222853 - DNA, 25 bp, Artificial
  probe
  misc_feature (1)..(25): SEQ ID NO: 7334; WAN024FVN_at; Start 130; Stop 154
tcgagctcccctactgtcttaggca

SEQ ID NO: 222854 - DNA, 25 bp, Artificial
  probe
  misc_feature (1)..(25): SEQ ID NO: 7334; WAN024FVN_at; Start 123; Stop 147
ttatgagtcgagctcccctactgtc

SEQ ID NO: 222855 - DNA, 25 bp, Artificial
  probe
  misc_feature (1)..(25): SEQ ID NO: 7334; WAN024FVN_at; Start 83; Stop 107
gcttctttttacatgatacgtcttg

SEQ ID NO: 222856 - DNA, 25 bp, Artificial
  probe
  misc_feature (1)..(25): SEQ ID NO: 7334; WAN024FVN_at; Start 78; Stop 102
aatacgcttctttttacatgatacg

SEQ ID NO: 222857 - DNA, 25 bp, Artificial
  probe
  misc_feature (1)..(25): SEQ ID NO: 7334; WAN024FVN_at; Start 61; Stop 85
cctagacacgaaagtacaatacgct

SEQ ID NO: 222858 - DNA, 25 bp, Artificial
  probe
  misc_feature (1)..(25): SEQ ID NO: 7334; WAN024FVN_at; Start 75; Stop 99
tacaatacgcttctttttacatgat

SEQ ID NO: 222859 - DNA, 25 bp, Artificial
  probe
  misc_feature (1)..(25): SEQ ID NO: 7334; WAN024FVN_at; Start 97; Stop 121
gatacgtcttgtcctcggcaggata

SEQ ID NO: 222860 - DNA, 25 bp, Artificial
  probe
  misc_feature (1)..(25): SEQ ID NO: 4969; WAN024FVO_at; Start 219; Stop 243
gatcttcaagaccagctttttcagc

SEQ ID NO: 222861 - DNA, 25 bp, Artificial
  probe
  misc_feature (1)..(25): SEQ ID NO: 4969; WAN024FVO_at; Start 226; Stop 250
aagaccagctttttcagctgcacga

SEQ ID NO: 222862 - DNA, 25 bp, Artificial
  probe
  misc_feature (1)..(25): SEQ ID NO: 4969; WAN024FVO_at; Start 197; Stop 221
ggtccaacaaatacagatgcaagat

SEQ ID NO: 222863 - DNA, 25 bp, Artificial
  probe
  misc_feature (1)..(25): SEQ ID NO: 4969; WAN024FVO_at; Start 19; Stop 43
catagaaagaagtccttcgcggttt

SEQ ID NO: 222864 - DNA, 25 bp, Artificial
  probe
  misc_feature (1)..(25): SEQ ID NO: 4969; WAN024FVO_at; Start 1; Stop 25
ttgaagtacagaaaggagcatagaa

SEQ ID NO: 222865 - DNA, 25 bp, Artificial
  probe
  misc_feature (1)..(25): SEQ ID NO: 4969; WAN024FVO_at; Start 113; Stop 137
tcaagtgcttcagcgtttttagaaa

SEQ ID NO: 222866 - DNA, 25 bp, Artificial
  probe
  misc_feature (1)..(25): SEQ ID NO: 4969; WAN024FVO_at; Start 9; Stop 33
cagaaaggagcatagaaagaagtcc

SEQ ID NO: 222867 - DNA, 25 bp, Artificial
  probe
  misc_feature (1)..(25): SEQ ID NO: 4969; WAN024FVO_at; Start 177; Stop 201
tagaaaatgctactgcagatggtcc

SEQ ID NO: 222868 - DNA, 25 bp, Artificial
  probe
  misc_feature (1)..(25): SEQ ID NO: 4969; WAN024FVO_at; Start 85; Stop 109
agcgccttcgattgcaccaccttta

SEQ ID NO: 222869 - DNA, 25 bp, Artificial
  probe
  misc_feature (1)..(25): SEQ ID NO: 4969; WAN024FVO_at; Start 32; Stop 56
ccttcgcggtttggaagagttgcaa

SEQ ID NO: 222870 - DNA, 25 bp, Artificial
  probe
  misc_feature (1)..(25): SEQ ID NO: 4969; WAN024FVO_at; Start 182; Stop 206
aatgctactgcagatggtccaacaa

SEQ ID NO: 222871 - DNA, 25 bp, Artificial
  probe
  misc_feature (1)..(25): SEQ ID NO: 4969; WAN024FVO_at; Start 212; Stop 236
gatgcaagatcttcaagaccagctt

SEQ ID NO: 222872 - DNA, 25 bp, Artificial
  probe
  misc_feature (1)..(25): SEQ ID NO: 4969; WAN024FVO_at; Start 15; Stop 39
ggagcatagaaagaagtccttcgcg

SEQ ID NO: 222873 - DNA, 25 bp, Artificial
  probe
  misc_feature (1)..(25): SEQ ID NO: 4969; WAN024FVO_at; Start 145; Stop 169
caagattttcgctggtgcgataaca

SEQ ID NO: 222874 - DNA, 25 bp, Artificial
  probe
  misc_feature (1)..(25): SEQ ID NO: 4969; WAN024FVO_at; Start 103; Stop 127
acctttaatttcaagtgcttcagcg

SEQ ID NO: 222875 - DNA, 25 bp, Artificial
  probe
  misc_feature (1)..(25): SEQ ID NO: 4969; WAN024FVO_at; Start 233; Stop 257
gctttttcagctgcacgacgcaaga

SEQ ID NO: 222876 - DNA, 25 bp, Artificial
  probe
  misc_feature (1)..(25): SEQ ID NO: 4969; WAN024FVO_at; Start 72; Stop 96
ctttagatgcgacagcgccttcgat

SEQ ID NO: 222877 - DNA, 25 bp, Artificial
  probe
  misc_feature (1)..(25): SEQ ID NO: 4969; WAN024FVO_at; Start 170; Stop 194
tcttcattagaaaatgctactgcag

SEQ ID NO: 222878 - DNA, 25 bp, Artificial
  probe
  misc_feature (1)..(25): SEQ ID NO: 4969; WAN024FVO_at; Start 187; Stop 211
tactgcagatggtccaacaaataca

SEQ ID NO: 222879 - DNA, 25 bp, Artificial
  probe
  misc_feature (1)..(25): SEQ ID NO: 4969; WAN024FVO_at; Start 132; Stop 156
tagaaaagtcgttcaagattttcgc

SEQ ID NO: 222880 - DNA, 25 bp, Artificial
  probe
  misc_feature (1)..(25): SEQ ID NO: 4969; WAN024FVO_at; Start 38; Stop 62
cggtttggaagagttgcaagtgcaa

SEQ ID NO: 222881 - DNA, 25 bp, Artificial
  probe
  misc_feature (1)..(25): SEQ ID NO: 4969; WAN024FVO_at; Start 78; Stop 102
atgcgacagcgccttcgattgcacc

SEQ ID NO: 222882 - DNA, 25 bp, Artificial
  probe
  misc_feature (1)..(25): SEQ ID NO: 4969; WAN024FVO_at; Start 191; Stop 215
gcagatggtccaacaaatacagatg

SEQ ID NO: 222883 - DNA, 25 bp, Artificial
  probe
  misc_feature (1)..(25): SEQ ID NO: 4969; WAN024FVO_at; Start 68; Stop 92
tcttctttagatgcgacagcgcctt

SEQ ID NO: 222884 - DNA, 25 bp, Artificial
  probe
  misc_feature (1)..(25): SEQ ID NO: 4969; WAN024FVO_at; Start 194; Stop 218
gatggtccaacaaatacagatgcaa

SEQ ID NO: 222885 - DNA, 25 bp, Artificial
  probe
  misc_feature (1)..(25): SEQ ID NO: 4969; WAN024FVO_at; Start 139; Stop 163
gtcgttcaagattttcgctggtgcg

SEQ ID NO: 222886 - DNA, 25 bp, Artificial
  probe
  misc_feature (1)..(25): SEQ ID NO: 4969; WAN024FVO_at; Start 93; Stop 117
cgattgcaccacctttaatttcaag

SEQ ID NO: 222887 - DNA, 25 bp, Artificial
  probe
  misc_feature (1)..(25): SEQ ID NO: 4969; WAN024FVO_at; Start 237; Stop 261
tttcagctgcacgacgcaagattga

SEQ ID NO: 222888 - DNA, 25 bp, Artificial
  probe
  misc_feature (1)..(25): SEQ ID NO: 4969; WAN024FVO_at; Start 117; Stop 141
gtgcttcagcgtttttagaaaagtc

SEQ ID NO: 222889 - DNA, 25 bp, Artificial
  probe
  misc_feature (1)..(25): SEQ ID NO: 4969; WAN024FVO_at; Start 153; Stop 177
tcgctggtgcgataacatcttcatt

SEQ ID NO: 222890 - DNA, 25 bp, Artificial
  probe
  misc_feature (1)..(25): SEQ ID NO: 4969; WAN024FVO_at; Start 158; Stop 182
ggtgcgataacatcttcattagaaa

SEQ ID NO: 222891 - DNA, 25 bp, Artificial
  probe
  misc_feature (1)..(25): SEQ ID NO: 4969; WAN024FVO_at; Start 63; Stop 87
gaatctcttctttagatgcgacagc

SEQ ID NO: 222892 - DNA, 25 bp, Artificial
  probe
  misc_feature (1)..(25): SEQ ID NO: 4969; WAN024FVO_at; Start 208; Stop 232
tacagatgcaagatcttcaagacca

SEQ ID NO: 222893 - DNA, 25 bp, Artificial
  probe
  misc_feature (1)..(25): SEQ ID NO: 4969; WAN024FVO_at; Start 48; Stop 72
gagttgcaagtgcaagaatctcttc

SEQ ID NO: 222894 - DNA, 25 bp, Artificial
  probe
  misc_feature (1)..(25): SEQ ID NO: 5568; WAN024FVP_at; Start 59; Stop 83
cactaatgagtgaagcaattattgc

SEQ ID NO: 222895 - DNA, 25 bp, Artificial
  probe
  misc_feature (1)..(25): SEQ ID NO: 5568; WAN024FVP_at; Start 409; Stop 433
ggcgctgtcgcatctaaagaagaga

SEQ ID NO: 222896 - DNA, 25 bp, Artificial
  probe
  misc_feature (1)..(25): SEQ ID NO: 5568; WAN024FVP_at; Start 510; Stop 534
caacgttgctcttgcagtcaaagcg

SEQ ID NO: 222897 - DNA, 25 bp, Artificial
  probe
  misc_feature (1)..(25): SEQ ID NO: 5568; WAN024FVP_at; Start 137; Stop 161
ctatcgtcgttgtagacgctcgtgg

SEQ ID NO: 222898 - DNA, 25 bp, Artificial
  probe
  misc_feature (1)..(25): SEQ ID NO: 5568; WAN024FVP_at; Start 331; Stop 355
gttatcgcaccagcgaaaatcttga

SEQ ID NO: 222899 - DNA, 25 bp, Artificial
  probe
  misc_feature (1)..(25): SEQ ID NO: 5568; WAN024FVP_at; Start 543; Stop 567
aagcaaagaagacgcggcttaacta

SEQ ID NO: 222900 - DNA, 25 bp, Artificial
  probe
  misc_feature (1)..(25): SEQ ID NO: 5568; WAN024FVP_at; Start 387; Stop 411
aattaaaggtggtgcaatcgaaggc

SEQ ID NO: 222901 - DNA, 25 bp, Artificial
  probe
  misc_feature (1)..(25): SEQ ID NO: 5568; WAN024FVP_at; Start 360; Stop 384
cttttctaaaaacgctgaagcactt

SEQ ID NO: 222902 - DNA, 25 bp, Artificial
  probe
  misc_feature (1)..(25): SEQ ID NO: 5568; WAN024FVP_at; Start 524; Stop 548
cagtcaaagcggttgcagaaagcaa

SEQ ID NO: 222903 - DNA, 25 bp, Artificial
  probe
  misc_feature (1)..(25): SEQ ID NO: 5568; WAN024FVP_at; Start 486; Stop 510
ttctgtacttcaagcgccagtgcgc

SEQ ID NO: 222904 - DNA, 25 bp, Artificial
  probe
  misc_feature (1)..(25): SEQ ID NO: 5568; WAN024FVP_at; Start 232; Stop 256
aaaaactcaatcttgcgtcgtgcag

SEQ ID NO: 222905 - DNA, 25 bp, Artificial
  probe
  misc_feature (1)..(25): SEQ ID NO: 5568; WAN024FVP_at; Start 425; Stop 449
aagaagagattcttgcacttgcaac

SEQ ID NO: 222906 - DNA, 25 bp, Artificial
  probe
  misc_feature (1)..(25): SEQ ID NO: 5568; WAN024FVP_at; Start 537; Stop 561
tgcagaaagcaaagaagacgcggct

SEQ ID NO: 222907 - DNA, 25 bp, Artificial
  probe
  misc_feature (1)..(25): SEQ ID NO: 5568; WAN024FVP_at; Start 444; Stop 468
tgcaactcttccaaaccgcgaagga

SEQ ID NO: 222908 - DNA, 25 bp, Artificial
  probe
  misc_feature (1)..(25): SEQ ID NO: 5568; WAN024FVP_at; Start 292; Stop 316
tttgttggaccatctgcagtagcat

SEQ ID NO: 222909 - DNA, 25 bp, Artificial
  probe
  misc_feature (1)..(25): SEQ ID NO: 5568; WAN024FVP_at; Start 30; Stop 54
cccaagcaaaataattacggaggtg

SEQ ID NO: 222910 - DNA, 25 bp, Artificial
  probe
  misc_feature (1)..(25): SEQ ID NO: 5568; WAN024FVP_at; Start 372; Stop 396
cgctgaagcacttgaaattaaaggt

SEQ ID NO: 222911 - DNA, 25 bp, Artificial
  probe
  misc_feature (1)..(25): SEQ ID NO: 5568; WAN024FVP_at; Start 261; Stop 285
aaaagctggtcttgaagatcttgca

SEQ ID NO: 222912 - DNA, 25 bp, Artificial
  probe
  misc_feature (1)..(25): SEQ ID NO: 5568; WAN024FVP_at; Start 74; Stop 98
caattattgctaaaaaagcggaact

SEQ ID NO: 222913 - DNA, 25 bp, Artificial
  probe
  misc_feature (1)..(25): SEQ ID NO: 5568; WAN024FVP_at; Start 495; Stop 519
tcaagcgccagtgcgcaacgttgct

SEQ ID NO: 222914 - DNA, 25 bp, Artificial
  probe
  misc_feature (1)..(25): SEQ ID NO: 5568; WAN024FVP_at; Start 163; Stop 187
ttgacagttgagcaagatacagttc

SEQ ID NO: 222915 - DNA, 25 bp, Artificial
  probe
  misc_feature (1)..(25): SEQ ID NO: 5568; WAN024FVP_at; Start 246; Stop 270
gcgtcgtgcagctgaaaaagctggt

SEQ ID NO: 222916 - DNA, 25 bp, Artificial
  probe
  misc_feature (1)..(25): SEQ ID NO: 5568; WAN024FVP_at; Start 122; Stop 146
tgaaagctgctgcatctatcgtcgt

SEQ ID NO: 222917 - DNA, 25 bp, Artificial
  probe
  misc_feature (1)..(25): SEQ ID NO: 5568; WAN024FVP_at; Start 92; Stop 116
cggaactagttgacgtagtagctga

SEQ ID NO: 222918 - DNA, 25 bp, Artificial
  probe
  misc_feature (1)..(25): SEQ ID NO: 5568; WAN024FVP_at; Start 201; Stop 225
tcgtggaagcgaagttgagtataaa

SEQ ID NO: 222919 - DNA, 25 bp, Artificial
  probe
  misc_feature (1)..(25): SEQ ID NO: 5568; WAN024FVP_at; Start 45; Stop 69
tacggaggtgaacacactaatgagt

SEQ ID NO: 222920 - DNA, 25 bp, Artificial
  probe
  misc_feature (1)..(25): SEQ ID NO: 5568; WAN024FVP_at; Start 279; Stop 303
tcttgcatctgtatttgttggacca

SEQ ID NO: 222921 - DNA, 25 bp, Artificial
  probe
  misc_feature (1)..(25): SEQ ID NO: 5568; WAN024FVP_at; Start 477; Stop 501
tatgctcctttctgtacttcaagcg

SEQ ID NO: 222922 - DNA, 25 bp, Artificial
  probe
  misc_feature (1)..(25): SEQ ID NO: 5568; WAN024FVP_at; Start 304; Stop 328
tctgcagtagcattttctaatgaag

SEQ ID NO: 222923 - DNA, 25 bp, Artificial
  probe
  misc_feature (1)..(25): SEQ ID NO: 5568; WAN024FVP_at; Start 396; Stop 420
tggtgcaatcgaaggcgctgtcgca

SEQ ID NO: 222924 - DNA, 25 bp, Artificial
  probe
  misc_feature (1)..(25): SEQ ID NO: 5568; WAN024FVP_at; Start 186; Stop 210
tcttcgtcgtgagcttcgtggaagc

SEQ ID NO: 222925 - DNA, 25 bp, Artificial
  probe
  misc_feature (1)..(25): SEQ ID NO: 5568; WAN024FVP_at; Start 321; Stop 345
taatgaagatgttatcgcaccagcg

SEQ ID NO: 222926 - DNA, 25 bp, Artificial
  probe
  misc_feature (1)..(25): SEQ ID NO: 5568; WAN024FVP_at; Start 107; Stop 131
tagtagctgaaaaaatgaaagctgc

SEQ ID NO: 222927 - DNA, 25 bp, Artificial
  probe
  misc_feature (1)..(25): SEQ ID NO: 5568; WAN024FVP_at; Start 175; Stop 199
caagatacagttcttcgtcgtgagc

SEQ ID NO: 222928 - DNA, 25 bp, Artificial
  probe
  misc_feature (1)..(25): SEQ ID NO: 2679; WAN024FVQ_at; Start 278; Stop 302
aactggttcaggcaagtgacgatgc

SEQ ID NO: 222929 - DNA, 25 bp, Artificial
  probe
  misc_feature (1)..(25): SEQ ID NO: 2679; WAN024FVQ_at; Start 568; Stop 592
gaatatgtagaagaagtcggactca

SEQ ID NO: 222930 - DNA, 25 bp, Artificial
  probe
  misc_feature (1)..(25): SEQ ID NO: 2679; WAN024FVQ_at; Start 506; Stop 530
tggtcaatttcatcaaccccggtcg

SEQ ID NO: 222931 - DNA, 25 bp, Artificial
  probe
  misc_feature (1)..(25): SEQ ID NO: 2679; WAN024FVQ_at; Start 202; Stop 226
tcgacccctggtcgtgatccacggg

SEQ ID NO: 222932 - DNA, 25 bp, Artificial
  probe
  misc_feature (1)..(25): SEQ ID NO: 2679; WAN024FVQ_at; Start 44; Stop 68
tgattcgtcgcaaggctcaccctta

SEQ ID NO: 222933 - DNA, 25 bp, Artificial
  probe
  misc_feature (1)..(25): SEQ ID NO: 2679; WAN024FVQ_at; Start 188; Stop 212
agttaatgaccgtatcgacccctgg

SEQ ID NO: 222934 - DNA, 25 bp, Artificial
  probe
  misc_feature (1)..(25): SEQ ID NO: 2679; WAN024FVQ_at; Start 98; Stop 122
ttatggacaagggagaagatgctgc

SEQ ID NO: 222935 - DNA, 25 bp, Artificial
  probe
  misc_feature (1)..(25): SEQ ID NO: 2679; WAN024FVQ_at; Start 57; Stop 81
ggctcacccttatcaaaactattta

SEQ ID NO: 222936 - DNA, 25 bp, Artificial
  probe
  misc_feature (1)..(25): SEQ ID NO: 2679; WAN024FVQ_at; Start 175; Stop 199
gaaaaaatcgagcagttaatgaccg

SEQ ID NO: 222937 - DNA, 25 bp, Artificial
  probe
  misc_feature (1)..(25): SEQ ID NO: 2679; WAN024FVQ_at; Start 552; Stop 576
tctcgtaaaatacggcgaatatgta

SEQ ID NO: 222938 - DNA, 25 bp, Artificial
  probe
  misc_feature (1)..(25): SEQ ID NO: 2679; WAN024FVQ_at; Start 451; Stop 475
ccgaccttcctttatctgttggaag

SEQ ID NO: 222939 - DNA, 25 bp, Artificial
  probe
  misc_feature (1)..(25): SEQ ID NO: 2679; WAN024FVQ_at; Start 110; Stop 134
gagaagatgctgcacatgcctgtca

SEQ ID NO: 222940 - DNA, 25 bp, Artificial
  probe
  misc_feature (1)..(25): SEQ ID NO: 2679; WAN024FVQ_at; Start 472; Stop 496
gaagaagagtttactgtctatgaag

SEQ ID NO: 222941 - DNA, 25 bp, Artificial
  probe
  misc_feature (1)..(25): SEQ ID NO: 2679; WAN024FVQ_at; Start 290; Stop 314
caagtgacgatgctaaggatgttgt

SEQ ID NO: 222942 - DNA, 25 bp, Artificial
  probe
  misc_feature (1)..(25): SEQ ID NO: 2679; WAN024FVQ_at; Start 362; Stop 386
tggagctggacgagcaagccttagc

SEQ ID NO: 222943 - DNA, 25 bp, Artificial
  probe
  misc_feature (1)..(25): SEQ ID NO: 2679; WAN024FVQ_at; Start 413; Stop 437
aatccatcaaacgaatccaaggccg

SEQ ID NO: 222944 - DNA, 25 bp, Artificial
  probe
  misc_feature (1)..(25): SEQ ID NO: 2679; WAN024FVQ_at; Start 580; Stop 604
gaagtcggactcaaacgagtaccta

SEQ ID NO: 222945 - DNA, 25 bp, Artificial
  probe
  misc_feature (1)..(25): SEQ ID NO: 2679; WAN024FVQ_at; Start 136; Stop 160
cgcgaagtgaaagaagaagtcaatc

SEQ ID NO: 222946 - DNA, 25 bp, Artificial
  probe
  misc_feature (1)..(25): SEQ ID NO: 2679; WAN024FVQ_at; Start 82; Stop 106
gccttagttggaggctttatggaca

SEQ ID NO: 222947 - DNA, 25 bp, Artificial
  probe
  misc_feature (1)..(25): SEQ ID NO: 2679; WAN024FVQ_at; Start 486; Stop 510
tgtctatgaaggaaccgaactggtc

SEQ ID NO: 222948 - DNA, 25 bp, Artificial
  probe
  misc_feature (1)..(25): SEQ ID NO: 2679; WAN024FVQ_at; Start 264; Stop 288
tagtcgtgcattagaactggttcag

SEQ ID NO: 222949 - DNA, 25 bp, Artificial
  probe
  misc_feature (1)..(25): SEQ ID NO: 2679; WAN024FVQ_at; Start 151; Stop 175
gaagtcaatctcgatcttcctttgg

SEQ ID NO: 222950 - DNA, 25 bp, Artificial
  probe
  misc_feature (1)..(25): SEQ ID NO: 2679; WAN024FVQ_at; Start 249; Stop 273
tttagtgtacctacctagtcgtgca

SEQ ID NO: 222951 - DNA, 25 bp, Artificial
  probe
  misc_feature (1)..(25): SEQ ID NO: 2679; WAN024FVQ_at; Start 343; Stop 367
aaatgctaccttgagggagtggagc

SEQ ID NO: 222952 - DNA, 25 bp, Artificial
  probe
  misc_feature (1)..(25): SEQ ID NO: 2679; WAN024FVQ_at; Start 428; Stop 452
tccaaggccgtatcgactggaaccc

SEQ ID NO: 222953 - DNA, 25 bp, Artificial
  probe
  misc_feature (1)..(25): SEQ ID NO: 2679; WAN024FVQ_at; Start 231; Stop 255
gacagtgaccattgcctatttagtg

SEQ ID NO: 222954 - DNA, 25 bp, Artificial
  probe
  misc_feature (1)..(25): SEQ ID NO: 2679; WAN024FVQ_at; Start 379; Stop 403
gccttagcctttgaccattatgcca

SEQ ID NO: 222955 - DNA, 25 bp, Artificial
  probe
  misc_feature (1)..(25): SEQ ID NO: 2679; WAN024FVQ_at; Start 317; Stop 341
ttgtagatgttgactttcagacggg

SEQ ID NO: 222956 - DNA, 25 bp, Artificial
  probe
  misc_feature (1)..(25): SEQ ID NO: 2679; WAN024FVQ_at; Start 165; Stop 189
tcttcctttggaaaaaatcgagcag

SEQ ID NO: 222957 - DNA, 25 bp, Artificial
  probe
  misc_feature (1)..(25): SEQ ID NO: 2679; WAN024FVQ_at; Start 32; Stop 56
tcaaactcttgctgattcgtcgcaa

SEQ ID NO: 222958 - DNA, 25 bp, Artificial
  probe
  misc_feature (1)..(25): SEQ ID NO: 2679; WAN024FVQ_at; Start 6; Stop 30
ggcctactgctttgtcgaaggaaaa

SEQ ID NO: 222959 - DNA, 25 bp, Artificial
  probe
  misc_feature (1)..(25): SEQ ID NO: 2679; WAN024FVQ_at; Start 526; Stop 550
ggtcgcccaatcgtcagcaataact

SEQ ID NO: 222960 - DNA, 25 bp, Artificial
  probe
  misc_feature (1)..(25): SEQ ID NO: 2679; WAN024FVQ_at; Start 122; Stop 146
cacatgcctgtcagcgcgaagtgaa

SEQ ID NO: 222961 - DNA, 25 bp, Artificial
  probe
  misc_feature (1)..(25): SEQ ID NO: 2679; WAN024FVQ_at; Start 613; Stop 637
ccaagaaaaacctatcgattgaaat

SEQ ID NO: 222962 - DNA, 25 bp, Artificial
  probe
  misc_feature (1)..(25): SEQ ID NO: 680; WAN024FVR_at; Start 61; Stop 85
aaagcccgaaagattggttttgcag

SEQ ID NO: 222963 - DNA, 25 bp, Artificial
  probe
  misc_feature (1)..(25): SEQ ID NO: 680; WAN024FVR_at; Start 215; Stop 239
tgagcttgtttgcatcctggactgg

SEQ ID NO: 222964 - DNA, 25 bp, Artificial
  probe
  misc_feature (1)..(25): SEQ ID NO: 680; WAN024FVR_at; Start 462; Stop 486
gaaattatctgttcttgactggctc

SEQ ID NO: 222965 - DNA, 25 bp, Artificial
  probe
  misc_feature (1)..(25): SEQ ID NO: 680; WAN024FVR_at; Start 439; Stop 463
gaagaatcccactttgaagctaaga

SEQ ID NO: 222966 - DNA, 25 bp, Artificial
  probe
  misc_feature (1)..(25): SEQ ID NO: 680; WAN024FVR_at; Start 311; Stop 335
tctatttgattttggccatgaatgc

SEQ ID NO: 222967 - DNA, 25 bp, Artificial
  probe
  misc_feature (1)..(25): SEQ ID NO: 680; WAN024FVR_at; Start 477; Stop 501
tgactggctcaagtacttaaccttg

SEQ ID NO: 222968 - DNA, 25 bp, Artificial
  probe
  misc_feature (1)..(25): SEQ ID NO: 680; WAN024FVR_at; Start 509; Stop 533
tcatctggattggtatgggcttggc

SEQ ID NO: 222969 - DNA, 25 bp, Artificial
  probe
  misc_feature (1)..(25): SEQ ID NO: 680; WAN024FVR_at; Start 372; Stop 396
ctttgtcatgcagccgattggtctc

SEQ ID NO: 222970 - DNA, 25 bp, Artificial
  probe
  misc_feature (1)..(25): SEQ ID NO: 680; WAN024FVR_at; Start 387; Stop 411
gattggtctctgtacttggttgtcc

SEQ ID NO: 222971 - DNA, 25 bp, Artificial
  probe
  misc_feature (1)..(25): SEQ ID NO: 680; WAN024FVR_at; Start 576; Stop 600
tacctgttggtcagctcttgatgac

SEQ ID NO: 222972 - DNA, 25 bp, Artificial
  probe
  misc_feature (1)..(25): SEQ ID NO: 680; WAN024FVR_at; Start 199; Stop 223
aaaagtcatgactggctgagcttgt

SEQ ID NO: 222973 - DNA, 25 bp, Artificial
  probe
  misc_feature (1)..(25): SEQ ID NO: 680; WAN024FVR_at; Start 535; Stop 559
taccaaagtatcaatagcgctcgtc

SEQ ID NO: 222974 - DNA, 25 bp, Artificial
  probe
  misc_feature (1)..(25): SEQ ID NO: 680; WAN024FVR_at; Start 165; Stop 189
tgttcccttgatcttaaagttcacg

SEQ ID NO: 222975 - DNA, 25 bp, Artificial
  probe
  misc_feature (1)..(25): SEQ ID NO: 680; WAN024FVR_at; Start 120; Stop 144
tggtcgtagccttttccagtggttg

SEQ ID NO: 222976 - DNA, 25 bp, Artificial
  probe
  misc_feature (1)..(25): SEQ ID NO: 680; WAN024FVR_at; Start 404; Stop 428
ggttgtccaatcgtatcaatgacca

SEQ ID NO: 222977 - DNA, 25 bp, Artificial
  probe
  misc_feature (1)..(25): SEQ ID NO: 680; WAN024FVR_at; Start 45; Stop 69
taaaaatgtccatgccaaagcccga

SEQ ID NO: 222978 - DNA, 25 bp, Artificial
  probe
  misc_feature (1)..(25): SEQ ID NO: 680; WAN024FVR_at; Start 150; Stop 174
catcgccttgtcaagtgttcccttg

SEQ ID NO: 222979 - DNA, 25 bp, Artificial
  probe
  misc_feature (1)..(25): SEQ ID NO: 680; WAN024FVR_at; Start 363; Stop 387
gatttacttctttgtcatgcagccg

SEQ ID NO: 222980 - DNA, 25 bp, Artificial
  probe
  misc_feature (1)..(25): SEQ ID NO: 680; WAN024FVR_at; Start 135; Stop 159
ccagtggttgtatctcatcgccttg

SEQ ID NO: 222981 - DNA, 25 bp, Artificial
  probe
  misc_feature (1)..(25): SEQ ID NO: 680; WAN024FVR_at; Start 345; Stop 369
tggtgaagttttgacagcgatttac

SEQ ID NO: 222982 - DNA, 25 bp, Artificial
  probe
  misc_feature (1)..(25): SEQ ID NO: 680; WAN024FVR_at; Start 549; Stop 573
tagcgctcgtcctttccgtgatagt

SEQ ID NO: 222983 - DNA, 25 bp, Artificial
  probe
  misc_feature (1)..(25): SEQ ID NO: 680; WAN024FVR_at; Start 90; Stop 114
catgcgcctgctctggaaagatctc

SEQ ID NO: 222984 - DNA, 25 bp, Artificial
  probe
  misc_feature (1)..(25): SEQ ID NO: 680; WAN024FVR_at; Start 327; Stop 351
catgaatgccactttttatggtgaa

SEQ ID NO: 222985 - DNA, 25 bp, Artificial
  probe
  misc_feature (1)..(25): SEQ ID NO: 680; WAN024FVR_at; Start 251; Stop 275
tcatcttggtatcagaaggacgtgc

SEQ ID NO: 222986 - DNA, 25 bp, Artificial
  probe
  misc_feature (1)..(25): SEQ ID NO: 680; WAN024FVR_at; Start 106; Stop 130
aaagatctctttgttggtcgtagcc

SEQ ID NO: 222987 - DNA, 25 bp, Artificial
  probe
  misc_feature (1)..(25): SEQ ID NO: 680; WAN024FVR_at; Start 184; Stop 208
ttcacgcaaaatacaaaaagtcatg

SEQ ID NO: 222988 - DNA, 25 bp, Artificial
  probe
  misc_feature (1)..(25): SEQ ID NO: 680; WAN024FVR_at; Start 229; Stop 253
tcctggactgggattgtctgtctca

SEQ ID NO: 222989 - DNA, 25 bp, Artificial
  probe
  misc_feature (1)..(25): SEQ ID NO: 680; WAN024FVR_at; Start 563; Stop 587
tccgtgatagtgttacctgttggtc

SEQ ID NO: 222990 - DNA, 25 bp, Artificial
  probe
  misc_feature (1)..(25): SEQ ID NO: 680; WAN024FVR_at; Start 591; Stop 615
tcttgatgacacgtctcaaccgtga

SEQ ID NO: 222991 - DNA, 25 bp, Artificial
  probe
  misc_feature (1)..(25): SEQ ID NO: 680; WAN024FVR_at; Start 265; Stop 289
gaaggacgtgcaagcaattatctct

SEQ ID NO: 222992 - DNA, 25 bp, Artificial
  probe
  misc_feature (1)..(25): SEQ ID NO: 680; WAN024FVR_at; Start 75; Stop 99
tggttttgcagggttcatgcgcctg

SEQ ID NO: 222993 - DNA, 25 bp, Artificial
  probe
  misc_feature (1)..(25): SEQ ID NO: 680; WAN024FVR_at; Start 416; Stop 440
gtatcaatgaccaaggtaaaccaga

SEQ ID NO: 222994 - DNA, 25 bp, Artificial
  probe
  misc_feature (1)..(25): SEQ ID NO: 680; WAN024FVR_at; Start 522; Stop 546
tatgggcttggcttaccaaagtatc

SEQ ID NO: 222995 - DNA, 25 bp, Artificial
  probe
  misc_feature (1)..(25): SEQ ID NO: 680; WAN024FVR_at; Start 498; Stop 522
cttgactgccatcatctggattggt

SEQ ID NO: 222996 - DNA, 25 bp, Artificial
  probe
  misc_feature (1)..(25): SEQ ID NO: 2578; WAN024FVS_at; Start 281; Stop 305
ccaaggatttggctaggtattacga

SEQ ID NO: 222997 - DNA, 25 bp, Artificial
  probe
  misc_feature (1)..(25): SEQ ID NO: 2578; WAN024FVS_at; Start 611; Stop 635
tgttggctcctatgtcaatgacgga

SEQ ID NO: 222998 - DNA, 25 bp, Artificial
  probe
  misc_feature (1)..(25): SEQ ID NO: 2578; WAN024FVS_at; Start 310; Stop 334
cctgtcagtctggaatacgcacgtg

SEQ ID NO: 222999 - DNA, 25 bp, Artificial
  probe
  misc_feature (1)..(25): SEQ ID NO: 2578; WAN024FVS_at; Start 409; Stop 433
tatgaccagacctcaaagttaatcg

SEQ ID NO: 223000 - DNA, 25 bp, Artificial
  probe
  misc_feature (1)..(25): SEQ ID NO: 2578; WAN024FVS_at; Start 195; Stop 219
gaaatacatcgctcaacccttccgt

SEQ ID NO: 223001 - DNA, 25 bp, Artificial
  probe
  misc_feature (1)..(25): SEQ ID NO: 2578; WAN024FVS_at; Start 125; Stop 149
gcactgtcttgccagaaagaaagtt

SEQ ID NO: 223002 - DNA, 25 bp, Artificial
  probe
  misc_feature (1)..(25): SEQ ID NO: 2578; WAN024FVS_at; Start 22; Stop 46
gaccagatgttagcggaaatttcct

SEQ ID NO: 223003 - DNA, 25 bp, Artificial
  probe
  misc_feature (1)..(25): SEQ ID NO: 2578; WAN024FVS_at; Start 109; Stop 133
tctaaacgtggatttggcactgtct

SEQ ID NO: 223004 - DNA, 25 bp, Artificial
  probe
  misc_feature (1)..(25): SEQ ID NO: 2578; WAN024FVS_at; Start 143; Stop 167
gaaagtttggtatctcggtgactat

SEQ ID NO: 223005 - DNA, 25 bp, Artificial
  probe
  misc_feature (1)..(25): SEQ ID NO: 2578; WAN024FVS_at; Start 340; Stop 364
cagattaaaaataacgtccgcgacg

SEQ ID NO: 223006 - DNA, 25 bp, Artificial
  probe
  misc_feature (1)..(25): SEQ ID NO: 2578; WAN024FVS_at; Start 396; Stop 420
cctgttgggacagtatgaccagacc

SEQ ID NO: 223007 - DNA, 25 bp, Artificial
  probe
  misc_feature (1)..(25): SEQ ID NO: 2578; WAN024FVS_at; Start 325; Stop 349
tacgcacgtgagtatcagattaaaa

SEQ ID NO: 223008 - DNA, 25 bp, Artificial
  probe
  misc_feature (1)..(25): SEQ ID NO: 2578; WAN024FVS_at; Start 594; Stop 618
gattctctttgtgcacctgttggct

SEQ ID NO: 223009 - DNA, 25 bp, Artificial
  probe
  misc_feature (1)..(25): SEQ ID NO: 2578; WAN024FVS_at; Start 265; Stop 289
gggaagaccactctagccaaggatt

SEQ ID NO: 223010 - DNA, 25 bp, Artificial
  probe
  misc_feature (1)..(25): SEQ ID NO: 2578; WAN024FVS_at; Start 235; Stop 259
aaagtattgatcatgggaagtgcca

SEQ ID NO: 223011 - DNA, 25 bp, Artificial
  probe
  misc_feature (1)..(25): SEQ ID NO: 2578; WAN024FVS_at; Start 477; Stop 501
cttggtaaccaagggctactatgat

SEQ ID NO: 223012 - DNA, 25 bp, Artificial
  probe
  misc_feature (1)..(25): SEQ ID NO: 2578; WAN024FVS_at; Start 251; Stop 275
gaagtgccagcaatgggaagaccac

SEQ ID NO: 223013 - DNA, 25 bp, Artificial
  probe
  misc_feature (1)..(25): SEQ ID NO: 2578; WAN024FVS_at; Start 522; Stop 546
ccaagtggacttatcaggagaaacc

SEQ ID NO: 223014 - DNA, 25 bp, Artificial
  probe
  misc_feature (1)..(25): SEQ ID NO: 2578; WAN024FVS_at; Start 507; Stop 531
catggagacagagaaccaagtggac

SEQ ID NO: 223015 - DNA, 25 bp, Artificial
  probe
  misc_feature (1)..(25): SEQ ID NO: 2578; WAN024FVS_at; Start 457; Stop 481
gtaatagccgataccaactccttgg

SEQ ID NO: 223016 - DNA, 25 bp, Artificial
  probe
  misc_feature (1)..(25): SEQ ID NO: 2578; WAN024FVS_at; Start 45; Stop 69
ctatgatgaaaaccagcaagagctg

SEQ ID NO: 223017 - DNA, 25 bp, Artificial
  probe
  misc_feature (1)..(25): SEQ ID NO: 2578; WAN024FVS_at; Start 557; Stop 581
tctttgtttcaatcttggccaagga

SEQ ID NO: 223018 - DNA, 25 bp, Artificial
  probe
  misc_feature (1)..(25): SEQ ID NO: 2578; WAN024FVS_at; Start 61; Stop 85
caagagctgatcttctttgtaggag

SEQ ID NO: 223019 - DNA, 25 bp, Artificial
  probe
  misc_feature (1)..(25): SEQ ID NO: 2578; WAN024FVS_at; Start 217; Stop 241
cgtcgtcagtttaccaagaaagtat

SEQ ID NO: 223020 - DNA, 25 bp, Artificial
  probe
  misc_feature (1)..(25): SEQ ID NO: 2578; WAN024FVS_at; Start 94; Stop 118
tatcagcaagaactatctaaacgtg

SEQ ID NO: 223021 - DNA, 25 bp, Artificial
  probe
  misc_feature (1)..(25): SEQ ID NO: 2578; WAN024FVS_at; Start 570; Stop 594
cttggccaaggaaaaatgggacttg

SEQ ID NO: 223022 - DNA, 25 bp, Artificial
  probe
  misc_feature (1)..(25): SEQ ID NO: 2578; WAN024FVS_at; Start 294; Stop 318
taggtattacgatgcgcctgtcagt

SEQ ID NO: 223023 - DNA, 25 bp, Artificial
  probe
  misc_feature (1)..(25): SEQ ID NO: 2578; WAN024FVS_at; Start 442; Stop 466
gccaatcgaggtttggtaatagccg

SEQ ID NO: 223024 - DNA, 25 bp, Artificial
  probe
  misc_feature (1)..(25): SEQ ID NO: 2578; WAN024FVS_at; Start 356; Stop 380
tccgcgacgatgaattgactccaaa

SEQ ID NO: 223025 - DNA, 25 bp, Artificial
  probe
  misc_feature (1)..(25): SEQ ID NO: 2578; WAN024FVS_at; Start 158; Stop 182
cggtgactatgattcgagaaaatcc

SEQ ID NO: 223026 - DNA, 25 bp, Artificial
  probe
  misc_feature (1)..(25): SEQ ID NO: 2578; WAN024FVS_at; Start 76; Stop 100
tttgtaggagaagcagactatcagc

SEQ ID NO: 223027 - DNA, 25 bp, Artificial
  probe
  misc_feature (1)..(25): SEQ ID NO: 2578; WAN024FVS_at; Start 9; Stop 33
gcaggagtggttagaccagatgtta

SEQ ID NO: 223028 - DNA, 25 bp, Artificial
  probe
  misc_feature (1)..(25): SEQ ID NO: 2578; WAN024FVS_at; Start 382; Stop 406
gattactactatctcctgttgggac

SEQ ID NO: 223029 - DNA, 25 bp, Artificial
  probe
  misc_feature (1)..(25): SEQ ID NO: 2578; WAN024FVS_at; Start 422; Stop 446
caaagttaatcgatagcaatgccaa

SEQ ID NO: 223030 - DNA, 25 bp, Artificial
  probe
  misc_feature (1)..(25): SEQ ID NO: 5604; WAN024FVT_at; Start 102; Stop 126
tgctggtgcaccgtcaacaagttct

SEQ ID NO: 223031 - DNA, 25 bp, Artificial
  probe
  misc_feature (1)..(25): SEQ ID NO: 5604; WAN024FVT_at; Start 241; Stop 265
tcagctgcatcagctgcagcaacag

SEQ ID NO: 223032 - DNA, 25 bp, Artificial
  probe
  misc_feature (1)..(25): SEQ ID NO: 5604; WAN024FVT_at; Start 226; Stop 250
ttagcagcaccagcatcagctgcat

SEQ ID NO: 223033 - DNA, 25 bp, Artificial
  probe
  misc_feature (1)..(25): SEQ ID NO: 5604; WAN024FVT_at; Start 46; Stop 70
tccaatttagctttgatttcttcag

SEQ ID NO: 223034 - DNA, 25 bp, Artificial
  probe
  misc_feature (1)..(25): SEQ ID NO: 5604; WAN024FVT_at; Start 374; Stop 398
tcaatgccattgttatttcctccaa

SEQ ID NO: 223035 - DNA, 25 bp, Artificial
  probe
  misc_feature (1)..(25): SEQ ID NO: 5604; WAN024FVT_at; Start 155; Stop 179
tttcacgtacaactttgataacgcc

SEQ ID NO: 223036 - DNA, 25 bp, Artificial
  probe
  misc_feature (1)..(25): SEQ ID NO: 5604; WAN024FVT_at; Start 285; Stop 309
tacaccaaattcttcttcgatagct

SEQ ID NO: 223037 - DNA, 25 bp, Artificial
  probe
  misc_feature (1)..(25): SEQ ID NO: 5604; WAN024FVT_at; Start 106; Stop 130
ggtgcaccgtcaacaagttctttag

SEQ ID NO: 223038 - DNA, 25 bp, Artificial
  probe
  misc_feature (1)..(25): SEQ ID NO: 5604; WAN024FVT_at; Start 274; Stop 298
gcagctgcagttacaccaaattctt

SEQ ID NO: 223039 - DNA, 25 bp, Artificial
  probe
  misc_feature (1)..(25): SEQ ID NO: 5604; WAN024FVT_at; Start 112; Stop 136
ccgtcaacaagttctttagcttctt

SEQ ID NO: 223040 - DNA, 25 bp, Artificial
  probe
  misc_feature (1)..(25): SEQ ID NO: 5604; WAN024FVT_at; Start 209; Stop 233
caacgtcgaatgaatctttagcagc

SEQ ID NO: 223041 - DNA, 25 bp, Artificial
  probe
  misc_feature (1)..(25): SEQ ID NO: 5604; WAN024FVT_at; Start 60; Stop 84
gatttcttcagcttctgcagttgca

SEQ ID NO: 223042 - DNA, 25 bp, Artificial
  probe
  misc_feature (1)..(25): SEQ ID NO: 5604; WAN024FVT_at; Start 353; Stop 377
cagcaataatgttttcaatgttcaa

SEQ ID NO: 223043 - DNA, 25 bp, Artificial
  probe
  misc_feature (1)..(25): SEQ ID NO: 5604; WAN024FVT_at; Start 2; Stop 26
tggtatatgcctcttatttaagagt

SEQ ID NO: 223044 - DNA, 25 bp, Artificial
  probe
  misc_feature (1)..(25): SEQ ID NO: 5604; WAN024FVT_at; Start 31; Stop 55
gaagctccagcttcttccaatttag

SEQ ID NO: 223045 - DNA, 25 bp, Artificial
  probe
  misc_feature (1)..(25): SEQ ID NO: 5604; WAN024FVT_at; Start 177; Stop 201
gccaacttttttgtcgcctgcagat

SEQ ID NO: 223046 - DNA, 25 bp, Artificial
  probe
  misc_feature (1)..(25): SEQ ID NO: 5604; WAN024FVT_at; Start 298; Stop 322
tcttcgatagcttttacaaggtcgt

SEQ ID NO: 223047 - DNA, 25 bp, Artificial
  probe
  misc_feature (1)..(25): SEQ ID NO: 5604; WAN024FVT_at; Start 216; Stop 240
gaatgaatctttagcagcaccagca

SEQ ID NO: 223048 - DNA, 25 bp, Artificial
  probe
  misc_feature (1)..(25): SEQ ID NO: 5604; WAN024FVT_at; Start 220; Stop 244
gaatctttagcagcaccagcatcag

SEQ ID NO: 223049 - DNA, 25 bp, Artificial
  probe
  misc_feature (1)..(25): SEQ ID NO: 5604; WAN024FVT_at; Start 95; Stop 119
taacaagtgctggtgcaccgtcaac

SEQ ID NO: 223050 - DNA, 25 bp, Artificial
  probe
  misc_feature (1)..(25): SEQ ID NO: 5604; WAN024FVT_at; Start 337; Stop 361
gaagcttctttaatttcagcaataa

SEQ ID NO: 223051 - DNA, 25 bp, Artificial
  probe
  misc_feature (1)..(25): SEQ ID NO: 5604; WAN024FVT_at; Start 79; Stop 103
gttgcaacgccttctttaacaagtg

SEQ ID NO: 223052 - DNA, 25 bp, Artificial
  probe
  misc_feature (1)..(25): SEQ ID NO: 5604; WAN024FVT_at; Start 128; Stop 152
tagcttctttaagaccaagaccagt

SEQ ID NO: 223053 - DNA, 25 bp, Artificial
  probe
  misc_feature (1)..(25): SEQ ID NO: 5604; WAN024FVT_at; Start 255; Stop 279
tgcagcaacagctacaggagcagct

SEQ ID NO: 223054 - DNA, 25 bp, Artificial
  probe
  misc_feature (1)..(25): SEQ ID NO: 5604; WAN024FVT_at; Start 18; Stop 42
tttaagagtaactgaagctccagct

SEQ ID NO: 223055 - DNA, 25 bp, Artificial
  probe
  misc_feature (1)..(25): SEQ ID NO: 5604; WAN024FVT_at; Start 324; Stop 348
caattcaaggattgaagcttcttta

SEQ ID NO: 223056 - DNA, 25 bp, Artificial
  probe
  misc_feature (1)..(25): SEQ ID NO: 5604; WAN024FVT_at; Start 194; Stop 218
ctgcagatgtcaattcaacgtcgaa

SEQ ID NO: 223057 - DNA, 25 bp, Artificial
  probe
  misc_feature (1)..(25): SEQ ID NO: 5604; WAN024FVT_at; Start 88; Stop 112
ccttctttaacaagtgctggtgcac

SEQ ID NO: 223058 - DNA, 25 bp, Artificial
  probe
  misc_feature (1)..(25): SEQ ID NO: 5604; WAN024FVT_at; Start 312; Stop 336
tacaaggtcgttcaattcaaggatt

SEQ ID NO: 223059 - DNA, 25 bp, Artificial
  probe
  misc_feature (1)..(25): SEQ ID NO: 5604; WAN024FVT_at; Start 359; Stop 383
taatgttttcaatgttcaatgccat

SEQ ID NO: 223060 - DNA, 25 bp, Artificial
  probe
  misc_feature (1)..(25): SEQ ID NO: 5604; WAN024FVT_at; Start 67; Stop 91
tcagcttctgcagttgcaacgcctt

SEQ ID NO: 223061 - DNA, 25 bp, Artificial
  probe
  misc_feature (1)..(25): SEQ ID NO: 5604; WAN024FVT_at; Start 170; Stop 194
tgataacgccaacttttttgtcgcc

SEQ ID NO: 223062 - DNA, 25 bp, Artificial
  probe
  misc_feature (1)..(25): SEQ ID NO: 5604; WAN024FVT_at; Start 267; Stop 291
tacaggagcagctgcagttacacca

SEQ ID NO: 223063 - DNA, 25 bp, Artificial
  probe
  misc_feature (1)..(25): SEQ ID NO: 5604; WAN024FVT_at; Start 188; Stop 212
tgtcgcctgcagatgtcaattcaac

SEQ ID NO: 223064 - DNA, 25 bp, Artificial
  probe
  misc_feature (1)..(25): SEQ ID NO: 5466; WAN024FVU_at; Start 166; Stop 190
gctgctaaagattcattcgacgttg

SEQ ID NO: 223065 - DNA, 25 bp, Artificial
  probe
  misc_feature (1)..(25): SEQ ID NO: 5466; WAN024FVU_at; Start 186; Stop 210
cgttgaattgacatctgcaggcgac

SEQ ID NO: 223066 - DNA, 25 bp, Artificial
  probe
  misc_feature (1)..(25): SEQ ID NO: 5466; WAN024FVU_at; Start 283; Stop 307
gacggtgcaccagcacttgttaaag

SEQ ID NO: 223067 - DNA, 25 bp, Artificial
  probe
  misc_feature (1)..(25): SEQ ID NO: 5466; WAN024FVU_at; Start 296; Stop 320
cacttgttaaagaaggcgttgcaac

SEQ ID NO: 223068 - DNA, 25 bp, Artificial
  probe
  misc_feature (1)..(25): SEQ ID NO: 5466; WAN024FVU_at; Start 51; Stop 75
taaagaagcttcaatccttgaattg

SEQ ID NO: 223069 - DNA, 25 bp, Artificial
  probe
  misc_feature (1)..(25): SEQ ID NO: 5466; WAN024FVU_at; Start 39; Stop 63
tattgctgaaattaaagaagcttca

SEQ ID NO: 223070 - DNA, 25 bp, Artificial
  probe
  misc_feature (1)..(25): SEQ ID NO: 5466; WAN024FVU_at; Start 128; Stop 152
ctgtagctgttgctgcagctgatgc

SEQ ID NO: 223071 - DNA, 25 bp, Artificial
  probe
  misc_feature (1)..(25): SEQ ID NO: 5466; WAN024FVU_at; Start 190; Stop 214
gaattgacatctgcaggcgacaaaa

SEQ ID NO: 223072 - DNA, 25 bp, Artificial
  probe
  misc_feature (1)..(25): SEQ ID NO: 5466; WAN024FVU_at; Start 316; Stop 340
gcaactgcagaagctgaagaaatca

SEQ ID NO: 223073 - DNA, 25 bp, Artificial
  probe
  misc_feature (1)..(25): SEQ ID NO: 5466; WAN024FVU_at; Start 181; Stop 205
ttcgacgttgaattgacatctgcag

SEQ ID NO: 223074 - DNA, 25 bp, Artificial
  probe
  misc_feature (1)..(25): SEQ ID NO: 5466; WAN024FVU_at; Start 98; Stop 122
aagaagaatttggtgtaactgcagc

SEQ ID NO: 223075 - DNA, 25 bp, Artificial
  probe
  misc_feature (1)..(25): SEQ ID NO: 5466; WAN024FVU_at; Start 361; Stop 385
ggagcttcagttactcttaaataac

SEQ ID NO: 223076 - DNA, 25 bp, Artificial
  probe
  misc_feature (1)..(25): SEQ ID NO: 5466; WAN024FVU_at; Start 24; Stop 48
gaacattgaaaacattattgctgaa

SEQ ID NO: 223077 - DNA, 25 bp, Artificial
  probe
  misc_feature (1)..(25): SEQ ID NO: 5466; WAN024FVU_at; Start 275; Stop 299
aacttgttgacggtgcaccagcact

SEQ ID NO: 223078 - DNA, 25 bp, Artificial
  probe
  misc_feature (1)..(25): SEQ ID NO: 5466; WAN024FVU_at; Start 120; Stop 144
agctgctcctgtagctgttgctgca

SEQ ID NO: 223079 - DNA, 25 bp, Artificial
  probe
  misc_feature (1)..(25): SEQ ID NO: 5466; WAN024FVU_at; Start 270; Stop 294
taaagaacttgttgacggtgcacca

SEQ ID NO: 223080 - DNA, 25 bp, Artificial
  probe
  misc_feature (1)..(25): SEQ ID NO: 5466; WAN024FVU_at; Start 109; Stop 133
ggtgtaactgcagctgctcctgtag

SEQ ID NO: 223081 - DNA, 25 bp, Artificial
  probe
  misc_feature (1)..(25): SEQ ID NO: 5466; WAN024FVU_at; Start 328; Stop 352
gctgaagaaatcaaagctaaattgg

SEQ ID NO: 223082 - DNA, 25 bp, Artificial
  probe
  misc_feature (1)..(25): SEQ ID NO: 5466; WAN024FVU_at; Start 154; Stop 178
gctgatgctggtgctgctaaagatt

SEQ ID NO: 223083 - DNA, 25 bp, Artificial
  probe
  misc_feature (1)..(25): SEQ ID NO: 5466; WAN024FVU_at; Start 17; Stop 41
tggcattgaacattgaaaacattat

SEQ ID NO: 223084 - DNA, 25 bp, Artificial
  probe
  misc_feature (1)..(25): SEQ ID NO: 5466; WAN024FVU_at; Start 344; Stop 368
ctaaattggaagaagctggagcttc

SEQ ID NO: 223085 - DNA, 25 bp, Artificial
  probe
  misc_feature (1)..(25): SEQ ID NO: 5466; WAN024FVU_at; Start 63; Stop 87
aatccttgaattgaacgaccttgta

SEQ ID NO: 223086 - DNA, 25 bp, Artificial
  probe
  misc_feature (1)..(25): SEQ ID NO: 5466; WAN024FVU_at; Start 1; Stop 25
ttggaggaaataacaatggcattga

SEQ ID NO: 223087 - DNA, 25 bp, Artificial
  probe
  misc_feature (1)..(25): SEQ ID NO: 5466; WAN024FVU_at; Start 79; Stop 103
gaccttgtaaaagctatcgaagaag

SEQ ID NO: 223088 - DNA, 25 bp, Artificial
  probe
  misc_feature (1)..(25): SEQ ID NO: 5466; WAN024FVU_at; Start 197; Stop 221
catctgcaggcgacaaaaaagttgg

SEQ ID NO: 223089 - DNA, 25 bp, Artificial
  probe
  misc_feature (1)..(25): SEQ ID NO: 5466; WAN024FVU_at; Start 247; Stop 271
actggtcttggtcttaaagaagcta

SEQ ID NO: 223090 - DNA, 25 bp, Artificial
  probe
  misc_feature (1)..(25): SEQ ID NO: 5466; WAN024FVU_at; Start 261; Stop 285
taaagaagctaaagaacttgttgac

SEQ ID NO: 223091 - DNA, 25 bp, Artificial
  probe
  misc_feature (1)..(25): SEQ ID NO: 5466; WAN024FVU_at; Start 86; Stop 110
taaaagctatcgaagaagaatttgg

SEQ ID NO: 223092 - DNA, 25 bp, Artificial
  probe
  misc_feature (1)..(25): SEQ ID NO: 5466; WAN024FVU_at; Start 303; Stop 327
taaagaaggcgttgcaactgcagaa

SEQ ID NO: 223093 - DNA, 25 bp, Artificial
  probe
  misc_feature (1)..(25): SEQ ID NO: 5466; WAN024FVU_at; Start 288; Stop 312
tgcaccagcacttgttaaagaaggc

SEQ ID NO: 223094 - DNA, 25 bp, Artificial
  probe
  misc_feature (1)..(25): SEQ ID NO: 5466; WAN024FVU_at; Start 355; Stop 379
gaagctggagcttcagttactctta

SEQ ID NO: 223095 - DNA, 25 bp, Artificial
  probe
  misc_feature (1)..(25): SEQ ID NO: 5466; WAN024FVU_at; Start 69; Stop 93
tgaattgaacgaccttgtaaaagct

SEQ ID NO: 223096 - DNA, 25 bp, Artificial
  probe
  misc_feature (1)..(25): SEQ ID NO: 5466; WAN024FVU_at; Start 160; Stop 184
gctggtgctgctaaagattcattcg

SEQ ID NO: 223097 - DNA, 25 bp, Artificial
  probe
  misc_feature (1)..(25): SEQ ID NO: 5466; WAN024FVU_at; Start 104; Stop 128
aatttggtgtaactgcagctgctcc

SEQ ID NO: 223098 - DNA, 25 bp, Artificial
  probe
  misc_feature (1)..(25): SEQ ID NO: 7257; WAN024FVV_at; Start 56; Stop 80
aatattcaactgttctccaaaatat

SEQ ID NO: 223099 - DNA, 25 bp, Artificial
  probe
  misc_feature (1)..(25): SEQ ID NO: 7257; WAN024FVV_at; Start 43; Stop 67
aaaaaaggagaacaatattcaactg

SEQ ID NO: 223100 - DNA, 25 bp, Artificial
  probe
  misc_feature (1)..(25): SEQ ID NO: 7257; WAN024FVV_at; Start 49; Stop 73
ggagaacaatattcaactgttctcc

SEQ ID NO: 223101 - DNA, 25 bp, Artificial
  probe
  misc_feature (1)..(25): SEQ ID NO: 7257; WAN024FVV_at; Start 54; Stop 78
acaatattcaactgttctccaaaat

SEQ ID NO: 223102 - DNA, 25 bp, Artificial
  probe
  misc_feature (1)..(25): SEQ ID NO: 7257; WAN024FVV_at; Start 57; Stop 81
atattcaactgttctccaaaatatt

SEQ ID NO: 223103 - DNA, 25 bp, Artificial
  probe
  misc_feature (1)..(25): SEQ ID NO: 7257; WAN024FVV_at; Start 44; Stop 68
aaaaaggagaacaatattcaactgt

SEQ ID NO: 223104 - DNA, 25 bp, Artificial
  probe
  misc_feature (1)..(25): SEQ ID NO: 7257; WAN024FVV_at; Start 19; Stop 43
ttgtcatttttcctccagaaaataa

SEQ ID NO: 223105 - DNA, 25 bp, Artificial
  probe
  misc_feature (1)..(25): SEQ ID NO: 7257; WAN024FVV_at; Start 50; Stop 74
gagaacaatattcaactgttctcca

SEQ ID NO: 223106 - DNA, 25 bp, Artificial
  probe
  misc_feature (1)..(25): SEQ ID NO: 7257; WAN024FVV_at; Start 45; Stop 69
aaaaggagaacaatattcaactgtt

SEQ ID NO: 223107 - DNA, 25 bp, Artificial
  probe
  misc_feature (1)..(25): SEQ ID NO: 7257; WAN024FVV_at; Start 18; Stop 42
tttgtcatttttcctccagaaaata

SEQ ID NO: 223108 - DNA, 25 bp, Artificial
  probe
  misc_feature (1)..(25): SEQ ID NO: 7257; WAN024FVV_at; Start 51; Stop 75
agaacaatattcaactgttctccaa

SEQ ID NO: 223109 - DNA, 25 bp, Artificial
  probe
  misc_feature (1)..(25): SEQ ID NO: 7257; WAN024FVV_at; Start 52; Stop 76
gaacaatattcaactgttctccaaa

SEQ ID NO: 223110 - DNA, 25 bp, Artificial
  probe
  misc_feature (1)..(25): SEQ ID NO: 7257; WAN024FVV_at; Start 58; Stop 82
tattcaactgttctccaaaatattt

SEQ ID NO: 223111 - DNA, 25 bp, Artificial
  probe
  misc_feature (1)..(25): SEQ ID NO: 7257; WAN024FVV_at; Start 2; Stop 26
tgatgattgtaattcttttgtcatt

SEQ ID NO: 223112 - DNA, 25 bp, Artificial
  probe
  misc_feature (1)..(25): SEQ ID NO: 7257; WAN024FVV_at; Start 62; Stop 86
caactgttctccaaaatatttttat

SEQ ID NO: 223113 - DNA, 25 bp, Artificial
  probe
  misc_feature (1)..(25): SEQ ID NO: 7257; WAN024FVV_at; Start 1; Stop 25
gtgatgattgtaattcttttgtcat

SEQ ID NO: 223114 - DNA, 25 bp, Artificial
  probe
  misc_feature (1)..(25): SEQ ID NO: 7257; WAN024FVV_at; Start 61; Stop 85
tcaactgttctccaaaatattttta

SEQ ID NO: 223115 - DNA, 25 bp, Artificial
  probe
  misc_feature (1)..(25): SEQ ID NO: 7257; WAN024FVV_at; Start 20; Stop 44
tgtcatttttcctccagaaaataaa

SEQ ID NO: 223116 - DNA, 25 bp, Artificial
  probe
  misc_feature (1)..(25): SEQ ID NO: 7257; WAN024FVV_at; Start 47; Stop 71
aaggagaacaatattcaactgttct

SEQ ID NO: 223117 - DNA, 25 bp, Artificial
  probe
  misc_feature (1)..(25): SEQ ID NO: 7257; WAN024FVV_at; Start 6; Stop 30
gattgtaattcttttgtcatttttc

SEQ ID NO: 223118 - DNA, 25 bp, Artificial
  probe
  misc_feature (1)..(25): SEQ ID NO: 7257; WAN024FVV_at; Start 48; Stop 72
aggagaacaatattcaactgttctc

SEQ ID NO: 223119 - DNA, 25 bp, Artificial
  probe
  misc_feature (1)..(25): SEQ ID NO: 7257; WAN024FVV_at; Start 46; Stop 70
aaaggagaacaatattcaactgttc

SEQ ID NO: 223120 - DNA, 25 bp, Artificial
  probe
  misc_feature (1)..(25): SEQ ID NO: 7257; WAN024FVV_at; Start 3; Stop 27
gatgattgtaattcttttgtcattt

SEQ ID NO: 223121 - DNA, 25 bp, Artificial
  probe
  misc_feature (1)..(25): SEQ ID NO: 7257; WAN024FVV_at; Start 53; Stop 77
aacaatattcaactgttctccaaaa

SEQ ID NO: 223122 - DNA, 25 bp, Artificial
  probe
  misc_feature (1)..(25): SEQ ID NO: 7257; WAN024FVV_at; Start 55; Stop 79
caatattcaactgttctccaaaata

SEQ ID NO: 223123 - DNA, 25 bp, Artificial
  probe
  misc_feature (1)..(25): SEQ ID NO: 4991; WAN024FVW_at; Start 109; Stop 133
attgttgaagccatctctcttatgg

SEQ ID NO: 223124 - DNA, 25 bp, Artificial
  probe
  misc_feature (1)..(25): SEQ ID NO: 4991; WAN024FVW_at; Start 160; Stop 184
cgattggaatcaagtggagatttaa

SEQ ID NO: 223125 - DNA, 25 bp, Artificial
  probe
  misc_feature (1)..(25): SEQ ID NO: 4991; WAN024FVW_at; Start 171; Stop 195
aagtggagatttaatactcaaagaa

SEQ ID NO: 223126 - DNA, 25 bp, Artificial
  probe
  misc_feature (1)..(25): SEQ ID NO: 4991; WAN024FVW_at; Start 157; Stop 181
gttcgattggaatcaagtggagatt

SEQ ID NO: 223127 - DNA, 25 bp, Artificial
  probe
  misc_feature (1)..(25): SEQ ID NO: 4991; WAN024FVW_at; Start 159; Stop 183
tcgattggaatcaagtggagattta

SEQ ID NO: 223128 - DNA, 25 bp, Artificial
  probe
  misc_feature (1)..(25): SEQ ID NO: 4991; WAN024FVW_at; Start 110; Stop 134
ttgttgaagccatctctcttatggc

SEQ ID NO: 223129 - DNA, 25 bp, Artificial
  probe
  misc_feature (1)..(25): SEQ ID NO: 4991; WAN024FVW_at; Start 165; Stop 189
ggaatcaagtggagatttaatactc

SEQ ID NO: 223130 - DNA, 25 bp, Artificial
  probe
  misc_feature (1)..(25): SEQ ID NO: 4991; WAN024FVW_at; Start 150; Stop 174
tggcttggttcgattggaatcaagt

SEQ ID NO: 223131 - DNA, 25 bp, Artificial
  probe
  misc_feature (1)..(25): SEQ ID NO: 4991; WAN024FVW_at; Start 71; Stop 95
ttgtcatttcatttttagtacgtga

SEQ ID NO: 223132 - DNA, 25 bp, Artificial
  probe
  misc_feature (1)..(25): SEQ ID NO: 4991; WAN024FVW_at; Start 80; Stop 104
catttttagtacgtgaaatgggaat

SEQ ID NO: 223133 - DNA, 25 bp, Artificial
  probe
  misc_feature (1)..(25): SEQ ID NO: 4991; WAN024FVW_at; Start 83; Stop 107
ttttagtacgtgaaatgggaattga

SEQ ID NO: 223134 - DNA, 25 bp, Artificial
  probe
  misc_feature (1)..(25): SEQ ID NO: 4991; WAN024FVW_at; Start 69; Stop 93
tattgtcatttcatttttagtacgt

SEQ ID NO: 223135 - DNA, 25 bp, Artificial
  probe
  misc_feature (1)..(25): SEQ ID NO: 4991; WAN024FVW_at; Start 167; Stop 191
aatcaagtggagatttaatactcaa

SEQ ID NO: 223136 - DNA, 25 bp, Artificial
  probe
  misc_feature (1)..(25): SEQ ID NO: 4991; WAN024FVW_at; Start 166; Stop 190
gaatcaagtggagatttaatactca

SEQ ID NO: 223137 - DNA, 25 bp, Artificial
  probe
  misc_feature (1)..(25): SEQ ID NO: 4991; WAN024FVW_at; Start 154; Stop 178
ttggttcgattggaatcaagtggag

SEQ ID NO: 223138 - DNA, 25 bp, Artificial
  probe
  misc_feature (1)..(25): SEQ ID NO: 4991; WAN024FVW_at; Start 158; Stop 182
ttcgattggaatcaagtggagattt

SEQ ID NO: 223139 - DNA, 25 bp, Artificial
  probe
  misc_feature (1)..(25): SEQ ID NO: 4991; WAN024FVW_at; Start 152; Stop 176
gcttggttcgattggaatcaagtgg

SEQ ID NO: 223140 - DNA, 25 bp, Artificial
  probe
  misc_feature (1)..(25): SEQ ID NO: 4991; WAN024FVW_at; Start 151; Stop 175
ggcttggttcgattggaatcaagtg

SEQ ID NO: 223141 - DNA, 25 bp, Artificial
  probe
  misc_feature (1)..(25): SEQ ID NO: 4991; WAN024FVW_at; Start 153; Stop 177
cttggttcgattggaatcaagtgga

SEQ ID NO: 223142 - DNA, 25 bp, Artificial
  probe
  misc_feature (1)..(25): SEQ ID NO: 4991; WAN024FVW_at; Start 163; Stop 187
ttggaatcaagtggagatttaatac

SEQ ID NO: 223143 - DNA, 25 bp, Artificial
  probe
  misc_feature (1)..(25): SEQ ID NO: 4991; WAN024FVW_at; Start 169; Stop 193
tcaagtggagatttaatactcaaag

SEQ ID NO: 223144 - DNA, 25 bp, Artificial
  probe
  misc_feature (1)..(25): SEQ ID NO: 4991; WAN024FVW_at; Start 164; Stop 188
tggaatcaagtggagatttaatact

SEQ ID NO: 223145 - DNA, 25 bp, Artificial
  probe
  misc_feature (1)..(25): SEQ ID NO: 4991; WAN024FVW_at; Start 72; Stop 96
tgtcatttcatttttagtacgtgaa

SEQ ID NO: 223146 - DNA, 25 bp, Artificial
  probe
  misc_feature (1)..(25): SEQ ID NO: 4991; WAN024FVW_at; Start 156; Stop 180
ggttcgattggaatcaagtggagat

SEQ ID NO: 223147 - DNA, 25 bp, Artificial
  probe
  misc_feature (1)..(25): SEQ ID NO: 4991; WAN024FVW_at; Start 173; Stop 197
gtggagatttaatactcaaagaact

SEQ ID NO: 223148 - DNA, 25 bp, Artificial
  probe
  misc_feature (1)..(25): SEQ ID NO: 4991; WAN024FVW_at; Start 68; Stop 92
atattgtcatttcatttttagtacg

SEQ ID NO: 223149 - DNA, 25 bp, Artificial
  probe
  misc_feature (1)..(25): SEQ ID NO: 4991; WAN024FVW_at; Start 79; Stop 103
tcatttttagtacgtgaaatgggaa

SEQ ID NO: 223150 - DNA, 25 bp, Artificial
  probe
  misc_feature (1)..(25): SEQ ID NO: 4991; WAN024FVW_at; Start 70; Stop 94
attgtcatttcatttttagtacgtg

SEQ ID NO: 223151 - DNA, 25 bp, Artificial
  probe
  misc_feature (1)..(25): SEQ ID NO: 4991; WAN024FVW_at; Start 172; Stop 196
agtggagatttaatactcaaagaac

SEQ ID NO: 223152 - DNA, 25 bp, Artificial
  probe
  misc_feature (1)..(25): SEQ ID NO: 4991; WAN024FVW_at; Start 73; Stop 97
gtcatttcatttttagtacgtgaaa

SEQ ID NO: 223153 - DNA, 25 bp, Artificial
  probe
  misc_feature (1)..(25): SEQ ID NO: 4991; WAN024FVW_at; Start 78; Stop 102
ttcatttttagtacgtgaaatggga

SEQ ID NO: 223154 - DNA, 25 bp, Artificial
  probe
  misc_feature (1)..(25): SEQ ID NO: 4991; WAN024FVW_at; Start 161; Stop 185
gattggaatcaagtggagatttaat

SEQ ID NO: 223155 - DNA, 25 bp, Artificial
  probe
  misc_feature (1)..(25): SEQ ID NO: 4991; WAN024FVW_at; Start 155; Stop 179
tggttcgattggaatcaagtggaga

SEQ ID NO: 223156 - DNA, 25 bp, Artificial
  probe
  misc_feature (1)..(25): SEQ ID NO: 4991; WAN024FVW_at; Start 170; Stop 194
caagtggagatttaatactcaaaga

SEQ ID NO: 223157 - DNA, 25 bp, Artificial
  probe
  misc_feature (1)..(25): SEQ ID NO: 5363; WAN024FVX_at; Start 10; Stop 34
ccctatttaccagtctttgagagcg

SEQ ID NO: 223158 - DNA, 25 bp, Artificial
  probe
  misc_feature (1)..(25): SEQ ID NO: 5363; WAN024FVX_at; Start 69; Stop 93
gtttcctgccaaaaattctttggca

SEQ ID NO: 223159 - DNA, 25 bp, Artificial
  probe
  misc_feature (1)..(25): SEQ ID NO: 5363; WAN024FVX_at; Start 71; Stop 95
ttcctgccaaaaattctttggcagg

SEQ ID NO: 223160 - DNA, 25 bp, Artificial
  probe
  misc_feature (1)..(25): SEQ ID NO: 5363; WAN024FVX_at; Start 19; Stop 43
ccagtctttgagagcgataagcgat

SEQ ID NO: 223161 - DNA, 25 bp, Artificial
  probe
  misc_feature (1)..(25): SEQ ID NO: 5363; WAN024FVX_at; Start 24; Stop 48
ctttgagagcgataagcgattgata

SEQ ID NO: 223162 - DNA, 25 bp, Artificial
  probe
  misc_feature (1)..(25): SEQ ID NO: 5363; WAN024FVX_at; Start 17; Stop 41
taccagtctttgagagcgataagcg

SEQ ID NO: 223163 - DNA, 25 bp, Artificial
  probe
  misc_feature (1)..(25): SEQ ID NO: 5363; WAN024FVX_at; Start 18; Stop 42
accagtctttgagagcgataagcga

SEQ ID NO: 223164 - DNA, 25 bp, Artificial
  probe
  misc_feature (1)..(25): SEQ ID NO: 5363; WAN024FVX_at; Start 12; Stop 36
ctatttaccagtctttgagagcgat

SEQ ID NO: 223165 - DNA, 25 bp, Artificial
  probe
  misc_feature (1)..(25): SEQ ID NO: 5363; WAN024FVX_at; Start 2; Stop 26
tgcggaatccctatttaccagtctt

SEQ ID NO: 223166 - DNA, 25 bp, Artificial
  probe
  misc_feature (1)..(25): SEQ ID NO: 5363; WAN024FVX_at; Start 32; Stop 56
gcgataagcgattgatagaaactga

SEQ ID NO: 223167 - DNA, 25 bp, Artificial
  probe
  misc_feature (1)..(25): SEQ ID NO: 5363; WAN024FVX_at; Start 13; Stop 37
tatttaccagtctttgagagcgata

SEQ ID NO: 223168 - DNA, 25 bp, Artificial
  probe
  misc_feature (1)..(25): SEQ ID NO: 5363; WAN024FVX_at; Start 7; Stop 31
aatccctatttaccagtctttgaga

SEQ ID NO: 223169 - DNA, 25 bp, Artificial
  probe
  misc_feature (1)..(25): SEQ ID NO: 5363; WAN024FVX_at; Start 62; Stop 86
tgatttggtttcctgccaaaaattc

SEQ ID NO: 223170 - DNA, 25 bp, Artificial
  probe
  misc_feature (1)..(25): SEQ ID NO: 5363; WAN024FVX_at; Start 34; Stop 58
gataagcgattgatagaaactgata

SEQ ID NO: 223171 - DNA, 25 bp, Artificial
  probe
  misc_feature (1)..(25): SEQ ID NO: 5363; WAN024FVX_at; Start 15; Stop 39
tttaccagtctttgagagcgataag

SEQ ID NO: 223172 - DNA, 25 bp, Artificial
  probe
  misc_feature (1)..(25): SEQ ID NO: 5363; WAN024FVX_at; Start 6; Stop 30
gaatccctatttaccagtctttgag

SEQ ID NO: 223173 - DNA, 25 bp, Artificial
  probe
  misc_feature (1)..(25): SEQ ID NO: 5363; WAN024FVX_at; Start 11; Stop 35
cctatttaccagtctttgagagcga

SEQ ID NO: 223174 - DNA, 25 bp, Artificial
  probe
  misc_feature (1)..(25): SEQ ID NO: 5363; WAN024FVX_at; Start 39; Stop 63
gcgattgatagaaactgataaattg

SEQ ID NO: 223175 - DNA, 25 bp, Artificial
  probe
  misc_feature (1)..(25): SEQ ID NO: 5363; WAN024FVX_at; Start 4; Stop 28
cggaatccctatttaccagtctttg

SEQ ID NO: 223176 - DNA, 25 bp, Artificial
  probe
  misc_feature (1)..(25): SEQ ID NO: 5363; WAN024FVX_at; Start 23; Stop 47
tctttgagagcgataagcgattgat

SEQ ID NO: 223177 - DNA, 25 bp, Artificial
  probe
  misc_feature (1)..(25): SEQ ID NO: 5363; WAN024FVX_at; Start 33; Stop 57
cgataagcgattgatagaaactgat

SEQ ID NO: 223178 - DNA, 25 bp, Artificial
  probe
  misc_feature (1)..(25): SEQ ID NO: 5363; WAN024FVX_at; Start 45; Stop 69
gatagaaactgataaattgatttgg

SEQ ID NO: 223179 - DNA, 25 bp, Artificial
  probe
  misc_feature (1)..(25): SEQ ID NO: 5363; WAN024FVX_at; Start 5; Stop 29
ggaatccctatttaccagtctttga

SEQ ID NO: 223180 - DNA, 25 bp, Artificial
  probe
  misc_feature (1)..(25): SEQ ID NO: 5363; WAN024FVX_at; Start 30; Stop 54
gagcgataagcgattgatagaaact

SEQ ID NO: 223181 - DNA, 25 bp, Artificial
  probe
  misc_feature (1)..(25): SEQ ID NO: 5363; WAN024FVX_at; Start 55; Stop 79
gataaattgatttggtttcctgcca

SEQ ID NO: 223182 - DNA, 25 bp, Artificial
  probe
  misc_feature (1)..(25): SEQ ID NO: 5363; WAN024FVX_at; Start 22; Stop 46
gtctttgagagcgataagcgattga

SEQ ID NO: 223183 - DNA, 25 bp, Artificial
  probe
  misc_feature (1)..(25): SEQ ID NO: 5363; WAN024FVX_at; Start 27; Stop 51
tgagagcgataagcgattgatagaa

SEQ ID NO: 223184 - DNA, 25 bp, Artificial
  probe
  misc_feature (1)..(25): SEQ ID NO: 5363; WAN024FVX_at; Start 20; Stop 44
cagtctttgagagcgataagcgatt

SEQ ID NO: 223185 - DNA, 25 bp, Artificial
  probe
  misc_feature (1)..(25): SEQ ID NO: 5363; WAN024FVX_at; Start 25; Stop 49
tttgagagcgataagcgattgatag

SEQ ID NO: 223186 - DNA, 25 bp, Artificial
  probe
  misc_feature (1)..(25): SEQ ID NO: 5363; WAN024FVX_at; Start 1; Stop 25
ttgcggaatccctatttaccagtct

SEQ ID NO: 223187 - DNA, 25 bp, Artificial
  probe
  misc_feature (1)..(25): SEQ ID NO: 5363; WAN024FVX_at; Start 36; Stop 60
taagcgattgatagaaactgataaa

SEQ ID NO: 223188 - DNA, 25 bp, Artificial
  probe
  misc_feature (1)..(25): SEQ ID NO: 5363; WAN024FVX_at; Start 29; Stop 53
agagcgataagcgattgatagaaac

SEQ ID NO: 223189 - DNA, 25 bp, Artificial
  probe
  misc_feature (1)..(25): SEQ ID NO: 5363; WAN024FVX_at; Start 9; Stop 33
tccctatttaccagtctttgagagc

SEQ ID NO: 223190 - DNA, 25 bp, Artificial
  probe
  misc_feature (1)..(25): SEQ ID NO: 5363; WAN024FVX_at; Start 57; Stop 81
taaattgatttggtttcctgccaaa

SEQ ID NO: 223191 - DNA, 25 bp, Artificial
  probe
  misc_feature (1)..(25): SEQ ID NO: 7022; WAN024FVY_at; Start 29; Stop 53
ctaaagaagttataattccatttct

SEQ ID NO: 223192 - DNA, 25 bp, Artificial
  probe
  misc_feature (1)..(25): SEQ ID NO: 7022; WAN024FVY_at; Start 49; Stop 73
tttctgaaagtaattagtaagatta

SEQ ID NO: 223193 - DNA, 25 bp, Artificial
  probe
  misc_feature (1)..(25): SEQ ID NO: 7022; WAN024FVY_at; Start 51; Stop 75
tctgaaagtaattagtaagattaac

SEQ ID NO: 223194 - DNA, 25 bp, Artificial
  probe
  misc_feature (1)..(25): SEQ ID NO: 7022; WAN024FVY_at; Start 48; Stop 72
atttctgaaagtaattagtaagatt

SEQ ID NO: 223195 - DNA, 25 bp, Artificial
  probe
  misc_feature (1)..(25): SEQ ID NO: 7022; WAN024FVY_at; Start 35; Stop 59
aagttataattccatttctgaaagt

SEQ ID NO: 223196 - DNA, 25 bp, Artificial
  probe
  misc_feature (1)..(25): SEQ ID NO: 7022; WAN024FVY_at; Start 40; Stop 64
ataattccatttctgaaagtaatta

SEQ ID NO: 223197 - DNA, 25 bp, Artificial
  probe
  misc_feature (1)..(25): SEQ ID NO: 7022; WAN024FVY_at; Start 36; Stop 60
agttataattccatttctgaaagta

SEQ ID NO: 223198 - DNA, 25 bp, Artificial
  probe
  misc_feature (1)..(25): SEQ ID NO: 7022; WAN024FVY_at; Start 32; Stop 56
aagaagttataattccatttctgaa

SEQ ID NO: 223199 - DNA, 25 bp, Artificial
  probe
  misc_feature (1)..(25): SEQ ID NO: 7022; WAN024FVY_at; Start 2; Stop 26
tgttggcagcattaattttttattt

SEQ ID NO: 223200 - DNA, 25 bp, Artificial
  probe
  misc_feature (1)..(25): SEQ ID NO: 7022; WAN024FVY_at; Start 43; Stop 67
attccatttctgaaagtaattagta

SEQ ID NO: 223201 - DNA, 25 bp, Artificial
  probe
  misc_feature (1)..(25): SEQ ID NO: 7022; WAN024FVY_at; Start 37; Stop 61
gttataattccatttctgaaagtaa

SEQ ID NO: 223202 - DNA, 25 bp, Artificial
  probe
  misc_feature (1)..(25): SEQ ID NO: 7022; WAN024FVY_at; Start 44; Stop 68
ttccatttctgaaagtaattagtaa

SEQ ID NO: 223203 - DNA, 25 bp, Artificial
  probe
  misc_feature (1)..(25): SEQ ID NO: 7022; WAN024FVY_at; Start 1; Stop 25
atgttggcagcattaattttttatt

SEQ ID NO: 223204 - DNA, 25 bp, Artificial
  probe
  misc_feature (1)..(25): SEQ ID NO: 7022; WAN024FVY_at; Start 45; Stop 69
tccatttctgaaagtaattagtaag

SEQ ID NO: 223205 - DNA, 25 bp, Artificial
  probe
  misc_feature (1)..(25): SEQ ID NO: 7022; WAN024FVY_at; Start 46; Stop 70
ccatttctgaaagtaattagtaaga

SEQ ID NO: 223206 - DNA, 25 bp, Artificial
  probe
  misc_feature (1)..(25): SEQ ID NO: 7022; WAN024FVY_at; Start 38; Stop 62
ttataattccatttctgaaagtaat

SEQ ID NO: 223207 - DNA, 25 bp, Artificial
  probe
  misc_feature (1)..(25): SEQ ID NO: 7022; WAN024FVY_at; Start 34; Stop 58
gaagttataattccatttctgaaag

SEQ ID NO: 223208 - DNA, 25 bp, Artificial
  probe
  misc_feature (1)..(25): SEQ ID NO: 7022; WAN024FVY_at; Start 50; Stop 74
ttctgaaagtaattagtaagattaa

SEQ ID NO: 223209 - DNA, 25 bp, Artificial
  probe
  misc_feature (1)..(25): SEQ ID NO: 7022; WAN024FVY_at; Start 31; Stop 55
aaagaagttataattccatttctga

SEQ ID NO: 223210 - DNA, 25 bp, Artificial
  probe
  misc_feature (1)..(25): SEQ ID NO: 7022; WAN024FVY_at; Start 30; Stop 54
taaagaagttataattccatttctg

SEQ ID NO: 223211 - DNA, 25 bp, Artificial
  probe
  misc_feature (1)..(25): SEQ ID NO: 7022; WAN024FVY_at; Start 33; Stop 57
agaagttataattccatttctgaaa

SEQ ID NO: 223212 - DNA, 25 bp, Artificial
  probe
  misc_feature (1)..(25): SEQ ID NO: 7022; WAN024FVY_at; Start 52; Stop 76
ctgaaagtaattagtaagattaacg

SEQ ID NO: 223213 - DNA, 25 bp, Artificial
  probe
  misc_feature (1)..(25): SEQ ID NO: 7022; WAN024FVY_at; Start 39; Stop 63
tataattccatttctgaaagtaatt

SEQ ID NO: 223214 - DNA, 25 bp, Artificial
  probe
  misc_feature (1)..(25): SEQ ID NO: 7022; WAN024FVY_at; Start 47; Stop 71
catttctgaaagtaattagtaagat

SEQ ID NO: 223215 - DNA, 25 bp, Artificial
  probe
  misc_feature (1)..(25): SEQ ID NO: 7022; WAN024FVY_at; Start 42; Stop 66
aattccatttctgaaagtaattagt

SEQ ID NO: 223216 - DNA, 25 bp, Artificial
  probe
  misc_feature (1)..(25): SEQ ID NO: 7022; WAN024FVY_at; Start 41; Stop 65
taattccatttctgaaagtaattag

SEQ ID NO: 223217 - DNA, 25 bp, Artificial
  probe
  misc_feature (1)..(25): SEQ ID NO: 5699; WAN024FVZ_at; Start 88; Stop 112
tcgccaacaattaattcatcaatag

SEQ ID NO: 223218 - DNA, 25 bp, Artificial
  probe
  misc_feature (1)..(25): SEQ ID NO: 5699; WAN024FVZ_at; Start 190; Stop 214
tcgcttaaaatatatggcccattat

SEQ ID NO: 223219 - DNA, 25 bp, Artificial
  probe
  misc_feature (1)..(25): SEQ ID NO: 5699; WAN024FVZ_at; Start 222; Stop 246
taaggcactttctaacctttgcaaa

SEQ ID NO: 223220 - DNA, 25 bp, Artificial
  probe
  misc_feature (1)..(25): SEQ ID NO: 5699; WAN024FVZ_at; Start 13; Stop 37
ttattcaaaaagtcagggggcacta

SEQ ID NO: 223221 - DNA, 25 bp, Artificial
  probe
  misc_feature (1)..(25): SEQ ID NO: 5699; WAN024FVZ_at; Start 57; Stop 81
tactggtaaacgttcatctttaaca

SEQ ID NO: 223222 - DNA, 25 bp, Artificial
  probe
  misc_feature (1)..(25): SEQ ID NO: 5699; WAN024FVZ_at; Start 152; Stop 176
catacctcagatatattggtgcttc

SEQ ID NO: 223223 - DNA, 25 bp, Artificial
  probe
  misc_feature (1)..(25): SEQ ID NO: 5699; WAN024FVZ_at; Start 6; Stop 30
aagccatttattcaaaaagtcaggg

SEQ ID NO: 223224 - DNA, 25 bp, Artificial
  probe
  misc_feature (1)..(25): SEQ ID NO: 5699; WAN024FVZ_at; Start 172; Stop 196
gcttcatcccaacgtttatcgctta

SEQ ID NO: 223225 - DNA, 25 bp, Artificial
  probe
  misc_feature (1)..(25): SEQ ID NO: 5699; WAN024FVZ_at; Start 184; Stop 208
cgtttatcgcttaaaatatatggcc

SEQ ID NO: 223226 - DNA, 25 bp, Artificial
  probe
  misc_feature (1)..(25): SEQ ID NO: 5699; WAN024FVZ_at; Start 2; Stop 26
tgtcaagccatttattcaaaaagtc

SEQ ID NO: 223227 - DNA, 25 bp, Artificial
  probe
  misc_feature (1)..(25): SEQ ID NO: 5699; WAN024FVZ_at; Start 161; Stop 185
gatatattggtgcttcatcccaacg

SEQ ID NO: 223228 - DNA, 25 bp, Artificial
  probe
  misc_feature (1)..(25): SEQ ID NO: 5699; WAN024FVZ_at; Start 95; Stop 119
caattaattcatcaatagcaacctt

SEQ ID NO: 223229 - DNA, 25 bp, Artificial
  probe
  misc_feature (1)..(25): SEQ ID NO: 5699; WAN024FVZ_at; Start 175; Stop 199
tcatcccaacgtttatcgcttaaaa

SEQ ID NO: 223230 - DNA, 25 bp, Artificial
  probe
  misc_feature (1)..(25): SEQ ID NO: 5699; WAN024FVZ_at; Start 82; Stop 106
acttcatcgccaacaattaattcat

SEQ ID NO: 223231 - DNA, 25 bp, Artificial
  probe
  misc_feature (1)..(25): SEQ ID NO: 5699; WAN024FVZ_at; Start 134; Stop 158
ttgacggcctaaacacaccatacct

SEQ ID NO: 223232 - DNA, 25 bp, Artificial
  probe
  misc_feature (1)..(25): SEQ ID NO: 5699; WAN024FVZ_at; Start 139; Stop 163
ggcctaaacacaccatacctcagat

SEQ ID NO: 223233 - DNA, 25 bp, Artificial
  probe
  misc_feature (1)..(25): SEQ ID NO: 5699; WAN024FVZ_at; Start 110; Stop 134
tagcaaccttcttttcatcatccct

SEQ ID NO: 223234 - DNA, 25 bp, Artificial
  probe
  misc_feature (1)..(25): SEQ ID NO: 5699; WAN024FVZ_at; Start 202; Stop 226
tatggcccattatattgctttaagg

SEQ ID NO: 223235 - DNA, 25 bp, Artificial
  probe
  misc_feature (1)..(25): SEQ ID NO: 5699; WAN024FVZ_at; Start 169; Stop 193
ggtgcttcatcccaacgtttatcgc

SEQ ID NO: 223236 - DNA, 25 bp, Artificial
  probe
  misc_feature (1)..(25): SEQ ID NO: 5699; WAN024FVZ_at; Start 99; Stop 123
taattcatcaatagcaaccttcttt

SEQ ID NO: 223237 - DNA, 25 bp, Artificial
  probe
  misc_feature (1)..(25): SEQ ID NO: 5699; WAN024FVZ_at; Start 70; Stop 94
tcatctttaacaacttcatcgccaa

SEQ ID NO: 223238 - DNA, 25 bp, Artificial
  probe
  misc_feature (1)..(25): SEQ ID NO: 5699; WAN024FVZ_at; Start 156; Stop 180
cctcagatatattggtgcttcatcc

SEQ ID NO: 223239 - DNA, 25 bp, Artificial
  probe
  misc_feature (1)..(25): SEQ ID NO: 5699; WAN024FVZ_at; Start 206; Stop 230
gcccattatattgctttaaggcact

SEQ ID NO: 223240 - DNA, 25 bp, Artificial
  probe
  misc_feature (1)..(25): SEQ ID NO: 5699; WAN024FVZ_at; Start 243; Stop 267
caaaaccgactctaattcattttga

SEQ ID NO: 223241 - DNA, 25 bp, Artificial
  probe
  misc_feature (1)..(25): SEQ ID NO: 5699; WAN024FVZ_at; Start 118; Stop 142
ttcttttcatcatcccttgacggcc

SEQ ID NO: 223242 - DNA, 25 bp, Artificial
  probe
  misc_feature (1)..(25): SEQ ID NO: 5699; WAN024FVZ_at; Start 126; Stop 150
atcatcccttgacggcctaaacaca

SEQ ID NO: 223243 - DNA, 25 bp, Artificial
  probe
  misc_feature (1)..(25): SEQ ID NO: 5699; WAN024FVZ_at; Start 26; Stop 50
cagggggcactataccttttggaat

SEQ ID NO: 223244 - DNA, 25 bp, Artificial
  probe
  misc_feature (1)..(25): SEQ ID NO: 5699; WAN024FVZ_at; Start 121; Stop 145
ttttcatcatcccttgacggcctaa

SEQ ID NO: 223245 - DNA, 25 bp, Artificial
  probe
  misc_feature (1)..(25): SEQ ID NO: 5699; WAN024FVZ_at; Start 215; Stop 239
attgctttaaggcactttctaacct

SEQ ID NO: 223246 - DNA, 25 bp, Artificial
  probe
  misc_feature (1)..(25): SEQ ID NO: 5699; WAN024FVZ_at; Start 238; Stop 262
ctttgcaaaaccgactctaattcat

SEQ ID NO: 223247 - DNA, 25 bp, Artificial
  probe
  misc_feature (1)..(25): SEQ ID NO: 5699; WAN024FVZ_at; Start 187; Stop 211
ttatcgcttaaaatatatggcccat

SEQ ID NO: 223248 - DNA, 25 bp, Artificial
  probe
  misc_feature (1)..(25): SEQ ID NO: 5699; WAN024FVZ_at; Start 232; Stop 256
tctaacctttgcaaaaccgactcta

SEQ ID NO: 223249 - DNA, 25 bp, Artificial
  probe
  misc_feature (1)..(25): SEQ ID NO: 5699; WAN024FVZ_at; Start 143; Stop 167
taaacacaccatacctcagatatat

SEQ ID NO: 223250 - DNA, 25 bp, Artificial
  probe
  misc_feature (1)..(25): SEQ ID NO: 5699; WAN024FVZ_at; Start 75; Stop 99
tttaacaacttcatcgccaacaatt

SEQ ID NO: 223251 - DNA, 25 bp, Artificial
  probe
  misc_feature (1)..(25): SEQ ID NO: 5383; WAN024FW2_at; Start 135; Stop 159
taagcttcaccgaagagccaagcta

SEQ ID NO: 223252 - DNA, 25 bp, Artificial
  probe
  misc_feature (1)..(25): SEQ ID NO: 5383; WAN024FW2_at; Start 126; Stop 150
gttaatttataagcttcaccgaaga

SEQ ID NO: 223253 - DNA, 25 bp, Artificial
  probe
  misc_feature (1)..(25): SEQ ID NO: 5383; WAN024FW2_at; Start 82; Stop 106
tatctacagccaattctagaccatt

SEQ ID NO: 223254 - DNA, 25 bp, Artificial
  probe
  misc_feature (1)..(25): SEQ ID NO: 5383; WAN024FW2_at; Start 14; Stop 38
tagtaatctatgaccttggctgtac

SEQ ID NO: 223255 - DNA, 25 bp, Artificial
  probe
  misc_feature (1)..(25): SEQ ID NO: 5383; WAN024FW2_at; Start 115; Stop 139
tactttcaccagttaatttataagc

SEQ ID NO: 223256 - DNA, 25 bp, Artificial
  probe
  misc_feature (1)..(25): SEQ ID NO: 5383; WAN024FW2_at; Start 132; Stop 156
ttataagcttcaccgaagagccaag

SEQ ID NO: 223257 - DNA, 25 bp, Artificial
  probe
  misc_feature (1)..(25): SEQ ID NO: 5383; WAN024FW2_at; Start 31; Stop 55
ggctgtactgcaatgaattattact

SEQ ID NO: 223258 - DNA, 25 bp, Artificial
  probe
  misc_feature (1)..(25): SEQ ID NO: 5383; WAN024FW2_at; Start 178; Stop 202
gtaatccaccaaaattctcataagg

SEQ ID NO: 223259 - DNA, 25 bp, Artificial
  probe
  misc_feature (1)..(25): SEQ ID NO: 5383; WAN024FW2_at; Start 55; Stop 79
tatctactttataagcaactaattc

SEQ ID NO: 223260 - DNA, 25 bp, Artificial
  probe
  misc_feature (1)..(25): SEQ ID NO: 5383; WAN024FW2_at; Start 172; Stop 196
catatagtaatccaccaaaattctc

SEQ ID NO: 223261 - DNA, 25 bp, Artificial
  probe
  misc_feature (1)..(25): SEQ ID NO: 5383; WAN024FW2_at; Start 181; Stop 205
atccaccaaaattctcataaggatc

SEQ ID NO: 223262 - DNA, 25 bp, Artificial
  probe
  misc_feature (1)..(25): SEQ ID NO: 5383; WAN024FW2_at; Start 156; Stop 180
gctacccctgcgtgaccatatagta

SEQ ID NO: 223263 - DNA, 25 bp, Artificial
  probe
  misc_feature (1)..(25): SEQ ID NO: 5383; WAN024FW2_at; Start 102; Stop 126
ccatttttatagatactttcaccag

SEQ ID NO: 223264 - DNA, 25 bp, Artificial
  probe
  misc_feature (1)..(25): SEQ ID NO: 5383; WAN024FW2_at; Start 22; Stop 46
tatgaccttggctgtactgcaatga

SEQ ID NO: 223265 - DNA, 25 bp, Artificial
  probe
  misc_feature (1)..(25): SEQ ID NO: 5383; WAN024FW2_at; Start 86; Stop 110
tacagccaattctagaccattttta

SEQ ID NO: 223266 - DNA, 25 bp, Artificial
  probe
  misc_feature (1)..(25): SEQ ID NO: 5383; WAN024FW2_at; Start 90; Stop 114
gccaattctagaccatttttataga

SEQ ID NO: 223267 - DNA, 25 bp, Artificial
  probe
  misc_feature (1)..(25): SEQ ID NO: 5383; WAN024FW2_at; Start 11; Stop 35
tggtagtaatctatgaccttggctg

SEQ ID NO: 223268 - DNA, 25 bp, Artificial
  probe
  misc_feature (1)..(25): SEQ ID NO: 5383; WAN024FW2_at; Start 129; Stop 153
aatttataagcttcaccgaagagcc

SEQ ID NO: 223269 - DNA, 25 bp, Artificial
  probe
  misc_feature (1)..(25): SEQ ID NO: 5383; WAN024FW2_at; Start 17; Stop 41
taatctatgaccttggctgtactgc

SEQ ID NO: 223270 - DNA, 25 bp, Artificial
  probe
  misc_feature (1)..(25): SEQ ID NO: 5383; WAN024FW2_at; Start 168; Stop 192
tgaccatatagtaatccaccaaaat

SEQ ID NO: 223271 - DNA, 25 bp, Artificial
  probe
  misc_feature (1)..(25): SEQ ID NO: 5383; WAN024FW2_at; Start 19; Stop 43
atctatgaccttggctgtactgcaa

SEQ ID NO: 223272 - DNA, 25 bp, Artificial
  probe
  misc_feature (1)..(25): SEQ ID NO: 5383; WAN024FW2_at; Start 146; Stop 170
gaagagccaagctacccctgcgtga

SEQ ID NO: 223273 - DNA, 25 bp, Artificial
  probe
  misc_feature (1)..(25): SEQ ID NO: 5383; WAN024FW2_at; Start 27; Stop 51
ccttggctgtactgcaatgaattat

SEQ ID NO: 223274 - DNA, 25 bp, Artificial
  probe
  misc_feature (1)..(25): SEQ ID NO: 5383; WAN024FW2_at; Start 37; Stop 61
actgcaatgaattattactatctac

SEQ ID NO: 223275 - DNA, 25 bp, Artificial
  probe
  misc_feature (1)..(25): SEQ ID NO: 5383; WAN024FW2_at; Start 78; Stop 102
tctttatctacagccaattctagac

SEQ ID NO: 223276 - DNA, 25 bp, Artificial
  probe
  misc_feature (1)..(25): SEQ ID NO: 5383; WAN024FW2_at; Start 158; Stop 182
tacccctgcgtgaccatatagtaat

SEQ ID NO: 223277 - DNA, 25 bp, Artificial
  probe
  misc_feature (1)..(25): SEQ ID NO: 5383; WAN024FW2_at; Start 49; Stop 73
tattactatctactttataagcaac

SEQ ID NO: 223278 - DNA, 25 bp, Artificial
  probe
  misc_feature (1)..(25): SEQ ID NO: 5383; WAN024FW2_at; Start 4; Stop 28
ctagatatggtagtaatctatgacc

SEQ ID NO: 223279 - DNA, 25 bp, Artificial
  probe
  misc_feature (1)..(25): SEQ ID NO: 5383; WAN024FW2_at; Start 161; Stop 185
ccctgcgtgaccatatagtaatcca

SEQ ID NO: 223280 - DNA, 25 bp, Artificial
  probe
  misc_feature (1)..(25): SEQ ID NO: 5383; WAN024FW2_at; Start 123; Stop 147
ccagttaatttataagcttcaccga

SEQ ID NO: 223281 - DNA, 25 bp, Artificial
  probe
  misc_feature (1)..(25): SEQ ID NO: 5383; WAN024FW2_at; Start 165; Stop 189
gcgtgaccatatagtaatccaccaa

SEQ ID NO: 223282 - DNA, 25 bp, Artificial
  probe
  misc_feature (1)..(25): SEQ ID NO: 5383; WAN024FW2_at; Start 9; Stop 33
tatggtagtaatctatgaccttggc

SEQ ID NO: 223283 - DNA, 25 bp, Artificial
  probe
  misc_feature (1)..(25): SEQ ID NO: 5383; WAN024FW2_at; Start 24; Stop 48
tgaccttggctgtactgcaatgaat

SEQ ID NO: 223284 - DNA, 25 bp, Artificial
  probe
  misc_feature (1)..(25): SEQ ID NO: 5383; WAN024FW2_at; Start 69; Stop 93
gcaactaattctttatctacagcca

SEQ ID NO: 223285 - DNA, 25 bp, Artificial
  probe
  misc_feature (1)..(25): SEQ ID NO: 3833; WAN024FW3_at; Start 378; Stop 402
tgttggtattatgaatttgggatct

SEQ ID NO: 223286 - DNA, 25 bp, Artificial
  probe
  misc_feature (1)..(25): SEQ ID NO: 3833; WAN024FW3_at; Start 230; Stop 254
tgtatagtgcaattaatgagaaact

SEQ ID NO: 223287 - DNA, 25 bp, Artificial
  probe
  misc_feature (1)..(25): SEQ ID NO: 3833; WAN024FW3_at; Start 84; Stop 108
taatttagtaccaaatatagcactg

SEQ ID NO: 223288 - DNA, 25 bp, Artificial
  probe
  misc_feature (1)..(25): SEQ ID NO: 3833; WAN024FW3_at; Start 176; Stop 200
gctcaaccaaatatcagtatcgttg

SEQ ID NO: 223289 - DNA, 25 bp, Artificial
  probe
  misc_feature (1)..(25): SEQ ID NO: 3833; WAN024FW3_at; Start 100; Stop 124
atagcactgttttctgattttaatc

SEQ ID NO: 223290 - DNA, 25 bp, Artificial
  probe
  misc_feature (1)..(25): SEQ ID NO: 3833; WAN024FW3_at; Start 275; Stop 299
tattaggtttacttcctcaaagaca

SEQ ID NO: 223291 - DNA, 25 bp, Artificial
  probe
  misc_feature (1)..(25): SEQ ID NO: 3833; WAN024FW3_at; Start 162; Stop 186
taaatactataatcgctcaaccaaa

SEQ ID NO: 223292 - DNA, 25 bp, Artificial
  probe
  misc_feature (1)..(25): SEQ ID NO: 3833; WAN024FW3_at; Start 91; Stop 115
gtaccaaatatagcactgttttctg

SEQ ID NO: 223293 - DNA, 25 bp, Artificial
  probe
  misc_feature (1)..(25): SEQ ID NO: 3833; WAN024FW3_at; Start 625; Stop 649
tggataacgcaaggtcgaatagaga

SEQ ID NO: 223294 - DNA, 25 bp, Artificial
  probe
  misc_feature (1)..(25): SEQ ID NO: 3833; WAN024FW3_at; Start 190; Stop 214
cagtatcgttggtatattattttca

SEQ ID NO: 223295 - DNA, 25 bp, Artificial
  probe
  misc_feature (1)..(25): SEQ ID NO: 3833; WAN024FW3_at; Start 144; Stop 168
catgacagttgttaatattaaatac

SEQ ID NO: 223296 - DNA, 25 bp, Artificial
  probe
  misc_feature (1)..(25): SEQ ID NO: 3833; WAN024FW3_at; Start 338; Stop 362
agtatttccaagaacaaaatattag

SEQ ID NO: 223297 - DNA, 25 bp, Artificial
  probe
  misc_feature (1)..(25): SEQ ID NO: 3833; WAN024FW3_at; Start 665; Stop 689
tttcaacgatagtttgcataatagt

SEQ ID NO: 223298 - DNA, 25 bp, Artificial
  probe
  misc_feature (1)..(25): SEQ ID NO: 3833; WAN024FW3_at; Start 426; Stop 450
acaaaagatagtaatattatatggg

SEQ ID NO: 223299 - DNA, 25 bp, Artificial
  probe
  misc_feature (1)..(25): SEQ ID NO: 3833; WAN024FW3_at; Start 634; Stop 658
caaggtcgaatagagatgattgttt

SEQ ID NO: 223300 - DNA, 25 bp, Artificial
  probe
  misc_feature (1)..(25): SEQ ID NO: 3833; WAN024FW3_at; Start 629; Stop 653
taacgcaaggtcgaatagagatgat

SEQ ID NO: 223301 - DNA, 25 bp, Artificial
  probe
  misc_feature (1)..(25): SEQ ID NO: 3833; WAN024FW3_at; Start 533; Stop 557
ttttagcaacattaatttctaccgc

SEQ ID NO: 223302 - DNA, 25 bp, Artificial
  probe
  misc_feature (1)..(25): SEQ ID NO: 3833; WAN024FW3_at; Start 505; Stop 529
agattgtatgtaggtagttctttaa

SEQ ID NO: 223303 - DNA, 25 bp, Artificial
  probe
  misc_feature (1)..(25): SEQ ID NO: 3833; WAN024FW3_at; Start 483; Stop 507
tgccggatattttagcgggtataga

SEQ ID NO: 223304 - DNA, 25 bp, Artificial
  probe
  misc_feature (1)..(25): SEQ ID NO: 3833; WAN024FW3_at; Start 611; Stop 635
ggtttactcaaatttggataacgca

SEQ ID NO: 223305 - DNA, 25 bp, Artificial
  probe
  misc_feature (1)..(25): SEQ ID NO: 3833; WAN024FW3_at; Start 129; Stop 153
gattattataatcatcatgacagtt

SEQ ID NO: 223306 - DNA, 25 bp, Artificial
  probe
  misc_feature (1)..(25): SEQ ID NO: 3833; WAN024FW3_at; Start 476; Stop 500
atagttttgccggatattttagcgg

SEQ ID NO: 223307 - DNA, 25 bp, Artificial
  probe
  misc_feature (1)..(25): SEQ ID NO: 3833; WAN024FW3_at; Start 660; Stop 684
gctaatttcaacgatagtttgcata

SEQ ID NO: 223308 - DNA, 25 bp, Artificial
  probe
  misc_feature (1)..(25): SEQ ID NO: 3833; WAN024FW3_at; Start 171; Stop 195
taatcgctcaaccaaatatcagtat

SEQ ID NO: 223309 - DNA, 25 bp, Artificial
  probe
  misc_feature (1)..(25): SEQ ID NO: 3833; WAN024FW3_at; Start 648; Stop 672
gatgattgttttgctaatttcaacg

SEQ ID NO: 223310 - DNA, 25 bp, Artificial
  probe
  misc_feature (1)..(25): SEQ ID NO: 3833; WAN024FW3_at; Start 397; Stop 421
ggatctatttcatcgttaatttaca

SEQ ID NO: 223311 - DNA, 25 bp, Artificial
  probe
  misc_feature (1)..(25): SEQ ID NO: 3833; WAN024FW3_at; Start 269; Stop 293
catttctattaggtttacttcctca

SEQ ID NO: 223312 - DNA, 25 bp, Artificial
  probe
  misc_feature (1)..(25): SEQ ID NO: 3833; WAN024FW3_at; Start 568; Stop 592
gaaacattaaaactcaagtatctgt

SEQ ID NO: 223313 - DNA, 25 bp, Artificial
  probe
  misc_feature (1)..(25): SEQ ID NO: 3833; WAN024FW3_at; Start 619; Stop 643
caaatttggataacgcaaggtcgaa

SEQ ID NO: 223314 - DNA, 25 bp, Artificial
  probe
  misc_feature (1)..(25): SEQ ID NO: 3833; WAN024FW3_at; Start 495; Stop 519
tagcgggtatagattgtatgtaggt

SEQ ID NO: 223315 - DNA, 25 bp, Artificial
  probe
  misc_feature (1)..(25): SEQ ID NO: 3833; WAN024FW3_at; Start 59; Stop 83
tgattgtactgagtaaaaacttctt

SEQ ID NO: 223316 - DNA, 25 bp, Artificial
  probe
  misc_feature (1)..(25): SEQ ID NO: 3833; WAN024FW3_at; Start 390; Stop 414
gaatttgggatctatttcatcgtta

SEQ ID NO: 223317 - DNA, 25 bp, Artificial
  probe
  misc_feature (1)..(25): SEQ ID NO: 3833; WAN024FW3_at; Start 215; Stop 239
cattgatatttgtgttgtatagtgc

SEQ ID NO: 223318 - DNA, 25 bp, Artificial
  probe
  misc_feature (1)..(25): SEQ ID NO: 3833; WAN024FW3_at; Start 538; Stop 562
gcaacattaatttctaccgcttatt

SEQ ID NO: 223319 - DNA, 25 bp, Artificial
  probe
  misc_feature (1)..(25): SEQ ID NO: 1567; WAN024FW4_at; Start 647; Stop 671
tccataaactgggatataaaattgt

SEQ ID NO: 223320 - DNA, 25 bp, Artificial
  probe
  misc_feature (1)..(25): SEQ ID NO: 1567; WAN024FW4_at; Start 663; Stop 687
taaaattgtagatatagctcctaca

SEQ ID NO: 223321 - DNA, 25 bp, Artificial
  probe
  misc_feature (1)..(25): SEQ ID NO: 1567; WAN024FW4_at; Start 673; Stop 697
gatatagctcctacaaattttatat

SEQ ID NO: 223322 - DNA, 25 bp, Artificial
  probe
  misc_feature (1)..(25): SEQ ID NO: 1567; WAN024FW4_at; Start 606; Stop 630
agaaaaatcactagacaacattgtg

SEQ ID NO: 223323 - DNA, 25 bp, Artificial
  probe
  misc_feature (1)..(25): SEQ ID NO: 1567; WAN024FW4_at; Start 602; Stop 626
ttagagaaaaatcactagacaacat

SEQ ID NO: 223324 - DNA, 25 bp, Artificial
  probe
  misc_feature (1)..(25): SEQ ID NO: 1567; WAN024FW4_at; Start 665; Stop 689
aaattgtagatatagctcctacaaa

SEQ ID NO: 223325 - DNA, 25 bp, Artificial
  probe
  misc_feature (1)..(25): SEQ ID NO: 1567; WAN024FW4_at; Start 444; Stop 468
aaatgaggcttacatgctaaaaaag

SEQ ID NO: 223326 - DNA, 25 bp, Artificial
  probe
  misc_feature (1)..(25): SEQ ID NO: 1567; WAN024FW4_at; Start 607; Stop 631
gaaaaatcactagacaacattgtga

SEQ ID NO: 223327 - DNA, 25 bp, Artificial
  probe
  misc_feature (1)..(25): SEQ ID NO: 1567; WAN024FW4_at; Start 671; Stop 695
tagatatagctcctacaaattttat

SEQ ID NO: 223328 - DNA, 25 bp, Artificial
  probe
  misc_feature (1)..(25): SEQ ID NO: 1567; WAN024FW4_at; Start 696; Stop 720
atataccaaaaatgtactgacccca

SEQ ID NO: 223329 - DNA, 25 bp, Artificial
  probe
  misc_feature (1)..(25): SEQ ID NO: 1567; WAN024FW4_at; Start 651; Stop 675
taaactgggatataaaattgtagat

SEQ ID NO: 223330 - DNA, 25 bp, Artificial
  probe
  misc_feature (1)..(25): SEQ ID NO: 1567; WAN024FW4_at; Start 600; Stop 624
tattagagaaaaatcactagacaac

SEQ ID NO: 223331 - DNA, 25 bp, Artificial
  probe
  misc_feature (1)..(25): SEQ ID NO: 1567; WAN024FW4_at; Start 661; Stop 685
tataaaattgtagatatagctccta

SEQ ID NO: 223332 - DNA, 25 bp, Artificial
  probe
  misc_feature (1)..(25): SEQ ID NO: 1567; WAN024FW4_at; Start 648; Stop 672
ccataaactgggatataaaattgta

SEQ ID NO: 223333 - DNA, 25 bp, Artificial
  probe
  misc_feature (1)..(25): SEQ ID NO: 1567; WAN024FW4_at; Start 446; Stop 470
atgaggcttacatgctaaaaaagtt

SEQ ID NO: 223334 - DNA, 25 bp, Artificial
  probe
  misc_feature (1)..(25): SEQ ID NO: 1567; WAN024FW4_at; Start 669; Stop 693
tgtagatatagctcctacaaatttt

SEQ ID NO: 223335 - DNA, 25 bp, Artificial
  probe
  misc_feature (1)..(25): SEQ ID NO: 1567; WAN024FW4_at; Start 679; Stop 703
gctcctacaaattttatatatacca

SEQ ID NO: 223336 - DNA, 25 bp, Artificial
  probe
  misc_feature (1)..(25): SEQ ID NO: 1567; WAN024FW4_at; Start 701; Stop 725
ccaaaaatgtactgaccccaaacag

SEQ ID NO: 223337 - DNA, 25 bp, Artificial
  probe
  misc_feature (1)..(25): SEQ ID NO: 1567; WAN024FW4_at; Start 605; Stop 629
gagaaaaatcactagacaacattgt

SEQ ID NO: 223338 - DNA, 25 bp, Artificial
  probe
  misc_feature (1)..(25): SEQ ID NO: 1567; WAN024FW4_at; Start 445; Stop 469
aatgaggcttacatgctaaaaaagt

SEQ ID NO: 223339 - DNA, 25 bp, Artificial
  probe
  misc_feature (1)..(25): SEQ ID NO: 1567; WAN024FW4_at; Start 450; Stop 474
ggcttacatgctaaaaaagttagcc

SEQ ID NO: 223340 - DNA, 25 bp, Artificial
  probe
  misc_feature (1)..(25): SEQ ID NO: 1567; WAN024FW4_at; Start 702; Stop 726
caaaaatgtactgaccccaaacagt

SEQ ID NO: 223341 - DNA, 25 bp, Artificial
  probe
  misc_feature (1)..(25): SEQ ID NO: 1567; WAN024FW4_at; Start 447; Stop 471
tgaggcttacatgctaaaaaagtta

SEQ ID NO: 223342 - DNA, 25 bp, Artificial
  probe
  misc_feature (1)..(25): SEQ ID NO: 1567; WAN024FW4_at; Start 610; Stop 634
aaatcactagacaacattgtgaata

SEQ ID NO: 223343 - DNA, 25 bp, Artificial
  probe
  misc_feature (1)..(25): SEQ ID NO: 1567; WAN024FW4_at; Start 659; Stop 683
gatataaaattgtagatatagctcc

SEQ ID NO: 223344 - DNA, 25 bp, Artificial
  probe
  misc_feature (1)..(25): SEQ ID NO: 1567; WAN024FW4_at; Start 649; Stop 673
cataaactgggatataaaattgtag

SEQ ID NO: 223345 - DNA, 25 bp, Artificial
  probe
  misc_feature (1)..(25): SEQ ID NO: 1567; WAN024FW4_at; Start 603; Stop 627
tagagaaaaatcactagacaacatt

SEQ ID NO: 223346 - DNA, 25 bp, Artificial
  probe
  misc_feature (1)..(25): SEQ ID NO: 1567; WAN024FW4_at; Start 448; Stop 472
gaggcttacatgctaaaaaagttag

SEQ ID NO: 223347 - DNA, 25 bp, Artificial
  probe
  misc_feature (1)..(25): SEQ ID NO: 1567; WAN024FW4_at; Start 697; Stop 721
tataccaaaaatgtactgaccccaa

SEQ ID NO: 223348 - DNA, 25 bp, Artificial
  probe
  misc_feature (1)..(25): SEQ ID NO: 1567; WAN024FW4_at; Start 608; Stop 632
aaaaatcactagacaacattgtgaa

SEQ ID NO: 223349 - DNA, 25 bp, Artificial
  probe
  misc_feature (1)..(25): SEQ ID NO: 1567; WAN024FW4_at; Start 695; Stop 719
tatataccaaaaatgtactgacccc

SEQ ID NO: 223350 - DNA, 25 bp, Artificial
  probe
  misc_feature (1)..(25): SEQ ID NO: 1567; WAN024FW4_at; Start 612; Stop 636
atcactagacaacattgtgaatata

SEQ ID NO: 223351 - DNA, 25 bp, Artificial
  probe
  misc_feature (1)..(25): SEQ ID NO: 1567; WAN024FW4_at; Start 693; Stop 717
tatatataccaaaaatgtactgacc

SEQ ID NO: 223352 - DNA, 25 bp, Artificial
  probe
  misc_feature (1)..(25): SEQ ID NO: 1567; WAN024FW4_at; Start 604; Stop 628
agagaaaaatcactagacaacattg

SEQ ID NO: 223353 - DNA, 25 bp, Artificial
  probe
  misc_feature (1)..(25): SEQ ID NO: 2272; WAN024FW5_at; Start 1262; Stop 1286
ctgtaggagttgagaatgacaattc

SEQ ID NO: 223354 - DNA, 25 bp, Artificial
  probe
  misc_feature (1)..(25): SEQ ID NO: 2272; WAN024FW5_at; Start 213; Stop 237
taggaaaaaatctgaaatacatgag

SEQ ID NO: 223355 - DNA, 25 bp, Artificial
  probe
  misc_feature (1)..(25): SEQ ID NO: 2272; WAN024FW5_at; Start 1406; Stop 1430
ctaggaatagtatgaataagacggg

SEQ ID NO: 223356 - DNA, 25 bp, Artificial
  probe
  misc_feature (1)..(25): SEQ ID NO: 2272; WAN024FW5_at; Start 1947; Stop 1971
tgtatatctgattaaaacactgcaa

SEQ ID NO: 223357 - DNA, 25 bp, Artificial
  probe
  misc_feature (1)..(25): SEQ ID NO: 2272; WAN024FW5_at; Start 1525; Stop 1549
ggaccgacagttagatatgaattta

SEQ ID NO: 223358 - DNA, 25 bp, Artificial
  probe
  misc_feature (1)..(25): SEQ ID NO: 2272; WAN024FW5_at; Start 1666; Stop 1690
ttcaatgaatcactagtaacaccag

SEQ ID NO: 223359 - DNA, 25 bp, Artificial
  probe
  misc_feature (1)..(25): SEQ ID NO: 2272; WAN024FW5_at; Start 1137; Stop 1161
taaacaaacagacaaagtatcagat

SEQ ID NO: 223360 - DNA, 25 bp, Artificial
  probe
  misc_feature (1)..(25): SEQ ID NO: 2272; WAN024FW5_at; Start 1420; Stop 1444
aataagacgggaatactgtttactg

SEQ ID NO: 223361 - DNA, 25 bp, Artificial
  probe
  misc_feature (1)..(25): SEQ ID NO: 2272; WAN024FW5_at; Start 768; Stop 792
tgttatttctcaagcttgtactgaa

SEQ ID NO: 223362 - DNA, 25 bp, Artificial
  probe
  misc_feature (1)..(25): SEQ ID NO: 2272; WAN024FW5_at; Start 1562; Stop 1586
gggtaccaacattggatacagatga

SEQ ID NO: 223363 - DNA, 25 bp, Artificial
  probe
  misc_feature (1)..(25): SEQ ID NO: 2272; WAN024FW5_at; Start 1890; Stop 1914
taaagcgtatggaaagaatagattg

SEQ ID NO: 223364 - DNA, 25 bp, Artificial
  probe
  misc_feature (1)..(25): SEQ ID NO: 2272; WAN024FW5_at; Start 1808; Stop 1832
taaaatctactaacaggaatagtga

SEQ ID NO: 223365 - DNA, 25 bp, Artificial
  probe
  misc_feature (1)..(25): SEQ ID NO: 2272; WAN024FW5_at; Start 65; Stop 89
gatggaaggataagcaatatattgc

SEQ ID NO: 223366 - DNA, 25 bp, Artificial
  probe
  misc_feature (1)..(25): SEQ ID NO: 2272; WAN024FW5_at; Start 1775; Stop 1799
tagatagagcagcaaaagaaaattt

SEQ ID NO: 223367 - DNA, 25 bp, Artificial
  probe
  misc_feature (1)..(25): SEQ ID NO: 2272; WAN024FW5_at; Start 603; Stop 627
gatcaatgaattgagctgtaagcct

SEQ ID NO: 223368 - DNA, 25 bp, Artificial
  probe
  misc_feature (1)..(25): SEQ ID NO: 2272; WAN024FW5_at; Start 358; Stop 382
tatgcaagaacgtgtgaagaggaaa

SEQ ID NO: 223369 - DNA, 25 bp, Artificial
  probe
  misc_feature (1)..(25): SEQ ID NO: 2272; WAN024FW5_at; Start 175; Stop 199
ttctctttcaaaatatctgctacag

SEQ ID NO: 223370 - DNA, 25 bp, Artificial
  probe
  misc_feature (1)..(25): SEQ ID NO: 2272; WAN024FW5_at; Start 232; Stop 256
catgagaagcaagaaaaacaattgg

SEQ ID NO: 223371 - DNA, 25 bp, Artificial
  probe
  misc_feature (1)..(25): SEQ ID NO: 2272; WAN024FW5_at; Start 322; Stop 346
gatgttaccgactataatcttgaag

SEQ ID NO: 223372 - DNA, 25 bp, Artificial
  probe
  misc_feature (1)..(25): SEQ ID NO: 2272; WAN024FW5_at; Start 1323; Stop 1347
gatacaagacaatattcaaaaagct

SEQ ID NO: 223373 - DNA, 25 bp, Artificial
  probe
  misc_feature (1)..(25): SEQ ID NO: 2272; WAN024FW5_at; Start 1510; Stop 1534
tttgttgcagatcatggaccgacag

SEQ ID NO: 223374 - DNA, 25 bp, Artificial
  probe
  misc_feature (1)..(25): SEQ ID NO: 2272; WAN024FW5_at; Start 1962; Stop 1986
aacactgcaaataaaaatagtaggg

SEQ ID NO: 223375 - DNA, 25 bp, Artificial
  probe
  misc_feature (1)..(25): SEQ ID NO: 2272; WAN024FW5_at; Start 739; Stop 763
cctaacgatattgtaaaagcgatga

SEQ ID NO: 223376 - DNA, 25 bp, Artificial
  probe
  misc_feature (1)..(25): SEQ ID NO: 2272; WAN024FW5_at; Start 850; Stop 874
gaattatctgttaacaaagctagtg

SEQ ID NO: 223377 - DNA, 25 bp, Artificial
  probe
  misc_feature (1)..(25): SEQ ID NO: 2272; WAN024FW5_at; Start 1682; Stop 1706
taacaccagatgaattatttaacga

SEQ ID NO: 223378 - DNA, 25 bp, Artificial
  probe
  misc_feature (1)..(25): SEQ ID NO: 2272; WAN024FW5_at; Start 307; Stop 331
agtcgtttgaagtcagatgttaccg

SEQ ID NO: 223379 - DNA, 25 bp, Artificial
  probe
  misc_feature (1)..(25): SEQ ID NO: 2272; WAN024FW5_at; Start 722; Stop 746
cacatgtgactgtgagtcctaacga

SEQ ID NO: 223380 - DNA, 25 bp, Artificial
  probe
  misc_feature (1)..(25): SEQ ID NO: 2272; WAN024FW5_at; Start 709; Stop 733
tcttattcagattcacatgtgactg

SEQ ID NO: 223381 - DNA, 25 bp, Artificial
  probe
  misc_feature (1)..(25): SEQ ID NO: 2272; WAN024FW5_at; Start 1391; Stop 1415
ttcaacggtattctactaggaatag

SEQ ID NO: 223382 - DNA, 25 bp, Artificial
  probe
  misc_feature (1)..(25): SEQ ID NO: 2272; WAN024FW5_at; Start 1910; Stop 1934
gattgttaaaccctatattggatat

SEQ ID NO: 223383 - DNA, 25 bp, Artificial
  probe
  misc_feature (1)..(25): SEQ ID NO: 2272; WAN024FW5_at; Start 979; Stop 1003
tctagaaaatcaacgctatatccat

SEQ ID NO: 223384 - DNA, 25 bp, Artificial
  probe
  misc_feature (1)..(25): SEQ ID NO: 2272; WAN024FW5_at; Start 113; Stop 137
tccatagaaattgtcatcctgaagt

SEQ ID NO: 223385 - DNA, 25 bp, Artificial
  probe
  misc_feature (1)..(25): SEQ ID NO: 2272; WAN024FW5_at; Start 515; Stop 539
cattagggattagagattatttctc

SEQ ID NO: 223386 - DNA, 25 bp, Artificial
  probe
  misc_feature (1)..(25): SEQ ID NO: 2272; WAN024FW5_at; Start 569; Stop 593
tacgtaagtcatcaggaaatttata

SEQ ID NO: 223387 - DNA, 25 bp, Artificial
  probe
  misc_feature (1)..(25): SEQ ID NO: 2366; WAN024FW6_at; Start 508; Stop 532
aatttccctagtcttcctagctgga

SEQ ID NO: 223388 - DNA, 25 bp, Artificial
  probe
  misc_feature (1)..(25): SEQ ID NO: 2366; WAN024FW6_at; Start 927; Stop 951
tattagagaaaaaacactggataac

SEQ ID NO: 223389 - DNA, 25 bp, Artificial
  probe
  misc_feature (1)..(25): SEQ ID NO: 2366; WAN024FW6_at; Start 974; Stop 998
tccataaactgggaatactaactaa

SEQ ID NO: 223390 - DNA, 25 bp, Artificial
  probe
  misc_feature (1)..(25): SEQ ID NO: 2366; WAN024FW6_at; Start 516; Stop 540
tagtcttcctagctggaaaatggat

SEQ ID NO: 223391 - DNA, 25 bp, Artificial
  probe
  misc_feature (1)..(25): SEQ ID NO: 2366; WAN024FW6_at; Start 513; Stop 537
ccctagtcttcctagctggaaaatg

SEQ ID NO: 223392 - DNA, 25 bp, Artificial
  probe
  misc_feature (1)..(25): SEQ ID NO: 2366; WAN024FW6_at; Start 496; Stop 520
gataagagacaaaatttccctagtc

SEQ ID NO: 223393 - DNA, 25 bp, Artificial
  probe
  misc_feature (1)..(25): SEQ ID NO: 2366; WAN024FW6_at; Start 175; Stop 199
ctaaataattgtagctttaaagttg

SEQ ID NO: 223394 - DNA, 25 bp, Artificial
  probe
  misc_feature (1)..(25): SEQ ID NO: 2366; WAN024FW6_at; Start 147; Stop 171
ttttaagattgtgtataaactatcc

SEQ ID NO: 223395 - DNA, 25 bp, Artificial
  probe
  misc_feature (1)..(25): SEQ ID NO: 2366; WAN024FW6_at; Start 234; Stop 258
ccctagggaaatgagccctactgct

SEQ ID NO: 223396 - DNA, 25 bp, Artificial
  probe
  misc_feature (1)..(25): SEQ ID NO: 2366; WAN024FW6_at; Start 507; Stop 531
aaatttccctagtcttcctagctgg

SEQ ID NO: 223397 - DNA, 25 bp, Artificial
  probe
  misc_feature (1)..(25): SEQ ID NO: 2366; WAN024FW6_at; Start 483; Stop 507
gaactatgtagaagataagagacaa

SEQ ID NO: 223398 - DNA, 25 bp, Artificial
  probe
  misc_feature (1)..(25): SEQ ID NO: 2366; WAN024FW6_at; Start 493; Stop 517
gaagataagagacaaaatttcccta

SEQ ID NO: 223399 - DNA, 25 bp, Artificial
  probe
  misc_feature (1)..(25): SEQ ID NO: 2366; WAN024FW6_at; Start 937; Stop 961
aaaacactggataacattgtgaata

SEQ ID NO: 223400 - DNA, 25 bp, Artificial
  probe
  misc_feature (1)..(25): SEQ ID NO: 2366; WAN024FW6_at; Start 506; Stop 530
aaaatttccctagtcttcctagctg

SEQ ID NO: 223401 - DNA, 25 bp, Artificial
  probe
  misc_feature (1)..(25): SEQ ID NO: 2366; WAN024FW6_at; Start 13; Stop 37
gagaaagaatgtttaaaatgtgata

SEQ ID NO: 223402 - DNA, 25 bp, Artificial
  probe
  misc_feature (1)..(25): SEQ ID NO: 2366; WAN024FW6_at; Start 471; Stop 495
tgaaaaaaggaagaactatgtagaa

SEQ ID NO: 223403 - DNA, 25 bp, Artificial
  probe
  misc_feature (1)..(25): SEQ ID NO: 2366; WAN024FW6_at; Start 486; Stop 510
ctatgtagaagataagagacaaaat

SEQ ID NO: 223404 - DNA, 25 bp, Artificial
  probe
  misc_feature (1)..(25): SEQ ID NO: 2366; WAN024FW6_at; Start 515; Stop 539
ctagtcttcctagctggaaaatgga

SEQ ID NO: 223405 - DNA, 25 bp, Artificial
  probe
  misc_feature (1)..(25): SEQ ID NO: 2366; WAN024FW6_at; Start 491; Stop 515
tagaagataagagacaaaatttccc

SEQ ID NO: 223406 - DNA, 25 bp, Artificial
  probe
  misc_feature (1)..(25): SEQ ID NO: 2366; WAN024FW6_at; Start 533; Stop 557
aaatggatttattttcagaagaaga

SEQ ID NO: 223407 - DNA, 25 bp, Artificial
  probe
  misc_feature (1)..(25): SEQ ID NO: 2366; WAN024FW6_at; Start 934; Stop 958
gaaaaaacactggataacattgtga

SEQ ID NO: 223408 - DNA, 25 bp, Artificial
  probe
  misc_feature (1)..(25): SEQ ID NO: 2366; WAN024FW6_at; Start 469; Stop 493
gatgaaaaaaggaagaactatgtag

SEQ ID NO: 223409 - DNA, 25 bp, Artificial
  probe
  misc_feature (1)..(25): SEQ ID NO: 2366; WAN024FW6_at; Start 975; Stop 999
ccataaactgggaatactaactaat

SEQ ID NO: 223410 - DNA, 25 bp, Artificial
  probe
  misc_feature (1)..(25): SEQ ID NO: 2366; WAN024FW6_at; Start 479; Stop 503
ggaagaactatgtagaagataagag

SEQ ID NO: 223411 - DNA, 25 bp, Artificial
  probe
  misc_feature (1)..(25): SEQ ID NO: 2366; WAN024FW6_at; Start 939; Stop 963
aacactggataacattgtgaatata

SEQ ID NO: 223412 - DNA, 25 bp, Artificial
  probe
  misc_feature (1)..(25): SEQ ID NO: 2366; WAN024FW6_at; Start 511; Stop 535
ttccctagtcttcctagctggaaaa

SEQ ID NO: 223413 - DNA, 25 bp, Artificial
  probe
  misc_feature (1)..(25): SEQ ID NO: 2366; WAN024FW6_at; Start 932; Stop 956
gagaaaaaacactggataacattgt

SEQ ID NO: 223414 - DNA, 25 bp, Artificial
  probe
  misc_feature (1)..(25): SEQ ID NO: 2366; WAN024FW6_at; Start 467; Stop 491
tagatgaaaaaaggaagaactatgt

SEQ ID NO: 223415 - DNA, 25 bp, Artificial
  probe
  misc_feature (1)..(25): SEQ ID NO: 2366; WAN024FW6_at; Start 775; Stop 799
gaagctcacatgctaaaaaaattag

SEQ ID NO: 223416 - DNA, 25 bp, Artificial
  probe
  misc_feature (1)..(25): SEQ ID NO: 2366; WAN024FW6_at; Start 929; Stop 953
ttagagaaaaaacactggataacat

SEQ ID NO: 223417 - DNA, 25 bp, Artificial
  probe
  misc_feature (1)..(25): SEQ ID NO: 2366; WAN024FW6_at; Start 522; Stop 546
tcctagctggaaaatggatttattt

SEQ ID NO: 223418 - DNA, 25 bp, Artificial
  probe
  misc_feature (1)..(25): SEQ ID NO: 2366; WAN024FW6_at; Start 3; Stop 27
ggatttattagagaaagaatgttta

SEQ ID NO: 223419 - DNA, 25 bp, Artificial
  probe
  misc_feature (1)..(25): SEQ ID NO: 2366; WAN024FW6_at; Start 232; Stop 256
tcccctagggaaatgagccctactg

SEQ ID NO: 223420 - DNA, 25 bp, Artificial
  probe
  misc_feature (1)..(25): SEQ ID NO: 2366; WAN024FW6_at; Start 519; Stop 543
tcttcctagctggaaaatggattta

SEQ ID NO: 223421 - DNA, 25 bp, Artificial
  probe
  misc_feature (1)..(25): SEQ ID NO: 5172; WAN024FW7_at; Start 1273; Stop 1297
tacatgccactagtaactacatcgg

SEQ ID NO: 223422 - DNA, 25 bp, Artificial
  probe
  misc_feature (1)..(25): SEQ ID NO: 5172; WAN024FW7_at; Start 1142; Stop 1166
gggaacaggctgtcttttcaaatga

SEQ ID NO: 223423 - DNA, 25 bp, Artificial
  probe
  misc_feature (1)..(25): SEQ ID NO: 5172; WAN024FW7_at; Start 1777; Stop 1801
ggtaaaattggtacaatctggctca

SEQ ID NO: 223424 - DNA, 25 bp, Artificial
  probe
  misc_feature (1)..(25): SEQ ID NO: 5172; WAN024FW7_at; Start 1421; Stop 1445
gtccacagattgagaatatttccag

SEQ ID NO: 223425 - DNA, 25 bp, Artificial
  probe
  misc_feature (1)..(25): SEQ ID NO: 5172; WAN024FW7_at; Start 2257; Stop 2281
tatctagcaactggaagtgctggcc

SEQ ID NO: 223426 - DNA, 25 bp, Artificial
  probe
  misc_feature (1)..(25): SEQ ID NO: 5172; WAN024FW7_at; Start 2339; Stop 2363
taacttctttagagagggcaactga

SEQ ID NO: 223427 - DNA, 25 bp, Artificial
  probe
  misc_feature (1)..(25): SEQ ID NO: 5172; WAN024FW7_at; Start 1220; Stop 1244
cacttcccagtgagatagattggta

SEQ ID NO: 223428 - DNA, 25 bp, Artificial
  probe
  misc_feature (1)..(25): SEQ ID NO: 5172; WAN024FW7_at; Start 307; Stop 331
gacaaatttatcatgcgaaacggga

SEQ ID NO: 223429 - DNA, 25 bp, Artificial
  probe
  misc_feature (1)..(25): SEQ ID NO: 5172; WAN024FW7_at; Start 761; Stop 785
taaaagaggctagaccgtatacagg

SEQ ID NO: 223430 - DNA, 25 bp, Artificial
  probe
  misc_feature (1)..(25): SEQ ID NO: 5172; WAN024FW7_at; Start 1127; Stop 1151
ttagtataatagactgggaacaggc

SEQ ID NO: 223431 - DNA, 25 bp, Artificial
  probe
  misc_feature (1)..(25): SEQ ID NO: 5172; WAN024FW7_at; Start 1308; Stop 1332
caactatgtaagtcaaaccaggata

SEQ ID NO: 223432 - DNA, 25 bp, Artificial
  probe
  misc_feature (1)..(25): SEQ ID NO: 5172; WAN024FW7_at; Start 498; Stop 522
tgtgtttaggccgtcaagggatgat

SEQ ID NO: 223433 - DNA, 25 bp, Artificial
  probe
  misc_feature (1)..(25): SEQ ID NO: 5172; WAN024FW7_at; Start 1476; Stop 1500
tagaactatcgagagtgagcaagat

SEQ ID NO: 223434 - DNA, 25 bp, Artificial
  probe
  misc_feature (1)..(25): SEQ ID NO: 5172; WAN024FW7_at; Start 1175; Stop 1199
ttgtacataaagttgcagcccctgg

SEQ ID NO: 223435 - DNA, 25 bp, Artificial
  probe
  misc_feature (1)..(25): SEQ ID NO: 5172; WAN024FW7_at; Start 894; Stop 918
gatctgggagcacaccttcttagga

SEQ ID NO: 223436 - DNA, 25 bp, Artificial
  probe
  misc_feature (1)..(25): SEQ ID NO: 5172; WAN024FW7_at; Start 2082; Stop 2106
tggattactatatggtcacgcaggg

SEQ ID NO: 223437 - DNA, 25 bp, Artificial
  probe
  misc_feature (1)..(25): SEQ ID NO: 5172; WAN024FW7_at; Start 2214; Stop 2238
taataattcattgcagtacagccaa

SEQ ID NO: 223438 - DNA, 25 bp, Artificial
  probe
  misc_feature (1)..(25): SEQ ID NO: 5172; WAN024FW7_at; Start 1203; Stop 1227
tagagcatggcgagaaacacttccc

SEQ ID NO: 223439 - DNA, 25 bp, Artificial
  probe
  misc_feature (1)..(25): SEQ ID NO: 5172; WAN024FW7_at; Start 812; Stop 836
cagagaaattagcttcggagtgcaa

SEQ ID NO: 223440 - DNA, 25 bp, Artificial
  probe
  misc_feature (1)..(25): SEQ ID NO: 5172; WAN024FW7_at; Start 422; Stop 446
ccttaaagcaatataatgggccata

SEQ ID NO: 223441 - DNA, 25 bp, Artificial
  probe
  misc_feature (1)..(25): SEQ ID NO: 5172; WAN024FW7_at; Start 880; Stop 904
tactggcacggtaagatctgggagc

SEQ ID NO: 223442 - DNA, 25 bp, Artificial
  probe
  misc_feature (1)..(25): SEQ ID NO: 5172; WAN024FW7_at; Start 2544; Stop 2568
gataacaacagatattgcttcggga

SEQ ID NO: 223443 - DNA, 25 bp, Artificial
  probe
  misc_feature (1)..(25): SEQ ID NO: 5172; WAN024FW7_at; Start 452; Stop 476
taagcgataaacgttgggatgaagc

SEQ ID NO: 223444 - DNA, 25 bp, Artificial
  probe
  misc_feature (1)..(25): SEQ ID NO: 5172; WAN024FW7_at; Start 1188; Stop 1212
tgcagcccctggttttagagcatgg

SEQ ID NO: 223445 - DNA, 25 bp, Artificial
  probe
  misc_feature (1)..(25): SEQ ID NO: 5172; WAN024FW7_at; Start 1883; Stop 1907
aaaatttatatagtgggcaggctgg

SEQ ID NO: 223446 - DNA, 25 bp, Artificial
  probe
  misc_feature (1)..(25): SEQ ID NO: 5172; WAN024FW7_at; Start 96; Stop 120
cataaagtaccaagtaagtctgcct

SEQ ID NO: 223447 - DNA, 25 bp, Artificial
  probe
  misc_feature (1)..(25): SEQ ID NO: 5172; WAN024FW7_at; Start 1696; Stop 1720
gactattatgagattcgaacacagg

SEQ ID NO: 223448 - DNA, 25 bp, Artificial
  probe
  misc_feature (1)..(25): SEQ ID NO: 5172; WAN024FW7_at; Start 1900; Stop 1924
caggctggaattttactggttggac

SEQ ID NO: 223449 - DNA, 25 bp, Artificial
  probe
  misc_feature (1)..(25): SEQ ID NO: 5172; WAN024FW7_at; Start 2032; Stop 2056
aaagttggcgctagtgatgttcaga

SEQ ID NO: 223450 - DNA, 25 bp, Artificial
  probe
  misc_feature (1)..(25): SEQ ID NO: 5172; WAN024FW7_at; Start 914; Stop 938
taggaattgaacatatgaagggcgt

SEQ ID NO: 223451 - DNA, 25 bp, Artificial
  probe
  misc_feature (1)..(25): SEQ ID NO: 5172; WAN024FW7_at; Start 468; Stop 492
ggatgaagcaccaatatatctgagg

SEQ ID NO: 223452 - DNA, 25 bp, Artificial
  probe
  misc_feature (1)..(25): SEQ ID NO: 5172; WAN024FW7_at; Start 1538; Stop 1562
cgctaacttatggacagtggcgtaa

SEQ ID NO: 223453 - DNA, 25 bp, Artificial
  probe
  misc_feature (1)..(25): SEQ ID NO: 5172; WAN024FW7_at; Start 1711; Stop 1735
cgaacacaggttattaatgaggcag

SEQ ID NO: 223454 - DNA, 25 bp, Artificial
  probe
  misc_feature (1)..(25): SEQ ID NO: 5172; WAN024FW7_at; Start 930; Stop 954
gaagggcgttccactaaatagatgg

SEQ ID NO: 223455 - DNA, 25 bp, Artificial
  probe
  misc_feature (1)..(25): SEQ ID NO: 3908; WAN024FW8_at; Start 851; Stop 875
gaagagttcactgtataggacgtta

SEQ ID NO: 223456 - DNA, 25 bp, Artificial
  probe
  misc_feature (1)..(25): SEQ ID NO: 3908; WAN024FW8_at; Start 332; Stop 356
tagttttggttgtatcctcactgcg

SEQ ID NO: 223457 - DNA, 25 bp, Artificial
  probe
  misc_feature (1)..(25): SEQ ID NO: 3908; WAN024FW8_at; Start 1607; Stop 1631
caaatgatcctctttctaagaccga

SEQ ID NO: 223458 - DNA, 25 bp, Artificial
  probe
  misc_feature (1)..(25): SEQ ID NO: 3908; WAN024FW8_at; Start 1713; Stop 1737
ggcacgagactcaaatactgttata

SEQ ID NO: 223459 - DNA, 25 bp, Artificial
  probe
  misc_feature (1)..(25): SEQ ID NO: 3908; WAN024FW8_at; Start 630; Stop 654
caggatttttctatacagtttcgac

SEQ ID NO: 223460 - DNA, 25 bp, Artificial
  probe
  misc_feature (1)..(25): SEQ ID NO: 3908; WAN024FW8_at; Start 1205; Stop 1229
aaagtgaagatacggatgagctccc

SEQ ID NO: 223461 - DNA, 25 bp, Artificial
  probe
  misc_feature (1)..(25): SEQ ID NO: 3908; WAN024FW8_at; Start 884; Stop 908
tagactgttcaaacgcagcgaattc

SEQ ID NO: 223462 - DNA, 25 bp, Artificial
  probe
  misc_feature (1)..(25): SEQ ID NO: 3908; WAN024FW8_at; Start 1338; Stop 1362
tatagttcatgtaagaggtggaggc

SEQ ID NO: 223463 - DNA, 25 bp, Artificial
  probe
  misc_feature (1)..(25): SEQ ID NO: 3908; WAN024FW8_at; Start 57; Stop 81
gaggtctatctcttcatcatttcag

SEQ ID NO: 223464 - DNA, 25 bp, Artificial
  probe
  misc_feature (1)..(25): SEQ ID NO: 3908; WAN024FW8_at; Start 707; Stop 731
gagatatcgctctatttagtacaga

SEQ ID NO: 223465 - DNA, 25 bp, Artificial
  probe
  misc_feature (1)..(25): SEQ ID NO: 3908; WAN024FW8_at; Start 1859; Stop 1883
gaggttttactccatcagatgttct

SEQ ID NO: 223466 - DNA, 25 bp, Artificial
  probe
  misc_feature (1)..(25): SEQ ID NO: 3908; WAN024FW8_at; Start 837; Stop 861
tcaagatagggctagaagagttcac

SEQ ID NO: 223467 - DNA, 25 bp, Artificial
  probe
  misc_feature (1)..(25): SEQ ID NO: 3908; WAN024FW8_at; Start 1362; Stop 1386
ctatttgggtggtgaatggtatcgc

SEQ ID NO: 223468 - DNA, 25 bp, Artificial
  probe
  misc_feature (1)..(25): SEQ ID NO: 3908; WAN024FW8_at; Start 187; Stop 211
gaagataatgactggattcctaagg

SEQ ID NO: 223469 - DNA, 25 bp, Artificial
  probe
  misc_feature (1)..(25): SEQ ID NO: 3908; WAN024FW8_at; Start 691; Stop 715
gtagccccaacacctagagatatcg

SEQ ID NO: 223470 - DNA, 25 bp, Artificial
  probe
  misc_feature (1)..(25): SEQ ID NO: 3908; WAN024FW8_at; Start 1740; Stop 1764
taatattttgggtgagaaagaccca

SEQ ID NO: 223471 - DNA, 25 bp, Artificial
  probe
  misc_feature (1)..(25): SEQ ID NO: 3908; WAN024FW8_at; Start 474; Stop 498
caaagagtacgggaggccaagtaag

SEQ ID NO: 223472 - DNA, 25 bp, Artificial
  probe
  misc_feature (1)..(25): SEQ ID NO: 3908; WAN024FW8_at; Start 1698; Stop 1722
gcaaaatattgaaaaggcacgagac

SEQ ID NO: 223473 - DNA, 25 bp, Artificial
  probe
  misc_feature (1)..(25): SEQ ID NO: 3908; WAN024FW8_at; Start 1509; Stop 1533
aataattgctggtgcggtgttgaac

SEQ ID NO: 223474 - DNA, 25 bp, Artificial
  probe
  misc_feature (1)..(25): SEQ ID NO: 3908; WAN024FW8_at; Start 661; Stop 685
ggttttgttagacactcttacacag

SEQ ID NO: 223475 - DNA, 25 bp, Artificial
  probe
  misc_feature (1)..(25): SEQ ID NO: 3908; WAN024FW8_at; Start 1102; Stop 1126
gaaagacccatcataaaatcgaata

SEQ ID NO: 223476 - DNA, 25 bp, Artificial
  probe
  misc_feature (1)..(25): SEQ ID NO: 3908; WAN024FW8_at; Start 111; Stop 135
taggagagggcgatattggtaccaa

SEQ ID NO: 223477 - DNA, 25 bp, Artificial
  probe
  misc_feature (1)..(25): SEQ ID NO: 3908; WAN024FW8_at; Start 793; Stop 817
agggaaacttcttcgggagacagag

SEQ ID NO: 223478 - DNA, 25 bp, Artificial
  probe
  misc_feature (1)..(25): SEQ ID NO: 3908; WAN024FW8_at; Start 607; Stop 631
aagtcagtagactttcagaaaggca

SEQ ID NO: 223479 - DNA, 25 bp, Artificial
  probe
  misc_feature (1)..(25): SEQ ID NO: 3908; WAN024FW8_at; Start 1381; Stop 1405
tatcgctcaggaaaggcgttaaaca

SEQ ID NO: 223480 - DNA, 25 bp, Artificial
  probe
  misc_feature (1)..(25): SEQ ID NO: 3908; WAN024FW8_at; Start 516; Stop 540
tgatagctttacagaagaggaactg

SEQ ID NO: 223481 - DNA, 25 bp, Artificial
  probe
  misc_feature (1)..(25): SEQ ID NO: 3908; WAN024FW8_at; Start 899; Stop 923
cagcgaattccgtcttttatcttgc

SEQ ID NO: 223482 - DNA, 25 bp, Artificial
  probe
  misc_feature (1)..(25): SEQ ID NO: 3908; WAN024FW8_at; Start 1621; Stop 1645
tctaagaccgaaatagcagagtggg

SEQ ID NO: 223483 - DNA, 25 bp, Artificial
  probe
  misc_feature (1)..(25): SEQ ID NO: 3908; WAN024FW8_at; Start 1776; Stop 1800
taacgaagtgatagagtggtcaaag

SEQ ID NO: 223484 - DNA, 25 bp, Artificial
  probe
  misc_feature (1)..(25): SEQ ID NO: 3908; WAN024FW8_at; Start 676; Stop 700
tcttacacagaaacggtagccccaa

SEQ ID NO: 223485 - DNA, 25 bp, Artificial
  probe
  misc_feature (1)..(25): SEQ ID NO: 3908; WAN024FW8_at; Start 37; Stop 61
caggaaaaaacacactataagaggt

SEQ ID NO: 223486 - DNA, 25 bp, Artificial
  probe
  misc_feature (1)..(25): SEQ ID NO: 3908; WAN024FW8_at; Start 144; Stop 168
ttggagtatacccaatactggtgta

SEQ ID NO: 223487 - DNA, 25 bp, Artificial
  probe
  misc_feature (1)..(25): SEQ ID NO: 3908; WAN024FW8_at; Start 1487; Stop 1511
taataacttctagtgcaggtggaat

SEQ ID NO: 223488 - DNA, 25 bp, Artificial
  probe
  misc_feature (1)..(25): SEQ ID NO: 3908; WAN024FW8_at; Start 1217; Stop 1241
cggatgagctcccaagaagaaaaaa

SEQ ID NO: 223489 - DNA, 25 bp, Artificial
  probe
  misc_feature (1)..(25): SEQ ID NO: 646; WAN024FW9_at; Start 348; Stop 372
gaagtcttttgttggtgacgatccc

SEQ ID NO: 223490 - DNA, 25 bp, Artificial
  probe
  misc_feature (1)..(25): SEQ ID NO: 646; WAN024FW9_at; Start 877; Stop 901
caattggagaagctagatgactgtt

SEQ ID NO: 223491 - DNA, 25 bp, Artificial
  probe
  misc_feature (1)..(25): SEQ ID NO: 646; WAN024FW9_at; Start 892; Stop 916
gatgactgttcgtcaagtggacacc

SEQ ID NO: 223492 - DNA, 25 bp, Artificial
  probe
  misc_feature (1)..(25): SEQ ID NO: 646; WAN024FW9_at; Start 316; Stop 340
ccacgtggtcttggtgacgctgttc

SEQ ID NO: 223493 - DNA, 25 bp, Artificial
  probe
  misc_feature (1)..(25): SEQ ID NO: 646; WAN024FW9_at; Start 15; Stop 39
aaaagctgttattcctgctgcaggg

SEQ ID NO: 223494 - DNA, 25 bp, Artificial
  probe
  misc_feature (1)..(25): SEQ ID NO: 646; WAN024FW9_at; Start 715; Stop 739
gatacattgaataagacacagagtg

SEQ ID NO: 223495 - DNA, 25 bp, Artificial
  probe
  misc_feature (1)..(25): SEQ ID NO: 646; WAN024FW9_at; Start 416; Stop 440
caactgctgtacctttaacaagaca

SEQ ID NO: 223496 - DNA, 25 bp, Artificial
  probe
  misc_feature (1)..(25): SEQ ID NO: 646; WAN024FW9_at; Start 460; Stop 484
gcaacacaggcttcaactatcgcag

SEQ ID NO: 223497 - DNA, 25 bp, Artificial
  probe
  misc_feature (1)..(25): SEQ ID NO: 646; WAN024FW9_at; Start 331; Stop 355
gacgctgttctccaagcgaagtctt

SEQ ID NO: 223498 - DNA, 25 bp, Artificial
  probe
  misc_feature (1)..(25): SEQ ID NO: 646; WAN024FW9_at; Start 245; Stop 269
gaaagatggaacttcttaagtcagt

SEQ ID NO: 223499 - DNA, 25 bp, Artificial
  probe
  misc_feature (1)..(25): SEQ ID NO: 646; WAN024FW9_at; Start 517; Stop 541
tatggtgtgatttctcctagattgg

SEQ ID NO: 223500 - DNA, 25 bp, Artificial
  probe
  misc_feature (1)..(25): SEQ ID NO: 646; WAN024FW9_at; Start 729; Stop 753
gacacagagtgtttttgcgcgtgaa

SEQ ID NO: 223501 - DNA, 25 bp, Artificial
  probe
  misc_feature (1)..(25): SEQ ID NO: 646; WAN024FW9_at; Start 364; Stop 388
gacgatccctttgttgtaatgcttg

SEQ ID NO: 223502 - DNA, 25 bp, Artificial
  probe
  misc_feature (1)..(25): SEQ ID NO: 646; WAN024FW9_at; Start 659; Stop 683
tattagaaacccaaaagccaggagc

SEQ ID NO: 223503 - DNA, 25 bp, Artificial
  probe
  misc_feature (1)..(25): SEQ ID NO: 646; WAN024FW9_at; Start 865; Stop 889
gcacttggtaagcaattggagaagc

SEQ ID NO: 223504 - DNA, 25 bp, Artificial
  probe
  misc_feature (1)..(25): SEQ ID NO: 646; WAN024FW9_at; Start 480; Stop 504
cgcagtaatgcctgttagatatgaa

SEQ ID NO: 223505 - DNA, 25 bp, Artificial
  probe
  misc_feature (1)..(25): SEQ ID NO: 646; WAN024FW9_at; Start 380; Stop 404
taatgcttggtgatgaccttatgga

SEQ ID NO: 223506 - DNA, 25 bp, Artificial
  probe
  misc_feature (1)..(25): SEQ ID NO: 646; WAN024FW9_at; Start 762; Stop 786
caaacgttacgatgttggtgataag

SEQ ID NO: 223507 - DNA, 25 bp, Artificial
  probe
  misc_feature (1)..(25): SEQ ID NO: 646; WAN024FW9_at; Start 675; Stop 699
gccaggagcaggtaatgaaattcaa

SEQ ID NO: 223508 - DNA, 25 bp, Artificial
  probe
  misc_feature (1)..(25): SEQ ID NO: 646; WAN024FW9_at; Start 401; Stop 425
tggatatcaccgactcaactgctgt

SEQ ID NO: 223509 - DNA, 25 bp, Artificial
  probe
  misc_feature (1)..(25): SEQ ID NO: 646; WAN024FW9_at; Start 744; Stop 768
tgcgcgtgaatttgtgggcaaacgt

SEQ ID NO: 223510 - DNA, 25 bp, Artificial
  probe
  misc_feature (1)..(25): SEQ ID NO: 646; WAN024FW9_at; Start 625; Stop 649
ggacgttatctacttactcctgaga

SEQ ID NO: 223511 - DNA, 25 bp, Artificial
  probe
  misc_feature (1)..(25): SEQ ID NO: 646; WAN024FW9_at; Start 97; Stop 121
gtagaccgccccacaattcattttg

SEQ ID NO: 223512 - DNA, 25 bp, Artificial
  probe
  misc_feature (1)..(25): SEQ ID NO: 646; WAN024FW9_at; Start 34; Stop 58
gcagggctgggcacacgatttttgc

SEQ ID NO: 223513 - DNA, 25 bp, Artificial
  probe
  misc_feature (1)..(25): SEQ ID NO: 646; WAN024FW9_at; Start 549; Stop 573
taatggcctctatagtgttgatgct

SEQ ID NO: 223514 - DNA, 25 bp, Artificial
  probe
  misc_feature (1)..(25): SEQ ID NO: 646; WAN024FW9_at; Start 52; Stop 76
tttttgcctgccactaaagctttgg

SEQ ID NO: 223515 - DNA, 25 bp, Artificial
  probe
  misc_feature (1)..(25): SEQ ID NO: 646; WAN024FW9_at; Start 568; Stop 592
gatgcttttgtagagaaaccaaaac

SEQ ID NO: 223516 - DNA, 25 bp, Artificial
  probe
  misc_feature (1)..(25): SEQ ID NO: 646; WAN024FW9_at; Start 69; Stop 93
agctttggcaaaagaaatgcttcca

SEQ ID NO: 223517 - DNA, 25 bp, Artificial
  probe
  misc_feature (1)..(25): SEQ ID NO: 646; WAN024FW9_at; Start 299; Stop 323
tcgttcgtcaaagttcaccacgtgg

SEQ ID NO: 223518 - DNA, 25 bp, Artificial
  probe
  misc_feature (1)..(25): SEQ ID NO: 646; WAN024FW9_at; Start 532; Stop 556
cctagattggaaagtagtaatggcc

SEQ ID NO: 223519 - DNA, 25 bp, Artificial
  probe
  misc_feature (1)..(25): SEQ ID NO: 646; WAN024FW9_at; Start 811; Stop 835
gattatgctcttcaacatcctcaga

SEQ ID NO: 223520 - DNA, 25 bp, Artificial
  probe
  misc_feature (1)..(25): SEQ ID NO: 646; WAN024FW9_at; Start 122; Stop 146
tcattgaagaagctttacgttcggg

SEQ ID NO: 223521 - DNA, 25 bp, Artificial
  probe
  misc_feature (1)..(25): SEQ ID NO: 646; WAN024FW9_at; Start 584; Stop 608
aaccaaaaccagaagaagcgcctag

SEQ ID NO: 223522 - DNA, 25 bp, Artificial
  probe
  misc_feature (1)..(25): SEQ ID NO: 646; WAN024FW9_at; Start 82; Stop 106
gaaatgcttccaattgtagaccgcc

SEQ ID NO: 223523 - DNA, 25 bp, Artificial
  probe
  misc_feature (1)..(25): SEQ ID NO: 2790; WAN024FWA_at; Start 1177; Stop 1201
tatgtgccctattaggctattagga

SEQ ID NO: 223524 - DNA, 25 bp, Artificial
  probe
  misc_feature (1)..(25): SEQ ID NO: 2790; WAN024FWA_at; Start 361; Stop 385
gttcctggcaagagaaatgctatcc

SEQ ID NO: 223525 - DNA, 25 bp, Artificial
  probe
  misc_feature (1)..(25): SEQ ID NO: 2790; WAN024FWA_at; Start 1191; Stop 1215
ggctattaggacttatgagatgttc

SEQ ID NO: 223526 - DNA, 25 bp, Artificial
  probe
  misc_feature (1)..(25): SEQ ID NO: 2790; WAN024FWA_at; Start 1074; Stop 1098
gaatgatttttagctttggaggaag

SEQ ID NO: 223527 - DNA, 25 bp, Artificial
  probe
  misc_feature (1)..(25): SEQ ID NO: 2790; WAN024FWA_at; Start 449; Stop 473
tatggacgcctagaaccttgagtga

SEQ ID NO: 223528 - DNA, 25 bp, Artificial
  probe
  misc_feature (1)..(25): SEQ ID NO: 2790; WAN024FWA_at; Start 108; Stop 132
tcatgctgtcagatataagtcctac

SEQ ID NO: 223529 - DNA, 25 bp, Artificial
  probe
  misc_feature (1)..(25): SEQ ID NO: 2790; WAN024FWA_at; Start 552; Stop 576
tctcgtgacaatgtttgctaacttg

SEQ ID NO: 223530 - DNA, 25 bp, Artificial
  probe
  misc_feature (1)..(25): SEQ ID NO: 2790; WAN024FWA_at; Start 843; Stop 867
tcattagacagcaactaaggtgggc

SEQ ID NO: 223531 - DNA, 25 bp, Artificial
  probe
  misc_feature (1)..(25): SEQ ID NO: 2790; WAN024FWA_at; Start 883; Stop 907
taacaatctaaagatgactccttgg

SEQ ID NO: 223532 - DNA, 25 bp, Artificial
  probe
  misc_feature (1)..(25): SEQ ID NO: 2790; WAN024FWA_at; Start 641; Stop 665
tacctggtcgaacaattgcttttag

SEQ ID NO: 223533 - DNA, 25 bp, Artificial
  probe
  misc_feature (1)..(25): SEQ ID NO: 2790; WAN024FWA_at; Start 406; Stop 430
gattcgcagagtgatattacagttc

SEQ ID NO: 223534 - DNA, 25 bp, Artificial
  probe
  misc_feature (1)..(25): SEQ ID NO: 2790; WAN024FWA_at; Start 461; Stop 485
gaaccttgagtgagttgctgaagcc

SEQ ID NO: 223535 - DNA, 25 bp, Artificial
  probe
  misc_feature (1)..(25): SEQ ID NO: 2790; WAN024FWA_at; Start 434; Stop 458
tagatagtgatacagtatggacgcc

SEQ ID NO: 223536 - DNA, 25 bp, Artificial
  probe
  misc_feature (1)..(25): SEQ ID NO: 2790; WAN024FWA_at; Start 777; Stop 801
gctataaaactgttatgcaggatac

SEQ ID NO: 223537 - DNA, 25 bp, Artificial
  probe
  misc_feature (1)..(25): SEQ ID NO: 2790; WAN024FWA_at; Start 587; Stop 611
ttagggcagaaggaactatgaaagc

SEQ ID NO: 223538 - DNA, 25 bp, Artificial
  probe
  misc_feature (1)..(25): SEQ ID NO: 2790; WAN024FWA_at; Start 714; Stop 738
tcatgggatttcataaggaagtttc

SEQ ID NO: 223539 - DNA, 25 bp, Artificial
  probe
  misc_feature (1)..(25): SEQ ID NO: 2790; WAN024FWA_at; Start 1105; Stop 1129
taaagctatgtctagaatgaagtgg

SEQ ID NO: 223540 - DNA, 25 bp, Artificial
  probe
  misc_feature (1)..(25): SEQ ID NO: 2790; WAN024FWA_at; Start 793; Stop 817
gcaggatacttctgttgtgtataca

SEQ ID NO: 223541 - DNA, 25 bp, Artificial
  probe
  misc_feature (1)..(25): SEQ ID NO: 2790; WAN024FWA_at; Start 602; Stop 626
ctatgaaagcaatgagtgtgactgg

SEQ ID NO: 223542 - DNA, 25 bp, Artificial
  probe
  misc_feature (1)..(25): SEQ ID NO: 2790; WAN024FWA_at; Start 477; Stop 501
gctgaagccttttgtttgcgataaa

SEQ ID NO: 223543 - DNA, 25 bp, Artificial
  probe
  misc_feature (1)..(25): SEQ ID NO: 2790; WAN024FWA_at; Start 224; Stop 248
gaatttccagacataaaccatccga

SEQ ID NO: 223544 - DNA, 25 bp, Artificial
  probe
  misc_feature (1)..(25): SEQ ID NO: 2790; WAN024FWA_at; Start 627; Stop 651
taaagtagggtgcttacctggtcga

SEQ ID NO: 223545 - DNA, 25 bp, Artificial
  probe
  misc_feature (1)..(25): SEQ ID NO: 2790; WAN024FWA_at; Start 538; Stop 562
gaccctgagcgtaatctcgtgacaa

SEQ ID NO: 223546 - DNA, 25 bp, Artificial
  probe
  misc_feature (1)..(25): SEQ ID NO: 2790; WAN024FWA_at; Start 1161; Stop 1185
tcgttttgagtataattatgtgccc

SEQ ID NO: 223547 - DNA, 25 bp, Artificial
  probe
  misc_feature (1)..(25): SEQ ID NO: 2790; WAN024FWA_at; Start 349; Stop 373
tattacactcctgttcctggcaaga

SEQ ID NO: 223548 - DNA, 25 bp, Artificial
  probe
  misc_feature (1)..(25): SEQ ID NO: 2790; WAN024FWA_at; Start 571; Stop 595
aacttgttagaggaaattagggcag

SEQ ID NO: 223549 - DNA, 25 bp, Artificial
  probe
  misc_feature (1)..(25): SEQ ID NO: 2790; WAN024FWA_at; Start 856; Stop 880
actaaggtgggcagaaggttctcag

SEQ ID NO: 223550 - DNA, 25 bp, Artificial
  probe
  misc_feature (1)..(25): SEQ ID NO: 2790; WAN024FWA_at; Start 524; Stop 548
gacaaaaaattcttgaccctgagcg

SEQ ID NO: 223551 - DNA, 25 bp, Artificial
  probe
  misc_feature (1)..(25): SEQ ID NO: 2790; WAN024FWA_at; Start 176; Stop 200
tccctgtcgtggatgaaccacttaa

SEQ ID NO: 223552 - DNA, 25 bp, Artificial
  probe
  misc_feature (1)..(25): SEQ ID NO: 2790; WAN024FWA_at; Start 128; Stop 152
cctacagttgtagtgtaagtgatga

SEQ ID NO: 223553 - DNA, 25 bp, Artificial
  probe
  misc_feature (1)..(25): SEQ ID NO: 2790; WAN024FWA_at; Start 1026; Stop 1050
ttgtttatacagcttcatggtggga

SEQ ID NO: 223554 - DNA, 25 bp, Artificial
  probe
  misc_feature (1)..(25): SEQ ID NO: 2790; WAN024FWA_at; Start 162; Stop 186
tagttctgtaattatccctgtcgtg

SEQ ID NO: 223555 - DNA, 25 bp, Artificial
  probe
  misc_feature (1)..(25): SEQ ID NO: 2790; WAN024FWA_at; Start 902; Stop 926
ccttggatgattagaaatgcccctc

SEQ ID NO: 223556 - DNA, 25 bp, Artificial
  probe
  misc_feature (1)..(25): SEQ ID NO: 2790; WAN024FWA_at; Start 811; Stop 835
gtatacagatgctcctacaagttgg

SEQ ID NO: 223557 - DNA, 25 bp, Artificial
  probe
  misc_feature (1)..(25): SEQ ID NO: 1267; WAN024FWB_at; Start 797; Stop 821
tgataggtattttcttagcaaacga

SEQ ID NO: 223558 - DNA, 25 bp, Artificial
  probe
  misc_feature (1)..(25): SEQ ID NO: 1267; WAN024FWB_at; Start 68; Stop 92
cgtttaatggtgtcttgctctcagg

SEQ ID NO: 223559 - DNA, 25 bp, Artificial
  probe
  misc_feature (1)..(25): SEQ ID NO: 1267; WAN024FWB_at; Start 779; Stop 803
gcctttcttttagtgaactgatagg

SEQ ID NO: 223560 - DNA, 25 bp, Artificial
  probe
  misc_feature (1)..(25): SEQ ID NO: 1267; WAN024FWB_at; Start 392; Stop 416
tattgttgttcatcgtctctctaag

SEQ ID NO: 223561 - DNA, 25 bp, Artificial
  probe
  misc_feature (1)..(25): SEQ ID NO: 1267; WAN024FWB_at; Start 534; Stop 558
taacagcaatgcagagtatactcac

SEQ ID NO: 223562 - DNA, 25 bp, Artificial
  probe
  misc_feature (1)..(25): SEQ ID NO: 1267; WAN024FWB_at; Start 1060; Stop 1084
agggtattattaacaggaacttctg

SEQ ID NO: 223563 - DNA, 25 bp, Artificial
  probe
  misc_feature (1)..(25): SEQ ID NO: 1267; WAN024FWB_at; Start 1112; Stop 1136
taattaatggttctttaaagccaca

SEQ ID NO: 223564 - DNA, 25 bp, Artificial
  probe
  misc_feature (1)..(25): SEQ ID NO: 1267; WAN024FWB_at; Start 1156; Stop 1180
ttatcacatgggaaaaagagttcag

SEQ ID NO: 223565 - DNA, 25 bp, Artificial
  probe
  misc_feature (1)..(25): SEQ ID NO: 1267; WAN024FWB_at; Start 667; Stop 691
tttaatttgaaacgatcagaggttc

SEQ ID NO: 223566 - DNA, 25 bp, Artificial
  probe
  misc_feature (1)..(25): SEQ ID NO: 1267; WAN024FWB_at; Start 1357; Stop 1381
aatggtagtaatttgtctggaggtc

SEQ ID NO: 223567 - DNA, 25 bp, Artificial
  probe
  misc_feature (1)..(25): SEQ ID NO: 1267; WAN024FWB_at; Start 1187; Stop 1211
taccaacagttgatcagacaccata

SEQ ID NO: 223568 - DNA, 25 bp, Artificial
  probe
  misc_feature (1)..(25): SEQ ID NO: 1267; WAN024FWB_at; Start 683; Stop 707
cagaggttctttcaaaattggttgc

SEQ ID NO: 223569 - DNA, 25 bp, Artificial
  probe
  misc_feature (1)..(25): SEQ ID NO: 1267; WAN024FWB_at; Start 86; Stop 110
tctcaggaattattgtatatgcagg

SEQ ID NO: 223570 - DNA, 25 bp, Artificial
  probe
  misc_feature (1)..(25): SEQ ID NO: 1267; WAN024FWB_at; Start 172; Stop 196
ggttggtcagcaatctatatatcaa

SEQ ID NO: 223571 - DNA, 25 bp, Artificial
  probe
  misc_feature (1)..(25): SEQ ID NO: 1267; WAN024FWB_at; Start 952; Stop 976
aacggactgtatacttcatcaatag

SEQ ID NO: 223572 - DNA, 25 bp, Artificial
  probe
  misc_feature (1)..(25): SEQ ID NO: 1267; WAN024FWB_at; Start 504; Stop 528
gatgttgtctaattcagctaatgag

SEQ ID NO: 223573 - DNA, 25 bp, Artificial
  probe
  misc_feature (1)..(25): SEQ ID NO: 1267; WAN024FWB_at; Start 123; Stop 147
gacttcctcattttctgacgttcta

SEQ ID NO: 223574 - DNA, 25 bp, Artificial
  probe
  misc_feature (1)..(25): SEQ ID NO: 1267; WAN024FWB_at; Start 698; Stop 722
aattggttgcagtactaatttcagg

SEQ ID NO: 223575 - DNA, 25 bp, Artificial
  probe
  misc_feature (1)..(25): SEQ ID NO: 1267; WAN024FWB_at; Start 139; Stop 163
gacgttctaagatttggtgctataa

SEQ ID NO: 223576 - DNA, 25 bp, Artificial
  probe
  misc_feature (1)..(25): SEQ ID NO: 1267; WAN024FWB_at; Start 1219; Stop 1243
gacactactattcgtgagaacgtaa

SEQ ID NO: 223577 - DNA, 25 bp, Artificial
  probe
  misc_feature (1)..(25): SEQ ID NO: 1267; WAN024FWB_at; Start 201; Stop 225
ctatttagaagtaacggaagcatca

SEQ ID NO: 223578 - DNA, 25 bp, Artificial
  probe
  misc_feature (1)..(25): SEQ ID NO: 1267; WAN024FWB_at; Start 828; Stop 852
tttagggccgatacaatcaattgcc

SEQ ID NO: 223579 - DNA, 25 bp, Artificial
  probe
  misc_feature (1)..(25): SEQ ID NO: 1267; WAN024FWB_at; Start 159; Stop 183
tataagtattctgggttggtcagca

SEQ ID NO: 223580 - DNA, 25 bp, Artificial
  probe
  misc_feature (1)..(25): SEQ ID NO: 1267; WAN024FWB_at; Start 1171; Stop 1195
aagagttcagattcaataccaacag

SEQ ID NO: 223581 - DNA, 25 bp, Artificial
  probe
  misc_feature (1)..(25): SEQ ID NO: 1267; WAN024FWB_at; Start 105; Stop 129
tgcaggtagtttaaatcagacttcc

SEQ ID NO: 223582 - DNA, 25 bp, Artificial
  probe
  misc_feature (1)..(25): SEQ ID NO: 1267; WAN024FWB_at; Start 1394; Stop 1418
tagctttagctagagctctgattag

SEQ ID NO: 223583 - DNA, 25 bp, Artificial
  probe
  misc_feature (1)..(25): SEQ ID NO: 1267; WAN024FWB_at; Start 522; Stop 546
taatgagtactctaacagcaatgca

SEQ ID NO: 223584 - DNA, 25 bp, Artificial
  probe
  misc_feature (1)..(25): SEQ ID NO: 1267; WAN024FWB_at; Start 1040; Stop 1064
tctcatttaagtcaccatttagggt

SEQ ID NO: 223585 - DNA, 25 bp, Artificial
  probe
  misc_feature (1)..(25): SEQ ID NO: 1267; WAN024FWB_at; Start 469; Stop 493
gcattgccgattatagtacctgtct

SEQ ID NO: 223586 - DNA, 25 bp, Artificial
  probe
  misc_feature (1)..(25): SEQ ID NO: 1267; WAN024FWB_at; Start 454; Stop 478
tttattgtattatcagcattgccga

SEQ ID NO: 223587 - DNA, 25 bp, Artificial
  probe
  misc_feature (1)..(25): SEQ ID NO: 1267; WAN024FWB_at; Start 937; Stop 961
gctgaacatgataataacggactgt

SEQ ID NO: 223588 - DNA, 25 bp, Artificial
  probe
  misc_feature (1)..(25): SEQ ID NO: 1267; WAN024FWB_at; Start 974; Stop 998
tagatgagatacacatgaaagatgt

SEQ ID NO: 223589 - DNA, 25 bp, Artificial
  probe
  misc_feature (1)..(25): SEQ ID NO: 1267; WAN024FWB_at; Start 1540; Stop 1564
gacttaaatgacaagagatacactg

SEQ ID NO: 223590 - DNA, 25 bp, Artificial
  probe
  misc_feature (1)..(25): SEQ ID NO: 1267; WAN024FWB_at; Start 727; Stop 751
tgctttctagttcccttggttgtag

SEQ ID NO: 223591 - DNA, 25 bp, Artificial
  probe
  misc_feature (1)..(25): SEQ ID NO: 6801; WAN024FWC_at; Start 550; Stop 574
gagttgatttcctacgctacccatg

SEQ ID NO: 223592 - DNA, 25 bp, Artificial
  probe
  misc_feature (1)..(25): SEQ ID NO: 6801; WAN024FWC_at; Start 1032; Stop 1056
cgatcctcgagtgacaaagattgga

SEQ ID NO: 223593 - DNA, 25 bp, Artificial
  probe
  misc_feature (1)..(25): SEQ ID NO: 6801; WAN024FWC_at; Start 1016; Stop 1040
tgtttaagatcgataacgatcctcg

SEQ ID NO: 223594 - DNA, 25 bp, Artificial
  probe
  misc_feature (1)..(25): SEQ ID NO: 6801; WAN024FWC_at; Start 397; Stop 421
cgcaagattttattggttacggcaa

SEQ ID NO: 223595 - DNA, 25 bp, Artificial
  probe
  misc_feature (1)..(25): SEQ ID NO: 6801; WAN024FWC_at; Start 410; Stop 434
tggttacggcaacatcacgcgtcga

SEQ ID NO: 223596 - DNA, 25 bp, Artificial
  probe
  misc_feature (1)..(25): SEQ ID NO: 6801; WAN024FWC_at; Start 723; Stop 747
aatggcaggattgaatgtagtgacc

SEQ ID NO: 223597 - DNA, 25 bp, Artificial
  probe
  misc_feature (1)..(25): SEQ ID NO: 6801; WAN024FWC_at; Start 1168; Stop 1192
tacacacctgaacaaaaacgtcgcc

SEQ ID NO: 223598 - DNA, 25 bp, Artificial
  probe
  misc_feature (1)..(25): SEQ ID NO: 6801; WAN024FWC_at; Start 440; Stop 464
taatggattgcctgttacttgcgaa

SEQ ID NO: 223599 - DNA, 25 bp, Artificial
  probe
  misc_feature (1)..(25): SEQ ID NO: 6801; WAN024FWC_at; Start 877; Stop 901
ggtgggtctgcaatcttttcacaaa

SEQ ID NO: 223600 - DNA, 25 bp, Artificial
  probe
  misc_feature (1)..(25): SEQ ID NO: 6801; WAN024FWC_at; Start 950; Stop 974
cgatgcgagtcgatgcagaagcgat

SEQ ID NO: 223601 - DNA, 25 bp, Artificial
  probe
  misc_feature (1)..(25): SEQ ID NO: 6801; WAN024FWC_at; Start 1278; Stop 1302
tgtggcttatatcgatgattggacc

SEQ ID NO: 223602 - DNA, 25 bp, Artificial
  probe
  misc_feature (1)..(25): SEQ ID NO: 6801; WAN024FWC_at; Start 455; Stop 479
tacttgcgaacgatgttcaagggaa

SEQ ID NO: 223603 - DNA, 25 bp, Artificial
  probe
  misc_feature (1)..(25): SEQ ID NO: 6801; WAN024FWC_at; Start 858; Stop 882
tcctcagattcgaaaagatggtggg

SEQ ID NO: 223604 - DNA, 25 bp, Artificial
  probe
  misc_feature (1)..(25): SEQ ID NO: 6801; WAN024FWC_at; Start 801; Stop 825
tatttgtggagctatcgttggtctt

SEQ ID NO: 223605 - DNA, 25 bp, Artificial
  probe
  misc_feature (1)..(25): SEQ ID NO: 6801; WAN024FWC_at; Start 562; Stop 586
tacgctacccatgaagtagtagatg

SEQ ID NO: 223606 - DNA, 25 bp, Artificial
  probe
  misc_feature (1)..(25): SEQ ID NO: 6801; WAN024FWC_at; Start 1067; Stop 1091
gaaaaactagcttggatgaattgcc

SEQ ID NO: 223607 - DNA, 25 bp, Artificial
  probe
  misc_feature (1)..(25): SEQ ID NO: 6801; WAN024FWC_at; Start 377; Stop 401
cctataatttaaagcgcagtcgcaa

SEQ ID NO: 223608 - DNA, 25 bp, Artificial
  probe
  misc_feature (1)..(25): SEQ ID NO: 6801; WAN024FWC_at; Start 282; Stop 306
tatttctagacgaggaatgctctac

SEQ ID NO: 223609 - DNA, 25 bp, Artificial
  probe
  misc_feature (1)..(25): SEQ ID NO: 6801; WAN024FWC_at; Start 606; Stop 630
aagtgaggactatgatattggagcc

SEQ ID NO: 223610 - DNA, 25 bp, Artificial
  probe
  misc_feature (1)..(25): SEQ ID NO: 6801; WAN024FWC_at; Start 963; Stop 987
tgcagaagcgatcaaggaacagttg

SEQ ID NO: 223611 - DNA, 25 bp, Artificial
  probe
  misc_feature (1)..(25): SEQ ID NO: 6801; WAN024FWC_at; Start 425; Stop 449
cacgcgtcgaaagagtaatggattg

SEQ ID NO: 223612 - DNA, 25 bp, Artificial
  probe
  misc_feature (1)..(25): SEQ ID NO: 6801; WAN024FWC_at; Start 1243; Stop 1267
gaaattacaaacttcgatgaggttg

SEQ ID NO: 223613 - DNA, 25 bp, Artificial
  probe
  misc_feature (1)..(25): SEQ ID NO: 6801; WAN024FWC_at; Start 625; Stop 649
ggagccattatttctcagtttgaaa

SEQ ID NO: 223614 - DNA, 25 bp, Artificial
  probe
  misc_feature (1)..(25): SEQ ID NO: 6801; WAN024FWC_at; Start 697; Stop 721
ttaagccgaaataaacgaatccatg

SEQ ID NO: 223615 - DNA, 25 bp, Artificial
  probe
  misc_feature (1)..(25): SEQ ID NO: 6801; WAN024FWC_at; Start 754; Stop 778
acgaatttttacaagcctagtcatg

SEQ ID NO: 223616 - DNA, 25 bp, Artificial
  probe
  misc_feature (1)..(25): SEQ ID NO: 6801; WAN024FWC_at; Start 1119; Stop 1143
catgagtctagtaggtacgcgccca

SEQ ID NO: 223617 - DNA, 25 bp, Artificial
  probe
  misc_feature (1)..(25): SEQ ID NO: 6801; WAN024FWC_at; Start 1222; Stop 1246
tggcaaattagtggtcgaagtgaaa

SEQ ID NO: 223618 - DNA, 25 bp, Artificial
  probe
  misc_feature (1)..(25): SEQ ID NO: 6801; WAN024FWC_at; Start 1134; Stop 1158
tacgcgcccaccaactgtagatgag

SEQ ID NO: 223619 - DNA, 25 bp, Artificial
  probe
  misc_feature (1)..(25): SEQ ID NO: 6801; WAN024FWC_at; Start 937; Stop 961
tataaattccgctcgatgcgagtcg

SEQ ID NO: 223620 - DNA, 25 bp, Artificial
  probe
  misc_feature (1)..(25): SEQ ID NO: 6801; WAN024FWC_at; Start 1153; Stop 1177
gatgagtacgaaaaatacacacctg

SEQ ID NO: 223621 - DNA, 25 bp, Artificial
  probe
  misc_feature (1)..(25): SEQ ID NO: 6801; WAN024FWC_at; Start 511; Stop 535
gaatttactcatgaaaagctccttg

SEQ ID NO: 223622 - DNA, 25 bp, Artificial
  probe
  misc_feature (1)..(25): SEQ ID NO: 6801; WAN024FWC_at; Start 896; Stop 920
cacaaactcgtgtaggaaaaaatgg

SEQ ID NO: 223623 - DNA, 25 bp, Artificial
  probe
  misc_feature (1)..(25): SEQ ID NO: 6801; WAN024FWC_at; Start 91; Stop 115
gaaaccgacattgctttaaatacag

SEQ ID NO: 223624 - DNA, 25 bp, Artificial
  probe
  misc_feature (1)..(25): SEQ ID NO: 6801; WAN024FWC_at; Start 531; Stop 555
ccttgttgtaccaaaagaagagttg

SEQ ID NO: 223625 - DNA, 25 bp, Artificial
  probe
  misc_feature (1)..(25): SEQ ID NO: 6724; WAN024FWD_at; Start 220; Stop 244
actcgaaattcagttatgtcaggat

SEQ ID NO: 223626 - DNA, 25 bp, Artificial
  probe
  misc_feature (1)..(25): SEQ ID NO: 6724; WAN024FWD_at; Start 150; Stop 174
aactacttccgtaaatatagcaagg

SEQ ID NO: 223627 - DNA, 25 bp, Artificial
  probe
  misc_feature (1)..(25): SEQ ID NO: 6724; WAN024FWD_at; Start 153; Stop 177
tacttccgtaaatatagcaaggtcg

SEQ ID NO: 223628 - DNA, 25 bp, Artificial
  probe
  misc_feature (1)..(25): SEQ ID NO: 6724; WAN024FWD_at; Start 226; Stop 250
aattcagttatgtcaggatttttta

SEQ ID NO: 223629 - DNA, 25 bp, Artificial
  probe
  misc_feature (1)..(25): SEQ ID NO: 6724; WAN024FWD_at; Start 209; Stop 233
tcgatggtgatactcgaaattcagt

SEQ ID NO: 223630 - DNA, 25 bp, Artificial
  probe
  misc_feature (1)..(25): SEQ ID NO: 6724; WAN024FWD_at; Start 155; Stop 179
cttccgtaaatatagcaaggtcgtt

SEQ ID NO: 223631 - DNA, 25 bp, Artificial
  probe
  misc_feature (1)..(25): SEQ ID NO: 6724; WAN024FWD_at; Start 223; Stop 247
cgaaattcagttatgtcaggatttt

SEQ ID NO: 223632 - DNA, 25 bp, Artificial
  probe
  misc_feature (1)..(25): SEQ ID NO: 6724; WAN024FWD_at; Start 157; Stop 181
tccgtaaatatagcaaggtcgtttg

SEQ ID NO: 223633 - DNA, 25 bp, Artificial
  probe
  misc_feature (1)..(25): SEQ ID NO: 6724; WAN024FWD_at; Start 206; Stop 230
tgatcgatggtgatactcgaaattc

SEQ ID NO: 223634 - DNA, 25 bp, Artificial
  probe
  misc_feature (1)..(25): SEQ ID NO: 6724; WAN024FWD_at; Start 210; Stop 234
cgatggtgatactcgaaattcagtt

SEQ ID NO: 223635 - DNA, 25 bp, Artificial
  probe
  misc_feature (1)..(25): SEQ ID NO: 6724; WAN024FWD_at; Start 199; Stop 223
actcttttgatcgatggtgatactc

SEQ ID NO: 223636 - DNA, 25 bp, Artificial
  probe
  misc_feature (1)..(25): SEQ ID NO: 6724; WAN024FWD_at; Start 221; Stop 245
ctcgaaattcagttatgtcaggatt

SEQ ID NO: 223637 - DNA, 25 bp, Artificial
  probe
  misc_feature (1)..(25): SEQ ID NO: 6724; WAN024FWD_at; Start 201; Stop 225
tcttttgatcgatggtgatactcga

SEQ ID NO: 223638 - DNA, 25 bp, Artificial
  probe
  misc_feature (1)..(25): SEQ ID NO: 6724; WAN024FWD_at; Start 214; Stop 238
ggtgatactcgaaattcagttatgt

SEQ ID NO: 223639 - DNA, 25 bp, Artificial
  probe
  misc_feature (1)..(25): SEQ ID NO: 6724; WAN024FWD_at; Start 160; Stop 184
gtaaatatagcaaggtcgtttgcgc

SEQ ID NO: 223640 - DNA, 25 bp, Artificial
  probe
  misc_feature (1)..(25): SEQ ID NO: 6724; WAN024FWD_at; Start 200; Stop 224
ctcttttgatcgatggtgatactcg

SEQ ID NO: 223641 - DNA, 25 bp, Artificial
  probe
  misc_feature (1)..(25): SEQ ID NO: 6724; WAN024FWD_at; Start 154; Stop 178
acttccgtaaatatagcaaggtcgt

SEQ ID NO: 223642 - DNA, 25 bp, Artificial
  probe
  misc_feature (1)..(25): SEQ ID NO: 6724; WAN024FWD_at; Start 159; Stop 183
cgtaaatatagcaaggtcgtttgcg

SEQ ID NO: 223643 - DNA, 25 bp, Artificial
  probe
  misc_feature (1)..(25): SEQ ID NO: 6724; WAN024FWD_at; Start 202; Stop 226
cttttgatcgatggtgatactcgaa

SEQ ID NO: 223644 - DNA, 25 bp, Artificial
  probe
  misc_feature (1)..(25): SEQ ID NO: 6724; WAN024FWD_at; Start 204; Stop 228
tttgatcgatggtgatactcgaaat

SEQ ID NO: 223645 - DNA, 25 bp, Artificial
  probe
  misc_feature (1)..(25): SEQ ID NO: 6724; WAN024FWD_at; Start 149; Stop 173
caactacttccgtaaatatagcaag

SEQ ID NO: 223646 - DNA, 25 bp, Artificial
  probe
  misc_feature (1)..(25): SEQ ID NO: 6724; WAN024FWD_at; Start 211; Stop 235
gatggtgatactcgaaattcagtta

SEQ ID NO: 223647 - DNA, 25 bp, Artificial
  probe
  misc_feature (1)..(25): SEQ ID NO: 6724; WAN024FWD_at; Start 203; Stop 227
ttttgatcgatggtgatactcgaaa

SEQ ID NO: 223648 - DNA, 25 bp, Artificial
  probe
  misc_feature (1)..(25): SEQ ID NO: 6724; WAN024FWD_at; Start 198; Stop 222
aactcttttgatcgatggtgatact

SEQ ID NO: 223649 - DNA, 25 bp, Artificial
  probe
  misc_feature (1)..(25): SEQ ID NO: 6724; WAN024FWD_at; Start 213; Stop 237
tggtgatactcgaaattcagttatg

SEQ ID NO: 223650 - DNA, 25 bp, Artificial
  probe
  misc_feature (1)..(25): SEQ ID NO: 6724; WAN024FWD_at; Start 217; Stop 241
gatactcgaaattcagttatgtcag

SEQ ID NO: 223651 - DNA, 25 bp, Artificial
  probe
  misc_feature (1)..(25): SEQ ID NO: 6724; WAN024FWD_at; Start 207; Stop 231
gatcgatggtgatactcgaaattca

SEQ ID NO: 223652 - DNA, 25 bp, Artificial
  probe
  misc_feature (1)..(25): SEQ ID NO: 6724; WAN024FWD_at; Start 208; Stop 232
atcgatggtgatactcgaaattcag

SEQ ID NO: 223653 - DNA, 25 bp, Artificial
  probe
  misc_feature (1)..(25): SEQ ID NO: 6724; WAN024FWD_at; Start 219; Stop 243
tactcgaaattcagttatgtcagga

SEQ ID NO: 223654 - DNA, 25 bp, Artificial
  probe
  misc_feature (1)..(25): SEQ ID NO: 6724; WAN024FWD_at; Start 168; Stop 192
agcaaggtcgtttgcgcgtgcaggc

SEQ ID NO: 223655 - DNA, 25 bp, Artificial
  probe
  misc_feature (1)..(25): SEQ ID NO: 6724; WAN024FWD_at; Start 230; Stop 254
cagttatgtcaggattttttaaatc

SEQ ID NO: 223656 - DNA, 25 bp, Artificial
  probe
  misc_feature (1)..(25): SEQ ID NO: 6724; WAN024FWD_at; Start 152; Stop 176
ctacttccgtaaatatagcaaggtc

SEQ ID NO: 223657 - DNA, 25 bp, Artificial
  probe
  misc_feature (1)..(25): SEQ ID NO: 6724; WAN024FWD_at; Start 197; Stop 221
aaactcttttgatcgatggtgatac

SEQ ID NO: 223658 - DNA, 25 bp, Artificial
  probe
  misc_feature (1)..(25): SEQ ID NO: 6724; WAN024FWD_at; Start 158; Stop 182
ccgtaaatatagcaaggtcgtttgc

SEQ ID NO: 223659 - DNA, 25 bp, Artificial
  probe
  misc_feature (1)..(25): SEQ ID NO: 1977; WAN024FWE_at; Start 119; Stop 143
tctcgtctgttaaacctggtgaggg

SEQ ID NO: 223660 - DNA, 25 bp, Artificial
  probe
  misc_feature (1)..(25): SEQ ID NO: 1977; WAN024FWE_at; Start 266; Stop 290
ttactgggctaacggattttctggc

SEQ ID NO: 223661 - DNA, 25 bp, Artificial
  probe
  misc_feature (1)..(25): SEQ ID NO: 1977; WAN024FWE_at; Start 199; Stop 223
gctttattggtggatgcggatattc

SEQ ID NO: 223662 - DNA, 25 bp, Artificial
  probe
  misc_feature (1)..(25): SEQ ID NO: 1977; WAN024FWE_at; Start 223; Stop 247
cgtaattctatcatgtcaggagtct

SEQ ID NO: 223663 - DNA, 25 bp, Artificial
  probe
  misc_feature (1)..(25): SEQ ID NO: 1977; WAN024FWE_at; Start 280; Stop 304
gattttctggcaggtaccactgacc

SEQ ID NO: 223664 - DNA, 25 bp, Artificial
  probe
  misc_feature (1)..(25): SEQ ID NO: 1977; WAN024FWE_at; Start 514; Stop 538
tctattttggtaacagcagcgaggg

SEQ ID NO: 223665 - DNA, 25 bp, Artificial
  probe
  misc_feature (1)..(25): SEQ ID NO: 1977; WAN024FWE_at; Start 301; Stop 325
gacctttctcatggactttgtgata

SEQ ID NO: 223666 - DNA, 25 bp, Artificial
  probe
  misc_feature (1)..(25): SEQ ID NO: 1977; WAN024FWE_at; Start 338; Stop 362
atttatttgttattcaggcaggacc

SEQ ID NO: 223667 - DNA, 25 bp, Artificial
  probe
  misc_feature (1)..(25): SEQ ID NO: 1977; WAN024FWE_at; Start 469; Stop 493
gggatggtcattgatgctgctatta

SEQ ID NO: 223668 - DNA, 25 bp, Artificial
  probe
  misc_feature (1)..(25): SEQ ID NO: 1977; WAN024FWE_at; Start 533; Stop 557
cgagggaaacaaagcgtcgtgatat

SEQ ID NO: 223669 - DNA, 25 bp, Artificial
  probe
  misc_feature (1)..(25): SEQ ID NO: 1977; WAN024FWE_at; Start 442; Stop 466
tatgtcattgtcgatactgcaccga

SEQ ID NO: 223670 - DNA, 25 bp, Artificial
  probe
  misc_feature (1)..(25): SEQ ID NO: 1977; WAN024FWE_at; Start 239; Stop 263
caggagtctttaaatcaagagaaaa

SEQ ID NO: 223671 - DNA, 25 bp, Artificial
  probe
  misc_feature (1)..(25): SEQ ID NO: 1977; WAN024FWE_at; Start 629; Stop 653
cagaagttgaaaaatatggagctta

SEQ ID NO: 223672 - DNA, 25 bp, Artificial
  probe
  misc_feature (1)..(25): SEQ ID NO: 1977; WAN024FWE_at; Start 81; Stop 105
tattcaattgagtggtgataatctg

SEQ ID NO: 223673 - DNA, 25 bp, Artificial
  probe
  misc_feature (1)..(25): SEQ ID NO: 1977; WAN024FWE_at; Start 71; Stop 95
tgcgaacaaatattcaattgagtgg

SEQ ID NO: 223674 - DNA, 25 bp, Artificial
  probe
  misc_feature (1)..(25): SEQ ID NO: 1977; WAN024FWE_at; Start 583; Stop 607
cagacaggagtaccttttttaggag

SEQ ID NO: 223675 - DNA, 25 bp, Artificial
  probe
  misc_feature (1)..(25): SEQ ID NO: 1977; WAN024FWE_at; Start 524; Stop 548
taacagcagcgagggaaacaaagcg

SEQ ID NO: 223676 - DNA, 25 bp, Artificial
  probe
  misc_feature (1)..(25): SEQ ID NO: 1977; WAN024FWE_at; Start 55; Stop 79
gagaattacaatgctttgcgaacaa

SEQ ID NO: 223677 - DNA, 25 bp, Artificial
  probe
  misc_feature (1)..(25): SEQ ID NO: 1977; WAN024FWE_at; Start 406; Stop 430
gccactatgattgatactatgcgta

SEQ ID NO: 223678 - DNA, 25 bp, Artificial
  probe
  misc_feature (1)..(25): SEQ ID NO: 1977; WAN024FWE_at; Start 372; Stop 396
taacccaacagcacttttacagagt

SEQ ID NO: 223679 - DNA, 25 bp, Artificial
  probe
  misc_feature (1)..(25): SEQ ID NO: 1977; WAN024FWE_at; Start 184; Stop 208
cgtgcaggctataaagctttattgg

SEQ ID NO: 223680 - DNA, 25 bp, Artificial
  probe
  misc_feature (1)..(25): SEQ ID NO: 1977; WAN024FWE_at; Start 40; Stop 64
gcgaaaaaagcagaagagaattaca

SEQ ID NO: 223681 - DNA, 25 bp, Artificial
  probe
  misc_feature (1)..(25): SEQ ID NO: 1977; WAN024FWE_at; Start 213; Stop 237
tgcggatattcgtaattctatcatg

SEQ ID NO: 223682 - DNA, 25 bp, Artificial
  probe
  misc_feature (1)..(25): SEQ ID NO: 1977; WAN024FWE_at; Start 28; Stop 52
cgtttagattttgcgaaaaaagcag

SEQ ID NO: 223683 - DNA, 25 bp, Artificial
  probe
  misc_feature (1)..(25): SEQ ID NO: 1977; WAN024FWE_at; Start 454; Stop 478
gatactgcaccgattgggatggtca

SEQ ID NO: 223684 - DNA, 25 bp, Artificial
  probe
  misc_feature (1)..(25): SEQ ID NO: 1977; WAN024FWE_at; Start 559; Stop 583
ttgaaagcaaaggaacagttagaac

SEQ ID NO: 223685 - DNA, 25 bp, Artificial
  probe
  misc_feature (1)..(25): SEQ ID NO: 1977; WAN024FWE_at; Start 484; Stop 508
gctgctattatcacacaaaaatgtg

SEQ ID NO: 223686 - DNA, 25 bp, Artificial
  probe
  misc_feature (1)..(25): SEQ ID NO: 1977; WAN024FWE_at; Start 574; Stop 598
cagttagaacagacaggagtacctt

SEQ ID NO: 223687 - DNA, 25 bp, Artificial
  probe
  misc_feature (1)..(25): SEQ ID NO: 1977; WAN024FWE_at; Start 348; Stop 372
tattcaggcaggacctgtatcccct

SEQ ID NO: 223688 - DNA, 25 bp, Artificial
  probe
  misc_feature (1)..(25): SEQ ID NO: 1977; WAN024FWE_at; Start 8; Stop 32
cattagcaatagaacaaaaacgttt

SEQ ID NO: 223689 - DNA, 25 bp, Artificial
  probe
  misc_feature (1)..(25): SEQ ID NO: 1977; WAN024FWE_at; Start 290; Stop 314
caggtaccactgacctttctcatgg

SEQ ID NO: 223690 - DNA, 25 bp, Artificial
  probe
  misc_feature (1)..(25): SEQ ID NO: 1977; WAN024FWE_at; Start 386; Stop 410
ttttacagagtgaaaactttgccac

SEQ ID NO: 223691 - DNA, 25 bp, Artificial
  probe
  misc_feature (1)..(25): SEQ ID NO: 1977; WAN024FWE_at; Start 108; Stop 132
agttctttccatctcgtctgttaaa

SEQ ID NO: 223692 - DNA, 25 bp, Artificial
  probe
  misc_feature (1)..(25): SEQ ID NO: 1977; WAN024FWE_at; Start 544; Stop 568
aagcgtcgtgatattttgaaagcaa

SEQ ID NO: 223693 - DNA, 25 bp, Artificial
  probe
  misc_feature (1)..(25): SEQ ID NO: 4888; WAN024FWF_at; Start 220; Stop 244
tgttctccaccagacagagttccaa

SEQ ID NO: 223694 - DNA, 25 bp, Artificial
  probe
  misc_feature (1)..(25): SEQ ID NO: 4888; WAN024FWF_at; Start 166; Stop 190
gcaaatattatatcactatcagcaa

SEQ ID NO: 223695 - DNA, 25 bp, Artificial
  probe
  misc_feature (1)..(25): SEQ ID NO: 4888; WAN024FWF_at; Start 196; Stop 220
gctctagctatagcaaccttctgtt

SEQ ID NO: 223696 - DNA, 25 bp, Artificial
  probe
  misc_feature (1)..(25): SEQ ID NO: 4888; WAN024FWF_at; Start 27; Stop 51
taatgcacgatcagttttcgaggcc

SEQ ID NO: 223697 - DNA, 25 bp, Artificial
  probe
  misc_feature (1)..(25): SEQ ID NO: 4888; WAN024FWF_at; Start 258; Stop 282
gccagcattaaacttcattcttttg

SEQ ID NO: 223698 - DNA, 25 bp, Artificial
  probe
  misc_feature (1)..(25): SEQ ID NO: 4888; WAN024FWF_at; Start 341; Stop 365
ctatattttctattaccggcaggga

SEQ ID NO: 223699 - DNA, 25 bp, Artificial
  probe
  misc_feature (1)..(25): SEQ ID NO: 4888; WAN024FWF_at; Start 115; Stop 139
tcaaaaattacttcacgagaaacgc

SEQ ID NO: 223700 - DNA, 25 bp, Artificial
  probe
  misc_feature (1)..(25): SEQ ID NO: 4888; WAN024FWF_at; Start 12; Stop 36
tccatctttcaatattaatgcacga

SEQ ID NO: 223701 - DNA, 25 bp, Artificial
  probe
  misc_feature (1)..(25): SEQ ID NO: 4888; WAN024FWF_at; Start 91; Stop 115
gcccctactaactctctcaataatt

SEQ ID NO: 223702 - DNA, 25 bp, Artificial
  probe
  misc_feature (1)..(25): SEQ ID NO: 4888; WAN024FWF_at; Start 360; Stop 384
cagggaaggtattaaattgtatgct

SEQ ID NO: 223703 - DNA, 25 bp, Artificial
  probe
  misc_feature (1)..(25): SEQ ID NO: 4888; WAN024FWF_at; Start 68; Stop 92
ttaccataattacacacttacccgc

SEQ ID NO: 223704 - DNA, 25 bp, Artificial
  probe
  misc_feature (1)..(25): SEQ ID NO: 4888; WAN024FWF_at; Start 32; Stop 56
cacgatcagttttcgaggccaattc

SEQ ID NO: 223705 - DNA, 25 bp, Artificial
  probe
  misc_feature (1)..(25): SEQ ID NO: 4888; WAN024FWF_at; Start 120; Stop 144
aattacttcacgagaaacgctgtct

SEQ ID NO: 223706 - DNA, 25 bp, Artificial
  probe
  misc_feature (1)..(25): SEQ ID NO: 4888; WAN024FWF_at; Start 148; Stop 172
gccccagttggctcatcagcaaata

SEQ ID NO: 223707 - DNA, 25 bp, Artificial
  probe
  misc_feature (1)..(25): SEQ ID NO: 4888; WAN024FWF_at; Start 217; Stop 241
tgttgttctccaccagacagagttc

SEQ ID NO: 223708 - DNA, 25 bp, Artificial
  probe
  misc_feature (1)..(25): SEQ ID NO: 4888; WAN024FWF_at; Start 43; Stop 67
ttcgaggccaattctatatcgtgcg

SEQ ID NO: 223709 - DNA, 25 bp, Artificial
  probe
  misc_feature (1)..(25): SEQ ID NO: 4888; WAN024FWF_at; Start 240; Stop 264
tccaacaaaatcgtttaagccagca

SEQ ID NO: 223710 - DNA, 25 bp, Artificial
  probe
  misc_feature (1)..(25): SEQ ID NO: 4888; WAN024FWF_at; Start 225; Stop 249
tccaccagacagagttccaacaaaa

SEQ ID NO: 223711 - DNA, 25 bp, Artificial
  probe
  misc_feature (1)..(25): SEQ ID NO: 4888; WAN024FWF_at; Start 178; Stop 202
tcactatcagcaataaccgctctag

SEQ ID NO: 223712 - DNA, 25 bp, Artificial
  probe
  misc_feature (1)..(25): SEQ ID NO: 4888; WAN024FWF_at; Start 127; Stop 151
tcacgagaaacgctgtctaaagccc

SEQ ID NO: 223713 - DNA, 25 bp, Artificial
  probe
  misc_feature (1)..(25): SEQ ID NO: 4888; WAN024FWF_at; Start 189; Stop 213
aataaccgctctagctatagcaacc

SEQ ID NO: 223714 - DNA, 25 bp, Artificial
  probe
  misc_feature (1)..(25): SEQ ID NO: 4888; WAN024FWF_at; Start 245; Stop 269
caaaatcgtttaagccagcattaaa

SEQ ID NO: 223715 - DNA, 25 bp, Artificial
  probe
  misc_feature (1)..(25): SEQ ID NO: 4888; WAN024FWF_at; Start 318; Stop 342
ttgtgataatcgcaaaggaagtgct

SEQ ID NO: 223716 - DNA, 25 bp, Artificial
  probe
  misc_feature (1)..(25): SEQ ID NO: 4888; WAN024FWF_at; Start 232; Stop 256
gacagagttccaacaaaatcgttta

SEQ ID NO: 223717 - DNA, 25 bp, Artificial
  probe
  misc_feature (1)..(25): SEQ ID NO: 4888; WAN024FWF_at; Start 157; Stop 181
ggctcatcagcaaatattatatcac

SEQ ID NO: 223718 - DNA, 25 bp, Artificial
  probe
  misc_feature (1)..(25): SEQ ID NO: 4888; WAN024FWF_at; Start 59; Stop 83
tatcgtgcgttaccataattacaca

SEQ ID NO: 223719 - DNA, 25 bp, Artificial
  probe
  misc_feature (1)..(25): SEQ ID NO: 4888; WAN024FWF_at; Start 49; Stop 73
gccaattctatatcgtgcgttacca

SEQ ID NO: 223720 - DNA, 25 bp, Artificial
  probe
  misc_feature (1)..(25): SEQ ID NO: 4888; WAN024FWF_at; Start 135; Stop 159
aacgctgtctaaagccccagttggc

SEQ ID NO: 223721 - DNA, 25 bp, Artificial
  probe
  misc_feature (1)..(25): SEQ ID NO: 4888; WAN024FWF_at; Start 349; Stop 373
tctattaccggcagggaaggtatta

SEQ ID NO: 223722 - DNA, 25 bp, Artificial
  probe
  misc_feature (1)..(25): SEQ ID NO: 4888; WAN024FWF_at; Start 144; Stop 168
taaagccccagttggctcatcagca

SEQ ID NO: 223723 - DNA, 25 bp, Artificial
  probe
  misc_feature (1)..(25): SEQ ID NO: 4888; WAN024FWF_at; Start 273; Stop 297
cattcttttgagtaagttttctaca

SEQ ID NO: 223724 - DNA, 25 bp, Artificial
  probe
  misc_feature (1)..(25): SEQ ID NO: 4888; WAN024FWF_at; Start 208; Stop 232
gcaaccttctgttgttctccaccag

SEQ ID NO: 223725 - DNA, 25 bp, Artificial
  probe
  misc_feature (1)..(25): SEQ ID NO: 4888; WAN024FWF_at; Start 327; Stop 351
tcgcaaaggaagtgctatattttct

SEQ ID NO: 223726 - DNA, 25 bp, Artificial
  probe
  misc_feature (1)..(25): SEQ ID NO: 4888; WAN024FWF_at; Start 131; Stop 155
gagaaacgctgtctaaagccccagt

SEQ ID NO: 223727 - DNA, 25 bp, Artificial
  probe
  misc_feature (1)..(25): SEQ ID NO: 4028; WAN024FWG_at; Start 408; Stop 432
caaaagaatgaagtttaatgctggc

SEQ ID NO: 223728 - DNA, 25 bp, Artificial
  probe
  misc_feature (1)..(25): SEQ ID NO: 4028; WAN024FWG_at; Start 449; Stop 473
gaactctgtctggtggagaacaaca

SEQ ID NO: 223729 - DNA, 25 bp, Artificial
  probe
  misc_feature (1)..(25): SEQ ID NO: 4028; WAN024FWG_at; Start 231; Stop 255
tggaatcaacccctataaaatcaga

SEQ ID NO: 223730 - DNA, 25 bp, Artificial
  probe
  misc_feature (1)..(25): SEQ ID NO: 4028; WAN024FWG_at; Start 251; Stop 275
tcagaaatgcaaaattgtcaagtat

SEQ ID NO: 223731 - DNA, 25 bp, Artificial
  probe
  misc_feature (1)..(25): SEQ ID NO: 4028; WAN024FWG_at; Start 458; Stop 482
ctggtggagaacaacagaaggttgc

SEQ ID NO: 223732 - DNA, 25 bp, Artificial
  probe
  misc_feature (1)..(25): SEQ ID NO: 4028; WAN024FWG_at; Start 603; Stop 627
taagtgtgtaattatggtaacgcac

SEQ ID NO: 223733 - DNA, 25 bp, Artificial
  probe
  misc_feature (1)..(25): SEQ ID NO: 4028; WAN024FWG_at; Start 715; Stop 739
gagttgtataaaatcttagaggtac

SEQ ID NO: 223734 - DNA, 25 bp, Artificial
  probe
  misc_feature (1)..(25): SEQ ID NO: 4028; WAN024FWG_at; Start 434; Stop 458
taaacgattttgttggaactctgtc

SEQ ID NO: 223735 - DNA, 25 bp, Artificial
  probe
  misc_feature (1)..(25): SEQ ID NO: 4028; WAN024FWG_at; Start 545; Stop 569
tagacagcgtttctcgtgaagtaat

SEQ ID NO: 223736 - DNA, 25 bp, Artificial
  probe
  misc_feature (1)..(25): SEQ ID NO: 4028; WAN024FWG_at; Start 620; Stop 644
taacgcacgatatagaattggcctc

SEQ ID NO: 223737 - DNA, 25 bp, Artificial
  probe
  misc_feature (1)..(25): SEQ ID NO: 4028; WAN024FWG_at; Start 686; Stop 710
tcaaagaacttcatagacctagcgg

SEQ ID NO: 223738 - DNA, 25 bp, Artificial
  probe
  misc_feature (1)..(25): SEQ ID NO: 4028; WAN024FWG_at; Start 105; Stop 129
tgtttctctttctgcttcgagagga

SEQ ID NO: 223739 - DNA, 25 bp, Artificial
  probe
  misc_feature (1)..(25): SEQ ID NO: 4028; WAN024FWG_at; Start 539; Stop 563
gggctttagacagcgtttctcgtga

SEQ ID NO: 223740 - DNA, 25 bp, Artificial
  probe
  misc_feature (1)..(25): SEQ ID NO: 4028; WAN024FWG_at; Start 192; Stop 216
tagtttgcttgaaccaacaagtggg

SEQ ID NO: 223741 - DNA, 25 bp, Artificial
  probe
  misc_feature (1)..(25): SEQ ID NO: 4028; WAN024FWG_at; Start 269; Stop 293
caagtataagacgtaacgaagtatc

SEQ ID NO: 223742 - DNA, 25 bp, Artificial
  probe
  misc_feature (1)..(25): SEQ ID NO: 4028; WAN024FWG_at; Start 635; Stop 659
aattggcctcgaaaactgatcgtgc

SEQ ID NO: 223743 - DNA, 25 bp, Artificial
  probe
  misc_feature (1)..(25): SEQ ID NO: 4028; WAN024FWG_at; Start 115; Stop 139
tctgcttcgagaggagaatttataa

SEQ ID NO: 223744 - DNA, 25 bp, Artificial
  probe
  misc_feature (1)..(25): SEQ ID NO: 4028; WAN024FWG_at; Start 338; Stop 362
tagaaaatatagcacttcctttgcg

SEQ ID NO: 223745 - DNA, 25 bp, Artificial
  probe
  misc_feature (1)..(25): SEQ ID NO: 4028; WAN024FWG_at; Start 309; Stop 333
atacaatttaataccttccctgccg

SEQ ID NO: 223746 - DNA, 25 bp, Artificial
  probe
  misc_feature (1)..(25): SEQ ID NO: 4028; WAN024FWG_at; Start 86; Stop 110
cgttgcaagtgctgaaaaatgtttc

SEQ ID NO: 223747 - DNA, 25 bp, Artificial
  probe
  misc_feature (1)..(25): SEQ ID NO: 4028; WAN024FWG_at; Start 731; Stop 755
tagaggtacaatcaactacggagga

SEQ ID NO: 223748 - DNA, 25 bp, Artificial
  probe
  misc_feature (1)..(25): SEQ ID NO: 4028; WAN024FWG_at; Start 149; Stop 173
gaattagtggttctggaaagtcaac

SEQ ID NO: 223749 - DNA, 25 bp, Artificial
  probe
  misc_feature (1)..(25): SEQ ID NO: 4028; WAN024FWG_at; Start 45; Stop 69
gaaagggctgtatcatcaattttta

SEQ ID NO: 223750 - DNA, 25 bp, Artificial
  probe
  misc_feature (1)..(25): SEQ ID NO: 4028; WAN024FWG_at; Start 3; Stop 27
gattggaggcaagaatatggataaa

SEQ ID NO: 223751 - DNA, 25 bp, Artificial
  probe
  misc_feature (1)..(25): SEQ ID NO: 4028; WAN024FWG_at; Start 655; Stop 679
cgtgcattaatattgaaagatggaa

SEQ ID NO: 223752 - DNA, 25 bp, Artificial
  probe
  misc_feature (1)..(25): SEQ ID NO: 4028; WAN024FWG_at; Start 325; Stop 349
tccctgccggtaatagaaaatatag

SEQ ID NO: 223753 - DNA, 25 bp, Artificial
  probe
  misc_feature (1)..(25): SEQ ID NO: 4028; WAN024FWG_at; Start 68; Stop 92
tactaggaaataataaaacgttgca

SEQ ID NO: 223754 - DNA, 25 bp, Artificial
  probe
  misc_feature (1)..(25): SEQ ID NO: 4028; WAN024FWG_at; Start 348; Stop 372
agcacttcctttgcgattatcacaa

SEQ ID NO: 223755 - DNA, 25 bp, Artificial
  probe
  misc_feature (1)..(25): SEQ ID NO: 4028; WAN024FWG_at; Start 393; Stop 417
tgtagaaaacttactcaaaagaatg

SEQ ID NO: 223756 - DNA, 25 bp, Artificial
  probe
  misc_feature (1)..(25): SEQ ID NO: 4028; WAN024FWG_at; Start 31; Stop 55
tatatattaaaagtgaaagggctgt

SEQ ID NO: 223757 - DNA, 25 bp, Artificial
  probe
  misc_feature (1)..(25): SEQ ID NO: 4028; WAN024FWG_at; Start 515; Stop 539
taatatttgctgatgagccaactgg

SEQ ID NO: 223758 - DNA, 25 bp, Artificial
  probe
  misc_feature (1)..(25): SEQ ID NO: 4028; WAN024FWG_at; Start 488; Stop 512
ctagagcggttattgctgatagtga

SEQ ID NO: 223759 - DNA, 25 bp, Artificial
  probe
  misc_feature (1)..(25): SEQ ID NO: 4028; WAN024FWG_at; Start 472; Stop 496
cagaaggttgctatagctagagcgg

SEQ ID NO: 223760 - DNA, 25 bp, Artificial
  probe
  misc_feature (1)..(25): SEQ ID NO: 4028; WAN024FWG_at; Start 423; Stop 447
taatgctggcttaaacgattttgtt

SEQ ID NO: 223761 - DNA, 25 bp, Artificial
  probe
  misc_feature (1)..(25): SEQ ID NO: 2079; WAN024FWH_at; Start 416; Stop 440
gggaaaatatattacctgatatcca

SEQ ID NO: 223762 - DNA, 25 bp, Artificial
  probe
  misc_feature (1)..(25): SEQ ID NO: 2079; WAN024FWH_at; Start 789; Stop 813
cattgtttcgaagtggaatttacta

SEQ ID NO: 223763 - DNA, 25 bp, Artificial
  probe
  misc_feature (1)..(25): SEQ ID NO: 2079; WAN024FWH_at; Start 504; Stop 528
aagtggttgcttttatacgttcaag

SEQ ID NO: 223764 - DNA, 25 bp, Artificial
  probe
  misc_feature (1)..(25): SEQ ID NO: 2079; WAN024FWH_at; Start 315; Stop 339
gggacagatttttatcatttcctcg

SEQ ID NO: 223765 - DNA, 25 bp, Artificial
  probe
  misc_feature (1)..(25): SEQ ID NO: 2079; WAN024FWH_at; Start 190; Stop 214
ggaggagtaacattattctttgtgc

SEQ ID NO: 223766 - DNA, 25 bp, Artificial
  probe
  misc_feature (1)..(25): SEQ ID NO: 2079; WAN024FWH_at; Start 578; Stop 602
taaaaagaatactgctattggctgg

SEQ ID NO: 223767 - DNA, 25 bp, Artificial
  probe
  misc_feature (1)..(25): SEQ ID NO: 2079; WAN024FWH_at; Start 557; Stop 581
taaggcatgttctttcaatagtaaa

SEQ ID NO: 223768 - DNA, 25 bp, Artificial
  probe
  misc_feature (1)..(25): SEQ ID NO: 2079; WAN024FWH_at; Start 646; Stop 670
gatagcacaattttagcgaaggccc

SEQ ID NO: 223769 - DNA, 25 bp, Artificial
  probe
  misc_feature (1)..(25): SEQ ID NO: 2079; WAN024FWH_at; Start 916; Stop 940
caagatgacagtgatttagagctaa

SEQ ID NO: 223770 - DNA, 25 bp, Artificial
  probe
  misc_feature (1)..(25): SEQ ID NO: 2079; WAN024FWH_at; Start 141; Stop 165
tgtcggacttccagatcctaaacca

SEQ ID NO: 223771 - DNA, 25 bp, Artificial
  probe
  misc_feature (1)..(25): SEQ ID NO: 2079; WAN024FWH_at; Start 964; Stop 988
ggagcaccaattttgatagtacttg

SEQ ID NO: 223772 - DNA, 25 bp, Artificial
  probe
  misc_feature (1)..(25): SEQ ID NO: 2079; WAN024FWH_at; Start 449; Stop 473
cgagtgctgttggatgtatcattac

SEQ ID NO: 223773 - DNA, 25 bp, Artificial
  probe
  misc_feature (1)..(25): SEQ ID NO: 2079; WAN024FWH_at; Start 598; Stop 622
gctggttttagtgttatctggttgc

SEQ ID NO: 223774 - DNA, 25 bp, Artificial
  probe
  misc_feature (1)..(25): SEQ ID NO: 2079; WAN024FWH_at; Start 210; Stop 234
tgtgctctctaacataataaatatg

SEQ ID NO: 223775 - DNA, 25 bp, Artificial
  probe
  misc_feature (1)..(25): SEQ ID NO: 2079; WAN024FWH_at; Start 43; Stop 67
caatggttaggcgtttcaccagtaa

SEQ ID NO: 223776 - DNA, 25 bp, Artificial
  probe
  misc_feature (1)..(25): SEQ ID NO: 2079; WAN024FWH_at; Start 1058; Stop 1082
taggaacttctaattaccagatggt

SEQ ID NO: 223777 - DNA, 25 bp, Artificial
  probe
  misc_feature (1)..(25): SEQ ID NO: 2079; WAN024FWH_at; Start 488; Stop 512
catttttagcctttctaagtggttg

SEQ ID NO: 223778 - DNA, 25 bp, Artificial
  probe
  misc_feature (1)..(25): SEQ ID NO: 2079; WAN024FWH_at; Start 1005; Stop 1029
tgcatttttgtcatcgcatcaagaa

SEQ ID NO: 223779 - DNA, 25 bp, Artificial
  probe
  misc_feature (1)..(25): SEQ ID NO: 2079; WAN024FWH_at; Start 1021; Stop 1045
catcaagaaaggattgagattcagc

SEQ ID NO: 223780 - DNA, 25 bp, Artificial
  probe
  misc_feature (1)..(25): SEQ ID NO: 2079; WAN024FWH_at; Start 840; Stop 864
cagtgctgcaattacaggagctata

SEQ ID NO: 223781 - DNA, 25 bp, Artificial
  probe
  misc_feature (1)..(25): SEQ ID NO: 2079; WAN024FWH_at; Start 630; Stop 654
gcaacaaattttccaagatagcaca

SEQ ID NO: 223782 - DNA, 25 bp, Artificial
  probe
  misc_feature (1)..(25): SEQ ID NO: 2079; WAN024FWH_at; Start 124; Stop 148
aataattcgcaagtatttgtcggac

SEQ ID NO: 223783 - DNA, 25 bp, Artificial
  probe
  misc_feature (1)..(25): SEQ ID NO: 2079; WAN024FWH_at; Start 542; Stop 566
ggaagagttctaaaataaggcatgt

SEQ ID NO: 223784 - DNA, 25 bp, Artificial
  probe
  misc_feature (1)..(25): SEQ ID NO: 2079; WAN024FWH_at; Start 176; Stop 200
ttccgatagtattcggaggagtaac

SEQ ID NO: 223785 - DNA, 25 bp, Artificial
  probe
  misc_feature (1)..(25): SEQ ID NO: 2079; WAN024FWH_at; Start 241; Stop 265
gaaatttttagagatgattacgaac

SEQ ID NO: 223786 - DNA, 25 bp, Artificial
  probe
  misc_feature (1)..(25): SEQ ID NO: 2079; WAN024FWH_at; Start 826; Stop 850
tatataaaatctatcagtgctgcaa

SEQ ID NO: 223787 - DNA, 25 bp, Artificial
  probe
  misc_feature (1)..(25): SEQ ID NO: 2079; WAN024FWH_at; Start 31; Stop 55
cataataagaaacaatggttaggcg

SEQ ID NO: 223788 - DNA, 25 bp, Artificial
  probe
  misc_feature (1)..(25): SEQ ID NO: 2079; WAN024FWH_at; Start 659; Stop 683
tagcgaaggcccagataatattcaa

SEQ ID NO: 223789 - DNA, 25 bp, Artificial
  probe
  misc_feature (1)..(25): SEQ ID NO: 2079; WAN024FWH_at; Start 947; Stop 971
catttattgtctatgtaggagcacc

SEQ ID NO: 223790 - DNA, 25 bp, Artificial
  probe
  misc_feature (1)..(25): SEQ ID NO: 2079; WAN024FWH_at; Start 76; Stop 100
tcgagtttagttatgggattggctg

SEQ ID NO: 223791 - DNA, 25 bp, Artificial
  probe
  misc_feature (1)..(25): SEQ ID NO: 2079; WAN024FWH_at; Start 1091; Stop 1115
aagttggtgaggctatatttttgac

SEQ ID NO: 223792 - DNA, 25 bp, Artificial
  probe
  misc_feature (1)..(25): SEQ ID NO: 2079; WAN024FWH_at; Start 433; Stop 457
gatatccaatttcaaacgagtgctg

SEQ ID NO: 223793 - DNA, 25 bp, Artificial
  probe
  misc_feature (1)..(25): SEQ ID NO: 2079; WAN024FWH_at; Start 519; Stop 543
tacgttcaagaagattagaaatagg

SEQ ID NO: 223794 - DNA, 25 bp, Artificial
  probe
  misc_feature (1)..(25): SEQ ID NO: 2079; WAN024FWH_at; Start 902; Stop 926
tactatctcaatttcaagatgacag

SEQ ID NO: 223795 - DNA, 25 bp, Artificial
  probe
  misc_feature (1)..(25): SEQ ID NO: 4893; WAN024FWI_at; Start 79; Stop 103
aaaaggaggaaagaggatgccacag

SEQ ID NO: 223796 - DNA, 25 bp, Artificial
  probe
  misc_feature (1)..(25): SEQ ID NO: 4893; WAN024FWI_at; Start 3; Stop 27
gaaactgaaatctattatactacaa

SEQ ID NO: 223797 - DNA, 25 bp, Artificial
  probe
  misc_feature (1)..(25): SEQ ID NO: 4893; WAN024FWI_at; Start 44; Stop 68
taattttaaggtataataatctcat

SEQ ID NO: 223798 - DNA, 25 bp, Artificial
  probe
  misc_feature (1)..(25): SEQ ID NO: 4893; WAN024FWI_at; Start 46; Stop 70
attttaaggtataataatctcatag

SEQ ID NO: 223799 - DNA, 25 bp, Artificial
  probe
  misc_feature (1)..(25): SEQ ID NO: 4893; WAN024FWI_at; Start 2; Stop 26
tgaaactgaaatctattatactaca

SEQ ID NO: 223800 - DNA, 25 bp, Artificial
  probe
  misc_feature (1)..(25): SEQ ID NO: 4893; WAN024FWI_at; Start 55; Stop 79
tataataatctcatagaaataaaga

SEQ ID NO: 223801 - DNA, 25 bp, Artificial
  probe
  misc_feature (1)..(25): SEQ ID NO: 4893; WAN024FWI_at; Start 57; Stop 81
taataatctcatagaaataaagaaa

SEQ ID NO: 223802 - DNA, 25 bp, Artificial
  probe
  misc_feature (1)..(25): SEQ ID NO: 4893; WAN024FWI_at; Start 77; Stop 101
agaaaaggaggaaagaggatgccac

SEQ ID NO: 223803 - DNA, 25 bp, Artificial
  probe
  misc_feature (1)..(25): SEQ ID NO: 4893; WAN024FWI_at; Start 50; Stop 74
taaggtataataatctcatagaaat

SEQ ID NO: 223804 - DNA, 25 bp, Artificial
  probe
  misc_feature (1)..(25): SEQ ID NO: 4893; WAN024FWI_at; Start 53; Stop 77
ggtataataatctcatagaaataaa

SEQ ID NO: 223805 - DNA, 25 bp, Artificial
  probe
  misc_feature (1)..(25): SEQ ID NO: 4893; WAN024FWI_at; Start 48; Stop 72
tttaaggtataataatctcatagaa

SEQ ID NO: 223806 - DNA, 25 bp, Artificial
  probe
  misc_feature (1)..(25): SEQ ID NO: 4893; WAN024FWI_at; Start 15; Stop 39
tattatactacaaactattgaaagc

SEQ ID NO: 223807 - DNA, 25 bp, Artificial
  probe
  misc_feature (1)..(25): SEQ ID NO: 4893; WAN024FWI_at; Start 47; Stop 71
ttttaaggtataataatctcataga

SEQ ID NO: 223808 - DNA, 25 bp, Artificial
  probe
  misc_feature (1)..(25): SEQ ID NO: 4893; WAN024FWI_at; Start 78; Stop 102
gaaaaggaggaaagaggatgccaca

SEQ ID NO: 223809 - DNA, 25 bp, Artificial
  probe
  misc_feature (1)..(25): SEQ ID NO: 4893; WAN024FWI_at; Start 52; Stop 76
aggtataataatctcatagaaataa

SEQ ID NO: 223810 - DNA, 25 bp, Artificial
  probe
  misc_feature (1)..(25): SEQ ID NO: 4893; WAN024FWI_at; Start 45; Stop 69
aattttaaggtataataatctcata

SEQ ID NO: 223811 - DNA, 25 bp, Artificial
  probe
  misc_feature (1)..(25): SEQ ID NO: 4893; WAN024FWI_at; Start 56; Stop 80
ataataatctcatagaaataaagaa

SEQ ID NO: 223812 - DNA, 25 bp, Artificial
  probe
  misc_feature (1)..(25): SEQ ID NO: 4893; WAN024FWI_at; Start 14; Stop 38
ctattatactacaaactattgaaag

SEQ ID NO: 223813 - DNA, 25 bp, Artificial
  probe
  misc_feature (1)..(25): SEQ ID NO: 4893; WAN024FWI_at; Start 80; Stop 104
aaaggaggaaagaggatgccacaga

SEQ ID NO: 223814 - DNA, 25 bp, Artificial
  probe
  misc_feature (1)..(25): SEQ ID NO: 4893; WAN024FWI_at; Start 54; Stop 78
gtataataatctcatagaaataaag

SEQ ID NO: 223815 - DNA, 25 bp, Artificial
  probe
  misc_feature (1)..(25): SEQ ID NO: 4893; WAN024FWI_at; Start 16; Stop 40
attatactacaaactattgaaagcg

SEQ ID NO: 223816 - DNA, 25 bp, Artificial
  probe
  misc_feature (1)..(25): SEQ ID NO: 4893; WAN024FWI_at; Start 18; Stop 42
tatactacaaactattgaaagcgtt

SEQ ID NO: 223817 - DNA, 25 bp, Artificial
  probe
  misc_feature (1)..(25): SEQ ID NO: 4893; WAN024FWI_at; Start 51; Stop 75
aaggtataataatctcatagaaata

SEQ ID NO: 223818 - DNA, 25 bp, Artificial
  probe
  misc_feature (1)..(25): SEQ ID NO: 4893; WAN024FWI_at; Start 74; Stop 98
taaagaaaaggaggaaagaggatgc

SEQ ID NO: 223819 - DNA, 25 bp, Artificial
  probe
  misc_feature (1)..(25): SEQ ID NO: 4893; WAN024FWI_at; Start 1; Stop 25
ttgaaactgaaatctattatactac

SEQ ID NO: 223820 - DNA, 25 bp, Artificial
  probe
  misc_feature (1)..(25): SEQ ID NO: 4893; WAN024FWI_at; Start 81; Stop 105
aaggaggaaagaggatgccacagat

SEQ ID NO: 223821 - DNA, 25 bp, Artificial
  probe
  misc_feature (1)..(25): SEQ ID NO: 4893; WAN024FWI_at; Start 17; Stop 41
ttatactacaaactattgaaagcgt

SEQ ID NO: 223822 - DNA, 25 bp, Artificial
  probe
  misc_feature (1)..(25): SEQ ID NO: 4893; WAN024FWI_at; Start 43; Stop 67
ttaattttaaggtataataatctca

SEQ ID NO: 223823 - DNA, 25 bp, Artificial
  probe
  misc_feature (1)..(25): SEQ ID NO: 4893; WAN024FWI_at; Start 76; Stop 100
aagaaaaggaggaaagaggatgcca

SEQ ID NO: 223824 - DNA, 25 bp, Artificial
  probe
  misc_feature (1)..(25): SEQ ID NO: 4893; WAN024FWI_at; Start 49; Stop 73
ttaaggtataataatctcatagaaa

SEQ ID NO: 223825 - DNA, 25 bp, Artificial
  probe
  misc_feature (1)..(25): SEQ ID NO: 4893; WAN024FWI_at; Start 73; Stop 97
ataaagaaaaggaggaaagaggatg

SEQ ID NO: 223826 - DNA, 25 bp, Artificial
  probe
  misc_feature (1)..(25): SEQ ID NO: 4893; WAN024FWI_at; Start 19; Stop 43
atactacaaactattgaaagcgttt

SEQ ID NO: 223827 - DNA, 25 bp, Artificial
  probe
  misc_feature (1)..(25): SEQ ID NO: 4231; WAN024FWJ_at; Start 9; Stop 33
gtttgaaagtgcaccaccaatcccc

SEQ ID NO: 223828 - DNA, 25 bp, Artificial
  probe
  misc_feature (1)..(25): SEQ ID NO: 4231; WAN024FWJ_at; Start 177; Stop 201
aatggcgccaccaacaacgatgcct

SEQ ID NO: 223829 - DNA, 25 bp, Artificial
  probe
  misc_feature (1)..(25): SEQ ID NO: 4231; WAN024FWJ_at; Start 25; Stop 49
ccaatccccaaaagtagacctgctg

SEQ ID NO: 223830 - DNA, 25 bp, Artificial
  probe
  misc_feature (1)..(25): SEQ ID NO: 4231; WAN024FWJ_at; Start 161; Stop 185
tctcttttggtctagtaatggcgcc

SEQ ID NO: 223831 - DNA, 25 bp, Artificial
  probe
  misc_feature (1)..(25): SEQ ID NO: 4231; WAN024FWJ_at; Start 173; Stop 197
tagtaatggcgccaccaacaacgat

SEQ ID NO: 223832 - DNA, 25 bp, Artificial
  probe
  misc_feature (1)..(25): SEQ ID NO: 4231; WAN024FWJ_at; Start 6; Stop 30
tgggtttgaaagtgcaccaccaatc

SEQ ID NO: 223833 - DNA, 25 bp, Artificial
  probe
  misc_feature (1)..(25): SEQ ID NO: 4231; WAN024FWJ_at; Start 132; Stop 156
tttaagactagcaacgaagcgttct

SEQ ID NO: 223834 - DNA, 25 bp, Artificial
  probe
  misc_feature (1)..(25): SEQ ID NO: 4231; WAN024FWJ_at; Start 168; Stop 192
tggtctagtaatggcgccaccaaca

SEQ ID NO: 223835 - DNA, 25 bp, Artificial
  probe
  misc_feature (1)..(25): SEQ ID NO: 4231; WAN024FWJ_at; Start 43; Stop 67
cctgctgcaggaagtatagctatag

SEQ ID NO: 223836 - DNA, 25 bp, Artificial
  probe
  misc_feature (1)..(25): SEQ ID NO: 4231; WAN024FWJ_at; Start 150; Stop 174
gcgttctgtaatctcttttggtcta

SEQ ID NO: 223837 - DNA, 25 bp, Artificial
  probe
  misc_feature (1)..(25): SEQ ID NO: 4231; WAN024FWJ_at; Start 163; Stop 187
tcttttggtctagtaatggcgccac

SEQ ID NO: 223838 - DNA, 25 bp, Artificial
  probe
  misc_feature (1)..(25): SEQ ID NO: 4231; WAN024FWJ_at; Start 46; Stop 70
gctgcaggaagtatagctataggta

SEQ ID NO: 223839 - DNA, 25 bp, Artificial
  probe
  misc_feature (1)..(25): SEQ ID NO: 4231; WAN024FWJ_at; Start 215; Stop 239
caaggatttgtttggcttgttctgg

SEQ ID NO: 223840 - DNA, 25 bp, Artificial
  probe
  misc_feature (1)..(25): SEQ ID NO: 4231; WAN024FWJ_at; Start 158; Stop 182
taatctcttttggtctagtaatggc

SEQ ID NO: 223841 - DNA, 25 bp, Artificial
  probe
  misc_feature (1)..(25): SEQ ID NO: 4231; WAN024FWJ_at; Start 41; Stop 65
gacctgctgcaggaagtatagctat

SEQ ID NO: 223842 - DNA, 25 bp, Artificial
  probe
  misc_feature (1)..(25): SEQ ID NO: 4231; WAN024FWJ_at; Start 202; Stop 226
cgcactccatattcaaggatttgtt

SEQ ID NO: 223843 - DNA, 25 bp, Artificial
  probe
  misc_feature (1)..(25): SEQ ID NO: 4231; WAN024FWJ_at; Start 118; Stop 142
cccctcacatcttatttaagactag

SEQ ID NO: 223844 - DNA, 25 bp, Artificial
  probe
  misc_feature (1)..(25): SEQ ID NO: 4231; WAN024FWJ_at; Start 165; Stop 189
ttttggtctagtaatggcgccacca

SEQ ID NO: 223845 - DNA, 25 bp, Artificial
  probe
  misc_feature (1)..(25): SEQ ID NO: 4231; WAN024FWJ_at; Start 222; Stop 246
ttgtttggcttgttctggtgtatga

SEQ ID NO: 223846 - DNA, 25 bp, Artificial
  probe
  misc_feature (1)..(25): SEQ ID NO: 4231; WAN024FWJ_at; Start 195; Stop 219
gatgcctcgcactccatattcaagg

SEQ ID NO: 223847 - DNA, 25 bp, Artificial
  probe
  misc_feature (1)..(25): SEQ ID NO: 4231; WAN024FWJ_at; Start 2; Stop 26
tggttgggtttgaaagtgcaccacc

SEQ ID NO: 223848 - DNA, 25 bp, Artificial
  probe
  misc_feature (1)..(25): SEQ ID NO: 4231; WAN024FWJ_at; Start 146; Stop 170
cgaagcgttctgtaatctcttttgg

SEQ ID NO: 223849 - DNA, 25 bp, Artificial
  probe
  misc_feature (1)..(25): SEQ ID NO: 4231; WAN024FWJ_at; Start 142; Stop 166
gcaacgaagcgttctgtaatctctt

SEQ ID NO: 223850 - DNA, 25 bp, Artificial
  probe
  misc_feature (1)..(25): SEQ ID NO: 4231; WAN024FWJ_at; Start 17; Stop 41
gtgcaccaccaatccccaaaagtag

SEQ ID NO: 223851 - DNA, 25 bp, Artificial
  probe
  misc_feature (1)..(25): SEQ ID NO: 4231; WAN024FWJ_at; Start 32; Stop 56
ccaaaagtagacctgctgcaggaag

SEQ ID NO: 223852 - DNA, 25 bp, Artificial
  probe
  misc_feature (1)..(25): SEQ ID NO: 4231; WAN024FWJ_at; Start 49; Stop 73
gcaggaagtatagctataggtaaca

SEQ ID NO: 223853 - DNA, 25 bp, Artificial
  probe
  misc_feature (1)..(25): SEQ ID NO: 4231; WAN024FWJ_at; Start 198; Stop 222
gcctcgcactccatattcaaggatt

SEQ ID NO: 223854 - DNA, 25 bp, Artificial
  probe
  misc_feature (1)..(25): SEQ ID NO: 4231; WAN024FWJ_at; Start 63; Stop 87
tataggtaacataaaagcttttcca

SEQ ID NO: 223855 - DNA, 25 bp, Artificial
  probe
  misc_feature (1)..(25): SEQ ID NO: 4231; WAN024FWJ_at; Start 175; Stop 199
gtaatggcgccaccaacaacgatgc

SEQ ID NO: 223856 - DNA, 25 bp, Artificial
  probe
  misc_feature (1)..(25): SEQ ID NO: 4231; WAN024FWJ_at; Start 29; Stop 53
tccccaaaagtagacctgctgcagg

SEQ ID NO: 223857 - DNA, 25 bp, Artificial
  probe
  misc_feature (1)..(25): SEQ ID NO: 4231; WAN024FWJ_at; Start 130; Stop 154
tatttaagactagcaacgaagcgtt

SEQ ID NO: 223858 - DNA, 25 bp, Artificial
  probe
  misc_feature (1)..(25): SEQ ID NO: 4231; WAN024FWJ_at; Start 134; Stop 158
taagactagcaacgaagcgttctgt

SEQ ID NO: 223859 - DNA, 25 bp, Artificial
  probe
  misc_feature (1)..(25): SEQ ID NO: 4231; WAN024FWJ_at; Start 137; Stop 161
gactagcaacgaagcgttctgtaat

SEQ ID NO: 223860 - DNA, 25 bp, Artificial
  probe
  misc_feature (1)..(25): SEQ ID NO: 4231; WAN024FWJ_at; Start 189; Stop 213
aacaacgatgcctcgcactccatat

SEQ ID NO: 223861 - DNA, 25 bp, Artificial
  probe
  misc_feature (1)..(25): SEQ ID NO: 5008; WAN024FWK_at; Start 177; Stop 201
ccttgatatcgcgaacactgtttgc

SEQ ID NO: 223862 - DNA, 25 bp, Artificial
  probe
  misc_feature (1)..(25): SEQ ID NO: 5008; WAN024FWK_at; Start 142; Stop 166
cccaatgattggaagtttagtgact

SEQ ID NO: 223863 - DNA, 25 bp, Artificial
  probe
  misc_feature (1)..(25): SEQ ID NO: 5008; WAN024FWK_at; Start 291; Stop 315
gagcctgacaagaaacgatgattcc

SEQ ID NO: 223864 - DNA, 25 bp, Artificial
  probe
  misc_feature (1)..(25): SEQ ID NO: 5008; WAN024FWK_at; Start 224; Stop 248
tgctcagccgctttgaccagcaagg

SEQ ID NO: 223865 - DNA, 25 bp, Artificial
  probe
  misc_feature (1)..(25): SEQ ID NO: 5008; WAN024FWK_at; Start 61; Stop 85
gtccagttctgccaattcatcaact

SEQ ID NO: 223866 - DNA, 25 bp, Artificial
  probe
  misc_feature (1)..(25): SEQ ID NO: 5008; WAN024FWK_at; Start 114; Stop 138
cctgaggtggataatcacgtttgat

SEQ ID NO: 223867 - DNA, 25 bp, Artificial
  probe
  misc_feature (1)..(25): SEQ ID NO: 5008; WAN024FWK_at; Start 129; Stop 153
cacgtttgataatcccaatgattgg

SEQ ID NO: 223868 - DNA, 25 bp, Artificial
  probe
  misc_feature (1)..(25): SEQ ID NO: 5008; WAN024FWK_at; Start 270; Stop 294
tataaagcggttcatgaggaagagc

SEQ ID NO: 223869 - DNA, 25 bp, Artificial
  probe
  misc_feature (1)..(25): SEQ ID NO: 5008; WAN024FWK_at; Start 51; Stop 75
tcacctcgatgtccagttctgccaa

SEQ ID NO: 223870 - DNA, 25 bp, Artificial
  probe
  misc_feature (1)..(25): SEQ ID NO: 5008; WAN024FWK_at; Start 159; Stop 183
tagtgacttccttaatttccttgat

SEQ ID NO: 223871 - DNA, 25 bp, Artificial
  probe
  misc_feature (1)..(25): SEQ ID NO: 5008; WAN024FWK_at; Start 29; Stop 53
cgcttggtacaatccagagcaatca

SEQ ID NO: 223872 - DNA, 25 bp, Artificial
  probe
  misc_feature (1)..(25): SEQ ID NO: 5008; WAN024FWK_at; Start 420; Stop 444
aacgctttcaagagtttgtagtata

SEQ ID NO: 223873 - DNA, 25 bp, Artificial
  probe
  misc_feature (1)..(25): SEQ ID NO: 5008; WAN024FWK_at; Start 277; Stop 301
cggttcatgaggaagagcctgacaa

SEQ ID NO: 223874 - DNA, 25 bp, Artificial
  probe
  misc_feature (1)..(25): SEQ ID NO: 5008; WAN024FWK_at; Start 168; Stop 192
ccttaatttccttgatatcgcgaac

SEQ ID NO: 223875 - DNA, 25 bp, Artificial
  probe
  misc_feature (1)..(25): SEQ ID NO: 5008; WAN024FWK_at; Start 34; Stop 58
ggtacaatccagagcaatcacctcg

SEQ ID NO: 223876 - DNA, 25 bp, Artificial
  probe
  misc_feature (1)..(25): SEQ ID NO: 5008; WAN024FWK_at; Start 230; Stop 254
gccgctttgaccagcaagggaatca

SEQ ID NO: 223877 - DNA, 25 bp, Artificial
  probe
  misc_feature (1)..(25): SEQ ID NO: 5008; WAN024FWK_at; Start 285; Stop 309
gaggaagagcctgacaagaaacgat

SEQ ID NO: 223878 - DNA, 25 bp, Artificial
  probe
  misc_feature (1)..(25): SEQ ID NO: 5008; WAN024FWK_at; Start 206; Stop 230
ataccgactgctccaccttgctcag

SEQ ID NO: 223879 - DNA, 25 bp, Artificial
  probe
  misc_feature (1)..(25): SEQ ID NO: 5008; WAN024FWK_at; Start 77; Stop 101
tcatcaacttctttcatagtagccg

SEQ ID NO: 223880 - DNA, 25 bp, Artificial
  probe
  misc_feature (1)..(25): SEQ ID NO: 5008; WAN024FWK_at; Start 23; Stop 47
cgttcacgcttggtacaatccagag

SEQ ID NO: 223881 - DNA, 25 bp, Artificial
  probe
  misc_feature (1)..(25): SEQ ID NO: 5008; WAN024FWK_at; Start 307; Stop 331
gatgattccatctttgatttgctca

SEQ ID NO: 223882 - DNA, 25 bp, Artificial
  probe
  misc_feature (1)..(25): SEQ ID NO: 5008; WAN024FWK_at; Start 235; Stop 259
tttgaccagcaagggaatcacccct

SEQ ID NO: 223883 - DNA, 25 bp, Artificial
  probe
  misc_feature (1)..(25): SEQ ID NO: 5008; WAN024FWK_at; Start 256; Stop 280
ccctcccgcttctgtataaagcggt

SEQ ID NO: 223884 - DNA, 25 bp, Artificial
  probe
  misc_feature (1)..(25): SEQ ID NO: 5008; WAN024FWK_at; Start 391; Stop 415
tctatgagattattataccttaaaa

SEQ ID NO: 223885 - DNA, 25 bp, Artificial
  probe
  misc_feature (1)..(25): SEQ ID NO: 5008; WAN024FWK_at; Start 107; Stop 131
aagggttcctgaggtggataatcac

SEQ ID NO: 223886 - DNA, 25 bp, Artificial
  probe
  misc_feature (1)..(25): SEQ ID NO: 5008; WAN024FWK_at; Start 94; Stop 118
agtagccgtgatgaagggttcctga

SEQ ID NO: 223887 - DNA, 25 bp, Artificial
  probe
  misc_feature (1)..(25): SEQ ID NO: 5008; WAN024FWK_at; Start 196; Stop 220
gtttgctcggataccgactgctcca

SEQ ID NO: 223888 - DNA, 25 bp, Artificial
  probe
  misc_feature (1)..(25): SEQ ID NO: 5008; WAN024FWK_at; Start 321; Stop 345
tgatttgctcaatcaaggcttcttt

SEQ ID NO: 223889 - DNA, 25 bp, Artificial
  probe
  misc_feature (1)..(25): SEQ ID NO: 5008; WAN024FWK_at; Start 295; Stop 319
ctgacaagaaacgatgattccatct

SEQ ID NO: 223890 - DNA, 25 bp, Artificial
  probe
  misc_feature (1)..(25): SEQ ID NO: 5008; WAN024FWK_at; Start 43; Stop 67
cagagcaatcacctcgatgtccagt

SEQ ID NO: 223891 - DNA, 25 bp, Artificial
  probe
  misc_feature (1)..(25): SEQ ID NO: 5008; WAN024FWK_at; Start 189; Stop 213
gaacactgtttgctcggataccgac

SEQ ID NO: 223892 - DNA, 25 bp, Artificial
  probe
  misc_feature (1)..(25): SEQ ID NO: 5008; WAN024FWK_at; Start 91; Stop 115
catagtagccgtgatgaagggttcc

SEQ ID NO: 223893 - DNA, 25 bp, Artificial
  probe
  misc_feature (1)..(25): SEQ ID NO: 5008; WAN024FWK_at; Start 10; Stop 34
caaaccatcgtagcgttcacgcttg

SEQ ID NO: 223894 - DNA, 25 bp, Artificial
  probe
  misc_feature (1)..(25): SEQ ID NO: 5008; WAN024FWK_at; Start 441; Stop 465
tataatagatttcagtttcaaaaac

SEQ ID NO: 223895 - DNA, 25 bp, Artificial
  probe
  misc_feature (1)..(25): SEQ ID NO: 3121; WAN024FWL_at; Start 465; Stop 489
tgtcggaacaaccttatcaggctac

SEQ ID NO: 223896 - DNA, 25 bp, Artificial
  probe
  misc_feature (1)..(25): SEQ ID NO: 3121; WAN024FWL_at; Start 352; Stop 376
gaaattcaagagttcattcgtcagg

SEQ ID NO: 223897 - DNA, 25 bp, Artificial
  probe
  misc_feature (1)..(25): SEQ ID NO: 3121; WAN024FWL_at; Start 46; Stop 70
ggaatcatcgtttcttgtcaggctc

SEQ ID NO: 223898 - DNA, 25 bp, Artificial
  probe
  misc_feature (1)..(25): SEQ ID NO: 3121; WAN024FWL_at; Start 496; Stop 520
tacagtccaaaagtagacggtccag

SEQ ID NO: 223899 - DNA, 25 bp, Artificial
  probe
  misc_feature (1)..(25): SEQ ID NO: 3121; WAN024FWL_at; Start 160; Stop 184
gcaaacagtgttcgcgatatcaagg

SEQ ID NO: 223900 - DNA, 25 bp, Artificial
  probe
  misc_feature (1)..(25): SEQ ID NO: 3121; WAN024FWL_at; Start 75; Stop 99
tcatgaaccgctttatacagaagcg

SEQ ID NO: 223901 - DNA, 25 bp, Artificial
  probe
  misc_feature (1)..(25): SEQ ID NO: 3121; WAN024FWL_at; Start 585; Stop 609
tacaccagaacaagccaaacaaatc

SEQ ID NO: 223902 - DNA, 25 bp, Artificial
  probe
  misc_feature (1)..(25): SEQ ID NO: 3121; WAN024FWL_at; Start 113; Stop 137
ccttgctggtcaaagcggctgagca

SEQ ID NO: 223903 - DNA, 25 bp, Artificial
  probe
  misc_feature (1)..(25): SEQ ID NO: 3121; WAN024FWL_at; Start 511; Stop 535
gacggtccagattttgaattgatta

SEQ ID NO: 223904 - DNA, 25 bp, Artificial
  probe
  misc_feature (1)..(25): SEQ ID NO: 3121; WAN024FWL_at; Start 331; Stop 355
cgtgaacgctacgatggtttggaaa

SEQ ID NO: 223905 - DNA, 25 bp, Artificial
  probe
  misc_feature (1)..(25): SEQ ID NO: 3121; WAN024FWL_at; Start 405; Stop 429
gatggctgatactagtatcttcgaa

SEQ ID NO: 223906 - DNA, 25 bp, Artificial
  probe
  misc_feature (1)..(25): SEQ ID NO: 3121; WAN024FWL_at; Start 60; Stop 84
ttgtcaggctcttcctcatgaaccg

SEQ ID NO: 223907 - DNA, 25 bp, Artificial
  probe
  misc_feature (1)..(25): SEQ ID NO: 3121; WAN024FWL_at; Start 386; Stop 410
aatatcctaatcagcttttgatggc

SEQ ID NO: 223908 - DNA, 25 bp, Artificial
  probe
  misc_feature (1)..(25): SEQ ID NO: 3121; WAN024FWL_at; Start 609; Stop 633
ccttgaatatggagtgcgaggcatc

SEQ ID NO: 223909 - DNA, 25 bp, Artificial
  probe
  misc_feature (1)..(25): SEQ ID NO: 3121; WAN024FWL_at; Start 148; Stop 172
gtcggtatccgagcaaacagtgttc

SEQ ID NO: 223910 - DNA, 25 bp, Artificial
  probe
  misc_feature (1)..(25): SEQ ID NO: 3121; WAN024FWL_at; Start 225; Stop 249
caaacgtgattatccacctcaggaa

SEQ ID NO: 223911 - DNA, 25 bp, Artificial
  probe
  misc_feature (1)..(25): SEQ ID NO: 3121; WAN024FWL_at; Start 104; Stop 128
gggtgattcccttgctggtcaaagc

SEQ ID NO: 223912 - DNA, 25 bp, Artificial
  probe
  misc_feature (1)..(25): SEQ ID NO: 3121; WAN024FWL_at; Start 297; Stop 321
ggacatcgaggtgattgctctggat

SEQ ID NO: 223913 - DNA, 25 bp, Artificial
  probe
  misc_feature (1)..(25): SEQ ID NO: 3121; WAN024FWL_at; Start 451; Stop 475
gcaggaattgactttgtcggaacaa

SEQ ID NO: 223914 - DNA, 25 bp, Artificial
  probe
  misc_feature (1)..(25): SEQ ID NO: 3121; WAN024FWL_at; Start 368; Stop 392
ttcgtcaggttaaggagaaatatcc

SEQ ID NO: 223915 - DNA, 25 bp, Artificial
  probe
  misc_feature (1)..(25): SEQ ID NO: 3121; WAN024FWL_at; Start 195; Stop 219
agtcactaaacttccaatcattggg

SEQ ID NO: 223916 - DNA, 25 bp, Artificial
  probe
  misc_feature (1)..(25): SEQ ID NO: 3121; WAN024FWL_at; Start 435; Stop 459
gctagcagctgtagaagcaggaatt

SEQ ID NO: 223917 - DNA, 25 bp, Artificial
  probe
  misc_feature (1)..(25): SEQ ID NO: 3121; WAN024FWL_at; Start 420; Stop 444
tatcttcgaagaagggctagcagct

SEQ ID NO: 223918 - DNA, 25 bp, Artificial
  probe
  misc_feature (1)..(25): SEQ ID NO: 3121; WAN024FWL_at; Start 16; Stop 40
aaagaagccttgattgagcaaatca

SEQ ID NO: 223919 - DNA, 25 bp, Artificial
  probe
  misc_feature (1)..(25): SEQ ID NO: 3121; WAN024FWL_at; Start 243; Stop 267
tcaggaacccttcatcacggctact

SEQ ID NO: 223920 - DNA, 25 bp, Artificial
  probe
  misc_feature (1)..(25): SEQ ID NO: 3121; WAN024FWL_at; Start 315; Stop 339
tctggattgtaccaagcgtgaacgc

SEQ ID NO: 223921 - DNA, 25 bp, Artificial
  probe
  misc_feature (1)..(25): SEQ ID NO: 3121; WAN024FWL_at; Start 31; Stop 55
gagcaaatcaaagatggaatcatcg

SEQ ID NO: 223922 - DNA, 25 bp, Artificial
  probe
  misc_feature (1)..(25): SEQ ID NO: 3121; WAN024FWL_at; Start 177; Stop 201
tatcaaggaaattaaggaagtcact

SEQ ID NO: 223923 - DNA, 25 bp, Artificial
  probe
  misc_feature (1)..(25): SEQ ID NO: 3121; WAN024FWL_at; Start 258; Stop 282
cacggctactatgaaagaagttgat

SEQ ID NO: 223924 - DNA, 25 bp, Artificial
  probe
  misc_feature (1)..(25): SEQ ID NO: 3121; WAN024FWL_at; Start 479; Stop 503
tatcaggctacacatcctacagtcc

SEQ ID NO: 223925 - DNA, 25 bp, Artificial
  probe
  misc_feature (1)..(25): SEQ ID NO: 3121; WAN024FWL_at; Start 282; Stop 306
tgaattggcagaactggacatcgag

SEQ ID NO: 223926 - DNA, 25 bp, Artificial
  probe
  misc_feature (1)..(25): SEQ ID NO: 3121; WAN024FWL_at; Start 553; Stop 577
ggtgtagatgtcattgcagaaggaa

SEQ ID NO: 223927 - DNA, 25 bp, Artificial
  probe
  misc_feature (1)..(25): SEQ ID NO: 3121; WAN024FWL_at; Start 653; Stop 677
ctagaccaaaagagattacagaacg

SEQ ID NO: 223928 - DNA, 25 bp, Artificial
  probe
  misc_feature (1)..(25): SEQ ID NO: 3121; WAN024FWL_at; Start 209; Stop 233
caatcattgggattatcaaacgtga

SEQ ID NO: 223929 - DNA, 25 bp, Artificial
  probe
  misc_feature (1)..(25): SEQ ID NO: 3978; WAN024FWM_at; Start 1342; Stop 1366
gaagatgtagatgcttgtgtgacac

SEQ ID NO: 223930 - DNA, 25 bp, Artificial
  probe
  misc_feature (1)..(25): SEQ ID NO: 3978; WAN024FWM_at; Start 1449; Stop 1473
gaagggtggcattcaagcaatctat

SEQ ID NO: 223931 - DNA, 25 bp, Artificial
  probe
  misc_feature (1)..(25): SEQ ID NO: 3978; WAN024FWM_at; Start 332; Stop 356
taaaactttttatggcagaaggatc

SEQ ID NO: 223932 - DNA, 25 bp, Artificial
  probe
  misc_feature (1)..(25): SEQ ID NO: 3978; WAN024FWM_at; Start 930; Stop 954
taccggtattacagaaccaattgaa

SEQ ID NO: 223933 - DNA, 25 bp, Artificial
  probe
  misc_feature (1)..(25): SEQ ID NO: 3978; WAN024FWM_at; Start 243; Stop 267
tattggcttagcgaaacgagataaa

SEQ ID NO: 223934 - DNA, 25 bp, Artificial
  probe
  misc_feature (1)..(25): SEQ ID NO: 3978; WAN024FWM_at; Start 1294; Stop 1318
caggatagcctacaaattatcagag

SEQ ID NO: 223935 - DNA, 25 bp, Artificial
  probe
  misc_feature (1)..(25): SEQ ID NO: 3978; WAN024FWM_at; Start 60; Stop 84
tatagctatacttcctgcagcaggt

SEQ ID NO: 223936 - DNA, 25 bp, Artificial
  probe
  misc_feature (1)..(25): SEQ ID NO: 3978; WAN024FWM_at; Start 302; Stop 326
tagttatgactgcaacgatcaaagc

SEQ ID NO: 223937 - DNA, 25 bp, Artificial
  probe
  misc_feature (1)..(25): SEQ ID NO: 3978; WAN024FWM_at; Start 112; Stop 136
tcaaacccaaccacgatagcaactt

SEQ ID NO: 223938 - DNA, 25 bp, Artificial
  probe
  misc_feature (1)..(25): SEQ ID NO: 3978; WAN024FWM_at; Start 707; Stop 731
caggacaaacagtggttggagctca

SEQ ID NO: 223939 - DNA, 25 bp, Artificial
  probe
  misc_feature (1)..(25): SEQ ID NO: 3978; WAN024FWM_at; Start 975; Stop 999
tccggttctatatgttgttcacgca

SEQ ID NO: 223940 - DNA, 25 bp, Artificial
  probe
  misc_feature (1)..(25): SEQ ID NO: 3978; WAN024FWM_at; Start 960; Stop 984
gtttctattcgtcagtccggttcta

SEQ ID NO: 223941 - DNA, 25 bp, Artificial
  probe
  misc_feature (1)..(25): SEQ ID NO: 3978; WAN024FWM_at; Start 838; Stop 862
gctgcctgtttagcgatgtaccata

SEQ ID NO: 223942 - DNA, 25 bp, Artificial
  probe
  misc_feature (1)..(25): SEQ ID NO: 3978; WAN024FWM_at; Start 1116; Stop 1140
gacgaattgggttcttcagattcca

SEQ ID NO: 223943 - DNA, 25 bp, Artificial
  probe
  misc_feature (1)..(25): SEQ ID NO: 3978; WAN024FWM_at; Start 96; Stop 120
gattggtggtgcactttcaaaccca

SEQ ID NO: 223944 - DNA, 25 bp, Artificial
  probe
  misc_feature (1)..(25): SEQ ID NO: 3978; WAN024FWM_at; Start 815; Stop 839
caacaatgatgttcggtttaccggc

SEQ ID NO: 223945 - DNA, 25 bp, Artificial
  probe
  misc_feature (1)..(25): SEQ ID NO: 3978; WAN024FWM_at; Start 994; Stop 1018
cacgcattccttgatggtgttagct

SEQ ID NO: 223946 - DNA, 25 bp, Artificial
  probe
  misc_feature (1)..(25): SEQ ID NO: 3978; WAN024FWM_at; Start 276; Stop 300
tgcgttagcaggagtaactggttac

SEQ ID NO: 223947 - DNA, 25 bp, Artificial
  probe
  misc_feature (1)..(25): SEQ ID NO: 3978; WAN024FWM_at; Start 564; Stop 588
tacaggtggatatatttctcaggcg

SEQ ID NO: 223948 - DNA, 25 bp, Artificial
  probe
  misc_feature (1)..(25): SEQ ID NO: 3978; WAN024FWM_at; Start 170; Stop 194
tattccaagtaatgagctctgcagg

SEQ ID NO: 223949 - DNA, 25 bp, Artificial
  probe
  misc_feature (1)..(25): SEQ ID NO: 3978; WAN024FWM_at; Start 1009; Stop 1033
ggtgttagcttctttattgcagacg

SEQ ID NO: 223950 - DNA, 25 bp, Artificial
  probe
  misc_feature (1)..(25): SEQ ID NO: 3978; WAN024FWM_at; Start 580; Stop 604
tctcaggcgggtccaattggaactt

SEQ ID NO: 223951 - DNA, 25 bp, Artificial
  probe
  misc_feature (1)..(25): SEQ ID NO: 3978; WAN024FWM_at; Start 349; Stop 373
gaaggatctgcaattgatactggag

SEQ ID NO: 223952 - DNA, 25 bp, Artificial
  probe
  misc_feature (1)..(25): SEQ ID NO: 3978; WAN024FWM_at; Start 185; Stop 209
gctctgcaggagaggttgtattcag

SEQ ID NO: 223953 - DNA, 25 bp, Artificial
  probe
  misc_feature (1)..(25): SEQ ID NO: 3978; WAN024FWM_at; Start 260; Stop 284
gagataaaggaaccgctgcgttagc

SEQ ID NO: 223954 - DNA, 25 bp, Artificial
  probe
  misc_feature (1)..(25): SEQ ID NO: 3978; WAN024FWM_at; Start 678; Stop 702
tactgaacttggtggtgttgaaact

SEQ ID NO: 223955 - DNA, 25 bp, Artificial
  probe
  misc_feature (1)..(25): SEQ ID NO: 3978; WAN024FWM_at; Start 1465; Stop 1489
gcaatctatggagcaaaagcaatct

SEQ ID NO: 223956 - DNA, 25 bp, Artificial
  probe
  misc_feature (1)..(25): SEQ ID NO: 3978; WAN024FWM_at; Start 626; Stop 650
gactttctggagcagtaggcttaca

SEQ ID NO: 223957 - DNA, 25 bp, Artificial
  probe
  misc_feature (1)..(25): SEQ ID NO: 3978; WAN024FWM_at; Start 398; Stop 422
tagttgccgtatatttgcacaaccg

SEQ ID NO: 223958 - DNA, 25 bp, Artificial
  probe
  misc_feature (1)..(25): SEQ ID NO: 3978; WAN024FWM_at; Start 454; Stop 478
ggattctttggaggttcacgcttcg

SEQ ID NO: 223959 - DNA, 25 bp, Artificial
  probe
  misc_feature (1)..(25): SEQ ID NO: 3978; WAN024FWM_at; Start 859; Stop 883
catagtgttcctaaaaatcgtcgta

SEQ ID NO: 223960 - DNA, 25 bp, Artificial
  probe
  misc_feature (1)..(25): SEQ ID NO: 3978; WAN024FWM_at; Start 799; Stop 823
tttgcaggtcgtttctcaacaatga

SEQ ID NO: 223961 - DNA, 25 bp, Artificial
  probe
  misc_feature (1)..(25): SEQ ID NO: 3978; WAN024FWM_at; Start 549; Stop 573
acaacttcttgtttctacaggtgga

SEQ ID NO: 223962 - DNA, 25 bp, Artificial
  probe
  misc_feature (1)..(25): SEQ ID NO: 3978; WAN024FWM_at; Start 1056; Stop 1080
cacattttcaggaggtgtaatcgat

SEQ ID NO: 223963 - DNA, 25 bp, Artificial
  probe
  misc_feature (1)..(25): SEQ ID NO: 4993; WAN024FWN_at; Start 841; Stop 865
tggcctggaattggttctatcatcc

SEQ ID NO: 223964 - DNA, 25 bp, Artificial
  probe
  misc_feature (1)..(25): SEQ ID NO: 4993; WAN024FWN_at; Start 436; Stop 460
gataatgttgctcgttttctagctg

SEQ ID NO: 223965 - DNA, 25 bp, Artificial
  probe
  misc_feature (1)..(25): SEQ ID NO: 4993; WAN024FWN_at; Start 455; Stop 479
tagctgttatcggaactgcgattcc

SEQ ID NO: 223966 - DNA, 25 bp, Artificial
  probe
  misc_feature (1)..(25): SEQ ID NO: 4993; WAN024FWN_at; Start 796; Stop 820
ccaatgttaattggtggatcagtaa

SEQ ID NO: 223967 - DNA, 25 bp, Artificial
  probe
  misc_feature (1)..(25): SEQ ID NO: 4993; WAN024FWN_at; Start 223; Stop 247
aatgatccagtattagttcgctatg

SEQ ID NO: 223968 - DNA, 25 bp, Artificial
  probe
  misc_feature (1)..(25): SEQ ID NO: 4993; WAN024FWN_at; Start 683; Stop 707
cagattatgttaaaacagctcgtgc

SEQ ID NO: 223969 - DNA, 25 bp, Artificial
  probe
  misc_feature (1)..(25): SEQ ID NO: 4993; WAN024FWN_at; Start 317; Stop 341
aaattgtaggacaagcattgcctgc

SEQ ID NO: 223970 - DNA, 25 bp, Artificial
  probe
  misc_feature (1)..(25): SEQ ID NO: 4993; WAN024FWN_at; Start 536; Stop 560
tacctattggtggtagatttgccag

SEQ ID NO: 223971 - DNA, 25 bp, Artificial
  probe
  misc_feature (1)..(25): SEQ ID NO: 4993; WAN024FWN_at; Start 826; Stop 850
gagagtgtcttttcttggcctggaa

SEQ ID NO: 223972 - DNA, 25 bp, Artificial
  probe
  misc_feature (1)..(25): SEQ ID NO: 4993; WAN024FWN_at; Start 602; Stop 626
taccagtaatggctatgtcaattgc

SEQ ID NO: 223973 - DNA, 25 bp, Artificial
  probe
  misc_feature (1)..(25): SEQ ID NO: 4993; WAN024FWN_at; Start 744; Stop 768
catatttagaaatgctatgcgacca

SEQ ID NO: 223974 - DNA, 25 bp, Artificial
  probe
  misc_feature (1)..(25): SEQ ID NO: 4993; WAN024FWN_at; Start 174; Stop 198
ggctagtagtgcagaacaaatcgaa

SEQ ID NO: 223975 - DNA, 25 bp, Artificial
  probe
  misc_feature (1)..(25): SEQ ID NO: 4993; WAN024FWN_at; Start 239; Stop 263
ttcgctatggaagatggctttggca

SEQ ID NO: 223976 - DNA, 25 bp, Artificial
  probe
  misc_feature (1)..(25): SEQ ID NO: 4993; WAN024FWN_at; Start 960; Stop 984
tatggctgcaatattagacccacgt

SEQ ID NO: 223977 - DNA, 25 bp, Artificial
  probe
  misc_feature (1)..(25): SEQ ID NO: 4993; WAN024FWN_at; Start 286; Stop 310
tacagtattgtaaatggtaacccaa

SEQ ID NO: 223978 - DNA, 25 bp, Artificial
  probe
  misc_feature (1)..(25): SEQ ID NO: 4993; WAN024FWN_at; Start 208; Stop 232
cagcaattaggtttaaatgatccag

SEQ ID NO: 223979 - DNA, 25 bp, Artificial
  probe
  misc_feature (1)..(25): SEQ ID NO: 4993; WAN024FWN_at; Start 945; Stop 969
tctacttgtagatattatggctgca

SEQ ID NO: 223980 - DNA, 25 bp, Artificial
  probe
  misc_feature (1)..(25): SEQ ID NO: 4993; WAN024FWN_at; Start 698; Stop 722
cagctcgtgcaaaaggtgttcctga

SEQ ID NO: 223981 - DNA, 25 bp, Artificial
  probe
  misc_feature (1)..(25): SEQ ID NO: 4993; WAN024FWN_at; Start 194; Stop 218
tcgaaaagctaagacagcaattagg

SEQ ID NO: 223982 - DNA, 25 bp, Artificial
  probe
  misc_feature (1)..(25): SEQ ID NO: 4993; WAN024FWN_at; Start 254; Stop 278
ggctttggcaattactccatggtga

SEQ ID NO: 223983 - DNA, 25 bp, Artificial
  probe
  misc_feature (1)..(25): SEQ ID NO: 4993; WAN024FWN_at; Start 647; Stop 671
gatacacacgtaattctatgttgga

SEQ ID NO: 223984 - DNA, 25 bp, Artificial
  probe
  misc_feature (1)..(25): SEQ ID NO: 4993; WAN024FWN_at; Start 584; Stop 608
gagttgaacacttaattctaccagt

SEQ ID NO: 223985 - DNA, 25 bp, Artificial
  probe
  misc_feature (1)..(25): SEQ ID NO: 4993; WAN024FWN_at; Start 116; Stop 140
tcattgcactagatttaacaccagc

SEQ ID NO: 223986 - DNA, 25 bp, Artificial
  probe
  misc_feature (1)..(25): SEQ ID NO: 4993; WAN024FWN_at; Start 811; Stop 835
ggatcagtaattatcgagagtgtct

SEQ ID NO: 223987 - DNA, 25 bp, Artificial
  probe
  misc_feature (1)..(25): SEQ ID NO: 4993; WAN024FWN_at; Start 131; Stop 155
taacaccagcagatccattgacata

SEQ ID NO: 223988 - DNA, 25 bp, Artificial
  probe
  misc_feature (1)..(25): SEQ ID NO: 4993; WAN024FWN_at; Start 875; Stop 899
taacagcaggtgactatcctgtaat

SEQ ID NO: 223989 - DNA, 25 bp, Artificial
  probe
  misc_feature (1)..(25): SEQ ID NO: 4993; WAN024FWN_at; Start 146; Stop 170
cattgacatatatggtatctccaga

SEQ ID NO: 223990 - DNA, 25 bp, Artificial
  probe
  misc_feature (1)..(25): SEQ ID NO: 4993; WAN024FWN_at; Start 860; Stop 884
tcatcctatctagtgtaacagcagg

SEQ ID NO: 223991 - DNA, 25 bp, Artificial
  probe
  misc_feature (1)..(25): SEQ ID NO: 4993; WAN024FWN_at; Start 632; Stop 656
tagctgctttaatgagatacacacg

SEQ ID NO: 223992 - DNA, 25 bp, Artificial
  probe
  misc_feature (1)..(25): SEQ ID NO: 4993; WAN024FWN_at; Start 332; Stop 356
cattgcctgcaacttttgaattagc

SEQ ID NO: 223993 - DNA, 25 bp, Artificial
  probe
  misc_feature (1)..(25): SEQ ID NO: 4993; WAN024FWN_at; Start 774; Stop 798
agtgttattgattttccgtctacca

SEQ ID NO: 223994 - DNA, 25 bp, Artificial
  probe
  misc_feature (1)..(25): SEQ ID NO: 4993; WAN024FWN_at; Start 615; Stop 639
tatgtcaattgcattggtagctgct

SEQ ID NO: 223995 - DNA, 25 bp, Artificial
  probe
  misc_feature (1)..(25): SEQ ID NO: 4993; WAN024FWN_at; Start 405; Stop 429
tatatcagccgttaaacaaaatggt

SEQ ID NO: 223996 - DNA, 25 bp, Artificial
  probe
  misc_feature (1)..(25): SEQ ID NO: 4993; WAN024FWN_at; Start 161; Stop 185
tatctccagatatggctagtagtgc

SEQ ID NO: 223997 - DNA, 25 bp, Artificial
  probe
  misc_feature (1)..(25): SEQ ID NO: 6378; WAN024FWO_at; Start 477; Stop 501
ccgaatggttcgtaatgagttcatg

SEQ ID NO: 223998 - DNA, 25 bp, Artificial
  probe
  misc_feature (1)..(25): SEQ ID NO: 6378; WAN024FWO_at; Start 45; Stop 69
taataacaaattggcctttatcggc

SEQ ID NO: 223999 - DNA, 25 bp, Artificial
  probe
  misc_feature (1)..(25): SEQ ID NO: 6378; WAN024FWO_at; Start 828; Stop 852
tataatggatccgaaacaacagtag

SEQ ID NO: 224000 - DNA, 25 bp, Artificial
  probe
  misc_feature (1)..(25): SEQ ID NO: 6378; WAN024FWO_at; Start 234; Stop 258
tggtggtcgagtttcaattcaagtc

SEQ ID NO: 224001 - DNA, 25 bp, Artificial
  probe
  misc_feature (1)..(25): SEQ ID NO: 6378; WAN024FWO_at; Start 608; Stop 632
tatcgttgtctttaaacgttgctgg

SEQ ID NO: 224002 - DNA, 25 bp, Artificial
  probe
  misc_feature (1)..(25): SEQ ID NO: 6378; WAN024FWO_at; Start 2; Stop 26
tgaaacctatgcctttatggaaaag

SEQ ID NO: 224003 - DNA, 25 bp, Artificial
  probe
  misc_feature (1)..(25): SEQ ID NO: 6378; WAN024FWO_at; Start 58; Stop 82
gcctttatcggctttatatgcttca

SEQ ID NO: 224004 - DNA, 25 bp, Artificial
  probe
  misc_feature (1)..(25): SEQ ID NO: 6378; WAN024FWO_at; Start 578; Stop 602
ttttaagaaatgctatctcaccagt

SEQ ID NO: 224005 - DNA, 25 bp, Artificial
  probe
  misc_feature (1)..(25): SEQ ID NO: 6378; WAN024FWO_at; Start 156; Stop 180
tatgaaccgtcctccttcagcaaaa

SEQ ID NO: 224006 - DNA, 25 bp, Artificial
  probe
  misc_feature (1)..(25): SEQ ID NO: 6378; WAN024FWO_at; Start 337; Stop 361
gatgctcttctagttcgtctagcag

SEQ ID NO: 224007 - DNA, 25 bp, Artificial
  probe
  misc_feature (1)..(25): SEQ ID NO: 6378; WAN024FWO_at; Start 97; Stop 121
gcatgtattctagcacctttattga

SEQ ID NO: 224008 - DNA, 25 bp, Artificial
  probe
  misc_feature (1)..(25): SEQ ID NO: 6378; WAN024FWO_at; Start 761; Stop 785
tagttccagggtcaatcattactct

SEQ ID NO: 224009 - DNA, 25 bp, Artificial
  probe
  misc_feature (1)..(25): SEQ ID NO: 6378; WAN024FWO_at; Start 186; Stop 210
tctgggaacagataaactaggtcgt

SEQ ID NO: 224010 - DNA, 25 bp, Artificial
  probe
  misc_feature (1)..(25): SEQ ID NO: 6378; WAN024FWO_at; Start 449; Stop 473
tctcagtaatgggttggatgacaac

SEQ ID NO: 224011 - DNA, 25 bp, Artificial
  probe
  misc_feature (1)..(25): SEQ ID NO: 6378; WAN024FWO_at; Start 142; Stop 166
gttgatttaggatctatgaaccgtc

SEQ ID NO: 224012 - DNA, 25 bp, Artificial
  probe
  misc_feature (1)..(25): SEQ ID NO: 6378; WAN024FWO_at; Start 710; Stop 734
taaatgctgccaaaacagccgatgt

SEQ ID NO: 224013 - DNA, 25 bp, Artificial
  probe
  misc_feature (1)..(25): SEQ ID NO: 6378; WAN024FWO_at; Start 744; Stop 768
tagttggtggctgtggttagttcca

SEQ ID NO: 224014 - DNA, 25 bp, Artificial
  probe
  misc_feature (1)..(25): SEQ ID NO: 6378; WAN024FWO_at; Start 464; Stop 488
ggatgacaacgttccgaatggttcg

SEQ ID NO: 224015 - DNA, 25 bp, Artificial
  probe
  misc_feature (1)..(25): SEQ ID NO: 6378; WAN024FWO_at; Start 536; Stop 560
gagcttttggtttttctgacagtcg

SEQ ID NO: 224016 - DNA, 25 bp, Artificial
  probe
  misc_feature (1)..(25): SEQ ID NO: 6378; WAN024FWO_at; Start 277; Stop 301
tgtggagcggttattggtactgtac

SEQ ID NO: 224017 - DNA, 25 bp, Artificial
  probe
  misc_feature (1)..(25): SEQ ID NO: 6378; WAN024FWO_at; Start 116; Stop 140
tattgacaacctattctccagatgt

SEQ ID NO: 224018 - DNA, 25 bp, Artificial
  probe
  misc_feature (1)..(25): SEQ ID NO: 6378; WAN024FWO_at; Start 215; Stop 239
tatttgctcgaatcctatatggtgg

SEQ ID NO: 224019 - DNA, 25 bp, Artificial
  probe
  misc_feature (1)..(25): SEQ ID NO: 6378; WAN024FWO_at; Start 668; Stop 692
gagtaggtgttccttctgatattcc

SEQ ID NO: 224020 - DNA, 25 bp, Artificial
  probe
  misc_feature (1)..(25): SEQ ID NO: 6378; WAN024FWO_at; Start 502; Stop 526
tctttgaaacaagaaacatatgtgg

SEQ ID NO: 224021 - DNA, 25 bp, Artificial
  probe
  misc_feature (1)..(25): SEQ ID NO: 6378; WAN024FWO_at; Start 249; Stop 273
aattcaagtcgggatgtatggagcg

SEQ ID NO: 224022 - DNA, 25 bp, Artificial
  probe
  misc_feature (1)..(25): SEQ ID NO: 6378; WAN024FWO_at; Start 622; Stop 646
aacgttgctggtttcattctcagtg

SEQ ID NO: 224023 - DNA, 25 bp, Artificial
  probe
  misc_feature (1)..(25): SEQ ID NO: 6378; WAN024FWO_at; Start 636; Stop 660
cattctcagtgaggcaggtcttagt

SEQ ID NO: 224024 - DNA, 25 bp, Artificial
  probe
  misc_feature (1)..(25): SEQ ID NO: 6378; WAN024FWO_at; Start 801; Stop 825
caactttattggtgatggattacga

SEQ ID NO: 224025 - DNA, 25 bp, Artificial
  probe
  misc_feature (1)..(25): SEQ ID NO: 6378; WAN024FWO_at; Start 358; Stop 382
gcagaattattcttaacattcccga

SEQ ID NO: 224026 - DNA, 25 bp, Artificial
  probe
  misc_feature (1)..(25): SEQ ID NO: 6378; WAN024FWO_at; Start 200; Stop 224
aactaggtcgtgacgtatttgctcg

SEQ ID NO: 224027 - DNA, 25 bp, Artificial
  probe
  misc_feature (1)..(25): SEQ ID NO: 6378; WAN024FWO_at; Start 172; Stop 196
tcagcaaaacacattctgggaacag

SEQ ID NO: 224028 - DNA, 25 bp, Artificial
  probe
  misc_feature (1)..(25): SEQ ID NO: 6378; WAN024FWO_at; Start 322; Stop 346
tttggtgggaaaattgatgctcttc

SEQ ID NO: 224029 - DNA, 25 bp, Artificial
  probe
  misc_feature (1)..(25): SEQ ID NO: 6378; WAN024FWO_at; Start 593; Stop 617
tctcaccagtaattgtatcgttgtc

SEQ ID NO: 224030 - DNA, 25 bp, Artificial
  probe
  misc_feature (1)..(25): SEQ ID NO: 6378; WAN024FWO_at; Start 650; Stop 674
caggtcttagtttcttaggagtagg

SEQ ID NO: 224031 - DNA, 25 bp, Artificial
  probe
  misc_feature (1)..(25): SEQ ID NO: 5694; WAN024FWP_at; Start 305; Stop 329
gactgtcagaaaaaccaaaagctct

SEQ ID NO: 224032 - DNA, 25 bp, Artificial
  probe
  misc_feature (1)..(25): SEQ ID NO: 5694; WAN024FWP_at; Start 423; Stop 447
gataagattgaatacaccttgtcca

SEQ ID NO: 224033 - DNA, 25 bp, Artificial
  probe
  misc_feature (1)..(25): SEQ ID NO: 5694; WAN024FWP_at; Start 201; Stop 225
gaaactaagacctgcctcactgaga

SEQ ID NO: 224034 - DNA, 25 bp, Artificial
  probe
  misc_feature (1)..(25): SEQ ID NO: 5694; WAN024FWP_at; Start 71; Stop 95
gaacgaaaagagtaatgattgaccc

SEQ ID NO: 224035 - DNA, 25 bp, Artificial
  probe
  misc_feature (1)..(25): SEQ ID NO: 5694; WAN024FWP_at; Start 439; Stop 463
ccttgtccaaaaatacttgaaagca

SEQ ID NO: 224036 - DNA, 25 bp, Artificial
  probe
  misc_feature (1)..(25): SEQ ID NO: 5694; WAN024FWP_at; Start 261; Stop 285
tactggtgagatagcatttcttaaa

SEQ ID NO: 224037 - DNA, 25 bp, Artificial
  probe
  misc_feature (1)..(25): SEQ ID NO: 5694; WAN024FWP_at; Start 377; Stop 401
gaaccattcggaacgttgtcatcca

SEQ ID NO: 224038 - DNA, 25 bp, Artificial
  probe
  misc_feature (1)..(25): SEQ ID NO: 5694; WAN024FWP_at; Start 544; Stop 568
tatccagcaataccaccaagtacag

SEQ ID NO: 224039 - DNA, 25 bp, Artificial
  probe
  misc_feature (1)..(25): SEQ ID NO: 5694; WAN024FWP_at; Start 126; Stop 150
aataacatcggctgttttggcagca

SEQ ID NO: 224040 - DNA, 25 bp, Artificial
  probe
  misc_feature (1)..(25): SEQ ID NO: 5694; WAN024FWP_at; Start 2; Stop 26
tgtcaacctcctactgttgtttcgg

SEQ ID NO: 224041 - DNA, 25 bp, Artificial
  probe
  misc_feature (1)..(25): SEQ ID NO: 5694; WAN024FWP_at; Start 363; Stop 387
catgaactcattacgaaccattcgg

SEQ ID NO: 224042 - DNA, 25 bp, Artificial
  probe
  misc_feature (1)..(25): SEQ ID NO: 5694; WAN024FWP_at; Start 502; Stop 526
tctgctagacgaactagaagagcat

SEQ ID NO: 224043 - DNA, 25 bp, Artificial
  probe
  misc_feature (1)..(25): SEQ ID NO: 5694; WAN024FWP_at; Start 17; Stop 41
gttgtttcggatccattatatctcg

SEQ ID NO: 224044 - DNA, 25 bp, Artificial
  probe
  misc_feature (1)..(25): SEQ ID NO: 5694; WAN024FWP_at; Start 408; Stop 432
tactgagaatacgaagataagattg

SEQ ID NO: 224045 - DNA, 25 bp, Artificial
  probe
  misc_feature (1)..(25): SEQ ID NO: 5694; WAN024FWP_at; Start 217; Stop 241
tcactgagaatgaaaccagcaacgt

SEQ ID NO: 224046 - DNA, 25 bp, Artificial
  probe
  misc_feature (1)..(25): SEQ ID NO: 5694; WAN024FWP_at; Start 320; Stop 344
caaaagctctacatacatccacata

SEQ ID NO: 224047 - DNA, 25 bp, Artificial
  probe
  misc_feature (1)..(25): SEQ ID NO: 5694; WAN024FWP_at; Start 482; Stop 506
tcgggaatgttaagaataattctgc

SEQ ID NO: 224048 - DNA, 25 bp, Artificial
  probe
  misc_feature (1)..(25): SEQ ID NO: 5694; WAN024FWP_at; Start 349; Stop 373
tcttgtttcaaagacatgaactcat

SEQ ID NO: 224049 - DNA, 25 bp, Artificial
  probe
  misc_feature (1)..(25): SEQ ID NO: 5694; WAN024FWP_at; Start 97; Stop 121
ggaactaaccacagccaccaactat

SEQ ID NO: 224050 - DNA, 25 bp, Artificial
  probe
  misc_feature (1)..(25): SEQ ID NO: 5694; WAN024FWP_at; Start 462; Stop 486
caagagaatgacaatcatattcggg

SEQ ID NO: 224051 - DNA, 25 bp, Artificial
  probe
  misc_feature (1)..(25): SEQ ID NO: 5694; WAN024FWP_at; Start 518; Stop 542
gaagagcatcaattttcccaccaaa

SEQ ID NO: 224052 - DNA, 25 bp, Artificial
  probe
  misc_feature (1)..(25): SEQ ID NO: 5694; WAN024FWP_at; Start 290; Stop 314
tattaaagataattcgactgtcaga

SEQ ID NO: 224053 - DNA, 25 bp, Artificial
  probe
  misc_feature (1)..(25): SEQ ID NO: 5694; WAN024FWP_at; Start 232; Stop 256
ccagcaacgtttaaagacaacgata

SEQ ID NO: 224054 - DNA, 25 bp, Artificial
  probe
  misc_feature (1)..(25): SEQ ID NO: 5694; WAN024FWP_at; Start 39; Stop 63
tcgtaatccatcaccaataaagttg

SEQ ID NO: 224055 - DNA, 25 bp, Artificial
  probe
  misc_feature (1)..(25): SEQ ID NO: 5694; WAN024FWP_at; Start 560; Stop 584
caagtacagtaccaataaccgctcc

SEQ ID NO: 224056 - DNA, 25 bp, Artificial
  probe
  misc_feature (1)..(25): SEQ ID NO: 5694; WAN024FWP_at; Start 192; Stop 216
tactcctaagaaactaagacctgcc

SEQ ID NO: 224057 - DNA, 25 bp, Artificial
  probe
  misc_feature (1)..(25): SEQ ID NO: 5694; WAN024FWP_at; Start 160; Stop 184
tttccccaagtaggaatatcagaag

SEQ ID NO: 224058 - DNA, 25 bp, Artificial
  probe
  misc_feature (1)..(25): SEQ ID NO: 5694; WAN024FWP_at; Start 247; Stop 271
gacaacgatacaattactggtgaga

SEQ ID NO: 224059 - DNA, 25 bp, Artificial
  probe
  misc_feature (1)..(25): SEQ ID NO: 5694; WAN024FWP_at; Start 52; Stop 76
ccaataaagttgatagaaagaacga

SEQ ID NO: 224060 - DNA, 25 bp, Artificial
  probe
  misc_feature (1)..(25): SEQ ID NO: 5694; WAN024FWP_at; Start 391; Stop 415
gttgtcatccaacccattactgaga

SEQ ID NO: 224061 - DNA, 25 bp, Artificial
  probe
  misc_feature (1)..(25): SEQ ID NO: 5694; WAN024FWP_at; Start 173; Stop 197
gaatatcagaaggaacacctactcc

SEQ ID NO: 224062 - DNA, 25 bp, Artificial
  probe
  misc_feature (1)..(25): SEQ ID NO: 5694; WAN024FWP_at; Start 86; Stop 110
tgattgaccctggaactaaccacag

SEQ ID NO: 224063 - DNA, 25 bp, Artificial
  probe
  misc_feature (1)..(25): SEQ ID NO: 5694; WAN024FWP_at; Start 145; Stop 169
gcagcatttatgatatttccccaag

SEQ ID NO: 224064 - DNA, 25 bp, Artificial
  probe
  misc_feature (1)..(25): SEQ ID NO: 5694; WAN024FWP_at; Start 587; Stop 611
aaatcgctccatacatcccgacttg

SEQ ID NO: 224065 - DNA, 25 bp, Artificial
  probe
  misc_feature (1)..(25): SEQ ID NO: 1957; WAN024FWQ_at; Start 303; Stop 327
tacaggaggaaccatcattttgggc

SEQ ID NO: 224066 - DNA, 25 bp, Artificial
  probe
  misc_feature (1)..(25): SEQ ID NO: 1957; WAN024FWQ_at; Start 446; Stop 470
gctacgatggtaagaaaaagataaa

SEQ ID NO: 224067 - DNA, 25 bp, Artificial
  probe
  misc_feature (1)..(25): SEQ ID NO: 1957; WAN024FWQ_at; Start 578; Stop 602
tagttacaggttatttcgcagaaaa

SEQ ID NO: 224068 - DNA, 25 bp, Artificial
  probe
  misc_feature (1)..(25): SEQ ID NO: 1957; WAN024FWQ_at; Start 476; Stop 500
cagaagaaattgtaattggtaacca

SEQ ID NO: 224069 - DNA, 25 bp, Artificial
  probe
  misc_feature (1)..(25): SEQ ID NO: 1957; WAN024FWQ_at; Start 422; Stop 446
ttgactcagctggtcatacactaag

SEQ ID NO: 224070 - DNA, 25 bp, Artificial
  probe
  misc_feature (1)..(25): SEQ ID NO: 1957; WAN024FWQ_at; Start 533; Stop 557
aaggaagtaagattgcagatggttc

SEQ ID NO: 224071 - DNA, 25 bp, Artificial
  probe
  misc_feature (1)..(25): SEQ ID NO: 1957; WAN024FWQ_at; Start 514; Stop 538
gctgaagcacacttattgaaaggaa

SEQ ID NO: 224072 - DNA, 25 bp, Artificial
  probe
  misc_feature (1)..(25): SEQ ID NO: 1957; WAN024FWQ_at; Start 499; Stop 523
catgtatggatttgtgctgaagcac

SEQ ID NO: 224073 - DNA, 25 bp, Artificial
  probe
  misc_feature (1)..(25): SEQ ID NO: 1957; WAN024FWQ_at; Start 374; Stop 398
ggctcattgttggtaataatgtact

SEQ ID NO: 224074 - DNA, 25 bp, Artificial
  probe
  misc_feature (1)..(25): SEQ ID NO: 1957; WAN024FWQ_at; Start 310; Stop 334
ggaaccatcattttgggcgataact

SEQ ID NO: 224075 - DNA, 25 bp, Artificial
  probe
  misc_feature (1)..(25): SEQ ID NO: 1957; WAN024FWQ_at; Start 194; Stop 218
tctcaggtacggagataatatcctc

SEQ ID NO: 224076 - DNA, 25 bp, Artificial
  probe
  misc_feature (1)..(25): SEQ ID NO: 1957; WAN024FWQ_at; Start 291; Stop 315
cacaattagtgttacaggaggaacc

SEQ ID NO: 224077 - DNA, 25 bp, Artificial
  probe
  misc_feature (1)..(25): SEQ ID NO: 1957; WAN024FWQ_at; Start 548; Stop 572
cagatggttctgtagtagcttattc

SEQ ID NO: 224078 - DNA, 25 bp, Artificial
  probe
  misc_feature (1)..(25): SEQ ID NO: 1957; WAN024FWQ_at; Start 589; Stop 613
tatttcgcagaaaagaattgcttga

SEQ ID NO: 224079 - DNA, 25 bp, Artificial
  probe
  misc_feature (1)..(25): SEQ ID NO: 1957; WAN024FWQ_at; Start 144; Stop 168
tgtaattggtatagaaactgtagta

SEQ ID NO: 224080 - DNA, 25 bp, Artificial
  probe
  misc_feature (1)..(25): SEQ ID NO: 1957; WAN024FWQ_at; Start 97; Stop 121
ccaatacttgtagcatataatgtca

SEQ ID NO: 224081 - DNA, 25 bp, Artificial
  probe
  misc_feature (1)..(25): SEQ ID NO: 1957; WAN024FWQ_at; Start 617; Stop 641
gaggaatacctgcaaaaacacttag

SEQ ID NO: 224082 - DNA, 25 bp, Artificial
  probe
  misc_feature (1)..(25): SEQ ID NO: 1957; WAN024FWQ_at; Start 347; Stop 371
gaaattgtcttatatcatgtactga

SEQ ID NO: 224083 - DNA, 25 bp, Artificial
  probe
  misc_feature (1)..(25): SEQ ID NO: 1957; WAN024FWQ_at; Start 605; Stop 629
attgcttgattggaggaatacctgc

SEQ ID NO: 224084 - DNA, 25 bp, Artificial
  probe
  misc_feature (1)..(25): SEQ ID NO: 1957; WAN024FWQ_at; Start 25; Stop 49
tatctgatttcgctacctaaaacaa

SEQ ID NO: 224085 - DNA, 25 bp, Artificial
  probe
  misc_feature (1)..(25): SEQ ID NO: 1957; WAN024FWQ_at; Start 563; Stop 587
tagcttattctagtttagttacagg

SEQ ID NO: 224086 - DNA, 25 bp, Artificial
  probe
  misc_feature (1)..(25): SEQ ID NO: 1957; WAN024FWQ_at; Start 257; Stop 281
tttttaaagggaagtcagtgatcac

SEQ ID NO: 224087 - DNA, 25 bp, Artificial
  probe
  misc_feature (1)..(25): SEQ ID NO: 1957; WAN024FWQ_at; Start 271; Stop 295
tcagtgatcacaaaaggttgcacaa

SEQ ID NO: 224088 - DNA, 25 bp, Artificial
  probe
  misc_feature (1)..(25): SEQ ID NO: 1957; WAN024FWQ_at; Start 207; Stop 231
gataatatcctctaatcgatcgctc

SEQ ID NO: 224089 - DNA, 25 bp, Artificial
  probe
  misc_feature (1)..(25): SEQ ID NO: 1957; WAN024FWQ_at; Start 325; Stop 349
ggcgataacttttatgcgaatagaa

SEQ ID NO: 224090 - DNA, 25 bp, Artificial
  probe
  misc_feature (1)..(25): SEQ ID NO: 1957; WAN024FWQ_at; Start 362; Stop 386
catgtactgataggctcattgttgg

SEQ ID NO: 224091 - DNA, 25 bp, Artificial
  probe
  misc_feature (1)..(25): SEQ ID NO: 1957; WAN024FWQ_at; Start 82; Stop 106
caggcaattcaccttccaatacttg

SEQ ID NO: 224092 - DNA, 25 bp, Artificial
  probe
  misc_feature (1)..(25): SEQ ID NO: 1957; WAN024FWQ_at; Start 407; Stop 431
ggaatgttattctttttgactcagc

SEQ ID NO: 224093 - DNA, 25 bp, Artificial
  probe
  misc_feature (1)..(25): SEQ ID NO: 1957; WAN024FWQ_at; Start 224; Stop 248
gatcgctcataaacttgagacaagg

SEQ ID NO: 224094 - DNA, 25 bp, Artificial
  probe
  misc_feature (1)..(25): SEQ ID NO: 1957; WAN024FWQ_at; Start 63; Stop 87
taagtgtttaccaattaatcaggca

SEQ ID NO: 224095 - DNA, 25 bp, Artificial
  probe
  misc_feature (1)..(25): SEQ ID NO: 1957; WAN024FWQ_at; Start 3; Stop 27
gcaggttcgacatttattaacttat

SEQ ID NO: 224096 - DNA, 25 bp, Artificial
  probe
  misc_feature (1)..(25): SEQ ID NO: 1957; WAN024FWQ_at; Start 625; Stop 649
cctgcaaaaacacttagaaaaggag

SEQ ID NO: 224097 - DNA, 25 bp, Artificial
  probe
  misc_feature (1)..(25): SEQ ID NO: 1957; WAN024FWQ_at; Start 179; Stop 203
tagttcgaattggtttctcaggtac

SEQ ID NO: 224098 - DNA, 25 bp, Artificial
  probe
  misc_feature (1)..(25): SEQ ID NO: 1957; WAN024FWQ_at; Start 432; Stop 456
tggtcatacactaagctacgatggt

SEQ ID NO: 224099 - DNA, 25 bp, Artificial
  probe
  misc_feature (1)..(25): SEQ ID NO: 4381; WAN024FWR_at; Start 943; Stop 967
gtaattgaaggaaatgcaaatggcc

SEQ ID NO: 224100 - DNA, 25 bp, Artificial
  probe
  misc_feature (1)..(25): SEQ ID NO: 4381; WAN024FWR_at; Start 1003; Stop 1027
gaaattgtgcaaacagtaggaggag

SEQ ID NO: 224101 - DNA, 25 bp, Artificial
  probe
  misc_feature (1)..(25): SEQ ID NO: 4381; WAN024FWR_at; Start 83; Stop 107
taaaagaaggacatgaggtatttgc

SEQ ID NO: 224102 - DNA, 25 bp, Artificial
  probe
  misc_feature (1)..(25): SEQ ID NO: 4381; WAN024FWR_at; Start 973; Stop 997
gtcatcacttcagatagaggtggat

SEQ ID NO: 224103 - DNA, 25 bp, Artificial
  probe
  misc_feature (1)..(25): SEQ ID NO: 4381; WAN024FWR_at; Start 396; Stop 420
gaccttgcgagactattggctagaa

SEQ ID NO: 224104 - DNA, 25 bp, Artificial
  probe
  misc_feature (1)..(25): SEQ ID NO: 4381; WAN024FWR_at; Start 353; Stop 377
caatagttaaagaagctaaaaagag

SEQ ID NO: 224105 - DNA, 25 bp, Artificial
  probe
  misc_feature (1)..(25): SEQ ID NO: 4381; WAN024FWR_at; Start 883; Stop 907
tatcaaaattcggatgtattggtcg

SEQ ID NO: 224106 - DNA, 25 bp, Artificial
  probe
  misc_feature (1)..(25): SEQ ID NO: 4381; WAN024FWR_at; Start 840; Stop 864
acaatatttaggctttcaagataca

SEQ ID NO: 224107 - DNA, 25 bp, Artificial
  probe
  misc_feature (1)..(25): SEQ ID NO: 4381; WAN024FWR_at; Start 1090; Stop 1114
atggaaaactacaatgtctattacc

SEQ ID NO: 224108 - DNA, 25 bp, Artificial
  probe
  misc_feature (1)..(25): SEQ ID NO: 4381; WAN024FWR_at; Start 922; Stop 946
gatgaaccgtttggtagagttgtaa

SEQ ID NO: 224109 - DNA, 25 bp, Artificial
  probe
  misc_feature (1)..(25): SEQ ID NO: 4381; WAN024FWR_at; Start 551; Stop 575
tcaataaaggatttattaacccatc

SEQ ID NO: 224110 - DNA, 25 bp, Artificial
  probe
  misc_feature (1)..(25): SEQ ID NO: 4381; WAN024FWR_at; Start 70; Stop 94
gctgaacaacttgtaaaagaaggac

SEQ ID NO: 224111 - DNA, 25 bp, Artificial
  probe
  misc_feature (1)..(25): SEQ ID NO: 4381; WAN024FWR_at; Start 406; Stop 430
gactattggctagaatatccatggg

SEQ ID NO: 224112 - DNA, 25 bp, Artificial
  probe
  misc_feature (1)..(25): SEQ ID NO: 4381; WAN024FWR_at; Start 947; Stop 971
ttgaaggaaatgcaaatggccttcc

SEQ ID NO: 224113 - DNA, 25 bp, Artificial
  probe
  misc_feature (1)..(25): SEQ ID NO: 4381; WAN024FWR_at; Start 1118; Stop 1142
gcattcttgagaatattgatattta

SEQ ID NO: 224114 - DNA, 25 bp, Artificial
  probe
  misc_feature (1)..(25): SEQ ID NO: 4381; WAN024FWR_at; Start 928; Stop 952
ccgtttggtagagttgtaattgaag

SEQ ID NO: 224115 - DNA, 25 bp, Artificial
  probe
  misc_feature (1)..(25): SEQ ID NO: 4381; WAN024FWR_at; Start 567; Stop 591
taacccatcttctcaaaaatgtatg

SEQ ID NO: 224116 - DNA, 25 bp, Artificial
  probe
  misc_feature (1)..(25): SEQ ID NO: 4381; WAN024FWR_at; Start 1141; Stop 1165
tattctatcgaaaaacaaagtgaaa

SEQ ID NO: 224117 - DNA, 25 bp, Artificial
  probe
  misc_feature (1)..(25): SEQ ID NO: 4381; WAN024FWR_at; Start 362; Stop 386
aagaagctaaaaagagaaatatcag

SEQ ID NO: 224118 - DNA, 25 bp, Artificial
  probe
  misc_feature (1)..(25): SEQ ID NO: 4381; WAN024FWR_at; Start 76; Stop 100
caacttgtaaaagaaggacatgagg

SEQ ID NO: 224119 - DNA, 25 bp, Artificial
  probe
  misc_feature (1)..(25): SEQ ID NO: 4381; WAN024FWR_at; Start 59; Stop 83
ccaaatttctagctgaacaacttgt

SEQ ID NO: 224120 - DNA, 25 bp, Artificial
  probe
  misc_feature (1)..(25): SEQ ID NO: 4381; WAN024FWR_at; Start 392; Stop 416
tttggaccttgcgagactattggct

SEQ ID NO: 224121 - DNA, 25 bp, Artificial
  probe
  misc_feature (1)..(25): SEQ ID NO: 4381; WAN024FWR_at; Start 978; Stop 1002
cacttcagatagaggtggattacct

SEQ ID NO: 224122 - DNA, 25 bp, Artificial
  probe
  misc_feature (1)..(25): SEQ ID NO: 4381; WAN024FWR_at; Start 1083; Stop 1107
tgtagaaatggaaaactacaatgtc

SEQ ID NO: 224123 - DNA, 25 bp, Artificial
  probe
  misc_feature (1)..(25): SEQ ID NO: 4381; WAN024FWR_at; Start 188; Stop 212
ttagtcttcactatattttcagtgc

SEQ ID NO: 224124 - DNA, 25 bp, Artificial
  probe
  misc_feature (1)..(25): SEQ ID NO: 4381; WAN024FWR_at; Start 253; Stop 277
gaaacctataatgtatttgcgaaaa

SEQ ID NO: 224125 - DNA, 25 bp, Artificial
  probe
  misc_feature (1)..(25): SEQ ID NO: 4381; WAN024FWR_at; Start 467; Stop 491
gaatatatagaccttttgttaagaa

SEQ ID NO: 224126 - DNA, 25 bp, Artificial
  probe
  misc_feature (1)..(25): SEQ ID NO: 4381; WAN024FWR_at; Start 216; Stop 240
gaagaatccagctaaacattttttc

SEQ ID NO: 224127 - DNA, 25 bp, Artificial
  probe
  misc_feature (1)..(25): SEQ ID NO: 4381; WAN024FWR_at; Start 991; Stop 1015
ggtggattacctgaaattgtgcaaa

SEQ ID NO: 224128 - DNA, 25 bp, Artificial
  probe
  misc_feature (1)..(25): SEQ ID NO: 4381; WAN024FWR_at; Start 826; Stop 850
agtgatcctagaatacaatatttag

SEQ ID NO: 224129 - DNA, 25 bp, Artificial
  probe
  misc_feature (1)..(25): SEQ ID NO: 4381; WAN024FWR_at; Start 338; Stop 362
caggaatgtctttatcaatagttaa

SEQ ID NO: 224130 - DNA, 25 bp, Artificial
  probe
  misc_feature (1)..(25): SEQ ID NO: 4381; WAN024FWR_at; Start 92; Stop 116
gacatgaggtatttgcatactctga

SEQ ID NO: 224131 - DNA, 25 bp, Artificial
  probe
  misc_feature (1)..(25): SEQ ID NO: 4381; WAN024FWR_at; Start 330; Stop 354
tacaatttcaggaatgtctttatca

SEQ ID NO: 224132 - DNA, 25 bp, Artificial
  probe
  misc_feature (1)..(25): SEQ ID NO: 4381; WAN024FWR_at; Start 98; Stop 122
aggtatttgcatactctgatgatgc

SEQ ID NO: 224133 - DNA, 25 bp, Artificial
  probe
  misc_feature (1)..(25): SEQ ID NO: 2335; WAN024FWS_at; Start 1338; Stop 1362
gcaaggactggtattgggactaatt

SEQ ID NO: 224134 - DNA, 25 bp, Artificial
  probe
  misc_feature (1)..(25): SEQ ID NO: 2335; WAN024FWS_at; Start 121; Stop 145
tatggcgttgtagcggttgtcaatg

SEQ ID NO: 224135 - DNA, 25 bp, Artificial
  probe
  misc_feature (1)..(25): SEQ ID NO: 2335; WAN024FWS_at; Start 1250; Stop 1274
tagttcaccttgtaacagttatccc

SEQ ID NO: 224136 - DNA, 25 bp, Artificial
  probe
  misc_feature (1)..(25): SEQ ID NO: 2335; WAN024FWS_at; Start 876; Stop 900
tttaataggaatgccaatctcagtg

SEQ ID NO: 224137 - DNA, 25 bp, Artificial
  probe
  misc_feature (1)..(25): SEQ ID NO: 2335; WAN024FWS_at; Start 1036; Stop 1060
caagcttcgaatcgtgttgatctgt

SEQ ID NO: 224138 - DNA, 25 bp, Artificial
  probe
  misc_feature (1)..(25): SEQ ID NO: 2335; WAN024FWS_at; Start 1309; Stop 1333
gaacagggtgtagttatcaatcttg

SEQ ID NO: 224139 - DNA, 25 bp, Artificial
  probe
  misc_feature (1)..(25): SEQ ID NO: 2335; WAN024FWS_at; Start 1065; Stop 1089
taaggtaggattattagcgtcagga

SEQ ID NO: 224140 - DNA, 25 bp, Artificial
  probe
  misc_feature (1)..(25): SEQ ID NO: 2335; WAN024FWS_at; Start 760; Stop 784
cctaatcagattttattgcaggtga

SEQ ID NO: 224141 - DNA, 25 bp, Artificial
  probe
  misc_feature (1)..(25): SEQ ID NO: 2335; WAN024FWS_at; Start 321; Stop 345
gaatgaagtctatatcaaactgtac

SEQ ID NO: 224142 - DNA, 25 bp, Artificial
  probe
  misc_feature (1)..(25): SEQ ID NO: 2335; WAN024FWS_at; Start 81; Stop 105
tgtaacggcggtattaagtagaata

SEQ ID NO: 224143 - DNA, 25 bp, Artificial
  probe
  misc_feature (1)..(25): SEQ ID NO: 2335; WAN024FWS_at; Start 480; Stop 504
tgtgctggccatacatgatttcggg

SEQ ID NO: 224144 - DNA, 25 bp, Artificial
  probe
  misc_feature (1)..(25): SEQ ID NO: 2335; WAN024FWS_at; Start 944; Stop 968
gaaataattggtttcagagcgttcc

SEQ ID NO: 224145 - DNA, 25 bp, Artificial
  probe
  misc_feature (1)..(25): SEQ ID NO: 2335; WAN024FWS_at; Start 696; Stop 720
tggtagattcattaatcccgctgcg

SEQ ID NO: 224146 - DNA, 25 bp, Artificial
  probe
  misc_feature (1)..(25): SEQ ID NO: 2335; WAN024FWS_at; Start 976; Stop 1000
caaatactatctgctagcatctgga

SEQ ID NO: 224147 - DNA, 25 bp, Artificial
  probe
  misc_feature (1)..(25): SEQ ID NO: 2335; WAN024FWS_at; Start 467; Stop 491
gagttattggtgttgtgctggccat

SEQ ID NO: 224148 - DNA, 25 bp, Artificial
  probe
  misc_feature (1)..(25): SEQ ID NO: 2335; WAN024FWS_at; Start 1326; Stop 1350
caatcttgtgttgcaaggactggta

SEQ ID NO: 224149 - DNA, 25 bp, Artificial
  probe
  misc_feature (1)..(25): SEQ ID NO: 2335; WAN024FWS_at; Start 159; Stop 183
ctttcagatattggcagattcggga

SEQ ID NO: 224150 - DNA, 25 bp, Artificial
  probe
  misc_feature (1)..(25): SEQ ID NO: 2335; WAN024FWS_at; Start 783; Stop 807
gatttcacctgtaattcatccgata

SEQ ID NO: 224151 - DNA, 25 bp, Artificial
  probe
  misc_feature (1)..(25): SEQ ID NO: 2335; WAN024FWS_at; Start 429; Stop 453
gatgaacttattgagtctgattgcc

SEQ ID NO: 224152 - DNA, 25 bp, Artificial
  probe
  misc_feature (1)..(25): SEQ ID NO: 2335; WAN024FWS_at; Start 713; Stop 737
ccgctgcgttgggttattatgataa

SEQ ID NO: 224153 - DNA, 25 bp, Artificial
  probe
  misc_feature (1)..(25): SEQ ID NO: 2335; WAN024FWS_at; Start 1102; Stop 1126
gctattgtgatagggctattatcga

SEQ ID NO: 224154 - DNA, 25 bp, Artificial
  probe
  misc_feature (1)..(25): SEQ ID NO: 2335; WAN024FWS_at; Start 1366; Stop 1390
tctataggaatatttgtaacaggtc

SEQ ID NO: 224155 - DNA, 25 bp, Artificial
  probe
  misc_feature (1)..(25): SEQ ID NO: 2335; WAN024FWS_at; Start 104; Stop 128
tattaacacctgaagagtatggcgt

SEQ ID NO: 224156 - DNA, 25 bp, Artificial
  probe
  misc_feature (1)..(25): SEQ ID NO: 2335; WAN024FWS_at; Start 958; Stop 982
cagagcgttccagtatttcaaatac

SEQ ID NO: 224157 - DNA, 25 bp, Artificial
  probe
  misc_feature (1)..(25): SEQ ID NO: 2335; WAN024FWS_at; Start 1124; Stop 1148
cgaaaagtatagtgacaattgctgc

SEQ ID NO: 224158 - DNA, 25 bp, Artificial
  probe
  misc_feature (1)..(25): SEQ ID NO: 2335; WAN024FWS_at; Start 21; Stop 45
taaggtaggtatcctatatactgct

SEQ ID NO: 224159 - DNA, 25 bp, Artificial
  probe
  misc_feature (1)..(25): SEQ ID NO: 2335; WAN024FWS_at; Start 995; Stop 1019
tctggattcaaatggctaatagtcc

SEQ ID NO: 224160 - DNA, 25 bp, Artificial
  probe
  misc_feature (1)..(25): SEQ ID NO: 2335; WAN024FWS_at; Start 1380; Stop 1404
tgtaacaggtcaatacaagcagtta

SEQ ID NO: 224161 - DNA, 25 bp, Artificial
  probe
  misc_feature (1)..(25): SEQ ID NO: 2335; WAN024FWS_at; Start 1172; Stop 1196
tagggctatcactgaatctctacgt

SEQ ID NO: 224162 - DNA, 25 bp, Artificial
  probe
  misc_feature (1)..(25): SEQ ID NO: 2335; WAN024FWS_at; Start 306; Stop 330
tagtatagtctatgggaatgaagtc

SEQ ID NO: 224163 - DNA, 25 bp, Artificial
  probe
  misc_feature (1)..(25): SEQ ID NO: 2335; WAN024FWS_at; Start 291; Stop 315
gataggctatccaattagtatagtc

SEQ ID NO: 224164 - DNA, 25 bp, Artificial
  probe
  misc_feature (1)..(25): SEQ ID NO: 2335; WAN024FWS_at; Start 1293; Stop 1317
gattggctttagatttgaacagggt

SEQ ID NO: 224165 - DNA, 25 bp, Artificial
  probe
  misc_feature (1)..(25): SEQ ID NO: 2335; WAN024FWS_at; Start 407; Stop 431
caagaaacatgaactttaaacggat

SEQ ID NO: 224166 - DNA, 25 bp, Artificial
  probe
  misc_feature (1)..(25): SEQ ID NO: 2335; WAN024FWS_at; Start 179; Stop 203
cgggaataggacctgcaattgtaca

SEQ ID NO: 224167 - DNA, 25 bp, Artificial
  probe
  misc_feature (1)..(25): SEQ ID NO: 1559; WAN024FWT_at; Start 419; Stop 443
taaagaaactgattgcatcctatag

SEQ ID NO: 224168 - DNA, 25 bp, Artificial
  probe
  misc_feature (1)..(25): SEQ ID NO: 1559; WAN024FWT_at; Start 358; Stop 382
gataatccgaacagtatagttgttc

SEQ ID NO: 224169 - DNA, 25 bp, Artificial
  probe
  misc_feature (1)..(25): SEQ ID NO: 1559; WAN024FWT_at; Start 87; Stop 111
tgacatcttgggtgaaaaggctaat

SEQ ID NO: 224170 - DNA, 25 bp, Artificial
  probe
  misc_feature (1)..(25): SEQ ID NO: 1559; WAN024FWT_at; Start 313; Stop 337
gatgagaatcttcgttcacacaaaa

SEQ ID NO: 224171 - DNA, 25 bp, Artificial
  probe
  misc_feature (1)..(25): SEQ ID NO: 1559; WAN024FWT_at; Start 579; Stop 603
tagcggaggtgggacattatttcct

SEQ ID NO: 224172 - DNA, 25 bp, Artificial
  probe
  misc_feature (1)..(25): SEQ ID NO: 1559; WAN024FWT_at; Start 433; Stop 457
gcatcctatagaatttatccacagt

SEQ ID NO: 224173 - DNA, 25 bp, Artificial
  probe
  misc_feature (1)..(25): SEQ ID NO: 1559; WAN024FWT_at; Start 523; Stop 547
caatgggaatatgaaatatcaggag

SEQ ID NO: 224174 - DNA, 25 bp, Artificial
  probe
  misc_feature (1)..(25): SEQ ID NO: 1559; WAN024FWT_at; Start 590; Stop 614
ggacattatttcctccatgtactcg

SEQ ID NO: 224175 - DNA, 25 bp, Artificial
  probe
  misc_feature (1)..(25): SEQ ID NO: 1559; WAN024FWT_at; Start 573; Stop 597
ttttactagcggaggtgggacatta

SEQ ID NO: 224176 - DNA, 25 bp, Artificial
  probe
  misc_feature (1)..(25): SEQ ID NO: 1559; WAN024FWT_at; Start 269; Stop 293
ttctagaacttgaaatcaaaaatgg

SEQ ID NO: 224177 - DNA, 25 bp, Artificial
  probe
  misc_feature (1)..(25): SEQ ID NO: 1559; WAN024FWT_at; Start 727; Stop 751
cgatataaagggacaccattaacta

SEQ ID NO: 224178 - DNA, 25 bp, Artificial
  probe
  misc_feature (1)..(25): SEQ ID NO: 1559; WAN024FWT_at; Start 544; Stop 568
ggagctactataccatcgtatttta

SEQ ID NO: 224179 - DNA, 25 bp, Artificial
  probe
  misc_feature (1)..(25): SEQ ID NO: 1559; WAN024FWT_at; Start 305; Stop 329
tctatgtggatgagaatcttcgttc

SEQ ID NO: 224180 - DNA, 25 bp, Artificial
  probe
  misc_feature (1)..(25): SEQ ID NO: 1559; WAN024FWT_at; Start 454; Stop 478
cagtgtgtttcagcaatgcgatgtc

SEQ ID NO: 224181 - DNA, 25 bp, Artificial
  probe
  misc_feature (1)..(25): SEQ ID NO: 1559; WAN024FWT_at; Start 649; Stop 673
gaactcagttttctagctgatgatg

SEQ ID NO: 224182 - DNA, 25 bp, Artificial
  probe
  misc_feature (1)..(25): SEQ ID NO: 1559; WAN024FWT_at; Start 537; Stop 561
aatatcaggagctactataccatcg

SEQ ID NO: 224183 - DNA, 25 bp, Artificial
  probe
  misc_feature (1)..(25): SEQ ID NO: 1559; WAN024FWT_at; Start 603; Stop 627
tccatgtactcgcaatgaggatctt

SEQ ID NO: 224184 - DNA, 25 bp, Artificial
  probe
  misc_feature (1)..(25): SEQ ID NO: 1559; WAN024FWT_at; Start 640; Stop 664
aatatcagggaactcagttttctag

SEQ ID NO: 224185 - DNA, 25 bp, Artificial
  probe
  misc_feature (1)..(25): SEQ ID NO: 1559; WAN024FWT_at; Start 481; Stop 505
cgaattaagttgttttctgatggaa

SEQ ID NO: 224186 - DNA, 25 bp, Artificial
  probe
  misc_feature (1)..(25): SEQ ID NO: 1559; WAN024FWT_at; Start 763; Stop 787
cctgaggagagtttggtatatttga

SEQ ID NO: 224187 - DNA, 25 bp, Artificial
  probe
  misc_feature (1)..(25): SEQ ID NO: 1559; WAN024FWT_at; Start 388; Stop 412
gatgacgatatcatttatcctcgaa

SEQ ID NO: 224188 - DNA, 25 bp, Artificial
  probe
  misc_feature (1)..(25): SEQ ID NO: 1559; WAN024FWT_at; Start 843; Stop 867
tcaaattaattttacagaggataaa

SEQ ID NO: 224189 - DNA, 25 bp, Artificial
  probe
  misc_feature (1)..(25): SEQ ID NO: 1559; WAN024FWT_at; Start 721; Stop 745
gcaacacgatataaagggacaccat

SEQ ID NO: 224190 - DNA, 25 bp, Artificial
  probe
  misc_feature (1)..(25): SEQ ID NO: 1559; WAN024FWT_at; Start 506; Stop 530
gtttatatccatataatcaatggga

SEQ ID NO: 224191 - DNA, 25 bp, Artificial
  probe
  misc_feature (1)..(25): SEQ ID NO: 1559; WAN024FWT_at; Start 448; Stop 472
tatccacagtgtgtttcagcaatgc

SEQ ID NO: 224192 - DNA, 25 bp, Artificial
  probe
  misc_feature (1)..(25): SEQ ID NO: 1559; WAN024FWT_at; Start 372; Stop 396
tatagttgttctagttgatgacgat

SEQ ID NO: 224193 - DNA, 25 bp, Artificial
  probe
  misc_feature (1)..(25): SEQ ID NO: 1559; WAN024FWT_at; Start 613; Stop 637
cgcaatgaggatctttttaataaaa

SEQ ID NO: 224194 - DNA, 25 bp, Artificial
  probe
  misc_feature (1)..(25): SEQ ID NO: 1559; WAN024FWT_at; Start 791; Stop 815
ccgtatatgataacaacaatgataa

SEQ ID NO: 224195 - DNA, 25 bp, Artificial
  probe
  misc_feature (1)..(25): SEQ ID NO: 1559; WAN024FWT_at; Start 403; Stop 427
tatcctcgaaatactataaagaaac

SEQ ID NO: 224196 - DNA, 25 bp, Artificial
  probe
  misc_feature (1)..(25): SEQ ID NO: 1559; WAN024FWT_at; Start 81; Stop 105
aacggttgacatcttgggtgaaaag

SEQ ID NO: 224197 - DNA, 25 bp, Artificial
  probe
  misc_feature (1)..(25): SEQ ID NO: 1559; WAN024FWT_at; Start 256; Stop 280
aatttggagagtattctagaacttg

SEQ ID NO: 224198 - DNA, 25 bp, Artificial
  probe
  misc_feature (1)..(25): SEQ ID NO: 1559; WAN024FWT_at; Start 491; Stop 515
tgttttctgatggaagtttatatcc

SEQ ID NO: 224199 - DNA, 25 bp, Artificial
  probe
  misc_feature (1)..(25): SEQ ID NO: 1559; WAN024FWT_at; Start 756; Stop 780
tgacaatcctgaggagagtttggta

SEQ ID NO: 224200 - DNA, 25 bp, Artificial
  probe
  misc_feature (1)..(25): SEQ ID NO: 1559; WAN024FWT_at; Start 716; Stop 740
taaaagcaacacgatataaagggac

SEQ ID NO: 224201 - DNA, 25 bp, Artificial
  probe
  misc_feature (1)..(25): SEQ ID NO: 1560; WAN024FWU_at; Start 258; Stop 282
tttggagagtatcctagaaactgaa

SEQ ID NO: 224202 - DNA, 25 bp, Artificial
  probe
  misc_feature (1)..(25): SEQ ID NO: 1560; WAN024FWU_at; Start 455; Stop 479
gttgtatttcggcaatgcgatgtca

SEQ ID NO: 224203 - DNA, 25 bp, Artificial
  probe
  misc_feature (1)..(25): SEQ ID NO: 1560; WAN024FWU_at; Start 557; Stop 581
catcttactttaatttctttacagg

SEQ ID NO: 224204 - DNA, 25 bp, Artificial
  probe
  misc_feature (1)..(25): SEQ ID NO: 1560; WAN024FWU_at; Start 811; Stop 835
gataggtgtatcaagaatatggtag

SEQ ID NO: 224205 - DNA, 25 bp, Artificial
  probe
  misc_feature (1)..(25): SEQ ID NO: 1560; WAN024FWU_at; Start 572; Stop 596
tctttacaggttgtggaggagtact

SEQ ID NO: 224206 - DNA, 25 bp, Artificial
  probe
  misc_feature (1)..(25): SEQ ID NO: 1560; WAN024FWU_at; Start 432; Stop 456
tgcttcttacaggaaatacccaagt

SEQ ID NO: 224207 - DNA, 25 bp, Artificial
  probe
  misc_feature (1)..(25): SEQ ID NO: 1560; WAN024FWU_at; Start 590; Stop 614
gagtactttttcctcctactgctcg

SEQ ID NO: 224208 - DNA, 25 bp, Artificial
  probe
  misc_feature (1)..(25): SEQ ID NO: 1560; WAN024FWU_at; Start 475; Stop 499
tgtcatcgaattaaactgcttactg

SEQ ID NO: 224209 - DNA, 25 bp, Artificial
  probe
  misc_feature (1)..(25): SEQ ID NO: 1560; WAN024FWU_at; Start 313; Stop 337
gacgaaaatcttcgctcgcataaaa

SEQ ID NO: 224210 - DNA, 25 bp, Artificial
  probe
  misc_feature (1)..(25): SEQ ID NO: 1560; WAN024FWU_at; Start 762; Stop 786
ccctgaagagagtttggtgtatctg

SEQ ID NO: 224211 - DNA, 25 bp, Artificial
  probe
  misc_feature (1)..(25): SEQ ID NO: 1560; WAN024FWU_at; Start 354; Stop 378
gaaggataatccgaatagtattgta

SEQ ID NO: 224212 - DNA, 25 bp, Artificial
  probe
  misc_feature (1)..(25): SEQ ID NO: 1560; WAN024FWU_at; Start 304; Stop 328
gtctatgtggacgaaaatcttcgct

SEQ ID NO: 224213 - DNA, 25 bp, Artificial
  probe
  misc_feature (1)..(25): SEQ ID NO: 1560; WAN024FWU_at; Start 378; Stop 402
aattttggttgatgatgacactgtc

SEQ ID NO: 224214 - DNA, 25 bp, Artificial
  probe
  misc_feature (1)..(25): SEQ ID NO: 1560; WAN024FWU_at; Start 519; Stop 543
caatgagtgggaatatgaatttttc

SEQ ID NO: 224215 - DNA, 25 bp, Artificial
  probe
  misc_feature (1)..(25): SEQ ID NO: 1560; WAN024FWU_at; Start 647; Stop 671
tgaatctcagttatttagctgatga

SEQ ID NO: 224216 - DNA, 25 bp, Artificial
  probe
  misc_feature (1)..(25): SEQ ID NO: 1560; WAN024FWU_at; Start 604; Stop 628
cctactgctcgaacagatgaatttt

SEQ ID NO: 224217 - DNA, 25 bp, Artificial
  probe
  misc_feature (1)..(25): SEQ ID NO: 1560; WAN024FWU_at; Start 510; Stop 534
ggcaccatacaatgagtgggaatat

SEQ ID NO: 224218 - DNA, 25 bp, Artificial
  probe
  misc_feature (1)..(25): SEQ ID NO: 1560; WAN024FWU_at; Start 776; Stop 800
tggtgtatctgaatgctatatatga

SEQ ID NO: 224219 - DNA, 25 bp, Artificial
  probe
  misc_feature (1)..(25): SEQ ID NO: 1560; WAN024FWU_at; Start 727; Stop 751
cgatgtaagggaacaccattaacta

SEQ ID NO: 224220 - DNA, 25 bp, Artificial
  probe
  misc_feature (1)..(25): SEQ ID NO: 1560; WAN024FWU_at; Start 269; Stop 293
tcctagaaactgaaatcaaaaatgg

SEQ ID NO: 224221 - DNA, 25 bp, Artificial
  probe
  misc_feature (1)..(25): SEQ ID NO: 1560; WAN024FWU_at; Start 322; Stop 346
cttcgctcgcataaaaaatattttt

SEQ ID NO: 224222 - DNA, 25 bp, Artificial
  probe
  misc_feature (1)..(25): SEQ ID NO: 1560; WAN024FWU_at; Start 492; Stop 516
gcttactgatggaagtctggcacca

SEQ ID NO: 224223 - DNA, 25 bp, Artificial
  probe
  misc_feature (1)..(25): SEQ ID NO: 1560; WAN024FWU_at; Start 421; Stop 445
gaaaagttagttgcttcttacagga

SEQ ID NO: 224224 - DNA, 25 bp, Artificial
  probe
  misc_feature (1)..(25): SEQ ID NO: 1560; WAN024FWU_at; Start 821; Stop 845
tcaagaatatggtagatttttatca

SEQ ID NO: 224225 - DNA, 25 bp, Artificial
  probe
  misc_feature (1)..(25): SEQ ID NO: 1560; WAN024FWU_at; Start 756; Stop 780
tgacaaccctgaagagagtttggtg

SEQ ID NO: 224226 - DNA, 25 bp, Artificial
  probe
  misc_feature (1)..(25): SEQ ID NO: 1560; WAN024FWU_at; Start 721; Stop 745
gcaacacgatgtaagggaacaccat

SEQ ID NO: 224227 - DNA, 25 bp, Artificial
  probe
  misc_feature (1)..(25): SEQ ID NO: 1560; WAN024FWU_at; Start 841; Stop 865
tatcatattgatttttcagaggttg

SEQ ID NO: 224228 - DNA, 25 bp, Artificial
  probe
  misc_feature (1)..(25): SEQ ID NO: 1560; WAN024FWU_at; Start 448; Stop 472
tacccaagttgtatttcggcaatgc

SEQ ID NO: 224229 - DNA, 25 bp, Artificial
  probe
  misc_feature (1)..(25): SEQ ID NO: 1560; WAN024FWU_at; Start 394; Stop 418
gacactgtctattcatcgaatacca

SEQ ID NO: 224230 - DNA, 25 bp, Artificial
  probe
  misc_feature (1)..(25): SEQ ID NO: 1560; WAN024FWU_at; Start 541; Stop 565
ttcggtgatattaaaccatcttact

SEQ ID NO: 224231 - DNA, 25 bp, Artificial
  probe
  misc_feature (1)..(25): SEQ ID NO: 1560; WAN024FWU_at; Start 410; Stop 434
cgaataccatcgaaaagttagttgc

SEQ ID NO: 224232 - DNA, 25 bp, Artificial
  probe
  misc_feature (1)..(25): SEQ ID NO: 1560; WAN024FWU_at; Start 503; Stop 527
gaagtctggcaccatacaatgagtg

SEQ ID NO: 224233 - DNA, 25 bp, Artificial
  probe
  misc_feature (1)..(25): SEQ ID NO: 1560; WAN024FWU_at; Start 486; Stop 510
taaactgcttactgatggaagtctg

SEQ ID NO: 224234 - DNA, 25 bp, Artificial
  probe
  misc_feature (1)..(25): SEQ ID NO: 1560; WAN024FWU_at; Start 716; Stop 740
taaaagcaacacgatgtaagggaac

SEQ ID NO: 224235 - DNA, 25 bp, Artificial
  probe
  misc_feature (1)..(25): SEQ ID NO: 4127; WAN024FWV_at; Start 54; Stop 78
taaaaaatacgacagtaatacacag

SEQ ID NO: 224236 - DNA, 25 bp, Artificial
  probe
  misc_feature (1)..(25): SEQ ID NO: 4127; WAN024FWV_at; Start 22; Stop 46
gttgccattgatccaactgtaaaaa

SEQ ID NO: 224237 - DNA, 25 bp, Artificial
  probe
  misc_feature (1)..(25): SEQ ID NO: 4127; WAN024FWV_at; Start 6; Stop 30
gagtagggtaaatatagttgccatt

SEQ ID NO: 224238 - DNA, 25 bp, Artificial
  probe
  misc_feature (1)..(25): SEQ ID NO: 4127; WAN024FWV_at; Start 12; Stop 36
ggtaaatatagttgccattgatcca

SEQ ID NO: 224239 - DNA, 25 bp, Artificial
  probe
  misc_feature (1)..(25): SEQ ID NO: 4127; WAN024FWV_at; Start 23; Stop 47
ttgccattgatccaactgtaaaaaa

SEQ ID NO: 224240 - DNA, 25 bp, Artificial
  probe
  misc_feature (1)..(25): SEQ ID NO: 4127; WAN024FWV_at; Start 61; Stop 85
tacgacagtaatacacagattatat

SEQ ID NO: 224241 - DNA, 25 bp, Artificial
  probe
  misc_feature (1)..(25): SEQ ID NO: 4127; WAN024FWV_at; Start 110; Stop 134
taatttattctttcctcattcataa

SEQ ID NO: 224242 - DNA, 25 bp, Artificial
  probe
  misc_feature (1)..(25): SEQ ID NO: 4127; WAN024FWV_at; Start 8; Stop 32
gtagggtaaatatagttgccattga

SEQ ID NO: 224243 - DNA, 25 bp, Artificial
  probe
  misc_feature (1)..(25): SEQ ID NO: 4127; WAN024FWV_at; Start 5; Stop 29
agagtagggtaaatatagttgccat

SEQ ID NO: 224244 - DNA, 25 bp, Artificial
  probe
  misc_feature (1)..(25): SEQ ID NO: 4127; WAN024FWV_at; Start 9; Stop 33
tagggtaaatatagttgccattgat

SEQ ID NO: 224245 - DNA, 25 bp, Artificial
  probe
  misc_feature (1)..(25): SEQ ID NO: 4127; WAN024FWV_at; Start 17; Stop 41
atatagttgccattgatccaactgt

SEQ ID NO: 224246 - DNA, 25 bp, Artificial
  probe
  misc_feature (1)..(25): SEQ ID NO: 4127; WAN024FWV_at; Start 28; Stop 52
attgatccaactgtaaaaaaactag

SEQ ID NO: 224247 - DNA, 25 bp, Artificial
  probe
  misc_feature (1)..(25): SEQ ID NO: 4127; WAN024FWV_at; Start 21; Stop 45
agttgccattgatccaactgtaaaa

SEQ ID NO: 224248 - DNA, 25 bp, Artificial
  probe
  misc_feature (1)..(25): SEQ ID NO: 4127; WAN024FWV_at; Start 7; Stop 31
agtagggtaaatatagttgccattg

SEQ ID NO: 224249 - DNA, 25 bp, Artificial
  probe
  misc_feature (1)..(25): SEQ ID NO: 4127; WAN024FWV_at; Start 20; Stop 44
tagttgccattgatccaactgtaaa

SEQ ID NO: 224250 - DNA, 25 bp, Artificial
  probe
  misc_feature (1)..(25): SEQ ID NO: 4127; WAN024FWV_at; Start 63; Stop 87
cgacagtaatacacagattatatat

SEQ ID NO: 224251 - DNA, 25 bp, Artificial
  probe
  misc_feature (1)..(25): SEQ ID NO: 4127; WAN024FWV_at; Start 15; Stop 39
aaatatagttgccattgatccaact

SEQ ID NO: 224252 - DNA, 25 bp, Artificial
  probe
  misc_feature (1)..(25): SEQ ID NO: 4127; WAN024FWV_at; Start 16; Stop 40
aatatagttgccattgatccaactg

SEQ ID NO: 224253 - DNA, 25 bp, Artificial
  probe
  misc_feature (1)..(25): SEQ ID NO: 4127; WAN024FWV_at; Start 59; Stop 83
aatacgacagtaatacacagattat

SEQ ID NO: 224254 - DNA, 25 bp, Artificial
  probe
  misc_feature (1)..(25): SEQ ID NO: 4127; WAN024FWV_at; Start 102; Stop 126
catcaatctaatttattctttcctc

SEQ ID NO: 224255 - DNA, 25 bp, Artificial
  probe
  misc_feature (1)..(25): SEQ ID NO: 4127; WAN024FWV_at; Start 56; Stop 80
aaaaatacgacagtaatacacagat

SEQ ID NO: 224256 - DNA, 25 bp, Artificial
  probe
  misc_feature (1)..(25): SEQ ID NO: 4127; WAN024FWV_at; Start 66; Stop 90
cagtaatacacagattatatatatt

SEQ ID NO: 224257 - DNA, 25 bp, Artificial
  probe
  misc_feature (1)..(25): SEQ ID NO: 4127; WAN024FWV_at; Start 55; Stop 79
aaaaaatacgacagtaatacacaga

SEQ ID NO: 224258 - DNA, 25 bp, Artificial
  probe
  misc_feature (1)..(25): SEQ ID NO: 4127; WAN024FWV_at; Start 57; Stop 81
aaaatacgacagtaatacacagatt

SEQ ID NO: 224259 - DNA, 25 bp, Artificial
  probe
  misc_feature (1)..(25): SEQ ID NO: 4127; WAN024FWV_at; Start 4; Stop 28
gagagtagggtaaatatagttgcca

SEQ ID NO: 224260 - DNA, 25 bp, Artificial
  probe
  misc_feature (1)..(25): SEQ ID NO: 4127; WAN024FWV_at; Start 3; Stop 27
ggagagtagggtaaatatagttgcc

SEQ ID NO: 224261 - DNA, 25 bp, Artificial
  probe
  misc_feature (1)..(25): SEQ ID NO: 4127; WAN024FWV_at; Start 25; Stop 49
gccattgatccaactgtaaaaaaac

SEQ ID NO: 224262 - DNA, 25 bp, Artificial
  probe
  misc_feature (1)..(25): SEQ ID NO: 4127; WAN024FWV_at; Start 10; Stop 34
agggtaaatatagttgccattgatc

SEQ ID NO: 224263 - DNA, 25 bp, Artificial
  probe
  misc_feature (1)..(25): SEQ ID NO: 4127; WAN024FWV_at; Start 11; Stop 35
gggtaaatatagttgccattgatcc

SEQ ID NO: 224264 - DNA, 25 bp, Artificial
  probe
  misc_feature (1)..(25): SEQ ID NO: 4127; WAN024FWV_at; Start 19; Stop 43
atagttgccattgatccaactgtaa

SEQ ID NO: 224265 - DNA, 25 bp, Artificial
  probe
  misc_feature (1)..(25): SEQ ID NO: 4127; WAN024FWV_at; Start 64; Stop 88
gacagtaatacacagattatatata

SEQ ID NO: 224266 - DNA, 25 bp, Artificial
  probe
  misc_feature (1)..(25): SEQ ID NO: 4127; WAN024FWV_at; Start 2; Stop 26
tggagagtagggtaaatatagttgc

SEQ ID NO: 224267 - DNA, 25 bp, Artificial
  probe
  misc_feature (1)..(25): SEQ ID NO: 4127; WAN024FWV_at; Start 18; Stop 42
tatagttgccattgatccaactgta

SEQ ID NO: 224268 - DNA, 25 bp, Artificial
  probe
  misc_feature (1)..(25): SEQ ID NO: 4127; WAN024FWV_at; Start 13; Stop 37
gtaaatatagttgccattgatccaa

SEQ ID NO: 224269 - DNA, 25 bp, Artificial
  probe
  misc_feature (1)..(25): SEQ ID NO: 5219; WAN024FWW_at; Start 940; Stop 964
ccaggtgttttatttatagtgcttc

SEQ ID NO: 224270 - DNA, 25 bp, Artificial
  probe
  misc_feature (1)..(25): SEQ ID NO: 5219; WAN024FWW_at; Start 132; Stop 156
tgattatattcccaaagttctttta

SEQ ID NO: 224271 - DNA, 25 bp, Artificial
  probe
  misc_feature (1)..(25): SEQ ID NO: 5219; WAN024FWW_at; Start 1074; Stop 1098
gctgctaattattgttctttgtgta

SEQ ID NO: 224272 - DNA, 25 bp, Artificial
  probe
  misc_feature (1)..(25): SEQ ID NO: 5219; WAN024FWW_at; Start 1089; Stop 1113
tctttgtgtatattggccacgtgga

SEQ ID NO: 224273 - DNA, 25 bp, Artificial
  probe
  misc_feature (1)..(25): SEQ ID NO: 5219; WAN024FWW_at; Start 670; Stop 694
tctttagtcagtatggctgtatatg

SEQ ID NO: 224274 - DNA, 25 bp, Artificial
  probe
  misc_feature (1)..(25): SEQ ID NO: 5219; WAN024FWW_at; Start 1053; Stop 1077
gacttcatctatgagcatattgctg

SEQ ID NO: 224275 - DNA, 25 bp, Artificial
  probe
  misc_feature (1)..(25): SEQ ID NO: 5219; WAN024FWW_at; Start 683; Stop 707
tggctgtatatgtttgtttttctct

SEQ ID NO: 224276 - DNA, 25 bp, Artificial
  probe
  misc_feature (1)..(25): SEQ ID NO: 5219; WAN024FWW_at; Start 1002; Stop 1026
aaaaacactgttggctatgttagcc

SEQ ID NO: 224277 - DNA, 25 bp, Artificial
  probe
  misc_feature (1)..(25): SEQ ID NO: 5219; WAN024FWW_at; Start 160; Stop 184
cataaagtaacactgattgatattc

SEQ ID NO: 224278 - DNA, 25 bp, Artificial
  probe
  misc_feature (1)..(25): SEQ ID NO: 5219; WAN024FWW_at; Start 399; Stop 423
cggtttcgattctttgcaccctaca

SEQ ID NO: 224279 - DNA, 25 bp, Artificial
  probe
  misc_feature (1)..(25): SEQ ID NO: 5219; WAN024FWW_at; Start 455; Stop 479
agaacatagctaccccgtatatcat

SEQ ID NO: 224280 - DNA, 25 bp, Artificial
  probe
  misc_feature (1)..(25): SEQ ID NO: 5219; WAN024FWW_at; Start 886; Stop 910
gttaattcagcacacaataccttat

SEQ ID NO: 224281 - DNA, 25 bp, Artificial
  probe
  misc_feature (1)..(25): SEQ ID NO: 5219; WAN024FWW_at; Start 960; Stop 984
gcttcttatgaatctgtttcttgga

SEQ ID NO: 224282 - DNA, 25 bp, Artificial
  probe
  misc_feature (1)..(25): SEQ ID NO: 5219; WAN024FWW_at; Start 891; Stop 915
ttcagcacacaataccttattagat

SEQ ID NO: 224283 - DNA, 25 bp, Artificial
  probe
  misc_feature (1)..(25): SEQ ID NO: 5219; WAN024FWW_at; Start 852; Stop 876
cgttaattttaatgcttggacaaat

SEQ ID NO: 224284 - DNA, 25 bp, Artificial
  probe
  misc_feature (1)..(25): SEQ ID NO: 5219; WAN024FWW_at; Start 170; Stop 194
cactgattgatattctagttgttct

SEQ ID NO: 224285 - DNA, 25 bp, Artificial
  probe
  misc_feature (1)..(25): SEQ ID NO: 5219; WAN024FWW_at; Start 94; Stop 118
gctttgctttctactttagttaagc

SEQ ID NO: 224286 - DNA, 25 bp, Artificial
  probe
  misc_feature (1)..(25): SEQ ID NO: 5219; WAN024FWW_at; Start 82; Stop 106
gcgactttatttgctttgctttcta

SEQ ID NO: 224287 - DNA, 25 bp, Artificial
  probe
  misc_feature (1)..(25): SEQ ID NO: 5219; WAN024FWW_at; Start 218; Stop 242
cagcttttcaaagccaaacgttgta

SEQ ID NO: 224288 - DNA, 25 bp, Artificial
  probe
  misc_feature (1)..(25): SEQ ID NO: 5219; WAN024FWW_at; Start 1035; Stop 1059
gatttatattacaatggagacttca

SEQ ID NO: 224289 - DNA, 25 bp, Artificial
  probe
  misc_feature (1)..(25): SEQ ID NO: 5219; WAN024FWW_at; Start 1097; Stop 1121
tatattggccacgtggagaggagaa

SEQ ID NO: 224290 - DNA, 25 bp, Artificial
  probe
  misc_feature (1)..(25): SEQ ID NO: 5219; WAN024FWW_at; Start 76; Stop 100
tcaatggcgactttatttgctttgc

SEQ ID NO: 224291 - DNA, 25 bp, Artificial
  probe
  misc_feature (1)..(25): SEQ ID NO: 5219; WAN024FWW_at; Start 992; Stop 1016
gaatagaatcaaaaacactgttggc

SEQ ID NO: 224292 - DNA, 25 bp, Artificial
  probe
  misc_feature (1)..(25): SEQ ID NO: 5219; WAN024FWW_at; Start 208; Stop 232
caagcatttgcagcttttcaaagcc

SEQ ID NO: 224293 - DNA, 25 bp, Artificial
  probe
  misc_feature (1)..(25): SEQ ID NO: 5219; WAN024FWW_at; Start 197; Stop 221
ttttattttttcaagcatttgcagc

SEQ ID NO: 224294 - DNA, 25 bp, Artificial
  probe
  misc_feature (1)..(25): SEQ ID NO: 5219; WAN024FWW_at; Start 819; Stop 843
tgaagagaatttttggtttggacga

SEQ ID NO: 224295 - DNA, 25 bp, Artificial
  probe
  misc_feature (1)..(25): SEQ ID NO: 5219; WAN024FWW_at; Start 612; Stop 636
tgggctttttattttcatacgtcta

SEQ ID NO: 224296 - DNA, 25 bp, Artificial
  probe
  misc_feature (1)..(25): SEQ ID NO: 5219; WAN024FWW_at; Start 1108; Stop 1132
cgtggagaggagaagttgcatgagc

SEQ ID NO: 224297 - DNA, 25 bp, Artificial
  probe
  misc_feature (1)..(25): SEQ ID NO: 5219; WAN024FWW_at; Start 449; Stop 473
gaagaaagaacatagctaccccgta

SEQ ID NO: 224298 - DNA, 25 bp, Artificial
  probe
  misc_feature (1)..(25): SEQ ID NO: 5219; WAN024FWW_at; Start 1014; Stop 1038
ggctatgttagcctcatttatgatt

SEQ ID NO: 224299 - DNA, 25 bp, Artificial
  probe
  misc_feature (1)..(25): SEQ ID NO: 5219; WAN024FWW_at; Start 1044; Stop 1068
tacaatggagacttcatctatgagc

SEQ ID NO: 224300 - DNA, 25 bp, Artificial
  probe
  misc_feature (1)..(25): SEQ ID NO: 5219; WAN024FWW_at; Start 627; Stop 651
catacgtctattgggattaaaggaa

SEQ ID NO: 224301 - DNA, 25 bp, Artificial
  probe
  misc_feature (1)..(25): SEQ ID NO: 5219; WAN024FWW_at; Start 393; Stop 417
tccggtcggtttcgattctttgcac

SEQ ID NO: 224302 - DNA, 25 bp, Artificial
  probe
  misc_feature (1)..(25): SEQ ID NO: 5219; WAN024FWW_at; Start 1060; Stop 1084
tctatgagcatattgctgctaatta

SEQ ID NO: 224303 - DNA, 25 bp, Artificial
  probe
  misc_feature (1)..(25): SEQ ID NO: 1668; WAN024FWX_at; Start 396; Stop 420
tggtttcgactctttgtaccctaca

SEQ ID NO: 224304 - DNA, 25 bp, Artificial
  probe
  misc_feature (1)..(25): SEQ ID NO: 1668; WAN024FWX_at; Start 218; Stop 242
gggttcaaagtcagacagtgaatct

SEQ ID NO: 224305 - DNA, 25 bp, Artificial
  probe
  misc_feature (1)..(25): SEQ ID NO: 1668; WAN024FWX_at; Start 1025; Stop 1049
cattcatggtttatattacgatgga

SEQ ID NO: 224306 - DNA, 25 bp, Artificial
  probe
  misc_feature (1)..(25): SEQ ID NO: 1668; WAN024FWX_at; Start 159; Stop 183
taaggtaacgctgattgacattttg

SEQ ID NO: 224307 - DNA, 25 bp, Artificial
  probe
  misc_feature (1)..(25): SEQ ID NO: 1668; WAN024FWX_at; Start 835; Stop 859
ggaaaaggacttaatattgatttca

SEQ ID NO: 224308 - DNA, 25 bp, Artificial
  probe
  misc_feature (1)..(25): SEQ ID NO: 1668; WAN024FWX_at; Start 233; Stop 257
cagtgaatcttaactatattggagg

SEQ ID NO: 224309 - DNA, 25 bp, Artificial
  probe
  misc_feature (1)..(25): SEQ ID NO: 1668; WAN024FWX_at; Start 1105; Stop 1129
tttggagaggagaagttatatgagc

SEQ ID NO: 224310 - DNA, 25 bp, Artificial
  probe
  misc_feature (1)..(25): SEQ ID NO: 1668; WAN024FWX_at; Start 84; Stop 108
tatatttaccctactctccacagta

SEQ ID NO: 224311 - DNA, 25 bp, Artificial
  probe
  misc_feature (1)..(25): SEQ ID NO: 1668; WAN024FWX_at; Start 1094; Stop 1118
tgtattggtcttttggagaggagaa

SEQ ID NO: 224312 - DNA, 25 bp, Artificial
  probe
  misc_feature (1)..(25): SEQ ID NO: 1668; WAN024FWX_at; Start 113; Stop 137
ggctattcgtaactatatatcatgt

SEQ ID NO: 224313 - DNA, 25 bp, Artificial
  probe
  misc_feature (1)..(25): SEQ ID NO: 1668; WAN024FWX_at; Start 947; Stop 971
tatttgtagtggttcttctaagtct

SEQ ID NO: 224314 - DNA, 25 bp, Artificial
  probe
  misc_feature (1)..(25): SEQ ID NO: 1668; WAN024FWX_at; Start 667; Stop 691
tctttagtcagtataactgtgtata

SEQ ID NO: 224315 - DNA, 25 bp, Artificial
  probe
  misc_feature (1)..(25): SEQ ID NO: 1668; WAN024FWX_at; Start 883; Stop 907
gttaactccgcacacaataccttac

SEQ ID NO: 224316 - DNA, 25 bp, Artificial
  probe
  misc_feature (1)..(25): SEQ ID NO: 1668; WAN024FWX_at; Start 167; Stop 191
cgctgattgacattttggttgttct

SEQ ID NO: 224317 - DNA, 25 bp, Artificial
  probe
  misc_feature (1)..(25): SEQ ID NO: 1668; WAN024FWX_at; Start 132; Stop 156
tcatgttcctaaagttttttcacag

SEQ ID NO: 224318 - DNA, 25 bp, Artificial
  probe
  misc_feature (1)..(25): SEQ ID NO: 1668; WAN024FWX_at; Start 985; Stop 1009
tatagagtaaaatcaaaaacgctac

SEQ ID NO: 224319 - DNA, 25 bp, Artificial
  probe
  misc_feature (1)..(25): SEQ ID NO: 1668; WAN024FWX_at; Start 61; Stop 85
tttacagttggatcaatggcaacta

SEQ ID NO: 224320 - DNA, 25 bp, Artificial
  probe
  misc_feature (1)..(25): SEQ ID NO: 1668; WAN024FWX_at; Start 1050; Stop 1074
ggctacatctgtaagtattcttcta

SEQ ID NO: 224321 - DNA, 25 bp, Artificial
  probe
  misc_feature (1)..(25): SEQ ID NO: 1668; WAN024FWX_at; Start 98; Stop 122
tctccacagtaattaggctattcgt

SEQ ID NO: 224322 - DNA, 25 bp, Artificial
  probe
  misc_feature (1)..(25): SEQ ID NO: 1668; WAN024FWX_at; Start 147; Stop 171
tttttcacagtataaggtaacgctg

SEQ ID NO: 224323 - DNA, 25 bp, Artificial
  probe
  misc_feature (1)..(25): SEQ ID NO: 1668; WAN024FWX_at; Start 243; Stop 267
taactatattggaggacagtttttc

SEQ ID NO: 224324 - DNA, 25 bp, Artificial
  probe
  misc_feature (1)..(25): SEQ ID NO: 1668; WAN024FWX_at; Start 888; Stop 912
ctccgcacacaataccttactagat

SEQ ID NO: 224325 - DNA, 25 bp, Artificial
  probe
  misc_feature (1)..(25): SEQ ID NO: 1668; WAN024FWX_at; Start 1079; Stop 1103
taattgctatttgtgtgtattggtc

SEQ ID NO: 224326 - DNA, 25 bp, Artificial
  probe
  misc_feature (1)..(25): SEQ ID NO: 1668; WAN024FWX_at; Start 70; Stop 94
ggatcaatggcaactatatttaccc

SEQ ID NO: 224327 - DNA, 25 bp, Artificial
  probe
  misc_feature (1)..(25): SEQ ID NO: 1668; WAN024FWX_at; Start 624; Stop 648
tatgcgtatgttaggtttaaaggaa

SEQ ID NO: 224328 - DNA, 25 bp, Artificial
  probe
  misc_feature (1)..(25): SEQ ID NO: 1668; WAN024FWX_at; Start 1041; Stop 1065
tacgatggaggctacatctgtaagt

SEQ ID NO: 224329 - DNA, 25 bp, Artificial
  probe
  misc_feature (1)..(25): SEQ ID NO: 1668; WAN024FWX_at; Start 446; Stop 470
gaagaaaaaacatagccaccccata

SEQ ID NO: 224330 - DNA, 25 bp, Artificial
  probe
  misc_feature (1)..(25): SEQ ID NO: 1668; WAN024FWX_at; Start 452; Stop 476
aaaacatagccaccccatatatcat

SEQ ID NO: 224331 - DNA, 25 bp, Artificial
  probe
  misc_feature (1)..(25): SEQ ID NO: 1668; WAN024FWX_at; Start 957; Stop 981
ggttcttctaagtctatttcttgga

SEQ ID NO: 224332 - DNA, 25 bp, Artificial
  probe
  misc_feature (1)..(25): SEQ ID NO: 1668; WAN024FWX_at; Start 849; Stop 873
tattgatttcaatgcttggacaaat

SEQ ID NO: 224333 - DNA, 25 bp, Artificial
  probe
  misc_feature (1)..(25): SEQ ID NO: 1668; WAN024FWX_at; Start 1009; Stop 1033
ctgacaatgttgatttcattcatgg

SEQ ID NO: 224334 - DNA, 25 bp, Artificial
  probe
  misc_feature (1)..(25): SEQ ID NO: 1668; WAN024FWX_at; Start 998; Stop 1022
caaaaacgctactgacaatgttgat

SEQ ID NO: 224335 - DNA, 25 bp, Artificial
  probe
  misc_feature (1)..(25): SEQ ID NO: 1668; WAN024FWX_at; Start 1032; Stop 1056
ggtttatattacgatggaggctaca

SEQ ID NO: 224336 - DNA, 25 bp, Artificial
  probe
  misc_feature (1)..(25): SEQ ID NO: 1668; WAN024FWX_at; Start 916; Stop 940
cttgctcgaacgggtatatttccgg

SEQ ID NO: 224337 - DNA, 25 bp, Artificial
  probe
  misc_feature (1)..(25): SEQ ID NO: 7193; WAN024FWY_at; Start 160; Stop 184
cgtattgatttgactctctgcccca

SEQ ID NO: 224338 - DNA, 25 bp, Artificial
  probe
  misc_feature (1)..(25): SEQ ID NO: 7193; WAN024FWY_at; Start 309; Stop 333
gaattttgtaaaatcctgcaatgaa

SEQ ID NO: 224339 - DNA, 25 bp, Artificial
  probe
  misc_feature (1)..(25): SEQ ID NO: 7193; WAN024FWY_at; Start 545; Stop 569
tacttgatttctccagtttagacaa

SEQ ID NO: 224340 - DNA, 25 bp, Artificial
  probe
  misc_feature (1)..(25): SEQ ID NO: 7193; WAN024FWY_at; Start 293; Stop 317
gcccagctactgaaacgaattttgt

SEQ ID NO: 224341 - DNA, 25 bp, Artificial
  probe
  misc_feature (1)..(25): SEQ ID NO: 7193; WAN024FWY_at; Start 437; Stop 461
taatggcttggcaagtggtaagtga

SEQ ID NO: 224342 - DNA, 25 bp, Artificial
  probe
  misc_feature (1)..(25): SEQ ID NO: 7193; WAN024FWY_at; Start 84; Stop 108
cggagaacgaattatagagcaagag

SEQ ID NO: 224343 - DNA, 25 bp, Artificial
  probe
  misc_feature (1)..(25): SEQ ID NO: 7193; WAN024FWY_at; Start 360; Stop 384
taaaggaatctgtcgtaagcaagtc

SEQ ID NO: 224344 - DNA, 25 bp, Artificial
  probe
  misc_feature (1)..(25): SEQ ID NO: 7193; WAN024FWY_at; Start 70; Stop 94
tggttggcctatttcggagaacgaa

SEQ ID NO: 224345 - DNA, 25 bp, Artificial
  probe
  misc_feature (1)..(25): SEQ ID NO: 7193; WAN024FWY_at; Start 615; Stop 639
agctcaatctcttgctcaaaagctg

SEQ ID NO: 224346 - DNA, 25 bp, Artificial
  probe
  misc_feature (1)..(25): SEQ ID NO: 7193; WAN024FWY_at; Start 582; Stop 606
tttgtttgccacgatgcaacttttc

SEQ ID NO: 224347 - DNA, 25 bp, Artificial
  probe
  misc_feature (1)..(25): SEQ ID NO: 7193; WAN024FWY_at; Start 58; Stop 82
agtgacctttcttggttggcctatt

SEQ ID NO: 224348 - DNA, 25 bp, Artificial
  probe
  misc_feature (1)..(25): SEQ ID NO: 7193; WAN024FWY_at; Start 386; Stop 410
tctacgcgacttaccatctctacgg

SEQ ID NO: 224349 - DNA, 25 bp, Artificial
  probe
  misc_feature (1)..(25): SEQ ID NO: 7193; WAN024FWY_at; Start 644; Stop 668
tttactacgataaggaagtggcgga

SEQ ID NO: 224350 - DNA, 25 bp, Artificial
  probe
  misc_feature (1)..(25): SEQ ID NO: 7193; WAN024FWY_at; Start 467; Stop 491
gaaaagttgacatcggtaagaacta

SEQ ID NO: 224351 - DNA, 25 bp, Artificial
  probe
  misc_feature (1)..(25): SEQ ID NO: 7193; WAN024FWY_at; Start 255; Stop 279
tgaaccctattctcaaaatctagag

SEQ ID NO: 224352 - DNA, 25 bp, Artificial
  probe
  misc_feature (1)..(25): SEQ ID NO: 7193; WAN024FWY_at; Start 91; Stop 115
cgaattatagagcaagaggttgttc

SEQ ID NO: 224353 - DNA, 25 bp, Artificial
  probe
  misc_feature (1)..(25): SEQ ID NO: 7193; WAN024FWY_at; Start 273; Stop 297
tctagagcgttactggacaagccca

SEQ ID NO: 224354 - DNA, 25 bp, Artificial
  probe
  misc_feature (1)..(25): SEQ ID NO: 7193; WAN024FWY_at; Start 178; Stop 202
tgccccaaaaaccacatccaagagt

SEQ ID NO: 224355 - DNA, 25 bp, Artificial
  probe
  misc_feature (1)..(25): SEQ ID NO: 7193; WAN024FWY_at; Start 477; Stop 501
catcggtaagaactacaagtatctc

SEQ ID NO: 224356 - DNA, 25 bp, Artificial
  probe
  misc_feature (1)..(25): SEQ ID NO: 7193; WAN024FWY_at; Start 372; Stop 396
tcgtaagcaagtcatctacgcgact

SEQ ID NO: 224357 - DNA, 25 bp, Artificial
  probe
  misc_feature (1)..(25): SEQ ID NO: 7193; WAN024FWY_at; Start 333; Stop 357
attttggtgggtatcggcctacgtg

SEQ ID NO: 224358 - DNA, 25 bp, Artificial
  probe
  misc_feature (1)..(25): SEQ ID NO: 7193; WAN024FWY_at; Start 187; Stop 211
aaccacatccaagagtgggtggata

SEQ ID NO: 224359 - DNA, 25 bp, Artificial
  probe
  misc_feature (1)..(25): SEQ ID NO: 7193; WAN024FWY_at; Start 401; Stop 425
atctctacggtatttgccaacaagc

SEQ ID NO: 224360 - DNA, 25 bp, Artificial
  probe
  misc_feature (1)..(25): SEQ ID NO: 7193; WAN024FWY_at; Start 347; Stop 371
cggcctacgtggttaaaggaatctg

SEQ ID NO: 224361 - DNA, 25 bp, Artificial
  probe
  misc_feature (1)..(25): SEQ ID NO: 7193; WAN024FWY_at; Start 267; Stop 291
tcaaaatctagagcgttactggaca

SEQ ID NO: 224362 - DNA, 25 bp, Artificial
  probe
  misc_feature (1)..(25): SEQ ID NO: 7193; WAN024FWY_at; Start 238; Stop 262
gatccagaacatttatttgaaccct

SEQ ID NO: 224363 - DNA, 25 bp, Artificial
  probe
  misc_feature (1)..(25): SEQ ID NO: 7193; WAN024FWY_at; Start 602; Stop 626
ttttccacaaagaagctcaatctct

SEQ ID NO: 224364 - DNA, 25 bp, Artificial
  probe
  misc_feature (1)..(25): SEQ ID NO: 7193; WAN024FWY_at; Start 226; Stop 250
actgttttagaagatccagaacatt

SEQ ID NO: 224365 - DNA, 25 bp, Artificial
  probe
  misc_feature (1)..(25): SEQ ID NO: 7193; WAN024FWY_at; Start 554; Stop 578
tctccagtttagacaaaatcactca

SEQ ID NO: 224366 - DNA, 25 bp, Artificial
  probe
  misc_feature (1)..(25): SEQ ID NO: 7193; WAN024FWY_at; Start 514; Stop 538
cctgctgagaaagaaaagaagttct

SEQ ID NO: 224367 - DNA, 25 bp, Artificial
  probe
  misc_feature (1)..(25): SEQ ID NO: 7193; WAN024FWY_at; Start 409; Stop 433
ggtatttgccaacaagcactcttga

SEQ ID NO: 224368 - DNA, 25 bp, Artificial
  probe
  misc_feature (1)..(25): SEQ ID NO: 7193; WAN024FWY_at; Start 570; Stop 594
aatcactcattctttgtttgccacg

SEQ ID NO: 224369 - DNA, 25 bp, Artificial
  probe
  misc_feature (1)..(25): SEQ ID NO: 7193; WAN024FWY_at; Start 425; Stop 449
cactcttgaaggtaatggcttggca

SEQ ID NO: 224370 - DNA, 25 bp, Artificial
  probe
  misc_feature (1)..(25): SEQ ID NO: 7193; WAN024FWY_at; Start 286; Stop 310
tggacaagcccagctactgaaacga

SEQ ID NO: 224371 - DNA, 25 bp, Artificial
  probe
  misc_feature (1)..(25): SEQ ID NO: 3637; WAN024FWZ_at; Start 190; Stop 214
cacattcaagaatgggtggacagtg

SEQ ID NO: 224372 - DNA, 25 bp, Artificial
  probe
  misc_feature (1)..(25): SEQ ID NO: 3637; WAN024FWZ_at; Start 82; Stop 106
tttggcaaacgcctgattgaacagc

SEQ ID NO: 224373 - DNA, 25 bp, Artificial
  probe
  misc_feature (1)..(25): SEQ ID NO: 3637; WAN024FWZ_at; Start 477; Stop 501
cgtcggcaagaattataagcatctt

SEQ ID NO: 224374 - DNA, 25 bp, Artificial
  probe
  misc_feature (1)..(25): SEQ ID NO: 3637; WAN024FWZ_at; Start 78; Stop 102
tcagtttggcaaacgcctgattgaa

SEQ ID NO: 224375 - DNA, 25 bp, Artificial
  probe
  misc_feature (1)..(25): SEQ ID NO: 3637; WAN024FWZ_at; Start 160; Stop 184
cgtatcgatttgactctttgtccta

SEQ ID NO: 224376 - DNA, 25 bp, Artificial
  probe
  misc_feature (1)..(25): SEQ ID NO: 3637; WAN024FWZ_at; Start 96; Stop 120
gattgaacagcatgtccagcttgac

SEQ ID NO: 224377 - DNA, 25 bp, Artificial
  probe
  misc_feature (1)..(25): SEQ ID NO: 3637; WAN024FWZ_at; Start 519; Stop 543
tgagcaaaagaaggaattctcagat

SEQ ID NO: 224378 - DNA, 25 bp, Artificial
  probe
  misc_feature (1)..(25): SEQ ID NO: 3637; WAN024FWZ_at; Start 514; Stop 538
cctgctgagcaaaagaaggaattct

SEQ ID NO: 224379 - DNA, 25 bp, Artificial
  probe
  misc_feature (1)..(25): SEQ ID NO: 3637; WAN024FWZ_at; Start 480; Stop 504
cggcaagaattataagcatcttttt

SEQ ID NO: 224380 - DNA, 25 bp, Artificial
  probe
  misc_feature (1)..(25): SEQ ID NO: 3637; WAN024FWZ_at; Start 299; Stop 323
ctactgagacagattttaaaaattc

SEQ ID NO: 224381 - DNA, 25 bp, Artificial
  probe
  misc_feature (1)..(25): SEQ ID NO: 3637; WAN024FWZ_at; Start 72; Stop 96
gctagatcagtttggcaaacgcctg

SEQ ID NO: 224382 - DNA, 25 bp, Artificial
  probe
  misc_feature (1)..(25): SEQ ID NO: 3637; WAN024FWZ_at; Start 292; Stop 316
catccagctactgagacagatttta

SEQ ID NO: 224383 - DNA, 25 bp, Artificial
  probe
  misc_feature (1)..(25): SEQ ID NO: 3637; WAN024FWZ_at; Start 153; Stop 177
tggcaatcgtatcgatttgactctt

SEQ ID NO: 224384 - DNA, 25 bp, Artificial
  probe
  misc_feature (1)..(25): SEQ ID NO: 3637; WAN024FWZ_at; Start 187; Stop 211
gaacacattcaagaatgggtggaca

SEQ ID NO: 224385 - DNA, 25 bp, Artificial
  probe
  misc_feature (1)..(25): SEQ ID NO: 3637; WAN024FWZ_at; Start 516; Stop 540
tgctgagcaaaagaaggaattctca

SEQ ID NO: 224386 - DNA, 25 bp, Artificial
  probe
  misc_feature (1)..(25): SEQ ID NO: 3637; WAN024FWZ_at; Start 475; Stop 499
gacgtcggcaagaattataagcatc

SEQ ID NO: 224387 - DNA, 25 bp, Artificial
  probe
  misc_feature (1)..(25): SEQ ID NO: 3637; WAN024FWZ_at; Start 92; Stop 116
gcctgattgaacagcatgtccagct

SEQ ID NO: 224388 - DNA, 25 bp, Artificial
  probe
  misc_feature (1)..(25): SEQ ID NO: 3637; WAN024FWZ_at; Start 171; Stop 195
gactctttgtcctaaagaacacatt

SEQ ID NO: 224389 - DNA, 25 bp, Artificial
  probe
  misc_feature (1)..(25): SEQ ID NO: 3637; WAN024FWZ_at; Start 490; Stop 514
tataagcatctttttaactatttac

SEQ ID NO: 224390 - DNA, 25 bp, Artificial
  probe
  misc_feature (1)..(25): SEQ ID NO: 3637; WAN024FWZ_at; Start 105; Stop 129
gcatgtccagcttgaccatcgtcgt

SEQ ID NO: 224391 - DNA, 25 bp, Artificial
  probe
  misc_feature (1)..(25): SEQ ID NO: 3637; WAN024FWZ_at; Start 165; Stop 189
cgatttgactctttgtcctaaagaa

SEQ ID NO: 224392 - DNA, 25 bp, Artificial
  probe
  misc_feature (1)..(25): SEQ ID NO: 3637; WAN024FWZ_at; Start 512; Stop 536
tacctgctgagcaaaagaaggaatt

SEQ ID NO: 224393 - DNA, 25 bp, Artificial
  probe
  misc_feature (1)..(25): SEQ ID NO: 3637; WAN024FWZ_at; Start 176; Stop 200
tttgtcctaaagaacacattcaaga

SEQ ID NO: 224394 - DNA, 25 bp, Artificial
  probe
  misc_feature (1)..(25): SEQ ID NO: 3637; WAN024FWZ_at; Start 201; Stop 225
atgggtggacagtgaagcaggattc

SEQ ID NO: 224395 - DNA, 25 bp, Artificial
  probe
  misc_feature (1)..(25): SEQ ID NO: 3637; WAN024FWZ_at; Start 87; Stop 111
caaacgcctgattgaacagcatgtc

SEQ ID NO: 224396 - DNA, 25 bp, Artificial
  probe
  misc_feature (1)..(25): SEQ ID NO: 3637; WAN024FWZ_at; Start 181; Stop 205
cctaaagaacacattcaagaatggg

SEQ ID NO: 224397 - DNA, 25 bp, Artificial
  probe
  misc_feature (1)..(25): SEQ ID NO: 3637; WAN024FWZ_at; Start 472; Stop 496
gtagacgtcggcaagaattataagc

SEQ ID NO: 224398 - DNA, 25 bp, Artificial
  probe
  misc_feature (1)..(25): SEQ ID NO: 3637; WAN024FWZ_at; Start 302; Stop 326
ctgagacagattttaaaaattcctg

SEQ ID NO: 224399 - DNA, 25 bp, Artificial
  probe
  misc_feature (1)..(25): SEQ ID NO: 3637; WAN024FWZ_at; Start 101; Stop 125
aacagcatgtccagcttgaccatcg

SEQ ID NO: 224400 - DNA, 25 bp, Artificial
  probe
  misc_feature (1)..(25): SEQ ID NO: 3637; WAN024FWZ_at; Start 99; Stop 123
tgaacagcatgtccagcttgaccat

SEQ ID NO: 224401 - DNA, 25 bp, Artificial
  probe
  misc_feature (1)..(25): SEQ ID NO: 3637; WAN024FWZ_at; Start 85; Stop 109
ggcaaacgcctgattgaacagcatg

SEQ ID NO: 224402 - DNA, 25 bp, Artificial
  probe
  misc_feature (1)..(25): SEQ ID NO: 3637; WAN024FWZ_at; Start 295; Stop 319
ccagctactgagacagattttaaaa

SEQ ID NO: 224403 - DNA, 25 bp, Artificial
  probe
  misc_feature (1)..(25): SEQ ID NO: 3637; WAN024FWZ_at; Start 89; Stop 113
aacgcctgattgaacagcatgtcca

SEQ ID NO: 224404 - DNA, 25 bp, Artificial
  probe
  misc_feature (1)..(25): SEQ ID NO: 3637; WAN024FWZ_at; Start 195; Stop 219
tcaagaatgggtggacagtgaagca

SEQ ID NO: 224405 - DNA, 25 bp, Artificial
  probe
  misc_feature (1)..(25): SEQ ID NO: 2608; WAN024FX2_at; Start 414; Stop 438
tccagctactgaaacggattttgaa

SEQ ID NO: 224406 - DNA, 25 bp, Artificial
  probe
  misc_feature (1)..(25): SEQ ID NO: 2608; WAN024FX2_at; Start 107; Stop 131
caaaagcaccaaaagatgagtttca

SEQ ID NO: 224407 - DNA, 25 bp, Artificial
  probe
  misc_feature (1)..(25): SEQ ID NO: 2608; WAN024FX2_at; Start 302; Stop 326
caaaagagcacatcaaagagtgggt

SEQ ID NO: 224408 - DNA, 25 bp, Artificial
  probe
  misc_feature (1)..(25): SEQ ID NO: 2608; WAN024FX2_at; Start 76; Stop 100
gctgtcgccatgtctggttcacgaa

SEQ ID NO: 224409 - DNA, 25 bp, Artificial
  probe
  misc_feature (1)..(25): SEQ ID NO: 2608; WAN024FX2_at; Start 541; Stop 565
caagaattgctcaagcttttagctt

SEQ ID NO: 224410 - DNA, 25 bp, Artificial
  probe
  misc_feature (1)..(25): SEQ ID NO: 2608; WAN024FX2_at; Start 555; Stop 579
gcttttagctttgcaagtggcagca

SEQ ID NO: 224411 - DNA, 25 bp, Artificial
  probe
  misc_feature (1)..(25): SEQ ID NO: 2608; WAN024FX2_at; Start 258; Stop 282
tatgctttttgaagacggcaatcgg

SEQ ID NO: 224412 - DNA, 25 bp, Artificial
  probe
  misc_feature (1)..(25): SEQ ID NO: 2608; WAN024FX2_at; Start 428; Stop 452
cggattttgaaaagacctgcaatga

SEQ ID NO: 224413 - DNA, 25 bp, Artificial
  probe
  misc_feature (1)..(25): SEQ ID NO: 2608; WAN024FX2_at; Start 495; Stop 519
gaaccacttggtctatgcgacggat

SEQ ID NO: 224414 - DNA, 25 bp, Artificial
  probe
  misc_feature (1)..(25): SEQ ID NO: 2608; WAN024FX2_at; Start 192; Stop 216
gctagaccagtttggcaaacgcatt

SEQ ID NO: 224415 - DNA, 25 bp, Artificial
  probe
  misc_feature (1)..(25): SEQ ID NO: 2608; WAN024FX2_at; Start 138; Stop 162
cgatgtggtctatgtcgtggatgat

SEQ ID NO: 224416 - DNA, 25 bp, Artificial
  probe
  misc_feature (1)..(25): SEQ ID NO: 2608; WAN024FX2_at; Start 324; Stop 348
ggtggatagcgaagcggaattcata

SEQ ID NO: 224417 - DNA, 25 bp, Artificial
  probe
  misc_feature (1)..(25): SEQ ID NO: 2608; WAN024FX2_at; Start 123; Stop 147
tgagtttcaagactacgatgtggtc

SEQ ID NO: 224418 - DNA, 25 bp, Artificial
  probe
  misc_feature (1)..(25): SEQ ID NO: 2608; WAN024FX2_at; Start 784; Stop 808
gctgagaagatgattgagtatgctg

SEQ ID NO: 224419 - DNA, 25 bp, Artificial
  probe
  misc_feature (1)..(25): SEQ ID NO: 2608; WAN024FX2_at; Start 271; Stop 295
gacggcaatcggataaatttgactc

SEQ ID NO: 224420 - DNA, 25 bp, Artificial
  probe
  misc_feature (1)..(25): SEQ ID NO: 2608; WAN024FX2_at; Start 47; Stop 71
tacagactgccaaaactttacaagt

SEQ ID NO: 224421 - DNA, 25 bp, Artificial
  probe
  misc_feature (1)..(25): SEQ ID NO: 2608; WAN024FX2_at; Start 237; Stop 261
tgaccatcgtcgtctaaatcttatg

SEQ ID NO: 224422 - DNA, 25 bp, Artificial
  probe
  misc_feature (1)..(25): SEQ ID NO: 2608; WAN024FX2_at; Start 480; Stop 504
gaagggcattcatcggaaccacttg

SEQ ID NO: 224423 - DNA, 25 bp, Artificial
  probe
  misc_feature (1)..(25): SEQ ID NO: 2608; WAN024FX2_at; Start 33; Stop 57
gctagatctgattttacagactgcc

SEQ ID NO: 224424 - DNA, 25 bp, Artificial
  probe
  misc_feature (1)..(25): SEQ ID NO: 2608; WAN024FX2_at; Start 2; Stop 26
tgggtcttaacatgagagctgaaac

SEQ ID NO: 224425 - DNA, 25 bp, Artificial
  probe
  misc_feature (1)..(25): SEQ ID NO: 2608; WAN024FX2_at; Start 634; Stop 658
cccactgagaaagaaaaggaattct

SEQ ID NO: 224426 - DNA, 25 bp, Artificial
  probe
  misc_feature (1)..(25): SEQ ID NO: 2608; WAN024FX2_at; Start 63; Stop 87
tttacaagtcaaagctgtcgccatg

SEQ ID NO: 224427 - DNA, 25 bp, Artificial
  probe
  misc_feature (1)..(25): SEQ ID NO: 2608; WAN024FX2_at; Start 17; Stop 41
gagctgaaacagaaatgctagatct

SEQ ID NO: 224428 - DNA, 25 bp, Artificial
  probe
  misc_feature (1)..(25): SEQ ID NO: 2608; WAN024FX2_at; Start 802; Stop 826
tatgctgaggaaagagtgaagaagt

SEQ ID NO: 224429 - DNA, 25 bp, Artificial
  probe
  misc_feature (1)..(25): SEQ ID NO: 2608; WAN024FX2_at; Start 847; Stop 871
gaaaaagcgagaggagaagactcat

SEQ ID NO: 224430 - DNA, 25 bp, Artificial
  probe
  misc_feature (1)..(25): SEQ ID NO: 2608; WAN024FX2_at; Start 526; Stop 550
tatggaatttgccaacaagaattgc

SEQ ID NO: 224431 - DNA, 25 bp, Artificial
  probe
  misc_feature (1)..(25): SEQ ID NO: 2608; WAN024FX2_at; Start 206; Stop 230
gcaaacgcattattgagcaagaggt

SEQ ID NO: 224432 - DNA, 25 bp, Artificial
  probe
  misc_feature (1)..(25): SEQ ID NO: 2608; WAN024FX2_at; Start 453; Stop 477
attttggtgggtgtcagcctatgtg

SEQ ID NO: 224433 - DNA, 25 bp, Artificial
  probe
  misc_feature (1)..(25): SEQ ID NO: 2608; WAN024FX2_at; Start 508; Stop 532
tatgcgacggatcatctctatggaa

SEQ ID NO: 224434 - DNA, 25 bp, Artificial
  probe
  misc_feature (1)..(25): SEQ ID NO: 2608; WAN024FX2_at; Start 91; Stop 115
ggttcacgaactgatacaaaagcac

SEQ ID NO: 224435 - DNA, 25 bp, Artificial
  probe
  misc_feature (1)..(25): SEQ ID NO: 2608; WAN024FX2_at; Start 597; Stop 621
tgttggcaagaactacaagtacctc

SEQ ID NO: 224436 - DNA, 25 bp, Artificial
  probe
  misc_feature (1)..(25): SEQ ID NO: 2608; WAN024FX2_at; Start 467; Stop 491
cagcctatgtggtgaagggcattca

SEQ ID NO: 224437 - DNA, 25 bp, Artificial
  probe
  misc_feature (1)..(25): SEQ ID NO: 2608; WAN024FX2_at; Start 284; Stop 308
taaatttgactctttgcccaaaaga

SEQ ID NO: 224438 - DNA, 25 bp, Artificial
  probe
  misc_feature (1)..(25): SEQ ID NO: 2608; WAN024FX2_at; Start 575; Stop 599
cagcagataagggaacggtcgatgt

SEQ ID NO: 224439 - DNA, 25 bp, Artificial
  probe
  misc_feature (1)..(25): SEQ ID NO: 7489; WAN024FX3_at; Start 130; Stop 154
gaggaaaataaatccattggtatac

SEQ ID NO: 224440 - DNA, 25 bp, Artificial
  probe
  misc_feature (1)..(25): SEQ ID NO: 7489; WAN024FX3_at; Start 222; Stop 246
gagacaagcttgtttcacggaagtt

SEQ ID NO: 224441 - DNA, 25 bp, Artificial
  probe
  misc_feature (1)..(25): SEQ ID NO: 7489; WAN024FX3_at; Start 344; Stop 368
tcaccatattgacctttaccacgag

SEQ ID NO: 224442 - DNA, 25 bp, Artificial
  probe
  misc_feature (1)..(25): SEQ ID NO: 7489; WAN024FX3_at; Start 353; Stop 377
tgacctttaccacgaggaataagtg

SEQ ID NO: 224443 - DNA, 25 bp, Artificial
  probe
  misc_feature (1)..(25): SEQ ID NO: 7489; WAN024FX3_at; Start 285; Stop 309
tacggtcaccgatagtaactggtgc

SEQ ID NO: 224444 - DNA, 25 bp, Artificial
  probe
  misc_feature (1)..(25): SEQ ID NO: 7489; WAN024FX3_at; Start 362; Stop 386
ccacgaggaataagtggagtatcag

SEQ ID NO: 224445 - DNA, 25 bp, Artificial
  probe
  misc_feature (1)..(25): SEQ ID NO: 7489; WAN024FX3_at; Start 293; Stop 317
ccgatagtaactggtgcagaagaat

SEQ ID NO: 224446 - DNA, 25 bp, Artificial
  probe
  misc_feature (1)..(25): SEQ ID NO: 7489; WAN024FX3_at; Start 120; Stop 144
cttgatcattgaggaaaataaatcc

SEQ ID NO: 224447 - DNA, 25 bp, Artificial
  probe
  misc_feature (1)..(25): SEQ ID NO: 7489; WAN024FX3_at; Start 180; Stop 204
tagtatcccaatatgcaaagtgatc

SEQ ID NO: 224448 - DNA, 25 bp, Artificial
  probe
  misc_feature (1)..(25): SEQ ID NO: 7489; WAN024FX3_at; Start 144; Stop 168
cattggtatacaaaacacctggata

SEQ ID NO: 224449 - DNA, 25 bp, Artificial
  probe
  misc_feature (1)..(25): SEQ ID NO: 7489; WAN024FX3_at; Start 188; Stop 212
caatatgcaaagtgatctttctcaa

SEQ ID NO: 224450 - DNA, 25 bp, Artificial
  probe
  misc_feature (1)..(25): SEQ ID NO: 7489; WAN024FX3_at; Start 158; Stop 182
acacctggatattctggacgtttag

SEQ ID NO: 224451 - DNA, 25 bp, Artificial
  probe
  misc_feature (1)..(25): SEQ ID NO: 7489; WAN024FX3_at; Start 262; Stop 286
tcctcccatgtagtagaaataagta

SEQ ID NO: 224452 - DNA, 25 bp, Artificial
  probe
  misc_feature (1)..(25): SEQ ID NO: 7489; WAN024FX3_at; Start 308; Stop 332
gcagaagaatagatgcatccacagt

SEQ ID NO: 224453 - DNA, 25 bp, Artificial
  probe
  misc_feature (1)..(25): SEQ ID NO: 7489; WAN024FX3_at; Start 272; Stop 296
tagtagaaataagtacggtcaccga

SEQ ID NO: 224454 - DNA, 25 bp, Artificial
  probe
  misc_feature (1)..(25): SEQ ID NO: 7489; WAN024FX3_at; Start 369; Stop 393
gaataagtggagtatcagtgtttag

SEQ ID NO: 224455 - DNA, 25 bp, Artificial
  probe
  misc_feature (1)..(25): SEQ ID NO: 7489; WAN024FX3_at; Start 203; Stop 227
tctttctcaatataagcacgagaca

SEQ ID NO: 224456 - DNA, 25 bp, Artificial
  probe
  misc_feature (1)..(25): SEQ ID NO: 7489; WAN024FX3_at; Start 57; Stop 81
gattattctcgaacaattcaattgt

SEQ ID NO: 224457 - DNA, 25 bp, Artificial
  probe
  misc_feature (1)..(25): SEQ ID NO: 7489; WAN024FX3_at; Start 111; Stop 135
caaggtaaacttgatcattgaggaa

SEQ ID NO: 224458 - DNA, 25 bp, Artificial
  probe
  misc_feature (1)..(25): SEQ ID NO: 7489; WAN024FX3_at; Start 173; Stop 197
ggacgtttagtatcccaatatgcaa

SEQ ID NO: 224459 - DNA, 25 bp, Artificial
  probe
  misc_feature (1)..(25): SEQ ID NO: 7489; WAN024FX3_at; Start 46; Stop 70
cattggagtgtgattattctcgaac

SEQ ID NO: 224460 - DNA, 25 bp, Artificial
  probe
  misc_feature (1)..(25): SEQ ID NO: 7489; WAN024FX3_at; Start 23; Stop 47
ttttcaagggaagctgtaatttcca

SEQ ID NO: 224461 - DNA, 25 bp, Artificial
  probe
  misc_feature (1)..(25): SEQ ID NO: 7489; WAN024FX3_at; Start 165; Stop 189
gatattctggacgtttagtatccca

SEQ ID NO: 224462 - DNA, 25 bp, Artificial
  probe
  misc_feature (1)..(25): SEQ ID NO: 7489; WAN024FX3_at; Start 210; Stop 234
caatataagcacgagacaagcttgt

SEQ ID NO: 224463 - DNA, 25 bp, Artificial
  probe
  misc_feature (1)..(25): SEQ ID NO: 7489; WAN024FX3_at; Start 32; Stop 56
gaagctgtaatttccattggagtgt

SEQ ID NO: 224464 - DNA, 25 bp, Artificial
  probe
  misc_feature (1)..(25): SEQ ID NO: 7489; WAN024FX3_at; Start 74; Stop 98
tcaattgttacaaagcctccagctg

SEQ ID NO: 224465 - DNA, 25 bp, Artificial
  probe
  misc_feature (1)..(25): SEQ ID NO: 7489; WAN024FX3_at; Start 154; Stop 178
caaaacacctggatattctggacgt

SEQ ID NO: 224466 - DNA, 25 bp, Artificial
  probe
  misc_feature (1)..(25): SEQ ID NO: 7489; WAN024FX3_at; Start 7; Stop 31
gcgaccatcttctattttttcaagg

SEQ ID NO: 224467 - DNA, 25 bp, Artificial
  probe
  misc_feature (1)..(25): SEQ ID NO: 7489; WAN024FX3_at; Start 319; Stop 343
gatgcatccacagtcaaattctcca

SEQ ID NO: 224468 - DNA, 25 bp, Artificial
  probe
  misc_feature (1)..(25): SEQ ID NO: 7489; WAN024FX3_at; Start 330; Stop 354
agtcaaattctccatcaccatattg

SEQ ID NO: 224469 - DNA, 25 bp, Artificial
  probe
  misc_feature (1)..(25): SEQ ID NO: 7489; WAN024FX3_at; Start 97; Stop 121
tgcaatatctgcatcaaggtaaact

SEQ ID NO: 224470 - DNA, 25 bp, Artificial
  probe
  misc_feature (1)..(25): SEQ ID NO: 7489; WAN024FX3_at; Start 85; Stop 109
aaagcctccagctgcaatatctgca

SEQ ID NO: 224471 - DNA, 25 bp, Artificial
  probe
  misc_feature (1)..(25): SEQ ID NO: 7489; WAN024FX3_at; Start 236; Stop 260
tcacggaagtttgtatgttgtccat

SEQ ID NO: 224472 - DNA, 25 bp, Artificial
  probe
  misc_feature (1)..(25): SEQ ID NO: 7489; WAN024FX3_at; Start 251; Stop 275
tgttgtccatttcctcccatgtagt

SEQ ID NO: 224473 - DNA, 25 bp, Artificial
  probe
  misc_feature (1)..(25): SEQ ID NO: 4200; WAN024FX4_at; Start 1009; Stop 1033
tactacatgggaggaaatggacaac

SEQ ID NO: 224474 - DNA, 25 bp, Artificial
  probe
  misc_feature (1)..(25): SEQ ID NO: 4200; WAN024FX4_at; Start 1043; Stop 1067
tccgtgaaacaagcttgtctcgtgc

SEQ ID NO: 224475 - DNA, 25 bp, Artificial
  probe
  misc_feature (1)..(25): SEQ ID NO: 4200; WAN024FX4_at; Start 267; Stop 291
ggaacgtcaatatctacctcgtgcg

SEQ ID NO: 224476 - DNA, 25 bp, Artificial
  probe
  misc_feature (1)..(25): SEQ ID NO: 4200; WAN024FX4_at; Start 1286; Stop 1310
tgttattcagcgaacctttacctcg

SEQ ID NO: 224477 - DNA, 25 bp, Artificial
  probe
  misc_feature (1)..(25): SEQ ID NO: 4200; WAN024FX4_at; Start 908; Stop 932
cacttattcctcgtggtaaaggtca

SEQ ID NO: 224478 - DNA, 25 bp, Artificial
  probe
  misc_feature (1)..(25): SEQ ID NO: 4200; WAN024FX4_at; Start 559; Stop 583
gtaccaaacttcaatccacgtgcag

SEQ ID NO: 224479 - DNA, 25 bp, Artificial
  probe
  misc_feature (1)..(25): SEQ ID NO: 4200; WAN024FX4_at; Start 685; Stop 709
gctgatttcattaactggactccaa

SEQ ID NO: 224480 - DNA, 25 bp, Artificial
  probe
  misc_feature (1)..(25): SEQ ID NO: 4200; WAN024FX4_at; Start 639; Stop 663
tcgtacttggagagattcattgcgc

SEQ ID NO: 224481 - DNA, 25 bp, Artificial
  probe
  misc_feature (1)..(25): SEQ ID NO: 4200; WAN024FX4_at; Start 119; Stop 143
tcttcactgaggaaaaaccatggga

SEQ ID NO: 224482 - DNA, 25 bp, Artificial
  probe
  misc_feature (1)..(25): SEQ ID NO: 4200; WAN024FX4_at; Start 247; Stop 271
tactctttagaggagcgtaaggaac

SEQ ID NO: 224483 - DNA, 25 bp, Artificial
  probe
  misc_feature (1)..(25): SEQ ID NO: 4200; WAN024FX4_at; Start 1187; Stop 1211
cagctggaggctttgtaacaattga

SEQ ID NO: 224484 - DNA, 25 bp, Artificial
  probe
  misc_feature (1)..(25): SEQ ID NO: 4200; WAN024FX4_at; Start 842; Stop 866
cagtggaccttcaattgacttatag

SEQ ID NO: 224485 - DNA, 25 bp, Artificial
  probe
  misc_feature (1)..(25): SEQ ID NO: 4200; WAN024FX4_at; Start 435; Stop 459
taaacatgacgcagatgaaaatcgt

SEQ ID NO: 224486 - DNA, 25 bp, Artificial
  probe
  misc_feature (1)..(25): SEQ ID NO: 4200; WAN024FX4_at; Start 1026; Stop 1050
tggacaacatacaaacttccgtgaa

SEQ ID NO: 224487 - DNA, 25 bp, Artificial
  probe
  misc_feature (1)..(25): SEQ ID NO: 4200; WAN024FX4_at; Start 1270; Stop 1294
gatggtcgctatcaagtgttattca

SEQ ID NO: 224488 - DNA, 25 bp, Artificial
  probe
  misc_feature (1)..(25): SEQ ID NO: 4200; WAN024FX4_at; Start 977; Stop 1001
caccagttactatcggtgaccgtac

SEQ ID NO: 224489 - DNA, 25 bp, Artificial
  probe
  misc_feature (1)..(25): SEQ ID NO: 4200; WAN024FX4_at; Start 804; Stop 828
tttccatgaaggagatcaactgaac

SEQ ID NO: 224490 - DNA, 25 bp, Artificial
  probe
  misc_feature (1)..(25): SEQ ID NO: 4200; WAN024FX4_at; Start 1344; Stop 1368
tgctaaaatctacgcaatcgaagga

SEQ ID NO: 224491 - DNA, 25 bp, Artificial
  probe
  misc_feature (1)..(25): SEQ ID NO: 4200; WAN024FX4_at; Start 1217; Stop 1241
tcgagaataatcacactccaatgga

SEQ ID NO: 224492 - DNA, 25 bp, Artificial
  probe
  misc_feature (1)..(25): SEQ ID NO: 4200; WAN024FX4_at; Start 659; Stop 683
tgcgcttgccgtgtgtatctacgag

SEQ ID NO: 224493 - DNA, 25 bp, Artificial
  probe
  misc_feature (1)..(25): SEQ ID NO: 4200; WAN024FX4_at; Start 617; Stop 641
taaatcgctatgtgctaattactcg

SEQ ID NO: 224494 - DNA, 25 bp, Artificial
  probe
  misc_feature (1)..(25): SEQ ID NO: 4200; WAN024FX4_at; Start 577; Stop 601
cgtgcagacactcataaccatatca

SEQ ID NO: 224495 - DNA, 25 bp, Artificial
  probe
  misc_feature (1)..(25): SEQ ID NO: 4200; WAN024FX4_at; Start 490; Stop 514
ggtaacggtgttcatttcattgctg

SEQ ID NO: 224496 - DNA, 25 bp, Artificial
  probe
  misc_feature (1)..(25): SEQ ID NO: 4200; WAN024FX4_at; Start 1254; Stop 1278
ccttgaaaaaatagaagatggtcgc

SEQ ID NO: 224497 - DNA, 25 bp, Artificial
  probe
  misc_feature (1)..(25): SEQ ID NO: 4200; WAN024FX4_at; Start 282; Stop 306
acctcgtgcgaagcgtattgtttca

SEQ ID NO: 224498 - DNA, 25 bp, Artificial
  probe
  misc_feature (1)..(25): SEQ ID NO: 4200; WAN024FX4_at; Start 862; Stop 886
tatagttatcgtcatgttggttggc

SEQ ID NO: 224499 - DNA, 25 bp, Artificial
  probe
  misc_feature (1)..(25): SEQ ID NO: 4200; WAN024FX4_at; Start 1168; Stop 1192
taccttgatgcagatattgcagctg

SEQ ID NO: 224500 - DNA, 25 bp, Artificial
  probe
  misc_feature (1)..(25): SEQ ID NO: 4200; WAN024FX4_at; Start 942; Stop 966
tggagaatttgactgtggatgcatc

SEQ ID NO: 224501 - DNA, 25 bp, Artificial
  probe
  misc_feature (1)..(25): SEQ ID NO: 4200; WAN024FX4_at; Start 958; Stop 982
ggatgcatctattcttctgcaccag

SEQ ID NO: 224502 - DNA, 25 bp, Artificial
  probe
  misc_feature (1)..(25): SEQ ID NO: 4200; WAN024FX4_at; Start 1090; Stop 1114
gcatattgggatactaaacgtccag

SEQ ID NO: 224503 - DNA, 25 bp, Artificial
  probe
  misc_feature (1)..(25): SEQ ID NO: 4200; WAN024FX4_at; Start 826; Stop 850
aacaagaattacgatacagtggacc

SEQ ID NO: 224504 - DNA, 25 bp, Artificial
  probe
  misc_feature (1)..(25): SEQ ID NO: 4200; WAN024FX4_at; Start 768; Stop 792
taaacgtggcgattatatactaggt

SEQ ID NO: 224505 - DNA, 25 bp, Artificial
  probe
  misc_feature (1)..(25): SEQ ID NO: 4200; WAN024FX4_at; Start 1104; Stop 1128
taaacgtccagaatatccaggtgtt

SEQ ID NO: 224506 - DNA, 25 bp, Artificial
  probe
  misc_feature (1)..(25): SEQ ID NO: 4200; WAN024FX4_at; Start 1390; Stop 1414
gaatcagacaatgctctattgaggg

SEQ ID NO: 224507 - DNA, 25 bp, Artificial
  probe
  misc_feature (1)..(25): SEQ ID NO: 1159; WAN024FX5_at; Start 214; Stop 238
caagaacaattagacttgttgcagc

SEQ ID NO: 224508 - DNA, 25 bp, Artificial
  probe
  misc_feature (1)..(25): SEQ ID NO: 1159; WAN024FX5_at; Start 441; Stop 465
ctggacaataaagacagttagcttt

SEQ ID NO: 224509 - DNA, 25 bp, Artificial
  probe
  misc_feature (1)..(25): SEQ ID NO: 1159; WAN024FX5_at; Start 243; Stop 267
taaagaggaacatcctcggcgagct

SEQ ID NO: 224510 - DNA, 25 bp, Artificial
  probe
  misc_feature (1)..(25): SEQ ID NO: 1159; WAN024FX5_at; Start 173; Stop 197
gacagtttgatgagttggtaagtaa

SEQ ID NO: 224511 - DNA, 25 bp, Artificial
  probe
  misc_feature (1)..(25): SEQ ID NO: 1159; WAN024FX5_at; Start 415; Stop 439
tatggttgggatagaaatattgctc

SEQ ID NO: 224512 - DNA, 25 bp, Artificial
  probe
  misc_feature (1)..(25): SEQ ID NO: 1159; WAN024FX5_at; Start 333; Stop 357
aaaaagtgtagtggagataactgac

SEQ ID NO: 224513 - DNA, 25 bp, Artificial
  probe
  misc_feature (1)..(25): SEQ ID NO: 1159; WAN024FX5_at; Start 350; Stop 374
taactgactatttatttgaatggca

SEQ ID NO: 224514 - DNA, 25 bp, Artificial
  probe
  misc_feature (1)..(25): SEQ ID NO: 1159; WAN024FX5_at; Start 296; Stop 320
aaaaagtcgctcgtttccttgctgc

SEQ ID NO: 224515 - DNA, 25 bp, Artificial
  probe
  misc_feature (1)..(25): SEQ ID NO: 1159; WAN024FX5_at; Start 184; Stop 208
gagttggtaagtaatttgaatttga

SEQ ID NO: 224516 - DNA, 25 bp, Artificial
  probe
  misc_feature (1)..(25): SEQ ID NO: 1159; WAN024FX5_at; Start 423; Stop 447
ggatagaaatattgctcactggaca

SEQ ID NO: 224517 - DNA, 25 bp, Artificial
  probe
  misc_feature (1)..(25): SEQ ID NO: 1159; WAN024FX5_at; Start 233; Stop 257
tgcagcagtataaagaggaacatcc

SEQ ID NO: 224518 - DNA, 25 bp, Artificial
  probe
  misc_feature (1)..(25): SEQ ID NO: 1159; WAN024FX5_at; Start 247; Stop 271
gaggaacatcctcggcgagctaaaa

SEQ ID NO: 224519 - DNA, 25 bp, Artificial
  probe
  misc_feature (1)..(25): SEQ ID NO: 1159; WAN024FX5_at; Start 391; Stop 415
ggagcggagaattatcttgtacaat

SEQ ID NO: 224520 - DNA, 25 bp, Artificial
  probe
  misc_feature (1)..(25): SEQ ID NO: 1159; WAN024FX5_at; Start 70; Stop 94
cctgcagttacagtattttctgatg

SEQ ID NO: 224521 - DNA, 25 bp, Artificial
  probe
  misc_feature (1)..(25): SEQ ID NO: 1159; WAN024FX5_at; Start 139; Stop 163
gaattatataatcaactttctgctg

SEQ ID NO: 224522 - DNA, 25 bp, Artificial
  probe
  misc_feature (1)..(25): SEQ ID NO: 1159; WAN024FX5_at; Start 43; Stop 67
tcttgttctattttaggaagtacta

SEQ ID NO: 224523 - DNA, 25 bp, Artificial
  probe
  misc_feature (1)..(25): SEQ ID NO: 1159; WAN024FX5_at; Start 317; Stop 341
ctgctaaagtaggacaaaaaagtgt

SEQ ID NO: 224524 - DNA, 25 bp, Artificial
  probe
  misc_feature (1)..(25): SEQ ID NO: 1159; WAN024FX5_at; Start 107; Stop 131
cttataattcagagaataattcaga

SEQ ID NO: 224525 - DNA, 25 bp, Artificial
  probe
  misc_feature (1)..(25): SEQ ID NO: 1159; WAN024FX5_at; Start 220; Stop 244
caattagacttgttgcagcagtata

SEQ ID NO: 224526 - DNA, 25 bp, Artificial
  probe
  misc_feature (1)..(25): SEQ ID NO: 1159; WAN024FX5_at; Start 58; Stop 82
ggaagtactattcctgcagttacag

SEQ ID NO: 224527 - DNA, 25 bp, Artificial
  probe
  misc_feature (1)..(25): SEQ ID NO: 1159; WAN024FX5_at; Start 373; Stop 397
caagacaatttagaagctggagcgg

SEQ ID NO: 224528 - DNA, 25 bp, Artificial
  probe
  misc_feature (1)..(25): SEQ ID NO: 1159; WAN024FX5_at; Start 301; Stop 325
gtcgctcgtttccttgctgctaaag

SEQ ID NO: 224529 - DNA, 25 bp, Artificial
  probe
  misc_feature (1)..(25): SEQ ID NO: 1159; WAN024FX5_at; Start 435; Stop 459
tgctcactggacaataaagacagtt

SEQ ID NO: 224530 - DNA, 25 bp, Artificial
  probe
  misc_feature (1)..(25): SEQ ID NO: 1159; WAN024FX5_at; Start 355; Stop 379
gactatttatttgaatggcaagaca

SEQ ID NO: 224531 - DNA, 25 bp, Artificial
  probe
  misc_feature (1)..(25): SEQ ID NO: 1159; WAN024FX5_at; Start 367; Stop 391
gaatggcaagacaatttagaagctg

SEQ ID NO: 224532 - DNA, 25 bp, Artificial
  probe
  misc_feature (1)..(25): SEQ ID NO: 1159; WAN024FX5_at; Start 168; Stop 192
aaaaggacagtttgatgagttggta

SEQ ID NO: 224533 - DNA, 25 bp, Artificial
  probe
  misc_feature (1)..(25): SEQ ID NO: 1159; WAN024FX5_at; Start 312; Stop 336
ccttgctgctaaagtaggacaaaaa

SEQ ID NO: 224534 - DNA, 25 bp, Artificial
  probe
  misc_feature (1)..(25): SEQ ID NO: 1159; WAN024FX5_at; Start 385; Stop 409
gaagctggagcggagaattatcttg

SEQ ID NO: 224535 - DNA, 25 bp, Artificial
  probe
  misc_feature (1)..(25): SEQ ID NO: 1159; WAN024FX5_at; Start 274; Stop 298
gggataaaatcagctataataaaaa

SEQ ID NO: 224536 - DNA, 25 bp, Artificial
  probe
  misc_feature (1)..(25): SEQ ID NO: 1159; WAN024FX5_at; Start 405; Stop 429
tcttgtacaatatggttgggataga

SEQ ID NO: 224537 - DNA, 25 bp, Artificial
  probe
  misc_feature (1)..(25): SEQ ID NO: 1159; WAN024FX5_at; Start 97; Stop 121
gtaacaattacttataattcagaga

SEQ ID NO: 224538 - DNA, 25 bp, Artificial
  probe
  misc_feature (1)..(25): SEQ ID NO: 1159; WAN024FX5_at; Start 80; Stop 104
cagtattttctgatgaagtaacaat

SEQ ID NO: 224539 - DNA, 25 bp, Artificial
  probe
  misc_feature (1)..(25): SEQ ID NO: 1159; WAN024FX5_at; Start 154; Stop 178
ctttctgctgaaaaaaaaggacagt

SEQ ID NO: 224540 - DNA, 25 bp, Artificial
  probe
  misc_feature (1)..(25): SEQ ID NO: 1159; WAN024FX5_at; Start 376; Stop 400
gacaatttagaagctggagcggaga

SEQ ID NO: 224541 - DNA, 25 bp, Artificial
  probe
  misc_feature (1)..(25): SEQ ID NO: 1622; WAN024FX6_at; Start 211; Stop 235
gaaaatgttaatcaagcaaaagagg

SEQ ID NO: 224542 - DNA, 25 bp, Artificial
  probe
  misc_feature (1)..(25): SEQ ID NO: 1622; WAN024FX6_at; Start 144; Stop 168
taatatttcttgtaaggttgttgga

SEQ ID NO: 224543 - DNA, 25 bp, Artificial
  probe
  misc_feature (1)..(25): SEQ ID NO: 1622; WAN024FX6_at; Start 82; Stop 106
gaagaagctcatcagtttagagata

SEQ ID NO: 224544 - DNA, 25 bp, Artificial
  probe
  misc_feature (1)..(25): SEQ ID NO: 1622; WAN024FX6_at; Start 170; Stop 194
taaatagtataaaagatatgaacga

SEQ ID NO: 224545 - DNA, 25 bp, Artificial
  probe
  misc_feature (1)..(25): SEQ ID NO: 1622; WAN024FX6_at; Start 260; Stop 284
tagccgtcaggagctccagaattga

SEQ ID NO: 224546 - DNA, 25 bp, Artificial
  probe
  misc_feature (1)..(25): SEQ ID NO: 1622; WAN024FX6_at; Start 51; Stop 75
gaatagagatttgagtgatgaagaa

SEQ ID NO: 224547 - DNA, 25 bp, Artificial
  probe
  misc_feature (1)..(25): SEQ ID NO: 1622; WAN024FX6_at; Start 250; Stop 274
gatgaattaatagccgtcaggagct

SEQ ID NO: 224548 - DNA, 25 bp, Artificial
  probe
  misc_feature (1)..(25): SEQ ID NO: 1622; WAN024FX6_at; Start 184; Stop 208
gatatgaacgagtataaagagatta

SEQ ID NO: 224549 - DNA, 25 bp, Artificial
  probe
  misc_feature (1)..(25): SEQ ID NO: 1622; WAN024FX6_at; Start 227; Stop 251
caaaagaggaattaaagagaataga

SEQ ID NO: 224550 - DNA, 25 bp, Artificial
  probe
  misc_feature (1)..(25): SEQ ID NO: 1622; WAN024FX6_at; Start 13; Stop 37
tttagaacaaatacatcgatgatga

SEQ ID NO: 224551 - DNA, 25 bp, Artificial
  probe
  misc_feature (1)..(25): SEQ ID NO: 1622; WAN024FX6_at; Start 20; Stop 44
caaatacatcgatgatgaacattgc

SEQ ID NO: 224552 - DNA, 25 bp, Artificial
  probe
  misc_feature (1)..(25): SEQ ID NO: 1622; WAN024FX6_at; Start 24; Stop 48
tacatcgatgatgaacattgcttac

SEQ ID NO: 224553 - DNA, 25 bp, Artificial
  probe
  misc_feature (1)..(25): SEQ ID NO: 1622; WAN024FX6_at; Start 269; Stop 293
ggagctccagaattgattttttaga

SEQ ID NO: 224554 - DNA, 25 bp, Artificial
  probe
  misc_feature (1)..(25): SEQ ID NO: 1622; WAN024FX6_at; Start 152; Stop 176
cttgtaaggttgttggaataaatag

SEQ ID NO: 224555 - DNA, 25 bp, Artificial
  probe
  misc_feature (1)..(25): SEQ ID NO: 1622; WAN024FX6_at; Start 253; Stop 277
gaattaatagccgtcaggagctcca

SEQ ID NO: 224556 - DNA, 25 bp, Artificial
  probe
  misc_feature (1)..(25): SEQ ID NO: 1622; WAN024FX6_at; Start 29; Stop 53
cgatgatgaacattgcttacaagaa

SEQ ID NO: 224557 - DNA, 25 bp, Artificial
  probe
  misc_feature (1)..(25): SEQ ID NO: 1622; WAN024FX6_at; Start 254; Stop 278
aattaatagccgtcaggagctccag

SEQ ID NO: 224558 - DNA, 25 bp, Artificial
  probe
  misc_feature (1)..(25): SEQ ID NO: 1622; WAN024FX6_at; Start 88; Stop 112
gctcatcagtttagagataaagaga

SEQ ID NO: 224559 - DNA, 25 bp, Artificial
  probe
  misc_feature (1)..(25): SEQ ID NO: 1622; WAN024FX6_at; Start 204; Stop 228
gattatggaaaatgttaatcaagca

SEQ ID NO: 224560 - DNA, 25 bp, Artificial
  probe
  misc_feature (1)..(25): SEQ ID NO: 1622; WAN024FX6_at; Start 67; Stop 91
gatgaagaatttaaagaagaagctc

SEQ ID NO: 224561 - DNA, 25 bp, Artificial
  probe
  misc_feature (1)..(25): SEQ ID NO: 1622; WAN024FX6_at; Start 262; Stop 286
gccgtcaggagctccagaattgatt

SEQ ID NO: 224562 - DNA, 25 bp, Artificial
  probe
  misc_feature (1)..(25): SEQ ID NO: 1622; WAN024FX6_at; Start 9; Stop 33
ttcatttagaacaaatacatcgatg

SEQ ID NO: 224563 - DNA, 25 bp, Artificial
  probe
  misc_feature (1)..(25): SEQ ID NO: 1622; WAN024FX6_at; Start 243; Stop 267
gagaatagatgaattaatagccgtc

SEQ ID NO: 224564 - DNA, 25 bp, Artificial
  probe
  misc_feature (1)..(25): SEQ ID NO: 1622; WAN024FX6_at; Start 189; Stop 213
gaacgagtataaagagattatggaa

SEQ ID NO: 224565 - DNA, 25 bp, Artificial
  probe
  misc_feature (1)..(25): SEQ ID NO: 1622; WAN024FX6_at; Start 275; Stop 299
ccagaattgattttttagaggataa

SEQ ID NO: 224566 - DNA, 25 bp, Artificial
  probe
  misc_feature (1)..(25): SEQ ID NO: 1622; WAN024FX6_at; Start 222; Stop 246
tcaagcaaaagaggaattaaagaga

SEQ ID NO: 224567 - DNA, 25 bp, Artificial
  probe
  misc_feature (1)..(25): SEQ ID NO: 1622; WAN024FX6_at; Start 264; Stop 288
cgtcaggagctccagaattgatttt

SEQ ID NO: 224568 - DNA, 25 bp, Artificial
  probe
  misc_feature (1)..(25): SEQ ID NO: 1622; WAN024FX6_at; Start 257; Stop 281
taatagccgtcaggagctccagaat

SEQ ID NO: 224569 - DNA, 25 bp, Artificial
  probe
  misc_feature (1)..(25): SEQ ID NO: 1622; WAN024FX6_at; Start 103; Stop 127
gataaagagataaaaatactcgaag

SEQ ID NO: 224570 - DNA, 25 bp, Artificial
  probe
  misc_feature (1)..(25): SEQ ID NO: 1622; WAN024FX6_at; Start 306; Stop 330
tagaattacaggaaaccaaagatga

SEQ ID NO: 224571 - DNA, 25 bp, Artificial
  probe
  misc_feature (1)..(25): SEQ ID NO: 1622; WAN024FX6_at; Start 248; Stop 272
tagatgaattaatagccgtcaggag

SEQ ID NO: 224572 - DNA, 25 bp, Artificial
  probe
  misc_feature (1)..(25): SEQ ID NO: 1622; WAN024FX6_at; Start 35; Stop 59
tgaacattgcttacaagaatagaga

SEQ ID NO: 224573 - DNA, 25 bp, Artificial
  probe
  misc_feature (1)..(25): SEQ ID NO: 1622; WAN024FX6_at; Start 43; Stop 67
gcttacaagaatagagatttgagtg

SEQ ID NO: 224574 - DNA, 25 bp, Artificial
  probe
  misc_feature (1)..(25): SEQ ID NO: 1622; WAN024FX6_at; Start 73; Stop 97
gaatttaaagaagaagctcatcagt

SEQ ID NO: 224575 - DNA, 25 bp, Artificial
  probe
  misc_feature (1)..(25): SEQ ID NO: 2273; WAN024FX7_at; Start 519; Stop 543
tgttttgatgatggttaagtctagc

SEQ ID NO: 224576 - DNA, 25 bp, Artificial
  probe
  misc_feature (1)..(25): SEQ ID NO: 2273; WAN024FX7_at; Start 377; Stop 401
tgaacgcgacaattagccagctaac

SEQ ID NO: 224577 - DNA, 25 bp, Artificial
  probe
  misc_feature (1)..(25): SEQ ID NO: 2273; WAN024FX7_at; Start 392; Stop 416
gccagctaactcagtcctttgaccg

SEQ ID NO: 224578 - DNA, 25 bp, Artificial
  probe
  misc_feature (1)..(25): SEQ ID NO: 2273; WAN024FX7_at; Start 502; Stop 526
tatcaccctcatatccatgttttga

SEQ ID NO: 224579 - DNA, 25 bp, Artificial
  probe
  misc_feature (1)..(25): SEQ ID NO: 2273; WAN024FX7_at; Start 472; Stop 496
gaggtgactcataatcaagaagaag

SEQ ID NO: 224580 - DNA, 25 bp, Artificial
  probe
  misc_feature (1)..(25): SEQ ID NO: 2273; WAN024FX7_at; Start 809; Stop 833
aaattcggaagagattgcaactgtc

SEQ ID NO: 224581 - DNA, 25 bp, Artificial
  probe
  misc_feature (1)..(25): SEQ ID NO: 2273; WAN024FX7_at; Start 824; Stop 848
tgcaactgtctaatgtcgaaaatgg

SEQ ID NO: 224582 - DNA, 25 bp, Artificial
  probe
  misc_feature (1)..(25): SEQ ID NO: 2273; WAN024FX7_at; Start 60; Stop 84
tagaaactggcgaggacgaaaatta

SEQ ID NO: 224583 - DNA, 25 bp, Artificial
  probe
  misc_feature (1)..(25): SEQ ID NO: 2273; WAN024FX7_at; Start 639; Stop 663
tattcggtcagttaaagaaatagga

SEQ ID NO: 224584 - DNA, 25 bp, Artificial
  probe
  misc_feature (1)..(25): SEQ ID NO: 2273; WAN024FX7_at; Start 565; Stop 589
aattatgtatctcaagaagaatggg

SEQ ID NO: 224585 - DNA, 25 bp, Artificial
  probe
  misc_feature (1)..(25): SEQ ID NO: 2273; WAN024FX7_at; Start 178; Stop 202
attcgtcgagaagatgggagtttgc

SEQ ID NO: 224586 - DNA, 25 bp, Artificial
  probe
  misc_feature (1)..(25): SEQ ID NO: 2273; WAN024FX7_at; Start 897; Stop 921
aaaaatagtcgcgatttggaatgcg

SEQ ID NO: 224587 - DNA, 25 bp, Artificial
  probe
  misc_feature (1)..(25): SEQ ID NO: 2273; WAN024FX7_at; Start 2; Stop 26
tggagaagtgggaaaatcaagataa

SEQ ID NO: 224588 - DNA, 25 bp, Artificial
  probe
  misc_feature (1)..(25): SEQ ID NO: 2273; WAN024FX7_at; Start 124; Stop 148
tatagggaaaccttgatagaacgcg

SEQ ID NO: 224589 - DNA, 25 bp, Artificial
  probe
  misc_feature (1)..(25): SEQ ID NO: 2273; WAN024FX7_at; Start 757; Stop 781
tataatgggttatatcgtaaacggc

SEQ ID NO: 224590 - DNA, 25 bp, Artificial
  probe
  misc_feature (1)..(25): SEQ ID NO: 2273; WAN024FX7_at; Start 253; Stop 277
tggagacggtcaatgaaatattctt

SEQ ID NO: 224591 - DNA, 25 bp, Artificial
  probe
  misc_feature (1)..(25): SEQ ID NO: 2273; WAN024FX7_at; Start 912; Stop 936
ttggaatgcgactaaacaaaactat

SEQ ID NO: 224592 - DNA, 25 bp, Artificial
  probe
  misc_feature (1)..(25): SEQ ID NO: 2273; WAN024FX7_at; Start 143; Stop 167
aacgcgttgagacttgtggagatac

SEQ ID NO: 224593 - DNA, 25 bp, Artificial
  probe
  misc_feature (1)..(25): SEQ ID NO: 2273; WAN024FX7_at; Start 282; Stop 306
aacatctcagatagttgatgaagca

SEQ ID NO: 224594 - DNA, 25 bp, Artificial
  probe
  misc_feature (1)..(25): SEQ ID NO: 2273; WAN024FX7_at; Start 486; Stop 510
tcaagaagaagagacctatcaccct

SEQ ID NO: 224595 - DNA, 25 bp, Artificial
  probe
  misc_feature (1)..(25): SEQ ID NO: 2273; WAN024FX7_at; Start 677; Stop 701
gggcaattcttgaaacggcaaaata

SEQ ID NO: 224596 - DNA, 25 bp, Artificial
  probe
  misc_feature (1)..(25): SEQ ID NO: 2273; WAN024FX7_at; Start 194; Stop 218
ggagtttgcgtttatatcaagccta

SEQ ID NO: 224597 - DNA, 25 bp, Artificial
  probe
  misc_feature (1)..(25): SEQ ID NO: 2273; WAN024FX7_at; Start 722; Stop 746
tagatgttgaaaacaagcaagttgt

SEQ ID NO: 224598 - DNA, 25 bp, Artificial
  probe
  misc_feature (1)..(25): SEQ ID NO: 2273; WAN024FX7_at; Start 241; Stop 265
cctatgtgtaattggagacggtcaa

SEQ ID NO: 224599 - DNA, 25 bp, Artificial
  probe
  misc_feature (1)..(25): SEQ ID NO: 2273; WAN024FX7_at; Start 693; Stop 717
ggcaaaatatccaattaagccgatt

SEQ ID NO: 224600 - DNA, 25 bp, Artificial
  probe
  misc_feature (1)..(25): SEQ ID NO: 2273; WAN024FX7_at; Start 363; Stop 387
tccaggtaaagaattgaacgcgaca

SEQ ID NO: 224601 - DNA, 25 bp, Artificial
  probe
  misc_feature (1)..(25): SEQ ID NO: 2273; WAN024FX7_at; Start 163; Stop 187
gatactcttcgatttattcgtcgag

SEQ ID NO: 224602 - DNA, 25 bp, Artificial
  probe
  misc_feature (1)..(25): SEQ ID NO: 2273; WAN024FX7_at; Start 267; Stop 291
gaaatattcttatcaaacatctcag

SEQ ID NO: 224603 - DNA, 25 bp, Artificial
  probe
  misc_feature (1)..(25): SEQ ID NO: 2273; WAN024FX7_at; Start 45; Stop 69
taaaagaggcaaggatagaaactgg

SEQ ID NO: 224604 - DNA, 25 bp, Artificial
  probe
  misc_feature (1)..(25): SEQ ID NO: 2273; WAN024FX7_at; Start 458; Stop 482
ttttacgttcggttgaggtgactca

SEQ ID NO: 224605 - DNA, 25 bp, Artificial
  probe
  misc_feature (1)..(25): SEQ ID NO: 2273; WAN024FX7_at; Start 834; Stop 858
taatgtcgaaaatggagatctggtt

SEQ ID NO: 224606 - DNA, 25 bp, Artificial
  probe
  misc_feature (1)..(25): SEQ ID NO: 2273; WAN024FX7_at; Start 608; Stop 632
cgcttaaggttgactatgtgccaat

SEQ ID NO: 224607 - DNA, 25 bp, Artificial
  probe
  misc_feature (1)..(25): SEQ ID NO: 2273; WAN024FX7_at; Start 624; Stop 648
tgtgccaatggttgatattcggtca

SEQ ID NO: 224608 - DNA, 25 bp, Artificial
  probe
  misc_feature (1)..(25): SEQ ID NO: 2273; WAN024FX7_at; Start 594; Stop 618
gatgtgggaacagtcgcttaaggtt

SEQ ID NO: 224609 - DNA, 25 bp, Artificial
  probe
  misc_feature (1)..(25): SEQ ID NO: 2466; WAN024FX8_at; Start 94; Stop 118
caaaatcaacttgcgatcttcaacg

SEQ ID NO: 224610 - DNA, 25 bp, Artificial
  probe
  misc_feature (1)..(25): SEQ ID NO: 2466; WAN024FX8_at; Start 241; Stop 265
tgcgtagaaggctggaatgacacct

SEQ ID NO: 224611 - DNA, 25 bp, Artificial
  probe
  misc_feature (1)..(25): SEQ ID NO: 2466; WAN024FX8_at; Start 104; Stop 128
ttgcgatcttcaacgctttggtaga

SEQ ID NO: 224612 - DNA, 25 bp, Artificial
  probe
  misc_feature (1)..(25): SEQ ID NO: 2466; WAN024FX8_at; Start 149; Stop 173
ttgacataaagaccttgaacacctt

SEQ ID NO: 224613 - DNA, 25 bp, Artificial
  probe
  misc_feature (1)..(25): SEQ ID NO: 2466; WAN024FX8_at; Start 178; Stop 202
aatgaagtattgaacctaggcacgc

SEQ ID NO: 224614 - DNA, 25 bp, Artificial
  probe
  misc_feature (1)..(25): SEQ ID NO: 2466; WAN024FX8_at; Start 181; Stop 205
gaagtattgaacctaggcacgcgta

SEQ ID NO: 224615 - DNA, 25 bp, Artificial
  probe
  misc_feature (1)..(25): SEQ ID NO: 2466; WAN024FX8_at; Start 45; Stop 69
catgggcaataatggtcaatttacc

SEQ ID NO: 224616 - DNA, 25 bp, Artificial
  probe
  misc_feature (1)..(25): SEQ ID NO: 2466; WAN024FX8_at; Start 85; Stop 109
gacttcttccaaaatcaacttgcga

SEQ ID NO: 224617 - DNA, 25 bp, Artificial
  probe
  misc_feature (1)..(25): SEQ ID NO: 2466; WAN024FX8_at; Start 100; Stop 124
caacttgcgatcttcaacgctttgg

SEQ ID NO: 224618 - DNA, 25 bp, Artificial
  probe
  misc_feature (1)..(25): SEQ ID NO: 2466; WAN024FX8_at; Start 36; Stop 60
tgcaagcaacatgggcaataatggt

SEQ ID NO: 224619 - DNA, 25 bp, Artificial
  probe
  misc_feature (1)..(25): SEQ ID NO: 2466; WAN024FX8_at; Start 59; Stop 83
gtcaatttacctttggctaccgcca

SEQ ID NO: 224620 - DNA, 25 bp, Artificial
  probe
  misc_feature (1)..(25): SEQ ID NO: 2466; WAN024FX8_at; Start 27; Stop 51
tagtattattgcaagcaacatgggc

SEQ ID NO: 224621 - DNA, 25 bp, Artificial
  probe
  misc_feature (1)..(25): SEQ ID NO: 2466; WAN024FX8_at; Start 21; Stop 45
tatctttagtattattgcaagcaac

SEQ ID NO: 224622 - DNA, 25 bp, Artificial
  probe
  misc_feature (1)..(25): SEQ ID NO: 2466; WAN024FX8_at; Start 213; Stop 237
gacttacttctccttgctcatcata

SEQ ID NO: 224623 - DNA, 25 bp, Artificial
  probe
  misc_feature (1)..(25): SEQ ID NO: 2466; WAN024FX8_at; Start 2; Stop 26
tggcgagcaagttccatactatctt

SEQ ID NO: 224624 - DNA, 25 bp, Artificial
  probe
  misc_feature (1)..(25): SEQ ID NO: 2466; WAN024FX8_at; Start 197; Stop 221
gcacgcgtacgctctggacttactt

SEQ ID NO: 224625 - DNA, 25 bp, Artificial
  probe
  misc_feature (1)..(25): SEQ ID NO: 2466; WAN024FX8_at; Start 159; Stop 183
gaccttgaacacctttatcaatgaa

SEQ ID NO: 224626 - DNA, 25 bp, Artificial
  probe
  misc_feature (1)..(25): SEQ ID NO: 2466; WAN024FX8_at; Start 6; Stop 30
gagcaagttccatactatctttagt

SEQ ID NO: 224627 - DNA, 25 bp, Artificial
  probe
  misc_feature (1)..(25): SEQ ID NO: 2466; WAN024FX8_at; Start 233; Stop 257
tcataacatgcgtagaaggctggaa

SEQ ID NO: 224628 - DNA, 25 bp, Artificial
  probe
  misc_feature (1)..(25): SEQ ID NO: 2466; WAN024FX8_at; Start 114; Stop 138
caacgctttggtagatacattcacc

SEQ ID NO: 224629 - DNA, 25 bp, Artificial
  probe
  misc_feature (1)..(25): SEQ ID NO: 2466; WAN024FX8_at; Start 74; Stop 98
gctaccgccatgacttcttccaaaa

SEQ ID NO: 224630 - DNA, 25 bp, Artificial
  probe
  misc_feature (1)..(25): SEQ ID NO: 2466; WAN024FX8_at; Start 135; Stop 159
caccagaagaaccattgacataaag

SEQ ID NO: 224631 - DNA, 25 bp, Artificial
  probe
  misc_feature (1)..(25): SEQ ID NO: 2466; WAN024FX8_at; Start 230; Stop 254
tcatcataacatgcgtagaaggctg

SEQ ID NO: 224632 - DNA, 25 bp, Artificial
  probe
  misc_feature (1)..(25): SEQ ID NO: 2466; WAN024FX8_at; Start 194; Stop 218
taggcacgcgtacgctctggactta

SEQ ID NO: 224633 - DNA, 25 bp, Artificial
  probe
  misc_feature (1)..(25): SEQ ID NO: 2466; WAN024FX8_at; Start 204; Stop 228
tacgctctggacttacttctccttg

SEQ ID NO: 224634 - DNA, 25 bp, Artificial
  probe
  misc_feature (1)..(25): SEQ ID NO: 2466; WAN024FX8_at; Start 224; Stop 248
ccttgctcatcataacatgcgtaga

SEQ ID NO: 224635 - DNA, 25 bp, Artificial
  probe
  misc_feature (1)..(25): SEQ ID NO: 2466; WAN024FX8_at; Start 237; Stop 261
aacatgcgtagaaggctggaatgac

SEQ ID NO: 224636 - DNA, 25 bp, Artificial
  probe
  misc_feature (1)..(25): SEQ ID NO: 2466; WAN024FX8_at; Start 186; Stop 210
attgaacctaggcacgcgtacgctc

SEQ ID NO: 224637 - DNA, 25 bp, Artificial
  probe
  misc_feature (1)..(25): SEQ ID NO: 2466; WAN024FX8_at; Start 127; Stop 151
gatacattcaccagaagaaccattg

SEQ ID NO: 224638 - DNA, 25 bp, Artificial
  probe
  misc_feature (1)..(25): SEQ ID NO: 2466; WAN024FX8_at; Start 255; Stop 279
gaatgacaccttcgtattttttcaa

SEQ ID NO: 224639 - DNA, 25 bp, Artificial
  probe
  misc_feature (1)..(25): SEQ ID NO: 2466; WAN024FX8_at; Start 250; Stop 274
ggctggaatgacaccttcgtatttt

SEQ ID NO: 224640 - DNA, 25 bp, Artificial
  probe
  misc_feature (1)..(25): SEQ ID NO: 2466; WAN024FX8_at; Start 165; Stop 189
gaacacctttatcaatgaagtattg

SEQ ID NO: 224641 - DNA, 25 bp, Artificial
  probe
  misc_feature (1)..(25): SEQ ID NO: 2466; WAN024FX8_at; Start 66; Stop 90
tacctttggctaccgccatgacttc

SEQ ID NO: 224642 - DNA, 25 bp, Artificial
  probe
  misc_feature (1)..(25): SEQ ID NO: 2466; WAN024FX8_at; Start 143; Stop 167
gaaccattgacataaagaccttgaa

SEQ ID NO: 224643 - DNA, 25 bp, Artificial
  probe
  misc_feature (1)..(25): SEQ ID NO: 2869; WAN024FX9_at; Start 512; Stop 536
tgccagttcaagatatccaaacctt

SEQ ID NO: 224644 - DNA, 25 bp, Artificial
  probe
  misc_feature (1)..(25): SEQ ID NO: 2869; WAN024FX9_at; Start 25; Stop 49
ggtgtcattccagccttctacgcat

SEQ ID NO: 224645 - DNA, 25 bp, Artificial
  probe
  misc_feature (1)..(25): SEQ ID NO: 2869; WAN024FX9_at; Start 296; Stop 320
gcttgggagtagatgctattgcaac

SEQ ID NO: 224646 - DNA, 25 bp, Artificial
  probe
  misc_feature (1)..(25): SEQ ID NO: 2869; WAN024FX9_at; Start 279; Stop 303
tgctcgccatgctgaaagcttggga

SEQ ID NO: 224647 - DNA, 25 bp, Artificial
  probe
  misc_feature (1)..(25): SEQ ID NO: 2869; WAN024FX9_at; Start 452; Stop 476
caagcctttacacagaaatgttgaa

SEQ ID NO: 224648 - DNA, 25 bp, Artificial
  probe
  misc_feature (1)..(25): SEQ ID NO: 2869; WAN024FX9_at; Start 414; Stop 438
ttacaacattcctcaattggcaggg

SEQ ID NO: 224649 - DNA, 25 bp, Artificial
  probe
  misc_feature (1)..(25): SEQ ID NO: 2869; WAN024FX9_at; Start 138; Stop 162
caatggttcttctggtgaatgtatc

SEQ ID NO: 224650 - DNA, 25 bp, Artificial
  probe
  misc_feature (1)..(25): SEQ ID NO: 2869; WAN024FX9_at; Start 35; Stop 59
cagccttctacgcatgttatgatga

SEQ ID NO: 224651 - DNA, 25 bp, Artificial
  probe
  misc_feature (1)..(25): SEQ ID NO: 2869; WAN024FX9_at; Start 640; Stop 664
ggtgctatgccagaactcttcttga

SEQ ID NO: 224652 - DNA, 25 bp, Artificial
  probe
  misc_feature (1)..(25): SEQ ID NO: 2869; WAN024FX9_at; Start 123; Stop 147
tcaaggtctttatgtcaatggttct

SEQ ID NO: 224653 - DNA, 25 bp, Artificial
  probe
  misc_feature (1)..(25): SEQ ID NO: 2869; WAN024FX9_at; Start 620; Stop 644
ctggtatcggtggtacttatggtgc

SEQ ID NO: 224654 - DNA, 25 bp, Artificial
  probe
  misc_feature (1)..(25): SEQ ID NO: 2869; WAN024FX9_at; Start 886; Stop 910
ttgattcgtgaaaccaaggagcgct

SEQ ID NO: 224655 - DNA, 25 bp, Artificial
  probe
  misc_feature (1)..(25): SEQ ID NO: 2869; WAN024FX9_at; Start 15; Stop 39
aaaatacgaaggtgtcattccagcc

SEQ ID NO: 224656 - DNA, 25 bp, Artificial
  probe
  misc_feature (1)..(25): SEQ ID NO: 2869; WAN024FX9_at; Start 2; Stop 26
tgtcagatttgaaaaaatacgaagg

SEQ ID NO: 224657 - DNA, 25 bp, Artificial
  probe
  misc_feature (1)..(25): SEQ ID NO: 2869; WAN024FX9_at; Start 631; Stop 655
ggtacttatggtgctatgccagaac

SEQ ID NO: 224658 - DNA, 25 bp, Artificial
  probe
  misc_feature (1)..(25): SEQ ID NO: 2869; WAN024FX9_at; Start 892; Stop 916
cgtgaaaccaaggagcgcttcctct

SEQ ID NO: 224659 - DNA, 25 bp, Artificial
  probe
  misc_feature (1)..(25): SEQ ID NO: 2869; WAN024FX9_at; Start 899; Stop 923
ccaaggagcgcttcctctaactaat

SEQ ID NO: 224660 - DNA, 25 bp, Artificial
  probe
  misc_feature (1)..(25): SEQ ID NO: 2869; WAN024FX9_at; Start 820; Stop 844
tctgttcgttcaccattgacaccag

SEQ ID NO: 224661 - DNA, 25 bp, Artificial
  probe
  misc_feature (1)..(25): SEQ ID NO: 2869; WAN024FX9_at; Start 523; Stop 547
gatatccaaacctttgtcagccttg

SEQ ID NO: 224662 - DNA, 25 bp, Artificial
  probe
  misc_feature (1)..(25): SEQ ID NO: 2869; WAN024FX9_at; Start 717; Stop 741
gtatgctatcaacgcaatcattggt

SEQ ID NO: 224663 - DNA, 25 bp, Artificial
  probe
  misc_feature (1)..(25): SEQ ID NO: 2869; WAN024FX9_at; Start 108; Stop 132
cattgataaaggtgttcaaggtctt

SEQ ID NO: 224664 - DNA, 25 bp, Artificial
  probe
  misc_feature (1)..(25): SEQ ID NO: 2869; WAN024FX9_at; Start 401; Stop 425
cagactacgtgatttacaacattcc

SEQ ID NO: 224665 - DNA, 25 bp, Artificial
  probe
  misc_feature (1)..(25): SEQ ID NO: 2869; WAN024FX9_at; Start 270; Stop 294
tatggaacttgctcgccatgctgaa

SEQ ID NO: 224666 - DNA, 25 bp, Artificial
  probe
  misc_feature (1)..(25): SEQ ID NO: 2869; WAN024FX9_at; Start 307; Stop 331
gatgctattgcaacgattccaccaa

SEQ ID NO: 224667 - DNA, 25 bp, Artificial
  probe
  misc_feature (1)..(25): SEQ ID NO: 2869; WAN024FX9_at; Start 663; Stop 687
gaaactcaatcagttgattgcggat

SEQ ID NO: 224668 - DNA, 25 bp, Artificial
  probe
  misc_feature (1)..(25): SEQ ID NO: 2869; WAN024FX9_at; Start 462; Stop 486
cacagaaatgttgaaaaatcctcgt

SEQ ID NO: 224669 - DNA, 25 bp, Artificial
  probe
  misc_feature (1)..(25): SEQ ID NO: 2869; WAN024FX9_at; Start 100; Stop 124
caatacttcattgataaaggtgttc

SEQ ID NO: 224670 - DNA, 25 bp, Artificial
  probe
  misc_feature (1)..(25): SEQ ID NO: 2869; WAN024FX9_at; Start 473; Stop 497
tgaaaaatcctcgtgttatcggtgt

SEQ ID NO: 224671 - DNA, 25 bp, Artificial
  probe
  misc_feature (1)..(25): SEQ ID NO: 2869; WAN024FX9_at; Start 284; Stop 308
gccatgctgaaagcttgggagtaga

SEQ ID NO: 224672 - DNA, 25 bp, Artificial
  probe
  misc_feature (1)..(25): SEQ ID NO: 2869; WAN024FX9_at; Start 697; Stop 721
gaaacagcgcgtgaattgcagtatg

SEQ ID NO: 224673 - DNA, 25 bp, Artificial
  probe
  misc_feature (1)..(25): SEQ ID NO: 2869; WAN024FX9_at; Start 726; Stop 750
caacgcaatcattggtaaactcact

SEQ ID NO: 224674 - DNA, 25 bp, Artificial
  probe
  misc_feature (1)..(25): SEQ ID NO: 2869; WAN024FX9_at; Start 708; Stop 732
tgaattgcagtatgctatcaacgca

SEQ ID NO: 224675 - DNA, 25 bp, Artificial
  probe
  misc_feature (1)..(25): SEQ ID NO: 2869; WAN024FX9_at; Start 352; Stop 376
tactcagttgccaaatactggaacg

SEQ ID NO: 224676 - DNA, 25 bp, Artificial
  probe
  misc_feature (1)..(25): SEQ ID NO: 2869; WAN024FX9_at; Start 652; Stop 676
gaactcttcttgaaactcaatcagt

SEQ ID NO: 224677 - DNA, 25 bp, Artificial
  probe
  misc_feature (1)..(25): SEQ ID NO: 2108; WAN024FXA_at; Start 202; Stop 226
tatataagctgtagtactctccacc

SEQ ID NO: 224678 - DNA, 25 bp, Artificial
  probe
  misc_feature (1)..(25): SEQ ID NO: 2108; WAN024FXA_at; Start 212; Stop 236
gtagtactctccaccaagatccatt

SEQ ID NO: 224679 - DNA, 25 bp, Artificial
  probe
  misc_feature (1)..(25): SEQ ID NO: 2108; WAN024FXA_at; Start 127; Stop 151
cccctagtgaggctgttgttaaaat

SEQ ID NO: 224680 - DNA, 25 bp, Artificial
  probe
  misc_feature (1)..(25): SEQ ID NO: 2108; WAN024FXA_at; Start 98; Stop 122
aaaaattgcaaacactattccaatc

SEQ ID NO: 224681 - DNA, 25 bp, Artificial
  probe
  misc_feature (1)..(25): SEQ ID NO: 2108; WAN024FXA_at; Start 247; Stop 271
gatttcctgactcaacaatcttacc

SEQ ID NO: 224682 - DNA, 25 bp, Artificial
  probe
  misc_feature (1)..(25): SEQ ID NO: 2108; WAN024FXA_at; Start 75; Stop 99
ccatattcaactggaaaatctaaaa

SEQ ID NO: 224683 - DNA, 25 bp, Artificial
  probe
  misc_feature (1)..(25): SEQ ID NO: 2108; WAN024FXA_at; Start 69; Stop 93
gaaataccatattcaactggaaaat

SEQ ID NO: 224684 - DNA, 25 bp, Artificial
  probe
  misc_feature (1)..(25): SEQ ID NO: 2108; WAN024FXA_at; Start 215; Stop 239
gtactctccaccaagatccattaag

SEQ ID NO: 224685 - DNA, 25 bp, Artificial
  probe
  misc_feature (1)..(25): SEQ ID NO: 2108; WAN024FXA_at; Start 255; Stop 279
gactcaacaatcttaccacctttca

SEQ ID NO: 224686 - DNA, 25 bp, Artificial
  probe
  misc_feature (1)..(25): SEQ ID NO: 2108; WAN024FXA_at; Start 29; Stop 53
aatcagcgaacccaatactattcca

SEQ ID NO: 224687 - DNA, 25 bp, Artificial
  probe
  misc_feature (1)..(25): SEQ ID NO: 2108; WAN024FXA_at; Start 64; Stop 88
ctaaagaaataccatattcaactgg

SEQ ID NO: 224688 - DNA, 25 bp, Artificial
  probe
  misc_feature (1)..(25): SEQ ID NO: 2108; WAN024FXA_at; Start 239; Stop 263
gtacttatgatttcctgactcaaca

SEQ ID NO: 224689 - DNA, 25 bp, Artificial
  probe
  misc_feature (1)..(25): SEQ ID NO: 2108; WAN024FXA_at; Start 206; Stop 230
taagctgtagtactctccaccaaga

SEQ ID NO: 224690 - DNA, 25 bp, Artificial
  probe
  misc_feature (1)..(25): SEQ ID NO: 2108; WAN024FXA_at; Start 137; Stop 161
ggctgttgttaaaattacatattca

SEQ ID NO: 224691 - DNA, 25 bp, Artificial
  probe
  misc_feature (1)..(25): SEQ ID NO: 2108; WAN024FXA_at; Start 260; Stop 284
aacaatcttaccacctttcattaca

SEQ ID NO: 224692 - DNA, 25 bp, Artificial
  probe
  misc_feature (1)..(25): SEQ ID NO: 2108; WAN024FXA_at; Start 16; Stop 40
tgtttttgtaaacaatcagcgaacc

SEQ ID NO: 224693 - DNA, 25 bp, Artificial
  probe
  misc_feature (1)..(25): SEQ ID NO: 2108; WAN024FXA_at; Start 104; Stop 128
tgcaaacactattccaatcatcacc

SEQ ID NO: 224694 - DNA, 25 bp, Artificial
  probe
  misc_feature (1)..(25): SEQ ID NO: 2108; WAN024FXA_at; Start 130; Stop 154
ctagtgaggctgttgttaaaattac

SEQ ID NO: 224695 - DNA, 25 bp, Artificial
  probe
  misc_feature (1)..(25): SEQ ID NO: 2108; WAN024FXA_at; Start 209; Stop 233
gctgtagtactctccaccaagatcc

SEQ ID NO: 224696 - DNA, 25 bp, Artificial
  probe
  misc_feature (1)..(25): SEQ ID NO: 2108; WAN024FXA_at; Start 34; Stop 58
gcgaacccaatactattccattcaa

SEQ ID NO: 224697 - DNA, 25 bp, Artificial
  probe
  misc_feature (1)..(25): SEQ ID NO: 2108; WAN024FXA_at; Start 24; Stop 48
taaacaatcagcgaacccaatacta

SEQ ID NO: 224698 - DNA, 25 bp, Artificial
  probe
  misc_feature (1)..(25): SEQ ID NO: 2108; WAN024FXA_at; Start 36; Stop 60
gaacccaatactattccattcaaca

SEQ ID NO: 224699 - DNA, 25 bp, Artificial
  probe
  misc_feature (1)..(25): SEQ ID NO: 2108; WAN024FXA_at; Start 20; Stop 44
tttgtaaacaatcagcgaacccaat

SEQ ID NO: 224700 - DNA, 25 bp, Artificial
  probe
  misc_feature (1)..(25): SEQ ID NO: 2108; WAN024FXA_at; Start 125; Stop 149
cacccctagtgaggctgttgttaaa

SEQ ID NO: 224701 - DNA, 25 bp, Artificial
  probe
  misc_feature (1)..(25): SEQ ID NO: 2108; WAN024FXA_at; Start 166; Stop 190
ctttcttcattttctttacacctca

SEQ ID NO: 224702 - DNA, 25 bp, Artificial
  probe
  misc_feature (1)..(25): SEQ ID NO: 2108; WAN024FXA_at; Start 219; Stop 243
tctccaccaagatccattaagtact

SEQ ID NO: 224703 - DNA, 25 bp, Artificial
  probe
  misc_feature (1)..(25): SEQ ID NO: 2108; WAN024FXA_at; Start 223; Stop 247
caccaagatccattaagtacttatg

SEQ ID NO: 224704 - DNA, 25 bp, Artificial
  probe
  misc_feature (1)..(25): SEQ ID NO: 2108; WAN024FXA_at; Start 194; Stop 218
cctttttgtatataagctgtagtac

SEQ ID NO: 224705 - DNA, 25 bp, Artificial
  probe
  misc_feature (1)..(25): SEQ ID NO: 2108; WAN024FXA_at; Start 113; Stop 137
tattccaatcatcacccctagtgag

SEQ ID NO: 224706 - DNA, 25 bp, Artificial
  probe
  misc_feature (1)..(25): SEQ ID NO: 2108; WAN024FXA_at; Start 22; Stop 46
tgtaaacaatcagcgaacccaatac

SEQ ID NO: 224707 - DNA, 25 bp, Artificial
  probe
  misc_feature (1)..(25): SEQ ID NO: 2108; WAN024FXA_at; Start 18; Stop 42
tttttgtaaacaatcagcgaaccca

SEQ ID NO: 224708 - DNA, 25 bp, Artificial
  probe
  misc_feature (1)..(25): SEQ ID NO: 2108; WAN024FXA_at; Start 118; Stop 142
caatcatcacccctagtgaggctgt

SEQ ID NO: 224709 - DNA, 25 bp, Artificial
  probe
  misc_feature (1)..(25): SEQ ID NO: 2108; WAN024FXA_at; Start 121; Stop 145
tcatcacccctagtgaggctgttgt

SEQ ID NO: 224710 - DNA, 25 bp, Artificial
  probe
  misc_feature (1)..(25): SEQ ID NO: 2108; WAN024FXA_at; Start 233; Stop 257
cattaagtacttatgatttcctgac

SEQ ID NO: 224711 - DNA, 25 bp, Artificial
  probe
  misc_feature (1)..(25): SEQ ID NO: 4933; WAN024FXB_at; Start 40; Stop 64
gaagttacttcacaaaagatagagg

SEQ ID NO: 224712 - DNA, 25 bp, Artificial
  probe
  misc_feature (1)..(25): SEQ ID NO: 4933; WAN024FXB_at; Start 252; Stop 276
taatgaggaaagaataacaaagtat

SEQ ID NO: 224713 - DNA, 25 bp, Artificial
  probe
  misc_feature (1)..(25): SEQ ID NO: 4933; WAN024FXB_at; Start 417; Stop 441
gtactacagcttatatacaaaaagg

SEQ ID NO: 224714 - DNA, 25 bp, Artificial
  probe
  misc_feature (1)..(25): SEQ ID NO: 4933; WAN024FXB_at; Start 70; Stop 94
tgtaaagcagttcaaatctatgatg

SEQ ID NO: 224715 - DNA, 25 bp, Artificial
  probe
  misc_feature (1)..(25): SEQ ID NO: 4933; WAN024FXB_at; Start 93; Stop 117
tgaaatcatggctatgccgatgaaa

SEQ ID NO: 224716 - DNA, 25 bp, Artificial
  probe
  misc_feature (1)..(25): SEQ ID NO: 4933; WAN024FXB_at; Start 215; Stop 239
taattttagatgaagcaactagtgc

SEQ ID NO: 224717 - DNA, 25 bp, Artificial
  probe
  misc_feature (1)..(25): SEQ ID NO: 4933; WAN024FXB_at; Start 315; Stop 339
tagattgtcaacgattaaggatgcg

SEQ ID NO: 224718 - DNA, 25 bp, Artificial
  probe
  misc_feature (1)..(25): SEQ ID NO: 4933; WAN024FXB_at; Start 103; Stop 127
gctatgccgatgaaatttaatacta

SEQ ID NO: 224719 - DNA, 25 bp, Artificial
  probe
  misc_feature (1)..(25): SEQ ID NO: 4933; WAN024FXB_at; Start 351; Stop 375
tgtaatgaaaggtggtaagattgtt

SEQ ID NO: 224720 - DNA, 25 bp, Artificial
  probe
  misc_feature (1)..(25): SEQ ID NO: 4933; WAN024FXB_at; Start 317; Stop 341
gattgtcaacgattaaggatgcgga

SEQ ID NO: 224721 - DNA, 25 bp, Artificial
  probe
  misc_feature (1)..(25): SEQ ID NO: 4933; WAN024FXB_at; Start 47; Stop 71
cttcacaaaagatagaggaagtttg

SEQ ID NO: 224722 - DNA, 25 bp, Artificial
  probe
  misc_feature (1)..(25): SEQ ID NO: 4933; WAN024FXB_at; Start 119; Stop 143
ttaatactatcatctcagagatggg

SEQ ID NO: 224723 - DNA, 25 bp, Artificial
  probe
  misc_feature (1)..(25): SEQ ID NO: 4933; WAN024FXB_at; Start 412; Stop 436
ggagagtactacagcttatatacaa

SEQ ID NO: 224724 - DNA, 25 bp, Artificial
  probe
  misc_feature (1)..(25): SEQ ID NO: 4933; WAN024FXB_at; Start 310; Stop 334
gctcatagattgtcaacgattaagg

SEQ ID NO: 224725 - DNA, 25 bp, Artificial
  probe
  misc_feature (1)..(25): SEQ ID NO: 4933; WAN024FXB_at; Start 357; Stop 381
gaaaggtggtaagattgttgagtca

SEQ ID NO: 224726 - DNA, 25 bp, Artificial
  probe
  misc_feature (1)..(25): SEQ ID NO: 4933; WAN024FXB_at; Start 176; Stop 200
tagcactggcacgtgcattaataaa

SEQ ID NO: 224727 - DNA, 25 bp, Artificial
  probe
  misc_feature (1)..(25): SEQ ID NO: 4933; WAN024FXB_at; Start 179; Stop 203
cactggcacgtgcattaataaataa

SEQ ID NO: 224728 - DNA, 25 bp, Artificial
  probe
  misc_feature (1)..(25): SEQ ID NO: 4933; WAN024FXB_at; Start 114; Stop 138
gaaatttaatactatcatctcagag

SEQ ID NO: 224729 - DNA, 25 bp, Artificial
  probe
  misc_feature (1)..(25): SEQ ID NO: 4933; WAN024FXB_at; Start 205; Stop 229
cctagtattgtaattttagatgaag

SEQ ID NO: 224730 - DNA, 25 bp, Artificial
  probe
  misc_feature (1)..(25): SEQ ID NO: 4933; WAN024FXB_at; Start 420; Stop 444
ctacagcttatatacaaaaaggaaa

SEQ ID NO: 224731 - DNA, 25 bp, Artificial
  probe
  misc_feature (1)..(25): SEQ ID NO: 4933; WAN024FXB_at; Start 183; Stop 207
ggcacgtgcattaataaataatcct

SEQ ID NO: 224732 - DNA, 25 bp, Artificial
  probe
  misc_feature (1)..(25): SEQ ID NO: 4933; WAN024FXB_at; Start 376; Stop 400
gagtcaggaaatcataagtacttaa

SEQ ID NO: 224733 - DNA, 25 bp, Artificial
  probe
  misc_feature (1)..(25): SEQ ID NO: 4933; WAN024FXB_at; Start 169; Stop 193
caacggatagcactggcacgtgcat

SEQ ID NO: 224734 - DNA, 25 bp, Artificial
  probe
  misc_feature (1)..(25): SEQ ID NO: 4933; WAN024FXB_at; Start 362; Stop 386
gtggtaagattgttgagtcaggaaa

SEQ ID NO: 224735 - DNA, 25 bp, Artificial
  probe
  misc_feature (1)..(25): SEQ ID NO: 4933; WAN024FXB_at; Start 246; Stop 270
cactattaatgaggaaagaataaca

SEQ ID NO: 224736 - DNA, 25 bp, Artificial
  probe
  misc_feature (1)..(25): SEQ ID NO: 4933; WAN024FXB_at; Start 99; Stop 123
catggctatgccgatgaaatttaat

SEQ ID NO: 224737 - DNA, 25 bp, Artificial
  probe
  misc_feature (1)..(25): SEQ ID NO: 4933; WAN024FXB_at; Start 406; Stop 430
cttggtggagagtactacagcttat

SEQ ID NO: 224738 - DNA, 25 bp, Artificial
  probe
  misc_feature (1)..(25): SEQ ID NO: 4933; WAN024FXB_at; Start 372; Stop 396
tgttgagtcaggaaatcataagtac

SEQ ID NO: 224739 - DNA, 25 bp, Artificial
  probe
  misc_feature (1)..(25): SEQ ID NO: 4933; WAN024FXB_at; Start 173; Stop 197
ggatagcactggcacgtgcattaat

SEQ ID NO: 224740 - DNA, 25 bp, Artificial
  probe
  misc_feature (1)..(25): SEQ ID NO: 4933; WAN024FXB_at; Start 81; Stop 105
tcaaatctatgatgaaatcatggct

SEQ ID NO: 224741 - DNA, 25 bp, Artificial
  probe
  misc_feature (1)..(25): SEQ ID NO: 4933; WAN024FXB_at; Start 409; Stop 433
ggtggagagtactacagcttatata

SEQ ID NO: 224742 - DNA, 25 bp, Artificial
  probe
  misc_feature (1)..(25): SEQ ID NO: 4933; WAN024FXB_at; Start 187; Stop 211
cgtgcattaataaataatcctagta

SEQ ID NO: 224743 - DNA, 25 bp, Artificial
  probe
  misc_feature (1)..(25): SEQ ID NO: 4933; WAN024FXB_at; Start 242; Stop 266
tagacactattaatgaggaaagaat

SEQ ID NO: 224744 - DNA, 25 bp, Artificial
  probe
  misc_feature (1)..(25): SEQ ID NO: 4933; WAN024FXB_at; Start 59; Stop 83
tagaggaagtttgtaaagcagttca

SEQ ID NO: 224745 - DNA, 25 bp, Artificial
  probe
  misc_feature (1)..(25): SEQ ID NO: 4925; WAN024FXC_at; Start 13; Stop 37
cggagaatgaaattgacaaatagag

SEQ ID NO: 224746 - DNA, 25 bp, Artificial
  probe
  misc_feature (1)..(25): SEQ ID NO: 4925; WAN024FXC_at; Start 737; Stop 761
taacttcagtttgtgtgctgacagg

SEQ ID NO: 224747 - DNA, 25 bp, Artificial
  probe
  misc_feature (1)..(25): SEQ ID NO: 4925; WAN024FXC_at; Start 454; Stop 478
gataaaattcgcaatacctgcgaga

SEQ ID NO: 224748 - DNA, 25 bp, Artificial
  probe
  misc_feature (1)..(25): SEQ ID NO: 4925; WAN024FXC_at; Start 687; Stop 711
gattggagatcgcttgtatacggat

SEQ ID NO: 224749 - DNA, 25 bp, Artificial
  probe
  misc_feature (1)..(25): SEQ ID NO: 4925; WAN024FXC_at; Start 753; Stop 777
gctgacaggagaagcaacggtgaat

SEQ ID NO: 224750 - DNA, 25 bp, Artificial
  probe
  misc_feature (1)..(25): SEQ ID NO: 4925; WAN024FXC_at; Start 721; Stop 745
ggtataaatgcaggagtaacttcag

SEQ ID NO: 224751 - DNA, 25 bp, Artificial
  probe
  misc_feature (1)..(25): SEQ ID NO: 4925; WAN024FXC_at; Start 612; Stop 636
cataggtaaacctgaacctacgatg

SEQ ID NO: 224752 - DNA, 25 bp, Artificial
  probe
  misc_feature (1)..(25): SEQ ID NO: 4925; WAN024FXC_at; Start 711; Stop 735
tatcatgactggtataaatgcagga

SEQ ID NO: 224753 - DNA, 25 bp, Artificial
  probe
  misc_feature (1)..(25): SEQ ID NO: 4925; WAN024FXC_at; Start 385; Stop 409
gatgtaactgagcaagttagtgctg

SEQ ID NO: 224754 - DNA, 25 bp, Artificial
  probe
  misc_feature (1)..(25): SEQ ID NO: 4925; WAN024FXC_at; Start 593; Stop 617
tcgataggaaacctgtttacatagg

SEQ ID NO: 224755 - DNA, 25 bp, Artificial
  probe
  misc_feature (1)..(25): SEQ ID NO: 4925; WAN024FXC_at; Start 400; Stop 424
gttagtgctgatatagatgttgttc

SEQ ID NO: 224756 - DNA, 25 bp, Artificial
  probe
  misc_feature (1)..(25): SEQ ID NO: 4925; WAN024FXC_at; Start 766; Stop 790
gcaacggtgaatgatattcaacaag

SEQ ID NO: 224757 - DNA, 25 bp, Artificial
  probe
  misc_feature (1)..(25): SEQ ID NO: 4925; WAN024FXC_at; Start 530; Stop 554
gcccagtatcgtttggattcatccc

SEQ ID NO: 224758 - DNA, 25 bp, Artificial
  probe
  misc_feature (1)..(25): SEQ ID NO: 4925; WAN024FXC_at; Start 510; Stop 534
tactaaccctgatattcgctgccca

SEQ ID NO: 224759 - DNA, 25 bp, Artificial
  probe
  misc_feature (1)..(25): SEQ ID NO: 4925; WAN024FXC_at; Start 497; Stop 521
tacctttcatagctactaaccctga

SEQ ID NO: 224760 - DNA, 25 bp, Artificial
  probe
  misc_feature (1)..(25): SEQ ID NO: 4925; WAN024FXC_at; Start 556; Stop 580
gattgtggttctatttgtgatatga

SEQ ID NO: 224761 - DNA, 25 bp, Artificial
  probe
  misc_feature (1)..(25): SEQ ID NO: 4925; WAN024FXC_at; Start 628; Stop 652
cctacgatggttgatattgttcgaa

SEQ ID NO: 224762 - DNA, 25 bp, Artificial
  probe
  misc_feature (1)..(25): SEQ ID NO: 4925; WAN024FXC_at; Start 242; Stop 266
gattaggtattaaagctgaacgaga

SEQ ID NO: 224763 - DNA, 25 bp, Artificial
  probe
  misc_feature (1)..(25): SEQ ID NO: 4925; WAN024FXC_at; Start 3; Stop 27
gaaccgaatacggagaatgaaattg

SEQ ID NO: 224764 - DNA, 25 bp, Artificial
  probe
  misc_feature (1)..(25): SEQ ID NO: 4925; WAN024FXC_at; Start 361; Stop 385
aaagaactatctgacgcaggaattg

SEQ ID NO: 224765 - DNA, 25 bp, Artificial
  probe
  misc_feature (1)..(25): SEQ ID NO: 4925; WAN024FXC_at; Start 522; Stop 546
tattcgctgcccagtatcgtttgga

SEQ ID NO: 224766 - DNA, 25 bp, Artificial
  probe
  misc_feature (1)..(25): SEQ ID NO: 4925; WAN024FXC_at; Start 431; Stop 455
gttttgatacagaattaaccagtga

SEQ ID NO: 224767 - DNA, 25 bp, Artificial
  probe
  misc_feature (1)..(25): SEQ ID NO: 4925; WAN024FXC_at; Start 325; Stop 349
tctaaagtttattgccaaggaacaa

SEQ ID NO: 224768 - DNA, 25 bp, Artificial
  probe
  misc_feature (1)..(25): SEQ ID NO: 4925; WAN024FXC_at; Start 85; Stop 109
ttcttatttgatatggatggtacca

SEQ ID NO: 224769 - DNA, 25 bp, Artificial
  probe
  misc_feature (1)..(25): SEQ ID NO: 4925; WAN024FXC_at; Start 198; Stop 222
caattcatctaagtctgttgttgac

SEQ ID NO: 224770 - DNA, 25 bp, Artificial
  probe
  misc_feature (1)..(25): SEQ ID NO: 4925; WAN024FXC_at; Start 100; Stop 124
gatggtaccatttatgaagaagata

SEQ ID NO: 224771 - DNA, 25 bp, Artificial
  probe
  misc_feature (1)..(25): SEQ ID NO: 4925; WAN024FXC_at; Start 675; Stop 699
tgaaacagttgtgattggagatcgc

SEQ ID NO: 224772 - DNA, 25 bp, Artificial
  probe
  misc_feature (1)..(25): SEQ ID NO: 4925; WAN024FXC_at; Start 698; Stop 722
gcttgtatacggatatcatgactgg

SEQ ID NO: 224773 - DNA, 25 bp, Artificial
  probe
  misc_feature (1)..(25): SEQ ID NO: 4925; WAN024FXC_at; Start 154; Stop 178
gactatattcataatattggcggtg

SEQ ID NO: 224774 - DNA, 25 bp, Artificial
  probe
  misc_feature (1)..(25): SEQ ID NO: 4925; WAN024FXC_at; Start 446; Stop 470
taaccagtgataaaattcgcaatac

SEQ ID NO: 224775 - DNA, 25 bp, Artificial
  probe
  misc_feature (1)..(25): SEQ ID NO: 4925; WAN024FXC_at; Start 375; Stop 399
cgcaggaattgatgtaactgagcaa

SEQ ID NO: 224776 - DNA, 25 bp, Artificial
  probe
  misc_feature (1)..(25): SEQ ID NO: 4925; WAN024FXC_at; Start 132; Stop 156
tgagggtactctcgaattattagac

SEQ ID NO: 224777 - DNA, 25 bp, Artificial
  probe
  misc_feature (1)..(25): SEQ ID NO: 4925; WAN024FXC_at; Start 43; Stop 67
tattttggtgctgatattagtgaac

SEQ ID NO: 224778 - DNA, 25 bp, Artificial
  probe
  misc_feature (1)..(25): SEQ ID NO: 4925; WAN024FXC_at; Start 822; Stop 846
cgtgaaagaaatgtggaaaggaatt

SEQ ID NO: 224779 - DNA, 25 bp, Artificial
  probe
  misc_feature (1)..(25): SEQ ID NO: 892; WAN024FXD_at; Start 15; Stop 39
tttagcagcagggttaggaacacgt

SEQ ID NO: 224780 - DNA, 25 bp, Artificial
  probe
  misc_feature (1)..(25): SEQ ID NO: 892; WAN024FXD_at; Start 449; Stop 473
tttctaaacagatttcacctgagga

SEQ ID NO: 224781 - DNA, 25 bp, Artificial
  probe
  misc_feature (1)..(25): SEQ ID NO: 892; WAN024FXD_at; Start 172; Stop 196
tctgtattaacagatgcagttactg

SEQ ID NO: 224782 - DNA, 25 bp, Artificial
  probe
  misc_feature (1)..(25): SEQ ID NO: 892; WAN024FXD_at; Start 571; Stop 595
cttcaaatgtggagtgaggttgctc

SEQ ID NO: 224783 - DNA, 25 bp, Artificial
  probe
  misc_feature (1)..(25): SEQ ID NO: 892; WAN024FXD_at; Start 406; Stop 430
gagtctatgaaagtcgtagaaaaaa

SEQ ID NO: 224784 - DNA, 25 bp, Artificial
  probe
  misc_feature (1)..(25): SEQ ID NO: 892; WAN024FXD_at; Start 331; Stop 355
gcttctgttattaaaagtctgttgc

SEQ ID NO: 224785 - DNA, 25 bp, Artificial
  probe
  misc_feature (1)..(25): SEQ ID NO: 892; WAN024FXD_at; Start 240; Stop 264
aacgactaataatatgtattcagcc

SEQ ID NO: 224786 - DNA, 25 bp, Artificial
  probe
  misc_feature (1)..(25): SEQ ID NO: 892; WAN024FXD_at; Start 561; Stop 585
taaacgagaacttcaaatgtggagt

SEQ ID NO: 224787 - DNA, 25 bp, Artificial
  probe
  misc_feature (1)..(25): SEQ ID NO: 892; WAN024FXD_at; Start 249; Stop 273
taatatgtattcagcctatctagga

SEQ ID NO: 224788 - DNA, 25 bp, Artificial
  probe
  misc_feature (1)..(25): SEQ ID NO: 892; WAN024FXD_at; Start 295; Stop 319
gacttcttaatgatgaatgcagatg

SEQ ID NO: 224789 - DNA, 25 bp, Artificial
  probe
  misc_feature (1)..(25): SEQ ID NO: 892; WAN024FXD_at; Start 277; Stop 301
gctgcaatgggtgatagtgacttct

SEQ ID NO: 224790 - DNA, 25 bp, Artificial
  probe
  misc_feature (1)..(25): SEQ ID NO: 892; WAN024FXD_at; Start 149; Stop 173
cgattattgctggatataagtcatc

SEQ ID NO: 224791 - DNA, 25 bp, Artificial
  probe
  misc_feature (1)..(25): SEQ ID NO: 892; WAN024FXD_at; Start 51; Stop 75
taccaatgaggtaccaaaatctttg

SEQ ID NO: 224792 - DNA, 25 bp, Artificial
  probe
  misc_feature (1)..(25): SEQ ID NO: 892; WAN024FXD_at; Start 362; Stop 386
aagctccaaatgcaattgtaactga

SEQ ID NO: 224793 - DNA, 25 bp, Artificial
  probe
  misc_feature (1)..(25): SEQ ID NO: 892; WAN024FXD_at; Start 3; Stop 27
gaaagcacttattttagcagcaggg

SEQ ID NO: 224794 - DNA, 25 bp, Artificial
  probe
  misc_feature (1)..(25): SEQ ID NO: 892; WAN024FXD_at; Start 526; Stop 550
cgattctttgaaaagtgtaaggaat

SEQ ID NO: 224795 - DNA, 25 bp, Artificial
  probe
  misc_feature (1)..(25): SEQ ID NO: 892; WAN024FXD_at; Start 308; Stop 332
tgaatgcagatgtattttatgatgc

SEQ ID NO: 224796 - DNA, 25 bp, Artificial
  probe
  misc_feature (1)..(25): SEQ ID NO: 892; WAN024FXD_at; Start 88; Stop 112
ggtaagccaattttgatgaaacaaa

SEQ ID NO: 224797 - DNA, 25 bp, Artificial
  probe
  misc_feature (1)..(25): SEQ ID NO: 892; WAN024FXD_at; Start 20; Stop 44
cagcagggttaggaacacgtctagc

SEQ ID NO: 224798 - DNA, 25 bp, Artificial
  probe
  misc_feature (1)..(25): SEQ ID NO: 892; WAN024FXD_at; Start 581; Stop 605
ggagtgaggttgctcttaatgcaat

SEQ ID NO: 224799 - DNA, 25 bp, Artificial
  probe
  misc_feature (1)..(25): SEQ ID NO: 892; WAN024FXD_at; Start 137; Stop 161
ttacagatattacgattattgctgg

SEQ ID NO: 224800 - DNA, 25 bp, Artificial
  probe
  misc_feature (1)..(25): SEQ ID NO: 892; WAN024FXD_at; Start 345; Stop 369
aagtctgttgcttcataaagctcca

SEQ ID NO: 224801 - DNA, 25 bp, Artificial
  probe
  misc_feature (1)..(25): SEQ ID NO: 892; WAN024FXD_at; Start 160; Stop 184
ggatataagtcatctgtattaacag

SEQ ID NO: 224802 - DNA, 25 bp, Artificial
  probe
  misc_feature (1)..(25): SEQ ID NO: 892; WAN024FXD_at; Start 75; Stop 99
ggtaccagtcaatggtaagccaatt

SEQ ID NO: 224803 - DNA, 25 bp, Artificial
  probe
  misc_feature (1)..(25): SEQ ID NO: 892; WAN024FXD_at; Start 263; Stop 287
cctatctaggaaaagctgcaatggg

SEQ ID NO: 224804 - DNA, 25 bp, Artificial
  probe
  misc_feature (1)..(25): SEQ ID NO: 892; WAN024FXD_at; Start 65; Stop 89
caaaatctttggtaccagtcaatgg

SEQ ID NO: 224805 - DNA, 25 bp, Artificial
  probe
  misc_feature (1)..(25): SEQ ID NO: 892; WAN024FXD_at; Start 397; Stop 421
tatattgaagagtctatgaaagtcg

SEQ ID NO: 224806 - DNA, 25 bp, Artificial
  probe
  misc_feature (1)..(25): SEQ ID NO: 892; WAN024FXD_at; Start 354; Stop 378
gcttcataaagctccaaatgcaatt

SEQ ID NO: 224807 - DNA, 25 bp, Artificial
  probe
  misc_feature (1)..(25): SEQ ID NO: 892; WAN024FXD_at; Start 192; Stop 216
tactgaaaagtatccagaaattaat

SEQ ID NO: 224808 - DNA, 25 bp, Artificial
  probe
  misc_feature (1)..(25): SEQ ID NO: 892; WAN024FXD_at; Start 646; Stop 670
cgttggttagaaattgataatcatg

SEQ ID NO: 224809 - DNA, 25 bp, Artificial
  probe
  misc_feature (1)..(25): SEQ ID NO: 892; WAN024FXD_at; Start 547; Stop 571
gaatttattgaagataaacgagaac

SEQ ID NO: 224810 - DNA, 25 bp, Artificial
  probe
  misc_feature (1)..(25): SEQ ID NO: 892; WAN024FXD_at; Start 222; Stop 246
tgataatgttgattttaaaacgact

SEQ ID NO: 224811 - DNA, 25 bp, Artificial
  probe
  misc_feature (1)..(25): SEQ ID NO: 892; WAN024FXD_at; Start 499; Stop 523
tataaattctcttatgaagcaggtg

SEQ ID NO: 224812 - DNA, 25 bp, Artificial
  probe
  misc_feature (1)..(25): SEQ ID NO: 892; WAN024FXD_at; Start 184; Stop 208
gatgcagttactgaaaagtatccag

SEQ ID NO: 224813 - DNA, 25 bp, Artificial
  probe
  misc_feature (1)..(25): SEQ ID NO: 4868; WAN024FXE_at; Start 355; Stop 379
gcttccccagttgctgttttgaaaa

SEQ ID NO: 224814 - DNA, 25 bp, Artificial
  probe
  misc_feature (1)..(25): SEQ ID NO: 4868; WAN024FXE_at; Start 340; Stop 364
gcaaatgatggcattgcttccccag

SEQ ID NO: 224815 - DNA, 25 bp, Artificial
  probe
  misc_feature (1)..(25): SEQ ID NO: 4868; WAN024FXE_at; Start 857; Stop 881
gatttgaggttcatattaacccgaa

SEQ ID NO: 224816 - DNA, 25 bp, Artificial
  probe
  misc_feature (1)..(25): SEQ ID NO: 4868; WAN024FXE_at; Start 671; Stop 695
caggcattgcaatggattttgcggg

SEQ ID NO: 224817 - DNA, 25 bp, Artificial
  probe
  misc_feature (1)..(25): SEQ ID NO: 4868; WAN024FXE_at; Start 442; Stop 466
gatgttattgcatcaggacctatac

SEQ ID NO: 224818 - DNA, 25 bp, Artificial
  probe
  misc_feature (1)..(25): SEQ ID NO: 4868; WAN024FXE_at; Start 932; Stop 956
caaaaatgagaagtaatcgctatac

SEQ ID NO: 224819 - DNA, 25 bp, Artificial
  probe
  misc_feature (1)..(25): SEQ ID NO: 4868; WAN024FXE_at; Start 918; Stop 942
tatgcaacatgctacaaaaatgaga

SEQ ID NO: 224820 - DNA, 25 bp, Artificial
  probe
  misc_feature (1)..(25): SEQ ID NO: 4868; WAN024FXE_at; Start 505; Stop 529
tacactgcattgaaagattgggagt

SEQ ID NO: 224821 - DNA, 25 bp, Artificial
  probe
  misc_feature (1)..(25): SEQ ID NO: 4868; WAN024FXE_at; Start 841; Stop 865
gtggattacttgcaaagatttgagg

SEQ ID NO: 224822 - DNA, 25 bp, Artificial
  probe
  misc_feature (1)..(25): SEQ ID NO: 4868; WAN024FXE_at; Start 195; Stop 219
tgcttatgcgatgaatatagcagaa

SEQ ID NO: 224823 - DNA, 25 bp, Artificial
  probe
  misc_feature (1)..(25): SEQ ID NO: 4868; WAN024FXE_at; Start 793; Stop 817
ggtacagtcgcagttttgaaattaa

SEQ ID NO: 224824 - DNA, 25 bp, Artificial
  probe
  misc_feature (1)..(25): SEQ ID NO: 4868; WAN024FXE_at; Start 702; Stop 726
tagacctgtcagtgggtcagagcac

SEQ ID NO: 224825 - DNA, 25 bp, Artificial
  probe
  misc_feature (1)..(25): SEQ ID NO: 4868; WAN024FXE_at; Start 748; Stop 772
tactatggttctacaaggaatcttc

SEQ ID NO: 224826 - DNA, 25 bp, Artificial
  probe
  misc_feature (1)..(25): SEQ ID NO: 4868; WAN024FXE_at; Start 121; Stop 145
tacggttcgatagtacgttcacaaa

SEQ ID NO: 224827 - DNA, 25 bp, Artificial
  probe
  misc_feature (1)..(25): SEQ ID NO: 4868; WAN024FXE_at; Start 89; Stop 113
tatattgtgctgatccagttgtcga

SEQ ID NO: 224828 - DNA, 25 bp, Artificial
  probe
  misc_feature (1)..(25): SEQ ID NO: 4868; WAN024FXE_at; Start 716; Stop 740
ggtcagagcacttatttagtcatgc

SEQ ID NO: 224829 - DNA, 25 bp, Artificial
  probe
  misc_feature (1)..(25): SEQ ID NO: 4868; WAN024FXE_at; Start 291; Stop 315
tgcatcttttatttcgaaacgtcct

SEQ ID NO: 224830 - DNA, 25 bp, Artificial
  probe
  misc_feature (1)..(25): SEQ ID NO: 4868; WAN024FXE_at; Start 765; Stop 789
gaatcttcatggaattcaggttgca

SEQ ID NO: 224831 - DNA, 25 bp, Artificial
  probe
  misc_feature (1)..(25): SEQ ID NO: 4868; WAN024FXE_at; Start 409; Stop 433
gcggctatcccctcaatgacactaa

SEQ ID NO: 224832 - DNA, 25 bp, Artificial
  probe
  misc_feature (1)..(25): SEQ ID NO: 4868; WAN024FXE_at; Start 231; Stop 255
cacagatattgactgtattgtggga

SEQ ID NO: 224833 - DNA, 25 bp, Artificial
  probe
  misc_feature (1)..(25): SEQ ID NO: 4868; WAN024FXE_at; Start 559; Stop 583
catggttttgcatatctaatgtcgc

SEQ ID NO: 224834 - DNA, 25 bp, Artificial
  probe
  misc_feature (1)..(25): SEQ ID NO: 4868; WAN024FXE_at; Start 473; Stop 497
taaaagctggtatcggtgatacaat

SEQ ID NO: 224835 - DNA, 25 bp, Artificial
  probe
  misc_feature (1)..(25): SEQ ID NO: 4868; WAN024FXE_at; Start 687; Stop 711
ttttgcgggaagtagtagacctgtc

SEQ ID NO: 224836 - DNA, 25 bp, Artificial
  probe
  misc_feature (1)..(25): SEQ ID NO: 4868; WAN024FXE_at; Start 309; Stop 333
acgtccttacctatcgattccgaca

SEQ ID NO: 224837 - DNA, 25 bp, Artificial
  probe
  misc_feature (1)..(25): SEQ ID NO: 4868; WAN024FXE_at; Start 23; Stop 47
taggaagtggagctattcatcaaat

SEQ ID NO: 224838 - DNA, 25 bp, Artificial
  probe
  misc_feature (1)..(25): SEQ ID NO: 4868; WAN024FXE_at; Start 575; Stop 599
taatgtcgcaaaattctttagatgc

SEQ ID NO: 224839 - DNA, 25 bp, Artificial
  probe
  misc_feature (1)..(25): SEQ ID NO: 4868; WAN024FXE_at; Start 384; Stop 408
ggatgatagaccaaaaagcttaggg

SEQ ID NO: 224840 - DNA, 25 bp, Artificial
  probe
  misc_feature (1)..(25): SEQ ID NO: 4868; WAN024FXE_at; Start 611; Stop 635
cgaagtataattctattacccctga

SEQ ID NO: 224841 - DNA, 25 bp, Artificial
  probe
  misc_feature (1)..(25): SEQ ID NO: 4868; WAN024FXE_at; Start 104; Stop 128
cagttgtcgatgacttgtacggttc

SEQ ID NO: 224842 - DNA, 25 bp, Artificial
  probe
  misc_feature (1)..(25): SEQ ID NO: 4868; WAN024FXE_at; Start 324; Stop 348
gattccgacaacagcagcaaatgat

SEQ ID NO: 224843 - DNA, 25 bp, Artificial
  probe
  misc_feature (1)..(25): SEQ ID NO: 4868; WAN024FXE_at; Start 263; Stop 287
gaggtcgtgttttagatgtctgcaa

SEQ ID NO: 224844 - DNA, 25 bp, Artificial
  probe
  misc_feature (1)..(25): SEQ ID NO: 4868; WAN024FXE_at; Start 490; Stop 514
gatacaatatccaattacactgcat

SEQ ID NO: 224845 - DNA, 25 bp, Artificial
  probe
  misc_feature (1)..(25): SEQ ID NO: 4868; WAN024FXE_at; Start 661; Stop 685
ttagttttatcaggcattgcaatgg

SEQ ID NO: 224846 - DNA, 25 bp, Artificial
  probe
  misc_feature (1)..(25): SEQ ID NO: 4868; WAN024FXE_at; Start 780; Stop 804
tcaggttgcattaggtacagtcgca

SEQ ID NO: 224847 - DNA, 25 bp, Artificial
  probe
  misc_feature (1)..(25): SEQ ID NO: 772; WAN024FXF_at; Start 540; Stop 564
gccgagaaatgatgccttgtttcac

SEQ ID NO: 224848 - DNA, 25 bp, Artificial
  probe
  misc_feature (1)..(25): SEQ ID NO: 772; WAN024FXF_at; Start 1084; Stop 1108
gaaatactgtgtccaatctttaatg

SEQ ID NO: 224849 - DNA, 25 bp, Artificial
  probe
  misc_feature (1)..(25): SEQ ID NO: 772; WAN024FXF_at; Start 912; Stop 936
gccttatgtcagatatgtgaatgat

SEQ ID NO: 224850 - DNA, 25 bp, Artificial
  probe
  misc_feature (1)..(25): SEQ ID NO: 772; WAN024FXF_at; Start 438; Stop 462
tgatgcaagagtcacagatataatg

SEQ ID NO: 224851 - DNA, 25 bp, Artificial
  probe
  misc_feature (1)..(25): SEQ ID NO: 772; WAN024FXF_at; Start 1091; Stop 1115
tgtgtccaatctttaatggaaccgc

SEQ ID NO: 224852 - DNA, 25 bp, Artificial
  probe
  misc_feature (1)..(25): SEQ ID NO: 772; WAN024FXF_at; Start 1012; Stop 1036
gaagaattgtatgacttactgccta

SEQ ID NO: 224853 - DNA, 25 bp, Artificial
  probe
  misc_feature (1)..(25): SEQ ID NO: 772; WAN024FXF_at; Start 900; Stop 924
gcttttaaacaagccttatgtcaga

SEQ ID NO: 224854 - DNA, 25 bp, Artificial
  probe
  misc_feature (1)..(25): SEQ ID NO: 772; WAN024FXF_at; Start 473; Stop 497
gcagaaaacaaactgaagaatttca

SEQ ID NO: 224855 - DNA, 25 bp, Artificial
  probe
  misc_feature (1)..(25): SEQ ID NO: 772; WAN024FXF_at; Start 1107; Stop 1131
tggaaccgctagtgaaaatgtagga

SEQ ID NO: 224856 - DNA, 25 bp, Artificial
  probe
  misc_feature (1)..(25): SEQ ID NO: 772; WAN024FXF_at; Start 564; Stop 588
ctataaggaagactacgacaagtta

SEQ ID NO: 224857 - DNA, 25 bp, Artificial
  probe
  misc_feature (1)..(25): SEQ ID NO: 772; WAN024FXF_at; Start 626; Stop 650
attatgttattttatatgcccctac

SEQ ID NO: 224858 - DNA, 25 bp, Artificial
  probe
  misc_feature (1)..(25): SEQ ID NO: 772; WAN024FXF_at; Start 443; Stop 467
caagagtcacagatataatgatttc

SEQ ID NO: 224859 - DNA, 25 bp, Artificial
  probe
  misc_feature (1)..(25): SEQ ID NO: 772; WAN024FXF_at; Start 511; Stop 535
tattcaggagaaatttttgaggtgg

SEQ ID NO: 224860 - DNA, 25 bp, Artificial
  probe
  misc_feature (1)..(25): SEQ ID NO: 772; WAN024FXF_at; Start 550; Stop 574
gatgccttgtttcactataaggaag

SEQ ID NO: 224861 - DNA, 25 bp, Artificial
  probe
  misc_feature (1)..(25): SEQ ID NO: 772; WAN024FXF_at; Start 1015; Stop 1039
gaattgtatgacttactgcctaaaa

SEQ ID NO: 224862 - DNA, 25 bp, Artificial
  probe
  misc_feature (1)..(25): SEQ ID NO: 772; WAN024FXF_at; Start 638; Stop 662
tatatgcccctactttcagagatga

SEQ ID NO: 224863 - DNA, 25 bp, Artificial
  probe
  misc_feature (1)..(25): SEQ ID NO: 772; WAN024FXF_at; Start 452; Stop 476
cagatataatgatttcagatagcag

SEQ ID NO: 224864 - DNA, 25 bp, Artificial
  probe
  misc_feature (1)..(25): SEQ ID NO: 772; WAN024FXF_at; Start 1073; Stop 1097
aatatagaaatgaaatactgtgtcc

SEQ ID NO: 224865 - DNA, 25 bp, Artificial
  probe
  misc_feature (1)..(25): SEQ ID NO: 772; WAN024FXF_at; Start 1006; Stop 1030
actgctgaagaattgtatgacttac

SEQ ID NO: 224866 - DNA, 25 bp, Artificial
  probe
  misc_feature (1)..(25): SEQ ID NO: 772; WAN024FXF_at; Start 433; Stop 457
aagtatgatgcaagagtcacagata

SEQ ID NO: 224867 - DNA, 25 bp, Artificial
  probe
  misc_feature (1)..(25): SEQ ID NO: 772; WAN024FXF_at; Start 558; Stop 582
gtttcactataaggaagactacgac

SEQ ID NO: 224868 - DNA, 25 bp, Artificial
  probe
  misc_feature (1)..(25): SEQ ID NO: 772; WAN024FXF_at; Start 1103; Stop 1127
ttaatggaaccgctagtgaaaatgt

SEQ ID NO: 224869 - DNA, 25 bp, Artificial
  probe
  misc_feature (1)..(25): SEQ ID NO: 772; WAN024FXF_at; Start 907; Stop 931
aacaagccttatgtcagatatgtga

SEQ ID NO: 224870 - DNA, 25 bp, Artificial
  probe
  misc_feature (1)..(25): SEQ ID NO: 772; WAN024FXF_at; Start 682; Stop 706
gatataaattttgaacggcttttgc

SEQ ID NO: 224871 - DNA, 25 bp, Artificial
  probe
  misc_feature (1)..(25): SEQ ID NO: 772; WAN024FXF_at; Start 921; Stop 945
cagatatgtgaatgatttagaaaaa

SEQ ID NO: 224872 - DNA, 25 bp, Artificial
  probe
  misc_feature (1)..(25): SEQ ID NO: 772; WAN024FXF_at; Start 574; Stop 598
gactacgacaagttaaataatatca

SEQ ID NO: 224873 - DNA, 25 bp, Artificial
  probe
  misc_feature (1)..(25): SEQ ID NO: 772; WAN024FXF_at; Start 891; Stop 915
tgattttatgcttttaaacaagcct

SEQ ID NO: 224874 - DNA, 25 bp, Artificial
  probe
  misc_feature (1)..(25): SEQ ID NO: 772; WAN024FXF_at; Start 1077; Stop 1101
tagaaatgaaatactgtgtccaatc

SEQ ID NO: 224875 - DNA, 25 bp, Artificial
  probe
  misc_feature (1)..(25): SEQ ID NO: 772; WAN024FXF_at; Start 496; Stop 520
caaaagtatttttggtattcaggag

SEQ ID NO: 224876 - DNA, 25 bp, Artificial
  probe
  misc_feature (1)..(25): SEQ ID NO: 772; WAN024FXF_at; Start 665; Stop 689
gggatgcatcttatttagatataaa

SEQ ID NO: 224877 - DNA, 25 bp, Artificial
  probe
  misc_feature (1)..(25): SEQ ID NO: 772; WAN024FXF_at; Start 535; Stop 559
gggatgccgagaaatgatgccttgt

SEQ ID NO: 224878 - DNA, 25 bp, Artificial
  probe
  misc_feature (1)..(25): SEQ ID NO: 772; WAN024FXF_at; Start 937; Stop 961
ttagaaaaatatgctgagcttaggg

SEQ ID NO: 224879 - DNA, 25 bp, Artificial
  probe
  misc_feature (1)..(25): SEQ ID NO: 772; WAN024FXF_at; Start 467; Stop 491
cagatagcagaaaacaaactgaaga

SEQ ID NO: 224880 - DNA, 25 bp, Artificial
  probe
  misc_feature (1)..(25): SEQ ID NO: 772; WAN024FXF_at; Start 642; Stop 666
tgcccctactttcagagatgatggg

SEQ ID NO: 224881 - DNA, 25 bp, Artificial
  probe
  misc_feature (1)..(25): SEQ ID NO: 2696; WAN024FXG_at; Start 263; Stop 287
tatttgtatggatgttttggagaga

SEQ ID NO: 224882 - DNA, 25 bp, Artificial
  probe
  misc_feature (1)..(25): SEQ ID NO: 2696; WAN024FXG_at; Start 643; Stop 667
ggaacaattatctatccaatactaa

SEQ ID NO: 224883 - DNA, 25 bp, Artificial
  probe
  misc_feature (1)..(25): SEQ ID NO: 2696; WAN024FXG_at; Start 797; Stop 821
ttggagataaatatgcgacttttgt

SEQ ID NO: 224884 - DNA, 25 bp, Artificial
  probe
  misc_feature (1)..(25): SEQ ID NO: 2696; WAN024FXG_at; Start 568; Stop 592
ggaataggaattcttattgcacaga

SEQ ID NO: 224885 - DNA, 25 bp, Artificial
  probe
  misc_feature (1)..(25): SEQ ID NO: 2696; WAN024FXG_at; Start 449; Stop 473
gactactattgacaaaacgatggat

SEQ ID NO: 224886 - DNA, 25 bp, Artificial
  probe
  misc_feature (1)..(25): SEQ ID NO: 2696; WAN024FXG_at; Start 78; Stop 102
tgctattcatatatggctaccagga

SEQ ID NO: 224887 - DNA, 25 bp, Artificial
  probe
  misc_feature (1)..(25): SEQ ID NO: 2696; WAN024FXG_at; Start 39; Stop 63
tttgcatgcaataaaagtattagca

SEQ ID NO: 224888 - DNA, 25 bp, Artificial
  probe
  misc_feature (1)..(25): SEQ ID NO: 2696; WAN024FXG_at; Start 718; Stop 742
tctgtgctagcaaccataatattga

SEQ ID NO: 224889 - DNA, 25 bp, Artificial
  probe
  misc_feature (1)..(25): SEQ ID NO: 2696; WAN024FXG_at; Start 828; Stop 852
tatacaccagtttatcattgtgata

SEQ ID NO: 224890 - DNA, 25 bp, Artificial
  probe
  misc_feature (1)..(25): SEQ ID NO: 2696; WAN024FXG_at; Start 130; Stop 154
gcacgatttgcagttccaatgttct

SEQ ID NO: 224891 - DNA, 25 bp, Artificial
  probe
  misc_feature (1)..(25): SEQ ID NO: 2696; WAN024FXG_at; Start 873; Stop 897
tgtttatattctcaaatttgggacg

SEQ ID NO: 224892 - DNA, 25 bp, Artificial
  probe
  misc_feature (1)..(25): SEQ ID NO: 2696; WAN024FXG_at; Start 485; Stop 509
tactattttctttcattatggaagc

SEQ ID NO: 224893 - DNA, 25 bp, Artificial
  probe
  misc_feature (1)..(25): SEQ ID NO: 2696; WAN024FXG_at; Start 496; Stop 520
ttcattatggaagctacaattagcg

SEQ ID NO: 224894 - DNA, 25 bp, Artificial
  probe
  misc_feature (1)..(25): SEQ ID NO: 2696; WAN024FXG_at; Start 110; Stop 134
gagcgttttatcaaataatagcacg

SEQ ID NO: 224895 - DNA, 25 bp, Artificial
  probe
  misc_feature (1)..(25): SEQ ID NO: 2696; WAN024FXG_at; Start 368; Stop 392
taataggctatctagcaacaccgtt

SEQ ID NO: 224896 - DNA, 25 bp, Artificial
  probe
  misc_feature (1)..(25): SEQ ID NO: 2696; WAN024FXG_at; Start 277; Stop 301
ttttggagagaaggtaatatgcagt

SEQ ID NO: 224897 - DNA, 25 bp, Artificial
  probe
  misc_feature (1)..(25): SEQ ID NO: 2696; WAN024FXG_at; Start 504; Stop 528
ggaagctacaattagcgattcaatt

SEQ ID NO: 224898 - DNA, 25 bp, Artificial
  probe
  misc_feature (1)..(25): SEQ ID NO: 2696; WAN024FXG_at; Start 709; Stop 733
tatataagttctgtgctagcaacca

SEQ ID NO: 224899 - DNA, 25 bp, Artificial
  probe
  misc_feature (1)..(25): SEQ ID NO: 2696; WAN024FXG_at; Start 750; Stop 774
cgcgattaaatcacctaaagcgatt

SEQ ID NO: 224900 - DNA, 25 bp, Artificial
  probe
  misc_feature (1)..(25): SEQ ID NO: 2696; WAN024FXG_at; Start 813; Stop 837
gacttttgtttacattatacaccag

SEQ ID NO: 224901 - DNA, 25 bp, Artificial
  probe
  misc_feature (1)..(25): SEQ ID NO: 2696; WAN024FXG_at; Start 934; Stop 958
ctatttcaatttatcaaaaacagac

SEQ ID NO: 224902 - DNA, 25 bp, Artificial
  probe
  misc_feature (1)..(25): SEQ ID NO: 2696; WAN024FXG_at; Start 144; Stop 168
tccaatgttctttttgatttctggc

SEQ ID NO: 224903 - DNA, 25 bp, Artificial
  probe
  misc_feature (1)..(25): SEQ ID NO: 2696; WAN024FXG_at; Start 550; Stop 574
atgggaataccattttttggaatag

SEQ ID NO: 224904 - DNA, 25 bp, Artificial
  probe
  misc_feature (1)..(25): SEQ ID NO: 2696; WAN024FXG_at; Start 444; Stop 468
taaaagactactattgacaaaacga

SEQ ID NO: 224905 - DNA, 25 bp, Artificial
  probe
  misc_feature (1)..(25): SEQ ID NO: 2696; WAN024FXG_at; Start 882; Stop 906
tctcaaatttgggacgatatttgtc

SEQ ID NO: 224906 - DNA, 25 bp, Artificial
  probe
  misc_feature (1)..(25): SEQ ID NO: 2696; WAN024FXG_at; Start 359; Stop 383
tttcagatttaataggctatctagc

SEQ ID NO: 224907 - DNA, 25 bp, Artificial
  probe
  misc_feature (1)..(25): SEQ ID NO: 2696; WAN024FXG_at; Start 681; Stop 705
ttatatcttgggtaattcttttgag

SEQ ID NO: 224908 - DNA, 25 bp, Artificial
  probe
  misc_feature (1)..(25): SEQ ID NO: 2696; WAN024FXG_at; Start 731; Stop 755
ccataatattgatgattttcgcgat

SEQ ID NO: 224909 - DNA, 25 bp, Artificial
  probe
  misc_feature (1)..(25): SEQ ID NO: 2696; WAN024FXG_at; Start 23; Stop 47
taacatataatagtactttgcatgc

SEQ ID NO: 224910 - DNA, 25 bp, Artificial
  probe
  misc_feature (1)..(25): SEQ ID NO: 2696; WAN024FXG_at; Start 635; Stop 659
taatcttgggaacaattatctatcc

SEQ ID NO: 224911 - DNA, 25 bp, Artificial
  probe
  misc_feature (1)..(25): SEQ ID NO: 2696; WAN024FXG_at; Start 122; Stop 146
aaataatagcacgatttgcagttcc

SEQ ID NO: 224912 - DNA, 25 bp, Artificial
  probe
  misc_feature (1)..(25): SEQ ID NO: 2696; WAN024FXG_at; Start 62; Stop 86
catgttttagtgttgttgctattca

SEQ ID NO: 224913 - DNA, 25 bp, Artificial
  probe
  misc_feature (1)..(25): SEQ ID NO: 2696; WAN024FXG_at; Start 85; Stop 109
catatatggctaccaggaaaaattg

SEQ ID NO: 224914 - DNA, 25 bp, Artificial
  probe
  misc_feature (1)..(25): SEQ ID NO: 2696; WAN024FXG_at; Start 98; Stop 122
caggaaaaattggagcgttttatca

SEQ ID NO: 224915 - DNA, 25 bp, Artificial
  probe
  misc_feature (1)..(25): SEQ ID NO: 4867; WAN024FXH_at; Start 375; Stop 399
agaactcttatgtcgttatggagga

SEQ ID NO: 224916 - DNA, 25 bp, Artificial
  probe
  misc_feature (1)..(25): SEQ ID NO: 4867; WAN024FXH_at; Start 766; Stop 790
cagatatcggtgtttcataaattaa

SEQ ID NO: 224917 - DNA, 25 bp, Artificial
  probe
  misc_feature (1)..(25): SEQ ID NO: 4867; WAN024FXH_at; Start 349; Stop 373
gcacattattcagatatccttcggg

SEQ ID NO: 224918 - DNA, 25 bp, Artificial
  probe
  misc_feature (1)..(25): SEQ ID NO: 4867; WAN024FXH_at; Start 575; Stop 599
tactctgggagtattggcgtagaaa

SEQ ID NO: 224919 - DNA, 25 bp, Artificial
  probe
  misc_feature (1)..(25): SEQ ID NO: 4867; WAN024FXH_at; Start 246; Stop 270
tcttggaagagagattatcgtactg

SEQ ID NO: 224920 - DNA, 25 bp, Artificial
  probe
  misc_feature (1)..(25): SEQ ID NO: 4867; WAN024FXH_at; Start 753; Stop 777
ggaacagctaaaacagatatcggtg

SEQ ID NO: 224921 - DNA, 25 bp, Artificial
  probe
  misc_feature (1)..(25): SEQ ID NO: 4867; WAN024FXH_at; Start 9; Stop 33
taaaattcatagaatgtttccgata

SEQ ID NO: 224922 - DNA, 25 bp, Artificial
  probe
  misc_feature (1)..(25): SEQ ID NO: 4867; WAN024FXH_at; Start 234; Stop 258
gagaactcattttcttggaagagag

SEQ ID NO: 224923 - DNA, 25 bp, Artificial
  probe
  misc_feature (1)..(25): SEQ ID NO: 4867; WAN024FXH_at; Start 562; Stop 586
tatgcgagaaaactactctgggagt

SEQ ID NO: 224924 - DNA, 25 bp, Artificial
  probe
  misc_feature (1)..(25): SEQ ID NO: 4867; WAN024FXH_at; Start 197; Stop 221
gccctccggagttaattagaacatg

SEQ ID NO: 224925 - DNA, 25 bp, Artificial
  probe
  misc_feature (1)..(25): SEQ ID NO: 4867; WAN024FXH_at; Start 101; Stop 125
gacaatttagccatatttcgttgac

SEQ ID NO: 224926 - DNA, 25 bp, Artificial
  probe
  misc_feature (1)..(25): SEQ ID NO: 4867; WAN024FXH_at; Start 632; Stop 656
tattctttacaacagctacagagct

SEQ ID NO: 224927 - DNA, 25 bp, Artificial
  probe
  misc_feature (1)..(25): SEQ ID NO: 4867; WAN024FXH_at; Start 703; Stop 727
cctcatatgcttaattttgagttaa

SEQ ID NO: 224928 - DNA, 25 bp, Artificial
  probe
  misc_feature (1)..(25): SEQ ID NO: 4867; WAN024FXH_at; Start 36; Stop 60
tattatcagcaatcaaaatatagct

SEQ ID NO: 224929 - DNA, 25 bp, Artificial
  probe
  misc_feature (1)..(25): SEQ ID NO: 4867; WAN024FXH_at; Start 329; Stop 353
aaaagggttcgatttctcgtgcaca

SEQ ID NO: 224930 - DNA, 25 bp, Artificial
  probe
  misc_feature (1)..(25): SEQ ID NO: 4867; WAN024FXH_at; Start 78; Stop 102
tattgcttatagaaaaatgaagcga

SEQ ID NO: 224931 - DNA, 25 bp, Artificial
  probe
  misc_feature (1)..(25): SEQ ID NO: 4867; WAN024FXH_at; Start 284; Stop 308
taagtgactatatagatataccaga

SEQ ID NO: 224932 - DNA, 25 bp, Artificial
  probe
  misc_feature (1)..(25): SEQ ID NO: 4867; WAN024FXH_at; Start 338; Stop 362
cgatttctcgtgcacattattcaga

SEQ ID NO: 224933 - DNA, 25 bp, Artificial
  probe
  misc_feature (1)..(25): SEQ ID NO: 4867; WAN024FXH_at; Start 738; Stop 762
ttcagaaaaaaggtgggaacagcta

SEQ ID NO: 224934 - DNA, 25 bp, Artificial
  probe
  misc_feature (1)..(25): SEQ ID NO: 4867; WAN024FXH_at; Start 300; Stop 324
tataccagattatatcactgataaa

SEQ ID NO: 224935 - DNA, 25 bp, Artificial
  probe
  misc_feature (1)..(25): SEQ ID NO: 4867; WAN024FXH_at; Start 314; Stop 338
tcactgataaatataaaaagggttc

SEQ ID NO: 224936 - DNA, 25 bp, Artificial
  probe
  misc_feature (1)..(25): SEQ ID NO: 4867; WAN024FXH_at; Start 365; Stop 389
tccttcgggtagaactcttatgtcg

SEQ ID NO: 224937 - DNA, 25 bp, Artificial
  probe
  misc_feature (1)..(25): SEQ ID NO: 4867; WAN024FXH_at; Start 543; Stop 567
taatcatcctatattgctgtatgcg

SEQ ID NO: 224938 - DNA, 25 bp, Artificial
  probe
  misc_feature (1)..(25): SEQ ID NO: 4867; WAN024FXH_at; Start 114; Stop 138
tatttcgttgactgaaagtgaacaa

SEQ ID NO: 224939 - DNA, 25 bp, Artificial
  probe
  misc_feature (1)..(25): SEQ ID NO: 4867; WAN024FXH_at; Start 558; Stop 582
gctgtatgcgagaaaactactctgg

SEQ ID NO: 224940 - DNA, 25 bp, Artificial
  probe
  misc_feature (1)..(25): SEQ ID NO: 4867; WAN024FXH_at; Start 59; Stop 83
cttttcaacaagagattgatattgc

SEQ ID NO: 224941 - DNA, 25 bp, Artificial
  probe
  misc_feature (1)..(25): SEQ ID NO: 4867; WAN024FXH_at; Start 182; Stop 206
ttcagggcgaagaacgccctccgga

SEQ ID NO: 224942 - DNA, 25 bp, Artificial
  probe
  misc_feature (1)..(25): SEQ ID NO: 4867; WAN024FXH_at; Start 174; Stop 198
ttgttggtttcagggcgaagaacgc

SEQ ID NO: 224943 - DNA, 25 bp, Artificial
  probe
  misc_feature (1)..(25): SEQ ID NO: 4867; WAN024FXH_at; Start 89; Stop 113
gaaaaatgaagcgacaatttagcca

SEQ ID NO: 224944 - DNA, 25 bp, Artificial
  probe
  misc_feature (1)..(25): SEQ ID NO: 4867; WAN024FXH_at; Start 254; Stop 278
gagagattatcgtactgacagaaga

SEQ ID NO: 224945 - DNA, 25 bp, Artificial
  probe
  misc_feature (1)..(25): SEQ ID NO: 4867; WAN024FXH_at; Start 21; Stop 45
aatgtttccgatatatattatcagc

SEQ ID NO: 224946 - DNA, 25 bp, Artificial
  probe
  misc_feature (1)..(25): SEQ ID NO: 4867; WAN024FXH_at; Start 263; Stop 287
tcgtactgacagaagaaaatataag

SEQ ID NO: 224947 - DNA, 25 bp, Artificial
  probe
  misc_feature (1)..(25): SEQ ID NO: 4867; WAN024FXH_at; Start 381; Stop 405
cttatgtcgttatggaggattatgg

SEQ ID NO: 224948 - DNA, 25 bp, Artificial
  probe
  misc_feature (1)..(25): SEQ ID NO: 4867; WAN024FXH_at; Start 147; Stop 171
tatgaacatttcgaataaagtttgg

SEQ ID NO: 224949 - DNA, 25 bp, Artificial
  probe
  misc_feature (1)..(25): SEQ ID NO: 1697; WAN024FXI_at; Start 244; Stop 268
gagcatgccccagagttaattaaaa

SEQ ID NO: 224950 - DNA, 25 bp, Artificial
  probe
  misc_feature (1)..(25): SEQ ID NO: 1697; WAN024FXI_at; Start 771; Stop 795
tgagttgaatgaacaattttcggaa

SEQ ID NO: 224951 - DNA, 25 bp, Artificial
  probe
  misc_feature (1)..(25): SEQ ID NO: 1697; WAN024FXI_at; Start 620; Stop 644
gaaaactcctatgggcctactggcg

SEQ ID NO: 224952 - DNA, 25 bp, Artificial
  probe
  misc_feature (1)..(25): SEQ ID NO: 1697; WAN024FXI_at; Start 687; Stop 711
ttttacaatagctacagagcggtac

SEQ ID NO: 224953 - DNA, 25 bp, Artificial
  probe
  misc_feature (1)..(25): SEQ ID NO: 1697; WAN024FXI_at; Start 412; Stop 436
gatatccttaggatagatcttctat

SEQ ID NO: 224954 - DNA, 25 bp, Artificial
  probe
  misc_feature (1)..(25): SEQ ID NO: 1697; WAN024FXI_at; Start 174; Stop 198
gactggagatgagcttaaatataaa

SEQ ID NO: 224955 - DNA, 25 bp, Artificial
  probe
  misc_feature (1)..(25): SEQ ID NO: 1697; WAN024FXI_at; Start 232; Stop 256
tttcagggagaagagcatgccccag

SEQ ID NO: 224956 - DNA, 25 bp, Artificial
  probe
  misc_feature (1)..(25): SEQ ID NO: 1697; WAN024FXI_at; Start 334; Stop 358
ataagtgattatacagagattccag

SEQ ID NO: 224957 - DNA, 25 bp, Artificial
  probe
  misc_feature (1)..(25): SEQ ID NO: 1697; WAN024FXI_at; Start 805; Stop 829
gaacaactgaagcatatttcggcgt

SEQ ID NO: 224958 - DNA, 25 bp, Artificial
  probe
  misc_feature (1)..(25): SEQ ID NO: 1697; WAN024FXI_at; Start 425; Stop 449
tagatcttctatgtcgccatggagg

SEQ ID NO: 224959 - DNA, 25 bp, Artificial
  probe
  misc_feature (1)..(25): SEQ ID NO: 1697; WAN024FXI_at; Start 305; Stop 329
gagaaatcattgtgttgacagaaaa

SEQ ID NO: 224960 - DNA, 25 bp, Artificial
  probe
  misc_feature (1)..(25): SEQ ID NO: 1697; WAN024FXI_at; Start 795; Stop 819
aaaacggtgggaacaactgaagcat

SEQ ID NO: 224961 - DNA, 25 bp, Artificial
  probe
  misc_feature (1)..(25): SEQ ID NO: 1697; WAN024FXI_at; Start 133; Stop 157
gcatatagaaaactaaagaagaagt

SEQ ID NO: 224962 - DNA, 25 bp, Artificial
  probe
  misc_feature (1)..(25): SEQ ID NO: 1697; WAN024FXI_at; Start 275; Stop 299
ttcaatcaatgaggaatcaacttca

SEQ ID NO: 224963 - DNA, 25 bp, Artificial
  probe
  misc_feature (1)..(25): SEQ ID NO: 1697; WAN024FXI_at; Start 629; Stop 653
tatgggcctactggcgaagaaaaaa

SEQ ID NO: 224964 - DNA, 25 bp, Artificial
  probe
  misc_feature (1)..(25): SEQ ID NO: 1697; WAN024FXI_at; Start 433; Stop 457
ctatgtcgccatggaggattatggg

SEQ ID NO: 224965 - DNA, 25 bp, Artificial
  probe
  misc_feature (1)..(25): SEQ ID NO: 1697; WAN024FXI_at; Start 34; Stop 58
cattctttttatagtaaattgaagg

SEQ ID NO: 224966 - DNA, 25 bp, Artificial
  probe
  misc_feature (1)..(25): SEQ ID NO: 1697; WAN024FXI_at; Start 294; Stop 318
acttcaaggaagagaaatcattgtg

SEQ ID NO: 224967 - DNA, 25 bp, Artificial
  probe
  misc_feature (1)..(25): SEQ ID NO: 1697; WAN024FXI_at; Start 186; Stop 210
gcttaaatataaaatggagttttca

SEQ ID NO: 224968 - DNA, 25 bp, Artificial
  probe
  misc_feature (1)..(25): SEQ ID NO: 1697; WAN024FXI_at; Start 683; Stop 707
tatgttttacaatagctacagagcg

SEQ ID NO: 224969 - DNA, 25 bp, Artificial
  probe
  misc_feature (1)..(25): SEQ ID NO: 1697; WAN024FXI_at; Start 400; Stop 424
gcgcattactctgatatccttagga

SEQ ID NO: 224970 - DNA, 25 bp, Artificial
  probe
  misc_feature (1)..(25): SEQ ID NO: 1697; WAN024FXI_at; Start 394; Stop 418
tctcgtgcgcattactctgatatcc

SEQ ID NO: 224971 - DNA, 25 bp, Artificial
  probe
  misc_feature (1)..(25): SEQ ID NO: 1697; WAN024FXI_at; Start 250; Stop 274
gccccagagttaattaaaacatgta

SEQ ID NO: 224972 - DNA, 25 bp, Artificial
  probe
  misc_feature (1)..(25): SEQ ID NO: 1697; WAN024FXI_at; Start 228; Stop 252
ttggtttcagggagaagagcatgcc

SEQ ID NO: 224973 - DNA, 25 bp, Artificial
  probe
  misc_feature (1)..(25): SEQ ID NO: 1697; WAN024FXI_at; Start 281; Stop 305
caatgaggaatcaacttcaaggaag

SEQ ID NO: 224974 - DNA, 25 bp, Artificial
  probe
  misc_feature (1)..(25): SEQ ID NO: 1697; WAN024FXI_at; Start 598; Stop 622
catcctatattactctatacgagaa

SEQ ID NO: 224975 - DNA, 25 bp, Artificial
  probe
  misc_feature (1)..(25): SEQ ID NO: 1697; WAN024FXI_at; Start 386; Stop 410
gatggatttctcgtgcgcattactc

SEQ ID NO: 224976 - DNA, 25 bp, Artificial
  probe
  misc_feature (1)..(25): SEQ ID NO: 1697; WAN024FXI_at; Start 613; Stop 637
tatacgagaaaactcctatgggcct

SEQ ID NO: 224977 - DNA, 25 bp, Artificial
  probe
  misc_feature (1)..(25): SEQ ID NO: 1697; WAN024FXI_at; Start 121; Stop 145
gataccgatatagcatatagaaaac

SEQ ID NO: 224978 - DNA, 25 bp, Artificial
  probe
  misc_feature (1)..(25): SEQ ID NO: 1697; WAN024FXI_at; Start 109; Stop 133
gcttttcaacaagataccgatatag

SEQ ID NO: 224979 - DNA, 25 bp, Artificial
  probe
  misc_feature (1)..(25): SEQ ID NO: 1697; WAN024FXI_at; Start 754; Stop 778
cctcatatacttcattttgagttga

SEQ ID NO: 224980 - DNA, 25 bp, Artificial
  probe
  misc_feature (1)..(25): SEQ ID NO: 1697; WAN024FXI_at; Start 378; Stop 402
caaaaaaggatggatttctcgtgcg

SEQ ID NO: 224981 - DNA, 25 bp, Artificial
  probe
  misc_feature (1)..(25): SEQ ID NO: 1697; WAN024FXI_at; Start 816; Stop 840
gcatatttcggcgtttcataaatta

SEQ ID NO: 224982 - DNA, 25 bp, Artificial
  probe
  misc_feature (1)..(25): SEQ ID NO: 1697; WAN024FXI_at; Start 165; Stop 189
tatttcgttgactggagatgagctt

SEQ ID NO: 224983 - DNA, 25 bp, Artificial
  probe
  misc_feature (1)..(25): SEQ ID NO: 7415; WAN024FXJ_at; Start 38; Stop 62
tcacggtcaacccaaggaacacgga

SEQ ID NO: 224984 - DNA, 25 bp, Artificial
  probe
  misc_feature (1)..(25): SEQ ID NO: 7415; WAN024FXJ_at; Start 164; Stop 188
tcaacagcttggaggaattcagcct

SEQ ID NO: 224985 - DNA, 25 bp, Artificial
  probe
  misc_feature (1)..(25): SEQ ID NO: 7415; WAN024FXJ_at; Start 235; Stop 259
ttctttagcagatgtcatatcgttc

SEQ ID NO: 224986 - DNA, 25 bp, Artificial
  probe
  misc_feature (1)..(25): SEQ ID NO: 7415; WAN024FXJ_at; Start 185; Stop 209
gcctcgtgcccgttacgagctttta

SEQ ID NO: 224987 - DNA, 25 bp, Artificial
  probe
  misc_feature (1)..(25): SEQ ID NO: 7415; WAN024FXJ_at; Start 102; Stop 126
tattttcttcgatatactcagggtg

SEQ ID NO: 224988 - DNA, 25 bp, Artificial
  probe
  misc_feature (1)..(25): SEQ ID NO: 7415; WAN024FXJ_at; Start 88; Stop 112
aatacgtgccaagatattttcttcg

SEQ ID NO: 224989 - DNA, 25 bp, Artificial
  probe
  misc_feature (1)..(25): SEQ ID NO: 7415; WAN024FXJ_at; Start 49; Stop 73
ccaaggaacacggaaagaaatcacg

SEQ ID NO: 224990 - DNA, 25 bp, Artificial
  probe
  misc_feature (1)..(25): SEQ ID NO: 7415; WAN024FXJ_at; Start 31; Stop 55
ttttccatcacggtcaacccaagga

SEQ ID NO: 224991 - DNA, 25 bp, Artificial
  probe
  misc_feature (1)..(25): SEQ ID NO: 7415; WAN024FXJ_at; Start 173; Stop 197
tggaggaattcagcctcgtgcccgt

SEQ ID NO: 224992 - DNA, 25 bp, Artificial
  probe
  misc_feature (1)..(25): SEQ ID NO: 7415; WAN024FXJ_at; Start 34; Stop 58
tccatcacggtcaacccaaggaaca

SEQ ID NO: 224993 - DNA, 25 bp, Artificial
  probe
  misc_feature (1)..(25): SEQ ID NO: 7415; WAN024FXJ_at; Start 117; Stop 141
actcagggtgtttttcaaatacagg

SEQ ID NO: 224994 - DNA, 25 bp, Artificial
  probe
  misc_feature (1)..(25): SEQ ID NO: 7415; WAN024FXJ_at; Start 22; Stop 46
tacttgaacttttccatcacggtca

SEQ ID NO: 224995 - DNA, 25 bp, Artificial
  probe
  misc_feature (1)..(25): SEQ ID NO: 7415; WAN024FXJ_at; Start 16; Stop 40
gcggtttacttgaacttttccatca

SEQ ID NO: 224996 - DNA, 25 bp, Artificial
  probe
  misc_feature (1)..(25): SEQ ID NO: 7415; WAN024FXJ_at; Start 27; Stop 51
gaacttttccatcacggtcaaccca

SEQ ID NO: 224997 - DNA, 25 bp, Artificial
  probe
  misc_feature (1)..(25): SEQ ID NO: 7415; WAN024FXJ_at; Start 110; Stop 134
tcgatatactcagggtgtttttcaa

SEQ ID NO: 224998 - DNA, 25 bp, Artificial
  probe
  misc_feature (1)..(25): SEQ ID NO: 7415; WAN024FXJ_at; Start 206; Stop 230
tttacagtttcaaacacgctttgga

SEQ ID NO: 224999 - DNA, 25 bp, Artificial
  probe
  misc_feature (1)..(25): SEQ ID NO: 7415; WAN024FXJ_at; Start 154; Stop 178
gaaaaattcttcaacagcttggagg

SEQ ID NO: 225000 - DNA, 25 bp, Artificial
  probe
  misc_feature (1)..(25): SEQ ID NO: 7415; WAN024FXJ_at; Start 189; Stop 213
cgtgcccgttacgagcttttacagt

SEQ ID NO: 225001 - DNA, 25 bp, Artificial
  probe
  misc_feature (1)..(25): SEQ ID NO: 7415; WAN024FXJ_at; Start 75; Stop 99
gctcaggctcagtaatacgtgccaa

SEQ ID NO: 225002 - DNA, 25 bp, Artificial
  probe
  misc_feature (1)..(25): SEQ ID NO: 7415; WAN024FXJ_at; Start 58; Stop 82
acggaaagaaatcacgcgctcaggc

SEQ ID NO: 225003 - DNA, 25 bp, Artificial
  probe
  misc_feature (1)..(25): SEQ ID NO: 7415; WAN024FXJ_at; Start 250; Stop 274
catatcgttctccttttattgtcat

SEQ ID NO: 225004 - DNA, 25 bp, Artificial
  probe
  misc_feature (1)..(25): SEQ ID NO: 7415; WAN024FXJ_at; Start 240; Stop 264
tagcagatgtcatatcgttctcctt

SEQ ID NO: 225005 - DNA, 25 bp, Artificial
  probe
  misc_feature (1)..(25): SEQ ID NO: 7415; WAN024FXJ_at; Start 80; Stop 104
ggctcagtaatacgtgccaagatat

SEQ ID NO: 225006 - DNA, 25 bp, Artificial
  probe
  misc_feature (1)..(25): SEQ ID NO: 7415; WAN024FXJ_at; Start 220; Stop 244
cacgctttggatatattctttagca

SEQ ID NO: 225007 - DNA, 25 bp, Artificial
  probe
  misc_feature (1)..(25): SEQ ID NO: 7415; WAN024FXJ_at; Start 178; Stop 202
gaattcagcctcgtgcccgttacga

SEQ ID NO: 225008 - DNA, 25 bp, Artificial
  probe
  misc_feature (1)..(25): SEQ ID NO: 7415; WAN024FXJ_at; Start 161; Stop 185
tcttcaacagcttggaggaattcag

SEQ ID NO: 225009 - DNA, 25 bp, Artificial
  probe
  misc_feature (1)..(25): SEQ ID NO: 7415; WAN024FXJ_at; Start 170; Stop 194
gcttggaggaattcagcctcgtgcc

SEQ ID NO: 225010 - DNA, 25 bp, Artificial
  probe
  misc_feature (1)..(25): SEQ ID NO: 7415; WAN024FXJ_at; Start 142; Stop 166
ttccaaagtgttgaaaaattcttca

SEQ ID NO: 225011 - DNA, 25 bp, Artificial
  probe
  misc_feature (1)..(25): SEQ ID NO: 7415; WAN024FXJ_at; Start 67; Stop 91
aatcacgcgctcaggctcagtaata

SEQ ID NO: 225012 - DNA, 25 bp, Artificial
  probe
  misc_feature (1)..(25): SEQ ID NO: 7415; WAN024FXJ_at; Start 53; Stop 77
ggaacacggaaagaaatcacgcgct

SEQ ID NO: 225013 - DNA, 25 bp, Artificial
  probe
  misc_feature (1)..(25): SEQ ID NO: 7415; WAN024FXJ_at; Start 132; Stop 156
caaatacaggttccaaagtgttgaa

SEQ ID NO: 225014 - DNA, 25 bp, Artificial
  probe
  misc_feature (1)..(25): SEQ ID NO: 7415; WAN024FXJ_at; Start 64; Stop 88
agaaatcacgcgctcaggctcagta

SEQ ID NO: 225015 - DNA, 25 bp, Artificial
  probe
  misc_feature (1)..(25): SEQ ID NO: 7415; WAN024FXJ_at; Start 60; Stop 84
ggaaagaaatcacgcgctcaggctc

SEQ ID NO: 225016 - DNA, 25 bp, Artificial
  probe
  misc_feature (1)..(25): SEQ ID NO: 7415; WAN024FXJ_at; Start 72; Stop 96
cgcgctcaggctcagtaatacgtgc

SEQ ID NO: 225017 - DNA, 25 bp, Artificial
  probe
  misc_feature (1)..(25): SEQ ID NO: 2974; WAN024FXK_at; Start 10; Stop 34
tgcaattcagtcatgaagctttggc

SEQ ID NO: 225018 - DNA, 25 bp, Artificial
  probe
  misc_feature (1)..(25): SEQ ID NO: 2974; WAN024FXK_at; Start 86; Stop 110
cacctttacctccaccgataggaag

SEQ ID NO: 225019 - DNA, 25 bp, Artificial
  probe
  misc_feature (1)..(25): SEQ ID NO: 2974; WAN024FXK_at; Start 75; Stop 99
gaagtctgatccacctttacctcca

SEQ ID NO: 225020 - DNA, 25 bp, Artificial
  probe
  misc_feature (1)..(25): SEQ ID NO: 2974; WAN024FXK_at; Start 50; Stop 74
cagcatctgttttacctttaggatc

SEQ ID NO: 225021 - DNA, 25 bp, Artificial
  probe
  misc_feature (1)..(25): SEQ ID NO: 2974; WAN024FXK_at; Start 30; Stop 54
ttggcagaagcgcatcacttcagca

SEQ ID NO: 225022 - DNA, 25 bp, Artificial
  probe
  misc_feature (1)..(25): SEQ ID NO: 2974; WAN024FXK_at; Start 98; Stop 122
caccgataggaagtccagtcaagac

SEQ ID NO: 225023 - DNA, 25 bp, Artificial
  probe
  misc_feature (1)..(25): SEQ ID NO: 2974; WAN024FXK_at; Start 66; Stop 90
tttaggatcgaagtctgatccacct

SEQ ID NO: 225024 - DNA, 25 bp, Artificial
  probe
  misc_feature (1)..(25): SEQ ID NO: 2974; WAN024FXK_at; Start 39; Stop 63
gcgcatcacttcagcatctgtttta

SEQ ID NO: 225025 - DNA, 25 bp, Artificial
  probe
  misc_feature (1)..(25): SEQ ID NO: 2974; WAN024FXK_at; Start 71; Stop 95
gatcgaagtctgatccacctttacc

SEQ ID NO: 225026 - DNA, 25 bp, Artificial
  probe
  misc_feature (1)..(25): SEQ ID NO: 2974; WAN024FXK_at; Start 128; Stop 152
taaagatttgttcaaatccgaggaa

SEQ ID NO: 225027 - DNA, 25 bp, Artificial
  probe
  misc_feature (1)..(25): SEQ ID NO: 2974; WAN024FXK_at; Start 27; Stop 51
gctttggcagaagcgcatcacttca

SEQ ID NO: 225028 - DNA, 25 bp, Artificial
  probe
  misc_feature (1)..(25): SEQ ID NO: 2974; WAN024FXK_at; Start 62; Stop 86
tacctttaggatcgaagtctgatcc

SEQ ID NO: 225029 - DNA, 25 bp, Artificial
  probe
  misc_feature (1)..(25): SEQ ID NO: 2974; WAN024FXK_at; Start 36; Stop 60
gaagcgcatcacttcagcatctgtt

SEQ ID NO: 225030 - DNA, 25 bp, Artificial
  probe
  misc_feature (1)..(25): SEQ ID NO: 2974; WAN024FXK_at; Start 59; Stop 83
ttttacctttaggatcgaagtctga

SEQ ID NO: 225031 - DNA, 25 bp, Artificial
  probe
  misc_feature (1)..(25): SEQ ID NO: 2974; WAN024FXK_at; Start 93; Stop 117
acctccaccgataggaagtccagtc

SEQ ID NO: 225032 - DNA, 25 bp, Artificial
  probe
  misc_feature (1)..(25): SEQ ID NO: 2974; WAN024FXK_at; Start 12; Stop 36
caattcagtcatgaagctttggcag

SEQ ID NO: 225033 - DNA, 25 bp, Artificial
  probe
  misc_feature (1)..(25): SEQ ID NO: 2974; WAN024FXK_at; Start 41; Stop 65
gcatcacttcagcatctgttttacc

SEQ ID NO: 225034 - DNA, 25 bp, Artificial
  probe
  misc_feature (1)..(25): SEQ ID NO: 2974; WAN024FXK_at; Start 15; Stop 39
ttcagtcatgaagctttggcagaag

SEQ ID NO: 225035 - DNA, 25 bp, Artificial
  probe
  misc_feature (1)..(25): SEQ ID NO: 2974; WAN024FXK_at; Start 34; Stop 58
cagaagcgcatcacttcagcatctg

SEQ ID NO: 225036 - DNA, 25 bp, Artificial
  probe
  misc_feature (1)..(25): SEQ ID NO: 2974; WAN024FXK_at; Start 202; Stop 226
tatggtccaacagctgagttgaatt

SEQ ID NO: 225037 - DNA, 25 bp, Artificial
  probe
  misc_feature (1)..(25): SEQ ID NO: 2974; WAN024FXK_at; Start 132; Stop 156
gatttgttcaaatccgaggaatttc

SEQ ID NO: 225038 - DNA, 25 bp, Artificial
  probe
  misc_feature (1)..(25): SEQ ID NO: 2974; WAN024FXK_at; Start 53; Stop 77
catctgttttacctttaggatcgaa

SEQ ID NO: 225039 - DNA, 25 bp, Artificial
  probe
  misc_feature (1)..(25): SEQ ID NO: 2974; WAN024FXK_at; Start 64; Stop 88
cctttaggatcgaagtctgatccac

SEQ ID NO: 225040 - DNA, 25 bp, Artificial
  probe
  misc_feature (1)..(25): SEQ ID NO: 2974; WAN024FXK_at; Start 2; Stop 26
tgtgtttttgcaattcagtcatgaa

SEQ ID NO: 225041 - DNA, 25 bp, Artificial
  probe
  misc_feature (1)..(25): SEQ ID NO: 2974; WAN024FXK_at; Start 92; Stop 116
tacctccaccgataggaagtccagt

SEQ ID NO: 225042 - DNA, 25 bp, Artificial
  probe
  misc_feature (1)..(25): SEQ ID NO: 2974; WAN024FXK_at; Start 47; Stop 71
cttcagcatctgttttacctttagg

SEQ ID NO: 225043 - DNA, 25 bp, Artificial
  probe
  misc_feature (1)..(25): SEQ ID NO: 2974; WAN024FXK_at; Start 133; Stop 157
atttgttcaaatccgaggaatttca

SEQ ID NO: 225044 - DNA, 25 bp, Artificial
  probe
  misc_feature (1)..(25): SEQ ID NO: 2974; WAN024FXK_at; Start 73; Stop 97
tcgaagtctgatccacctttacctc

SEQ ID NO: 225045 - DNA, 25 bp, Artificial
  probe
  misc_feature (1)..(25): SEQ ID NO: 2974; WAN024FXK_at; Start 96; Stop 120
tccaccgataggaagtccagtcaag

SEQ ID NO: 225046 - DNA, 25 bp, Artificial
  probe
  misc_feature (1)..(25): SEQ ID NO: 2974; WAN024FXK_at; Start 68; Stop 92
taggatcgaagtctgatccaccttt

SEQ ID NO: 225047 - DNA, 25 bp, Artificial
  probe
  misc_feature (1)..(25): SEQ ID NO: 2974; WAN024FXK_at; Start 4; Stop 28
tgtttttgcaattcagtcatgaagc

SEQ ID NO: 225048 - DNA, 25 bp, Artificial
  probe
  misc_feature (1)..(25): SEQ ID NO: 2974; WAN024FXK_at; Start 32; Stop 56
ggcagaagcgcatcacttcagcatc

SEQ ID NO: 225049 - DNA, 25 bp, Artificial
  probe
  misc_feature (1)..(25): SEQ ID NO: 2974; WAN024FXK_at; Start 90; Stop 114
tttacctccaccgataggaagtcca

SEQ ID NO: 225050 - DNA, 25 bp, Artificial
  probe
  misc_feature (1)..(25): SEQ ID NO: 2974; WAN024FXK_at; Start 204; Stop 228
tggtccaacagctgagttgaattga

SEQ ID NO: 225051 - DNA, 25 bp, Artificial
  probe
  misc_feature (1)..(25): SEQ ID NO: 4033; WAN024FXL_at; Start 7; Stop 31
tctgaattgctaaacattttctttt

SEQ ID NO: 225052 - DNA, 25 bp, Artificial
  probe
  misc_feature (1)..(25): SEQ ID NO: 4033; WAN024FXL_at; Start 38; Stop 62
gcataccatactttaagattttgtc

SEQ ID NO: 225053 - DNA, 25 bp, Artificial
  probe
  misc_feature (1)..(25): SEQ ID NO: 4033; WAN024FXL_at; Start 39; Stop 63
cataccatactttaagattttgtct

SEQ ID NO: 225054 - DNA, 25 bp, Artificial
  probe
  misc_feature (1)..(25): SEQ ID NO: 4033; WAN024FXL_at; Start 3; Stop 27
gatttctgaattgctaaacattttc

SEQ ID NO: 225055 - DNA, 25 bp, Artificial
  probe
  misc_feature (1)..(25): SEQ ID NO: 4033; WAN024FXL_at; Start 44; Stop 68
catactttaagattttgtctttgag

SEQ ID NO: 225056 - DNA, 25 bp, Artificial
  probe
  misc_feature (1)..(25): SEQ ID NO: 4033; WAN024FXL_at; Start 30; Stop 54
ttcttatagcataccatactttaag

SEQ ID NO: 225057 - DNA, 25 bp, Artificial
  probe
  misc_feature (1)..(25): SEQ ID NO: 4033; WAN024FXL_at; Start 178; Stop 202
aaaaattctgctataatgtcttatg

SEQ ID NO: 225058 - DNA, 25 bp, Artificial
  probe
  misc_feature (1)..(25): SEQ ID NO: 4033; WAN024FXL_at; Start 208; Stop 232
aaatatgacaataaaaggagaacga

SEQ ID NO: 225059 - DNA, 25 bp, Artificial
  probe
  misc_feature (1)..(25): SEQ ID NO: 4033; WAN024FXL_at; Start 24; Stop 48
tttcttttcttatagcataccatac

SEQ ID NO: 225060 - DNA, 25 bp, Artificial
  probe
  misc_feature (1)..(25): SEQ ID NO: 4033; WAN024FXL_at; Start 61; Stop 85
tctttgagaaagatatttccaagaa

SEQ ID NO: 225061 - DNA, 25 bp, Artificial
  probe
  misc_feature (1)..(25): SEQ ID NO: 4033; WAN024FXL_at; Start 187; Stop 211
gctataatgtcttatgtaataaaat

SEQ ID NO: 225062 - DNA, 25 bp, Artificial
  probe
  misc_feature (1)..(25): SEQ ID NO: 4033; WAN024FXL_at; Start 211; Stop 235
tatgacaataaaaggagaacgatat

SEQ ID NO: 225063 - DNA, 25 bp, Artificial
  probe
  misc_feature (1)..(25): SEQ ID NO: 4033; WAN024FXL_at; Start 34; Stop 58
tatagcataccatactttaagattt

SEQ ID NO: 225064 - DNA, 25 bp, Artificial
  probe
  misc_feature (1)..(25): SEQ ID NO: 4033; WAN024FXL_at; Start 51; Stop 75
taagattttgtctttgagaaagata

SEQ ID NO: 225065 - DNA, 25 bp, Artificial
  probe
  misc_feature (1)..(25): SEQ ID NO: 4033; WAN024FXL_at; Start 36; Stop 60
tagcataccatactttaagattttg

SEQ ID NO: 225066 - DNA, 25 bp, Artificial
  probe
  misc_feature (1)..(25): SEQ ID NO: 4033; WAN024FXL_at; Start 213; Stop 237
tgacaataaaaggagaacgatatga

SEQ ID NO: 225067 - DNA, 25 bp, Artificial
  probe
  misc_feature (1)..(25): SEQ ID NO: 4033; WAN024FXL_at; Start 206; Stop 230
taaaatatgacaataaaaggagaac

SEQ ID NO: 225068 - DNA, 25 bp, Artificial
  probe
  misc_feature (1)..(25): SEQ ID NO: 4033; WAN024FXL_at; Start 28; Stop 52
ttttcttatagcataccatacttta

SEQ ID NO: 225069 - DNA, 25 bp, Artificial
  probe
  misc_feature (1)..(25): SEQ ID NO: 4033; WAN024FXL_at; Start 65; Stop 89
tgagaaagatatttccaagaaaaac

SEQ ID NO: 225070 - DNA, 25 bp, Artificial
  probe
  misc_feature (1)..(25): SEQ ID NO: 4033; WAN024FXL_at; Start 1; Stop 25
gtgatttctgaattgctaaacattt

SEQ ID NO: 225071 - DNA, 25 bp, Artificial
  probe
  misc_feature (1)..(25): SEQ ID NO: 4033; WAN024FXL_at; Start 184; Stop 208
tctgctataatgtcttatgtaataa

SEQ ID NO: 225072 - DNA, 25 bp, Artificial
  probe
  misc_feature (1)..(25): SEQ ID NO: 4033; WAN024FXL_at; Start 9; Stop 33
tgaattgctaaacattttcttttct

SEQ ID NO: 225073 - DNA, 25 bp, Artificial
  probe
  misc_feature (1)..(25): SEQ ID NO: 4033; WAN024FXL_at; Start 59; Stop 83
tgtctttgagaaagatatttccaag

SEQ ID NO: 225074 - DNA, 25 bp, Artificial
  probe
  misc_feature (1)..(25): SEQ ID NO: 4033; WAN024FXL_at; Start 62; Stop 86
ctttgagaaagatatttccaagaaa

SEQ ID NO: 225075 - DNA, 25 bp, Artificial
  probe
  misc_feature (1)..(25): SEQ ID NO: 4033; WAN024FXL_at; Start 60; Stop 84
gtctttgagaaagatatttccaaga

SEQ ID NO: 225076 - DNA, 25 bp, Artificial
  probe
  misc_feature (1)..(25): SEQ ID NO: 4033; WAN024FXL_at; Start 209; Stop 233
aatatgacaataaaaggagaacgat

SEQ ID NO: 225077 - DNA, 25 bp, Artificial
  probe
  misc_feature (1)..(25): SEQ ID NO: 4033; WAN024FXL_at; Start 26; Stop 50
tcttttcttatagcataccatactt

SEQ ID NO: 225078 - DNA, 25 bp, Artificial
  probe
  misc_feature (1)..(25): SEQ ID NO: 4033; WAN024FXL_at; Start 192; Stop 216
aatgtcttatgtaataaaatatgac

SEQ ID NO: 225079 - DNA, 25 bp, Artificial
  probe
  misc_feature (1)..(25): SEQ ID NO: 4033; WAN024FXL_at; Start 180; Stop 204
aaattctgctataatgtcttatgta

SEQ ID NO: 225080 - DNA, 25 bp, Artificial
  probe
  misc_feature (1)..(25): SEQ ID NO: 4033; WAN024FXL_at; Start 48; Stop 72
ctttaagattttgtctttgagaaag

SEQ ID NO: 225081 - DNA, 25 bp, Artificial
  probe
  misc_feature (1)..(25): SEQ ID NO: 4033; WAN024FXL_at; Start 46; Stop 70
tactttaagattttgtctttgagaa

SEQ ID NO: 225082 - DNA, 25 bp, Artificial
  probe
  misc_feature (1)..(25): SEQ ID NO: 4033; WAN024FXL_at; Start 164; Stop 188
tctttacagtgaaaaaaaattctgc

SEQ ID NO: 225083 - DNA, 25 bp, Artificial
  probe
  misc_feature (1)..(25): SEQ ID NO: 4033; WAN024FXL_at; Start 212; Stop 236
atgacaataaaaggagaacgatatg

SEQ ID NO: 225084 - DNA, 25 bp, Artificial
  probe
  misc_feature (1)..(25): SEQ ID NO: 4033; WAN024FXL_at; Start 57; Stop 81
tttgtctttgagaaagatatttcca

SEQ ID NO: 225085 - DNA, 25 bp, Artificial
  probe
  misc_feature (1)..(25): SEQ ID NO: 5663; WAN024FXM_at; Start 56; Stop 80
tcaaagacaaaatcttaaagtatgc

SEQ ID NO: 225086 - DNA, 25 bp, Artificial
  probe
  misc_feature (1)..(25): SEQ ID NO: 5663; WAN024FXM_at; Start 38; Stop 62
ttcttggaaatatctttctcaaaga

SEQ ID NO: 225087 - DNA, 25 bp, Artificial
  probe
  misc_feature (1)..(25): SEQ ID NO: 5663; WAN024FXM_at; Start 39; Stop 63
tcttggaaatatctttctcaaagac

SEQ ID NO: 225088 - DNA, 25 bp, Artificial
  probe
  misc_feature (1)..(25): SEQ ID NO: 5663; WAN024FXM_at; Start 43; Stop 67
ggaaatatctttctcaaagacaaaa

SEQ ID NO: 225089 - DNA, 25 bp, Artificial
  probe
  misc_feature (1)..(25): SEQ ID NO: 5663; WAN024FXM_at; Start 45; Stop 69
aaatatctttctcaaagacaaaatc

SEQ ID NO: 225090 - DNA, 25 bp, Artificial
  probe
  misc_feature (1)..(25): SEQ ID NO: 5663; WAN024FXM_at; Start 37; Stop 61
tttcttggaaatatctttctcaaag

SEQ ID NO: 225091 - DNA, 25 bp, Artificial
  probe
  misc_feature (1)..(25): SEQ ID NO: 5663; WAN024FXM_at; Start 51; Stop 75
ctttctcaaagacaaaatcttaaag

SEQ ID NO: 225092 - DNA, 25 bp, Artificial
  probe
  misc_feature (1)..(25): SEQ ID NO: 5663; WAN024FXM_at; Start 62; Stop 86
acaaaatcttaaagtatgctataag

SEQ ID NO: 225093 - DNA, 25 bp, Artificial
  probe
  misc_feature (1)..(25): SEQ ID NO: 5663; WAN024FXM_at; Start 55; Stop 79
ctcaaagacaaaatcttaaagtatg

SEQ ID NO: 225094 - DNA, 25 bp, Artificial
  probe
  misc_feature (1)..(25): SEQ ID NO: 5663; WAN024FXM_at; Start 71; Stop 95
taaagtatgctataagaaaagaaaa

SEQ ID NO: 225095 - DNA, 25 bp, Artificial
  probe
  misc_feature (1)..(25): SEQ ID NO: 5663; WAN024FXM_at; Start 54; Stop 78
tctcaaagacaaaatcttaaagtat

SEQ ID NO: 225096 - DNA, 25 bp, Artificial
  probe
  misc_feature (1)..(25): SEQ ID NO: 5663; WAN024FXM_at; Start 67; Stop 91
atcttaaagtatgctataagaaaag

SEQ ID NO: 225097 - DNA, 25 bp, Artificial
  probe
  misc_feature (1)..(25): SEQ ID NO: 5663; WAN024FXM_at; Start 42; Stop 66
tggaaatatctttctcaaagacaaa

SEQ ID NO: 225098 - DNA, 25 bp, Artificial
  probe
  misc_feature (1)..(25): SEQ ID NO: 5663; WAN024FXM_at; Start 35; Stop 59
tttttcttggaaatatctttctcaa

SEQ ID NO: 225099 - DNA, 25 bp, Artificial
  probe
  misc_feature (1)..(25): SEQ ID NO: 5663; WAN024FXM_at; Start 48; Stop 72
tatctttctcaaagacaaaatctta

SEQ ID NO: 225100 - DNA, 25 bp, Artificial
  probe
  misc_feature (1)..(25): SEQ ID NO: 5663; WAN024FXM_at; Start 60; Stop 84
agacaaaatcttaaagtatgctata

SEQ ID NO: 225101 - DNA, 25 bp, Artificial
  probe
  misc_feature (1)..(25): SEQ ID NO: 5663; WAN024FXM_at; Start 65; Stop 89
aaatcttaaagtatgctataagaaa

SEQ ID NO: 225102 - DNA, 25 bp, Artificial
  probe
  misc_feature (1)..(25): SEQ ID NO: 5663; WAN024FXM_at; Start 44; Stop 68
gaaatatctttctcaaagacaaaat

SEQ ID NO: 225103 - DNA, 25 bp, Artificial
  probe
  misc_feature (1)..(25): SEQ ID NO: 5663; WAN024FXM_at; Start 72; Stop 96
aaagtatgctataagaaaagaaaat

SEQ ID NO: 225104 - DNA, 25 bp, Artificial
  probe
  misc_feature (1)..(25): SEQ ID NO: 5663; WAN024FXM_at; Start 53; Stop 77
ttctcaaagacaaaatcttaaagta

SEQ ID NO: 225105 - DNA, 25 bp, Artificial
  probe
  misc_feature (1)..(25): SEQ ID NO: 5663; WAN024FXM_at; Start 34; Stop 58
gtttttcttggaaatatctttctca

SEQ ID NO: 225106 - DNA, 25 bp, Artificial
  probe
  misc_feature (1)..(25): SEQ ID NO: 5663; WAN024FXM_at; Start 40; Stop 64
cttggaaatatctttctcaaagaca

SEQ ID NO: 225107 - DNA, 25 bp, Artificial
  probe
  misc_feature (1)..(25): SEQ ID NO: 5663; WAN024FXM_at; Start 58; Stop 82
aaagacaaaatcttaaagtatgcta

SEQ ID NO: 225108 - DNA, 25 bp, Artificial
  probe
  misc_feature (1)..(25): SEQ ID NO: 5663; WAN024FXM_at; Start 70; Stop 94
ttaaagtatgctataagaaaagaaa

SEQ ID NO: 225109 - DNA, 25 bp, Artificial
  probe
  misc_feature (1)..(25): SEQ ID NO: 5663; WAN024FXM_at; Start 57; Stop 81
caaagacaaaatcttaaagtatgct

SEQ ID NO: 225110 - DNA, 25 bp, Artificial
  probe
  misc_feature (1)..(25): SEQ ID NO: 5663; WAN024FXM_at; Start 63; Stop 87
caaaatcttaaagtatgctataaga

SEQ ID NO: 225111 - DNA, 25 bp, Artificial
  probe
  misc_feature (1)..(25): SEQ ID NO: 5663; WAN024FXM_at; Start 41; Stop 65
ttggaaatatctttctcaaagacaa

SEQ ID NO: 225112 - DNA, 25 bp, Artificial
  probe
  misc_feature (1)..(25): SEQ ID NO: 5663; WAN024FXM_at; Start 69; Stop 93
cttaaagtatgctataagaaaagaa

SEQ ID NO: 225113 - DNA, 25 bp, Artificial
  probe
  misc_feature (1)..(25): SEQ ID NO: 5663; WAN024FXM_at; Start 59; Stop 83
aagacaaaatcttaaagtatgctat

SEQ ID NO: 225114 - DNA, 25 bp, Artificial
  probe
  misc_feature (1)..(25): SEQ ID NO: 5663; WAN024FXM_at; Start 50; Stop 74
tctttctcaaagacaaaatcttaaa

SEQ ID NO: 225115 - DNA, 25 bp, Artificial
  probe
  misc_feature (1)..(25): SEQ ID NO: 5663; WAN024FXM_at; Start 46; Stop 70
aatatctttctcaaagacaaaatct

SEQ ID NO: 225116 - DNA, 25 bp, Artificial
  probe
  misc_feature (1)..(25): SEQ ID NO: 5663; WAN024FXM_at; Start 61; Stop 85
gacaaaatcttaaagtatgctataa

SEQ ID NO: 225117 - DNA, 25 bp, Artificial
  probe
  misc_feature (1)..(25): SEQ ID NO: 5663; WAN024FXM_at; Start 49; Stop 73
atctttctcaaagacaaaatcttaa

SEQ ID NO: 225118 - DNA, 25 bp, Artificial
  probe
  misc_feature (1)..(25): SEQ ID NO: 5663; WAN024FXM_at; Start 68; Stop 92
tcttaaagtatgctataagaaaaga

SEQ ID NO: 225119 - DNA, 25 bp, Artificial
  probe
  misc_feature (1)..(25): SEQ ID NO: 1387; WAN024FXN_at; Start 676; Stop 700
gctaacggtaacagctttgctggta

SEQ ID NO: 225120 - DNA, 25 bp, Artificial
  probe
  misc_feature (1)..(25): SEQ ID NO: 1387; WAN024FXN_at; Start 427; Stop 451
gaagtgatgcgcttctgccaaagct

SEQ ID NO: 225121 - DNA, 25 bp, Artificial
  probe
  misc_feature (1)..(25): SEQ ID NO: 1387; WAN024FXN_at; Start 1266; Stop 1290
tgataaagactaccttgcaggagct

SEQ ID NO: 225122 - DNA, 25 bp, Artificial
  probe
  misc_feature (1)..(25): SEQ ID NO: 1387; WAN024FXN_at; Start 579; Stop 603
tgtcttgactggtaaacctcttgga

SEQ ID NO: 225123 - DNA, 25 bp, Artificial
  probe
  misc_feature (1)..(25): SEQ ID NO: 1387; WAN024FXN_at; Start 479; Stop 503
gaccatcacttgacgtacctgctgg

SEQ ID NO: 225124 - DNA, 25 bp, Artificial
  probe
  misc_feature (1)..(25): SEQ ID NO: 1387; WAN024FXN_at; Start 191; Stop 215
tccgtgttccttgggttgaccgtga

SEQ ID NO: 225125 - DNA, 25 bp, Artificial
  probe
  misc_feature (1)..(25): SEQ ID NO: 1387; WAN024FXN_at; Start 1025; Stop 1049
gtgtatctgaaggtgccaacatgcc

SEQ ID NO: 225126 - DNA, 25 bp, Artificial
  probe
  misc_feature (1)..(25): SEQ ID NO: 1387; WAN024FXN_at; Start 67; Stop 91
gctgaattcctccaagctgttgaag

SEQ ID NO: 225127 - DNA, 25 bp, Artificial
  probe
  misc_feature (1)..(25): SEQ ID NO: 1387; WAN024FXN_at; Start 451; Stop 475
ttcatgactgaattgcaaaaacaca

SEQ ID NO: 225128 - DNA, 25 bp, Artificial
  probe
  misc_feature (1)..(25): SEQ ID NO: 1387; WAN024FXN_at; Start 1167; Stop 1191
tcgcctctcatggactcgtgaagaa

SEQ ID NO: 225129 - DNA, 25 bp, Artificial
  probe
  misc_feature (1)..(25): SEQ ID NO: 1387; WAN024FXN_at; Start 925; Stop 949
tggacttacgctggaaactatgaca

SEQ ID NO: 225130 - DNA, 25 bp, Artificial
  probe
  misc_feature (1)..(25): SEQ ID NO: 1387; WAN024FXN_at; Start 564; Stop 588
ccaatttgatgctggtgtcttgact

SEQ ID NO: 225131 - DNA, 25 bp, Artificial
  probe
  misc_feature (1)..(25): SEQ ID NO: 1387; WAN024FXN_at; Start 121; Stop 145
gaaaaacaccctgagtatatcgaag

SEQ ID NO: 225132 - DNA, 25 bp, Artificial
  probe
  misc_feature (1)..(25): SEQ ID NO: 1387; WAN024FXN_at; Start 414; Stop 438
taaaacagatgctgaagtgatgcgc

SEQ ID NO: 225133 - DNA, 25 bp, Artificial
  probe
  misc_feature (1)..(25): SEQ ID NO: 1387; WAN024FXN_at; Start 52; Stop 76
cgtaacgggcacgaggctgaattcc

SEQ ID NO: 225134 - DNA, 25 bp, Artificial
  probe
  misc_feature (1)..(25): SEQ ID NO: 1387; WAN024FXN_at; Start 360; Stop 384
gactggacttcctatcggtggaggt

SEQ ID NO: 225135 - DNA, 25 bp, Artificial
  probe
  misc_feature (1)..(25): SEQ ID NO: 1387; WAN024FXN_at; Start 1285; Stop 1309
ggagctaacattgctgcctttgaaa

SEQ ID NO: 225136 - DNA, 25 bp, Artificial
  probe
  misc_feature (1)..(25): SEQ ID NO: 1387; WAN024FXN_at; Start 610; Stop 634
ggtagcttgattcgtccagaagcaa

SEQ ID NO: 225137 - DNA, 25 bp, Artificial
  probe
  misc_feature (1)..(25): SEQ ID NO: 1387; WAN024FXN_at; Start 9; Stop 33
tgctaaagaatatatccaaagcgtg

SEQ ID NO: 225138 - DNA, 25 bp, Artificial
  probe
  misc_feature (1)..(25): SEQ ID NO: 1387; WAN024FXN_at; Start 865; Stop 889
gctcgtttgactgagtatgcagctg

SEQ ID NO: 225139 - DNA, 25 bp, Artificial
  probe
  misc_feature (1)..(25): SEQ ID NO: 1387; WAN024FXN_at; Start 660; Stop 684
tgaagaaatgctcaaagctaacggt

SEQ ID NO: 225140 - DNA, 25 bp, Artificial
  probe
  misc_feature (1)..(25): SEQ ID NO: 1387; WAN024FXN_at; Start 1116; Stop 1140
caacgctggtggtgtagccgtttca

SEQ ID NO: 225141 - DNA, 25 bp, Artificial
  probe
  misc_feature (1)..(25): SEQ ID NO: 1387; WAN024FXN_at; Start 157; Stop 181
gcacgtattactgagcctgagcgcg

SEQ ID NO: 225142 - DNA, 25 bp, Artificial
  probe
  misc_feature (1)..(25): SEQ ID NO: 1387; WAN024FXN_at; Start 626; Stop 650
cagaagcaactggttacggtttggt

SEQ ID NO: 225143 - DNA, 25 bp, Artificial
  probe
  misc_feature (1)..(25): SEQ ID NO: 1387; WAN024FXN_at; Start 1012; Stop 1036
caaggcgttatctgtgtatctgaag

SEQ ID NO: 225144 - DNA, 25 bp, Artificial
  probe
  misc_feature (1)..(25): SEQ ID NO: 1387; WAN024FXN_at; Start 716; Stop 740
caggttctggtaacgttgctcaata

SEQ ID NO: 225145 - DNA, 25 bp, Artificial
  probe
  misc_feature (1)..(25): SEQ ID NO: 1387; WAN024FXN_at; Start 1081; Stop 1105
gaaaatggtatcttctacggacctg

SEQ ID NO: 225146 - DNA, 25 bp, Artificial
  probe
  misc_feature (1)..(25): SEQ ID NO: 1387; WAN024FXN_at; Start 595; Stop 619
cctcttggatttggtggtagcttga

SEQ ID NO: 225147 - DNA, 25 bp, Artificial
  probe
  misc_feature (1)..(25): SEQ ID NO: 1387; WAN024FXN_at; Start 378; Stop 402
tggaggtaaaggtggatcagacttc

SEQ ID NO: 225148 - DNA, 25 bp, Artificial
  probe
  misc_feature (1)..(25): SEQ ID NO: 1387; WAN024FXN_at; Start 392; Stop 416
gatcagacttcgatcctaaaggtaa

SEQ ID NO: 225149 - DNA, 25 bp, Artificial
  probe
  misc_feature (1)..(25): SEQ ID NO: 1387; WAN024FXN_at; Start 994; Stop 1018
gctaaacgtttggttgctcaaggcg

SEQ ID NO: 225150 - DNA, 25 bp, Artificial
  probe
  misc_feature (1)..(25): SEQ ID NO: 1387; WAN024FXN_at; Start 977; Stop 1001
aaatcaacggtgaagcagctaaacg

SEQ ID NO: 225151 - DNA, 25 bp, Artificial
  probe
  misc_feature (1)..(25): SEQ ID NO: 1387; WAN024FXN_at; Start 241; Stop 265
taccgtgttcaattcaactcagctg

SEQ ID NO: 225152 - DNA, 25 bp, Artificial
  probe
  misc_feature (1)..(25): SEQ ID NO: 1387; WAN024FXN_at; Start 494; Stop 518
tacctgctggtgatatcggtgttgg

SEQ ID NO: 225153 - DNA, 25 bp, Artificial
  probe
  misc_feature (1)..(25): SEQ ID NO: 5853; WAN024FXO_at; Start 192; Stop 216
aagggtagaggaagcgacctgtatc

SEQ ID NO: 225154 - DNA, 25 bp, Artificial
  probe
  misc_feature (1)..(25): SEQ ID NO: 5853; WAN024FXO_at; Start 206; Stop 230
cgacctgtatcaccgacaattcctg

SEQ ID NO: 225155 - DNA, 25 bp, Artificial
  probe
  misc_feature (1)..(25): SEQ ID NO: 5853; WAN024FXO_at; Start 144; Stop 168
tatgttctctcaaataagcagccag

SEQ ID NO: 225156 - DNA, 25 bp, Artificial
  probe
  misc_feature (1)..(25): SEQ ID NO: 5853; WAN024FXO_at; Start 216; Stop 240
caccgacaattcctgcaaagagcaa

SEQ ID NO: 225157 - DNA, 25 bp, Artificial
  probe
  misc_feature (1)..(25): SEQ ID NO: 5853; WAN024FXO_at; Start 89; Stop 113
gcaattttgtagctcatagtgtcca

SEQ ID NO: 225158 - DNA, 25 bp, Artificial
  probe
  misc_feature (1)..(25): SEQ ID NO: 5853; WAN024FXO_at; Start 147; Stop 171
gttctctcaaataagcagccaggcg

SEQ ID NO: 225159 - DNA, 25 bp, Artificial
  probe
  misc_feature (1)..(25): SEQ ID NO: 5853; WAN024FXO_at; Start 25; Stop 49
gataacgcgagcagcaccattttca

SEQ ID NO: 225160 - DNA, 25 bp, Artificial
  probe
  misc_feature (1)..(25): SEQ ID NO: 5853; WAN024FXO_at; Start 37; Stop 61
agcaccattttcatccacttccaga

SEQ ID NO: 225161 - DNA, 25 bp, Artificial
  probe
  misc_feature (1)..(25): SEQ ID NO: 5853; WAN024FXO_at; Start 62; Stop 86
tggtcgtagatgtagccttgcagtt

SEQ ID NO: 225162 - DNA, 25 bp, Artificial
  probe
  misc_feature (1)..(25): SEQ ID NO: 5853; WAN024FXO_at; Start 223; Stop 247
aattcctgcaaagagcaactcagca

SEQ ID NO: 225163 - DNA, 25 bp, Artificial
  probe
  misc_feature (1)..(25): SEQ ID NO: 5853; WAN024FXO_at; Start 156; Stop 180
aataagcagccaggcgaagagtccg

SEQ ID NO: 225164 - DNA, 25 bp, Artificial
  probe
  misc_feature (1)..(25): SEQ ID NO: 5853; WAN024FXO_at; Start 243; Stop 267
cagcatcgcgatctgccaaggctag

SEQ ID NO: 225165 - DNA, 25 bp, Artificial
  probe
  misc_feature (1)..(25): SEQ ID NO: 5853; WAN024FXO_at; Start 237; Stop 261
gcaactcagcatcgcgatctgccaa

SEQ ID NO: 225166 - DNA, 25 bp, Artificial
  probe
  misc_feature (1)..(25): SEQ ID NO: 5853; WAN024FXO_at; Start 31; Stop 55
gcgagcagcaccattttcatccact

SEQ ID NO: 225167 - DNA, 25 bp, Artificial
  probe
  misc_feature (1)..(25): SEQ ID NO: 5853; WAN024FXO_at; Start 151; Stop 175
tctcaaataagcagccaggcgaaga

SEQ ID NO: 225168 - DNA, 25 bp, Artificial
  probe
  misc_feature (1)..(25): SEQ ID NO: 5853; WAN024FXO_at; Start 201; Stop 225
ggaagcgacctgtatcaccgacaat

SEQ ID NO: 225169 - DNA, 25 bp, Artificial
  probe
  misc_feature (1)..(25): SEQ ID NO: 5853; WAN024FXO_at; Start 213; Stop 237
tatcaccgacaattcctgcaaagag

SEQ ID NO: 225170 - DNA, 25 bp, Artificial
  probe
  misc_feature (1)..(25): SEQ ID NO: 5853; WAN024FXO_at; Start 58; Stop 82
cagatggtcgtagatgtagccttgc

SEQ ID NO: 225171 - DNA, 25 bp, Artificial
  probe
  misc_feature (1)..(25): SEQ ID NO: 5853; WAN024FXO_at; Start 47; Stop 71
tcatccacttccagatggtcgtaga

SEQ ID NO: 225172 - DNA, 25 bp, Artificial
  probe
  misc_feature (1)..(25): SEQ ID NO: 5853; WAN024FXO_at; Start 162; Stop 186
cagccaggcgaagagtccgtgcagt

SEQ ID NO: 225173 - DNA, 25 bp, Artificial
  probe
  misc_feature (1)..(25): SEQ ID NO: 5853; WAN024FXO_at; Start 177; Stop 201
tccgtgcagtggtagaagggtagag

SEQ ID NO: 225174 - DNA, 25 bp, Artificial
  probe
  misc_feature (1)..(25): SEQ ID NO: 5853; WAN024FXO_at; Start 197; Stop 221
tagaggaagcgacctgtatcaccga

SEQ ID NO: 225175 - DNA, 25 bp, Artificial
  probe
  misc_feature (1)..(25): SEQ ID NO: 5853; WAN024FXO_at; Start 230; Stop 254
gcaaagagcaactcagcatcgcgat

SEQ ID NO: 225176 - DNA, 25 bp, Artificial
  probe
  misc_feature (1)..(25): SEQ ID NO: 5853; WAN024FXO_at; Start 120; Stop 144
gagtgagagccgcaaagtcaaagtt

SEQ ID NO: 225177 - DNA, 25 bp, Artificial
  probe
  misc_feature (1)..(25): SEQ ID NO: 5853; WAN024FXO_at; Start 131; Stop 155
gcaaagtcaaagttatgttctctca

SEQ ID NO: 225178 - DNA, 25 bp, Artificial
  probe
  misc_feature (1)..(25): SEQ ID NO: 5853; WAN024FXO_at; Start 68; Stop 92
tagatgtagccttgcagtttagcaa

SEQ ID NO: 225179 - DNA, 25 bp, Artificial
  probe
  misc_feature (1)..(25): SEQ ID NO: 5853; WAN024FXO_at; Start 105; Stop 129
tagtgtccattttgcgagtgagagc

SEQ ID NO: 225180 - DNA, 25 bp, Artificial
  probe
  misc_feature (1)..(25): SEQ ID NO: 5853; WAN024FXO_at; Start 96; Stop 120
tgtagctcatagtgtccattttgcg

SEQ ID NO: 225181 - DNA, 25 bp, Artificial
  probe
  misc_feature (1)..(25): SEQ ID NO: 5853; WAN024FXO_at; Start 22; Stop 46
caggataacgcgagcagcaccattt

SEQ ID NO: 225182 - DNA, 25 bp, Artificial
  probe
  misc_feature (1)..(25): SEQ ID NO: 5853; WAN024FXO_at; Start 77; Stop 101
ccttgcagtttagcaattttgtagc

SEQ ID NO: 225183 - DNA, 25 bp, Artificial
  probe
  misc_feature (1)..(25): SEQ ID NO: 5853; WAN024FXO_at; Start 110; Stop 134
tccattttgcgagtgagagccgcaa

SEQ ID NO: 225184 - DNA, 25 bp, Artificial
  probe
  misc_feature (1)..(25): SEQ ID NO: 5853; WAN024FXO_at; Start 126; Stop 150
gagccgcaaagtcaaagttatgttc

SEQ ID NO: 225185 - DNA, 25 bp, Artificial
  probe
  misc_feature (1)..(25): SEQ ID NO: 5853; WAN024FXO_at; Start 17; Stop 41
tgactcaggataacgcgagcagcac

SEQ ID NO: 225186 - DNA, 25 bp, Artificial
  probe
  misc_feature (1)..(25): SEQ ID NO: 5853; WAN024FXO_at; Start 53; Stop 77
acttccagatggtcgtagatgtagc

SEQ ID NO: 225187 - DNA, 25 bp, Artificial
  probe
  misc_feature (1)..(25): SEQ ID NO: 2681; WAN024FXP_at; Start 161; Stop 185
ccgacggctttgatggttttttctg

SEQ ID NO: 225188 - DNA, 25 bp, Artificial
  probe
  misc_feature (1)..(25): SEQ ID NO: 2681; WAN024FXP_at; Start 108; Stop 132
tatcttcaacaagatccatctcagc

SEQ ID NO: 225189 - DNA, 25 bp, Artificial
  probe
  misc_feature (1)..(25): SEQ ID NO: 2681; WAN024FXP_at; Start 265; Stop 289
gataatggtgtcgtattctttaatt

SEQ ID NO: 225190 - DNA, 25 bp, Artificial
  probe
  misc_feature (1)..(25): SEQ ID NO: 2681; WAN024FXP_at; Start 117; Stop 141
caagatccatctcagccatccaagt

SEQ ID NO: 225191 - DNA, 25 bp, Artificial
  probe
  misc_feature (1)..(25): SEQ ID NO: 2681; WAN024FXP_at; Start 18; Stop 42
tgagaaaatcaccttgactatagcg

SEQ ID NO: 225192 - DNA, 25 bp, Artificial
  probe
  misc_feature (1)..(25): SEQ ID NO: 2681; WAN024FXP_at; Start 222; Stop 246
gacttcccaaggcatcagggtctgg

SEQ ID NO: 225193 - DNA, 25 bp, Artificial
  probe
  misc_feature (1)..(25): SEQ ID NO: 2681; WAN024FXP_at; Start 98; Stop 122
tggtaggctctatcttcaacaagat

SEQ ID NO: 225194 - DNA, 25 bp, Artificial
  probe
  misc_feature (1)..(25): SEQ ID NO: 2681; WAN024FXP_at; Start 199; Stop 223
cagcaaggctttcaatcccacctga

SEQ ID NO: 225195 - DNA, 25 bp, Artificial
  probe
  misc_feature (1)..(25): SEQ ID NO: 2681; WAN024FXP_at; Start 85; Stop 109
gacaagtgcgccttggtaggctcta

SEQ ID NO: 225196 - DNA, 25 bp, Artificial
  probe
  misc_feature (1)..(25): SEQ ID NO: 2681; WAN024FXP_at; Start 257; Stop 281
cgatgaatgataatggtgtcgtatt

SEQ ID NO: 225197 - DNA, 25 bp, Artificial
  probe
  misc_feature (1)..(25): SEQ ID NO: 2681; WAN024FXP_at; Start 217; Stop 241
cacctgacttcccaaggcatcaggg

SEQ ID NO: 225198 - DNA, 25 bp, Artificial
  probe
  misc_feature (1)..(25): SEQ ID NO: 2681; WAN024FXP_at; Start 77; Stop 101
cagacgatgacaagtgcgccttggt

SEQ ID NO: 225199 - DNA, 25 bp, Artificial
  probe
  misc_feature (1)..(25): SEQ ID NO: 2681; WAN024FXP_at; Start 54; Stop 78
tacgagcagtattagctgtatcaca

SEQ ID NO: 225200 - DNA, 25 bp, Artificial
  probe
  misc_feature (1)..(25): SEQ ID NO: 2681; WAN024FXP_at; Start 126; Stop 150
tctcagccatccaagtaagagttgg

SEQ ID NO: 225201 - DNA, 25 bp, Artificial
  probe
  misc_feature (1)..(25): SEQ ID NO: 2681; WAN024FXP_at; Start 185; Stop 209
gggaaatgatgttccagcaaggctt

SEQ ID NO: 225202 - DNA, 25 bp, Artificial
  probe
  misc_feature (1)..(25): SEQ ID NO: 2681; WAN024FXP_at; Start 72; Stop 96
tatcacagacgatgacaagtgcgcc

SEQ ID NO: 225203 - DNA, 25 bp, Artificial
  probe
  misc_feature (1)..(25): SEQ ID NO: 2681; WAN024FXP_at; Start 237; Stop 261
cagggtctggtttcatatgacgatg

SEQ ID NO: 225204 - DNA, 25 bp, Artificial
  probe
  misc_feature (1)..(25): SEQ ID NO: 2681; WAN024FXP_at; Start 45; Stop 69
tatcatcgatacgagcagtattagc

SEQ ID NO: 225205 - DNA, 25 bp, Artificial
  probe
  misc_feature (1)..(25): SEQ ID NO: 2681; WAN024FXP_at; Start 227; Stop 251
cccaaggcatcagggtctggtttca

SEQ ID NO: 225206 - DNA, 25 bp, Artificial
  probe
  misc_feature (1)..(25): SEQ ID NO: 2681; WAN024FXP_at; Start 148; Stop 172
tggttcatcaaaaccgacggctttg

SEQ ID NO: 225207 - DNA, 25 bp, Artificial
  probe
  misc_feature (1)..(25): SEQ ID NO: 2681; WAN024FXP_at; Start 137; Stop 161
caagtaagagttggttcatcaaaac

SEQ ID NO: 225208 - DNA, 25 bp, Artificial
  probe
  misc_feature (1)..(25): SEQ ID NO: 2681; WAN024FXP_at; Start 176; Stop 200
gttttttctgggaaatgatgttcca

SEQ ID NO: 225209 - DNA, 25 bp, Artificial
  probe
  misc_feature (1)..(25): SEQ ID NO: 2681; WAN024FXP_at; Start 3; Stop 27
ggtggtcaatcttaatgagaaaatc

SEQ ID NO: 225210 - DNA, 25 bp, Artificial
  probe
  misc_feature (1)..(25): SEQ ID NO: 2681; WAN024FXP_at; Start 33; Stop 57
gactatagcgcttatcatcgatacg

SEQ ID NO: 225211 - DNA, 25 bp, Artificial
  probe
  misc_feature (1)..(25): SEQ ID NO: 2681; WAN024FXP_at; Start 38; Stop 62
tagcgcttatcatcgatacgagcag

SEQ ID NO: 225212 - DNA, 25 bp, Artificial
  probe
  misc_feature (1)..(25): SEQ ID NO: 2681; WAN024FXP_at; Start 144; Stop 168
gagttggttcatcaaaaccgacggc

SEQ ID NO: 225213 - DNA, 25 bp, Artificial
  probe
  misc_feature (1)..(25): SEQ ID NO: 2681; WAN024FXP_at; Start 94; Stop 118
gccttggtaggctctatcttcaaca

SEQ ID NO: 225214 - DNA, 25 bp, Artificial
  probe
  misc_feature (1)..(25): SEQ ID NO: 2681; WAN024FXP_at; Start 203; Stop 227
aaggctttcaatcccacctgacttc

SEQ ID NO: 225215 - DNA, 25 bp, Artificial
  probe
  misc_feature (1)..(25): SEQ ID NO: 2681; WAN024FXP_at; Start 234; Stop 258
catcagggtctggtttcatatgacg

SEQ ID NO: 225216 - DNA, 25 bp, Artificial
  probe
  misc_feature (1)..(25): SEQ ID NO: 2681; WAN024FXP_at; Start 63; Stop 87
tattagctgtatcacagacgatgac

SEQ ID NO: 225217 - DNA, 25 bp, Artificial
  probe
  misc_feature (1)..(25): SEQ ID NO: 2681; WAN024FXP_at; Start 250; Stop 274
catatgacgatgaatgataatggtg

SEQ ID NO: 225218 - DNA, 25 bp, Artificial
  probe
  misc_feature (1)..(25): SEQ ID NO: 2681; WAN024FXP_at; Start 192; Stop 216
gatgttccagcaaggctttcaatcc

SEQ ID NO: 225219 - DNA, 25 bp, Artificial
  probe
  misc_feature (1)..(25): SEQ ID NO: 2681; WAN024FXP_at; Start 21; Stop 45
gaaaatcaccttgactatagcgctt

SEQ ID NO: 225220 - DNA, 25 bp, Artificial
  probe
  misc_feature (1)..(25): SEQ ID NO: 2681; WAN024FXP_at; Start 129; Stop 153
cagccatccaagtaagagttggttc

SEQ ID NO: 225221 - DNA, 25 bp, Artificial
  probe
  misc_feature (1)..(25): SEQ ID NO: 5139; WAN024FXQ_at; Start 616; Stop 640
tacatctacgaccatctggaagtgg

SEQ ID NO: 225222 - DNA, 25 bp, Artificial
  probe
  misc_feature (1)..(25): SEQ ID NO: 5139; WAN024FXQ_at; Start 871; Stop 895
gcaagtggtgctaattcctatagcc

SEQ ID NO: 225223 - DNA, 25 bp, Artificial
  probe
  misc_feature (1)..(25): SEQ ID NO: 5139; WAN024FXQ_at; Start 521; Stop 545
gcctggctgcttatttgagagaaca

SEQ ID NO: 225224 - DNA, 25 bp, Artificial
  probe
  misc_feature (1)..(25): SEQ ID NO: 5139; WAN024FXQ_at; Start 505; Stop 529
actgcacggactcttcgcctggctg

SEQ ID NO: 225225 - DNA, 25 bp, Artificial
  probe
  misc_feature (1)..(25): SEQ ID NO: 5139; WAN024FXQ_at; Start 601; Stop 625
gctaaactgcaaggctacatctacg

SEQ ID NO: 225226 - DNA, 25 bp, Artificial
  probe
  misc_feature (1)..(25): SEQ ID NO: 5139; WAN024FXQ_at; Start 159; Stop 183
caaagccgtcggttttgatgaacca

SEQ ID NO: 225227 - DNA, 25 bp, Artificial
  probe
  misc_feature (1)..(25): SEQ ID NO: 5139; WAN024FXQ_at; Start 541; Stop 565
gaacataactttgactttgcggctc

SEQ ID NO: 225228 - DNA, 25 bp, Artificial
  probe
  misc_feature (1)..(25): SEQ ID NO: 5139; WAN024FXQ_at; Start 235; Stop 259
ggcgcacttgtcatcgtctgtgata

SEQ ID NO: 225229 - DNA, 25 bp, Artificial
  probe
  misc_feature (1)..(25): SEQ ID NO: 5139; WAN024FXQ_at; Start 475; Stop 499
gatacaggtcgcttcctctaccctt

SEQ ID NO: 225230 - DNA, 25 bp, Artificial
  probe
  misc_feature (1)..(25): SEQ ID NO: 5139; WAN024FXQ_at; Start 146; Stop 170
cagaaaaaaccatcaaagccgtcgg

SEQ ID NO: 225231 - DNA, 25 bp, Artificial
  probe
  misc_feature (1)..(25): SEQ ID NO: 5139; WAN024FXQ_at; Start 354; Stop 378
cctgtcttgggtcgatactagttca

SEQ ID NO: 225232 - DNA, 25 bp, Artificial
  probe
  misc_feature (1)..(25): SEQ ID NO: 5139; WAN024FXQ_at; Start 630; Stop 654
tctggaagtggatgaaaatggtgct

SEQ ID NO: 225233 - DNA, 25 bp, Artificial
  probe
  misc_feature (1)..(25): SEQ ID NO: 5139; WAN024FXQ_at; Start 442; Stop 466
gatgctgagttgctctttgcaggaa

SEQ ID NO: 225234 - DNA, 25 bp, Artificial
  probe
  misc_feature (1)..(25): SEQ ID NO: 5139; WAN024FXQ_at; Start 412; Stop 436
caaacaacccaactagccttggcag

SEQ ID NO: 225235 - DNA, 25 bp, Artificial
  probe
  misc_feature (1)..(25): SEQ ID NO: 5139; WAN024FXQ_at; Start 175; Stop 199
gatgaaccaactcttacttggatgg

SEQ ID NO: 225236 - DNA, 25 bp, Artificial
  probe
  misc_feature (1)..(25): SEQ ID NO: 5139; WAN024FXQ_at; Start 81; Stop 105
gaaaccagaccctgatgccttggga

SEQ ID NO: 225237 - DNA, 25 bp, Artificial
  probe
  misc_feature (1)..(25): SEQ ID NO: 5139; WAN024FXQ_at; Start 189; Stop 213
tacttggatggctgagatggatctt

SEQ ID NO: 225238 - DNA, 25 bp, Artificial
  probe
  misc_feature (1)..(25): SEQ ID NO: 5139; WAN024FXQ_at; Start 461; Stop 485
caggaattgtcggtgatacaggtcg

SEQ ID NO: 225239 - DNA, 25 bp, Artificial
  probe
  misc_feature (1)..(25): SEQ ID NO: 5139; WAN024FXQ_at; Start 729; Stop 753
tgcacctggacgcattgacagagtg

SEQ ID NO: 225240 - DNA, 25 bp, Artificial
  probe
  misc_feature (1)..(25): SEQ ID NO: 5139; WAN024FXQ_at; Start 316; Stop 340
aagattgaccaccatccaaatgatg

SEQ ID NO: 225241 - DNA, 25 bp, Artificial
  probe
  misc_feature (1)..(25): SEQ ID NO: 5139; WAN024FXQ_at; Start 369; Stop 393
tactagttcaagtagcgctagcgag

SEQ ID NO: 225242 - DNA, 25 bp, Artificial
  probe
  misc_feature (1)..(25): SEQ ID NO: 5139; WAN024FXQ_at; Start 765; Stop 789
aatttttgtcgaacaggctgatggc

SEQ ID NO: 225243 - DNA, 25 bp, Artificial
  probe
  misc_feature (1)..(25): SEQ ID NO: 5139; WAN024FXQ_at; Start 646; Stop 670
aatggtgctgctcgcgttatcctga

SEQ ID NO: 225244 - DNA, 25 bp, Artificial
  probe
  misc_feature (1)..(25): SEQ ID NO: 5139; WAN024FXQ_at; Start 104; Stop 128
gaagtcaggtgggattgaaagcctt

SEQ ID NO: 225245 - DNA, 25 bp, Artificial
  probe
  misc_feature (1)..(25): SEQ ID NO: 5139; WAN024FXQ_at; Start 391; Stop 415
gagatgattaccctatttgcccaaa

SEQ ID NO: 225246 - DNA, 25 bp, Artificial
  probe
  misc_feature (1)..(25): SEQ ID NO: 5139; WAN024FXQ_at; Start 289; Stop 313
cgctatagtcaaggtgattttctca

SEQ ID NO: 225247 - DNA, 25 bp, Artificial
  probe
  misc_feature (1)..(25): SEQ ID NO: 5139; WAN024FXQ_at; Start 561; Stop 585
ggctctcactcgcaaaatggacact

SEQ ID NO: 225248 - DNA, 25 bp, Artificial
  probe
  misc_feature (1)..(25): SEQ ID NO: 5139; WAN024FXQ_at; Start 220; Stop 244
gatagagcctaccaaggcgcacttg

SEQ ID NO: 225249 - DNA, 25 bp, Artificial
  probe
  misc_feature (1)..(25): SEQ ID NO: 5139; WAN024FXQ_at; Start 578; Stop 602
tggacactatgagctacaaaattgc

SEQ ID NO: 225250 - DNA, 25 bp, Artificial
  probe
  misc_feature (1)..(25): SEQ ID NO: 5139; WAN024FXQ_at; Start 425; Stop 449
tagccttggcagatcgcgatgctga

SEQ ID NO: 225251 - DNA, 25 bp, Artificial
  probe
  misc_feature (1)..(25): SEQ ID NO: 5139; WAN024FXQ_at; Start 855; Stop 879
tggaggccaccctctagcaagtggt

SEQ ID NO: 225252 - DNA, 25 bp, Artificial
  probe
  misc_feature (1)..(25): SEQ ID NO: 5139; WAN024FXQ_at; Start 210; Stop 234
tcttgttgaagatagagcctaccaa

SEQ ID NO: 225253 - DNA, 25 bp, Artificial
  probe
  misc_feature (1)..(25): SEQ ID NO: 5139; WAN024FXQ_at; Start 331; Stop 355
ccaaatgatgatgtatacggtgacc

SEQ ID NO: 225254 - DNA, 25 bp, Artificial
  probe
  misc_feature (1)..(25): SEQ ID NO: 5139; WAN024FXQ_at; Start 251; Stop 275
tctgtgatacagctaatactgctcg

SEQ ID NO: 225255 - DNA, 25 bp, Artificial
  probe
  misc_feature (1)..(25): SEQ ID NO: 2936; WAN024FXR_at; Start 85; Stop 109
gctacaatatctgcaatttcttcgg

SEQ ID NO: 225256 - DNA, 25 bp, Artificial
  probe
  misc_feature (1)..(25): SEQ ID NO: 2936; WAN024FXR_at; Start 66; Stop 90
caagtcacgtaatttgtctgctaca

SEQ ID NO: 225257 - DNA, 25 bp, Artificial
  probe
  misc_feature (1)..(25): SEQ ID NO: 2936; WAN024FXR_at; Start 76; Stop 100
aatttgtctgctacaatatctgcaa

SEQ ID NO: 225258 - DNA, 25 bp, Artificial
  probe
  misc_feature (1)..(25): SEQ ID NO: 2936; WAN024FXR_at; Start 106; Stop 130
tcggtattaccggtcatactggcaa

SEQ ID NO: 225259 - DNA, 25 bp, Artificial
  probe
  misc_feature (1)..(25): SEQ ID NO: 2936; WAN024FXR_at; Start 6; Stop 30
tgcttccaagaagtctgaagcgtca

SEQ ID NO: 225260 - DNA, 25 bp, Artificial
  probe
  misc_feature (1)..(25): SEQ ID NO: 2936; WAN024FXR_at; Start 97; Stop 121
gcaatttcttcggtattaccggtca

SEQ ID NO: 225261 - DNA, 25 bp, Artificial
  probe
  misc_feature (1)..(25): SEQ ID NO: 2936; WAN024FXR_at; Start 10; Stop 34
tccaagaagtctgaagcgtcaacag

SEQ ID NO: 225262 - DNA, 25 bp, Artificial
  probe
  misc_feature (1)..(25): SEQ ID NO: 2936; WAN024FXR_at; Start 2; Stop 26
tgtctgcttccaagaagtctgaagc

SEQ ID NO: 225263 - DNA, 25 bp, Artificial
  probe
  misc_feature (1)..(25): SEQ ID NO: 2936; WAN024FXR_at; Start 156; Stop 180
gtcctcctcaatttatctttctcca

SEQ ID NO: 225264 - DNA, 25 bp, Artificial
  probe
  misc_feature (1)..(25): SEQ ID NO: 2936; WAN024FXR_at; Start 120; Stop 144
catactggcaaatacaatttttgct

SEQ ID NO: 225265 - DNA, 25 bp, Artificial
  probe
  misc_feature (1)..(25): SEQ ID NO: 2936; WAN024FXR_at; Start 169; Stop 193
tatctttctccattatatcacatct

SEQ ID NO: 225266 - DNA, 25 bp, Artificial
  probe
  misc_feature (1)..(25): SEQ ID NO: 2936; WAN024FXR_at; Start 37; Stop 61
gtacattcatcaacatcaacatcca

SEQ ID NO: 225267 - DNA, 25 bp, Artificial
  probe
  misc_feature (1)..(25): SEQ ID NO: 2936; WAN024FXR_at; Start 108; Stop 132
ggtattaccggtcatactggcaaat

SEQ ID NO: 225268 - DNA, 25 bp, Artificial
  probe
  misc_feature (1)..(25): SEQ ID NO: 2936; WAN024FXR_at; Start 46; Stop 70
tcaacatcaacatccaagcccaagt

SEQ ID NO: 225269 - DNA, 25 bp, Artificial
  probe
  misc_feature (1)..(25): SEQ ID NO: 2936; WAN024FXR_at; Start 62; Stop 86
agcccaagtcacgtaatttgtctgc

SEQ ID NO: 225270 - DNA, 25 bp, Artificial
  probe
  misc_feature (1)..(25): SEQ ID NO: 2936; WAN024FXR_at; Start 58; Stop 82
tccaagcccaagtcacgtaatttgt

SEQ ID NO: 225271 - DNA, 25 bp, Artificial
  probe
  misc_feature (1)..(25): SEQ ID NO: 2936; WAN024FXR_at; Start 142; Stop 166
gctaatgccatatcgtcctcctcaa

SEQ ID NO: 225272 - DNA, 25 bp, Artificial
  probe
  misc_feature (1)..(25): SEQ ID NO: 2936; WAN024FXR_at; Start 113; Stop 137
taccggtcatactggcaaatacaat

SEQ ID NO: 225273 - DNA, 25 bp, Artificial
  probe
  misc_feature (1)..(25): SEQ ID NO: 2936; WAN024FXR_at; Start 54; Stop 78
aacatccaagcccaagtcacgtaat

SEQ ID NO: 225274 - DNA, 25 bp, Artificial
  probe
  misc_feature (1)..(25): SEQ ID NO: 2936; WAN024FXR_at; Start 203; Stop 227
taaaaataaaaattcttgtgctaca

SEQ ID NO: 225275 - DNA, 25 bp, Artificial
  probe
  misc_feature (1)..(25): SEQ ID NO: 2936; WAN024FXR_at; Start 17; Stop 41
agtctgaagcgtcaacagttgtaca

SEQ ID NO: 225276 - DNA, 25 bp, Artificial
  probe
  misc_feature (1)..(25): SEQ ID NO: 2936; WAN024FXR_at; Start 69; Stop 93
gtcacgtaatttgtctgctacaata

SEQ ID NO: 225277 - DNA, 25 bp, Artificial
  probe
  misc_feature (1)..(25): SEQ ID NO: 2936; WAN024FXR_at; Start 138; Stop 162
ttttgctaatgccatatcgtcctcc

SEQ ID NO: 225278 - DNA, 25 bp, Artificial
  probe
  misc_feature (1)..(25): SEQ ID NO: 2936; WAN024FXR_at; Start 19; Stop 43
tctgaagcgtcaacagttgtacatt

SEQ ID NO: 225279 - DNA, 25 bp, Artificial
  probe
  misc_feature (1)..(25): SEQ ID NO: 2936; WAN024FXR_at; Start 25; Stop 49
gcgtcaacagttgtacattcatcaa

SEQ ID NO: 225280 - DNA, 25 bp, Artificial
  probe
  misc_feature (1)..(25): SEQ ID NO: 2936; WAN024FXR_at; Start 132; Stop 156
tacaatttttgctaatgccatatcg

SEQ ID NO: 225281 - DNA, 25 bp, Artificial
  probe
  misc_feature (1)..(25): SEQ ID NO: 2936; WAN024FXR_at; Start 94; Stop 118
tctgcaatttcttcggtattaccgg

SEQ ID NO: 225282 - DNA, 25 bp, Artificial
  probe
  misc_feature (1)..(25): SEQ ID NO: 2936; WAN024FXR_at; Start 207; Stop 231
aataaaaattcttgtgctacaatga

SEQ ID NO: 225283 - DNA, 25 bp, Artificial
  probe
  misc_feature (1)..(25): SEQ ID NO: 2936; WAN024FXR_at; Start 12; Stop 36
caagaagtctgaagcgtcaacagtt

SEQ ID NO: 225284 - DNA, 25 bp, Artificial
  probe
  misc_feature (1)..(25): SEQ ID NO: 2936; WAN024FXR_at; Start 116; Stop 140
cggtcatactggcaaatacaatttt

SEQ ID NO: 225285 - DNA, 25 bp, Artificial
  probe
  misc_feature (1)..(25): SEQ ID NO: 2936; WAN024FXR_at; Start 110; Stop 134
tattaccggtcatactggcaaatac

SEQ ID NO: 225286 - DNA, 25 bp, Artificial
  probe
  misc_feature (1)..(25): SEQ ID NO: 2936; WAN024FXR_at; Start 147; Stop 171
tgccatatcgtcctcctcaatttat

SEQ ID NO: 225287 - DNA, 25 bp, Artificial
  probe
  misc_feature (1)..(25): SEQ ID NO: 2936; WAN024FXR_at; Start 15; Stop 39
gaagtctgaagcgtcaacagttgta

SEQ ID NO: 225288 - DNA, 25 bp, Artificial
  probe
  misc_feature (1)..(25): SEQ ID NO: 2936; WAN024FXR_at; Start 29; Stop 53
caacagttgtacattcatcaacatc

SEQ ID NO: 225289 - DNA, 25 bp, Artificial
  probe
  misc_feature (1)..(25): SEQ ID NO: 2444; WAN024FXS_at; Start 379; Stop 403
gccgaggaagaagatattgaacgct

SEQ ID NO: 225290 - DNA, 25 bp, Artificial
  probe
  misc_feature (1)..(25): SEQ ID NO: 2444; WAN024FXS_at; Start 258; Stop 282
agtggtcggctcaggagataccttc

SEQ ID NO: 225291 - DNA, 25 bp, Artificial
  probe
  misc_feature (1)..(25): SEQ ID NO: 2444; WAN024FXS_at; Start 304; Stop 328
gttgatgactttgaccgtgtctttg

SEQ ID NO: 225292 - DNA, 25 bp, Artificial
  probe
  misc_feature (1)..(25): SEQ ID NO: 2444; WAN024FXS_at; Start 60; Stop 84
tattgtagcagacaaattacgtgac

SEQ ID NO: 225293 - DNA, 25 bp, Artificial
  probe
  misc_feature (1)..(25): SEQ ID NO: 2444; WAN024FXS_at; Start 83; Stop 107
acttgggcttggatgttgatgttga

SEQ ID NO: 225294 - DNA, 25 bp, Artificial
  probe
  misc_feature (1)..(25): SEQ ID NO: 2444; WAN024FXS_at; Start 120; Stop 144
tgttgacgcttcagacttcttggaa

SEQ ID NO: 225295 - DNA, 25 bp, Artificial
  probe
  misc_feature (1)..(25): SEQ ID NO: 2444; WAN024FXS_at; Start 44; Stop 68
ccgaagaaattgcagatattgtagc

SEQ ID NO: 225296 - DNA, 25 bp, Artificial
  probe
  misc_feature (1)..(25): SEQ ID NO: 2444; WAN024FXS_at; Start 224; Stop 248
tagcagatctcaacttgaatggcaa

SEQ ID NO: 225297 - DNA, 25 bp, Artificial
  probe
  misc_feature (1)..(25): SEQ ID NO: 2444; WAN024FXS_at; Start 281; Stop 305
tctacgatgaattctgtaaggctgt

SEQ ID NO: 225298 - DNA, 25 bp, Artificial
  probe
  misc_feature (1)..(25): SEQ ID NO: 2444; WAN024FXS_at; Start 297; Stop 321
taaggctgttgatgactttgaccgt

SEQ ID NO: 225299 - DNA, 25 bp, Artificial
  probe
  misc_feature (1)..(25): SEQ ID NO: 2444; WAN024FXS_at; Start 393; Stop 417
tattgaacgcttggaacaattcgca

SEQ ID NO: 225300 - DNA, 25 bp, Artificial
  probe
  misc_feature (1)..(25): SEQ ID NO: 2444; WAN024FXS_at; Start 13; Stop 37
aaaattgtatttgccagtatgaccg

SEQ ID NO: 225301 - DNA, 25 bp, Artificial
  probe
  misc_feature (1)..(25): SEQ ID NO: 2444; WAN024FXS_at; Start 104; Stop 128
ttgatgaatgtacaactgttgacgc

SEQ ID NO: 225302 - DNA, 25 bp, Artificial
  probe
  misc_feature (1)..(25): SEQ ID NO: 2444; WAN024FXS_at; Start 397; Stop 421
gaacgcttggaacaattcgcagaag

SEQ ID NO: 225303 - DNA, 25 bp, Artificial
  probe
  misc_feature (1)..(25): SEQ ID NO: 2444; WAN024FXS_at; Start 140; Stop 164
tggaagcagacatcgctatcgttgc

SEQ ID NO: 225304 - DNA, 25 bp, Artificial
  probe
  misc_feature (1)..(25): SEQ ID NO: 2444; WAN024FXS_at; Start 22; Stop 46
tttgccagtatgaccggtaataccg

SEQ ID NO: 225305 - DNA, 25 bp, Artificial
  probe
  misc_feature (1)..(25): SEQ ID NO: 2444; WAN024FXS_at; Start 73; Stop 97
aaattacgtgacttgggcttggatg

SEQ ID NO: 225306 - DNA, 25 bp, Artificial
  probe
  misc_feature (1)..(25): SEQ ID NO: 2444; WAN024FXS_at; Start 148; Stop 172
gacatcgctatcgttgcgacctata

SEQ ID NO: 225307 - DNA, 25 bp, Artificial
  probe
  misc_feature (1)..(25): SEQ ID NO: 2444; WAN024FXS_at; Start 35; Stop 59
ccggtaataccgaagaaattgcaga

SEQ ID NO: 225308 - DNA, 25 bp, Artificial
  probe
  misc_feature (1)..(25): SEQ ID NO: 2444; WAN024FXS_at; Start 186; Stop 210
tgaattgccagatgagatgatggac

SEQ ID NO: 225309 - DNA, 25 bp, Artificial
  probe
  misc_feature (1)..(25): SEQ ID NO: 2444; WAN024FXS_at; Start 3; Stop 27
ggcattagcaaaaattgtatttgcc

SEQ ID NO: 225310 - DNA, 25 bp, Artificial
  probe
  misc_feature (1)..(25): SEQ ID NO: 2444; WAN024FXS_at; Start 133; Stop 157
gacttcttggaagcagacatcgcta

SEQ ID NO: 225311 - DNA, 25 bp, Artificial
  probe
  misc_feature (1)..(25): SEQ ID NO: 2444; WAN024FXS_at; Start 112; Stop 136
tgtacaactgttgacgcttcagact

SEQ ID NO: 225312 - DNA, 25 bp, Artificial
  probe
  misc_feature (1)..(25): SEQ ID NO: 2444; WAN024FXS_at; Start 49; Stop 73
gaaattgcagatattgtagcagaca

SEQ ID NO: 225313 - DNA, 25 bp, Artificial
  probe
  misc_feature (1)..(25): SEQ ID NO: 2444; WAN024FXS_at; Start 269; Stop 293
caggagataccttctacgatgaatt

SEQ ID NO: 225314 - DNA, 25 bp, Artificial
  probe
  misc_feature (1)..(25): SEQ ID NO: 2444; WAN024FXS_at; Start 158; Stop 182
tcgttgcgacctatacttatggtga

SEQ ID NO: 225315 - DNA, 25 bp, Artificial
  probe
  misc_feature (1)..(25): SEQ ID NO: 2444; WAN024FXS_at; Start 67; Stop 91
gcagacaaattacgtgacttgggct

SEQ ID NO: 225316 - DNA, 25 bp, Artificial
  probe
  misc_feature (1)..(25): SEQ ID NO: 2444; WAN024FXS_at; Start 401; Stop 425
gcttggaacaattcgcagaagaatt

SEQ ID NO: 225317 - DNA, 25 bp, Artificial
  probe
  misc_feature (1)..(25): SEQ ID NO: 2444; WAN024FXS_at; Start 89; Stop 113
gcttggatgttgatgttgatgaatg

SEQ ID NO: 225318 - DNA, 25 bp, Artificial
  probe
  misc_feature (1)..(25): SEQ ID NO: 2444; WAN024FXS_at; Start 288; Stop 312
tgaattctgtaaggctgttgatgac

SEQ ID NO: 225319 - DNA, 25 bp, Artificial
  probe
  misc_feature (1)..(25): SEQ ID NO: 2444; WAN024FXS_at; Start 263; Stop 287
tcggctcaggagataccttctacga

SEQ ID NO: 225320 - DNA, 25 bp, Artificial
  probe
  misc_feature (1)..(25): SEQ ID NO: 2444; WAN024FXS_at; Start 171; Stop 195
tacttatggtgatggtgaattgcca

SEQ ID NO: 225321 - DNA, 25 bp, Artificial
  probe
  misc_feature (1)..(25): SEQ ID NO: 2444; WAN024FXS_at; Start 196; Stop 220
gatgagatgatggacttctacgaag

SEQ ID NO: 225322 - DNA, 25 bp, Artificial
  probe
  misc_feature (1)..(25): SEQ ID NO: 2444; WAN024FXS_at; Start 364; Stop 388
aaagttgatctttctgccgaggaag

SEQ ID NO: 225323 - DNA, 25 bp, Artificial
  probe
  misc_feature (1)..(25): SEQ ID NO: 6631; WAN024FXT_at; Start 35; Stop 59
tgggcaacgccggattcgtcatttg

SEQ ID NO: 225324 - DNA, 25 bp, Artificial
  probe
  misc_feature (1)..(25): SEQ ID NO: 6631; WAN024FXT_at; Start 172; Stop 196
catggtttcatctttggtcaatccg

SEQ ID NO: 225325 - DNA, 25 bp, Artificial
  probe
  misc_feature (1)..(25): SEQ ID NO: 6631; WAN024FXT_at; Start 130; Stop 154
gacttccagcatggcacggtcattt

SEQ ID NO: 225326 - DNA, 25 bp, Artificial
  probe
  misc_feature (1)..(25): SEQ ID NO: 6631; WAN024FXT_at; Start 44; Stop 68
ccggattcgtcatttgttttggtga

SEQ ID NO: 225327 - DNA, 25 bp, Artificial
  probe
  misc_feature (1)..(25): SEQ ID NO: 6631; WAN024FXT_at; Start 187; Stop 211
ggtcaatccgagtttttcagccaag

SEQ ID NO: 225328 - DNA, 25 bp, Artificial
  probe
  misc_feature (1)..(25): SEQ ID NO: 6631; WAN024FXT_at; Start 9; Stop 33
tttacagtacccatgttcggatggc

SEQ ID NO: 225329 - DNA, 25 bp, Artificial
  probe
  misc_feature (1)..(25): SEQ ID NO: 6631; WAN024FXT_at; Start 125; Stop 149
ccaacgacttccagcatggcacggt

SEQ ID NO: 225330 - DNA, 25 bp, Artificial
  probe
  misc_feature (1)..(25): SEQ ID NO: 6631; WAN024FXT_at; Start 147; Stop 171
ggtcattttcttcatcaccgattgc

SEQ ID NO: 225331 - DNA, 25 bp, Artificial
  probe
  misc_feature (1)..(25): SEQ ID NO: 6631; WAN024FXT_at; Start 29; Stop 53
atggcatgggcaacgccggattcgt

SEQ ID NO: 225332 - DNA, 25 bp, Artificial
  probe
  misc_feature (1)..(25): SEQ ID NO: 6631; WAN024FXT_at; Start 13; Stop 37
cagtacccatgttcggatggcatgg

SEQ ID NO: 225333 - DNA, 25 bp, Artificial
  probe
  misc_feature (1)..(25): SEQ ID NO: 6631; WAN024FXT_at; Start 136; Stop 160
cagcatggcacggtcattttcttca

SEQ ID NO: 225334 - DNA, 25 bp, Artificial
  probe
  misc_feature (1)..(25): SEQ ID NO: 6631; WAN024FXT_at; Start 88; Stop 112
gatttctggatttccattttccatg

SEQ ID NO: 225335 - DNA, 25 bp, Artificial
  probe
  misc_feature (1)..(25): SEQ ID NO: 6631; WAN024FXT_at; Start 119; Stop 143
gggtttccaacgacttccagcatgg

SEQ ID NO: 225336 - DNA, 25 bp, Artificial
  probe
  misc_feature (1)..(25): SEQ ID NO: 6631; WAN024FXT_at; Start 163; Stop 187
accgattgccatggtttcatctttg

SEQ ID NO: 225337 - DNA, 25 bp, Artificial
  probe
  misc_feature (1)..(25): SEQ ID NO: 6631; WAN024FXT_at; Start 54; Stop 78
catttgttttggtgatgtatttggc

SEQ ID NO: 225338 - DNA, 25 bp, Artificial
  probe
  misc_feature (1)..(25): SEQ ID NO: 6631; WAN024FXT_at; Start 139; Stop 163
catggcacggtcattttcttcatca

SEQ ID NO: 225339 - DNA, 25 bp, Artificial
  probe
  misc_feature (1)..(25): SEQ ID NO: 6631; WAN024FXT_at; Start 158; Stop 182
tcatcaccgattgccatggtttcat

SEQ ID NO: 225340 - DNA, 25 bp, Artificial
  probe
  misc_feature (1)..(25): SEQ ID NO: 6631; WAN024FXT_at; Start 142; Stop 166
ggcacggtcattttcttcatcaccg

SEQ ID NO: 225341 - DNA, 25 bp, Artificial
  probe
  misc_feature (1)..(25): SEQ ID NO: 6631; WAN024FXT_at; Start 19; Stop 43
ccatgttcggatggcatgggcaacg

SEQ ID NO: 225342 - DNA, 25 bp, Artificial
  probe
  misc_feature (1)..(25): SEQ ID NO: 6631; WAN024FXT_at; Start 38; Stop 62
gcaacgccggattcgtcatttgttt

SEQ ID NO: 225343 - DNA, 25 bp, Artificial
  probe
  misc_feature (1)..(25): SEQ ID NO: 6631; WAN024FXT_at; Start 11; Stop 35
tacagtacccatgttcggatggcat

SEQ ID NO: 225344 - DNA, 25 bp, Artificial
  probe
  misc_feature (1)..(25): SEQ ID NO: 6631; WAN024FXT_at; Start 190; Stop 214
caatccgagtttttcagccaagtga

SEQ ID NO: 225345 - DNA, 25 bp, Artificial
  probe
  misc_feature (1)..(25): SEQ ID NO: 6631; WAN024FXT_at; Start 58; Stop 82
tgttttggtgatgtatttggcgatt

SEQ ID NO: 225346 - DNA, 25 bp, Artificial
  probe
  misc_feature (1)..(25): SEQ ID NO: 6631; WAN024FXT_at; Start 5; Stop 29
tacttttacagtacccatgttcgga

SEQ ID NO: 225347 - DNA, 25 bp, Artificial
  probe
  misc_feature (1)..(25): SEQ ID NO: 6631; WAN024FXT_at; Start 198; Stop 222
gtttttcagccaagtgagtaatggc

SEQ ID NO: 225348 - DNA, 25 bp, Artificial
  probe
  misc_feature (1)..(25): SEQ ID NO: 6631; WAN024FXT_at; Start 201; Stop 225
tttcagccaagtgagtaatggctga

SEQ ID NO: 225349 - DNA, 25 bp, Artificial
  probe
  misc_feature (1)..(25): SEQ ID NO: 6631; WAN024FXT_at; Start 132; Stop 156
cttccagcatggcacggtcattttc

SEQ ID NO: 225350 - DNA, 25 bp, Artificial
  probe
  misc_feature (1)..(25): SEQ ID NO: 6631; WAN024FXT_at; Start 127; Stop 151
aacgacttccagcatggcacggtca

SEQ ID NO: 225351 - DNA, 25 bp, Artificial
  probe
  misc_feature (1)..(25): SEQ ID NO: 6631; WAN024FXT_at; Start 73; Stop 97
tttggcgatttttttgatttctgga

SEQ ID NO: 225352 - DNA, 25 bp, Artificial
  probe
  misc_feature (1)..(25): SEQ ID NO: 6631; WAN024FXT_at; Start 96; Stop 120
gatttccattttccatgacaacggg

SEQ ID NO: 225353 - DNA, 25 bp, Artificial
  probe
  misc_feature (1)..(25): SEQ ID NO: 6631; WAN024FXT_at; Start 194; Stop 218
ccgagtttttcagccaagtgagtaa

SEQ ID NO: 225354 - DNA, 25 bp, Artificial
  probe
  misc_feature (1)..(25): SEQ ID NO: 6631; WAN024FXT_at; Start 152; Stop 176
ttttcttcatcaccgattgccatgg

SEQ ID NO: 225355 - DNA, 25 bp, Artificial
  probe
  misc_feature (1)..(25): SEQ ID NO: 6631; WAN024FXT_at; Start 175; Stop 199
ggtttcatctttggtcaatccgagt

SEQ ID NO: 225356 - DNA, 25 bp, Artificial
  probe
  misc_feature (1)..(25): SEQ ID NO: 6631; WAN024FXT_at; Start 121; Stop 145
gtttccaacgacttccagcatggca

SEQ ID NO: 225357 - DNA, 25 bp, Artificial
  probe
  misc_feature (1)..(25): SEQ ID NO: 6714; WAN024FXU_at; Start 150; Stop 174
actgcaagtcgtccagaagtttggc

SEQ ID NO: 225358 - DNA, 25 bp, Artificial
  probe
  misc_feature (1)..(25): SEQ ID NO: 6714; WAN024FXU_at; Start 103; Stop 127
gacaagggcaccattgaaggtcacc

SEQ ID NO: 225359 - DNA, 25 bp, Artificial
  probe
  misc_feature (1)..(25): SEQ ID NO: 6714; WAN024FXU_at; Start 90; Stop 114
tagcagtttcttggacaagggcacc

SEQ ID NO: 225360 - DNA, 25 bp, Artificial
  probe
  misc_feature (1)..(25): SEQ ID NO: 6714; WAN024FXU_at; Start 5; Stop 29
atgtggacaccgagcttgcgactga

SEQ ID NO: 225361 - DNA, 25 bp, Artificial
  probe
  misc_feature (1)..(25): SEQ ID NO: 6714; WAN024FXU_at; Start 109; Stop 133
ggcaccattgaaggtcaccacatag

SEQ ID NO: 225362 - DNA, 25 bp, Artificial
  probe
  misc_feature (1)..(25): SEQ ID NO: 6714; WAN024FXU_at; Start 141; Stop 165
ggtctctcaactgcaagtcgtccag

SEQ ID NO: 225363 - DNA, 25 bp, Artificial
  probe
  misc_feature (1)..(25): SEQ ID NO: 6714; WAN024FXU_at; Start 131; Stop 155
tagtcaccttggtctctcaactgca

SEQ ID NO: 225364 - DNA, 25 bp, Artificial
  probe
  misc_feature (1)..(25): SEQ ID NO: 6714; WAN024FXU_at; Start 118; Stop 142
gaaggtcaccacatagtcaccttgg

SEQ ID NO: 225365 - DNA, 25 bp, Artificial
  probe
  misc_feature (1)..(25): SEQ ID NO: 6714; WAN024FXU_at; Start 208; Stop 232
gactttgacaccagcttctttggca

SEQ ID NO: 225366 - DNA, 25 bp, Artificial
  probe
  misc_feature (1)..(25): SEQ ID NO: 6714; WAN024FXU_at; Start 41; Stop 65
tccagataatcctcataggtcaagg

SEQ ID NO: 225367 - DNA, 25 bp, Artificial
  probe
  misc_feature (1)..(25): SEQ ID NO: 6714; WAN024FXU_at; Start 65; Stop 89
gattcgctgataatctcatggccag

SEQ ID NO: 225368 - DNA, 25 bp, Artificial
  probe
  misc_feature (1)..(25): SEQ ID NO: 6714; WAN024FXU_at; Start 22; Stop 46
gcgactgaggaattccatatccaga

SEQ ID NO: 225369 - DNA, 25 bp, Artificial
  probe
  misc_feature (1)..(25): SEQ ID NO: 6714; WAN024FXU_at; Start 258; Stop 282
gagtgatttccttttggctgttgac

SEQ ID NO: 225370 - DNA, 25 bp, Artificial
  probe
  misc_feature (1)..(25): SEQ ID NO: 6714; WAN024FXU_at; Start 72; Stop 96
tgataatctcatggccagtagcagt

SEQ ID NO: 225371 - DNA, 25 bp, Artificial
  probe
  misc_feature (1)..(25): SEQ ID NO: 6714; WAN024FXU_at; Start 96; Stop 120
tttcttggacaagggcaccattgaa

SEQ ID NO: 225372 - DNA, 25 bp, Artificial
  probe
  misc_feature (1)..(25): SEQ ID NO: 6714; WAN024FXU_at; Start 188; Stop 212
gggcggccagttgcaatcacgactt

SEQ ID NO: 225373 - DNA, 25 bp, Artificial
  probe
  misc_feature (1)..(25): SEQ ID NO: 6714; WAN024FXU_at; Start 228; Stop 252
tggcatcttggatggcagaaaagac

SEQ ID NO: 225374 - DNA, 25 bp, Artificial
  probe
  misc_feature (1)..(25): SEQ ID NO: 6714; WAN024FXU_at; Start 16; Stop 40
gagcttgcgactgaggaattccata

SEQ ID NO: 225375 - DNA, 25 bp, Artificial
  probe
  misc_feature (1)..(25): SEQ ID NO: 6714; WAN024FXU_at; Start 199; Stop 223
tgcaatcacgactttgacaccagct

SEQ ID NO: 225376 - DNA, 25 bp, Artificial
  probe
  misc_feature (1)..(25): SEQ ID NO: 6714; WAN024FXU_at; Start 214; Stop 238
gacaccagcttctttggcatcttgg

SEQ ID NO: 225377 - DNA, 25 bp, Artificial
  probe
  misc_feature (1)..(25): SEQ ID NO: 6714; WAN024FXU_at; Start 234; Stop 258
cttggatggcagaaaagacttcagg

SEQ ID NO: 225378 - DNA, 25 bp, Artificial
  probe
  misc_feature (1)..(25): SEQ ID NO: 6714; WAN024FXU_at; Start 51; Stop 75
cctcataggtcaaggattcgctgat

SEQ ID NO: 225379 - DNA, 25 bp, Artificial
  probe
  misc_feature (1)..(25): SEQ ID NO: 6714; WAN024FXU_at; Start 219; Stop 243
cagcttctttggcatcttggatggc

SEQ ID NO: 225380 - DNA, 25 bp, Artificial
  probe
  misc_feature (1)..(25): SEQ ID NO: 6714; WAN024FXU_at; Start 27; Stop 51
tgaggaattccatatccagataatc

SEQ ID NO: 225381 - DNA, 25 bp, Artificial
  probe
  misc_feature (1)..(25): SEQ ID NO: 6714; WAN024FXU_at; Start 12; Stop 36
caccgagcttgcgactgaggaattc

SEQ ID NO: 225382 - DNA, 25 bp, Artificial
  probe
  misc_feature (1)..(25): SEQ ID NO: 6714; WAN024FXU_at; Start 261; Stop 285
tgatttccttttggctgttgactag

SEQ ID NO: 225383 - DNA, 25 bp, Artificial
  probe
  misc_feature (1)..(25): SEQ ID NO: 6714; WAN024FXU_at; Start 245; Stop 269
gaaaagacttcaggagtgatttcct

SEQ ID NO: 225384 - DNA, 25 bp, Artificial
  probe
  misc_feature (1)..(25): SEQ ID NO: 6714; WAN024FXU_at; Start 192; Stop 216
ggccagttgcaatcacgactttgac

SEQ ID NO: 225385 - DNA, 25 bp, Artificial
  probe
  misc_feature (1)..(25): SEQ ID NO: 6714; WAN024FXU_at; Start 166; Stop 190
aagtttggcaacacctgcgatgggg

SEQ ID NO: 225386 - DNA, 25 bp, Artificial
  probe
  misc_feature (1)..(25): SEQ ID NO: 6714; WAN024FXU_at; Start 114; Stop 138
cattgaaggtcaccacatagtcacc

SEQ ID NO: 225387 - DNA, 25 bp, Artificial
  probe
  misc_feature (1)..(25): SEQ ID NO: 6714; WAN024FXU_at; Start 78; Stop 102
tctcatggccagtagcagtttcttg

SEQ ID NO: 225388 - DNA, 25 bp, Artificial
  probe
  misc_feature (1)..(25): SEQ ID NO: 6714; WAN024FXU_at; Start 87; Stop 111
cagtagcagtttcttggacaagggc

SEQ ID NO: 225389 - DNA, 25 bp, Artificial
  probe
  misc_feature (1)..(25): SEQ ID NO: 6714; WAN024FXU_at; Start 154; Stop 178
caagtcgtccagaagtttggcaaca

SEQ ID NO: 225390 - DNA, 25 bp, Artificial
  probe
  misc_feature (1)..(25): SEQ ID NO: 6714; WAN024FXU_at; Start 2; Stop 26
tgcatgtggacaccgagcttgcgac

SEQ ID NO: 225391 - DNA, 25 bp, Artificial
  probe
  misc_feature (1)..(25): SEQ ID NO: 1618; WAN024FXV_at; Start 332; Stop 356
ccaaggacggtatctatactgcaaa

SEQ ID NO: 225392 - DNA, 25 bp, Artificial
  probe
  misc_feature (1)..(25): SEQ ID NO: 1618; WAN024FXV_at; Start 283; Stop 307
gatatggaattcctcagtcgcaagc

SEQ ID NO: 225393 - DNA, 25 bp, Artificial
  probe
  misc_feature (1)..(25): SEQ ID NO: 1618; WAN024FXV_at; Start 664; Stop 688
aatgaccgtgccatgctggaagtcg

SEQ ID NO: 225394 - DNA, 25 bp, Artificial
  probe
  misc_feature (1)..(25): SEQ ID NO: 1618; WAN024FXV_at; Start 211; Stop 235
ggtgcccttgtccaagaaactgcta

SEQ ID NO: 225395 - DNA, 25 bp, Artificial
  probe
  misc_feature (1)..(25): SEQ ID NO: 1618; WAN024FXV_at; Start 542; Stop 566
aatctgctcctttctacctcgaact

SEQ ID NO: 225396 - DNA, 25 bp, Artificial
  probe
  misc_feature (1)..(25): SEQ ID NO: 1618; WAN024FXV_at; Start 289; Stop 313
gaattcctcagtcgcaagctcggtg

SEQ ID NO: 225397 - DNA, 25 bp, Artificial
  probe
  misc_feature (1)..(25): SEQ ID NO: 1618; WAN024FXV_at; Start 318; Stop 342
catgcatgccattaccaaggacggt

SEQ ID NO: 225398 - DNA, 25 bp, Artificial
  probe
  misc_feature (1)..(25): SEQ ID NO: 1618; WAN024FXV_at; Start 378; Stop 402
tgtacacgaatcaaccctcgtcagc

SEQ ID NO: 225399 - DNA, 25 bp, Artificial
  probe
  misc_feature (1)..(25): SEQ ID NO: 1618; WAN024FXV_at; Start 346; Stop 370
tatactgcaaatcgcaatatcggaa

SEQ ID NO: 225400 - DNA, 25 bp, Artificial
  probe
  misc_feature (1)..(25): SEQ ID NO: 1618; WAN024FXV_at; Start 322; Stop 346
catgccattaccaaggacggtatct

SEQ ID NO: 225401 - DNA, 25 bp, Artificial
  probe
  misc_feature (1)..(25): SEQ ID NO: 1618; WAN024FXV_at; Start 96; Stop 120
caaagaagctggtgtcaaagtcgtg

SEQ ID NO: 225402 - DNA, 25 bp, Artificial
  probe
  misc_feature (1)..(25): SEQ ID NO: 1618; WAN024FXV_at; Start 82; Stop 106
gccatccaagatgccaaagaagctg

SEQ ID NO: 225403 - DNA, 25 bp, Artificial
  probe
  misc_feature (1)..(25): SEQ ID NO: 1618; WAN024FXV_at; Start 337; Stop 361
gacggtatctatactgcaaatcgca

SEQ ID NO: 225404 - DNA, 25 bp, Artificial
  probe
  misc_feature (1)..(25): SEQ ID NO: 1618; WAN024FXV_at; Start 87; Stop 111
ccaagatgccaaagaagctggtgtc

SEQ ID NO: 225405 - DNA, 25 bp, Artificial
  probe
  misc_feature (1)..(25): SEQ ID NO: 1618; WAN024FXV_at; Start 91; Stop 115
gatgccaaagaagctggtgtcaaag

SEQ ID NO: 225406 - DNA, 25 bp, Artificial
  probe
  misc_feature (1)..(25): SEQ ID NO: 1618; WAN024FXV_at; Start 308; Stop 332
tcggtgtccacatgcatgccattac

SEQ ID NO: 225407 - DNA, 25 bp, Artificial
  probe
  misc_feature (1)..(25): SEQ ID NO: 1618; WAN024FXV_at; Start 372; Stop 396
atacactgtacacgaatcaaccctc

SEQ ID NO: 225408 - DNA, 25 bp, Artificial
  probe
  misc_feature (1)..(25): SEQ ID NO: 1618; WAN024FXV_at; Start 386; Stop 410
aatcaaccctcgtcagcatgcctat

SEQ ID NO: 225409 - DNA, 25 bp, Artificial
  probe
  misc_feature (1)..(25): SEQ ID NO: 1618; WAN024FXV_at; Start 304; Stop 328
aagctcggtgtccacatgcatgcca

SEQ ID NO: 225410 - DNA, 25 bp, Artificial
  probe
  misc_feature (1)..(25): SEQ ID NO: 1618; WAN024FXV_at; Start 716; Stop 740
gaaatccagaaatcaaaaaaatcgc

SEQ ID NO: 225411 - DNA, 25 bp, Artificial
  probe
  misc_feature (1)..(25): SEQ ID NO: 1618; WAN024FXV_at; Start 661; Stop 685
gaaaatgaccgtgccatgctggaag

SEQ ID NO: 225412 - DNA, 25 bp, Artificial
  probe
  misc_feature (1)..(25): SEQ ID NO: 1618; WAN024FXV_at; Start 313; Stop 337
gtccacatgcatgccattaccaagg

SEQ ID NO: 225413 - DNA, 25 bp, Artificial
  probe
  misc_feature (1)..(25): SEQ ID NO: 1618; WAN024FXV_at; Start 668; Stop 692
accgtgccatgctggaagtcgttgg

SEQ ID NO: 225414 - DNA, 25 bp, Artificial
  probe
  misc_feature (1)..(25): SEQ ID NO: 1618; WAN024FXV_at; Start 754; Stop 778
aaaacaaatgacgaatccggcgttg

SEQ ID NO: 225415 - DNA, 25 bp, Artificial
  probe
  misc_feature (1)..(25): SEQ ID NO: 1618; WAN024FXV_at; Start 241; Stop 265
catgagattatcagcgaatccttga

SEQ ID NO: 225416 - DNA, 25 bp, Artificial
  probe
  misc_feature (1)..(25): SEQ ID NO: 1618; WAN024FXV_at; Start 329; Stop 353
ttaccaaggacggtatctatactgc

SEQ ID NO: 225417 - DNA, 25 bp, Artificial
  probe
  misc_feature (1)..(25): SEQ ID NO: 1618; WAN024FXV_at; Start 539; Stop 563
acaaatctgctcctttctacctcga

SEQ ID NO: 225418 - DNA, 25 bp, Artificial
  probe
  misc_feature (1)..(25): SEQ ID NO: 1618; WAN024FXV_at; Start 102; Stop 126
agctggtgtcaaagtcgtgattgca

SEQ ID NO: 225419 - DNA, 25 bp, Artificial
  probe
  misc_feature (1)..(25): SEQ ID NO: 1618; WAN024FXV_at; Start 110; Stop 134
tcaaagtcgtgattgcaactggccg

SEQ ID NO: 225420 - DNA, 25 bp, Artificial
  probe
  misc_feature (1)..(25): SEQ ID NO: 1618; WAN024FXV_at; Start 659; Stop 683
aagaaaatgaccgtgccatgctgga

SEQ ID NO: 225421 - DNA, 25 bp, Artificial
  probe
  misc_feature (1)..(25): SEQ ID NO: 1618; WAN024FXV_at; Start 76; Stop 100
ttttctgccatccaagatgccaaag

SEQ ID NO: 225422 - DNA, 25 bp, Artificial
  probe
  misc_feature (1)..(25): SEQ ID NO: 1618; WAN024FXV_at; Start 299; Stop 323
gtcgcaagctcggtgtccacatgca

SEQ ID NO: 225423 - DNA, 25 bp, Artificial
  probe
  misc_feature (1)..(25): SEQ ID NO: 1618; WAN024FXV_at; Start 292; Stop 316
ttcctcagtcgcaagctcggtgtcc

SEQ ID NO: 225424 - DNA, 25 bp, Artificial
  probe
  misc_feature (1)..(25): SEQ ID NO: 1618; WAN024FXV_at; Start 758; Stop 782
caaatgacgaatccggcgttgccca

SEQ ID NO: 225425 - DNA, 25 bp, Artificial
  probe
  misc_feature (1)..(25): SEQ ID NO: 4111; WAN024FXW_at; Start 52; Stop 76
gatggcgtgcatgccattgcgctga

SEQ ID NO: 225426 - DNA, 25 bp, Artificial
  probe
  misc_feature (1)..(25): SEQ ID NO: 4111; WAN024FXW_at; Start 29; Stop 53
tagcgactgaggacgtagtcttcga

SEQ ID NO: 225427 - DNA, 25 bp, Artificial
  probe
  misc_feature (1)..(25): SEQ ID NO: 4111; WAN024FXW_at; Start 148; Stop 172
tcctgtaaaataggagtcgcgcaag

SEQ ID NO: 225428 - DNA, 25 bp, Artificial
  probe
  misc_feature (1)..(25): SEQ ID NO: 4111; WAN024FXW_at; Start 240; Stop 264
tatggtcaatgacactggccacctt

SEQ ID NO: 225429 - DNA, 25 bp, Artificial
  probe
  misc_feature (1)..(25): SEQ ID NO: 4111; WAN024FXW_at; Start 108; Stop 132
ctcggaggattcgagtcaggtcaaa

SEQ ID NO: 225430 - DNA, 25 bp, Artificial
  probe
  misc_feature (1)..(25): SEQ ID NO: 4111; WAN024FXW_at; Start 71; Stop 95
cgctgaaaggcgataccattttcga

SEQ ID NO: 225431 - DNA, 25 bp, Artificial
  probe
  misc_feature (1)..(25): SEQ ID NO: 4111; WAN024FXW_at; Start 184; Stop 208
gcgatctgcgtcaatctgactagaa

SEQ ID NO: 225432 - DNA, 25 bp, Artificial
  probe
  misc_feature (1)..(25): SEQ ID NO: 4111; WAN024FXW_at; Start 9; Stop 33
aaacctgcatgtacatctggtagcg

SEQ ID NO: 225433 - DNA, 25 bp, Artificial
  probe
  misc_feature (1)..(25): SEQ ID NO: 4111; WAN024FXW_at; Start 200; Stop 224
tgactagaaatgagctgcacgacct

SEQ ID NO: 225434 - DNA, 25 bp, Artificial
  probe
  misc_feature (1)..(25): SEQ ID NO: 4111; WAN024FXW_at; Start 87; Stop 111
cattttcgataggacgaatgactcg

SEQ ID NO: 225435 - DNA, 25 bp, Artificial
  probe
  misc_feature (1)..(25): SEQ ID NO: 4111; WAN024FXW_at; Start 250; Stop 274
gacactggccaccttttctgggaaa

SEQ ID NO: 225436 - DNA, 25 bp, Artificial
  probe
  misc_feature (1)..(25): SEQ ID NO: 4111; WAN024FXW_at; Start 42; Stop 66
cgtagtcttcgatggcgtgcatgcc

SEQ ID NO: 225437 - DNA, 25 bp, Artificial
  probe
  misc_feature (1)..(25): SEQ ID NO: 4111; WAN024FXW_at; Start 211; Stop 235
gagctgcacgacctgcttattagga

SEQ ID NO: 225438 - DNA, 25 bp, Artificial
  probe
  misc_feature (1)..(25): SEQ ID NO: 4111; WAN024FXW_at; Start 115; Stop 139
gattcgagtcaggtcaaattcccca

SEQ ID NO: 225439 - DNA, 25 bp, Artificial
  probe
  misc_feature (1)..(25): SEQ ID NO: 4111; WAN024FXW_at; Start 195; Stop 219
caatctgactagaaatgagctgcac

SEQ ID NO: 225440 - DNA, 25 bp, Artificial
  probe
  misc_feature (1)..(25): SEQ ID NO: 4111; WAN024FXW_at; Start 138; Stop 162
cataggatgctcctgtaaaatagga

SEQ ID NO: 225441 - DNA, 25 bp, Artificial
  probe
  misc_feature (1)..(25): SEQ ID NO: 4111; WAN024FXW_at; Start 22; Stop 46
catctggtagcgactgaggacgtag

SEQ ID NO: 225442 - DNA, 25 bp, Artificial
  probe
  misc_feature (1)..(25): SEQ ID NO: 4111; WAN024FXW_at; Start 266; Stop 290
tctgggaaatcaggtgccacttgta

SEQ ID NO: 225443 - DNA, 25 bp, Artificial
  probe
  misc_feature (1)..(25): SEQ ID NO: 4111; WAN024FXW_at; Start 34; Stop 58
actgaggacgtagtcttcgatggcg

SEQ ID NO: 225444 - DNA, 25 bp, Artificial
  probe
  misc_feature (1)..(25): SEQ ID NO: 4111; WAN024FXW_at; Start 230; Stop 254
ttaggataggtatggtcaatgacac

SEQ ID NO: 225445 - DNA, 25 bp, Artificial
  probe
  misc_feature (1)..(25): SEQ ID NO: 4111; WAN024FXW_at; Start 120; Stop 144
gagtcaggtcaaattccccatagga

SEQ ID NO: 225446 - DNA, 25 bp, Artificial
  probe
  misc_feature (1)..(25): SEQ ID NO: 4111; WAN024FXW_at; Start 204; Stop 228
tagaaatgagctgcacgacctgctt

SEQ ID NO: 225447 - DNA, 25 bp, Artificial
  probe
  misc_feature (1)..(25): SEQ ID NO: 4111; WAN024FXW_at; Start 169; Stop 193
caagagatagtccatgcgatctgcg

SEQ ID NO: 225448 - DNA, 25 bp, Artificial
  probe
  misc_feature (1)..(25): SEQ ID NO: 4111; WAN024FXW_at; Start 3; Stop 27
ggaaataaacctgcatgtacatctg

SEQ ID NO: 225449 - DNA, 25 bp, Artificial
  probe
  misc_feature (1)..(25): SEQ ID NO: 4111; WAN024FXW_at; Start 128; Stop 152
tcaaattccccataggatgctcctg

SEQ ID NO: 225450 - DNA, 25 bp, Artificial
  probe
  misc_feature (1)..(25): SEQ ID NO: 4111; WAN024FXW_at; Start 161; Stop 185
gagtcgcgcaagagatagtccatgc

SEQ ID NO: 225451 - DNA, 25 bp, Artificial
  probe
  misc_feature (1)..(25): SEQ ID NO: 4111; WAN024FXW_at; Start 158; Stop 182
taggagtcgcgcaagagatagtcca

SEQ ID NO: 225452 - DNA, 25 bp, Artificial
  probe
  misc_feature (1)..(25): SEQ ID NO: 4111; WAN024FXW_at; Start 217; Stop 241
cacgacctgcttattaggataggta

SEQ ID NO: 225453 - DNA, 25 bp, Artificial
  probe
  misc_feature (1)..(25): SEQ ID NO: 4111; WAN024FXW_at; Start 174; Stop 198
gatagtccatgcgatctgcgtcaat

SEQ ID NO: 225454 - DNA, 25 bp, Artificial
  probe
  misc_feature (1)..(25): SEQ ID NO: 4111; WAN024FXW_at; Start 63; Stop 87
tgccattgcgctgaaaggcgatacc

SEQ ID NO: 225455 - DNA, 25 bp, Artificial
  probe
  misc_feature (1)..(25): SEQ ID NO: 4111; WAN024FXW_at; Start 18; Stop 42
tgtacatctggtagcgactgaggac

SEQ ID NO: 225456 - DNA, 25 bp, Artificial
  probe
  misc_feature (1)..(25): SEQ ID NO: 4111; WAN024FXW_at; Start 262; Stop 286
cttttctgggaaatcaggtgccact

SEQ ID NO: 225457 - DNA, 25 bp, Artificial
  probe
  misc_feature (1)..(25): SEQ ID NO: 4111; WAN024FXW_at; Start 93; Stop 117
cgataggacgaatgactcggaggat

SEQ ID NO: 225458 - DNA, 25 bp, Artificial
  probe
  misc_feature (1)..(25): SEQ ID NO: 4111; WAN024FXW_at; Start 79; Stop 103
ggcgataccattttcgataggacga

SEQ ID NO: 225459 - DNA, 25 bp, Artificial
  probe
  misc_feature (1)..(25): SEQ ID NO: 5691; WAN024FXX_at; Start 572; Stop 596
tcatttctagtcagattgacgcaga

SEQ ID NO: 225460 - DNA, 25 bp, Artificial
  probe
  misc_feature (1)..(25): SEQ ID NO: 5691; WAN024FXX_at; Start 585; Stop 609
gattgacgcagatcgcatggactat

SEQ ID NO: 225461 - DNA, 25 bp, Artificial
  probe
  misc_feature (1)..(25): SEQ ID NO: 5691; WAN024FXX_at; Start 802; Stop 826
gaagttctcctacagaatcttctca

SEQ ID NO: 225462 - DNA, 25 bp, Artificial
  probe
  misc_feature (1)..(25): SEQ ID NO: 5691; WAN024FXX_at; Start 624; Stop 648
ctattttacaggagcatcctatggg

SEQ ID NO: 225463 - DNA, 25 bp, Artificial
  probe
  misc_feature (1)..(25): SEQ ID NO: 5691; WAN024FXX_at; Start 96; Stop 120
tatgaacgaaaaagtattccgtgac

SEQ ID NO: 225464 - DNA, 25 bp, Artificial
  probe
  misc_feature (1)..(25): SEQ ID NO: 5691; WAN024FXX_at; Start 714; Stop 738
caatggcatgcacgccatcgaagac

SEQ ID NO: 225465 - DNA, 25 bp, Artificial
  probe
  misc_feature (1)..(25): SEQ ID NO: 5691; WAN024FXX_at; Start 416; Stop 440
atctctttgatacagaccatgaagc

SEQ ID NO: 225466 - DNA, 25 bp, Artificial
  probe
  misc_feature (1)..(25): SEQ ID NO: 5691; WAN024FXX_at; Start 15; Stop 39
cgaatcttcacatcaggccctcttt

SEQ ID NO: 225467 - DNA, 25 bp, Artificial
  probe
  misc_feature (1)..(25): SEQ ID NO: 5691; WAN024FXX_at; Start 689; Stop 713
tcgaaaatggtatcgcctttcagcg

SEQ ID NO: 225468 - DNA, 25 bp, Artificial
  probe
  misc_feature (1)..(25): SEQ ID NO: 5691; WAN024FXX_at; Start 1190; Stop 1214
ggacacagattgagattttacaaaa

SEQ ID NO: 225469 - DNA, 25 bp, Artificial
  probe
  misc_feature (1)..(25): SEQ ID NO: 5691; WAN024FXX_at; Start 124; Stop 148
gttcacaactacatccatgtcaata

SEQ ID NO: 225470 - DNA, 25 bp, Artificial
  probe
  misc_feature (1)..(25): SEQ ID NO: 5691; WAN024FXX_at; Start 233; Stop 257
tccacggtggagaacacagtcgctt

SEQ ID NO: 225471 - DNA, 25 bp, Artificial
  probe
  misc_feature (1)..(25): SEQ ID NO: 5691; WAN024FXX_at; Start 1139; Stop 1163
agaactttgacctcccttatgatat

SEQ ID NO: 225472 - DNA, 25 bp, Artificial
  probe
  misc_feature (1)..(25): SEQ ID NO: 5691; WAN024FXX_at; Start 1017; Stop 1041
tgtcaaccgcaaggtctttaaatcc

SEQ ID NO: 225473 - DNA, 25 bp, Artificial
  probe
  misc_feature (1)..(25): SEQ ID NO: 5691; WAN024FXX_at; Start 28; Stop 52
caggccctctttcttgtctcttgtc

SEQ ID NO: 225474 - DNA, 25 bp, Artificial
  probe
  misc_feature (1)..(25): SEQ ID NO: 5691; WAN024FXX_at; Start 2; Stop 26
tgtatttcgcatccgaatcttcaca

SEQ ID NO: 225475 - DNA, 25 bp, Artificial
  probe
  misc_feature (1)..(25): SEQ ID NO: 5691; WAN024FXX_at; Start 280; Stop 304
gaaattgcacgacgcatcacagaga

SEQ ID NO: 225476 - DNA, 25 bp, Artificial
  probe
  misc_feature (1)..(25): SEQ ID NO: 5691; WAN024FXX_at; Start 305; Stop 329
ttttcgaagaaaaatatcctgagga

SEQ ID NO: 225477 - DNA, 25 bp, Artificial
  probe
  misc_feature (1)..(25): SEQ ID NO: 5691; WAN024FXX_at; Start 328; Stop 352
gaatggaatcctgccgagtctctct

SEQ ID NO: 225478 - DNA, 25 bp, Artificial
  probe
  misc_feature (1)..(25): SEQ ID NO: 5691; WAN024FXX_at; Start 319; Stop 343
tatcctgaggaatggaatcctgccg

SEQ ID NO: 225479 - DNA, 25 bp, Artificial
  probe
  misc_feature (1)..(25): SEQ ID NO: 5691; WAN024FXX_at; Start 197; Stop 221
gccggatcaaacaactgggaacttc

SEQ ID NO: 225480 - DNA, 25 bp, Artificial
  probe
  misc_feature (1)..(25): SEQ ID NO: 5691; WAN024FXX_at; Start 181; Stop 205
gaatttcagcgtttgcgccggatca

SEQ ID NO: 225481 - DNA, 25 bp, Artificial
  probe
  misc_feature (1)..(25): SEQ ID NO: 5691; WAN024FXX_at; Start 212; Stop 236
tgggaacttccagttataccttcca

SEQ ID NO: 225482 - DNA, 25 bp, Artificial
  probe
  misc_feature (1)..(25): SEQ ID NO: 5691; WAN024FXX_at; Start 249; Stop 273
cagtcgcttctctcactgtctagga

SEQ ID NO: 225483 - DNA, 25 bp, Artificial
  probe
  misc_feature (1)..(25): SEQ ID NO: 5691; WAN024FXX_at; Start 1126; Stop 1150
actgccattcataagaactttgacc

SEQ ID NO: 225484 - DNA, 25 bp, Artificial
  probe
  misc_feature (1)..(25): SEQ ID NO: 5691; WAN024FXX_at; Start 1034; Stop 1058
ttaaatccattaccttttcacaaga

SEQ ID NO: 225485 - DNA, 25 bp, Artificial
  probe
  misc_feature (1)..(25): SEQ ID NO: 5691; WAN024FXX_at; Start 54; Stop 78
tactattttaccaaaaagagcagga

SEQ ID NO: 225486 - DNA, 25 bp, Artificial
  probe
  misc_feature (1)..(25): SEQ ID NO: 5691; WAN024FXX_at; Start 73; Stop 97
gcaggattttgctataatggtcata

SEQ ID NO: 225487 - DNA, 25 bp, Artificial
  probe
  misc_feature (1)..(25): SEQ ID NO: 5691; WAN024FXX_at; Start 465; Stop 489
tcctgagacagagattcaccaagtc

SEQ ID NO: 225488 - DNA, 25 bp, Artificial
  probe
  misc_feature (1)..(25): SEQ ID NO: 5691; WAN024FXX_at; Start 290; Stop 314
gacgcatcacagagattttcgaaga

SEQ ID NO: 225489 - DNA, 25 bp, Artificial
  probe
  misc_feature (1)..(25): SEQ ID NO: 5691; WAN024FXX_at; Start 593; Stop 617
cagatcgcatggactatctcttgcg

SEQ ID NO: 225490 - DNA, 25 bp, Artificial
  probe
  misc_feature (1)..(25): SEQ ID NO: 5691; WAN024FXX_at; Start 337; Stop 361
cctgccgagtctctcttgaccatga

SEQ ID NO: 225491 - DNA, 25 bp, Artificial
  probe
  misc_feature (1)..(25): SEQ ID NO: 5691; WAN024FXX_at; Start 267; Stop 291
tctaggagtctatgaaattgcacga

SEQ ID NO: 225492 - DNA, 25 bp, Artificial
  probe
  misc_feature (1)..(25): SEQ ID NO: 5691; WAN024FXX_at; Start 699; Stop 723
tatcgcctttcagcgcaatggcatg

SEQ ID NO: 225493 - DNA, 25 bp, Artificial
  probe
  misc_feature (1)..(25): SEQ ID NO: 2390; WAN024FXY_at; Start 135; Stop 159
agctgaacctgcaagtccaagaccg

SEQ ID NO: 225494 - DNA, 25 bp, Artificial
  probe
  misc_feature (1)..(25): SEQ ID NO: 2390; WAN024FXY_at; Start 30; Stop 54
gaagccttttccttttgtattgata

SEQ ID NO: 225495 - DNA, 25 bp, Artificial
  probe
  misc_feature (1)..(25): SEQ ID NO: 2390; WAN024FXY_at; Start 149; Stop 173
gtccaagaccgataacgatgatcat

SEQ ID NO: 225496 - DNA, 25 bp, Artificial
  probe
  misc_feature (1)..(25): SEQ ID NO: 2390; WAN024FXY_at; Start 198; Stop 222
gagtttatcaatccattttgttcct

SEQ ID NO: 225497 - DNA, 25 bp, Artificial
  probe
  misc_feature (1)..(25): SEQ ID NO: 2390; WAN024FXY_at; Start 144; Stop 168
tgcaagtccaagaccgataacgatg

SEQ ID NO: 225498 - DNA, 25 bp, Artificial
  probe
  misc_feature (1)..(25): SEQ ID NO: 2390; WAN024FXY_at; Start 107; Stop 131
cgtctgctacaagacctgcattggt

SEQ ID NO: 225499 - DNA, 25 bp, Artificial
  probe
  misc_feature (1)..(25): SEQ ID NO: 2390; WAN024FXY_at; Start 89; Stop 113
gagcatttttccaatttccgtctgc

SEQ ID NO: 225500 - DNA, 25 bp, Artificial
  probe
  misc_feature (1)..(25): SEQ ID NO: 2390; WAN024FXY_at; Start 40; Stop 64
ccttttgtattgataaaggcagcaa

SEQ ID NO: 225501 - DNA, 25 bp, Artificial
  probe
  misc_feature (1)..(25): SEQ ID NO: 2390; WAN024FXY_at; Start 124; Stop 148
gcattggtaacagctgaacctgcaa

SEQ ID NO: 225502 - DNA, 25 bp, Artificial
  probe
  misc_feature (1)..(25): SEQ ID NO: 2390; WAN024FXY_at; Start 84; Stop 108
taccagagcatttttccaatttccg

SEQ ID NO: 225503 - DNA, 25 bp, Artificial
  probe
  misc_feature (1)..(25): SEQ ID NO: 2390; WAN024FXY_at; Start 139; Stop 163
gaacctgcaagtccaagaccgataa

SEQ ID NO: 225504 - DNA, 25 bp, Artificial
  probe
  misc_feature (1)..(25): SEQ ID NO: 2390; WAN024FXY_at; Start 77; Stop 101
caacggctaccagagcatttttcca

SEQ ID NO: 225505 - DNA, 25 bp, Artificial
  probe
  misc_feature (1)..(25): SEQ ID NO: 2390; WAN024FXY_at; Start 71; Stop 95
aagtaacaacggctaccagagcatt

SEQ ID NO: 225506 - DNA, 25 bp, Artificial
  probe
  misc_feature (1)..(25): SEQ ID NO: 2390; WAN024FXY_at; Start 222; Stop 246
tacaaatcggatgctggtagcaaca

SEQ ID NO: 225507 - DNA, 25 bp, Artificial
  probe
  misc_feature (1)..(25): SEQ ID NO: 2390; WAN024FXY_at; Start 17; Stop 41
gaatgattcgtaggaagccttttcc

SEQ ID NO: 225508 - DNA, 25 bp, Artificial
  probe
  misc_feature (1)..(25): SEQ ID NO: 2390; WAN024FXY_at; Start 2; Stop 26
tggcaaagaggaatggaatgattcg

SEQ ID NO: 225509 - DNA, 25 bp, Artificial
  probe
  misc_feature (1)..(25): SEQ ID NO: 2390; WAN024FXY_at; Start 157; Stop 181
ccgataacgatgatcataggaccga

SEQ ID NO: 225510 - DNA, 25 bp, Artificial
  probe
  misc_feature (1)..(25): SEQ ID NO: 2390; WAN024FXY_at; Start 214; Stop 238
tttgttcctacaaatcggatgctgg

SEQ ID NO: 225511 - DNA, 25 bp, Artificial
  probe
  misc_feature (1)..(25): SEQ ID NO: 2390; WAN024FXY_at; Start 96; Stop 120
tttccaatttccgtctgctacaaga

SEQ ID NO: 225512 - DNA, 25 bp, Artificial
  probe
  misc_feature (1)..(25): SEQ ID NO: 2390; WAN024FXY_at; Start 131; Stop 155
taacagctgaacctgcaagtccaag

SEQ ID NO: 225513 - DNA, 25 bp, Artificial
  probe
  misc_feature (1)..(25): SEQ ID NO: 2390; WAN024FXY_at; Start 128; Stop 152
tggtaacagctgaacctgcaagtcc

SEQ ID NO: 225514 - DNA, 25 bp, Artificial
  probe
  misc_feature (1)..(25): SEQ ID NO: 2390; WAN024FXY_at; Start 66; Stop 90
taggaaagtaacaacggctaccaga

SEQ ID NO: 225515 - DNA, 25 bp, Artificial
  probe
  misc_feature (1)..(25): SEQ ID NO: 2390; WAN024FXY_at; Start 171; Stop 195
cataggaccgataatgattggtggc

SEQ ID NO: 225516 - DNA, 25 bp, Artificial
  probe
  misc_feature (1)..(25): SEQ ID NO: 2390; WAN024FXY_at; Start 12; Stop 36
gaatggaatgattcgtaggaagcct

SEQ ID NO: 225517 - DNA, 25 bp, Artificial
  probe
  misc_feature (1)..(25): SEQ ID NO: 2390; WAN024FXY_at; Start 119; Stop 143
gacctgcattggtaacagctgaacc

SEQ ID NO: 225518 - DNA, 25 bp, Artificial
  probe
  misc_feature (1)..(25): SEQ ID NO: 2390; WAN024FXY_at; Start 190; Stop 214
ggtggcaagagtttatcaatccatt

SEQ ID NO: 225519 - DNA, 25 bp, Artificial
  probe
  misc_feature (1)..(25): SEQ ID NO: 2390; WAN024FXY_at; Start 231; Stop 255
gatgctggtagcaacaaggacatag

SEQ ID NO: 225520 - DNA, 25 bp, Artificial
  probe
  misc_feature (1)..(25): SEQ ID NO: 2390; WAN024FXY_at; Start 228; Stop 252
tcggatgctggtagcaacaaggaca

SEQ ID NO: 225521 - DNA, 25 bp, Artificial
  probe
  misc_feature (1)..(25): SEQ ID NO: 2390; WAN024FXY_at; Start 114; Stop 138
tacaagacctgcattggtaacagct

SEQ ID NO: 225522 - DNA, 25 bp, Artificial
  probe
  misc_feature (1)..(25): SEQ ID NO: 2390; WAN024FXY_at; Start 178; Stop 202
ccgataatgattggtggcaagagtt

SEQ ID NO: 225523 - DNA, 25 bp, Artificial
  probe
  misc_feature (1)..(25): SEQ ID NO: 2390; WAN024FXY_at; Start 101; Stop 125
aatttccgtctgctacaagacctgc

SEQ ID NO: 225524 - DNA, 25 bp, Artificial
  probe
  misc_feature (1)..(25): SEQ ID NO: 2390; WAN024FXY_at; Start 161; Stop 185
taacgatgatcataggaccgataat

SEQ ID NO: 225525 - DNA, 25 bp, Artificial
  probe
  misc_feature (1)..(25): SEQ ID NO: 2390; WAN024FXY_at; Start 59; Stop 83
cagcaattaggaaagtaacaacggc

SEQ ID NO: 225526 - DNA, 25 bp, Artificial
  probe
  misc_feature (1)..(25): SEQ ID NO: 2390; WAN024FXY_at; Start 53; Stop 77
taaaggcagcaattaggaaagtaac

SEQ ID NO: 225527 - DNA, 25 bp, Artificial
  probe
  misc_feature (1)..(25): SEQ ID NO: 3353; WAN024FXZ_at; Start 987; Stop 1011
tatcggtatgactcgtatcgcttct

SEQ ID NO: 225528 - DNA, 25 bp, Artificial
  probe
  misc_feature (1)..(25): SEQ ID NO: 3353; WAN024FXZ_at; Start 1224; Stop 1248
ggttcttggacttggaggagctatc

SEQ ID NO: 225529 - DNA, 25 bp, Artificial
  probe
  misc_feature (1)..(25): SEQ ID NO: 3353; WAN024FXZ_at; Start 382; Stop 406
gtctatgtccttgttgctaccagca

SEQ ID NO: 225530 - DNA, 25 bp, Artificial
  probe
  misc_feature (1)..(25): SEQ ID NO: 3353; WAN024FXZ_at; Start 818; Stop 842
caatttctgaacatatcggagacca

SEQ ID NO: 225531 - DNA, 25 bp, Artificial
  probe
  misc_feature (1)..(25): SEQ ID NO: 3353; WAN024FXZ_at; Start 226; Stop 250
ggtgttggaacactcatctacatga

SEQ ID NO: 225532 - DNA, 25 bp, Artificial
  probe
  misc_feature (1)..(25): SEQ ID NO: 3353; WAN024FXZ_at; Start 636; Stop 660
cattatcggtggttaccttttcgca

SEQ ID NO: 225533 - DNA, 25 bp, Artificial
  probe
  misc_feature (1)..(25): SEQ ID NO: 3353; WAN024FXZ_at; Start 770; Stop 794
tttactttggtccagaagccatcgc

SEQ ID NO: 225534 - DNA, 25 bp, Artificial
  probe
  misc_feature (1)..(25): SEQ ID NO: 3353; WAN024FXZ_at; Start 494; Stop 518
caggttcagctgttaccaatgcagg

SEQ ID NO: 225535 - DNA, 25 bp, Artificial
  probe
  misc_feature (1)..(25): SEQ ID NO: 3353; WAN024FXZ_at; Start 479; Stop 503
tcggtcttggacttgcaggttcagc

SEQ ID NO: 225536 - DNA, 25 bp, Artificial
  probe
  misc_feature (1)..(25): SEQ ID NO: 3353; WAN024FXZ_at; Start 1196; Stop 1220
gaaacctcatcatcgcaagtgctat

SEQ ID NO: 225537 - DNA, 25 bp, Artificial
  probe
  misc_feature (1)..(25): SEQ ID NO: 3353; WAN024FXZ_at; Start 189; Stop 213
tttgggaatgcctgtatctgttgcc

SEQ ID NO: 225538 - DNA, 25 bp, Artificial
  probe
  misc_feature (1)..(25): SEQ ID NO: 3353; WAN024FXZ_at; Start 538; Stop 562
tggaaaaatgctctggtagccgttg

SEQ ID NO: 225539 - DNA, 25 bp, Artificial
  probe
  misc_feature (1)..(25): SEQ ID NO: 3353; WAN024FXZ_at; Start 510; Stop 534
caatgcaggtcttgtagcagacgga

SEQ ID NO: 225540 - DNA, 25 bp, Artificial
  probe
  misc_feature (1)..(25): SEQ ID NO: 3353; WAN024FXZ_at; Start 1110; Stop 1134
tggtatgtcaatccttctctatggg

SEQ ID NO: 225541 - DNA, 25 bp, Artificial
  probe
  misc_feature (1)..(25): SEQ ID NO: 3353; WAN024FXZ_at; Start 598; Stop 622
ggaaaaggcttcctacgaatcattc

SEQ ID NO: 225542 - DNA, 25 bp, Artificial
  probe
  misc_feature (1)..(25): SEQ ID NO: 3353; WAN024FXZ_at; Start 931; Stop 955
gtttctgccttccttggtggaccag

SEQ ID NO: 225543 - DNA, 25 bp, Artificial
  probe
  misc_feature (1)..(25): SEQ ID NO: 3353; WAN024FXZ_at; Start 784; Stop 808
gaagccatcgctatcttgccaatcg

SEQ ID NO: 225544 - DNA, 25 bp, Artificial
  probe
  misc_feature (1)..(25): SEQ ID NO: 3353; WAN024FXZ_at; Start 311; Stop 335
tgtcactggctatgaaagaaatggg

SEQ ID NO: 225545 - DNA, 25 bp, Artificial
  probe
  misc_feature (1)..(25): SEQ ID NO: 3353; WAN024FXZ_at; Start 909; Stop 933
tggtgacggtatcgcaacttctgtt

SEQ ID NO: 225546 - DNA, 25 bp, Artificial
  probe
  misc_feature (1)..(25): SEQ ID NO: 3353; WAN024FXZ_at; Start 949; Stop 973
ggaccagccaatacaacttacggag

SEQ ID NO: 225547 - DNA, 25 bp, Artificial
  probe
  misc_feature (1)..(25): SEQ ID NO: 3353; WAN024FXZ_at; Start 741; Stop 765
cacaggtggtgcctttaaagagtac

SEQ ID NO: 225548 - DNA, 25 bp, Artificial
  probe
  misc_feature (1)..(25): SEQ ID NO: 3353; WAN024FXZ_at; Start 1276; Stop 1300
ggtactgccctttcagccatgacag

SEQ ID NO: 225549 - DNA, 25 bp, Artificial
  probe
  misc_feature (1)..(25): SEQ ID NO: 3353; WAN024FXZ_at; Start 401; Stop 425
ccagcatccgatttgtaggaacaaa

SEQ ID NO: 225550 - DNA, 25 bp, Artificial
  probe
  misc_feature (1)..(25): SEQ ID NO: 3353; WAN024FXZ_at; Start 664; Stop 688
actcttggcttggttgactttacac

SEQ ID NO: 225551 - DNA, 25 bp, Artificial
  probe
  misc_feature (1)..(25): SEQ ID NO: 3353; WAN024FXZ_at; Start 727; Stop 751
tacttgccatttagcacaggtggtg

SEQ ID NO: 225552 - DNA, 25 bp, Artificial
  probe
  misc_feature (1)..(25): SEQ ID NO: 3353; WAN024FXZ_at; Start 211; Stop 235
gccctttttgcttcaggtgttggaa

SEQ ID NO: 225553 - DNA, 25 bp, Artificial
  probe
  misc_feature (1)..(25): SEQ ID NO: 3353; WAN024FXZ_at; Start 1044; Stop 1068
gattgccctcagcttccttggtaaa

SEQ ID NO: 225554 - DNA, 25 bp, Artificial
  probe
  misc_feature (1)..(25): SEQ ID NO: 3353; WAN024FXZ_at; Start 145; Stop 169
cacgttttcgccatgtttggtgcga

SEQ ID NO: 225555 - DNA, 25 bp, Artificial
  probe
  misc_feature (1)..(25): SEQ ID NO: 3353; WAN024FXZ_at; Start 1137; Stop 1161
tatcgccagcaatggtttgaaagtc

SEQ ID NO: 225556 - DNA, 25 bp, Artificial
  probe
  misc_feature (1)..(25): SEQ ID NO: 3353; WAN024FXZ_at; Start 1026; Stop 1050
taacgctgccttcatcgcgattgcc

SEQ ID NO: 225557 - DNA, 25 bp, Artificial
  probe
  misc_feature (1)..(25): SEQ ID NO: 3353; WAN024FXZ_at; Start 1240; Stop 1264
ggagctatccttaaacttggtccag

SEQ ID NO: 225558 - DNA, 25 bp, Artificial
  probe
  misc_feature (1)..(25): SEQ ID NO: 3353; WAN024FXZ_at; Start 458; Stop 482
tcggtcctatgatcatcgttatcgg

SEQ ID NO: 225559 - DNA, 25 bp, Artificial
  probe
  misc_feature (1)..(25): SEQ ID NO: 3353; WAN024FXZ_at; Start 82; Stop 106
gatttgttactagacgttgaccaac

SEQ ID NO: 225560 - DNA, 25 bp, Artificial
  probe
  misc_feature (1)..(25): SEQ ID NO: 3353; WAN024FXZ_at; Start 163; Stop 187
ggtgcgaccatcttggtaccattga

SEQ ID NO: 225561 - DNA, 25 bp, Artificial
  probe
  misc_feature (1)..(25): SEQ ID NO: 3942; WAN024FY2_at; Start 27; Stop 51
tgcaagcaataaacgaaaaacctgg

SEQ ID NO: 225562 - DNA, 25 bp, Artificial
  probe
  misc_feature (1)..(25): SEQ ID NO: 3942; WAN024FY2_at; Start 601; Stop 625
atcattatgctagtggtttccctac

SEQ ID NO: 225563 - DNA, 25 bp, Artificial
  probe
  misc_feature (1)..(25): SEQ ID NO: 3942; WAN024FY2_at; Start 652; Stop 676
gcaaccttggttcagctcgctattt

SEQ ID NO: 225564 - DNA, 25 bp, Artificial
  probe
  misc_feature (1)..(25): SEQ ID NO: 3942; WAN024FY2_at; Start 110; Stop 134
tctttataagatctggacttggtgg

SEQ ID NO: 225565 - DNA, 25 bp, Artificial
  probe
  misc_feature (1)..(25): SEQ ID NO: 3942; WAN024FY2_at; Start 229; Stop 253
gtggatgagcaaacggcaccagacc

SEQ ID NO: 225566 - DNA, 25 bp, Artificial
  probe
  misc_feature (1)..(25): SEQ ID NO: 3942; WAN024FY2_at; Start 741; Stop 765
gattaatgccctagataagttggac

SEQ ID NO: 225567 - DNA, 25 bp, Artificial
  probe
  misc_feature (1)..(25): SEQ ID NO: 3942; WAN024FY2_at; Start 416; Stop 440
aactagaagctgttatgggacatga

SEQ ID NO: 225568 - DNA, 25 bp, Artificial
  probe
  misc_feature (1)..(25): SEQ ID NO: 3942; WAN024FY2_at; Start 623; Stop 647
tactagctattgtactggcacctct

SEQ ID NO: 225569 - DNA, 25 bp, Artificial
  probe
  misc_feature (1)..(25): SEQ ID NO: 3942; WAN024FY2_at; Start 349; Stop 373
ggttctaatcctcaaaatgcggctg

SEQ ID NO: 225570 - DNA, 25 bp, Artificial
  probe
  misc_feature (1)..(25): SEQ ID NO: 3942; WAN024FY2_at; Start 334; Stop 358
aatgcctttgcgacaggttctaatc

SEQ ID NO: 225571 - DNA, 25 bp, Artificial
  probe
  misc_feature (1)..(25): SEQ ID NO: 3942; WAN024FY2_at; Start 431; Stop 455
tgggacatgaagtcagtcatattcg

SEQ ID NO: 225572 - DNA, 25 bp, Artificial
  probe
  misc_feature (1)..(25): SEQ ID NO: 3942; WAN024FY2_at; Start 363; Stop 387
aaatgcggctgttgctgcgacttca

SEQ ID NO: 225573 - DNA, 25 bp, Artificial
  probe
  misc_feature (1)..(25): SEQ ID NO: 3942; WAN024FY2_at; Start 402; Stop 426
catgaatcgtgaagaactagaagct

SEQ ID NO: 225574 - DNA, 25 bp, Artificial
  probe
  misc_feature (1)..(25): SEQ ID NO: 3942; WAN024FY2_at; Start 77; Stop 101
tcttagctcttgttggttatgcggt

SEQ ID NO: 225575 - DNA, 25 bp, Artificial
  probe
  misc_feature (1)..(25): SEQ ID NO: 3942; WAN024FY2_at; Start 268; Stop 292
gaagatatggctctggtcgctcaga

SEQ ID NO: 225576 - DNA, 25 bp, Artificial
  probe
  misc_feature (1)..(25): SEQ ID NO: 3942; WAN024FY2_at; Start 388; Stop 412
ggtctactagctatcatgaatcgtg

SEQ ID NO: 225577 - DNA, 25 bp, Artificial
  probe
  misc_feature (1)..(25): SEQ ID NO: 3942; WAN024FY2_at; Start 869; Stop 893
cacctatctcagaacggattgaacg

SEQ ID NO: 225578 - DNA, 25 bp, Artificial
  probe
  misc_feature (1)..(25): SEQ ID NO: 3942; WAN024FY2_at; Start 666; Stop 690
gctcgctatttctcgtcagagggaa

SEQ ID NO: 225579 - DNA, 25 bp, Artificial
  probe
  misc_feature (1)..(25): SEQ ID NO: 3942; WAN024FY2_at; Start 559; Stop 583
cgcagacgaagtgatgatgaccgag

SEQ ID NO: 225580 - DNA, 25 bp, Artificial
  probe
  misc_feature (1)..(25): SEQ ID NO: 3942; WAN024FY2_at; Start 469; Stop 493
cgtatttcgactattgcagttgccc

SEQ ID NO: 225581 - DNA, 25 bp, Artificial
  probe
  misc_feature (1)..(25): SEQ ID NO: 3942; WAN024FY2_at; Start 299; Stop 323
tgccccgtgttttcatcattgatga

SEQ ID NO: 225582 - DNA, 25 bp, Artificial
  probe
  misc_feature (1)..(25): SEQ ID NO: 3942; WAN024FY2_at; Start 150; Stop 174
gattatcggctttatctacgctttg

SEQ ID NO: 225583 - DNA, 25 bp, Artificial
  probe
  misc_feature (1)..(25): SEQ ID NO: 3942; WAN024FY2_at; Start 373; Stop 397
gttgctgcgacttcaggtctactag

SEQ ID NO: 225584 - DNA, 25 bp, Artificial
  probe
  misc_feature (1)..(25): SEQ ID NO: 3942; WAN024FY2_at; Start 716; Stop 740
agctgactcgcaatccccagggaat

SEQ ID NO: 225585 - DNA, 25 bp, Artificial
  probe
  misc_feature (1)..(25): SEQ ID NO: 3942; WAN024FY2_at; Start 727; Stop 751
aatccccagggaatgattaatgccc

SEQ ID NO: 225586 - DNA, 25 bp, Artificial
  probe
  misc_feature (1)..(25): SEQ ID NO: 3942; WAN024FY2_at; Start 283; Stop 307
gtcgctcagattcctatgccccgtg

SEQ ID NO: 225587 - DNA, 25 bp, Artificial
  probe
  misc_feature (1)..(25): SEQ ID NO: 3942; WAN024FY2_at; Start 319; Stop 343
gatgatccagccttaaatgcctttg

SEQ ID NO: 225588 - DNA, 25 bp, Artificial
  probe
  misc_feature (1)..(25): SEQ ID NO: 3942; WAN024FY2_at; Start 638; Stop 662
tggcacctctcgctgcaaccttggt

SEQ ID NO: 225589 - DNA, 25 bp, Artificial
  probe
  misc_feature (1)..(25): SEQ ID NO: 3942; WAN024FY2_at; Start 783; Stop 807
tcgccacgtcgatgatgctagcagt

SEQ ID NO: 225590 - DNA, 25 bp, Artificial
  probe
  misc_feature (1)..(25): SEQ ID NO: 3942; WAN024FY2_at; Start 187; Stop 211
caatcgacagagattgtcatgtcca

SEQ ID NO: 225591 - DNA, 25 bp, Artificial
  probe
  misc_feature (1)..(25): SEQ ID NO: 3942; WAN024FY2_at; Start 248; Stop 272
cagacctctaccatgtagtggaaga

SEQ ID NO: 225592 - DNA, 25 bp, Artificial
  probe
  misc_feature (1)..(25): SEQ ID NO: 3942; WAN024FY2_at; Start 688; Stop 712
gaatttctggcagatgcatctagtg

SEQ ID NO: 225593 - DNA, 25 bp, Artificial
  probe
  misc_feature (1)..(25): SEQ ID NO: 3942; WAN024FY2_at; Start 204; Stop 228
catgtccatgaatggagcgcgtgag

SEQ ID NO: 225594 - DNA, 25 bp, Artificial
  probe
  misc_feature (1)..(25): SEQ ID NO: 3942; WAN024FY2_at; Start 579; Stop 603
ccgagatggaaatggtcttgaaatc

SEQ ID NO: 225595 - DNA, 25 bp, Artificial
  probe
  misc_feature (1)..(25): SEQ ID NO: 4187; WAN024FY3_at; Start 155; Stop 179
gccattgcaaagagttggtgtccca

SEQ ID NO: 225596 - DNA, 25 bp, Artificial
  probe
  misc_feature (1)..(25): SEQ ID NO: 4187; WAN024FY3_at; Start 209; Stop 233
tgtacaccgcgaatcatgtcgagtg

SEQ ID NO: 225597 - DNA, 25 bp, Artificial
  probe
  misc_feature (1)..(25): SEQ ID NO: 4187; WAN024FY3_at; Start 86; Stop 110
gcgatttcacgtaccgcatggttga

SEQ ID NO: 225598 - DNA, 25 bp, Artificial
  probe
  misc_feature (1)..(25): SEQ ID NO: 4187; WAN024FY3_at; Start 32; Stop 56
tcgcggctgactgcataaccatggt

SEQ ID NO: 225599 - DNA, 25 bp, Artificial
  probe
  misc_feature (1)..(25): SEQ ID NO: 4187; WAN024FY3_at; Start 202; Stop 226
ttttccttgtacaccgcgaatcatg

SEQ ID NO: 225600 - DNA, 25 bp, Artificial
  probe
  misc_feature (1)..(25): SEQ ID NO: 4187; WAN024FY3_at; Start 171; Stop 195
ggtgtcccatacaaataccaaagat

SEQ ID NO: 225601 - DNA, 25 bp, Artificial
  probe
  misc_feature (1)..(25): SEQ ID NO: 4187; WAN024FY3_at; Start 36; Stop 60
ggctgactgcataaccatggttctg

SEQ ID NO: 225602 - DNA, 25 bp, Artificial
  probe
  misc_feature (1)..(25): SEQ ID NO: 4187; WAN024FY3_at; Start 45; Stop 69
cataaccatggttctggctggtgaa

SEQ ID NO: 225603 - DNA, 25 bp, Artificial
  probe
  misc_feature (1)..(25): SEQ ID NO: 4187; WAN024FY3_at; Start 127; Stop 151
cttcatcttataggtcttagccccg

SEQ ID NO: 225604 - DNA, 25 bp, Artificial
  probe
  misc_feature (1)..(25): SEQ ID NO: 4187; WAN024FY3_at; Start 219; Stop 243
gaatcatgtcgagtgcttgtggaac

SEQ ID NO: 225605 - DNA, 25 bp, Artificial
  probe
  misc_feature (1)..(25): SEQ ID NO: 4187; WAN024FY3_at; Start 82; Stop 106
tgttgcgatttcacgtaccgcatgg

SEQ ID NO: 225606 - DNA, 25 bp, Artificial
  probe
  misc_feature (1)..(25): SEQ ID NO: 4187; WAN024FY3_at; Start 93; Stop 117
cacgtaccgcatggttgaatccacg

SEQ ID NO: 225607 - DNA, 25 bp, Artificial
  probe
  misc_feature (1)..(25): SEQ ID NO: 4187; WAN024FY3_at; Start 227; Stop 251
tcgagtgcttgtggaacgtcttctg

SEQ ID NO: 225608 - DNA, 25 bp, Artificial
  probe
  misc_feature (1)..(25): SEQ ID NO: 4187; WAN024FY3_at; Start 196; Stop 220
tggaatttttccttgtacaccgcga

SEQ ID NO: 225609 - DNA, 25 bp, Artificial
  probe
  misc_feature (1)..(25): SEQ ID NO: 4187; WAN024FY3_at; Start 112; Stop 136
tccacggtggccaaacttcatctta

SEQ ID NO: 225610 - DNA, 25 bp, Artificial
  probe
  misc_feature (1)..(25): SEQ ID NO: 4187; WAN024FY3_at; Start 223; Stop 247
catgtcgagtgcttgtggaacgtct

SEQ ID NO: 225611 - DNA, 25 bp, Artificial
  probe
  misc_feature (1)..(25): SEQ ID NO: 4187; WAN024FY3_at; Start 117; Stop 141
ggtggccaaacttcatcttataggt

SEQ ID NO: 225612 - DNA, 25 bp, Artificial
  probe
  misc_feature (1)..(25): SEQ ID NO: 4187; WAN024FY3_at; Start 245; Stop 269
tcttctgggttacctggaccatttg

SEQ ID NO: 225613 - DNA, 25 bp, Artificial
  probe
  misc_feature (1)..(25): SEQ ID NO: 4187; WAN024FY3_at; Start 238; Stop 262
tggaacgtcttctgggttacctgga

SEQ ID NO: 225614 - DNA, 25 bp, Artificial
  probe
  misc_feature (1)..(25): SEQ ID NO: 4187; WAN024FY3_at; Start 1; Stop 25
gtgggtaataatcaagtgctctggc

SEQ ID NO: 225615 - DNA, 25 bp, Artificial
  probe
  misc_feature (1)..(25): SEQ ID NO: 4187; WAN024FY3_at; Start 233; Stop 257
gcttgtggaacgtcttctgggttac

SEQ ID NO: 225616 - DNA, 25 bp, Artificial
  probe
  misc_feature (1)..(25): SEQ ID NO: 4187; WAN024FY3_at; Start 101; Stop 125
gcatggttgaatccacggtggccaa

SEQ ID NO: 225617 - DNA, 25 bp, Artificial
  probe
  misc_feature (1)..(25): SEQ ID NO: 4187; WAN024FY3_at; Start 161; Stop 185
gcaaagagttggtgtcccatacaaa

SEQ ID NO: 225618 - DNA, 25 bp, Artificial
  probe
  misc_feature (1)..(25): SEQ ID NO: 4187; WAN024FY3_at; Start 57; Stop 81
tctggctggtgaagtctactcgtcc

SEQ ID NO: 225619 - DNA, 25 bp, Artificial
  probe
  misc_feature (1)..(25): SEQ ID NO: 4187; WAN024FY3_at; Start 51; Stop 75
catggttctggctggtgaagtctac

SEQ ID NO: 225620 - DNA, 25 bp, Artificial
  probe
  misc_feature (1)..(25): SEQ ID NO: 4187; WAN024FY3_at; Start 166; Stop 190
gagttggtgtcccatacaaatacca

SEQ ID NO: 225621 - DNA, 25 bp, Artificial
  probe
  misc_feature (1)..(25): SEQ ID NO: 4187; WAN024FY3_at; Start 13; Stop 37
caagtgctctggcaaatcctcgcgg

SEQ ID NO: 225622 - DNA, 25 bp, Artificial
  probe
  misc_feature (1)..(25): SEQ ID NO: 4187; WAN024FY3_at; Start 64; Stop 88
ggtgaagtctactcgtcctgttgcg

SEQ ID NO: 225623 - DNA, 25 bp, Artificial
  probe
  misc_feature (1)..(25): SEQ ID NO: 4187; WAN024FY3_at; Start 73; Stop 97
tactcgtcctgttgcgatttcacgt

SEQ ID NO: 225624 - DNA, 25 bp, Artificial
  probe
  misc_feature (1)..(25): SEQ ID NO: 4187; WAN024FY3_at; Start 132; Stop 156
tcttataggtcttagccccgtttgc

SEQ ID NO: 225625 - DNA, 25 bp, Artificial
  probe
  misc_feature (1)..(25): SEQ ID NO: 4187; WAN024FY3_at; Start 140; Stop 164
gtcttagccccgtttgccattgcaa

SEQ ID NO: 225626 - DNA, 25 bp, Artificial
  probe
  misc_feature (1)..(25): SEQ ID NO: 4187; WAN024FY3_at; Start 21; Stop 45
ctggcaaatcctcgcggctgactgc

SEQ ID NO: 225627 - DNA, 25 bp, Artificial
  probe
  misc_feature (1)..(25): SEQ ID NO: 4187; WAN024FY3_at; Start 176; Stop 200
cccatacaaataccaaagattggaa

SEQ ID NO: 225628 - DNA, 25 bp, Artificial
  probe
  misc_feature (1)..(25): SEQ ID NO: 4187; WAN024FY3_at; Start 26; Stop 50
aaatcctcgcggctgactgcataac

SEQ ID NO: 225629 - DNA, 25 bp, Artificial
  probe
  misc_feature (1)..(25): SEQ ID NO: 575; WAN024FY4_at; Start 99; Stop 123
tccctgtattaaagacgatttcgcc

SEQ ID NO: 225630 - DNA, 25 bp, Artificial
  probe
  misc_feature (1)..(25): SEQ ID NO: 575; WAN024FY4_at; Start 153; Stop 177
tgccttcaaaaactgtgccatcttc

SEQ ID NO: 225631 - DNA, 25 bp, Artificial
  probe
  misc_feature (1)..(25): SEQ ID NO: 575; WAN024FY4_at; Start 108; Stop 132
taaagacgatttcgcctgttacatc

SEQ ID NO: 225632 - DNA, 25 bp, Artificial
  probe
  misc_feature (1)..(25): SEQ ID NO: 575; WAN024FY4_at; Start 65; Stop 89
gactggtctgtaatggattcttggt

SEQ ID NO: 225633 - DNA, 25 bp, Artificial
  probe
  misc_feature (1)..(25): SEQ ID NO: 575; WAN024FY4_at; Start 88; Stop 112
gtagccggtcatccctgtattaaag

SEQ ID NO: 225634 - DNA, 25 bp, Artificial
  probe
  misc_feature (1)..(25): SEQ ID NO: 575; WAN024FY4_at; Start 76; Stop 100
aatggattcttggtagccggtcatc

SEQ ID NO: 225635 - DNA, 25 bp, Artificial
  probe
  misc_feature (1)..(25): SEQ ID NO: 575; WAN024FY4_at; Start 105; Stop 129
tattaaagacgatttcgcctgttac

SEQ ID NO: 225636 - DNA, 25 bp, Artificial
  probe
  misc_feature (1)..(25): SEQ ID NO: 575; WAN024FY4_at; Start 3; Stop 27
cacgattaataccataatttcctac

SEQ ID NO: 225637 - DNA, 25 bp, Artificial
  probe
  misc_feature (1)..(25): SEQ ID NO: 575; WAN024FY4_at; Start 135; Stop 159
tatctgctccgaaggccttgccttc

SEQ ID NO: 225638 - DNA, 25 bp, Artificial
  probe
  misc_feature (1)..(25): SEQ ID NO: 575; WAN024FY4_at; Start 33; Stop 57
gataagtaaaggtcaagatttgtcc

SEQ ID NO: 225639 - DNA, 25 bp, Artificial
  probe
  misc_feature (1)..(25): SEQ ID NO: 575; WAN024FY4_at; Start 79; Stop 103
ggattcttggtagccggtcatccct

SEQ ID NO: 225640 - DNA, 25 bp, Artificial
  probe
  misc_feature (1)..(25): SEQ ID NO: 575; WAN024FY4_at; Start 35; Stop 59
taagtaaaggtcaagatttgtccat

SEQ ID NO: 225641 - DNA, 25 bp, Artificial
  probe
  misc_feature (1)..(25): SEQ ID NO: 575; WAN024FY4_at; Start 53; Stop 77
tgtccattataagactggtctgtaa

SEQ ID NO: 225642 - DNA, 25 bp, Artificial
  probe
  misc_feature (1)..(25): SEQ ID NO: 575; WAN024FY4_at; Start 124; Stop 148
tgttacatcaatatctgctccgaag

SEQ ID NO: 225643 - DNA, 25 bp, Artificial
  probe
  misc_feature (1)..(25): SEQ ID NO: 575; WAN024FY4_at; Start 156; Stop 180
cttcaaaaactgtgccatcttctaa

SEQ ID NO: 225644 - DNA, 25 bp, Artificial
  probe
  misc_feature (1)..(25): SEQ ID NO: 575; WAN024FY4_at; Start 83; Stop 107
tcttggtagccggtcatccctgtat

SEQ ID NO: 225645 - DNA, 25 bp, Artificial
  probe
  misc_feature (1)..(25): SEQ ID NO: 575; WAN024FY4_at; Start 14; Stop 38
ccataatttcctaccaaaggataag

SEQ ID NO: 225646 - DNA, 25 bp, Artificial
  probe
  misc_feature (1)..(25): SEQ ID NO: 575; WAN024FY4_at; Start 61; Stop 85
ataagactggtctgtaatggattct

SEQ ID NO: 225647 - DNA, 25 bp, Artificial
  probe
  misc_feature (1)..(25): SEQ ID NO: 575; WAN024FY4_at; Start 131; Stop 155
tcaatatctgctccgaaggccttgc

SEQ ID NO: 225648 - DNA, 25 bp, Artificial
  probe
  misc_feature (1)..(25): SEQ ID NO: 575; WAN024FY4_at; Start 71; Stop 95
tctgtaatggattcttggtagccgg

SEQ ID NO: 225649 - DNA, 25 bp, Artificial
  probe
  misc_feature (1)..(25): SEQ ID NO: 575; WAN024FY4_at; Start 150; Stop 174
ccttgccttcaaaaactgtgccatc

SEQ ID NO: 225650 - DNA, 25 bp, Artificial
  probe
  misc_feature (1)..(25): SEQ ID NO: 575; WAN024FY4_at; Start 86; Stop 110
tggtagccggtcatccctgtattaa

SEQ ID NO: 225651 - DNA, 25 bp, Artificial
  probe
  misc_feature (1)..(25): SEQ ID NO: 575; WAN024FY4_at; Start 27; Stop 51
ccaaaggataagtaaaggtcaagat

SEQ ID NO: 225652 - DNA, 25 bp, Artificial
  probe
  misc_feature (1)..(25): SEQ ID NO: 575; WAN024FY4_at; Start 94; Stop 118
ggtcatccctgtattaaagacgatt

SEQ ID NO: 225653 - DNA, 25 bp, Artificial
  probe
  misc_feature (1)..(25): SEQ ID NO: 575; WAN024FY4_at; Start 127; Stop 151
tacatcaatatctgctccgaaggcc

SEQ ID NO: 225654 - DNA, 25 bp, Artificial
  probe
  misc_feature (1)..(25): SEQ ID NO: 575; WAN024FY4_at; Start 112; Stop 136
gacgatttcgcctgttacatcaata

SEQ ID NO: 225655 - DNA, 25 bp, Artificial
  probe
  misc_feature (1)..(25): SEQ ID NO: 575; WAN024FY4_at; Start 121; Stop 145
gcctgttacatcaatatctgctccg

SEQ ID NO: 225656 - DNA, 25 bp, Artificial
  probe
  misc_feature (1)..(25): SEQ ID NO: 575; WAN024FY4_at; Start 73; Stop 97
tgtaatggattcttggtagccggtc

SEQ ID NO: 225657 - DNA, 25 bp, Artificial
  probe
  misc_feature (1)..(25): SEQ ID NO: 575; WAN024FY4_at; Start 129; Stop 153
catcaatatctgctccgaaggcctt

SEQ ID NO: 225658 - DNA, 25 bp, Artificial
  probe
  misc_feature (1)..(25): SEQ ID NO: 575; WAN024FY4_at; Start 91; Stop 115
gccggtcatccctgtattaaagacg

SEQ ID NO: 225659 - DNA, 25 bp, Artificial
  probe
  misc_feature (1)..(25): SEQ ID NO: 575; WAN024FY4_at; Start 46; Stop 70
caagatttgtccattataagactgg

SEQ ID NO: 225660 - DNA, 25 bp, Artificial
  probe
  misc_feature (1)..(25): SEQ ID NO: 575; WAN024FY4_at; Start 49; Stop 73
gatttgtccattataagactggtct

SEQ ID NO: 225661 - DNA, 25 bp, Artificial
  probe
  misc_feature (1)..(25): SEQ ID NO: 575; WAN024FY4_at; Start 133; Stop 157
aatatctgctccgaaggccttgcct

SEQ ID NO: 225662 - DNA, 25 bp, Artificial
  probe
  misc_feature (1)..(25): SEQ ID NO: 575; WAN024FY4_at; Start 101; Stop 125
cctgtattaaagacgatttcgcctg

SEQ ID NO: 225663 - DNA, 25 bp, Artificial
  probe
  misc_feature (1)..(25): SEQ ID NO: 5194; WAN024FY5_at; Start 82; Stop 106
gcacgcatagtaccatgcttacgga

SEQ ID NO: 225664 - DNA, 25 bp, Artificial
  probe
  misc_feature (1)..(25): SEQ ID NO: 5194; WAN024FY5_at; Start 64; Stop 88
ccaacatgggtcaaggttgcacgca

SEQ ID NO: 225665 - DNA, 25 bp, Artificial
  probe
  misc_feature (1)..(25): SEQ ID NO: 5194; WAN024FY5_at; Start 127; Stop 151
gtatcaattcctgaaatccctggaa

SEQ ID NO: 225666 - DNA, 25 bp, Artificial
  probe
  misc_feature (1)..(25): SEQ ID NO: 5194; WAN024FY5_at; Start 37; Stop 61
tggtccgtcacatggtccatactgt

SEQ ID NO: 225667 - DNA, 25 bp, Artificial
  probe
  misc_feature (1)..(25): SEQ ID NO: 5194; WAN024FY5_at; Start 125; Stop 149
gcgtatcaattcctgaaatccctgg

SEQ ID NO: 225668 - DNA, 25 bp, Artificial
  probe
  misc_feature (1)..(25): SEQ ID NO: 5194; WAN024FY5_at; Start 24; Stop 48
tgttgcttggagctggtccgtcaca

SEQ ID NO: 225669 - DNA, 25 bp, Artificial
  probe
  misc_feature (1)..(25): SEQ ID NO: 5194; WAN024FY5_at; Start 158; Stop 182
tggctttcaaaaattcatccaaggt

SEQ ID NO: 225670 - DNA, 25 bp, Artificial
  probe
  misc_feature (1)..(25): SEQ ID NO: 5194; WAN024FY5_at; Start 43; Stop 67
gtcacatggtccatactgtccccaa

SEQ ID NO: 225671 - DNA, 25 bp, Artificial
  probe
  misc_feature (1)..(25): SEQ ID NO: 5194; WAN024FY5_at; Start 21; Stop 45
aactgttgcttggagctggtccgtc

SEQ ID NO: 225672 - DNA, 25 bp, Artificial
  probe
  misc_feature (1)..(25): SEQ ID NO: 5194; WAN024FY5_at; Start 59; Stop 83
tgtccccaacatgggtcaaggttgc

SEQ ID NO: 225673 - DNA, 25 bp, Artificial
  probe
  misc_feature (1)..(25): SEQ ID NO: 5194; WAN024FY5_at; Start 78; Stop 102
ggttgcacgcatagtaccatgctta

SEQ ID NO: 225674 - DNA, 25 bp, Artificial
  probe
  misc_feature (1)..(25): SEQ ID NO: 5194; WAN024FY5_at; Start 75; Stop 99
caaggttgcacgcatagtaccatgc

SEQ ID NO: 225675 - DNA, 25 bp, Artificial
  probe
  misc_feature (1)..(25): SEQ ID NO: 5194; WAN024FY5_at; Start 33; Stop 57
gagctggtccgtcacatggtccata

SEQ ID NO: 225676 - DNA, 25 bp, Artificial
  probe
  misc_feature (1)..(25): SEQ ID NO: 5194; WAN024FY5_at; Start 12; Stop 36
tgtcggtaaaactgttgcttggagc

SEQ ID NO: 225677 - DNA, 25 bp, Artificial
  probe
  misc_feature (1)..(25): SEQ ID NO: 5194; WAN024FY5_at; Start 105; Stop 129
gataatcttggtaagagcacgcgta

SEQ ID NO: 225678 - DNA, 25 bp, Artificial
  probe
  misc_feature (1)..(25): SEQ ID NO: 5194; WAN024FY5_at; Start 1; Stop 25
ttgatattgtctgtcggtaaaactg

SEQ ID NO: 225679 - DNA, 25 bp, Artificial
  probe
  misc_feature (1)..(25): SEQ ID NO: 5194; WAN024FY5_at; Start 28; Stop 52
gcttggagctggtccgtcacatggt

SEQ ID NO: 225680 - DNA, 25 bp, Artificial
  probe
  misc_feature (1)..(25): SEQ ID NO: 5194; WAN024FY5_at; Start 72; Stop 96
ggtcaaggttgcacgcatagtacca

SEQ ID NO: 225681 - DNA, 25 bp, Artificial
  probe
  misc_feature (1)..(25): SEQ ID NO: 5194; WAN024FY5_at; Start 101; Stop 125
tacggataatcttggtaagagcacg

SEQ ID NO: 225682 - DNA, 25 bp, Artificial
  probe
  misc_feature (1)..(25): SEQ ID NO: 5194; WAN024FY5_at; Start 56; Stop 80
tactgtccccaacatgggtcaaggt

SEQ ID NO: 225683 - DNA, 25 bp, Artificial
  probe
  misc_feature (1)..(25): SEQ ID NO: 5194; WAN024FY5_at; Start 91; Stop 115
gtaccatgcttacggataatcttgg

SEQ ID NO: 225684 - DNA, 25 bp, Artificial
  probe
  misc_feature (1)..(25): SEQ ID NO: 5194; WAN024FY5_at; Start 5; Stop 29
tattgtctgtcggtaaaactgttgc

SEQ ID NO: 225685 - DNA, 25 bp, Artificial
  probe
  misc_feature (1)..(25): SEQ ID NO: 5194; WAN024FY5_at; Start 107; Stop 131
taatcttggtaagagcacgcgtatc

SEQ ID NO: 225686 - DNA, 25 bp, Artificial
  probe
  misc_feature (1)..(25): SEQ ID NO: 5194; WAN024FY5_at; Start 138; Stop 162
tgaaatccctggaattttcttggct

SEQ ID NO: 225687 - DNA, 25 bp, Artificial
  probe
  misc_feature (1)..(25): SEQ ID NO: 5194; WAN024FY5_at; Start 18; Stop 42
taaaactgttgcttggagctggtcc

SEQ ID NO: 225688 - DNA, 25 bp, Artificial
  probe
  misc_feature (1)..(25): SEQ ID NO: 5194; WAN024FY5_at; Start 49; Stop 73
tggtccatactgtccccaacatggg

SEQ ID NO: 225689 - DNA, 25 bp, Artificial
  probe
  misc_feature (1)..(25): SEQ ID NO: 5194; WAN024FY5_at; Start 110; Stop 134
tcttggtaagagcacgcgtatcaat

SEQ ID NO: 225690 - DNA, 25 bp, Artificial
  probe
  misc_feature (1)..(25): SEQ ID NO: 5194; WAN024FY5_at; Start 68; Stop 92
catgggtcaaggttgcacgcatagt

SEQ ID NO: 225691 - DNA, 25 bp, Artificial
  probe
  misc_feature (1)..(25): SEQ ID NO: 5194; WAN024FY5_at; Start 8; Stop 32
tgtctgtcggtaaaactgttgcttg

SEQ ID NO: 225692 - DNA, 25 bp, Artificial
  probe
  misc_feature (1)..(25): SEQ ID NO: 5194; WAN024FY5_at; Start 143; Stop 167
tccctggaattttcttggctttcaa

SEQ ID NO: 225693 - DNA, 25 bp, Artificial
  probe
  misc_feature (1)..(25): SEQ ID NO: 5194; WAN024FY5_at; Start 119; Stop 143
gagcacgcgtatcaattcctgaaat

SEQ ID NO: 225694 - DNA, 25 bp, Artificial
  probe
  misc_feature (1)..(25): SEQ ID NO: 5194; WAN024FY5_at; Start 161; Stop 185
ctttcaaaaattcatccaaggtcat

SEQ ID NO: 225695 - DNA, 25 bp, Artificial
  probe
  misc_feature (1)..(25): SEQ ID NO: 5194; WAN024FY5_at; Start 116; Stop 140
taagagcacgcgtatcaattcctga

SEQ ID NO: 225696 - DNA, 25 bp, Artificial
  probe
  misc_feature (1)..(25): SEQ ID NO: 5194; WAN024FY5_at; Start 85; Stop 109
cgcatagtaccatgcttacggataa

SEQ ID NO: 225697 - DNA, 25 bp, Artificial
  probe
  misc_feature (1)..(25): SEQ ID NO: 1295; WAN024FY6_at; Start 366; Stop 390
taagcatggtactatgcgtgcaacc

SEQ ID NO: 225698 - DNA, 25 bp, Artificial
  probe
  misc_feature (1)..(25): SEQ ID NO: 1295; WAN024FY6_at; Start 848; Stop 872
tagacttcaccagccagaaccatgg

SEQ ID NO: 225699 - DNA, 25 bp, Artificial
  probe
  misc_feature (1)..(25): SEQ ID NO: 1295; WAN024FY6_at; Start 591; Stop 615
tgttccttattcgacaacggctgaa

SEQ ID NO: 225700 - DNA, 25 bp, Artificial
  probe
  misc_feature (1)..(25): SEQ ID NO: 1295; WAN024FY6_at; Start 949; Stop 973
ggtgtgcgccacagataccaacctg

SEQ ID NO: 225701 - DNA, 25 bp, Artificial
  probe
  misc_feature (1)..(25): SEQ ID NO: 1295; WAN024FY6_at; Start 833; Stop 857
tcgcaacaggacgagtagacttcac

SEQ ID NO: 225702 - DNA, 25 bp, Artificial
  probe
  misc_feature (1)..(25): SEQ ID NO: 1295; WAN024FY6_at; Start 104; Stop 128
tgaccggctaccaagaatccattac

SEQ ID NO: 225703 - DNA, 25 bp, Artificial
  probe
  misc_feature (1)..(25): SEQ ID NO: 1295; WAN024FY6_at; Start 676; Stop 700
gacgttccacaagcactcgacatga

SEQ ID NO: 225704 - DNA, 25 bp, Artificial
  probe
  misc_feature (1)..(25): SEQ ID NO: 1295; WAN024FY6_at; Start 32; Stop 56
gcacagtttttgaaggcaaggcctt

SEQ ID NO: 225705 - DNA, 25 bp, Artificial
  probe
  misc_feature (1)..(25): SEQ ID NO: 1295; WAN024FY6_at; Start 864; Stop 888
gaaccatggttatgcagtcagccgc

SEQ ID NO: 225706 - DNA, 25 bp, Artificial
  probe
  misc_feature (1)..(25): SEQ ID NO: 1295; WAN024FY6_at; Start 47; Stop 71
gcaaggccttcggagcagatattga

SEQ ID NO: 225707 - DNA, 25 bp, Artificial
  probe
  misc_feature (1)..(25): SEQ ID NO: 1295; WAN024FY6_at; Start 480; Stop 504
taaaacgtcttatccagctccagga

SEQ ID NO: 225708 - DNA, 25 bp, Artificial
  probe
  misc_feature (1)..(25): SEQ ID NO: 1295; WAN024FY6_at; Start 246; Stop 270
tgaagaagcgcgtagagctagcaac

SEQ ID NO: 225709 - DNA, 25 bp, Artificial
  probe
  misc_feature (1)..(25): SEQ ID NO: 1295; WAN024FY6_at; Start 264; Stop 288
tagcaactggcgcaaccaaatgacc

SEQ ID NO: 225710 - DNA, 25 bp, Artificial
  probe
  misc_feature (1)..(25): SEQ ID NO: 1295; WAN024FY6_at; Start 535; Stop 559
ggtctcaagcactcaatcctacgtg

SEQ ID NO: 225711 - DNA, 25 bp, Artificial
  probe
  misc_feature (1)..(25): SEQ ID NO: 1295; WAN024FY6_at; Start 744; Stop 768
gggacaccaactctttgcaatggca

SEQ ID NO: 225712 - DNA, 25 bp, Artificial
  probe
  misc_feature (1)..(25): SEQ ID NO: 1295; WAN024FY6_at; Start 336; Stop 360
tgatacgcgtgctcttaccaagatt

SEQ ID NO: 225713 - DNA, 25 bp, Artificial
  probe
  misc_feature (1)..(25): SEQ ID NO: 1295; WAN024FY6_at; Start 979; Stop 1003
tctgttcaataccacccagatgcag

SEQ ID NO: 225714 - DNA, 25 bp, Artificial
  probe
  misc_feature (1)..(25): SEQ ID NO: 1295; WAN024FY6_at; Start 879; Stop 903
agtcagccgcgaggatttgccagag

SEQ ID NO: 225715 - DNA, 25 bp, Artificial
  probe
  misc_feature (1)..(25): SEQ ID NO: 1295; WAN024FY6_at; Start 899; Stop 923
cagagcacttgattattacccacga

SEQ ID NO: 225716 - DNA, 25 bp, Artificial
  probe
  misc_feature (1)..(25): SEQ ID NO: 1295; WAN024FY6_at; Start 66; Stop 90
tattgatgtaacaggcgaaatcgtc

SEQ ID NO: 225717 - DNA, 25 bp, Artificial
  probe
  misc_feature (1)..(25): SEQ ID NO: 1295; WAN024FY6_at; Start 381; Stop 405
gcgtgcaaccttgacccatgttggg

SEQ ID NO: 225718 - DNA, 25 bp, Artificial
  probe
  misc_feature (1)..(25): SEQ ID NO: 1295; WAN024FY6_at; Start 915; Stop 939
tacccacgaagaaatcaatgacaag

SEQ ID NO: 225719 - DNA, 25 bp, Artificial
  probe
  misc_feature (1)..(25): SEQ ID NO: 1295; WAN024FY6_at; Start 702; Stop 726
tcgcggtgtacaaggaaaaattcca

SEQ ID NO: 225720 - DNA, 25 bp, Artificial
  probe
  misc_feature (1)..(25): SEQ ID NO: 1295; WAN024FY6_at; Start 812; Stop 836
tcaaccatgcggtacgtgaaatcgc

SEQ ID NO: 225721 - DNA, 25 bp, Artificial
  probe
  misc_feature (1)..(25): SEQ ID NO: 1295; WAN024FY6_at; Start 613; Stop 637
gaagaaattctccatctcaatcctg

SEQ ID NO: 225722 - DNA, 25 bp, Artificial
  probe
  misc_feature (1)..(25): SEQ ID NO: 1295; WAN024FY6_at; Start 408; Stop 432
cagtatggaccatgtgacggaccag

SEQ ID NO: 225723 - DNA, 25 bp, Artificial
  probe
  misc_feature (1)..(25): SEQ ID NO: 1295; WAN024FY6_at; Start 647; Stop 671
tgttgtcaaatggtccaggtaaccc

SEQ ID NO: 225724 - DNA, 25 bp, Artificial
  probe
  misc_feature (1)..(25): SEQ ID NO: 1295; WAN024FY6_at; Start 439; Stop 463
gcaacagttttaccgacagacaata

SEQ ID NO: 225725 - DNA, 25 bp, Artificial
  probe
  misc_feature (1)..(25): SEQ ID NO: 1295; WAN024FY6_at; Start 662; Stop 686
caggtaacccagaagacgttccaca

SEQ ID NO: 225726 - DNA, 25 bp, Artificial
  probe
  misc_feature (1)..(25): SEQ ID NO: 1295; WAN024FY6_at; Start 935; Stop 959
acaagtcagtggaaggtgtgcgcca

SEQ ID NO: 225727 - DNA, 25 bp, Artificial
  probe
  misc_feature (1)..(25): SEQ ID NO: 1295; WAN024FY6_at; Start 302; Stop 326
tgaaagccaagaaaattccagggat

SEQ ID NO: 225728 - DNA, 25 bp, Artificial
  probe
  misc_feature (1)..(25): SEQ ID NO: 1295; WAN024FY6_at; Start 1018; Stop 1042
gacgctagctacctatttgacgagt

SEQ ID NO: 225729 - DNA, 25 bp, Artificial
  probe
  misc_feature (1)..(25): SEQ ID NO: 1295; WAN024FY6_at; Start 423; Stop 447
gacggaccagctccaagcaacagtt

SEQ ID NO: 225730 - DNA, 25 bp, Artificial
  probe
  misc_feature (1)..(25): SEQ ID NO: 1295; WAN024FY6_at; Start 319; Stop 343
ccagggatttcaggaattgatacgc

SEQ ID NO: 225731 - DNA, 25 bp, Artificial
  probe
  misc_feature (1)..(25): SEQ ID NO: 6602; WAN024FY7_at; Start 763; Stop 787
caaattttttccacaattagcgcta

SEQ ID NO: 225732 - DNA, 25 bp, Artificial
  probe
  misc_feature (1)..(25): SEQ ID NO: 6602; WAN024FY7_at; Start 926; Stop 950
caatctctaatatactcttcggagc

SEQ ID NO: 225733 - DNA, 25 bp, Artificial
  probe
  misc_feature (1)..(25): SEQ ID NO: 6602; WAN024FY7_at; Start 1141; Stop 1165
gggattacaatctcaactatgatag

SEQ ID NO: 225734 - DNA, 25 bp, Artificial
  probe
  misc_feature (1)..(25): SEQ ID NO: 6602; WAN024FY7_at; Start 993; Stop 1017
tagcagtttgtttaatgcgatttcg

SEQ ID NO: 225735 - DNA, 25 bp, Artificial
  probe
  misc_feature (1)..(25): SEQ ID NO: 6602; WAN024FY7_at; Start 742; Stop 766
tcagttgcttataagattccacaaa

SEQ ID NO: 225736 - DNA, 25 bp, Artificial
  probe
  misc_feature (1)..(25): SEQ ID NO: 6602; WAN024FY7_at; Start 946; Stop 970
ggagcttcattttattcagcgtgga

SEQ ID NO: 225737 - DNA, 25 bp, Artificial
  probe
  misc_feature (1)..(25): SEQ ID NO: 6602; WAN024FY7_at; Start 1066; Stop 1090
gctaaatctgctttggttggaatga

SEQ ID NO: 225738 - DNA, 25 bp, Artificial
  probe
  misc_feature (1)..(25): SEQ ID NO: 6602; WAN024FY7_at; Start 606; Stop 630
tgatagatcgttacagtgggaaatg

SEQ ID NO: 225739 - DNA, 25 bp, Artificial
  probe
  misc_feature (1)..(25): SEQ ID NO: 6602; WAN024FY7_at; Start 1021; Stop 1045
tatataggagcgataatgggcgcta

SEQ ID NO: 225740 - DNA, 25 bp, Artificial
  probe
  misc_feature (1)..(25): SEQ ID NO: 6602; WAN024FY7_at; Start 171; Stop 195
cctgacattgaatatatctgaagca

SEQ ID NO: 225741 - DNA, 25 bp, Artificial
  probe
  misc_feature (1)..(25): SEQ ID NO: 6602; WAN024FY7_at; Start 1034; Stop 1058
taatgggcgctaaaatggatactaa

SEQ ID NO: 225742 - DNA, 25 bp, Artificial
  probe
  misc_feature (1)..(25): SEQ ID NO: 6602; WAN024FY7_at; Start 30; Stop 54
tacaggtacttttgctttagctaat

SEQ ID NO: 225743 - DNA, 25 bp, Artificial
  probe
  misc_feature (1)..(25): SEQ ID NO: 6602; WAN024FY7_at; Start 1195; Stop 1219
gatagtgttgaagaaattgctccag

SEQ ID NO: 225744 - DNA, 25 bp, Artificial
  probe
  misc_feature (1)..(25): SEQ ID NO: 6602; WAN024FY7_at; Start 110; Stop 134
caacgacagagtatggtttttatga

SEQ ID NO: 225745 - DNA, 25 bp, Artificial
  probe
  misc_feature (1)..(25): SEQ ID NO: 6602; WAN024FY7_at; Start 881; Stop 905
cactcttgctgattatagcgagcgg

SEQ ID NO: 225746 - DNA, 25 bp, Artificial
  probe
  misc_feature (1)..(25): SEQ ID NO: 6602; WAN024FY7_at; Start 337; Stop 361
caatatagcatatatatcatggcga

SEQ ID NO: 225747 - DNA, 25 bp, Artificial
  probe
  misc_feature (1)..(25): SEQ ID NO: 6602; WAN024FY7_at; Start 392; Stop 416
tgatacaatactctaaagggattga

SEQ ID NO: 225748 - DNA, 25 bp, Artificial
  probe
  misc_feature (1)..(25): SEQ ID NO: 6602; WAN024FY7_at; Start 96; Stop 120
tacaaaagttctaacaacgacagag

SEQ ID NO: 225749 - DNA, 25 bp, Artificial
  probe
  misc_feature (1)..(25): SEQ ID NO: 6602; WAN024FY7_at; Start 424; Stop 448
ggtgtaacggctatctctggagtca

SEQ ID NO: 225750 - DNA, 25 bp, Artificial
  probe
  misc_feature (1)..(25): SEQ ID NO: 6602; WAN024FY7_at; Start 411; Stop 435
gattgataaaataggtgtaacggct

SEQ ID NO: 225751 - DNA, 25 bp, Artificial
  probe
  misc_feature (1)..(25): SEQ ID NO: 6602; WAN024FY7_at; Start 435; Stop 459
tatctctggagtcataagtgcagca

SEQ ID NO: 225752 - DNA, 25 bp, Artificial
  probe
  misc_feature (1)..(25): SEQ ID NO: 6602; WAN024FY7_at; Start 1207; Stop 1231
gaaattgctccagaaacatatagag

SEQ ID NO: 225753 - DNA, 25 bp, Artificial
  probe
  misc_feature (1)..(25): SEQ ID NO: 6602; WAN024FY7_at; Start 322; Stop 346
tcggagttaatttctcaatatagca

SEQ ID NO: 225754 - DNA, 25 bp, Artificial
  probe
  misc_feature (1)..(25): SEQ ID NO: 6602; WAN024FY7_at; Start 138; Stop 162
ggtttatacaacaattcagctcctt

SEQ ID NO: 225755 - DNA, 25 bp, Artificial
  probe
  misc_feature (1)..(25): SEQ ID NO: 6602; WAN024FY7_at; Start 1337; Stop 1361
taaaggatactcttaaaccattatg

SEQ ID NO: 225756 - DNA, 25 bp, Artificial
  probe
  misc_feature (1)..(25): SEQ ID NO: 6602; WAN024FY7_at; Start 1008; Stop 1032
tgcgatttcgggttatataggagcg

SEQ ID NO: 225757 - DNA, 25 bp, Artificial
  probe
  misc_feature (1)..(25): SEQ ID NO: 6602; WAN024FY7_at; Start 673; Stop 697
tgggttaataacacttcagataggt

SEQ ID NO: 225758 - DNA, 25 bp, Artificial
  probe
  misc_feature (1)..(25): SEQ ID NO: 6602; WAN024FY7_at; Start 454; Stop 478
gcagcagttatgctttcgatgaata

SEQ ID NO: 225759 - DNA, 25 bp, Artificial
  probe
  misc_feature (1)..(25): SEQ ID NO: 6602; WAN024FY7_at; Start 796; Stop 820
caatcgtggcaaatatctgcaataa

SEQ ID NO: 225760 - DNA, 25 bp, Artificial
  probe
  misc_feature (1)..(25): SEQ ID NO: 6602; WAN024FY7_at; Start 962; Stop 986
cagcgtggacgcttgtaccgttttt

SEQ ID NO: 225761 - DNA, 25 bp, Artificial
  probe
  misc_feature (1)..(25): SEQ ID NO: 6602; WAN024FY7_at; Start 526; Stop 550
gcaaatatttgtgggtatgtcattc

SEQ ID NO: 225762 - DNA, 25 bp, Artificial
  probe
  misc_feature (1)..(25): SEQ ID NO: 6602; WAN024FY7_at; Start 156; Stop 180
gctccttgtaccaatcctgacattg

SEQ ID NO: 225763 - DNA, 25 bp, Artificial
  probe
  misc_feature (1)..(25): SEQ ID NO: 6602; WAN024FY7_at; Start 780; Stop 804
tagcgctatattcattcaatcgtgg

SEQ ID NO: 225764 - DNA, 25 bp, Artificial
  probe
  misc_feature (1)..(25): SEQ ID NO: 6602; WAN024FY7_at; Start 898; Stop 922
gcgagcggtatcattctatttgtaa

SEQ ID NO: 225765 - DNA, 25 bp, Artificial
  probe
  misc_feature (1)..(25): SEQ ID NO: 1600; WAN024FY8_at; Start 172; Stop 196
ttgacattaaatatatctgaagccg

SEQ ID NO: 225766 - DNA, 25 bp, Artificial
  probe
  misc_feature (1)..(25): SEQ ID NO: 1600; WAN024FY8_at; Start 956; Stop 980
tctattctgcgtgggagctggtacc

SEQ ID NO: 225767 - DNA, 25 bp, Artificial
  probe
  misc_feature (1)..(25): SEQ ID NO: 1600; WAN024FY8_at; Start 995; Stop 1019
gcagtctattcaatgcaatttcagg

SEQ ID NO: 225768 - DNA, 25 bp, Artificial
  probe
  misc_feature (1)..(25): SEQ ID NO: 1600; WAN024FY8_at; Start 457; Stop 481
gcagttatgcttgccatgaatgtca

SEQ ID NO: 225769 - DNA, 25 bp, Artificial
  probe
  misc_feature (1)..(25): SEQ ID NO: 1600; WAN024FY8_at; Start 1067; Stop 1091
caaagtcggctttagttgggatgat

SEQ ID NO: 225770 - DNA, 25 bp, Artificial
  probe
  misc_feature (1)..(25): SEQ ID NO: 1600; WAN024FY8_at; Start 1265; Stop 1289
aggcctgtctgctaatttatatgga

SEQ ID NO: 225771 - DNA, 25 bp, Artificial
  probe
  misc_feature (1)..(25): SEQ ID NO: 1600; WAN024FY8_at; Start 420; Stop 444
aattggtgttacagctatctctggg

SEQ ID NO: 225772 - DNA, 25 bp, Artificial
  probe
  misc_feature (1)..(25): SEQ ID NO: 1600; WAN024FY8_at; Start 946; Stop 970
ggtatttccttctattctgcgtggg

SEQ ID NO: 225773 - DNA, 25 bp, Artificial
  probe
  misc_feature (1)..(25): SEQ ID NO: 1600; WAN024FY8_at; Start 898; Stop 922
gcgagtggtatcatattatttgtca

SEQ ID NO: 225774 - DNA, 25 bp, Artificial
  probe
  misc_feature (1)..(25): SEQ ID NO: 1600; WAN024FY8_at; Start 153; Stop 177
tcagctttttgtaccaatcttgaca

SEQ ID NO: 225775 - DNA, 25 bp, Artificial
  probe
  misc_feature (1)..(25): SEQ ID NO: 1600; WAN024FY8_at; Start 86; Stop 110
tacctatatatacacgggtacttac

SEQ ID NO: 225776 - DNA, 25 bp, Artificial
  probe
  misc_feature (1)..(25): SEQ ID NO: 1600; WAN024FY8_at; Start 1010; Stop 1034
caatttcaggttgtataggagcaat

SEQ ID NO: 225777 - DNA, 25 bp, Artificial
  probe
  misc_feature (1)..(25): SEQ ID NO: 1600; WAN024FY8_at; Start 1053; Stop 1077
tactcataacattgcaaagtcggct

SEQ ID NO: 225778 - DNA, 25 bp, Artificial
  probe
  misc_feature (1)..(25): SEQ ID NO: 1600; WAN024FY8_at; Start 527; Stop 551
ctaatgtttgtggatatgttatacc

SEQ ID NO: 225779 - DNA, 25 bp, Artificial
  probe
  misc_feature (1)..(25): SEQ ID NO: 1600; WAN024FY8_at; Start 133; Stop 157
gacttagtctatacaactattcagc

SEQ ID NO: 225780 - DNA, 25 bp, Artificial
  probe
  misc_feature (1)..(25): SEQ ID NO: 1600; WAN024FY8_at; Start 100; Stop 124
cgggtacttaccactacggaatatg

SEQ ID NO: 225781 - DNA, 25 bp, Artificial
  probe
  misc_feature (1)..(25): SEQ ID NO: 1600; WAN024FY8_at; Start 111; Stop 135
cactacggaatatggtttttatgac

SEQ ID NO: 225782 - DNA, 25 bp, Artificial
  probe
  misc_feature (1)..(25): SEQ ID NO: 1600; WAN024FY8_at; Start 30; Stop 54
tacaggtatttttgctttggctaac

SEQ ID NO: 225783 - DNA, 25 bp, Artificial
  probe
  misc_feature (1)..(25): SEQ ID NO: 1600; WAN024FY8_at; Start 1031; Stop 1055
caattatgggagctaaaatggatac

SEQ ID NO: 225784 - DNA, 25 bp, Artificial
  probe
  misc_feature (1)..(25): SEQ ID NO: 1600; WAN024FY8_at; Start 200; Stop 224
tgaggttcctaatgaaagatggtgt

SEQ ID NO: 225785 - DNA, 25 bp, Artificial
  probe
  misc_feature (1)..(25): SEQ ID NO: 1600; WAN024FY8_at; Start 881; Stop 905
cacttctattgattatagcgagtgg

SEQ ID NO: 225786 - DNA, 25 bp, Artificial
  probe
  misc_feature (1)..(25): SEQ ID NO: 1600; WAN024FY8_at; Start 848; Stop 872
catttgtatcaaacatgctcctata

SEQ ID NO: 225787 - DNA, 25 bp, Artificial
  probe
  misc_feature (1)..(25): SEQ ID NO: 1600; WAN024FY8_at; Start 1130; Stop 1154
tgggtccacagggaattacaatttc

SEQ ID NO: 225788 - DNA, 25 bp, Artificial
  probe
  misc_feature (1)..(25): SEQ ID NO: 1600; WAN024FY8_at; Start 1118; Stop 1142
taacattcttaatgggtccacaggg

SEQ ID NO: 225789 - DNA, 25 bp, Artificial
  probe
  misc_feature (1)..(25): SEQ ID NO: 1600; WAN024FY8_at; Start 185; Stop 209
tatctgaagccgttatgaggttcct

SEQ ID NO: 225790 - DNA, 25 bp, Artificial
  probe
  misc_feature (1)..(25): SEQ ID NO: 1600; WAN024FY8_at; Start 1145; Stop 1169
ttacaatttctaccctgatagctag

SEQ ID NO: 225791 - DNA, 25 bp, Artificial
  probe
  misc_feature (1)..(25): SEQ ID NO: 1600; WAN024FY8_at; Start 447; Stop 471
cataagtacagcagttatgcttgcc

SEQ ID NO: 225792 - DNA, 25 bp, Artificial
  probe
  misc_feature (1)..(25): SEQ ID NO: 1600; WAN024FY8_at; Start 1229; Stop 1253
gagcaatttatttatcgtggatact

SEQ ID NO: 225793 - DNA, 25 bp, Artificial
  probe
  misc_feature (1)..(25): SEQ ID NO: 1600; WAN024FY8_at; Start 964; Stop 988
gcgtgggagctggtaccatttttaa

SEQ ID NO: 225794 - DNA, 25 bp, Artificial
  probe
  misc_feature (1)..(25): SEQ ID NO: 1600; WAN024FY8_at; Start 791; Stop 815
ttattcaatcatggcaaatctctgc

SEQ ID NO: 225795 - DNA, 25 bp, Artificial
  probe
  misc_feature (1)..(25): SEQ ID NO: 1600; WAN024FY8_at; Start 705; Stop 729
gactgcaatagtaggtatacaagct

SEQ ID NO: 225796 - DNA, 25 bp, Artificial
  probe
  misc_feature (1)..(25): SEQ ID NO: 1600; WAN024FY8_at; Start 743; Stop 767
cagtcgcttataaaattccacagat

SEQ ID NO: 225797 - DNA, 25 bp, Artificial
  probe
  misc_feature (1)..(25): SEQ ID NO: 1600; WAN024FY8_at; Start 665; Stop 689
taagctggtgggtaaataatacttc

SEQ ID NO: 225798 - DNA, 25 bp, Artificial
  probe
  misc_feature (1)..(25): SEQ ID NO: 1600; WAN024FY8_at; Start 617; Stop 641
tacaatgggaaatggtttactatgc

SEQ ID NO: 225799 - DNA, 25 bp, Artificial
  probe
  misc_feature (1)..(25): SEQ ID NO: 6454; WAN024FY9_at; Start 250; Stop 274
cagtttactgcgacttgtatatcga

SEQ ID NO: 225800 - DNA, 25 bp, Artificial
  probe
  misc_feature (1)..(25): SEQ ID NO: 6454; WAN024FY9_at; Start 385; Stop 409
caaggactagaagattttaggaaga

SEQ ID NO: 225801 - DNA, 25 bp, Artificial
  probe
  misc_feature (1)..(25): SEQ ID NO: 6454; WAN024FY9_at; Start 1241; Stop 1265
cagcatcaattcttatgtatgttgc

SEQ ID NO: 225802 - DNA, 25 bp, Artificial
  probe
  misc_feature (1)..(25): SEQ ID NO: 6454; WAN024FY9_at; Start 237; Stop 261
tatttatactttgcagtttactgcg

SEQ ID NO: 225803 - DNA, 25 bp, Artificial
  probe
  misc_feature (1)..(25): SEQ ID NO: 6454; WAN024FY9_at; Start 933; Stop 957
tgactttcaagaagcaaaatatgct

SEQ ID NO: 225804 - DNA, 25 bp, Artificial
  probe
  misc_feature (1)..(25): SEQ ID NO: 6454; WAN024FY9_at; Start 1061; Stop 1085
caacggttccagcaattattagtgt

SEQ ID NO: 225805 - DNA, 25 bp, Artificial
  probe
  misc_feature (1)..(25): SEQ ID NO: 6454; WAN024FY9_at; Start 811; Stop 835
gataagaagtctgtgaatcgcatga

SEQ ID NO: 225806 - DNA, 25 bp, Artificial
  probe
  misc_feature (1)..(25): SEQ ID NO: 6454; WAN024FY9_at; Start 1049; Stop 1073
ttttgacttcaacaacggttccagc

SEQ ID NO: 225807 - DNA, 25 bp, Artificial
  probe
  misc_feature (1)..(25): SEQ ID NO: 6454; WAN024FY9_at; Start 1103; Stop 1127
tactgcctgaatttggatatattgg

SEQ ID NO: 225808 - DNA, 25 bp, Artificial
  probe
  misc_feature (1)..(25): SEQ ID NO: 6454; WAN024FY9_at; Start 683; Stop 707
ctttagcatcaacaacagatgttgg

SEQ ID NO: 225809 - DNA, 25 bp, Artificial
  probe
  misc_feature (1)..(25): SEQ ID NO: 6454; WAN024FY9_at; Start 1379; Stop 1403
gcttaaaggagataaaagagcagct

SEQ ID NO: 225810 - DNA, 25 bp, Artificial
  probe
  misc_feature (1)..(25): SEQ ID NO: 6454; WAN024FY9_at; Start 372; Stop 396
tacttggctttttcaaggactagaa

SEQ ID NO: 225811 - DNA, 25 bp, Artificial
  probe
  misc_feature (1)..(25): SEQ ID NO: 6454; WAN024FY9_at; Start 74; Stop 98
caccttatgtaactagggtatttag

SEQ ID NO: 225812 - DNA, 25 bp, Artificial
  probe
  misc_feature (1)..(25): SEQ ID NO: 6454; WAN024FY9_at; Start 188; Stop 212
caaaagagatttcagctcatagaaa

SEQ ID NO: 225813 - DNA, 25 bp, Artificial
  probe
  misc_feature (1)..(25): SEQ ID NO: 6454; WAN024FY9_at; Start 1151; Stop 1175
cagaaatatttgtatgggttatcca

SEQ ID NO: 225814 - DNA, 25 bp, Artificial
  probe
  misc_feature (1)..(25): SEQ ID NO: 6454; WAN024FY9_at; Start 768; Stop 792
tagtgttatgctaccacgtgtttcg

SEQ ID NO: 225815 - DNA, 25 bp, Artificial
  probe
  misc_feature (1)..(25): SEQ ID NO: 6454; WAN024FY9_at; Start 657; Stop 681
tacgttaaataggacaatgcttggc

SEQ ID NO: 225816 - DNA, 25 bp, Artificial
  probe
  misc_feature (1)..(25): SEQ ID NO: 6454; WAN024FY9_at; Start 529; Stop 553
caattaagtatgtggctgccagctc

SEQ ID NO: 225817 - DNA, 25 bp, Artificial
  probe
  misc_feature (1)..(25): SEQ ID NO: 6454; WAN024FY9_at; Start 867; Stop 891
gatttttccaactattgcaggtatg

SEQ ID NO: 225818 - DNA, 25 bp, Artificial
  probe
  misc_feature (1)..(25): SEQ ID NO: 6454; WAN024FY9_at; Start 623; Stop 647
tgtttttacctcaaatagcgatatc

SEQ ID NO: 225819 - DNA, 25 bp, Artificial
  probe
  misc_feature (1)..(25): SEQ ID NO: 6454; WAN024FY9_at; Start 40; Stop 64
cagctactagtgataattcttccta

SEQ ID NO: 225820 - DNA, 25 bp, Artificial
  probe
  misc_feature (1)..(25): SEQ ID NO: 6454; WAN024FY9_at; Start 1088; Stop 1112
gtttaaatttgcttttactgcctga

SEQ ID NO: 225821 - DNA, 25 bp, Artificial
  probe
  misc_feature (1)..(25): SEQ ID NO: 6454; WAN024FY9_at; Start 27; Stop 51
taatctctcttaccagctactagtg

SEQ ID NO: 225822 - DNA, 25 bp, Artificial
  probe
  misc_feature (1)..(25): SEQ ID NO: 6454; WAN024FY9_at; Start 786; Stop 810
tgtttcgaatcttttatcaacaggg

SEQ ID NO: 225823 - DNA, 25 bp, Artificial
  probe
  misc_feature (1)..(25): SEQ ID NO: 6454; WAN024FY9_at; Start 601; Stop 625
catcttaaaccggtgatattactgt

SEQ ID NO: 225824 - DNA, 25 bp, Artificial
  probe
  misc_feature (1)..(25): SEQ ID NO: 6454; WAN024FY9_at; Start 671; Stop 695
caatgcttggcgctttagcatcaac

SEQ ID NO: 225825 - DNA, 25 bp, Artificial
  probe
  misc_feature (1)..(25): SEQ ID NO: 6454; WAN024FY9_at; Start 419; Stop 443
gaaatatcactgtcaaactcatagg

SEQ ID NO: 225826 - DNA, 25 bp, Artificial
  probe
  misc_feature (1)..(25): SEQ ID NO: 6454; WAN024FY9_at; Start 101; Stop 125
caaatgatttaggaacttttggcta

SEQ ID NO: 225827 - DNA, 25 bp, Artificial
  probe
  misc_feature (1)..(25): SEQ ID NO: 6454; WAN024FY9_at; Start 542; Stop 566
ggctgccagctctagaatttatagg

SEQ ID NO: 225828 - DNA, 25 bp, Artificial
  probe
  misc_feature (1)..(25): SEQ ID NO: 6454; WAN024FY9_at; Start 589; Stop 613
tatgccaagaaacatcttaaaccgg

SEQ ID NO: 225829 - DNA, 25 bp, Artificial
  probe
  misc_feature (1)..(25): SEQ ID NO: 6454; WAN024FY9_at; Start 153; Stop 177
ttttttagcaacattaggagtagct

SEQ ID NO: 225830 - DNA, 25 bp, Artificial
  probe
  misc_feature (1)..(25): SEQ ID NO: 6454; WAN024FY9_at; Start 561; Stop 585
tataggtaagccacaatttgatttc

SEQ ID NO: 225831 - DNA, 25 bp, Artificial
  probe
  misc_feature (1)..(25): SEQ ID NO: 6454; WAN024FY9_at; Start 748; Stop 772
actttggtaacttcactaggtagtg

SEQ ID NO: 225832 - DNA, 25 bp, Artificial
  probe
  misc_feature (1)..(25): SEQ ID NO: 6454; WAN024FY9_at; Start 167; Stop 191
taggagtagctaattatgggacaaa

SEQ ID NO: 225833 - DNA, 25 bp, Artificial
  probe
  misc_feature (1)..(25): SEQ ID NO: 6396; WAN024FYA_at; Start 565; Stop 589
ggtagacctcattttgatttagaat

SEQ ID NO: 225834 - DNA, 25 bp, Artificial
  probe
  misc_feature (1)..(25): SEQ ID NO: 6396; WAN024FYA_at; Start 1174; Stop 1198
caattgtactatattcgtgcatacc

SEQ ID NO: 225835 - DNA, 25 bp, Artificial
  probe
  misc_feature (1)..(25): SEQ ID NO: 6396; WAN024FYA_at; Start 330; Stop 354
ctacattctaggcttggctttggtt

SEQ ID NO: 225836 - DNA, 25 bp, Artificial
  probe
  misc_feature (1)..(25): SEQ ID NO: 6396; WAN024FYA_at; Start 552; Stop 576
tcgtgagtttattggtagacctcat

SEQ ID NO: 225837 - DNA, 25 bp, Artificial
  probe
  misc_feature (1)..(25): SEQ ID NO: 6396; WAN024FYA_at; Start 51; Stop 75
gattatacttccaatcattacgacc

SEQ ID NO: 225838 - DNA, 25 bp, Artificial
  probe
  misc_feature (1)..(25): SEQ ID NO: 6396; WAN024FYA_at; Start 1095; Stop 1119
tcttctcttgcttcccaagtttgga

SEQ ID NO: 225839 - DNA, 25 bp, Artificial
  probe
  misc_feature (1)..(25): SEQ ID NO: 6396; WAN024FYA_at; Start 734; Stop 758
taaatatccttctgaccttggtaac

SEQ ID NO: 225840 - DNA, 25 bp, Artificial
  probe
  misc_feature (1)..(25): SEQ ID NO: 6396; WAN024FYA_at; Start 465; Stop 489
tgtcaaatctgcagatgatctatac

SEQ ID NO: 225841 - DNA, 25 bp, Artificial
  probe
  misc_feature (1)..(25): SEQ ID NO: 6396; WAN024FYA_at; Start 254; Stop 278
taggtgcaacagttttttctctaac

SEQ ID NO: 225842 - DNA, 25 bp, Artificial
  probe
  misc_feature (1)..(25): SEQ ID NO: 6396; WAN024FYA_at; Start 326; Stop 350
tagcctacattctaggcttggcttt

SEQ ID NO: 225843 - DNA, 25 bp, Artificial
  probe
  misc_feature (1)..(25): SEQ ID NO: 6396; WAN024FYA_at; Start 1110; Stop 1134
caagtttggatatataggagcagca

SEQ ID NO: 225844 - DNA, 25 bp, Artificial
  probe
  misc_feature (1)..(25): SEQ ID NO: 6396; WAN024FYA_at; Start 258; Stop 282
tgcaacagttttttctctaaccttg

SEQ ID NO: 225845 - DNA, 25 bp, Artificial
  probe
  misc_feature (1)..(25): SEQ ID NO: 6396; WAN024FYA_at; Start 619; Stop 643
ttattgttccttccgcaagtggcga

SEQ ID NO: 225846 - DNA, 25 bp, Artificial
  probe
  misc_feature (1)..(25): SEQ ID NO: 6396; WAN024FYA_at; Start 647; Stop 671
ccttgtatgttacgctagatcgtac

SEQ ID NO: 225847 - DNA, 25 bp, Artificial
  probe
  misc_feature (1)..(25): SEQ ID NO: 6396; WAN024FYA_at; Start 486; Stop 510
atacctctatgtctttttgctaacc

SEQ ID NO: 225848 - DNA, 25 bp, Artificial
  probe
  misc_feature (1)..(25): SEQ ID NO: 6396; WAN024FYA_at; Start 630; Stop 654
tccgcaagtggcgatttccttgtat

SEQ ID NO: 225849 - DNA, 25 bp, Artificial
  probe
  misc_feature (1)..(25): SEQ ID NO: 6396; WAN024FYA_at; Start 21; Stop 45
tgcatacaatctatcttatcaatta

SEQ ID NO: 225850 - DNA, 25 bp, Artificial
  probe
  misc_feature (1)..(25): SEQ ID NO: 6396; WAN024FYA_at; Start 641; Stop 665
cgatttccttgtatgttacgctaga

SEQ ID NO: 225851 - DNA, 25 bp, Artificial
  probe
  misc_feature (1)..(25): SEQ ID NO: 6396; WAN024FYA_at; Start 474; Stop 498
tgcagatgatctatacctctatgtc

SEQ ID NO: 225852 - DNA, 25 bp, Artificial
  probe
  misc_feature (1)..(25): SEQ ID NO: 6396; WAN024FYA_at; Start 580; Stop 604
gatttagaatatgctagacatcatt

SEQ ID NO: 225853 - DNA, 25 bp, Artificial
  probe
  misc_feature (1)..(25): SEQ ID NO: 6396; WAN024FYA_at; Start 636; Stop 660
agtggcgatttccttgtatgttacg

SEQ ID NO: 225854 - DNA, 25 bp, Artificial
  probe
  misc_feature (1)..(25): SEQ ID NO: 6396; WAN024FYA_at; Start 272; Stop 296
ctctaaccttgtattgtcttctttg

SEQ ID NO: 225855 - DNA, 25 bp, Artificial
  probe
  misc_feature (1)..(25): SEQ ID NO: 6396; WAN024FYA_at; Start 537; Stop 561
tatgtgggtgcctgctcgtgagttt

SEQ ID NO: 225856 - DNA, 25 bp, Artificial
  probe
  misc_feature (1)..(25): SEQ ID NO: 6396; WAN024FYA_at; Start 426; Stop 450
cacagtcaagttcgttggtgtaatc

SEQ ID NO: 225857 - DNA, 25 bp, Artificial
  probe
  misc_feature (1)..(25): SEQ ID NO: 6396; WAN024FYA_at; Start 729; Stop 753
gttggtaaatatccttctgaccttg

SEQ ID NO: 225858 - DNA, 25 bp, Artificial
  probe
  misc_feature (1)..(25): SEQ ID NO: 6396; WAN024FYA_at; Start 543; Stop 567
ggtgcctgctcgtgagtttattggt

SEQ ID NO: 225859 - DNA, 25 bp, Artificial
  probe
  misc_feature (1)..(25): SEQ ID NO: 6396; WAN024FYA_at; Start 624; Stop 648
gttccttccgcaagtggcgatttcc

SEQ ID NO: 225860 - DNA, 25 bp, Artificial
  probe
  misc_feature (1)..(25): SEQ ID NO: 6396; WAN024FYA_at; Start 611; Stop 635
cagtcatattattgttccttccgca

SEQ ID NO: 225861 - DNA, 25 bp, Artificial
  probe
  misc_feature (1)..(25): SEQ ID NO: 6396; WAN024FYA_at; Start 1180; Stop 1204
tactatattcgtgcatacctaaaag

SEQ ID NO: 225862 - DNA, 25 bp, Artificial
  probe
  misc_feature (1)..(25): SEQ ID NO: 6396; WAN024FYA_at; Start 1187; Stop 1211
ttcgtgcatacctaaaagatgttcc

SEQ ID NO: 225863 - DNA, 25 bp, Artificial
  probe
  misc_feature (1)..(25): SEQ ID NO: 6396; WAN024FYA_at; Start 12; Stop 36
taaaaactatgcatacaatctatct

SEQ ID NO: 225864 - DNA, 25 bp, Artificial
  probe
  misc_feature (1)..(25): SEQ ID NO: 6396; WAN024FYA_at; Start 432; Stop 456
caagttcgttggtgtaatctctatc

SEQ ID NO: 225865 - DNA, 25 bp, Artificial
  probe
  misc_feature (1)..(25): SEQ ID NO: 6396; WAN024FYA_at; Start 510; Stop 534
catatttgaactcttggggcagcta

SEQ ID NO: 225866 - DNA, 25 bp, Artificial
  probe
  misc_feature (1)..(25): SEQ ID NO: 6396; WAN024FYA_at; Start 161; Stop 185
caacgctaggggttgccaactatgg

SEQ ID NO: 225867 - DNA, 25 bp, Artificial
  probe
  misc_feature (1)..(25): SEQ ID NO: 6395; WAN024FYB_at; Start 644; Stop 668
tatcactatatgcaactttagaccg

SEQ ID NO: 225868 - DNA, 25 bp, Artificial
  probe
  misc_feature (1)..(25): SEQ ID NO: 6395; WAN024FYB_at; Start 1200; Stop 1224
gagagaagttcctattctaggttca

SEQ ID NO: 225869 - DNA, 25 bp, Artificial
  probe
  misc_feature (1)..(25): SEQ ID NO: 6395; WAN024FYB_at; Start 1293; Stop 1317
cgtatcacctatgataaatgtaggg

SEQ ID NO: 225870 - DNA, 25 bp, Artificial
  probe
  misc_feature (1)..(25): SEQ ID NO: 6395; WAN024FYB_at; Start 1110; Stop 1134
taaactcggatatataggagcggca

SEQ ID NO: 225871 - DNA, 25 bp, Artificial
  probe
  misc_feature (1)..(25): SEQ ID NO: 6395; WAN024FYB_at; Start 250; Stop 274
caatttggtgcaacatcattatcaa

SEQ ID NO: 225872 - DNA, 25 bp, Artificial
  probe
  misc_feature (1)..(25): SEQ ID NO: 6395; WAN024FYB_at; Start 1063; Stop 1087
actgtgcctgcaattcttagtgttg

SEQ ID NO: 225873 - DNA, 25 bp, Artificial
  probe
  misc_feature (1)..(25): SEQ ID NO: 6395; WAN024FYB_at; Start 749; Stop 773
ctgtagtaacttcgttaggaagtgt

SEQ ID NO: 225874 - DNA, 25 bp, Artificial
  probe
  misc_feature (1)..(25): SEQ ID NO: 6395; WAN024FYB_at; Start 652; Stop 676
tatgcaactttagaccgtacgatgt

SEQ ID NO: 225875 - DNA, 25 bp, Artificial
  probe
  misc_feature (1)..(25): SEQ ID NO: 6395; WAN024FYB_at; Start 417; Stop 441
cagaaacatattagtgaagctcgtt

SEQ ID NO: 225876 - DNA, 25 bp, Artificial
  probe
  misc_feature (1)..(25): SEQ ID NO: 6395; WAN024FYB_at; Start 666; Stop 690
ccgtacgatgttaggaatgatatca

SEQ ID NO: 225877 - DNA, 25 bp, Artificial
  probe
  misc_feature (1)..(25): SEQ ID NO: 6395; WAN024FYB_at; Start 461; Stop 485
tattgataaaatcagcgaatgatct

SEQ ID NO: 225878 - DNA, 25 bp, Artificial
  probe
  misc_feature (1)..(25): SEQ ID NO: 6395; WAN024FYB_at; Start 322; Stop 346
cctgttgcgtatatattaggaatga

SEQ ID NO: 225879 - DNA, 25 bp, Artificial
  probe
  misc_feature (1)..(25): SEQ ID NO: 6395; WAN024FYB_at; Start 1240; Stop 1264
gtttcatcgggatttatgtatgtca

SEQ ID NO: 225880 - DNA, 25 bp, Artificial
  probe
  misc_feature (1)..(25): SEQ ID NO: 6395; WAN024FYB_at; Start 627; Stop 651
tctccctcagattgctatatcacta

SEQ ID NO: 225881 - DNA, 25 bp, Artificial
  probe
  misc_feature (1)..(25): SEQ ID NO: 6395; WAN024FYB_at; Start 177; Stop 201
tagctatgggactaaggagatttcg

SEQ ID NO: 225882 - DNA, 25 bp, Artificial
  probe
  misc_feature (1)..(25): SEQ ID NO: 6395; WAN024FYB_at; Start 684; Stop 708
gatatcatctacaaatgatgtcggg

SEQ ID NO: 225883 - DNA, 25 bp, Artificial
  probe
  misc_feature (1)..(25): SEQ ID NO: 6395; WAN024FYB_at; Start 307; Stop 331
tacataatgagaaatcctgttgcgt

SEQ ID NO: 225884 - DNA, 25 bp, Artificial
  probe
  misc_feature (1)..(25): SEQ ID NO: 6395; WAN024FYB_at; Start 236; Stop 260
ggatatatactcttcaatttggtgc

SEQ ID NO: 225885 - DNA, 25 bp, Artificial
  probe
  misc_feature (1)..(25): SEQ ID NO: 6395; WAN024FYB_at; Start 1048; Stop 1072
tatatgatctcaacaactgtgcctg

SEQ ID NO: 225886 - DNA, 25 bp, Artificial
  probe
  misc_feature (1)..(25): SEQ ID NO: 6395; WAN024FYB_at; Start 786; Stop 810
agtatctaatctcttggcgacaggg

SEQ ID NO: 225887 - DNA, 25 bp, Artificial
  probe
  misc_feature (1)..(25): SEQ ID NO: 6395; WAN024FYB_at; Start 768; Stop 792
aagtgtcatgttgccgagagtatct

SEQ ID NO: 225888 - DNA, 25 bp, Artificial
  probe
  misc_feature (1)..(25): SEQ ID NO: 6395; WAN024FYB_at; Start 549; Stop 573
tgctcgaaagtttattggaaaacca

SEQ ID NO: 225889 - DNA, 25 bp, Artificial
  probe
  misc_feature (1)..(25): SEQ ID NO: 6395; WAN024FYB_at; Start 1277; Stop 1301
taaaacatcttctgaacgtatcacc

SEQ ID NO: 225890 - DNA, 25 bp, Artificial
  probe
  misc_feature (1)..(25): SEQ ID NO: 6395; WAN024FYB_at; Start 100; Stop 124
gcaaaggatcttggaacatatggat

SEQ ID NO: 225891 - DNA, 25 bp, Artificial
  probe
  misc_feature (1)..(25): SEQ ID NO: 6395; WAN024FYB_at; Start 432; Stop 456
gaagctcgttggtgtaatttcaata

SEQ ID NO: 225892 - DNA, 25 bp, Artificial
  probe
  misc_feature (1)..(25): SEQ ID NO: 6395; WAN024FYB_at; Start 402; Stop 426
tcgtaagattatagtcagaaacata

SEQ ID NO: 225893 - DNA, 25 bp, Artificial
  probe
  misc_feature (1)..(25): SEQ ID NO: 6395; WAN024FYB_at; Start 19; Stop 43
tacgcgtataacctctcttatcaat

SEQ ID NO: 225894 - DNA, 25 bp, Artificial
  probe
  misc_feature (1)..(25): SEQ ID NO: 6395; WAN024FYB_at; Start 699; Stop 723
tgatgtcgggatctatgatcaagca

SEQ ID NO: 225895 - DNA, 25 bp, Artificial
  probe
  misc_feature (1)..(25): SEQ ID NO: 6395; WAN024FYB_at; Start 199; Stop 223
tcgagtaatagaaaaaatatcccga

SEQ ID NO: 225896 - DNA, 25 bp, Artificial
  probe
  misc_feature (1)..(25): SEQ ID NO: 6395; WAN024FYB_at; Start 1007; Stop 1031
tgggatttcaaatgctaatcgtaca

SEQ ID NO: 225897 - DNA, 25 bp, Artificial
  probe
  misc_feature (1)..(25): SEQ ID NO: 6395; WAN024FYB_at; Start 1314; Stop 1338
agggatttatgctgttctgggagca

SEQ ID NO: 225898 - DNA, 25 bp, Artificial
  probe
  misc_feature (1)..(25): SEQ ID NO: 6395; WAN024FYB_at; Start 83; Stop 107
tgacacgggtattttctgcaaagga

SEQ ID NO: 225899 - DNA, 25 bp, Artificial
  probe
  misc_feature (1)..(25): SEQ ID NO: 6395; WAN024FYB_at; Start 801; Stop 825
ggcgacagggaatcataaggcagtt

SEQ ID NO: 225900 - DNA, 25 bp, Artificial
  probe
  misc_feature (1)..(25): SEQ ID NO: 6395; WAN024FYB_at; Start 537; Stop 561
tatgtggttacctgctcgaaagttt

SEQ ID NO: 225901 - DNA, 25 bp, Artificial
  probe
  misc_feature (1)..(25): SEQ ID NO: 6357; WAN024FYC_at; Start 551; Stop 575
ctcgagaatttattggtagagatca

SEQ ID NO: 225902 - DNA, 25 bp, Artificial
  probe
  misc_feature (1)..(25): SEQ ID NO: 6357; WAN024FYC_at; Start 774; Stop 798
tatgttacctcgtgttgcgcatctg

SEQ ID NO: 225903 - DNA, 25 bp, Artificial
  probe
  misc_feature (1)..(25): SEQ ID NO: 6357; WAN024FYC_at; Start 90; Stop 114
agtcttttcttcgtatgctttaggg

SEQ ID NO: 225904 - DNA, 25 bp, Artificial
  probe
  misc_feature (1)..(25): SEQ ID NO: 6357; WAN024FYC_at; Start 276; Stop 300
gtccttatacgttgttctttgtcta

SEQ ID NO: 225905 - DNA, 25 bp, Artificial
  probe
  misc_feature (1)..(25): SEQ ID NO: 6357; WAN024FYC_at; Start 460; Stop 484
ctttttgtcaaatctgaaagtgacc

SEQ ID NO: 225906 - DNA, 25 bp, Artificial
  probe
  misc_feature (1)..(25): SEQ ID NO: 6357; WAN024FYC_at; Start 874; Stop 898
ccagtgatagtagtgattttgattg

SEQ ID NO: 225907 - DNA, 25 bp, Artificial
  probe
  misc_feature (1)..(25): SEQ ID NO: 6357; WAN024FYC_at; Start 1087; Stop 1111
ggtttaaacttgctattcctgccaa

SEQ ID NO: 225908 - DNA, 25 bp, Artificial
  probe
  misc_feature (1)..(25): SEQ ID NO: 6357; WAN024FYC_at; Start 786; Stop 810
tgttgcgcatctgctatccaaaggg

SEQ ID NO: 225909 - DNA, 25 bp, Artificial
  probe
  misc_feature (1)..(25): SEQ ID NO: 6357; WAN024FYC_at; Start 955; Stop 979
gcaattgccatcatgatttttcgga

SEQ ID NO: 225910 - DNA, 25 bp, Artificial
  probe
  misc_feature (1)..(25): SEQ ID NO: 6357; WAN024FYC_at; Start 580; Stop 604
gatatagcatatgttagacatcatt

SEQ ID NO: 225911 - DNA, 25 bp, Artificial
  probe
  misc_feature (1)..(25): SEQ ID NO: 6357; WAN024FYC_at; Start 307; Stop 331
tctttgatgcaaaatccagtcgcct

SEQ ID NO: 225912 - DNA, 25 bp, Artificial
  probe
  misc_feature (1)..(25): SEQ ID NO: 6357; WAN024FYC_at; Start 565; Stop 589
ggtagagatcattttgatatagcat

SEQ ID NO: 225913 - DNA, 25 bp, Artificial
  probe
  misc_feature (1)..(25): SEQ ID NO: 6357; WAN024FYC_at; Start 100; Stop 124
tcgtatgctttagggacttatggtt

SEQ ID NO: 225914 - DNA, 25 bp, Artificial
  probe
  misc_feature (1)..(25): SEQ ID NO: 6357; WAN024FYC_at; Start 295; Stop 319
tgtctaactctttctttgatgcaaa

SEQ ID NO: 225915 - DNA, 25 bp, Artificial
  probe
  misc_feature (1)..(25): SEQ ID NO: 6357; WAN024FYC_at; Start 475; Stop 499
gaaagtgacctttatctctatatct

SEQ ID NO: 225916 - DNA, 25 bp, Artificial
  probe
  misc_feature (1)..(25): SEQ ID NO: 6357; WAN024FYC_at; Start 239; Stop 263
tctactccctgcaattgtgtgcggc

SEQ ID NO: 225917 - DNA, 25 bp, Artificial
  probe
  misc_feature (1)..(25): SEQ ID NO: 6357; WAN024FYC_at; Start 542; Stop 566
ggttgcctgctcgagaatttattgg

SEQ ID NO: 225918 - DNA, 25 bp, Artificial
  probe
  misc_feature (1)..(25): SEQ ID NO: 6357; WAN024FYC_at; Start 968; Stop 992
tgatttttcggatgttctttatcgg

SEQ ID NO: 225919 - DNA, 25 bp, Artificial
  probe
  misc_feature (1)..(25): SEQ ID NO: 6357; WAN024FYC_at; Start 735; Stop 759
caatatccttatgaccctggtaact

SEQ ID NO: 225920 - DNA, 25 bp, Artificial
  probe
  misc_feature (1)..(25): SEQ ID NO: 6357; WAN024FYC_at; Start 813; Stop 837
acaaaaagcggttaataaaatgcat

SEQ ID NO: 225921 - DNA, 25 bp, Artificial
  probe
  misc_feature (1)..(25): SEQ ID NO: 6357; WAN024FYC_at; Start 1104; Stop 1128
cctgccaaagtttggttatatcggg

SEQ ID NO: 225922 - DNA, 25 bp, Artificial
  probe
  misc_feature (1)..(25): SEQ ID NO: 6357; WAN024FYC_at; Start 251; Stop 275
aattgtgtgcggcagttctgtctct

SEQ ID NO: 225923 - DNA, 25 bp, Artificial
  probe
  misc_feature (1)..(25): SEQ ID NO: 6357; WAN024FYC_at; Start 414; Stop 438
tgttcgaaatatcacggttaaactg

SEQ ID NO: 225924 - DNA, 25 bp, Artificial
  probe
  misc_feature (1)..(25): SEQ ID NO: 6357; WAN024FYC_at; Start 721; Stop 745
gctctaaagttggtcaatatcctta

SEQ ID NO: 225925 - DNA, 25 bp, Artificial
  probe
  misc_feature (1)..(25): SEQ ID NO: 6357; WAN024FYC_at; Start 863; Stop 887
tagtgatttttccagtgatagtagt

SEQ ID NO: 225926 - DNA, 25 bp, Artificial
  probe
  misc_feature (1)..(25): SEQ ID NO: 6357; WAN024FYC_at; Start 1095; Stop 1119
cttgctattcctgccaaagtttggt

SEQ ID NO: 225927 - DNA, 25 bp, Artificial
  probe
  misc_feature (1)..(25): SEQ ID NO: 6357; WAN024FYC_at; Start 744; Stop 768
tatgaccctggtaacttctttggga

SEQ ID NO: 225928 - DNA, 25 bp, Artificial
  probe
  misc_feature (1)..(25): SEQ ID NO: 6357; WAN024FYC_at; Start 432; Stop 456
taaactgataggtgtaatctctatc

SEQ ID NO: 225929 - DNA, 25 bp, Artificial
  probe
  misc_feature (1)..(25): SEQ ID NO: 6357; WAN024FYC_at; Start 426; Stop 450
cacggttaaactgataggtgtaatc

SEQ ID NO: 225930 - DNA, 25 bp, Artificial
  probe
  misc_feature (1)..(25): SEQ ID NO: 6357; WAN024FYC_at; Start 262; Stop 286
gcagttctgtctctgtccttatacg

SEQ ID NO: 225931 - DNA, 25 bp, Artificial
  probe
  misc_feature (1)..(25): SEQ ID NO: 6357; WAN024FYC_at; Start 648; Stop 672
tatgtatattacgttagatcgtacc

SEQ ID NO: 225932 - DNA, 25 bp, Artificial
  probe
  misc_feature (1)..(25): SEQ ID NO: 6357; WAN024FYC_at; Start 760; Stop 784
tctttgggaagcgttatgttacctc

SEQ ID NO: 225933 - DNA, 25 bp, Artificial
  probe
  misc_feature (1)..(25): SEQ ID NO: 6357; WAN024FYC_at; Start 627; Stop 651
ccttcctcaagtagctatttctatg

SEQ ID NO: 225934 - DNA, 25 bp, Artificial
  probe
  misc_feature (1)..(25): SEQ ID NO: 6357; WAN024FYC_at; Start 235; Stop 259
ggaatctactccctgcaattgtgtg

SEQ ID NO: 225935 - DNA, 25 bp, Artificial
  probe
  misc_feature (1)..(25): SEQ ID NO: 6394; WAN024FYD_at; Start 137; Stop 161
tagttacttactttattttgctggc

SEQ ID NO: 225936 - DNA, 25 bp, Artificial
  probe
  misc_feature (1)..(25): SEQ ID NO: 6394; WAN024FYD_at; Start 1073; Stop 1097
ccattattagcgttggattgaatct

SEQ ID NO: 225937 - DNA, 25 bp, Artificial
  probe
  misc_feature (1)..(25): SEQ ID NO: 6394; WAN024FYD_at; Start 712; Stop 736
tacgatcaagccctaaaattggtaa

SEQ ID NO: 225938 - DNA, 25 bp, Artificial
  probe
  misc_feature (1)..(25): SEQ ID NO: 6394; WAN024FYD_at; Start 541; Stop 565
tggttgccggctcgagactttatcg

SEQ ID NO: 225939 - DNA, 25 bp, Artificial
  probe
  misc_feature (1)..(25): SEQ ID NO: 6394; WAN024FYD_at; Start 785; Stop 809
gagtatctcatctgcttgcgacagg

SEQ ID NO: 225940 - DNA, 25 bp, Artificial
  probe
  misc_feature (1)..(25): SEQ ID NO: 6394; WAN024FYD_at; Start 891; Stop 915
tctgatcgtgaatgatgatttcgtt

SEQ ID NO: 225941 - DNA, 25 bp, Artificial
  probe
  misc_feature (1)..(25): SEQ ID NO: 6394; WAN024FYD_at; Start 430; Stop 454
gtcaaactcgttggtgtcatctcca

SEQ ID NO: 225942 - DNA, 25 bp, Artificial
  probe
  misc_feature (1)..(25): SEQ ID NO: 6394; WAN024FYD_at; Start 574; Stop 598
catgttgatatagaatacgccagac

SEQ ID NO: 225943 - DNA, 25 bp, Artificial
  probe
  misc_feature (1)..(25): SEQ ID NO: 6394; WAN024FYD_at; Start 946; Stop 970
gcacgctatgcaattgcgattatgg

SEQ ID NO: 225944 - DNA, 25 bp, Artificial
  probe
  misc_feature (1)..(25): SEQ ID NO: 6394; WAN024FYD_at; Start 795; Stop 819
tctgcttgcgacaggtgaacgtaag

SEQ ID NO: 225945 - DNA, 25 bp, Artificial
  probe
  misc_feature (1)..(25): SEQ ID NO: 6394; WAN024FYD_at; Start 620; Stop 644
tattgttcctaccacaagtcgcgat

SEQ ID NO: 225946 - DNA, 25 bp, Artificial
  probe
  misc_feature (1)..(25): SEQ ID NO: 6394; WAN024FYD_at; Start 156; Stop 180
gctggctagtcttggcgttgctaac

SEQ ID NO: 225947 - DNA, 25 bp, Artificial
  probe
  misc_feature (1)..(25): SEQ ID NO: 6394; WAN024FYD_at; Start 323; Stop 347
tagtagcctacattcttggattgag

SEQ ID NO: 225948 - DNA, 25 bp, Artificial
  probe
  misc_feature (1)..(25): SEQ ID NO: 6394; WAN024FYD_at; Start 821; Stop 845
cagtaaacaagatgcatgagatgtc

SEQ ID NO: 225949 - DNA, 25 bp, Artificial
  probe
  misc_feature (1)..(25): SEQ ID NO: 6394; WAN024FYD_at; Start 250; Stop 274
caaatgggtgcaacgcttctttctc

SEQ ID NO: 225950 - DNA, 25 bp, Artificial
  probe
  misc_feature (1)..(25): SEQ ID NO: 6394; WAN024FYD_at; Start 556; Stop 580
gactttatcggcaagtttcatgttg

SEQ ID NO: 225951 - DNA, 25 bp, Artificial
  probe
  misc_feature (1)..(25): SEQ ID NO: 6394; WAN024FYD_at; Start 1106; Stop 1130
tacccaagttaggttatataggagc

SEQ ID NO: 225952 - DNA, 25 bp, Artificial
  probe
  misc_feature (1)..(25): SEQ ID NO: 6394; WAN024FYD_at; Start 589; Stop 613
tacgccagacagcatttgaagccaa

SEQ ID NO: 225953 - DNA, 25 bp, Artificial
  probe
  misc_feature (1)..(25): SEQ ID NO: 6394; WAN024FYD_at; Start 236; Stop 260
ggatttactcattgcaaatgggtgc

SEQ ID NO: 225954 - DNA, 25 bp, Artificial
  probe
  misc_feature (1)..(25): SEQ ID NO: 6394; WAN024FYD_at; Start 771; Stop 795
tgttatgctgccacgagtatctcat

SEQ ID NO: 225955 - DNA, 25 bp, Artificial
  probe
  misc_feature (1)..(25): SEQ ID NO: 6394; WAN024FYD_at; Start 1060; Stop 1084
acaacagctccagccattattagcg

SEQ ID NO: 225956 - DNA, 25 bp, Artificial
  probe
  misc_feature (1)..(25): SEQ ID NO: 6394; WAN024FYD_at; Start 1151; Stop 1175
cagaggcgctagtttgggtaattca

SEQ ID NO: 225957 - DNA, 25 bp, Artificial
  probe
  misc_feature (1)..(25): SEQ ID NO: 6394; WAN024FYD_at; Start 961; Stop 985
gcgattatggttctcaggatgttct

SEQ ID NO: 225958 - DNA, 25 bp, Artificial
  probe
  misc_feature (1)..(25): SEQ ID NO: 6394; WAN024FYD_at; Start 926; Stop 950
taggacaagattttcaagatgcacg

SEQ ID NO: 225959 - DNA, 25 bp, Artificial
  probe
  misc_feature (1)..(25): SEQ ID NO: 6394; WAN024FYD_at; Start 911; Stop 935
tcgttcagttatttctaggacaaga

SEQ ID NO: 225960 - DNA, 25 bp, Artificial
  probe
  misc_feature (1)..(25): SEQ ID NO: 6394; WAN024FYD_at; Start 697; Stop 721
aaagacgttggcatctacgatcaag

SEQ ID NO: 225961 - DNA, 25 bp, Artificial
  probe
  misc_feature (1)..(25): SEQ ID NO: 6394; WAN024FYD_at; Start 679; Stop 703
ggagcgcttgcttctacaaaagacg

SEQ ID NO: 225962 - DNA, 25 bp, Artificial
  probe
  misc_feature (1)..(25): SEQ ID NO: 6394; WAN024FYD_at; Start 636; Stop 660
agtcgcgatttctttgtatgttacc

SEQ ID NO: 225963 - DNA, 25 bp, Artificial
  probe
  misc_feature (1)..(25): SEQ ID NO: 6394; WAN024FYD_at; Start 465; Stop 489
tgtcaaatctgcaaacgatctttat

SEQ ID NO: 225964 - DNA, 25 bp, Artificial
  probe
  misc_feature (1)..(25): SEQ ID NO: 6394; WAN024FYD_at; Start 1004; Stop 1028
taatgggaactcagatgttgatccc

SEQ ID NO: 225965 - DNA, 25 bp, Artificial
  probe
  misc_feature (1)..(25): SEQ ID NO: 6394; WAN024FYD_at; Start 806; Stop 830
caggtgaacgtaaggcagtaaacaa

SEQ ID NO: 225966 - DNA, 25 bp, Artificial
  probe
  misc_feature (1)..(25): SEQ ID NO: 6394; WAN024FYD_at; Start 1092; Stop 1116
gaatctattattcctacccaagtta

SEQ ID NO: 225967 - DNA, 25 bp, Artificial
  probe
  misc_feature (1)..(25): SEQ ID NO: 6394; WAN024FYD_at; Start 744; Stop 768
tctaacctttgtaacttcattggga

SEQ ID NO: 225968 - DNA, 25 bp, Artificial
  probe
  misc_feature (1)..(25): SEQ ID NO: 6394; WAN024FYD_at; Start 110; Stop 134
tagggacatacggatactttagttc

SEQ ID NO: 225969 - DNA, 25 bp, Artificial
  probe
  misc_feature (1)..(25): SEQ ID NO: 924; WAN024FYE_at; Start 1242; Stop 1266
ctcatctggagttatgtatggtatc

SEQ ID NO: 225970 - DNA, 25 bp, Artificial
  probe
  misc_feature (1)..(25): SEQ ID NO: 924; WAN024FYE_at; Start 1318; Stop 1342
ctatatgctattctgggagcaatga

SEQ ID NO: 225971 - DNA, 25 bp, Artificial
  probe
  misc_feature (1)..(25): SEQ ID NO: 924; WAN024FYE_at; Start 675; Stop 699
gcttggttctctatcttcaattaga

SEQ ID NO: 225972 - DNA, 25 bp, Artificial
  probe
  misc_feature (1)..(25): SEQ ID NO: 924; WAN024FYE_at; Start 186; Stop 210
tacaaaggtaatttcaggacatcgt

SEQ ID NO: 225973 - DNA, 25 bp, Artificial
  probe
  misc_feature (1)..(25): SEQ ID NO: 924; WAN024FYE_at; Start 19; Stop 43
tatgcctacaacctttcttatcagt

SEQ ID NO: 225974 - DNA, 25 bp, Artificial
  probe
  misc_feature (1)..(25): SEQ ID NO: 924; WAN024FYE_at; Start 181; Stop 205
tatggtacaaaggtaatttcaggac

SEQ ID NO: 225975 - DNA, 25 bp, Artificial
  probe
  misc_feature (1)..(25): SEQ ID NO: 924; WAN024FYE_at; Start 199; Stop 223
tcaggacatcgtaaaaacattgaaa

SEQ ID NO: 225976 - DNA, 25 bp, Artificial
  probe
  misc_feature (1)..(25): SEQ ID NO: 924; WAN024FYE_at; Start 1151; Stop 1175
cagaggtactagtatggctgataca

SEQ ID NO: 225977 - DNA, 25 bp, Artificial
  probe
  misc_feature (1)..(25): SEQ ID NO: 924; WAN024FYE_at; Start 1200; Stop 1224
gagagaggtgcccattctaggttca

SEQ ID NO: 225978 - DNA, 25 bp, Artificial
  probe
  misc_feature (1)..(25): SEQ ID NO: 924; WAN024FYE_at; Start 1226; Stop 1250
tgatcaaaattataatctcatctgg

SEQ ID NO: 225979 - DNA, 25 bp, Artificial
  probe
  misc_feature (1)..(25): SEQ ID NO: 924; WAN024FYE_at; Start 1313; Stop 1337
tgggactatatgctattctgggagc

SEQ ID NO: 225980 - DNA, 25 bp, Artificial
  probe
  misc_feature (1)..(25): SEQ ID NO: 924; WAN024FYE_at; Start 245; Stop 269
cgttacaattaggtgcgacagttct

SEQ ID NO: 225981 - DNA, 25 bp, Artificial
  probe
  misc_feature (1)..(25): SEQ ID NO: 924; WAN024FYE_at; Start 99; Stop 123
ttcggatgatttaggatcatatggt

SEQ ID NO: 225982 - DNA, 25 bp, Artificial
  probe
  misc_feature (1)..(25): SEQ ID NO: 924; WAN024FYE_at; Start 308; Stop 332
cttttatgaaaaatccaacagccta

SEQ ID NO: 225983 - DNA, 25 bp, Artificial
  probe
  misc_feature (1)..(25): SEQ ID NO: 924; WAN024FYE_at; Start 339; Stop 363
tggattgagtttaatatcaaaaggc

SEQ ID NO: 225984 - DNA, 25 bp, Artificial
  probe
  misc_feature (1)..(25): SEQ ID NO: 924; WAN024FYE_at; Start 1159; Stop 1183
ctagtatggctgatacagttattct

SEQ ID NO: 225985 - DNA, 25 bp, Artificial
  probe
  misc_feature (1)..(25): SEQ ID NO: 924; WAN024FYE_at; Start 685; Stop 709
ctatcttcaattagagatgtaggaa

SEQ ID NO: 225986 - DNA, 25 bp, Artificial
  probe
  misc_feature (1)..(25): SEQ ID NO: 924; WAN024FYE_at; Start 1278; Stop 1302
aaaacaattcctaaatgtatcaccg

SEQ ID NO: 225987 - DNA, 25 bp, Artificial
  probe
  misc_feature (1)..(25): SEQ ID NO: 924; WAN024FYE_at; Start 259; Stop 283
gcgacagttctttcactgttattct

SEQ ID NO: 225988 - DNA, 25 bp, Artificial
  probe
  misc_feature (1)..(25): SEQ ID NO: 924; WAN024FYE_at; Start 1298; Stop 1322
caccgataatcaatgtgggactata

SEQ ID NO: 225989 - DNA, 25 bp, Artificial
  probe
  misc_feature (1)..(25): SEQ ID NO: 924; WAN024FYE_at; Start 1144; Stop 1168
gttttaacagaggtactagtatggc

SEQ ID NO: 225990 - DNA, 25 bp, Artificial
  probe
  misc_feature (1)..(25): SEQ ID NO: 924; WAN024FYE_at; Start 1209; Stop 1233
gcccattctaggttcattgatcaaa

SEQ ID NO: 225991 - DNA, 25 bp, Artificial
  probe
  misc_feature (1)..(25): SEQ ID NO: 924; WAN024FYE_at; Start 293; Stop 317
tatgtctctctatatcttttatgaa

SEQ ID NO: 225992 - DNA, 25 bp, Artificial
  probe
  misc_feature (1)..(25): SEQ ID NO: 924; WAN024FYE_at; Start 278; Stop 302
tattctatgtcattctatgtctctc

SEQ ID NO: 225993 - DNA, 25 bp, Artificial
  probe
  misc_feature (1)..(25): SEQ ID NO: 924; WAN024FYE_at; Start 353; Stop 377
tatcaaaaggcttggatatttcctg

SEQ ID NO: 225994 - DNA, 25 bp, Artificial
  probe
  misc_feature (1)..(25): SEQ ID NO: 924; WAN024FYE_at; Start 1192; Stop 1216
tcttatttgagagaggtgcccattc

SEQ ID NO: 225995 - DNA, 25 bp, Artificial
  probe
  misc_feature (1)..(25): SEQ ID NO: 924; WAN024FYE_at; Start 121; Stop 145
ggttatttcaattcgatagtgactt

SEQ ID NO: 225996 - DNA, 25 bp, Artificial
  probe
  misc_feature (1)..(25): SEQ ID NO: 924; WAN024FYE_at; Start 40; Stop 64
cagttgttgataattatactcccta

SEQ ID NO: 225997 - DNA, 25 bp, Artificial
  probe
  misc_feature (1)..(25): SEQ ID NO: 924; WAN024FYE_at; Start 147; Stop 171
ttttatcttgttagcaacacttggg

SEQ ID NO: 225998 - DNA, 25 bp, Artificial
  probe
  misc_feature (1)..(25): SEQ ID NO: 924; WAN024FYE_at; Start 1293; Stop 1317
tgtatcaccgataatcaatgtggga

SEQ ID NO: 225999 - DNA, 25 bp, Artificial
  probe
  misc_feature (1)..(25): SEQ ID NO: 924; WAN024FYE_at; Start 234; Stop 258
gggcatctattcgttacaattaggt

SEQ ID NO: 226000 - DNA, 25 bp, Artificial
  probe
  misc_feature (1)..(25): SEQ ID NO: 924; WAN024FYE_at; Start 840; Stop 864
gatgtcatttctggtttataacttg

SEQ ID NO: 226001 - DNA, 25 bp, Artificial
  probe
  misc_feature (1)..(25): SEQ ID NO: 924; WAN024FYE_at; Start 112; Stop 136
ggatcatatggttatttcaattcga

SEQ ID NO: 226002 - DNA, 25 bp, Artificial
  probe
  misc_feature (1)..(25): SEQ ID NO: 924; WAN024FYE_at; Start 323; Stop 347
caacagcctatattcttggattgag

SEQ ID NO: 226003 - DNA, 25 bp, Artificial
  probe
  misc_feature (1)..(25): SEQ ID NO: 920; WAN024FYF_at; Start 577; Stop 601
tttgatttaagctatgcaaagcagc

SEQ ID NO: 226004 - DNA, 25 bp, Artificial
  probe
  misc_feature (1)..(25): SEQ ID NO: 920; WAN024FYF_at; Start 1080; Stop 1104
cagtgtaggattaaacatgcttttc

SEQ ID NO: 226005 - DNA, 25 bp, Artificial
  probe
  misc_feature (1)..(25): SEQ ID NO: 920; WAN024FYF_at; Start 828; Stop 852
taagatgcatgaaatgtccttcctc

SEQ ID NO: 226006 - DNA, 25 bp, Artificial
  probe
  misc_feature (1)..(25): SEQ ID NO: 920; WAN024FYF_at; Start 522; Stop 546
gttgggacagttaagcatgtggtta

SEQ ID NO: 226007 - DNA, 25 bp, Artificial
  probe
  misc_feature (1)..(25): SEQ ID NO: 920; WAN024FYF_at; Start 22; Stop 46
gcctataacctctcctatcaactat

SEQ ID NO: 226008 - DNA, 25 bp, Artificial
  probe
  misc_feature (1)..(25): SEQ ID NO: 920; WAN024FYF_at; Start 1191; Stop 1215
cagatatctcaaagaagttcctatc

SEQ ID NO: 226009 - DNA, 25 bp, Artificial
  probe
  misc_feature (1)..(25): SEQ ID NO: 920; WAN024FYF_at; Start 589; Stop 613
tatgcaaagcagcatctgaagccaa

SEQ ID NO: 226010 - DNA, 25 bp, Artificial
  probe
  misc_feature (1)..(25): SEQ ID NO: 920; WAN024FYF_at; Start 1363; Stop 1387
tctatgaaagtaatagatgtgaaag

SEQ ID NO: 226011 - DNA, 25 bp, Artificial
  probe
  misc_feature (1)..(25): SEQ ID NO: 920; WAN024FYF_at; Start 1010; Stop 1034
gaattcagattttaattccccataa

SEQ ID NO: 226012 - DNA, 25 bp, Artificial
  probe
  misc_feature (1)..(25): SEQ ID NO: 920; WAN024FYF_at; Start 800; Stop 824
tagcaacaggtgattacaaagctgt

SEQ ID NO: 226013 - DNA, 25 bp, Artificial
  probe
  misc_feature (1)..(25): SEQ ID NO: 920; WAN024FYF_at; Start 1110; Stop 1134
aaagcttggctatattggagcagcc

SEQ ID NO: 226014 - DNA, 25 bp, Artificial
  probe
  misc_feature (1)..(25): SEQ ID NO: 920; WAN024FYF_at; Start 816; Stop 840
caaagctgttaataagatgcatgaa

SEQ ID NO: 226015 - DNA, 25 bp, Artificial
  probe
  misc_feature (1)..(25): SEQ ID NO: 920; WAN024FYF_at; Start 1114; Stop 1138
cttggctatattggagcagccattg

SEQ ID NO: 226016 - DNA, 25 bp, Artificial
  probe
  misc_feature (1)..(25): SEQ ID NO: 920; WAN024FYF_at; Start 152; Stop 176
ttcttttagcaactttaggagttgc

SEQ ID NO: 226017 - DNA, 25 bp, Artificial
  probe
  misc_feature (1)..(25): SEQ ID NO: 920; WAN024FYF_at; Start 465; Stop 489
tataaaatcagctagtgacctttac

SEQ ID NO: 226018 - DNA, 25 bp, Artificial
  probe
  misc_feature (1)..(25): SEQ ID NO: 920; WAN024FYF_at; Start 638; Stop 662
tagcgatctccttatatgttactct

SEQ ID NO: 226019 - DNA, 25 bp, Artificial
  probe
  misc_feature (1)..(25): SEQ ID NO: 920; WAN024FYF_at; Start 767; Stop 791
ggagtgttatgttacctcgagttgc

SEQ ID NO: 226020 - DNA, 25 bp, Artificial
  probe
  misc_feature (1)..(25): SEQ ID NO: 920; WAN024FYF_at; Start 790; Stop 814
gctaatttattagcaacaggtgatt

SEQ ID NO: 226021 - DNA, 25 bp, Artificial
  probe
  misc_feature (1)..(25): SEQ ID NO: 920; WAN024FYF_at; Start 623; Stop 647
tattccttcctcaggtagcgatctc

SEQ ID NO: 226022 - DNA, 25 bp, Artificial
  probe
  misc_feature (1)..(25): SEQ ID NO: 920; WAN024FYF_at; Start 779; Stop 803
tacctcgagttgctaatttattagc

SEQ ID NO: 226023 - DNA, 25 bp, Artificial
  probe
  misc_feature (1)..(25): SEQ ID NO: 920; WAN024FYF_at; Start 597; Stop 621
gcagcatctgaagccaattgtttta

SEQ ID NO: 226024 - DNA, 25 bp, Artificial
  probe
  misc_feature (1)..(25): SEQ ID NO: 920; WAN024FYF_at; Start 1095; Stop 1119
catgcttttcctaccaaagcttggc

SEQ ID NO: 226025 - DNA, 25 bp, Artificial
  probe
  misc_feature (1)..(25): SEQ ID NO: 920; WAN024FYF_at; Start 879; Stop 903
tatggctggaattttgattgtgaat

SEQ ID NO: 226026 - DNA, 25 bp, Artificial
  probe
  misc_feature (1)..(25): SEQ ID NO: 920; WAN024FYF_at; Start 431; Stop 455
tgaaactcgtaggtgtaagttcgat

SEQ ID NO: 226027 - DNA, 25 bp, Artificial
  probe
  misc_feature (1)..(25): SEQ ID NO: 920; WAN024FYF_at; Start 537; Stop 561
catgtggttacccgctcgggaattt

SEQ ID NO: 226028 - DNA, 25 bp, Artificial
  probe
  misc_feature (1)..(25): SEQ ID NO: 920; WAN024FYF_at; Start 1204; Stop 1228
gaagttcctatcatagtatctatga

SEQ ID NO: 226029 - DNA, 25 bp, Artificial
  probe
  misc_feature (1)..(25): SEQ ID NO: 920; WAN024FYF_at; Start 246; Stop 270
cctgcaattgggtgcgacagttctt

SEQ ID NO: 226030 - DNA, 25 bp, Artificial
  probe
  misc_feature (1)..(25): SEQ ID NO: 920; WAN024FYF_at; Start 402; Stop 426
tcgtaagattacagcaagaaatatc

SEQ ID NO: 226031 - DNA, 25 bp, Artificial
  probe
  misc_feature (1)..(25): SEQ ID NO: 920; WAN024FYF_at; Start 425; Stop 449
tcattgtgaaactcgtaggtgtaag

SEQ ID NO: 226032 - DNA, 25 bp, Artificial
  probe
  misc_feature (1)..(25): SEQ ID NO: 920; WAN024FYF_at; Start 863; Stop 887
tagtgatttttccaattatggctgg

SEQ ID NO: 226033 - DNA, 25 bp, Artificial
  probe
  misc_feature (1)..(25): SEQ ID NO: 920; WAN024FYF_at; Start 1345; Stop 1369
tacctttttgcaattttatctatga

SEQ ID NO: 226034 - DNA, 25 bp, Artificial
  probe
  misc_feature (1)..(25): SEQ ID NO: 920; WAN024FYF_at; Start 237; Stop 261
gatttactccctgcaattgggtgcg

SEQ ID NO: 226035 - DNA, 25 bp, Artificial
  probe
  misc_feature (1)..(25): SEQ ID NO: 920; WAN024FYF_at; Start 509; Stop 533
caatatttgagttgttgggacagtt

SEQ ID NO: 226036 - DNA, 25 bp, Artificial
  probe
  misc_feature (1)..(25): SEQ ID NO: 920; WAN024FYF_at; Start 415; Stop 439
gcaagaaatatcattgtgaaactcg

SEQ ID NO: 226037 - DNA, 25 bp, Artificial
  probe
  misc_feature (1)..(25): SEQ ID NO: 4135; WAN024FYG_at; Start 188; Stop 212
taggaaattatggaacaaaagagat

SEQ ID NO: 226038 - DNA, 25 bp, Artificial
  probe
  misc_feature (1)..(25): SEQ ID NO: 4135; WAN024FYG_at; Start 217; Stop 241
ggtaataggaaagctatccatcaga

SEQ ID NO: 226039 - DNA, 25 bp, Artificial
  probe
  misc_feature (1)..(25): SEQ ID NO: 4135; WAN024FYG_at; Start 252; Stop 276
tatttatagtatacaactgggagca

SEQ ID NO: 226040 - DNA, 25 bp, Artificial
  probe
  misc_feature (1)..(25): SEQ ID NO: 4135; WAN024FYG_at; Start 168; Stop 192
tttgctggctactttaggaatagga

SEQ ID NO: 226041 - DNA, 25 bp, Artificial
  probe
  misc_feature (1)..(25): SEQ ID NO: 4135; WAN024FYG_at; Start 1189; Stop 1213
caattgtactatactcgtacatact

SEQ ID NO: 226042 - DNA, 25 bp, Artificial
  probe
  misc_feature (1)..(25): SEQ ID NO: 4135; WAN024FYG_at; Start 177; Stop 201
tactttaggaataggaaattatgga

SEQ ID NO: 226043 - DNA, 25 bp, Artificial
  probe
  misc_feature (1)..(25): SEQ ID NO: 4135; WAN024FYG_at; Start 256; Stop 280
tatagtatacaactgggagcatctc

SEQ ID NO: 226044 - DNA, 25 bp, Artificial
  probe
  misc_feature (1)..(25): SEQ ID NO: 4135; WAN024FYG_at; Start 320; Stop 344
taccagctatgcaaaatactgtagc

SEQ ID NO: 226045 - DNA, 25 bp, Artificial
  probe
  misc_feature (1)..(25): SEQ ID NO: 4135; WAN024FYG_at; Start 694; Stop 718
ggttctctagcctcaataagagatg

SEQ ID NO: 226046 - DNA, 25 bp, Artificial
  probe
  misc_feature (1)..(25): SEQ ID NO: 4135; WAN024FYG_at; Start 689; Stop 713
tgcttggttctctagcctcaataag

SEQ ID NO: 226047 - DNA, 25 bp, Artificial
  probe
  misc_feature (1)..(25): SEQ ID NO: 4135; WAN024FYG_at; Start 226; Stop 250
aaagctatccatcagaatttttggg

SEQ ID NO: 226048 - DNA, 25 bp, Artificial
  probe
  misc_feature (1)..(25): SEQ ID NO: 4135; WAN024FYG_at; Start 287; Stop 311
ccactttcctttatgttattgtctg

SEQ ID NO: 226049 - DNA, 25 bp, Artificial
  probe
  misc_feature (1)..(25): SEQ ID NO: 4135; WAN024FYG_at; Start 55; Stop 79
cagttactaatcataatcttaccga

SEQ ID NO: 226050 - DNA, 25 bp, Artificial
  probe
  misc_feature (1)..(25): SEQ ID NO: 4135; WAN024FYG_at; Start 6; Stop 30
gtgtgcttgtatgaaagtacttaaa

SEQ ID NO: 226051 - DNA, 25 bp, Artificial
  probe
  misc_feature (1)..(25): SEQ ID NO: 4135; WAN024FYG_at; Start 42; Stop 66
caatctttcatatcagttactaatc

SEQ ID NO: 226052 - DNA, 25 bp, Artificial
  probe
  misc_feature (1)..(25): SEQ ID NO: 4135; WAN024FYG_at; Start 325; Stop 349
gctatgcaaaatactgtagcctata

SEQ ID NO: 226053 - DNA, 25 bp, Artificial
  probe
  misc_feature (1)..(25): SEQ ID NO: 4135; WAN024FYG_at; Start 171; Stop 195
gctggctactttaggaataggaaat

SEQ ID NO: 226054 - DNA, 25 bp, Artificial
  probe
  misc_feature (1)..(25): SEQ ID NO: 4135; WAN024FYG_at; Start 699; Stop 723
tctagcctcaataagagatgttgga

SEQ ID NO: 226055 - DNA, 25 bp, Artificial
  probe
  misc_feature (1)..(25): SEQ ID NO: 4135; WAN024FYG_at; Start 203; Stop 227
caaaagagatttcaggtaataggaa

SEQ ID NO: 226056 - DNA, 25 bp, Artificial
  probe
  misc_feature (1)..(25): SEQ ID NO: 4135; WAN024FYG_at; Start 310; Stop 334
tgtctaattttaccagctatgcaaa

SEQ ID NO: 226057 - DNA, 25 bp, Artificial
  probe
  misc_feature (1)..(25): SEQ ID NO: 4135; WAN024FYG_at; Start 1198; Stop 1222
tatactcgtacatacttaaaagatg

SEQ ID NO: 226058 - DNA, 25 bp, Artificial
  probe
  misc_feature (1)..(25): SEQ ID NO: 4135; WAN024FYG_at; Start 258; Stop 282
tagtatacaactgggagcatctcta

SEQ ID NO: 226059 - DNA, 25 bp, Artificial
  probe
  misc_feature (1)..(25): SEQ ID NO: 4135; WAN024FYG_at; Start 266; Stop 290
aactgggagcatctctattctccac

SEQ ID NO: 226060 - DNA, 25 bp, Artificial
  probe
  misc_feature (1)..(25): SEQ ID NO: 4135; WAN024FYG_at; Start 71; Stop 95
tcttaccgattattaccactcccta

SEQ ID NO: 226061 - DNA, 25 bp, Artificial
  probe
  misc_feature (1)..(25): SEQ ID NO: 4135; WAN024FYG_at; Start 101; Stop 125
ctaggatttttagttcggataatct

SEQ ID NO: 226062 - DNA, 25 bp, Artificial
  probe
  misc_feature (1)..(25): SEQ ID NO: 4135; WAN024FYG_at; Start 342; Stop 366
agcctatattttaggcttaagtttg

SEQ ID NO: 226063 - DNA, 25 bp, Artificial
  probe
  misc_feature (1)..(25): SEQ ID NO: 4135; WAN024FYG_at; Start 155; Stop 179
taacctattttcttttgctggctac

SEQ ID NO: 226064 - DNA, 25 bp, Artificial
  probe
  misc_feature (1)..(25): SEQ ID NO: 4135; WAN024FYG_at; Start 272; Stop 296
gagcatctctattctccactttcct

SEQ ID NO: 226065 - DNA, 25 bp, Artificial
  probe
  misc_feature (1)..(25): SEQ ID NO: 4135; WAN024FYG_at; Start 214; Stop 238
tcaggtaataggaaagctatccatc

SEQ ID NO: 226066 - DNA, 25 bp, Artificial
  probe
  misc_feature (1)..(25): SEQ ID NO: 4135; WAN024FYG_at; Start 703; Stop 727
gcctcaataagagatgttggaattt

SEQ ID NO: 226067 - DNA, 25 bp, Artificial
  probe
  misc_feature (1)..(25): SEQ ID NO: 4135; WAN024FYG_at; Start 112; Stop 136
agttcggataatctagggacttatg

SEQ ID NO: 226068 - DNA, 25 bp, Artificial
  probe
  misc_feature (1)..(25): SEQ ID NO: 4135; WAN024FYG_at; Start 2; Stop 26
tggagtgtgcttgtatgaaagtact

SEQ ID NO: 226069 - DNA, 25 bp, Artificial
  probe
  misc_feature (1)..(25): SEQ ID NO: 4135; WAN024FYG_at; Start 263; Stop 287
tacaactgggagcatctctattctc

SEQ ID NO: 226070 - DNA, 25 bp, Artificial
  probe
  misc_feature (1)..(25): SEQ ID NO: 4135; WAN024FYG_at; Start 302; Stop 326
ttattgtctgtctaattttaccagc

SEQ ID NO: 226071 - DNA, 25 bp, Artificial
  probe
  misc_feature (1)..(25): SEQ ID NO: 1102; WAN024FYH_at; Start 152; Stop 176
tattgctcgctactttaggtgtcgc

SEQ ID NO: 226072 - DNA, 25 bp, Artificial
  probe
  misc_feature (1)..(25): SEQ ID NO: 1102; WAN024FYH_at; Start 623; Stop 647
tatttcttcctcagatagcaatctc

SEQ ID NO: 226073 - DNA, 25 bp, Artificial
  probe
  misc_feature (1)..(25): SEQ ID NO: 1102; WAN024FYH_at; Start 828; Stop 852
taagatgcatgagatggctttcttg

SEQ ID NO: 226074 - DNA, 25 bp, Artificial
  probe
  misc_feature (1)..(25): SEQ ID NO: 1102; WAN024FYH_at; Start 92; Stop 116
tctttagttctcaagagttaggtga

SEQ ID NO: 226075 - DNA, 25 bp, Artificial
  probe
  misc_feature (1)..(25): SEQ ID NO: 1102; WAN024FYH_at; Start 791; Stop 815
ctaacttattagcaacaggagatca

SEQ ID NO: 226076 - DNA, 25 bp, Artificial
  probe
  misc_feature (1)..(25): SEQ ID NO: 1102; WAN024FYH_at; Start 803; Stop 827
caacaggagatcatagagcagtcaa

SEQ ID NO: 226077 - DNA, 25 bp, Artificial
  probe
  misc_feature (1)..(25): SEQ ID NO: 1102; WAN024FYH_at; Start 579; Stop 603
tgatttagaatacgctaggtaccat

SEQ ID NO: 226078 - DNA, 25 bp, Artificial
  probe
  misc_feature (1)..(25): SEQ ID NO: 1102; WAN024FYH_at; Start 1318; Stop 1342
gcatttgctgtgtttggtggactca

SEQ ID NO: 226079 - DNA, 25 bp, Artificial
  probe
  misc_feature (1)..(25): SEQ ID NO: 1102; WAN024FYH_at; Start 591; Stop 615
cgctaggtaccatttgaaaccaatt

SEQ ID NO: 226080 - DNA, 25 bp, Artificial
  probe
  misc_feature (1)..(25): SEQ ID NO: 1102; WAN024FYH_at; Start 174; Stop 198
cgccaactatgggactaaggtaatt

SEQ ID NO: 226081 - DNA, 25 bp, Artificial
  probe
  misc_feature (1)..(25): SEQ ID NO: 1102; WAN024FYH_at; Start 309; Stop 333
tccaatgcaaaacccagtagcctat

SEQ ID NO: 226082 - DNA, 25 bp, Artificial
  probe
  misc_feature (1)..(25): SEQ ID NO: 1102; WAN024FYH_at; Start 192; Stop 216
ggtaatttctggacatcgtaatgag

SEQ ID NO: 226083 - DNA, 25 bp, Artificial
  probe
  misc_feature (1)..(25): SEQ ID NO: 1102; WAN024FYH_at; Start 652; Stop 676
tacgttactttagatcgtacgatgc

SEQ ID NO: 226084 - DNA, 25 bp, Artificial
  probe
  misc_feature (1)..(25): SEQ ID NO: 1102; WAN024FYH_at; Start 1167; Stop 1191
ggcaattcaattgtactttacccgc

SEQ ID NO: 226085 - DNA, 25 bp, Artificial
  probe
  misc_feature (1)..(25): SEQ ID NO: 1102; WAN024FYH_at; Start 296; Stop 320
gcgttaaccttcctccaatgcaaaa

SEQ ID NO: 226086 - DNA, 25 bp, Artificial
  probe
  misc_feature (1)..(25): SEQ ID NO: 1102; WAN024FYH_at; Start 323; Stop 347
cagtagcctatattttgggattgag

SEQ ID NO: 226087 - DNA, 25 bp, Artificial
  probe
  misc_feature (1)..(25): SEQ ID NO: 1102; WAN024FYH_at; Start 778; Stop 802
ttgcctcgagtagctaacttattag

SEQ ID NO: 226088 - DNA, 25 bp, Artificial
  probe
  misc_feature (1)..(25): SEQ ID NO: 1102; WAN024FYH_at; Start 137; Stop 161
tagtaacttactttatattgctcgc

SEQ ID NO: 226089 - DNA, 25 bp, Artificial
  probe
  misc_feature (1)..(25): SEQ ID NO: 1102; WAN024FYH_at; Start 1110; Stop 1134
taaacttggttatatcggagcagct

SEQ ID NO: 226090 - DNA, 25 bp, Artificial
  probe
  misc_feature (1)..(25): SEQ ID NO: 1102; WAN024FYH_at; Start 636; Stop 660
gatagcaatctctttatacgttact

SEQ ID NO: 226091 - DNA, 25 bp, Artificial
  probe
  misc_feature (1)..(25): SEQ ID NO: 1102; WAN024FYH_at; Start 883; Stop 907
tccggaatgttaattgtcaatgatg

SEQ ID NO: 226092 - DNA, 25 bp, Artificial
  probe
  misc_feature (1)..(25): SEQ ID NO: 1102; WAN024FYH_at; Start 444; Stop 468
ggtaatctctattttcctgtttgtc

SEQ ID NO: 226093 - DNA, 25 bp, Artificial
  probe
  misc_feature (1)..(25): SEQ ID NO: 1102; WAN024FYH_at; Start 565; Stop 589
ggtaagccccatgttgatttagaat

SEQ ID NO: 226094 - DNA, 25 bp, Artificial
  probe
  misc_feature (1)..(25): SEQ ID NO: 1102; WAN024FYH_at; Start 461; Stop 485
tgtttgtcaaatctactaacgacct

SEQ ID NO: 226095 - DNA, 25 bp, Artificial
  probe
  misc_feature (1)..(25): SEQ ID NO: 1102; WAN024FYH_at; Start 767; Stop 791
gaagtgttatgttgcctcgagtagc

SEQ ID NO: 226096 - DNA, 25 bp, Artificial
  probe
  misc_feature (1)..(25): SEQ ID NO: 1102; WAN024FYH_at; Start 1291; Stop 1315
cagttttcaccaaccataaatgttc

SEQ ID NO: 226097 - DNA, 25 bp, Artificial
  probe
  misc_feature (1)..(25): SEQ ID NO: 1102; WAN024FYH_at; Start 1140; Stop 1164
ctctgttttaacagaagcgctagta

SEQ ID NO: 226098 - DNA, 25 bp, Artificial
  probe
  misc_feature (1)..(25): SEQ ID NO: 1102; WAN024FYH_at; Start 241; Stop 265
tactctttacaattaggtgctacaa

SEQ ID NO: 226099 - DNA, 25 bp, Artificial
  probe
  misc_feature (1)..(25): SEQ ID NO: 1102; WAN024FYH_at; Start 256; Stop 280
ggtgctacaatcctttcaatctcct

SEQ ID NO: 226100 - DNA, 25 bp, Artificial
  probe
  misc_feature (1)..(25): SEQ ID NO: 1102; WAN024FYH_at; Start 1199; Stop 1223
taaaggaagtttcaattattggatc

SEQ ID NO: 226101 - DNA, 25 bp, Artificial
  probe
  misc_feature (1)..(25): SEQ ID NO: 1102; WAN024FYH_at; Start 1269; Stop 1293
gcttggttcaaaaacatttatacag

SEQ ID NO: 226102 - DNA, 25 bp, Artificial
  probe
  misc_feature (1)..(25): SEQ ID NO: 1102; WAN024FYH_at; Start 162; Stop 186
tactttaggtgtcgccaactatggg

SEQ ID NO: 226103 - DNA, 25 bp, Artificial
  probe
  misc_feature (1)..(25): SEQ ID NO: 1102; WAN024FYH_at; Start 42; Stop 66
gatactagtagttgttctcccaata

SEQ ID NO: 226104 - DNA, 25 bp, Artificial
  probe
  misc_feature (1)..(25): SEQ ID NO: 1102; WAN024FYH_at; Start 553; Stop 577
cgagggtttattggtaagccccatg

SEQ ID NO: 226105 - DNA, 25 bp, Artificial
  probe
  misc_feature (1)..(25): SEQ ID NO: 1131; WAN024FYI_at; Start 431; Stop 455
tgaagcttgttggtgtaagtgccat

SEQ ID NO: 226106 - DNA, 25 bp, Artificial
  probe
  misc_feature (1)..(25): SEQ ID NO: 1131; WAN024FYI_at; Start 548; Stop 572
cagcccgtgaatatattggaaaacc

SEQ ID NO: 226107 - DNA, 25 bp, Artificial
  probe
  misc_feature (1)..(25): SEQ ID NO: 1131; WAN024FYI_at; Start 290; Stop 314
tagcctgtcttttcatcccagggat

SEQ ID NO: 226108 - DNA, 25 bp, Artificial
  probe
  misc_feature (1)..(25): SEQ ID NO: 1131; WAN024FYI_at; Start 305; Stop 329
tcccagggatgaaaaacctagttgc

SEQ ID NO: 226109 - DNA, 25 bp, Artificial
  probe
  misc_feature (1)..(25): SEQ ID NO: 1131; WAN024FYI_at; Start 589; Stop 613
tatgctaggcatcatctgaagccag

SEQ ID NO: 226110 - DNA, 25 bp, Artificial
  probe
  misc_feature (1)..(25): SEQ ID NO: 1131; WAN024FYI_at; Start 146; Stop 170
acttcattttacttgctactctggg

SEQ ID NO: 226111 - DNA, 25 bp, Artificial
  probe
  misc_feature (1)..(25): SEQ ID NO: 1131; WAN024FYI_at; Start 609; Stop 633
gccagttatcttgctattcttacca

SEQ ID NO: 226112 - DNA, 25 bp, Artificial
  probe
  misc_feature (1)..(25): SEQ ID NO: 1131; WAN024FYI_at; Start 657; Stop 681
gactttagatcgtacaatgttaggg

SEQ ID NO: 226113 - DNA, 25 bp, Artificial
  probe
  misc_feature (1)..(25): SEQ ID NO: 1131; WAN024FYI_at; Start 927; Stop 951
tgggcaagactttcaagatgcacgc

SEQ ID NO: 226114 - DNA, 25 bp, Artificial
  probe
  misc_feature (1)..(25): SEQ ID NO: 1131; WAN024FYI_at; Start 335; Stop 359
tcttgggattgggtttagtctctaa

SEQ ID NO: 226115 - DNA, 25 bp, Artificial
  probe
  misc_feature (1)..(25): SEQ ID NO: 1131; WAN024FYI_at; Start 66; Stop 90
cattacgactccttatgtgacgcgc

SEQ ID NO: 226116 - DNA, 25 bp, Artificial
  probe
  misc_feature (1)..(25): SEQ ID NO: 1131; WAN024FYI_at; Start 374; Stop 398
catggttgtttcaagggttagaaga

SEQ ID NO: 226117 - DNA, 25 bp, Artificial
  probe
  misc_feature (1)..(25): SEQ ID NO: 1131; WAN024FYI_at; Start 180; Stop 204
ctatggaacgaaggagatatctggg

SEQ ID NO: 226118 - DNA, 25 bp, Artificial
  probe
  misc_feature (1)..(25): SEQ ID NO: 1131; WAN024FYI_at; Start 413; Stop 437
cggtcagaaatatcacagtgaagct

SEQ ID NO: 226119 - DNA, 25 bp, Artificial
  probe
  misc_feature (1)..(25): SEQ ID NO: 1131; WAN024FYI_at; Start 357; Stop 381
taaaggactagatatttcatggttg

SEQ ID NO: 226120 - DNA, 25 bp, Artificial
  probe
  misc_feature (1)..(25): SEQ ID NO: 1131; WAN024FYI_at; Start 771; Stop 795
tgttatgctgccacgcgttgcgcat

SEQ ID NO: 226121 - DNA, 25 bp, Artificial
  probe
  misc_feature (1)..(25): SEQ ID NO: 1131; WAN024FYI_at; Start 826; Stop 850
aataagatgcatgaggtatccttct

SEQ ID NO: 226122 - DNA, 25 bp, Artificial
  probe
  misc_feature (1)..(25): SEQ ID NO: 1131; WAN024FYI_at; Start 84; Stop 108
gacgcgcatattttcttcagatgat

SEQ ID NO: 226123 - DNA, 25 bp, Artificial
  probe
  misc_feature (1)..(25): SEQ ID NO: 1131; WAN024FYI_at; Start 164; Stop 188
ctctgggtattgctaactatggaac

SEQ ID NO: 226124 - DNA, 25 bp, Artificial
  probe
  misc_feature (1)..(25): SEQ ID NO: 1131; WAN024FYI_at; Start 509; Stop 533
cagcatttgaattgttgggtcagtt

SEQ ID NO: 226125 - DNA, 25 bp, Artificial
  probe
  misc_feature (1)..(25): SEQ ID NO: 1131; WAN024FYI_at; Start 626; Stop 650
tcttaccacaaattgctatctcgct

SEQ ID NO: 226126 - DNA, 25 bp, Artificial
  probe
  misc_feature (1)..(25): SEQ ID NO: 1131; WAN024FYI_at; Start 197; Stop 221
tatctgggaataggaagagtattca

SEQ ID NO: 226127 - DNA, 25 bp, Artificial
  probe
  misc_feature (1)..(25): SEQ ID NO: 1131; WAN024FYI_at; Start 782; Stop 806
cacgcgttgcgcatttgttagcgac

SEQ ID NO: 226128 - DNA, 25 bp, Artificial
  probe
  misc_feature (1)..(25): SEQ ID NO: 1131; WAN024FYI_at; Start 250; Stop 274
cagtttggagcgactactttttcca

SEQ ID NO: 226129 - DNA, 25 bp, Artificial
  probe
  misc_feature (1)..(25): SEQ ID NO: 1131; WAN024FYI_at; Start 472; Stop 496
tcagcgagtgatctatacttgtatg

SEQ ID NO: 226130 - DNA, 25 bp, Artificial
  probe
  misc_feature (1)..(25): SEQ ID NO: 1131; WAN024FYI_at; Start 704; Stop 728
tcggcatttatgatcaggctttgaa

SEQ ID NO: 226131 - DNA, 25 bp, Artificial
  probe
  misc_feature (1)..(25): SEQ ID NO: 1131; WAN024FYI_at; Start 534; Stop 558
aagtatgtggtttccagcccgtgaa

SEQ ID NO: 226132 - DNA, 25 bp, Artificial
  probe
  misc_feature (1)..(25): SEQ ID NO: 1131; WAN024FYI_at; Start 947; Stop 971
cacgctatgcaatttccattatgat

SEQ ID NO: 226133 - DNA, 25 bp, Artificial
  probe
  misc_feature (1)..(25): SEQ ID NO: 1131; WAN024FYI_at; Start 458; Stop 482
tcttgtttgtaaaatcagcgagtga

SEQ ID NO: 226134 - DNA, 25 bp, Artificial
  probe
  misc_feature (1)..(25): SEQ ID NO: 1131; WAN024FYI_at; Start 528; Stop 552
tcagttaagtatgtggtttccagcc

SEQ ID NO: 226135 - DNA, 25 bp, Artificial
  probe
  misc_feature (1)..(25): SEQ ID NO: 1131; WAN024FYI_at; Start 874; Stop 898
ccgattatggcagggatgttgattg

SEQ ID NO: 226136 - DNA, 25 bp, Artificial
  probe
  misc_feature (1)..(25): SEQ ID NO: 1131; WAN024FYI_at; Start 806; Stop 830
caggtgatcataaggtagtcaataa

SEQ ID NO: 226137 - DNA, 25 bp, Artificial
  probe
  misc_feature (1)..(25): SEQ ID NO: 1131; WAN024FYI_at; Start 321; Stop 345
cctagttgcatatatcttgggattg

SEQ ID NO: 226138 - DNA, 25 bp, Artificial
  probe
  misc_feature (1)..(25): SEQ ID NO: 1131; WAN024FYI_at; Start 239; Stop 263
tatatactttacagtttggagcgac

SEQ ID NO: 226139 - DNA, 25 bp, Artificial
  probe
  misc_feature (1)..(25): SEQ ID NO: 927; WAN024FYJ_at; Start 1310; Stop 1334
atgttatagtatttgcagtgcttgg

SEQ ID NO: 226140 - DNA, 25 bp, Artificial
  probe
  misc_feature (1)..(25): SEQ ID NO: 927; WAN024FYJ_at; Start 1312; Stop 1336
gttatagtatttgcagtgcttggtg

SEQ ID NO: 226141 - DNA, 25 bp, Artificial
  probe
  misc_feature (1)..(25): SEQ ID NO: 927; WAN024FYJ_at; Start 1169; Stop 1193
cgatacaattatactttacccgtag

SEQ ID NO: 226142 - DNA, 25 bp, Artificial
  probe
  misc_feature (1)..(25): SEQ ID NO: 927; WAN024FYJ_at; Start 1311; Stop 1335
tgttatagtatttgcagtgcttggt

SEQ ID NO: 226143 - DNA, 25 bp, Artificial
  probe
  misc_feature (1)..(25): SEQ ID NO: 927; WAN024FYJ_at; Start 1308; Stop 1332
aaatgttatagtatttgcagtgctt

SEQ ID NO: 226144 - DNA, 25 bp, Artificial
  probe
  misc_feature (1)..(25): SEQ ID NO: 927; WAN024FYJ_at; Start 1162; Stop 1186
gtatgggcgatacaattatacttta

SEQ ID NO: 226145 - DNA, 25 bp, Artificial
  probe
  misc_feature (1)..(25): SEQ ID NO: 927; WAN024FYJ_at; Start 1164; Stop 1188
atgggcgatacaattatactttacc

SEQ ID NO: 226146 - DNA, 25 bp, Artificial
  probe
  misc_feature (1)..(25): SEQ ID NO: 927; WAN024FYJ_at; Start 1168; Stop 1192
gcgatacaattatactttacccgta

SEQ ID NO: 226147 - DNA, 25 bp, Artificial
  probe
  misc_feature (1)..(25): SEQ ID NO: 927; WAN024FYJ_at; Start 1171; Stop 1195
atacaattatactttacccgtagat

SEQ ID NO: 226148 - DNA, 25 bp, Artificial
  probe
  misc_feature (1)..(25): SEQ ID NO: 927; WAN024FYJ_at; Start 1163; Stop 1187
tatgggcgatacaattatactttac

SEQ ID NO: 226149 - DNA, 25 bp, Artificial
  probe
  misc_feature (1)..(25): SEQ ID NO: 927; WAN024FYJ_at; Start 1307; Stop 1331
taaatgttatagtatttgcagtgct

SEQ ID NO: 226150 - DNA, 25 bp, Artificial
  probe
  misc_feature (1)..(25): SEQ ID NO: 927; WAN024FYJ_at; Start 1313; Stop 1337
ttatagtatttgcagtgcttggtgg

SEQ ID NO: 226151 - DNA, 25 bp, Artificial
  probe
  misc_feature (1)..(25): SEQ ID NO: 927; WAN024FYJ_at; Start 1165; Stop 1189
tgggcgatacaattatactttaccc

SEQ ID NO: 226152 - DNA, 25 bp, Artificial
  probe
  misc_feature (1)..(25): SEQ ID NO: 927; WAN024FYJ_at; Start 1315; Stop 1339
atagtatttgcagtgcttggtggaa

SEQ ID NO: 226153 - DNA, 25 bp, Artificial
  probe
  misc_feature (1)..(25): SEQ ID NO: 927; WAN024FYJ_at; Start 1170; Stop 1194
gatacaattatactttacccgtaga

SEQ ID NO: 226154 - DNA, 25 bp, Artificial
  probe
  misc_feature (1)..(25): SEQ ID NO: 927; WAN024FYJ_at; Start 1172; Stop 1196
tacaattatactttacccgtagata

SEQ ID NO: 226155 - DNA, 25 bp, Artificial
  probe
  misc_feature (1)..(25): SEQ ID NO: 927; WAN024FYJ_at; Start 1306; Stop 1330
ataaatgttatagtatttgcagtgc

SEQ ID NO: 226156 - DNA, 25 bp, Artificial
  probe
  misc_feature (1)..(25): SEQ ID NO: 927; WAN024FYJ_at; Start 1314; Stop 1338
tatagtatttgcagtgcttggtgga

SEQ ID NO: 226157 - DNA, 25 bp, Artificial
  probe
  misc_feature (1)..(25): SEQ ID NO: 927; WAN024FYJ_at; Start 1309; Stop 1333
aatgttatagtatttgcagtgcttg

SEQ ID NO: 226158 - DNA, 25 bp, Artificial
  probe
  misc_feature (1)..(25): SEQ ID NO: 47; WAN024FYK_at; Start 262; Stop 286
acagttctttctctgtccttgtatg

SEQ ID NO: 226159 - DNA, 25 bp, Artificial
  probe
  misc_feature (1)..(25): SEQ ID NO: 47; WAN024FYK_at; Start 255; Stop 279
aggtgcaacagttctttctctgtcc

SEQ ID NO: 226160 - DNA, 25 bp, Artificial
  probe
  misc_feature (1)..(25): SEQ ID NO: 47; WAN024FYK_at; Start 272; Stop 296
ctctgtccttgtatgctcttctttg

SEQ ID NO: 226161 - DNA, 25 bp, Artificial
  probe
  misc_feature (1)..(25): SEQ ID NO: 47; WAN024FYK_at; Start 258; Stop 282
tgcaacagttctttctctgtccttg

SEQ ID NO: 226162 - DNA, 25 bp, Artificial
  probe
  misc_feature (1)..(25): SEQ ID NO: 47; WAN024FYK_at; Start 200; Stop 224
cagggcatcgaaagcaaattcaaaa

SEQ ID NO: 226163 - DNA, 25 bp, Artificial
  probe
  misc_feature (1)..(25): SEQ ID NO: 47; WAN024FYK_at; Start 273; Stop 297
tctgtccttgtatgctcttctttgt

SEQ ID NO: 226164 - DNA, 25 bp, Artificial
  probe
  misc_feature (1)..(25): SEQ ID NO: 47; WAN024FYK_at; Start 257; Stop 281
gtgcaacagttctttctctgtcctt

SEQ ID NO: 226165 - DNA, 25 bp, Artificial
  probe
  misc_feature (1)..(25): SEQ ID NO: 47; WAN024FYK_at; Start 254; Stop 278
taggtgcaacagttctttctctgtc

SEQ ID NO: 226166 - DNA, 25 bp, Artificial
  probe
  misc_feature (1)..(25): SEQ ID NO: 47; WAN024FYK_at; Start 260; Stop 284
caacagttctttctctgtccttgta

SEQ ID NO: 226167 - DNA, 25 bp, Artificial
  probe
  misc_feature (1)..(25): SEQ ID NO: 47; WAN024FYK_at; Start 271; Stop 295
tctctgtccttgtatgctcttcttt

SEQ ID NO: 226168 - DNA, 25 bp, Artificial
  probe
  misc_feature (1)..(25): SEQ ID NO: 47; WAN024FYK_at; Start 269; Stop 293
tttctctgtccttgtatgctcttct

SEQ ID NO: 226169 - DNA, 25 bp, Artificial
  probe
  misc_feature (1)..(25): SEQ ID NO: 47; WAN024FYK_at; Start 268; Stop 292
ctttctctgtccttgtatgctcttc

SEQ ID NO: 226170 - DNA, 25 bp, Artificial
  probe
  misc_feature (1)..(25): SEQ ID NO: 47; WAN024FYK_at; Start 100; Stop 124
tcggatgatttagggacgtatggtt

SEQ ID NO: 226171 - DNA, 25 bp, Artificial
  probe
  misc_feature (1)..(25): SEQ ID NO: 47; WAN024FYK_at; Start 261; Stop 285
aacagttctttctctgtccttgtat

SEQ ID NO: 226172 - DNA, 25 bp, Artificial
  probe
  misc_feature (1)..(25): SEQ ID NO: 47; WAN024FYK_at; Start 265; Stop 289
gttctttctctgtccttgtatgctc

SEQ ID NO: 226173 - DNA, 25 bp, Artificial
  probe
  misc_feature (1)..(25): SEQ ID NO: 47; WAN024FYK_at; Start 198; Stop 222
ttcagggcatcgaaagcaaattcaa

SEQ ID NO: 226174 - DNA, 25 bp, Artificial
  probe
  misc_feature (1)..(25): SEQ ID NO: 47; WAN024FYK_at; Start 197; Stop 221
tttcagggcatcgaaagcaaattca

SEQ ID NO: 226175 - DNA, 25 bp, Artificial
  probe
  misc_feature (1)..(25): SEQ ID NO: 47; WAN024FYK_at; Start 199; Stop 223
tcagggcatcgaaagcaaattcaaa

SEQ ID NO: 226176 - DNA, 25 bp, Artificial
  probe
  misc_feature (1)..(25): SEQ ID NO: 47; WAN024FYK_at; Start 263; Stop 287
cagttctttctctgtccttgtatgc

SEQ ID NO: 226177 - DNA, 25 bp, Artificial
  probe
  misc_feature (1)..(25): SEQ ID NO: 47; WAN024FYK_at; Start 274; Stop 298
ctgtccttgtatgctcttctttgtc

SEQ ID NO: 226178 - DNA, 25 bp, Artificial
  probe
  misc_feature (1)..(25): SEQ ID NO: 47; WAN024FYK_at; Start 270; Stop 294
ttctctgtccttgtatgctcttctt

SEQ ID NO: 226179 - DNA, 25 bp, Artificial
  probe
  misc_feature (1)..(25): SEQ ID NO: 47; WAN024FYK_at; Start 267; Stop 291
tctttctctgtccttgtatgctctt

SEQ ID NO: 226180 - DNA, 25 bp, Artificial
  probe
  misc_feature (1)..(25): SEQ ID NO: 47; WAN024FYK_at; Start 256; Stop 280
ggtgcaacagttctttctctgtcct

SEQ ID NO: 226181 - DNA, 25 bp, Artificial
  probe
  misc_feature (1)..(25): SEQ ID NO: 47; WAN024FYK_at; Start 259; Stop 283
gcaacagttctttctctgtccttgt

SEQ ID NO: 226182 - DNA, 25 bp, Artificial
  probe
  misc_feature (1)..(25): SEQ ID NO: 47; WAN024FYK_at; Start 99; Stop 123
ttcggatgatttagggacgtatggt

SEQ ID NO: 226183 - DNA, 25 bp, Artificial
  probe
  misc_feature (1)..(25): SEQ ID NO: 47; WAN024FYK_at; Start 196; Stop 220
atttcagggcatcgaaagcaaattc

SEQ ID NO: 226184 - DNA, 25 bp, Artificial
  probe
  misc_feature (1)..(25): SEQ ID NO: 47; WAN024FYK_at; Start 103; Stop 127
gatgatttagggacgtatggttatt

SEQ ID NO: 226185 - DNA, 25 bp, Artificial
  probe
  misc_feature (1)..(25): SEQ ID NO: 47; WAN024FYK_at; Start 266; Stop 290
ttctttctctgtccttgtatgctct

SEQ ID NO: 226186 - DNA, 25 bp, Artificial
  probe
  misc_feature (1)..(25): SEQ ID NO: 47; WAN024FYK_at; Start 264; Stop 288
agttctttctctgtccttgtatgct

SEQ ID NO: 226187 - DNA, 25 bp, Artificial
  probe
  misc_feature (1)..(25): SEQ ID NO: 735; WAN024FYL_at; Start 250; Stop 274
cagtttggtgcaacttggctatcca

SEQ ID NO: 226188 - DNA, 25 bp, Artificial
  probe
  misc_feature (1)..(25): SEQ ID NO: 735; WAN024FYL_at; Start 864; Stop 888
ggtgattttcccaatcatagcagga

SEQ ID NO: 226189 - DNA, 25 bp, Artificial
  probe
  misc_feature (1)..(25): SEQ ID NO: 735; WAN024FYL_at; Start 1109; Stop 1133
cccaatttggttatataggtgctgc

SEQ ID NO: 226190 - DNA, 25 bp, Artificial
  probe
  misc_feature (1)..(25): SEQ ID NO: 735; WAN024FYL_at; Start 816; Stop 840
caaagccgttaataagatgcacgag

SEQ ID NO: 226191 - DNA, 25 bp, Artificial
  probe
  misc_feature (1)..(25): SEQ ID NO: 735; WAN024FYL_at; Start 1257; Stop 1281
gtatggtctcttgctaggttcaaaa

SEQ ID NO: 226192 - DNA, 25 bp, Artificial
  probe
  misc_feature (1)..(25): SEQ ID NO: 735; WAN024FYL_at; Start 940; Stop 964
caagatgctcgctatgcgattgcta

SEQ ID NO: 226193 - DNA, 25 bp, Artificial
  probe
  misc_feature (1)..(25): SEQ ID NO: 735; WAN024FYL_at; Start 1050; Stop 1074
tatggtttcaacgacagttcccgct

SEQ ID NO: 226194 - DNA, 25 bp, Artificial
  probe
  misc_feature (1)..(25): SEQ ID NO: 735; WAN024FYL_at; Start 955; Stop 979
gcgattgctattatgaccttccgta

SEQ ID NO: 226195 - DNA, 25 bp, Artificial
  probe
  misc_feature (1)..(25): SEQ ID NO: 735; WAN024FYL_at; Start 541; Stop 565
tggttacccgcaagacaatttattg

SEQ ID NO: 226196 - DNA, 25 bp, Artificial
  probe
  misc_feature (1)..(25): SEQ ID NO: 735; WAN024FYL_at; Start 1219; Stop 1243
ggttcaatgacaaaaactgcacttg

SEQ ID NO: 226197 - DNA, 25 bp, Artificial
  probe
  misc_feature (1)..(25): SEQ ID NO: 735; WAN024FYL_at; Start 402; Stop 426
tagaaagattacagttcggaacatc

SEQ ID NO: 226198 - DNA, 25 bp, Artificial
  probe
  misc_feature (1)..(25): SEQ ID NO: 735; WAN024FYL_at; Start 507; Stop 531
taccattttcgaattgttagggcaa

SEQ ID NO: 226199 - DNA, 25 bp, Artificial
  probe
  misc_feature (1)..(25): SEQ ID NO: 735; WAN024FYL_at; Start 623; Stop 647
tattcttgccacagattgccatctc

SEQ ID NO: 226200 - DNA, 25 bp, Artificial
  probe
  misc_feature (1)..(25): SEQ ID NO: 735; WAN024FYL_at; Start 1204; Stop 1228
gaagttcctattatcggttcaatga

SEQ ID NO: 226201 - DNA, 25 bp, Artificial
  probe
  misc_feature (1)..(25): SEQ ID NO: 735; WAN024FYL_at; Start 1333; Stop 1357
ggcggaattatctatctttttgcaa

SEQ ID NO: 226202 - DNA, 25 bp, Artificial
  probe
  misc_feature (1)..(25): SEQ ID NO: 735; WAN024FYL_at; Start 743; Stop 767
tactgactttggttacctcactggg

SEQ ID NO: 226203 - DNA, 25 bp, Artificial
  probe
  misc_feature (1)..(25): SEQ ID NO: 735; WAN024FYL_at; Start 1238; Stop 1262
cacttgcatctgctgttatgtatgg

SEQ ID NO: 226204 - DNA, 25 bp, Artificial
  probe
  misc_feature (1)..(25): SEQ ID NO: 735; WAN024FYL_at; Start 113; Stop 137
gaacgtatggctactttagctccat

SEQ ID NO: 226205 - DNA, 25 bp, Artificial
  probe
  misc_feature (1)..(25): SEQ ID NO: 735; WAN024FYL_at; Start 656; Stop 680
tgactttggaccgtacgatgctggg

SEQ ID NO: 226206 - DNA, 25 bp, Artificial
  probe
  misc_feature (1)..(25): SEQ ID NO: 735; WAN024FYL_at; Start 236; Stop 260
gaatttattctctccagtttggtgc

SEQ ID NO: 226207 - DNA, 25 bp, Artificial
  probe
  misc_feature (1)..(25): SEQ ID NO: 735; WAN024FYL_at; Start 426; Stop 450
cactgttaagttagttggtgcaatc

SEQ ID NO: 226208 - DNA, 25 bp, Artificial
  probe
  misc_feature (1)..(25): SEQ ID NO: 735; WAN024FYL_at; Start 927; Stop 951
tgggcaaaattttcaagatgctcgc

SEQ ID NO: 226209 - DNA, 25 bp, Artificial
  probe
  misc_feature (1)..(25): SEQ ID NO: 735; WAN024FYL_at; Start 589; Stop 613
tacgctaagaagcatttgaaaccag

SEQ ID NO: 226210 - DNA, 25 bp, Artificial
  probe
  misc_feature (1)..(25): SEQ ID NO: 735; WAN024FYL_at; Start 786; Stop 810
agtatctagccttttatcgtctggg

SEQ ID NO: 226211 - DNA, 25 bp, Artificial
  probe
  misc_feature (1)..(25): SEQ ID NO: 735; WAN024FYL_at; Start 199; Stop 223
tcagcacatcgtaaggaaattggga

SEQ ID NO: 226212 - DNA, 25 bp, Artificial
  probe
  misc_feature (1)..(25): SEQ ID NO: 735; WAN024FYL_at; Start 161; Stop 185
caactcttggtgttgccaactacgg

SEQ ID NO: 226213 - DNA, 25 bp, Artificial
  probe
  misc_feature (1)..(25): SEQ ID NO: 735; WAN024FYL_at; Start 772; Stop 796
gttatgttgccacgagtatctagcc

SEQ ID NO: 226214 - DNA, 25 bp, Artificial
  probe
  misc_feature (1)..(25): SEQ ID NO: 735; WAN024FYL_at; Start 681; Stop 705
ggtgttggcttcgacaaaggatgtt

SEQ ID NO: 226215 - DNA, 25 bp, Artificial
  probe
  misc_feature (1)..(25): SEQ ID NO: 735; WAN024FYL_at; Start 181; Stop 205
tacggtaccaaagagatttcagcac

SEQ ID NO: 226216 - DNA, 25 bp, Artificial
  probe
  misc_feature (1)..(25): SEQ ID NO: 735; WAN024FYL_at; Start 302; Stop 326
tatttacttcaatgcaaaatccggt

SEQ ID NO: 226217 - DNA, 25 bp, Artificial
  probe
  misc_feature (1)..(25): SEQ ID NO: 735; WAN024FYL_at; Start 99; Stop 123
ttctgacgatttaggaacgtatggc

SEQ ID NO: 226218 - DNA, 25 bp, Artificial
  probe
  misc_feature (1)..(25): SEQ ID NO: 735; WAN024FYL_at; Start 1088; Stop 1112
gattgaatttgttgcttcttcccca

SEQ ID NO: 226219 - DNA, 25 bp, Artificial
  probe
  misc_feature (1)..(25): SEQ ID NO: 735; WAN024FYL_at; Start 1315; Stop 1339
ttaatattttcggtgctaggcggaa

SEQ ID NO: 226220 - DNA, 25 bp, Artificial
  probe
  misc_feature (1)..(25): SEQ ID NO: 735; WAN024FYL_at; Start 879; Stop 903
catagcaggaatgttgattgtcaac

SEQ ID NO: 226221 - DNA, 25 bp, Artificial
  probe
  misc_feature (1)..(25): SEQ ID NO: 5352; WAN024FYM_at; Start 415; Stop 439
cgtattacggttgctaggaattcat

SEQ ID NO: 226222 - DNA, 25 bp, Artificial
  probe
  misc_feature (1)..(25): SEQ ID NO: 5352; WAN024FYM_at; Start 805; Stop 829
catttactgagtataggtgatgaac

SEQ ID NO: 226223 - DNA, 25 bp, Artificial
  probe
  misc_feature (1)..(25): SEQ ID NO: 5352; WAN024FYM_at; Start 789; Stop 813
gttgcctcgaacagtacatttactg

SEQ ID NO: 226224 - DNA, 25 bp, Artificial
  probe
  misc_feature (1)..(25): SEQ ID NO: 5352; WAN024FYM_at; Start 83; Stop 107
acttagcgcgtgtgttaggtgcaga

SEQ ID NO: 226225 - DNA, 25 bp, Artificial
  probe
  misc_feature (1)..(25): SEQ ID NO: 5352; WAN024FYM_at; Start 207; Stop 231
ggtacgaacaagtagagaacatttg

SEQ ID NO: 226226 - DNA, 25 bp, Artificial
  probe
  misc_feature (1)..(25): SEQ ID NO: 5352; WAN024FYM_at; Start 68; Stop 92
ttattacctcaccttacttagcgcg

SEQ ID NO: 226227 - DNA, 25 bp, Artificial
  probe
  misc_feature (1)..(25): SEQ ID NO: 5352; WAN024FYM_at; Start 712; Stop 736
gaaactgctttttatgagaattcag

SEQ ID NO: 226228 - DNA, 25 bp, Artificial
  probe
  misc_feature (1)..(25): SEQ ID NO: 5352; WAN024FYM_at; Start 1008; Stop 1032
tggaaatgtcatccgaacccagttt

SEQ ID NO: 226229 - DNA, 25 bp, Artificial
  probe
  misc_feature (1)..(25): SEQ ID NO: 5352; WAN024FYM_at; Start 501; Stop 525
tttatatacctttataatggcaggg

SEQ ID NO: 226230 - DNA, 25 bp, Artificial
  probe
  misc_feature (1)..(25): SEQ ID NO: 5352; WAN024FYM_at; Start 175; Stop 199
atttctaattatgggaatcggacaa

SEQ ID NO: 226231 - DNA, 25 bp, Artificial
  probe
  misc_feature (1)..(25): SEQ ID NO: 5352; WAN024FYM_at; Start 41; Stop 65
atcagatcttagctgtaatagtacc

SEQ ID NO: 226232 - DNA, 25 bp, Artificial
  probe
  misc_feature (1)..(25): SEQ ID NO: 5352; WAN024FYM_at; Start 1163; Stop 1187
cagagttagttctatgttgctatca

SEQ ID NO: 226233 - DNA, 25 bp, Artificial
  probe
  misc_feature (1)..(25): SEQ ID NO: 5352; WAN024FYM_at; Start 333; Stop 357
gattgtagcctatatccaagtatta

SEQ ID NO: 226234 - DNA, 25 bp, Artificial
  probe
  misc_feature (1)..(25): SEQ ID NO: 5352; WAN024FYM_at; Start 1034; Stop 1058
taattccacgaagttttgacaagga

SEQ ID NO: 226235 - DNA, 25 bp, Artificial
  probe
  misc_feature (1)..(25): SEQ ID NO: 5352; WAN024FYM_at; Start 965; Stop 989
aaattattgcaggaatgacaccggc

SEQ ID NO: 226236 - DNA, 25 bp, Artificial
  probe
  misc_feature (1)..(25): SEQ ID NO: 5352; WAN024FYM_at; Start 998; Stop 1022
tttcggcttttggaaatgtcatccg

SEQ ID NO: 226237 - DNA, 25 bp, Artificial
  probe
  misc_feature (1)..(25): SEQ ID NO: 5352; WAN024FYM_at; Start 955; Stop 979
gccagtagccaaattattgcaggaa

SEQ ID NO: 226238 - DNA, 25 bp, Artificial
  probe
  misc_feature (1)..(25): SEQ ID NO: 5352; WAN024FYM_at; Start 1047; Stop 1071
ttttgacaaggaatatacggtatct

SEQ ID NO: 226239 - DNA, 25 bp, Artificial
  probe
  misc_feature (1)..(25): SEQ ID NO: 5352; WAN024FYM_at; Start 916; Stop 940
gcaacctttgctcctgtttattggg

SEQ ID NO: 226240 - DNA, 25 bp, Artificial
  probe
  misc_feature (1)..(25): SEQ ID NO: 5352; WAN024FYM_at; Start 881; Stop 905
caatgggctgtgctttcggtttagc

SEQ ID NO: 226241 - DNA, 25 bp, Artificial
  probe
  misc_feature (1)..(25): SEQ ID NO: 5352; WAN024FYM_at; Start 149; Stop 173
actttatgattctgtccatgttggg

SEQ ID NO: 226242 - DNA, 25 bp, Artificial
  probe
  misc_feature (1)..(25): SEQ ID NO: 5352; WAN024FYM_at; Start 358; Stop 382
catgttttatcgtatgcaacagatg

SEQ ID NO: 226243 - DNA, 25 bp, Artificial
  probe
  misc_feature (1)..(25): SEQ ID NO: 5352; WAN024FYM_at; Start 902; Stop 926
tagcaggagtttctgcaacctttgc

SEQ ID NO: 226244 - DNA, 25 bp, Artificial
  probe
  misc_feature (1)..(25): SEQ ID NO: 5352; WAN024FYM_at; Start 869; Stop 893
ttttagtgattacaatgggctgtgc

SEQ ID NO: 226245 - DNA, 25 bp, Artificial
  probe
  misc_feature (1)..(25): SEQ ID NO: 5352; WAN024FYM_at; Start 1218; Stop 1242
cagagaatatctgataaatgctggg

SEQ ID NO: 226246 - DNA, 25 bp, Artificial
  probe
  misc_feature (1)..(25): SEQ ID NO: 5352; WAN024FYM_at; Start 399; Stop 423
tggtcttgaagagtttcgtattacg

SEQ ID NO: 226247 - DNA, 25 bp, Artificial
  probe
  misc_feature (1)..(25): SEQ ID NO: 5352; WAN024FYM_at; Start 98; Stop 122
taggtgcagagcaaattggagttta

SEQ ID NO: 226248 - DNA, 25 bp, Artificial
  probe
  misc_feature (1)..(25): SEQ ID NO: 5352; WAN024FYM_at; Start 528; Stop 552
taccctgcttggtcagttgattaca

SEQ ID NO: 226249 - DNA, 25 bp, Artificial
  probe
  misc_feature (1)..(25): SEQ ID NO: 5352; WAN024FYM_at; Start 980; Stop 1004
tgacaccggctttagtattttcggc

SEQ ID NO: 226250 - DNA, 25 bp, Artificial
  probe
  misc_feature (1)..(25): SEQ ID NO: 5352; WAN024FYM_at; Start 477; Stop 501
tgtaaaaagccctaatgatatctat

SEQ ID NO: 226251 - DNA, 25 bp, Artificial
  probe
  misc_feature (1)..(25): SEQ ID NO: 5352; WAN024FYM_at; Start 748; Stop 772
agtattccaaaagctctgattcaag

SEQ ID NO: 226252 - DNA, 25 bp, Artificial
  probe
  misc_feature (1)..(25): SEQ ID NO: 5352; WAN024FYM_at; Start 778; Stop 802
ggagctgtaatgttgcctcgaacag

SEQ ID NO: 226253 - DNA, 25 bp, Artificial
  probe
  misc_feature (1)..(25): SEQ ID NO: 5352; WAN024FYM_at; Start 318; Stop 342
tgtgaatagttttcagattgtagcc

SEQ ID NO: 226254 - DNA, 25 bp, Artificial
  probe
  misc_feature (1)..(25): SEQ ID NO: 5352; WAN024FYM_at; Start 763; Stop 787
ctgattcaagcctttggagctgtaa

SEQ ID NO: 226255 - DNA, 25 bp, Artificial
  probe
  misc_feature (1)..(25): SEQ ID NO: 5389; WAN024FYN_at; Start 111; Stop 135
taccaacaggttgggcttgcaagcc

SEQ ID NO: 226256 - DNA, 25 bp, Artificial
  probe
  misc_feature (1)..(25): SEQ ID NO: 5389; WAN024FYN_at; Start 148; Stop 172
gaaggctgctgtcccttctgtcgca

SEQ ID NO: 226257 - DNA, 25 bp, Artificial
  probe
  misc_feature (1)..(25): SEQ ID NO: 5389; WAN024FYN_at; Start 171; Stop 195
caaggattccataaccaatgttttg

SEQ ID NO: 226258 - DNA, 25 bp, Artificial
  probe
  misc_feature (1)..(25): SEQ ID NO: 5389; WAN024FYN_at; Start 64; Stop 88
tcctttgcgtacaaaacttgggata

SEQ ID NO: 226259 - DNA, 25 bp, Artificial
  probe
  misc_feature (1)..(25): SEQ ID NO: 5389; WAN024FYN_at; Start 139; Stop 163
actagcaaagaaggctgctgtccct

SEQ ID NO: 226260 - DNA, 25 bp, Artificial
  probe
  misc_feature (1)..(25): SEQ ID NO: 5389; WAN024FYN_at; Start 128; Stop 152
tgcaagccatgactagcaaagaagg

SEQ ID NO: 226261 - DNA, 25 bp, Artificial
  probe
  misc_feature (1)..(25): SEQ ID NO: 5389; WAN024FYN_at; Start 101; Stop 125
tcaccaatcttaccaacaggttggg

SEQ ID NO: 226262 - DNA, 25 bp, Artificial
  probe
  misc_feature (1)..(25): SEQ ID NO: 5389; WAN024FYN_at; Start 191; Stop 215
ttttggaaacgacgagccaagttca

SEQ ID NO: 226263 - DNA, 25 bp, Artificial
  probe
  misc_feature (1)..(25): SEQ ID NO: 5389; WAN024FYN_at; Start 231; Stop 255
catcatcagcgatggtaaagacgac

SEQ ID NO: 226264 - DNA, 25 bp, Artificial
  probe
  misc_feature (1)..(25): SEQ ID NO: 5389; WAN024FYN_at; Start 15; Stop 39
cgtcagcagttcgttttgttcctac

SEQ ID NO: 226265 - DNA, 25 bp, Artificial
  probe
  misc_feature (1)..(25): SEQ ID NO: 5389; WAN024FYN_at; Start 208; Stop 232
caagttcaaggcttcttctttggca

SEQ ID NO: 226266 - DNA, 25 bp, Artificial
  probe
  misc_feature (1)..(25): SEQ ID NO: 5389; WAN024FYN_at; Start 26; Stop 50
cgttttgttcctactgtgttaatga

SEQ ID NO: 226267 - DNA, 25 bp, Artificial
  probe
  misc_feature (1)..(25): SEQ ID NO: 5389; WAN024FYN_at; Start 134; Stop 158
ccatgactagcaaagaaggctgctg

SEQ ID NO: 226268 - DNA, 25 bp, Artificial
  probe
  misc_feature (1)..(25): SEQ ID NO: 5389; WAN024FYN_at; Start 9; Stop 33
catcttcgtcagcagttcgttttgt

SEQ ID NO: 226269 - DNA, 25 bp, Artificial
  probe
  misc_feature (1)..(25): SEQ ID NO: 5389; WAN024FYN_at; Start 48; Stop 72
tgatagcttgaattcttcctttgcg

SEQ ID NO: 226270 - DNA, 25 bp, Artificial
  probe
  misc_feature (1)..(25): SEQ ID NO: 5389; WAN024FYN_at; Start 196; Stop 220
gaaacgacgagccaagttcaaggct

SEQ ID NO: 226271 - DNA, 25 bp, Artificial
  probe
  misc_feature (1)..(25): SEQ ID NO: 5389; WAN024FYN_at; Start 166; Stop 190
tgtcgcaaggattccataaccaatg

SEQ ID NO: 226272 - DNA, 25 bp, Artificial
  probe
  misc_feature (1)..(25): SEQ ID NO: 5389; WAN024FYN_at; Start 248; Stop 272
aagacgacattaccaaaagttggca

SEQ ID NO: 226273 - DNA, 25 bp, Artificial
  probe
  misc_feature (1)..(25): SEQ ID NO: 5389; WAN024FYN_at; Start 3; Stop 27
gctcaccatcttcgtcagcagttcg

SEQ ID NO: 226274 - DNA, 25 bp, Artificial
  probe
  misc_feature (1)..(25): SEQ ID NO: 5389; WAN024FYN_at; Start 214; Stop 238
caaggcttcttctttggcatcatca

SEQ ID NO: 226275 - DNA, 25 bp, Artificial
  probe
  misc_feature (1)..(25): SEQ ID NO: 5389; WAN024FYN_at; Start 83; Stop 107
gggatatccttatcgtcatcaccaa

SEQ ID NO: 226276 - DNA, 25 bp, Artificial
  probe
  misc_feature (1)..(25): SEQ ID NO: 5389; WAN024FYN_at; Start 35; Stop 59
cctactgtgttaatgatagcttgaa

SEQ ID NO: 226277 - DNA, 25 bp, Artificial
  probe
  misc_feature (1)..(25): SEQ ID NO: 5389; WAN024FYN_at; Start 75; Stop 99
caaaacttgggatatccttatcgtc

SEQ ID NO: 226278 - DNA, 25 bp, Artificial
  probe
  misc_feature (1)..(25): SEQ ID NO: 5389; WAN024FYN_at; Start 185; Stop 209
ccaatgttttggaaacgacgagcca

SEQ ID NO: 226279 - DNA, 25 bp, Artificial
  probe
  misc_feature (1)..(25): SEQ ID NO: 5389; WAN024FYN_at; Start 236; Stop 260
tcagcgatggtaaagacgacattac

SEQ ID NO: 226280 - DNA, 25 bp, Artificial
  probe
  misc_feature (1)..(25): SEQ ID NO: 5389; WAN024FYN_at; Start 116; Stop 140
acaggttgggcttgcaagccatgac

SEQ ID NO: 226281 - DNA, 25 bp, Artificial
  probe
  misc_feature (1)..(25): SEQ ID NO: 5389; WAN024FYN_at; Start 53; Stop 77
gcttgaattcttcctttgcgtacaa

SEQ ID NO: 226282 - DNA, 25 bp, Artificial
  probe
  misc_feature (1)..(25): SEQ ID NO: 5389; WAN024FYN_at; Start 221; Stop 245
tcttctttggcatcatcagcgatgg

SEQ ID NO: 226283 - DNA, 25 bp, Artificial
  probe
  misc_feature (1)..(25): SEQ ID NO: 5389; WAN024FYN_at; Start 152; Stop 176
gctgctgtcccttctgtcgcaagga

SEQ ID NO: 226284 - DNA, 25 bp, Artificial
  probe
  misc_feature (1)..(25): SEQ ID NO: 5389; WAN024FYN_at; Start 96; Stop 120
cgtcatcaccaatcttaccaacagg

SEQ ID NO: 226285 - DNA, 25 bp, Artificial
  probe
  misc_feature (1)..(25): SEQ ID NO: 5389; WAN024FYN_at; Start 255; Stop 279
cattaccaaaagttggcaagtgtag

SEQ ID NO: 226286 - DNA, 25 bp, Artificial
  probe
  misc_feature (1)..(25): SEQ ID NO: 5389; WAN024FYN_at; Start 69; Stop 93
tgcgtacaaaacttgggatatcctt

SEQ ID NO: 226287 - DNA, 25 bp, Artificial
  probe
  misc_feature (1)..(25): SEQ ID NO: 5389; WAN024FYN_at; Start 159; Stop 183
tcccttctgtcgcaaggattccata

SEQ ID NO: 226288 - DNA, 25 bp, Artificial
  probe
  misc_feature (1)..(25): SEQ ID NO: 5389; WAN024FYN_at; Start 123; Stop 147
gggcttgcaagccatgactagcaaa

SEQ ID NO: 226289 - DNA, 25 bp, Artificial
  probe
  misc_feature (1)..(25): SEQ ID NO: 5340; WAN024FYO_at; Start 133; Stop 157
gcggacaagaactgggaagccaatc

SEQ ID NO: 226290 - DNA, 25 bp, Artificial
  probe
  misc_feature (1)..(25): SEQ ID NO: 5340; WAN024FYO_at; Start 20; Stop 44
tcgacaagaactgggtggtctggac

SEQ ID NO: 226291 - DNA, 25 bp, Artificial
  probe
  misc_feature (1)..(25): SEQ ID NO: 5340; WAN024FYO_at; Start 112; Stop 136
tccaccaagtacataagatgggcgg

SEQ ID NO: 226292 - DNA, 25 bp, Artificial
  probe
  misc_feature (1)..(25): SEQ ID NO: 5340; WAN024FYO_at; Start 29; Stop 53
actgggtggtctggactagccttaa

SEQ ID NO: 226293 - DNA, 25 bp, Artificial
  probe
  misc_feature (1)..(25): SEQ ID NO: 5340; WAN024FYO_at; Start 97; Stop 121
gatttccatggcacgtccaccaagt

SEQ ID NO: 226294 - DNA, 25 bp, Artificial
  probe
  misc_feature (1)..(25): SEQ ID NO: 5340; WAN024FYO_at; Start 117; Stop 141
caagtacataagatgggcggacaag

SEQ ID NO: 226295 - DNA, 25 bp, Artificial
  probe
  misc_feature (1)..(25): SEQ ID NO: 5340; WAN024FYO_at; Start 200; Stop 224
tgtcctggtggctgtggaatatcca

SEQ ID NO: 226296 - DNA, 25 bp, Artificial
  probe
  misc_feature (1)..(25): SEQ ID NO: 5340; WAN024FYO_at; Start 106; Stop 130
ggcacgtccaccaagtacataagat

SEQ ID NO: 226297 - DNA, 25 bp, Artificial
  probe
  misc_feature (1)..(25): SEQ ID NO: 5340; WAN024FYO_at; Start 141; Stop 165
gaactgggaagccaatcttgcgagc

SEQ ID NO: 226298 - DNA, 25 bp, Artificial
  probe
  misc_feature (1)..(25): SEQ ID NO: 5340; WAN024FYO_at; Start 244; Stop 268
gaagaggtcacggtcttcggcacga

SEQ ID NO: 226299 - DNA, 25 bp, Artificial
  probe
  misc_feature (1)..(25): SEQ ID NO: 5340; WAN024FYO_at; Start 249; Stop 273
ggtcacggtcttcggcacgatctag

SEQ ID NO: 226300 - DNA, 25 bp, Artificial
  probe
  misc_feature (1)..(25): SEQ ID NO: 5340; WAN024FYO_at; Start 54; Stop 78
cagcagttcgcatgtaagaacgaag

SEQ ID NO: 226301 - DNA, 25 bp, Artificial
  probe
  misc_feature (1)..(25): SEQ ID NO: 5340; WAN024FYO_at; Start 180; Stop 204
cttcttcattggtagccgtttgtcc

SEQ ID NO: 226302 - DNA, 25 bp, Artificial
  probe
  misc_feature (1)..(25): SEQ ID NO: 5340; WAN024FYO_at; Start 170; Stop 194
agagctgcttcttcttcattggtag

SEQ ID NO: 226303 - DNA, 25 bp, Artificial
  probe
  misc_feature (1)..(25): SEQ ID NO: 5340; WAN024FYO_at; Start 146; Stop 170
gggaagccaatcttgcgagctgcaa

SEQ ID NO: 226304 - DNA, 25 bp, Artificial
  probe
  misc_feature (1)..(25): SEQ ID NO: 5340; WAN024FYO_at; Start 14; Stop 38
taagagtcgacaagaactgggtggt

SEQ ID NO: 226305 - DNA, 25 bp, Artificial
  probe
  misc_feature (1)..(25): SEQ ID NO: 5340; WAN024FYO_at; Start 186; Stop 210
cattggtagccgtttgtcctggtgg

SEQ ID NO: 226306 - DNA, 25 bp, Artificial
  probe
  misc_feature (1)..(25): SEQ ID NO: 5340; WAN024FYO_at; Start 159; Stop 183
tgcgagctgcaagagctgcttcttc

SEQ ID NO: 226307 - DNA, 25 bp, Artificial
  probe
  misc_feature (1)..(25): SEQ ID NO: 5340; WAN024FYO_at; Start 64; Stop 88
catgtaagaacgaaggtcttcttcg

SEQ ID NO: 226308 - DNA, 25 bp, Artificial
  probe
  misc_feature (1)..(25): SEQ ID NO: 5340; WAN024FYO_at; Start 35; Stop 59
tggtctggactagccttaacagcag

SEQ ID NO: 226309 - DNA, 25 bp, Artificial
  probe
  misc_feature (1)..(25): SEQ ID NO: 5340; WAN024FYO_at; Start 195; Stop 219
ccgtttgtcctggtggctgtggaat

SEQ ID NO: 226310 - DNA, 25 bp, Artificial
  probe
  misc_feature (1)..(25): SEQ ID NO: 5340; WAN024FYO_at; Start 40; Stop 64
tggactagccttaacagcagttcgc

SEQ ID NO: 226311 - DNA, 25 bp, Artificial
  probe
  misc_feature (1)..(25): SEQ ID NO: 5340; WAN024FYO_at; Start 45; Stop 69
tagccttaacagcagttcgcatgta

SEQ ID NO: 226312 - DNA, 25 bp, Artificial
  probe
  misc_feature (1)..(25): SEQ ID NO: 5340; WAN024FYO_at; Start 10; Stop 34
gatataagagtcgacaagaactggg

SEQ ID NO: 226313 - DNA, 25 bp, Artificial
  probe
  misc_feature (1)..(25): SEQ ID NO: 5340; WAN024FYO_at; Start 153; Stop 177
caatcttgcgagctgcaagagctgc

SEQ ID NO: 226314 - DNA, 25 bp, Artificial
  probe
  misc_feature (1)..(25): SEQ ID NO: 5340; WAN024FYO_at; Start 205; Stop 229
tggtggctgtggaatatccaattct

SEQ ID NO: 226315 - DNA, 25 bp, Artificial
  probe
  misc_feature (1)..(25): SEQ ID NO: 5340; WAN024FYO_at; Start 1; Stop 25
ttgcccaacgatataagagtcgaca

SEQ ID NO: 226316 - DNA, 25 bp, Artificial
  probe
  misc_feature (1)..(25): SEQ ID NO: 5340; WAN024FYO_at; Start 87; Stop 111
cgttttcaacgatttccatggcacg

SEQ ID NO: 226317 - DNA, 25 bp, Artificial
  probe
  misc_feature (1)..(25): SEQ ID NO: 5340; WAN024FYO_at; Start 60; Stop 84
ttcgcatgtaagaacgaaggtcttc

SEQ ID NO: 226318 - DNA, 25 bp, Artificial
  probe
  misc_feature (1)..(25): SEQ ID NO: 5340; WAN024FYO_at; Start 230; Stop 254
ttgagagcttgctcgaagaggtcac

SEQ ID NO: 226319 - DNA, 25 bp, Artificial
  probe
  misc_feature (1)..(25): SEQ ID NO: 5340; WAN024FYO_at; Start 222; Stop 246
ccaattctttgagagcttgctcgaa

SEQ ID NO: 226320 - DNA, 25 bp, Artificial
  probe
  misc_feature (1)..(25): SEQ ID NO: 5340; WAN024FYO_at; Start 25; Stop 49
aagaactgggtggtctggactagcc

SEQ ID NO: 226321 - DNA, 25 bp, Artificial
  probe
  misc_feature (1)..(25): SEQ ID NO: 5340; WAN024FYO_at; Start 236; Stop 260
gcttgctcgaagaggtcacggtctt

SEQ ID NO: 226322 - DNA, 25 bp, Artificial
  probe
  misc_feature (1)..(25): SEQ ID NO: 5340; WAN024FYO_at; Start 216; Stop 240
gaatatccaattctttgagagcttg

SEQ ID NO: 226323 - DNA, 25 bp, Artificial
  probe
  misc_feature (1)..(25): SEQ ID NO: 5572; WAN024FYP_at; Start 139; Stop 163
gacttctccagtcgccttcatttgt

SEQ ID NO: 226324 - DNA, 25 bp, Artificial
  probe
  misc_feature (1)..(25): SEQ ID NO: 5572; WAN024FYP_at; Start 90; Stop 114
agcggcaggccttgagaagagattc

SEQ ID NO: 226325 - DNA, 25 bp, Artificial
  probe
  misc_feature (1)..(25): SEQ ID NO: 5572; WAN024FYP_at; Start 230; Stop 254
tagtcaagggctggttcaaacatgg

SEQ ID NO: 226326 - DNA, 25 bp, Artificial
  probe
  misc_feature (1)..(25): SEQ ID NO: 5572; WAN024FYP_at; Start 126; Stop 150
gaccgattgccatgacttctccagt

SEQ ID NO: 226327 - DNA, 25 bp, Artificial
  probe
  misc_feature (1)..(25): SEQ ID NO: 5572; WAN024FYP_at; Start 189; Stop 213
caaacttgtcaaatgggaaacgtgg

SEQ ID NO: 226328 - DNA, 25 bp, Artificial
  probe
  misc_feature (1)..(25): SEQ ID NO: 5572; WAN024FYP_at; Start 116; Stop 140
tcgatgttacgaccgattgccatga

SEQ ID NO: 226329 - DNA, 25 bp, Artificial
  probe
  misc_feature (1)..(25): SEQ ID NO: 5572; WAN024FYP_at; Start 53; Stop 77
tcaggtatttcattgtggtgcaccc

SEQ ID NO: 226330 - DNA, 25 bp, Artificial
  probe
  misc_feature (1)..(25): SEQ ID NO: 5572; WAN024FYP_at; Start 239; Stop 263
gctggttcaaacatggcataggttg

SEQ ID NO: 226331 - DNA, 25 bp, Artificial
  probe
  misc_feature (1)..(25): SEQ ID NO: 5572; WAN024FYP_at; Start 2; Stop 26
tgggctttgacaaccttttcaatca

SEQ ID NO: 226332 - DNA, 25 bp, Artificial
  probe
  misc_feature (1)..(25): SEQ ID NO: 5572; WAN024FYP_at; Start 110; Stop 134
gattcctcgatgttacgaccgattg

SEQ ID NO: 226333 - DNA, 25 bp, Artificial
  probe
  misc_feature (1)..(25): SEQ ID NO: 5572; WAN024FYP_at; Start 36; Stop 60
cagaaactgctgcaagttcaggtat

SEQ ID NO: 226334 - DNA, 25 bp, Artificial
  probe
  misc_feature (1)..(25): SEQ ID NO: 5572; WAN024FYP_at; Start 28; Stop 52
ggcatcatcagaaactgctgcaagt

SEQ ID NO: 226335 - DNA, 25 bp, Artificial
  probe
  misc_feature (1)..(25): SEQ ID NO: 5572; WAN024FYP_at; Start 161; Stop 185
tgtgtaccgagacggcgttcaccct

SEQ ID NO: 226336 - DNA, 25 bp, Artificial
  probe
  misc_feature (1)..(25): SEQ ID NO: 5572; WAN024FYP_at; Start 130; Stop 154
gattgccatgacttctccagtcgcc

SEQ ID NO: 226337 - DNA, 25 bp, Artificial
  probe
  misc_feature (1)..(25): SEQ ID NO: 5572; WAN024FYP_at; Start 20; Stop 44
tcaatcaaggcatcatcagaaactg

SEQ ID NO: 226338 - DNA, 25 bp, Artificial
  probe
  misc_feature (1)..(25): SEQ ID NO: 5572; WAN024FYP_at; Start 219; Stop 243
tagcaactacgtagtcaagggctgg

SEQ ID NO: 226339 - DNA, 25 bp, Artificial
  probe
  misc_feature (1)..(25): SEQ ID NO: 5572; WAN024FYP_at; Start 209; Stop 233
cgtggaatcttagcaactacgtagt

SEQ ID NO: 226340 - DNA, 25 bp, Artificial
  probe
  misc_feature (1)..(25): SEQ ID NO: 5572; WAN024FYP_at; Start 10; Stop 34
gacaaccttttcaatcaaggcatca

SEQ ID NO: 226341 - DNA, 25 bp, Artificial
  probe
  misc_feature (1)..(25): SEQ ID NO: 5572; WAN024FYP_at; Start 97; Stop 121
ggccttgagaagagattcctcgatg

SEQ ID NO: 226342 - DNA, 25 bp, Artificial
  probe
  misc_feature (1)..(25): SEQ ID NO: 5572; WAN024FYP_at; Start 24; Stop 48
tcaaggcatcatcagaaactgctgc

SEQ ID NO: 226343 - DNA, 25 bp, Artificial
  probe
  misc_feature (1)..(25): SEQ ID NO: 5572; WAN024FYP_at; Start 105; Stop 129
gaagagattcctcgatgttacgacc

SEQ ID NO: 226344 - DNA, 25 bp, Artificial
  probe
  misc_feature (1)..(25): SEQ ID NO: 5572; WAN024FYP_at; Start 195; Stop 219
tgtcaaatgggaaacgtggaatctt

SEQ ID NO: 226345 - DNA, 25 bp, Artificial
  probe
  misc_feature (1)..(25): SEQ ID NO: 5572; WAN024FYP_at; Start 66; Stop 90
tgtggtgcaccccaatttcaaggga

SEQ ID NO: 226346 - DNA, 25 bp, Artificial
  probe
  misc_feature (1)..(25): SEQ ID NO: 5572; WAN024FYP_at; Start 145; Stop 169
tccagtcgccttcatttgtgtaccg

SEQ ID NO: 226347 - DNA, 25 bp, Artificial
  probe
  misc_feature (1)..(25): SEQ ID NO: 5572; WAN024FYP_at; Start 153; Stop 177
ccttcatttgtgtaccgagacggcg

SEQ ID NO: 226348 - DNA, 25 bp, Artificial
  probe
  misc_feature (1)..(25): SEQ ID NO: 5572; WAN024FYP_at; Start 234; Stop 258
caagggctggttcaaacatggcata

SEQ ID NO: 226349 - DNA, 25 bp, Artificial
  probe
  misc_feature (1)..(25): SEQ ID NO: 5572; WAN024FYP_at; Start 157; Stop 181
catttgtgtaccgagacggcgttca

SEQ ID NO: 226350 - DNA, 25 bp, Artificial
  probe
  misc_feature (1)..(25): SEQ ID NO: 5572; WAN024FYP_at; Start 43; Stop 67
tgctgcaagttcaggtatttcattg

SEQ ID NO: 226351 - DNA, 25 bp, Artificial
  probe
  misc_feature (1)..(25): SEQ ID NO: 5572; WAN024FYP_at; Start 175; Stop 199
gcgttcacccttttcaaacttgtca

SEQ ID NO: 226352 - DNA, 25 bp, Artificial
  probe
  misc_feature (1)..(25): SEQ ID NO: 5572; WAN024FYP_at; Start 71; Stop 95
tgcaccccaatttcaagggagcggc

SEQ ID NO: 226353 - DNA, 25 bp, Artificial
  probe
  misc_feature (1)..(25): SEQ ID NO: 5572; WAN024FYP_at; Start 224; Stop 248
actacgtagtcaagggctggttcaa

SEQ ID NO: 226354 - DNA, 25 bp, Artificial
  probe
  misc_feature (1)..(25): SEQ ID NO: 5572; WAN024FYP_at; Start 56; Stop 80
ggtatttcattgtggtgcaccccaa

SEQ ID NO: 226355 - DNA, 25 bp, Artificial
  probe
  misc_feature (1)..(25): SEQ ID NO: 5572; WAN024FYP_at; Start 120; Stop 144
tgttacgaccgattgccatgacttc

SEQ ID NO: 226356 - DNA, 25 bp, Artificial
  probe
  misc_feature (1)..(25): SEQ ID NO: 5572; WAN024FYP_at; Start 77; Stop 101
ccaatttcaagggagcggcaggcct

SEQ ID NO: 226357 - DNA, 25 bp, Artificial
  probe
  misc_feature (1)..(25): SEQ ID NO: 3518; WAN024FYQ-3_at; Start 796; Stop 820
ttcaggagaccatcgcagactacac

SEQ ID NO: 226358 - DNA, 25 bp, Artificial
  probe
  misc_feature (1)..(25): SEQ ID NO: 3518; WAN024FYQ-3_at; Start 548; Stop 572
tggacgtgccatggaaatcgttgaa

SEQ ID NO: 226359 - DNA, 25 bp, Artificial
  probe
  misc_feature (1)..(25): SEQ ID NO: 3518; WAN024FYQ-3_at; Start 123; Stop 147
tacgcaaccgttcactctgttaagg

SEQ ID NO: 226360 - DNA, 25 bp, Artificial
  probe
  misc_feature (1)..(25): SEQ ID NO: 3518; WAN024FYQ-3_at; Start 1038; Stop 1062
gaaagcacccgtgttcatatcaagg

SEQ ID NO: 226361 - DNA, 25 bp, Artificial
  probe
  misc_feature (1)..(25): SEQ ID NO: 3518; WAN024FYQ-3_at; Start 1238; Stop 1262
tgatgatgccaaagaagaagccttg

SEQ ID NO: 226362 - DNA, 25 bp, Artificial
  probe
  misc_feature (1)..(25): SEQ ID NO: 3518; WAN024FYQ-3_at; Start 742; Stop 766
tccactcaggtgactcaatggctgt

SEQ ID NO: 226363 - DNA, 25 bp, Artificial
  probe
  misc_feature (1)..(25): SEQ ID NO: 3518; WAN024FYQ-3_at; Start 579; Stop 603
gaagaccttcgttcttacatgcgaa

SEQ ID NO: 226364 - DNA, 25 bp, Artificial
  probe
  misc_feature (1)..(25): SEQ ID NO: 3518; WAN024FYQ-3_at; Start 1105; Stop 1129
tgctcggtcctgaaatgaagtcaac

SEQ ID NO: 226365 - DNA, 25 bp, Artificial
  probe
  misc_feature (1)..(25): SEQ ID NO: 3518; WAN024FYQ-3_at; Start 900; Stop 924
attgaggtcaatccacgtgccagcc

SEQ ID NO: 226366 - DNA, 25 bp, Artificial
  probe
  misc_feature (1)..(25): SEQ ID NO: 3518; WAN024FYQ-3_at; Start 1386; Stop 1410
gatatcccaagttttgtacgcaaag

SEQ ID NO: 226367 - DNA, 25 bp, Artificial
  probe
  misc_feature (1)..(25): SEQ ID NO: 3518; WAN024FYQ-3_at; Start 417; Stop 441
ttcgagcaagctctcaaagaattgg

SEQ ID NO: 226368 - DNA, 25 bp, Artificial
  probe
  misc_feature (1)..(25): SEQ ID NO: 3518; WAN024FYQ-3_at; Start 341; Stop 365
gccattggcaaaagcaggtgtgacc

SEQ ID NO: 226369 - DNA, 25 bp, Artificial
  probe
  misc_feature (1)..(25): SEQ ID NO: 3518; WAN024FYQ-3_at; Start 402; Stop 426
gaagaccgtgacctcttcgagcaag

SEQ ID NO: 226370 - DNA, 25 bp, Artificial
  probe
  misc_feature (1)..(25): SEQ ID NO: 3518; WAN024FYQ-3_at; Start 532; Stop 556
catcttatgtacttggtggacgtgc

SEQ ID NO: 226371 - DNA, 25 bp, Artificial
  probe
  misc_feature (1)..(25): SEQ ID NO: 3518; WAN024FYQ-3_at; Start 727; Stop 751
tcgaacgtgctggtgtccactcagg

SEQ ID NO: 226372 - DNA, 25 bp, Artificial
  probe
  misc_feature (1)..(25): SEQ ID NO: 3518; WAN024FYQ-3_at; Start 1502; Stop 1526
ggtgcccctcttcacagcgctagat

SEQ ID NO: 226373 - DNA, 25 bp, Artificial
  probe
  misc_feature (1)..(25): SEQ ID NO: 3518; WAN024FYQ-3_at; Start 459; Stop 483
ggacaaacggctaccaatgaagaag

SEQ ID NO: 226374 - DNA, 25 bp, Artificial
  probe
  misc_feature (1)..(25): SEQ ID NO: 3518; WAN024FYQ-3_at; Start 823; Stop 847
aacgcttagcaatcggtcttcactg

SEQ ID NO: 226375 - DNA, 25 bp, Artificial
  probe
  misc_feature (1)..(25): SEQ ID NO: 3518; WAN024FYQ-3_at; Start 1438; Stop 1462
taggaacaaaacgaactgctgacga

SEQ ID NO: 226376 - DNA, 25 bp, Artificial
  probe
  misc_feature (1)..(25): SEQ ID NO: 3518; WAN024FYQ-3_at; Start 439; Stop 463
tggatattccacagccaccaggaca

SEQ ID NO: 226377 - DNA, 25 bp, Artificial
  probe
  misc_feature (1)..(25): SEQ ID NO: 3518; WAN024FYQ-3_at; Start 266; Stop 290
gaacgtcattgacttggaacaacca

SEQ ID NO: 226378 - DNA, 25 bp, Artificial
  probe
  misc_feature (1)..(25): SEQ ID NO: 3518; WAN024FYQ-3_at; Start 138; Stop 162
tctgttaaggctatccaggcagctg

SEQ ID NO: 226379 - DNA, 25 bp, Artificial
  probe
  misc_feature (1)..(25): SEQ ID NO: 3518; WAN024FYQ-3_at; Start 594; Stop 618
tacatgcgaactgctgttaaggcta

SEQ ID NO: 226380 - DNA, 25 bp, Artificial
  probe
  misc_feature (1)..(25): SEQ ID NO: 3518; WAN024FYQ-3_at; Start 1470; Stop 1494
gagcaaattcgtcgttcagccattg

SEQ ID NO: 226381 - DNA, 25 bp, Artificial
  probe
  misc_feature (1)..(25): SEQ ID NO: 3518; WAN024FYQ-3_at; Start 1283; Stop 1307
aaacattggttatggaatccttgcg

SEQ ID NO: 226382 - DNA, 25 bp, Artificial
  probe
  misc_feature (1)..(25): SEQ ID NO: 3518; WAN024FYQ-3_at; Start 178; Stop 202
tcatgaactcaaacccagagaccgt

SEQ ID NO: 226383 - DNA, 25 bp, Artificial
  probe
  misc_feature (1)..(25): SEQ ID NO: 3518; WAN024FYQ-3_at; Start 781; Stop 805
ccttgtcgcaaaaggttcaggagac

SEQ ID NO: 226384 - DNA, 25 bp, Artificial
  probe
  misc_feature (1)..(25): SEQ ID NO: 3518; WAN024FYQ-3_at; Start 288; Stop 312
ccaaagggagttatcgttcagttcg

SEQ ID NO: 226385 - DNA, 25 bp, Artificial
  probe
  misc_feature (1)..(25): SEQ ID NO: 3518; WAN024FYQ-3_at; Start 305; Stop 329
tcagttcggtggtcaaacagccatc

SEQ ID NO: 226386 - DNA, 25 bp, Artificial
  probe
  misc_feature (1)..(25): SEQ ID NO: 3518; WAN024FYQ-3_at; Start 79; Stop 103
taggttcaggtccaatccgtatcgg

SEQ ID NO: 226387 - DNA, 25 bp, Artificial
  probe
  misc_feature (1)..(25): SEQ ID NO: 3518; WAN024FYQ-3_at; Start 506; Stop 530
gattggcttcccagttcttgtccgc

SEQ ID NO: 226388 - DNA, 25 bp, Artificial
  probe
  misc_feature (1)..(25): SEQ ID NO: 3518; WAN024FYQ-3_at; Start 1341; Stop 1365
ggcttgcaagcccaacctgttggta

SEQ ID NO: 226389 - DNA, 25 bp, Artificial
  probe
  misc_feature (1)..(25): SEQ ID NO: 3518; WAN024FYQ-3_at; Start 365; Stop 389
catccttggtacacaggttgctgac

SEQ ID NO: 226390 - DNA, 25 bp, Artificial
  probe
  misc_feature (1)..(25): SEQ ID NO: 3518; WAN024FYQ-3_at; Start 1089; Stop 1113
gctaaggtagacagcttgctcggtc

SEQ ID NO: 226391 - DNA, 25 bp, Artificial
  probe
  misc_feature (1)..(25): SEQ ID NO: 2008; WAN024FYQ-5_at; Start 946; Stop 970
tatccgattgctaagttggctgcca

SEQ ID NO: 226392 - DNA, 25 bp, Artificial
  probe
  misc_feature (1)..(25): SEQ ID NO: 2008; WAN024FYQ-5_at; Start 966; Stop 990
tgccaagattgcagtaggtttgacc

SEQ ID NO: 226393 - DNA, 25 bp, Artificial
  probe
  misc_feature (1)..(25): SEQ ID NO: 2008; WAN024FYQ-5_at; Start 1051; Stop 1075
gactacgtagttgctaagattccac

SEQ ID NO: 226394 - DNA, 25 bp, Artificial
  probe
  misc_feature (1)..(25): SEQ ID NO: 2008; WAN024FYQ-5_at; Start 711; Stop 735
tgacccagttgggattcacacaggg

SEQ ID NO: 226395 - DNA, 25 bp, Artificial
  probe
  misc_feature (1)..(25): SEQ ID NO: 2008; WAN024FYQ-5_at; Start 50; Stop 74
cgattattattggtcaggctgctga

SEQ ID NO: 226396 - DNA, 25 bp, Artificial
  probe
  misc_feature (1)..(25): SEQ ID NO: 2008; WAN024FYQ-5_at; Start 1104; Stop 1128
tgaacgccgtctcggtacacaaatg

SEQ ID NO: 226397 - DNA, 25 bp, Artificial
  probe
  misc_feature (1)..(25): SEQ ID NO: 2008; WAN024FYQ-5_at; Start 906; Stop 930
tgtatcacgttcgtcagcccttgct

SEQ ID NO: 226398 - DNA, 25 bp, Artificial
  probe
  misc_feature (1)..(25): SEQ ID NO: 2008; WAN024FYQ-5_at; Start 780; Stop 804
aaaccaaatgcttcgtgatgcgagc

SEQ ID NO: 226399 - DNA, 25 bp, Artificial
  probe
  misc_feature (1)..(25): SEQ ID NO: 2008; WAN024FYQ-5_at; Start 883; Stop 907
tatgttatcgaagtaaaccctcgtg

SEQ ID NO: 226400 - DNA, 25 bp, Artificial
  probe
  misc_feature (1)..(25): SEQ ID NO: 2008; WAN024FYQ-5_at; Start 664; Stop 688
cgtgactcagctgacaatgccttgg

SEQ ID NO: 226401 - DNA, 25 bp, Artificial
  probe
  misc_feature (1)..(25): SEQ ID NO: 2008; WAN024FYQ-5_at; Start 361; Stop 385
tctgccattgaccaagcggaggacc

SEQ ID NO: 226402 - DNA, 25 bp, Artificial
  probe
  misc_feature (1)..(25): SEQ ID NO: 2008; WAN024FYQ-5_at; Start 145; Stop 169
tcaaatcctgcaaccatcatgacgg

SEQ ID NO: 226403 - DNA, 25 bp, Artificial
  probe
  misc_feature (1)..(25): SEQ ID NO: 2008; WAN024FYQ-5_at; Start 1169; Stop 1193
aggaatctcttctcaaggcctgccg

SEQ ID NO: 226404 - DNA, 25 bp, Artificial
  probe
  misc_feature (1)..(25): SEQ ID NO: 2008; WAN024FYQ-5_at; Start 735; Stop 759
ggattccattgtatttgcccctgcg

SEQ ID NO: 226405 - DNA, 25 bp, Artificial
  probe
  misc_feature (1)..(25): SEQ ID NO: 2008; WAN024FYQ-5_at; Start 1154; Stop 1178
tcggtcgtaacatcgaggaatctct

SEQ ID NO: 226406 - DNA, 25 bp, Artificial
  probe
  misc_feature (1)..(25): SEQ ID NO: 2008; WAN024FYQ-5_at; Start 250; Stop 274
gatgccttgctaccaacactcggtg

SEQ ID NO: 226407 - DNA, 25 bp, Artificial
  probe
  misc_feature (1)..(25): SEQ ID NO: 2008; WAN024FYQ-5_at; Start 279; Stop 303
gacaggtctcaacatggccatggaa

SEQ ID NO: 226408 - DNA, 25 bp, Artificial
  probe
  misc_feature (1)..(25): SEQ ID NO: 2008; WAN024FYQ-5_at; Start 161; Stop 185
tcatgacggacaaggaaattgctga

SEQ ID NO: 226409 - DNA, 25 bp, Artificial
  probe
  misc_feature (1)..(25): SEQ ID NO: 2008; WAN024FYQ-5_at; Start 472; Stop 496
tttgcagcgacaattggctacccag

SEQ ID NO: 226410 - DNA, 25 bp, Artificial
  probe
  misc_feature (1)..(25): SEQ ID NO: 2008; WAN024FYQ-5_at; Start 1474; Stop 1498
gaccgtaagattgctgaactctggg

SEQ ID NO: 226411 - DNA, 25 bp, Artificial
  probe
  misc_feature (1)..(25): SEQ ID NO: 2008; WAN024FYQ-5_at; Start 987; Stop 1011
gaccttggatgaggttataaaccca

SEQ ID NO: 226412 - DNA, 25 bp, Artificial
  probe
  misc_feature (1)..(25): SEQ ID NO: 2008; WAN024FYQ-5_at; Start 1139; Stop 1163
gagaagtcatggcaatcggtcgtaa

SEQ ID NO: 226413 - DNA, 25 bp, Artificial
  probe
  misc_feature (1)..(25): SEQ ID NO: 2008; WAN024FYQ-5_at; Start 1119; Stop 1143
tacacaaatgaaggcgactggagaa

SEQ ID NO: 226414 - DNA, 25 bp, Artificial
  probe
  misc_feature (1)..(25): SEQ ID NO: 2008; WAN024FYQ-5_at; Start 1271; Stop 1295
ttgtcaaagcccaagatgaccgtct

SEQ ID NO: 226415 - DNA, 25 bp, Artificial
  probe
  misc_feature (1)..(25): SEQ ID NO: 2008; WAN024FYQ-5_at; Start 1068; Stop 1092
gattccacgtttcccatttgacaag

SEQ ID NO: 226416 - DNA, 25 bp, Artificial
  probe
  misc_feature (1)..(25): SEQ ID NO: 2008; WAN024FYQ-5_at; Start 266; Stop 290
cactcggtggtcagacaggtctcaa

SEQ ID NO: 226417 - DNA, 25 bp, Artificial
  probe
  misc_feature (1)..(25): SEQ ID NO: 2008; WAN024FYQ-5_at; Start 1036; Stop 1060
tttgaaccagcccttgactacgtag

SEQ ID NO: 226418 - DNA, 25 bp, Artificial
  probe
  misc_feature (1)..(25): SEQ ID NO: 2008; WAN024FYQ-5_at; Start 1407; Stop 1431
gcaagaattgggtgctcatccacaa

SEQ ID NO: 226419 - DNA, 25 bp, Artificial
  probe
  misc_feature (1)..(25): SEQ ID NO: 2008; WAN024FYQ-5_at; Start 928; Stop 952
gcttctaaagcgacaggatatccga

SEQ ID NO: 226420 - DNA, 25 bp, Artificial
  probe
  misc_feature (1)..(25): SEQ ID NO: 2008; WAN024FYQ-5_at; Start 542; Stop 566
tgtgtgccaacgagaaagaattgcg

SEQ ID NO: 226421 - DNA, 25 bp, Artificial
  probe
  misc_feature (1)..(25): SEQ ID NO: 2008; WAN024FYQ-5_at; Start 487; Stop 511
ggctacccagtcatcgttcgtccag

SEQ ID NO: 226422 - DNA, 25 bp, Artificial
  probe
  misc_feature (1)..(25): SEQ ID NO: 2008; WAN024FYQ-5_at; Start 813; Stop 837
tattcgtgccctcaagattgaaggt

SEQ ID NO: 226423 - DNA, 25 bp, Artificial
  probe
  misc_feature (1)..(25): SEQ ID NO: 2008; WAN024FYQ-5_at; Start 1208; Stop 1232
gggtgcaccacaatgaaatacctga

SEQ ID NO: 226424 - DNA, 25 bp, Artificial
  probe
  misc_feature (1)..(25): SEQ ID NO: 2008; WAN024FYQ-5_at; Start 650; Stop 674
aatacgaagtgatgcgtgactcagc

SEQ ID NO: 226425 - DNA, 25 bp, Artificial
  probe
  misc_feature (1)..(25): SEQ ID NO: 1970; WAN024FYR_at; Start 317; Stop 341
tgtactatgatgttaatgaaatcgc

SEQ ID NO: 226426 - DNA, 25 bp, Artificial
  probe
  misc_feature (1)..(25): SEQ ID NO: 1970; WAN024FYR_at; Start 164; Stop 188
tatctatgaaggcaatcaatgtgat

SEQ ID NO: 226427 - DNA, 25 bp, Artificial
  probe
  misc_feature (1)..(25): SEQ ID NO: 1970; WAN024FYR_at; Start 330; Stop 354
taatgaaatcgcaaatctgatacgg

SEQ ID NO: 226428 - DNA, 25 bp, Artificial
  probe
  misc_feature (1)..(25): SEQ ID NO: 1970; WAN024FYR_at; Start 869; Stop 893
tggcatggcagaaaagtcctatttg

SEQ ID NO: 226429 - DNA, 25 bp, Artificial
  probe
  misc_feature (1)..(25): SEQ ID NO: 1970; WAN024FYR_at; Start 577; Stop 601
tggagtttggtattgagccttgcat

SEQ ID NO: 226430 - DNA, 25 bp, Artificial
  probe
  misc_feature (1)..(25): SEQ ID NO: 1970; WAN024FYR_at; Start 955; Stop 979
tataatcttgggtatagcaatagct

SEQ ID NO: 226431 - DNA, 25 bp, Artificial
  probe
  misc_feature (1)..(25): SEQ ID NO: 1970; WAN024FYR_at; Start 431; Stop 455
tatccccaacggtttatgtgttgaa

SEQ ID NO: 226432 - DNA, 25 bp, Artificial
  probe
  misc_feature (1)..(25): SEQ ID NO: 1970; WAN024FYR_at; Start 111; Stop 135
ggcgactctgttacttgtggtatca

SEQ ID NO: 226433 - DNA, 25 bp, Artificial
  probe
  misc_feature (1)..(25): SEQ ID NO: 1970; WAN024FYR_at; Start 302; Stop 326
tgatgattttgcagatgtactatga

SEQ ID NO: 226434 - DNA, 25 bp, Artificial
  probe
  misc_feature (1)..(25): SEQ ID NO: 1970; WAN024FYR_at; Start 591; Stop 615
gagccttgcattgatatttcaaacg

SEQ ID NO: 226435 - DNA, 25 bp, Artificial
  probe
  misc_feature (1)..(25): SEQ ID NO: 1970; WAN024FYR_at; Start 995; Stop 1019
ctcaaggagggataatgttggcttc

SEQ ID NO: 226436 - DNA, 25 bp, Artificial
  probe
  misc_feature (1)..(25): SEQ ID NO: 1970; WAN024FYR_at; Start 476; Stop 500
tagtagaagggtactataatcttca

SEQ ID NO: 226437 - DNA, 25 bp, Artificial
  probe
  misc_feature (1)..(25): SEQ ID NO: 1970; WAN024FYR_at; Start 396; Stop 420
cctattttggcttattggtagtgta

SEQ ID NO: 226438 - DNA, 25 bp, Artificial
  probe
  misc_feature (1)..(25): SEQ ID NO: 1970; WAN024FYR_at; Start 381; Stop 405
agcaattggctctctcctattttgg

SEQ ID NO: 226439 - DNA, 25 bp, Artificial
  probe
  misc_feature (1)..(25): SEQ ID NO: 1970; WAN024FYR_at; Start 854; Stop 878
ataaggctggttttttggcatggca

SEQ ID NO: 226440 - DNA, 25 bp, Artificial
  probe
  misc_feature (1)..(25): SEQ ID NO: 1970; WAN024FYR_at; Start 1068; Stop 1092
gaatgatttgaagttttctgcgcta

SEQ ID NO: 226441 - DNA, 25 bp, Artificial
  probe
  misc_feature (1)..(25): SEQ ID NO: 1970; WAN024FYR_at; Start 418; Stop 442
gtatttcatattatatccccaacgg

SEQ ID NO: 226442 - DNA, 25 bp, Artificial
  probe
  misc_feature (1)..(25): SEQ ID NO: 1970; WAN024FYR_at; Start 839; Stop 863
tacgctttgatgattataaggctgg

SEQ ID NO: 226443 - DNA, 25 bp, Artificial
  probe
  misc_feature (1)..(25): SEQ ID NO: 1970; WAN024FYR_at; Start 1014; Stop 1038
ggcttcgtattacttttatccagta

SEQ ID NO: 226444 - DNA, 25 bp, Artificial
  probe
  misc_feature (1)..(25): SEQ ID NO: 1970; WAN024FYR_at; Start 249; Stop 273
taagatttctgagacaagtttcgtc

SEQ ID NO: 226445 - DNA, 25 bp, Artificial
  probe
  misc_feature (1)..(25): SEQ ID NO: 1970; WAN024FYR_at; Start 666; Stop 690
tatgacaactacgtcaacaacaggg

SEQ ID NO: 226446 - DNA, 25 bp, Artificial
  probe
  misc_feature (1)..(25): SEQ ID NO: 1970; WAN024FYR_at; Start 1188; Stop 1212
tagagattgtcatgagaaacagtac

SEQ ID NO: 226447 - DNA, 25 bp, Artificial
  probe
  misc_feature (1)..(25): SEQ ID NO: 1970; WAN024FYR_at; Start 896; Stop 920
gattaggtatttcagacggtcttag

SEQ ID NO: 226448 - DNA, 25 bp, Artificial
  probe
  misc_feature (1)..(25): SEQ ID NO: 1970; WAN024FYR_at; Start 16; Stop 40
gatggtttgctggactatatatttc

SEQ ID NO: 226449 - DNA, 25 bp, Artificial
  probe
  misc_feature (1)..(25): SEQ ID NO: 1970; WAN024FYR_at; Start 180; Stop 204
caatgtgattgtgtcgcgttcttta

SEQ ID NO: 226450 - DNA, 25 bp, Artificial
  probe
  misc_feature (1)..(25): SEQ ID NO: 1970; WAN024FYR_at; Start 724; Stop 748
ttattttcaaaaacaagtggtgtga

SEQ ID NO: 226451 - DNA, 25 bp, Artificial
  probe
  misc_feature (1)..(25): SEQ ID NO: 1970; WAN024FYR_at; Start 982; Stop 1006
tttgttgttttagctcaaggaggga

SEQ ID NO: 226452 - DNA, 25 bp, Artificial
  probe
  misc_feature (1)..(25): SEQ ID NO: 1970; WAN024FYR_at; Start 923; Stop 947
ccattgaacaacatatggatagaac

SEQ ID NO: 226453 - DNA, 25 bp, Artificial
  probe
  misc_feature (1)..(25): SEQ ID NO: 1970; WAN024FYR_at; Start 4; Stop 28
catgttagattagatggtttgctgg

SEQ ID NO: 226454 - DNA, 25 bp, Artificial
  probe
  misc_feature (1)..(25): SEQ ID NO: 1970; WAN024FYR_at; Start 95; Stop 119
atggactagggaaatgggcgactct

SEQ ID NO: 226455 - DNA, 25 bp, Artificial
  probe
  misc_feature (1)..(25): SEQ ID NO: 1970; WAN024FYR_at; Start 803; Stop 827
tatgggataataaatctggaactgg

SEQ ID NO: 226456 - DNA, 25 bp, Artificial
  probe
  misc_feature (1)..(25): SEQ ID NO: 1970; WAN024FYR_at; Start 737; Stop 761
caagtggtgtgaagagatatgtttc

SEQ ID NO: 226457 - DNA, 25 bp, Artificial
  probe
  misc_feature (1)..(25): SEQ ID NO: 1970; WAN024FYR_at; Start 819; Stop 843
tggaactggttcagcaactatacgc

SEQ ID NO: 226458 - DNA, 25 bp, Artificial
  probe
  misc_feature (1)..(25): SEQ ID NO: 1970; WAN024FYR_at; Start 558; Stop 582
ttttgctgaagcacctatgtggagt

SEQ ID NO: 226459 - DNA, 25 bp, Artificial
  probe
  misc_feature (1)..(25): SEQ ID NO: 5048; WAN024FYS_at; Start 57; Stop 81
gatcaattgggaagacatcgatgaa

SEQ ID NO: 226460 - DNA, 25 bp, Artificial
  probe
  misc_feature (1)..(25): SEQ ID NO: 5048; WAN024FYS_at; Start 36; Stop 60
caatgctcaagtctgtaaatcgatc

SEQ ID NO: 226461 - DNA, 25 bp, Artificial
  probe
  misc_feature (1)..(25): SEQ ID NO: 5048; WAN024FYS_at; Start 23; Stop 47
tagctcttgtcgacaatgctcaagt

SEQ ID NO: 226462 - DNA, 25 bp, Artificial
  probe
  misc_feature (1)..(25): SEQ ID NO: 5048; WAN024FYS_at; Start 67; Stop 91
gaagacatcgatgaaaaggctggta

SEQ ID NO: 226463 - DNA, 25 bp, Artificial
  probe
  misc_feature (1)..(25): SEQ ID NO: 5048; WAN024FYS_at; Start 11; Stop 35
gccacatacttatagctcttgtcga

SEQ ID NO: 226464 - DNA, 25 bp, Artificial
  probe
  misc_feature (1)..(25): SEQ ID NO: 5048; WAN024FYS_at; Start 63; Stop 87
ttgggaagacatcgatgaaaaggct

SEQ ID NO: 226465 - DNA, 25 bp, Artificial
  probe
  misc_feature (1)..(25): SEQ ID NO: 5048; WAN024FYS_at; Start 43; Stop 67
caagtctgtaaatcgatcaattggg

SEQ ID NO: 226466 - DNA, 25 bp, Artificial
  probe
  misc_feature (1)..(25): SEQ ID NO: 5048; WAN024FYS_at; Start 200; Stop 224
cgagggtgattttcttcttcaataa

SEQ ID NO: 226467 - DNA, 25 bp, Artificial
  probe
  misc_feature (1)..(25): SEQ ID NO: 5048; WAN024FYS_at; Start 197; Stop 221
tagcgagggtgattttcttcttcaa

SEQ ID NO: 226468 - DNA, 25 bp, Artificial
  probe
  misc_feature (1)..(25): SEQ ID NO: 5048; WAN024FYS_at; Start 51; Stop 75
taaatcgatcaattgggaagacatc

SEQ ID NO: 226469 - DNA, 25 bp, Artificial
  probe
  misc_feature (1)..(25): SEQ ID NO: 5048; WAN024FYS_at; Start 88; Stop 112
ggtatcatgacgcttgtacttaaca

SEQ ID NO: 226470 - DNA, 25 bp, Artificial
  probe
  misc_feature (1)..(25): SEQ ID NO: 5048; WAN024FYS_at; Start 158; Stop 182
tggaagtaccaagaagatgtatcgt

SEQ ID NO: 226471 - DNA, 25 bp, Artificial
  probe
  misc_feature (1)..(25): SEQ ID NO: 5048; WAN024FYS_at; Start 104; Stop 128
tacttaacatggtcttctataacag

SEQ ID NO: 226472 - DNA, 25 bp, Artificial
  probe
  misc_feature (1)..(25): SEQ ID NO: 5048; WAN024FYS_at; Start 145; Stop 169
cgatgcgaaattatggaagtaccaa

SEQ ID NO: 226473 - DNA, 25 bp, Artificial
  probe
  misc_feature (1)..(25): SEQ ID NO: 5048; WAN024FYS_at; Start 207; Stop 231
gattttcttcttcaataatcttcag

SEQ ID NO: 226474 - DNA, 25 bp, Artificial
  probe
  misc_feature (1)..(25): SEQ ID NO: 5048; WAN024FYS_at; Start 164; Stop 188
taccaagaagatgtatcgtaggaaa

SEQ ID NO: 226475 - DNA, 25 bp, Artificial
  probe
  misc_feature (1)..(25): SEQ ID NO: 5048; WAN024FYS_at; Start 108; Stop 132
taacatggtcttctataacagtaga

SEQ ID NO: 226476 - DNA, 25 bp, Artificial
  probe
  misc_feature (1)..(25): SEQ ID NO: 5048; WAN024FYS_at; Start 79; Stop 103
gaaaaggctggtatcatgacgcttg

SEQ ID NO: 226477 - DNA, 25 bp, Artificial
  probe
  misc_feature (1)..(25): SEQ ID NO: 5048; WAN024FYS_at; Start 70; Stop 94
gacatcgatgaaaaggctggtatca

SEQ ID NO: 226478 - DNA, 25 bp, Artificial
  probe
  misc_feature (1)..(25): SEQ ID NO: 5048; WAN024FYS_at; Start 129; Stop 153
tagaagtgtccaaaatcgatgcgaa

SEQ ID NO: 226479 - DNA, 25 bp, Artificial
  probe
  misc_feature (1)..(25): SEQ ID NO: 5048; WAN024FYS_at; Start 126; Stop 150
cagtagaagtgtccaaaatcgatgc

SEQ ID NO: 226480 - DNA, 25 bp, Artificial
  probe
  misc_feature (1)..(25): SEQ ID NO: 5048; WAN024FYS_at; Start 93; Stop 117
catgacgcttgtacttaacatggtc

SEQ ID NO: 226481 - DNA, 25 bp, Artificial
  probe
  misc_feature (1)..(25): SEQ ID NO: 5048; WAN024FYS_at; Start 98; Stop 122
cgcttgtacttaacatggtcttcta

SEQ ID NO: 226482 - DNA, 25 bp, Artificial
  probe
  misc_feature (1)..(25): SEQ ID NO: 5048; WAN024FYS_at; Start 121; Stop 145
tataacagtagaagtgtccaaaatc

SEQ ID NO: 226483 - DNA, 25 bp, Artificial
  probe
  misc_feature (1)..(25): SEQ ID NO: 5048; WAN024FYS_at; Start 135; Stop 159
tgtccaaaatcgatgcgaaattatg

SEQ ID NO: 226484 - DNA, 25 bp, Artificial
  probe
  misc_feature (1)..(25): SEQ ID NO: 5048; WAN024FYS_at; Start 2; Stop 26
tgacgaagagccacatacttatagc

SEQ ID NO: 226485 - DNA, 25 bp, Artificial
  probe
  misc_feature (1)..(25): SEQ ID NO: 5048; WAN024FYS_at; Start 170; Stop 194
gaagatgtatcgtaggaaagaacct

SEQ ID NO: 226486 - DNA, 25 bp, Artificial
  probe
  misc_feature (1)..(25): SEQ ID NO: 5048; WAN024FYS_at; Start 177; Stop 201
tatcgtaggaaagaaccttgtagcg

SEQ ID NO: 226487 - DNA, 25 bp, Artificial
  probe
  misc_feature (1)..(25): SEQ ID NO: 5048; WAN024FYS_at; Start 30; Stop 54
tgtcgacaatgctcaagtctgtaaa

SEQ ID NO: 226488 - DNA, 25 bp, Artificial
  probe
  misc_feature (1)..(25): SEQ ID NO: 5048; WAN024FYS_at; Start 185; Stop 209
gaaagaaccttgtagcgagggtgat

SEQ ID NO: 226489 - DNA, 25 bp, Artificial
  probe
  misc_feature (1)..(25): SEQ ID NO: 5048; WAN024FYS_at; Start 189; Stop 213
gaaccttgtagcgagggtgattttc

SEQ ID NO: 226490 - DNA, 25 bp, Artificial
  probe
  misc_feature (1)..(25): SEQ ID NO: 5048; WAN024FYS_at; Start 17; Stop 41
tacttatagctcttgtcgacaatgc

SEQ ID NO: 226491 - DNA, 25 bp, Artificial
  probe
  misc_feature (1)..(25): SEQ ID NO: 5048; WAN024FYS_at; Start 82; Stop 106
aaggctggtatcatgacgcttgtac

SEQ ID NO: 226492 - DNA, 25 bp, Artificial
  probe
  misc_feature (1)..(25): SEQ ID NO: 5048; WAN024FYS_at; Start 131; Stop 155
gaagtgtccaaaatcgatgcgaaat

SEQ ID NO: 226493 - DNA, 25 bp, Artificial
  probe
  misc_feature (1)..(25): SEQ ID NO: 2901; WAN024FYT_at; Start 689; Stop 713
aagggactgatttgagttgtcctcg

SEQ ID NO: 226494 - DNA, 25 bp, Artificial
  probe
  misc_feature (1)..(25): SEQ ID NO: 2901; WAN024FYT_at; Start 262; Stop 286
aaagctttctctgtaattcgggatg

SEQ ID NO: 226495 - DNA, 25 bp, Artificial
  probe
  misc_feature (1)..(25): SEQ ID NO: 2901; WAN024FYT_at; Start 601; Stop 625
gcttttgcaggaaactatacaggag

SEQ ID NO: 226496 - DNA, 25 bp, Artificial
  probe
  misc_feature (1)..(25): SEQ ID NO: 2901; WAN024FYT_at; Start 405; Stop 429
tagatacttatatagacggatgatg

SEQ ID NO: 226497 - DNA, 25 bp, Artificial
  probe
  misc_feature (1)..(25): SEQ ID NO: 2901; WAN024FYT_at; Start 616; Stop 640
tatacaggagcatataaactaagag

SEQ ID NO: 226498 - DNA, 25 bp, Artificial
  probe
  misc_feature (1)..(25): SEQ ID NO: 2901; WAN024FYT_at; Start 75; Stop 99
taatttgacttactatgctctaggg

SEQ ID NO: 226499 - DNA, 25 bp, Artificial
  probe
  misc_feature (1)..(25): SEQ ID NO: 2901; WAN024FYT_at; Start 497; Stop 521
tgattattggatttgcgaacgctgt

SEQ ID NO: 226500 - DNA, 25 bp, Artificial
  probe
  misc_feature (1)..(25): SEQ ID NO: 2901; WAN024FYT_at; Start 341; Stop 365
ggatagatatttttccacttgatgg

SEQ ID NO: 226501 - DNA, 25 bp, Artificial
  probe
  misc_feature (1)..(25): SEQ ID NO: 2901; WAN024FYT_at; Start 534; Stop 558
gattatttcttttaactgggcacag

SEQ ID NO: 226502 - DNA, 25 bp, Artificial
  probe
  misc_feature (1)..(25): SEQ ID NO: 2901; WAN024FYT_at; Start 312; Stop 336
tagtaaagaggaattggtagagagt

SEQ ID NO: 226503 - DNA, 25 bp, Artificial
  probe
  misc_feature (1)..(25): SEQ ID NO: 2901; WAN024FYT_at; Start 661; Stop 685
tttggagagccagtatcattagagt

SEQ ID NO: 226504 - DNA, 25 bp, Artificial
  probe
  misc_feature (1)..(25): SEQ ID NO: 2901; WAN024FYT_at; Start 803; Stop 827
taatatctcttggtgataatgaaga

SEQ ID NO: 226505 - DNA, 25 bp, Artificial
  probe
  misc_feature (1)..(25): SEQ ID NO: 2901; WAN024FYT_at; Start 630; Stop 654
taaactaagagaaatcgtaccttca

SEQ ID NO: 226506 - DNA, 25 bp, Artificial
  probe
  misc_feature (1)..(25): SEQ ID NO: 2901; WAN024FYT_at; Start 195; Stop 219
gaaagtagctcccaattttctacca

SEQ ID NO: 226507 - DNA, 25 bp, Artificial
  probe
  misc_feature (1)..(25): SEQ ID NO: 2901; WAN024FYT_at; Start 649; Stop 673
ccttcagattattttggagagccag

SEQ ID NO: 226508 - DNA, 25 bp, Artificial
  probe
  misc_feature (1)..(25): SEQ ID NO: 2901; WAN024FYT_at; Start 278; Stop 302
ttcgggatgattcaacgaaaatcat

SEQ ID NO: 226509 - DNA, 25 bp, Artificial
  probe
  misc_feature (1)..(25): SEQ ID NO: 2901; WAN024FYT_at; Start 116; Stop 140
cagtacgtcacaaaggatttatccc

SEQ ID NO: 226510 - DNA, 25 bp, Artificial
  probe
  misc_feature (1)..(25): SEQ ID NO: 2901; WAN024FYT_at; Start 674; Stop 698
tatcattagagtttgaagggactga

SEQ ID NO: 226511 - DNA, 25 bp, Artificial
  probe
  misc_feature (1)..(25): SEQ ID NO: 2901; WAN024FYT_at; Start 101; Stop 125
gaacattgcttggagcagtacgtca

SEQ ID NO: 226512 - DNA, 25 bp, Artificial
  probe
  misc_feature (1)..(25): SEQ ID NO: 2901; WAN024FYT_at; Start 764; Stop 788
tacctccagaagataagcgaaacca

SEQ ID NO: 226513 - DNA, 25 bp, Artificial
  probe
  misc_feature (1)..(25): SEQ ID NO: 2901; WAN024FYT_at; Start 586; Stop 610
tattcgtttaaggaagcttttgcag

SEQ ID NO: 226514 - DNA, 25 bp, Artificial
  probe
  misc_feature (1)..(25): SEQ ID NO: 2901; WAN024FYT_at; Start 462; Stop 486
tcagaagaaagagaatcgtccacta

SEQ ID NO: 226515 - DNA, 25 bp, Artificial
  probe
  misc_feature (1)..(25): SEQ ID NO: 2901; WAN024FYT_at; Start 511; Stop 535
gcgaacgctgttaatattgaaaaga

SEQ ID NO: 226516 - DNA, 25 bp, Artificial
  probe
  misc_feature (1)..(25): SEQ ID NO: 2901; WAN024FYT_at; Start 727; Stop 751
tatttgatagcaatttatggagaga

SEQ ID NO: 226517 - DNA, 25 bp, Artificial
  probe
  misc_feature (1)..(25): SEQ ID NO: 2901; WAN024FYT_at; Start 355; Stop 379
ccacttgatggaatgcctgctgccc

SEQ ID NO: 226518 - DNA, 25 bp, Artificial
  probe
  misc_feature (1)..(25): SEQ ID NO: 2901; WAN024FYT_at; Start 378; Stop 402
cccctttaagagaaaaatgcatgag

SEQ ID NO: 226519 - DNA, 25 bp, Artificial
  probe
  misc_feature (1)..(25): SEQ ID NO: 2901; WAN024FYT_at; Start 233; Stop 257
ttttaagtgaagataccgctaatta

SEQ ID NO: 226520 - DNA, 25 bp, Artificial
  probe
  misc_feature (1)..(25): SEQ ID NO: 2901; WAN024FYT_at; Start 749; Stop 773
agaattatatgcagttacctccaga

SEQ ID NO: 226521 - DNA, 25 bp, Artificial
  probe
  misc_feature (1)..(25): SEQ ID NO: 2901; WAN024FYT_at; Start 149; Stop 173
atgatattgatattggcatgccaag

SEQ ID NO: 226522 - DNA, 25 bp, Artificial
  probe
  misc_feature (1)..(25): SEQ ID NO: 2901; WAN024FYT_at; Start 702; Stop 726
gagttgtcctcgtaagtataaagaa

SEQ ID NO: 226523 - DNA, 25 bp, Artificial
  probe
  misc_feature (1)..(25): SEQ ID NO: 2901; WAN024FYT_at; Start 419; Stop 443
gacggatgatggttcaactttctca

SEQ ID NO: 226524 - DNA, 25 bp, Artificial
  probe
  misc_feature (1)..(25): SEQ ID NO: 2901; WAN024FYT_at; Start 777; Stop 801
taagcgaaaccaacatcactataag

SEQ ID NO: 226525 - DNA, 25 bp, Artificial
  probe
  misc_feature (1)..(25): SEQ ID NO: 2901; WAN024FYT_at; Start 474; Stop 498
gaatcgtccactatctgaaaaaatg

SEQ ID NO: 226526 - DNA, 25 bp, Artificial
  probe
  misc_feature (1)..(25): SEQ ID NO: 2901; WAN024FYT_at; Start 548; Stop 572
actgggcacagaaaaaatatttaca

SEQ ID NO: 226527 - DNA, 25 bp, Artificial
  probe
  misc_feature (1)..(25): SEQ ID NO: 2205; WAN024FYU_at; Start 298; Stop 322
tattgttaaaattgcgaattcggaa

SEQ ID NO: 226528 - DNA, 25 bp, Artificial
  probe
  misc_feature (1)..(25): SEQ ID NO: 2205; WAN024FYU_at; Start 334; Stop 358
tattgacatttttcctctagatggt

SEQ ID NO: 226529 - DNA, 25 bp, Artificial
  probe
  misc_feature (1)..(25): SEQ ID NO: 2205; WAN024FYU_at; Start 785; Stop 809
gaacttatatcagtaggtgatgcag

SEQ ID NO: 226530 - DNA, 25 bp, Artificial
  probe
  misc_feature (1)..(25): SEQ ID NO: 2205; WAN024FYU_at; Start 665; Stop 689
tctcttatttttgaggatacgatga

SEQ ID NO: 226531 - DNA, 25 bp, Artificial
  probe
  misc_feature (1)..(25): SEQ ID NO: 2205; WAN024FYU_at; Start 119; Stop 143
ttgttgggcgcggtacgtcataaag

SEQ ID NO: 226532 - DNA, 25 bp, Artificial
  probe
  misc_feature (1)..(25): SEQ ID NO: 2205; WAN024FYU_at; Start 77; Stop 101
tgtgaagaaaataacctgacctact

SEQ ID NO: 226533 - DNA, 25 bp, Artificial
  probe
  misc_feature (1)..(25): SEQ ID NO: 2205; WAN024FYU_at; Start 441; Stop 465
tagaccagcttgaagataaagaccg

SEQ ID NO: 226534 - DNA, 25 bp, Artificial
  probe
  misc_feature (1)..(25): SEQ ID NO: 2205; WAN024FYU_at; Start 140; Stop 164
aaaggattcataccttgggatgacg

SEQ ID NO: 226535 - DNA, 25 bp, Artificial
  probe
  misc_feature (1)..(25): SEQ ID NO: 2205; WAN024FYU_at; Start 522; Stop 546
tacttcctaaggatacattggtaga

SEQ ID NO: 226536 - DNA, 25 bp, Artificial
  probe
  misc_feature (1)..(25): SEQ ID NO: 2205; WAN024FYU_at; Start 273; Stop 297
taactcagttagtagataaaaatgt

SEQ ID NO: 226537 - DNA, 25 bp, Artificial
  probe
  misc_feature (1)..(25): SEQ ID NO: 2205; WAN024FYU_at; Start 101; Stop 125
tatgctctaggtgggaccttgttgg

SEQ ID NO: 226538 - DNA, 25 bp, Artificial
  probe
  misc_feature (1)..(25): SEQ ID NO: 2205; WAN024FYU_at; Start 428; Stop 452
aaaatatcagttttagaccagcttg

SEQ ID NO: 226539 - DNA, 25 bp, Artificial
  probe
  misc_feature (1)..(25): SEQ ID NO: 2205; WAN024FYU_at; Start 504; Stop 528
tgctaagaatccaaaaagtacttcc

SEQ ID NO: 226540 - DNA, 25 bp, Artificial
  probe
  misc_feature (1)..(25): SEQ ID NO: 2205; WAN024FYU_at; Start 680; Stop 704
gatacgatgataaactgtccgacaa

SEQ ID NO: 226541 - DNA, 25 bp, Artificial
  probe
  misc_feature (1)..(25): SEQ ID NO: 2205; WAN024FYU_at; Start 163; Stop 187
cgatattgatatcggtatgccaaga

SEQ ID NO: 226542 - DNA, 25 bp, Artificial
  probe
  misc_feature (1)..(25): SEQ ID NO: 2205; WAN024FYU_at; Start 601; Stop 625
taatgttctaggtagatatagggag

SEQ ID NO: 226543 - DNA, 25 bp, Artificial
  probe
  misc_feature (1)..(25): SEQ ID NO: 2205; WAN024FYU_at; Start 588; Stop 612
ctcgttacgtcggtaatgttctagg

SEQ ID NO: 226544 - DNA, 25 bp, Artificial
  probe
  misc_feature (1)..(25): SEQ ID NO: 2205; WAN024FYU_at; Start 617; Stop 641
tatagggagagagaaatagttccga

SEQ ID NO: 226545 - DNA, 25 bp, Artificial
  probe
  misc_feature (1)..(25): SEQ ID NO: 2205; WAN024FYU_at; Start 697; Stop 721
tccgacaaagtacaaggaatattta

SEQ ID NO: 226546 - DNA, 25 bp, Artificial
  probe
  misc_feature (1)..(25): SEQ ID NO: 2205; WAN024FYU_at; Start 491; Stop 515
aaaatatcgaaaatgctaagaatcc

SEQ ID NO: 226547 - DNA, 25 bp, Artificial
  probe
  misc_feature (1)..(25): SEQ ID NO: 2205; WAN024FYU_at; Start 737; Stop 761
gattacatgaaattaccatcagtag

SEQ ID NO: 226548 - DNA, 25 bp, Artificial
  probe
  misc_feature (1)..(25): SEQ ID NO: 2205; WAN024FYU_at; Start 413; Stop 437
caaagaatgctttgtaaaatatcag

SEQ ID NO: 226549 - DNA, 25 bp, Artificial
  probe
  misc_feature (1)..(25): SEQ ID NO: 2205; WAN024FYU_at; Start 256; Stop 280
tccacttaatcttgatataactcag

SEQ ID NO: 226550 - DNA, 25 bp, Artificial
  probe
  misc_feature (1)..(25): SEQ ID NO: 2205; WAN024FYU_at; Start 764; Stop 788
gatagagtagcacataatatagaac

SEQ ID NO: 226551 - DNA, 25 bp, Artificial
  probe
  misc_feature (1)..(25): SEQ ID NO: 2205; WAN024FYU_at; Start 464; Stop 488
cgtggcactgtggagaatcttatag

SEQ ID NO: 226552 - DNA, 25 bp, Artificial
  probe
  misc_feature (1)..(25): SEQ ID NO: 2205; WAN024FYU_at; Start 533; Stop 557
gatacattggtagaaaatctgcata

SEQ ID NO: 226553 - DNA, 25 bp, Artificial
  probe
  misc_feature (1)..(25): SEQ ID NO: 2205; WAN024FYU_at; Start 363; Stop 387
cagaaaaaggattttttgcagctaa

SEQ ID NO: 226554 - DNA, 25 bp, Artificial
  probe
  misc_feature (1)..(25): SEQ ID NO: 2205; WAN024FYU_at; Start 398; Stop 422
tttaggctattgtttcaaagaatgc

SEQ ID NO: 226555 - DNA, 25 bp, Artificial
  probe
  misc_feature (1)..(25): SEQ ID NO: 2205; WAN024FYU_at; Start 91; Stop 115
cctgacctactatgctctaggtggg

SEQ ID NO: 226556 - DNA, 25 bp, Artificial
  probe
  misc_feature (1)..(25): SEQ ID NO: 2205; WAN024FYU_at; Start 752; Stop 776
ccatcagtagaagatagagtagcac

SEQ ID NO: 226557 - DNA, 25 bp, Artificial
  probe
  misc_feature (1)..(25): SEQ ID NO: 2205; WAN024FYU_at; Start 455; Stop 479
gataaagaccgtggcactgtggaga

SEQ ID NO: 226558 - DNA, 25 bp, Artificial
  probe
  misc_feature (1)..(25): SEQ ID NO: 2205; WAN024FYU_at; Start 690; Stop 714
taaactgtccgacaaagtacaagga

SEQ ID NO: 226559 - DNA, 25 bp, Artificial
  probe
  misc_feature (1)..(25): SEQ ID NO: 2205; WAN024FYU_at; Start 125; Stop 149
ggcgcggtacgtcataaaggattca

SEQ ID NO: 226560 - DNA, 25 bp, Artificial
  probe
  misc_feature (1)..(25): SEQ ID NO: 2205; WAN024FYU_at; Start 380; Stop 404
gcagctaaattgcatagttttaggc

SEQ ID NO: 226561 - DNA, 25 bp, Artificial
  probe
  misc_feature (1)..(25): SEQ ID NO: 808; WAN024FYV_at; Start 761; Stop 785
gcttctacagtcatgaatttcacgc

SEQ ID NO: 226562 - DNA, 25 bp, Artificial
  probe
  misc_feature (1)..(25): SEQ ID NO: 808; WAN024FYV_at; Start 472; Stop 496
ttaaaagattggatacgaacagcct

SEQ ID NO: 226563 - DNA, 25 bp, Artificial
  probe
  misc_feature (1)..(25): SEQ ID NO: 808; WAN024FYV_at; Start 96; Stop 120
tattaactacggtactctgattggg

SEQ ID NO: 226564 - DNA, 25 bp, Artificial
  probe
  misc_feature (1)..(25): SEQ ID NO: 808; WAN024FYV_at; Start 367; Stop 391
gatcgctttgatgatcctaaggtca

SEQ ID NO: 226565 - DNA, 25 bp, Artificial
  probe
  misc_feature (1)..(25): SEQ ID NO: 808; WAN024FYV_at; Start 229; Stop 253
tataagctcctatccttagaaactg

SEQ ID NO: 226566 - DNA, 25 bp, Artificial
  probe
  misc_feature (1)..(25): SEQ ID NO: 808; WAN024FYV_at; Start 242; Stop 266
ccttagaaactgataagaactactt

SEQ ID NO: 226567 - DNA, 25 bp, Artificial
  probe
  misc_feature (1)..(25): SEQ ID NO: 808; WAN024FYV_at; Start 535; Stop 559
gcaaataaaatcgagaaagaaattc

SEQ ID NO: 226568 - DNA, 25 bp, Artificial
  probe
  misc_feature (1)..(25): SEQ ID NO: 808; WAN024FYV_at; Start 19; Stop 43
gaagatgccaaacaaattgaattag

SEQ ID NO: 226569 - DNA, 25 bp, Artificial
  probe
  misc_feature (1)..(25): SEQ ID NO: 808; WAN024FYV_at; Start 735; Stop 759
tatgaccctaccaccagaagaaaaa

SEQ ID NO: 226570 - DNA, 25 bp, Artificial
  probe
  misc_feature (1)..(25): SEQ ID NO: 808; WAN024FYV_at; Start 57; Stop 81
tattgatactctctgtaaaaagcac

SEQ ID NO: 226571 - DNA, 25 bp, Artificial
  probe
  misc_feature (1)..(25): SEQ ID NO: 808; WAN024FYV_at; Start 635; Stop 659
gtggtacctttgataaaacaatcga

SEQ ID NO: 226572 - DNA, 25 bp, Artificial
  probe
  misc_feature (1)..(25): SEQ ID NO: 808; WAN024FYV_at; Start 181; Stop 205
gaagactaccaacgatttattaaca

SEQ ID NO: 226573 - DNA, 25 bp, Artificial
  probe
  misc_feature (1)..(25): SEQ ID NO: 808; WAN024FYV_at; Start 727; Stop 751
ggagattatatgaccctaccaccag

SEQ ID NO: 226574 - DNA, 25 bp, Artificial
  probe
  misc_feature (1)..(25): SEQ ID NO: 808; WAN024FYV_at; Start 317; Stop 341
gaaatacaaaaacctatgagtctgg

SEQ ID NO: 226575 - DNA, 25 bp, Artificial
  probe
  misc_feature (1)..(25): SEQ ID NO: 808; WAN024FYV_at; Start 651; Stop 675
aacaatcgatttaccctttgagaat

SEQ ID NO: 226576 - DNA, 25 bp, Artificial
  probe
  misc_feature (1)..(25): SEQ ID NO: 808; WAN024FYV_at; Start 405; Stop 429
taaactggaaagcttcaaactgctg

SEQ ID NO: 226577 - DNA, 25 bp, Artificial
  probe
  misc_feature (1)..(25): SEQ ID NO: 808; WAN024FYV_at; Start 445; Stop 469
aaaaatattgtctataaggatagcc

SEQ ID NO: 226578 - DNA, 25 bp, Artificial
  probe
  misc_feature (1)..(25): SEQ ID NO: 808; WAN024FYV_at; Start 517; Stop 541
gtttctcctcgttattttgcaaata

SEQ ID NO: 226579 - DNA, 25 bp, Artificial
  probe
  misc_feature (1)..(25): SEQ ID NO: 808; WAN024FYV_at; Start 624; Stop 648
agtcttcccaagtggtacctttgat

SEQ ID NO: 226580 - DNA, 25 bp, Artificial
  probe
  misc_feature (1)..(25): SEQ ID NO: 808; WAN024FYV_at; Start 670; Stop 694
gagaatttaagccttcctgcacctg

SEQ ID NO: 226581 - DNA, 25 bp, Artificial
  probe
  misc_feature (1)..(25): SEQ ID NO: 808; WAN024FYV_at; Start 684; Stop 708
tcctgcacctgaaaaatttgatact

SEQ ID NO: 226582 - DNA, 25 bp, Artificial
  probe
  misc_feature (1)..(25): SEQ ID NO: 808; WAN024FYV_at; Start 169; Stop 193
tccatgcctagagaagactaccaac

SEQ ID NO: 226583 - DNA, 25 bp, Artificial
  probe
  misc_feature (1)..(25): SEQ ID NO: 808; WAN024FYV_at; Start 379; Stop 403
gatcctaaggtcattgatacttgtt

SEQ ID NO: 226584 - DNA, 25 bp, Artificial
  probe
  misc_feature (1)..(25): SEQ ID NO: 808; WAN024FYV_at; Start 216; Stop 240
ggaaaaaagcaagtataagctccta

SEQ ID NO: 226585 - DNA, 25 bp, Artificial
  probe
  misc_feature (1)..(25): SEQ ID NO: 808; WAN024FYV_at; Start 120; Stop 144
ggcggttcgacatgagggctttatc

SEQ ID NO: 226586 - DNA, 25 bp, Artificial
  probe
  misc_feature (1)..(25): SEQ ID NO: 808; WAN024FYV_at; Start 329; Stop 353
cctatgagtctggtatctttatcga

SEQ ID NO: 226587 - DNA, 25 bp, Artificial
  probe
  misc_feature (1)..(25): SEQ ID NO: 808; WAN024FYV_at; Start 718; Stop 742
caattttatggagattatatgaccc

SEQ ID NO: 226588 - DNA, 25 bp, Artificial
  probe
  misc_feature (1)..(25): SEQ ID NO: 808; WAN024FYV_at; Start 751; Stop 775
gaagaaaaacgcttctacagtcatg

SEQ ID NO: 226589 - DNA, 25 bp, Artificial
  probe
  misc_feature (1)..(25): SEQ ID NO: 808; WAN024FYV_at; Start 136; Stop 160
ggctttatcccttgggacgacgata

SEQ ID NO: 226590 - DNA, 25 bp, Artificial
  probe
  misc_feature (1)..(25): SEQ ID NO: 808; WAN024FYV_at; Start 274; Stop 298
tttatcaagataaccgacagtacga

SEQ ID NO: 226591 - DNA, 25 bp, Artificial
  probe
  misc_feature (1)..(25): SEQ ID NO: 808; WAN024FYV_at; Start 419; Stop 443
tcaaactgctgtctttcagtaaaca

SEQ ID NO: 226592 - DNA, 25 bp, Artificial
  probe
  misc_feature (1)..(25): SEQ ID NO: 808; WAN024FYV_at; Start 287; Stop 311
ccgacagtacgactaaaattattga

SEQ ID NO: 226593 - DNA, 25 bp, Artificial
  probe
  misc_feature (1)..(25): SEQ ID NO: 808; WAN024FYV_at; Start 393; Stop 417
tgatacttgttataaactggaaagc

SEQ ID NO: 226594 - DNA, 25 bp, Artificial
  probe
  misc_feature (1)..(25): SEQ ID NO: 808; WAN024FYV_at; Start 559; Stop 583
caaaaatatagtcgtgaaaatgggc

SEQ ID NO: 226595 - DNA, 25 bp, Artificial
  probe
  misc_feature (1)..(25): SEQ ID NO: 1282; WAN024FYW_at; Start 208; Stop 232
tatcgtgaggattatgagcgtttac

SEQ ID NO: 226596 - DNA, 25 bp, Artificial
  probe
  misc_feature (1)..(25): SEQ ID NO: 1282; WAN024FYW_at; Start 23; Stop 47
ggaggattaggatgcaatatttaga

SEQ ID NO: 226597 - DNA, 25 bp, Artificial
  probe
  misc_feature (1)..(25): SEQ ID NO: 1282; WAN024FYW_at; Start 488; Stop 512
cagttcacggtgatagcaaactaaa

SEQ ID NO: 226598 - DNA, 25 bp, Artificial
  probe
  misc_feature (1)..(25): SEQ ID NO: 1282; WAN024FYW_at; Start 60; Stop 84
taaagaaattcaactagccctgctg

SEQ ID NO: 226599 - DNA, 25 bp, Artificial
  probe
  misc_feature (1)..(25): SEQ ID NO: 1282; WAN024FYW_at; Start 590; Stop 614
tagtcaaaaatgctgtaaccaacac

SEQ ID NO: 226600 - DNA, 25 bp, Artificial
  probe
  misc_feature (1)..(25): SEQ ID NO: 1282; WAN024FYW_at; Start 697; Stop 721
ttaactgagtttgagggccgtatgt

SEQ ID NO: 226601 - DNA, 25 bp, Artificial
  probe
  misc_feature (1)..(25): SEQ ID NO: 1282; WAN024FYW_at; Start 280; Stop 304
tacgatacatcttcttggtacttcc

SEQ ID NO: 226602 - DNA, 25 bp, Artificial
  probe
  misc_feature (1)..(25): SEQ ID NO: 1282; WAN024FYW_at; Start 311; Stop 335
tcgcatcgattttggacacttctac

SEQ ID NO: 226603 - DNA, 25 bp, Artificial
  probe
  misc_feature (1)..(25): SEQ ID NO: 1282; WAN024FYW_at; Start 194; Stop 218
ttgatatttccctttatcgtgagga

SEQ ID NO: 226604 - DNA, 25 bp, Artificial
  probe
  misc_feature (1)..(25): SEQ ID NO: 1282; WAN024FYW_at; Start 325; Stop 349
gacacttctactgttatagaagacc

SEQ ID NO: 226605 - DNA, 25 bp, Artificial
  probe
  misc_feature (1)..(25): SEQ ID NO: 1282; WAN024FYW_at; Start 723; Stop 747
gcctgttcccaaaaaatatgaccaa

SEQ ID NO: 226606 - DNA, 25 bp, Artificial
  probe
  misc_feature (1)..(25): SEQ ID NO: 1282; WAN024FYW_at; Start 605; Stop 629
taaccaacactcctcaatatgaagg

SEQ ID NO: 226607 - DNA, 25 bp, Artificial
  probe
  misc_feature (1)..(25): SEQ ID NO: 1282; WAN024FYW_at; Start 383; Stop 407
tcatcgatgtcttcccaattgatcg

SEQ ID NO: 226608 - DNA, 25 bp, Artificial
  probe
  misc_feature (1)..(25): SEQ ID NO: 1282; WAN024FYW_at; Start 774; Stop 798
tatgacaccaccatcaaaagaaatg

SEQ ID NO: 226609 - DNA, 25 bp, Artificial
  probe
  misc_feature (1)..(25): SEQ ID NO: 1282; WAN024FYW_at; Start 354; Stop 378
taagtacaagcgtcatgataccagc

SEQ ID NO: 226610 - DNA, 25 bp, Artificial
  probe
  misc_feature (1)..(25): SEQ ID NO: 1282; WAN024FYW_at; Start 657; Stop 681
gaaagaaatcttcccagttgatacc

SEQ ID NO: 226611 - DNA, 25 bp, Artificial
  probe
  misc_feature (1)..(25): SEQ ID NO: 1282; WAN024FYW_at; Start 370; Stop 394
gataccagccttttcatcgatgtct

SEQ ID NO: 226612 - DNA, 25 bp, Artificial
  probe
  misc_feature (1)..(25): SEQ ID NO: 1282; WAN024FYW_at; Start 709; Stop 733
gagggccgtatgttgcctgttccca

SEQ ID NO: 226613 - DNA, 25 bp, Artificial
  probe
  misc_feature (1)..(25): SEQ ID NO: 1282; WAN024FYW_at; Start 223; Stop 247
gagcgtttactgaagattattgaag

SEQ ID NO: 226614 - DNA, 25 bp, Artificial
  probe
  misc_feature (1)..(25): SEQ ID NO: 1282; WAN024FYW_at; Start 745; Stop 769
caatttttaacccagatgtatggcg

SEQ ID NO: 226615 - DNA, 25 bp, Artificial
  probe
  misc_feature (1)..(25): SEQ ID NO: 1282; WAN024FYW_at; Start 761; Stop 785
tgtatggcgattatatgacaccacc

SEQ ID NO: 226616 - DNA, 25 bp, Artificial
  probe
  misc_feature (1)..(25): SEQ ID NO: 1282; WAN024FYW_at; Start 73; Stop 97
ctagccctgctggactatattgatg

SEQ ID NO: 226617 - DNA, 25 bp, Artificial
  probe
  misc_feature (1)..(25): SEQ ID NO: 1282; WAN024FYW_at; Start 158; Stop 182
tccgccacaaaggtatgattccttg

SEQ ID NO: 226618 - DNA, 25 bp, Artificial
  probe
  misc_feature (1)..(25): SEQ ID NO: 1282; WAN024FYW_at; Start 428; Stop 452
tcgacaagagctataagtatgtggc

SEQ ID NO: 226619 - DNA, 25 bp, Artificial
  probe
  misc_feature (1)..(25): SEQ ID NO: 1282; WAN024FYW_at; Start 295; Stop 319
tggtacttccataatttcgcatcga

SEQ ID NO: 226620 - DNA, 25 bp, Artificial
  probe
  misc_feature (1)..(25): SEQ ID NO: 1282; WAN024FYW_at; Start 399; Stop 423
aattgatcgatttacagacttgagc

SEQ ID NO: 226621 - DNA, 25 bp, Artificial
  probe
  misc_feature (1)..(25): SEQ ID NO: 1282; WAN024FYW_at; Start 145; Stop 169
atgcttggagccatccgccacaaag

SEQ ID NO: 226622 - DNA, 25 bp, Artificial
  probe
  misc_feature (1)..(25): SEQ ID NO: 1282; WAN024FYW_at; Start 473; Stop 497
tcaaaaaatcacgagcagttcacgg

SEQ ID NO: 226623 - DNA, 25 bp, Artificial
  probe
  misc_feature (1)..(25): SEQ ID NO: 1282; WAN024FYW_at; Start 519; Stop 543
tcttagattatgtagctggtacgct

SEQ ID NO: 226624 - DNA, 25 bp, Artificial
  probe
  misc_feature (1)..(25): SEQ ID NO: 1282; WAN024FYW_at; Start 84; Stop 108
ggactatattgatgagacttgtaag

SEQ ID NO: 226625 - DNA, 25 bp, Artificial
  probe
  misc_feature (1)..(25): SEQ ID NO: 1282; WAN024FYW_at; Start 533; Stop 557
gctggtacgctctccgatttgtcaa

SEQ ID NO: 226626 - DNA, 25 bp, Artificial
  probe
  misc_feature (1)..(25): SEQ ID NO: 1282; WAN024FYW_at; Start 618; Stop 642
tcaatatgaaggaggagttgggatc

SEQ ID NO: 226627 - DNA, 25 bp, Artificial
  probe
  misc_feature (1)..(25): SEQ ID NO: 1282; WAN024FYW_at; Start 341; Stop 365
tagaagaccatgttaagtacaagcg

SEQ ID NO: 226628 - DNA, 25 bp, Artificial
  probe
  misc_feature (1)..(25): SEQ ID NO: 1282; WAN024FYW_at; Start 413; Stop 437
cagacttgagcattgtcgacaagag

SEQ ID NO: 226629 - DNA, 25 bp, Artificial
  probe
  misc_feature (1)..(25): SEQ ID NO: 3868; WAN024FYX_at; Start 476; Stop 500
cagatgatagtttcaatggttcggt

SEQ ID NO: 226630 - DNA, 25 bp, Artificial
  probe
  misc_feature (1)..(25): SEQ ID NO: 3868; WAN024FYX_at; Start 77; Stop 101
ggcaacatctgtatcctgtaacgta

SEQ ID NO: 226631 - DNA, 25 bp, Artificial
  probe
  misc_feature (1)..(25): SEQ ID NO: 3868; WAN024FYX_at; Start 657; Stop 681
gagtgtattaattatcataccagta

SEQ ID NO: 226632 - DNA, 25 bp, Artificial
  probe
  misc_feature (1)..(25): SEQ ID NO: 3868; WAN024FYX_at; Start 91; Stop 115
cctgtaacgtacatgacaaaatatt

SEQ ID NO: 226633 - DNA, 25 bp, Artificial
  probe
  misc_feature (1)..(25): SEQ ID NO: 3868; WAN024FYX_at; Start 248; Stop 272
cagtcttactagacgtaatgaaccc

SEQ ID NO: 226634 - DNA, 25 bp, Artificial
  probe
  misc_feature (1)..(25): SEQ ID NO: 3868; WAN024FYX_at; Start 1071; Stop 1095
tcttctttatagaaatgctaaacgt

SEQ ID NO: 226635 - DNA, 25 bp, Artificial
  probe
  misc_feature (1)..(25): SEQ ID NO: 3868; WAN024FYX_at; Start 1153; Stop 1177
cagatgctgatatggtttacagata

SEQ ID NO: 226636 - DNA, 25 bp, Artificial
  probe
  misc_feature (1)..(25): SEQ ID NO: 3868; WAN024FYX_at; Start 509; Stop 533
tgcatgaagttgcacctattacagc

SEQ ID NO: 226637 - DNA, 25 bp, Artificial
  probe
  misc_feature (1)..(25): SEQ ID NO: 3868; WAN024FYX_at; Start 210; Stop 234
gatattagctataccaacaattgtt

SEQ ID NO: 226638 - DNA, 25 bp, Artificial
  probe
  misc_feature (1)..(25): SEQ ID NO: 3868; WAN024FYX_at; Start 500; Stop 524
tactagaaatgcatgaagttgcacc

SEQ ID NO: 226639 - DNA, 25 bp, Artificial
  probe
  misc_feature (1)..(25): SEQ ID NO: 3868; WAN024FYX_at; Start 322; Stop 346
ggtttgttagctatctttcaagcta

SEQ ID NO: 226640 - DNA, 25 bp, Artificial
  probe
  misc_feature (1)..(25): SEQ ID NO: 3868; WAN024FYX_at; Start 427; Stop 451
attgttgcctttaggcagggaggac

SEQ ID NO: 226641 - DNA, 25 bp, Artificial
  probe
  misc_feature (1)..(25): SEQ ID NO: 3868; WAN024FYX_at; Start 858; Stop 882
ggctagaacagatttatggaaggga

SEQ ID NO: 226642 - DNA, 25 bp, Artificial
  probe
  misc_feature (1)..(25): SEQ ID NO: 3868; WAN024FYX_at; Start 1005; Stop 1029
ccataatgatattttgaagtactac

SEQ ID NO: 226643 - DNA, 25 bp, Artificial
  probe
  misc_feature (1)..(25): SEQ ID NO: 3868; WAN024FYX_at; Start 950; Stop 974
tggataataattggatgactttgaa

SEQ ID NO: 226644 - DNA, 25 bp, Artificial
  probe
  misc_feature (1)..(25): SEQ ID NO: 3868; WAN024FYX_at; Start 238; Stop 262
ttcctgtactcagtcttactagacg

SEQ ID NO: 226645 - DNA, 25 bp, Artificial
  probe
  misc_feature (1)..(25): SEQ ID NO: 3868; WAN024FYX_at; Start 966; Stop 990
gactttgaatatcaatggtcttaca

SEQ ID NO: 226646 - DNA, 25 bp, Artificial
  probe
  misc_feature (1)..(25): SEQ ID NO: 3868; WAN024FYX_at; Start 445; Stop 469
ggaggacttagtcaatttatcttga

SEQ ID NO: 226647 - DNA, 25 bp, Artificial
  probe
  misc_feature (1)..(25): SEQ ID NO: 3868; WAN024FYX_at; Start 1017; Stop 1041
tttgaagtactacattgagatagga

SEQ ID NO: 226648 - DNA, 25 bp, Artificial
  probe
  misc_feature (1)..(25): SEQ ID NO: 3868; WAN024FYX_at; Start 366; Stop 390
tggacaaaaagtagtagattacact

SEQ ID NO: 226649 - DNA, 25 bp, Artificial
  probe
  misc_feature (1)..(25): SEQ ID NO: 3868; WAN024FYX_at; Start 489; Stop 513
caatggttcggtactagaaatgcat

SEQ ID NO: 226650 - DNA, 25 bp, Artificial
  probe
  misc_feature (1)..(25): SEQ ID NO: 3868; WAN024FYX_at; Start 399; Stop 423
tatctccctcagctacttaaccagt

SEQ ID NO: 226651 - DNA, 25 bp, Artificial
  probe
  misc_feature (1)..(25): SEQ ID NO: 3868; WAN024FYX_at; Start 434; Stop 458
cctttaggcagggaggacttagtca

SEQ ID NO: 226652 - DNA, 25 bp, Artificial
  probe
  misc_feature (1)..(25): SEQ ID NO: 3868; WAN024FYX_at; Start 386; Stop 410
acacttttacagctatctccctcag

SEQ ID NO: 226653 - DNA, 25 bp, Artificial
  probe
  misc_feature (1)..(25): SEQ ID NO: 3868; WAN024FYX_at; Start 1138; Stop 1162
gtattgataatgtttcagatgctga

SEQ ID NO: 226654 - DNA, 25 bp, Artificial
  probe
  misc_feature (1)..(25): SEQ ID NO: 3868; WAN024FYX_at; Start 303; Stop 327
atcaagtacgactatttttggtttg

SEQ ID NO: 226655 - DNA, 25 bp, Artificial
  probe
  misc_feature (1)..(25): SEQ ID NO: 3868; WAN024FYX_at; Start 30; Stop 54
cgcgatactgtatatattgctagta

SEQ ID NO: 226656 - DNA, 25 bp, Artificial
  probe
  misc_feature (1)..(25): SEQ ID NO: 3868; WAN024FYX_at; Start 152; Stop 176
tattagtaggccgtgggaagcttat

SEQ ID NO: 226657 - DNA, 25 bp, Artificial
  probe
  misc_feature (1)..(25): SEQ ID NO: 3868; WAN024FYX_at; Start 1029; Stop 1053
cattgagataggatttgtaggatta

SEQ ID NO: 226658 - DNA, 25 bp, Artificial
  probe
  misc_feature (1)..(25): SEQ ID NO: 3868; WAN024FYX_at; Start 15; Stop 39
taaatttaatccaatcgcgatactg

SEQ ID NO: 226659 - DNA, 25 bp, Artificial
  probe
  misc_feature (1)..(25): SEQ ID NO: 3868; WAN024FYX_at; Start 844; Stop 868
aatattaattcgatggctagaacag

SEQ ID NO: 226660 - DNA, 25 bp, Artificial
  probe
  misc_feature (1)..(25): SEQ ID NO: 3868; WAN024FYX_at; Start 227; Stop 251
caattgttcttttcctgtactcagt

SEQ ID NO: 226661 - DNA, 25 bp, Artificial
  probe
  misc_feature (1)..(25): SEQ ID NO: 3868; WAN024FYX_at; Start 1102; Stop 1126
gtaaaaattggtcataaagaatcat

SEQ ID NO: 226662 - DNA, 25 bp, Artificial
  probe
  misc_feature (1)..(25): SEQ ID NO: 3868; WAN024FYX_at; Start 932; Stop 956
ggtttgtaacaaaatggatggataa

SEQ ID NO: 226663 - DNA, 25 bp, Artificial
  probe
  misc_feature (1)..(25): SEQ ID NO: 52; WAN024FYY_at; Start 366; Stop 390
tcagcagttgcttttgtcaggaatt

SEQ ID NO: 226664 - DNA, 25 bp, Artificial
  probe
  misc_feature (1)..(25): SEQ ID NO: 52; WAN024FYY_at; Start 408; Stop 432
tatcgaacgttatgatgctcttgaa

SEQ ID NO: 226665 - DNA, 25 bp, Artificial
  probe
  misc_feature (1)..(25): SEQ ID NO: 52; WAN024FYY_at; Start 178; Stop 202
cgtgcggtacagaaaatagctagag

SEQ ID NO: 226666 - DNA, 25 bp, Artificial
  probe
  misc_feature (1)..(25): SEQ ID NO: 52; WAN024FYY_at; Start 47; Stop 71
caaagtccatagaagatagtagagc

SEQ ID NO: 226667 - DNA, 25 bp, Artificial
  probe
  misc_feature (1)..(25): SEQ ID NO: 52; WAN024FYY_at; Start 108; Stop 132
aattgtttcaacatcccaccgccgt

SEQ ID NO: 226668 - DNA, 25 bp, Artificial
  probe
  misc_feature (1)..(25): SEQ ID NO: 52; WAN024FYY_at; Start 351; Stop 375
tattcatagcgctcttcagcagttg

SEQ ID NO: 226669 - DNA, 25 bp, Artificial
  probe
  misc_feature (1)..(25): SEQ ID NO: 52; WAN024FYY_at; Start 585; Stop 609
tgtagcaagtgacatgcataatctt

SEQ ID NO: 226670 - DNA, 25 bp, Artificial
  probe
  misc_feature (1)..(25): SEQ ID NO: 52; WAN024FYY_at; Start 94; Stop 118
caaggaattcggacaattgtttcaa

SEQ ID NO: 226671 - DNA, 25 bp, Artificial
  probe
  misc_feature (1)..(25): SEQ ID NO: 52; WAN024FYY_at; Start 694; Stop 718
aaaaatccgcaacgaatcctaatgg

SEQ ID NO: 226672 - DNA, 25 bp, Artificial
  probe
  misc_feature (1)..(25): SEQ ID NO: 52; WAN024FYY_at; Start 30; Stop 54
tgatgtggatgatgggccaaagtcc

SEQ ID NO: 226673 - DNA, 25 bp, Artificial
  probe
  misc_feature (1)..(25): SEQ ID NO: 52; WAN024FYY_at; Start 599; Stop 623
tgcataatcttgatactagaccgcc

SEQ ID NO: 226674 - DNA, 25 bp, Artificial
  probe
  misc_feature (1)..(25): SEQ ID NO: 52; WAN024FYY_at; Start 453; Stop 477
cgaattgattcgtatgggctgttat

SEQ ID NO: 226675 - DNA, 25 bp, Artificial
  probe
  misc_feature (1)..(25): SEQ ID NO: 52; WAN024FYY_at; Start 424; Stop 448
gctcttgaaaacaataaacaagcag

SEQ ID NO: 226676 - DNA, 25 bp, Artificial
  probe
  misc_feature (1)..(25): SEQ ID NO: 52; WAN024FYY_at; Start 612; Stop 636
tactagaccgccttatatggcggaa

SEQ ID NO: 226677 - DNA, 25 bp, Artificial
  probe
  misc_feature (1)..(25): SEQ ID NO: 52; WAN024FYY_at; Start 396; Stop 420
gcttatcgcccatatcgaacgttat

SEQ ID NO: 226678 - DNA, 25 bp, Artificial
  probe
  misc_feature (1)..(25): SEQ ID NO: 52; WAN024FYY_at; Start 332; Stop 356
gcgagacttcttatcgttctattca

SEQ ID NO: 226679 - DNA, 25 bp, Artificial
  probe
  misc_feature (1)..(25): SEQ ID NO: 52; WAN024FYY_at; Start 123; Stop 147
ccaccgccgtcaaggtatgtttgaa

SEQ ID NO: 226680 - DNA, 25 bp, Artificial
  probe
  misc_feature (1)..(25): SEQ ID NO: 52; WAN024FYY_at; Start 627; Stop 651
tatggcggaagcttatgaaatcatt

SEQ ID NO: 226681 - DNA, 25 bp, Artificial
  probe
  misc_feature (1)..(25): SEQ ID NO: 52; WAN024FYY_at; Start 80; Stop 104
tagaagcctatgatcaaggaattcg

SEQ ID NO: 226682 - DNA, 25 bp, Artificial
  probe
  misc_feature (1)..(25): SEQ ID NO: 52; WAN024FYY_at; Start 314; Stop 338
ccttgattgaatttagtagcgagac

SEQ ID NO: 226683 - DNA, 25 bp, Artificial
  probe
  misc_feature (1)..(25): SEQ ID NO: 52; WAN024FYY_at; Start 63; Stop 87
tagtagagctttgttgttagaagcc

SEQ ID NO: 226684 - DNA, 25 bp, Artificial
  probe
  misc_feature (1)..(25): SEQ ID NO: 52; WAN024FYY_at; Start 166; Stop 190
gcggaaaattttcgtgcggtacaga

SEQ ID NO: 226685 - DNA, 25 bp, Artificial
  probe
  misc_feature (1)..(25): SEQ ID NO: 52; WAN024FYY_at; Start 289; Stop 313
ccaactttaaatgggagtcgatatg

SEQ ID NO: 226686 - DNA, 25 bp, Artificial
  probe
  misc_feature (1)..(25): SEQ ID NO: 52; WAN024FYY_at; Start 659; Stop 683
gatacggaaaagaaaaagctgaaga

SEQ ID NO: 226687 - DNA, 25 bp, Artificial
  probe
  misc_feature (1)..(25): SEQ ID NO: 52; WAN024FYY_at; Start 571; Stop 595
gatttagtccatattgtagcaagtg

SEQ ID NO: 226688 - DNA, 25 bp, Artificial
  probe
  misc_feature (1)..(25): SEQ ID NO: 52; WAN024FYY_at; Start 528; Stop 552
tgcaaaaatcatgaagaaacgagtt

SEQ ID NO: 226689 - DNA, 25 bp, Artificial
  probe
  misc_feature (1)..(25): SEQ ID NO: 52; WAN024FYY_at; Start 472; Stop 496
tgttatacacagattaatagttccc

SEQ ID NO: 226690 - DNA, 25 bp, Artificial
  probe
  misc_feature (1)..(25): SEQ ID NO: 52; WAN024FYY_at; Start 440; Stop 464
aacaagcagttctcgaattgattcg

SEQ ID NO: 226691 - DNA, 25 bp, Artificial
  probe
  misc_feature (1)..(25): SEQ ID NO: 52; WAN024FYY_at; Start 300; Stop 324
tgggagtcgatatgccttgattgaa

SEQ ID NO: 226692 - DNA, 25 bp, Artificial
  probe
  misc_feature (1)..(25): SEQ ID NO: 52; WAN024FYY_at; Start 145; Stop 169
gaaacaccagaagacaagattgcgg

SEQ ID NO: 226693 - DNA, 25 bp, Artificial
  probe
  misc_feature (1)..(25): SEQ ID NO: 52; WAN024FYY_at; Start 194; Stop 218
tagctagagatattgcagatgattt

SEQ ID NO: 226694 - DNA, 25 bp, Artificial
  probe
  misc_feature (1)..(25): SEQ ID NO: 52; WAN024FYY_at; Start 643; Stop 667
gaaatcatttctaaaagatacggaa

SEQ ID NO: 226695 - DNA, 25 bp, Artificial
  probe
  misc_feature (1)..(25): SEQ ID NO: 52; WAN024FYY_at; Start 232; Stop 256
ggtgcagaaatctactatactcaag

SEQ ID NO: 226696 - DNA, 25 bp, Artificial
  probe
  misc_feature (1)..(25): SEQ ID NO: 52; WAN024FYY_at; Start 380; Stop 404
tgtcaggaattaccccgcttatcgc

SEQ ID NO: 226697 - DNA, 25 bp, Artificial
  probe
  misc_feature (1)..(25): SEQ ID NO: 1619; WAN024FYZ_at; Start 180; Stop 204
cgaagaacgttttccaatgatgagc

SEQ ID NO: 226698 - DNA, 25 bp, Artificial
  probe
  misc_feature (1)..(25): SEQ ID NO: 1619; WAN024FYZ_at; Start 560; Stop 584
cgttgcgcaaactattaactggcga

SEQ ID NO: 226699 - DNA, 25 bp, Artificial
  probe
  misc_feature (1)..(25): SEQ ID NO: 1619; WAN024FYZ_at; Start 318; Stop 342
cacagaaaagcatcttacggatggc

SEQ ID NO: 226700 - DNA, 25 bp, Artificial
  probe
  misc_feature (1)..(25): SEQ ID NO: 1619; WAN024FYZ_at; Start 596; Stop 620
tagcttcccggcaacaattaataga

SEQ ID NO: 226701 - DNA, 25 bp, Artificial
  probe
  misc_feature (1)..(25): SEQ ID NO: 1619; WAN024FYZ_at; Start 610; Stop 634
caattaatagactggatggaggcgg

SEQ ID NO: 226702 - DNA, 25 bp, Artificial
  probe
  misc_feature (1)..(25): SEQ ID NO: 1619; WAN024FYZ_at; Start 347; Stop 371
cagtaagagaattatgcagtgctgc

SEQ ID NO: 226703 - DNA, 25 bp, Artificial
  probe
  misc_feature (1)..(25): SEQ ID NO: 1619; WAN024FYZ_at; Start 575; Stop 599
taactggcgaactacttactctagc

SEQ ID NO: 226704 - DNA, 25 bp, Artificial
  probe
  misc_feature (1)..(25): SEQ ID NO: 1619; WAN024FYZ_at; Start 233; Stop 257
tattatcccgtgttgacgccgggca

SEQ ID NO: 226705 - DNA, 25 bp, Artificial
  probe
  misc_feature (1)..(25): SEQ ID NO: 1619; WAN024FYZ_at; Start 690; Stop 714
tgataaatctggagccggtgagcgt

SEQ ID NO: 226706 - DNA, 25 bp, Artificial
  probe
  misc_feature (1)..(25): SEQ ID NO: 1619; WAN024FYZ_at; Start 468; Stop 492
tgtaacccgccttgatcgttgggaa

SEQ ID NO: 226707 - DNA, 25 bp, Artificial
  probe
  misc_feature (1)..(25): SEQ ID NO: 1619; WAN024FYZ_at; Start 134; Stop 158
tcgagctggatctcaacagcggtaa

SEQ ID NO: 226708 - DNA, 25 bp, Artificial
  probe
  misc_feature (1)..(25): SEQ ID NO: 1619; WAN024FYZ_at; Start 159; Stop 183
gatccttgagagttttcgccccgaa

SEQ ID NO: 226709 - DNA, 25 bp, Artificial
  probe
  misc_feature (1)..(25): SEQ ID NO: 1619; WAN024FYZ_at; Start 268; Stop 292
ggtcgccgcatacactattctcaga

SEQ ID NO: 226710 - DNA, 25 bp, Artificial
  probe
  misc_feature (1)..(25): SEQ ID NO: 1619; WAN024FYZ_at; Start 63; Stop 87
ttttgctcacccagaaacgctggtg

SEQ ID NO: 226711 - DNA, 25 bp, Artificial
  probe
  misc_feature (1)..(25): SEQ ID NO: 1619; WAN024FYZ_at; Start 101; Stop 125
ctgaagatcagttgggtgcacgagt

SEQ ID NO: 226712 - DNA, 25 bp, Artificial
  probe
  misc_feature (1)..(25): SEQ ID NO: 1619; WAN024FYZ_at; Start 404; Stop 428
tacttctgacaacgatcggaggacc

SEQ ID NO: 226713 - DNA, 25 bp, Artificial
  probe
  misc_feature (1)..(25): SEQ ID NO: 1619; WAN024FYZ_at; Start 831; Stop 855
gataggtgcctcactgattaagcat

SEQ ID NO: 226714 - DNA, 25 bp, Artificial
  probe
  misc_feature (1)..(25): SEQ ID NO: 1619; WAN024FYZ_at; Start 300; Stop 324
ggttgagtactcaccagtcacagaa

SEQ ID NO: 226715 - DNA, 25 bp, Artificial
  probe
  misc_feature (1)..(25): SEQ ID NO: 1619; WAN024FYZ_at; Start 670; Stop 694
ccggctggctggtttattgctgata

SEQ ID NO: 226716 - DNA, 25 bp, Artificial
  probe
  misc_feature (1)..(25): SEQ ID NO: 1619; WAN024FYZ_at; Start 3; Stop 27
gagtattcaacatttccgtgtcgcc

SEQ ID NO: 226717 - DNA, 25 bp, Artificial
  probe
  misc_feature (1)..(25): SEQ ID NO: 1619; WAN024FYZ_at; Start 119; Stop 143
cacgagtgggttacatcgagctgga

SEQ ID NO: 226718 - DNA, 25 bp, Artificial
  probe
  misc_feature (1)..(25): SEQ ID NO: 1619; WAN024FYZ_at; Start 437; Stop 461
taaccgcttttttgcacaacatggg

SEQ ID NO: 226719 - DNA, 25 bp, Artificial
  probe
  misc_feature (1)..(25): SEQ ID NO: 1619; WAN024FYZ_at; Start 718; Stop 742
tctcgcggtatcattgcagcactgg

SEQ ID NO: 226720 - DNA, 25 bp, Artificial
  probe
  misc_feature (1)..(25): SEQ ID NO: 1619; WAN024FYZ_at; Start 381; Stop 405
gagtgataacactgcggccaactta

SEQ ID NO: 226721 - DNA, 25 bp, Artificial
  probe
  misc_feature (1)..(25): SEQ ID NO: 1619; WAN024FYZ_at; Start 789; Stop 813
gagtcaggcaactatggatgaacga

SEQ ID NO: 226722 - DNA, 25 bp, Artificial
  probe
  misc_feature (1)..(25): SEQ ID NO: 1619; WAN024FYZ_at; Start 748; Stop 772
gatggtaagccctcccgtatcgtag

SEQ ID NO: 226723 - DNA, 25 bp, Artificial
  probe
  misc_feature (1)..(25): SEQ ID NO: 1619; WAN024FYZ_at; Start 362; Stop 386
gcagtgctgccataaccatgagtga

SEQ ID NO: 226724 - DNA, 25 bp, Artificial
  probe
  misc_feature (1)..(25): SEQ ID NO: 1619; WAN024FYZ_at; Start 420; Stop 444
cggaggaccgaaggagctaaccgct

SEQ ID NO: 226725 - DNA, 25 bp, Artificial
  probe
  misc_feature (1)..(25): SEQ ID NO: 1619; WAN024FYZ_at; Start 816; Stop 840
tagacagatcgctgagataggtgcc

SEQ ID NO: 226726 - DNA, 25 bp, Artificial
  probe
  misc_feature (1)..(25): SEQ ID NO: 1619; WAN024FYZ_at; Start 501; Stop 525
gaatgaagccataccaaacgacgag

SEQ ID NO: 226727 - DNA, 25 bp, Artificial
  probe
  misc_feature (1)..(25): SEQ ID NO: 1619; WAN024FYZ_at; Start 486; Stop 510
ttgggaaccggagctgaatgaagcc

SEQ ID NO: 226728 - DNA, 25 bp, Artificial
  probe
  misc_feature (1)..(25): SEQ ID NO: 1619; WAN024FYZ_at; Start 764; Stop 788
gtatcgtagttatctacacgacggg

SEQ ID NO: 226729 - DNA, 25 bp, Artificial
  probe
  misc_feature (1)..(25): SEQ ID NO: 1619; WAN024FYZ_at; Start 636; Stop 660
taaagttgcaggaccacttctgcgc

SEQ ID NO: 226730 - DNA, 25 bp, Artificial
  probe
  misc_feature (1)..(25): SEQ ID NO: 1619; WAN024FYZ_at; Start 523; Stop 547
gagcgtgacaccacgatgcctgcag

SEQ ID NO: 226731 - DNA, 25 bp, Artificial
  probe
  misc_feature (1)..(25): SEQ ID NO: 1696; WAN024FZ2_at; Start 161; Stop 185
ttccgaaaaaatacacctctggtgc

SEQ ID NO: 226732 - DNA, 25 bp, Artificial
  probe
  misc_feature (1)..(25): SEQ ID NO: 1696; WAN024FZ2_at; Start 163; Stop 187
ccgaaaaaatacacctctggtgcag

SEQ ID NO: 226733 - DNA, 25 bp, Artificial
  probe
  misc_feature (1)..(25): SEQ ID NO: 1696; WAN024FZ2_at; Start 22; Stop 46
gtagccctagtattgactactgtcg

SEQ ID NO: 226734 - DNA, 25 bp, Artificial
  probe
  misc_feature (1)..(25): SEQ ID NO: 1696; WAN024FZ2_at; Start 12; Stop 36
gaacggaacagtagccctagtattg

SEQ ID NO: 226735 - DNA, 25 bp, Artificial
  probe
  misc_feature (1)..(25): SEQ ID NO: 1696; WAN024FZ2_at; Start 54; Stop 78
tcatattggctattctaggactgag

SEQ ID NO: 226736 - DNA, 25 bp, Artificial
  probe
  misc_feature (1)..(25): SEQ ID NO: 1696; WAN024FZ2_at; Start 3; Stop 27
gatactgtggaacggaacagtagcc

SEQ ID NO: 226737 - DNA, 25 bp, Artificial
  probe
  misc_feature (1)..(25): SEQ ID NO: 1696; WAN024FZ2_at; Start 2; Stop 26
tgatactgtggaacggaacagtagc

SEQ ID NO: 226738 - DNA, 25 bp, Artificial
  probe
  misc_feature (1)..(25): SEQ ID NO: 1696; WAN024FZ2_at; Start 44; Stop 68
tcgtttctattcatattggctattc

SEQ ID NO: 226739 - DNA, 25 bp, Artificial
  probe
  misc_feature (1)..(25): SEQ ID NO: 1696; WAN024FZ2_at; Start 41; Stop 65
ctgtcgtttctattcatattggcta

SEQ ID NO: 226740 - DNA, 25 bp, Artificial
  probe
  misc_feature (1)..(25): SEQ ID NO: 1696; WAN024FZ2_at; Start 167; Stop 191
aaaaatacacctctggtgcagtgag

SEQ ID NO: 226741 - DNA, 25 bp, Artificial
  probe
  misc_feature (1)..(25): SEQ ID NO: 1696; WAN024FZ2_at; Start 162; Stop 186
tccgaaaaaatacacctctggtgca

SEQ ID NO: 226742 - DNA, 25 bp, Artificial
  probe
  misc_feature (1)..(25): SEQ ID NO: 1696; WAN024FZ2_at; Start 60; Stop 84
tggctattctaggactgagatgaaa

SEQ ID NO: 226743 - DNA, 25 bp, Artificial
  probe
  misc_feature (1)..(25): SEQ ID NO: 1696; WAN024FZ2_at; Start 13; Stop 37
aacggaacagtagccctagtattga

SEQ ID NO: 226744 - DNA, 25 bp, Artificial
  probe
  misc_feature (1)..(25): SEQ ID NO: 1696; WAN024FZ2_at; Start 55; Stop 79
catattggctattctaggactgaga

SEQ ID NO: 226745 - DNA, 25 bp, Artificial
  probe
  misc_feature (1)..(25): SEQ ID NO: 1696; WAN024FZ2_at; Start 65; Stop 89
attctaggactgagatgaaaaaatc

SEQ ID NO: 226746 - DNA, 25 bp, Artificial
  probe
  misc_feature (1)..(25): SEQ ID NO: 1696; WAN024FZ2_at; Start 17; Stop 41
gaacagtagccctagtattgactac

SEQ ID NO: 226747 - DNA, 25 bp, Artificial
  probe
  misc_feature (1)..(25): SEQ ID NO: 1696; WAN024FZ2_at; Start 165; Stop 189
gaaaaaatacacctctggtgcagtg

SEQ ID NO: 226748 - DNA, 25 bp, Artificial
  probe
  misc_feature (1)..(25): SEQ ID NO: 1696; WAN024FZ2_at; Start 23; Stop 47
tagccctagtattgactactgtcgt

SEQ ID NO: 226749 - DNA, 25 bp, Artificial
  probe
  misc_feature (1)..(25): SEQ ID NO: 1696; WAN024FZ2_at; Start 10; Stop 34
tggaacggaacagtagccctagtat

SEQ ID NO: 226750 - DNA, 25 bp, Artificial
  probe
  misc_feature (1)..(25): SEQ ID NO: 1696; WAN024FZ2_at; Start 6; Stop 30
actgtggaacggaacagtagcccta

SEQ ID NO: 226751 - DNA, 25 bp, Artificial
  probe
  misc_feature (1)..(25): SEQ ID NO: 1696; WAN024FZ2_at; Start 51; Stop 75
tattcatattggctattctaggact

SEQ ID NO: 226752 - DNA, 25 bp, Artificial
  probe
  misc_feature (1)..(25): SEQ ID NO: 1696; WAN024FZ2_at; Start 25; Stop 49
gccctagtattgactactgtcgttt

SEQ ID NO: 226753 - DNA, 25 bp, Artificial
  probe
  misc_feature (1)..(25): SEQ ID NO: 1696; WAN024FZ2_at; Start 62; Stop 86
gctattctaggactgagatgaaaaa

SEQ ID NO: 226754 - DNA, 25 bp, Artificial
  probe
  misc_feature (1)..(25): SEQ ID NO: 1696; WAN024FZ2_at; Start 5; Stop 29
tactgtggaacggaacagtagccct

SEQ ID NO: 226755 - DNA, 25 bp, Artificial
  probe
  misc_feature (1)..(25): SEQ ID NO: 1696; WAN024FZ2_at; Start 32; Stop 56
tattgactactgtcgtttctattca

SEQ ID NO: 226756 - DNA, 25 bp, Artificial
  probe
  misc_feature (1)..(25): SEQ ID NO: 1696; WAN024FZ2_at; Start 39; Stop 63
tactgtcgtttctattcatattggc

SEQ ID NO: 226757 - DNA, 25 bp, Artificial
  probe
  misc_feature (1)..(25): SEQ ID NO: 1696; WAN024FZ2_at; Start 251; Stop 275
ttgatgatgtagaacaaattgaaaa

SEQ ID NO: 226758 - DNA, 25 bp, Artificial
  probe
  misc_feature (1)..(25): SEQ ID NO: 1696; WAN024FZ2_at; Start 27; Stop 51
cctagtattgactactgtcgtttct

SEQ ID NO: 226759 - DNA, 25 bp, Artificial
  probe
  misc_feature (1)..(25): SEQ ID NO: 1696; WAN024FZ2_at; Start 157; Stop 181
attattccgaaaaaatacacctctg

SEQ ID NO: 226760 - DNA, 25 bp, Artificial
  probe
  misc_feature (1)..(25): SEQ ID NO: 1696; WAN024FZ2_at; Start 299; Stop 323
ttgatgttgtcagagaacagtttgg

SEQ ID NO: 226761 - DNA, 25 bp, Artificial
  probe
  misc_feature (1)..(25): SEQ ID NO: 1696; WAN024FZ2_at; Start 9; Stop 33
gtggaacggaacagtagccctagta

SEQ ID NO: 226762 - DNA, 25 bp, Artificial
  probe
  misc_feature (1)..(25): SEQ ID NO: 1696; WAN024FZ2_at; Start 16; Stop 40
ggaacagtagccctagtattgacta

SEQ ID NO: 226763 - DNA, 25 bp, Artificial
  probe
  misc_feature (1)..(25): SEQ ID NO: 1696; WAN024FZ2_at; Start 8; Stop 32
tgtggaacggaacagtagccctagt

SEQ ID NO: 226764 - DNA, 25 bp, Artificial
  probe
  misc_feature (1)..(25): SEQ ID NO: 1696; WAN024FZ2_at; Start 57; Stop 81
tattggctattctaggactgagatg

SEQ ID NO: 226765 - DNA, 25 bp, Artificial
  probe
  misc_feature (1)..(25): SEQ ID NO: 1229; WAN024FZ3_at; Start 136; Stop 160
aaaacaatggcgacttcacgtaaga

SEQ ID NO: 226766 - DNA, 25 bp, Artificial
  probe
  misc_feature (1)..(25): SEQ ID NO: 1229; WAN024FZ3_at; Start 157; Stop 181
aagaattactttgtcctcaataagg

SEQ ID NO: 226767 - DNA, 25 bp, Artificial
  probe
  misc_feature (1)..(25): SEQ ID NO: 1229; WAN024FZ3_at; Start 177; Stop 201
taaggaaaagtccagagataaccgc

SEQ ID NO: 226768 - DNA, 25 bp, Artificial
  probe
  misc_feature (1)..(25): SEQ ID NO: 1229; WAN024FZ3_at; Start 145; Stop 169
gcgacttcacgtaagaattactttg

SEQ ID NO: 226769 - DNA, 25 bp, Artificial
  probe
  misc_feature (1)..(25): SEQ ID NO: 1229; WAN024FZ3_at; Start 143; Stop 167
tggcgacttcacgtaagaattactt

SEQ ID NO: 226770 - DNA, 25 bp, Artificial
  probe
  misc_feature (1)..(25): SEQ ID NO: 1229; WAN024FZ3_at; Start 193; Stop 217
gataaccgcgatcacttcttcatat

SEQ ID NO: 226771 - DNA, 25 bp, Artificial
  probe
  misc_feature (1)..(25): SEQ ID NO: 1229; WAN024FZ3_at; Start 49; Stop 73
agcgagagctaccaagattttgaac

SEQ ID NO: 226772 - DNA, 25 bp, Artificial
  probe
  misc_feature (1)..(25): SEQ ID NO: 1229; WAN024FZ3_at; Start 62; Stop 86
aagattttgaacgtgacttctaccg

SEQ ID NO: 226773 - DNA, 25 bp, Artificial
  probe
  misc_feature (1)..(25): SEQ ID NO: 1229; WAN024FZ3_at; Start 152; Stop 176
cacgtaagaattactttgtcctcaa

SEQ ID NO: 226774 - DNA, 25 bp, Artificial
  probe
  misc_feature (1)..(25): SEQ ID NO: 1229; WAN024FZ3_at; Start 184; Stop 208
aagtccagagataaccgcgatcact

SEQ ID NO: 226775 - DNA, 25 bp, Artificial
  probe
  misc_feature (1)..(25): SEQ ID NO: 1229; WAN024FZ3_at; Start 171; Stop 195
cctcaataaggaaaagtccagagat

SEQ ID NO: 226776 - DNA, 25 bp, Artificial
  probe
  misc_feature (1)..(25): SEQ ID NO: 1229; WAN024FZ3_at; Start 138; Stop 162
aacaatggcgacttcacgtaagaat

SEQ ID NO: 226777 - DNA, 25 bp, Artificial
  probe
  misc_feature (1)..(25): SEQ ID NO: 1229; WAN024FZ3_at; Start 147; Stop 171
gacttcacgtaagaattactttgtc

SEQ ID NO: 226778 - DNA, 25 bp, Artificial
  probe
  misc_feature (1)..(25): SEQ ID NO: 1229; WAN024FZ3_at; Start 60; Stop 84
ccaagattttgaacgtgacttctac

SEQ ID NO: 226779 - DNA, 25 bp, Artificial
  probe
  misc_feature (1)..(25): SEQ ID NO: 1229; WAN024FZ3_at; Start 66; Stop 90
ttttgaacgtgacttctaccgctac

SEQ ID NO: 226780 - DNA, 25 bp, Artificial
  probe
  misc_feature (1)..(25): SEQ ID NO: 1229; WAN024FZ3_at; Start 52; Stop 76
gagagctaccaagattttgaacgtg

SEQ ID NO: 226781 - DNA, 25 bp, Artificial
  probe
  misc_feature (1)..(25): SEQ ID NO: 1229; WAN024FZ3_at; Start 199; Stop 223
cgcgatcacttcttcatatttgaag

SEQ ID NO: 226782 - DNA, 25 bp, Artificial
  probe
  misc_feature (1)..(25): SEQ ID NO: 1229; WAN024FZ3_at; Start 202; Stop 226
gatcacttcttcatatttgaagtaa

SEQ ID NO: 226783 - DNA, 25 bp, Artificial
  probe
  misc_feature (1)..(25): SEQ ID NO: 1229; WAN024FZ3_at; Start 182; Stop 206
aaaagtccagagataaccgcgatca

SEQ ID NO: 226784 - DNA, 25 bp, Artificial
  probe
  misc_feature (1)..(25): SEQ ID NO: 1229; WAN024FZ3_at; Start 159; Stop 183
gaattactttgtcctcaataaggaa

SEQ ID NO: 226785 - DNA, 25 bp, Artificial
  probe
  misc_feature (1)..(25): SEQ ID NO: 1229; WAN024FZ3_at; Start 168; Stop 192
tgtcctcaataaggaaaagtccaga

SEQ ID NO: 226786 - DNA, 25 bp, Artificial
  probe
  misc_feature (1)..(25): SEQ ID NO: 1229; WAN024FZ3_at; Start 186; Stop 210
gtccagagataaccgcgatcacttc

SEQ ID NO: 226787 - DNA, 25 bp, Artificial
  probe
  misc_feature (1)..(25): SEQ ID NO: 1229; WAN024FZ3_at; Start 56; Stop 80
gctaccaagattttgaacgtgactt

SEQ ID NO: 226788 - DNA, 25 bp, Artificial
  probe
  misc_feature (1)..(25): SEQ ID NO: 1229; WAN024FZ3_at; Start 191; Stop 215
gagataaccgcgatcacttcttcat

SEQ ID NO: 226789 - DNA, 25 bp, Artificial
  probe
  misc_feature (1)..(25): SEQ ID NO: 1229; WAN024FZ3_at; Start 68; Stop 92
ttgaacgtgacttctaccgctactc

SEQ ID NO: 226790 - DNA, 25 bp, Artificial
  probe
  misc_feature (1)..(25): SEQ ID NO: 1229; WAN024FZ3_at; Start 54; Stop 78
gagctaccaagattttgaacgtgac

SEQ ID NO: 226791 - DNA, 25 bp, Artificial
  probe
  misc_feature (1)..(25): SEQ ID NO: 1229; WAN024FZ3_at; Start 180; Stop 204
ggaaaagtccagagataaccgcgat

SEQ ID NO: 226792 - DNA, 25 bp, Artificial
  probe
  misc_feature (1)..(25): SEQ ID NO: 1229; WAN024FZ3_at; Start 256; Stop 280
cattatacatataagaaaactacaa

SEQ ID NO: 226793 - DNA, 25 bp, Artificial
  probe
  misc_feature (1)..(25): SEQ ID NO: 1229; WAN024FZ3_at; Start 64; Stop 88
gattttgaacgtgacttctaccgct

SEQ ID NO: 226794 - DNA, 25 bp, Artificial
  probe
  misc_feature (1)..(25): SEQ ID NO: 1229; WAN024FZ3_at; Start 140; Stop 164
caatggcgacttcacgtaagaatta

SEQ ID NO: 226795 - DNA, 25 bp, Artificial
  probe
  misc_feature (1)..(25): SEQ ID NO: 1229; WAN024FZ3_at; Start 58; Stop 82
taccaagattttgaacgtgacttct

SEQ ID NO: 226796 - DNA, 25 bp, Artificial
  probe
  misc_feature (1)..(25): SEQ ID NO: 1229; WAN024FZ3_at; Start 95; Stop 119
acatgaatattccattgaccttcct

SEQ ID NO: 226797 - DNA, 25 bp, Artificial
  probe
  misc_feature (1)..(25): SEQ ID NO: 1229; WAN024FZ3_at; Start 196; Stop 220
aaccgcgatcacttcttcatatttg

SEQ ID NO: 226798 - DNA, 25 bp, Artificial
  probe
  misc_feature (1)..(25): SEQ ID NO: 1229; WAN024FZ3_at; Start 50; Stop 74
gcgagagctaccaagattttgaacg

SEQ ID NO: 226799 - DNA, 25 bp, Artificial
  probe
  misc_feature (1)..(25): SEQ ID NO: 2235; WAN024FZ4_at; Start 443; Stop 467
cactgttagttattagccatgaccg

SEQ ID NO: 226800 - DNA, 25 bp, Artificial
  probe
  misc_feature (1)..(25): SEQ ID NO: 2235; WAN024FZ4_at; Start 852; Stop 876
gcaaagtaaagcattggagctccat

SEQ ID NO: 226801 - DNA, 25 bp, Artificial
  probe
  misc_feature (1)..(25): SEQ ID NO: 2235; WAN024FZ4_at; Start 1067; Stop 1091
aaataggttactttgcacagaatgg

SEQ ID NO: 226802 - DNA, 25 bp, Artificial
  probe
  misc_feature (1)..(25): SEQ ID NO: 2235; WAN024FZ4_at; Start 423; Stop 447
gctaaaatattttacaggtgcactg

SEQ ID NO: 226803 - DNA, 25 bp, Artificial
  probe
  misc_feature (1)..(25): SEQ ID NO: 2235; WAN024FZ4_at; Start 230; Stop 254
ctctgcaggaggaaaaagattttgc

SEQ ID NO: 226804 - DNA, 25 bp, Artificial
  probe
  misc_feature (1)..(25): SEQ ID NO: 2235; WAN024FZ4_at; Start 714; Stop 738
cggagggcgtttagctcatcaaaaa

SEQ ID NO: 226805 - DNA, 25 bp, Artificial
  probe
  misc_feature (1)..(25): SEQ ID NO: 2235; WAN024FZ4_at; Start 1317; Stop 1341
tgacataccaagtttagaggctttg

SEQ ID NO: 226806 - DNA, 25 bp, Artificial
  probe
  misc_feature (1)..(25): SEQ ID NO: 2235; WAN024FZ4_at; Start 378; Stop 402
tacgagccatttagaccgtgaagga

SEQ ID NO: 226807 - DNA, 25 bp, Artificial
  probe
  misc_feature (1)..(25): SEQ ID NO: 2235; WAN024FZ4_at; Start 91; Stop 115
gaccgtattggtttagtaggagcaa

SEQ ID NO: 226808 - DNA, 25 bp, Artificial
  probe
  misc_feature (1)..(25): SEQ ID NO: 2235; WAN024FZ4_at; Start 1265; Stop 1289
tgctcatgggtagatataacatcct

SEQ ID NO: 226809 - DNA, 25 bp, Artificial
  probe
  misc_feature (1)..(25): SEQ ID NO: 2235; WAN024FZ4_at; Start 1082; Stop 1106
cacagaatggttacaagtacaacag

SEQ ID NO: 226810 - DNA, 25 bp, Artificial
  probe
  misc_feature (1)..(25): SEQ ID NO: 2235; WAN024FZ4_at; Start 458; Stop 482
gccatgaccgctattttcttgatga

SEQ ID NO: 226811 - DNA, 25 bp, Artificial
  probe
  misc_feature (1)..(25): SEQ ID NO: 2235; WAN024FZ4_at; Start 260; Stop 284
taggcaagctaggtgttgagcaatt

SEQ ID NO: 226812 - DNA, 25 bp, Artificial
  probe
  misc_feature (1)..(25): SEQ ID NO: 2235; WAN024FZ4_at; Start 1366; Stop 1390
ggaactatcgtgtttatcacccacg

SEQ ID NO: 226813 - DNA, 25 bp, Artificial
  probe
  misc_feature (1)..(25): SEQ ID NO: 2235; WAN024FZ4_at; Start 492; Stop 516
taaaatatgggaactgaaagatggc

SEQ ID NO: 226814 - DNA, 25 bp, Artificial
  probe
  misc_feature (1)..(25): SEQ ID NO: 2235; WAN024FZ4_at; Start 1250; Stop 1274
tgttgcttgctaaaatgctcatggg

SEQ ID NO: 226815 - DNA, 25 bp, Artificial
  probe
  misc_feature (1)..(25): SEQ ID NO: 2235; WAN024FZ4_at; Start 830; Stop 854
gcattcgcagaattcgtttcaggca

SEQ ID NO: 226816 - DNA, 25 bp, Artificial
  probe
  misc_feature (1)..(25): SEQ ID NO: 2235; WAN024FZ4_at; Start 511; Stop 535
gatggcaaaatcactgagtattggg

SEQ ID NO: 226817 - DNA, 25 bp, Artificial
  probe
  misc_feature (1)..(25): SEQ ID NO: 2235; WAN024FZ4_at; Start 595; Stop 619
tacgaacaatttattgcggaacgtg

SEQ ID NO: 226818 - DNA, 25 bp, Artificial
  probe
  misc_feature (1)..(25): SEQ ID NO: 2235; WAN024FZ4_at; Start 196; Stop 220
gaacttgcctatattccccagttgg

SEQ ID NO: 226819 - DNA, 25 bp, Artificial
  probe
  misc_feature (1)..(25): SEQ ID NO: 2235; WAN024FZ4_at; Start 555; Stop 579
tcgtcagaaagaggaagaacgtaag

SEQ ID NO: 226820 - DNA, 25 bp, Artificial
  probe
  misc_feature (1)..(25): SEQ ID NO: 2235; WAN024FZ4_at; Start 657; Stop 681
ggctcgtaaaatagaacagaaggca

SEQ ID NO: 226821 - DNA, 25 bp, Artificial
  probe
  misc_feature (1)..(25): SEQ ID NO: 2235; WAN024FZ4_at; Start 324; Stop 348
taaaatagcacaggccttatcggca

SEQ ID NO: 226822 - DNA, 25 bp, Artificial
  probe
  misc_feature (1)..(25): SEQ ID NO: 2235; WAN024FZ4_at; Start 1111; Stop 1135
cagaatgttatggagtttatgcaga

SEQ ID NO: 226823 - DNA, 25 bp, Artificial
  probe
  misc_feature (1)..(25): SEQ ID NO: 2235; WAN024FZ4_at; Start 1346; Stop 1370
tactaatgaaggagtacaccggaac

SEQ ID NO: 226824 - DNA, 25 bp, Artificial
  probe
  misc_feature (1)..(25): SEQ ID NO: 2235; WAN024FZ4_at; Start 212; Stop 236
cccagttggacgaagtaactctgca

SEQ ID NO: 226825 - DNA, 25 bp, Artificial
  probe
  misc_feature (1)..(25): SEQ ID NO: 2235; WAN024FZ4_at; Start 1296; Stop 1320
ggatgaacccagtaacttccttgac

SEQ ID NO: 226826 - DNA, 25 bp, Artificial
  probe
  misc_feature (1)..(25): SEQ ID NO: 2235; WAN024FZ4_at; Start 875; Stop 899
ataatccataccctatagtcggtgc

SEQ ID NO: 226827 - DNA, 25 bp, Artificial
  probe
  misc_feature (1)..(25): SEQ ID NO: 2235; WAN024FZ4_at; Start 302; Stop 326
gcggtggtgaagaaacaaggcttaa

SEQ ID NO: 226828 - DNA, 25 bp, Artificial
  probe
  misc_feature (1)..(25): SEQ ID NO: 2235; WAN024FZ4_at; Start 1383; Stop 1407
cacccacgataaacgattactcgaa

SEQ ID NO: 226829 - DNA, 25 bp, Artificial
  probe
  misc_feature (1)..(25): SEQ ID NO: 2235; WAN024FZ4_at; Start 347; Stop 371
cacaggttcatggtattttagcgga

SEQ ID NO: 226830 - DNA, 25 bp, Artificial
  probe
  misc_feature (1)..(25): SEQ ID NO: 2235; WAN024FZ4_at; Start 636; Stop 660
tgcggaggaaaagcgaaaacaggct

SEQ ID NO: 226831 - DNA, 25 bp, Artificial
  probe
  misc_feature (1)..(25): SEQ ID NO: 2235; WAN024FZ4_at; Start 815; Stop 839
tagaagctccggaaggcattcgcag

SEQ ID NO: 226832 - DNA, 25 bp, Artificial
  probe
  misc_feature (1)..(25): SEQ ID NO: 2235; WAN024FZ4_at; Start 362; Stop 386
ttttagcggatgaacctacgagcca

SEQ ID NO: 226833 - DNA, 25 bp, Artificial
  probe
  misc_feature (1)..(25): SEQ ID NO: 5137; WAN024FZ5_at; Start 246; Stop 270
taatacttgtattgcggtcagcacc

SEQ ID NO: 226834 - DNA, 25 bp, Artificial
  probe
  misc_feature (1)..(25): SEQ ID NO: 5137; WAN024FZ5_at; Start 367; Stop 391
aattttttcaatacttggctccaag

SEQ ID NO: 226835 - DNA, 25 bp, Artificial
  probe
  misc_feature (1)..(25): SEQ ID NO: 5137; WAN024FZ5_at; Start 170; Stop 194
cgaacagaatcgtgggtaacaacga

SEQ ID NO: 226836 - DNA, 25 bp, Artificial
  probe
  misc_feature (1)..(25): SEQ ID NO: 5137; WAN024FZ5_at; Start 309; Stop 333
gatatttatctacaagatcttctgc

SEQ ID NO: 226837 - DNA, 25 bp, Artificial
  probe
  misc_feature (1)..(25): SEQ ID NO: 5137; WAN024FZ5_at; Start 282; Stop 306
tgatgatacgttccttataaagagg

SEQ ID NO: 226838 - DNA, 25 bp, Artificial
  probe
  misc_feature (1)..(25): SEQ ID NO: 5137; WAN024FZ5_at; Start 162; Stop 186
taaatggacgaacagaatcgtgggt

SEQ ID NO: 226839 - DNA, 25 bp, Artificial
  probe
  misc_feature (1)..(25): SEQ ID NO: 5137; WAN024FZ5_at; Start 324; Stop 348
gatcttctgcatgagaaacccagtc

SEQ ID NO: 226840 - DNA, 25 bp, Artificial
  probe
  misc_feature (1)..(25): SEQ ID NO: 5137; WAN024FZ5_at; Start 132; Stop 156
ggatattgtcctgaatcatgcgaag

SEQ ID NO: 226841 - DNA, 25 bp, Artificial
  probe
  misc_feature (1)..(25): SEQ ID NO: 5137; WAN024FZ5_at; Start 379; Stop 403
acttggctccaagacaaatttttca

SEQ ID NO: 226842 - DNA, 25 bp, Artificial
  probe
  misc_feature (1)..(25): SEQ ID NO: 5137; WAN024FZ5_at; Start 337; Stop 361
agaaacccagtctccatgaacacca

SEQ ID NO: 226843 - DNA, 25 bp, Artificial
  probe
  misc_feature (1)..(25): SEQ ID NO: 5137; WAN024FZ5_at; Start 402; Stop 426
caattgtatgaatcaaaataggtcg

SEQ ID NO: 226844 - DNA, 25 bp, Artificial
  probe
  misc_feature (1)..(25): SEQ ID NO: 5137; WAN024FZ5_at; Start 294; Stop 318
ccttataaagaggaagatatttatc

SEQ ID NO: 226845 - DNA, 25 bp, Artificial
  probe
  misc_feature (1)..(25): SEQ ID NO: 5137; WAN024FZ5_at; Start 182; Stop 206
tgggtaacaacgatatcctctggag

SEQ ID NO: 226846 - DNA, 25 bp, Artificial
  probe
  misc_feature (1)..(25): SEQ ID NO: 5137; WAN024FZ5_at; Start 11; Stop 35
tgtccttgataaaggtgagcacgat

SEQ ID NO: 226847 - DNA, 25 bp, Artificial
  probe
  misc_feature (1)..(25): SEQ ID NO: 5137; WAN024FZ5_at; Start 44; Stop 68
tctgtaataaattgaccattggtac

SEQ ID NO: 226848 - DNA, 25 bp, Artificial
  probe
  misc_feature (1)..(25): SEQ ID NO: 5137; WAN024FZ5_at; Start 105; Stop 129
ccactgcgtcatgattttgggcaag

SEQ ID NO: 226849 - DNA, 25 bp, Artificial
  probe
  misc_feature (1)..(25): SEQ ID NO: 5137; WAN024FZ5_at; Start 212; Stop 236
ggacgataagcatcaatggcttcaa

SEQ ID NO: 226850 - DNA, 25 bp, Artificial
  probe
  misc_feature (1)..(25): SEQ ID NO: 5137; WAN024FZ5_at; Start 120; Stop 144
tttgggcaagttggatattgtcctg

SEQ ID NO: 226851 - DNA, 25 bp, Artificial
  probe
  misc_feature (1)..(25): SEQ ID NO: 5137; WAN024FZ5_at; Start 258; Stop 282
tgcggtcagcaccaccctttgtaat

SEQ ID NO: 226852 - DNA, 25 bp, Artificial
  probe
  misc_feature (1)..(25): SEQ ID NO: 5137; WAN024FZ5_at; Start 198; Stop 222
cctctggagtaagcggacgataagc

SEQ ID NO: 226853 - DNA, 25 bp, Artificial
  probe
  misc_feature (1)..(25): SEQ ID NO: 5137; WAN024FZ5_at; Start 411; Stop 435
gaatcaaaataggtcgatcacctag

SEQ ID NO: 226854 - DNA, 25 bp, Artificial
  probe
  misc_feature (1)..(25): SEQ ID NO: 5137; WAN024FZ5_at; Start 29; Stop 53
gcacgatttggaatatctgtaataa

SEQ ID NO: 226855 - DNA, 25 bp, Artificial
  probe
  misc_feature (1)..(25): SEQ ID NO: 5137; WAN024FZ5_at; Start 193; Stop 217
gatatcctctggagtaagcggacga

SEQ ID NO: 226856 - DNA, 25 bp, Artificial
  probe
  misc_feature (1)..(25): SEQ ID NO: 5137; WAN024FZ5_at; Start 56; Stop 80
tgaccattggtactttcaacgatag

SEQ ID NO: 226857 - DNA, 25 bp, Artificial
  probe
  misc_feature (1)..(25): SEQ ID NO: 5137; WAN024FZ5_at; Start 346; Stop 370
gtctccatgaacaccaactacaatt

SEQ ID NO: 226858 - DNA, 25 bp, Artificial
  probe
  misc_feature (1)..(25): SEQ ID NO: 5137; WAN024FZ5_at; Start 81; Stop 105
tatcaaccgcttctaccactgtgtc

SEQ ID NO: 226859 - DNA, 25 bp, Artificial
  probe
  misc_feature (1)..(25): SEQ ID NO: 5137; WAN024FZ5_at; Start 21; Stop 45
aaaggtgagcacgatttggaatatc

SEQ ID NO: 226860 - DNA, 25 bp, Artificial
  probe
  misc_feature (1)..(25): SEQ ID NO: 5137; WAN024FZ5_at; Start 66; Stop 90
tactttcaacgatagtatcaaccgc

SEQ ID NO: 226861 - DNA, 25 bp, Artificial
  probe
  misc_feature (1)..(25): SEQ ID NO: 5137; WAN024FZ5_at; Start 225; Stop 249
caatggcttcaatgatgttcttaat

SEQ ID NO: 226862 - DNA, 25 bp, Artificial
  probe
  misc_feature (1)..(25): SEQ ID NO: 5137; WAN024FZ5_at; Start 207; Stop 231
taagcggacgataagcatcaatggc

SEQ ID NO: 226863 - DNA, 25 bp, Artificial
  probe
  misc_feature (1)..(25): SEQ ID NO: 5137; WAN024FZ5_at; Start 267; Stop 291
caccaccctttgtaatgatgatacg

SEQ ID NO: 226864 - DNA, 25 bp, Artificial
  probe
  misc_feature (1)..(25): SEQ ID NO: 5137; WAN024FZ5_at; Start 1; Stop 25
ttgaggtgtttgtccttgataaagg

SEQ ID NO: 226865 - DNA, 25 bp, Artificial
  probe
  misc_feature (1)..(25): SEQ ID NO: 5137; WAN024FZ5_at; Start 147; Stop 171
tcatgcgaagtgtaataaatggacg

SEQ ID NO: 226866 - DNA, 25 bp, Artificial
  probe
  misc_feature (1)..(25): SEQ ID NO: 5137; WAN024FZ5_at; Start 94; Stop 118
taccactgtgtccactgcgtcatga

SEQ ID NO: 226867 - DNA, 25 bp, Artificial
  probe
  misc_feature (1)..(25): SEQ ID NO: 1861; WAN024FZ6_at; Start 437; Stop 461
tcgttgaaagtaccaatggtcaatt

SEQ ID NO: 226868 - DNA, 25 bp, Artificial
  probe
  misc_feature (1)..(25): SEQ ID NO: 1861; WAN024FZ6_at; Start 187; Stop 211
gatcttgtagataaatatcttcctc

SEQ ID NO: 226869 - DNA, 25 bp, Artificial
  probe
  misc_feature (1)..(25): SEQ ID NO: 1861; WAN024FZ6_at; Start 89; Stop 113
gacctattttgattcatacaattga

SEQ ID NO: 226870 - DNA, 25 bp, Artificial
  probe
  misc_feature (1)..(25): SEQ ID NO: 1861; WAN024FZ6_at; Start 640; Stop 664
tactcaaatctgaagattacaaccg

SEQ ID NO: 226871 - DNA, 25 bp, Artificial
  probe
  misc_feature (1)..(25): SEQ ID NO: 1861; WAN024FZ6_at; Start 518; Stop 542
tccgttgcaaggacttcatggacct

SEQ ID NO: 226872 - DNA, 25 bp, Artificial
  probe
  misc_feature (1)..(25): SEQ ID NO: 1861; WAN024FZ6_at; Start 178; Stop 202
catgcagaagatcttgtagataaat

SEQ ID NO: 226873 - DNA, 25 bp, Artificial
  probe
  misc_feature (1)..(25): SEQ ID NO: 1861; WAN024FZ6_at; Start 236; Stop 260
caaagggtggtgctgaccgcaatac

SEQ ID NO: 226874 - DNA, 25 bp, Artificial
  probe
  misc_feature (1)..(25): SEQ ID NO: 1861; WAN024FZ6_at; Start 103; Stop 127
catacaattgaaaaatttgtcttgg

SEQ ID NO: 226875 - DNA, 25 bp, Artificial
  probe
  misc_feature (1)..(25): SEQ ID NO: 1861; WAN024FZ6_at; Start 9; Stop 33
tgcaggaattcttgccggtggaact

SEQ ID NO: 226876 - DNA, 25 bp, Artificial
  probe
  misc_feature (1)..(25): SEQ ID NO: 1861; WAN024FZ6_at; Start 538; Stop 562
gacctttatggatctctttctgatg

SEQ ID NO: 226877 - DNA, 25 bp, Artificial
  probe
  misc_feature (1)..(25): SEQ ID NO: 1861; WAN024FZ6_at; Start 646; Stop 670
aatctgaagattacaaccgtaacag

SEQ ID NO: 226878 - DNA, 25 bp, Artificial
  probe
  misc_feature (1)..(25): SEQ ID NO: 1861; WAN024FZ6_at; Start 331; Stop 355
cacgattctgttcgtccatttatta

SEQ ID NO: 226879 - DNA, 25 bp, Artificial
  probe
  misc_feature (1)..(25): SEQ ID NO: 1861; WAN024FZ6_at; Start 59; Stop 83
tgccaaaacaatttttagagctagg

SEQ ID NO: 226880 - DNA, 25 bp, Artificial
  probe
  misc_feature (1)..(25): SEQ ID NO: 1861; WAN024FZ6_at; Start 309; Stop 333
tccagaggatatcgttgttacccac

SEQ ID NO: 226881 - DNA, 25 bp, Artificial
  probe
  misc_feature (1)..(25): SEQ ID NO: 1861; WAN024FZ6_at; Start 15; Stop 39
aattcttgccggtggaactggcaca

SEQ ID NO: 226882 - DNA, 25 bp, Artificial
  probe
  misc_feature (1)..(25): SEQ ID NO: 1861; WAN024FZ6_at; Start 681; Stop 705
tgcaaaaagtatgattgagaaagac

SEQ ID NO: 226883 - DNA, 25 bp, Artificial
  probe
  misc_feature (1)..(25): SEQ ID NO: 1861; WAN024FZ6_at; Start 301; Stop 325
ccgcttactccagaggatatcgttg

SEQ ID NO: 226884 - DNA, 25 bp, Artificial
  probe
  misc_feature (1)..(25): SEQ ID NO: 1861; WAN024FZ6_at; Start 596; Stop 620
tctttgtgatcaaaggaaaagatgt

SEQ ID NO: 226885 - DNA, 25 bp, Artificial
  probe
  misc_feature (1)..(25): SEQ ID NO: 1861; WAN024FZ6_at; Start 320; Stop 344
tcgttgttacccacgattctgttcg

SEQ ID NO: 226886 - DNA, 25 bp, Artificial
  probe
  misc_feature (1)..(25): SEQ ID NO: 1861; WAN024FZ6_at; Start 430; Stop 454
gatactatcgttgaaagtaccaatg

SEQ ID NO: 226887 - DNA, 25 bp, Artificial
  probe
  misc_feature (1)..(25): SEQ ID NO: 1861; WAN024FZ6_at; Start 570; Stop 594
ggaaatcttgacagatgcatgtaaa

SEQ ID NO: 226888 - DNA, 25 bp, Artificial
  probe
  misc_feature (1)..(25): SEQ ID NO: 1861; WAN024FZ6_at; Start 660; Stop 684
aaccgtaacagatttgaagattgca

SEQ ID NO: 226889 - DNA, 25 bp, Artificial
  probe
  misc_feature (1)..(25): SEQ ID NO: 1861; WAN024FZ6_at; Start 130; Stop 154
ccaagtattgaaaaaattgtagttg

SEQ ID NO: 226890 - DNA, 25 bp, Artificial
  probe
  misc_feature (1)..(25): SEQ ID NO: 1861; WAN024FZ6_at; Start 511; Stop 535
caaacattccgttgcaaggacttca

SEQ ID NO: 226891 - DNA, 25 bp, Artificial
  probe
  misc_feature (1)..(25): SEQ ID NO: 1861; WAN024FZ6_at; Start 565; Stop 589
gagaaggaaatcttgacagatgcat

SEQ ID NO: 226892 - DNA, 25 bp, Artificial
  probe
  misc_feature (1)..(25): SEQ ID NO: 1861; WAN024FZ6_at; Start 500; Stop 524
gacaaacacctcaaacattccgttg

SEQ ID NO: 226893 - DNA, 25 bp, Artificial
  probe
  misc_feature (1)..(25): SEQ ID NO: 1861; WAN024FZ6_at; Start 553; Stop 577
ctttctgatgaagagaaggaaatct

SEQ ID NO: 226894 - DNA, 25 bp, Artificial
  probe
  misc_feature (1)..(25): SEQ ID NO: 1861; WAN024FZ6_at; Start 275; Stop 299
tcattgaagccattgatgcttatcg

SEQ ID NO: 226895 - DNA, 25 bp, Artificial
  probe
  misc_feature (1)..(25): SEQ ID NO: 1861; WAN024FZ6_at; Start 243; Stop 267
tggtgctgaccgcaatacaagtatt

SEQ ID NO: 226896 - DNA, 25 bp, Artificial
  probe
  misc_feature (1)..(25): SEQ ID NO: 1861; WAN024FZ6_at; Start 230; Stop 254
tcattacaaagggtggtgctgaccg

SEQ ID NO: 226897 - DNA, 25 bp, Artificial
  probe
  misc_feature (1)..(25): SEQ ID NO: 1861; WAN024FZ6_at; Start 2; Stop 26
tgatttatgcaggaattcttgccgg

SEQ ID NO: 226898 - DNA, 25 bp, Artificial
  probe
  misc_feature (1)..(25): SEQ ID NO: 1861; WAN024FZ6_at; Start 21; Stop 45
tgccggtggaactggcacacgcatg

SEQ ID NO: 226899 - DNA, 25 bp, Artificial
  probe
  misc_feature (1)..(25): SEQ ID NO: 1861; WAN024FZ6_at; Start 525; Stop 549
caaggacttcatggacctttatgga

SEQ ID NO: 226900 - DNA, 25 bp, Artificial
  probe
  misc_feature (1)..(25): SEQ ID NO: 1861; WAN024FZ6_at; Start 583; Stop 607
gatgcatgtaaaatctttgtgatca

SEQ ID NO: 226901 - DNA, 25 bp, Artificial
  probe
  misc_feature (1)..(25): SEQ ID NO: 4065; WAN024FZ7_at; Start 142; Stop 166
catgtagttttcatagaattcttca

SEQ ID NO: 226902 - DNA, 25 bp, Artificial
  probe
  misc_feature (1)..(25): SEQ ID NO: 4065; WAN024FZ7_at; Start 49; Stop 73
aatagcatcataagccaccacacga

SEQ ID NO: 226903 - DNA, 25 bp, Artificial
  probe
  misc_feature (1)..(25): SEQ ID NO: 4065; WAN024FZ7_at; Start 103; Stop 127
aaagccatcaaatccactagacaag

SEQ ID NO: 226904 - DNA, 25 bp, Artificial
  probe
  misc_feature (1)..(25): SEQ ID NO: 4065; WAN024FZ7_at; Start 16; Stop 40
gacaaactctgtaatggctgcaacc

SEQ ID NO: 226905 - DNA, 25 bp, Artificial
  probe
  misc_feature (1)..(25): SEQ ID NO: 4065; WAN024FZ7_at; Start 40; Stop 64
cgtatcttcaatagcatcataagcc

SEQ ID NO: 226906 - DNA, 25 bp, Artificial
  probe
  misc_feature (1)..(25): SEQ ID NO: 4065; WAN024FZ7_at; Start 177; Stop 201
taggagactgattgggaatcatgac

SEQ ID NO: 226907 - DNA, 25 bp, Artificial
  probe
  misc_feature (1)..(25): SEQ ID NO: 4065; WAN024FZ7_at; Start 229; Stop 253
ggtcgggtcagaaatgacggttcca

SEQ ID NO: 226908 - DNA, 25 bp, Artificial
  probe
  misc_feature (1)..(25): SEQ ID NO: 4065; WAN024FZ7_at; Start 64; Stop 88
caccacacgatctttagggagagaa

SEQ ID NO: 226909 - DNA, 25 bp, Artificial
  probe
  misc_feature (1)..(25): SEQ ID NO: 4065; WAN024FZ7_at; Start 172; Stop 196
ctgcataggagactgattgggaatc

SEQ ID NO: 226910 - DNA, 25 bp, Artificial
  probe
  misc_feature (1)..(25): SEQ ID NO: 4065; WAN024FZ7_at; Start 234; Stop 258
ggtcagaaatgacggttccacatga

SEQ ID NO: 226911 - DNA, 25 bp, Artificial
  probe
  misc_feature (1)..(25): SEQ ID NO: 4065; WAN024FZ7_at; Start 168; Stop 192
cactctgcataggagactgattggg

SEQ ID NO: 226912 - DNA, 25 bp, Artificial
  probe
  misc_feature (1)..(25): SEQ ID NO: 4065; WAN024FZ7_at; Start 67; Stop 91
cacacgatctttagggagagaaaca

SEQ ID NO: 226913 - DNA, 25 bp, Artificial
  probe
  misc_feature (1)..(25): SEQ ID NO: 4065; WAN024FZ7_at; Start 59; Stop 83
taagccaccacacgatctttaggga

SEQ ID NO: 226914 - DNA, 25 bp, Artificial
  probe
  misc_feature (1)..(25): SEQ ID NO: 4065; WAN024FZ7_at; Start 80; Stop 104
gggagagaaacaaactctctcataa

SEQ ID NO: 226915 - DNA, 25 bp, Artificial
  probe
  misc_feature (1)..(25): SEQ ID NO: 4065; WAN024FZ7_at; Start 189; Stop 213
tgggaatcatgacaactttttgacc

SEQ ID NO: 226916 - DNA, 25 bp, Artificial
  probe
  misc_feature (1)..(25): SEQ ID NO: 4065; WAN024FZ7_at; Start 90; Stop 114
caaactctctcataaagccatcaaa

SEQ ID NO: 226917 - DNA, 25 bp, Artificial
  probe
  misc_feature (1)..(25): SEQ ID NO: 4065; WAN024FZ7_at; Start 115; Stop 139
tccactagacaagaaatgggtccct

SEQ ID NO: 226918 - DNA, 25 bp, Artificial
  probe
  misc_feature (1)..(25): SEQ ID NO: 4065; WAN024FZ7_at; Start 12; Stop 36
cactgacaaactctgtaatggctgc

SEQ ID NO: 226919 - DNA, 25 bp, Artificial
  probe
  misc_feature (1)..(25): SEQ ID NO: 4065; WAN024FZ7_at; Start 19; Stop 43
aaactctgtaatggctgcaaccgta

SEQ ID NO: 226920 - DNA, 25 bp, Artificial
  probe
  misc_feature (1)..(25): SEQ ID NO: 4065; WAN024FZ7_at; Start 198; Stop 222
tgacaactttttgaccaacctcgta

SEQ ID NO: 226921 - DNA, 25 bp, Artificial
  probe
  misc_feature (1)..(25): SEQ ID NO: 4065; WAN024FZ7_at; Start 35; Stop 59
gcaaccgtatcttcaatagcatcat

SEQ ID NO: 226922 - DNA, 25 bp, Artificial
  probe
  misc_feature (1)..(25): SEQ ID NO: 4065; WAN024FZ7_at; Start 23; Stop 47
tctgtaatggctgcaaccgtatctt

SEQ ID NO: 226923 - DNA, 25 bp, Artificial
  probe
  misc_feature (1)..(25): SEQ ID NO: 4065; WAN024FZ7_at; Start 31; Stop 55
ggctgcaaccgtatcttcaatagca

SEQ ID NO: 226924 - DNA, 25 bp, Artificial
  probe
  misc_feature (1)..(25): SEQ ID NO: 4065; WAN024FZ7_at; Start 182; Stop 206
gactgattgggaatcatgacaactt

SEQ ID NO: 226925 - DNA, 25 bp, Artificial
  probe
  misc_feature (1)..(25): SEQ ID NO: 4065; WAN024FZ7_at; Start 120; Stop 144
tagacaagaaatgggtccctgtcat

SEQ ID NO: 226926 - DNA, 25 bp, Artificial
  probe
  misc_feature (1)..(25): SEQ ID NO: 4065; WAN024FZ7_at; Start 132; Stop 156
gggtccctgtcatgtagttttcata

SEQ ID NO: 226927 - DNA, 25 bp, Artificial
  probe
  misc_feature (1)..(25): SEQ ID NO: 4065; WAN024FZ7_at; Start 6; Stop 30
tgcccacactgacaaactctgtaat

SEQ ID NO: 226928 - DNA, 25 bp, Artificial
  probe
  misc_feature (1)..(25): SEQ ID NO: 4065; WAN024FZ7_at; Start 2; Stop 26
tgcatgcccacactgacaaactctg

SEQ ID NO: 226929 - DNA, 25 bp, Artificial
  probe
  misc_feature (1)..(25): SEQ ID NO: 4065; WAN024FZ7_at; Start 127; Stop 151
gaaatgggtccctgtcatgtagttt

SEQ ID NO: 226930 - DNA, 25 bp, Artificial
  probe
  misc_feature (1)..(25): SEQ ID NO: 4065; WAN024FZ7_at; Start 86; Stop 110
gaaacaaactctctcataaagccat

SEQ ID NO: 226931 - DNA, 25 bp, Artificial
  probe
  misc_feature (1)..(25): SEQ ID NO: 4065; WAN024FZ7_at; Start 117; Stop 141
cactagacaagaaatgggtccctgt

SEQ ID NO: 226932 - DNA, 25 bp, Artificial
  probe
  misc_feature (1)..(25): SEQ ID NO: 4065; WAN024FZ7_at; Start 163; Stop 187
ttcatcactctgcataggagactga

SEQ ID NO: 226933 - DNA, 25 bp, Artificial
  probe
  misc_feature (1)..(25): SEQ ID NO: 4065; WAN024FZ7_at; Start 157; Stop 181
gaattcttcatcactctgcatagga

SEQ ID NO: 226934 - DNA, 25 bp, Artificial
  probe
  misc_feature (1)..(25): SEQ ID NO: 4065; WAN024FZ7_at; Start 27; Stop 51
taatggctgcaaccgtatcttcaat

SEQ ID NO: 226935 - DNA, 25 bp, Artificial
  probe
  misc_feature (1)..(25): SEQ ID NO: 5085; WAN024FZ8_at; Start 108; Stop 132
tatccgtcccaactacatggctgtc

SEQ ID NO: 226936 - DNA, 25 bp, Artificial
  probe
  misc_feature (1)..(25): SEQ ID NO: 5085; WAN024FZ8_at; Start 279; Stop 303
gattcccaatcagtctcctatgcag

SEQ ID NO: 226937 - DNA, 25 bp, Artificial
  probe
  misc_feature (1)..(25): SEQ ID NO: 5085; WAN024FZ8_at; Start 76; Stop 100
gaagaggctattgaccaagagaatc

SEQ ID NO: 226938 - DNA, 25 bp, Artificial
  probe
  misc_feature (1)..(25): SEQ ID NO: 5085; WAN024FZ8_at; Start 60; Stop 84
caatgtcaaatatcaggaagaggct

SEQ ID NO: 226939 - DNA, 25 bp, Artificial
  probe
  misc_feature (1)..(25): SEQ ID NO: 5085; WAN024FZ8_at; Start 799; Stop 823
tataaagtcaatctcaatactcgcg

SEQ ID NO: 226940 - DNA, 25 bp, Artificial
  probe
  misc_feature (1)..(25): SEQ ID NO: 5085; WAN024FZ8_at; Start 590; Stop 614
cagagattgtggttattggtcgtca

SEQ ID NO: 226941 - DNA, 25 bp, Artificial
  probe
  misc_feature (1)..(25): SEQ ID NO: 5085; WAN024FZ8_at; Start 777; Stop 801
tctcatgatgggagttagcgaatat

SEQ ID NO: 226942 - DNA, 25 bp, Artificial
  probe
  misc_feature (1)..(25): SEQ ID NO: 5085; WAN024FZ8_at; Start 194; Stop 218
ttccaatggcaatgattcacgagtc

SEQ ID NO: 226943 - DNA, 25 bp, Artificial
  probe
  misc_feature (1)..(25): SEQ ID NO: 5085; WAN024FZ8_at; Start 294; Stop 318
tcctatgcagagtgatgaagaattc

SEQ ID NO: 226944 - DNA, 25 bp, Artificial
  probe
  misc_feature (1)..(25): SEQ ID NO: 5085; WAN024FZ8_at; Start 988; Stop 1012
tttgcaaccgatttaaacacagcct

SEQ ID NO: 226945 - DNA, 25 bp, Artificial
  probe
  misc_feature (1)..(25): SEQ ID NO: 5085; WAN024FZ8_at; Start 627; Stop 651
ggaactcttctcatttgccaaagaa

SEQ ID NO: 226946 - DNA, 25 bp, Artificial
  probe
  misc_feature (1)..(25): SEQ ID NO: 5085; WAN024FZ8_at; Start 609; Stop 633
tcgtcattgggaaaagttggaactc

SEQ ID NO: 226947 - DNA, 25 bp, Artificial
  probe
  misc_feature (1)..(25): SEQ ID NO: 5085; WAN024FZ8_at; Start 683; Stop 707
tggcctttgaccatgcttttgaatg

SEQ ID NO: 226948 - DNA, 25 bp, Artificial
  probe
  misc_feature (1)..(25): SEQ ID NO: 5085; WAN024FZ8_at; Start 267; Stop 291
aaaagttgtcatgattcccaatcag

SEQ ID NO: 226949 - DNA, 25 bp, Artificial
  probe
  misc_feature (1)..(25): SEQ ID NO: 5085; WAN024FZ8_at; Start 747; Stop 771
gattcgctacattcgtcctcaggga

SEQ ID NO: 226950 - DNA, 25 bp, Artificial
  probe
  misc_feature (1)..(25): SEQ ID NO: 5085; WAN024FZ8_at; Start 179; Stop 203
ttttgaataaaaagcttccaatggc

SEQ ID NO: 226951 - DNA, 25 bp, Artificial
  probe
  misc_feature (1)..(25): SEQ ID NO: 5085; WAN024FZ8_at; Start 398; Stop 422
aagatcgtgtggtggcttatgatgc

SEQ ID NO: 226952 - DNA, 25 bp, Artificial
  probe
  misc_feature (1)..(25): SEQ ID NO: 5085; WAN024FZ8_at; Start 319; Stop 343
tatgaaaactacatgacagggaccc

SEQ ID NO: 226953 - DNA, 25 bp, Artificial
  probe
  misc_feature (1)..(25): SEQ ID NO: 5085; WAN024FZ8_at; Start 435; Stop 459
ggttgcagccattacagagtttgtc

SEQ ID NO: 226954 - DNA, 25 bp, Artificial
  probe
  misc_feature (1)..(25): SEQ ID NO: 5085; WAN024FZ8_at; Start 539; Stop 563
gaagtttagcttttgtggttgccaa

SEQ ID NO: 226955 - DNA, 25 bp, Artificial
  probe
  misc_feature (1)..(25): SEQ ID NO: 5085; WAN024FZ8_at; Start 938; Stop 962
tcctttatctagaagaacctgtaag

SEQ ID NO: 226956 - DNA, 25 bp, Artificial
  probe
  misc_feature (1)..(25): SEQ ID NO: 5085; WAN024FZ8_at; Start 723; Stop 747
tactggaccagctattaatgacttg

SEQ ID NO: 226957 - DNA, 25 bp, Artificial
  probe
  misc_feature (1)..(25): SEQ ID NO: 5085; WAN024FZ8_at; Start 420; Stop 444
tgctattgaagatacggttgcagcc

SEQ ID NO: 226958 - DNA, 25 bp, Artificial
  probe
  misc_feature (1)..(25): SEQ ID NO: 5085; WAN024FZ8_at; Start 160; Stop 184
ggaaaacgtgatcccaagattttga

SEQ ID NO: 226959 - DNA, 25 bp, Artificial
  probe
  misc_feature (1)..(25): SEQ ID NO: 5085; WAN024FZ8_at; Start 816; Stop 840
tactcgcgatgccttagaaaagggc

SEQ ID NO: 226960 - DNA, 25 bp, Artificial
  probe
  misc_feature (1)..(25): SEQ ID NO: 5085; WAN024FZ8_at; Start 643; Stop 667
gccaaagaatgctatattacggata

SEQ ID NO: 226961 - DNA, 25 bp, Artificial
  probe
  misc_feature (1)..(25): SEQ ID NO: 5085; WAN024FZ8_at; Start 498; Stop 522
tgctcatagcaagcgggagcggatc

SEQ ID NO: 226962 - DNA, 25 bp, Artificial
  probe
  misc_feature (1)..(25): SEQ ID NO: 5085; WAN024FZ8_at; Start 524; Stop 548
ccgttattggagatggaagtttagc

SEQ ID NO: 226963 - DNA, 25 bp, Artificial
  probe
  misc_feature (1)..(25): SEQ ID NO: 5085; WAN024FZ8_at; Start 335; Stop 359
cagggacccatttcttgtctagtgg

SEQ ID NO: 226964 - DNA, 25 bp, Artificial
  probe
  misc_feature (1)..(25): SEQ ID NO: 5085; WAN024FZ8_at; Start 94; Stop 118
gagaatcatatccttatccgtccca

SEQ ID NO: 226965 - DNA, 25 bp, Artificial
  probe
  misc_feature (1)..(25): SEQ ID NO: 5085; WAN024FZ8_at; Start 480; Stop 504
gaatcgtctattgactcttgctcat

SEQ ID NO: 226966 - DNA, 25 bp, Artificial
  probe
  misc_feature (1)..(25): SEQ ID NO: 5085; WAN024FZ8_at; Start 449; Stop 473
cagagtttgtcagtgtgggcatgca

SEQ ID NO: 226967 - DNA, 25 bp, Artificial
  probe
  misc_feature (1)..(25): SEQ ID NO: 5085; WAN024FZ8_at; Start 464; Stop 488
tgggcatgcacgctatgaatcgtct

SEQ ID NO: 226968 - DNA, 25 bp, Artificial
  probe
  misc_feature (1)..(25): SEQ ID NO: 5085; WAN024FZ8_at; Start 384; Stop 408
tgtttctctccctaaagatcgtgtg

SEQ ID NO: 226969 - DNA, 25 bp, Artificial
  probe
  misc_feature (1)..(25): SEQ ID NO: 2296; WAN024FZ9_at; Start 307; Stop 331
agttctttagcttcatctgtatcgg

SEQ ID NO: 226970 - DNA, 25 bp, Artificial
  probe
  misc_feature (1)..(25): SEQ ID NO: 2296; WAN024FZ9_at; Start 111; Stop 135
tttgtcaccctttgtggtggctgca

SEQ ID NO: 226971 - DNA, 25 bp, Artificial
  probe
  misc_feature (1)..(25): SEQ ID NO: 2296; WAN024FZ9_at; Start 628; Stop 652
tctcatcagtcatttactgcagtag

SEQ ID NO: 226972 - DNA, 25 bp, Artificial
  probe
  misc_feature (1)..(25): SEQ ID NO: 2296; WAN024FZ9_at; Start 490; Stop 514
gctttggtttgtgctattgcatggg

SEQ ID NO: 226973 - DNA, 25 bp, Artificial
  probe
  misc_feature (1)..(25): SEQ ID NO: 2296; WAN024FZ9_at; Start 723; Stop 747
tatcgctatcaatcgcttgcaacca

SEQ ID NO: 226974 - DNA, 25 bp, Artificial
  probe
  misc_feature (1)..(25): SEQ ID NO: 2296; WAN024FZ9_at; Start 739; Stop 763
ttgcaaccagccaaggctacaggct

SEQ ID NO: 226975 - DNA, 25 bp, Artificial
  probe
  misc_feature (1)..(25): SEQ ID NO: 2296; WAN024FZ9_at; Start 211; Stop 235
ttcttaaatattcgcaatgtcagtg

SEQ ID NO: 226976 - DNA, 25 bp, Artificial
  probe
  misc_feature (1)..(25): SEQ ID NO: 2296; WAN024FZ9_at; Start 592; Stop 616
acttcgttcttgtcctatcttgtga

SEQ ID NO: 226977 - DNA, 25 bp, Artificial
  probe
  misc_feature (1)..(25): SEQ ID NO: 2296; WAN024FZ9_at; Start 273; Stop 297
gcaggccaatctttatgcagttaag

SEQ ID NO: 226978 - DNA, 25 bp, Artificial
  probe
  misc_feature (1)..(25): SEQ ID NO: 2296; WAN024FZ9_at; Start 375; Stop 399
gaagcacaagatttcgaaaaatact

SEQ ID NO: 226979 - DNA, 25 bp, Artificial
  probe
  misc_feature (1)..(25): SEQ ID NO: 2296; WAN024FZ9_at; Start 185; Stop 209
aagaagggaaagttcgcctctcaat

SEQ ID NO: 226980 - DNA, 25 bp, Artificial
  probe
  misc_feature (1)..(25): SEQ ID NO: 2296; WAN024FZ9_at; Start 615; Stop 639
gattgtgctcttctctcatcagtca

SEQ ID NO: 226981 - DNA, 25 bp, Artificial
  probe
  misc_feature (1)..(25): SEQ ID NO: 2296; WAN024FZ9_at; Start 843; Stop 867
gacgtcacttgtcgtcattgctgga

SEQ ID NO: 226982 - DNA, 25 bp, Artificial
  probe
  misc_feature (1)..(25): SEQ ID NO: 2296; WAN024FZ9_at; Start 768; Stop 792
cgtgagctatgtagtatggacggtc

SEQ ID NO: 226983 - DNA, 25 bp, Artificial
  probe
  misc_feature (1)..(25): SEQ ID NO: 2296; WAN024FZ9_at; Start 322; Stop 346
tctgtatcggctatttaccctgcga

SEQ ID NO: 226984 - DNA, 25 bp, Artificial
  probe
  misc_feature (1)..(25): SEQ ID NO: 2296; WAN024FZ9_at; Start 754; Stop 778
gctacaggcttgaacgtgagctatg

SEQ ID NO: 226985 - DNA, 25 bp, Artificial
  probe
  misc_feature (1)..(25): SEQ ID NO: 2296; WAN024FZ9_at; Start 566; Stop 590
tcgaagccctcttaatccgtcaagt

SEQ ID NO: 226986 - DNA, 25 bp, Artificial
  probe
  misc_feature (1)..(25): SEQ ID NO: 2296; WAN024FZ9_at; Start 687; Stop 711
tgcagcctttgatatgatttcctac

SEQ ID NO: 226987 - DNA, 25 bp, Artificial
  probe
  misc_feature (1)..(25): SEQ ID NO: 2296; WAN024FZ9_at; Start 360; Stop 384
ggctttcttctttttgaagcacaag

SEQ ID NO: 226988 - DNA, 25 bp, Artificial
  probe
  misc_feature (1)..(25): SEQ ID NO: 2296; WAN024FZ9_at; Start 654; Stop 678
caatggacaattgctaggtctcatg

SEQ ID NO: 226989 - DNA, 25 bp, Artificial
  probe
  misc_feature (1)..(25): SEQ ID NO: 2296; WAN024FZ9_at; Start 251; Stop 275
tgctagcaggccctatcggtatgca

SEQ ID NO: 226990 - DNA, 25 bp, Artificial
  probe
  misc_feature (1)..(25): SEQ ID NO: 2296; WAN024FZ9_at; Start 65; Stop 89
gcttgggtctaacggttagtgctta

SEQ ID NO: 226991 - DNA, 25 bp, Artificial
  probe
  misc_feature (1)..(25): SEQ ID NO: 2296; WAN024FZ9_at; Start 40; Stop 64
ggccttctctcaggtattttctggg

SEQ ID NO: 226992 - DNA, 25 bp, Artificial
  probe
  misc_feature (1)..(25): SEQ ID NO: 2296; WAN024FZ9_at; Start 28; Stop 52
ggagttccttttggccttctctcag

SEQ ID NO: 226993 - DNA, 25 bp, Artificial
  probe
  misc_feature (1)..(25): SEQ ID NO: 2296; WAN024FZ9_at; Start 260; Stop 284
gccctatcggtatgcaggccaatct

SEQ ID NO: 226994 - DNA, 25 bp, Artificial
  probe
  misc_feature (1)..(25): SEQ ID NO: 2296; WAN024FZ9_at; Start 782; Stop 806
tatggacggtcttgtttgcagttgt

SEQ ID NO: 226995 - DNA, 25 bp, Artificial
  probe
  misc_feature (1)..(25): SEQ ID NO: 2296; WAN024FZ9_at; Start 557; Stop 581
tgagtgaaatcgaagccctcttaat

SEQ ID NO: 226996 - DNA, 25 bp, Artificial
  probe
  misc_feature (1)..(25): SEQ ID NO: 2296; WAN024FZ9_at; Start 96; Stop 120
ttcgatttttacagatttgtcaccc

SEQ ID NO: 226997 - DNA, 25 bp, Artificial
  probe
  misc_feature (1)..(25): SEQ ID NO: 2296; WAN024FZ9_at; Start 706; Stop 730
tcctacttggcttattatatcgcta

SEQ ID NO: 226998 - DNA, 25 bp, Artificial
  probe
  misc_feature (1)..(25): SEQ ID NO: 2296; WAN024FZ9_at; Start 224; Stop 248
gcaatgtcagtgttatcatcggagc

SEQ ID NO: 226999 - DNA, 25 bp, Artificial
  probe
  misc_feature (1)..(25): SEQ ID NO: 2296; WAN024FZ9_at; Start 288; Stop 312
tgcagttaagtatatcggaagttct

SEQ ID NO: 227000 - DNA, 25 bp, Artificial
  probe
  misc_feature (1)..(25): SEQ ID NO: 2296; WAN024FZ9_at; Start 812; Stop 836
tgggtgcaccgctagatatgctgac

SEQ ID NO: 227001 - DNA, 25 bp, Artificial
  probe
  misc_feature (1)..(25): SEQ ID NO: 2296; WAN024FZ9_at; Start 337; Stop 361
taccctgcgatttcagttctattgg

SEQ ID NO: 227002 - DNA, 25 bp, Artificial
  probe
  misc_feature (1)..(25): SEQ ID NO: 2296; WAN024FZ9_at; Start 669; Stop 693
aggtctcatgattgtttttgcagcc

SEQ ID NO: 227003 - DNA, 25 bp, Artificial
  probe
  misc_feature (1)..(25): SEQ ID NO: 4123; WAN024FZA_at; Start 470; Stop 494
tctccttagagaaaagactggctga

SEQ ID NO: 227004 - DNA, 25 bp, Artificial
  probe
  misc_feature (1)..(25): SEQ ID NO: 4123; WAN024FZA_at; Start 804; Stop 828
tggtgtgaatcgttaccaaagagct

SEQ ID NO: 227005 - DNA, 25 bp, Artificial
  probe
  misc_feature (1)..(25): SEQ ID NO: 4123; WAN024FZA_at; Start 606; Stop 630
tccaatgtgggatttggctgccctc

SEQ ID NO: 227006 - DNA, 25 bp, Artificial
  probe
  misc_feature (1)..(25): SEQ ID NO: 4123; WAN024FZA_at; Start 742; Stop 766
gatactatttggagtctatggactg

SEQ ID NO: 227007 - DNA, 25 bp, Artificial
  probe
  misc_feature (1)..(25): SEQ ID NO: 4123; WAN024FZA_at; Start 376; Stop 400
gaatttgctccttttgaagaaatca

SEQ ID NO: 227008 - DNA, 25 bp, Artificial
  probe
  misc_feature (1)..(25): SEQ ID NO: 4123; WAN024FZA_at; Start 424; Stop 448
gaacaaattccttatgccaactatg

SEQ ID NO: 227009 - DNA, 25 bp, Artificial
  probe
  misc_feature (1)..(25): SEQ ID NO: 4123; WAN024FZA_at; Start 101; Stop 125
tggccaaaacaacaaataagcaata

SEQ ID NO: 227010 - DNA, 25 bp, Artificial
  probe
  misc_feature (1)..(25): SEQ ID NO: 4123; WAN024FZA_at; Start 664; Stop 688
gaaactttcttatctcactatgaga

SEQ ID NO: 227011 - DNA, 25 bp, Artificial
  probe
  misc_feature (1)..(25): SEQ ID NO: 4123; WAN024FZA_at; Start 277; Stop 301
tctgcgattacgcttgattcaacgt

SEQ ID NO: 227012 - DNA, 25 bp, Artificial
  probe
  misc_feature (1)..(25): SEQ ID NO: 4123; WAN024FZA_at; Start 189; Stop 213
tcttgaactactaaaggatttaggc

SEQ ID NO: 227013 - DNA, 25 bp, Artificial
  probe
  misc_feature (1)..(25): SEQ ID NO: 4123; WAN024FZA_at; Start 141; Stop 165
tggtaaagggacagaaaagcttatc

SEQ ID NO: 227014 - DNA, 25 bp, Artificial
  probe
  misc_feature (1)..(25): SEQ ID NO: 4123; WAN024FZA_at; Start 439; Stop 463
gccaactatgaatctgttagaaatg

SEQ ID NO: 227015 - DNA, 25 bp, Artificial
  probe
  misc_feature (1)..(25): SEQ ID NO: 4123; WAN024FZA_at; Start 679; Stop 703
cactatgagagtgaccaaacaccgg

SEQ ID NO: 227016 - DNA, 25 bp, Artificial
  probe
  misc_feature (1)..(25): SEQ ID NO: 4123; WAN024FZA_at; Start 175; Stop 199
gatgaaaagtacaatcttgaactac

SEQ ID NO: 227017 - DNA, 25 bp, Artificial
  probe
  misc_feature (1)..(25): SEQ ID NO: 4123; WAN024FZA_at; Start 514; Stop 538
tcttgtcatatcgatttggtgcctg

SEQ ID NO: 227018 - DNA, 25 bp, Artificial
  probe
  misc_feature (1)..(25): SEQ ID NO: 4123; WAN024FZA_at; Start 406; Stop 430
tacgaatccttgattgaagaacaaa

SEQ ID NO: 227019 - DNA, 25 bp, Artificial
  probe
  misc_feature (1)..(25): SEQ ID NO: 4123; WAN024FZA_at; Start 302; Stop 326
caatcaagaccaagttcgacaaaat

SEQ ID NO: 227020 - DNA, 25 bp, Artificial
  probe
  misc_feature (1)..(25): SEQ ID NO: 4123; WAN024FZA_at; Start 291; Stop 315
tgattcaacgtcaatcaagaccaag

SEQ ID NO: 227021 - DNA, 25 bp, Artificial
  probe
  misc_feature (1)..(25): SEQ ID NO: 4123; WAN024FZA_at; Start 259; Stop 283
gtaaatgagtatatcgaatctgcga

SEQ ID NO: 227022 - DNA, 25 bp, Artificial
  probe
  misc_feature (1)..(25): SEQ ID NO: 4123; WAN024FZA_at; Start 78; Stop 102
tggaatgaccaatcaaaactatttg

SEQ ID NO: 227023 - DNA, 25 bp, Artificial
  probe
  misc_feature (1)..(25): SEQ ID NO: 4123; WAN024FZA_at; Start 49; Stop 73
gaggaagtcctcagtgttgaacaac

SEQ ID NO: 227024 - DNA, 25 bp, Artificial
  probe
  misc_feature (1)..(25): SEQ ID NO: 4123; WAN024FZA_at; Start 694; Stop 718
caaacaccggtttctcatgaaaaga

SEQ ID NO: 227025 - DNA, 25 bp, Artificial
  probe
  misc_feature (1)..(25): SEQ ID NO: 4123; WAN024FZA_at; Start 546; Stop 570
tatcgaatcacctcaaggacgactt

SEQ ID NO: 227026 - DNA, 25 bp, Artificial
  probe
  misc_feature (1)..(25): SEQ ID NO: 4123; WAN024FZA_at; Start 355; Stop 379
tctgctaaggaattaagaggagaat

SEQ ID NO: 227027 - DNA, 25 bp, Artificial
  probe
  misc_feature (1)..(25): SEQ ID NO: 4123; WAN024FZA_at; Start 563; Stop 587
gacgactttatttgattgactggga

SEQ ID NO: 227028 - DNA, 25 bp, Artificial
  probe
  misc_feature (1)..(25): SEQ ID NO: 4123; WAN024FZA_at; Start 154; Stop 178
gaaaagcttatcaatcgacaagatg

SEQ ID NO: 227029 - DNA, 25 bp, Artificial
  probe
  misc_feature (1)..(25): SEQ ID NO: 4123; WAN024FZA_at; Start 484; Stop 508
agactggctgacttaggtgttgaca

SEQ ID NO: 227030 - DNA, 25 bp, Artificial
  probe
  misc_feature (1)..(25): SEQ ID NO: 4123; WAN024FZA_at; Start 35; Stop 59
tacttagtcaagaagaggaagtcct

SEQ ID NO: 227031 - DNA, 25 bp, Artificial
  probe
  misc_feature (1)..(25): SEQ ID NO: 4123; WAN024FZA_at; Start 497; Stop 521
taggtgttgacagaaaatcttgtca

SEQ ID NO: 227032 - DNA, 25 bp, Artificial
  probe
  misc_feature (1)..(25): SEQ ID NO: 4123; WAN024FZA_at; Start 621; Stop 645
ggctgccctctttttagagtctgaa

SEQ ID NO: 227033 - DNA, 25 bp, Artificial
  probe
  misc_feature (1)..(25): SEQ ID NO: 4123; WAN024FZA_at; Start 592; Stop 616
tcatcaatgaatgatccaatgtggg

SEQ ID NO: 227034 - DNA, 25 bp, Artificial
  probe
  misc_feature (1)..(25): SEQ ID NO: 4123; WAN024FZA_at; Start 637; Stop 661
gagtctgaattcacttcccaagagg

SEQ ID NO: 227035 - DNA, 25 bp, Artificial
  probe
  misc_feature (1)..(25): SEQ ID NO: 4123; WAN024FZA_at; Start 530; Stop 554
tggtgcctgaaaactttatcgaatc

SEQ ID NO: 227036 - DNA, 25 bp, Artificial
  probe
  misc_feature (1)..(25): SEQ ID NO: 4123; WAN024FZA_at; Start 63; Stop 87
tgttgaacaactgggtggaatgacc

SEQ ID NO: 227037 - DNA, 25 bp, Artificial
  probe
  misc_feature (1)..(25): SEQ ID NO: 3919; WAN024FZB_at; Start 696; Stop 720
tgcaacgactttagtgagagaaacg

SEQ ID NO: 227038 - DNA, 25 bp, Artificial
  probe
  misc_feature (1)..(25): SEQ ID NO: 3919; WAN024FZB_at; Start 663; Stop 687
tgctgttttgctgatgattccgagt

SEQ ID NO: 227039 - DNA, 25 bp, Artificial
  probe
  misc_feature (1)..(25): SEQ ID NO: 3919; WAN024FZB_at; Start 432; Stop 456
tgttcctggtgttgctattgcaacc

SEQ ID NO: 227040 - DNA, 25 bp, Artificial
  probe
  misc_feature (1)..(25): SEQ ID NO: 3919; WAN024FZB_at; Start 793; Stop 817
tctaaaaagactcataccctaaagc

SEQ ID NO: 227041 - DNA, 25 bp, Artificial
  probe
  misc_feature (1)..(25): SEQ ID NO: 3919; WAN024FZB_at; Start 76; Stop 100
gatttagcgattttactatgtgcca

SEQ ID NO: 227042 - DNA, 25 bp, Artificial
  probe
  misc_feature (1)..(25): SEQ ID NO: 3919; WAN024FZB_at; Start 350; Stop 374
cgactatttgggatgttctcattgc

SEQ ID NO: 227043 - DNA, 25 bp, Artificial
  probe
  misc_feature (1)..(25): SEQ ID NO: 3919; WAN024FZB_at; Start 173; Stop 197
tgatgacacctattctgggagtggg

SEQ ID NO: 227044 - DNA, 25 bp, Artificial
  probe
  misc_feature (1)..(25): SEQ ID NO: 3919; WAN024FZB_at; Start 461; Stop 485
tgatgcctcctctttgtacagtagg

SEQ ID NO: 227045 - DNA, 25 bp, Artificial
  probe
  misc_feature (1)..(25): SEQ ID NO: 3919; WAN024FZB_at; Start 418; Stop 442
gagaccaataatattgttcctggtg

SEQ ID NO: 227046 - DNA, 25 bp, Artificial
  probe
  misc_feature (1)..(25): SEQ ID NO: 3919; WAN024FZB_at; Start 248; Stop 272
tattagctattcaaattcttgccag

SEQ ID NO: 227047 - DNA, 25 bp, Artificial
  probe
  misc_feature (1)..(25): SEQ ID NO: 3919; WAN024FZB_at; Start 839; Stop 863
tgacagaagaagaactcgatatgat

SEQ ID NO: 227048 - DNA, 25 bp, Artificial
  probe
  misc_feature (1)..(25): SEQ ID NO: 3919; WAN024FZB_at; Start 447; Stop 471
tattgcaaccgccttgatgcctcct

SEQ ID NO: 227049 - DNA, 25 bp, Artificial
  probe
  misc_feature (1)..(25): SEQ ID NO: 3919; WAN024FZB_at; Start 907; Stop 931
caagtttcacaattgtctgattcag

SEQ ID NO: 227050 - DNA, 25 bp, Artificial
  probe
  misc_feature (1)..(25): SEQ ID NO: 3919; WAN024FZB_at; Start 507; Stop 531
tctaaaatttatcataggctcctct

SEQ ID NO: 227051 - DNA, 25 bp, Artificial
  probe
  misc_feature (1)..(25): SEQ ID NO: 3919; WAN024FZB_at; Start 969; Stop 993
ccagtatatcaaggataaggaagca

SEQ ID NO: 227052 - DNA, 25 bp, Artificial
  probe
  misc_feature (1)..(25): SEQ ID NO: 3919; WAN024FZB_at; Start 61; Stop 85
gaactttccagaagtgatttagcga

SEQ ID NO: 227053 - DNA, 25 bp, Artificial
  probe
  misc_feature (1)..(25): SEQ ID NO: 3919; WAN024FZB_at; Start 678; Stop 702
gattccgagtttcatctctgcaacg

SEQ ID NO: 227054 - DNA, 25 bp, Artificial
  probe
  misc_feature (1)..(25): SEQ ID NO: 3919; WAN024FZB_at; Start 807; Stop 831
taccctaaagctaaccatttcagga

SEQ ID NO: 227055 - DNA, 25 bp, Artificial
  probe
  misc_feature (1)..(25): SEQ ID NO: 3919; WAN024FZB_at; Start 479; Stop 503
cagtaggttatgctattgcttctgc

SEQ ID NO: 227056 - DNA, 25 bp, Artificial
  probe
  misc_feature (1)..(25): SEQ ID NO: 3919; WAN024FZB_at; Start 122; Stop 146
taaatatggattcgactcccgtgat

SEQ ID NO: 227057 - DNA, 25 bp, Artificial
  probe
  misc_feature (1)..(25): SEQ ID NO: 3919; WAN024FZB_at; Start 337; Stop 361
gctagaacctctccgactatttggg

SEQ ID NO: 227058 - DNA, 25 bp, Artificial
  probe
  misc_feature (1)..(25): SEQ ID NO: 3919; WAN024FZB_at; Start 743; Stop 767
aatttatatcagagcagtttcaggg

SEQ ID NO: 227059 - DNA, 25 bp, Artificial
  probe
  misc_feature (1)..(25): SEQ ID NO: 3919; WAN024FZB_at; Start 92; Stop 116
tatgtgccatgcttatcgcctctat

SEQ ID NO: 227060 - DNA, 25 bp, Artificial
  probe
  misc_feature (1)..(25): SEQ ID NO: 3919; WAN024FZB_at; Start 564; Stop 588
cattgcgacttatataggtgttagg

SEQ ID NO: 227061 - DNA, 25 bp, Artificial
  probe
  misc_feature (1)..(25): SEQ ID NO: 3919; WAN024FZB_at; Start 1023; Stop 1047
tacagagtctgaggagcaataacta

SEQ ID NO: 227062 - DNA, 25 bp, Artificial
  probe
  misc_feature (1)..(25): SEQ ID NO: 3919; WAN024FZB_at; Start 710; Stop 734
tgagagaaacgttgaaaaaagagtc

SEQ ID NO: 227063 - DNA, 25 bp, Artificial
  probe
  misc_feature (1)..(25): SEQ ID NO: 3919; WAN024FZB_at; Start 625; Stop 649
gaagaagactctaaaatgcgtagga

SEQ ID NO: 227064 - DNA, 25 bp, Artificial
  probe
  misc_feature (1)..(25): SEQ ID NO: 3919; WAN024FZB_at; Start 196; Stop 220
gggctctctctagctatatttgatt

SEQ ID NO: 227065 - DNA, 25 bp, Artificial
  probe
  misc_feature (1)..(25): SEQ ID NO: 3919; WAN024FZB_at; Start 139; Stop 163
cccgtgattattggagccatgttaa

SEQ ID NO: 227066 - DNA, 25 bp, Artificial
  probe
  misc_feature (1)..(25): SEQ ID NO: 3919; WAN024FZB_at; Start 643; Stop 667
cgtaggattttgcttctagttgctg

SEQ ID NO: 227067 - DNA, 25 bp, Artificial
  probe
  misc_feature (1)..(25): SEQ ID NO: 3919; WAN024FZB_at; Start 730; Stop 754
gagtcccttaagaaatttatatcag

SEQ ID NO: 227068 - DNA, 25 bp, Artificial
  probe
  misc_feature (1)..(25): SEQ ID NO: 3919; WAN024FZB_at; Start 107; Stop 131
tcgcctctatcggattaaatatgga

SEQ ID NO: 227069 - DNA, 25 bp, Artificial
  probe
  misc_feature (1)..(25): SEQ ID NO: 3919; WAN024FZB_at; Start 547; Stop 571
aattgtagctttattgtcattgcga

SEQ ID NO: 227070 - DNA, 25 bp, Artificial
  probe
  misc_feature (1)..(25): SEQ ID NO: 3919; WAN024FZB_at; Start 922; Stop 946
tctgattcagaacaacttagtaagg

SEQ ID NO: 227071 - DNA, 25 bp, Artificial
  probe
  misc_feature (1)..(25): SEQ ID NO: 6636; WAN024FZC_at; Start 1171; Stop 1195
ccgagcaaggacaaggttattgata

SEQ ID NO: 227072 - DNA, 25 bp, Artificial
  probe
  misc_feature (1)..(25): SEQ ID NO: 6636; WAN024FZC_at; Start 135; Stop 159
cctttctagagaggataatatcttt

SEQ ID NO: 227073 - DNA, 25 bp, Artificial
  probe
  misc_feature (1)..(25): SEQ ID NO: 6636; WAN024FZC_at; Start 23; Stop 47
tactggtgataatgatgcggataac

SEQ ID NO: 227074 - DNA, 25 bp, Artificial
  probe
  misc_feature (1)..(25): SEQ ID NO: 6636; WAN024FZC_at; Start 62; Stop 86
aaattgctaaagaagactttgtcgc

SEQ ID NO: 227075 - DNA, 25 bp, Artificial
  probe
  misc_feature (1)..(25): SEQ ID NO: 6636; WAN024FZC_at; Start 1202; Stop 1226
taggaaacctagcaggttatggtct

SEQ ID NO: 227076 - DNA, 25 bp, Artificial
  probe
  misc_feature (1)..(25): SEQ ID NO: 6636; WAN024FZC_at; Start 36; Stop 60
gatgcggataactgataatcagcat

SEQ ID NO: 227077 - DNA, 25 bp, Artificial
  probe
  misc_feature (1)..(25): SEQ ID NO: 6636; WAN024FZC_at; Start 745; Stop 769
cgtgctaagattatcagaatgaata

SEQ ID NO: 227078 - DNA, 25 bp, Artificial
  probe
  misc_feature (1)..(25): SEQ ID NO: 6636; WAN024FZC_at; Start 125; Stop 149
cactggataacctttctagagagga

SEQ ID NO: 227079 - DNA, 25 bp, Artificial
  probe
  misc_feature (1)..(25): SEQ ID NO: 6636; WAN024FZC_at; Start 820; Stop 844
gaactctgcttggtgattctgagta

SEQ ID NO: 227080 - DNA, 25 bp, Artificial
  probe
  misc_feature (1)..(25): SEQ ID NO: 6636; WAN024FZC_at; Start 417; Stop 441
gatgtatctcttccccaagtatcta

SEQ ID NO: 227081 - DNA, 25 bp, Artificial
  probe
  misc_feature (1)..(25): SEQ ID NO: 6636; WAN024FZC_at; Start 1190; Stop 1214
ttgataatgagataggaaacctagc

SEQ ID NO: 227082 - DNA, 25 bp, Artificial
  probe
  misc_feature (1)..(25): SEQ ID NO: 6636; WAN024FZC_at; Start 1149; Stop 1173
tgagaaggctggacttgtttttccg

SEQ ID NO: 227083 - DNA, 25 bp, Artificial
  probe
  misc_feature (1)..(25): SEQ ID NO: 6636; WAN024FZC_at; Start 101; Stop 125
taagtcaagctcttcttgatagaac

SEQ ID NO: 227084 - DNA, 25 bp, Artificial
  probe
  misc_feature (1)..(25): SEQ ID NO: 6636; WAN024FZC_at; Start 1159; Stop 1183
ggacttgtttttccgagcaaggaca

SEQ ID NO: 227085 - DNA, 25 bp, Artificial
  probe
  misc_feature (1)..(25): SEQ ID NO: 6636; WAN024FZC_at; Start 796; Stop 820
ttcagagagtatagaaaattacagg

SEQ ID NO: 227086 - DNA, 25 bp, Artificial
  probe
  misc_feature (1)..(25): SEQ ID NO: 6636; WAN024FZC_at; Start 782; Stop 806
tccgacacgcctatttcagagagta

SEQ ID NO: 227087 - DNA, 25 bp, Artificial
  probe
  misc_feature (1)..(25): SEQ ID NO: 6636; WAN024FZC_at; Start 847; Stop 871
gaaaagcatggtcttggacctcaag

SEQ ID NO: 227088 - DNA, 25 bp, Artificial
  probe
  misc_feature (1)..(25): SEQ ID NO: 6636; WAN024FZC_at; Start 497; Stop 521
acagtcatgttaagggagtaattga

SEQ ID NO: 227089 - DNA, 25 bp, Artificial
  probe
  misc_feature (1)..(25): SEQ ID NO: 6636; WAN024FZC_at; Start 809; Stop 833
gaaaattacaggaactctgcttggt

SEQ ID NO: 227090 - DNA, 25 bp, Artificial
  probe
  misc_feature (1)..(25): SEQ ID NO: 6636; WAN024FZC_at; Start 5; Stop 29
tcaaactggtcaacaagatactggt

SEQ ID NO: 227091 - DNA, 25 bp, Artificial
  probe
  misc_feature (1)..(25): SEQ ID NO: 6636; WAN024FZC_at; Start 871; Stop 895
gcccaaagggtacatggtattctct

SEQ ID NO: 227092 - DNA, 25 bp, Artificial
  probe
  misc_feature (1)..(25): SEQ ID NO: 6636; WAN024FZC_at; Start 1245; Stop 1269
gcctcattctatagtacattttgta

SEQ ID NO: 227093 - DNA, 25 bp, Artificial
  probe
  misc_feature (1)..(25): SEQ ID NO: 6636; WAN024FZC_at; Start 862; Stop 886
ggacctcaagcccaaagggtacatg

SEQ ID NO: 227094 - DNA, 25 bp, Artificial
  probe
  misc_feature (1)..(25): SEQ ID NO: 6636; WAN024FZC_at; Start 768; Stop 792
taaaatcaaacttatccgacacgcc

SEQ ID NO: 227095 - DNA, 25 bp, Artificial
  probe
  misc_feature (1)..(25): SEQ ID NO: 6636; WAN024FZC_at; Start 228; Stop 252
tcagaaaatcaagacagggaacgtg

SEQ ID NO: 227096 - DNA, 25 bp, Artificial
  probe
  misc_feature (1)..(25): SEQ ID NO: 6636; WAN024FZC_at; Start 1216; Stop 1240
ggttatggtctattcgaatccctca

SEQ ID NO: 227097 - DNA, 25 bp, Artificial
  probe
  misc_feature (1)..(25): SEQ ID NO: 6636; WAN024FZC_at; Start 114; Stop 138
tcttgatagaacactggataacctt

SEQ ID NO: 227098 - DNA, 25 bp, Artificial
  probe
  misc_feature (1)..(25): SEQ ID NO: 6636; WAN024FZC_at; Start 217; Stop 241
gaaacagtcaatcagaaaatcaaga

SEQ ID NO: 227099 - DNA, 25 bp, Artificial
  probe
  misc_feature (1)..(25): SEQ ID NO: 6636; WAN024FZC_at; Start 183; Stop 207
tactcctgatttggataaggaccaa

SEQ ID NO: 227100 - DNA, 25 bp, Artificial
  probe
  misc_feature (1)..(25): SEQ ID NO: 6636; WAN024FZC_at; Start 85; Stop 109
gcagaatatcccaaactaagtcaag

SEQ ID NO: 227101 - DNA, 25 bp, Artificial
  probe
  misc_feature (1)..(25): SEQ ID NO: 6636; WAN024FZC_at; Start 1228; Stop 1252
ttcgaatccctcagaatgcctcatt

SEQ ID NO: 227102 - DNA, 25 bp, Artificial
  probe
  misc_feature (1)..(25): SEQ ID NO: 6636; WAN024FZC_at; Start 202; Stop 226
gaccaaaagatttttgaaacagtca

SEQ ID NO: 227103 - DNA, 25 bp, Artificial
  probe
  misc_feature (1)..(25): SEQ ID NO: 6636; WAN024FZC_at; Start 74; Stop 98
aagactttgtcgcagaatatcccaa

SEQ ID NO: 227104 - DNA, 25 bp, Artificial
  probe
  misc_feature (1)..(25): SEQ ID NO: 6636; WAN024FZC_at; Start 837; Stop 861
tctgagtagagaaaagcatggtctt

SEQ ID NO: 227105 - DNA, 25 bp, Artificial
  probe
  misc_feature (1)..(25): SEQ ID NO: 5033; WAN024FZD_at; Start 118; Stop 142
atttttcttgagatggtttcttaca

SEQ ID NO: 227106 - DNA, 25 bp, Artificial
  probe
  misc_feature (1)..(25): SEQ ID NO: 5033; WAN024FZD_at; Start 96; Stop 120
caatatttcccgtgaaaggaagatt

SEQ ID NO: 227107 - DNA, 25 bp, Artificial
  probe
  misc_feature (1)..(25): SEQ ID NO: 5033; WAN024FZD_at; Start 109; Stop 133
gaaaggaagatttttcttgagatgg

SEQ ID NO: 227108 - DNA, 25 bp, Artificial
  probe
  misc_feature (1)..(25): SEQ ID NO: 5033; WAN024FZD_at; Start 163; Stop 187
actgtcgttatgagaaaatcgatga

SEQ ID NO: 227109 - DNA, 25 bp, Artificial
  probe
  misc_feature (1)..(25): SEQ ID NO: 5033; WAN024FZD_at; Start 92; Stop 116
taggcaatatttcccgtgaaaggaa

SEQ ID NO: 227110 - DNA, 25 bp, Artificial
  probe
  misc_feature (1)..(25): SEQ ID NO: 5033; WAN024FZD_at; Start 201; Stop 225
gaccttttcgaatagcagcttgtag

SEQ ID NO: 227111 - DNA, 25 bp, Artificial
  probe
  misc_feature (1)..(25): SEQ ID NO: 5033; WAN024FZD_at; Start 6; Stop 30
caatgcttttctgattcttaatgta

SEQ ID NO: 227112 - DNA, 25 bp, Artificial
  probe
  misc_feature (1)..(25): SEQ ID NO: 5033; WAN024FZD_at; Start 165; Stop 189
tgtcgttatgagaaaatcgatgata

SEQ ID NO: 227113 - DNA, 25 bp, Artificial
  probe
  misc_feature (1)..(25): SEQ ID NO: 5033; WAN024FZD_at; Start 38; Stop 62
gtgtgacggaccaactgcatgaggg

SEQ ID NO: 227114 - DNA, 25 bp, Artificial
  probe
  misc_feature (1)..(25): SEQ ID NO: 5033; WAN024FZD_at; Start 32; Stop 56
tcaatagtgtgacggaccaactgca

SEQ ID NO: 227115 - DNA, 25 bp, Artificial
  probe
  misc_feature (1)..(25): SEQ ID NO: 5033; WAN024FZD_at; Start 62; Stop 86
ggattatcataggtgaactctctcg

SEQ ID NO: 227116 - DNA, 25 bp, Artificial
  probe
  misc_feature (1)..(25): SEQ ID NO: 5033; WAN024FZD_at; Start 34; Stop 58
aatagtgtgacggaccaactgcatg

SEQ ID NO: 227117 - DNA, 25 bp, Artificial
  probe
  misc_feature (1)..(25): SEQ ID NO: 5033; WAN024FZD_at; Start 25; Stop 49
aatgtattcaatagtgtgacggacc

SEQ ID NO: 227118 - DNA, 25 bp, Artificial
  probe
  misc_feature (1)..(25): SEQ ID NO: 5033; WAN024FZD_at; Start 29; Stop 53
tattcaatagtgtgacggaccaact

SEQ ID NO: 227119 - DNA, 25 bp, Artificial
  probe
  misc_feature (1)..(25): SEQ ID NO: 5033; WAN024FZD_at; Start 61; Stop 85
gggattatcataggtgaactctctc

SEQ ID NO: 227120 - DNA, 25 bp, Artificial
  probe
  misc_feature (1)..(25): SEQ ID NO: 5033; WAN024FZD_at; Start 171; Stop 195
tatgagaaaatcgatgatattcctt

SEQ ID NO: 227121 - DNA, 25 bp, Artificial
  probe
  misc_feature (1)..(25): SEQ ID NO: 5033; WAN024FZD_at; Start 200; Stop 224
agaccttttcgaatagcagcttgta

SEQ ID NO: 227122 - DNA, 25 bp, Artificial
  probe
  misc_feature (1)..(25): SEQ ID NO: 5033; WAN024FZD_at; Start 195; Stop 219
tataaagaccttttcgaatagcagc

SEQ ID NO: 227123 - DNA, 25 bp, Artificial
  probe
  misc_feature (1)..(25): SEQ ID NO: 5033; WAN024FZD_at; Start 63; Stop 87
gattatcataggtgaactctctcgt

SEQ ID NO: 227124 - DNA, 25 bp, Artificial
  probe
  misc_feature (1)..(25): SEQ ID NO: 5033; WAN024FZD_at; Start 10; Stop 34
gcttttctgattcttaatgtattca

SEQ ID NO: 227125 - DNA, 25 bp, Artificial
  probe
  misc_feature (1)..(25): SEQ ID NO: 5033; WAN024FZD_at; Start 185; Stop 209
tgatattccttataaagaccttttc

SEQ ID NO: 227126 - DNA, 25 bp, Artificial
  probe
  misc_feature (1)..(25): SEQ ID NO: 5033; WAN024FZD_at; Start 46; Stop 70
gaccaactgcatgaggggattatca

SEQ ID NO: 227127 - DNA, 25 bp, Artificial
  probe
  misc_feature (1)..(25): SEQ ID NO: 5033; WAN024FZD_at; Start 65; Stop 89
ttatcataggtgaactctctcgttg

SEQ ID NO: 227128 - DNA, 25 bp, Artificial
  probe
  misc_feature (1)..(25): SEQ ID NO: 5033; WAN024FZD_at; Start 105; Stop 129
ccgtgaaaggaagatttttcttgag

SEQ ID NO: 227129 - DNA, 25 bp, Artificial
  probe
  misc_feature (1)..(25): SEQ ID NO: 5033; WAN024FZD_at; Start 2; Stop 26
tgaccaatgcttttctgattcttaa

SEQ ID NO: 227130 - DNA, 25 bp, Artificial
  probe
  misc_feature (1)..(25): SEQ ID NO: 5033; WAN024FZD_at; Start 36; Stop 60
tagtgtgacggaccaactgcatgag

SEQ ID NO: 227131 - DNA, 25 bp, Artificial
  probe
  misc_feature (1)..(25): SEQ ID NO: 5033; WAN024FZD_at; Start 31; Stop 55
ttcaatagtgtgacggaccaactgc

SEQ ID NO: 227132 - DNA, 25 bp, Artificial
  probe
  misc_feature (1)..(25): SEQ ID NO: 5033; WAN024FZD_at; Start 91; Stop 115
gtaggcaatatttcccgtgaaagga

SEQ ID NO: 227133 - DNA, 25 bp, Artificial
  probe
  misc_feature (1)..(25): SEQ ID NO: 5033; WAN024FZD_at; Start 198; Stop 222
aaagaccttttcgaatagcagcttg

SEQ ID NO: 227134 - DNA, 25 bp, Artificial
  probe
  misc_feature (1)..(25): SEQ ID NO: 5033; WAN024FZD_at; Start 197; Stop 221
taaagaccttttcgaatagcagctt

SEQ ID NO: 227135 - DNA, 25 bp, Artificial
  probe
  misc_feature (1)..(25): SEQ ID NO: 5033; WAN024FZD_at; Start 27; Stop 51
tgtattcaatagtgtgacggaccaa

SEQ ID NO: 227136 - DNA, 25 bp, Artificial
  probe
  misc_feature (1)..(25): SEQ ID NO: 5033; WAN024FZD_at; Start 174; Stop 198
gagaaaatcgatgatattccttata

SEQ ID NO: 227137 - DNA, 25 bp, Artificial
  probe
  misc_feature (1)..(25): SEQ ID NO: 5033; WAN024FZD_at; Start 95; Stop 119
gcaatatttcccgtgaaaggaagat

SEQ ID NO: 227138 - DNA, 25 bp, Artificial
  probe
  misc_feature (1)..(25): SEQ ID NO: 5033; WAN024FZD_at; Start 169; Stop 193
gttatgagaaaatcgatgatattcc

SEQ ID NO: 227139 - DNA, 25 bp, Artificial
  probe
  misc_feature (1)..(25): SEQ ID NO: 2501; WAN024FZE_at; Start 16; Stop 40
gataagttttggacaccagttcaat

SEQ ID NO: 227140 - DNA, 25 bp, Artificial
  probe
  misc_feature (1)..(25): SEQ ID NO: 2501; WAN024FZE_at; Start 60; Stop 84
taaggtccaccttgatttgtctgag

SEQ ID NO: 227141 - DNA, 25 bp, Artificial
  probe
  misc_feature (1)..(25): SEQ ID NO: 2501; WAN024FZE_at; Start 46; Stop 70
tatgattttgcagataaggtccacc

SEQ ID NO: 227142 - DNA, 25 bp, Artificial
  probe
  misc_feature (1)..(25): SEQ ID NO: 2501; WAN024FZE_at; Start 4; Stop 28
gctccaactcaggataagttttgga

SEQ ID NO: 227143 - DNA, 25 bp, Artificial
  probe
  misc_feature (1)..(25): SEQ ID NO: 2501; WAN024FZE_at; Start 54; Stop 78
tgcagataaggtccaccttgatttg

SEQ ID NO: 227144 - DNA, 25 bp, Artificial
  probe
  misc_feature (1)..(25): SEQ ID NO: 2501; WAN024FZE_at; Start 49; Stop 73
gattttgcagataaggtccaccttg

SEQ ID NO: 227145 - DNA, 25 bp, Artificial
  probe
  misc_feature (1)..(25): SEQ ID NO: 2501; WAN024FZE_at; Start 13; Stop 37
caggataagttttggacaccagttc

SEQ ID NO: 227146 - DNA, 25 bp, Artificial
  probe
  misc_feature (1)..(25): SEQ ID NO: 2501; WAN024FZE_at; Start 94; Stop 118
ggttccaaaattctttctgactatc

SEQ ID NO: 227147 - DNA, 25 bp, Artificial
  probe
  misc_feature (1)..(25): SEQ ID NO: 2501; WAN024FZE_at; Start 75; Stop 99
tttgtctgagaaacaaagtggttcc

SEQ ID NO: 227148 - DNA, 25 bp, Artificial
  probe
  misc_feature (1)..(25): SEQ ID NO: 2501; WAN024FZE_at; Start 27; Stop 51
gacaccagttcaattattttatgat

SEQ ID NO: 227149 - DNA, 25 bp, Artificial
  probe
  misc_feature (1)..(25): SEQ ID NO: 2501; WAN024FZE_at; Start 77; Stop 101
tgtctgagaaacaaagtggttccaa

SEQ ID NO: 227150 - DNA, 25 bp, Artificial
  probe
  misc_feature (1)..(25): SEQ ID NO: 2501; WAN024FZE_at; Start 69; Stop 93
ccttgatttgtctgagaaacaaagt

SEQ ID NO: 227151 - DNA, 25 bp, Artificial
  probe
  misc_feature (1)..(25): SEQ ID NO: 2501; WAN024FZE_at; Start 98; Stop 122
ccaaaattctttctgactatctaac

SEQ ID NO: 227152 - DNA, 25 bp, Artificial
  probe
  misc_feature (1)..(25): SEQ ID NO: 2501; WAN024FZE_at; Start 8; Stop 32
caactcaggataagttttggacacc

SEQ ID NO: 227153 - DNA, 25 bp, Artificial
  probe
  misc_feature (1)..(25): SEQ ID NO: 2501; WAN024FZE_at; Start 10; Stop 34
actcaggataagttttggacaccag

SEQ ID NO: 227154 - DNA, 25 bp, Artificial
  probe
  misc_feature (1)..(25): SEQ ID NO: 2501; WAN024FZE_at; Start 25; Stop 49
tggacaccagttcaattattttatg

SEQ ID NO: 227155 - DNA, 25 bp, Artificial
  probe
  misc_feature (1)..(25): SEQ ID NO: 2501; WAN024FZE_at; Start 91; Stop 115
agtggttccaaaattctttctgact

SEQ ID NO: 227156 - DNA, 25 bp, Artificial
  probe
  misc_feature (1)..(25): SEQ ID NO: 2501; WAN024FZE_at; Start 65; Stop 89
tccaccttgatttgtctgagaaaca

SEQ ID NO: 227157 - DNA, 25 bp, Artificial
  probe
  misc_feature (1)..(25): SEQ ID NO: 2501; WAN024FZE_at; Start 67; Stop 91
caccttgatttgtctgagaaacaaa

SEQ ID NO: 227158 - DNA, 25 bp, Artificial
  probe
  misc_feature (1)..(25): SEQ ID NO: 2501; WAN024FZE_at; Start 56; Stop 80
cagataaggtccaccttgatttgtc

SEQ ID NO: 227159 - DNA, 25 bp, Artificial
  probe
  misc_feature (1)..(25): SEQ ID NO: 2501; WAN024FZE_at; Start 80; Stop 104
ctgagaaacaaagtggttccaaaat

SEQ ID NO: 227160 - DNA, 25 bp, Artificial
  probe
  misc_feature (1)..(25): SEQ ID NO: 2501; WAN024FZE_at; Start 88; Stop 112
caaagtggttccaaaattctttctg

SEQ ID NO: 227161 - DNA, 25 bp, Artificial
  probe
  misc_feature (1)..(25): SEQ ID NO: 2501; WAN024FZE_at; Start 3; Stop 27
ggctccaactcaggataagttttgg

SEQ ID NO: 227162 - DNA, 25 bp, Artificial
  probe
  misc_feature (1)..(25): SEQ ID NO: 2501; WAN024FZE_at; Start 2; Stop 26
tggctccaactcaggataagttttg

SEQ ID NO: 227163 - DNA, 25 bp, Artificial
  probe
  misc_feature (1)..(25): SEQ ID NO: 2501; WAN024FZE_at; Start 48; Stop 72
tgattttgcagataaggtccacctt

SEQ ID NO: 227164 - DNA, 25 bp, Artificial
  probe
  misc_feature (1)..(25): SEQ ID NO: 2501; WAN024FZE_at; Start 63; Stop 87
ggtccaccttgatttgtctgagaaa

SEQ ID NO: 227165 - DNA, 25 bp, Artificial
  probe
  misc_feature (1)..(25): SEQ ID NO: 2501; WAN024FZE_at; Start 15; Stop 39
ggataagttttggacaccagttcaa

SEQ ID NO: 227166 - DNA, 25 bp, Artificial
  probe
  misc_feature (1)..(25): SEQ ID NO: 2501; WAN024FZE_at; Start 79; Stop 103
tctgagaaacaaagtggttccaaaa

SEQ ID NO: 227167 - DNA, 25 bp, Artificial
  probe
  misc_feature (1)..(25): SEQ ID NO: 2501; WAN024FZE_at; Start 62; Stop 86
aggtccaccttgatttgtctgagaa

SEQ ID NO: 227168 - DNA, 25 bp, Artificial
  probe
  misc_feature (1)..(25): SEQ ID NO: 2501; WAN024FZE_at; Start 18; Stop 42
taagttttggacaccagttcaatta

SEQ ID NO: 227169 - DNA, 25 bp, Artificial
  probe
  misc_feature (1)..(25): SEQ ID NO: 2501; WAN024FZE_at; Start 101; Stop 125
aaattctttctgactatctaactaa

SEQ ID NO: 227170 - DNA, 25 bp, Artificial
  probe
  misc_feature (1)..(25): SEQ ID NO: 2501; WAN024FZE_at; Start 61; Stop 85
aaggtccaccttgatttgtctgaga

SEQ ID NO: 227171 - DNA, 25 bp, Artificial
  probe
  misc_feature (1)..(25): SEQ ID NO: 2501; WAN024FZE_at; Start 51; Stop 75
ttttgcagataaggtccaccttgat

SEQ ID NO: 227172 - DNA, 25 bp, Artificial
  probe
  misc_feature (1)..(25): SEQ ID NO: 2501; WAN024FZE_at; Start 12; Stop 36
tcaggataagttttggacaccagtt

SEQ ID NO: 227173 - DNA, 25 bp, Artificial
  probe
  misc_feature (1)..(25): SEQ ID NO: 2156; WAN024FZF_at; Start 79; Stop 103
gatcctgatgttgcggcctttgtcc

SEQ ID NO: 227174 - DNA, 25 bp, Artificial
  probe
  misc_feature (1)..(25): SEQ ID NO: 2156; WAN024FZF_at; Start 116; Stop 140
tcaatcaggacgagttgaaccgtag

SEQ ID NO: 227175 - DNA, 25 bp, Artificial
  probe
  misc_feature (1)..(25): SEQ ID NO: 2156; WAN024FZF_at; Start 326; Stop 350
taattaattttccatctagcctgaa

SEQ ID NO: 227176 - DNA, 25 bp, Artificial
  probe
  misc_feature (1)..(25): SEQ ID NO: 2156; WAN024FZF_at; Start 31; Stop 55
caaccaagtcgttttcactatcaag

SEQ ID NO: 227177 - DNA, 25 bp, Artificial
  probe
  misc_feature (1)..(25): SEQ ID NO: 2156; WAN024FZF_at; Start 237; Stop 261
gaaccatggctatgcggatgtttct

SEQ ID NO: 227178 - DNA, 25 bp, Artificial
  probe
  misc_feature (1)..(25): SEQ ID NO: 2156; WAN024FZF_at; Start 214; Stop 238
ggctacaagcctatattagtcatga

SEQ ID NO: 227179 - DNA, 25 bp, Artificial
  probe
  misc_feature (1)..(25): SEQ ID NO: 2156; WAN024FZF_at; Start 369; Stop 393
tgtttatcgtgatgatgttcagcgc

SEQ ID NO: 227180 - DNA, 25 bp, Artificial
  probe
  misc_feature (1)..(25): SEQ ID NO: 2156; WAN024FZF_at; Start 182; Stop 206
tcctccgaggagatacagattatat

SEQ ID NO: 227181 - DNA, 25 bp, Artificial
  probe
  misc_feature (1)..(25): SEQ ID NO: 2156; WAN024FZF_at; Start 388; Stop 412
cagcgcttaactgttctaaaaagaa

SEQ ID NO: 227182 - DNA, 25 bp, Artificial
  probe
  misc_feature (1)..(25): SEQ ID NO: 2156; WAN024FZF_at; Start 23; Stop 47
tcaaacgtcaaccaagtcgttttca

SEQ ID NO: 227183 - DNA, 25 bp, Artificial
  probe
  misc_feature (1)..(25): SEQ ID NO: 2156; WAN024FZF_at; Start 243; Stop 267
tggctatgcggatgtttcttatgaa

SEQ ID NO: 227184 - DNA, 25 bp, Artificial
  probe
  misc_feature (1)..(25): SEQ ID NO: 2156; WAN024FZF_at; Start 413; Stop 437
tgatagaatttgttaacgattaccc

SEQ ID NO: 227185 - DNA, 25 bp, Artificial
  probe
  misc_feature (1)..(25): SEQ ID NO: 2156; WAN024FZF_at; Start 375; Stop 399
tcgtgatgatgttcagcgcttaact

SEQ ID NO: 227186 - DNA, 25 bp, Artificial
  probe
  misc_feature (1)..(25): SEQ ID NO: 2156; WAN024FZF_at; Start 300; Stop 324
agcggctatcaagaaacgtctcaac

SEQ ID NO: 227187 - DNA, 25 bp, Artificial
  probe
  misc_feature (1)..(25): SEQ ID NO: 2156; WAN024FZF_at; Start 234; Stop 258
catgaaccatggctatgcggatgtt

SEQ ID NO: 227188 - DNA, 25 bp, Artificial
  probe
  misc_feature (1)..(25): SEQ ID NO: 2156; WAN024FZF_at; Start 188; Stop 212
gaggagatacagattatattgccaa

SEQ ID NO: 227189 - DNA, 25 bp, Artificial
  probe
  misc_feature (1)..(25): SEQ ID NO: 2156; WAN024FZF_at; Start 126; Stop 150
cgagttgaaccgtagtatttccaag

SEQ ID NO: 227190 - DNA, 25 bp, Artificial
  probe
  misc_feature (1)..(25): SEQ ID NO: 2156; WAN024FZF_at; Start 76; Stop 100
aaggatcctgatgttgcggcctttg

SEQ ID NO: 227191 - DNA, 25 bp, Artificial
  probe
  misc_feature (1)..(25): SEQ ID NO: 2156; WAN024FZF_at; Start 109; Stop 133
gaatccctcaatcaggacgagttga

SEQ ID NO: 227192 - DNA, 25 bp, Artificial
  probe
  misc_feature (1)..(25): SEQ ID NO: 2156; WAN024FZF_at; Start 105; Stop 129
gcaagaatccctcaatcaggacgag

SEQ ID NO: 227193 - DNA, 25 bp, Artificial
  probe
  misc_feature (1)..(25): SEQ ID NO: 2156; WAN024FZF_at; Start 164; Stop 188
tcactgagagagataaattcctccg

SEQ ID NO: 227194 - DNA, 25 bp, Artificial
  probe
  misc_feature (1)..(25): SEQ ID NO: 2156; WAN024FZF_at; Start 230; Stop 254
tagtcatgaaccatggctatgcgga

SEQ ID NO: 227195 - DNA, 25 bp, Artificial
  probe
  misc_feature (1)..(25): SEQ ID NO: 2156; WAN024FZF_at; Start 355; Stop 379
gtcagttttttagatgtttatcgtg

SEQ ID NO: 227196 - DNA, 25 bp, Artificial
  probe
  misc_feature (1)..(25): SEQ ID NO: 2156; WAN024FZF_at; Start 309; Stop 333
caagaaacgtctcaacttaattaat

SEQ ID NO: 227197 - DNA, 25 bp, Artificial
  probe
  misc_feature (1)..(25): SEQ ID NO: 2156; WAN024FZF_at; Start 336; Stop 360
tccatctagcctgaaaaatgtcagt

SEQ ID NO: 227198 - DNA, 25 bp, Artificial
  probe
  misc_feature (1)..(25): SEQ ID NO: 2156; WAN024FZF_at; Start 152; Stop 176
ttaaccaatacatcactgagagaga

SEQ ID NO: 227199 - DNA, 25 bp, Artificial
  probe
  misc_feature (1)..(25): SEQ ID NO: 2156; WAN024FZF_at; Start 340; Stop 364
tctagcctgaaaaatgtcagttttt

SEQ ID NO: 227200 - DNA, 25 bp, Artificial
  probe
  misc_feature (1)..(25): SEQ ID NO: 2156; WAN024FZF_at; Start 46; Stop 70
cactatcaagatttagttcagaaaa

SEQ ID NO: 227201 - DNA, 25 bp, Artificial
  probe
  misc_feature (1)..(25): SEQ ID NO: 2156; WAN024FZF_at; Start 221; Stop 245
agcctatattagtcatgaaccatgg

SEQ ID NO: 227202 - DNA, 25 bp, Artificial
  probe
  misc_feature (1)..(25): SEQ ID NO: 2156; WAN024FZF_at; Start 382; Stop 406
gatgttcagcgcttaactgttctaa

SEQ ID NO: 227203 - DNA, 25 bp, Artificial
  probe
  misc_feature (1)..(25): SEQ ID NO: 2156; WAN024FZF_at; Start 395; Stop 419
taactgttctaaaaagaatgataga

SEQ ID NO: 227204 - DNA, 25 bp, Artificial
  probe
  misc_feature (1)..(25): SEQ ID NO: 2156; WAN024FZF_at; Start 303; Stop 327
ggctatcaagaaacgtctcaactta

SEQ ID NO: 227205 - DNA, 25 bp, Artificial
  probe
  misc_feature (1)..(25): SEQ ID NO: 2156; WAN024FZF_at; Start 171; Stop 195
gagagataaattcctccgaggagat

SEQ ID NO: 227206 - DNA, 25 bp, Artificial
  probe
  misc_feature (1)..(25): SEQ ID NO: 2156; WAN024FZF_at; Start 91; Stop 115
gcggcctttgtccagcaagaatccc

SEQ ID NO: 227207 - DNA, 25 bp, Artificial
  probe
  misc_feature (1)..(25): SEQ ID NO: 2051; WAN024FZG_at; Start 262; Stop 286
gcatttttgacatcaatgacaaagc

SEQ ID NO: 227208 - DNA, 25 bp, Artificial
  probe
  misc_feature (1)..(25): SEQ ID NO: 2051; WAN024FZG_at; Start 183; Stop 207
ggcgccaatatcatctaaaatcagg

SEQ ID NO: 227209 - DNA, 25 bp, Artificial
  probe
  misc_feature (1)..(25): SEQ ID NO: 2051; WAN024FZG_at; Start 85; Stop 109
ttgaagttggatgtgaaaaaggtcg

SEQ ID NO: 227210 - DNA, 25 bp, Artificial
  probe
  misc_feature (1)..(25): SEQ ID NO: 2051; WAN024FZG_at; Start 155; Stop 179
cgtcacgcacccaaacggttgattg

SEQ ID NO: 227211 - DNA, 25 bp, Artificial
  probe
  misc_feature (1)..(25): SEQ ID NO: 2051; WAN024FZG_at; Start 196; Stop 220
tctaaaatcaggacctcagacagct

SEQ ID NO: 227212 - DNA, 25 bp, Artificial
  probe
  misc_feature (1)..(25): SEQ ID NO: 2051; WAN024FZG_at; Start 11; Stop 35
tgacccgtctggcttcccaggtttc

SEQ ID NO: 227213 - DNA, 25 bp, Artificial
  probe
  misc_feature (1)..(25): SEQ ID NO: 2051; WAN024FZG_at; Start 119; Stop 143
cctgcatccgatattggagaatgac

SEQ ID NO: 227214 - DNA, 25 bp, Artificial
  probe
  misc_feature (1)..(25): SEQ ID NO: 2051; WAN024FZG_at; Start 141; Stop 165
gacctgcaggatttcgtcacgcacc

SEQ ID NO: 227215 - DNA, 25 bp, Artificial
  probe
  misc_feature (1)..(25): SEQ ID NO: 2051; WAN024FZG_at; Start 42; Stop 66
tccatgtttcactttcgcaaaatgc

SEQ ID NO: 227216 - DNA, 25 bp, Artificial
  probe
  misc_feature (1)..(25): SEQ ID NO: 2051; WAN024FZG_at; Start 214; Stop 238
gacagcttaatctcatccaccaagg

SEQ ID NO: 227217 - DNA, 25 bp, Artificial
  probe
  misc_feature (1)..(25): SEQ ID NO: 2051; WAN024FZG_at; Start 57; Stop 81
cgcaaaatgcttctccaaatcttca

SEQ ID NO: 227218 - DNA, 25 bp, Artificial
  probe
  misc_feature (1)..(25): SEQ ID NO: 2051; WAN024FZG_at; Start 249; Stop 273
gccatcactgatagcatttttgaca

SEQ ID NO: 227219 - DNA, 25 bp, Artificial
  probe
  misc_feature (1)..(25): SEQ ID NO: 2051; WAN024FZG_at; Start 125; Stop 149
tccgatattggagaatgacctgcag

SEQ ID NO: 227220 - DNA, 25 bp, Artificial
  probe
  misc_feature (1)..(25): SEQ ID NO: 2051; WAN024FZG_at; Start 270; Stop 294
gacatcaatgacaaagctaggatag

SEQ ID NO: 227221 - DNA, 25 bp, Artificial
  probe
  misc_feature (1)..(25): SEQ ID NO: 2051; WAN024FZG_at; Start 65; Stop 89
gcttctccaaatcttcaaagttgaa

SEQ ID NO: 227222 - DNA, 25 bp, Artificial
  probe
  misc_feature (1)..(25): SEQ ID NO: 2051; WAN024FZG_at; Start 165; Stop 189
ccaaacggttgattgctcggcgcca

SEQ ID NO: 227223 - DNA, 25 bp, Artificial
  probe
  misc_feature (1)..(25): SEQ ID NO: 2051; WAN024FZG_at; Start 21; Stop 45
ggcttcccaggtttcgtcatttcca

SEQ ID NO: 227224 - DNA, 25 bp, Artificial
  probe
  misc_feature (1)..(25): SEQ ID NO: 2051; WAN024FZG_at; Start 77; Stop 101
cttcaaagttgaagttggatgtgaa

SEQ ID NO: 227225 - DNA, 25 bp, Artificial
  probe
  misc_feature (1)..(25): SEQ ID NO: 2051; WAN024FZG_at; Start 145; Stop 169
tgcaggatttcgtcacgcacccaaa

SEQ ID NO: 227226 - DNA, 25 bp, Artificial
  probe
  misc_feature (1)..(25): SEQ ID NO: 2051; WAN024FZG_at; Start 237; Stop 261
ggtcttaacattgccatcactgata

SEQ ID NO: 227227 - DNA, 25 bp, Artificial
  probe
  misc_feature (1)..(25): SEQ ID NO: 2051; WAN024FZG_at; Start 137; Stop 161
gaatgacctgcaggatttcgtcacg

SEQ ID NO: 227228 - DNA, 25 bp, Artificial
  probe
  misc_feature (1)..(25): SEQ ID NO: 2051; WAN024FZG_at; Start 50; Stop 74
tcactttcgcaaaatgcttctccaa

SEQ ID NO: 227229 - DNA, 25 bp, Artificial
  probe
  misc_feature (1)..(25): SEQ ID NO: 2051; WAN024FZG_at; Start 218; Stop 242
gcttaatctcatccaccaaggtctt

SEQ ID NO: 227230 - DNA, 25 bp, Artificial
  probe
  misc_feature (1)..(25): SEQ ID NO: 2051; WAN024FZG_at; Start 203; Stop 227
tcaggacctcagacagcttaatctc

SEQ ID NO: 227231 - DNA, 25 bp, Artificial
  probe
  misc_feature (1)..(25): SEQ ID NO: 2051; WAN024FZG_at; Start 130; Stop 154
tattggagaatgacctgcaggattt

SEQ ID NO: 227232 - DNA, 25 bp, Artificial
  probe
  misc_feature (1)..(25): SEQ ID NO: 2051; WAN024FZG_at; Start 111; Stop 135
taaattttcctgcatccgatattgg

SEQ ID NO: 227233 - DNA, 25 bp, Artificial
  probe
  misc_feature (1)..(25): SEQ ID NO: 2051; WAN024FZG_at; Start 152; Stop 176
tttcgtcacgcacccaaacggttga

SEQ ID NO: 227234 - DNA, 25 bp, Artificial
  probe
  misc_feature (1)..(25): SEQ ID NO: 2051; WAN024FZG_at; Start 104; Stop 128
aggtcggtaaattttcctgcatccg

SEQ ID NO: 227235 - DNA, 25 bp, Artificial
  probe
  misc_feature (1)..(25): SEQ ID NO: 2051; WAN024FZG_at; Start 168; Stop 192
aacggttgattgctcggcgccaata

SEQ ID NO: 227236 - DNA, 25 bp, Artificial
  probe
  misc_feature (1)..(25): SEQ ID NO: 2051; WAN024FZG_at; Start 1; Stop 25
atgcgttccatgacccgtctggctt

SEQ ID NO: 227237 - DNA, 25 bp, Artificial
  probe
  misc_feature (1)..(25): SEQ ID NO: 2051; WAN024FZG_at; Start 191; Stop 215
tatcatctaaaatcaggacctcaga

SEQ ID NO: 227238 - DNA, 25 bp, Artificial
  probe
  misc_feature (1)..(25): SEQ ID NO: 2051; WAN024FZG_at; Start 226; Stop 250
tcatccaccaaggtcttaacattgc

SEQ ID NO: 227239 - DNA, 25 bp, Artificial
  probe
  misc_feature (1)..(25): SEQ ID NO: 2051; WAN024FZG_at; Start 28; Stop 52
caggtttcgtcatttccatgtttca

SEQ ID NO: 227240 - DNA, 25 bp, Artificial
  probe
  misc_feature (1)..(25): SEQ ID NO: 2051; WAN024FZG_at; Start 178; Stop 202
tgctcggcgccaatatcatctaaaa

SEQ ID NO: 227241 - DNA, 25 bp, Artificial
  probe
  misc_feature (1)..(25): SEQ ID NO: 5318; WAN024FZH_at; Start 256; Stop 280
tgtactcgtgaaagtatgcatgacg

SEQ ID NO: 227242 - DNA, 25 bp, Artificial
  probe
  misc_feature (1)..(25): SEQ ID NO: 5318; WAN024FZH_at; Start 95; Stop 119
cttatttctgggatgtacaaaacct

SEQ ID NO: 227243 - DNA, 25 bp, Artificial
  probe
  misc_feature (1)..(25): SEQ ID NO: 5318; WAN024FZH_at; Start 207; Stop 231
ccgtgcttttcttggtttaggatca

SEQ ID NO: 227244 - DNA, 25 bp, Artificial
  probe
  misc_feature (1)..(25): SEQ ID NO: 5318; WAN024FZH_at; Start 141; Stop 165
tactcttcccaaagccaggcaacat

SEQ ID NO: 227245 - DNA, 25 bp, Artificial
  probe
  misc_feature (1)..(25): SEQ ID NO: 5318; WAN024FZH_at; Start 101; Stop 125
tctgggatgtacaaaaccttttggc

SEQ ID NO: 227246 - DNA, 25 bp, Artificial
  probe
  misc_feature (1)..(25): SEQ ID NO: 5318; WAN024FZH_at; Start 122; Stop 146
tggcaacaaggtgtaaacatactct

SEQ ID NO: 227247 - DNA, 25 bp, Artificial
  probe
  misc_feature (1)..(25): SEQ ID NO: 5318; WAN024FZH_at; Start 26; Stop 50
tctgtcataaaaatctggatatact

SEQ ID NO: 227248 - DNA, 25 bp, Artificial
  probe
  misc_feature (1)..(25): SEQ ID NO: 5318; WAN024FZH_at; Start 216; Stop 240
tcttggtttaggatcatcagacaaa

SEQ ID NO: 227249 - DNA, 25 bp, Artificial
  probe
  misc_feature (1)..(25): SEQ ID NO: 5318; WAN024FZH_at; Start 105; Stop 129
ggatgtacaaaaccttttggcaaca

SEQ ID NO: 227250 - DNA, 25 bp, Artificial
  probe
  misc_feature (1)..(25): SEQ ID NO: 5318; WAN024FZH_at; Start 190; Stop 214
gatcttgataccctaaaccgtgctt

SEQ ID NO: 227251 - DNA, 25 bp, Artificial
  probe
  misc_feature (1)..(25): SEQ ID NO: 5318; WAN024FZH_at; Start 163; Stop 187
catcaaagagaataccatagatttt

SEQ ID NO: 227252 - DNA, 25 bp, Artificial
  probe
  misc_feature (1)..(25): SEQ ID NO: 5318; WAN024FZH_at; Start 75; Stop 99
gaaattccatccgtcttatccttat

SEQ ID NO: 227253 - DNA, 25 bp, Artificial
  probe
  misc_feature (1)..(25): SEQ ID NO: 5318; WAN024FZH_at; Start 243; Stop 267
tcttgtaagtttctgtactcgtgaa

SEQ ID NO: 227254 - DNA, 25 bp, Artificial
  probe
  misc_feature (1)..(25): SEQ ID NO: 5318; WAN024FZH_at; Start 150; Stop 174
caaagccaggcaacatcaaagagaa

SEQ ID NO: 227255 - DNA, 25 bp, Artificial
  probe
  misc_feature (1)..(25): SEQ ID NO: 5318; WAN024FZH_at; Start 211; Stop 235
gcttttcttggtttaggatcatcag

SEQ ID NO: 227256 - DNA, 25 bp, Artificial
  probe
  misc_feature (1)..(25): SEQ ID NO: 5318; WAN024FZH_at; Start 1; Stop 25
ttgcatctagaacaatctttcgttc

SEQ ID NO: 227257 - DNA, 25 bp, Artificial
  probe
  misc_feature (1)..(25): SEQ ID NO: 5318; WAN024FZH_at; Start 251; Stop 275
gtttctgtactcgtgaaagtatgca

SEQ ID NO: 227258 - DNA, 25 bp, Artificial
  probe
  misc_feature (1)..(25): SEQ ID NO: 5318; WAN024FZH_at; Start 178; Stop 202
catagattttttgatcttgataccc

SEQ ID NO: 227259 - DNA, 25 bp, Artificial
  probe
  misc_feature (1)..(25): SEQ ID NO: 5318; WAN024FZH_at; Start 20; Stop 44
tcgttctctgtcataaaaatctgga

SEQ ID NO: 227260 - DNA, 25 bp, Artificial
  probe
  misc_feature (1)..(25): SEQ ID NO: 5318; WAN024FZH_at; Start 158; Stop 182
ggcaacatcaaagagaataccatag

SEQ ID NO: 227261 - DNA, 25 bp, Artificial
  probe
  misc_feature (1)..(25): SEQ ID NO: 5318; WAN024FZH_at; Start 43; Stop 67
gatatacttttcgtttcccaacaga

SEQ ID NO: 227262 - DNA, 25 bp, Artificial
  probe
  misc_feature (1)..(25): SEQ ID NO: 5318; WAN024FZH_at; Start 227; Stop 251
gatcatcagacaaagttcttgtaag

SEQ ID NO: 227263 - DNA, 25 bp, Artificial
  probe
  misc_feature (1)..(25): SEQ ID NO: 5318; WAN024FZH_at; Start 82; Stop 106
catccgtcttatccttatttctggg

SEQ ID NO: 227264 - DNA, 25 bp, Artificial
  probe
  misc_feature (1)..(25): SEQ ID NO: 5318; WAN024FZH_at; Start 53; Stop 77
tcgtttcccaacagaaaatactgaa

SEQ ID NO: 227265 - DNA, 25 bp, Artificial
  probe
  misc_feature (1)..(25): SEQ ID NO: 5318; WAN024FZH_at; Start 187; Stop 211
tttgatcttgataccctaaaccgtg

SEQ ID NO: 227266 - DNA, 25 bp, Artificial
  probe
  misc_feature (1)..(25): SEQ ID NO: 5318; WAN024FZH_at; Start 10; Stop 34
gaacaatctttcgttctctgtcata

SEQ ID NO: 227267 - DNA, 25 bp, Artificial
  probe
  misc_feature (1)..(25): SEQ ID NO: 5318; WAN024FZH_at; Start 66; Stop 90
gaaaatactgaaattccatccgtct

SEQ ID NO: 227268 - DNA, 25 bp, Artificial
  probe
  misc_feature (1)..(25): SEQ ID NO: 5318; WAN024FZH_at; Start 131; Stop 155
ggtgtaaacatactcttcccaaagc

SEQ ID NO: 227269 - DNA, 25 bp, Artificial
  probe
  misc_feature (1)..(25): SEQ ID NO: 5318; WAN024FZH_at; Start 154; Stop 178
gccaggcaacatcaaagagaatacc

SEQ ID NO: 227270 - DNA, 25 bp, Artificial
  probe
  misc_feature (1)..(25): SEQ ID NO: 5318; WAN024FZH_at; Start 71; Stop 95
tactgaaattccatccgtcttatcc

SEQ ID NO: 227271 - DNA, 25 bp, Artificial
  probe
  misc_feature (1)..(25): SEQ ID NO: 5318; WAN024FZH_at; Start 223; Stop 247
ttaggatcatcagacaaagttcttg

SEQ ID NO: 227272 - DNA, 25 bp, Artificial
  probe
  misc_feature (1)..(25): SEQ ID NO: 5318; WAN024FZH_at; Start 117; Stop 141
ccttttggcaacaaggtgtaaacat

SEQ ID NO: 227273 - DNA, 25 bp, Artificial
  probe
  misc_feature (1)..(25): SEQ ID NO: 5318; WAN024FZH_at; Start 261; Stop 285
tcgtgaaagtatgcatgacgtatag

SEQ ID NO: 227274 - DNA, 25 bp, Artificial
  probe
  misc_feature (1)..(25): SEQ ID NO: 5318; WAN024FZH_at; Start 135; Stop 159
taaacatactcttcccaaagccagg

SEQ ID NO: 227275 - DNA, 25 bp, Artificial
  probe
  misc_feature (1)..(25): SEQ ID NO: 2155; WAN024FZI_at; Start 335; Stop 359
taccagccagtctcaagaaagctag

SEQ ID NO: 227276 - DNA, 25 bp, Artificial
  probe
  misc_feature (1)..(25): SEQ ID NO: 2155; WAN024FZI_at; Start 406; Stop 430
gaaaagctactagccttcgtggagc

SEQ ID NO: 227277 - DNA, 25 bp, Artificial
  probe
  misc_feature (1)..(25): SEQ ID NO: 2155; WAN024FZI_at; Start 783; Stop 807
gcattttgcgaaagtgaaacatgga

SEQ ID NO: 227278 - DNA, 25 bp, Artificial
  probe
  misc_feature (1)..(25): SEQ ID NO: 2155; WAN024FZI_at; Start 301; Stop 325
gcggctattaagaaccgtctcaagt

SEQ ID NO: 227279 - DNA, 25 bp, Artificial
  probe
  misc_feature (1)..(25): SEQ ID NO: 2155; WAN024FZI_at; Start 429; Stop 453
gcaatatccagctattcgaaaaggt

SEQ ID NO: 227280 - DNA, 25 bp, Artificial
  probe
  misc_feature (1)..(25): SEQ ID NO: 2155; WAN024FZI_at; Start 327; Stop 351
aatcaatctaccagccagtctcaag

SEQ ID NO: 227281 - DNA, 25 bp, Artificial
  probe
  misc_feature (1)..(25): SEQ ID NO: 2155; WAN024FZI_at; Start 775; Stop 799
ttggagaagcattttgcgaaagtga

SEQ ID NO: 227282 - DNA, 25 bp, Artificial
  probe
  misc_feature (1)..(25): SEQ ID NO: 2155; WAN024FZI_at; Start 126; Stop 150
ggaattaaatcgcagtatctccaag

SEQ ID NO: 227283 - DNA, 25 bp, Artificial
  probe
  misc_feature (1)..(25): SEQ ID NO: 2155; WAN024FZI_at; Start 164; Stop 188
tcaccgagcgtgacaagtttctccg

SEQ ID NO: 227284 - DNA, 25 bp, Artificial
  probe
  misc_feature (1)..(25): SEQ ID NO: 2155; WAN024FZI_at; Start 309; Stop 333
taagaaccgtctcaagttaatcaat

SEQ ID NO: 227285 - DNA, 25 bp, Artificial
  probe
  misc_feature (1)..(25): SEQ ID NO: 2155; WAN024FZI_at; Start 792; Stop 816
gaaagtgaaacatggaaatgacgaa

SEQ ID NO: 227286 - DNA, 25 bp, Artificial
  probe
  misc_feature (1)..(25): SEQ ID NO: 2155; WAN024FZI_at; Start 390; Stop 414
gcgcttaccagtttttgaaaagcta

SEQ ID NO: 227287 - DNA, 25 bp, Artificial
  probe
  misc_feature (1)..(25): SEQ ID NO: 2155; WAN024FZI_at; Start 135; Stop 159
tcgcagtatctccaagtttaatcag

SEQ ID NO: 227288 - DNA, 25 bp, Artificial
  probe
  misc_feature (1)..(25): SEQ ID NO: 2155; WAN024FZI_at; Start 789; Stop 813
tgcgaaagtgaaacatggaaatgac

SEQ ID NO: 227289 - DNA, 25 bp, Artificial
  probe
  misc_feature (1)..(25): SEQ ID NO: 2155; WAN024FZI_at; Start 46; Stop 70
tattatcaagatttggtccagaaaa

SEQ ID NO: 227290 - DNA, 25 bp, Artificial
  probe
  misc_feature (1)..(25): SEQ ID NO: 2155; WAN024FZI_at; Start 413; Stop 437
tactagccttcgtggagcaatatcc

SEQ ID NO: 227291 - DNA, 25 bp, Artificial
  probe
  misc_feature (1)..(25): SEQ ID NO: 2155; WAN024FZI_at; Start 445; Stop 469
cgaaaaggtctttacttatatggag

SEQ ID NO: 227292 - DNA, 25 bp, Artificial
  probe
  misc_feature (1)..(25): SEQ ID NO: 2155; WAN024FZI_at; Start 365; Stop 389
ctcaagttgacttggatgatttggg

SEQ ID NO: 227293 - DNA, 25 bp, Artificial
  probe
  misc_feature (1)..(25): SEQ ID NO: 2155; WAN024FZI_at; Start 356; Stop 380
ctagtttggctcaagttgacttgga

SEQ ID NO: 227294 - DNA, 25 bp, Artificial
  probe
  misc_feature (1)..(25): SEQ ID NO: 2155; WAN024FZI_at; Start 187; Stop 211
cgtggggatacggattatattgcca

SEQ ID NO: 227295 - DNA, 25 bp, Artificial
  probe
  misc_feature (1)..(25): SEQ ID NO: 2155; WAN024FZI_at; Start 31; Stop 55
caacccagccgtttttattatcaag

SEQ ID NO: 227296 - DNA, 25 bp, Artificial
  probe
  misc_feature (1)..(25): SEQ ID NO: 2155; WAN024FZI_at; Start 320; Stop 344
tcaagttaatcaatctaccagccag

SEQ ID NO: 227297 - DNA, 25 bp, Artificial
  probe
  misc_feature (1)..(25): SEQ ID NO: 2155; WAN024FZI_at; Start 157; Stop 181
cagtacatcaccgagcgtgacaagt

SEQ ID NO: 227298 - DNA, 25 bp, Artificial
  probe
  misc_feature (1)..(25): SEQ ID NO: 2155; WAN024FZI_at; Start 422; Stop 446
tcgtggagcaatatccagctattcg

SEQ ID NO: 227299 - DNA, 25 bp, Artificial
  probe
  misc_feature (1)..(25): SEQ ID NO: 2155; WAN024FZI_at; Start 147; Stop 171
caagtttaatcagtacatcaccgag

SEQ ID NO: 227300 - DNA, 25 bp, Artificial
  probe
  misc_feature (1)..(25): SEQ ID NO: 2155; WAN024FZI_at; Start 151; Stop 175
tttaatcagtacatcaccgagcgtg

SEQ ID NO: 227301 - DNA, 25 bp, Artificial
  probe
  misc_feature (1)..(25): SEQ ID NO: 2155; WAN024FZI_at; Start 398; Stop 422
cagtttttgaaaagctactagcctt

SEQ ID NO: 227302 - DNA, 25 bp, Artificial
  probe
  misc_feature (1)..(25): SEQ ID NO: 2155; WAN024FZI_at; Start 210; Stop 234
caaaggctacaagccgattttggtt

SEQ ID NO: 227303 - DNA, 25 bp, Artificial
  probe
  misc_feature (1)..(25): SEQ ID NO: 2155; WAN024FZI_at; Start 221; Stop 245
agccgattttggttaagaatcatgg

SEQ ID NO: 227304 - DNA, 25 bp, Artificial
  probe
  misc_feature (1)..(25): SEQ ID NO: 2155; WAN024FZI_at; Start 351; Stop 375
gaaagctagtttggctcaagttgac

SEQ ID NO: 227305 - DNA, 25 bp, Artificial
  probe
  misc_feature (1)..(25): SEQ ID NO: 2155; WAN024FZI_at; Start 416; Stop 440
tagccttcgtggagcaatatccagc

SEQ ID NO: 227306 - DNA, 25 bp, Artificial
  probe
  misc_feature (1)..(25): SEQ ID NO: 2155; WAN024FZI_at; Start 215; Stop 239
gctacaagccgattttggttaagaa

SEQ ID NO: 227307 - DNA, 25 bp, Artificial
  probe
  misc_feature (1)..(25): SEQ ID NO: 2155; WAN024FZI_at; Start 168; Stop 192
cgagcgtgacaagtttctccgtggg

SEQ ID NO: 227308 - DNA, 25 bp, Artificial
  probe
  misc_feature (1)..(25): SEQ ID NO: 2155; WAN024FZI_at; Start 341; Stop 365
ccagtctcaagaaagctagtttggc

SEQ ID NO: 227309 - DNA, 25 bp, Artificial
  probe
  misc_feature (1)..(25): SEQ ID NO: 3363; WAN024FZJ_at; Start 811; Stop 835
caagaactttgtctgatgatcctaa

SEQ ID NO: 227310 - DNA, 25 bp, Artificial
  probe
  misc_feature (1)..(25): SEQ ID NO: 3363; WAN024FZJ_at; Start 116; Stop 140
gaaccttggaaagtctatcccaaga

SEQ ID NO: 227311 - DNA, 25 bp, Artificial
  probe
  misc_feature (1)..(25): SEQ ID NO: 3363; WAN024FZJ_at; Start 857; Stop 881
ggtatcaagatcaaaaaatctatgg

SEQ ID NO: 227312 - DNA, 25 bp, Artificial
  probe
  misc_feature (1)..(25): SEQ ID NO: 3363; WAN024FZJ_at; Start 817; Stop 841
ctttgtctgatgatcctaaaccaag

SEQ ID NO: 227313 - DNA, 25 bp, Artificial
  probe
  misc_feature (1)..(25): SEQ ID NO: 3363; WAN024FZJ_at; Start 114; Stop 138
cagaaccttggaaagtctatcccaa

SEQ ID NO: 227314 - DNA, 25 bp, Artificial
  probe
  misc_feature (1)..(25): SEQ ID NO: 3363; WAN024FZJ_at; Start 781; Stop 805
catgcatactttcacgagtacagaa

SEQ ID NO: 227315 - DNA, 25 bp, Artificial
  probe
  misc_feature (1)..(25): SEQ ID NO: 3363; WAN024FZJ_at; Start 763; Stop 787
caatctaaacctatacgtcatgcat

SEQ ID NO: 227316 - DNA, 25 bp, Artificial
  probe
  misc_feature (1)..(25): SEQ ID NO: 3363; WAN024FZJ_at; Start 846; Stop 870
gcacggtttagggtatcaagatcaa

SEQ ID NO: 227317 - DNA, 25 bp, Artificial
  probe
  misc_feature (1)..(25): SEQ ID NO: 3363; WAN024FZJ_at; Start 808; Stop 832
ttacaagaactttgtctgatgatcc

SEQ ID NO: 227318 - DNA, 25 bp, Artificial
  probe
  misc_feature (1)..(25): SEQ ID NO: 3363; WAN024FZJ_at; Start 865; Stop 889
gatcaaaaaatctatggtattctct

SEQ ID NO: 227319 - DNA, 25 bp, Artificial
  probe
  misc_feature (1)..(25): SEQ ID NO: 3363; WAN024FZJ_at; Start 778; Stop 802
cgtcatgcatactttcacgagtaca

SEQ ID NO: 227320 - DNA, 25 bp, Artificial
  probe
  misc_feature (1)..(25): SEQ ID NO: 3363; WAN024FZJ_at; Start 30; Stop 54
gatgcggattactgataatcaacac

SEQ ID NO: 227321 - DNA, 25 bp, Artificial
  probe
  misc_feature (1)..(25): SEQ ID NO: 3363; WAN024FZJ_at; Start 852; Stop 876
tttagggtatcaagatcaaaaaatc

SEQ ID NO: 227322 - DNA, 25 bp, Artificial
  probe
  misc_feature (1)..(25): SEQ ID NO: 3363; WAN024FZJ_at; Start 49; Stop 73
caacacaagattattaaagaaaaat

SEQ ID NO: 227323 - DNA, 25 bp, Artificial
  probe
  misc_feature (1)..(25): SEQ ID NO: 3363; WAN024FZJ_at; Start 758; Stop 782
gaaatcaatctaaacctatacgtca

SEQ ID NO: 227324 - DNA, 25 bp, Artificial
  probe
  misc_feature (1)..(25): SEQ ID NO: 3363; WAN024FZJ_at; Start 774; Stop 798
tatacgtcatgcatactttcacgag

SEQ ID NO: 227325 - DNA, 25 bp, Artificial
  probe
  misc_feature (1)..(25): SEQ ID NO: 3363; WAN024FZJ_at; Start 75; Stop 99
tgttgaagaatatcctaaactaagc

SEQ ID NO: 227326 - DNA, 25 bp, Artificial
  probe
  misc_feature (1)..(25): SEQ ID NO: 3363; WAN024FZJ_at; Start 119; Stop 143
ccttggaaagtctatcccaagatga

SEQ ID NO: 227327 - DNA, 25 bp, Artificial
  probe
  misc_feature (1)..(25): SEQ ID NO: 3363; WAN024FZJ_at; Start 820; Stop 844
tgtctgatgatcctaaaccaagaaa

SEQ ID NO: 227328 - DNA, 25 bp, Artificial
  probe
  misc_feature (1)..(25): SEQ ID NO: 3363; WAN024FZJ_at; Start 67; Stop 91
gaaaaatttgttgaagaatatccta

SEQ ID NO: 227329 - DNA, 25 bp, Artificial
  probe
  misc_feature (1)..(25): SEQ ID NO: 3363; WAN024FZJ_at; Start 766; Stop 790
tctaaacctatacgtcatgcatact

SEQ ID NO: 227330 - DNA, 25 bp, Artificial
  probe
  misc_feature (1)..(25): SEQ ID NO: 3363; WAN024FZJ_at; Start 843; Stop 867
aaagcacggtttagggtatcaagat

SEQ ID NO: 227331 - DNA, 25 bp, Artificial
  probe
  misc_feature (1)..(25): SEQ ID NO: 3363; WAN024FZJ_at; Start 827; Stop 851
tgatcctaaaccaagaaaagcacgg

SEQ ID NO: 227332 - DNA, 25 bp, Artificial
  probe
  misc_feature (1)..(25): SEQ ID NO: 3363; WAN024FZJ_at; Start 112; Stop 136
gacagaaccttggaaagtctatccc

SEQ ID NO: 227333 - DNA, 25 bp, Artificial
  probe
  misc_feature (1)..(25): SEQ ID NO: 3363; WAN024FZJ_at; Start 814; Stop 838
gaactttgtctgatgatcctaaacc

SEQ ID NO: 227334 - DNA, 25 bp, Artificial
  probe
  misc_feature (1)..(25): SEQ ID NO: 3363; WAN024FZJ_at; Start 1279; Stop 1303
tgtaaaatgatggaaaattcagaag

SEQ ID NO: 227335 - DNA, 25 bp, Artificial
  probe
  misc_feature (1)..(25): SEQ ID NO: 3363; WAN024FZJ_at; Start 868; Stop 892
caaaaaatctatggtattctctttg

SEQ ID NO: 227336 - DNA, 25 bp, Artificial
  probe
  misc_feature (1)..(25): SEQ ID NO: 3363; WAN024FZJ_at; Start 27; Stop 51
gatgatgcggattactgataatcaa

SEQ ID NO: 227337 - DNA, 25 bp, Artificial
  probe
  misc_feature (1)..(25): SEQ ID NO: 3363; WAN024FZJ_at; Start 847; Stop 871
cacggtttagggtatcaagatcaaa

SEQ ID NO: 227338 - DNA, 25 bp, Artificial
  probe
  misc_feature (1)..(25): SEQ ID NO: 3363; WAN024FZJ_at; Start 79; Stop 103
gaagaatatcctaaactaagcaatc

SEQ ID NO: 227339 - DNA, 25 bp, Artificial
  probe
  misc_feature (1)..(25): SEQ ID NO: 3363; WAN024FZJ_at; Start 33; Stop 57
gcggattactgataatcaacacaag

SEQ ID NO: 227340 - DNA, 25 bp, Artificial
  probe
  misc_feature (1)..(25): SEQ ID NO: 3363; WAN024FZJ_at; Start 824; Stop 848
tgatgatcctaaaccaagaaaagca

SEQ ID NO: 227341 - DNA, 25 bp, Artificial
  probe
  misc_feature (1)..(25): SEQ ID NO: 3363; WAN024FZJ_at; Start 108; Stop 132
tttagacagaaccttggaaagtcta

SEQ ID NO: 227342 - DNA, 25 bp, Artificial
  probe
  misc_feature (1)..(25): SEQ ID NO: 3363; WAN024FZJ_at; Start 36; Stop 60
gattactgataatcaacacaagatt

SEQ ID NO: 227343 - DNA, 25 bp, Artificial
  probe
  misc_feature (1)..(25): SEQ ID NO: 5211; WAN024FZK_at; Start 1172; Stop 1196
cactacctagcaaatatgtttacga

SEQ ID NO: 227344 - DNA, 25 bp, Artificial
  probe
  misc_feature (1)..(25): SEQ ID NO: 5211; WAN024FZK_at; Start 337; Stop 361
tcagagttggatcagcgattttcaa

SEQ ID NO: 227345 - DNA, 25 bp, Artificial
  probe
  misc_feature (1)..(25): SEQ ID NO: 5211; WAN024FZK_at; Start 1426; Stop 1450
ggaagtgtttctacccaatatgcaa

SEQ ID NO: 227346 - DNA, 25 bp, Artificial
  probe
  misc_feature (1)..(25): SEQ ID NO: 5211; WAN024FZK_at; Start 502; Stop 526
gagggagatcctttctttggtgtaa

SEQ ID NO: 227347 - DNA, 25 bp, Artificial
  probe
  misc_feature (1)..(25): SEQ ID NO: 5211; WAN024FZK_at; Start 913; Stop 937
gaaggtttaagaccagtatcaaatg

SEQ ID NO: 227348 - DNA, 25 bp, Artificial
  probe
  misc_feature (1)..(25): SEQ ID NO: 5211; WAN024FZK_at; Start 1444; Stop 1468
tatgcaaatctacacgaaactgatg

SEQ ID NO: 227349 - DNA, 25 bp, Artificial
  probe
  misc_feature (1)..(25): SEQ ID NO: 5211; WAN024FZK_at; Start 118; Stop 142
gagtttctccaggaatggcctttgg

SEQ ID NO: 227350 - DNA, 25 bp, Artificial
  probe
  misc_feature (1)..(25): SEQ ID NO: 5211; WAN024FZK_at; Start 1007; Stop 1031
cccaattgattggaggacaagataa

SEQ ID NO: 227351 - DNA, 25 bp, Artificial
  probe
  misc_feature (1)..(25): SEQ ID NO: 5211; WAN024FZK_at; Start 1779; Stop 1803
taagcctctcctagaagactacttg

SEQ ID NO: 227352 - DNA, 25 bp, Artificial
  probe
  misc_feature (1)..(25): SEQ ID NO: 5211; WAN024FZK_at; Start 577; Stop 601
caaggtggaccttatctgcaaaatc

SEQ ID NO: 227353 - DNA, 25 bp, Artificial
  probe
  misc_feature (1)..(25): SEQ ID NO: 5211; WAN024FZK_at; Start 1247; Stop 1271
gaaaaactgtcctagaaacattgag

SEQ ID NO: 227354 - DNA, 25 bp, Artificial
  probe
  misc_feature (1)..(25): SEQ ID NO: 5211; WAN024FZK_at; Start 643; Stop 667
gagccatcgaaattaggaactatgc

SEQ ID NO: 227355 - DNA, 25 bp, Artificial
  probe
  misc_feature (1)..(25): SEQ ID NO: 5211; WAN024FZK_at; Start 246; Stop 270
tcttggaatttctggtggctcagct

SEQ ID NO: 227356 - DNA, 25 bp, Artificial
  probe
  misc_feature (1)..(25): SEQ ID NO: 5211; WAN024FZK_at; Start 862; Stop 886
caaatcggatttgtacaatttcacc

SEQ ID NO: 227357 - DNA, 25 bp, Artificial
  probe
  misc_feature (1)..(25): SEQ ID NO: 5211; WAN024FZK_at; Start 1538; Stop 1562
cctttgattttgctatgcgtcgtcg

SEQ ID NO: 227358 - DNA, 25 bp, Artificial
  probe
  misc_feature (1)..(25): SEQ ID NO: 5211; WAN024FZK_at; Start 1157; Stop 1181
gtgttccaggatggtcactacctag

SEQ ID NO: 227359 - DNA, 25 bp, Artificial
  probe
  misc_feature (1)..(25): SEQ ID NO: 5211; WAN024FZK_at; Start 259; Stop 283
ggtggctcagcttcaaaatttggta

SEQ ID NO: 227360 - DNA, 25 bp, Artificial
  probe
  misc_feature (1)..(25): SEQ ID NO: 5211; WAN024FZK_at; Start 1142; Stop 1166
taaattatgatagtggtgttccagg

SEQ ID NO: 227361 - DNA, 25 bp, Artificial
  probe
  misc_feature (1)..(25): SEQ ID NO: 5211; WAN024FZK_at; Start 561; Stop 585
tgtttctcagacaaatcaaggtgga

SEQ ID NO: 227362 - DNA, 25 bp, Artificial
  probe
  misc_feature (1)..(25): SEQ ID NO: 5211; WAN024FZK_at; Start 1225; Stop 1249
caagaatactacaaaagtggtggaa

SEQ ID NO: 227363 - DNA, 25 bp, Artificial
  probe
  misc_feature (1)..(25): SEQ ID NO: 5211; WAN024FZK_at; Start 206; Stop 230
tatgctacgctcttgagaagggaaa

SEQ ID NO: 227364 - DNA, 25 bp, Artificial
  probe
  misc_feature (1)..(25): SEQ ID NO: 5211; WAN024FZK_at; Start 1650; Stop 1674
tctaagaaacttgaacgctgctatc

SEQ ID NO: 227365 - DNA, 25 bp, Artificial
  probe
  misc_feature (1)..(25): SEQ ID NO: 5211; WAN024FZK_at; Start 1409; Stop 1433
gctatcgtggtgaaaaaggaagtgt

SEQ ID NO: 227366 - DNA, 25 bp, Artificial
  probe
  misc_feature (1)..(25): SEQ ID NO: 5211; WAN024FZK_at; Start 628; Stop 652
acttatcctgagttggagccatcga

SEQ ID NO: 227367 - DNA, 25 bp, Artificial
  probe
  misc_feature (1)..(25): SEQ ID NO: 5211; WAN024FZK_at; Start 946; Stop 970
gctattgagtttaggctacaggacg

SEQ ID NO: 227368 - DNA, 25 bp, Artificial
  probe
  misc_feature (1)..(25): SEQ ID NO: 5211; WAN024FZK_at; Start 1625; Stop 1649
tccatgcagaagaagcaaaaattcg

SEQ ID NO: 227369 - DNA, 25 bp, Artificial
  probe
  misc_feature (1)..(25): SEQ ID NO: 5211; WAN024FZK_at; Start 1465; Stop 1489
gatgaaaagttctatatccccgaaa

SEQ ID NO: 227370 - DNA, 25 bp, Artificial
  probe
  misc_feature (1)..(25): SEQ ID NO: 5211; WAN024FZK_at; Start 456; Stop 480
tattggtcgttctgctatggtgaca

SEQ ID NO: 227371 - DNA, 25 bp, Artificial
  probe
  misc_feature (1)..(25): SEQ ID NO: 5211; WAN024FZK_at; Start 534; Stop 558
tagtcagaaagaattttggaaccac

SEQ ID NO: 227372 - DNA, 25 bp, Artificial
  probe
  misc_feature (1)..(25): SEQ ID NO: 5211; WAN024FZK_at; Start 601; Stop 625
cataaaataattgaactggtgtcca

SEQ ID NO: 227373 - DNA, 25 bp, Artificial
  probe
  misc_feature (1)..(25): SEQ ID NO: 5211; WAN024FZK_at; Start 169; Stop 193
gaatatgtaataggaaagggacagc

SEQ ID NO: 227374 - DNA, 25 bp, Artificial
  probe
  misc_feature (1)..(25): SEQ ID NO: 5211; WAN024FZK_at; Start 1516; Stop 1540
gatattgatcgttcagtggatacct

SEQ ID NO: 227375 - DNA, 25 bp, Artificial
  probe
  misc_feature (1)..(25): SEQ ID NO: 5211; WAN024FZK_at; Start 613; Stop 637
gaactggtgtccaaaacttatcctg

SEQ ID NO: 227376 - DNA, 25 bp, Artificial
  probe
  misc_feature (1)..(25): SEQ ID NO: 5211; WAN024FZK_at; Start 1795; Stop 1819
gactacttgcgaggttcttatgatg

SEQ ID NO: 227377 - DNA, 25 bp, Artificial
  probe
  misc_feature (1)..(25): SEQ ID NO: 2844; WAN024FZL_at; Start 148; Stop 172
aatggaacccctatttctatcagag

SEQ ID NO: 227378 - DNA, 25 bp, Artificial
  probe
  misc_feature (1)..(25): SEQ ID NO: 2844; WAN024FZL_at; Start 400; Stop 424
gataggttcgttgaaggaaaatgcc

SEQ ID NO: 227379 - DNA, 25 bp, Artificial
  probe
  misc_feature (1)..(25): SEQ ID NO: 2844; WAN024FZL_at; Start 917; Stop 941
caggtttagaaatagagcctcttcc

SEQ ID NO: 227380 - DNA, 25 bp, Artificial
  probe
  misc_feature (1)..(25): SEQ ID NO: 2844; WAN024FZL_at; Start 901; Stop 925
tggccggcaatactctcaggtttag

SEQ ID NO: 227381 - DNA, 25 bp, Artificial
  probe
  misc_feature (1)..(25): SEQ ID NO: 2844; WAN024FZL_at; Start 749; Stop 773
tatatgtctggtttgaagcggtagc

SEQ ID NO: 227382 - DNA, 25 bp, Artificial
  probe
  misc_feature (1)..(25): SEQ ID NO: 2844; WAN024FZL_at; Start 783; Stop 807
cacagcaagtgttgattgggcgcaa

SEQ ID NO: 227383 - DNA, 25 bp, Artificial
  probe
  misc_feature (1)..(25): SEQ ID NO: 2844; WAN024FZL_at; Start 23; Stop 47
catggccatatgcaaacggttcgtt

SEQ ID NO: 227384 - DNA, 25 bp, Artificial
  probe
  misc_feature (1)..(25): SEQ ID NO: 2844; WAN024FZL_at; Start 416; Stop 440
gaaaatgcccgaattgtggaaccca

SEQ ID NO: 227385 - DNA, 25 bp, Artificial
  probe
  misc_feature (1)..(25): SEQ ID NO: 2844; WAN024FZL_at; Start 884; Stop 908
catttcatactattatttggccggc

SEQ ID NO: 227386 - DNA, 25 bp, Artificial
  probe
  misc_feature (1)..(25): SEQ ID NO: 2844; WAN024FZL_at; Start 768; Stop 792
ggtagcaggttactacacagcaagt

SEQ ID NO: 227387 - DNA, 25 bp, Artificial
  probe
  misc_feature (1)..(25): SEQ ID NO: 2844; WAN024FZL_at; Start 430; Stop 454
tgtggaacccattcaagaggagatc

SEQ ID NO: 227388 - DNA, 25 bp, Artificial
  probe
  misc_feature (1)..(25): SEQ ID NO: 2844; WAN024FZL_at; Start 275; Stop 299
gaacagattctccactacatcatga

SEQ ID NO: 227389 - DNA, 25 bp, Artificial
  probe
  misc_feature (1)..(25): SEQ ID NO: 2844; WAN024FZL_at; Start 517; Stop 541
tgttccaatgaaccagaagttcgtg

SEQ ID NO: 227390 - DNA, 25 bp, Artificial
  probe
  misc_feature (1)..(25): SEQ ID NO: 2844; WAN024FZL_at; Start 687; Stop 711
tgttactcgtgatctaccaaatggg

SEQ ID NO: 227391 - DNA, 25 bp, Artificial
  probe
  misc_feature (1)..(25): SEQ ID NO: 2844; WAN024FZL_at; Start 1612; Stop 1636
gaattgcaacaaacatccagtagat

SEQ ID NO: 227392 - DNA, 25 bp, Artificial
  probe
  misc_feature (1)..(25): SEQ ID NO: 2844; WAN024FZL_at; Start 1363; Stop 1387
aaaccgtgggcattgcgagagtccg

SEQ ID NO: 227393 - DNA, 25 bp, Artificial
  probe
  misc_feature (1)..(25): SEQ ID NO: 2844; WAN024FZL_at; Start 1284; Stop 1308
tgagagcgggcatatgaaacaggca

SEQ ID NO: 227394 - DNA, 25 bp, Artificial
  probe
  misc_feature (1)..(25): SEQ ID NO: 2844; WAN024FZL_at; Start 133; Stop 157
tctggaagtgattgtaatggaaccc

SEQ ID NO: 227395 - DNA, 25 bp, Artificial
  probe
  misc_feature (1)..(25): SEQ ID NO: 2844; WAN024FZL_at; Start 667; Stop 691
gaaggtttacctgatcgagctgtta

SEQ ID NO: 227396 - DNA, 25 bp, Artificial
  probe
  misc_feature (1)..(25): SEQ ID NO: 2844; WAN024FZL_at; Start 1000; Stop 1024
aataattgggctatatggcttaacg

SEQ ID NO: 227397 - DNA, 25 bp, Artificial
  probe
  misc_feature (1)..(25): SEQ ID NO: 2844; WAN024FZL_at; Start 825; Stop 849
tactgatttttggaacaatcggaca

SEQ ID NO: 227398 - DNA, 25 bp, Artificial
  probe
  misc_feature (1)..(25): SEQ ID NO: 2844; WAN024FZL_at; Start 451; Stop 475
gatcaatgtgataattgctcagcaa

SEQ ID NO: 227399 - DNA, 25 bp, Artificial
  probe
  misc_feature (1)..(25): SEQ ID NO: 2844; WAN024FZL_at; Start 45; Stop 69
gttacatattggtcacgcggcagcg

SEQ ID NO: 227400 - DNA, 25 bp, Artificial
  probe
  misc_feature (1)..(25): SEQ ID NO: 2844; WAN024FZL_at; Start 1078; Stop 1102
gctcctgagatgaaagatgcaaatt

SEQ ID NO: 227401 - DNA, 25 bp, Artificial
  probe
  misc_feature (1)..(25): SEQ ID NO: 2844; WAN024FZL_at; Start 5; Stop 29
caatttttattggaggagcatggcc

SEQ ID NO: 227402 - DNA, 25 bp, Artificial
  probe
  misc_feature (1)..(25): SEQ ID NO: 2844; WAN024FZL_at; Start 608; Stop 632
ctgaagaaacagtgagatggcgaaa

SEQ ID NO: 227403 - DNA, 25 bp, Artificial
  probe
  misc_feature (1)..(25): SEQ ID NO: 2844; WAN024FZL_at; Start 1211; Stop 1235
tacccactaaatatctcgaaggaga

SEQ ID NO: 227404 - DNA, 25 bp, Artificial
  probe
  misc_feature (1)..(25): SEQ ID NO: 2844; WAN024FZL_at; Start 861; Stop 885
tgttcatggaaaagataacatccca

SEQ ID NO: 227405 - DNA, 25 bp, Artificial
  probe
  misc_feature (1)..(25): SEQ ID NO: 2844; WAN024FZL_at; Start 1377; Stop 1401
gcgagagtccgatattgaaaaatgt

SEQ ID NO: 227406 - DNA, 25 bp, Artificial
  probe
  misc_feature (1)..(25): SEQ ID NO: 2844; WAN024FZL_at; Start 257; Stop 281
catatgacttgtactcgcgaacaga

SEQ ID NO: 227407 - DNA, 25 bp, Artificial
  probe
  misc_feature (1)..(25): SEQ ID NO: 2844; WAN024FZL_at; Start 1136; Stop 1160
cagaattattaggatcgtacggtaa

SEQ ID NO: 227408 - DNA, 25 bp, Artificial
  probe
  misc_feature (1)..(25): SEQ ID NO: 2844; WAN024FZL_at; Start 1060; Stop 1084
tacttcctaacaataaatgctcctg

SEQ ID NO: 227409 - DNA, 25 bp, Artificial
  probe
  misc_feature (1)..(25): SEQ ID NO: 2844; WAN024FZL_at; Start 1349; Stop 1373
tctatgatgatatgaaaccgtgggc

SEQ ID NO: 227410 - DNA, 25 bp, Artificial
  probe
  misc_feature (1)..(25): SEQ ID NO: 2844; WAN024FZL_at; Start 92; Stop 116
caagatactatcgtcagaagggaga

SEQ ID NO: 227411 - DNA, 25 bp, Artificial
  probe
  misc_feature (1)..(25): SEQ ID NO: 5524; WAN024FZM_at; Start 313; Stop 337
tttacccaacttgataaactggtca

SEQ ID NO: 227412 - DNA, 25 bp, Artificial
  probe
  misc_feature (1)..(25): SEQ ID NO: 5524; WAN024FZM_at; Start 387; Stop 411
tagcacggagttttgataggtcacc

SEQ ID NO: 227413 - DNA, 25 bp, Artificial
  probe
  misc_feature (1)..(25): SEQ ID NO: 5524; WAN024FZM_at; Start 333; Stop 357
ggtcaaactggcaatcacgcgcaaa

SEQ ID NO: 227414 - DNA, 25 bp, Artificial
  probe
  misc_feature (1)..(25): SEQ ID NO: 5524; WAN024FZM_at; Start 60; Stop 84
gagcaggccctgtttcagaaatcac

SEQ ID NO: 227415 - DNA, 25 bp, Artificial
  probe
  misc_feature (1)..(25): SEQ ID NO: 5524; WAN024FZM_at; Start 343; Stop 367
gcaatcacgcgcaaaaccagctaaa

SEQ ID NO: 227416 - DNA, 25 bp, Artificial
  probe
  misc_feature (1)..(25): SEQ ID NO: 5524; WAN024FZM_at; Start 269; Stop 293
ccaagaatggtgtcacgattgcgac

SEQ ID NO: 227417 - DNA, 25 bp, Artificial
  probe
  misc_feature (1)..(25): SEQ ID NO: 5524; WAN024FZM_at; Start 441; Stop 465
gatattctgaaatcaataactgtag

SEQ ID NO: 227418 - DNA, 25 bp, Artificial
  probe
  misc_feature (1)..(25): SEQ ID NO: 5524; WAN024FZM_at; Start 93; Stop 117
gaatagccacatcaccattgacctg

SEQ ID NO: 227419 - DNA, 25 bp, Artificial
  probe
  misc_feature (1)..(25): SEQ ID NO: 5524; WAN024FZM_at; Start 401; Stop 425
gataggtcaccttcaggctttttag

SEQ ID NO: 227420 - DNA, 25 bp, Artificial
  probe
  misc_feature (1)..(25): SEQ ID NO: 5524; WAN024FZM_at; Start 218; Stop 242
gccacatccttatccaaaagaaggg

SEQ ID NO: 227421 - DNA, 25 bp, Artificial
  probe
  misc_feature (1)..(25): SEQ ID NO: 5524; WAN024FZM_at; Start 121; Stop 145
caactcttggagatgggttttatag

SEQ ID NO: 227422 - DNA, 25 bp, Artificial
  probe
  misc_feature (1)..(25): SEQ ID NO: 5524; WAN024FZM_at; Start 408; Stop 432
caccttcaggctttttaggatattt

SEQ ID NO: 227423 - DNA, 25 bp, Artificial
  probe
  misc_feature (1)..(25): SEQ ID NO: 5524; WAN024FZM_at; Start 481; Stop 505
aaattccaagcgttcattgtgtgaa

SEQ ID NO: 227424 - DNA, 25 bp, Artificial
  probe
  misc_feature (1)..(25): SEQ ID NO: 5524; WAN024FZM_at; Start 232; Stop 256
caaaagaagggcaccaagaaaggct

SEQ ID NO: 227425 - DNA, 25 bp, Artificial
  probe
  misc_feature (1)..(25): SEQ ID NO: 5524; WAN024FZM_at; Start 500; Stop 524
tgtgaaatttttaagaggcggtgct

SEQ ID NO: 227426 - DNA, 25 bp, Artificial
  probe
  misc_feature (1)..(25): SEQ ID NO: 5524; WAN024FZM_at; Start 453; Stop 477
tcaataactgtagaacagcgtctcc

SEQ ID NO: 227427 - DNA, 25 bp, Artificial
  probe
  misc_feature (1)..(25): SEQ ID NO: 5524; WAN024FZM_at; Start 468; Stop 492
cagcgtctcctaaaaattccaagcg

SEQ ID NO: 227428 - DNA, 25 bp, Artificial
  probe
  misc_feature (1)..(25): SEQ ID NO: 5524; WAN024FZM_at; Start 77; Stop 101
gaaatcacctgataacgaatagcca

SEQ ID NO: 227429 - DNA, 25 bp, Artificial
  probe
  misc_feature (1)..(25): SEQ ID NO: 5524; WAN024FZM_at; Start 1; Stop 25
ttggccttgaccgatgctcttacct

SEQ ID NO: 227430 - DNA, 25 bp, Artificial
  probe
  misc_feature (1)..(25): SEQ ID NO: 5524; WAN024FZM_at; Start 327; Stop 351
taaactggtcaaactggcaatcacg

SEQ ID NO: 227431 - DNA, 25 bp, Artificial
  probe
  misc_feature (1)..(25): SEQ ID NO: 5524; WAN024FZM_at; Start 273; Stop 297
gaatggtgtcacgattgcgaccacc

SEQ ID NO: 227432 - DNA, 25 bp, Artificial
  probe
  misc_feature (1)..(25): SEQ ID NO: 5524; WAN024FZM_at; Start 9; Stop 33
gaccgatgctcttaccttcaacaag

SEQ ID NO: 227433 - DNA, 25 bp, Artificial
  probe
  misc_feature (1)..(25): SEQ ID NO: 5524; WAN024FZM_at; Start 369; Stop 393
tctcctcacggacaatcatagcacg

SEQ ID NO: 227434 - DNA, 25 bp, Artificial
  probe
  misc_feature (1)..(25): SEQ ID NO: 5524; WAN024FZM_at; Start 246; Stop 270
caagaaaggcttcaaaggcatcacc

SEQ ID NO: 227435 - DNA, 25 bp, Artificial
  probe
  misc_feature (1)..(25): SEQ ID NO: 5524; WAN024FZM_at; Start 511; Stop 535
taagaggcggtgctcattggcataa

SEQ ID NO: 227436 - DNA, 25 bp, Artificial
  probe
  misc_feature (1)..(25): SEQ ID NO: 5524; WAN024FZM_at; Start 108; Stop 132
cattgacctgaagcaactcttggag

SEQ ID NO: 227437 - DNA, 25 bp, Artificial
  probe
  misc_feature (1)..(25): SEQ ID NO: 5524; WAN024FZM_at; Start 254; Stop 278
gcttcaaaggcatcaccaagaatgg

SEQ ID NO: 227438 - DNA, 25 bp, Artificial
  probe
  misc_feature (1)..(25): SEQ ID NO: 5524; WAN024FZM_at; Start 114; Stop 138
cctgaagcaactcttggagatgggt

SEQ ID NO: 227439 - DNA, 25 bp, Artificial
  probe
  misc_feature (1)..(25): SEQ ID NO: 5524; WAN024FZM_at; Start 28; Stop 52
aacaagaacttctacatcaaagacc

SEQ ID NO: 227440 - DNA, 25 bp, Artificial
  probe
  misc_feature (1)..(25): SEQ ID NO: 5524; WAN024FZM_at; Start 49; Stop 73
gaccttatcgtgagcaggccctgtt

SEQ ID NO: 227441 - DNA, 25 bp, Artificial
  probe
  misc_feature (1)..(25): SEQ ID NO: 5524; WAN024FZM_at; Start 44; Stop 68
tcaaagaccttatcgtgagcaggcc

SEQ ID NO: 227442 - DNA, 25 bp, Artificial
  probe
  misc_feature (1)..(25): SEQ ID NO: 5524; WAN024FZM_at; Start 375; Stop 399
cacggacaatcatagcacggagttt

SEQ ID NO: 227443 - DNA, 25 bp, Artificial
  probe
  misc_feature (1)..(25): SEQ ID NO: 5524; WAN024FZM_at; Start 136; Stop 160
ggttttatagtctgtaatcatctca

SEQ ID NO: 227444 - DNA, 25 bp, Artificial
  probe
  misc_feature (1)..(25): SEQ ID NO: 5524; WAN024FZM_at; Start 355; Stop 379
aaaaccagctaaactctcctcacgg

SEQ ID NO: 227445 - DNA, 25 bp, Artificial
  probe
  misc_feature (1)..(25): SEQ ID NO: 881; WAN024FZN_at; Start 348; Stop 372
cattcttggtgatgcctttgaagcc

SEQ ID NO: 227446 - DNA, 25 bp, Artificial
  probe
  misc_feature (1)..(25): SEQ ID NO: 881; WAN024FZN_at; Start 100; Stop 124
gagcaccgcctcttaaaaatttcac

SEQ ID NO: 227447 - DNA, 25 bp, Artificial
  probe
  misc_feature (1)..(25): SEQ ID NO: 881; WAN024FZN_at; Start 496; Stop 520
caagagttgcttcaggtcaatggtg

SEQ ID NO: 227448 - DNA, 25 bp, Artificial
  probe
  misc_feature (1)..(25): SEQ ID NO: 881; WAN024FZN_at; Start 596; Stop 620
ttgaaggtaagagcatcggtcaagg

SEQ ID NO: 227449 - DNA, 25 bp, Artificial
  probe
  misc_feature (1)..(25): SEQ ID NO: 881; WAN024FZN_at; Start 232; Stop 256
cgtgctatgattgtccgtgaggaga

SEQ ID NO: 227450 - DNA, 25 bp, Artificial
  probe
  misc_feature (1)..(25): SEQ ID NO: 881; WAN024FZN_at; Start 198; Stop 222
tcctaaaaagcctgaaggtgaccta

SEQ ID NO: 227451 - DNA, 25 bp, Artificial
  probe
  misc_feature (1)..(25): SEQ ID NO: 881; WAN024FZN_at; Start 82; Stop 106
catacgagttatgccaatgagcacc

SEQ ID NO: 227452 - DNA, 25 bp, Artificial
  probe
  misc_feature (1)..(25): SEQ ID NO: 881; WAN024FZN_at; Start 65; Stop 89
tggaaactgcctttactcatacgag

SEQ ID NO: 227453 - DNA, 25 bp, Artificial
  probe
  misc_feature (1)..(25): SEQ ID NO: 881; WAN024FZN_at; Start 679; Stop 703
gggctggattcatgtatttaactaa

SEQ ID NO: 227454 - DNA, 25 bp, Artificial
  probe
  misc_feature (1)..(25): SEQ ID NO: 881; WAN024FZN_at; Start 224; Stop 248
caaaactccgtgctatgattgtccg

SEQ ID NO: 227455 - DNA, 25 bp, Artificial
  probe
  misc_feature (1)..(25): SEQ ID NO: 881; WAN024FZN_at; Start 369; Stop 393
agcctttcttggtgcccttcttttg

SEQ ID NO: 227456 - DNA, 25 bp, Artificial
  probe
  misc_feature (1)..(25): SEQ ID NO: 881; WAN024FZN_at; Start 193; Stop 217
aaatatcctaaaaagcctgaaggtg

SEQ ID NO: 227457 - DNA, 25 bp, Artificial
  probe
  misc_feature (1)..(25): SEQ ID NO: 881; WAN024FZN_at; Start 481; Stop 505
tataaaacccatctccaagagttgc

SEQ ID NO: 227458 - DNA, 25 bp, Artificial
  probe
  misc_feature (1)..(25): SEQ ID NO: 881; WAN024FZN_at; Start 148; Stop 172
ggagacgctgttctacagttattga

SEQ ID NO: 227459 - DNA, 25 bp, Artificial
  probe
  misc_feature (1)..(25): SEQ ID NO: 881; WAN024FZN_at; Start 361; Stop 385
gcctttgaagcctttcttggtgccc

SEQ ID NO: 227460 - DNA, 25 bp, Artificial
  probe
  misc_feature (1)..(25): SEQ ID NO: 881; WAN024FZN_at; Start 2; Stop 26
tgaaagaattacaaactgtactaaa

SEQ ID NO: 227461 - DNA, 25 bp, Artificial
  probe
  misc_feature (1)..(25): SEQ ID NO: 881; WAN024FZN_at; Start 648; Stop 672
gcaggaagctgccaaaaatgccgtt

SEQ ID NO: 227462 - DNA, 25 bp, Artificial
  probe
  misc_feature (1)..(25): SEQ ID NO: 881; WAN024FZN_at; Start 513; Stop 537
caatggtgatgtggctattcgttat

SEQ ID NO: 227463 - DNA, 25 bp, Artificial
  probe
  misc_feature (1)..(25): SEQ ID NO: 881; WAN024FZN_at; Start 211; Stop 235
gaaggtgacctatcaaaactccgtg

SEQ ID NO: 227464 - DNA, 25 bp, Artificial
  probe
  misc_feature (1)..(25): SEQ ID NO: 881; WAN024FZN_at; Start 277; Stop 301
gattgccagtttgaccagtttatca

SEQ ID NO: 227465 - DNA, 25 bp, Artificial
  probe
  misc_feature (1)..(25): SEQ ID NO: 881; WAN024FZN_at; Start 582; Stop 606
tgtagaagttcttgttgaaggtaag

SEQ ID NO: 227466 - DNA, 25 bp, Artificial
  probe
  misc_feature (1)..(25): SEQ ID NO: 881; WAN024FZN_at; Start 115; Stop 139
aaaatttcacacaatgaacgcttgg

SEQ ID NO: 227467 - DNA, 25 bp, Artificial
  probe
  misc_feature (1)..(25): SEQ ID NO: 881; WAN024FZN_at; Start 652; Stop 676
gaagctgccaaaaatgccgttgaga

SEQ ID NO: 227468 - DNA, 25 bp, Artificial
  probe
  misc_feature (1)..(25): SEQ ID NO: 881; WAN024FZN_at; Start 160; Stop 184
ctacagttattgatttcagaatatc

SEQ ID NO: 227469 - DNA, 25 bp, Artificial
  probe
  misc_feature (1)..(25): SEQ ID NO: 881; WAN024FZN_at; Start 622; Stop 646
caaggtcgttctaagaaattagcag

SEQ ID NO: 227470 - DNA, 25 bp, Artificial
  probe
  misc_feature (1)..(25): SEQ ID NO: 881; WAN024FZN_at; Start 87; Stop 111
gagttatgccaatgagcaccgcctc

SEQ ID NO: 227471 - DNA, 25 bp, Artificial
  probe
  misc_feature (1)..(25): SEQ ID NO: 881; WAN024FZN_at; Start 592; Stop 616
cttgttgaaggtaagagcatcggtc

SEQ ID NO: 227472 - DNA, 25 bp, Artificial
  probe
  misc_feature (1)..(25): SEQ ID NO: 881; WAN024FZN_at; Start 129; Stop 153
tgaacgcttggaatttttaggagac

SEQ ID NO: 227473 - DNA, 25 bp, Artificial
  probe
  misc_feature (1)..(25): SEQ ID NO: 881; WAN024FZN_at; Start 490; Stop 514
catctccaagagttgcttcaggtca

SEQ ID NO: 227474 - DNA, 25 bp, Artificial
  probe
  misc_feature (1)..(25): SEQ ID NO: 881; WAN024FZN_at; Start 139; Stop 163
gaatttttaggagacgctgttctac

SEQ ID NO: 227475 - DNA, 25 bp, Artificial
  probe
  misc_feature (1)..(25): SEQ ID NO: 881; WAN024FZN_at; Start 268; Stop 292
tttgcgcgtgattgccagtttgacc

SEQ ID NO: 227476 - DNA, 25 bp, Artificial
  probe
  misc_feature (1)..(25): SEQ ID NO: 881; WAN024FZN_at; Start 466; Stop 490
gagatgattacagactataaaaccc

SEQ ID NO: 227477 - DNA, 25 bp, Artificial
  probe
  misc_feature (1)..(25): SEQ ID NO: 881; WAN024FZN_at; Start 508; Stop 532
caggtcaatggtgatgtggctattc

SEQ ID NO: 227478 - DNA, 25 bp, Artificial
  probe
  misc_feature (1)..(25): SEQ ID NO: 881; WAN024FZN_at; Start 636; Stop 660
gaaattagcagagcaggaagctgcc

SEQ ID NO: 227479 - DNA, 25 bp, Artificial
  probe
  misc_feature (1)..(25): SEQ ID NO: 4234; WAN024FZO_at; Start 197; Stop 221
cggaaaatttgttcttcgtcaaatg

SEQ ID NO: 227480 - DNA, 25 bp, Artificial
  probe
  misc_feature (1)..(25): SEQ ID NO: 4234; WAN024FZO_at; Start 183; Stop 207
gataatggtcgatacggaaaatttg

SEQ ID NO: 227481 - DNA, 25 bp, Artificial
  probe
  misc_feature (1)..(25): SEQ ID NO: 4234; WAN024FZO_at; Start 12; Stop 36
ccatgtcacggagggcaccggattg

SEQ ID NO: 227482 - DNA, 25 bp, Artificial
  probe
  misc_feature (1)..(25): SEQ ID NO: 4234; WAN024FZO_at; Start 93; Stop 117
cattgtcgataaaatccttgttcca

SEQ ID NO: 227483 - DNA, 25 bp, Artificial
  probe
  misc_feature (1)..(25): SEQ ID NO: 4234; WAN024FZO_at; Start 41; Stop 65
tagtagccaccacgttcttctacac

SEQ ID NO: 227484 - DNA, 25 bp, Artificial
  probe
  misc_feature (1)..(25): SEQ ID NO: 4234; WAN024FZO_at; Start 4; Stop 28
gttttggaccatgtcacggagggca

SEQ ID NO: 227485 - DNA, 25 bp, Artificial
  probe
  misc_feature (1)..(25): SEQ ID NO: 4234; WAN024FZO_at; Start 193; Stop 217
gatacggaaaatttgttcttcgtca

SEQ ID NO: 227486 - DNA, 25 bp, Artificial
  probe
  misc_feature (1)..(25): SEQ ID NO: 4234; WAN024FZO_at; Start 29; Stop 53
ccggattggtcatagtagccaccac

SEQ ID NO: 227487 - DNA, 25 bp, Artificial
  probe
  misc_feature (1)..(25): SEQ ID NO: 4234; WAN024FZO_at; Start 78; Stop 102
caaaggtaatttgaacattgtcgat

SEQ ID NO: 227488 - DNA, 25 bp, Artificial
  probe
  misc_feature (1)..(25): SEQ ID NO: 4234; WAN024FZO_at; Start 38; Stop 62
tcatagtagccaccacgttcttcta

SEQ ID NO: 227489 - DNA, 25 bp, Artificial
  probe
  misc_feature (1)..(25): SEQ ID NO: 4234; WAN024FZO_at; Start 70; Stop 94
gcgctccgcaaaggtaatttgaaca

SEQ ID NO: 227490 - DNA, 25 bp, Artificial
  probe
  misc_feature (1)..(25): SEQ ID NO: 4234; WAN024FZO_at; Start 157; Stop 181
gatgctttggatcatttccttacca

SEQ ID NO: 227491 - DNA, 25 bp, Artificial
  probe
  misc_feature (1)..(25): SEQ ID NO: 4234; WAN024FZO_at; Start 169; Stop 193
catttccttaccaagataatggtcg

SEQ ID NO: 227492 - DNA, 25 bp, Artificial
  probe
  misc_feature (1)..(25): SEQ ID NO: 4234; WAN024FZO_at; Start 143; Stop 167
aagcgaactgcaaagatgctttgga

SEQ ID NO: 227493 - DNA, 25 bp, Artificial
  probe
  misc_feature (1)..(25): SEQ ID NO: 4234; WAN024FZO_at; Start 6; Stop 30
tttggaccatgtcacggagggcacc

SEQ ID NO: 227494 - DNA, 25 bp, Artificial
  probe
  misc_feature (1)..(25): SEQ ID NO: 4234; WAN024FZO_at; Start 88; Stop 112
ttgaacattgtcgataaaatccttg

SEQ ID NO: 227495 - DNA, 25 bp, Artificial
  probe
  misc_feature (1)..(25): SEQ ID NO: 4234; WAN024FZO_at; Start 139; Stop 163
tgcaaagcgaactgcaaagatgctt

SEQ ID NO: 227496 - DNA, 25 bp, Artificial
  probe
  misc_feature (1)..(25): SEQ ID NO: 4234; WAN024FZO_at; Start 32; Stop 56
gattggtcatagtagccaccacgtt

SEQ ID NO: 227497 - DNA, 25 bp, Artificial
  probe
  misc_feature (1)..(25): SEQ ID NO: 4234; WAN024FZO_at; Start 174; Stop 198
ccttaccaagataatggtcgatacg

SEQ ID NO: 227498 - DNA, 25 bp, Artificial
  probe
  misc_feature (1)..(25): SEQ ID NO: 4234; WAN024FZO_at; Start 74; Stop 98
tccgcaaaggtaatttgaacattgt

SEQ ID NO: 227499 - DNA, 25 bp, Artificial
  probe
  misc_feature (1)..(25): SEQ ID NO: 4234; WAN024FZO_at; Start 166; Stop 190
gatcatttccttaccaagataatgg

SEQ ID NO: 227500 - DNA, 25 bp, Artificial
  probe
  misc_feature (1)..(25): SEQ ID NO: 4234; WAN024FZO_at; Start 133; Stop 157
caagtttgcaaagcgaactgcaaag

SEQ ID NO: 227501 - DNA, 25 bp, Artificial
  probe
  misc_feature (1)..(25): SEQ ID NO: 4234; WAN024FZO_at; Start 146; Stop 170
cgaactgcaaagatgctttggatca

SEQ ID NO: 227502 - DNA, 25 bp, Artificial
  probe
  misc_feature (1)..(25): SEQ ID NO: 4234; WAN024FZO_at; Start 67; Stop 91
caagcgctccgcaaaggtaatttga

SEQ ID NO: 227503 - DNA, 25 bp, Artificial
  probe
  misc_feature (1)..(25): SEQ ID NO: 4234; WAN024FZO_at; Start 63; Stop 87
cacccaagcgctccgcaaaggtaat

SEQ ID NO: 227504 - DNA, 25 bp, Artificial
  probe
  misc_feature (1)..(25): SEQ ID NO: 4234; WAN024FZO_at; Start 48; Stop 72
caccacgttcttctacacccaagcg

SEQ ID NO: 227505 - DNA, 25 bp, Artificial
  probe
  misc_feature (1)..(25): SEQ ID NO: 4234; WAN024FZO_at; Start 160; Stop 184
gctttggatcatttccttaccaaga

SEQ ID NO: 227506 - DNA, 25 bp, Artificial
  probe
  misc_feature (1)..(25): SEQ ID NO: 4234; WAN024FZO_at; Start 36; Stop 60
ggtcatagtagccaccacgttcttc

SEQ ID NO: 227507 - DNA, 25 bp, Artificial
  probe
  misc_feature (1)..(25): SEQ ID NO: 4234; WAN024FZO_at; Start 129; Stop 153
aaatcaagtttgcaaagcgaactgc

SEQ ID NO: 227508 - DNA, 25 bp, Artificial
  probe
  misc_feature (1)..(25): SEQ ID NO: 4234; WAN024FZO_at; Start 26; Stop 50
gcaccggattggtcatagtagccac

SEQ ID NO: 227509 - DNA, 25 bp, Artificial
  probe
  misc_feature (1)..(25): SEQ ID NO: 4234; WAN024FZO_at; Start 23; Stop 47
agggcaccggattggtcatagtagc

SEQ ID NO: 227510 - DNA, 25 bp, Artificial
  probe
  misc_feature (1)..(25): SEQ ID NO: 4234; WAN024FZO_at; Start 179; Stop 203
ccaagataatggtcgatacggaaaa

SEQ ID NO: 227511 - DNA, 25 bp, Artificial
  probe
  misc_feature (1)..(25): SEQ ID NO: 4234; WAN024FZO_at; Start 152; Stop 176
gcaaagatgctttggatcatttcct

SEQ ID NO: 227512 - DNA, 25 bp, Artificial
  probe
  misc_feature (1)..(25): SEQ ID NO: 4234; WAN024FZO_at; Start 96; Stop 120
tgtcgataaaatccttgttccaaac

SEQ ID NO: 227513 - DNA, 25 bp, Artificial
  probe
  misc_feature (1)..(25): SEQ ID NO: 2878; WAN024FZP_at; Start 688; Stop 712
ggtgccctccgtgacatggtccaaa

SEQ ID NO: 227514 - DNA, 25 bp, Artificial
  probe
  misc_feature (1)..(25): SEQ ID NO: 2878; WAN024FZP_at; Start 1375; Stop 1399
tataaagctggaagcatgggacctc

SEQ ID NO: 227515 - DNA, 25 bp, Artificial
  probe
  misc_feature (1)..(25): SEQ ID NO: 2878; WAN024FZP_at; Start 39; Stop 63
tggagacctggctaaacgcaagctc

SEQ ID NO: 227516 - DNA, 25 bp, Artificial
  probe
  misc_feature (1)..(25): SEQ ID NO: 2878; WAN024FZP_at; Start 658; Stop 682
gaagaacgtggtggctactatgacc

SEQ ID NO: 227517 - DNA, 25 bp, Artificial
  probe
  misc_feature (1)..(25): SEQ ID NO: 2878; WAN024FZP_at; Start 1357; Stop 1381
ggtgccccacttcatgactataaag

SEQ ID NO: 227518 - DNA, 25 bp, Artificial
  probe
  misc_feature (1)..(25): SEQ ID NO: 2878; WAN024FZP_at; Start 817; Stop 841
catccaactgatgaagaactcaaag

SEQ ID NO: 227519 - DNA, 25 bp, Artificial
  probe
  misc_feature (1)..(25): SEQ ID NO: 2878; WAN024FZP_at; Start 263; Stop 287
cggaacattatattgctttgcgtca

SEQ ID NO: 227520 - DNA, 25 bp, Artificial
  probe
  misc_feature (1)..(25): SEQ ID NO: 2878; WAN024FZP_at; Start 1341; Stop 1365
gctctgggctgaaaatggtgcccca

SEQ ID NO: 227521 - DNA, 25 bp, Artificial
  probe
  misc_feature (1)..(25): SEQ ID NO: 2878; WAN024FZP_at; Start 481; Stop 505
gacgaactcctagcaacatttgacg

SEQ ID NO: 227522 - DNA, 25 bp, Artificial
  probe
  misc_feature (1)..(25): SEQ ID NO: 2878; WAN024FZP_at; Start 110; Stop 134
actttgccgttattggaactgcccg

SEQ ID NO: 227523 - DNA, 25 bp, Artificial
  probe
  misc_feature (1)..(25): SEQ ID NO: 2878; WAN024FZP_at; Start 420; Stop 444
tgagcgcttgatcgttgaaaaacca

SEQ ID NO: 227524 - DNA, 25 bp, Artificial
  probe
  misc_feature (1)..(25): SEQ ID NO: 2878; WAN024FZP_at; Start 125; Stop 149
gaactgcccgtagaccttggagtaa

SEQ ID NO: 227525 - DNA, 25 bp, Artificial
  probe
  misc_feature (1)..(25): SEQ ID NO: 2878; WAN024FZP_at; Start 183; Stop 207
ccttgatttggcagatagtaccgag

SEQ ID NO: 227526 - DNA, 25 bp, Artificial
  probe
  misc_feature (1)..(25): SEQ ID NO: 2878; WAN024FZP_at; Start 1419; Stop 1443
tgaaaaattcggtgccaaatggact

SEQ ID NO: 227527 - DNA, 25 bp, Artificial
  probe
  misc_feature (1)..(25): SEQ ID NO: 2878; WAN024FZP_at; Start 1402; Stop 1426
gccagctttgacctacttgaaaaat

SEQ ID NO: 227528 - DNA, 25 bp, Artificial
  probe
  misc_feature (1)..(25): SEQ ID NO: 2878; WAN024FZP_at; Start 777; Stop 801
gattcgtgctgaaaagattaaggtc

SEQ ID NO: 227529 - DNA, 25 bp, Artificial
  probe
  misc_feature (1)..(25): SEQ ID NO: 2878; WAN024FZP_at; Start 1388; Stop 1412
gcatgggacctcaagccagctttga

SEQ ID NO: 227530 - DNA, 25 bp, Artificial
  probe
  misc_feature (1)..(25): SEQ ID NO: 2878; WAN024FZP_at; Start 606; Stop 630
caaggattttatcgacaatgttcaa

SEQ ID NO: 227531 - DNA, 25 bp, Artificial
  probe
  misc_feature (1)..(25): SEQ ID NO: 2878; WAN024FZP_at; Start 22; Stop 46
acaattttcggtgcgagtggagacc

SEQ ID NO: 227532 - DNA, 25 bp, Artificial
  probe
  misc_feature (1)..(25): SEQ ID NO: 2878; WAN024FZP_at; Start 367; Stop 391
ggaaccattgccaaacacctcaaat

SEQ ID NO: 227533 - DNA, 25 bp, Artificial
  probe
  misc_feature (1)..(25): SEQ ID NO: 2878; WAN024FZP_at; Start 440; Stop 464
aaccatttggtacagattacgcaac

SEQ ID NO: 227534 - DNA, 25 bp, Artificial
  probe
  misc_feature (1)..(25): SEQ ID NO: 2878; WAN024FZP_at; Start 91; Stop 115
tccggcaatctttccaagcactttg

SEQ ID NO: 227535 - DNA, 25 bp, Artificial
  probe
  misc_feature (1)..(25): SEQ ID NO: 2878; WAN024FZP_at; Start 671; Stop 695
gctactatgaccaatccggtgccct

SEQ ID NO: 227536 - DNA, 25 bp, Artificial
  probe
  misc_feature (1)..(25): SEQ ID NO: 2878; WAN024FZP_at; Start 198; Stop 222
tagtaccgagcaagcccaagaattt

SEQ ID NO: 227537 - DNA, 25 bp, Artificial
  probe
  misc_feature (1)..(25): SEQ ID NO: 2878; WAN024FZP_at; Start 725; Stop 749
aacttctttcgctcctcgccatgga

SEQ ID NO: 227538 - DNA, 25 bp, Artificial
  probe
  misc_feature (1)..(25): SEQ ID NO: 2878; WAN024FZP_at; Start 330; Stop 354
taagctcttcttcttgtctatggca

SEQ ID NO: 227539 - DNA, 25 bp, Artificial
  probe
  misc_feature (1)..(25): SEQ ID NO: 2878; WAN024FZP_at; Start 241; Stop 265
caaagccatgatgtcaatgattcgg

SEQ ID NO: 227540 - DNA, 25 bp, Artificial
  probe
  misc_feature (1)..(25): SEQ ID NO: 2878; WAN024FZP_at; Start 160; Stop 184
gaatctgtagttgtcgagtccatcc

SEQ ID NO: 227541 - DNA, 25 bp, Artificial
  probe
  misc_feature (1)..(25): SEQ ID NO: 2878; WAN024FZP_at; Start 278; Stop 302
ctttgcgtcaattacaagctgagct

SEQ ID NO: 227542 - DNA, 25 bp, Artificial
  probe
  misc_feature (1)..(25): SEQ ID NO: 2878; WAN024FZP_at; Start 292; Stop 316
caagctgagcttaatgaaaaatacc

SEQ ID NO: 227543 - DNA, 25 bp, Artificial
  probe
  misc_feature (1)..(25): SEQ ID NO: 2878; WAN024FZP_at; Start 628; Stop 652
caaattacctttgcggagcgcttgg

SEQ ID NO: 227544 - DNA, 25 bp, Artificial
  probe
  misc_feature (1)..(25): SEQ ID NO: 2878; WAN024FZP_at; Start 762; Stop 786
cttcacaaaagacgagattcgtgct

SEQ ID NO: 227545 - DNA, 25 bp, Artificial
  probe
  misc_feature (1)..(25): SEQ ID NO: 2878; WAN024FZP_at; Start 348; Stop 372
tatggcacctcagttctttggaacc

SEQ ID NO: 227546 - DNA, 25 bp, Artificial
  probe
  misc_feature (1)..(25): SEQ ID NO: 2878; WAN024FZP_at; Start 391; Stop 415
tctgaaaacattgtcgatggcaaag

SEQ ID NO: 227547 - DNA, 25 bp, Artificial
  probe
  misc_feature (1)..(25): SEQ ID NO: 5603; WAN024FZQ_at; Start 205; Stop 229
aactggaacggcctgaataccacca

SEQ ID NO: 227548 - DNA, 25 bp, Artificial
  probe
  misc_feature (1)..(25): SEQ ID NO: 5603; WAN024FZQ_at; Start 222; Stop 246
taccaccacgaacgatttcagcgat

SEQ ID NO: 227549 - DNA, 25 bp, Artificial
  probe
  misc_feature (1)..(25): SEQ ID NO: 5603; WAN024FZQ_at; Start 43; Stop 67
ttcaaccaaaccgatagcagatacg

SEQ ID NO: 227550 - DNA, 25 bp, Artificial
  probe
  misc_feature (1)..(25): SEQ ID NO: 5603; WAN024FZQ_at; Start 167; Stop 191
taagagatacccaagcttcggctgg

SEQ ID NO: 227551 - DNA, 25 bp, Artificial
  probe
  misc_feature (1)..(25): SEQ ID NO: 5603; WAN024FZQ_at; Start 200; Stop 224
tggccaactggaacggcctgaatac

SEQ ID NO: 227552 - DNA, 25 bp, Artificial
  probe
  misc_feature (1)..(25): SEQ ID NO: 5603; WAN024FZQ_at; Start 163; Stop 187
tccataagagatacccaagcttcgg

SEQ ID NO: 227553 - DNA, 25 bp, Artificial
  probe
  misc_feature (1)..(25): SEQ ID NO: 5603; WAN024FZQ_at; Start 219; Stop 243
gaataccaccacgaacgatttcagc

SEQ ID NO: 227554 - DNA, 25 bp, Artificial
  probe
  misc_feature (1)..(25): SEQ ID NO: 5603; WAN024FZQ_at; Start 239; Stop 263
tcagcgatataagcagccgcattga

SEQ ID NO: 227555 - DNA, 25 bp, Artificial
  probe
  misc_feature (1)..(25): SEQ ID NO: 5603; WAN024FZQ_at; Start 99; Stop 123
ggttgacaaagtttggcaacatcaa

SEQ ID NO: 227556 - DNA, 25 bp, Artificial
  probe
  misc_feature (1)..(25): SEQ ID NO: 5603; WAN024FZQ_at; Start 196; Stop 220
catttggccaactggaacggcctga

SEQ ID NO: 227557 - DNA, 25 bp, Artificial
  probe
  misc_feature (1)..(25): SEQ ID NO: 5603; WAN024FZQ_at; Start 24; Stop 48
tcttaccagtttggaagagttcaac

SEQ ID NO: 227558 - DNA, 25 bp, Artificial
  probe
  misc_feature (1)..(25): SEQ ID NO: 5603; WAN024FZQ_at; Start 154; Stop 178
catggtttttccataagagataccc

SEQ ID NO: 227559 - DNA, 25 bp, Artificial
  probe
  misc_feature (1)..(25): SEQ ID NO: 5603; WAN024FZQ_at; Start 187; Stop 211
gctggcttccatttggccaactgga

SEQ ID NO: 227560 - DNA, 25 bp, Artificial
  probe
  misc_feature (1)..(25): SEQ ID NO: 5603; WAN024FZQ_at; Start 235; Stop 259
gatttcagcgatataagcagccgca

SEQ ID NO: 227561 - DNA, 25 bp, Artificial
  probe
  misc_feature (1)..(25): SEQ ID NO: 5603; WAN024FZQ_at; Start 8; Stop 32
ttacgagcaatgataatcttaccag

SEQ ID NO: 227562 - DNA, 25 bp, Artificial
  probe
  misc_feature (1)..(25): SEQ ID NO: 5603; WAN024FZQ_at; Start 14; Stop 38
gcaatgataatcttaccagtttgga

SEQ ID NO: 227563 - DNA, 25 bp, Artificial
  probe
  misc_feature (1)..(25): SEQ ID NO: 5603; WAN024FZQ_at; Start 242; Stop 266
gcgatataagcagccgcattgagtg

SEQ ID NO: 227564 - DNA, 25 bp, Artificial
  probe
  misc_feature (1)..(25): SEQ ID NO: 5603; WAN024FZQ_at; Start 178; Stop 202
caagcttcggctggcttccatttgg

SEQ ID NO: 227565 - DNA, 25 bp, Artificial
  probe
  misc_feature (1)..(25): SEQ ID NO: 5603; WAN024FZQ_at; Start 40; Stop 64
gagttcaaccaaaccgatagcagat

SEQ ID NO: 227566 - DNA, 25 bp, Artificial
  probe
  misc_feature (1)..(25): SEQ ID NO: 5603; WAN024FZQ_at; Start 214; Stop 238
ggcctgaataccaccacgaacgatt

SEQ ID NO: 227567 - DNA, 25 bp, Artificial
  probe
  misc_feature (1)..(25): SEQ ID NO: 5603; WAN024FZQ_at; Start 2; Stop 26
tggtagttacgagcaatgataatct

SEQ ID NO: 227568 - DNA, 25 bp, Artificial
  probe
  misc_feature (1)..(25): SEQ ID NO: 5603; WAN024FZQ_at; Start 84; Stop 108
gagcgataacgaattggttgacaaa

SEQ ID NO: 227569 - DNA, 25 bp, Artificial
  probe
  misc_feature (1)..(25): SEQ ID NO: 5603; WAN024FZQ_at; Start 170; Stop 194
gagatacccaagcttcggctggctt

SEQ ID NO: 227570 - DNA, 25 bp, Artificial
  probe
  misc_feature (1)..(25): SEQ ID NO: 5603; WAN024FZQ_at; Start 64; Stop 88
tacgatagttgtatctttaagagcg

SEQ ID NO: 227571 - DNA, 25 bp, Artificial
  probe
  misc_feature (1)..(25): SEQ ID NO: 5603; WAN024FZQ_at; Start 36; Stop 60
ggaagagttcaaccaaaccgatagc

SEQ ID NO: 227572 - DNA, 25 bp, Artificial
  probe
  misc_feature (1)..(25): SEQ ID NO: 5603; WAN024FZQ_at; Start 142; Stop 166
gataatcttacgcatggtttttcca

SEQ ID NO: 227573 - DNA, 25 bp, Artificial
  probe
  misc_feature (1)..(25): SEQ ID NO: 5603; WAN024FZQ_at; Start 27; Stop 51
taccagtttggaagagttcaaccaa

SEQ ID NO: 227574 - DNA, 25 bp, Artificial
  probe
  misc_feature (1)..(25): SEQ ID NO: 5603; WAN024FZQ_at; Start 93; Stop 117
cgaattggttgacaaagtttggcaa

SEQ ID NO: 227575 - DNA, 25 bp, Artificial
  probe
  misc_feature (1)..(25): SEQ ID NO: 5603; WAN024FZQ_at; Start 48; Stop 72
ccaaaccgatagcagatacgatagt

SEQ ID NO: 227576 - DNA, 25 bp, Artificial
  probe
  misc_feature (1)..(25): SEQ ID NO: 5603; WAN024FZQ_at; Start 77; Stop 101
tctttaagagcgataacgaattggt

SEQ ID NO: 227577 - DNA, 25 bp, Artificial
  probe
  misc_feature (1)..(25): SEQ ID NO: 5603; WAN024FZQ_at; Start 105; Stop 129
caaagtttggcaacatcaatttagt

SEQ ID NO: 227578 - DNA, 25 bp, Artificial
  probe
  misc_feature (1)..(25): SEQ ID NO: 5603; WAN024FZQ_at; Start 228; Stop 252
cacgaacgatttcagcgatataagc

SEQ ID NO: 227579 - DNA, 25 bp, Artificial
  probe
  misc_feature (1)..(25): SEQ ID NO: 5603; WAN024FZQ_at; Start 52; Stop 76
accgatagcagatacgatagttgta

SEQ ID NO: 227580 - DNA, 25 bp, Artificial
  probe
  misc_feature (1)..(25): SEQ ID NO: 5603; WAN024FZQ_at; Start 134; Stop 158
tgtggcaagataatcttacgcatgg

SEQ ID NO: 227581 - DNA, 25 bp, Artificial
  probe
  misc_feature (1)..(25): SEQ ID NO: 2705; WAN024FZR_at; Start 225; Stop 249
tagagcaagagtgataccaagaccg

SEQ ID NO: 227582 - DNA, 25 bp, Artificial
  probe
  misc_feature (1)..(25): SEQ ID NO: 2705; WAN024FZR_at; Start 180; Stop 204
gaagataattccgatgacaatggca

SEQ ID NO: 227583 - DNA, 25 bp, Artificial
  probe
  misc_feature (1)..(25): SEQ ID NO: 2705; WAN024FZR_at; Start 145; Stop 169
cgaagagatttgtatgggctaacgc

SEQ ID NO: 227584 - DNA, 25 bp, Artificial
  probe
  misc_feature (1)..(25): SEQ ID NO: 2705; WAN024FZR_at; Start 102; Stop 126
tggaataccacgaataacgtcaacg

SEQ ID NO: 227585 - DNA, 25 bp, Artificial
  probe
  misc_feature (1)..(25): SEQ ID NO: 2705; WAN024FZR_at; Start 189; Stop 213
tccgatgacaatggcaatagcaaat

SEQ ID NO: 227586 - DNA, 25 bp, Artificial
  probe
  misc_feature (1)..(25): SEQ ID NO: 2705; WAN024FZR_at; Start 89; Stop 113
caagaatcatcaatggaataccacg

SEQ ID NO: 227587 - DNA, 25 bp, Artificial
  probe
  misc_feature (1)..(25): SEQ ID NO: 2705; WAN024FZR_at; Start 174; Stop 198
cataccgaagataattccgatgaca

SEQ ID NO: 227588 - DNA, 25 bp, Artificial
  probe
  misc_feature (1)..(25): SEQ ID NO: 2705; WAN024FZR_at; Start 168; Stop 192
gctaaacataccgaagataattccg

SEQ ID NO: 227589 - DNA, 25 bp, Artificial
  probe
  misc_feature (1)..(25): SEQ ID NO: 2705; WAN024FZR_at; Start 37; Stop 61
tggcctgtgatagactcgatgaagt

SEQ ID NO: 227590 - DNA, 25 bp, Artificial
  probe
  misc_feature (1)..(25): SEQ ID NO: 2705; WAN024FZR_at; Start 20; Stop 44
cgttaattgggctttgttggcctgt

SEQ ID NO: 227591 - DNA, 25 bp, Artificial
  probe
  misc_feature (1)..(25): SEQ ID NO: 2705; WAN024FZR_at; Start 54; Stop 78
gatgaagtttggaattccccagaag

SEQ ID NO: 227592 - DNA, 25 bp, Artificial
  probe
  misc_feature (1)..(25): SEQ ID NO: 2705; WAN024FZR_at; Start 134; Stop 158
cagagatgacgcgaagagatttgta

SEQ ID NO: 227593 - DNA, 25 bp, Artificial
  probe
  misc_feature (1)..(25): SEQ ID NO: 2705; WAN024FZR_at; Start 81; Stop 105
gaaggctgcaagaatcatcaatgga

SEQ ID NO: 227594 - DNA, 25 bp, Artificial
  probe
  misc_feature (1)..(25): SEQ ID NO: 2705; WAN024FZR_at; Start 62; Stop 86
ttggaattccccagaagatgaaggc

SEQ ID NO: 227595 - DNA, 25 bp, Artificial
  probe
  misc_feature (1)..(25): SEQ ID NO: 2705; WAN024FZR_at; Start 229; Stop 253
gcaagagtgataccaagaccgctaa

SEQ ID NO: 227596 - DNA, 25 bp, Artificial
  probe
  misc_feature (1)..(25): SEQ ID NO: 2705; WAN024FZR_at; Start 125; Stop 149
cgaaaatctcagagatgacgcgaag

SEQ ID NO: 227597 - DNA, 25 bp, Artificial
  probe
  misc_feature (1)..(25): SEQ ID NO: 2705; WAN024FZR_at; Start 69; Stop 93
tccccagaagatgaaggctgcaaga

SEQ ID NO: 227598 - DNA, 25 bp, Artificial
  probe
  misc_feature (1)..(25): SEQ ID NO: 2705; WAN024FZR_at; Start 242; Stop 266
caagaccgctaaggagttgtttgta

SEQ ID NO: 227599 - DNA, 25 bp, Artificial
  probe
  misc_feature (1)..(25): SEQ ID NO: 2705; WAN024FZR_at; Start 233; Stop 257
gagtgataccaagaccgctaaggag

SEQ ID NO: 227600 - DNA, 25 bp, Artificial
  probe
  misc_feature (1)..(25): SEQ ID NO: 2705; WAN024FZR_at; Start 161; Stop 185
ggctaacgctaaacataccgaagat

SEQ ID NO: 227601 - DNA, 25 bp, Artificial
  probe
  misc_feature (1)..(25): SEQ ID NO: 2705; WAN024FZR_at; Start 65; Stop 89
gaattccccagaagatgaaggctgc

SEQ ID NO: 227602 - DNA, 25 bp, Artificial
  probe
  misc_feature (1)..(25): SEQ ID NO: 2705; WAN024FZR_at; Start 49; Stop 73
gactcgatgaagtttggaattcccc

SEQ ID NO: 227603 - DNA, 25 bp, Artificial
  probe
  misc_feature (1)..(25): SEQ ID NO: 2705; WAN024FZR_at; Start 30; Stop 54
gctttgttggcctgtgatagactcg

SEQ ID NO: 227604 - DNA, 25 bp, Artificial
  probe
  misc_feature (1)..(25): SEQ ID NO: 2705; WAN024FZR_at; Start 185; Stop 209
taattccgatgacaatggcaatagc

SEQ ID NO: 227605 - DNA, 25 bp, Artificial
  probe
  misc_feature (1)..(25): SEQ ID NO: 2705; WAN024FZR_at; Start 116; Stop 140
taacgtcaacgaaaatctcagagat

SEQ ID NO: 227606 - DNA, 25 bp, Artificial
  probe
  misc_feature (1)..(25): SEQ ID NO: 2705; WAN024FZR_at; Start 209; Stop 233
caaatgagataagagctagagcaag

SEQ ID NO: 227607 - DNA, 25 bp, Artificial
  probe
  misc_feature (1)..(25): SEQ ID NO: 2705; WAN024FZR_at; Start 1; Stop 25
atggttccagctacaaagtcgttaa

SEQ ID NO: 227608 - DNA, 25 bp, Artificial
  probe
  misc_feature (1)..(25): SEQ ID NO: 2705; WAN024FZR_at; Start 34; Stop 58
tgttggcctgtgatagactcgatga

SEQ ID NO: 227609 - DNA, 25 bp, Artificial
  probe
  misc_feature (1)..(25): SEQ ID NO: 2705; WAN024FZR_at; Start 72; Stop 96
ccagaagatgaaggctgcaagaatc

SEQ ID NO: 227610 - DNA, 25 bp, Artificial
  probe
  misc_feature (1)..(25): SEQ ID NO: 2705; WAN024FZR_at; Start 98; Stop 122
tcaatggaataccacgaataacgtc

SEQ ID NO: 227611 - DNA, 25 bp, Artificial
  probe
  misc_feature (1)..(25): SEQ ID NO: 2705; WAN024FZR_at; Start 218; Stop 242
taagagctagagcaagagtgatacc

SEQ ID NO: 227612 - DNA, 25 bp, Artificial
  probe
  misc_feature (1)..(25): SEQ ID NO: 2705; WAN024FZR_at; Start 8; Stop 32
cagctacaaagtcgttaattgggct

SEQ ID NO: 227613 - DNA, 25 bp, Artificial
  probe
  misc_feature (1)..(25): SEQ ID NO: 2705; WAN024FZR_at; Start 157; Stop 181
tatgggctaacgctaaacataccga

SEQ ID NO: 227614 - DNA, 25 bp, Artificial
  probe
  misc_feature (1)..(25): SEQ ID NO: 2705; WAN024FZR_at; Start 200; Stop 224
tggcaatagcaaatgagataagagc

SEQ ID NO: 227615 - DNA, 25 bp, Artificial
  probe
  misc_feature (1)..(25): SEQ ID NO: 1501; WAN024FZS_at; Start 18; Stop 42
aaaattagcaaaaatgctagaaatt

SEQ ID NO: 227616 - DNA, 25 bp, Artificial
  probe
  misc_feature (1)..(25): SEQ ID NO: 1501; WAN024FZS_at; Start 17; Stop 41
taaaattagcaaaaatgctagaaat

SEQ ID NO: 227617 - DNA, 25 bp, Artificial
  probe
  misc_feature (1)..(25): SEQ ID NO: 1501; WAN024FZS_at; Start 55; Stop 79
ttagtctccttttccgaatattctc

SEQ ID NO: 227618 - DNA, 25 bp, Artificial
  probe
  misc_feature (1)..(25): SEQ ID NO: 1501; WAN024FZS_at; Start 19; Stop 43
aaattagcaaaaatgctagaaattt

SEQ ID NO: 227619 - DNA, 25 bp, Artificial
  probe
  misc_feature (1)..(25): SEQ ID NO: 1501; WAN024FZS_at; Start 64; Stop 88
ttttccgaatattctctcattatat

SEQ ID NO: 227620 - DNA, 25 bp, Artificial
  probe
  misc_feature (1)..(25): SEQ ID NO: 1501; WAN024FZS_at; Start 3; Stop 27
gagaaaattgggaataaaattagca

SEQ ID NO: 227621 - DNA, 25 bp, Artificial
  probe
  misc_feature (1)..(25): SEQ ID NO: 1501; WAN024FZS_at; Start 62; Stop 86
ccttttccgaatattctctcattat

SEQ ID NO: 227622 - DNA, 25 bp, Artificial
  probe
  misc_feature (1)..(25): SEQ ID NO: 1501; WAN024FZS_at; Start 58; Stop 82
gtctccttttccgaatattctctca

SEQ ID NO: 227623 - DNA, 25 bp, Artificial
  probe
  misc_feature (1)..(25): SEQ ID NO: 1501; WAN024FZS_at; Start 14; Stop 38
gaataaaattagcaaaaatgctaga

SEQ ID NO: 227624 - DNA, 25 bp, Artificial
  probe
  misc_feature (1)..(25): SEQ ID NO: 1501; WAN024FZS_at; Start 2; Stop 26
tgagaaaattgggaataaaattagc

SEQ ID NO: 227625 - DNA, 25 bp, Artificial
  probe
  misc_feature (1)..(25): SEQ ID NO: 1501; WAN024FZS_at; Start 11; Stop 35
tgggaataaaattagcaaaaatgct

SEQ ID NO: 227626 - DNA, 25 bp, Artificial
  probe
  misc_feature (1)..(25): SEQ ID NO: 1501; WAN024FZS_at; Start 12; Stop 36
gggaataaaattagcaaaaatgcta

SEQ ID NO: 227627 - DNA, 25 bp, Artificial
  probe
  misc_feature (1)..(25): SEQ ID NO: 1501; WAN024FZS_at; Start 13; Stop 37
ggaataaaattagcaaaaatgctag

SEQ ID NO: 227628 - DNA, 25 bp, Artificial
  probe
  misc_feature (1)..(25): SEQ ID NO: 1501; WAN024FZS_at; Start 20; Stop 44
aattagcaaaaatgctagaaatttt

SEQ ID NO: 227629 - DNA, 25 bp, Artificial
  probe
  misc_feature (1)..(25): SEQ ID NO: 1501; WAN024FZS_at; Start 23; Stop 47
tagcaaaaatgctagaaattttttc

SEQ ID NO: 227630 - DNA, 25 bp, Artificial
  probe
  misc_feature (1)..(25): SEQ ID NO: 1501; WAN024FZS_at; Start 65; Stop 89
tttccgaatattctctcattatatc

SEQ ID NO: 227631 - DNA, 25 bp, Artificial
  probe
  misc_feature (1)..(25): SEQ ID NO: 1501; WAN024FZS_at; Start 9; Stop 33
attgggaataaaattagcaaaaatg

SEQ ID NO: 227632 - DNA, 25 bp, Artificial
  probe
  misc_feature (1)..(25): SEQ ID NO: 1501; WAN024FZS_at; Start 21; Stop 45
attagcaaaaatgctagaaattttt

SEQ ID NO: 227633 - DNA, 25 bp, Artificial
  probe
  misc_feature (1)..(25): SEQ ID NO: 1501; WAN024FZS_at; Start 60; Stop 84
ctccttttccgaatattctctcatt

SEQ ID NO: 227634 - DNA, 25 bp, Artificial
  probe
  misc_feature (1)..(25): SEQ ID NO: 1501; WAN024FZS_at; Start 57; Stop 81
agtctccttttccgaatattctctc

SEQ ID NO: 227635 - DNA, 25 bp, Artificial
  probe
  misc_feature (1)..(25): SEQ ID NO: 1501; WAN024FZS_at; Start 56; Stop 80
tagtctccttttccgaatattctct

SEQ ID NO: 227636 - DNA, 25 bp, Artificial
  probe
  misc_feature (1)..(25): SEQ ID NO: 1501; WAN024FZS_at; Start 10; Stop 34
ttgggaataaaattagcaaaaatgc

SEQ ID NO: 227637 - DNA, 25 bp, Artificial
  probe
  misc_feature (1)..(25): SEQ ID NO: 1501; WAN024FZS_at; Start 16; Stop 40
ataaaattagcaaaaatgctagaaa

SEQ ID NO: 227638 - DNA, 25 bp, Artificial
  probe
  misc_feature (1)..(25): SEQ ID NO: 1501; WAN024FZS_at; Start 1; Stop 25
atgagaaaattgggaataaaattag

SEQ ID NO: 227639 - DNA, 25 bp, Artificial
  probe
  misc_feature (1)..(25): SEQ ID NO: 1501; WAN024FZS_at; Start 59; Stop 83
tctccttttccgaatattctctcat

SEQ ID NO: 227640 - DNA, 25 bp, Artificial
  probe
  misc_feature (1)..(25): SEQ ID NO: 1501; WAN024FZS_at; Start 15; Stop 39
aataaaattagcaaaaatgctagaa

SEQ ID NO: 227641 - DNA, 25 bp, Artificial
  probe
  misc_feature (1)..(25): SEQ ID NO: 1501; WAN024FZS_at; Start 63; Stop 87
cttttccgaatattctctcattata

SEQ ID NO: 227642 - DNA, 25 bp, Artificial
  probe
  misc_feature (1)..(25): SEQ ID NO: 1501; WAN024FZS_at; Start 29; Stop 53
aaatgctagaaattttttcttcatt

SEQ ID NO: 227643 - DNA, 25 bp, Artificial
  probe
  misc_feature (1)..(25): SEQ ID NO: 1501; WAN024FZS_at; Start 24; Stop 48
agcaaaaatgctagaaattttttct

SEQ ID NO: 227644 - DNA, 25 bp, Artificial
  probe
  misc_feature (1)..(25): SEQ ID NO: 1501; WAN024FZS_at; Start 28; Stop 52
aaaatgctagaaattttttcttcat

SEQ ID NO: 227645 - DNA, 25 bp, Artificial
  probe
  misc_feature (1)..(25): SEQ ID NO: 1501; WAN024FZS_at; Start 61; Stop 85
tccttttccgaatattctctcatta

SEQ ID NO: 227646 - DNA, 25 bp, Artificial
  probe
  misc_feature (1)..(25): SEQ ID NO: 5631; WAN024FZT_at; Start 174; Stop 198
tgtagttggcactgctgaagatgat

SEQ ID NO: 227647 - DNA, 25 bp, Artificial
  probe
  misc_feature (1)..(25): SEQ ID NO: 5631; WAN024FZT_at; Start 186; Stop 210
tgctgaagatgatgaagcagtccat

SEQ ID NO: 227648 - DNA, 25 bp, Artificial
  probe
  misc_feature (1)..(25): SEQ ID NO: 5631; WAN024FZT_at; Start 151; Stop 175
gcttttaatcctgcgagagtagttg

SEQ ID NO: 227649 - DNA, 25 bp, Artificial
  probe
  misc_feature (1)..(25): SEQ ID NO: 5631; WAN024FZT_at; Start 2; Stop 26
tggtgatttcaatttcaaaaccttg

SEQ ID NO: 227650 - DNA, 25 bp, Artificial
  probe
  misc_feature (1)..(25): SEQ ID NO: 5631; WAN024FZT_at; Start 216; Stop 240
gataattttatcaagactaccatct

SEQ ID NO: 227651 - DNA, 25 bp, Artificial
  probe
  misc_feature (1)..(25): SEQ ID NO: 5631; WAN024FZT_at; Start 264; Stop 288
gttaaattcagtaaccaggtgctcg

SEQ ID NO: 227652 - DNA, 25 bp, Artificial
  probe
  misc_feature (1)..(25): SEQ ID NO: 5631; WAN024FZT_at; Start 195; Stop 219
tgatgaagcagtccatttcttgata

SEQ ID NO: 227653 - DNA, 25 bp, Artificial
  probe
  misc_feature (1)..(25): SEQ ID NO: 5631; WAN024FZT_at; Start 22; Stop 46
ccttggtctttagcgattgccttaa

SEQ ID NO: 227654 - DNA, 25 bp, Artificial
  probe
  misc_feature (1)..(25): SEQ ID NO: 5631; WAN024FZT_at; Start 164; Stop 188
cgagagtagttgtagttggcactgc

SEQ ID NO: 227655 - DNA, 25 bp, Artificial
  probe
  misc_feature (1)..(25): SEQ ID NO: 5631; WAN024FZT_at; Start 240; Stop 264
ttttttcatttcagacaaggcttgg

SEQ ID NO: 227656 - DNA, 25 bp, Artificial
  probe
  misc_feature (1)..(25): SEQ ID NO: 5631; WAN024FZT_at; Start 193; Stop 217
gatgatgaagcagtccatttcttga

SEQ ID NO: 227657 - DNA, 25 bp, Artificial
  probe
  misc_feature (1)..(25): SEQ ID NO: 5631; WAN024FZT_at; Start 145; Stop 169
ggaatagcttttaatcctgcgagag

SEQ ID NO: 227658 - DNA, 25 bp, Artificial
  probe
  misc_feature (1)..(25): SEQ ID NO: 5631; WAN024FZT_at; Start 271; Stop 295
tcagtaaccaggtgctcgtatttac

SEQ ID NO: 227659 - DNA, 25 bp, Artificial
  probe
  misc_feature (1)..(25): SEQ ID NO: 5631; WAN024FZT_at; Start 275; Stop 299
taaccaggtgctcgtatttacttcc

SEQ ID NO: 227660 - DNA, 25 bp, Artificial
  probe
  misc_feature (1)..(25): SEQ ID NO: 5631; WAN024FZT_at; Start 112; Stop 136
gaatcgctggcaatgatatatttag

SEQ ID NO: 227661 - DNA, 25 bp, Artificial
  probe
  misc_feature (1)..(25): SEQ ID NO: 5631; WAN024FZT_at; Start 32; Stop 56
tagcgattgccttaatcaattccat

SEQ ID NO: 227662 - DNA, 25 bp, Artificial
  probe
  misc_feature (1)..(25): SEQ ID NO: 5631; WAN024FZT_at; Start 316; Stop 340
gcaaaacttcctacagcttcaccat

SEQ ID NO: 227663 - DNA, 25 bp, Artificial
  probe
  misc_feature (1)..(25): SEQ ID NO: 5631; WAN024FZT_at; Start 45; Stop 69
aatcaattccatatcaataccagtg

SEQ ID NO: 227664 - DNA, 25 bp, Artificial
  probe
  misc_feature (1)..(25): SEQ ID NO: 5631; WAN024FZT_at; Start 121; Stop 145
gcaatgatatatttagccttaacag

SEQ ID NO: 227665 - DNA, 25 bp, Artificial
  probe
  misc_feature (1)..(25): SEQ ID NO: 5631; WAN024FZT_at; Start 104; Stop 128
caaaagaagaatcgctggcaatgat

SEQ ID NO: 227666 - DNA, 25 bp, Artificial
  probe
  misc_feature (1)..(25): SEQ ID NO: 5631; WAN024FZT_at; Start 304; Stop 328
ttcacaccgaaagcaaaacttccta

SEQ ID NO: 227667 - DNA, 25 bp, Artificial
  probe
  misc_feature (1)..(25): SEQ ID NO: 5631; WAN024FZT_at; Start 251; Stop 275
cagacaaggcttggttaaattcagt

SEQ ID NO: 227668 - DNA, 25 bp, Artificial
  probe
  misc_feature (1)..(25): SEQ ID NO: 5631; WAN024FZT_at; Start 330; Stop 354
agcttcaccatccatttcaatatgg

SEQ ID NO: 227669 - DNA, 25 bp, Artificial
  probe
  misc_feature (1)..(25): SEQ ID NO: 5631; WAN024FZT_at; Start 101; Stop 125
gggcaaaagaagaatcgctggcaat

SEQ ID NO: 227670 - DNA, 25 bp, Artificial
  probe
  misc_feature (1)..(25): SEQ ID NO: 5631; WAN024FZT_at; Start 338; Stop 362
catccatttcaatatggaggtcttg

SEQ ID NO: 227671 - DNA, 25 bp, Artificial
  probe
  misc_feature (1)..(25): SEQ ID NO: 5631; WAN024FZT_at; Start 230; Stop 254
gactaccatcttttttcatttcaga

SEQ ID NO: 227672 - DNA, 25 bp, Artificial
  probe
  misc_feature (1)..(25): SEQ ID NO: 5631; WAN024FZT_at; Start 159; Stop 183
tcctgcgagagtagttgtagttggc

SEQ ID NO: 227673 - DNA, 25 bp, Artificial
  probe
  misc_feature (1)..(25): SEQ ID NO: 5631; WAN024FZT_at; Start 279; Stop 303
caggtgctcgtatttacttcctttt

SEQ ID NO: 227674 - DNA, 25 bp, Artificial
  probe
  misc_feature (1)..(25): SEQ ID NO: 5631; WAN024FZT_at; Start 130; Stop 154
tatttagccttaacaggaatagctt

SEQ ID NO: 227675 - DNA, 25 bp, Artificial
  probe
  misc_feature (1)..(25): SEQ ID NO: 5631; WAN024FZT_at; Start 179; Stop 203
ttggcactgctgaagatgatgaagc

SEQ ID NO: 227676 - DNA, 25 bp, Artificial
  probe
  misc_feature (1)..(25): SEQ ID NO: 5631; WAN024FZT_at; Start 17; Stop 41
caaaaccttggtctttagcgattgc

SEQ ID NO: 227677 - DNA, 25 bp, Artificial
  probe
  misc_feature (1)..(25): SEQ ID NO: 5631; WAN024FZT_at; Start 73; Stop 97
tggttgcttgaattttggaaaacaa

SEQ ID NO: 227678 - DNA, 25 bp, Artificial
  probe
  misc_feature (1)..(25): SEQ ID NO: 5631; WAN024FZT_at; Start 167; Stop 191
gagtagttgtagttggcactgctga

SEQ ID NO: 227679 - DNA, 25 bp, Artificial
  probe
  misc_feature (1)..(25): SEQ ID NO: 5631; WAN024FZT_at; Start 60; Stop 84
aataccagtgtattggttgcttgaa

SEQ ID NO: 227680 - DNA, 25 bp, Artificial
  probe
  misc_feature (1)..(25): SEQ ID NO: 1057; WAN024FZU_at; Start 505; Stop 529
ttgagtgctggtgccatcgatgcca

SEQ ID NO: 227681 - DNA, 25 bp, Artificial
  probe
  misc_feature (1)..(25): SEQ ID NO: 1057; WAN024FZU_at; Start 165; Stop 189
caaagtcgctgagattaaaggctgg

SEQ ID NO: 227682 - DNA, 25 bp, Artificial
  probe
  misc_feature (1)..(25): SEQ ID NO: 1057; WAN024FZU_at; Start 523; Stop 547
gatgccatgatggatgacaaacctg

SEQ ID NO: 227683 - DNA, 25 bp, Artificial
  probe
  misc_feature (1)..(25): SEQ ID NO: 1057; WAN024FZU_at; Start 243; Stop 267
tgggcaagccgacgctatcatggca

SEQ ID NO: 227684 - DNA, 25 bp, Artificial
  probe
  misc_feature (1)..(25): SEQ ID NO: 1057; WAN024FZU_at; Start 227; Stop 251
tcaatgcggttcaagctgggcaagc

SEQ ID NO: 227685 - DNA, 25 bp, Artificial
  probe
  misc_feature (1)..(25): SEQ ID NO: 1057; WAN024FZU_at; Start 1326; Stop 1350
tggaactccaatcggtgaaacagcc

SEQ ID NO: 227686 - DNA, 25 bp, Artificial
  probe
  misc_feature (1)..(25): SEQ ID NO: 1057; WAN024FZU_at; Start 1234; Stop 1258
ttaaacactggtgccattgatgccg

SEQ ID NO: 227687 - DNA, 25 bp, Artificial
  probe
  misc_feature (1)..(25): SEQ ID NO: 1057; WAN024FZU_at; Start 1387; Stop 1411
gaaatgttcaacaacggacttgcaa

SEQ ID NO: 227688 - DNA, 25 bp, Artificial
  probe
  misc_feature (1)..(25): SEQ ID NO: 1057; WAN024FZU_at; Start 1742; Stop 1766
tcgagtctatcacaggccaacaaag

SEQ ID NO: 227689 - DNA, 25 bp, Artificial
  probe
  misc_feature (1)..(25): SEQ ID NO: 1057; WAN024FZU_at; Start 890; Stop 914
ttaaggcaatcgctaaagaccaagg

SEQ ID NO: 227690 - DNA, 25 bp, Artificial
  probe
  misc_feature (1)..(25): SEQ ID NO: 1057; WAN024FZU_at; Start 1443; Stop 1467
tcttgacaaatacctagctagcgaa

SEQ ID NO: 227691 - DNA, 25 bp, Artificial
  probe
  misc_feature (1)..(25): SEQ ID NO: 1057; WAN024FZU_at; Start 180; Stop 204
taaaggctggaacattcagatgtcc

SEQ ID NO: 227692 - DNA, 25 bp, Artificial
  probe
  misc_feature (1)..(25): SEQ ID NO: 1057; WAN024FZU_at; Start 637; Stop 661
ggaagtaaatacgagcacctggtta

SEQ ID NO: 227693 - DNA, 25 bp, Artificial
  probe
  misc_feature (1)..(25): SEQ ID NO: 1057; WAN024FZU_at; Start 379; Stop 403
caattaactggcaaaaccgttggtg

SEQ ID NO: 227694 - DNA, 25 bp, Artificial
  probe
  misc_feature (1)..(25): SEQ ID NO: 1057; WAN024FZU_at; Start 1833; Stop 1857
aatcgttcgtggtggtattcaggcc

SEQ ID NO: 227695 - DNA, 25 bp, Artificial
  probe
  misc_feature (1)..(25): SEQ ID NO: 1057; WAN024FZU_at; Start 1769; Stop 1793
caattaacgactttgtagctggaac

SEQ ID NO: 227696 - DNA, 25 bp, Artificial
  probe
  misc_feature (1)..(25): SEQ ID NO: 1057; WAN024FZU_at; Start 1870; Stop 1894
caaatggaagccagccgaagcttgg

SEQ ID NO: 227697 - DNA, 25 bp, Artificial
  probe
  misc_feature (1)..(25): SEQ ID NO: 1057; WAN024FZU_at; Start 1885; Stop 1909
cgaagcttgggtatctcttatggaa

SEQ ID NO: 227698 - DNA, 25 bp, Artificial
  probe
  misc_feature (1)..(25): SEQ ID NO: 1057; WAN024FZU_at; Start 1488; Stop 1512
tactgttgacgaaacaacgctctgg

SEQ ID NO: 227699 - DNA, 25 bp, Artificial
  probe
  misc_feature (1)..(25): SEQ ID NO: 1057; WAN024FZU_at; Start 553; Stop 577
gaatatgccattaaccaaggtcaag

SEQ ID NO: 227700 - DNA, 25 bp, Artificial
  probe
  misc_feature (1)..(25): SEQ ID NO: 1057; WAN024FZU_at; Start 946; Stop 970
gatgctgctatcagtgctgtccaag

SEQ ID NO: 227701 - DNA, 25 bp, Artificial
  probe
  misc_feature (1)..(25): SEQ ID NO: 1057; WAN024FZU_at; Start 1613; Stop 1637
tcttcggtatgtttagcgttagccc

SEQ ID NO: 227702 - DNA, 25 bp, Artificial
  probe
  misc_feature (1)..(25): SEQ ID NO: 1057; WAN024FZU_at; Start 918; Stop 942
tgaaattgaaatcaccaaccctggt

SEQ ID NO: 227703 - DNA, 25 bp, Artificial
  probe
  misc_feature (1)..(25): SEQ ID NO: 1057; WAN024FZU_at; Start 963; Stop 987
tgtccaagctggtcaagccgatggt

SEQ ID NO: 227704 - DNA, 25 bp, Artificial
  probe
  misc_feature (1)..(25): SEQ ID NO: 1057; WAN024FZU_at; Start 202; Stop 226
tcctatcctggatttgacgcagcag

SEQ ID NO: 227705 - DNA, 25 bp, Artificial
  probe
  misc_feature (1)..(25): SEQ ID NO: 1057; WAN024FZU_at; Start 261; Stop 285
catggcagggatgacaaagactaaa

SEQ ID NO: 227706 - DNA, 25 bp, Artificial
  probe
  misc_feature (1)..(25): SEQ ID NO: 1057; WAN024FZU_at; Start 90; Stop 114
tgataccgcctatgcaccttttgag

SEQ ID NO: 227707 - DNA, 25 bp, Artificial
  probe
  misc_feature (1)..(25): SEQ ID NO: 1057; WAN024FZU_at; Start 1628; Stop 1652
gcgttagcccatacaaatctcttcg

SEQ ID NO: 227708 - DNA, 25 bp, Artificial
  probe
  misc_feature (1)..(25): SEQ ID NO: 1057; WAN024FZU_at; Start 75; Stop 99
gattaagattgtttctgataccgcc

SEQ ID NO: 227709 - DNA, 25 bp, Artificial
  probe
  misc_feature (1)..(25): SEQ ID NO: 1057; WAN024FZU_at; Start 1809; Stop 1833
caatgcggctgcttatatcgctgaa

SEQ ID NO: 227710 - DNA, 25 bp, Artificial
  probe
  misc_feature (1)..(25): SEQ ID NO: 1057; WAN024FZU_at; Start 413; Stop 437
gaactgccgctcaacgtttccttga

SEQ ID NO: 227711 - DNA, 25 bp, Artificial
  probe
  misc_feature (1)..(25): SEQ ID NO: 1057; WAN024FZU_at; Start 1848; Stop 1872
tattcaggccgttccagttggccaa

SEQ ID NO: 227712 - DNA, 25 bp, Artificial
  probe
  misc_feature (1)..(25): SEQ ID NO: 1057; WAN024FZU_at; Start 1544; Stop 1568
ttagcggtcttggtatcactcttgc

SEQ ID NO: 227713 - DNA, 25 bp, Artificial
  probe
  misc_feature (1)..(25): SEQ ID NO: 1057; WAN024FZU_at; Start 1005; Stop 1029
tgtcacagatgctcgtaaggcaact

SEQ ID NO: 227714 - DNA, 25 bp, Artificial
  probe
  misc_feature (1)..(25): SEQ ID NO: 1074; WAN024FZV_at; Start 208; Stop 232
catcagagcttgacggataaaacaa

SEQ ID NO: 227715 - DNA, 25 bp, Artificial
  probe
  misc_feature (1)..(25): SEQ ID NO: 1074; WAN024FZV_at; Start 774; Stop 798
gattttagttagtggtcaaccgtca

SEQ ID NO: 227716 - DNA, 25 bp, Artificial
  probe
  misc_feature (1)..(25): SEQ ID NO: 1074; WAN024FZV_at; Start 882; Stop 906
gacaagtctggtattactactgctg

SEQ ID NO: 227717 - DNA, 25 bp, Artificial
  probe
  misc_feature (1)..(25): SEQ ID NO: 1074; WAN024FZV_at; Start 545; Stop 569
ggctacttcctcaattggcctcaag

SEQ ID NO: 227718 - DNA, 25 bp, Artificial
  probe
  misc_feature (1)..(25): SEQ ID NO: 1074; WAN024FZV_at; Start 363; Stop 387
tcttctgaaaggatttagtctaggc

SEQ ID NO: 227719 - DNA, 25 bp, Artificial
  probe
  misc_feature (1)..(25): SEQ ID NO: 1074; WAN024FZV_at; Start 460; Stop 484
aatccttattctcttgcctttgtcg

SEQ ID NO: 227720 - DNA, 25 bp, Artificial
  probe
  misc_feature (1)..(25): SEQ ID NO: 1074; WAN024FZV_at; Start 415; Stop 439
ggtttagtggtcttaggtcaatatc

SEQ ID NO: 227721 - DNA, 25 bp, Artificial
  probe
  misc_feature (1)..(25): SEQ ID NO: 1074; WAN024FZV_at; Start 491; Stop 515
ctatcccattttggattttacaggg

SEQ ID NO: 227722 - DNA, 25 bp, Artificial
  probe
  misc_feature (1)..(25): SEQ ID NO: 1074; WAN024FZV_at; Start 25; Stop 49
gacttccaagcttcaaaaatgagtt

SEQ ID NO: 227723 - DNA, 25 bp, Artificial
  probe
  misc_feature (1)..(25): SEQ ID NO: 1074; WAN024FZV_at; Start 199; Stop 223
cagaccttgcatcagagcttgacgg

SEQ ID NO: 227724 - DNA, 25 bp, Artificial
  probe
  misc_feature (1)..(25): SEQ ID NO: 1074; WAN024FZV_at; Start 156; Stop 180
tagaaattttggagaggctggtcaa

SEQ ID NO: 227725 - DNA, 25 bp, Artificial
  probe
  misc_feature (1)..(25): SEQ ID NO: 1074; WAN024FZV_at; Start 785; Stop 809
gtggtcaaccgtcaggaacgtctct

SEQ ID NO: 227726 - DNA, 25 bp, Artificial
  probe
  misc_feature (1)..(25): SEQ ID NO: 1074; WAN024FZV_at; Start 594; Stop 618
tatatctagcctgttctttaccctg

SEQ ID NO: 227727 - DNA, 25 bp, Artificial
  probe
  misc_feature (1)..(25): SEQ ID NO: 1074; WAN024FZV_at; Start 86; Stop 110
ttgtcttcataggagagtttgtggc

SEQ ID NO: 227728 - DNA, 25 bp, Artificial
  probe
  misc_feature (1)..(25): SEQ ID NO: 1074; WAN024FZV_at; Start 340; Stop 364
tatagagagaatttcctcagcaatc

SEQ ID NO: 227729 - DNA, 25 bp, Artificial
  probe
  misc_feature (1)..(25): SEQ ID NO: 1074; WAN024FZV_at; Start 753; Stop 777
tgctcagggtaatctctttgggatt

SEQ ID NO: 227730 - DNA, 25 bp, Artificial
  probe
  misc_feature (1)..(25): SEQ ID NO: 1074; WAN024FZV_at; Start 134; Stop 158
tgttagctctcatcggacttgctag

SEQ ID NO: 227731 - DNA, 25 bp, Artificial
  probe
  misc_feature (1)..(25): SEQ ID NO: 1074; WAN024FZV_at; Start 325; Stop 349
cgaaccttgggattttatagagaga

SEQ ID NO: 227732 - DNA, 25 bp, Artificial
  probe
  misc_feature (1)..(25): SEQ ID NO: 1074; WAN024FZV_at; Start 560; Stop 584
tggcctcaagaaccaatctaaaact

SEQ ID NO: 227733 - DNA, 25 bp, Artificial
  probe
  misc_feature (1)..(25): SEQ ID NO: 1074; WAN024FZV_at; Start 736; Stop 760
catggtgcttggaattttgctcagg

SEQ ID NO: 227734 - DNA, 25 bp, Artificial
  probe
  misc_feature (1)..(25): SEQ ID NO: 1074; WAN024FZV_at; Start 430; Stop 454
ggtcaatatcgtttggaatccattc

SEQ ID NO: 227735 - DNA, 25 bp, Artificial
  probe
  misc_feature (1)..(25): SEQ ID NO: 1074; WAN024FZV_at; Start 309; Stop 333
tgagaaaagacctattcgaaccttg

SEQ ID NO: 227736 - DNA, 25 bp, Artificial
  probe
  misc_feature (1)..(25): SEQ ID NO: 1074; WAN024FZV_at; Start 819; Stop 843
tttaccacaaggcaatcaagattgg

SEQ ID NO: 227737 - DNA, 25 bp, Artificial
  probe
  misc_feature (1)..(25): SEQ ID NO: 1074; WAN024FZV_at; Start 144; Stop 168
catcggacttgctagaaattttgga

SEQ ID NO: 227738 - DNA, 25 bp, Artificial
  probe
  misc_feature (1)..(25): SEQ ID NO: 1074; WAN024FZV_at; Start 853; Stop 877
ggttcttttggcatagaaggttcca

SEQ ID NO: 227739 - DNA, 25 bp, Artificial
  probe
  misc_feature (1)..(25): SEQ ID NO: 1074; WAN024FZV_at; Start 475; Stop 499
gcctttgtcgtctttactatcccat

SEQ ID NO: 227740 - DNA, 25 bp, Artificial
  probe
  misc_feature (1)..(25): SEQ ID NO: 1074; WAN024FZV_at; Start 665; Stop 689
tctttttattcggagttgccatggc

SEQ ID NO: 227741 - DNA, 25 bp, Artificial
  probe
  misc_feature (1)..(25): SEQ ID NO: 1074; WAN024FZV_at; Start 390; Stop 414
ggcactttttcttctgaccttgtta

SEQ ID NO: 227742 - DNA, 25 bp, Artificial
  probe
  misc_feature (1)..(25): SEQ ID NO: 1074; WAN024FZV_at; Start 896; Stop 920
tactactgctgattgtctatcttgc

SEQ ID NO: 227743 - DNA, 25 bp, Artificial
  probe
  misc_feature (1)..(25): SEQ ID NO: 1074; WAN024FZV_at; Start 721; Stop 745
ggtgttgcaggtattcatggtgctt

SEQ ID NO: 227744 - DNA, 25 bp, Artificial
  probe
  misc_feature (1)..(25): SEQ ID NO: 1074; WAN024FZV_at; Start 614; Stop 638
ccctgcttcatatgggcaattctgg

SEQ ID NO: 227745 - DNA, 25 bp, Artificial
  probe
  misc_feature (1)..(25): SEQ ID NO: 1074; WAN024FZV_at; Start 868; Stop 892
gaaggttccattatgacaagtctgg

SEQ ID NO: 227746 - DNA, 25 bp, Artificial
  probe
  misc_feature (1)..(25): SEQ ID NO: 1074; WAN024FZV_at; Start 527; Stop 551
aagtggtggcccgtgcttggctact

SEQ ID NO: 227747 - DNA, 25 bp, Artificial
  probe
  misc_feature (1)..(25): SEQ ID NO: 1074; WAN024FZV_at; Start 834; Stop 858
tcaagattggctatcaggtggttct

SEQ ID NO: 227748 - DNA, 25 bp, Artificial
  probe
  misc_feature (1)..(25): SEQ ID NO: 1043; WAN024FZW_at; Start 296; Stop 320
cgctgtttcaaacgctgggcttcaa

SEQ ID NO: 227749 - DNA, 25 bp, Artificial
  probe
  misc_feature (1)..(25): SEQ ID NO: 1043; WAN024FZW_at; Start 39; Stop 63
gattgtccaaagcagacggcaaacg

SEQ ID NO: 227750 - DNA, 25 bp, Artificial
  probe
  misc_feature (1)..(25): SEQ ID NO: 1043; WAN024FZW_at; Start 287; Stop 311
tactctgtccgctgtttcaaacgct

SEQ ID NO: 227751 - DNA, 25 bp, Artificial
  probe
  misc_feature (1)..(25): SEQ ID NO: 1043; WAN024FZW_at; Start 134; Stop 158
gtcatatgactctcgtcaatcataa

SEQ ID NO: 227752 - DNA, 25 bp, Artificial
  probe
  misc_feature (1)..(25): SEQ ID NO: 1043; WAN024FZW_at; Start 23; Stop 47
tcccgacggagaggacgattgtcca

SEQ ID NO: 227753 - DNA, 25 bp, Artificial
  probe
  misc_feature (1)..(25): SEQ ID NO: 1043; WAN024FZW_at; Start 71; Stop 95
taattaaccagcatttctttacgcg

SEQ ID NO: 227754 - DNA, 25 bp, Artificial
  probe
  misc_feature (1)..(25): SEQ ID NO: 1043; WAN024FZW_at; Start 12; Stop 36
tctcaaactcctcccgacggagagg

SEQ ID NO: 227755 - DNA, 25 bp, Artificial
  probe
  misc_feature (1)..(25): SEQ ID NO: 1043; WAN024FZW_at; Start 47; Stop 71
aaagcagacggcaaacggaaaccat

SEQ ID NO: 227756 - DNA, 25 bp, Artificial
  probe
  misc_feature (1)..(25): SEQ ID NO: 1043; WAN024FZW_at; Start 27; Stop 51
gacggagaggacgattgtccaaagc

SEQ ID NO: 227757 - DNA, 25 bp, Artificial
  probe
  misc_feature (1)..(25): SEQ ID NO: 1043; WAN024FZW_at; Start 50; Stop 74
gcagacggcaaacggaaaccataat

SEQ ID NO: 227758 - DNA, 25 bp, Artificial
  probe
  misc_feature (1)..(25): SEQ ID NO: 1043; WAN024FZW_at; Start 300; Stop 324
gtttcaaacgctgggcttcaagcag

SEQ ID NO: 227759 - DNA, 25 bp, Artificial
  probe
  misc_feature (1)..(25): SEQ ID NO: 1043; WAN024FZW_at; Start 75; Stop 99
taaccagcatttctttacgcgaacg

SEQ ID NO: 227760 - DNA, 25 bp, Artificial
  probe
  misc_feature (1)..(25): SEQ ID NO: 1043; WAN024FZW_at; Start 180; Stop 204
agtcgagaagcgtataaggaggctc

SEQ ID NO: 227761 - DNA, 25 bp, Artificial
  probe
  misc_feature (1)..(25): SEQ ID NO: 1043; WAN024FZW_at; Start 227; Stop 251
tggcgagaataattttcaaccccat

SEQ ID NO: 227762 - DNA, 25 bp, Artificial
  probe
  misc_feature (1)..(25): SEQ ID NO: 1043; WAN024FZW_at; Start 42; Stop 66
tgtccaaagcagacggcaaacggaa

SEQ ID NO: 227763 - DNA, 25 bp, Artificial
  probe
  misc_feature (1)..(25): SEQ ID NO: 1043; WAN024FZW_at; Start 306; Stop 330
aacgctgggcttcaagcagtttacc

SEQ ID NO: 227764 - DNA, 25 bp, Artificial
  probe
  misc_feature (1)..(25): SEQ ID NO: 1043; WAN024FZW_at; Start 219; Stop 243
catccatgtggcgagaataattttc

SEQ ID NO: 227765 - DNA, 25 bp, Artificial
  probe
  misc_feature (1)..(25): SEQ ID NO: 1043; WAN024FZW_at; Start 311; Stop 335
tgggcttcaagcagtttaccttcct

SEQ ID NO: 227766 - DNA, 25 bp, Artificial
  probe
  misc_feature (1)..(25): SEQ ID NO: 1043; WAN024FZW_at; Start 99; Stop 123
ggtctccattgtacatgcccttgat

SEQ ID NO: 227767 - DNA, 25 bp, Artificial
  probe
  misc_feature (1)..(25): SEQ ID NO: 1043; WAN024FZW_at; Start 91; Stop 115
acgcgaacggtctccattgtacatg

SEQ ID NO: 227768 - DNA, 25 bp, Artificial
  probe
  misc_feature (1)..(25): SEQ ID NO: 1043; WAN024FZW_at; Start 95; Stop 119
gaacggtctccattgtacatgccct

SEQ ID NO: 227769 - DNA, 25 bp, Artificial
  probe
  misc_feature (1)..(25): SEQ ID NO: 1043; WAN024FZW_at; Start 62; Stop 86
cggaaaccataattaaccagcattt

SEQ ID NO: 227770 - DNA, 25 bp, Artificial
  probe
  misc_feature (1)..(25): SEQ ID NO: 1043; WAN024FZW_at; Start 290; Stop 314
tctgtccgctgtttcaaacgctggg

SEQ ID NO: 227771 - DNA, 25 bp, Artificial
  probe
  misc_feature (1)..(25): SEQ ID NO: 1043; WAN024FZW_at; Start 215; Stop 239
cgtccatccatgtggcgagaataat

SEQ ID NO: 227772 - DNA, 25 bp, Artificial
  probe
  misc_feature (1)..(25): SEQ ID NO: 1043; WAN024FZW_at; Start 138; Stop 162
tatgactctcgtcaatcataatcaa

SEQ ID NO: 227773 - DNA, 25 bp, Artificial
  probe
  misc_feature (1)..(25): SEQ ID NO: 1043; WAN024FZW_at; Start 317; Stop 341
tcaagcagtttaccttccttttcaa

SEQ ID NO: 227774 - DNA, 25 bp, Artificial
  probe
  misc_feature (1)..(25): SEQ ID NO: 1043; WAN024FZW_at; Start 86; Stop 110
tctttacgcgaacggtctccattgt

SEQ ID NO: 227775 - DNA, 25 bp, Artificial
  probe
  misc_feature (1)..(25): SEQ ID NO: 1043; WAN024FZW_at; Start 102; Stop 126
ctccattgtacatgcccttgatttg

SEQ ID NO: 227776 - DNA, 25 bp, Artificial
  probe
  misc_feature (1)..(25): SEQ ID NO: 1043; WAN024FZW_at; Start 223; Stop 247
catgtggcgagaataattttcaacc

SEQ ID NO: 227777 - DNA, 25 bp, Artificial
  probe
  misc_feature (1)..(25): SEQ ID NO: 1043; WAN024FZW_at; Start 1; Stop 25
atgaacgtgactctcaaactcctcc

SEQ ID NO: 227778 - DNA, 25 bp, Artificial
  probe
  misc_feature (1)..(25): SEQ ID NO: 1043; WAN024FZW_at; Start 79; Stop 103
cagcatttctttacgcgaacggtct

SEQ ID NO: 227779 - DNA, 25 bp, Artificial
  probe
  misc_feature (1)..(25): SEQ ID NO: 1043; WAN024FZW_at; Start 276; Stop 300
tttcgatatcatactctgtccgctg

SEQ ID NO: 227780 - DNA, 25 bp, Artificial
  probe
  misc_feature (1)..(25): SEQ ID NO: 1043; WAN024FZW_at; Start 35; Stop 59
ggacgattgtccaaagcagacggca
